United States Patent Application Publication US 2025/0313840 A1 - sequence listing, part 5

SEQ ID NO: 114185 - DNA, 17 bp, synthetic construct
  source 1..17: mol_type = other DNA
tggagggtggagctgcc

SEQ ID NO: 114186 - DNA, 17 bp, synthetic construct
  source 1..17: mol_type = other DNA
ggagggtggagctgccc

SEQ ID NO: 114187 - DNA, 17 bp, synthetic construct
  source 1..17: mol_type = other DNA
gagggtggagctgccca

SEQ ID NO: 114188 - DNA, 17 bp, synthetic construct
  source 1..17: mol_type = other DNA
agggtggagctgcccac

SEQ ID NO: 114189 - DNA, 17 bp, synthetic construct
  source 1..17: mol_type = other DNA
gggtggagctgcccacg

SEQ ID NO: 114190 - DNA, 17 bp, synthetic construct
  source 1..17: mol_type = other DNA
ggtggagctgcccacga

SEQ ID NO: 114191 - DNA, 17 bp, synthetic construct
  source 1..17: mol_type = other DNA
gtggagctgcccacgat

SEQ ID NO: 114192 - DNA, 17 bp, synthetic construct
  source 1..17: mol_type = other DNA
tggagctgcccacgatg

SEQ ID NO: 114193 - DNA, 17 bp, synthetic construct
  source 1..17: mol_type = other DNA
ggagctgcccacgatga

SEQ ID NO: 114194 - DNA, 17 bp, synthetic construct
  source 1..17: mol_type = other DNA
gagctgcccacgatgag

SEQ ID NO: 114195 - DNA, 17 bp, synthetic construct
  source 1..17: mol_type = other DNA
agctgcccacgatgagg

SEQ ID NO: 114196 - DNA, 17 bp, synthetic construct
  source 1..17: mol_type = other DNA
gctgcccacgatgaggg

SEQ ID NO: 114197 - DNA, 17 bp, synthetic construct
  source 1..17: mol_type = other DNA
ctgcccacgatgagggg

SEQ ID NO: 114198 - DNA, 17 bp, synthetic construct
  source 1..17: mol_type = other DNA
tgcccacgatgaggggc

SEQ ID NO: 114199 - DNA, 17 bp, synthetic construct
  source 1..17: mol_type = other DNA
gcccacgatgaggggcg

SEQ ID NO: 114200 - DNA, 17 bp, synthetic construct
  source 1..17: mol_type = other DNA
cccacgatgaggggcgt

SEQ ID NO: 114201 - DNA, 17 bp, synthetic construct
  source 1..17: mol_type = other DNA
ccacgatgaggggcgtc

SEQ ID NO: 114202 - DNA, 17 bp, synthetic construct
  source 1..17: mol_type = other DNA
cacgatgaggggcgtca

SEQ ID NO: 114203 - DNA, 17 bp, synthetic construct
  source 1..17: mol_type = other DNA
acgatgaggggcgtcag

SEQ ID NO: 114204 - DNA, 17 bp, synthetic construct
  source 1..17: mol_type = other DNA
cgatgaggggcgtcagg

SEQ ID NO: 114205 - DNA, 17 bp, synthetic construct
  source 1..17: mol_type = other DNA
gatgaggggcgtcaggg

SEQ ID NO: 114206 - DNA, 17 bp, synthetic construct
  source 1..17: mol_type = other DNA
atgaggggcgtcagggc

SEQ ID NO: 114207 - DNA, 17 bp, synthetic construct
  source 1..17: mol_type = other DNA
tgaggggcgtcagggcc

SEQ ID NO: 114208 - DNA, 17 bp, synthetic construct
  source 1..17: mol_type = other DNA
gaggggcgtcagggcca

SEQ ID NO: 114209 - DNA, 17 bp, synthetic construct
  source 1..17: mol_type = other DNA
aggggcgtcagggccac

SEQ ID NO: 114210 - DNA, 17 bp, synthetic construct
  source 1..17: mol_type = other DNA
ggggcgtcagggccacc

SEQ ID NO: 114211 - DNA, 17 bp, synthetic construct
  source 1..17: mol_type = other DNA
gggcgtcagggccaccc

SEQ ID NO: 114212 - DNA, 17 bp, synthetic construct
  source 1..17: mol_type = other DNA
ggcgtcagggccaccct

SEQ ID NO: 114213 - DNA, 17 bp, synthetic construct
  source 1..17: mol_type = other DNA
gcgtcagggccaccctg

SEQ ID NO: 114214 - DNA, 17 bp, synthetic construct
  source 1..17: mol_type = other DNA
cgtcagggccaccctgg

SEQ ID NO: 114215 - DNA, 17 bp, synthetic construct
  source 1..17: mol_type = other DNA
gtcagggccaccctggg

SEQ ID NO: 114216 - DNA, 17 bp, synthetic construct
  source 1..17: mol_type = other DNA
tcagggccaccctgggg

SEQ ID NO: 114217 - DNA, 17 bp, synthetic construct
  source 1..17: mol_type = other DNA
cagggccaccctggggc

SEQ ID NO: 114218 - DNA, 17 bp, synthetic construct
  source 1..17: mol_type = other DNA
agggccaccctggggcc

SEQ ID NO: 114219 - DNA, 17 bp, synthetic construct
  source 1..17: mol_type = other DNA
gggccaccctggggcct

SEQ ID NO: 114220 - DNA, 17 bp, synthetic construct
  source 1..17: mol_type = other DNA
ggccaccctggggccta

SEQ ID NO: 114221 - DNA, 17 bp, synthetic construct
  source 1..17: mol_type = other DNA
gccaccctggggcctag

SEQ ID NO: 114222 - DNA, 17 bp, synthetic construct
  source 1..17: mol_type = other DNA
ccaccctggggcctagc

SEQ ID NO: 114223 - DNA, 17 bp, synthetic construct
  source 1..17: mol_type = other DNA
caccctggggcctagct

SEQ ID NO: 114224 - DNA, 17 bp, synthetic construct
  source 1..17: mol_type = other DNA
accctggggcctagctc

SEQ ID NO: 114225 - DNA, 17 bp, synthetic construct
  source 1..17: mol_type = other DNA
ccctggggcctagctct

SEQ ID NO: 114226 - DNA, 17 bp, synthetic construct
  source 1..17: mol_type = other DNA
cctggggcctagctctg

SEQ ID NO: 114227 - DNA, 17 bp, synthetic construct
  source 1..17: mol_type = other DNA
ctggggcctagctctgg

SEQ ID NO: 114228 - DNA, 17 bp, synthetic construct
  source 1..17: mol_type = other DNA
tggggcctagctctggc

SEQ ID NO: 114229 - DNA, 17 bp, synthetic construct
  source 1..17: mol_type = other DNA
ggggcctagctctggct

SEQ ID NO: 114230 - DNA, 17 bp, synthetic construct
  source 1..17: mol_type = other DNA
gggcctagctctggctt

SEQ ID NO: 114231 - DNA, 17 bp, synthetic construct
  source 1..17: mol_type = other DNA
ggcctagctctggcttc

SEQ ID NO: 114232 - DNA, 17 bp, synthetic construct
  source 1..17: mol_type = other DNA
gcctagctctggcttct

SEQ ID NO: 114233 - DNA, 17 bp, synthetic construct
  source 1..17: mol_type = other DNA
cctagctctggcttctg

SEQ ID NO: 114234 - DNA, 17 bp, synthetic construct
  source 1..17: mol_type = other DNA
ctagctctggcttctgt

SEQ ID NO: 114235 - DNA, 17 bp, synthetic construct
  source 1..17: mol_type = other DNA
tagctctggcttctgtg

SEQ ID NO: 114236 - DNA, 17 bp, synthetic construct
  source 1..17: mol_type = other DNA
agctctggcttctgtgg

SEQ ID NO: 114237 - DNA, 17 bp, synthetic construct
  source 1..17: mol_type = other DNA
gctctggcttctgtgga

SEQ ID NO: 114238 - DNA, 17 bp, synthetic construct
  source 1..17: mol_type = other DNA
ctctggcttctgtggac

SEQ ID NO: 114239 - DNA, 17 bp, synthetic construct
  source 1..17: mol_type = other DNA
tctggcttctgtggact

SEQ ID NO: 114240 - DNA, 17 bp, synthetic construct
  source 1..17: mol_type = other DNA
ctggcttctgtggactt

SEQ ID NO: 114241 - DNA, 17 bp, synthetic construct
  source 1..17: mol_type = other DNA
tggcttctgtggacttg

SEQ ID NO: 114242 - DNA, 17 bp, synthetic construct
  source 1..17: mol_type = other DNA
ggcttctgtggacttga

SEQ ID NO: 114243 - DNA, 17 bp, synthetic construct
  source 1..17: mol_type = other DNA
gcttctgtggacttgat

SEQ ID NO: 114244 - DNA, 17 bp, synthetic construct
  source 1..17: mol_type = other DNA
cttctgtggacttgatg

SEQ ID NO: 114245 - DNA, 17 bp, synthetic construct
  source 1..17: mol_type = other DNA
ttctgtggacttgatgg

SEQ ID NO: 114246 - DNA, 17 bp, synthetic construct
  source 1..17: mol_type = other DNA
tctgtggacttgatggc

SEQ ID NO: 114247 - DNA, 17 bp, synthetic construct
  source 1..17: mol_type = other DNA
ctgtggacttgatggca

SEQ ID NO: 114248 - DNA, 17 bp, synthetic construct
  source 1..17: mol_type = other DNA
tgtggacttgatggcat

SEQ ID NO: 114249 - DNA, 17 bp, synthetic construct
  source 1..17: mol_type = other DNA
gtggacttgatggcatg

SEQ ID NO: 114250 - DNA, 17 bp, synthetic construct
  source 1..17: mol_type = other DNA
tggacttgatggcatgt

SEQ ID NO: 114251 - DNA, 17 bp, synthetic construct
  source 1..17: mol_type = other DNA
ggacttgatggcatgtg

SEQ ID NO: 114252 - DNA, 17 bp, synthetic construct
  source 1..17: mol_type = other DNA
gacttgatggcatgtgg

SEQ ID NO: 114253 - DNA, 17 bp, synthetic construct
  source 1..17: mol_type = other DNA
acttgatggcatgtgga

SEQ ID NO: 114254 - DNA, 17 bp, synthetic construct
  source 1..17: mol_type = other DNA
cttgatggcatgtggaa

SEQ ID NO: 114255 - DNA, 17 bp, synthetic construct
  source 1..17: mol_type = other DNA
ttgatggcatgtggaag

SEQ ID NO: 114256 - DNA, 17 bp, synthetic construct
  source 1..17: mol_type = other DNA
tgatggcatgtggaagg

SEQ ID NO: 114257 - DNA, 17 bp, synthetic construct
  source 1..17: mol_type = other DNA
gatggcatgtggaaggc

SEQ ID NO: 114258 - DNA, 17 bp, synthetic construct
  source 1..17: mol_type = other DNA
atggcatgtggaaggcc

SEQ ID NO: 114259 - DNA, 17 bp, synthetic construct
  source 1..17: mol_type = other DNA
tggcatgtggaaggccg

SEQ ID NO: 114260 - DNA, 17 bp, synthetic construct
  source 1..17: mol_type = other DNA
ggcatgtggaaggccgt

SEQ ID NO: 114261 - DNA, 17 bp, synthetic construct
  source 1..17: mol_type = other DNA
gcatgtggaaggccgtg

SEQ ID NO: 114262 - DNA, 17 bp, synthetic construct
  source 1..17: mol_type = other DNA
catgtggaaggccgtgg

SEQ ID NO: 114263 - DNA, 17 bp, synthetic construct
  source 1..17: mol_type = other DNA
atgtggaaggccgtgga

SEQ ID NO: 114264 - DNA, 17 bp, synthetic construct
  source 1..17: mol_type = other DNA
tgtggaaggccgtggaa

SEQ ID NO: 114265 - DNA, 17 bp, synthetic construct
  source 1..17: mol_type = other DNA
gtggaaggccgtggaag

SEQ ID NO: 114266 - DNA, 17 bp, synthetic construct
  source 1..17: mol_type = other DNA
tggaaggccgtggaagg

SEQ ID NO: 114267 - DNA, 17 bp, synthetic construct
  source 1..17: mol_type = other DNA
ggaaggccgtggaaggc

SEQ ID NO: 114268 - DNA, 17 bp, synthetic construct
  source 1..17: mol_type = other DNA
gaaggccgtggaaggcg

SEQ ID NO: 114269 - DNA, 17 bp, synthetic construct
  source 1..17: mol_type = other DNA
aaggccgtggaaggcgg

SEQ ID NO: 114270 - DNA, 17 bp, synthetic construct
  source 1..17: mol_type = other DNA
aggccgtggaaggcggc

SEQ ID NO: 114271 - DNA, 17 bp, synthetic construct
  source 1..17: mol_type = other DNA
ggccgtggaaggcggct

SEQ ID NO: 114272 - DNA, 17 bp, synthetic construct
  source 1..17: mol_type = other DNA
gccgtggaaggcggctg

SEQ ID NO: 114273 - DNA, 17 bp, synthetic construct
  source 1..17: mol_type = other DNA
ccgtggaaggcggctgg

SEQ ID NO: 114274 - DNA, 17 bp, synthetic construct
  source 1..17: mol_type = other DNA
cgtggaaggcggctggg

SEQ ID NO: 114275 - DNA, 17 bp, synthetic construct
  source 1..17: mol_type = other DNA
gtggaaggcggctgggg

SEQ ID NO: 114276 - DNA, 17 bp, synthetic construct
  source 1..17: mol_type = other DNA
tggaaggcggctggggc

SEQ ID NO: 114277 - DNA, 17 bp, synthetic construct
  source 1..17: mol_type = other DNA
ggaaggcggctggggct

SEQ ID NO: 114278 - DNA, 17 bp, synthetic construct
  source 1..17: mol_type = other DNA
gaaggcggctggggctg

SEQ ID NO: 114279 - DNA, 17 bp, synthetic construct
  source 1..17: mol_type = other DNA
aaggcggctggggctga

SEQ ID NO: 114280 - DNA, 17 bp, synthetic construct
  source 1..17: mol_type = other DNA
aggcggctggggctgac

SEQ ID NO: 114281 - DNA, 17 bp, synthetic construct
  source 1..17: mol_type = other DNA
ggcggctggggctgacc

SEQ ID NO: 114282 - DNA, 17 bp, synthetic construct
  source 1..17: mol_type = other DNA
gcggctggggctgacca

SEQ ID NO: 114283 - DNA, 17 bp, synthetic construct
  source 1..17: mol_type = other DNA
cggctggggctgaccac

SEQ ID NO: 114284 - DNA, 17 bp, synthetic construct
  source 1..17: mol_type = other DNA
ggctggggctgaccaca

SEQ ID NO: 114285 - DNA, 17 bp, synthetic construct
  source 1..17: mol_type = other DNA
gctggggctgaccacac

SEQ ID NO: 114286 - DNA, 17 bp, synthetic construct
  source 1..17: mol_type = other DNA
ctggggctgaccacacg

SEQ ID NO: 114287 - DNA, 17 bp, synthetic construct
  source 1..17: mol_type = other DNA
tggggctgaccacacgg

SEQ ID NO: 114288 - DNA, 17 bp, synthetic construct
  source 1..17: mol_type = other DNA
ggggctgaccacacggg

SEQ ID NO: 114289 - DNA, 17 bp, synthetic construct
  source 1..17: mol_type = other DNA
gggctgaccacacgggc

SEQ ID NO: 114290 - DNA, 17 bp, synthetic construct
  source 1..17: mol_type = other DNA
ggctgaccacacgggca

SEQ ID NO: 114291 - DNA, 17 bp, synthetic construct
  source 1..17: mol_type = other DNA
gctgaccacacgggcag

SEQ ID NO: 114292 - DNA, 17 bp, synthetic construct
  source 1..17: mol_type = other DNA
ctgaccacacgggcagt

SEQ ID NO: 114293 - DNA, 17 bp, synthetic construct
  source 1..17: mol_type = other DNA
tgaccacacgggcagta

SEQ ID NO: 114294 - DNA, 17 bp, synthetic construct
  source 1..17: mol_type = other DNA
gaccacacgggcagtac

SEQ ID NO: 114295 - DNA, 17 bp, synthetic construct
  source 1..17: mol_type = other DNA
accacacgggcagtaca

SEQ ID NO: 114296 - DNA, 17 bp, synthetic construct
  source 1..17: mol_type = other DNA
ccacacgggcagtacag

SEQ ID NO: 114297 - DNA, 17 bp, synthetic construct
  source 1..17: mol_type = other DNA
cacacgggcagtacagg

SEQ ID NO: 114298 - DNA, 17 bp, synthetic construct
  source 1..17: mol_type = other DNA
acacgggcagtacaggg

SEQ ID NO: 114299 - DNA, 17 bp, synthetic construct
  source 1..17: mol_type = other DNA
cacgggcagtacagggc

SEQ ID NO: 114300 - DNA, 17 bp, synthetic construct
  source 1..17: mol_type = other DNA
acgggcagtacagggcc

SEQ ID NO: 114301 - DNA, 17 bp, synthetic construct
  source 1..17: mol_type = other DNA
cgggcagtacagggccc

SEQ ID NO: 114302 - DNA, 17 bp, synthetic construct
  source 1..17: mol_type = other DNA
gggcagtacagggccct

SEQ ID NO: 114303 - DNA, 17 bp, synthetic construct
  source 1..17: mol_type = other DNA
ggcagtacagggccctt

SEQ ID NO: 114304 - DNA, 17 bp, synthetic construct
  source 1..17: mol_type = other DNA
gcagtacagggcccttc

SEQ ID NO: 114305 - DNA, 17 bp, synthetic construct
  source 1..17: mol_type = other DNA
cagtacagggcccttcc

SEQ ID NO: 114306 - DNA, 17 bp, synthetic construct
  source 1..17: mol_type = other DNA
agtacagggcccttccc

SEQ ID NO: 114307 - DNA, 17 bp, synthetic construct
  source 1..17: mol_type = other DNA
gtacagggcccttcccc

SEQ ID NO: 114308 - DNA, 17 bp, synthetic construct
  source 1..17: mol_type = other DNA
tacagggcccttcccct

SEQ ID NO: 114309 - DNA, 17 bp, synthetic construct
  source 1..17: mol_type = other DNA
acagggcccttcccctg

SEQ ID NO: 114310 - DNA, 17 bp, synthetic construct
  source 1..17: mol_type = other DNA
cagggcccttcccctgg

SEQ ID NO: 114311 - DNA, 17 bp, synthetic construct
  source 1..17: mol_type = other DNA
agggcccttcccctggc

SEQ ID NO: 114312 - DNA, 17 bp, synthetic construct
  source 1..17: mol_type = other DNA
gggcccttcccctggcc

SEQ ID NO: 114313 - DNA, 17 bp, synthetic construct
  source 1..17: mol_type = other DNA
ggcccttcccctggccc

SEQ ID NO: 114314 - DNA, 17 bp, synthetic construct
  source 1..17: mol_type = other DNA
gcccttcccctggccca

SEQ ID NO: 114315 - DNA, 17 bp, synthetic construct
  source 1..17: mol_type = other DNA
cccttcccctggcccag

SEQ ID NO: 114316 - DNA, 17 bp, synthetic construct
  source 1..17: mol_type = other DNA
ccttcccctggcccagc

SEQ ID NO: 114317 - DNA, 17 bp, synthetic construct
  source 1..17: mol_type = other DNA
cttcccctggcccagcc

SEQ ID NO: 114318 - DNA, 17 bp, synthetic construct
  source 1..17: mol_type = other DNA
ttcccctggcccagccc

SEQ ID NO: 114319 - DNA, 17 bp, synthetic construct
  source 1..17: mol_type = other DNA
tcccctggcccagcccc

SEQ ID NO: 114320 - DNA, 17 bp, synthetic construct
  source 1..17: mol_type = other DNA
cccctggcccagcccca

SEQ ID NO: 114321 - DNA, 17 bp, synthetic construct
  source 1..17: mol_type = other DNA
ccctggcccagccccac

SEQ ID NO: 114322 - DNA, 17 bp, synthetic construct
  source 1..17: mol_type = other DNA
cctggcccagccccacc

SEQ ID NO: 114323 - DNA, 17 bp, synthetic construct
  source 1..17: mol_type = other DNA
ctggcccagccccacct

SEQ ID NO: 114324 - DNA, 17 bp, synthetic construct
  source 1..17: mol_type = other DNA
tggcccagccccacctc

SEQ ID NO: 114325 - DNA, 17 bp, synthetic construct
  source 1..17: mol_type = other DNA
ggcccagccccacctcc

SEQ ID NO: 114326 - DNA, 17 bp, synthetic construct
  source 1..17: mol_type = other DNA
gcccagccccacctcct

SEQ ID NO: 114327 - DNA, 17 bp, synthetic construct
  source 1..17: mol_type = other DNA
cccagccccacctcctt

SEQ ID NO: 114328 - DNA, 17 bp, synthetic construct
  source 1..17: mol_type = other DNA
ccagccccacctccttt

SEQ ID NO: 114329 - DNA, 17 bp, synthetic construct
  source 1..17: mol_type = other DNA
cagccccacctcctttt

SEQ ID NO: 114330 - DNA, 17 bp, synthetic construct
  source 1..17: mol_type = other DNA
agccccacctccttttg

SEQ ID NO: 114331 - DNA, 17 bp, synthetic construct
  source 1..17: mol_type = other DNA
gccccacctccttttgc

SEQ ID NO: 114332 - DNA, 17 bp, synthetic construct
  source 1..17: mol_type = other DNA
ccccacctccttttgcg

SEQ ID NO: 114333 - DNA, 17 bp, synthetic construct
  source 1..17: mol_type = other DNA
cccacctccttttgcgc

SEQ ID NO: 114334 - DNA, 17 bp, synthetic construct
  source 1..17: mol_type = other DNA
ccacctccttttgcgca

SEQ ID NO: 114335 - DNA, 17 bp, synthetic construct
  source 1..17: mol_type = other DNA
cacctccttttgcgcag

SEQ ID NO: 114336 - DNA, 17 bp, synthetic construct
  source 1..17: mol_type = other DNA
acctccttttgcgcagc

SEQ ID NO: 114337 - DNA, 17 bp, synthetic construct
  source 1..17: mol_type = other DNA
cctccttttgcgcagcc

SEQ ID NO: 114338 - DNA, 17 bp, synthetic construct
  source 1..17: mol_type = other DNA
ctccttttgcgcagccc

SEQ ID NO: 114339 - DNA, 17 bp, synthetic construct
  source 1..17: mol_type = other DNA
tccttttgcgcagcccg

SEQ ID NO: 114340 - DNA, 17 bp, synthetic construct
  source 1..17: mol_type = other DNA
ccttttgcgcagcccgg

SEQ ID NO: 114341 - DNA, 17 bp, synthetic construct
  source 1..17: mol_type = other DNA
cttttgcgcagcccgga

SEQ ID NO: 114342 - DNA, 17 bp, synthetic construct
  source 1..17: mol_type = other DNA
ttttgcgcagcccggac

SEQ ID NO: 114343 - DNA, 17 bp, synthetic construct
  source 1..17: mol_type = other DNA
tttgcgcagcccggacc

SEQ ID NO: 114344 - DNA, 17 bp, synthetic construct
  source 1..17: mol_type = other DNA
ttgcgcagcccggacct

SEQ ID NO: 114345 - DNA, 17 bp, synthetic construct
  source 1..17: mol_type = other DNA
tgcgcagcccggacctg

SEQ ID NO: 114346 - DNA, 17 bp, synthetic construct
  source 1..17: mol_type = other DNA
gcgcagcccggacctgc

SEQ ID NO: 114347 - DNA, 17 bp, synthetic construct
  source 1..17: mol_type = other DNA
cgcagcccggacctgcc

SEQ ID NO: 114348 - DNA, 17 bp, synthetic construct
  source 1..17: mol_type = other DNA
gcagcccggacctgccc

SEQ ID NO: 114349 - DNA, 17 bp, synthetic construct
  source 1..17: mol_type = other DNA
cagcccggacctgcccc

SEQ ID NO: 114350 - DNA, 17 bp, synthetic construct
  source 1..17: mol_type = other DNA
agcccggacctgccccc

SEQ ID NO: 114351 - DNA, 17 bp, synthetic construct
  source 1..17: mol_type = other DNA
gcccggacctgccccct

SEQ ID NO: 114352 - DNA, 17 bp, synthetic construct
  source 1..17: mol_type = other DNA
cccggacctgccccctc

SEQ ID NO: 114353 - DNA, 17 bp, synthetic construct
  source 1..17: mol_type = other DNA
ccggacctgccccctca

SEQ ID NO: 114354 - DNA, 17 bp, synthetic construct
  source 1..17: mol_type = other DNA
cggacctgccccctcaa

SEQ ID NO: 114355 - DNA, 17 bp, synthetic construct
  source 1..17: mol_type = other DNA
ggacctgccccctcaac

SEQ ID NO: 114356 - DNA, 17 bp, synthetic construct
  source 1..17: mol_type = other DNA
gacctgccccctcaaca

SEQ ID NO: 114357 - DNA, 17 bp, synthetic construct
  source 1..17: mol_type = other DNA
acctgccccctcaacat

SEQ ID NO: 114358 - DNA, 17 bp, synthetic construct
  source 1..17: mol_type = other DNA
cctgccccctcaacatg

SEQ ID NO: 114359 - DNA, 17 bp, synthetic construct
  source 1..17: mol_type = other DNA
ctgccccctcaacatgc

SEQ ID NO: 114360 - DNA, 17 bp, synthetic construct
  source 1..17: mol_type = other DNA
tgccccctcaacatgca

SEQ ID NO: 114361 - DNA, 17 bp, synthetic construct
  source 1..17: mol_type = other DNA
gccccctcaacatgcag

SEQ ID NO: 114362 - DNA, 17 bp, synthetic construct
  source 1..17: mol_type = other DNA
ccccctcaacatgcagc

SEQ ID NO: 114363 - DNA, 17 bp, synthetic construct
  source 1..17: mol_type = other DNA
cccctcaacatgcagca

SEQ ID NO: 114364 - DNA, 17 bp, synthetic construct
  source 1..17: mol_type = other DNA
ccctcaacatgcagcac

SEQ ID NO: 114365 - DNA, 17 bp, synthetic construct
  source 1..17: mol_type = other DNA
cctcaacatgcagcacc

SEQ ID NO: 114366 - DNA, 17 bp, synthetic construct
  source 1..17: mol_type = other DNA
ctcaacatgcagcacca

SEQ ID NO: 114367 - DNA, 17 bp, synthetic construct
  source 1..17: mol_type = other DNA
tcaacatgcagcaccag

SEQ ID NO: 114368 - DNA, 17 bp, synthetic construct
  source 1..17: mol_type = other DNA
caacatgcagcaccagg

SEQ ID NO: 114369 - DNA, 17 bp, synthetic construct
  source 1..17: mol_type = other DNA
aacatgcagcaccagga

SEQ ID NO: 114370 - DNA, 17 bp, synthetic construct
  source 1..17: mol_type = other DNA
acatgcagcaccaggag

SEQ ID NO: 114371 - DNA, 17 bp, synthetic construct
  source 1..17: mol_type = other DNA
catgcagcaccaggagt

SEQ ID NO: 114372 - DNA, 17 bp, synthetic construct
  source 1..17: mol_type = other DNA
atgcagcaccaggagtg

SEQ ID NO: 114373 - DNA, 17 bp, synthetic construct
  source 1..17: mol_type = other DNA
tgcagcaccaggagtgt

SEQ ID NO: 114374 - DNA, 17 bp, synthetic construct
  source 1..17: mol_type = other DNA
gcagcaccaggagtgtg

SEQ ID NO: 114375 - DNA, 17 bp, synthetic construct
  source 1..17: mol_type = other DNA
cagcaccaggagtgtgg

SEQ ID NO: 114376 - DNA, 17 bp, synthetic construct
  source 1..17: mol_type = other DNA
agcaccaggagtgtggc

SEQ ID NO: 114377 - DNA, 17 bp, synthetic construct
  source 1..17: mol_type = other DNA
gcaccaggagtgtggct

SEQ ID NO: 114378 - DNA, 17 bp, synthetic construct
  source 1..17: mol_type = other DNA
caccaggagtgtggctc

SEQ ID NO: 114379 - DNA, 17 bp, synthetic construct
  source 1..17: mol_type = other DNA
accaggagtgtggctca

SEQ ID NO: 114380 - DNA, 17 bp, synthetic construct
  source 1..17: mol_type = other DNA
ccaggagtgtggctcac

SEQ ID NO: 114381 - DNA, 17 bp, synthetic construct
  source 1..17: mol_type = other DNA
caggagtgtggctcacc

SEQ ID NO: 114382 - DNA, 17 bp, synthetic construct
  source 1..17: mol_type = other DNA
aggagtgtggctcaccc

SEQ ID NO: 114383 - DNA, 17 bp, synthetic construct
  source 1..17: mol_type = other DNA
ggagtgtggctcaccct

SEQ ID NO: 114384 - DNA, 17 bp, synthetic construct
  source 1..17: mol_type = other DNA
gagtgtggctcaccctg

SEQ ID NO: 114385 - DNA, 17 bp, synthetic construct
  source 1..17: mol_type = other DNA
agtgtggctcaccctgc

SEQ ID NO: 114386 - DNA, 17 bp, synthetic construct
  source 1..17: mol_type = other DNA
gtgtggctcaccctgca

SEQ ID NO: 114387 - DNA, 17 bp, synthetic construct
  source 1..17: mol_type = other DNA
tgtggctcaccctgcac

SEQ ID NO: 114388 - DNA, 17 bp, synthetic construct
  source 1..17: mol_type = other DNA
gtggctcaccctgcacg

SEQ ID NO: 114389 - DNA, 17 bp, synthetic construct
  source 1..17: mol_type = other DNA
tggctcaccctgcacgg

SEQ ID NO: 114390 - DNA, 17 bp, synthetic construct
  source 1..17: mol_type = other DNA
ggctcaccctgcacgga

SEQ ID NO: 114391 - DNA, 17 bp, synthetic construct
  source 1..17: mol_type = other DNA
gctcaccctgcacggac

SEQ ID NO: 114392 - DNA, 17 bp, synthetic construct
  source 1..17: mol_type = other DNA
ctcaccctgcacggaca

SEQ ID NO: 114393 - DNA, 17 bp, synthetic construct
  source 1..17: mol_type = other DNA
tcaccctgcacggacac

SEQ ID NO: 114394 - DNA, 17 bp, synthetic construct
  source 1..17: mol_type = other DNA
caccctgcacggacacc

SEQ ID NO: 114395 - DNA, 17 bp, synthetic construct
  source 1..17: mol_type = other DNA
accctgcacggacacct

SEQ ID NO: 114396 - DNA, 17 bp, synthetic construct
  source 1..17: mol_type = other DNA
ccctgcacggacacctg

SEQ ID NO: 114397 - DNA, 17 bp, synthetic construct
  source 1..17: mol_type = other DNA
cctgcacggacacctgc

SEQ ID NO: 114398 - DNA, 17 bp, synthetic construct
  source 1..17: mol_type = other DNA
ctgcacggacacctgct

SEQ ID NO: 114399 - DNA, 17 bp, synthetic construct
  source 1..17: mol_type = other DNA
tgcacggacacctgctc

SEQ ID NO: 114400 - DNA, 17 bp, synthetic construct
  source 1..17: mol_type = other DNA
gcacggacacctgctcc

SEQ ID NO: 114401 - DNA, 17 bp, synthetic construct
  source 1..17: mol_type = other DNA
cacggacacctgctcca

SEQ ID NO: 114402 - DNA, 17 bp, synthetic construct
  source 1..17: mol_type = other DNA
acggacacctgctccaa

SEQ ID NO: 114403 - DNA, 17 bp, synthetic construct
  source 1..17: mol_type = other DNA
cggacacctgctccaac

SEQ ID NO: 114404 - DNA, 17 bp, synthetic construct
  source 1..17: mol_type = other DNA
ggacacctgctccaacc

SEQ ID NO: 114405 - DNA, 17 bp, synthetic construct
  source 1..17: mol_type = other DNA
gacacctgctccaaccc

SEQ ID NO: 114406 - DNA, 17 bp, synthetic construct
  source 1..17: mol_type = other DNA
acacctgctccaacccc

SEQ ID NO: 114407 - DNA, 17 bp, synthetic construct
  source 1..17: mol_type = other DNA
cacctgctccaaccccc

SEQ ID NO: 114408 - DNA, 17 bp, synthetic construct
  source 1..17: mol_type = other DNA
acctgctccaaccccca

SEQ ID NO: 114409 - DNA, 17 bp, synthetic construct
  source 1..17: mol_type = other DNA
cctgctccaacccccag

SEQ ID NO: 114410 - DNA, 17 bp, synthetic construct
  source 1..17: mol_type = other DNA
ctgctccaacccccagc

SEQ ID NO: 114411 - DNA, 17 bp, synthetic construct
  source 1..17: mol_type = other DNA
tgctccaacccccagcg

SEQ ID NO: 114412 - DNA, 17 bp, synthetic construct
  source 1..17: mol_type = other DNA
gctccaacccccagcgc

SEQ ID NO: 114413 - DNA, 17 bp, synthetic construct
  source 1..17: mol_type = other DNA
ctccaacccccagcgcg

SEQ ID NO: 114414 - DNA, 17 bp, synthetic construct
  source 1..17: mol_type = other DNA
tccaacccccagcgcgc

SEQ ID NO: 114415 - DNA, 17 bp, synthetic construct
  source 1..17: mol_type = other DNA
ccaacccccagcgcgcg

SEQ ID NO: 114416 - DNA, 17 bp, synthetic construct
  source 1..17: mol_type = other DNA
caacccccagcgcgcgc

SEQ ID NO: 114417 - DNA, 17 bp, synthetic construct
  source 1..17: mol_type = other DNA
aacccccagcgcgcgca

SEQ ID NO: 114418 - DNA, 17 bp, synthetic construct
  source 1..17: mol_type = other DNA
acccccagcgcgcgcag

SEQ ID NO: 114419 - DNA, 17 bp, synthetic construct
  source 1..17: mol_type = other DNA
cccccagcgcgcgcagc

SEQ ID NO: 114420 - DNA, 17 bp, synthetic construct
  source 1..17: mol_type = other DNA
ccccagcgcgcgcagct

SEQ ID NO: 114421 - DNA, 17 bp, synthetic construct
  source 1..17: mol_type = other DNA
cccagcgcgcgcagctc

SEQ ID NO: 114422 - DNA, 17 bp, synthetic construct
  source 1..17: mol_type = other DNA
ccagcgcgcgcagctct

SEQ ID NO: 114423 - DNA, 17 bp, synthetic construct
  source 1..17: mol_type = other DNA
cagcgcgcgcagctctg

SEQ ID NO: 114424 - DNA, 17 bp, synthetic construct
  source 1..17: mol_type = other DNA
agcgcgcgcagctctgc

SEQ ID NO: 114425 - DNA, 17 bp, synthetic construct
  source 1..17: mol_type = other DNA
gcgcgcgcagctctgcg

SEQ ID NO: 114426 - DNA, 17 bp, synthetic construct
  source 1..17: mol_type = other DNA
cgcgcgcagctctgcga

SEQ ID NO: 114427 - DNA, 17 bp, synthetic construct
  source 1..17: mol_type = other DNA
gcgcgcagctctgcgag

SEQ ID NO: 114428 - DNA, 17 bp, synthetic construct
  source 1..17: mol_type = other DNA
cgcgcagctctgcgagg

SEQ ID NO: 114429 - DNA, 17 bp, synthetic construct
  source 1..17: mol_type = other DNA
gcgcagctctgcgagga

SEQ ID NO: 114430 - DNA, 17 bp, synthetic construct
  source 1..17: mol_type = other DNA
cgcagctctgcgaggac

SEQ ID NO: 114431 - DNA, 17 bp, synthetic construct
  source 1..17: mol_type = other DNA
gcagctctgcgaggacc

SEQ ID NO: 114432 - DNA, 17 bp, synthetic construct
  source 1..17: mol_type = other DNA
cagctctgcgaggacca

SEQ ID NO: 114433 - DNA, 17 bp, synthetic construct
  source 1..17: mol_type = other DNA
agctctgcgaggaccac

SEQ ID NO: 114434 - DNA, 17 bp, synthetic construct
  source 1..17: mol_type = other DNA
gctctgcgaggaccact

SEQ ID NO: 114435 - DNA, 17 bp, synthetic construct
  source 1..17: mol_type = other DNA
ctctgcgaggaccactg

SEQ ID NO: 114436 - DNA, 17 bp, synthetic construct
  source 1..17: mol_type = other DNA
tctgcgaggaccactgt

SEQ ID NO: 114437 - DNA, 17 bp, synthetic construct
  source 1..17: mol_type = other DNA
ctgcgaggaccactgtg

SEQ ID NO: 114438 - DNA, 17 bp, synthetic construct
  source 1..17: mol_type = other DNA
tgcgaggaccactgtgt

SEQ ID NO: 114439 - DNA, 17 bp, synthetic construct
  source 1..17: mol_type = other DNA
gcgaggaccactgtgtg

SEQ ID NO: 114440 - DNA, 17 bp, synthetic construct
  source 1..17: mol_type = other DNA
cgaggaccactgtgtgg

SEQ ID NO: 114441 - DNA, 17 bp, synthetic construct
  source 1..17: mol_type = other DNA
gaggaccactgtgtgga

SEQ ID NO: 114442 - DNA, 17 bp, synthetic construct
  source 1..17: mol_type = other DNA
aggaccactgtgtggac

SEQ ID NO: 114443 - DNA, 17 bp, synthetic construct
  source 1..17: mol_type = other DNA
ggaccactgtgtggacg

SEQ ID NO: 114444 - DNA, 17 bp, synthetic construct
  source 1..17: mol_type = other DNA
gaccactgtgtggacgg

SEQ ID NO: 114445 - DNA, 17 bp, synthetic construct
  source 1..17: mol_type = other DNA
accactgtgtggacggc

SEQ ID NO: 114446 - DNA, 17 bp, synthetic construct
  source 1..17: mol_type = other DNA
ccactgtgtggacggct

SEQ ID NO: 114447 - DNA, 17 bp, synthetic construct
  source 1..17: mol_type = other DNA
cactgtgtggacggctg

SEQ ID NO: 114448 - DNA, 17 bp, synthetic construct
  source 1..17: mol_type = other DNA
actgtgtggacggctgc

SEQ ID NO: 114449 - DNA, 17 bp, synthetic construct
  source 1..17: mol_type = other DNA
ctgtgtggacggctgct

SEQ ID NO: 114450 - DNA, 17 bp, synthetic construct
  source 1..17: mol_type = other DNA
tgtgtggacggctgctt

SEQ ID NO: 114451 - DNA, 17 bp, synthetic construct
  source 1..17: mol_type = other DNA
gtgtggacggctgcttc

SEQ ID NO: 114452 - DNA, 17 bp, synthetic construct
  source 1..17: mol_type = other DNA
tgtggacggctgcttct

SEQ ID NO: 114453 - DNA, 17 bp, synthetic construct
  source 1..17: mol_type = other DNA
gtggacggctgcttctg

SEQ ID NO: 114454 - DNA, 17 bp, synthetic construct
  source 1..17: mol_type = other DNA
tggacggctgcttctgc

SEQ ID NO: 114455 - DNA, 17 bp, synthetic construct
  source 1..17: mol_type = other DNA
ggacggctgcttctgcc

SEQ ID NO: 114456 - DNA, 17 bp, synthetic construct
  source 1..17: mol_type = other DNA
gacggctgcttctgccc

SEQ ID NO: 114457 - DNA, 17 bp, synthetic construct
  source 1..17: mol_type = other DNA
acggctgcttctgcccc

SEQ ID NO: 114458 - DNA, 17 bp, synthetic construct
  source 1..17: mol_type = other DNA
cggctgcttctgccccc

SEQ ID NO: 114459 - DNA, 17 bp, synthetic construct
  source 1..17: mol_type = other DNA
ggctgcttctgcccccc

SEQ ID NO: 114460 - DNA, 17 bp, synthetic construct
  source 1..17: mol_type = other DNA
gctgcttctgcccccca

SEQ ID NO: 114461 - DNA, 17 bp, synthetic construct
  source 1..17: mol_type = other DNA
ctgcttctgccccccag

SEQ ID NO: 114462 - DNA, 17 bp, synthetic construct
  source 1..17: mol_type = other DNA
tgcttctgccccccagg

SEQ ID NO: 114463 - DNA, 17 bp, synthetic construct
  source 1..17: mol_type = other DNA
gcttctgccccccaggc

SEQ ID NO: 114464 - DNA, 17 bp, synthetic construct
  source 1..17: mol_type = other DNA
cttctgccccccaggca

SEQ ID NO: 114465 - DNA, 17 bp, synthetic construct
  source 1..17: mol_type = other DNA
ttctgccccccaggcag

SEQ ID NO: 114466 - DNA, 17 bp, synthetic construct
  source 1..17: mol_type = other DNA
tctgccccccaggcagg

SEQ ID NO: 114467 - DNA, 17 bp, synthetic construct
  source 1..17: mol_type = other DNA
ctgccccccaggcaggt

SEQ ID NO: 114468 - DNA, 17 bp, synthetic construct
  source 1..17: mol_type = other DNA
tgccccccaggcaggtc

SEQ ID NO: 114469 - DNA, 17 bp, synthetic construct
  source 1..17: mol_type = other DNA
gccccccaggcaggtct

SEQ ID NO: 114470 - DNA, 17 bp, synthetic construct
  source 1..17: mol_type = other DNA
ccccccaggcaggtctt

SEQ ID NO: 114471 - DNA, 17 bp, synthetic construct
  source 1..17: mol_type = other DNA
cccccaggcaggtcttg

SEQ ID NO: 114472 - DNA, 17 bp, synthetic construct
  source 1..17: mol_type = other DNA
ccccaggcaggtcttgt

SEQ ID NO: 114473 - DNA, 17 bp, synthetic construct
  source 1..17: mol_type = other DNA
cccaggcaggtcttgtg

SEQ ID NO: 114474 - DNA, 17 bp, synthetic construct
  source 1..17: mol_type = other DNA
ccaggcaggtcttgtgt

SEQ ID NO: 114475 - DNA, 17 bp, synthetic construct
  source 1..17: mol_type = other DNA
caggcaggtcttgtgtg

SEQ ID NO: 114476 - DNA, 17 bp, synthetic construct
  source 1..17: mol_type = other DNA
aggcaggtcttgtgtgc

SEQ ID NO: 114477 - DNA, 17 bp, synthetic construct
  source 1..17: mol_type = other DNA
ggcaggtcttgtgtgcc

SEQ ID NO: 114478 - DNA, 17 bp, synthetic construct
  source 1..17: mol_type = other DNA
gcaggtcttgtgtgccc

SEQ ID NO: 114479 - DNA, 17 bp, synthetic construct
  source 1..17: mol_type = other DNA
caggtcttgtgtgccct

SEQ ID NO: 114480 - DNA, 17 bp, synthetic construct
  source 1..17: mol_type = other DNA
aggtcttgtgtgccctg

SEQ ID NO: 114481 - DNA, 17 bp, synthetic construct
  source 1..17: mol_type = other DNA
ggtcttgtgtgccctga

SEQ ID NO: 114482 - DNA, 17 bp, synthetic construct
  source 1..17: mol_type = other DNA
gtcttgtgtgccctgaa

SEQ ID NO: 114483 - DNA, 17 bp, synthetic construct
  source 1..17: mol_type = other DNA
tcttgtgtgccctgaac

SEQ ID NO: 114484 - DNA, 17 bp, synthetic construct
  source 1..17: mol_type = other DNA
cttgtgtgccctgaacc

SEQ ID NO: 114485 - DNA, 17 bp, synthetic construct
  source 1..17: mol_type = other DNA
ttgtgtgccctgaaccc

SEQ ID NO: 114486 - DNA, 17 bp, synthetic construct
  source 1..17: mol_type = other DNA
tgtgtgccctgaacccc

SEQ ID NO: 114487 - DNA, 17 bp, synthetic construct
  source 1..17: mol_type = other DNA
gtgtgccctgaacccct

SEQ ID NO: 114488 - DNA, 17 bp, synthetic construct
  source 1..17: mol_type = other DNA
tgtgccctgaacccctc

SEQ ID NO: 114489 - DNA, 17 bp, synthetic construct
  source 1..17: mol_type = other DNA
gtgccctgaacccctca

SEQ ID NO: 114490 - DNA, 17 bp, synthetic construct
  source 1..17: mol_type = other DNA
tgccctgaacccctcag

SEQ ID NO: 114491 - DNA, 17 bp, synthetic construct
  source 1..17: mol_type = other DNA
gccctgaacccctcagg

SEQ ID NO: 114492 - DNA, 17 bp, synthetic construct
  source 1..17: mol_type = other DNA
ccctgaacccctcaggg

SEQ ID NO: 114493 - DNA, 17 bp, synthetic construct
  source 1..17: mol_type = other DNA
cctgaacccctcagggg

SEQ ID NO: 114494 - DNA, 17 bp, synthetic construct
  source 1..17: mol_type = other DNA
ctgaacccctcaggggg

SEQ ID NO: 114495 - DNA, 17 bp, synthetic construct
  source 1..17: mol_type = other DNA
tgaacccctcagggggc

SEQ ID NO: 114496 - DNA, 17 bp, synthetic construct
  source 1..17: mol_type = other DNA
gaacccctcagggggct

SEQ ID NO: 114497 - DNA, 17 bp, synthetic construct
  source 1..17: mol_type = other DNA
aacccctcagggggctt

SEQ ID NO: 114498 - DNA, 17 bp, synthetic construct
  source 1..17: mol_type = other DNA
acccctcagggggcttt

SEQ ID NO: 114499 - DNA, 17 bp, synthetic construct
  source 1..17: mol_type = other DNA
cccctcagggggctttc

SEQ ID NO: 114500 - DNA, 17 bp, synthetic construct
  source 1..17: mol_type = other DNA
ccctcagggggctttca

SEQ ID NO: 114501 - DNA, 17 bp, synthetic construct
  source 1..17: mol_type = other DNA
cctcagggggctttcag

SEQ ID NO: 114502 - DNA, 17 bp, synthetic construct
  source 1..17: mol_type = other DNA
ctcagggggctttcagg

SEQ ID NO: 114503 - DNA, 17 bp, synthetic construct
  source 1..17: mol_type = other DNA
tcagggggctttcaggt

SEQ ID NO: 114504 - DNA, 17 bp, synthetic construct
  source 1..17: mol_type = other DNA
cagggggctttcaggtc

SEQ ID NO: 114505 - DNA, 17 bp, synthetic construct
  source 1..17: mol_type = other DNA
agggggctttcaggtcc

SEQ ID NO: 114506 - DNA, 17 bp, synthetic construct
  source 1..17: mol_type = other DNA
gggggctttcaggtccc

SEQ ID NO: 114507 - DNA, 17 bp, synthetic construct
  source 1..17: mol_type = other DNA
ggggctttcaggtccct

SEQ ID NO: 114508 - DNA, 17 bp, synthetic construct
  source 1..17: mol_type = other DNA
gggctttcaggtccctg

SEQ ID NO: 114509 - DNA, 17 bp, synthetic construct
  source 1..17: mol_type = other DNA
ggctttcaggtccctgc

SEQ ID NO: 114510 - DNA, 17 bp, synthetic construct
  source 1..17: mol_type = other DNA
gctttcaggtccctgct

SEQ ID NO: 114511 - DNA, 17 bp, synthetic construct
  source 1..17: mol_type = other DNA
ctttcaggtccctgctc

SEQ ID NO: 114512 - DNA, 17 bp, synthetic construct
  source 1..17: mol_type = other DNA
tttcaggtccctgctcc

SEQ ID NO: 114513 - DNA, 17 bp, synthetic construct
  source 1..17: mol_type = other DNA
ttcaggtccctgctccc

SEQ ID NO: 114514 - DNA, 17 bp, synthetic construct
  source 1..17: mol_type = other DNA
tcaggtccctgctccca

SEQ ID NO: 114515 - DNA, 17 bp, synthetic construct
  source 1..17: mol_type = other DNA
caggtccctgctcccaa

SEQ ID NO: 114516 - DNA, 17 bp, synthetic construct
  source 1..17: mol_type = other DNA
aggtccctgctcccaac

SEQ ID NO: 114517 - DNA, 17 bp, synthetic construct
  source 1..17: mol_type = other DNA
ggtccctgctcccaacc

SEQ ID NO: 114518 - DNA, 17 bp, synthetic construct
  source 1..17: mol_type = other DNA
gtccctgctcccaaccc

SEQ ID NO: 114519 - DNA, 17 bp, synthetic construct
  source 1..17: mol_type = other DNA
tccctgctcccaacccc

SEQ ID NO: 114520 - DNA, 17 bp, synthetic construct
  source 1..17: mol_type = other DNA
ccctgctcccaaccccg

SEQ ID NO: 114521 - DNA, 17 bp, synthetic construct
  source 1..17: mol_type = other DNA
cctgctcccaaccccgc

SEQ ID NO: 114522 - DNA, 17 bp, synthetic construct
  source 1..17: mol_type = other DNA
ctgctcccaaccccgcc

SEQ ID NO: 114523 - DNA, 17 bp, synthetic construct
  source 1..17: mol_type = other DNA
tgctcccaaccccgccc

SEQ ID NO: 114524 - DNA, 17 bp, synthetic construct
  source 1..17: mol_type = other DNA
gctcccaaccccgcccc

SEQ ID NO: 114525 - DNA, 17 bp, synthetic construct
  source 1..17: mol_type = other DNA
ctcccaaccccgccccc

SEQ ID NO: 114526 - DNA, 17 bp, synthetic construct
  source 1..17: mol_type = other DNA
tcccaaccccgccccca

SEQ ID NO: 114527 - DNA, 17 bp, synthetic construct
  source 1..17: mol_type = other DNA
cccaaccccgcccccag

SEQ ID NO: 114528 - DNA, 17 bp, synthetic construct
  source 1..17: mol_type = other DNA
ccaaccccgcccccagc

SEQ ID NO: 114529 - DNA, 17 bp, synthetic construct
  source 1..17: mol_type = other DNA
caaccccgcccccagcc

SEQ ID NO: 114530 - DNA, 17 bp, synthetic construct
  source 1..17: mol_type = other DNA
aaccccgcccccagcct

SEQ ID NO: 114531 - DNA, 17 bp, synthetic construct
  source 1..17: mol_type = other DNA
accccgcccccagcctc

SEQ ID NO: 114532 - DNA, 17 bp, synthetic construct
  source 1..17: mol_type = other DNA
ccccgcccccagcctca

SEQ ID NO: 114533 - DNA, 17 bp, synthetic construct
  source 1..17: mol_type = other DNA
cccgcccccagcctcat

SEQ ID NO: 114534 - DNA, 17 bp, synthetic construct
  source 1..17: mol_type = other DNA
ccgcccccagcctcatc

SEQ ID NO: 114535 - DNA, 17 bp, synthetic construct
  source 1..17: mol_type = other DNA
cgcccccagcctcatca

SEQ ID NO: 114536 - DNA, 17 bp, synthetic construct
  source 1..17: mol_type = other DNA
gcccccagcctcatcag

SEQ ID NO: 114537 - DNA, 17 bp, synthetic construct
  source 1..17: mol_type = other DNA
cccccagcctcatcagg

SEQ ID NO: 114538 - DNA, 17 bp, synthetic construct
  source 1..17: mol_type = other DNA
ccccagcctcatcaggc

SEQ ID NO: 114539 - DNA, 17 bp, synthetic construct
  source 1..17: mol_type = other DNA
cccagcctcatcaggcg

SEQ ID NO: 114540 - DNA, 17 bp, synthetic construct
  source 1..17: mol_type = other DNA
ccagcctcatcaggcgt

SEQ ID NO: 114541 - DNA, 17 bp, synthetic construct
  source 1..17: mol_type = other DNA
cagcctcatcaggcgtg

SEQ ID NO: 114542 - DNA, 17 bp, synthetic construct
  source 1..17: mol_type = other DNA
agcctcatcaggcgtgg

SEQ ID NO: 114543 - DNA, 17 bp, synthetic construct
  source 1..17: mol_type = other DNA
gcctcatcaggcgtgga

SEQ ID NO: 114544 - DNA, 17 bp, synthetic construct
  source 1..17: mol_type = other DNA
cctcatcaggcgtggaa

SEQ ID NO: 114545 - DNA, 17 bp, synthetic construct
  source 1..17: mol_type = other DNA
ctcatcaggcgtggaag

SEQ ID NO: 114546 - DNA, 17 bp, synthetic construct
  source 1..17: mol_type = other DNA
tcatcaggcgtggaagc

SEQ ID NO: 114547 - DNA, 17 bp, synthetic construct
  source 1..17: mol_type = other DNA
catcaggcgtggaagca

SEQ ID NO: 114548 - DNA, 17 bp, synthetic construct
  source 1..17: mol_type = other DNA
atcaggcgtggaagcag

SEQ ID NO: 114549 - DNA, 17 bp, synthetic construct
  source 1..17: mol_type = other DNA
tcaggcgtggaagcaga

SEQ ID NO: 114550 - DNA, 17 bp, synthetic construct
  source 1..17: mol_type = other DNA
caggcgtggaagcagag

SEQ ID NO: 114551 - DNA, 17 bp, synthetic construct
  source 1..17: mol_type = other DNA
aggcgtggaagcagagc

SEQ ID NO: 114552 - DNA, 17 bp, synthetic construct
  source 1..17: mol_type = other DNA
ggcgtggaagcagagcc

SEQ ID NO: 114553 - DNA, 17 bp, synthetic construct
  source 1..17: mol_type = other DNA
gcgtggaagcagagccc

SEQ ID NO: 114554 - DNA, 17 bp, synthetic construct
  source 1..17: mol_type = other DNA
cgtggaagcagagcccc

SEQ ID NO: 114555 - DNA, 17 bp, synthetic construct
  source 1..17: mol_type = other DNA
gtggaagcagagcccct

SEQ ID NO: 114556 - DNA, 17 bp, synthetic construct
  source 1..17: mol_type = other DNA
tggaagcagagcccctc

SEQ ID NO: 114557 - DNA, 17 bp, synthetic construct
  source 1..17: mol_type = other DNA
ggaagcagagcccctca

SEQ ID NO: 114558 - DNA, 17 bp, synthetic construct
  source 1..17: mol_type = other DNA
gaagcagagcccctcat

SEQ ID NO: 114559 - DNA, 17 bp, synthetic construct
  source 1..17: mol_type = other DNA
aagcagagcccctcatg

SEQ ID NO: 114560 - DNA, 17 bp, synthetic construct
  source 1..17: mol_type = other DNA
agcagagcccctcatgc

SEQ ID NO: 114561 - DNA, 17 bp, synthetic construct
  source 1..17: mol_type = other DNA
gcagagcccctcatgcc

SEQ ID NO: 114562 - DNA, 17 bp, synthetic construct
  source 1..17: mol_type = other DNA
cagagcccctcatgcca

SEQ ID NO: 114563 - DNA, 17 bp, synthetic construct
  source 1..17: mol_type = other DNA
agagcccctcatgccag

SEQ ID NO: 114564 - DNA, 17 bp, synthetic construct
  source 1..17: mol_type = other DNA
gagcccctcatgccaga

SEQ ID NO: 114565 - DNA, 17 bp, synthetic construct
  source 1..17: mol_type = other DNA
agcccctcatgccagaa

SEQ ID NO: 114566 - DNA, 17 bp, synthetic construct
  source 1..17: mol_type = other DNA
gcccctcatgccagaag

SEQ ID NO: 114567 - DNA, 17 bp, synthetic construct
  source 1..17: mol_type = other DNA
cccctcatgccagaagg

SEQ ID NO: 114568 - DNA, 17 bp, synthetic construct
  source 1..17: mol_type = other DNA
ccctcatgccagaaggt

SEQ ID NO: 114569 - DNA, 17 bp, synthetic construct
  source 1..17: mol_type = other DNA
cctcatgccagaaggtc

SEQ ID NO: 114570 - DNA, 17 bp, synthetic construct
  source 1..17: mol_type = other DNA
ctcatgccagaaggtcc

SEQ ID NO: 114571 - DNA, 17 bp, synthetic construct
  source 1..17: mol_type = other DNA
tcatgccagaaggtccc

SEQ ID NO: 114572 - DNA, 17 bp, synthetic construct
  source 1..17: mol_type = other DNA
catgccagaaggtccca

SEQ ID NO: 114573 - DNA, 17 bp, synthetic construct
  source 1..17: mol_type = other DNA
atgccagaaggtcccac

SEQ ID NO: 114574 - DNA, 17 bp, synthetic construct
  source 1..17: mol_type = other DNA
tgccagaaggtcccacc

SEQ ID NO: 114575 - DNA, 17 bp, synthetic construct
  source 1..17: mol_type = other DNA
gccagaaggtcccacca

SEQ ID NO: 114576 - DNA, 17 bp, synthetic construct
  source 1..17: mol_type = other DNA
ccagaaggtcccaccag

SEQ ID NO: 114577 - DNA, 17 bp, synthetic construct
  source 1..17: mol_type = other DNA
cagaaggtcccaccaga

SEQ ID NO: 114578 - DNA, 17 bp, synthetic construct
  source 1..17: mol_type = other DNA
agaaggtcccaccagag

SEQ ID NO: 114579 - DNA, 17 bp, synthetic construct
  source 1..17: mol_type = other DNA
gaaggtcccaccagagg

SEQ ID NO: 114580 - DNA, 17 bp, synthetic construct
  source 1..17: mol_type = other DNA
aaggtcccaccagaggg

SEQ ID NO: 114581 - DNA, 17 bp, synthetic construct
  source 1..17: mol_type = other DNA
aggtcccaccagagggc

SEQ ID NO: 114582 - DNA, 17 bp, synthetic construct
  source 1..17: mol_type = other DNA
ggtcccaccagagggcc

SEQ ID NO: 114583 - DNA, 17 bp, synthetic construct
  source 1..17: mol_type = other DNA
gtcccaccagagggccc

SEQ ID NO: 114584 - DNA, 17 bp, synthetic construct
  source 1..17: mol_type = other DNA
tcccaccagagggccca

SEQ ID NO: 114585 - DNA, 17 bp, synthetic construct
  source 1..17: mol_type = other DNA
cccaccagagggcccag

SEQ ID NO: 114586 - DNA, 17 bp, synthetic construct
  source 1..17: mol_type = other DNA
ccaccagagggcccagg

SEQ ID NO: 114587 - DNA, 17 bp, synthetic construct
  source 1..17: mol_type = other DNA
caccagagggcccaggg

SEQ ID NO: 114588 - DNA, 17 bp, synthetic construct
  source 1..17: mol_type = other DNA
accagagggcccagggt

SEQ ID NO: 114589 - DNA, 17 bp, synthetic construct
  source 1..17: mol_type = other DNA
ccagagggcccagggtg

SEQ ID NO: 114590 - DNA, 17 bp, synthetic construct
  source 1..17: mol_type = other DNA
cagagggcccagggtgg

SEQ ID NO: 114591 - DNA, 17 bp, synthetic construct
  source 1..17: mol_type = other DNA
agagggcccagggtggg

SEQ ID NO: 114592 - DNA, 17 bp, synthetic construct
  source 1..17: mol_type = other DNA
gagggcccagggtggga

SEQ ID NO: 114593 - DNA, 17 bp, synthetic construct
  source 1..17: mol_type = other DNA
agggcccagggtgggaa

SEQ ID NO: 114594 - DNA, 17 bp, synthetic construct
  source 1..17: mol_type = other DNA
gggcccagggtgggaag

SEQ ID NO: 114595 - DNA, 17 bp, synthetic construct
  source 1..17: mol_type = other DNA
ggcccagggtgggaagg

SEQ ID NO: 114596 - DNA, 17 bp, synthetic construct
  source 1..17: mol_type = other DNA
gcccagggtgggaaggg

SEQ ID NO: 114597 - DNA, 17 bp, synthetic construct
  source 1..17: mol_type = other DNA
cccagggtgggaagggc

SEQ ID NO: 114598 - DNA, 17 bp, synthetic construct
  source 1..17: mol_type = other DNA
ccagggtgggaagggca

SEQ ID NO: 114599 - DNA, 17 bp, synthetic construct
  source 1..17: mol_type = other DNA
cagggtgggaagggcac

SEQ ID NO: 114600 - DNA, 17 bp, synthetic construct
  source 1..17: mol_type = other DNA
agggtgggaagggcact

SEQ ID NO: 114601 - DNA, 17 bp, synthetic construct
  source 1..17: mol_type = other DNA
gggtgggaagggcactg

SEQ ID NO: 114602 - DNA, 17 bp, synthetic construct
  source 1..17: mol_type = other DNA
ggtgggaagggcactgg

SEQ ID NO: 114603 - DNA, 17 bp, synthetic construct
  source 1..17: mol_type = other DNA
gtgggaagggcactggc

SEQ ID NO: 114604 - DNA, 17 bp, synthetic construct
  source 1..17: mol_type = other DNA
tgggaagggcactggct

SEQ ID NO: 114605 - DNA, 17 bp, synthetic construct
  source 1..17: mol_type = other DNA
gggaagggcactggctg

SEQ ID NO: 114606 - DNA, 17 bp, synthetic construct
  source 1..17: mol_type = other DNA
ggaagggcactggctgg

SEQ ID NO: 114607 - DNA, 17 bp, synthetic construct
  source 1..17: mol_type = other DNA
gaagggcactggctggg

SEQ ID NO: 114608 - DNA, 17 bp, synthetic construct
  source 1..17: mol_type = other DNA
aagggcactggctggga

SEQ ID NO: 114609 - DNA, 17 bp, synthetic construct
  source 1..17: mol_type = other DNA
agggcactggctgggag

SEQ ID NO: 114610 - DNA, 17 bp, synthetic construct
  source 1..17: mol_type = other DNA
gggcactggctgggagg

SEQ ID NO: 114611 - DNA, 17 bp, synthetic construct
  source 1..17: mol_type = other DNA
ggcactggctgggaggg

SEQ ID NO: 114612 - DNA, 17 bp, synthetic construct
  source 1..17: mol_type = other DNA
gcactggctgggagggt

SEQ ID NO: 114613 - DNA, 17 bp, synthetic construct
  source 1..17: mol_type = other DNA
cactggctgggagggtg

SEQ ID NO: 114614 - DNA, 17 bp, synthetic construct
  source 1..17: mol_type = other DNA
actggctgggagggtgc

SEQ ID NO: 114615 - DNA, 17 bp, synthetic construct
  source 1..17: mol_type = other DNA
ctggctgggagggtgcc

SEQ ID NO: 114616 - DNA, 17 bp, synthetic construct
  source 1..17: mol_type = other DNA
tggctgggagggtgccg

SEQ ID NO: 114617 - DNA, 17 bp, synthetic construct
  source 1..17: mol_type = other DNA
ggctgggagggtgccgg

SEQ ID NO: 114618 - DNA, 17 bp, synthetic construct
  source 1..17: mol_type = other DNA
gctgggagggtgccgga

SEQ ID NO: 114619 - DNA, 17 bp, synthetic construct
  source 1..17: mol_type = other DNA
ctgggagggtgccggaa

SEQ ID NO: 114620 - DNA, 17 bp, synthetic construct
  source 1..17: mol_type = other DNA
tgggagggtgccggaag

SEQ ID NO: 114621 - DNA, 17 bp, synthetic construct
  source 1..17: mol_type = other DNA
gggagggtgccggaaga

SEQ ID NO: 114622 - DNA, 17 bp, synthetic construct
  source 1..17: mol_type = other DNA
ggagggtgccggaagac

SEQ ID NO: 114623 - DNA, 17 bp, synthetic construct
  source 1..17: mol_type = other DNA
gagggtgccggaagacc

SEQ ID NO: 114624 - DNA, 17 bp, synthetic construct
  source 1..17: mol_type = other DNA
agggtgccggaagacct

SEQ ID NO: 114625 - DNA, 17 bp, synthetic construct
  source 1..17: mol_type = other DNA
gggtgccggaagacctg

SEQ ID NO: 114626 - DNA, 17 bp, synthetic construct
  source 1..17: mol_type = other DNA
ggtgccggaagacctgc

SEQ ID NO: 114627 - DNA, 17 bp, synthetic construct
  source 1..17: mol_type = other DNA
gtgccggaagacctgcc

SEQ ID NO: 114628 - DNA, 17 bp, synthetic construct
  source 1..17: mol_type = other DNA
tgccggaagacctgccg

SEQ ID NO: 114629 - DNA, 17 bp, synthetic construct
  source 1..17: mol_type = other DNA
gccggaagacctgccga

SEQ ID NO: 114630 - DNA, 17 bp, synthetic construct
  source 1..17: mol_type = other DNA
ccggaagacctgccgat

SEQ ID NO: 114631 - DNA, 17 bp, synthetic construct
  source 1..17: mol_type = other DNA
cggaagacctgccgatg

SEQ ID NO: 114632 - DNA, 17 bp, synthetic construct
  source 1..17: mol_type = other DNA
ggaagacctgccgatgc

SEQ ID NO: 114633 - DNA, 17 bp, synthetic construct
  source 1..17: mol_type = other DNA
gaagacctgccgatgcg

SEQ ID NO: 114634 - DNA, 17 bp, synthetic construct
  source 1..17: mol_type = other DNA
aagacctgccgatgcgt

SEQ ID NO: 114635 - DNA, 17 bp, synthetic construct
  source 1..17: mol_type = other DNA
agacctgccgatgcgtg

SEQ ID NO: 114636 - DNA, 17 bp, synthetic construct
  source 1..17: mol_type = other DNA
gacctgccgatgcgtgg

SEQ ID NO: 114637 - DNA, 17 bp, synthetic construct
  source 1..17: mol_type = other DNA
acctgccgatgcgtgga

SEQ ID NO: 114638 - DNA, 17 bp, synthetic construct
  source 1..17: mol_type = other DNA
cctgccgatgcgtggag

SEQ ID NO: 114639 - DNA, 17 bp, synthetic construct
  source 1..17: mol_type = other DNA
ctgccgatgcgtggagg

SEQ ID NO: 114640 - DNA, 17 bp, synthetic construct
  source 1..17: mol_type = other DNA
tgccgatgcgtggaggg

SEQ ID NO: 114641 - DNA, 17 bp, synthetic construct
  source 1..17: mol_type = other DNA
gccgatgcgtggaggga

SEQ ID NO: 114642 - DNA, 17 bp, synthetic construct
  source 1..17: mol_type = other DNA
ccgatgcgtggagggag

SEQ ID NO: 114643 - DNA, 17 bp, synthetic construct
  source 1..17: mol_type = other DNA
cgatgcgtggagggagg

SEQ ID NO: 114644 - DNA, 17 bp, synthetic construct
  source 1..17: mol_type = other DNA
gatgcgtggagggaggt

SEQ ID NO: 114645 - DNA, 17 bp, synthetic construct
  source 1..17: mol_type = other DNA
atgcgtggagggaggta

SEQ ID NO: 114646 - DNA, 17 bp, synthetic construct
  source 1..17: mol_type = other DNA
tgcgtggagggaggtag

SEQ ID NO: 114647 - DNA, 17 bp, synthetic construct
  source 1..17: mol_type = other DNA
gcgtggagggaggtaga

SEQ ID NO: 114648 - DNA, 17 bp, synthetic construct
  source 1..17: mol_type = other DNA
cgtggagggaggtagag

SEQ ID NO: 114649 - DNA, 17 bp, synthetic construct
  source 1..17: mol_type = other DNA
gtggagggaggtagagc

SEQ ID NO: 114650 - DNA, 17 bp, synthetic construct
  source 1..17: mol_type = other DNA
tggagggaggtagagca

SEQ ID NO: 114651 - DNA, 17 bp, synthetic construct
  source 1..17: mol_type = other DNA
ggagggaggtagagcag

SEQ ID NO: 114652 - DNA, 17 bp, synthetic construct
  source 1..17: mol_type = other DNA
gagggaggtagagcagt

SEQ ID NO: 114653 - DNA, 17 bp, synthetic construct
  source 1..17: mol_type = other DNA
agggaggtagagcagtg

SEQ ID NO: 114654 - DNA, 17 bp, synthetic construct
  source 1..17: mol_type = other DNA
gggaggtagagcagtgc

SEQ ID NO: 114655 - DNA, 17 bp, synthetic construct
  source 1..17: mol_type = other DNA
ggaggtagagcagtgcc

SEQ ID NO: 114656 - DNA, 17 bp, synthetic construct
  source 1..17: mol_type = other DNA
gaggtagagcagtgcca

SEQ ID NO: 114657 - DNA, 17 bp, synthetic construct
  source 1..17: mol_type = other DNA
aggtagagcagtgccat

SEQ ID NO: 114658 - DNA, 17 bp, synthetic construct
  source 1..17: mol_type = other DNA
ggtagagcagtgccatg

SEQ ID NO: 114659 - DNA, 17 bp, synthetic construct
  source 1..17: mol_type = other DNA
gtagagcagtgccatga

SEQ ID NO: 114660 - DNA, 17 bp, synthetic construct
  source 1..17: mol_type = other DNA
tagagcagtgccatgag

SEQ ID NO: 114661 - DNA, 17 bp, synthetic construct
  source 1..17: mol_type = other DNA
agagcagtgccatgagc

SEQ ID NO: 114662 - DNA, 17 bp, synthetic construct
  source 1..17: mol_type = other DNA
gagcagtgccatgagcc

SEQ ID NO: 114663 - DNA, 17 bp, synthetic construct
  source 1..17: mol_type = other DNA
agcagtgccatgagcca

SEQ ID NO: 114664 - DNA, 17 bp, synthetic construct
  source 1..17: mol_type = other DNA
gcagtgccatgagccag

SEQ ID NO: 114665 - DNA, 17 bp, synthetic construct
  source 1..17: mol_type = other DNA
cagtgccatgagccagc

SEQ ID NO: 114666 - DNA, 17 bp, synthetic construct
  source 1..17: mol_type = other DNA
agtgccatgagccagct

SEQ ID NO: 114667 - DNA, 17 bp, synthetic construct
  source 1..17: mol_type = other DNA
gtgccatgagccagctg

SEQ ID NO: 114668 - DNA, 17 bp, synthetic construct
  source 1..17: mol_type = other DNA
tgccatgagccagctgg

SEQ ID NO: 114669 - DNA, 17 bp, synthetic construct
  source 1..17: mol_type = other DNA
gccatgagccagctggg

SEQ ID NO: 114670 - DNA, 17 bp, synthetic construct
  source 1..17: mol_type = other DNA
ccatgagccagctgggc

SEQ ID NO: 114671 - DNA, 17 bp, synthetic construct
  source 1..17: mol_type = other DNA
catgagccagctgggca

SEQ ID NO: 114672 - DNA, 17 bp, synthetic construct
  source 1..17: mol_type = other DNA
atgagccagctgggcat

SEQ ID NO: 114673 - DNA, 17 bp, synthetic construct
  source 1..17: mol_type = other DNA
tgagccagctgggcatg

SEQ ID NO: 114674 - DNA, 17 bp, synthetic construct
  source 1..17: mol_type = other DNA
gagccagctgggcatgg

SEQ ID NO: 114675 - DNA, 17 bp, synthetic construct
  source 1..17: mol_type = other DNA
agccagctgggcatggt

SEQ ID NO: 114676 - DNA, 17 bp, synthetic construct
  source 1..17: mol_type = other DNA
gccagctgggcatggtg

SEQ ID NO: 114677 - DNA, 17 bp, synthetic construct
  source 1..17: mol_type = other DNA
ccagctgggcatggtgg

SEQ ID NO: 114678 - DNA, 17 bp, synthetic construct
  source 1..17: mol_type = other DNA
cagctgggcatggtggg

SEQ ID NO: 114679 - DNA, 17 bp, synthetic construct
  source 1..17: mol_type = other DNA
agctgggcatggtgggg

SEQ ID NO: 114680 - DNA, 17 bp, synthetic construct
  source 1..17: mol_type = other DNA
gctgggcatggtgggga

SEQ ID NO: 114681 - DNA, 17 bp, synthetic construct
  source 1..17: mol_type = other DNA
ctgggcatggtggggaa

SEQ ID NO: 114682 - DNA, 17 bp, synthetic construct
  source 1..17: mol_type = other DNA
tgggcatggtggggaaa

SEQ ID NO: 114683 - DNA, 17 bp, synthetic construct
  source 1..17: mol_type = other DNA
gggcatggtggggaaac

SEQ ID NO: 114684 - DNA, 17 bp, synthetic construct
  source 1..17: mol_type = other DNA
ggcatggtggggaaact

SEQ ID NO: 114685 - DNA, 17 bp, synthetic construct
  source 1..17: mol_type = other DNA
gcatggtggggaaactg

SEQ ID NO: 114686 - DNA, 17 bp, synthetic construct
  source 1..17: mol_type = other DNA
catggtggggaaactga

SEQ ID NO: 114687 - DNA, 17 bp, synthetic construct
  source 1..17: mol_type = other DNA
atggtggggaaactgag

SEQ ID NO: 114688 - DNA, 17 bp, synthetic construct
  source 1..17: mol_type = other DNA
tggtggggaaactgagg

SEQ ID NO: 114689 - DNA, 17 bp, synthetic construct
  source 1..17: mol_type = other DNA
ggtggggaaactgaggc

SEQ ID NO: 114690 - DNA, 17 bp, synthetic construct
  source 1..17: mol_type = other DNA
gtggggaaactgaggcc

SEQ ID NO: 114691 - DNA, 17 bp, synthetic construct
  source 1..17: mol_type = other DNA
tggggaaactgaggccc

SEQ ID NO: 114692 - DNA, 17 bp, synthetic construct
  source 1..17: mol_type = other DNA
ggggaaactgaggccca

SEQ ID NO: 114693 - DNA, 17 bp, synthetic construct
  source 1..17: mol_type = other DNA
gggaaactgaggcccag

SEQ ID NO: 114694 - DNA, 17 bp, synthetic construct
  source 1..17: mol_type = other DNA
ggaaactgaggcccaga

SEQ ID NO: 114695 - DNA, 17 bp, synthetic construct
  source 1..17: mol_type = other DNA
gaaactgaggcccagag

SEQ ID NO: 114696 - DNA, 17 bp, synthetic construct
  source 1..17: mol_type = other DNA
aaactgaggcccagagg

SEQ ID NO: 114697 - DNA, 17 bp, synthetic construct
  source 1..17: mol_type = other DNA
aactgaggcccagaggt

SEQ ID NO: 114698 - DNA, 17 bp, synthetic construct
  source 1..17: mol_type = other DNA
actgaggcccagaggtg

SEQ ID NO: 114699 - DNA, 17 bp, synthetic construct
  source 1..17: mol_type = other DNA
ctgaggcccagaggtgc

SEQ ID NO: 114700 - DNA, 17 bp, synthetic construct
  source 1..17: mol_type = other DNA
tgaggcccagaggtgct

SEQ ID NO: 114701 - DNA, 17 bp, synthetic construct
  source 1..17: mol_type = other DNA
gaggcccagaggtgctt

SEQ ID NO: 114702 - DNA, 17 bp, synthetic construct
  source 1..17: mol_type = other DNA
aggcccagaggtgcttg

SEQ ID NO: 114703 - DNA, 17 bp, synthetic construct
  source 1..17: mol_type = other DNA
ggcccagaggtgcttgg

SEQ ID NO: 114704 - DNA, 17 bp, synthetic construct
  source 1..17: mol_type = other DNA
gcccagaggtgcttggt

SEQ ID NO: 114705 - DNA, 17 bp, synthetic construct
  source 1..17: mol_type = other DNA
cccagaggtgcttggtg

SEQ ID NO: 114706 - DNA, 17 bp, synthetic construct
  source 1..17: mol_type = other DNA
ccagaggtgcttggtgt

SEQ ID NO: 114707 - DNA, 17 bp, synthetic construct
  source 1..17: mol_type = other DNA
cagaggtgcttggtgtt

SEQ ID NO: 114708 - DNA, 17 bp, synthetic construct
  source 1..17: mol_type = other DNA
agaggtgcttggtgttc

SEQ ID NO: 114709 - DNA, 17 bp, synthetic construct
  source 1..17: mol_type = other DNA
gaggtgcttggtgttca

SEQ ID NO: 114710 - DNA, 17 bp, synthetic construct
  source 1..17: mol_type = other DNA
aggtgcttggtgttcat

SEQ ID NO: 114711 - DNA, 17 bp, synthetic construct
  source 1..17: mol_type = other DNA
ggtgcttggtgttcatc

SEQ ID NO: 114712 - DNA, 17 bp, synthetic construct
  source 1..17: mol_type = other DNA
gtgcttggtgttcatcc

SEQ ID NO: 114713 - DNA, 17 bp, synthetic construct
  source 1..17: mol_type = other DNA
tgcttggtgttcatcca

SEQ ID NO: 114714 - DNA, 17 bp, synthetic construct
  source 1..17: mol_type = other DNA
gcttggtgttcatccaa

SEQ ID NO: 114715 - DNA, 17 bp, synthetic construct
  source 1..17: mol_type = other DNA
cttggtgttcatccaag

SEQ ID NO: 114716 - DNA, 17 bp, synthetic construct
  source 1..17: mol_type = other DNA
ttggtgttcatccaagc

SEQ ID NO: 114717 - DNA, 17 bp, synthetic construct
  source 1..17: mol_type = other DNA
tggtgttcatccaagcg

SEQ ID NO: 114718 - DNA, 17 bp, synthetic construct
  source 1..17: mol_type = other DNA
ggtgttcatccaagcga

SEQ ID NO: 114719 - DNA, 17 bp, synthetic construct
  source 1..17: mol_type = other DNA
gtgttcatccaagcgag

SEQ ID NO: 114720 - DNA, 17 bp, synthetic construct
  source 1..17: mol_type = other DNA
tgttcatccaagcgagt

SEQ ID NO: 114721 - DNA, 17 bp, synthetic construct
  source 1..17: mol_type = other DNA
gttcatccaagcgagtg

SEQ ID NO: 114722 - DNA, 17 bp, synthetic construct
  source 1..17: mol_type = other DNA
ttcatccaagcgagtgc

SEQ ID NO: 114723 - DNA, 17 bp, synthetic construct
  source 1..17: mol_type = other DNA
tcatccaagcgagtgca

SEQ ID NO: 114724 - DNA, 17 bp, synthetic construct
  source 1..17: mol_type = other DNA
catccaagcgagtgcag

SEQ ID NO: 114725 - DNA, 17 bp, synthetic construct
  source 1..17: mol_type = other DNA
atccaagcgagtgcagc

SEQ ID NO: 114726 - DNA, 17 bp, synthetic construct
  source 1..17: mol_type = other DNA
tccaagcgagtgcagct

SEQ ID NO: 114727 - DNA, 17 bp, synthetic construct
  source 1..17: mol_type = other DNA
ccaagcgagtgcagctc

SEQ ID NO: 114728 - DNA, 17 bp, synthetic construct
  source 1..17: mol_type = other DNA
caagcgagtgcagctca

SEQ ID NO: 114729 - DNA, 17 bp, synthetic construct
  source 1..17: mol_type = other DNA
aagcgagtgcagctcag

SEQ ID NO: 114730 - DNA, 17 bp, synthetic construct
  source 1..17: mol_type = other DNA
agcgagtgcagctcagg

SEQ ID NO: 114731 - DNA, 17 bp, synthetic construct
  source 1..17: mol_type = other DNA
gcgagtgcagctcaggg

SEQ ID NO: 114732 - DNA, 17 bp, synthetic construct
  source 1..17: mol_type = other DNA
cgagtgcagctcagggc

SEQ ID NO: 114733 - DNA, 17 bp, synthetic construct
  source 1..17: mol_type = other DNA
gagtgcagctcagggcg

SEQ ID NO: 114734 - DNA, 17 bp, synthetic construct
  source 1..17: mol_type = other DNA
agtgcagctcagggcgg

SEQ ID NO: 114735 - DNA, 17 bp, synthetic construct
  source 1..17: mol_type = other DNA
gtgcagctcagggcggg

SEQ ID NO: 114736 - DNA, 17 bp, synthetic construct
  source 1..17: mol_type = other DNA
tgcagctcagggcgggg

SEQ ID NO: 114737 - DNA, 17 bp, synthetic construct
  source 1..17: mol_type = other DNA
gcagctcagggcggggg

SEQ ID NO: 114738 - DNA, 17 bp, synthetic construct
  source 1..17: mol_type = other DNA
cagctcagggcgggggc

SEQ ID NO: 114739 - DNA, 17 bp, synthetic construct
  source 1..17: mol_type = other DNA
agctcagggcgggggcg

SEQ ID NO: 114740 - DNA, 17 bp, synthetic construct
  source 1..17: mol_type = other DNA
gctcagggcgggggcgg

SEQ ID NO: 114741 - DNA, 17 bp, synthetic construct
  source 1..17: mol_type = other DNA
ctcagggcgggggcggt

SEQ ID NO: 114742 - DNA, 17 bp, synthetic construct
  source 1..17: mol_type = other DNA
tcagggcgggggcggtg

SEQ ID NO: 114743 - DNA, 17 bp, synthetic construct
  source 1..17: mol_type = other DNA
cagggcgggggcggtgt

SEQ ID NO: 114744 - DNA, 17 bp, synthetic construct
  source 1..17: mol_type = other DNA
agggcgggggcggtgtc

SEQ ID NO: 114745 - DNA, 17 bp, synthetic construct
  source 1..17: mol_type = other DNA
gggcgggggcggtgtcc

SEQ ID NO: 114746 - DNA, 17 bp, synthetic construct
  source 1..17: mol_type = other DNA
ggcgggggcggtgtcct

SEQ ID NO: 114747 - DNA, 17 bp, synthetic construct
  source 1..17: mol_type = other DNA
gcgggggcggtgtcctg

SEQ ID NO: 114748 - DNA, 17 bp, synthetic construct
  source 1..17: mol_type = other DNA
cgggggcggtgtcctgg

SEQ ID NO: 114749 - DNA, 17 bp, synthetic construct
  source 1..17: mol_type = other DNA
gggggcggtgtcctgga

SEQ ID NO: 114750 - DNA, 17 bp, synthetic construct
  source 1..17: mol_type = other DNA
ggggcggtgtcctggag

SEQ ID NO: 114751 - DNA, 17 bp, synthetic construct
  source 1..17: mol_type = other DNA
gggcggtgtcctggagc

SEQ ID NO: 114752 - DNA, 17 bp, synthetic construct
  source 1..17: mol_type = other DNA
ggcggtgtcctggagca

SEQ ID NO: 114753 - DNA, 17 bp, synthetic construct
  source 1..17: mol_type = other DNA
gcggtgtcctggagcag

SEQ ID NO: 114754 - DNA, 17 bp, synthetic construct
  source 1..17: mol_type = other DNA
cggtgtcctggagcagg

SEQ ID NO: 114755 - DNA, 17 bp, synthetic construct
  source 1..17: mol_type = other DNA
ggtgtcctggagcagga

SEQ ID NO: 114756 - DNA, 17 bp, synthetic construct
  source 1..17: mol_type = other DNA
gtgtcctggagcaggaa

SEQ ID NO: 114757 - DNA, 17 bp, synthetic construct
  source 1..17: mol_type = other DNA
tgtcctggagcaggaat

SEQ ID NO: 114758 - DNA, 17 bp, synthetic construct
  source 1..17: mol_type = other DNA
gtcctggagcaggaatt

SEQ ID NO: 114759 - DNA, 17 bp, synthetic construct
  source 1..17: mol_type = other DNA
tcctggagcaggaattc

SEQ ID NO: 114760 - DNA, 17 bp, synthetic construct
  source 1..17: mol_type = other DNA
cctggagcaggaattcc

SEQ ID NO: 114761 - DNA, 17 bp, synthetic construct
  source 1..17: mol_type = other DNA
ctggagcaggaattcct

SEQ ID NO: 114762 - DNA, 17 bp, synthetic construct
  source 1..17: mol_type = other DNA
tggagcaggaattcctc

SEQ ID NO: 114763 - DNA, 17 bp, synthetic construct
  source 1..17: mol_type = other DNA
ggagcaggaattcctcc

SEQ ID NO: 114764 - DNA, 17 bp, synthetic construct
  source 1..17: mol_type = other DNA
gagcaggaattcctccc

SEQ ID NO: 114765 - DNA, 17 bp, synthetic construct
  source 1..17: mol_type = other DNA
agcaggaattcctcccc

SEQ ID NO: 114766 - DNA, 17 bp, synthetic construct
  source 1..17: mol_type = other DNA
gcaggaattcctcccca

SEQ ID NO: 114767 - DNA, 17 bp, synthetic construct
  source 1..17: mol_type = other DNA
caggaattcctccccaa

SEQ ID NO: 114768 - DNA, 17 bp, synthetic construct
  source 1..17: mol_type = other DNA
aggaattcctccccaag

SEQ ID NO: 114769 - DNA, 17 bp, synthetic construct
  source 1..17: mol_type = other DNA
ggaattcctccccaagg

SEQ ID NO: 114770 - DNA, 17 bp, synthetic construct
  source 1..17: mol_type = other DNA
gaattcctccccaaggg

SEQ ID NO: 114771 - DNA, 17 bp, synthetic construct
  source 1..17: mol_type = other DNA
aattcctccccaaggga

SEQ ID NO: 114772 - DNA, 17 bp, synthetic construct
  source 1..17: mol_type = other DNA
attcctccccaagggag

SEQ ID NO: 114773 - DNA, 17 bp, synthetic construct
  source 1..17: mol_type = other DNA
ttcctccccaagggagg

SEQ ID NO: 114774 - DNA, 17 bp, synthetic construct
  source 1..17: mol_type = other DNA
tcctccccaagggaggc

SEQ ID NO: 114775 - DNA, 17 bp, synthetic construct
  source 1..17: mol_type = other DNA
cctccccaagggaggca

SEQ ID NO: 114776 - DNA, 17 bp, synthetic construct
  source 1..17: mol_type = other DNA
ctccccaagggaggcag

SEQ ID NO: 114777 - DNA, 17 bp, synthetic construct
  source 1..17: mol_type = other DNA
tccccaagggaggcagc

SEQ ID NO: 114778 - DNA, 17 bp, synthetic construct
  source 1..17: mol_type = other DNA
ccccaagggaggcagct

SEQ ID NO: 114779 - DNA, 17 bp, synthetic construct
  source 1..17: mol_type = other DNA
cccaagggaggcagctt

SEQ ID NO: 114780 - DNA, 17 bp, synthetic construct
  source 1..17: mol_type = other DNA
ccaagggaggcagcttg

SEQ ID NO: 114781 - DNA, 17 bp, synthetic construct
  source 1..17: mol_type = other DNA
caagggaggcagcttgt

SEQ ID NO: 114782 - DNA, 17 bp, synthetic construct
  source 1..17: mol_type = other DNA
aagggaggcagcttgtc

SEQ ID NO: 114783 - DNA, 17 bp, synthetic construct
  source 1..17: mol_type = other DNA
agggaggcagcttgtcc

SEQ ID NO: 114784 - DNA, 17 bp, synthetic construct
  source 1..17: mol_type = other DNA
gggaggcagcttgtccc

SEQ ID NO: 114785 - DNA, 17 bp, synthetic construct
  source 1..17: mol_type = other DNA
ggaggcagcttgtcccc

SEQ ID NO: 114786 - DNA, 17 bp, synthetic construct
  source 1..17: mol_type = other DNA
gaggcagcttgtcccca

SEQ ID NO: 114787 - DNA, 17 bp, synthetic construct
  source 1..17: mol_type = other DNA
aggcagcttgtccccaa

SEQ ID NO: 114788 - DNA, 17 bp, synthetic construct
  source 1..17: mol_type = other DNA
ggcagcttgtccccaag

SEQ ID NO: 114789 - DNA, 17 bp, synthetic construct
  source 1..17: mol_type = other DNA
gcagcttgtccccaagg

SEQ ID NO: 114790 - DNA, 17 bp, synthetic construct
  source 1..17: mol_type = other DNA
cagcttgtccccaaggc

SEQ ID NO: 114791 - DNA, 17 bp, synthetic construct
  source 1..17: mol_type = other DNA
agcttgtccccaaggcc

SEQ ID NO: 114792 - DNA, 17 bp, synthetic construct
  source 1..17: mol_type = other DNA
gcttgtccccaaggccg

SEQ ID NO: 114793 - DNA, 17 bp, synthetic construct
  source 1..17: mol_type = other DNA
cttgtccccaaggccgg

SEQ ID NO: 114794 - DNA, 17 bp, synthetic construct
  source 1..17: mol_type = other DNA
ttgtccccaaggccggt

SEQ ID NO: 114795 - DNA, 17 bp, synthetic construct
  source 1..17: mol_type = other DNA
tgtccccaaggccggtg

SEQ ID NO: 114796 - DNA, 17 bp, synthetic construct
  source 1..17: mol_type = other DNA
gtccccaaggccggtgt

SEQ ID NO: 114797 - DNA, 17 bp, synthetic construct
  source 1..17: mol_type = other DNA
tccccaaggccggtgtc

SEQ ID NO: 114798 - DNA, 17 bp, synthetic construct
  source 1..17: mol_type = other DNA
ccccaaggccggtgtct

SEQ ID NO: 114799 - DNA, 17 bp, synthetic construct
  source 1..17: mol_type = other DNA
cccaaggccggtgtctt

SEQ ID NO: 114800 - DNA, 17 bp, synthetic construct
  source 1..17: mol_type = other DNA
ccaaggccggtgtcttc

SEQ ID NO: 114801 - DNA, 17 bp, synthetic construct
  source 1..17: mol_type = other DNA
caaggccggtgtcttct

SEQ ID NO: 114802 - DNA, 17 bp, synthetic construct
  source 1..17: mol_type = other DNA
aaggccggtgtcttctg

SEQ ID NO: 114803 - DNA, 17 bp, synthetic construct
  source 1..17: mol_type = other DNA
aggccggtgtcttctga

SEQ ID NO: 114804 - DNA, 17 bp, synthetic construct
  source 1..17: mol_type = other DNA
ggccggtgtcttctgac

SEQ ID NO: 114805 - DNA, 17 bp, synthetic construct
  source 1..17: mol_type = other DNA
gccggtgtcttctgacc

SEQ ID NO: 114806 - DNA, 17 bp, synthetic construct
  source 1..17: mol_type = other DNA
ccggtgtcttctgacct

SEQ ID NO: 114807 - DNA, 17 bp, synthetic construct
  source 1..17: mol_type = other DNA
cggtgtcttctgacctt

SEQ ID NO: 114808 - DNA, 17 bp, synthetic construct
  source 1..17: mol_type = other DNA
ggtgtcttctgaccttg

SEQ ID NO: 114809 - DNA, 17 bp, synthetic construct
  source 1..17: mol_type = other DNA
gtgtcttctgaccttgg

SEQ ID NO: 114810 - DNA, 17 bp, synthetic construct
  source 1..17: mol_type = other DNA
tgtcttctgaccttggt

SEQ ID NO: 114811 - DNA, 17 bp, synthetic construct
  source 1..17: mol_type = other DNA
gtcttctgaccttggtg

SEQ ID NO: 114812 - DNA, 17 bp, synthetic construct
  source 1..17: mol_type = other DNA
tcttctgaccttggtgt

SEQ ID NO: 114813 - DNA, 17 bp, synthetic construct
  source 1..17: mol_type = other DNA
cttctgaccttggtgtc

SEQ ID NO: 114814 - DNA, 17 bp, synthetic construct
  source 1..17: mol_type = other DNA
ttctgaccttggtgtcc

SEQ ID NO: 114815 - DNA, 17 bp, synthetic construct
  source 1..17: mol_type = other DNA
tctgaccttggtgtccc

SEQ ID NO: 114816 - DNA, 17 bp, synthetic construct
  source 1..17: mol_type = other DNA
ctgaccttggtgtcccc

SEQ ID NO: 114817 - DNA, 17 bp, synthetic construct
  source 1..17: mol_type = other DNA
tgaccttggtgtccccc

SEQ ID NO: 114818 - DNA, 17 bp, synthetic construct
  source 1..17: mol_type = other DNA
gaccttggtgtcccccg

SEQ ID NO: 114819 - DNA, 17 bp, synthetic construct
  source 1..17: mol_type = other DNA
accttggtgtcccccgt

SEQ ID NO: 114820 - DNA, 17 bp, synthetic construct
  source 1..17: mol_type = other DNA
ccttggtgtcccccgtg

SEQ ID NO: 114821 - DNA, 17 bp, synthetic construct
  source 1..17: mol_type = other DNA
cttggtgtcccccgtgc

SEQ ID NO: 114822 - DNA, 17 bp, synthetic construct
  source 1..17: mol_type = other DNA
ttggtgtcccccgtgca

SEQ ID NO: 114823 - DNA, 17 bp, synthetic construct
  source 1..17: mol_type = other DNA
tggtgtcccccgtgcat

SEQ ID NO: 114824 - DNA, 17 bp, synthetic construct
  source 1..17: mol_type = other DNA
ggtgtcccccgtgcatg

SEQ ID NO: 114825 - DNA, 17 bp, synthetic construct
  source 1..17: mol_type = other DNA
gtgtcccccgtgcatgg

SEQ ID NO: 114826 - DNA, 17 bp, synthetic construct
  source 1..17: mol_type = other DNA
tgtcccccgtgcatggg

SEQ ID NO: 114827 - DNA, 17 bp, synthetic construct
  source 1..17: mol_type = other DNA
gtcccccgtgcatgggc

SEQ ID NO: 114828 - DNA, 17 bp, synthetic construct
  source 1..17: mol_type = other DNA
tcccccgtgcatgggcc

SEQ ID NO: 114829 - DNA, 17 bp, synthetic construct
  source 1..17: mol_type = other DNA
cccccgtgcatgggccg

SEQ ID NO: 114830 - DNA, 17 bp, synthetic construct
  source 1..17: mol_type = other DNA
ccccgtgcatgggccgg

SEQ ID NO: 114831 - DNA, 17 bp, synthetic construct
  source 1..17: mol_type = other DNA
cccgtgcatgggccggc

SEQ ID NO: 114832 - DNA, 17 bp, synthetic construct
  source 1..17: mol_type = other DNA
ccgtgcatgggccggcc

SEQ ID NO: 114833 - DNA, 17 bp, synthetic construct
  source 1..17: mol_type = other DNA
cgtgcatgggccggccc

SEQ ID NO: 114834 - DNA, 17 bp, synthetic construct
  source 1..17: mol_type = other DNA
gtgcatgggccggccct

SEQ ID NO: 114835 - DNA, 17 bp, synthetic construct
  source 1..17: mol_type = other DNA
tgcatgggccggccctg

SEQ ID NO: 114836 - DNA, 17 bp, synthetic construct
  source 1..17: mol_type = other DNA
gcatgggccggccctgc

SEQ ID NO: 114837 - DNA, 17 bp, synthetic construct
  source 1..17: mol_type = other DNA
catgggccggccctgcc

SEQ ID NO: 114838 - DNA, 17 bp, synthetic construct
  source 1..17: mol_type = other DNA
atgggccggccctgcct

SEQ ID NO: 114839 - DNA, 17 bp, synthetic construct
  source 1..17: mol_type = other DNA
tgggccggccctgcctc

SEQ ID NO: 114840 - DNA, 17 bp, synthetic construct
  source 1..17: mol_type = other DNA
gggccggccctgcctca

SEQ ID NO: 114841 - DNA, 17 bp, synthetic construct
  source 1..17: mol_type = other DNA
ggccggccctgcctcac

SEQ ID NO: 114842 - DNA, 17 bp, synthetic construct
  source 1..17: mol_type = other DNA
gccggccctgcctcacg

SEQ ID NO: 114843 - DNA, 17 bp, synthetic construct
  source 1..17: mol_type = other DNA
ccggccctgcctcacgc

SEQ ID NO: 114844 - DNA, 17 bp, synthetic construct
  source 1..17: mol_type = other DNA
cggccctgcctcacgcc

SEQ ID NO: 114845 - DNA, 17 bp, synthetic construct
  source 1..17: mol_type = other DNA
ggccctgcctcacgccg

SEQ ID NO: 114846 - DNA, 17 bp, synthetic construct
  source 1..17: mol_type = other DNA
gccctgcctcacgccgc

SEQ ID NO: 114847 - DNA, 17 bp, synthetic construct
  source 1..17: mol_type = other DNA
ccctgcctcacgccgcg

SEQ ID NO: 114848 - DNA, 17 bp, synthetic construct
  source 1..17: mol_type = other DNA
cctgcctcacgccgcgc

SEQ ID NO: 114849 - DNA, 17 bp, synthetic construct
  source 1..17: mol_type = other DNA
ctgcctcacgccgcgcc

SEQ ID NO: 114850 - DNA, 17 bp, synthetic construct
  source 1..17: mol_type = other DNA
tgcctcacgccgcgccc

SEQ ID NO: 114851 - DNA, 17 bp, synthetic construct
  source 1..17: mol_type = other DNA
gcctcacgccgcgcccc

SEQ ID NO: 114852 - DNA, 17 bp, synthetic construct
  source 1..17: mol_type = other DNA
cctcacgccgcgcccca

SEQ ID NO: 114853 - DNA, 17 bp, synthetic construct
  source 1..17: mol_type = other DNA
ctcacgccgcgccccac

SEQ ID NO: 114854 - DNA, 17 bp, synthetic construct
  source 1..17: mol_type = other DNA
tcacgccgcgccccaca

SEQ ID NO: 114855 - DNA, 17 bp, synthetic construct
  source 1..17: mol_type = other DNA
cacgccgcgccccacag

SEQ ID NO: 114856 - DNA, 17 bp, synthetic construct
  source 1..17: mol_type = other DNA
acgccgcgccccacagg

SEQ ID NO: 114857 - DNA, 17 bp, synthetic construct
  source 1..17: mol_type = other DNA
cgccgcgccccacaggc

SEQ ID NO: 114858 - DNA, 17 bp, synthetic construct
  source 1..17: mol_type = other DNA
gccgcgccccacaggca

SEQ ID NO: 114859 - DNA, 17 bp, synthetic construct
  source 1..17: mol_type = other DNA
ccgcgccccacaggcac

SEQ ID NO: 114860 - DNA, 17 bp, synthetic construct
  source 1..17: mol_type = other DNA
cgcgccccacaggcacg

SEQ ID NO: 114861 - DNA, 17 bp, synthetic construct
  source 1..17: mol_type = other DNA
gcgccccacaggcacgg

SEQ ID NO: 114862 - DNA, 17 bp, synthetic construct
  source 1..17: mol_type = other DNA
cgccccacaggcacggt

SEQ ID NO: 114863 - DNA, 17 bp, synthetic construct
  source 1..17: mol_type = other DNA
gccccacaggcacggtg

SEQ ID NO: 114864 - DNA, 17 bp, synthetic construct
  source 1..17: mol_type = other DNA
ccccacaggcacggtgc

SEQ ID NO: 114865 - DNA, 17 bp, synthetic construct
  source 1..17: mol_type = other DNA
cccacaggcacggtgct

SEQ ID NO: 114866 - DNA, 17 bp, synthetic construct
  source 1..17: mol_type = other DNA
ccacaggcacggtgctg

SEQ ID NO: 114867 - DNA, 17 bp, synthetic construct
  source 1..17: mol_type = other DNA
cacaggcacggtgctgg

SEQ ID NO: 114868 - DNA, 17 bp, synthetic construct
  source 1..17: mol_type = other DNA
acaggcacggtgctgga

SEQ ID NO: 114869 - DNA, 17 bp, synthetic construct
  source 1..17: mol_type = other DNA
caggcacggtgctggat

SEQ ID NO: 114870 - DNA, 17 bp, synthetic construct
  source 1..17: mol_type = other DNA
aggcacggtgctggatg

SEQ ID NO: 114871 - DNA, 17 bp, synthetic construct
  source 1..17: mol_type = other DNA
ggcacggtgctggatga

SEQ ID NO: 114872 - DNA, 17 bp, synthetic construct
  source 1..17: mol_type = other DNA
gcacggtgctggatgac

SEQ ID NO: 114873 - DNA, 17 bp, synthetic construct
  source 1..17: mol_type = other DNA
cacggtgctggatgaca

SEQ ID NO: 114874 - DNA, 17 bp, synthetic construct
  source 1..17: mol_type = other DNA
acggtgctggatgacat

SEQ ID NO: 114875 - DNA, 17 bp, synthetic construct
  source 1..17: mol_type = other DNA
cggtgctggatgacatc

SEQ ID NO: 114876 - DNA, 17 bp, synthetic construct
  source 1..17: mol_type = other DNA
ggtgctggatgacatca

SEQ ID NO: 114877 - DNA, 17 bp, synthetic construct
  source 1..17: mol_type = other DNA
gtgctggatgacatcac

SEQ ID NO: 114878 - DNA, 17 bp, synthetic construct
  source 1..17: mol_type = other DNA
tgctggatgacatcacg

SEQ ID NO: 114879 - DNA, 17 bp, synthetic construct
  source 1..17: mol_type = other DNA
gctggatgacatcacgc

SEQ ID NO: 114880 - DNA, 17 bp, synthetic construct
  source 1..17: mol_type = other DNA
ctggatgacatcacgca

SEQ ID NO: 114881 - DNA, 17 bp, synthetic construct
  source 1..17: mol_type = other DNA
tggatgacatcacgcac

SEQ ID NO: 114882 - DNA, 17 bp, synthetic construct
  source 1..17: mol_type = other DNA
ggatgacatcacgcact

SEQ ID NO: 114883 - DNA, 17 bp, synthetic construct
  source 1..17: mol_type = other DNA
gatgacatcacgcactc

SEQ ID NO: 114884 - DNA, 17 bp, synthetic construct
  source 1..17: mol_type = other DNA
atgacatcacgcactct

SEQ ID NO: 114885 - DNA, 17 bp, synthetic construct
  source 1..17: mol_type = other DNA
tgacatcacgcactctg

SEQ ID NO: 114886 - DNA, 17 bp, synthetic construct
  source 1..17: mol_type = other DNA
gacatcacgcactctgg

SEQ ID NO: 114887 - DNA, 17 bp, synthetic construct
  source 1..17: mol_type = other DNA
acatcacgcactctggc

SEQ ID NO: 114888 - DNA, 17 bp, synthetic construct
  source 1..17: mol_type = other DNA
catcacgcactctggct

SEQ ID NO: 114889 - DNA, 17 bp, synthetic construct
  source 1..17: mol_type = other DNA
atcacgcactctggctg

SEQ ID NO: 114890 - DNA, 17 bp, synthetic construct
  source 1..17: mol_type = other DNA
tcacgcactctggctgc

SEQ ID NO: 114891 - DNA, 17 bp, synthetic construct
  source 1..17: mol_type = other DNA
cacgcactctggctgcc

SEQ ID NO: 114892 - DNA, 17 bp, synthetic construct
  source 1..17: mol_type = other DNA
acgcactctggctgcct

SEQ ID NO: 114893 - DNA, 17 bp, synthetic construct
  source 1..17: mol_type = other DNA
cgcactctggctgcctg

SEQ ID NO: 114894 - DNA, 17 bp, synthetic construct
  source 1..17: mol_type = other DNA
gcactctggctgcctgc

SEQ ID NO: 114895 - DNA, 17 bp, synthetic construct
  source 1..17: mol_type = other DNA
cactctggctgcctgcc

SEQ ID NO: 114896 - DNA, 17 bp, synthetic construct
  source 1..17: mol_type = other DNA
actctggctgcctgccc

SEQ ID NO: 114897 - DNA, 17 bp, synthetic construct
  source 1..17: mol_type = other DNA
ctctggctgcctgcccc

SEQ ID NO: 114898 - DNA, 17 bp, synthetic construct
  source 1..17: mol_type = other DNA
tctggctgcctgcccct

SEQ ID NO: 114899 - DNA, 17 bp, synthetic construct
  source 1..17: mol_type = other DNA
ctggctgcctgcccctc

SEQ ID NO: 114900 - DNA, 17 bp, synthetic construct
  source 1..17: mol_type = other DNA
tggctgcctgcccctcg

SEQ ID NO: 114901 - DNA, 17 bp, synthetic construct
  source 1..17: mol_type = other DNA
ggctgcctgcccctcgg

SEQ ID NO: 114902 - DNA, 17 bp, synthetic construct
  source 1..17: mol_type = other DNA
gctgcctgcccctcggg

SEQ ID NO: 114903 - DNA, 17 bp, synthetic construct
  source 1..17: mol_type = other DNA
ctgcctgcccctcgggc

SEQ ID NO: 114904 - DNA, 17 bp, synthetic construct
  source 1..17: mol_type = other DNA
tgcctgcccctcgggca

SEQ ID NO: 114905 - DNA, 17 bp, synthetic construct
  source 1..17: mol_type = other DNA
gcctgcccctcgggcag

SEQ ID NO: 114906 - DNA, 17 bp, synthetic construct
  source 1..17: mol_type = other DNA
cctgcccctcgggcagt

SEQ ID NO: 114907 - DNA, 17 bp, synthetic construct
  source 1..17: mol_type = other DNA
ctgcccctcgggcagtg

SEQ ID NO: 114908 - DNA, 17 bp, synthetic construct
  source 1..17: mol_type = other DNA
tgcccctcgggcagtgc

SEQ ID NO: 114909 - DNA, 17 bp, synthetic construct
  source 1..17: mol_type = other DNA
gcccctcgggcagtgcc

SEQ ID NO: 114910 - DNA, 17 bp, synthetic construct
  source 1..17: mol_type = other DNA
cccctcgggcagtgccc

SEQ ID NO: 114911 - DNA, 17 bp, synthetic construct
  source 1..17: mol_type = other DNA
ccctcgggcagtgcccc

SEQ ID NO: 114912 - DNA, 17 bp, synthetic construct
  source 1..17: mol_type = other DNA
cctcgggcagtgcccct

SEQ ID NO: 114913 - DNA, 17 bp, synthetic construct
  source 1..17: mol_type = other DNA
ctcgggcagtgcccctg

SEQ ID NO: 114914 - DNA, 17 bp, synthetic construct
  source 1..17: mol_type = other DNA
tcgggcagtgcccctgc

SEQ ID NO: 114915 - DNA, 17 bp, synthetic construct
  source 1..17: mol_type = other DNA
cgggcagtgcccctgca

SEQ ID NO: 114916 - DNA, 17 bp, synthetic construct
  source 1..17: mol_type = other DNA
gggcagtgcccctgcac

SEQ ID NO: 114917 - DNA, 17 bp, synthetic construct
  source 1..17: mol_type = other DNA
ggcagtgcccctgcacc

SEQ ID NO: 114918 - DNA, 17 bp, synthetic construct
  source 1..17: mol_type = other DNA
gcagtgcccctgcaccc

SEQ ID NO: 114919 - DNA, 17 bp, synthetic construct
  source 1..17: mol_type = other DNA
cagtgcccctgcaccca

SEQ ID NO: 114920 - DNA, 17 bp, synthetic construct
  source 1..17: mol_type = other DNA
agtgcccctgcacccac

SEQ ID NO: 114921 - DNA, 17 bp, synthetic construct
  source 1..17: mol_type = other DNA
gtgcccctgcacccacg

SEQ ID NO: 114922 - DNA, 17 bp, synthetic construct
  source 1..17: mol_type = other DNA
tgcccctgcacccacgg

SEQ ID NO: 114923 - DNA, 17 bp, synthetic construct
  source 1..17: mol_type = other DNA
gcccctgcacccacggc

SEQ ID NO: 114924 - DNA, 17 bp, synthetic construct
  source 1..17: mol_type = other DNA
cccctgcacccacggcg

SEQ ID NO: 114925 - DNA, 17 bp, synthetic construct
  source 1..17: mol_type = other DNA
ccctgcacccacggcgg

SEQ ID NO: 114926 - DNA, 17 bp, synthetic construct
  source 1..17: mol_type = other DNA
cctgcacccacggcggc

SEQ ID NO: 114927 - DNA, 17 bp, synthetic construct
  source 1..17: mol_type = other DNA
ctgcacccacggcggcc

SEQ ID NO: 114928 - DNA, 17 bp, synthetic construct
  source 1..17: mol_type = other DNA
tgcacccacggcggccg

SEQ ID NO: 114929 - DNA, 17 bp, synthetic construct
  source 1..17: mol_type = other DNA
gcacccacggcggccgc

SEQ ID NO: 114930 - DNA, 17 bp, synthetic construct
  source 1..17: mol_type = other DNA
cacccacggcggccgca

SEQ ID NO: 114931 - DNA, 17 bp, synthetic construct
  source 1..17: mol_type = other DNA
acccacggcggccgcac

SEQ ID NO: 114932 - DNA, 17 bp, synthetic construct
  source 1..17: mol_type = other DNA
cccacggcggccgcacc

SEQ ID NO: 114933 - DNA, 17 bp, synthetic construct
  source 1..17: mol_type = other DNA
ccacggcggccgcacct

SEQ ID NO: 114934 - DNA, 17 bp, synthetic construct
  source 1..17: mol_type = other DNA
cacggcggccgcaccta

SEQ ID NO: 114935 - DNA, 17 bp, synthetic construct
  source 1..17: mol_type = other DNA
acggcggccgcacctac

SEQ ID NO: 114936 - DNA, 17 bp, synthetic construct
  source 1..17: mol_type = other DNA
cggcggccgcacctaca

SEQ ID NO: 114937 - DNA, 17 bp, synthetic construct
  source 1..17: mol_type = other DNA
ggcggccgcacctacag

SEQ ID NO: 114938 - DNA, 17 bp, synthetic construct
  source 1..17: mol_type = other DNA
gcggccgcacctacagc

SEQ ID NO: 114939 - DNA, 17 bp, synthetic construct
  source 1..17: mol_type = other DNA
cggccgcacctacagcc

SEQ ID NO: 114940 - DNA, 17 bp, synthetic construct
  source 1..17: mol_type = other DNA
ggccgcacctacagccc

SEQ ID NO: 114941 - DNA, 17 bp, synthetic construct
  source 1..17: mol_type = other DNA
gccgcacctacagcccg

SEQ ID NO: 114942 - DNA, 17 bp, synthetic construct
  source 1..17: mol_type = other DNA
ccgcacctacagcccgg

SEQ ID NO: 114943 - DNA, 17 bp, synthetic construct
  source 1..17: mol_type = other DNA
cgcacctacagcccggg

SEQ ID NO: 114944 - DNA, 17 bp, synthetic construct
  source 1..17: mol_type = other DNA
gcacctacagcccgggc

SEQ ID NO: 114945 - DNA, 17 bp, synthetic construct
  source 1..17: mol_type = other DNA
cacctacagcccgggca

SEQ ID NO: 114946 - DNA, 17 bp, synthetic construct
  source 1..17: mol_type = other DNA
acctacagcccgggcac

SEQ ID NO: 114947 - DNA, 17 bp, synthetic construct
  source 1..17: mol_type = other DNA
cctacagcccgggcacc

SEQ ID NO: 114948 - DNA, 17 bp, synthetic construct
  source 1..17: mol_type = other DNA
ctacagcccgggcacct

SEQ ID NO: 114949 - DNA, 17 bp, synthetic construct
  source 1..17: mol_type = other DNA
tacagcccgggcacctc

SEQ ID NO: 114950 - DNA, 17 bp, synthetic construct
  source 1..17: mol_type = other DNA
acagcccgggcacctcc

SEQ ID NO: 114951 - DNA, 17 bp, synthetic construct
  source 1..17: mol_type = other DNA
cagcccgggcacctcct

SEQ ID NO: 114952 - DNA, 17 bp, synthetic construct
  source 1..17: mol_type = other DNA
agcccgggcacctcctt

SEQ ID NO: 114953 - DNA, 17 bp, synthetic construct
  source 1..17: mol_type = other DNA
gcccgggcacctccttc

SEQ ID NO: 114954 - DNA, 17 bp, synthetic construct
  source 1..17: mol_type = other DNA
cccgggcacctccttca

SEQ ID NO: 114955 - DNA, 17 bp, synthetic construct
  source 1..17: mol_type = other DNA
ccgggcacctccttcaa

SEQ ID NO: 114956 - DNA, 17 bp, synthetic construct
  source 1..17: mol_type = other DNA
cgggcacctccttcaac

SEQ ID NO: 114957 - DNA, 17 bp, synthetic construct
  source 1..17: mol_type = other DNA
gggcacctccttcaaca

SEQ ID NO: 114958 - DNA, 17 bp, synthetic construct
  source 1..17: mol_type = other DNA
ggcacctccttcaacac

SEQ ID NO: 114959 - DNA, 17 bp, synthetic construct
  source 1..17: mol_type = other DNA
gcacctccttcaacacc

SEQ ID NO: 114960 - DNA, 17 bp, synthetic construct
  source 1..17: mol_type = other DNA
cacctccttcaacacca

SEQ ID NO: 114961 - DNA, 17 bp, synthetic construct
  source 1..17: mol_type = other DNA
acctccttcaacaccac

SEQ ID NO: 114962 - DNA, 17 bp, synthetic construct
  source 1..17: mol_type = other DNA
cctccttcaacaccacc

SEQ ID NO: 114963 - DNA, 17 bp, synthetic construct
  source 1..17: mol_type = other DNA
ctccttcaacaccacct

SEQ ID NO: 114964 - DNA, 17 bp, synthetic construct
  source 1..17: mol_type = other DNA
tccttcaacaccacctg

SEQ ID NO: 114965 - DNA, 17 bp, synthetic construct
  source 1..17: mol_type = other DNA
ccttcaacaccacctgc

SEQ ID NO: 114966 - DNA, 17 bp, synthetic construct
  source 1..17: mol_type = other DNA
cttcaacaccacctgca

SEQ ID NO: 114967 - DNA, 17 bp, synthetic construct
  source 1..17: mol_type = other DNA
ttcaacaccacctgcag

SEQ ID NO: 114968 - DNA, 17 bp, synthetic construct
  source 1..17: mol_type = other DNA
tcaacaccacctgcagc

SEQ ID NO: 114969 - DNA, 17 bp, synthetic construct
  source 1..17: mol_type = other DNA
caacaccacctgcagct

SEQ ID NO: 114970 - DNA, 17 bp, synthetic construct
  source 1..17: mol_type = other DNA
aacaccacctgcagctc

SEQ ID NO: 114971 - DNA, 17 bp, synthetic construct
  source 1..17: mol_type = other DNA
acaccacctgcagctcc

SEQ ID NO: 114972 - DNA, 17 bp, synthetic construct
  source 1..17: mol_type = other DNA
caccacctgcagctcct

SEQ ID NO: 114973 - DNA, 17 bp, synthetic construct
  source 1..17: mol_type = other DNA
accacctgcagctcctg

SEQ ID NO: 114974 - DNA, 17 bp, synthetic construct
  source 1..17: mol_type = other DNA
ccacctgcagctcctgg

SEQ ID NO: 114975 - DNA, 17 bp, synthetic construct
  source 1..17: mol_type = other DNA
cacctgcagctcctggt

SEQ ID NO: 114976 - DNA, 17 bp, synthetic construct
  source 1..17: mol_type = other DNA
acctgcagctcctggta

SEQ ID NO: 114977 - DNA, 17 bp, synthetic construct
  source 1..17: mol_type = other DNA
cctgcagctcctggtac

SEQ ID NO: 114978 - DNA, 17 bp, synthetic construct
  source 1..17: mol_type = other DNA
ctgcagctcctggtact

SEQ ID NO: 114979 - DNA, 17 bp, synthetic construct
  source 1..17: mol_type = other DNA
tgcagctcctggtactt

SEQ ID NO: 114980 - DNA, 17 bp, synthetic construct
  source 1..17: mol_type = other DNA
gcagctcctggtactta

SEQ ID NO: 114981 - DNA, 17 bp, synthetic construct
  source 1..17: mol_type = other DNA
cagctcctggtacttat

SEQ ID NO: 114982 - DNA, 17 bp, synthetic construct
  source 1..17: mol_type = other DNA
agctcctggtacttatg

SEQ ID NO: 114983 - DNA, 17 bp, synthetic construct
  source 1..17: mol_type = other DNA
gctcctggtacttatga

SEQ ID NO: 114984 - DNA, 17 bp, synthetic construct
  source 1..17: mol_type = other DNA
ctcctggtacttatgag

SEQ ID NO: 114985 - DNA, 17 bp, synthetic construct
  source 1..17: mol_type = other DNA
tcctggtacttatgagc

SEQ ID NO: 114986 - DNA, 17 bp, synthetic construct
  source 1..17: mol_type = other DNA
cctggtacttatgagcc

SEQ ID NO: 114987 - DNA, 17 bp, synthetic construct
  source 1..17: mol_type = other DNA
ctggtacttatgagccc

SEQ ID NO: 114988 - DNA, 17 bp, synthetic construct
  source 1..17: mol_type = other DNA
tggtacttatgagccca

SEQ ID NO: 114989 - DNA, 17 bp, synthetic construct
  source 1..17: mol_type = other DNA
ggtacttatgagcccac

SEQ ID NO: 114990 - DNA, 17 bp, synthetic construct
  source 1..17: mol_type = other DNA
gtacttatgagcccacc

SEQ ID NO: 114991 - DNA, 17 bp, synthetic construct
  source 1..17: mol_type = other DNA
tacttatgagcccacca

SEQ ID NO: 114992 - DNA, 17 bp, synthetic construct
  source 1..17: mol_type = other DNA
acttatgagcccaccag

SEQ ID NO: 114993 - DNA, 17 bp, synthetic construct
  source 1..17: mol_type = other DNA
cttatgagcccaccagc

SEQ ID NO: 114994 - DNA, 17 bp, synthetic construct
  source 1..17: mol_type = other DNA
ttatgagcccaccagcc

SEQ ID NO: 114995 - DNA, 17 bp, synthetic construct
  source 1..17: mol_type = other DNA
tatgagcccaccagcct

SEQ ID NO: 114996 - DNA, 17 bp, synthetic construct
  source 1..17: mol_type = other DNA
atgagcccaccagcctc

SEQ ID NO: 114997 - DNA, 17 bp, synthetic construct
  source 1..17: mol_type = other DNA
tgagcccaccagcctcc

SEQ ID NO: 114998 - DNA, 17 bp, synthetic construct
  source 1..17: mol_type = other DNA
gagcccaccagcctccg

SEQ ID NO: 114999 - DNA, 17 bp, synthetic construct
  source 1..17: mol_type = other DNA
agcccaccagcctccgc

SEQ ID NO: 115000 - DNA, 17 bp, synthetic construct
  source 1..17: mol_type = other DNA
gcccaccagcctccgcc

SEQ ID NO: 115001 - DNA, 17 bp, synthetic construct
  source 1..17: mol_type = other DNA
cccaccagcctccgcct

SEQ ID NO: 115002 - DNA, 17 bp, synthetic construct
  source 1..17: mol_type = other DNA
ccaccagcctccgcctg

SEQ ID NO: 115003 - DNA, 17 bp, synthetic construct
  source 1..17: mol_type = other DNA
caccagcctccgcctgg

SEQ ID NO: 115004 - DNA, 17 bp, synthetic construct
  source 1..17: mol_type = other DNA
accagcctccgcctggg

SEQ ID NO: 115005 - DNA, 17 bp, synthetic construct
  source 1..17: mol_type = other DNA
ccagcctccgcctgggg

SEQ ID NO: 115006 - DNA, 17 bp, synthetic construct
  source 1..17: mol_type = other DNA
cagcctccgcctggggt

SEQ ID NO: 115007 - DNA, 17 bp, synthetic construct
  source 1..17: mol_type = other DNA
agcctccgcctggggtg

SEQ ID NO: 115008 - DNA, 17 bp, synthetic construct
  source 1..17: mol_type = other DNA
gcctccgcctggggtgg

SEQ ID NO: 115009 - DNA, 17 bp, synthetic construct
  source 1..17: mol_type = other DNA
cctccgcctggggtggg

SEQ ID NO: 115010 - DNA, 17 bp, synthetic construct
  source 1..17: mol_type = other DNA
ctccgcctggggtgggg

SEQ ID NO: 115011 - DNA, 17 bp, synthetic construct
  source 1..17: mol_type = other DNA
tccgcctggggtggggt

SEQ ID NO: 115012 - DNA, 17 bp, synthetic construct
  source 1..17: mol_type = other DNA
ccgcctggggtggggtg

SEQ ID NO: 115013 - DNA, 17 bp, synthetic construct
  source 1..17: mol_type = other DNA
cgcctggggtggggtgt

SEQ ID NO: 115014 - DNA, 17 bp, synthetic construct
  source 1..17: mol_type = other DNA
gcctggggtggggtgtg

SEQ ID NO: 115015 - DNA, 17 bp, synthetic construct
  source 1..17: mol_type = other DNA
cctggggtggggtgtgg

SEQ ID NO: 115016 - DNA, 17 bp, synthetic construct
  source 1..17: mol_type = other DNA
ctggggtggggtgtgga

SEQ ID NO: 115017 - DNA, 17 bp, synthetic construct
  source 1..17: mol_type = other DNA
tggggtggggtgtggag

SEQ ID NO: 115018 - DNA, 17 bp, synthetic construct
  source 1..17: mol_type = other DNA
ggggtggggtgtggagc

SEQ ID NO: 115019 - DNA, 17 bp, synthetic construct
  source 1..17: mol_type = other DNA
gggtggggtgtggagct

SEQ ID NO: 115020 - DNA, 17 bp, synthetic construct
  source 1..17: mol_type = other DNA
ggtggggtgtggagctc

SEQ ID NO: 115021 - DNA, 17 bp, synthetic construct
  source 1..17: mol_type = other DNA
gtggggtgtggagctcc

SEQ ID NO: 115022 - DNA, 17 bp, synthetic construct
  source 1..17: mol_type = other DNA
tggggtgtggagctcct

SEQ ID NO: 115023 - DNA, 17 bp, synthetic construct
  source 1..17: mol_type = other DNA
ggggtgtggagctcctg

SEQ ID NO: 115024 - DNA, 17 bp, synthetic construct
  source 1..17: mol_type = other DNA
gggtgtggagctcctgg

SEQ ID NO: 115025 - DNA, 17 bp, synthetic construct
  source 1..17: mol_type = other DNA
ggtgtggagctcctggt

SEQ ID NO: 115026 - DNA, 17 bp, synthetic construct
  source 1..17: mol_type = other DNA
gtgtggagctcctggta

SEQ ID NO: 115027 - DNA, 17 bp, synthetic construct
  source 1..17: mol_type = other DNA
tgtggagctcctggtat

SEQ ID NO: 115028 - DNA, 17 bp, synthetic construct
  source 1..17: mol_type = other DNA
gtggagctcctggtatt

SEQ ID NO: 115029 - DNA, 17 bp, synthetic construct
  source 1..17: mol_type = other DNA
tggagctcctggtattt

SEQ ID NO: 115030 - DNA, 17 bp, synthetic construct
  source 1..17: mol_type = other DNA
ggagctcctggtattta

SEQ ID NO: 115031 - DNA, 17 bp, synthetic construct
  source 1..17: mol_type = other DNA
gagctcctggtatttat

SEQ ID NO: 115032 - DNA, 17 bp, synthetic construct
  source 1..17: mol_type = other DNA
agctcctggtatttatg

SEQ ID NO: 115033 - DNA, 17 bp, synthetic construct
  source 1..17: mol_type = other DNA
gctcctggtatttatga

SEQ ID NO: 115034 - DNA, 17 bp, synthetic construct
  source 1..17: mol_type = other DNA
ctcctggtatttatgaa

SEQ ID NO: 115035 - DNA, 17 bp, synthetic construct
  source 1..17: mol_type = other DNA
tcctggtatttatgaac

SEQ ID NO: 115036 - DNA, 17 bp, synthetic construct
  source 1..17: mol_type = other DNA
cctggtatttatgaacc

SEQ ID NO: 115037 - DNA, 17 bp, synthetic construct
  source 1..17: mol_type = other DNA
ctggtatttatgaaccc

SEQ ID NO: 115038 - DNA, 17 bp, synthetic construct
  source 1..17: mol_type = other DNA
tggtatttatgaacccg

SEQ ID NO: 115039 - DNA, 17 bp, synthetic construct
  source 1..17: mol_type = other DNA
ggtatttatgaacccgc

SEQ ID NO: 115040 - DNA, 17 bp, synthetic construct
  source 1..17: mol_type = other DNA
gtatttatgaacccgcc

SEQ ID NO: 115041 - DNA, 17 bp, synthetic construct
  source 1..17: mol_type = other DNA
tatttatgaacccgcca

SEQ ID NO: 115042 - DNA, 17 bp, synthetic construct
  source 1..17: mol_type = other DNA
atttatgaacccgccag

SEQ ID NO: 115043 - DNA, 17 bp, synthetic construct
  source 1..17: mol_type = other DNA
tttatgaacccgccagc

SEQ ID NO: 115044 - DNA, 17 bp, synthetic construct
  source 1..17: mol_type = other DNA
ttatgaacccgccagcc

SEQ ID NO: 115045 - DNA, 17 bp, synthetic construct
  source 1..17: mol_type = other DNA
tatgaacccgccagcct

SEQ ID NO: 115046 - DNA, 17 bp, synthetic construct
  source 1..17: mol_type = other DNA
atgaacccgccagcctc

SEQ ID NO: 115047 - DNA, 17 bp, synthetic construct
  source 1..17: mol_type = other DNA
tgaacccgccagcctct

SEQ ID NO: 115048 - DNA, 17 bp, synthetic construct
  source 1..17: mol_type = other DNA
gaacccgccagcctctg

SEQ ID NO: 115049 - DNA, 17 bp, synthetic construct
  source 1..17: mol_type = other DNA
aacccgccagcctctgc

SEQ ID NO: 115050 - DNA, 17 bp, synthetic construct
  source 1..17: mol_type = other DNA
acccgccagcctctgcc

SEQ ID NO: 115051 - DNA, 17 bp, synthetic construct
  source 1..17: mol_type = other DNA
cccgccagcctctgcct

SEQ ID NO: 115052 - DNA, 17 bp, synthetic construct
  source 1..17: mol_type = other DNA
ccgccagcctctgcctg

SEQ ID NO: 115053 - DNA, 17 bp, synthetic construct
  source 1..17: mol_type = other DNA
cgccagcctctgcctgg

SEQ ID NO: 115054 - DNA, 17 bp, synthetic construct
  source 1..17: mol_type = other DNA
gccagcctctgcctggg

SEQ ID NO: 115055 - DNA, 17 bp, synthetic construct
  source 1..17: mol_type = other DNA
ccagcctctgcctgggg

SEQ ID NO: 115056 - DNA, 17 bp, synthetic construct
  source 1..17: mol_type = other DNA
cagcctctgcctggggt

SEQ ID NO: 115057 - DNA, 17 bp, synthetic construct
  source 1..17: mol_type = other DNA
agcctctgcctggggtg

SEQ ID NO: 115058 - DNA, 17 bp, synthetic construct
  source 1..17: mol_type = other DNA
gcctctgcctggggtgg

SEQ ID NO: 115059 - DNA, 17 bp, synthetic construct
  source 1..17: mol_type = other DNA
cctctgcctggggtggg

SEQ ID NO: 115060 - DNA, 17 bp, synthetic construct
  source 1..17: mol_type = other DNA
ctctgcctggggtgggg

SEQ ID NO: 115061 - DNA, 17 bp, synthetic construct
  source 1..17: mol_type = other DNA
tctgcctggggtggggg

SEQ ID NO: 115062 - DNA, 17 bp, synthetic construct
  source 1..17: mol_type = other DNA
ctgcctggggtgggggt

SEQ ID NO: 115063 - DNA, 17 bp, synthetic construct
  source 1..17: mol_type = other DNA
tgcctggggtgggggtg

SEQ ID NO: 115064 - DNA, 17 bp, synthetic construct
  source 1..17: mol_type = other DNA
gcctggggtgggggtgt

SEQ ID NO: 115065 - DNA, 17 bp, synthetic construct
  source 1..17: mol_type = other DNA
cctggggtgggggtgtg

SEQ ID NO: 115066 - DNA, 17 bp, synthetic construct
  source 1..17: mol_type = other DNA
ctggggtgggggtgtgg

SEQ ID NO: 115067 - DNA, 17 bp, synthetic construct
  source 1..17: mol_type = other DNA
tggggtgggggtgtgga

SEQ ID NO: 115068 - DNA, 17 bp, synthetic construct
  source 1..17: mol_type = other DNA
ggggtgggggtgtggag

SEQ ID NO: 115069 - DNA, 17 bp, synthetic construct
  source 1..17: mol_type = other DNA
gggtgggggtgtggagc

SEQ ID NO: 115070 - DNA, 17 bp, synthetic construct
  source 1..17: mol_type = other DNA
ggtgggggtgtggagct

SEQ ID NO: 115071 - DNA, 17 bp, synthetic construct
  source 1..17: mol_type = other DNA
gtgggggtgtggagctc

SEQ ID NO: 115072 - DNA, 17 bp, synthetic construct
  source 1..17: mol_type = other DNA
tgggggtgtggagctcc

SEQ ID NO: 115073 - DNA, 17 bp, synthetic construct
  source 1..17: mol_type = other DNA
gggggtgtggagctcct

SEQ ID NO: 115074 - DNA, 17 bp, synthetic construct
  source 1..17: mol_type = other DNA
ggggtgtggagctcctg

SEQ ID NO: 115075 - DNA, 17 bp, synthetic construct
  source 1..17: mol_type = other DNA
gggtgtggagctcctgg

SEQ ID NO: 115076 - DNA, 17 bp, synthetic construct
  source 1..17: mol_type = other DNA
ggtgtggagctcctggt

SEQ ID NO: 115077 - DNA, 17 bp, synthetic construct
  source 1..17: mol_type = other DNA
gtgtggagctcctggtg

SEQ ID NO: 115078 - DNA, 17 bp, synthetic construct
  source 1..17: mol_type = other DNA
tgtggagctcctggtgt

SEQ ID NO: 115079 - DNA, 17 bp, synthetic construct
  source 1..17: mol_type = other DNA
gtggagctcctggtgtg

SEQ ID NO: 115080 - DNA, 17 bp, synthetic construct
  source 1..17: mol_type = other DNA
tggagctcctggtgtgc

SEQ ID NO: 115081 - DNA, 17 bp, synthetic construct
  source 1..17: mol_type = other DNA
ggagctcctggtgtgca

SEQ ID NO: 115082 - DNA, 17 bp, synthetic construct
  source 1..17: mol_type = other DNA
gagctcctggtgtgcac

SEQ ID NO: 115083 - DNA, 17 bp, synthetic construct
  source 1..17: mol_type = other DNA
agctcctggtgtgcacc

SEQ ID NO: 115084 - DNA, 17 bp, synthetic construct
  source 1..17: mol_type = other DNA
gctcctggtgtgcaccc

SEQ ID NO: 115085 - DNA, 17 bp, synthetic construct
  source 1..17: mol_type = other DNA
ctcctggtgtgcaccca

SEQ ID NO: 115086 - DNA, 17 bp, synthetic construct
  source 1..17: mol_type = other DNA
tcctggtgtgcacccac

SEQ ID NO: 115087 - DNA, 17 bp, synthetic construct
  source 1..17: mol_type = other DNA
cctggtgtgcacccacc

SEQ ID NO: 115088 - DNA, 17 bp, synthetic construct
  source 1..17: mol_type = other DNA
ctggtgtgcacccacca

SEQ ID NO: 115089 - DNA, 17 bp, synthetic construct
  source 1..17: mol_type = other DNA
tggtgtgcacccaccag

SEQ ID NO: 115090 - DNA, 17 bp, synthetic construct
  source 1..17: mol_type = other DNA
ggtgtgcacccaccagc

SEQ ID NO: 115091 - DNA, 17 bp, synthetic construct
  source 1..17: mol_type = other DNA
gtgtgcacccaccagcc

SEQ ID NO: 115092 - DNA, 17 bp, synthetic construct
  source 1..17: mol_type = other DNA
tgtgcacccaccagcct

SEQ ID NO: 115093 - DNA, 17 bp, synthetic construct
  source 1..17: mol_type = other DNA
gtgcacccaccagcctc

SEQ ID NO: 115094 - DNA, 17 bp, synthetic construct
  source 1..17: mol_type = other DNA
tgcacccaccagcctcc

SEQ ID NO: 115095 - DNA, 17 bp, synthetic construct
  source 1..17: mol_type = other DNA
gcacccaccagcctccg

SEQ ID NO: 115096 - DNA, 17 bp, synthetic construct
  source 1..17: mol_type = other DNA
cacccaccagcctccgc

SEQ ID NO: 115097 - DNA, 17 bp, synthetic construct
  source 1..17: mol_type = other DNA
acccaccagcctccgcc

SEQ ID NO: 115098 - DNA, 17 bp, synthetic construct
  source 1..17: mol_type = other DNA
cccaccagcctccgcct

SEQ ID NO: 115099 - DNA, 17 bp, synthetic construct
  source 1..17: mol_type = other DNA
ccaccagcctccgcctg

SEQ ID NO: 115100 - DNA, 17 bp, synthetic construct
  source 1..17: mol_type = other DNA
caccagcctccgcctgc

SEQ ID NO: 115101 - DNA, 17 bp, synthetic construct
  source 1..17: mol_type = other DNA
accagcctccgcctgcg

SEQ ID NO: 115102 - DNA, 17 bp, synthetic construct
  source 1..17: mol_type = other DNA
ccagcctccgcctgcgg

SEQ ID NO: 115103 - DNA, 17 bp, synthetic construct
  source 1..17: mol_type = other DNA
cagcctccgcctgcggt

SEQ ID NO: 115104 - DNA, 17 bp, synthetic construct
  source 1..17: mol_type = other DNA
agcctccgcctgcggtg

SEQ ID NO: 115105 - DNA, 17 bp, synthetic construct
  source 1..17: mol_type = other DNA
gcctccgcctgcggtgg

SEQ ID NO: 115106 - DNA, 17 bp, synthetic construct
  source 1..17: mol_type = other DNA
cctccgcctgcggtggg

SEQ ID NO: 115107 - DNA, 17 bp, synthetic construct
  source 1..17: mol_type = other DNA
ctccgcctgcggtgggg

SEQ ID NO: 115108 - DNA, 17 bp, synthetic construct
  source 1..17: mol_type = other DNA
tccgcctgcggtggggg

SEQ ID NO: 115109 - DNA, 17 bp, synthetic construct
  source 1..17: mol_type = other DNA
ccgcctgcggtgggggt

SEQ ID NO: 115110 - DNA, 17 bp, synthetic construct
  source 1..17: mol_type = other DNA
cgcctgcggtgggggtg

SEQ ID NO: 115111 - DNA, 17 bp, synthetic construct
  source 1..17: mol_type = other DNA
gcctgcggtgggggtgt

SEQ ID NO: 115112 - DNA, 17 bp, synthetic construct
  source 1..17: mol_type = other DNA
cctgcggtgggggtgtg

SEQ ID NO: 115113 - DNA, 17 bp, synthetic construct
  source 1..17: mol_type = other DNA
ctgcggtgggggtgtgg

SEQ ID NO: 115114 - DNA, 17 bp, synthetic construct
  source 1..17: mol_type = other DNA
tgcggtgggggtgtgga

SEQ ID NO: 115115 - DNA, 17 bp, synthetic construct
  source 1..17: mol_type = other DNA
gcggtgggggtgtggag

SEQ ID NO: 115116 - DNA, 17 bp, synthetic construct
  source 1..17: mol_type = other DNA
cggtgggggtgtggagg

SEQ ID NO: 115117 - DNA, 17 bp, synthetic construct
  source 1..17: mol_type = other DNA
ggtgggggtgtggaggg

SEQ ID NO: 115118 - DNA, 17 bp, synthetic construct
  source 1..17: mol_type = other DNA
gtgggggtgtggagggt

SEQ ID NO: 115119 - DNA, 17 bp, synthetic construct
  source 1..17: mol_type = other DNA
tgggggtgtggagggtg

SEQ ID NO: 115120 - DNA, 17 bp, synthetic construct
  source 1..17: mol_type = other DNA
gggggtgtggagggtgg

SEQ ID NO: 115121 - DNA, 17 bp, synthetic construct
  source 1..17: mol_type = other DNA
ggggtgtggagggtggg

SEQ ID NO: 115122 - DNA, 17 bp, synthetic construct
  source 1..17: mol_type = other DNA
gggtgtggagggtgggg

SEQ ID NO: 115123 - DNA, 17 bp, synthetic construct
  source 1..17: mol_type = other DNA
ggtgtggagggtggggc

SEQ ID NO: 115124 - DNA, 17 bp, synthetic construct
  source 1..17: mol_type = other DNA
gtgtggagggtggggcc

SEQ ID NO: 115125 - DNA, 17 bp, synthetic construct
  source 1..17: mol_type = other DNA
tgtggagggtggggccc

SEQ ID NO: 115126 - DNA, 17 bp, synthetic construct
  source 1..17: mol_type = other DNA
gtggagggtggggccca

SEQ ID NO: 115127 - DNA, 17 bp, synthetic construct
  source 1..17: mol_type = other DNA
tggagggtggggcccac

SEQ ID NO: 115128 - DNA, 17 bp, synthetic construct
  source 1..17: mol_type = other DNA
ggagggtggggcccacc

SEQ ID NO: 115129 - DNA, 17 bp, synthetic construct
  source 1..17: mol_type = other DNA
gagggtggggcccacct

SEQ ID NO: 115130 - DNA, 17 bp, synthetic construct
  source 1..17: mol_type = other DNA
agggtggggcccacctc

SEQ ID NO: 115131 - DNA, 17 bp, synthetic construct
  source 1..17: mol_type = other DNA
gggtggggcccacctcc

SEQ ID NO: 115132 - DNA, 17 bp, synthetic construct
  source 1..17: mol_type = other DNA
ggtggggcccacctcct

SEQ ID NO: 115133 - DNA, 17 bp, synthetic construct
  source 1..17: mol_type = other DNA
gtggggcccacctcctc

SEQ ID NO: 115134 - DNA, 17 bp, synthetic construct
  source 1..17: mol_type = other DNA
tggggcccacctcctcc

SEQ ID NO: 115135 - DNA, 17 bp, synthetic construct
  source 1..17: mol_type = other DNA
ggggcccacctcctccc

SEQ ID NO: 115136 - DNA, 17 bp, synthetic construct
  source 1..17: mol_type = other DNA
gggcccacctcctcccg

SEQ ID NO: 115137 - DNA, 17 bp, synthetic construct
  source 1..17: mol_type = other DNA
ggcccacctcctcccga

SEQ ID NO: 115138 - DNA, 17 bp, synthetic construct
  source 1..17: mol_type = other DNA
gcccacctcctcccgac

SEQ ID NO: 115139 - DNA, 17 bp, synthetic construct
  source 1..17: mol_type = other DNA
cccacctcctcccgaca

SEQ ID NO: 115140 - DNA, 17 bp, synthetic construct
  source 1..17: mol_type = other DNA
ccacctcctcccgacat

SEQ ID NO: 115141 - DNA, 17 bp, synthetic construct
  source 1..17: mol_type = other DNA
cacctcctcccgacatg

SEQ ID NO: 115142 - DNA, 17 bp, synthetic construct
  source 1..17: mol_type = other DNA
acctcctcccgacatgc

SEQ ID NO: 115143 - DNA, 17 bp, synthetic construct
  source 1..17: mol_type = other DNA
cctcctcccgacatgcc

SEQ ID NO: 115144 - DNA, 17 bp, synthetic construct
  source 1..17: mol_type = other DNA
ctcctcccgacatgccg

SEQ ID NO: 115145 - DNA, 17 bp, synthetic construct
  source 1..17: mol_type = other DNA
tcctcccgacatgccgg

SEQ ID NO: 115146 - DNA, 17 bp, synthetic construct
  source 1..17: mol_type = other DNA
cctcccgacatgccggt

SEQ ID NO: 115147 - DNA, 17 bp, synthetic construct
  source 1..17: mol_type = other DNA
ctcccgacatgccggtt

SEQ ID NO: 115148 - DNA, 17 bp, synthetic construct
  source 1..17: mol_type = other DNA
tcccgacatgccggttc

SEQ ID NO: 115149 - DNA, 17 bp, synthetic construct
  source 1..17: mol_type = other DNA
cccgacatgccggttct

SEQ ID NO: 115150 - DNA, 17 bp, synthetic construct
  source 1..17: mol_type = other DNA
ccgacatgccggttctg

SEQ ID NO: 115151 - DNA, 17 bp, synthetic construct
  source 1..17: mol_type = other DNA
cgacatgccggttctgc

SEQ ID NO: 115152 - DNA, 17 bp, synthetic construct
  source 1..17: mol_type = other DNA
gacatgccggttctgct

SEQ ID NO: 115153 - DNA, 17 bp, synthetic construct
  source 1..17: mol_type = other DNA
acatgccggttctgctc

SEQ ID NO: 115154 - DNA, 17 bp, synthetic construct
  source 1..17: mol_type = other DNA
catgccggttctgctca

SEQ ID NO: 115155 - DNA, 17 bp, synthetic construct
  source 1..17: mol_type = other DNA
atgccggttctgctcac

SEQ ID NO: 115156 - DNA, 17 bp, synthetic construct
  source 1..17: mol_type = other DNA
tgccggttctgctcacg

SEQ ID NO: 115157 - DNA, 17 bp, synthetic construct
  source 1..17: mol_type = other DNA
gccggttctgctcacgg

SEQ ID NO: 115158 - DNA, 17 bp, synthetic construct
  source 1..17: mol_type = other DNA
ccggttctgctcacggc

SEQ ID NO: 115159 - DNA, 17 bp, synthetic construct
  source 1..17: mol_type = other DNA
cggttctgctcacggcc

SEQ ID NO: 115160 - DNA, 17 bp, synthetic construct
  source 1..17: mol_type = other DNA
ggttctgctcacggcct

SEQ ID NO: 115161 - DNA, 17 bp, synthetic construct
  source 1..17: mol_type = other DNA
gttctgctcacggcctc

SEQ ID NO: 115162 - DNA, 17 bp, synthetic construct
  source 1..17: mol_type = other DNA
ttctgctcacggcctcc

SEQ ID NO: 115163 - DNA, 17 bp, synthetic construct
  source 1..17: mol_type = other DNA
tctgctcacggcctccc

SEQ ID NO: 115164 - DNA, 17 bp, synthetic construct
  source 1..17: mol_type = other DNA
ctgctcacggcctccct

SEQ ID NO: 115165 - DNA, 17 bp, synthetic construct
  source 1..17: mol_type = other DNA
tgctcacggcctccctc

SEQ ID NO: 115166 - DNA, 17 bp, synthetic construct
  source 1..17: mol_type = other DNA
gctcacggcctccctcc

SEQ ID NO: 115167 - DNA, 17 bp, synthetic construct
  source 1..17: mol_type = other DNA
ctcacggcctccctccc

SEQ ID NO: 115168 - DNA, 17 bp, synthetic construct
  source 1..17: mol_type = other DNA
tcacggcctccctcccc

SEQ ID NO: 115169 - DNA, 17 bp, synthetic construct
  source 1..17: mol_type = other DNA
cacggcctccctcccca

SEQ ID NO: 115170 - DNA, 17 bp, synthetic construct
  source 1..17: mol_type = other DNA
acggcctccctccccag

SEQ ID NO: 115171 - DNA, 17 bp, synthetic construct
  source 1..17: mol_type = other DNA
cggcctccctccccagc

SEQ ID NO: 115172 - DNA, 17 bp, synthetic construct
  source 1..17: mol_type = other DNA
ggcctccctccccagca

SEQ ID NO: 115173 - DNA, 17 bp, synthetic construct
  source 1..17: mol_type = other DNA
gcctccctccccagcac

SEQ ID NO: 115174 - DNA, 17 bp, synthetic construct
  source 1..17: mol_type = other DNA
cctccctccccagcacc

SEQ ID NO: 115175 - DNA, 17 bp, synthetic construct
  source 1..17: mol_type = other DNA
ctccctccccagcacct

SEQ ID NO: 115176 - DNA, 17 bp, synthetic construct
  source 1..17: mol_type = other DNA
tccctccccagcacctg

SEQ ID NO: 115177 - DNA, 17 bp, synthetic construct
  source 1..17: mol_type = other DNA
ccctccccagcacctgc

SEQ ID NO: 115178 - DNA, 17 bp, synthetic construct
  source 1..17: mol_type = other DNA
cctccccagcacctgct

SEQ ID NO: 115179 - DNA, 17 bp, synthetic construct
  source 1..17: mol_type = other DNA
ctccccagcacctgctc

SEQ ID NO: 115180 - DNA, 17 bp, synthetic construct
  source 1..17: mol_type = other DNA
tccccagcacctgctcc

SEQ ID NO: 115181 - DNA, 17 bp, synthetic construct
  source 1..17: mol_type = other DNA
ccccagcacctgctccg

SEQ ID NO: 115182 - DNA, 17 bp, synthetic construct
  source 1..17: mol_type = other DNA
cccagcacctgctccgg

SEQ ID NO: 115183 - DNA, 17 bp, synthetic construct
  source 1..17: mol_type = other DNA
ccagcacctgctccggg

SEQ ID NO: 115184 - DNA, 17 bp, synthetic construct
  source 1..17: mol_type = other DNA
cagcacctgctccgggg

SEQ ID NO: 115185 - DNA, 17 bp, synthetic construct
  source 1..17: mol_type = other DNA
agcacctgctccggggg

SEQ ID NO: 115186 - DNA, 17 bp, synthetic construct
  source 1..17: mol_type = other DNA
gcacctgctccgggggg

SEQ ID NO: 115187 - DNA, 17 bp, synthetic construct
  source 1..17: mol_type = other DNA
cacctgctccggggggc

SEQ ID NO: 115188 - DNA, 17 bp, synthetic construct
  source 1..17: mol_type = other DNA
acctgctccggggggct

SEQ ID NO: 115189 - DNA, 17 bp, synthetic construct
  source 1..17: mol_type = other DNA
cctgctccggggggcta

SEQ ID NO: 115190 - DNA, 17 bp, synthetic construct
  source 1..17: mol_type = other DNA
ctgctccggggggctat

SEQ ID NO: 115191 - DNA, 17 bp, synthetic construct
  source 1..17: mol_type = other DNA
tgctccggggggctatg

SEQ ID NO: 115192 - DNA, 17 bp, synthetic construct
  source 1..17: mol_type = other DNA
gctccggggggctatgg

SEQ ID NO: 115193 - DNA, 17 bp, synthetic construct
  source 1..17: mol_type = other DNA
ctccggggggctatggc

SEQ ID NO: 115194 - DNA, 17 bp, synthetic construct
  source 1..17: mol_type = other DNA
tccggggggctatggca

SEQ ID NO: 115195 - DNA, 17 bp, synthetic construct
  source 1..17: mol_type = other DNA
ccggggggctatggcag

SEQ ID NO: 115196 - DNA, 17 bp, synthetic construct
  source 1..17: mol_type = other DNA
cggggggctatggcagt

SEQ ID NO: 115197 - DNA, 17 bp, synthetic construct
  source 1..17: mol_type = other DNA
ggggggctatggcagtg

SEQ ID NO: 115198 - DNA, 17 bp, synthetic construct
  source 1..17: mol_type = other DNA
gggggctatggcagtgc

SEQ ID NO: 115199 - DNA, 17 bp, synthetic construct
  source 1..17: mol_type = other DNA
ggggctatggcagtgcc

SEQ ID NO: 115200 - DNA, 17 bp, synthetic construct
  source 1..17: mol_type = other DNA
gggctatggcagtgcca

SEQ ID NO: 115201 - DNA, 17 bp, synthetic construct
  source 1..17: mol_type = other DNA
ggctatggcagtgccag

SEQ ID NO: 115202 - DNA, 17 bp, synthetic construct
  source 1..17: mol_type = other DNA
gctatggcagtgccagg

SEQ ID NO: 115203 - DNA, 17 bp, synthetic construct
  source 1..17: mol_type = other DNA
ctatggcagtgccagga

SEQ ID NO: 115204 - DNA, 17 bp, synthetic construct
  source 1..17: mol_type = other DNA
tatggcagtgccaggac

SEQ ID NO: 115205 - DNA, 17 bp, synthetic construct
  source 1..17: mol_type = other DNA
atggcagtgccaggacc

SEQ ID NO: 115206 - DNA, 17 bp, synthetic construct
  source 1..17: mol_type = other DNA
tggcagtgccaggacct

SEQ ID NO: 115207 - DNA, 17 bp, synthetic construct
  source 1..17: mol_type = other DNA
ggcagtgccaggacctg

SEQ ID NO: 115208 - DNA, 17 bp, synthetic construct
  source 1..17: mol_type = other DNA
gcagtgccaggacctgc

SEQ ID NO: 115209 - DNA, 17 bp, synthetic construct
  source 1..17: mol_type = other DNA
cagtgccaggacctgcc

SEQ ID NO: 115210 - DNA, 17 bp, synthetic construct
  source 1..17: mol_type = other DNA
agtgccaggacctgccg

SEQ ID NO: 115211 - DNA, 17 bp, synthetic construct
  source 1..17: mol_type = other DNA
gtgccaggacctgccgt

SEQ ID NO: 115212 - DNA, 17 bp, synthetic construct
  source 1..17: mol_type = other DNA
tgccaggacctgccgtg

SEQ ID NO: 115213 - DNA, 17 bp, synthetic construct
  source 1..17: mol_type = other DNA
gccaggacctgccgtgc

SEQ ID NO: 115214 - DNA, 17 bp, synthetic construct
  source 1..17: mol_type = other DNA
ccaggacctgccgtgcc

SEQ ID NO: 115215 - DNA, 17 bp, synthetic construct
  source 1..17: mol_type = other DNA
caggacctgccgtgccc

SEQ ID NO: 115216 - DNA, 17 bp, synthetic construct
  source 1..17: mol_type = other DNA
aggacctgccgtgccct

SEQ ID NO: 115217 - DNA, 17 bp, synthetic construct
  source 1..17: mol_type = other DNA
ggacctgccgtgccctg

SEQ ID NO: 115218 - DNA, 17 bp, synthetic construct
  source 1..17: mol_type = other DNA
gacctgccgtgccctgg

SEQ ID NO: 115219 - DNA, 17 bp, synthetic construct
  source 1..17: mol_type = other DNA
acctgccgtgccctggc

SEQ ID NO: 115220 - DNA, 17 bp, synthetic construct
  source 1..17: mol_type = other DNA
cctgccgtgccctggca

SEQ ID NO: 115221 - DNA, 17 bp, synthetic construct
  source 1..17: mol_type = other DNA
ctgccgtgccctggcac

SEQ ID NO: 115222 - DNA, 17 bp, synthetic construct
  source 1..17: mol_type = other DNA
tgccgtgccctggcacc

SEQ ID NO: 115223 - DNA, 17 bp, synthetic construct
  source 1..17: mol_type = other DNA
gccgtgccctggcacct

SEQ ID NO: 115224 - DNA, 17 bp, synthetic construct
  source 1..17: mol_type = other DNA
ccgtgccctggcacctg

SEQ ID NO: 115225 - DNA, 17 bp, synthetic construct
  source 1..17: mol_type = other DNA
cgtgccctggcacctgc

SEQ ID NO: 115226 - DNA, 17 bp, synthetic construct
  source 1..17: mol_type = other DNA
gtgccctggcacctgct

SEQ ID NO: 115227 - DNA, 17 bp, synthetic construct
  source 1..17: mol_type = other DNA
tgccctggcacctgctc

SEQ ID NO: 115228 - DNA, 17 bp, synthetic construct
  source 1..17: mol_type = other DNA
gccctggcacctgctct

SEQ ID NO: 115229 - DNA, 17 bp, synthetic construct
  source 1..17: mol_type = other DNA
ccctggcacctgctctg

SEQ ID NO: 115230 - DNA, 17 bp, synthetic construct
  source 1..17: mol_type = other DNA
cctggcacctgctctgt

SEQ ID NO: 115231 - DNA, 17 bp, synthetic construct
  source 1..17: mol_type = other DNA
ctggcacctgctctgtg

SEQ ID NO: 115232 - DNA, 17 bp, synthetic construct
  source 1..17: mol_type = other DNA
tggcacctgctctgtgc

SEQ ID NO: 115233 - DNA, 17 bp, synthetic construct
  source 1..17: mol_type = other DNA
ggcacctgctctgtgca

SEQ ID NO: 115234 - DNA, 17 bp, synthetic construct
  source 1..17: mol_type = other DNA
gcacctgctctgtgcag

SEQ ID NO: 115235 - DNA, 17 bp, synthetic construct
  source 1..17: mol_type = other DNA
cacctgctctgtgcagg

SEQ ID NO: 115236 - DNA, 17 bp, synthetic construct
  source 1..17: mol_type = other DNA
acctgctctgtgcaggg

SEQ ID NO: 115237 - DNA, 17 bp, synthetic construct
  source 1..17: mol_type = other DNA
cctgctctgtgcagggc

SEQ ID NO: 115238 - DNA, 17 bp, synthetic construct
  source 1..17: mol_type = other DNA
ctgctctgtgcagggcg

SEQ ID NO: 115239 - DNA, 17 bp, synthetic construct
  source 1..17: mol_type = other DNA
tgctctgtgcagggcgg

SEQ ID NO: 115240 - DNA, 17 bp, synthetic construct
  source 1..17: mol_type = other DNA
gctctgtgcagggcggg

SEQ ID NO: 115241 - DNA, 17 bp, synthetic construct
  source 1..17: mol_type = other DNA
ctctgtgcagggcgggg

SEQ ID NO: 115242 - DNA, 17 bp, synthetic construct
  source 1..17: mol_type = other DNA
tctgtgcagggcggggc

SEQ ID NO: 115243 - DNA, 17 bp, synthetic construct
  source 1..17: mol_type = other DNA
ctgtgcagggcggggcc

SEQ ID NO: 115244 - DNA, 17 bp, synthetic construct
  source 1..17: mol_type = other DNA
tgtgcagggcggggccc

SEQ ID NO: 115245 - DNA, 17 bp, synthetic construct
  source 1..17: mol_type = other DNA
gtgcagggcggggccca

SEQ ID NO: 115246 - DNA, 17 bp, synthetic construct
  source 1..17: mol_type = other DNA
tgcagggcggggcccac

SEQ ID NO: 115247 - DNA, 17 bp, synthetic construct
  source 1..17: mol_type = other DNA
gcagggcggggcccaca

SEQ ID NO: 115248 - DNA, 17 bp, synthetic construct
  source 1..17: mol_type = other DNA
cagggcggggcccacat

SEQ ID NO: 115249 - DNA, 17 bp, synthetic construct
  source 1..17: mol_type = other DNA
agggcggggcccacatc

SEQ ID NO: 115250 - DNA, 17 bp, synthetic construct
  source 1..17: mol_type = other DNA
gggcggggcccacatct

SEQ ID NO: 115251 - DNA, 17 bp, synthetic construct
  source 1..17: mol_type = other DNA
ggcggggcccacatctc

SEQ ID NO: 115252 - DNA, 17 bp, synthetic construct
  source 1..17: mol_type = other DNA
gcggggcccacatctcc

SEQ ID NO: 115253 - DNA, 17 bp, synthetic construct
  source 1..17: mol_type = other DNA
cggggcccacatctcca

SEQ ID NO: 115254 - DNA, 17 bp, synthetic construct
  source 1..17: mol_type = other DNA
ggggcccacatctccac

SEQ ID NO: 115255 - DNA, 17 bp, synthetic construct
  source 1..17: mol_type = other DNA
gggcccacatctccacc

SEQ ID NO: 115256 - DNA, 17 bp, synthetic construct
  source 1..17: mol_type = other DNA
ggcccacatctccacct

SEQ ID NO: 115257 - DNA, 17 bp, synthetic construct
  source 1..17: mol_type = other DNA
gcccacatctccaccta

SEQ ID NO: 115258 - DNA, 17 bp, synthetic construct
  source 1..17: mol_type = other DNA
cccacatctccacctat

SEQ ID NO: 115259 - DNA, 17 bp, synthetic construct
  source 1..17: mol_type = other DNA
ccacatctccacctatg

SEQ ID NO: 115260 - DNA, 17 bp, synthetic construct
  source 1..17: mol_type = other DNA
cacatctccacctatga

SEQ ID NO: 115261 - DNA, 17 bp, synthetic construct
  source 1..17: mol_type = other DNA
acatctccacctatgat

SEQ ID NO: 115262 - DNA, 17 bp, synthetic construct
  source 1..17: mol_type = other DNA
catctccacctatgatg

SEQ ID NO: 115263 - DNA, 17 bp, synthetic construct
  source 1..17: mol_type = other DNA
atctccacctatgatga

SEQ ID NO: 115264 - DNA, 17 bp, synthetic construct
  source 1..17: mol_type = other DNA
tctccacctatgatgag

SEQ ID NO: 115265 - DNA, 17 bp, synthetic construct
  source 1..17: mol_type = other DNA
ctccacctatgatgaga

SEQ ID NO: 115266 - DNA, 17 bp, synthetic construct
  source 1..17: mol_type = other DNA
tccacctatgatgagaa

SEQ ID NO: 115267 - DNA, 17 bp, synthetic construct
  source 1..17: mol_type = other DNA
ccacctatgatgagaaa

SEQ ID NO: 115268 - DNA, 17 bp, synthetic construct
  source 1..17: mol_type = other DNA
cacctatgatgagaaac

SEQ ID NO: 115269 - DNA, 17 bp, synthetic construct
  source 1..17: mol_type = other DNA
acctatgatgagaaact

SEQ ID NO: 115270 - DNA, 17 bp, synthetic construct
  source 1..17: mol_type = other DNA
cctatgatgagaaactc

SEQ ID NO: 115271 - DNA, 17 bp, synthetic construct
  source 1..17: mol_type = other DNA
ctatgatgagaaactct

SEQ ID NO: 115272 - DNA, 17 bp, synthetic construct
  source 1..17: mol_type = other DNA
tatgatgagaaactcta

SEQ ID NO: 115273 - DNA, 17 bp, synthetic construct
  source 1..17: mol_type = other DNA
atgatgagaaactctac

SEQ ID NO: 115274 - DNA, 17 bp, synthetic construct
  source 1..17: mol_type = other DNA
tgatgagaaactctacg

SEQ ID NO: 115275 - DNA, 17 bp, synthetic construct
  source 1..17: mol_type = other DNA
gatgagaaactctacga

SEQ ID NO: 115276 - DNA, 17 bp, synthetic construct
  source 1..17: mol_type = other DNA
atgagaaactctacgac

SEQ ID NO: 115277 - DNA, 17 bp, synthetic construct
  source 1..17: mol_type = other DNA
tgagaaactctacgacc

SEQ ID NO: 115278 - DNA, 17 bp, synthetic construct
  source 1..17: mol_type = other DNA
gagaaactctacgacct

SEQ ID NO: 115279 - DNA, 17 bp, synthetic construct
  source 1..17: mol_type = other DNA
agaaactctacgacctg

SEQ ID NO: 115280 - DNA, 17 bp, synthetic construct
  source 1..17: mol_type = other DNA
gaaactctacgacctgc

SEQ ID NO: 115281 - DNA, 17 bp, synthetic construct
  source 1..17: mol_type = other DNA
aaactctacgacctgca

SEQ ID NO: 115282 - DNA, 17 bp, synthetic construct
  source 1..17: mol_type = other DNA
aactctacgacctgcat

SEQ ID NO: 115283 - DNA, 17 bp, synthetic construct
  source 1..17: mol_type = other DNA
actctacgacctgcatg

SEQ ID NO: 115284 - DNA, 17 bp, synthetic construct
  source 1..17: mol_type = other DNA
ctctacgacctgcatgg

SEQ ID NO: 115285 - DNA, 17 bp, synthetic construct
  source 1..17: mol_type = other DNA
tctacgacctgcatggt

SEQ ID NO: 115286 - DNA, 17 bp, synthetic construct
  source 1..17: mol_type = other DNA
ctacgacctgcatggtg

SEQ ID NO: 115287 - DNA, 17 bp, synthetic construct
  source 1..17: mol_type = other DNA
tacgacctgcatggtga

SEQ ID NO: 115288 - DNA, 17 bp, synthetic construct
  source 1..17: mol_type = other DNA
acgacctgcatggtgac

SEQ ID NO: 115289 - DNA, 17 bp, synthetic construct
  source 1..17: mol_type = other DNA
cgacctgcatggtgact

SEQ ID NO: 115290 - DNA, 17 bp, synthetic construct
  source 1..17: mol_type = other DNA
gacctgcatggtgactg

SEQ ID NO: 115291 - DNA, 17 bp, synthetic construct
  source 1..17: mol_type = other DNA
acctgcatggtgactgc

SEQ ID NO: 115292 - DNA, 17 bp, synthetic construct
  source 1..17: mol_type = other DNA
cctgcatggtgactgca

SEQ ID NO: 115293 - DNA, 17 bp, synthetic construct
  source 1..17: mol_type = other DNA
ctgcatggtgactgcag

SEQ ID NO: 115294 - DNA, 17 bp, synthetic construct
  source 1..17: mol_type = other DNA
tgcatggtgactgcagc

SEQ ID NO: 115295 - DNA, 17 bp, synthetic construct
  source 1..17: mol_type = other DNA
gcatggtgactgcagct

SEQ ID NO: 115296 - DNA, 17 bp, synthetic construct
  source 1..17: mol_type = other DNA
catggtgactgcagcta

SEQ ID NO: 115297 - DNA, 17 bp, synthetic construct
  source 1..17: mol_type = other DNA
atggtgactgcagctac

SEQ ID NO: 115298 - DNA, 17 bp, synthetic construct
  source 1..17: mol_type = other DNA
tggtgactgcagctacg

SEQ ID NO: 115299 - DNA, 17 bp, synthetic construct
  source 1..17: mol_type = other DNA
ggtgactgcagctacgt

SEQ ID NO: 115300 - DNA, 17 bp, synthetic construct
  source 1..17: mol_type = other DNA
gtgactgcagctacgtt

SEQ ID NO: 115301 - DNA, 17 bp, synthetic construct
  source 1..17: mol_type = other DNA
tgactgcagctacgttc

SEQ ID NO: 115302 - DNA, 17 bp, synthetic construct
  source 1..17: mol_type = other DNA
gactgcagctacgttct

SEQ ID NO: 115303 - DNA, 17 bp, synthetic construct
  source 1..17: mol_type = other DNA
actgcagctacgttctg

SEQ ID NO: 115304 - DNA, 17 bp, synthetic construct
  source 1..17: mol_type = other DNA
ctgcagctacgttctgt

SEQ ID NO: 115305 - DNA, 17 bp, synthetic construct
  source 1..17: mol_type = other DNA
tgcagctacgttctgtc

SEQ ID NO: 115306 - DNA, 17 bp, synthetic construct
  source 1..17: mol_type = other DNA
gcagctacgttctgtcc

SEQ ID NO: 115307 - DNA, 17 bp, synthetic construct
  source 1..17: mol_type = other DNA
cagctacgttctgtcca

SEQ ID NO: 115308 - DNA, 17 bp, synthetic construct
  source 1..17: mol_type = other DNA
agctacgttctgtccaa

SEQ ID NO: 115309 - DNA, 17 bp, synthetic construct
  source 1..17: mol_type = other DNA
gctacgttctgtccaag

SEQ ID NO: 115310 - DNA, 17 bp, synthetic construct
  source 1..17: mol_type = other DNA
ctacgttctgtccaagg

SEQ ID NO: 115311 - DNA, 17 bp, synthetic construct
  source 1..17: mol_type = other DNA
tacgttctgtccaaggt

SEQ ID NO: 115312 - DNA, 17 bp, synthetic construct
  source 1..17: mol_type = other DNA
acgttctgtccaaggtc

SEQ ID NO: 115313 - DNA, 17 bp, synthetic construct
  source 1..17: mol_type = other DNA
cgttctgtccaaggtct

SEQ ID NO: 115314 - DNA, 17 bp, synthetic construct
  source 1..17: mol_type = other DNA
gttctgtccaaggtctg

SEQ ID NO: 115315 - DNA, 17 bp, synthetic construct
  source 1..17: mol_type = other DNA
ttctgtccaaggtctgg

SEQ ID NO: 115316 - DNA, 17 bp, synthetic construct
  source 1..17: mol_type = other DNA
tctgtccaaggtctggg

SEQ ID NO: 115317 - DNA, 17 bp, synthetic construct
  source 1..17: mol_type = other DNA
ctgtccaaggtctgggc

SEQ ID NO: 115318 - DNA, 17 bp, synthetic construct
  source 1..17: mol_type = other DNA
tgtccaaggtctgggct

SEQ ID NO: 115319 - DNA, 17 bp, synthetic construct
  source 1..17: mol_type = other DNA
gtccaaggtctgggctt

SEQ ID NO: 115320 - DNA, 17 bp, synthetic construct
  source 1..17: mol_type = other DNA
tccaaggtctgggcttg

SEQ ID NO: 115321 - DNA, 17 bp, synthetic construct
  source 1..17: mol_type = other DNA
ccaaggtctgggcttgg

SEQ ID NO: 115322 - DNA, 17 bp, synthetic construct
  source 1..17: mol_type = other DNA
caaggtctgggcttggg

SEQ ID NO: 115323 - DNA, 17 bp, synthetic construct
  source 1..17: mol_type = other DNA
aaggtctgggcttgggg

SEQ ID NO: 115324 - DNA, 17 bp, synthetic construct
  source 1..17: mol_type = other DNA
aggtctgggcttggggc

SEQ ID NO: 115325 - DNA, 17 bp, synthetic construct
  source 1..17: mol_type = other DNA
ggtctgggcttggggcc

SEQ ID NO: 115326 - DNA, 17 bp, synthetic construct
  source 1..17: mol_type = other DNA
gtctgggcttggggccg

SEQ ID NO: 115327 - DNA, 17 bp, synthetic construct
  source 1..17: mol_type = other DNA
tctgggcttggggccgg

SEQ ID NO: 115328 - DNA, 17 bp, synthetic construct
  source 1..17: mol_type = other DNA
ctgggcttggggccggg

SEQ ID NO: 115329 - DNA, 17 bp, synthetic construct
  source 1..17: mol_type = other DNA
tgggcttggggccgggt

SEQ ID NO: 115330 - DNA, 17 bp, synthetic construct
  source 1..17: mol_type = other DNA
gggcttggggccgggtc

SEQ ID NO: 115331 - DNA, 17 bp, synthetic construct
  source 1..17: mol_type = other DNA
ggcttggggccgggtct

SEQ ID NO: 115332 - DNA, 17 bp, synthetic construct
  source 1..17: mol_type = other DNA
gcttggggccgggtctt

SEQ ID NO: 115333 - DNA, 17 bp, synthetic construct
  source 1..17: mol_type = other DNA
cttggggccgggtcttc

SEQ ID NO: 115334 - DNA, 17 bp, synthetic construct
  source 1..17: mol_type = other DNA
ttggggccgggtcttca

SEQ ID NO: 115335 - DNA, 17 bp, synthetic construct
  source 1..17: mol_type = other DNA
tggggccgggtcttcag

SEQ ID NO: 115336 - DNA, 17 bp, synthetic construct
  source 1..17: mol_type = other DNA
ggggccgggtcttcaga

SEQ ID NO: 115337 - DNA, 17 bp, synthetic construct
  source 1..17: mol_type = other DNA
gggccgggtcttcagac

SEQ ID NO: 115338 - DNA, 17 bp, synthetic construct
  source 1..17: mol_type = other DNA
ggccgggtcttcagaca

SEQ ID NO: 115339 - DNA, 17 bp, synthetic construct
  source 1..17: mol_type = other DNA
gccgggtcttcagacac

SEQ ID NO: 115340 - DNA, 17 bp, synthetic construct
  source 1..17: mol_type = other DNA
ccgggtcttcagacacc

SEQ ID NO: 115341 - DNA, 17 bp, synthetic construct
  source 1..17: mol_type = other DNA
cgggtcttcagacaccc

SEQ ID NO: 115342 - DNA, 17 bp, synthetic construct
  source 1..17: mol_type = other DNA
gggtcttcagacaccca

SEQ ID NO: 115343 - DNA, 17 bp, synthetic construct
  source 1..17: mol_type = other DNA
ggtcttcagacacccag

SEQ ID NO: 115344 - DNA, 17 bp, synthetic construct
  source 1..17: mol_type = other DNA
gtcttcagacacccaga

SEQ ID NO: 115345 - DNA, 17 bp, synthetic construct
  source 1..17: mol_type = other DNA
tcttcagacacccagac

SEQ ID NO: 115346 - DNA, 17 bp, synthetic construct
  source 1..17: mol_type = other DNA
cttcagacacccagacc

SEQ ID NO: 115347 - DNA, 17 bp, synthetic construct
  source 1..17: mol_type = other DNA
ttcagacacccagaccc

SEQ ID NO: 115348 - DNA, 17 bp, synthetic construct
  source 1..17: mol_type = other DNA
tcagacacccagaccct

SEQ ID NO: 115349 - DNA, 17 bp, synthetic construct
  source 1..17: mol_type = other DNA
cagacacccagaccctc

SEQ ID NO: 115350 - DNA, 17 bp, synthetic construct
  source 1..17: mol_type = other DNA
agacacccagaccctcc

SEQ ID NO: 115351 - DNA, 17 bp, synthetic construct
  source 1..17: mol_type = other DNA
gacacccagaccctcct

SEQ ID NO: 115352 - DNA, 17 bp, synthetic construct
  source 1..17: mol_type = other DNA
acacccagaccctcctg

SEQ ID NO: 115353 - DNA, 17 bp, synthetic construct
  source 1..17: mol_type = other DNA
cacccagaccctcctgg

SEQ ID NO: 115354 - DNA, 17 bp, synthetic construct
  source 1..17: mol_type = other DNA
acccagaccctcctggg

SEQ ID NO: 115355 - DNA, 17 bp, synthetic construct
  source 1..17: mol_type = other DNA
cccagaccctcctggga

SEQ ID NO: 115356 - DNA, 17 bp, synthetic construct
  source 1..17: mol_type = other DNA
ccagaccctcctgggac

SEQ ID NO: 115357 - DNA, 17 bp, synthetic construct
  source 1..17: mol_type = other DNA
cagaccctcctgggacc

SEQ ID NO: 115358 - DNA, 17 bp, synthetic construct
  source 1..17: mol_type = other DNA
agaccctcctgggaccc

SEQ ID NO: 115359 - DNA, 17 bp, synthetic construct
  source 1..17: mol_type = other DNA
gaccctcctgggaccct

SEQ ID NO: 115360 - DNA, 17 bp, synthetic construct
  source 1..17: mol_type = other DNA
accctcctgggaccctc

SEQ ID NO: 115361 - DNA, 17 bp, synthetic construct
  source 1..17: mol_type = other DNA
ccctcctgggaccctca

SEQ ID NO: 115362 - DNA, 17 bp, synthetic construct
  source 1..17: mol_type = other DNA
cctcctgggaccctcat

SEQ ID NO: 115363 - DNA, 17 bp, synthetic construct
  source 1..17: mol_type = other DNA
ctcctgggaccctcatg

SEQ ID NO: 115364 - DNA, 17 bp, synthetic construct
  source 1..17: mol_type = other DNA
tcctgggaccctcatgc

SEQ ID NO: 115365 - DNA, 17 bp, synthetic construct
  source 1..17: mol_type = other DNA
cctgggaccctcatgcc

SEQ ID NO: 115366 - DNA, 17 bp, synthetic construct
  source 1..17: mol_type = other DNA
ctgggaccctcatgcca

SEQ ID NO: 115367 - DNA, 17 bp, synthetic construct
  source 1..17: mol_type = other DNA
tgggaccctcatgccac

SEQ ID NO: 115368 - DNA, 17 bp, synthetic construct
  source 1..17: mol_type = other DNA
gggaccctcatgccact

SEQ ID NO: 115369 - DNA, 17 bp, synthetic construct
  source 1..17: mol_type = other DNA
ggaccctcatgccactt

SEQ ID NO: 115370 - DNA, 17 bp, synthetic construct
  source 1..17: mol_type = other DNA
gaccctcatgccacttc

SEQ ID NO: 115371 - DNA, 17 bp, synthetic construct
  source 1..17: mol_type = other DNA
accctcatgccacttcc

SEQ ID NO: 115372 - DNA, 17 bp, synthetic construct
  source 1..17: mol_type = other DNA
ccctcatgccacttcca

SEQ ID NO: 115373 - DNA, 17 bp, synthetic construct
  source 1..17: mol_type = other DNA
cctcatgccacttccac

SEQ ID NO: 115374 - DNA, 17 bp, synthetic construct
  source 1..17: mol_type = other DNA
ctcatgccacttccacc

SEQ ID NO: 115375 - DNA, 17 bp, synthetic construct
  source 1..17: mol_type = other DNA
tcatgccacttccaccc

SEQ ID NO: 115376 - DNA, 17 bp, synthetic construct
  source 1..17: mol_type = other DNA
catgccacttccaccca

SEQ ID NO: 115377 - DNA, 17 bp, synthetic construct
  source 1..17: mol_type = other DNA
atgccacttccacccag

SEQ ID NO: 115378 - DNA, 17 bp, synthetic construct
  source 1..17: mol_type = other DNA
tgccacttccacccagg

SEQ ID NO: 115379 - DNA, 17 bp, synthetic construct
  source 1..17: mol_type = other DNA
gccacttccacccaggg

SEQ ID NO: 115380 - DNA, 17 bp, synthetic construct
  source 1..17: mol_type = other DNA
ccacttccacccagggg

SEQ ID NO: 115381 - DNA, 17 bp, synthetic construct
  source 1..17: mol_type = other DNA
cacttccacccagggga

SEQ ID NO: 115382 - DNA, 17 bp, synthetic construct
  source 1..17: mol_type = other DNA
acttccacccaggggag

SEQ ID NO: 115383 - DNA, 17 bp, synthetic construct
  source 1..17: mol_type = other DNA
cttccacccaggggagg

SEQ ID NO: 115384 - DNA, 17 bp, synthetic construct
  source 1..17: mol_type = other DNA
ttccacccaggggaggc

SEQ ID NO: 115385 - DNA, 17 bp, synthetic construct
  source 1..17: mol_type = other DNA
tccacccaggggaggcc

SEQ ID NO: 115386 - DNA, 17 bp, synthetic construct
  source 1..17: mol_type = other DNA
ccacccaggggaggccc

SEQ ID NO: 115387 - DNA, 17 bp, synthetic construct
  source 1..17: mol_type = other DNA
cacccaggggaggcccc

SEQ ID NO: 115388 - DNA, 17 bp, synthetic construct
  source 1..17: mol_type = other DNA
acccaggggaggccccc

SEQ ID NO: 115389 - DNA, 17 bp, synthetic construct
  source 1..17: mol_type = other DNA
cccaggggaggccccca

SEQ ID NO: 115390 - DNA, 17 bp, synthetic construct
  source 1..17: mol_type = other DNA
ccaggggaggcccccac

SEQ ID NO: 115391 - DNA, 17 bp, synthetic construct
  source 1..17: mol_type = other DNA
caggggaggcccccacg

SEQ ID NO: 115392 - DNA, 17 bp, synthetic construct
  source 1..17: mol_type = other DNA
aggggaggcccccacga

SEQ ID NO: 115393 - DNA, 17 bp, synthetic construct
  source 1..17: mol_type = other DNA
ggggaggcccccacgat

SEQ ID NO: 115394 - DNA, 17 bp, synthetic construct
  source 1..17: mol_type = other DNA
gggaggcccccacgatg

SEQ ID NO: 115395 - DNA, 17 bp, synthetic construct
  source 1..17: mol_type = other DNA
ggaggcccccacgatgg

SEQ ID NO: 115396 - DNA, 17 bp, synthetic construct
  source 1..17: mol_type = other DNA
gaggcccccacgatggt

SEQ ID NO: 115397 - DNA, 17 bp, synthetic construct
  source 1..17: mol_type = other DNA
aggcccccacgatggtc

SEQ ID NO: 115398 - DNA, 17 bp, synthetic construct
  source 1..17: mol_type = other DNA
ggcccccacgatggtca

SEQ ID NO: 115399 - DNA, 17 bp, synthetic construct
  source 1..17: mol_type = other DNA
gcccccacgatggtcat

SEQ ID NO: 115400 - DNA, 17 bp, synthetic construct
  source 1..17: mol_type = other DNA
cccccacgatggtcata

SEQ ID NO: 115401 - DNA, 17 bp, synthetic construct
  source 1..17: mol_type = other DNA
ccccacgatggtcatag

SEQ ID NO: 115402 - DNA, 17 bp, synthetic construct
  source 1..17: mol_type = other DNA
cccacgatggtcataga

SEQ ID NO: 115403 - DNA, 17 bp, synthetic construct
  source 1..17: mol_type = other DNA
ccacgatggtcatagag

SEQ ID NO: 115404 - DNA, 17 bp, synthetic construct
  source 1..17: mol_type = other DNA
cacgatggtcatagagg

SEQ ID NO: 115405 - DNA, 17 bp, synthetic construct
  source 1..17: mol_type = other DNA
acgatggtcatagaggg

SEQ ID NO: 115406 - DNA, 17 bp, synthetic construct
  source 1..17: mol_type = other DNA
cgatggtcatagagggg

SEQ ID NO: 115407 - DNA, 17 bp, synthetic construct
  source 1..17: mol_type = other DNA
gatggtcatagaggggt

SEQ ID NO: 115408 - DNA, 17 bp, synthetic construct
  source 1..17: mol_type = other DNA
atggtcatagaggggtg

SEQ ID NO: 115409 - DNA, 17 bp, synthetic construct
  source 1..17: mol_type = other DNA
tggtcatagaggggtgg

SEQ ID NO: 115410 - DNA, 17 bp, synthetic construct
  source 1..17: mol_type = other DNA
ggtcatagaggggtgga

SEQ ID NO: 115411 - DNA, 17 bp, synthetic construct
  source 1..17: mol_type = other DNA
gtcatagaggggtggat

SEQ ID NO: 115412 - DNA, 17 bp, synthetic construct
  source 1..17: mol_type = other DNA
tcatagaggggtggatg

SEQ ID NO: 115413 - DNA, 17 bp, synthetic construct
  source 1..17: mol_type = other DNA
catagaggggtggatgt

SEQ ID NO: 115414 - DNA, 17 bp, synthetic construct
  source 1..17: mol_type = other DNA
atagaggggtggatgtc

SEQ ID NO: 115415 - DNA, 17 bp, synthetic construct
  source 1..17: mol_type = other DNA
tagaggggtggatgtcc

SEQ ID NO: 115416 - DNA, 17 bp, synthetic construct
  source 1..17: mol_type = other DNA
agaggggtggatgtccc

SEQ ID NO: 115417 - DNA, 17 bp, synthetic construct
  source 1..17: mol_type = other DNA
gaggggtggatgtccct

SEQ ID NO: 115418 - DNA, 17 bp, synthetic construct
  source 1..17: mol_type = other DNA
aggggtggatgtccctg

SEQ ID NO: 115419 - DNA, 17 bp, synthetic construct
  source 1..17: mol_type = other DNA
ggggtggatgtccctgc

SEQ ID NO: 115420 - DNA, 17 bp, synthetic construct
  source 1..17: mol_type = other DNA
gggtggatgtccctgct

SEQ ID NO: 115421 - DNA, 17 bp, synthetic construct
  source 1..17: mol_type = other DNA
ggtggatgtccctgctg

SEQ ID NO: 115422 - DNA, 17 bp, synthetic construct
  source 1..17: mol_type = other DNA
gtggatgtccctgctga

SEQ ID NO: 115423 - DNA, 17 bp, synthetic construct
  source 1..17: mol_type = other DNA
tggatgtccctgctgag

SEQ ID NO: 115424 - DNA, 17 bp, synthetic construct
  source 1..17: mol_type = other DNA
ggatgtccctgctgagg

SEQ ID NO: 115425 - DNA, 17 bp, synthetic construct
  source 1..17: mol_type = other DNA
gatgtccctgctgaggg

SEQ ID NO: 115426 - DNA, 17 bp, synthetic construct
  source 1..17: mol_type = other DNA
atgtccctgctgagggg

SEQ ID NO: 115427 - DNA, 17 bp, synthetic construct
  source 1..17: mol_type = other DNA
tgtccctgctgaggggg

SEQ ID NO: 115428 - DNA, 17 bp, synthetic construct
  source 1..17: mol_type = other DNA
gtccctgctgagggggg

SEQ ID NO: 115429 - DNA, 17 bp, synthetic construct
  source 1..17: mol_type = other DNA
tccctgctgagggggga

SEQ ID NO: 115430 - DNA, 17 bp, synthetic construct
  source 1..17: mol_type = other DNA
ccctgctgaggggggag

SEQ ID NO: 115431 - DNA, 17 bp, synthetic construct
  source 1..17: mol_type = other DNA
cctgctgaggggggagc

SEQ ID NO: 115432 - DNA, 17 bp, synthetic construct
  source 1..17: mol_type = other DNA
ctgctgaggggggagcc

SEQ ID NO: 115433 - DNA, 17 bp, synthetic construct
  source 1..17: mol_type = other DNA
tgctgaggggggagccc

SEQ ID NO: 115434 - DNA, 17 bp, synthetic construct
  source 1..17: mol_type = other DNA
gctgaggggggagccct

SEQ ID NO: 115435 - DNA, 17 bp, synthetic construct
  source 1..17: mol_type = other DNA
ctgaggggggagccctg

SEQ ID NO: 115436 - DNA, 17 bp, synthetic construct
  source 1..17: mol_type = other DNA
tgaggggggagccctgg

SEQ ID NO: 115437 - DNA, 17 bp, synthetic construct
  source 1..17: mol_type = other DNA
gaggggggagccctggg

SEQ ID NO: 115438 - DNA, 17 bp, synthetic construct
  source 1..17: mol_type = other DNA
aggggggagccctgggt

SEQ ID NO: 115439 - DNA, 17 bp, synthetic construct
  source 1..17: mol_type = other DNA
ggggggagccctgggtc

SEQ ID NO: 115440 - DNA, 17 bp, synthetic construct
  source 1..17: mol_type = other DNA
gggggagccctgggtcc

SEQ ID NO: 115441 - DNA, 17 bp, synthetic construct
  source 1..17: mol_type = other DNA
ggggagccctgggtccc

SEQ ID NO: 115442 - DNA, 17 bp, synthetic construct
  source 1..17: mol_type = other DNA
gggagccctgggtcccc

SEQ ID NO: 115443 - DNA, 17 bp, synthetic construct
  source 1..17: mol_type = other DNA
ggagccctgggtcccca

SEQ ID NO: 115444 - DNA, 17 bp, synthetic construct
  source 1..17: mol_type = other DNA
gagccctgggtccccat

SEQ ID NO: 115445 - DNA, 17 bp, synthetic construct
  source 1..17: mol_type = other DNA
agccctgggtccccatg

SEQ ID NO: 115446 - DNA, 17 bp, synthetic construct
  source 1..17: mol_type = other DNA
gccctgggtccccatga

SEQ ID NO: 115447 - DNA, 17 bp, synthetic construct
  source 1..17: mol_type = other DNA
ccctgggtccccatgat

SEQ ID NO: 115448 - DNA, 17 bp, synthetic construct
  source 1..17: mol_type = other DNA
cctgggtccccatgatg

SEQ ID NO: 115449 - DNA, 17 bp, synthetic construct
  source 1..17: mol_type = other DNA
ctgggtccccatgatgg

SEQ ID NO: 115450 - DNA, 17 bp, synthetic construct
  source 1..17: mol_type = other DNA
tgggtccccatgatggt

SEQ ID NO: 115451 - DNA, 17 bp, synthetic construct
  source 1..17: mol_type = other DNA
gggtccccatgatggtc

SEQ ID NO: 115452 - DNA, 17 bp, synthetic construct
  source 1..17: mol_type = other DNA
ggtccccatgatggtca

SEQ ID NO: 115453 - DNA, 17 bp, synthetic construct
  source 1..17: mol_type = other DNA
gtccccatgatggtcat

SEQ ID NO: 115454 - DNA, 17 bp, synthetic construct
  source 1..17: mol_type = other DNA
tccccatgatggtcata

SEQ ID NO: 115455 - DNA, 17 bp, synthetic construct
  source 1..17: mol_type = other DNA
ccccatgatggtcatag

SEQ ID NO: 115456 - DNA, 17 bp, synthetic construct
  source 1..17: mol_type = other DNA
cccatgatggtcataga

SEQ ID NO: 115457 - DNA, 17 bp, synthetic construct
  source 1..17: mol_type = other DNA
ccatgatggtcatagag

SEQ ID NO: 115458 - DNA, 17 bp, synthetic construct
  source 1..17: mol_type = other DNA
catgatggtcatagagg

SEQ ID NO: 115459 - DNA, 17 bp, synthetic construct
  source 1..17: mol_type = other DNA
atgatggtcatagaggg

SEQ ID NO: 115460 - DNA, 17 bp, synthetic construct
  source 1..17: mol_type = other DNA
tgatggtcatagaggga

SEQ ID NO: 115461 - DNA, 17 bp, synthetic construct
  source 1..17: mol_type = other DNA
gatggtcatagagggat

SEQ ID NO: 115462 - DNA, 17 bp, synthetic construct
  source 1..17: mol_type = other DNA
atggtcatagagggatg

SEQ ID NO: 115463 - DNA, 17 bp, synthetic construct
  source 1..17: mol_type = other DNA
tggtcatagagggatgg

SEQ ID NO: 115464 - DNA, 17 bp, synthetic construct
  source 1..17: mol_type = other DNA
ggtcatagagggatggc

SEQ ID NO: 115465 - DNA, 17 bp, synthetic construct
  source 1..17: mol_type = other DNA
gtcatagagggatggct

SEQ ID NO: 115466 - DNA, 17 bp, synthetic construct
  source 1..17: mol_type = other DNA
tcatagagggatggctc

SEQ ID NO: 115467 - DNA, 17 bp, synthetic construct
  source 1..17: mol_type = other DNA
catagagggatggctct

SEQ ID NO: 115468 - DNA, 17 bp, synthetic construct
  source 1..17: mol_type = other DNA
atagagggatggctctc

SEQ ID NO: 115469 - DNA, 17 bp, synthetic construct
  source 1..17: mol_type = other DNA
tagagggatggctctcc

SEQ ID NO: 115470 - DNA, 17 bp, synthetic construct
  source 1..17: mol_type = other DNA
agagggatggctctccc

SEQ ID NO: 115471 - DNA, 17 bp, synthetic construct
  source 1..17: mol_type = other DNA
gagggatggctctccct

SEQ ID NO: 115472 - DNA, 17 bp, synthetic construct
  source 1..17: mol_type = other DNA
agggatggctctccctg

SEQ ID NO: 115473 - DNA, 17 bp, synthetic construct
  source 1..17: mol_type = other DNA
gggatggctctccctgc

SEQ ID NO: 115474 - DNA, 17 bp, synthetic construct
  source 1..17: mol_type = other DNA
ggatggctctccctgct

SEQ ID NO: 115475 - DNA, 17 bp, synthetic construct
  source 1..17: mol_type = other DNA
gatggctctccctgctg

SEQ ID NO: 115476 - DNA, 17 bp, synthetic construct
  source 1..17: mol_type = other DNA
atggctctccctgctga

SEQ ID NO: 115477 - DNA, 17 bp, synthetic construct
  source 1..17: mol_type = other DNA
tggctctccctgctgag

SEQ ID NO: 115478 - DNA, 17 bp, synthetic construct
  source 1..17: mol_type = other DNA
ggctctccctgctgagc

SEQ ID NO: 115479 - DNA, 17 bp, synthetic construct
  source 1..17: mol_type = other DNA
gctctccctgctgagcg

SEQ ID NO: 115480 - DNA, 17 bp, synthetic construct
  source 1..17: mol_type = other DNA
ctctccctgctgagcgg

SEQ ID NO: 115481 - DNA, 17 bp, synthetic construct
  source 1..17: mol_type = other DNA
tctccctgctgagcggc

SEQ ID NO: 115482 - DNA, 17 bp, synthetic construct
  source 1..17: mol_type = other DNA
ctccctgctgagcggca

SEQ ID NO: 115483 - DNA, 17 bp, synthetic construct
  source 1..17: mol_type = other DNA
tccctgctgagcggcat

SEQ ID NO: 115484 - DNA, 17 bp, synthetic construct
  source 1..17: mol_type = other DNA
ccctgctgagcggcatg

SEQ ID NO: 115485 - DNA, 17 bp, synthetic construct
  source 1..17: mol_type = other DNA
cctgctgagcggcatgg

SEQ ID NO: 115486 - DNA, 17 bp, synthetic construct
  source 1..17: mol_type = other DNA
ctgctgagcggcatggg

SEQ ID NO: 115487 - DNA, 17 bp, synthetic construct
  source 1..17: mol_type = other DNA
tgctgagcggcatgggg

SEQ ID NO: 115488 - DNA, 17 bp, synthetic construct
  source 1..17: mol_type = other DNA
gctgagcggcatggggc

SEQ ID NO: 115489 - DNA, 17 bp, synthetic construct
  source 1..17: mol_type = other DNA
ctgagcggcatggggcc

SEQ ID NO: 115490 - DNA, 17 bp, synthetic construct
  source 1..17: mol_type = other DNA
tgagcggcatggggcca

SEQ ID NO: 115491 - DNA, 17 bp, synthetic construct
  source 1..17: mol_type = other DNA
gagcggcatggggccaa

SEQ ID NO: 115492 - DNA, 17 bp, synthetic construct
  source 1..17: mol_type = other DNA
agcggcatggggccaag

SEQ ID NO: 115493 - DNA, 17 bp, synthetic construct
  source 1..17: mol_type = other DNA
gcggcatggggccaagg

SEQ ID NO: 115494 - DNA, 17 bp, synthetic construct
  source 1..17: mol_type = other DNA
cggcatggggccaagga

SEQ ID NO: 115495 - DNA, 17 bp, synthetic construct
  source 1..17: mol_type = other DNA
ggcatggggccaaggag

SEQ ID NO: 115496 - DNA, 17 bp, synthetic construct
  source 1..17: mol_type = other DNA
gcatggggccaaggagc

SEQ ID NO: 115497 - DNA, 17 bp, synthetic construct
  source 1..17: mol_type = other DNA
catggggccaaggagcc

SEQ ID NO: 115498 - DNA, 17 bp, synthetic construct
  source 1..17: mol_type = other DNA
atggggccaaggagccc

SEQ ID NO: 115499 - DNA, 17 bp, synthetic construct
  source 1..17: mol_type = other DNA
tggggccaaggagcccc

SEQ ID NO: 115500 - DNA, 17 bp, synthetic construct
  source 1..17: mol_type = other DNA
ggggccaaggagccccc

SEQ ID NO: 115501 - DNA, 17 bp, synthetic construct
  source 1..17: mol_type = other DNA
gggccaaggagccccca

SEQ ID NO: 115502 - DNA, 17 bp, synthetic construct
  source 1..17: mol_type = other DNA
ggccaaggagcccccag

SEQ ID NO: 115503 - DNA, 17 bp, synthetic construct
  source 1..17: mol_type = other DNA
gccaaggagcccccagg

SEQ ID NO: 115504 - DNA, 17 bp, synthetic construct
  source 1..17: mol_type = other DNA
ccaaggagcccccaggc

SEQ ID NO: 115505 - DNA, 17 bp, synthetic construct
  source 1..17: mol_type = other DNA
caaggagcccccaggcc

SEQ ID NO: 115506 - DNA, 17 bp, synthetic construct
  source 1..17: mol_type = other DNA
aaggagcccccaggccc

SEQ ID NO: 115507 - DNA, 17 bp, synthetic construct
  source 1..17: mol_type = other DNA
aggagcccccaggccct

SEQ ID NO: 115508 - DNA, 17 bp, synthetic construct
  source 1..17: mol_type = other DNA
ggagcccccaggccctg

SEQ ID NO: 115509 - DNA, 17 bp, synthetic construct
  source 1..17: mol_type = other DNA
gagcccccaggccctga

SEQ ID NO: 115510 - DNA, 17 bp, synthetic construct
  source 1..17: mol_type = other DNA
agcccccaggccctgag

SEQ ID NO: 115511 - DNA, 17 bp, synthetic construct
  source 1..17: mol_type = other DNA
gcccccaggccctgaga

SEQ ID NO: 115512 - DNA, 17 bp, synthetic construct
  source 1..17: mol_type = other DNA
cccccaggccctgagac

SEQ ID NO: 115513 - DNA, 17 bp, synthetic construct
  source 1..17: mol_type = other DNA
ccccaggccctgagaca

SEQ ID NO: 115514 - DNA, 17 bp, synthetic construct
  source 1..17: mol_type = other DNA
cccaggccctgagacaa

SEQ ID NO: 115515 - DNA, 17 bp, synthetic construct
  source 1..17: mol_type = other DNA
ccaggccctgagacaag

SEQ ID NO: 115516 - DNA, 17 bp, synthetic construct
  source 1..17: mol_type = other DNA
caggccctgagacaagc

SEQ ID NO: 115517 - DNA, 17 bp, synthetic construct
  source 1..17: mol_type = other DNA
aggccctgagacaagct

SEQ ID NO: 115518 - DNA, 17 bp, synthetic construct
  source 1..17: mol_type = other DNA
ggccctgagacaagctg

SEQ ID NO: 115519 - DNA, 17 bp, synthetic construct
  source 1..17: mol_type = other DNA
gccctgagacaagctgc

SEQ ID NO: 115520 - DNA, 17 bp, synthetic construct
  source 1..17: mol_type = other DNA
ccctgagacaagctgct

SEQ ID NO: 115521 - DNA, 17 bp, synthetic construct
  source 1..17: mol_type = other DNA
cctgagacaagctgctg

SEQ ID NO: 115522 - DNA, 17 bp, synthetic construct
  source 1..17: mol_type = other DNA
ctgagacaagctgctgg

SEQ ID NO: 115523 - DNA, 17 bp, synthetic construct
  source 1..17: mol_type = other DNA
tgagacaagctgctggg

SEQ ID NO: 115524 - DNA, 17 bp, synthetic construct
  source 1..17: mol_type = other DNA
gagacaagctgctggga

SEQ ID NO: 115525 - DNA, 17 bp, synthetic construct
  source 1..17: mol_type = other DNA
agacaagctgctgggag

SEQ ID NO: 115526 - DNA, 17 bp, synthetic construct
  source 1..17: mol_type = other DNA
gacaagctgctgggagg

SEQ ID NO: 115527 - DNA, 17 bp, synthetic construct
  source 1..17: mol_type = other DNA
acaagctgctgggaggt

SEQ ID NO: 115528 - DNA, 17 bp, synthetic construct
  source 1..17: mol_type = other DNA
caagctgctgggaggtg

SEQ ID NO: 115529 - DNA, 17 bp, synthetic construct
  source 1..17: mol_type = other DNA
aagctgctgggaggtga

SEQ ID NO: 115530 - DNA, 17 bp, synthetic construct
  source 1..17: mol_type = other DNA
agctgctgggaggtgac

SEQ ID NO: 115531 - DNA, 17 bp, synthetic construct
  source 1..17: mol_type = other DNA
gctgctgggaggtgacc

SEQ ID NO: 115532 - DNA, 17 bp, synthetic construct
  source 1..17: mol_type = other DNA
ctgctgggaggtgacca

SEQ ID NO: 115533 - DNA, 17 bp, synthetic construct
  source 1..17: mol_type = other DNA
tgctgggaggtgaccag

SEQ ID NO: 115534 - DNA, 17 bp, synthetic construct
  source 1..17: mol_type = other DNA
gctgggaggtgaccaga

SEQ ID NO: 115535 - DNA, 17 bp, synthetic construct
  source 1..17: mol_type = other DNA
ctgggaggtgaccagag

SEQ ID NO: 115536 - DNA, 17 bp, synthetic construct
  source 1..17: mol_type = other DNA
tgggaggtgaccagagg

SEQ ID NO: 115537 - DNA, 17 bp, synthetic construct
  source 1..17: mol_type = other DNA
gggaggtgaccagaggt

SEQ ID NO: 115538 - DNA, 17 bp, synthetic construct
  source 1..17: mol_type = other DNA
ggaggtgaccagaggtg

SEQ ID NO: 115539 - DNA, 17 bp, synthetic construct
  source 1..17: mol_type = other DNA
gaggtgaccagaggtgc

SEQ ID NO: 115540 - DNA, 17 bp, synthetic construct
  source 1..17: mol_type = other DNA
aggtgaccagaggtgcc

SEQ ID NO: 115541 - DNA, 17 bp, synthetic construct
  source 1..17: mol_type = other DNA
ggtgaccagaggtgcca

SEQ ID NO: 115542 - DNA, 17 bp, synthetic construct
  source 1..17: mol_type = other DNA
gtgaccagaggtgccaa

SEQ ID NO: 115543 - DNA, 17 bp, synthetic construct
  source 1..17: mol_type = other DNA
tgaccagaggtgccaag

SEQ ID NO: 115544 - DNA, 17 bp, synthetic construct
  source 1..17: mol_type = other DNA
gaccagaggtgccaagg

SEQ ID NO: 115545 - DNA, 17 bp, synthetic construct
  source 1..17: mol_type = other DNA
accagaggtgccaagga

SEQ ID NO: 115546 - DNA, 17 bp, synthetic construct
  source 1..17: mol_type = other DNA
ccagaggtgccaaggac

SEQ ID NO: 115547 - DNA, 17 bp, synthetic construct
  source 1..17: mol_type = other DNA
cagaggtgccaaggacc

SEQ ID NO: 115548 - DNA, 17 bp, synthetic construct
  source 1..17: mol_type = other DNA
agaggtgccaaggacca

SEQ ID NO: 115549 - DNA, 17 bp, synthetic construct
  source 1..17: mol_type = other DNA
gaggtgccaaggaccac

SEQ ID NO: 115550 - DNA, 17 bp, synthetic construct
  source 1..17: mol_type = other DNA
aggtgccaaggaccacc

SEQ ID NO: 115551 - DNA, 17 bp, synthetic construct
  source 1..17: mol_type = other DNA
ggtgccaaggaccacct

SEQ ID NO: 115552 - DNA, 17 bp, synthetic construct
  source 1..17: mol_type = other DNA
gtgccaaggaccacctc

SEQ ID NO: 115553 - DNA, 17 bp, synthetic construct
  source 1..17: mol_type = other DNA
tgccaaggaccacctcc

SEQ ID NO: 115554 - DNA, 17 bp, synthetic construct
  source 1..17: mol_type = other DNA
gccaaggaccacctccc

SEQ ID NO: 115555 - DNA, 17 bp, synthetic construct
  source 1..17: mol_type = other DNA
ccaaggaccacctcccc

SEQ ID NO: 115556 - DNA, 17 bp, synthetic construct
  source 1..17: mol_type = other DNA
caaggaccacctcccca

SEQ ID NO: 115557 - DNA, 17 bp, synthetic construct
  source 1..17: mol_type = other DNA
aaggaccacctccccac

SEQ ID NO: 115558 - DNA, 17 bp, synthetic construct
  source 1..17: mol_type = other DNA
aggaccacctccccaca

SEQ ID NO: 115559 - DNA, 17 bp, synthetic construct
  source 1..17: mol_type = other DNA
ggaccacctccccacag

SEQ ID NO: 115560 - DNA, 17 bp, synthetic construct
  source 1..17: mol_type = other DNA
gaccacctccccacaga

SEQ ID NO: 115561 - DNA, 17 bp, synthetic construct
  source 1..17: mol_type = other DNA
accacctccccacagag

SEQ ID NO: 115562 - DNA, 17 bp, synthetic construct
  source 1..17: mol_type = other DNA
ccacctccccacagagc

SEQ ID NO: 115563 - DNA, 17 bp, synthetic construct
  source 1..17: mol_type = other DNA
cacctccccacagagcc

SEQ ID NO: 115564 - DNA, 17 bp, synthetic construct
  source 1..17: mol_type = other DNA
acctccccacagagcca

SEQ ID NO: 115565 - DNA, 17 bp, synthetic construct
  source 1..17: mol_type = other DNA
cctccccacagagccac

SEQ ID NO: 115566 - DNA, 17 bp, synthetic construct
  source 1..17: mol_type = other DNA
ctccccacagagccaca

SEQ ID NO: 115567 - DNA, 17 bp, synthetic construct
  source 1..17: mol_type = other DNA
tccccacagagccacat

SEQ ID NO: 115568 - DNA, 17 bp, synthetic construct
  source 1..17: mol_type = other DNA
ccccacagagccacatc

SEQ ID NO: 115569 - DNA, 17 bp, synthetic construct
  source 1..17: mol_type = other DNA
cccacagagccacatcc

SEQ ID NO: 115570 - DNA, 17 bp, synthetic construct
  source 1..17: mol_type = other DNA
ccacagagccacatccc

SEQ ID NO: 115571 - DNA, 17 bp, synthetic construct
  source 1..17: mol_type = other DNA
cacagagccacatcccc

SEQ ID NO: 115572 - DNA, 17 bp, synthetic construct
  source 1..17: mol_type = other DNA
acagagccacatccccc

SEQ ID NO: 115573 - DNA, 17 bp, synthetic construct
  source 1..17: mol_type = other DNA
cagagccacatccccca

SEQ ID NO: 115574 - DNA, 17 bp, synthetic construct
  source 1..17: mol_type = other DNA
agagccacatcccccac

SEQ ID NO: 115575 - DNA, 17 bp, synthetic construct
  source 1..17: mol_type = other DNA
gagccacatcccccaca

SEQ ID NO: 115576 - DNA, 17 bp, synthetic construct
  source 1..17: mol_type = other DNA
agccacatcccccacat

SEQ ID NO: 115577 - DNA, 17 bp, synthetic construct
  source 1..17: mol_type = other DNA
gccacatcccccacatg

SEQ ID NO: 115578 - DNA, 17 bp, synthetic construct
  source 1..17: mol_type = other DNA
ccacatcccccacatgg

SEQ ID NO: 115579 - DNA, 17 bp, synthetic construct
  source 1..17: mol_type = other DNA
cacatcccccacatggg

SEQ ID NO: 115580 - DNA, 17 bp, synthetic construct
  source 1..17: mol_type = other DNA
acatcccccacatgggc

SEQ ID NO: 115581 - DNA, 17 bp, synthetic construct
  source 1..17: mol_type = other DNA
catcccccacatgggca

SEQ ID NO: 115582 - DNA, 17 bp, synthetic construct
  source 1..17: mol_type = other DNA
atcccccacatgggcat

SEQ ID NO: 115583 - DNA, 17 bp, synthetic construct
  source 1..17: mol_type = other DNA
tcccccacatgggcatc

SEQ ID NO: 115584 - DNA, 17 bp, synthetic construct
  source 1..17: mol_type = other DNA
cccccacatgggcatcc

SEQ ID NO: 115585 - DNA, 17 bp, synthetic construct
  source 1..17: mol_type = other DNA
ccccacatgggcatccc

SEQ ID NO: 115586 - DNA, 17 bp, synthetic construct
  source 1..17: mol_type = other DNA
cccacatgggcatcccc

SEQ ID NO: 115587 - DNA, 17 bp, synthetic construct
  source 1..17: mol_type = other DNA
ccacatgggcatcccca

SEQ ID NO: 115588 - DNA, 17 bp, synthetic construct
  source 1..17: mol_type = other DNA
cacatgggcatccccag

SEQ ID NO: 115589 - DNA, 17 bp, synthetic construct
  source 1..17: mol_type = other DNA
acatgggcatccccagc

SEQ ID NO: 115590 - DNA, 17 bp, synthetic construct
  source 1..17: mol_type = other DNA
catgggcatccccagca

SEQ ID NO: 115591 - DNA, 17 bp, synthetic construct
  source 1..17: mol_type = other DNA
atgggcatccccagcac

SEQ ID NO: 115592 - DNA, 17 bp, synthetic construct
  source 1..17: mol_type = other DNA
tgggcatccccagcaca

SEQ ID NO: 115593 - DNA, 17 bp, synthetic construct
  source 1..17: mol_type = other DNA
gggcatccccagcacac

SEQ ID NO: 115594 - DNA, 17 bp, synthetic construct
  source 1..17: mol_type = other DNA
ggcatccccagcacact

SEQ ID NO: 115595 - DNA, 17 bp, synthetic construct
  source 1..17: mol_type = other DNA
gcatccccagcacactt

SEQ ID NO: 115596 - DNA, 17 bp, synthetic construct
  source 1..17: mol_type = other DNA
catccccagcacacttc

SEQ ID NO: 115597 - DNA, 17 bp, synthetic construct
  source 1..17: mol_type = other DNA
atccccagcacacttct

SEQ ID NO: 115598 - DNA, 17 bp, synthetic construct
  source 1..17: mol_type = other DNA
tccccagcacacttctg

SEQ ID NO: 115599 - DNA, 17 bp, synthetic construct
  source 1..17: mol_type = other DNA
ccccagcacacttctgg

SEQ ID NO: 115600 - DNA, 17 bp, synthetic construct
  source 1..17: mol_type = other DNA
cccagcacacttctggg

SEQ ID NO: 115601 - DNA, 17 bp, synthetic construct
  source 1..17: mol_type = other DNA
ccagcacacttctgggg

SEQ ID NO: 115602 - DNA, 17 bp, synthetic construct
  source 1..17: mol_type = other DNA
cagcacacttctggggg

SEQ ID NO: 115603 - DNA, 17 bp, synthetic construct
  source 1..17: mol_type = other DNA
agcacacttctgggggg

SEQ ID NO: 115604 - DNA, 17 bp, synthetic construct
  source 1..17: mol_type = other DNA
gcacacttctggggggc

SEQ ID NO: 115605 - DNA, 17 bp, synthetic construct
  source 1..17: mol_type = other DNA
cacacttctggggggca

SEQ ID NO: 115606 - DNA, 17 bp, synthetic construct
  source 1..17: mol_type = other DNA
acacttctggggggcac

SEQ ID NO: 115607 - DNA, 17 bp, synthetic construct
  source 1..17: mol_type = other DNA
cacttctggggggcacc

SEQ ID NO: 115608 - DNA, 17 bp, synthetic construct
  source 1..17: mol_type = other DNA
acttctggggggcaccc

SEQ ID NO: 115609 - DNA, 17 bp, synthetic construct
  source 1..17: mol_type = other DNA
cttctggggggcacccc

SEQ ID NO: 115610 - DNA, 17 bp, synthetic construct
  source 1..17: mol_type = other DNA
ttctggggggcacccca

SEQ ID NO: 115611 - DNA, 17 bp, synthetic construct
  source 1..17: mol_type = other DNA
tctggggggcaccccac

SEQ ID NO: 115612 - DNA, 17 bp, synthetic construct
  source 1..17: mol_type = other DNA
ctggggggcaccccaca

SEQ ID NO: 115613 - DNA, 17 bp, synthetic construct
  source 1..17: mol_type = other DNA
tggggggcaccccacat

SEQ ID NO: 115614 - DNA, 17 bp, synthetic construct
  source 1..17: mol_type = other DNA
ggggggcaccccacatc

SEQ ID NO: 115615 - DNA, 17 bp, synthetic construct
  source 1..17: mol_type = other DNA
gggggcaccccacatca

SEQ ID NO: 115616 - DNA, 17 bp, synthetic construct
  source 1..17: mol_type = other DNA
ggggcaccccacatcat

SEQ ID NO: 115617 - DNA, 17 bp, synthetic construct
  source 1..17: mol_type = other DNA
gggcaccccacatcatc

SEQ ID NO: 115618 - DNA, 17 bp, synthetic construct
  source 1..17: mol_type = other DNA
ggcaccccacatcatcg

SEQ ID NO: 115619 - DNA, 17 bp, synthetic construct
  source 1..17: mol_type = other DNA
gcaccccacatcatcga

SEQ ID NO: 115620 - DNA, 17 bp, synthetic construct
  source 1..17: mol_type = other DNA
caccccacatcatcgag

SEQ ID NO: 115621 - DNA, 17 bp, synthetic construct
  source 1..17: mol_type = other DNA
accccacatcatcgagc

SEQ ID NO: 115622 - DNA, 17 bp, synthetic construct
  source 1..17: mol_type = other DNA
ccccacatcatcgagcc

SEQ ID NO: 115623 - DNA, 17 bp, synthetic construct
  source 1..17: mol_type = other DNA
cccacatcatcgagcca

SEQ ID NO: 115624 - DNA, 17 bp, synthetic construct
  source 1..17: mol_type = other DNA
ccacatcatcgagccag

SEQ ID NO: 115625 - DNA, 17 bp, synthetic construct
  source 1..17: mol_type = other DNA
cacatcatcgagccagg

SEQ ID NO: 115626 - DNA, 17 bp, synthetic construct
  source 1..17: mol_type = other DNA
acatcatcgagccaggc

SEQ ID NO: 115627 - DNA, 17 bp, synthetic construct
  source 1..17: mol_type = other DNA
catcatcgagccaggcc

SEQ ID NO: 115628 - DNA, 17 bp, synthetic construct
  source 1..17: mol_type = other DNA
atcatcgagccaggccc

SEQ ID NO: 115629 - DNA, 17 bp, synthetic construct
  source 1..17: mol_type = other DNA
tcatcgagccaggccca

SEQ ID NO: 115630 - DNA, 17 bp, synthetic construct
  source 1..17: mol_type = other DNA
catcgagccaggcccaa

SEQ ID NO: 115631 - DNA, 17 bp, synthetic construct
  source 1..17: mol_type = other DNA
atcgagccaggcccaat

SEQ ID NO: 115632 - DNA, 17 bp, synthetic construct
  source 1..17: mol_type = other DNA
tcgagccaggcccaatg

SEQ ID NO: 115633 - DNA, 17 bp, synthetic construct
  source 1..17: mol_type = other DNA
cgagccaggcccaatgc

SEQ ID NO: 115634 - DNA, 17 bp, synthetic construct
  source 1..17: mol_type = other DNA
gagccaggcccaatgca

SEQ ID NO: 115635 - DNA, 17 bp, synthetic construct
  source 1..17: mol_type = other DNA
agccaggcccaatgcac

SEQ ID NO: 115636 - DNA, 17 bp, synthetic construct
  source 1..17: mol_type = other DNA
gccaggcccaatgcacg

SEQ ID NO: 115637 - DNA, 17 bp, synthetic construct
  source 1..17: mol_type = other DNA
ccaggcccaatgcacgc

SEQ ID NO: 115638 - DNA, 17 bp, synthetic construct
  source 1..17: mol_type = other DNA
caggcccaatgcacgcg

SEQ ID NO: 115639 - DNA, 17 bp, synthetic construct
  source 1..17: mol_type = other DNA
aggcccaatgcacgcgt

SEQ ID NO: 115640 - DNA, 17 bp, synthetic construct
  source 1..17: mol_type = other DNA
ggcccaatgcacgcgtg

SEQ ID NO: 115641 - DNA, 17 bp, synthetic construct
  source 1..17: mol_type = other DNA
gcccaatgcacgcgtgg

SEQ ID NO: 115642 - DNA, 17 bp, synthetic construct
  source 1..17: mol_type = other DNA
cccaatgcacgcgtggg

SEQ ID NO: 115643 - DNA, 17 bp, synthetic construct
  source 1..17: mol_type = other DNA
ccaatgcacgcgtgggt

SEQ ID NO: 115644 - DNA, 17 bp, synthetic construct
  source 1..17: mol_type = other DNA
caatgcacgcgtgggtc

SEQ ID NO: 115645 - DNA, 17 bp, synthetic construct
  source 1..17: mol_type = other DNA
aatgcacgcgtgggtcc

SEQ ID NO: 115646 - DNA, 17 bp, synthetic construct
  source 1..17: mol_type = other DNA
atgcacgcgtgggtcct

SEQ ID NO: 115647 - DNA, 17 bp, synthetic construct
  source 1..17: mol_type = other DNA
tgcacgcgtgggtcctt

SEQ ID NO: 115648 - DNA, 17 bp, synthetic construct
  source 1..17: mol_type = other DNA
gcacgcgtgggtccttc

SEQ ID NO: 115649 - DNA, 17 bp, synthetic construct
  source 1..17: mol_type = other DNA
cacgcgtgggtccttct

SEQ ID NO: 115650 - DNA, 17 bp, synthetic construct
  source 1..17: mol_type = other DNA
acgcgtgggtccttctc

SEQ ID NO: 115651 - DNA, 17 bp, synthetic construct
  source 1..17: mol_type = other DNA
cgcgtgggtccttctcc

SEQ ID NO: 115652 - DNA, 17 bp, synthetic construct
  source 1..17: mol_type = other DNA
gcgtgggtccttctccc

SEQ ID NO: 115653 - DNA, 17 bp, synthetic construct
  source 1..17: mol_type = other DNA
cgtgggtccttctcccc

SEQ ID NO: 115654 - DNA, 17 bp, synthetic construct
  source 1..17: mol_type = other DNA
gtgggtccttctcccca

SEQ ID NO: 115655 - DNA, 17 bp, synthetic construct
  source 1..17: mol_type = other DNA
tgggtccttctccccag

SEQ ID NO: 115656 - DNA, 17 bp, synthetic construct
  source 1..17: mol_type = other DNA
gggtccttctccccaga

SEQ ID NO: 115657 - DNA, 17 bp, synthetic construct
  source 1..17: mol_type = other DNA
ggtccttctccccagaa

SEQ ID NO: 115658 - DNA, 17 bp, synthetic construct
  source 1..17: mol_type = other DNA
gtccttctccccagaaa

SEQ ID NO: 115659 - DNA, 17 bp, synthetic construct
  source 1..17: mol_type = other DNA
tccttctccccagaaat

SEQ ID NO: 115660 - DNA, 17 bp, synthetic construct
  source 1..17: mol_type = other DNA
ccttctccccagaaatg

SEQ ID NO: 115661 - DNA, 17 bp, synthetic construct
  source 1..17: mol_type = other DNA
cttctccccagaaatgt

SEQ ID NO: 115662 - DNA, 17 bp, synthetic construct
  source 1..17: mol_type = other DNA
ttctccccagaaatgtg

SEQ ID NO: 115663 - DNA, 17 bp, synthetic construct
  source 1..17: mol_type = other DNA
tctccccagaaatgtgc

SEQ ID NO: 115664 - DNA, 17 bp, synthetic construct
  source 1..17: mol_type = other DNA
ctccccagaaatgtgcc

SEQ ID NO: 115665 - DNA, 17 bp, synthetic construct
  source 1..17: mol_type = other DNA
tccccagaaatgtgccg

SEQ ID NO: 115666 - DNA, 17 bp, synthetic construct
  source 1..17: mol_type = other DNA
ccccagaaatgtgccga

SEQ ID NO: 115667 - DNA, 17 bp, synthetic construct
  source 1..17: mol_type = other DNA
cccagaaatgtgccgac

SEQ ID NO: 115668 - DNA, 17 bp, synthetic construct
  source 1..17: mol_type = other DNA
ccagaaatgtgccgaca

SEQ ID NO: 115669 - DNA, 17 bp, synthetic construct
  source 1..17: mol_type = other DNA
cagaaatgtgccgacag

SEQ ID NO: 115670 - DNA, 17 bp, synthetic construct
  source 1..17: mol_type = other DNA
agaaatgtgccgacagc

SEQ ID NO: 115671 - DNA, 17 bp, synthetic construct
  source 1..17: mol_type = other DNA
gaaatgtgccgacagca

SEQ ID NO: 115672 - DNA, 17 bp, synthetic construct
  source 1..17: mol_type = other DNA
aaatgtgccgacagcag

SEQ ID NO: 115673 - DNA, 17 bp, synthetic construct
  source 1..17: mol_type = other DNA
aatgtgccgacagcagc

SEQ ID NO: 115674 - DNA, 17 bp, synthetic construct
  source 1..17: mol_type = other DNA
atgtgccgacagcagct

SEQ ID NO: 115675 - DNA, 17 bp, synthetic construct
  source 1..17: mol_type = other DNA
tgtgccgacagcagctt

SEQ ID NO: 115676 - DNA, 17 bp, synthetic construct
  source 1..17: mol_type = other DNA
gtgccgacagcagcttc

SEQ ID NO: 115677 - DNA, 17 bp, synthetic construct
  source 1..17: mol_type = other DNA
tgccgacagcagcttca

SEQ ID NO: 115678 - DNA, 17 bp, synthetic construct
  source 1..17: mol_type = other DNA
gccgacagcagcttcac

SEQ ID NO: 115679 - DNA, 17 bp, synthetic construct
  source 1..17: mol_type = other DNA
ccgacagcagcttcacc

SEQ ID NO: 115680 - DNA, 17 bp, synthetic construct
  source 1..17: mol_type = other DNA
cgacagcagcttcaccg

SEQ ID NO: 115681 - DNA, 17 bp, synthetic construct
  source 1..17: mol_type = other DNA
gacagcagcttcaccgt

SEQ ID NO: 115682 - DNA, 17 bp, synthetic construct
  source 1..17: mol_type = other DNA
acagcagcttcaccgtg

SEQ ID NO: 115683 - DNA, 17 bp, synthetic construct
  source 1..17: mol_type = other DNA
cagcagcttcaccgtgc

SEQ ID NO: 115684 - DNA, 17 bp, synthetic construct
  source 1..17: mol_type = other DNA
agcagcttcaccgtgct

SEQ ID NO: 115685 - DNA, 17 bp, synthetic construct
  source 1..17: mol_type = other DNA
gcagcttcaccgtgctg

SEQ ID NO: 115686 - DNA, 17 bp, synthetic construct
  source 1..17: mol_type = other DNA
cagcttcaccgtgctgg

SEQ ID NO: 115687 - DNA, 17 bp, synthetic construct
  source 1..17: mol_type = other DNA
agcttcaccgtgctggc

SEQ ID NO: 115688 - DNA, 17 bp, synthetic construct
  source 1..17: mol_type = other DNA
gcttcaccgtgctggct

SEQ ID NO: 115689 - DNA, 17 bp, synthetic construct
  source 1..17: mol_type = other DNA
cttcaccgtgctggctg

SEQ ID NO: 115690 - DNA, 17 bp, synthetic construct
  source 1..17: mol_type = other DNA
ttcaccgtgctggctga

SEQ ID NO: 115691 - DNA, 17 bp, synthetic construct
  source 1..17: mol_type = other DNA
tcaccgtgctggctgag

SEQ ID NO: 115692 - DNA, 17 bp, synthetic construct
  source 1..17: mol_type = other DNA
caccgtgctggctgagc

SEQ ID NO: 115693 - DNA, 17 bp, synthetic construct
  source 1..17: mol_type = other DNA
accgtgctggctgagct

SEQ ID NO: 115694 - DNA, 17 bp, synthetic construct
  source 1..17: mol_type = other DNA
ccgtgctggctgagctg

SEQ ID NO: 115695 - DNA, 17 bp, synthetic construct
  source 1..17: mol_type = other DNA
cgtgctggctgagctgc

SEQ ID NO: 115696 - DNA, 17 bp, synthetic construct
  source 1..17: mol_type = other DNA
gtgctggctgagctgcg

SEQ ID NO: 115697 - DNA, 17 bp, synthetic construct
  source 1..17: mol_type = other DNA
tgctggctgagctgcgg

SEQ ID NO: 115698 - DNA, 17 bp, synthetic construct
  source 1..17: mol_type = other DNA
gctggctgagctgcgga

SEQ ID NO: 115699 - DNA, 17 bp, synthetic construct
  source 1..17: mol_type = other DNA
ctggctgagctgcggaa

SEQ ID NO: 115700 - DNA, 17 bp, synthetic construct
  source 1..17: mol_type = other DNA
tggctgagctgcggaag

SEQ ID NO: 115701 - DNA, 17 bp, synthetic construct
  source 1..17: mol_type = other DNA
ggctgagctgcggaagt

SEQ ID NO: 115702 - DNA, 17 bp, synthetic construct
  source 1..17: mol_type = other DNA
gctgagctgcggaagtg

SEQ ID NO: 115703 - DNA, 17 bp, synthetic construct
  source 1..17: mol_type = other DNA
ctgagctgcggaagtgc

SEQ ID NO: 115704 - DNA, 17 bp, synthetic construct
  source 1..17: mol_type = other DNA
tgagctgcggaagtgcg

SEQ ID NO: 115705 - DNA, 17 bp, synthetic construct
  source 1..17: mol_type = other DNA
gagctgcggaagtgcgg

SEQ ID NO: 115706 - DNA, 17 bp, synthetic construct
  source 1..17: mol_type = other DNA
agctgcggaagtgcggc

SEQ ID NO: 115707 - DNA, 17 bp, synthetic construct
  source 1..17: mol_type = other DNA
gctgcggaagtgcggcc

SEQ ID NO: 115708 - DNA, 17 bp, synthetic construct
  source 1..17: mol_type = other DNA
ctgcggaagtgcggcct

SEQ ID NO: 115709 - DNA, 17 bp, synthetic construct
  source 1..17: mol_type = other DNA
tgcggaagtgcggcctg

SEQ ID NO: 115710 - DNA, 17 bp, synthetic construct
  source 1..17: mol_type = other DNA
gcggaagtgcggcctga

SEQ ID NO: 115711 - DNA, 17 bp, synthetic construct
  source 1..17: mol_type = other DNA
cggaagtgcggcctgac

SEQ ID NO: 115712 - DNA, 17 bp, synthetic construct
  source 1..17: mol_type = other DNA
ggaagtgcggcctgacg

SEQ ID NO: 115713 - DNA, 17 bp, synthetic construct
  source 1..17: mol_type = other DNA
gaagtgcggcctgacgg

SEQ ID NO: 115714 - DNA, 17 bp, synthetic construct
  source 1..17: mol_type = other DNA
aagtgcggcctgacgga

SEQ ID NO: 115715 - DNA, 17 bp, synthetic construct
  source 1..17: mol_type = other DNA
agtgcggcctgacggac

SEQ ID NO: 115716 - DNA, 17 bp, synthetic construct
  source 1..17: mol_type = other DNA
gtgcggcctgacggaca

SEQ ID NO: 115717 - DNA, 17 bp, synthetic construct
  source 1..17: mol_type = other DNA
tgcggcctgacggacaa

SEQ ID NO: 115718 - DNA, 17 bp, synthetic construct
  source 1..17: mol_type = other DNA
gcggcctgacggacaac

SEQ ID NO: 115719 - DNA, 17 bp, synthetic construct
  source 1..17: mol_type = other DNA
cggcctgacggacaacg

SEQ ID NO: 115720 - DNA, 17 bp, synthetic construct
  source 1..17: mol_type = other DNA
ggcctgacggacaacga

SEQ ID NO: 115721 - DNA, 17 bp, synthetic construct
  source 1..17: mol_type = other DNA
gcctgacggacaacgag

SEQ ID NO: 115722 - DNA, 17 bp, synthetic construct
  source 1..17: mol_type = other DNA
cctgacggacaacgaga

SEQ ID NO: 115723 - DNA, 17 bp, synthetic construct
  source 1..17: mol_type = other DNA
ctgacggacaacgagaa

SEQ ID NO: 115724 - DNA, 17 bp, synthetic construct
  source 1..17: mol_type = other DNA
tgacggacaacgagaac

SEQ ID NO: 115725 - DNA, 17 bp, synthetic construct
  source 1..17: mol_type = other DNA
gacggacaacgagaact

SEQ ID NO: 115726 - DNA, 17 bp, synthetic construct
  source 1..17: mol_type = other DNA
acggacaacgagaactg

SEQ ID NO: 115727 - DNA, 17 bp, synthetic construct
  source 1..17: mol_type = other DNA
cggacaacgagaactgc

SEQ ID NO: 115728 - DNA, 17 bp, synthetic construct
  source 1..17: mol_type = other DNA
ggacaacgagaactgcc

SEQ ID NO: 115729 - DNA, 17 bp, synthetic construct
  source 1..17: mol_type = other DNA
gacaacgagaactgcct

SEQ ID NO: 115730 - DNA, 17 bp, synthetic construct
  source 1..17: mol_type = other DNA
acaacgagaactgcctg

SEQ ID NO: 115731 - DNA, 17 bp, synthetic construct
  source 1..17: mol_type = other DNA
caacgagaactgcctga

SEQ ID NO: 115732 - DNA, 17 bp, synthetic construct
  source 1..17: mol_type = other DNA
aacgagaactgcctgaa

SEQ ID NO: 115733 - DNA, 17 bp, synthetic construct
  source 1..17: mol_type = other DNA
acgagaactgcctgaaa

SEQ ID NO: 115734 - DNA, 17 bp, synthetic construct
  source 1..17: mol_type = other DNA
cgagaactgcctgaaag

SEQ ID NO: 115735 - DNA, 17 bp, synthetic construct
  source 1..17: mol_type = other DNA
gagaactgcctgaaagc

SEQ ID NO: 115736 - DNA, 17 bp, synthetic construct
  source 1..17: mol_type = other DNA
agaactgcctgaaagcg

SEQ ID NO: 115737 - DNA, 17 bp, synthetic construct
  source 1..17: mol_type = other DNA
gaactgcctgaaagcgg

SEQ ID NO: 115738 - DNA, 17 bp, synthetic construct
  source 1..17: mol_type = other DNA
aactgcctgaaagcggt

SEQ ID NO: 115739 - DNA, 17 bp, synthetic construct
  source 1..17: mol_type = other DNA
actgcctgaaagcggtg

SEQ ID NO: 115740 - DNA, 17 bp, synthetic construct
  source 1..17: mol_type = other DNA
ctgcctgaaagcggtga

SEQ ID NO: 115741 - DNA, 17 bp, synthetic construct
  source 1..17: mol_type = other DNA
tgcctgaaagcggtgac

SEQ ID NO: 115742 - DNA, 17 bp, synthetic construct
  source 1..17: mol_type = other DNA
gcctgaaagcggtgacg

SEQ ID NO: 115743 - DNA, 17 bp, synthetic construct
  source 1..17: mol_type = other DNA
cctgaaagcggtgacgc

SEQ ID NO: 115744 - DNA, 17 bp, synthetic construct
  source 1..17: mol_type = other DNA
ctgaaagcggtgacgct

SEQ ID NO: 115745 - DNA, 17 bp, synthetic construct
  source 1..17: mol_type = other DNA
tgaaagcggtgacgctc

SEQ ID NO: 115746 - DNA, 17 bp, synthetic construct
  source 1..17: mol_type = other DNA
gaaagcggtgacgctca

SEQ ID NO: 115747 - DNA, 17 bp, synthetic construct
  source 1..17: mol_type = other DNA
aaagcggtgacgctcag

SEQ ID NO: 115748 - DNA, 17 bp, synthetic construct
  source 1..17: mol_type = other DNA
aagcggtgacgctcagc

SEQ ID NO: 115749 - DNA, 17 bp, synthetic construct
  source 1..17: mol_type = other DNA
agcggtgacgctcagcc

SEQ ID NO: 115750 - DNA, 17 bp, synthetic construct
  source 1..17: mol_type = other DNA
gcggtgacgctcagcct

SEQ ID NO: 115751 - DNA, 17 bp, synthetic construct
  source 1..17: mol_type = other DNA
cggtgacgctcagcctg

SEQ ID NO: 115752 - DNA, 17 bp, synthetic construct
  source 1..17: mol_type = other DNA
ggtgacgctcagcctgg

SEQ ID NO: 115753 - DNA, 17 bp, synthetic construct
  source 1..17: mol_type = other DNA
gtgacgctcagcctgga

SEQ ID NO: 115754 - DNA, 17 bp, synthetic construct
  source 1..17: mol_type = other DNA
tgacgctcagcctggac

SEQ ID NO: 115755 - DNA, 17 bp, synthetic construct
  source 1..17: mol_type = other DNA
gacgctcagcctggacg

SEQ ID NO: 115756 - DNA, 17 bp, synthetic construct
  source 1..17: mol_type = other DNA
acgctcagcctggacgg

SEQ ID NO: 115757 - DNA, 17 bp, synthetic construct
  source 1..17: mol_type = other DNA
cgctcagcctggacggc

SEQ ID NO: 115758 - DNA, 17 bp, synthetic construct
  source 1..17: mol_type = other DNA
gctcagcctggacggcg

SEQ ID NO: 115759 - DNA, 17 bp, synthetic construct
  source 1..17: mol_type = other DNA
ctcagcctggacggcgg

SEQ ID NO: 115760 - DNA, 17 bp, synthetic construct
  source 1..17: mol_type = other DNA
tcagcctggacggcggg

SEQ ID NO: 115761 - DNA, 17 bp, synthetic construct
  source 1..17: mol_type = other DNA
cagcctggacggcgggg

SEQ ID NO: 115762 - DNA, 17 bp, synthetic construct
  source 1..17: mol_type = other DNA
agcctggacggcgggga

SEQ ID NO: 115763 - DNA, 17 bp, synthetic construct
  source 1..17: mol_type = other DNA
gcctggacggcggggac

SEQ ID NO: 115764 - DNA, 17 bp, synthetic construct
  source 1..17: mol_type = other DNA
cctggacggcggggaca

SEQ ID NO: 115765 - DNA, 17 bp, synthetic construct
  source 1..17: mol_type = other DNA
ctggacggcggggacac

SEQ ID NO: 115766 - DNA, 17 bp, synthetic construct
  source 1..17: mol_type = other DNA
tggacggcggggacacg

SEQ ID NO: 115767 - DNA, 17 bp, synthetic construct
  source 1..17: mol_type = other DNA
ggacggcggggacacgg

SEQ ID NO: 115768 - DNA, 17 bp, synthetic construct
  source 1..17: mol_type = other DNA
gacggcggggacacggt

SEQ ID NO: 115769 - DNA, 17 bp, synthetic construct
  source 1..17: mol_type = other DNA
acggcggggacacggtg

SEQ ID NO: 115770 - DNA, 17 bp, synthetic construct
  source 1..17: mol_type = other DNA
cggcggggacacggtga

SEQ ID NO: 115771 - DNA, 17 bp, synthetic construct
  source 1..17: mol_type = other DNA
ggcggggacacggtgag

SEQ ID NO: 115772 - DNA, 17 bp, synthetic construct
  source 1..17: mol_type = other DNA
gcggggacacggtgagg

SEQ ID NO: 115773 - DNA, 17 bp, synthetic construct
  source 1..17: mol_type = other DNA
cggggacacggtgagga

SEQ ID NO: 115774 - DNA, 17 bp, synthetic construct
  source 1..17: mol_type = other DNA
ggggacacggtgaggac

SEQ ID NO: 115775 - DNA, 17 bp, synthetic construct
  source 1..17: mol_type = other DNA
gggacacggtgaggacc

SEQ ID NO: 115776 - DNA, 17 bp, synthetic construct
  source 1..17: mol_type = other DNA
ggacacggtgaggacct

SEQ ID NO: 115777 - DNA, 17 bp, synthetic construct
  source 1..17: mol_type = other DNA
gacacggtgaggacctg

SEQ ID NO: 115778 - DNA, 17 bp, synthetic construct
  source 1..17: mol_type = other DNA
acacggtgaggacctgg

SEQ ID NO: 115779 - DNA, 17 bp, synthetic construct
  source 1..17: mol_type = other DNA
cacggtgaggacctggc

SEQ ID NO: 115780 - DNA, 17 bp, synthetic construct
  source 1..17: mol_type = other DNA
acggtgaggacctggct

SEQ ID NO: 115781 - DNA, 17 bp, synthetic construct
  source 1..17: mol_type = other DNA
cggtgaggacctggctg

SEQ ID NO: 115782 - DNA, 17 bp, synthetic construct
  source 1..17: mol_type = other DNA
ggtgaggacctggctgg

SEQ ID NO: 115783 - DNA, 17 bp, synthetic construct
  source 1..17: mol_type = other DNA
gtgaggacctggctggg

SEQ ID NO: 115784 - DNA, 17 bp, synthetic construct
  source 1..17: mol_type = other DNA
tgaggacctggctgggg

SEQ ID NO: 115785 - DNA, 17 bp, synthetic construct
  source 1..17: mol_type = other DNA
gaggacctggctggggc

SEQ ID NO: 115786 - DNA, 17 bp, synthetic construct
  source 1..17: mol_type = other DNA
aggacctggctggggcc

SEQ ID NO: 115787 - DNA, 17 bp, synthetic construct
  source 1..17: mol_type = other DNA
ggacctggctggggccc

SEQ ID NO: 115788 - DNA, 17 bp, synthetic construct
  source 1..17: mol_type = other DNA
gacctggctggggccct

SEQ ID NO: 115789 - DNA, 17 bp, synthetic construct
  source 1..17: mol_type = other DNA
acctggctggggccctg

SEQ ID NO: 115790 - DNA, 17 bp, synthetic construct
  source 1..17: mol_type = other DNA
cctggctggggccctgg

SEQ ID NO: 115791 - DNA, 17 bp, synthetic construct
  source 1..17: mol_type = other DNA
ctggctggggccctggg

SEQ ID NO: 115792 - DNA, 17 bp, synthetic construct
  source 1..17: mol_type = other DNA
tggctggggccctgggc

SEQ ID NO: 115793 - DNA, 17 bp, synthetic construct
  source 1..17: mol_type = other DNA
ggctggggccctgggct

SEQ ID NO: 115794 - DNA, 17 bp, synthetic construct
  source 1..17: mol_type = other DNA
gctggggccctgggctg

SEQ ID NO: 115795 - DNA, 17 bp, synthetic construct
  source 1..17: mol_type = other DNA
ctggggccctgggctgg

SEQ ID NO: 115796 - DNA, 17 bp, synthetic construct
  source 1..17: mol_type = other DNA
tggggccctgggctggg

SEQ ID NO: 115797 - DNA, 17 bp, synthetic construct
  source 1..17: mol_type = other DNA
ggggccctgggctggga

SEQ ID NO: 115798 - DNA, 17 bp, synthetic construct
  source 1..17: mol_type = other DNA
gggccctgggctgggac

SEQ ID NO: 115799 - DNA, 17 bp, synthetic construct
  source 1..17: mol_type = other DNA
ggccctgggctgggaca

SEQ ID NO: 115800 - DNA, 17 bp, synthetic construct
  source 1..17: mol_type = other DNA
gccctgggctgggacag

SEQ ID NO: 115801 - DNA, 17 bp, synthetic construct
  source 1..17: mol_type = other DNA
ccctgggctgggacagg

SEQ ID NO: 115802 - DNA, 17 bp, synthetic construct
  source 1..17: mol_type = other DNA
cctgggctgggacagga

SEQ ID NO: 115803 - DNA, 17 bp, synthetic construct
  source 1..17: mol_type = other DNA
ctgggctgggacaggaa

SEQ ID NO: 115804 - DNA, 17 bp, synthetic construct
  source 1..17: mol_type = other DNA
tgggctgggacaggaag

SEQ ID NO: 115805 - DNA, 17 bp, synthetic construct
  source 1..17: mol_type = other DNA
gggctgggacaggaaga

SEQ ID NO: 115806 - DNA, 17 bp, synthetic construct
  source 1..17: mol_type = other DNA
ggctgggacaggaagag

SEQ ID NO: 115807 - DNA, 17 bp, synthetic construct
  source 1..17: mol_type = other DNA
gctgggacaggaagagg

SEQ ID NO: 115808 - DNA, 17 bp, synthetic construct
  source 1..17: mol_type = other DNA
ctgggacaggaagaggc

SEQ ID NO: 115809 - DNA, 17 bp, synthetic construct
  source 1..17: mol_type = other DNA
tgggacaggaagaggca

SEQ ID NO: 115810 - DNA, 17 bp, synthetic construct
  source 1..17: mol_type = other DNA
gggacaggaagaggcat

SEQ ID NO: 115811 - DNA, 17 bp, synthetic construct
  source 1..17: mol_type = other DNA
ggacaggaagaggcatg

SEQ ID NO: 115812 - DNA, 17 bp, synthetic construct
  source 1..17: mol_type = other DNA
gacaggaagaggcatgc

SEQ ID NO: 115813 - DNA, 17 bp, synthetic construct
  source 1..17: mol_type = other DNA
acaggaagaggcatgcg

SEQ ID NO: 115814 - DNA, 17 bp, synthetic construct
  source 1..17: mol_type = other DNA
caggaagaggcatgcga

SEQ ID NO: 115815 - DNA, 17 bp, synthetic construct
  source 1..17: mol_type = other DNA
aggaagaggcatgcgaa

SEQ ID NO: 115816 - DNA, 17 bp, synthetic construct
  source 1..17: mol_type = other DNA
ggaagaggcatgcgaag

SEQ ID NO: 115817 - DNA, 17 bp, synthetic construct
  source 1..17: mol_type = other DNA
gaagaggcatgcgaagg

SEQ ID NO: 115818 - DNA, 17 bp, synthetic construct
  source 1..17: mol_type = other DNA
aagaggcatgcgaaggt

SEQ ID NO: 115819 - DNA, 17 bp, synthetic construct
  source 1..17: mol_type = other DNA
agaggcatgcgaaggtg

SEQ ID NO: 115820 - DNA, 17 bp, synthetic construct
  source 1..17: mol_type = other DNA
gaggcatgcgaaggtgt

SEQ ID NO: 115821 - DNA, 17 bp, synthetic construct
  source 1..17: mol_type = other DNA
aggcatgcgaaggtgtg

SEQ ID NO: 115822 - DNA, 17 bp, synthetic construct
  source 1..17: mol_type = other DNA
ggcatgcgaaggtgtgt

SEQ ID NO: 115823 - DNA, 17 bp, synthetic construct
  source 1..17: mol_type = other DNA
gcatgcgaaggtgtgtg

SEQ ID NO: 115824 - DNA, 17 bp, synthetic construct
  source 1..17: mol_type = other DNA
catgcgaaggtgtgtgg

SEQ ID NO: 115825 - DNA, 17 bp, synthetic construct
  source 1..17: mol_type = other DNA
atgcgaaggtgtgtggg

SEQ ID NO: 115826 - DNA, 17 bp, synthetic construct
  source 1..17: mol_type = other DNA
tgcgaaggtgtgtgggg

SEQ ID NO: 115827 - DNA, 17 bp, synthetic construct
  source 1..17: mol_type = other DNA
gcgaaggtgtgtgggga

SEQ ID NO: 115828 - DNA, 17 bp, synthetic construct
  source 1..17: mol_type = other DNA
cgaaggtgtgtggggag

SEQ ID NO: 115829 - DNA, 17 bp, synthetic construct
  source 1..17: mol_type = other DNA
gaaggtgtgtggggagc

SEQ ID NO: 115830 - DNA, 17 bp, synthetic construct
  source 1..17: mol_type = other DNA
aaggtgtgtggggagca

SEQ ID NO: 115831 - DNA, 17 bp, synthetic construct
  source 1..17: mol_type = other DNA
aggtgtgtggggagcaa

SEQ ID NO: 115832 - DNA, 17 bp, synthetic construct
  source 1..17: mol_type = other DNA
ggtgtgtggggagcaag

SEQ ID NO: 115833 - DNA, 17 bp, synthetic construct
  source 1..17: mol_type = other DNA
gtgtgtggggagcaagc

SEQ ID NO: 115834 - DNA, 17 bp, synthetic construct
  source 1..17: mol_type = other DNA
tgtgtggggagcaagca

SEQ ID NO: 115835 - DNA, 17 bp, synthetic construct
  source 1..17: mol_type = other DNA
gtgtggggagcaagcac

SEQ ID NO: 115836 - DNA, 17 bp, synthetic construct
  source 1..17: mol_type = other DNA
tgtggggagcaagcacg

SEQ ID NO: 115837 - DNA, 17 bp, synthetic construct
  source 1..17: mol_type = other DNA
gtggggagcaagcacgg

SEQ ID NO: 115838 - DNA, 17 bp, synthetic construct
  source 1..17: mol_type = other DNA
tggggagcaagcacggt

SEQ ID NO: 115839 - DNA, 17 bp, synthetic construct
  source 1..17: mol_type = other DNA
ggggagcaagcacggtc

SEQ ID NO: 115840 - DNA, 17 bp, synthetic construct
  source 1..17: mol_type = other DNA
gggagcaagcacggtca

SEQ ID NO: 115841 - DNA, 17 bp, synthetic construct
  source 1..17: mol_type = other DNA
ggagcaagcacggtcag

SEQ ID NO: 115842 - DNA, 17 bp, synthetic construct
  source 1..17: mol_type = other DNA
gagcaagcacggtcagg

SEQ ID NO: 115843 - DNA, 17 bp, synthetic construct
  source 1..17: mol_type = other DNA
agcaagcacggtcaggt

SEQ ID NO: 115844 - DNA, 17 bp, synthetic construct
  source 1..17: mol_type = other DNA
gcaagcacggtcaggtc

SEQ ID NO: 115845 - DNA, 17 bp, synthetic construct
  source 1..17: mol_type = other DNA
caagcacggtcaggtcc

SEQ ID NO: 115846 - DNA, 17 bp, synthetic construct
  source 1..17: mol_type = other DNA
aagcacggtcaggtccc

SEQ ID NO: 115847 - DNA, 17 bp, synthetic construct
  source 1..17: mol_type = other DNA
agcacggtcaggtcccc

SEQ ID NO: 115848 - DNA, 17 bp, synthetic construct
  source 1..17: mol_type = other DNA
gcacggtcaggtccccc

SEQ ID NO: 115849 - DNA, 17 bp, synthetic construct
  source 1..17: mol_type = other DNA
cacggtcaggtccccct

SEQ ID NO: 115850 - DNA, 17 bp, synthetic construct
  source 1..17: mol_type = other DNA
acggtcaggtccccctc

SEQ ID NO: 115851 - DNA, 17 bp, synthetic construct
  source 1..17: mol_type = other DNA
cggtcaggtccccctcc

SEQ ID NO: 115852 - DNA, 17 bp, synthetic construct
  source 1..17: mol_type = other DNA
ggtcaggtccccctcca

SEQ ID NO: 115853 - DNA, 17 bp, synthetic construct
  source 1..17: mol_type = other DNA
gtcaggtccccctccag

SEQ ID NO: 115854 - DNA, 17 bp, synthetic construct
  source 1..17: mol_type = other DNA
tcaggtccccctccagc

SEQ ID NO: 115855 - DNA, 17 bp, synthetic construct
  source 1..17: mol_type = other DNA
caggtccccctccagcc

SEQ ID NO: 115856 - DNA, 17 bp, synthetic construct
  source 1..17: mol_type = other DNA
aggtccccctccagccc

SEQ ID NO: 115857 - DNA, 17 bp, synthetic construct
  source 1..17: mol_type = other DNA
ggtccccctccagcccc

SEQ ID NO: 115858 - DNA, 17 bp, synthetic construct
  source 1..17: mol_type = other DNA
gtccccctccagccccg

SEQ ID NO: 115859 - DNA, 17 bp, synthetic construct
  source 1..17: mol_type = other DNA
tccccctccagccccga

SEQ ID NO: 115860 - DNA, 17 bp, synthetic construct
  source 1..17: mol_type = other DNA
ccccctccagccccgag

SEQ ID NO: 115861 - DNA, 17 bp, synthetic construct
  source 1..17: mol_type = other DNA
cccctccagccccgagg

SEQ ID NO: 115862 - DNA, 17 bp, synthetic construct
  source 1..17: mol_type = other DNA
ccctccagccccgaggc

SEQ ID NO: 115863 - DNA, 17 bp, synthetic construct
  source 1..17: mol_type = other DNA
cctccagccccgaggcc

SEQ ID NO: 115864 - DNA, 17 bp, synthetic construct
  source 1..17: mol_type = other DNA
ctccagccccgaggcca

SEQ ID NO: 115865 - DNA, 17 bp, synthetic construct
  source 1..17: mol_type = other DNA
tccagccccgaggccag

SEQ ID NO: 115866 - DNA, 17 bp, synthetic construct
  source 1..17: mol_type = other DNA
ccagccccgaggccagg

SEQ ID NO: 115867 - DNA, 17 bp, synthetic construct
  source 1..17: mol_type = other DNA
cagccccgaggccaggt

SEQ ID NO: 115868 - DNA, 17 bp, synthetic construct
  source 1..17: mol_type = other DNA
agccccgaggccaggtc

SEQ ID NO: 115869 - DNA, 17 bp, synthetic construct
  source 1..17: mol_type = other DNA
gccccgaggccaggtcc

SEQ ID NO: 115870 - DNA, 17 bp, synthetic construct
  source 1..17: mol_type = other DNA
ccccgaggccaggtccc

SEQ ID NO: 115871 - DNA, 17 bp, synthetic construct
  source 1..17: mol_type = other DNA
cccgaggccaggtcccc

SEQ ID NO: 115872 - DNA, 17 bp, synthetic construct
  source 1..17: mol_type = other DNA
ccgaggccaggtccccc

SEQ ID NO: 115873 - DNA, 17 bp, synthetic construct
  source 1..17: mol_type = other DNA
cgaggccaggtcccccc

SEQ ID NO: 115874 - DNA, 17 bp, synthetic construct
  source 1..17: mol_type = other DNA
gaggccaggtcccccct

SEQ ID NO: 115875 - DNA, 17 bp, synthetic construct
  source 1..17: mol_type = other DNA
aggccaggtcccccctc

SEQ ID NO: 115876 - DNA, 17 bp, synthetic construct
  source 1..17: mol_type = other DNA
ggccaggtcccccctcc

SEQ ID NO: 115877 - DNA, 17 bp, synthetic construct
  source 1..17: mol_type = other DNA
gccaggtcccccctcca

SEQ ID NO: 115878 - DNA, 17 bp, synthetic construct
  source 1..17: mol_type = other DNA
ccaggtcccccctccag

SEQ ID NO: 115879 - DNA, 17 bp, synthetic construct
  source 1..17: mol_type = other DNA
caggtcccccctccagc

SEQ ID NO: 115880 - DNA, 17 bp, synthetic construct
  source 1..17: mol_type = other DNA
aggtcccccctccagcc

SEQ ID NO: 115881 - DNA, 17 bp, synthetic construct
  source 1..17: mol_type = other DNA
ggtcccccctccagccc

SEQ ID NO: 115882 - DNA, 17 bp, synthetic construct
  source 1..17: mol_type = other DNA
gtcccccctccagcccc

SEQ ID NO: 115883 - DNA, 17 bp, synthetic construct
  source 1..17: mol_type = other DNA
tcccccctccagccccc

SEQ ID NO: 115884 - DNA, 17 bp, synthetic construct
  source 1..17: mol_type = other DNA
cccccctccagccccca

SEQ ID NO: 115885 - DNA, 17 bp, synthetic construct
  source 1..17: mol_type = other DNA
ccccctccagcccccag

SEQ ID NO: 115886 - DNA, 17 bp, synthetic construct
  source 1..17: mol_type = other DNA
cccctccagcccccagg

SEQ ID NO: 115887 - DNA, 17 bp, synthetic construct
  source 1..17: mol_type = other DNA
ccctccagcccccaggc

SEQ ID NO: 115888 - DNA, 17 bp, synthetic construct
  source 1..17: mol_type = other DNA
cctccagcccccaggcc

SEQ ID NO: 115889 - DNA, 17 bp, synthetic construct
  source 1..17: mol_type = other DNA
ctccagcccccaggcca

SEQ ID NO: 115890 - DNA, 17 bp, synthetic construct
  source 1..17: mol_type = other DNA
tccagcccccaggccag

SEQ ID NO: 115891 - DNA, 17 bp, synthetic construct
  source 1..17: mol_type = other DNA
ccagcccccaggccagg

SEQ ID NO: 115892 - DNA, 17 bp, synthetic construct
  source 1..17: mol_type = other DNA
cagcccccaggccaggt

SEQ ID NO: 115893 - DNA, 17 bp, synthetic construct
  source 1..17: mol_type = other DNA
agcccccaggccaggtc

SEQ ID NO: 115894 - DNA, 17 bp, synthetic construct
  source 1..17: mol_type = other DNA
gcccccaggccaggtcc

SEQ ID NO: 115895 - DNA, 17 bp, synthetic construct
  source 1..17: mol_type = other DNA
cccccaggccaggtccc

SEQ ID NO: 115896 - DNA, 17 bp, synthetic construct
  source 1..17: mol_type = other DNA
ccccaggccaggtcccc

SEQ ID NO: 115897 - DNA, 17 bp, synthetic construct
  source 1..17: mol_type = other DNA
cccaggccaggtccccc

SEQ ID NO: 115898 - DNA, 17 bp, synthetic construct
  source 1..17: mol_type = other DNA
ccaggccaggtccccct

SEQ ID NO: 115899 - DNA, 17 bp, synthetic construct
  source 1..17: mol_type = other DNA
caggccaggtccccctc

SEQ ID NO: 115900 - DNA, 17 bp, synthetic construct
  source 1..17: mol_type = other DNA
aggccaggtccccctcc

SEQ ID NO: 115901 - DNA, 17 bp, synthetic construct
  source 1..17: mol_type = other DNA
ggccaggtccccctcca

SEQ ID NO: 115902 - DNA, 17 bp, synthetic construct
  source 1..17: mol_type = other DNA
gccaggtccccctccag

SEQ ID NO: 115903 - DNA, 17 bp, synthetic construct
  source 1..17: mol_type = other DNA
ccaggtccccctccagc

SEQ ID NO: 115904 - DNA, 17 bp, synthetic construct
  source 1..17: mol_type = other DNA
caggtccccctccagcc

SEQ ID NO: 115905 - DNA, 17 bp, synthetic construct
  source 1..17: mol_type = other DNA
aggtccccctccagccc

SEQ ID NO: 115906 - DNA, 17 bp, synthetic construct
  source 1..17: mol_type = other DNA
ggtccccctccagcccc

SEQ ID NO: 115907 - DNA, 17 bp, synthetic construct
  source 1..17: mol_type = other DNA
gtccccctccagccccc

SEQ ID NO: 115908 - DNA, 17 bp, synthetic construct
  source 1..17: mol_type = other DNA
tccccctccagccccca

SEQ ID NO: 115909 - DNA, 17 bp, synthetic construct
  source 1..17: mol_type = other DNA
ccccctccagcccccag

SEQ ID NO: 115910 - DNA, 17 bp, synthetic construct
  source 1..17: mol_type = other DNA
cccctccagcccccagg

SEQ ID NO: 115911 - DNA, 17 bp, synthetic construct
  source 1..17: mol_type = other DNA
ccctccagcccccaggt

SEQ ID NO: 115912 - DNA, 17 bp, synthetic construct
  source 1..17: mol_type = other DNA
cctccagcccccaggtc

SEQ ID NO: 115913 - DNA, 17 bp, synthetic construct
  source 1..17: mol_type = other DNA
ctccagcccccaggtca

SEQ ID NO: 115914 - DNA, 17 bp, synthetic construct
  source 1..17: mol_type = other DNA
tccagcccccaggtcag

SEQ ID NO: 115915 - DNA, 17 bp, synthetic construct
  source 1..17: mol_type = other DNA
ccagcccccaggtcagg

SEQ ID NO: 115916 - DNA, 17 bp, synthetic construct
  source 1..17: mol_type = other DNA
cagcccccaggtcaggt

SEQ ID NO: 115917 - DNA, 17 bp, synthetic construct
  source 1..17: mol_type = other DNA
agcccccaggtcaggtc

SEQ ID NO: 115918 - DNA, 17 bp, synthetic construct
  source 1..17: mol_type = other DNA
gcccccaggtcaggtcc

SEQ ID NO: 115919 - DNA, 17 bp, synthetic construct
  source 1..17: mol_type = other DNA
cccccaggtcaggtccc

SEQ ID NO: 115920 - DNA, 17 bp, synthetic construct
  source 1..17: mol_type = other DNA
ccccaggtcaggtcccc

SEQ ID NO: 115921 - DNA, 17 bp, synthetic construct
  source 1..17: mol_type = other DNA
cccaggtcaggtccccc

SEQ ID NO: 115922 - DNA, 17 bp, synthetic construct
  source 1..17: mol_type = other DNA
ccaggtcaggtcccccc

SEQ ID NO: 115923 - DNA, 17 bp, synthetic construct
  source 1..17: mol_type = other DNA
caggtcaggtcccccct

SEQ ID NO: 115924 - DNA, 17 bp, synthetic construct
  source 1..17: mol_type = other DNA
aggtcaggtcccccctc

SEQ ID NO: 115925 - DNA, 17 bp, synthetic construct
  source 1..17: mol_type = other DNA
ggtcaggtcccccctcc

SEQ ID NO: 115926 - DNA, 17 bp, synthetic construct
  source 1..17: mol_type = other DNA
gtcaggtcccccctcca

SEQ ID NO: 115927 - DNA, 17 bp, synthetic construct
  source 1..17: mol_type = other DNA
tcaggtcccccctccag

SEQ ID NO: 115928 - DNA, 17 bp, synthetic construct
  source 1..17: mol_type = other DNA
caggtcccccctccagc

SEQ ID NO: 115929 - DNA, 17 bp, synthetic construct
  source 1..17: mol_type = other DNA
aggtcccccctccagcc

SEQ ID NO: 115930 - DNA, 17 bp, synthetic construct
  source 1..17: mol_type = other DNA
ggtcccccctccagccc

SEQ ID NO: 115931 - DNA, 17 bp, synthetic construct
  source 1..17: mol_type = other DNA
gtcccccctccagccct

SEQ ID NO: 115932 - DNA, 17 bp, synthetic construct
  source 1..17: mol_type = other DNA
tcccccctccagccctg

SEQ ID NO: 115933 - DNA, 17 bp, synthetic construct
  source 1..17: mol_type = other DNA
cccccctccagccctga

SEQ ID NO: 115934 - DNA, 17 bp, synthetic construct
  source 1..17: mol_type = other DNA
ccccctccagccctgag

SEQ ID NO: 115935 - DNA, 17 bp, synthetic construct
  source 1..17: mol_type = other DNA
cccctccagccctgagg

SEQ ID NO: 115936 - DNA, 17 bp, synthetic construct
  source 1..17: mol_type = other DNA
ccctccagccctgaggt

SEQ ID NO: 115937 - DNA, 17 bp, synthetic construct
  source 1..17: mol_type = other DNA
cctccagccctgaggtc

SEQ ID NO: 115938 - DNA, 17 bp, synthetic construct
  source 1..17: mol_type = other DNA
ctccagccctgaggtca

SEQ ID NO: 115939 - DNA, 17 bp, synthetic construct
  source 1..17: mol_type = other DNA
tccagccctgaggtcag

SEQ ID NO: 115940 - DNA, 17 bp, synthetic construct
  source 1..17: mol_type = other DNA
ccagccctgaggtcagg

SEQ ID NO: 115941 - DNA, 17 bp, synthetic construct
  source 1..17: mol_type = other DNA
cagccctgaggtcaggt

SEQ ID NO: 115942 - DNA, 17 bp, synthetic construct
  source 1..17: mol_type = other DNA
agccctgaggtcaggtc

SEQ ID NO: 115943 - DNA, 17 bp, synthetic construct
  source 1..17: mol_type = other DNA
gccctgaggtcaggtcc

SEQ ID NO: 115944 - DNA, 17 bp, synthetic construct
  source 1..17: mol_type = other DNA
ccctgaggtcaggtcct

SEQ ID NO: 115945 - DNA, 17 bp, synthetic construct
  source 1..17: mol_type = other DNA
cctgaggtcaggtcctc

SEQ ID NO: 115946 - DNA, 17 bp, synthetic construct
  source 1..17: mol_type = other DNA
ctgaggtcaggtcctcc

SEQ ID NO: 115947 - DNA, 17 bp, synthetic construct
  source 1..17: mol_type = other DNA
tgaggtcaggtcctccc

SEQ ID NO: 115948 - DNA, 17 bp, synthetic construct
  source 1..17: mol_type = other DNA
gaggtcaggtcctcccg

SEQ ID NO: 115949 - DNA, 17 bp, synthetic construct
  source 1..17: mol_type = other DNA
aggtcaggtcctcccgg

SEQ ID NO: 115950 - DNA, 17 bp, synthetic construct
  source 1..17: mol_type = other DNA
ggtcaggtcctcccggg

SEQ ID NO: 115951 - DNA, 17 bp, synthetic construct
  source 1..17: mol_type = other DNA
gtcaggtcctcccgggg

SEQ ID NO: 115952 - DNA, 17 bp, synthetic construct
  source 1..17: mol_type = other DNA
tcaggtcctcccggggg

SEQ ID NO: 115953 - DNA, 17 bp, synthetic construct
  source 1..17: mol_type = other DNA
caggtcctcccgggggg

SEQ ID NO: 115954 - DNA, 17 bp, synthetic construct
  source 1..17: mol_type = other DNA
aggtcctcccggggggg

SEQ ID NO: 115955 - DNA, 17 bp, synthetic construct
  source 1..17: mol_type = other DNA
ggtcctcccgggggggc

SEQ ID NO: 115956 - DNA, 17 bp, synthetic construct
  source 1..17: mol_type = other DNA
gtcctcccgggggggca

SEQ ID NO: 115957 - DNA, 17 bp, synthetic construct
  source 1..17: mol_type = other DNA
tcctcccgggggggcaa

SEQ ID NO: 115958 - DNA, 17 bp, synthetic construct
  source 1..17: mol_type = other DNA
cctcccgggggggcaat

SEQ ID NO: 115959 - DNA, 17 bp, synthetic construct
  source 1..17: mol_type = other DNA
ctcccgggggggcaatt

SEQ ID NO: 115960 - DNA, 17 bp, synthetic construct
  source 1..17: mol_type = other DNA
tcccgggggggcaattg

SEQ ID NO: 115961 - DNA, 17 bp, synthetic construct
  source 1..17: mol_type = other DNA
cccgggggggcaattgc

SEQ ID NO: 115962 - DNA, 17 bp, synthetic construct
  source 1..17: mol_type = other DNA
ccgggggggcaattgca

SEQ ID NO: 115963 - DNA, 17 bp, synthetic construct
  source 1..17: mol_type = other DNA
cgggggggcaattgcag

SEQ ID NO: 115964 - DNA, 17 bp, synthetic construct
  source 1..17: mol_type = other DNA
gggggggcaattgcaga

SEQ ID NO: 115965 - DNA, 17 bp, synthetic construct
  source 1..17: mol_type = other DNA
ggggggcaattgcagag

SEQ ID NO: 115966 - DNA, 17 bp, synthetic construct
  source 1..17: mol_type = other DNA
gggggcaattgcagagc

SEQ ID NO: 115967 - DNA, 17 bp, synthetic construct
  source 1..17: mol_type = other DNA
ggggcaattgcagagcc

SEQ ID NO: 115968 - DNA, 17 bp, synthetic construct
  source 1..17: mol_type = other DNA
gggcaattgcagagccc

SEQ ID NO: 115969 - DNA, 17 bp, synthetic construct
  source 1..17: mol_type = other DNA
ggcaattgcagagccca

SEQ ID NO: 115970 - DNA, 17 bp, synthetic construct
  source 1..17: mol_type = other DNA
gcaattgcagagcccac

SEQ ID NO: 115971 - DNA, 17 bp, synthetic construct
  source 1..17: mol_type = other DNA
caattgcagagcccacc

SEQ ID NO: 115972 - DNA, 17 bp, synthetic construct
  source 1..17: mol_type = other DNA
aattgcagagcccaccg

SEQ ID NO: 115973 - DNA, 17 bp, synthetic construct
  source 1..17: mol_type = other DNA
attgcagagcccaccgc

SEQ ID NO: 115974 - DNA, 17 bp, synthetic construct
  source 1..17: mol_type = other DNA
ttgcagagcccaccgca

SEQ ID NO: 115975 - DNA, 17 bp, synthetic construct
  source 1..17: mol_type = other DNA
tgcagagcccaccgcag

SEQ ID NO: 115976 - DNA, 17 bp, synthetic construct
  source 1..17: mol_type = other DNA
gcagagcccaccgcagg

SEQ ID NO: 115977 - DNA, 17 bp, synthetic construct
  source 1..17: mol_type = other DNA
cagagcccaccgcaggt

SEQ ID NO: 115978 - DNA, 17 bp, synthetic construct
  source 1..17: mol_type = other DNA
agagcccaccgcaggtc

SEQ ID NO: 115979 - DNA, 17 bp, synthetic construct
  source 1..17: mol_type = other DNA
gagcccaccgcaggtcc

SEQ ID NO: 115980 - DNA, 17 bp, synthetic construct
  source 1..17: mol_type = other DNA
agcccaccgcaggtcca

SEQ ID NO: 115981 - DNA, 17 bp, synthetic construct
  source 1..17: mol_type = other DNA
gcccaccgcaggtccag

SEQ ID NO: 115982 - DNA, 17 bp, synthetic construct
  source 1..17: mol_type = other DNA
cccaccgcaggtccagg

SEQ ID NO: 115983 - DNA, 17 bp, synthetic construct
  source 1..17: mol_type = other DNA
ccaccgcaggtccaggt

SEQ ID NO: 115984 - DNA, 17 bp, synthetic construct
  source 1..17: mol_type = other DNA
caccgcaggtccaggtc

SEQ ID NO: 115985 - DNA, 17 bp, synthetic construct
  source 1..17: mol_type = other DNA
accgcaggtccaggtct

SEQ ID NO: 115986 - DNA, 17 bp, synthetic construct
  source 1..17: mol_type = other DNA
ccgcaggtccaggtctg

SEQ ID NO: 115987 - DNA, 17 bp, synthetic construct
  source 1..17: mol_type = other DNA
cgcaggtccaggtctga

SEQ ID NO: 115988 - DNA, 17 bp, synthetic construct
  source 1..17: mol_type = other DNA
gcaggtccaggtctgag

SEQ ID NO: 115989 - DNA, 17 bp, synthetic construct
  source 1..17: mol_type = other DNA
caggtccaggtctgagc

SEQ ID NO: 115990 - DNA, 17 bp, synthetic construct
  source 1..17: mol_type = other DNA
aggtccaggtctgagct

SEQ ID NO: 115991 - DNA, 17 bp, synthetic construct
  source 1..17: mol_type = other DNA
ggtccaggtctgagctt

SEQ ID NO: 115992 - DNA, 17 bp, synthetic construct
  source 1..17: mol_type = other DNA
gtccaggtctgagcttc

SEQ ID NO: 115993 - DNA, 17 bp, synthetic construct
  source 1..17: mol_type = other DNA
tccaggtctgagcttct

SEQ ID NO: 115994 - DNA, 17 bp, synthetic construct
  source 1..17: mol_type = other DNA
ccaggtctgagcttctc

SEQ ID NO: 115995 - DNA, 17 bp, synthetic construct
  source 1..17: mol_type = other DNA
caggtctgagcttctct

SEQ ID NO: 115996 - DNA, 17 bp, synthetic construct
  source 1..17: mol_type = other DNA
aggtctgagcttctctg

SEQ ID NO: 115997 - DNA, 17 bp, synthetic construct
  source 1..17: mol_type = other DNA
ggtctgagcttctctgt

SEQ ID NO: 115998 - DNA, 17 bp, synthetic construct
  source 1..17: mol_type = other DNA
gtctgagcttctctgtg

SEQ ID NO: 115999 - DNA, 17 bp, synthetic construct
  source 1..17: mol_type = other DNA
tctgagcttctctgtgg

SEQ ID NO: 116000 - DNA, 17 bp, synthetic construct
  source 1..17: mol_type = other DNA
ctgagcttctctgtggg

SEQ ID NO: 116001 - DNA, 17 bp, synthetic construct
  source 1..17: mol_type = other DNA
tgagcttctctgtgggc

SEQ ID NO: 116002 - DNA, 17 bp, synthetic construct
  source 1..17: mol_type = other DNA
gagcttctctgtgggct

SEQ ID NO: 116003 - DNA, 17 bp, synthetic construct
  source 1..17: mol_type = other DNA
agcttctctgtgggctc

SEQ ID NO: 116004 - DNA, 17 bp, synthetic construct
  source 1..17: mol_type = other DNA
gcttctctgtgggctct

SEQ ID NO: 116005 - DNA, 17 bp, synthetic construct
  source 1..17: mol_type = other DNA
cttctctgtgggctctg

SEQ ID NO: 116006 - DNA, 17 bp, synthetic construct
  source 1..17: mol_type = other DNA
ttctctgtgggctctgt

SEQ ID NO: 116007 - DNA, 17 bp, synthetic construct
  source 1..17: mol_type = other DNA
tctctgtgggctctgtc

SEQ ID NO: 116008 - DNA, 17 bp, synthetic construct
  source 1..17: mol_type = other DNA
ctctgtgggctctgtcc

SEQ ID NO: 116009 - DNA, 17 bp, synthetic construct
  source 1..17: mol_type = other DNA
tctgtgggctctgtccc

SEQ ID NO: 116010 - DNA, 17 bp, synthetic construct
  source 1..17: mol_type = other DNA
ctgtgggctctgtcccc

SEQ ID NO: 116011 - DNA, 17 bp, synthetic construct
  source 1..17: mol_type = other DNA
tgtgggctctgtcccca

SEQ ID NO: 116012 - DNA, 17 bp, synthetic construct
  source 1..17: mol_type = other DNA
gtgggctctgtccccag

SEQ ID NO: 116013 - DNA, 17 bp, synthetic construct
  source 1..17: mol_type = other DNA
tgggctctgtccccagt

SEQ ID NO: 116014 - DNA, 17 bp, synthetic construct
  source 1..17: mol_type = other DNA
gggctctgtccccagtg

SEQ ID NO: 116015 - DNA, 17 bp, synthetic construct
  source 1..17: mol_type = other DNA
ggctctgtccccagtgg

SEQ ID NO: 116016 - DNA, 17 bp, synthetic construct
  source 1..17: mol_type = other DNA
gctctgtccccagtggg

SEQ ID NO: 116017 - DNA, 17 bp, synthetic construct
  source 1..17: mol_type = other DNA
ctctgtccccagtgggg

SEQ ID NO: 116018 - DNA, 17 bp, synthetic construct
  source 1..17: mol_type = other DNA
tctgtccccagtggggg

SEQ ID NO: 116019 - DNA, 17 bp, synthetic construct
  source 1..17: mol_type = other DNA
ctgtccccagtgggggc

SEQ ID NO: 116020 - DNA, 17 bp, synthetic construct
  source 1..17: mol_type = other DNA
tgtccccagtgggggcc

SEQ ID NO: 116021 - DNA, 17 bp, synthetic construct
  source 1..17: mol_type = other DNA
gtccccagtgggggccc

SEQ ID NO: 116022 - DNA, 17 bp, synthetic construct
  source 1..17: mol_type = other DNA
tccccagtgggggcccc

SEQ ID NO: 116023 - DNA, 17 bp, synthetic construct
  source 1..17: mol_type = other DNA
ccccagtgggggcccct

SEQ ID NO: 116024 - DNA, 17 bp, synthetic construct
  source 1..17: mol_type = other DNA
cccagtgggggcccctg

SEQ ID NO: 116025 - DNA, 17 bp, synthetic construct
  source 1..17: mol_type = other DNA
ccagtgggggcccctgg

SEQ ID NO: 116026 - DNA, 17 bp, synthetic construct
  source 1..17: mol_type = other DNA
cagtgggggcccctggg

SEQ ID NO: 116027 - DNA, 17 bp, synthetic construct
  source 1..17: mol_type = other DNA
agtgggggcccctgggc

SEQ ID NO: 116028 - DNA, 17 bp, synthetic construct
  source 1..17: mol_type = other DNA
gtgggggcccctgggca

SEQ ID NO: 116029 - DNA, 17 bp, synthetic construct
  source 1..17: mol_type = other DNA
tgggggcccctgggcag

SEQ ID NO: 116030 - DNA, 17 bp, synthetic construct
  source 1..17: mol_type = other DNA
gggggcccctgggcagg

SEQ ID NO: 116031 - DNA, 17 bp, synthetic construct
  source 1..17: mol_type = other DNA
ggggcccctgggcaggc

SEQ ID NO: 116032 - DNA, 17 bp, synthetic construct
  source 1..17: mol_type = other DNA
gggcccctgggcaggcc

SEQ ID NO: 116033 - DNA, 17 bp, synthetic construct
  source 1..17: mol_type = other DNA
ggcccctgggcaggcca

SEQ ID NO: 116034 - DNA, 17 bp, synthetic construct
  source 1..17: mol_type = other DNA
gcccctgggcaggccac

SEQ ID NO: 116035 - DNA, 17 bp, synthetic construct
  source 1..17: mol_type = other DNA
cccctgggcaggccacc

SEQ ID NO: 116036 - DNA, 17 bp, synthetic construct
  source 1..17: mol_type = other DNA
ccctgggcaggccaccc

SEQ ID NO: 116037 - DNA, 17 bp, synthetic construct
  source 1..17: mol_type = other DNA
cctgggcaggccacccc

SEQ ID NO: 116038 - DNA, 17 bp, synthetic construct
  source 1..17: mol_type = other DNA
ctgggcaggccaccccc

SEQ ID NO: 116039 - DNA, 17 bp, synthetic construct
  source 1..17: mol_type = other DNA
tgggcaggccaccccct

SEQ ID NO: 116040 - DNA, 17 bp, synthetic construct
  source 1..17: mol_type = other DNA
gggcaggccaccccctc

SEQ ID NO: 116041 - DNA, 17 bp, synthetic construct
  source 1..17: mol_type = other DNA
ggcaggccaccccctca

SEQ ID NO: 116042 - DNA, 17 bp, synthetic construct
  source 1..17: mol_type = other DNA
gcaggccaccccctcat

SEQ ID NO: 116043 - DNA, 17 bp, synthetic construct
  source 1..17: mol_type = other DNA
caggccaccccctcatt

SEQ ID NO: 116044 - DNA, 17 bp, synthetic construct
  source 1..17: mol_type = other DNA
aggccaccccctcattt

SEQ ID NO: 116045 - DNA, 17 bp, synthetic construct
  source 1..17: mol_type = other DNA
ggccaccccctcatttg

SEQ ID NO: 116046 - DNA, 17 bp, synthetic construct
  source 1..17: mol_type = other DNA
gccaccccctcatttga

SEQ ID NO: 116047 - DNA, 17 bp, synthetic construct
  source 1..17: mol_type = other DNA
ccaccccctcatttgag

SEQ ID NO: 116048 - DNA, 17 bp, synthetic construct
  source 1..17: mol_type = other DNA
caccccctcatttgaga

SEQ ID NO: 116049 - DNA, 17 bp, synthetic construct
  source 1..17: mol_type = other DNA
accccctcatttgagag

SEQ ID NO: 116050 - DNA, 17 bp, synthetic construct
  source 1..17: mol_type = other DNA
ccccctcatttgagagt

SEQ ID NO: 116051 - DNA, 17 bp, synthetic construct
  source 1..17: mol_type = other DNA
cccctcatttgagagtc

SEQ ID NO: 116052 - DNA, 17 bp, synthetic construct
  source 1..17: mol_type = other DNA
ccctcatttgagagtcg

SEQ ID NO: 116053 - DNA, 17 bp, synthetic construct
  source 1..17: mol_type = other DNA
cctcatttgagagtcgg

SEQ ID NO: 116054 - DNA, 17 bp, synthetic construct
  source 1..17: mol_type = other DNA
ctcatttgagagtcggg

SEQ ID NO: 116055 - DNA, 17 bp, synthetic construct
  source 1..17: mol_type = other DNA
tcatttgagagtcggga

SEQ ID NO: 116056 - DNA, 17 bp, synthetic construct
  source 1..17: mol_type = other DNA
catttgagagtcgggaa

SEQ ID NO: 116057 - DNA, 17 bp, synthetic construct
  source 1..17: mol_type = other DNA
atttgagagtcgggaat

SEQ ID NO: 116058 - DNA, 17 bp, synthetic construct
  source 1..17: mol_type = other DNA
tttgagagtcgggaatg

SEQ ID NO: 116059 - DNA, 17 bp, synthetic construct
  source 1..17: mol_type = other DNA
ttgagagtcgggaatgg

SEQ ID NO: 116060 - DNA, 17 bp, synthetic construct
  source 1..17: mol_type = other DNA
tgagagtcgggaatggg

SEQ ID NO: 116061 - DNA, 17 bp, synthetic construct
  source 1..17: mol_type = other DNA
gagagtcgggaatgggt

SEQ ID NO: 116062 - DNA, 17 bp, synthetic construct
  source 1..17: mol_type = other DNA
agagtcgggaatgggtt

SEQ ID NO: 116063 - DNA, 17 bp, synthetic construct
  source 1..17: mol_type = other DNA
gagtcgggaatgggttc

SEQ ID NO: 116064 - DNA, 17 bp, synthetic construct
  source 1..17: mol_type = other DNA
agtcgggaatgggttcc

SEQ ID NO: 116065 - DNA, 17 bp, synthetic construct
  source 1..17: mol_type = other DNA
gtcgggaatgggttcct

SEQ ID NO: 116066 - DNA, 17 bp, synthetic construct
  source 1..17: mol_type = other DNA
tcgggaatgggttcctc

SEQ ID NO: 116067 - DNA, 17 bp, synthetic construct
  source 1..17: mol_type = other DNA
cgggaatgggttcctcc

SEQ ID NO: 116068 - DNA, 17 bp, synthetic construct
  source 1..17: mol_type = other DNA
gggaatgggttcctccc

SEQ ID NO: 116069 - DNA, 17 bp, synthetic construct
  source 1..17: mol_type = other DNA
ggaatgggttcctcccc

SEQ ID NO: 116070 - DNA, 17 bp, synthetic construct
  source 1..17: mol_type = other DNA
gaatgggttcctcccca

SEQ ID NO: 116071 - DNA, 17 bp, synthetic construct
  source 1..17: mol_type = other DNA
aatgggttcctccccag

SEQ ID NO: 116072 - DNA, 17 bp, synthetic construct
  source 1..17: mol_type = other DNA
atgggttcctccccaga

SEQ ID NO: 116073 - DNA, 17 bp, synthetic construct
  source 1..17: mol_type = other DNA
tgggttcctccccagag

SEQ ID NO: 116074 - DNA, 17 bp, synthetic construct
  source 1..17: mol_type = other DNA
gggttcctccccagagc

SEQ ID NO: 116075 - DNA, 17 bp, synthetic construct
  source 1..17: mol_type = other DNA
ggttcctccccagagct

SEQ ID NO: 116076 - DNA, 17 bp, synthetic construct
  source 1..17: mol_type = other DNA
gttcctccccagagctg

SEQ ID NO: 116077 - DNA, 17 bp, synthetic construct
  source 1..17: mol_type = other DNA
ttcctccccagagctga

SEQ ID NO: 116078 - DNA, 17 bp, synthetic construct
  source 1..17: mol_type = other DNA
tcctccccagagctgac

SEQ ID NO: 116079 - DNA, 17 bp, synthetic construct
  source 1..17: mol_type = other DNA
cctccccagagctgacc

SEQ ID NO: 116080 - DNA, 17 bp, synthetic construct
  source 1..17: mol_type = other DNA
ctccccagagctgacct

SEQ ID NO: 116081 - DNA, 17 bp, synthetic construct
  source 1..17: mol_type = other DNA
tccccagagctgacctc

SEQ ID NO: 116082 - DNA, 17 bp, synthetic construct
  source 1..17: mol_type = other DNA
ccccagagctgacctcc

SEQ ID NO: 116083 - DNA, 17 bp, synthetic construct
  source 1..17: mol_type = other DNA
cccagagctgacctccc

SEQ ID NO: 116084 - DNA, 17 bp, synthetic construct
  source 1..17: mol_type = other DNA
ccagagctgacctcccg

SEQ ID NO: 116085 - DNA, 17 bp, synthetic construct
  source 1..17: mol_type = other DNA
cagagctgacctcccgc

SEQ ID NO: 116086 - DNA, 17 bp, synthetic construct
  source 1..17: mol_type = other DNA
agagctgacctcccgcc

SEQ ID NO: 116087 - DNA, 17 bp, synthetic construct
  source 1..17: mol_type = other DNA
gagctgacctcccgccc

SEQ ID NO: 116088 - DNA, 17 bp, synthetic construct
  source 1..17: mol_type = other DNA
agctgacctcccgcccg

SEQ ID NO: 116089 - DNA, 17 bp, synthetic construct
  source 1..17: mol_type = other DNA
gctgacctcccgcccgc

SEQ ID NO: 116090 - DNA, 17 bp, synthetic construct
  source 1..17: mol_type = other DNA
ctgacctcccgcccgcc

SEQ ID NO: 116091 - DNA, 17 bp, synthetic construct
  source 1..17: mol_type = other DNA
tgacctcccgcccgcct

SEQ ID NO: 116092 - DNA, 17 bp, synthetic construct
  source 1..17: mol_type = other DNA
gacctcccgcccgcctc

SEQ ID NO: 116093 - DNA, 17 bp, synthetic construct
  source 1..17: mol_type = other DNA
acctcccgcccgcctcc

SEQ ID NO: 116094 - DNA, 17 bp, synthetic construct
  source 1..17: mol_type = other DNA
cctcccgcccgcctcct

SEQ ID NO: 116095 - DNA, 17 bp, synthetic construct
  source 1..17: mol_type = other DNA
ctcccgcccgcctcctt

SEQ ID NO: 116096 - DNA, 17 bp, synthetic construct
  source 1..17: mol_type = other DNA
tcccgcccgcctccttc

SEQ ID NO: 116097 - DNA, 17 bp, synthetic construct
  source 1..17: mol_type = other DNA
cccgcccgcctccttcc

SEQ ID NO: 116098 - DNA, 17 bp, synthetic construct
  source 1..17: mol_type = other DNA
ccgcccgcctccttccg

SEQ ID NO: 116099 - DNA, 17 bp, synthetic construct
  source 1..17: mol_type = other DNA
cgcccgcctccttccgc

SEQ ID NO: 116100 - DNA, 17 bp, synthetic construct
  source 1..17: mol_type = other DNA
gcccgcctccttccgca

SEQ ID NO: 116101 - DNA, 17 bp, synthetic construct
  source 1..17: mol_type = other DNA
cccgcctccttccgcag

SEQ ID NO: 116102 - DNA, 17 bp, synthetic construct
  source 1..17: mol_type = other DNA
ccgcctccttccgcagg

SEQ ID NO: 116103 - DNA, 17 bp, synthetic construct
  source 1..17: mol_type = other DNA
cgcctccttccgcaggc

SEQ ID NO: 116104 - DNA, 17 bp, synthetic construct
  source 1..17: mol_type = other DNA
gcctccttccgcaggcc

SEQ ID NO: 116105 - DNA, 17 bp, synthetic construct
  source 1..17: mol_type = other DNA
cctccttccgcaggcca

SEQ ID NO: 116106 - DNA, 17 bp, synthetic construct
  source 1..17: mol_type = other DNA
ctccttccgcaggccat

SEQ ID NO: 116107 - DNA, 17 bp, synthetic construct
  source 1..17: mol_type = other DNA
tccttccgcaggccatc

SEQ ID NO: 116108 - DNA, 17 bp, synthetic construct
  source 1..17: mol_type = other DNA
ccttccgcaggccatcc

SEQ ID NO: 116109 - DNA, 17 bp, synthetic construct
  source 1..17: mol_type = other DNA
cttccgcaggccatccg

SEQ ID NO: 116110 - DNA, 17 bp, synthetic construct
  source 1..17: mol_type = other DNA
ttccgcaggccatccgg

SEQ ID NO: 116111 - DNA, 17 bp, synthetic construct
  source 1..17: mol_type = other DNA
tccgcaggccatccggg

SEQ ID NO: 116112 - DNA, 17 bp, synthetic construct
  source 1..17: mol_type = other DNA
ccgcaggccatccgggt

SEQ ID NO: 116113 - DNA, 17 bp, synthetic construct
  source 1..17: mol_type = other DNA
cgcaggccatccgggtc

SEQ ID NO: 116114 - DNA, 17 bp, synthetic construct
  source 1..17: mol_type = other DNA
gcaggccatccgggtcc

SEQ ID NO: 116115 - DNA, 17 bp, synthetic construct
  source 1..17: mol_type = other DNA
caggccatccgggtcca

SEQ ID NO: 116116 - DNA, 17 bp, synthetic construct
  source 1..17: mol_type = other DNA
aggccatccgggtccaa

SEQ ID NO: 116117 - DNA, 17 bp, synthetic construct
  source 1..17: mol_type = other DNA
ggccatccgggtccaag

SEQ ID NO: 116118 - DNA, 17 bp, synthetic construct
  source 1..17: mol_type = other DNA
gccatccgggtccaagc

SEQ ID NO: 116119 - DNA, 17 bp, synthetic construct
  source 1..17: mol_type = other DNA
ccatccgggtccaagcg

SEQ ID NO: 116120 - DNA, 17 bp, synthetic construct
  source 1..17: mol_type = other DNA
catccgggtccaagcgg

SEQ ID NO: 116121 - DNA, 17 bp, synthetic construct
  source 1..17: mol_type = other DNA
atccgggtccaagcgga

SEQ ID NO: 116122 - DNA, 17 bp, synthetic construct
  source 1..17: mol_type = other DNA
tccgggtccaagcggac

SEQ ID NO: 116123 - DNA, 17 bp, synthetic construct
  source 1..17: mol_type = other DNA
ccgggtccaagcggacg

SEQ ID NO: 116124 - DNA, 17 bp, synthetic construct
  source 1..17: mol_type = other DNA
cgggtccaagcggacgg

SEQ ID NO: 116125 - DNA, 17 bp, synthetic construct
  source 1..17: mol_type = other DNA
gggtccaagcggacggc

SEQ ID NO: 116126 - DNA, 17 bp, synthetic construct
  source 1..17: mol_type = other DNA
ggtccaagcggacggcg

SEQ ID NO: 116127 - DNA, 17 bp, synthetic construct
  source 1..17: mol_type = other DNA
gtccaagcggacggcgg

SEQ ID NO: 116128 - DNA, 17 bp, synthetic construct
  source 1..17: mol_type = other DNA
tccaagcggacggcggc

SEQ ID NO: 116129 - DNA, 17 bp, synthetic construct
  source 1..17: mol_type = other DNA
ccaagcggacggcggcg

SEQ ID NO: 116130 - DNA, 17 bp, synthetic construct
  source 1..17: mol_type = other DNA
caagcggacggcggcgt

SEQ ID NO: 116131 - DNA, 17 bp, synthetic construct
  source 1..17: mol_type = other DNA
aagcggacggcggcgtg

SEQ ID NO: 116132 - DNA, 17 bp, synthetic construct
  source 1..17: mol_type = other DNA
agcggacggcggcgtgt

SEQ ID NO: 116133 - DNA, 17 bp, synthetic construct
  source 1..17: mol_type = other DNA
gcggacggcggcgtgtt

SEQ ID NO: 116134 - DNA, 17 bp, synthetic construct
  source 1..17: mol_type = other DNA
cggacggcggcgtgttc

SEQ ID NO: 116135 - DNA, 17 bp, synthetic construct
  source 1..17: mol_type = other DNA
ggacggcggcgtgttcc

SEQ ID NO: 116136 - DNA, 17 bp, synthetic construct
  source 1..17: mol_type = other DNA
gacggcggcgtgttcct

SEQ ID NO: 116137 - DNA, 17 bp, synthetic construct
  source 1..17: mol_type = other DNA
acggcggcgtgttcctc

SEQ ID NO: 116138 - DNA, 17 bp, synthetic construct
  source 1..17: mol_type = other DNA
cggcggcgtgttcctca

SEQ ID NO: 116139 - DNA, 17 bp, synthetic construct
  source 1..17: mol_type = other DNA
ggcggcgtgttcctcaa

SEQ ID NO: 116140 - DNA, 17 bp, synthetic construct
  source 1..17: mol_type = other DNA
gcggcgtgttcctcaac

SEQ ID NO: 116141 - DNA, 17 bp, synthetic construct
  source 1..17: mol_type = other DNA
cggcgtgttcctcaact

SEQ ID NO: 116142 - DNA, 17 bp, synthetic construct
  source 1..17: mol_type = other DNA
ggcgtgttcctcaactc

SEQ ID NO: 116143 - DNA, 17 bp, synthetic construct
  source 1..17: mol_type = other DNA
gcgtgttcctcaactcc

SEQ ID NO: 116144 - DNA, 17 bp, synthetic construct
  source 1..17: mol_type = other DNA
cgtgttcctcaactcca

SEQ ID NO: 116145 - DNA, 17 bp, synthetic construct
  source 1..17: mol_type = other DNA
gtgttcctcaactccat

SEQ ID NO: 116146 - DNA, 17 bp, synthetic construct
  source 1..17: mol_type = other DNA
tgttcctcaactccatc

SEQ ID NO: 116147 - DNA, 17 bp, synthetic construct
  source 1..17: mol_type = other DNA
gttcctcaactccatct

SEQ ID NO: 116148 - DNA, 17 bp, synthetic construct
  source 1..17: mol_type = other DNA
ttcctcaactccatcta

SEQ ID NO: 116149 - DNA, 17 bp, synthetic construct
  source 1..17: mol_type = other DNA
tcctcaactccatctac

SEQ ID NO: 116150 - DNA, 17 bp, synthetic construct
  source 1..17: mol_type = other DNA
cctcaactccatctaca

SEQ ID NO: 116151 - DNA, 17 bp, synthetic construct
  source 1..17: mol_type = other DNA
ctcaactccatctacac

SEQ ID NO: 116152 - DNA, 17 bp, synthetic construct
  source 1..17: mol_type = other DNA
tcaactccatctacacg

SEQ ID NO: 116153 - DNA, 17 bp, synthetic construct
  source 1..17: mol_type = other DNA
caactccatctacacgc

SEQ ID NO: 116154 - DNA, 17 bp, synthetic construct
  source 1..17: mol_type = other DNA
aactccatctacacgca

SEQ ID NO: 116155 - DNA, 17 bp, synthetic construct
  source 1..17: mol_type = other DNA
actccatctacacgcag

SEQ ID NO: 116156 - DNA, 17 bp, synthetic construct
  source 1..17: mol_type = other DNA
ctccatctacacgcagc

SEQ ID NO: 116157 - DNA, 17 bp, synthetic construct
  source 1..17: mol_type = other DNA
tccatctacacgcagct

SEQ ID NO: 116158 - DNA, 17 bp, synthetic construct
  source 1..17: mol_type = other DNA
ccatctacacgcagctg

SEQ ID NO: 116159 - DNA, 17 bp, synthetic construct
  source 1..17: mol_type = other DNA
catctacacgcagctgc

SEQ ID NO: 116160 - DNA, 17 bp, synthetic construct
  source 1..17: mol_type = other DNA
atctacacgcagctgcc

SEQ ID NO: 116161 - DNA, 17 bp, synthetic construct
  source 1..17: mol_type = other DNA
tctacacgcagctgccc

SEQ ID NO: 116162 - DNA, 17 bp, synthetic construct
  source 1..17: mol_type = other DNA
ctacacgcagctgcccc

SEQ ID NO: 116163 - DNA, 17 bp, synthetic construct
  source 1..17: mol_type = other DNA
tacacgcagctgcccct

SEQ ID NO: 116164 - DNA, 17 bp, synthetic construct
  source 1..17: mol_type = other DNA
acacgcagctgcccctg

SEQ ID NO: 116165 - DNA, 17 bp, synthetic construct
  source 1..17: mol_type = other DNA
cacgcagctgcccctgt

SEQ ID NO: 116166 - DNA, 17 bp, synthetic construct
  source 1..17: mol_type = other DNA
acgcagctgcccctgtc

SEQ ID NO: 116167 - DNA, 17 bp, synthetic construct
  source 1..17: mol_type = other DNA
cgcagctgcccctgtcg

SEQ ID NO: 116168 - DNA, 17 bp, synthetic construct
  source 1..17: mol_type = other DNA
gcagctgcccctgtcgg

SEQ ID NO: 116169 - DNA, 17 bp, synthetic construct
  source 1..17: mol_type = other DNA
cagctgcccctgtcggc

SEQ ID NO: 116170 - DNA, 17 bp, synthetic construct
  source 1..17: mol_type = other DNA
agctgcccctgtcggca

SEQ ID NO: 116171 - DNA, 17 bp, synthetic construct
  source 1..17: mol_type = other DNA
gctgcccctgtcggcag

SEQ ID NO: 116172 - DNA, 17 bp, synthetic construct
  source 1..17: mol_type = other DNA
ctgcccctgtcggcagg

SEQ ID NO: 116173 - DNA, 17 bp, synthetic construct
  source 1..17: mol_type = other DNA
tgcccctgtcggcaggt

SEQ ID NO: 116174 - DNA, 17 bp, synthetic construct
  source 1..17: mol_type = other DNA
gcccctgtcggcaggta

SEQ ID NO: 116175 - DNA, 17 bp, synthetic construct
  source 1..17: mol_type = other DNA
cccctgtcggcaggtat

SEQ ID NO: 116176 - DNA, 17 bp, synthetic construct
  source 1..17: mol_type = other DNA
ccctgtcggcaggtatg

SEQ ID NO: 116177 - DNA, 17 bp, synthetic construct
  source 1..17: mol_type = other DNA
cctgtcggcaggtatgt

SEQ ID NO: 116178 - DNA, 17 bp, synthetic construct
  source 1..17: mol_type = other DNA
ctgtcggcaggtatgtg

SEQ ID NO: 116179 - DNA, 17 bp, synthetic construct
  source 1..17: mol_type = other DNA
tgtcggcaggtatgtgg

SEQ ID NO: 116180 - DNA, 17 bp, synthetic construct
  source 1..17: mol_type = other DNA
gtcggcaggtatgtggc

SEQ ID NO: 116181 - DNA, 17 bp, synthetic construct
  source 1..17: mol_type = other DNA
tcggcaggtatgtggct

SEQ ID NO: 116182 - DNA, 17 bp, synthetic construct
  source 1..17: mol_type = other DNA
cggcaggtatgtggctc

SEQ ID NO: 116183 - DNA, 17 bp, synthetic construct
  source 1..17: mol_type = other DNA
ggcaggtatgtggctct

SEQ ID NO: 116184 - DNA, 17 bp, synthetic construct
  source 1..17: mol_type = other DNA
gcaggtatgtggctctc

SEQ ID NO: 116185 - DNA, 17 bp, synthetic construct
  source 1..17: mol_type = other DNA
caggtatgtggctctcc

SEQ ID NO: 116186 - DNA, 17 bp, synthetic construct
  source 1..17: mol_type = other DNA
aggtatgtggctctccc

SEQ ID NO: 116187 - DNA, 17 bp, synthetic construct
  source 1..17: mol_type = other DNA
ggtatgtggctctccca

SEQ ID NO: 116188 - DNA, 17 bp, synthetic construct
  source 1..17: mol_type = other DNA
gtatgtggctctcccag

SEQ ID NO: 116189 - DNA, 17 bp, synthetic construct
  source 1..17: mol_type = other DNA
tatgtggctctcccagg

SEQ ID NO: 116190 - DNA, 17 bp, synthetic construct
  source 1..17: mol_type = other DNA
atgtggctctcccagga

SEQ ID NO: 116191 - DNA, 17 bp, synthetic construct
  source 1..17: mol_type = other DNA
tgtggctctcccaggac

SEQ ID NO: 116192 - DNA, 17 bp, synthetic construct
  source 1..17: mol_type = other DNA
gtggctctcccaggacg

SEQ ID NO: 116193 - DNA, 17 bp, synthetic construct
  source 1..17: mol_type = other DNA
tggctctcccaggacgg

SEQ ID NO: 116194 - DNA, 17 bp, synthetic construct
  source 1..17: mol_type = other DNA
ggctctcccaggacggc

SEQ ID NO: 116195 - DNA, 17 bp, synthetic construct
  source 1..17: mol_type = other DNA
gctctcccaggacggcc

SEQ ID NO: 116196 - DNA, 17 bp, synthetic construct
  source 1..17: mol_type = other DNA
ctctcccaggacggccg

SEQ ID NO: 116197 - DNA, 17 bp, synthetic construct
  source 1..17: mol_type = other DNA
tctcccaggacggccgg

SEQ ID NO: 116198 - DNA, 17 bp, synthetic construct
  source 1..17: mol_type = other DNA
ctcccaggacggccggg

SEQ ID NO: 116199 - DNA, 17 bp, synthetic construct
  source 1..17: mol_type = other DNA
tcccaggacggccgggc

SEQ ID NO: 116200 - DNA, 17 bp, synthetic construct
  source 1..17: mol_type = other DNA
cccaggacggccgggct

SEQ ID NO: 116201 - DNA, 17 bp, synthetic construct
  source 1..17: mol_type = other DNA
ccaggacggccgggctg

SEQ ID NO: 116202 - DNA, 17 bp, synthetic construct
  source 1..17: mol_type = other DNA
caggacggccgggctgg

SEQ ID NO: 116203 - DNA, 17 bp, synthetic construct
  source 1..17: mol_type = other DNA
aggacggccgggctggg

SEQ ID NO: 116204 - DNA, 17 bp, synthetic construct
  source 1..17: mol_type = other DNA
ggacggccgggctgggt

SEQ ID NO: 116205 - DNA, 17 bp, synthetic construct
  source 1..17: mol_type = other DNA
gacggccgggctgggtg

SEQ ID NO: 116206 - DNA, 17 bp, synthetic construct
  source 1..17: mol_type = other DNA
acggccgggctgggtgg

SEQ ID NO: 116207 - DNA, 17 bp, synthetic construct
  source 1..17: mol_type = other DNA
cggccgggctgggtggc

SEQ ID NO: 116208 - DNA, 17 bp, synthetic construct
  source 1..17: mol_type = other DNA
ggccgggctgggtggcg

SEQ ID NO: 116209 - DNA, 17 bp, synthetic construct
  source 1..17: mol_type = other DNA
gccgggctgggtggcgc

SEQ ID NO: 116210 - DNA, 17 bp, synthetic construct
  source 1..17: mol_type = other DNA
ccgggctgggtggcgcc

SEQ ID NO: 116211 - DNA, 17 bp, synthetic construct
  source 1..17: mol_type = other DNA
cgggctgggtggcgcct

SEQ ID NO: 116212 - DNA, 17 bp, synthetic construct
  source 1..17: mol_type = other DNA
gggctgggtggcgcctg

SEQ ID NO: 116213 - DNA, 17 bp, synthetic construct
  source 1..17: mol_type = other DNA
ggctgggtggcgcctgc

SEQ ID NO: 116214 - DNA, 17 bp, synthetic construct
  source 1..17: mol_type = other DNA
gctgggtggcgcctgct

SEQ ID NO: 116215 - DNA, 17 bp, synthetic construct
  source 1..17: mol_type = other DNA
ctgggtggcgcctgctt

SEQ ID NO: 116216 - DNA, 17 bp, synthetic construct
  source 1..17: mol_type = other DNA
tgggtggcgcctgcttg

SEQ ID NO: 116217 - DNA, 17 bp, synthetic construct
  source 1..17: mol_type = other DNA
gggtggcgcctgcttgc

SEQ ID NO: 116218 - DNA, 17 bp, synthetic construct
  source 1..17: mol_type = other DNA
ggtggcgcctgcttgca

SEQ ID NO: 116219 - DNA, 17 bp, synthetic construct
  source 1..17: mol_type = other DNA
gtggcgcctgcttgcag

SEQ ID NO: 116220 - DNA, 17 bp, synthetic construct
  source 1..17: mol_type = other DNA
tggcgcctgcttgcagg

SEQ ID NO: 116221 - DNA, 17 bp, synthetic construct
  source 1..17: mol_type = other DNA
ggcgcctgcttgcaggg

SEQ ID NO: 116222 - DNA, 17 bp, synthetic construct
  source 1..17: mol_type = other DNA
gcgcctgcttgcagggg

SEQ ID NO: 116223 - DNA, 17 bp, synthetic construct
  source 1..17: mol_type = other DNA
cgcctgcttgcaggggc

SEQ ID NO: 116224 - DNA, 17 bp, synthetic construct
  source 1..17: mol_type = other DNA
gcctgcttgcaggggca

SEQ ID NO: 116225 - DNA, 17 bp, synthetic construct
  source 1..17: mol_type = other DNA
cctgcttgcaggggcag

SEQ ID NO: 116226 - DNA, 17 bp, synthetic construct
  source 1..17: mol_type = other DNA
ctgcttgcaggggcagc

SEQ ID NO: 116227 - DNA, 17 bp, synthetic construct
  source 1..17: mol_type = other DNA
tgcttgcaggggcagct

SEQ ID NO: 116228 - DNA, 17 bp, synthetic construct
  source 1..17: mol_type = other DNA
gcttgcaggggcagctc

SEQ ID NO: 116229 - DNA, 17 bp, synthetic construct
  source 1..17: mol_type = other DNA
cttgcaggggcagctcc

SEQ ID NO: 116230 - DNA, 17 bp, synthetic construct
  source 1..17: mol_type = other DNA
ttgcaggggcagctccc

SEQ ID NO: 116231 - DNA, 17 bp, synthetic construct
  source 1..17: mol_type = other DNA
tgcaggggcagctccca

SEQ ID NO: 116232 - DNA, 17 bp, synthetic construct
  source 1..17: mol_type = other DNA
gcaggggcagctcccac

SEQ ID NO: 116233 - DNA, 17 bp, synthetic construct
  source 1..17: mol_type = other DNA
caggggcagctcccaca

SEQ ID NO: 116234 - DNA, 17 bp, synthetic construct
  source 1..17: mol_type = other DNA
aggggcagctcccacag

SEQ ID NO: 116235 - DNA, 17 bp, synthetic construct
  source 1..17: mol_type = other DNA
ggggcagctcccacagc

SEQ ID NO: 116236 - DNA, 17 bp, synthetic construct
  source 1..17: mol_type = other DNA
gggcagctcccacagcc

SEQ ID NO: 116237 - DNA, 17 bp, synthetic construct
  source 1..17: mol_type = other DNA
ggcagctcccacagcct

SEQ ID NO: 116238 - DNA, 17 bp, synthetic construct
  source 1..17: mol_type = other DNA
gcagctcccacagcctg

SEQ ID NO: 116239 - DNA, 17 bp, synthetic construct
  source 1..17: mol_type = other DNA
cagctcccacagcctgg

SEQ ID NO: 116240 - DNA, 17 bp, synthetic construct
  source 1..17: mol_type = other DNA
agctcccacagcctggg

SEQ ID NO: 116241 - DNA, 17 bp, synthetic construct
  source 1..17: mol_type = other DNA
gctcccacagcctgggc

SEQ ID NO: 116242 - DNA, 17 bp, synthetic construct
  source 1..17: mol_type = other DNA
ctcccacagcctgggca

SEQ ID NO: 116243 - DNA, 17 bp, synthetic construct
  source 1..17: mol_type = other DNA
tcccacagcctgggcag

SEQ ID NO: 116244 - DNA, 17 bp, synthetic construct
  source 1..17: mol_type = other DNA
cccacagcctgggcagc

SEQ ID NO: 116245 - DNA, 17 bp, synthetic construct
  source 1..17: mol_type = other DNA
ccacagcctgggcagcg

SEQ ID NO: 116246 - DNA, 17 bp, synthetic construct
  source 1..17: mol_type = other DNA
cacagcctgggcagcgt

SEQ ID NO: 116247 - DNA, 17 bp, synthetic construct
  source 1..17: mol_type = other DNA
acagcctgggcagcgtc

SEQ ID NO: 116248 - DNA, 17 bp, synthetic construct
  source 1..17: mol_type = other DNA
cagcctgggcagcgtcc

SEQ ID NO: 116249 - DNA, 17 bp, synthetic construct
  source 1..17: mol_type = other DNA
agcctgggcagcgtccg

SEQ ID NO: 116250 - DNA, 17 bp, synthetic construct
  source 1..17: mol_type = other DNA
gcctgggcagcgtccgc

SEQ ID NO: 116251 - DNA, 17 bp, synthetic construct
  source 1..17: mol_type = other DNA
cctgggcagcgtccgct

SEQ ID NO: 116252 - DNA, 17 bp, synthetic construct
  source 1..17: mol_type = other DNA
ctgggcagcgtccgctc

SEQ ID NO: 116253 - DNA, 17 bp, synthetic construct
  source 1..17: mol_type = other DNA
tgggcagcgtccgctcc

SEQ ID NO: 116254 - DNA, 17 bp, synthetic construct
  source 1..17: mol_type = other DNA
gggcagcgtccgctcca

SEQ ID NO: 116255 - DNA, 17 bp, synthetic construct
  source 1..17: mol_type = other DNA
ggcagcgtccgctccat

SEQ ID NO: 116256 - DNA, 17 bp, synthetic construct
  source 1..17: mol_type = other DNA
gcagcgtccgctccatc

SEQ ID NO: 116257 - DNA, 17 bp, synthetic construct
  source 1..17: mol_type = other DNA
cagcgtccgctccatcc

SEQ ID NO: 116258 - DNA, 17 bp, synthetic construct
  source 1..17: mol_type = other DNA
agcgtccgctccatccc

SEQ ID NO: 116259 - DNA, 17 bp, synthetic construct
  source 1..17: mol_type = other DNA
gcgtccgctccatccct

SEQ ID NO: 116260 - DNA, 17 bp, synthetic construct
  source 1..17: mol_type = other DNA
cgtccgctccatccctg

SEQ ID NO: 116261 - DNA, 17 bp, synthetic construct
  source 1..17: mol_type = other DNA
gtccgctccatccctgc

SEQ ID NO: 116262 - DNA, 17 bp, synthetic construct
  source 1..17: mol_type = other DNA
tccgctccatccctgct

SEQ ID NO: 116263 - DNA, 17 bp, synthetic construct
  source 1..17: mol_type = other DNA
ccgctccatccctgcta

SEQ ID NO: 116264 - DNA, 17 bp, synthetic construct
  source 1..17: mol_type = other DNA
cgctccatccctgctag

SEQ ID NO: 116265 - DNA, 17 bp, synthetic construct
  source 1..17: mol_type = other DNA
gctccatccctgctagt

SEQ ID NO: 116266 - DNA, 17 bp, synthetic construct
  source 1..17: mol_type = other DNA
ctccatccctgctagtt

SEQ ID NO: 116267 - DNA, 17 bp, synthetic construct
  source 1..17: mol_type = other DNA
tccatccctgctagttc

SEQ ID NO: 116268 - DNA, 17 bp, synthetic construct
  source 1..17: mol_type = other DNA
ccatccctgctagttct

SEQ ID NO: 116269 - DNA, 17 bp, synthetic construct
  source 1..17: mol_type = other DNA
catccctgctagttctc

SEQ ID NO: 116270 - DNA, 17 bp, synthetic construct
  source 1..17: mol_type = other DNA
atccctgctagttctcc

SEQ ID NO: 116271 - DNA, 17 bp, synthetic construct
  source 1..17: mol_type = other DNA
tccctgctagttctccg

SEQ ID NO: 116272 - DNA, 17 bp, synthetic construct
  source 1..17: mol_type = other DNA
ccctgctagttctccgt

SEQ ID NO: 116273 - DNA, 17 bp, synthetic construct
  source 1..17: mol_type = other DNA
cctgctagttctccgtg

SEQ ID NO: 116274 - DNA, 17 bp, synthetic construct
  source 1..17: mol_type = other DNA
ctgctagttctccgtgg

SEQ ID NO: 116275 - DNA, 17 bp, synthetic construct
  source 1..17: mol_type = other DNA
tgctagttctccgtggc

SEQ ID NO: 116276 - DNA, 17 bp, synthetic construct
  source 1..17: mol_type = other DNA
gctagttctccgtggcc

SEQ ID NO: 116277 - DNA, 17 bp, synthetic construct
  source 1..17: mol_type = other DNA
ctagttctccgtggcct

SEQ ID NO: 116278 - DNA, 17 bp, synthetic construct
  source 1..17: mol_type = other DNA
tagttctccgtggcctc

SEQ ID NO: 116279 - DNA, 17 bp, synthetic construct
  source 1..17: mol_type = other DNA
agttctccgtggcctcg

SEQ ID NO: 116280 - DNA, 17 bp, synthetic construct
  source 1..17: mol_type = other DNA
gttctccgtggcctcgg

SEQ ID NO: 116281 - DNA, 17 bp, synthetic construct
  source 1..17: mol_type = other DNA
ttctccgtggcctcggg

SEQ ID NO: 116282 - DNA, 17 bp, synthetic construct
  source 1..17: mol_type = other DNA
tctccgtggcctcgggc

SEQ ID NO: 116283 - DNA, 17 bp, synthetic construct
  source 1..17: mol_type = other DNA
ctccgtggcctcgggca

SEQ ID NO: 116284 - DNA, 17 bp, synthetic construct
  source 1..17: mol_type = other DNA
tccgtggcctcgggcag

SEQ ID NO: 116285 - DNA, 17 bp, synthetic construct
  source 1..17: mol_type = other DNA
ccgtggcctcgggcagc

SEQ ID NO: 116286 - DNA, 17 bp, synthetic construct
  source 1..17: mol_type = other DNA
cgtggcctcgggcagct

SEQ ID NO: 116287 - DNA, 17 bp, synthetic construct
  source 1..17: mol_type = other DNA
gtggcctcgggcagctc

SEQ ID NO: 116288 - DNA, 17 bp, synthetic construct
  source 1..17: mol_type = other DNA
tggcctcgggcagctcc

SEQ ID NO: 116289 - DNA, 17 bp, synthetic construct
  source 1..17: mol_type = other DNA
ggcctcgggcagctcca

SEQ ID NO: 116290 - DNA, 17 bp, synthetic construct
  source 1..17: mol_type = other DNA
gcctcgggcagctccag

SEQ ID NO: 116291 - DNA, 17 bp, synthetic construct
  source 1..17: mol_type = other DNA
cctcgggcagctccagg

SEQ ID NO: 116292 - DNA, 17 bp, synthetic construct
  source 1..17: mol_type = other DNA
ctcgggcagctccagga

SEQ ID NO: 116293 - DNA, 17 bp, synthetic construct
  source 1..17: mol_type = other DNA
tcgggcagctccaggag

SEQ ID NO: 116294 - DNA, 17 bp, synthetic construct
  source 1..17: mol_type = other DNA
cgggcagctccaggagc

SEQ ID NO: 116295 - DNA, 17 bp, synthetic construct
  source 1..17: mol_type = other DNA
gggcagctccaggagct

SEQ ID NO: 116296 - DNA, 17 bp, synthetic construct
  source 1..17: mol_type = other DNA
ggcagctccaggagctc

SEQ ID NO: 116297 - DNA, 17 bp, synthetic construct
  source 1..17: mol_type = other DNA
gcagctccaggagctcc

SEQ ID NO: 116298 - DNA, 17 bp, synthetic construct
  source 1..17: mol_type = other DNA
cagctccaggagctccc

SEQ ID NO: 116299 - DNA, 17 bp, synthetic construct
  source 1..17: mol_type = other DNA
agctccaggagctccct

SEQ ID NO: 116300 - DNA, 17 bp, synthetic construct
  source 1..17: mol_type = other DNA
gctccaggagctccctg

SEQ ID NO: 116301 - DNA, 17 bp, synthetic construct
  source 1..17: mol_type = other DNA
ctccaggagctccctgt

SEQ ID NO: 116302 - DNA, 17 bp, synthetic construct
  source 1..17: mol_type = other DNA
tccaggagctccctgtg

SEQ ID NO: 116303 - DNA, 17 bp, synthetic construct
  source 1..17: mol_type = other DNA
ccaggagctccctgtgc

SEQ ID NO: 116304 - DNA, 17 bp, synthetic construct
  source 1..17: mol_type = other DNA
caggagctccctgtgct

SEQ ID NO: 116305 - DNA, 17 bp, synthetic construct
  source 1..17: mol_type = other DNA
aggagctccctgtgctc

SEQ ID NO: 116306 - DNA, 17 bp, synthetic construct
  source 1..17: mol_type = other DNA
ggagctccctgtgctcg

SEQ ID NO: 116307 - DNA, 17 bp, synthetic construct
  source 1..17: mol_type = other DNA
gagctccctgtgctcgg

SEQ ID NO: 116308 - DNA, 17 bp, synthetic construct
  source 1..17: mol_type = other DNA
agctccctgtgctcggt

SEQ ID NO: 116309 - DNA, 17 bp, synthetic construct
  source 1..17: mol_type = other DNA
gctccctgtgctcggtt

SEQ ID NO: 116310 - DNA, 17 bp, synthetic construct
  source 1..17: mol_type = other DNA
ctccctgtgctcggttt

SEQ ID NO: 116311 - DNA, 17 bp, synthetic construct
  source 1..17: mol_type = other DNA
tccctgtgctcggtttc

SEQ ID NO: 116312 - DNA, 17 bp, synthetic construct
  source 1..17: mol_type = other DNA
ccctgtgctcggtttct

SEQ ID NO: 116313 - DNA, 17 bp, synthetic construct
  source 1..17: mol_type = other DNA
cctgtgctcggtttctc

SEQ ID NO: 116314 - DNA, 17 bp, synthetic construct
  source 1..17: mol_type = other DNA
ctgtgctcggtttctcg

SEQ ID NO: 116315 - DNA, 17 bp, synthetic construct
  source 1..17: mol_type = other DNA
tgtgctcggtttctcgt

SEQ ID NO: 116316 - DNA, 17 bp, synthetic construct
  source 1..17: mol_type = other DNA
gtgctcggtttctcgtc

SEQ ID NO: 116317 - DNA, 17 bp, synthetic construct
  source 1..17: mol_type = other DNA
tgctcggtttctcgtct

SEQ ID NO: 116318 - DNA, 17 bp, synthetic construct
  source 1..17: mol_type = other DNA
gctcggtttctcgtctg

SEQ ID NO: 116319 - DNA, 17 bp, synthetic construct
  source 1..17: mol_type = other DNA
ctcggtttctcgtctgc

SEQ ID NO: 116320 - DNA, 17 bp, synthetic construct
  source 1..17: mol_type = other DNA
tcggtttctcgtctgca

SEQ ID NO: 116321 - DNA, 17 bp, synthetic construct
  source 1..17: mol_type = other DNA
cggtttctcgtctgcag

SEQ ID NO: 116322 - DNA, 17 bp, synthetic construct
  source 1..17: mol_type = other DNA
ggtttctcgtctgcaga

SEQ ID NO: 116323 - DNA, 17 bp, synthetic construct
  source 1..17: mol_type = other DNA
gtttctcgtctgcagag

SEQ ID NO: 116324 - DNA, 17 bp, synthetic construct
  source 1..17: mol_type = other DNA
tttctcgtctgcagagt

SEQ ID NO: 116325 - DNA, 17 bp, synthetic construct
  source 1..17: mol_type = other DNA
ttctcgtctgcagagtg

SEQ ID NO: 116326 - DNA, 17 bp, synthetic construct
  source 1..17: mol_type = other DNA
tctcgtctgcagagtgg

SEQ ID NO: 116327 - DNA, 17 bp, synthetic construct
  source 1..17: mol_type = other DNA
ctcgtctgcagagtggg

SEQ ID NO: 116328 - DNA, 17 bp, synthetic construct
  source 1..17: mol_type = other DNA
tcgtctgcagagtgggg

SEQ ID NO: 116329 - DNA, 17 bp, synthetic construct
  source 1..17: mol_type = other DNA
cgtctgcagagtgggga

SEQ ID NO: 116330 - DNA, 17 bp, synthetic construct
  source 1..17: mol_type = other DNA
gtctgcagagtggggat

SEQ ID NO: 116331 - DNA, 17 bp, synthetic construct
  source 1..17: mol_type = other DNA
tctgcagagtggggatg

SEQ ID NO: 116332 - DNA, 17 bp, synthetic construct
  source 1..17: mol_type = other DNA
ctgcagagtggggatgc

SEQ ID NO: 116333 - DNA, 17 bp, synthetic construct
  source 1..17: mol_type = other DNA
tgcagagtggggatgcc

SEQ ID NO: 116334 - DNA, 17 bp, synthetic construct
  source 1..17: mol_type = other DNA
gcagagtggggatgcca

SEQ ID NO: 116335 - DNA, 17 bp, synthetic construct
  source 1..17: mol_type = other DNA
cagagtggggatgccag

SEQ ID NO: 116336 - DNA, 17 bp, synthetic construct
  source 1..17: mol_type = other DNA
agagtggggatgccagg

SEQ ID NO: 116337 - DNA, 17 bp, synthetic construct
  source 1..17: mol_type = other DNA
gagtggggatgccaggc

SEQ ID NO: 116338 - DNA, 17 bp, synthetic construct
  source 1..17: mol_type = other DNA
agtggggatgccaggct

SEQ ID NO: 116339 - DNA, 17 bp, synthetic construct
  source 1..17: mol_type = other DNA
gtggggatgccaggctc

SEQ ID NO: 116340 - DNA, 17 bp, synthetic construct
  source 1..17: mol_type = other DNA
tggggatgccaggctcc

SEQ ID NO: 116341 - DNA, 17 bp, synthetic construct
  source 1..17: mol_type = other DNA
ggggatgccaggctccc

SEQ ID NO: 116342 - DNA, 17 bp, synthetic construct
  source 1..17: mol_type = other DNA
gggatgccaggctccca

SEQ ID NO: 116343 - DNA, 17 bp, synthetic construct
  source 1..17: mol_type = other DNA
ggatgccaggctcccac

SEQ ID NO: 116344 - DNA, 17 bp, synthetic construct
  source 1..17: mol_type = other DNA
gatgccaggctcccacc

SEQ ID NO: 116345 - DNA, 17 bp, synthetic construct
  source 1..17: mol_type = other DNA
atgccaggctcccaccc

SEQ ID NO: 116346 - DNA, 17 bp, synthetic construct
  source 1..17: mol_type = other DNA
tgccaggctcccacccc

SEQ ID NO: 116347 - DNA, 17 bp, synthetic construct
  source 1..17: mol_type = other DNA
gccaggctcccaccccg

SEQ ID NO: 116348 - DNA, 17 bp, synthetic construct
  source 1..17: mol_type = other DNA
ccaggctcccaccccgg

SEQ ID NO: 116349 - DNA, 17 bp, synthetic construct
  source 1..17: mol_type = other DNA
caggctcccaccccggc

SEQ ID NO: 116350 - DNA, 17 bp, synthetic construct
  source 1..17: mol_type = other DNA
aggctcccaccccggca

SEQ ID NO: 116351 - DNA, 17 bp, synthetic construct
  source 1..17: mol_type = other DNA
ggctcccaccccggcag

SEQ ID NO: 116352 - DNA, 17 bp, synthetic construct
  source 1..17: mol_type = other DNA
gctcccaccccggcagc

SEQ ID NO: 116353 - DNA, 17 bp, synthetic construct
  source 1..17: mol_type = other DNA
ctcccaccccggcagcg

SEQ ID NO: 116354 - DNA, 17 bp, synthetic construct
  source 1..17: mol_type = other DNA
tcccaccccggcagcgg

SEQ ID NO: 116355 - DNA, 17 bp, synthetic construct
  source 1..17: mol_type = other DNA
cccaccccggcagcggc

SEQ ID NO: 116356 - DNA, 17 bp, synthetic construct
  source 1..17: mol_type = other DNA
ccaccccggcagcggca

SEQ ID NO: 116357 - DNA, 17 bp, synthetic construct
  source 1..17: mol_type = other DNA
caccccggcagcggcag

SEQ ID NO: 116358 - DNA, 17 bp, synthetic construct
  source 1..17: mol_type = other DNA
accccggcagcggcagg

SEQ ID NO: 116359 - DNA, 17 bp, synthetic construct
  source 1..17: mol_type = other DNA
ccccggcagcggcaggg

SEQ ID NO: 116360 - DNA, 17 bp, synthetic construct
  source 1..17: mol_type = other DNA
cccggcagcggcaggga

SEQ ID NO: 116361 - DNA, 17 bp, synthetic construct
  source 1..17: mol_type = other DNA
ccggcagcggcagggac

SEQ ID NO: 116362 - DNA, 17 bp, synthetic construct
  source 1..17: mol_type = other DNA
cggcagcggcagggacc

SEQ ID NO: 116363 - DNA, 17 bp, synthetic construct
  source 1..17: mol_type = other DNA
ggcagcggcagggaccc

SEQ ID NO: 116364 - DNA, 17 bp, synthetic construct
  source 1..17: mol_type = other DNA
gcagcggcagggacccc

SEQ ID NO: 116365 - DNA, 17 bp, synthetic construct
  source 1..17: mol_type = other DNA
cagcggcagggacccca

SEQ ID NO: 116366 - DNA, 17 bp, synthetic construct
  source 1..17: mol_type = other DNA
agcggcagggaccccac

SEQ ID NO: 116367 - DNA, 17 bp, synthetic construct
  source 1..17: mol_type = other DNA
gcggcagggaccccaca

SEQ ID NO: 116368 - DNA, 17 bp, synthetic construct
  source 1..17: mol_type = other DNA
cggcagggaccccacat

SEQ ID NO: 116369 - DNA, 17 bp, synthetic construct
  source 1..17: mol_type = other DNA
ggcagggaccccacatc

SEQ ID NO: 116370 - DNA, 17 bp, synthetic construct
  source 1..17: mol_type = other DNA
gcagggaccccacatcc

SEQ ID NO: 116371 - DNA, 17 bp, synthetic construct
  source 1..17: mol_type = other DNA
cagggaccccacatcca

SEQ ID NO: 116372 - DNA, 17 bp, synthetic construct
  source 1..17: mol_type = other DNA
agggaccccacatccag

SEQ ID NO: 116373 - DNA, 17 bp, synthetic construct
  source 1..17: mol_type = other DNA
gggaccccacatccagc

SEQ ID NO: 116374 - DNA, 17 bp, synthetic construct
  source 1..17: mol_type = other DNA
ggaccccacatccagct

SEQ ID NO: 116375 - DNA, 17 bp, synthetic construct
  source 1..17: mol_type = other DNA
gaccccacatccagctc

SEQ ID NO: 116376 - DNA, 17 bp, synthetic construct
  source 1..17: mol_type = other DNA
accccacatccagctcg

SEQ ID NO: 116377 - DNA, 17 bp, synthetic construct
  source 1..17: mol_type = other DNA
ccccacatccagctcgc

SEQ ID NO: 116378 - DNA, 17 bp, synthetic construct
  source 1..17: mol_type = other DNA
cccacatccagctcgct

SEQ ID NO: 116379 - DNA, 17 bp, synthetic construct
  source 1..17: mol_type = other DNA
ccacatccagctcgctc

SEQ ID NO: 116380 - DNA, 17 bp, synthetic construct
  source 1..17: mol_type = other DNA
cacatccagctcgctca

SEQ ID NO: 116381 - DNA, 17 bp, synthetic construct
  source 1..17: mol_type = other DNA
acatccagctcgctcag

SEQ ID NO: 116382 - DNA, 17 bp, synthetic construct
  source 1..17: mol_type = other DNA
catccagctcgctcagc

SEQ ID NO: 116383 - DNA, 17 bp, synthetic construct
  source 1..17: mol_type = other DNA
atccagctcgctcagcc

SEQ ID NO: 116384 - DNA, 17 bp, synthetic construct
  source 1..17: mol_type = other DNA
tccagctcgctcagccc

SEQ ID NO: 116385 - DNA, 17 bp, synthetic construct
  source 1..17: mol_type = other DNA
ccagctcgctcagcccc

SEQ ID NO: 116386 - DNA, 17 bp, synthetic construct
  source 1..17: mol_type = other DNA
cagctcgctcagcccca

SEQ ID NO: 116387 - DNA, 17 bp, synthetic construct
  source 1..17: mol_type = other DNA
agctcgctcagccccac

SEQ ID NO: 116388 - DNA, 17 bp, synthetic construct
  source 1..17: mol_type = other DNA
gctcgctcagccccact

SEQ ID NO: 116389 - DNA, 17 bp, synthetic construct
  source 1..17: mol_type = other DNA
ctcgctcagccccactc

SEQ ID NO: 116390 - DNA, 17 bp, synthetic construct
  source 1..17: mol_type = other DNA
tcgctcagccccactct

SEQ ID NO: 116391 - DNA, 17 bp, synthetic construct
  source 1..17: mol_type = other DNA
cgctcagccccactctc

SEQ ID NO: 116392 - DNA, 17 bp, synthetic construct
  source 1..17: mol_type = other DNA
gctcagccccactctct

SEQ ID NO: 116393 - DNA, 17 bp, synthetic construct
  source 1..17: mol_type = other DNA
ctcagccccactctctc

SEQ ID NO: 116394 - DNA, 17 bp, synthetic construct
  source 1..17: mol_type = other DNA
tcagccccactctctca

SEQ ID NO: 116395 - DNA, 17 bp, synthetic construct
  source 1..17: mol_type = other DNA
cagccccactctctcag

SEQ ID NO: 116396 - DNA, 17 bp, synthetic construct
  source 1..17: mol_type = other DNA
agccccactctctcagg

SEQ ID NO: 116397 - DNA, 17 bp, synthetic construct
  source 1..17: mol_type = other DNA
gccccactctctcaggg

SEQ ID NO: 116398 - DNA, 17 bp, synthetic construct
  source 1..17: mol_type = other DNA
ccccactctctcaggga

SEQ ID NO: 116399 - DNA, 17 bp, synthetic construct
  source 1..17: mol_type = other DNA
cccactctctcagggag

SEQ ID NO: 116400 - DNA, 17 bp, synthetic construct
  source 1..17: mol_type = other DNA
ccactctctcagggagc

SEQ ID NO: 116401 - DNA, 17 bp, synthetic construct
  source 1..17: mol_type = other DNA
cactctctcagggagcc

SEQ ID NO: 116402 - DNA, 17 bp, synthetic construct
  source 1..17: mol_type = other DNA
actctctcagggagccc

SEQ ID NO: 116403 - DNA, 17 bp, synthetic construct
  source 1..17: mol_type = other DNA
ctctctcagggagcccg

SEQ ID NO: 116404 - DNA, 17 bp, synthetic construct
  source 1..17: mol_type = other DNA
tctctcagggagcccgg

SEQ ID NO: 116405 - DNA, 17 bp, synthetic construct
  source 1..17: mol_type = other DNA
ctctcagggagcccggt

SEQ ID NO: 116406 - DNA, 17 bp, synthetic construct
  source 1..17: mol_type = other DNA
tctcagggagcccggtc

SEQ ID NO: 116407 - DNA, 17 bp, synthetic construct
  source 1..17: mol_type = other DNA
ctcagggagcccggtct

SEQ ID NO: 116408 - DNA, 17 bp, synthetic construct
  source 1..17: mol_type = other DNA
tcagggagcccggtctc

SEQ ID NO: 116409 - DNA, 17 bp, synthetic construct
  source 1..17: mol_type = other DNA
cagggagcccggtctcc

SEQ ID NO: 116410 - DNA, 17 bp, synthetic construct
  source 1..17: mol_type = other DNA
agggagcccggtctcca

SEQ ID NO: 116411 - DNA, 17 bp, synthetic construct
  source 1..17: mol_type = other DNA
gggagcccggtctccac

SEQ ID NO: 116412 - DNA, 17 bp, synthetic construct
  source 1..17: mol_type = other DNA
ggagcccggtctccacc

SEQ ID NO: 116413 - DNA, 17 bp, synthetic construct
  source 1..17: mol_type = other DNA
gagcccggtctccacct

SEQ ID NO: 116414 - DNA, 17 bp, synthetic construct
  source 1..17: mol_type = other DNA
agcccggtctccacctg

SEQ ID NO: 116415 - DNA, 17 bp, synthetic construct
  source 1..17: mol_type = other DNA
gcccggtctccacctga

SEQ ID NO: 116416 - DNA, 17 bp, synthetic construct
  source 1..17: mol_type = other DNA
cccggtctccacctgag

SEQ ID NO: 116417 - DNA, 17 bp, synthetic construct
  source 1..17: mol_type = other DNA
ccggtctccacctgagc

SEQ ID NO: 116418 - DNA, 17 bp, synthetic construct
  source 1..17: mol_type = other DNA
cggtctccacctgagcc

SEQ ID NO: 116419 - DNA, 17 bp, synthetic construct
  source 1..17: mol_type = other DNA
ggtctccacctgagccc

SEQ ID NO: 116420 - DNA, 17 bp, synthetic construct
  source 1..17: mol_type = other DNA
gtctccacctgagccca

SEQ ID NO: 116421 - DNA, 17 bp, synthetic construct
  source 1..17: mol_type = other DNA
tctccacctgagcccac

SEQ ID NO: 116422 - DNA, 17 bp, synthetic construct
  source 1..17: mol_type = other DNA
ctccacctgagcccact

SEQ ID NO: 116423 - DNA, 17 bp, synthetic construct
  source 1..17: mol_type = other DNA
tccacctgagcccactt

SEQ ID NO: 116424 - DNA, 17 bp, synthetic construct
  source 1..17: mol_type = other DNA
ccacctgagcccacttg

SEQ ID NO: 116425 - DNA, 17 bp, synthetic construct
  source 1..17: mol_type = other DNA
cacctgagcccacttgg

SEQ ID NO: 116426 - DNA, 17 bp, synthetic construct
  source 1..17: mol_type = other DNA
acctgagcccacttggc

SEQ ID NO: 116427 - DNA, 17 bp, synthetic construct
  source 1..17: mol_type = other DNA
cctgagcccacttggcg

SEQ ID NO: 116428 - DNA, 17 bp, synthetic construct
  source 1..17: mol_type = other DNA
ctgagcccacttggcgg

SEQ ID NO: 116429 - DNA, 17 bp, synthetic construct
  source 1..17: mol_type = other DNA
tgagcccacttggcggc

SEQ ID NO: 116430 - DNA, 17 bp, synthetic construct
  source 1..17: mol_type = other DNA
gagcccacttggcggcc

SEQ ID NO: 116431 - DNA, 17 bp, synthetic construct
  source 1..17: mol_type = other DNA
agcccacttggcggcca

SEQ ID NO: 116432 - DNA, 17 bp, synthetic construct
  source 1..17: mol_type = other DNA
gcccacttggcggccac

SEQ ID NO: 116433 - DNA, 17 bp, synthetic construct
  source 1..17: mol_type = other DNA
cccacttggcggccaca

SEQ ID NO: 116434 - DNA, 17 bp, synthetic construct
  source 1..17: mol_type = other DNA
ccacttggcggccacag

SEQ ID NO: 116435 - DNA, 17 bp, synthetic construct
  source 1..17: mol_type = other DNA
cacttggcggccacagg

SEQ ID NO: 116436 - DNA, 17 bp, synthetic construct
  source 1..17: mol_type = other DNA
acttggcggccacaggc

SEQ ID NO: 116437 - DNA, 17 bp, synthetic construct
  source 1..17: mol_type = other DNA
cttggcggccacaggca

SEQ ID NO: 116438 - DNA, 17 bp, synthetic construct
  source 1..17: mol_type = other DNA
ttggcggccacaggcat

SEQ ID NO: 116439 - DNA, 17 bp, synthetic construct
  source 1..17: mol_type = other DNA
tggcggccacaggcatg

SEQ ID NO: 116440 - DNA, 17 bp, synthetic construct
  source 1..17: mol_type = other DNA
ggcggccacaggcatgg

SEQ ID NO: 116441 - DNA, 17 bp, synthetic construct
  source 1..17: mol_type = other DNA
gcggccacaggcatggg

SEQ ID NO: 116442 - DNA, 17 bp, synthetic construct
  source 1..17: mol_type = other DNA
cggccacaggcatggga

SEQ ID NO: 116443 - DNA, 17 bp, synthetic construct
  source 1..17: mol_type = other DNA
ggccacaggcatgggac

SEQ ID NO: 116444 - DNA, 17 bp, synthetic construct
  source 1..17: mol_type = other DNA
gccacaggcatgggaca

SEQ ID NO: 116445 - DNA, 17 bp, synthetic construct
  source 1..17: mol_type = other DNA
ccacaggcatgggacag

SEQ ID NO: 116446 - DNA, 17 bp, synthetic construct
  source 1..17: mol_type = other DNA
cacaggcatgggacagg

SEQ ID NO: 116447 - DNA, 17 bp, synthetic construct
  source 1..17: mol_type = other DNA
acaggcatgggacaggg

SEQ ID NO: 116448 - DNA, 17 bp, synthetic construct
  source 1..17: mol_type = other DNA
caggcatgggacaggga

SEQ ID NO: 116449 - DNA, 17 bp, synthetic construct
  source 1..17: mol_type = other DNA
aggcatgggacagggag

SEQ ID NO: 116450 - DNA, 17 bp, synthetic construct
  source 1..17: mol_type = other DNA
ggcatgggacagggagc

SEQ ID NO: 116451 - DNA, 17 bp, synthetic construct
  source 1..17: mol_type = other DNA
gcatgggacagggagcc

SEQ ID NO: 116452 - DNA, 17 bp, synthetic construct
  source 1..17: mol_type = other DNA
catgggacagggagcct

SEQ ID NO: 116453 - DNA, 17 bp, synthetic construct
  source 1..17: mol_type = other DNA
atgggacagggagcctg

SEQ ID NO: 116454 - DNA, 17 bp, synthetic construct
  source 1..17: mol_type = other DNA
tgggacagggagcctga

SEQ ID NO: 116455 - DNA, 17 bp, synthetic construct
  source 1..17: mol_type = other DNA
gggacagggagcctgag

SEQ ID NO: 116456 - DNA, 17 bp, synthetic construct
  source 1..17: mol_type = other DNA
ggacagggagcctgagg

SEQ ID NO: 116457 - DNA, 17 bp, synthetic construct
  source 1..17: mol_type = other DNA
gacagggagcctgaggg

SEQ ID NO: 116458 - DNA, 17 bp, synthetic construct
  source 1..17: mol_type = other DNA
acagggagcctgagggc

SEQ ID NO: 116459 - DNA, 17 bp, synthetic construct
  source 1..17: mol_type = other DNA
cagggagcctgagggct

SEQ ID NO: 116460 - DNA, 17 bp, synthetic construct
  source 1..17: mol_type = other DNA
agggagcctgagggctc

SEQ ID NO: 116461 - DNA, 17 bp, synthetic construct
  source 1..17: mol_type = other DNA
gggagcctgagggctcc

SEQ ID NO: 116462 - DNA, 17 bp, synthetic construct
  source 1..17: mol_type = other DNA
ggagcctgagggctcct

SEQ ID NO: 116463 - DNA, 17 bp, synthetic construct
  source 1..17: mol_type = other DNA
gagcctgagggctcctg

SEQ ID NO: 116464 - DNA, 17 bp, synthetic construct
  source 1..17: mol_type = other DNA
agcctgagggctcctgg

SEQ ID NO: 116465 - DNA, 17 bp, synthetic construct
  source 1..17: mol_type = other DNA
gcctgagggctcctggc

SEQ ID NO: 116466 - DNA, 17 bp, synthetic construct
  source 1..17: mol_type = other DNA
cctgagggctcctggcc

SEQ ID NO: 116467 - DNA, 17 bp, synthetic construct
  source 1..17: mol_type = other DNA
ctgagggctcctggcca

SEQ ID NO: 116468 - DNA, 17 bp, synthetic construct
  source 1..17: mol_type = other DNA
tgagggctcctggccac

SEQ ID NO: 116469 - DNA, 17 bp, synthetic construct
  source 1..17: mol_type = other DNA
gagggctcctggccact

SEQ ID NO: 116470 - DNA, 17 bp, synthetic construct
  source 1..17: mol_type = other DNA
agggctcctggccactc

SEQ ID NO: 116471 - DNA, 17 bp, synthetic construct
  source 1..17: mol_type = other DNA
gggctcctggccactcc

SEQ ID NO: 116472 - DNA, 17 bp, synthetic construct
  source 1..17: mol_type = other DNA
ggctcctggccactcct

SEQ ID NO: 116473 - DNA, 17 bp, synthetic construct
  source 1..17: mol_type = other DNA
gctcctggccactcctg

SEQ ID NO: 116474 - DNA, 17 bp, synthetic construct
  source 1..17: mol_type = other DNA
ctcctggccactcctgg

SEQ ID NO: 116475 - DNA, 17 bp, synthetic construct
  source 1..17: mol_type = other DNA
tcctggccactcctggg

SEQ ID NO: 116476 - DNA, 17 bp, synthetic construct
  source 1..17: mol_type = other DNA
cctggccactcctgggt

SEQ ID NO: 116477 - DNA, 17 bp, synthetic construct
  source 1..17: mol_type = other DNA
ctggccactcctgggtc

SEQ ID NO: 116478 - DNA, 17 bp, synthetic construct
  source 1..17: mol_type = other DNA
tggccactcctgggtct

SEQ ID NO: 116479 - DNA, 17 bp, synthetic construct
  source 1..17: mol_type = other DNA
ggccactcctgggtctc

SEQ ID NO: 116480 - DNA, 17 bp, synthetic construct
  source 1..17: mol_type = other DNA
gccactcctgggtctca

SEQ ID NO: 116481 - DNA, 17 bp, synthetic construct
  source 1..17: mol_type = other DNA
ccactcctgggtctcac

SEQ ID NO: 116482 - DNA, 17 bp, synthetic construct
  source 1..17: mol_type = other DNA
cactcctgggtctcact

SEQ ID NO: 116483 - DNA, 17 bp, synthetic construct
  source 1..17: mol_type = other DNA
actcctgggtctcactc

SEQ ID NO: 116484 - DNA, 17 bp, synthetic construct
  source 1..17: mol_type = other DNA
ctcctgggtctcactcc

SEQ ID NO: 116485 - DNA, 17 bp, synthetic construct
  source 1..17: mol_type = other DNA
tcctgggtctcactccc

SEQ ID NO: 116486 - DNA, 17 bp, synthetic construct
  source 1..17: mol_type = other DNA
cctgggtctcactcccg

SEQ ID NO: 116487 - DNA, 17 bp, synthetic construct
  source 1..17: mol_type = other DNA
ctgggtctcactcccgg

SEQ ID NO: 116488 - DNA, 17 bp, synthetic construct
  source 1..17: mol_type = other DNA
tgggtctcactcccggg

SEQ ID NO: 116489 - DNA, 17 bp, synthetic construct
  source 1..17: mol_type = other DNA
gggtctcactcccgggt

SEQ ID NO: 116490 - DNA, 17 bp, synthetic construct
  source 1..17: mol_type = other DNA
ggtctcactcccgggtc

SEQ ID NO: 116491 - DNA, 17 bp, synthetic construct
  source 1..17: mol_type = other DNA
gtctcactcccgggtct

SEQ ID NO: 116492 - DNA, 17 bp, synthetic construct
  source 1..17: mol_type = other DNA
tctcactcccgggtctc

SEQ ID NO: 116493 - DNA, 17 bp, synthetic construct
  source 1..17: mol_type = other DNA
ctcactcccgggtctca

SEQ ID NO: 116494 - DNA, 17 bp, synthetic construct
  source 1..17: mol_type = other DNA
tcactcccgggtctcag

SEQ ID NO: 116495 - DNA, 17 bp, synthetic construct
  source 1..17: mol_type = other DNA
cactcccgggtctcagt

SEQ ID NO: 116496 - DNA, 17 bp, synthetic construct
  source 1..17: mol_type = other DNA
actcccgggtctcagtg

SEQ ID NO: 116497 - DNA, 17 bp, synthetic construct
  source 1..17: mol_type = other DNA
ctcccgggtctcagtgg

SEQ ID NO: 116498 - DNA, 17 bp, synthetic construct
  source 1..17: mol_type = other DNA
tcccgggtctcagtggg

SEQ ID NO: 116499 - DNA, 17 bp, synthetic construct
  source 1..17: mol_type = other DNA
cccgggtctcagtgggg

SEQ ID NO: 116500 - DNA, 17 bp, synthetic construct
  source 1..17: mol_type = other DNA
ccgggtctcagtggggt

SEQ ID NO: 116501 - DNA, 17 bp, synthetic construct
  source 1..17: mol_type = other DNA
cgggtctcagtggggtg

SEQ ID NO: 116502 - DNA, 17 bp, synthetic construct
  source 1..17: mol_type = other DNA
gggtctcagtggggtgg

SEQ ID NO: 116503 - DNA, 17 bp, synthetic construct
  source 1..17: mol_type = other DNA
ggtctcagtggggtggc

SEQ ID NO: 116504 - DNA, 17 bp, synthetic construct
  source 1..17: mol_type = other DNA
gtctcagtggggtggcc

SEQ ID NO: 116505 - DNA, 17 bp, synthetic construct
  source 1..17: mol_type = other DNA
tctcagtggggtggccc

SEQ ID NO: 116506 - DNA, 17 bp, synthetic construct
  source 1..17: mol_type = other DNA
ctcagtggggtggcccg

SEQ ID NO: 116507 - DNA, 17 bp, synthetic construct
  source 1..17: mol_type = other DNA
tcagtggggtggcccgg

SEQ ID NO: 116508 - DNA, 17 bp, synthetic construct
  source 1..17: mol_type = other DNA
cagtggggtggcccggc

SEQ ID NO: 116509 - DNA, 17 bp, synthetic construct
  source 1..17: mol_type = other DNA
agtggggtggcccggcc

SEQ ID NO: 116510 - DNA, 17 bp, synthetic construct
  source 1..17: mol_type = other DNA
gtggggtggcccggccc

SEQ ID NO: 116511 - DNA, 17 bp, synthetic construct
  source 1..17: mol_type = other DNA
tggggtggcccggccca

SEQ ID NO: 116512 - DNA, 17 bp, synthetic construct
  source 1..17: mol_type = other DNA
ggggtggcccggcccac

SEQ ID NO: 116513 - DNA, 17 bp, synthetic construct
  source 1..17: mol_type = other DNA
gggtggcccggcccact

SEQ ID NO: 116514 - DNA, 17 bp, synthetic construct
  source 1..17: mol_type = other DNA
ggtggcccggcccactg

SEQ ID NO: 116515 - DNA, 17 bp, synthetic construct
  source 1..17: mol_type = other DNA
gtggcccggcccactgg

SEQ ID NO: 116516 - DNA, 17 bp, synthetic construct
  source 1..17: mol_type = other DNA
tggcccggcccactgga

SEQ ID NO: 116517 - DNA, 17 bp, synthetic construct
  source 1..17: mol_type = other DNA
ggcccggcccactggat

SEQ ID NO: 116518 - DNA, 17 bp, synthetic construct
  source 1..17: mol_type = other DNA
gcccggcccactggatg

SEQ ID NO: 116519 - DNA, 17 bp, synthetic construct
  source 1..17: mol_type = other DNA
cccggcccactggatgc

SEQ ID NO: 116520 - DNA, 17 bp, synthetic construct
  source 1..17: mol_type = other DNA
ccggcccactggatgcc

SEQ ID NO: 116521 - DNA, 17 bp, synthetic construct
  source 1..17: mol_type = other DNA
cggcccactggatgccc

SEQ ID NO: 116522 - DNA, 17 bp, synthetic construct
  source 1..17: mol_type = other DNA
ggcccactggatgccct

SEQ ID NO: 116523 - DNA, 17 bp, synthetic construct
  source 1..17: mol_type = other DNA
gcccactggatgccctg

SEQ ID NO: 116524 - DNA, 17 bp, synthetic construct
  source 1..17: mol_type = other DNA
cccactggatgccctgc

SEQ ID NO: 116525 - DNA, 17 bp, synthetic construct
  source 1..17: mol_type = other DNA
ccactggatgccctgcc

SEQ ID NO: 116526 - DNA, 17 bp, synthetic construct
  source 1..17: mol_type = other DNA
cactggatgccctgccc

SEQ ID NO: 116527 - DNA, 17 bp, synthetic construct
  source 1..17: mol_type = other DNA
actggatgccctgcccc

SEQ ID NO: 116528 - DNA, 17 bp, synthetic construct
  source 1..17: mol_type = other DNA
ctggatgccctgcccct

SEQ ID NO: 116529 - DNA, 17 bp, synthetic construct
  source 1..17: mol_type = other DNA
tggatgccctgcccctc

SEQ ID NO: 116530 - DNA, 17 bp, synthetic construct
  source 1..17: mol_type = other DNA
ggatgccctgcccctcc

SEQ ID NO: 116531 - DNA, 17 bp, synthetic construct
  source 1..17: mol_type = other DNA
gatgccctgcccctcca

SEQ ID NO: 116532 - DNA, 17 bp, synthetic construct
  source 1..17: mol_type = other DNA
atgccctgcccctccaa

SEQ ID NO: 116533 - DNA, 17 bp, synthetic construct
  source 1..17: mol_type = other DNA
tgccctgcccctccaat

SEQ ID NO: 116534 - DNA, 17 bp, synthetic construct
  source 1..17: mol_type = other DNA
gccctgcccctccaatc

SEQ ID NO: 116535 - DNA, 17 bp, synthetic construct
  source 1..17: mol_type = other DNA
ccctgcccctccaatct

SEQ ID NO: 116536 - DNA, 17 bp, synthetic construct
  source 1..17: mol_type = other DNA
cctgcccctccaatcta

SEQ ID NO: 116537 - DNA, 17 bp, synthetic construct
  source 1..17: mol_type = other DNA
ctgcccctccaatctag

SEQ ID NO: 116538 - DNA, 17 bp, synthetic construct
  source 1..17: mol_type = other DNA
tgcccctccaatctagc

SEQ ID NO: 116539 - DNA, 17 bp, synthetic construct
  source 1..17: mol_type = other DNA
gcccctccaatctagcc

SEQ ID NO: 116540 - DNA, 17 bp, synthetic construct
  source 1..17: mol_type = other DNA
cccctccaatctagcca

SEQ ID NO: 116541 - DNA, 17 bp, synthetic construct
  source 1..17: mol_type = other DNA
ccctccaatctagccag

SEQ ID NO: 116542 - DNA, 17 bp, synthetic construct
  source 1..17: mol_type = other DNA
cctccaatctagccaga

SEQ ID NO: 116543 - DNA, 17 bp, synthetic construct
  source 1..17: mol_type = other DNA
ctccaatctagccagat

SEQ ID NO: 116544 - DNA, 17 bp, synthetic construct
  source 1..17: mol_type = other DNA
tccaatctagccagatc

SEQ ID NO: 116545 - DNA, 17 bp, synthetic construct
  source 1..17: mol_type = other DNA
ccaatctagccagatct

SEQ ID NO: 116546 - DNA, 17 bp, synthetic construct
  source 1..17: mol_type = other DNA
caatctagccagatctg

SEQ ID NO: 116547 - DNA, 17 bp, synthetic construct
  source 1..17: mol_type = other DNA
aatctagccagatctgt

SEQ ID NO: 116548 - DNA, 17 bp, synthetic construct
  source 1..17: mol_type = other DNA
atctagccagatctgtc

SEQ ID NO: 116549 - DNA, 17 bp, synthetic construct
  source 1..17: mol_type = other DNA
tctagccagatctgtcc

SEQ ID NO: 116550 - DNA, 17 bp, synthetic construct
  source 1..17: mol_type = other DNA
ctagccagatctgtccc

SEQ ID NO: 116551 - DNA, 17 bp, synthetic construct
  source 1..17: mol_type = other DNA
tagccagatctgtccct

SEQ ID NO: 116552 - DNA, 17 bp, synthetic construct
  source 1..17: mol_type = other DNA
agccagatctgtccctg

SEQ ID NO: 116553 - DNA, 17 bp, synthetic construct
  source 1..17: mol_type = other DNA
gccagatctgtccctgc

SEQ ID NO: 116554 - DNA, 17 bp, synthetic construct
  source 1..17: mol_type = other DNA
ccagatctgtccctgca

SEQ ID NO: 116555 - DNA, 17 bp, synthetic construct
  source 1..17: mol_type = other DNA
cagatctgtccctgcac

SEQ ID NO: 116556 - DNA, 17 bp, synthetic construct
  source 1..17: mol_type = other DNA
agatctgtccctgcacc

SEQ ID NO: 116557 - DNA, 17 bp, synthetic construct
  source 1..17: mol_type = other DNA
gatctgtccctgcaccc

SEQ ID NO: 116558 - DNA, 17 bp, synthetic construct
  source 1..17: mol_type = other DNA
atctgtccctgcacccc

SEQ ID NO: 116559 - DNA, 17 bp, synthetic construct
  source 1..17: mol_type = other DNA
tctgtccctgcacccct

SEQ ID NO: 116560 - DNA, 17 bp, synthetic construct
  source 1..17: mol_type = other DNA
ctgtccctgcacccctg

SEQ ID NO: 116561 - DNA, 17 bp, synthetic construct
  source 1..17: mol_type = other DNA
tgtccctgcacccctga

SEQ ID NO: 116562 - DNA, 17 bp, synthetic construct
  source 1..17: mol_type = other DNA
gtccctgcacccctgac

SEQ ID NO: 116563 - DNA, 17 bp, synthetic construct
  source 1..17: mol_type = other DNA
tccctgcacccctgacc

SEQ ID NO: 116564 - DNA, 17 bp, synthetic construct
  source 1..17: mol_type = other DNA
ccctgcacccctgaccg

SEQ ID NO: 116565 - DNA, 17 bp, synthetic construct
  source 1..17: mol_type = other DNA
cctgcacccctgaccgg

SEQ ID NO: 116566 - DNA, 17 bp, synthetic construct
  source 1..17: mol_type = other DNA
ctgcacccctgaccggc

SEQ ID NO: 116567 - DNA, 17 bp, synthetic construct
  source 1..17: mol_type = other DNA
tgcacccctgaccggcc

SEQ ID NO: 116568 - DNA, 17 bp, synthetic construct
  source 1..17: mol_type = other DNA
gcacccctgaccggcct

SEQ ID NO: 116569 - DNA, 17 bp, synthetic construct
  source 1..17: mol_type = other DNA
cacccctgaccggcctc

SEQ ID NO: 116570 - DNA, 17 bp, synthetic construct
  source 1..17: mol_type = other DNA
acccctgaccggcctct

SEQ ID NO: 116571 - DNA, 17 bp, synthetic construct
  source 1..17: mol_type = other DNA
cccctgaccggcctctc

SEQ ID NO: 116572 - DNA, 17 bp, synthetic construct
  source 1..17: mol_type = other DNA
ccctgaccggcctctcc

SEQ ID NO: 116573 - DNA, 17 bp, synthetic construct
  source 1..17: mol_type = other DNA
cctgaccggcctctccc

SEQ ID NO: 116574 - DNA, 17 bp, synthetic construct
  source 1..17: mol_type = other DNA
ctgaccggcctctcccc

SEQ ID NO: 116575 - DNA, 17 bp, synthetic construct
  source 1..17: mol_type = other DNA
tgaccggcctctccccc

SEQ ID NO: 116576 - DNA, 17 bp, synthetic construct
  source 1..17: mol_type = other DNA
gaccggcctctccccca

SEQ ID NO: 116577 - DNA, 17 bp, synthetic construct
  source 1..17: mol_type = other DNA
accggcctctcccccac

SEQ ID NO: 116578 - DNA, 17 bp, synthetic construct
  source 1..17: mol_type = other DNA
ccggcctctcccccaca

SEQ ID NO: 116579 - DNA, 17 bp, synthetic construct
  source 1..17: mol_type = other DNA
cggcctctcccccacac

SEQ ID NO: 116580 - DNA, 17 bp, synthetic construct
  source 1..17: mol_type = other DNA
ggcctctcccccacact

SEQ ID NO: 116581 - DNA, 17 bp, synthetic construct
  source 1..17: mol_type = other DNA
gcctctcccccacactc

SEQ ID NO: 116582 - DNA, 17 bp, synthetic construct
  source 1..17: mol_type = other DNA
cctctcccccacactcc

SEQ ID NO: 116583 - DNA, 17 bp, synthetic construct
  source 1..17: mol_type = other DNA
ctctcccccacactccc

SEQ ID NO: 116584 - DNA, 17 bp, synthetic construct
  source 1..17: mol_type = other DNA
tctcccccacactcccg

SEQ ID NO: 116585 - DNA, 17 bp, synthetic construct
  source 1..17: mol_type = other DNA
ctcccccacactcccgg

SEQ ID NO: 116586 - DNA, 17 bp, synthetic construct
  source 1..17: mol_type = other DNA
tcccccacactcccggc

SEQ ID NO: 116587 - DNA, 17 bp, synthetic construct
  source 1..17: mol_type = other DNA
cccccacactcccggca

SEQ ID NO: 116588 - DNA, 17 bp, synthetic construct
  source 1..17: mol_type = other DNA
ccccacactcccggcag

SEQ ID NO: 116589 - DNA, 17 bp, synthetic construct
  source 1..17: mol_type = other DNA
cccacactcccggcagc

SEQ ID NO: 116590 - DNA, 17 bp, synthetic construct
  source 1..17: mol_type = other DNA
ccacactcccggcagcc

SEQ ID NO: 116591 - DNA, 17 bp, synthetic construct
  source 1..17: mol_type = other DNA
cacactcccggcagcca

SEQ ID NO: 116592 - DNA, 17 bp, synthetic construct
  source 1..17: mol_type = other DNA
acactcccggcagccaa

SEQ ID NO: 116593 - DNA, 17 bp, synthetic construct
  source 1..17: mol_type = other DNA
cactcccggcagccaac

SEQ ID NO: 116594 - DNA, 17 bp, synthetic construct
  source 1..17: mol_type = other DNA
actcccggcagccaaca

SEQ ID NO: 116595 - DNA, 17 bp, synthetic construct
  source 1..17: mol_type = other DNA
ctcccggcagccaacat

SEQ ID NO: 116596 - DNA, 17 bp, synthetic construct
  source 1..17: mol_type = other DNA
tcccggcagccaacatc

SEQ ID NO: 116597 - DNA, 17 bp, synthetic construct
  source 1..17: mol_type = other DNA
cccggcagccaacatca

SEQ ID NO: 116598 - DNA, 17 bp, synthetic construct
  source 1..17: mol_type = other DNA
ccggcagccaacatcac

SEQ ID NO: 116599 - DNA, 17 bp, synthetic construct
  source 1..17: mol_type = other DNA
cggcagccaacatcacc

SEQ ID NO: 116600 - DNA, 17 bp, synthetic construct
  source 1..17: mol_type = other DNA
ggcagccaacatcaccc

SEQ ID NO: 116601 - DNA, 17 bp, synthetic construct
  source 1..17: mol_type = other DNA
gcagccaacatcaccct

SEQ ID NO: 116602 - DNA, 17 bp, synthetic construct
  source 1..17: mol_type = other DNA
cagccaacatcaccctg

SEQ ID NO: 116603 - DNA, 17 bp, synthetic construct
  source 1..17: mol_type = other DNA
agccaacatcaccctgt

SEQ ID NO: 116604 - DNA, 17 bp, synthetic construct
  source 1..17: mol_type = other DNA
gccaacatcaccctgtt

SEQ ID NO: 116605 - DNA, 17 bp, synthetic construct
  source 1..17: mol_type = other DNA
ccaacatcaccctgttc

SEQ ID NO: 116606 - DNA, 17 bp, synthetic construct
  source 1..17: mol_type = other DNA
caacatcaccctgttca

SEQ ID NO: 116607 - DNA, 17 bp, synthetic construct
  source 1..17: mol_type = other DNA
aacatcaccctgttcac

SEQ ID NO: 116608 - DNA, 17 bp, synthetic construct
  source 1..17: mol_type = other DNA
acatcaccctgttcaca

SEQ ID NO: 116609 - DNA, 17 bp, synthetic construct
  source 1..17: mol_type = other DNA
catcaccctgttcacac

SEQ ID NO: 116610 - DNA, 17 bp, synthetic construct
  source 1..17: mol_type = other DNA
atcaccctgttcacacc

SEQ ID NO: 116611 - DNA, 17 bp, synthetic construct
  source 1..17: mol_type = other DNA
tcaccctgttcacaccc

SEQ ID NO: 116612 - DNA, 17 bp, synthetic construct
  source 1..17: mol_type = other DNA
caccctgttcacaccct

SEQ ID NO: 116613 - DNA, 17 bp, synthetic construct
  source 1..17: mol_type = other DNA
accctgttcacaccctc

SEQ ID NO: 116614 - DNA, 17 bp, synthetic construct
  source 1..17: mol_type = other DNA
ccctgttcacaccctcg

SEQ ID NO: 116615 - DNA, 17 bp, synthetic construct
  source 1..17: mol_type = other DNA
cctgttcacaccctcga

SEQ ID NO: 116616 - DNA, 17 bp, synthetic construct
  source 1..17: mol_type = other DNA
ctgttcacaccctcgag

SEQ ID NO: 116617 - DNA, 17 bp, synthetic construct
  source 1..17: mol_type = other DNA
tgttcacaccctcgagc

SEQ ID NO: 116618 - DNA, 17 bp, synthetic construct
  source 1..17: mol_type = other DNA
gttcacaccctcgagct

SEQ ID NO: 116619 - DNA, 17 bp, synthetic construct
  source 1..17: mol_type = other DNA
ttcacaccctcgagctt

SEQ ID NO: 116620 - DNA, 17 bp, synthetic construct
  source 1..17: mol_type = other DNA
tcacaccctcgagcttc

SEQ ID NO: 116621 - DNA, 17 bp, synthetic construct
  source 1..17: mol_type = other DNA
cacaccctcgagcttct

SEQ ID NO: 116622 - DNA, 17 bp, synthetic construct
  source 1..17: mol_type = other DNA
acaccctcgagcttctt

SEQ ID NO: 116623 - DNA, 17 bp, synthetic construct
  source 1..17: mol_type = other DNA
caccctcgagcttcttc

SEQ ID NO: 116624 - DNA, 17 bp, synthetic construct
  source 1..17: mol_type = other DNA
accctcgagcttcttca

SEQ ID NO: 116625 - DNA, 17 bp, synthetic construct
  source 1..17: mol_type = other DNA
ccctcgagcttcttcat

SEQ ID NO: 116626 - DNA, 17 bp, synthetic construct
  source 1..17: mol_type = other DNA
cctcgagcttcttcatc

SEQ ID NO: 116627 - DNA, 17 bp, synthetic construct
  source 1..17: mol_type = other DNA
ctcgagcttcttcatcg

SEQ ID NO: 116628 - DNA, 17 bp, synthetic construct
  source 1..17: mol_type = other DNA
tcgagcttcttcatcgt

SEQ ID NO: 116629 - DNA, 17 bp, synthetic construct
  source 1..17: mol_type = other DNA
cgagcttcttcatcgtg

SEQ ID NO: 116630 - DNA, 17 bp, synthetic construct
  source 1..17: mol_type = other DNA
gagcttcttcatcgtgg

SEQ ID NO: 116631 - DNA, 17 bp, synthetic construct
  source 1..17: mol_type = other DNA
agcttcttcatcgtggt

SEQ ID NO: 116632 - DNA, 17 bp, synthetic construct
  source 1..17: mol_type = other DNA
gcttcttcatcgtggtg

SEQ ID NO: 116633 - DNA, 17 bp, synthetic construct
  source 1..17: mol_type = other DNA
cttcttcatcgtggtgc

SEQ ID NO: 116634 - DNA, 17 bp, synthetic construct
  source 1..17: mol_type = other DNA
ttcttcatcgtggtgca

SEQ ID NO: 116635 - DNA, 17 bp, synthetic construct
  source 1..17: mol_type = other DNA
tcttcatcgtggtgcag

SEQ ID NO: 116636 - DNA, 17 bp, synthetic construct
  source 1..17: mol_type = other DNA
cttcatcgtggtgcaga

SEQ ID NO: 116637 - DNA, 17 bp, synthetic construct
  source 1..17: mol_type = other DNA
ttcatcgtggtgcagac

SEQ ID NO: 116638 - DNA, 17 bp, synthetic construct
  source 1..17: mol_type = other DNA
tcatcgtggtgcagaca

SEQ ID NO: 116639 - DNA, 17 bp, synthetic construct
  source 1..17: mol_type = other DNA
catcgtggtgcagacag

SEQ ID NO: 116640 - DNA, 17 bp, synthetic construct
  source 1..17: mol_type = other DNA
atcgtggtgcagacagg

SEQ ID NO: 116641 - DNA, 17 bp, synthetic construct
  source 1..17: mol_type = other DNA
tcgtggtgcagacaggc

SEQ ID NO: 116642 - DNA, 17 bp, synthetic construct
  source 1..17: mol_type = other DNA
cgtggtgcagacaggcc

SEQ ID NO: 116643 - DNA, 17 bp, synthetic construct
  source 1..17: mol_type = other DNA
gtggtgcagacaggcct

SEQ ID NO: 116644 - DNA, 17 bp, synthetic construct
  source 1..17: mol_type = other DNA
tggtgcagacaggcctg

SEQ ID NO: 116645 - DNA, 17 bp, synthetic construct
  source 1..17: mol_type = other DNA
ggtgcagacaggcctgg

SEQ ID NO: 116646 - DNA, 17 bp, synthetic construct
  source 1..17: mol_type = other DNA
gtgcagacaggcctggg

SEQ ID NO: 116647 - DNA, 17 bp, synthetic construct
  source 1..17: mol_type = other DNA
tgcagacaggcctgggg

SEQ ID NO: 116648 - DNA, 17 bp, synthetic construct
  source 1..17: mol_type = other DNA
gcagacaggcctggggc

SEQ ID NO: 116649 - DNA, 17 bp, synthetic construct
  source 1..17: mol_type = other DNA
cagacaggcctggggct

SEQ ID NO: 116650 - DNA, 17 bp, synthetic construct
  source 1..17: mol_type = other DNA
agacaggcctggggctg

SEQ ID NO: 116651 - DNA, 17 bp, synthetic construct
  source 1..17: mol_type = other DNA
gacaggcctggggctgc

SEQ ID NO: 116652 - DNA, 17 bp, synthetic construct
  source 1..17: mol_type = other DNA
acaggcctggggctgca

SEQ ID NO: 116653 - DNA, 17 bp, synthetic construct
  source 1..17: mol_type = other DNA
caggcctggggctgcag

SEQ ID NO: 116654 - DNA, 17 bp, synthetic construct
  source 1..17: mol_type = other DNA
aggcctggggctgcagc

SEQ ID NO: 116655 - DNA, 17 bp, synthetic construct
  source 1..17: mol_type = other DNA
ggcctggggctgcagct

SEQ ID NO: 116656 - DNA, 17 bp, synthetic construct
  source 1..17: mol_type = other DNA
gcctggggctgcagctg

SEQ ID NO: 116657 - DNA, 17 bp, synthetic construct
  source 1..17: mol_type = other DNA
cctggggctgcagctgc

SEQ ID NO: 116658 - DNA, 17 bp, synthetic construct
  source 1..17: mol_type = other DNA
ctggggctgcagctgct

SEQ ID NO: 116659 - DNA, 17 bp, synthetic construct
  source 1..17: mol_type = other DNA
tggggctgcagctgctg

SEQ ID NO: 116660 - DNA, 17 bp, synthetic construct
  source 1..17: mol_type = other DNA
ggggctgcagctgctgg

SEQ ID NO: 116661 - DNA, 17 bp, synthetic construct
  source 1..17: mol_type = other DNA
gggctgcagctgctggt

SEQ ID NO: 116662 - DNA, 17 bp, synthetic construct
  source 1..17: mol_type = other DNA
ggctgcagctgctggtg

SEQ ID NO: 116663 - DNA, 17 bp, synthetic construct
  source 1..17: mol_type = other DNA
gctgcagctgctggtgc

SEQ ID NO: 116664 - DNA, 17 bp, synthetic construct
  source 1..17: mol_type = other DNA
ctgcagctgctggtgca

SEQ ID NO: 116665 - DNA, 17 bp, synthetic construct
  source 1..17: mol_type = other DNA
tgcagctgctggtgcag

SEQ ID NO: 116666 - DNA, 17 bp, synthetic construct
  source 1..17: mol_type = other DNA
gcagctgctggtgcagc

SEQ ID NO: 116667 - DNA, 17 bp, synthetic construct
  source 1..17: mol_type = other DNA
cagctgctggtgcagct

SEQ ID NO: 116668 - DNA, 17 bp, synthetic construct
  source 1..17: mol_type = other DNA
agctgctggtgcagctg

SEQ ID NO: 116669 - DNA, 17 bp, synthetic construct
  source 1..17: mol_type = other DNA
gctgctggtgcagctgg

SEQ ID NO: 116670 - DNA, 17 bp, synthetic construct
  source 1..17: mol_type = other DNA
ctgctggtgcagctggt

SEQ ID NO: 116671 - DNA, 17 bp, synthetic construct
  source 1..17: mol_type = other DNA
tgctggtgcagctggtg

SEQ ID NO: 116672 - DNA, 17 bp, synthetic construct
  source 1..17: mol_type = other DNA
gctggtgcagctggtgc

SEQ ID NO: 116673 - DNA, 17 bp, synthetic construct
  source 1..17: mol_type = other DNA
ctggtgcagctggtgcc

SEQ ID NO: 116674 - DNA, 17 bp, synthetic construct
  source 1..17: mol_type = other DNA
tggtgcagctggtgcca

SEQ ID NO: 116675 - DNA, 17 bp, synthetic construct
  source 1..17: mol_type = other DNA
ggtgcagctggtgccac

SEQ ID NO: 116676 - DNA, 17 bp, synthetic construct
  source 1..17: mol_type = other DNA
gtgcagctggtgccact

SEQ ID NO: 116677 - DNA, 17 bp, synthetic construct
  source 1..17: mol_type = other DNA
tgcagctggtgccactc

SEQ ID NO: 116678 - DNA, 17 bp, synthetic construct
  source 1..17: mol_type = other DNA
gcagctggtgccactca

SEQ ID NO: 116679 - DNA, 17 bp, synthetic construct
  source 1..17: mol_type = other DNA
cagctggtgccactcat

SEQ ID NO: 116680 - DNA, 17 bp, synthetic construct
  source 1..17: mol_type = other DNA
agctggtgccactcatg

SEQ ID NO: 116681 - DNA, 17 bp, synthetic construct
  source 1..17: mol_type = other DNA
gctggtgccactcatgc

SEQ ID NO: 116682 - DNA, 17 bp, synthetic construct
  source 1..17: mol_type = other DNA
ctggtgccactcatgca

SEQ ID NO: 116683 - DNA, 17 bp, synthetic construct
  source 1..17: mol_type = other DNA
tggtgccactcatgcag

SEQ ID NO: 116684 - DNA, 17 bp, synthetic construct
  source 1..17: mol_type = other DNA
ggtgccactcatgcagg

SEQ ID NO: 116685 - DNA, 17 bp, synthetic construct
  source 1..17: mol_type = other DNA
gtgccactcatgcaggt

SEQ ID NO: 116686 - DNA, 17 bp, synthetic construct
  source 1..17: mol_type = other DNA
tgccactcatgcaggtg

SEQ ID NO: 116687 - DNA, 17 bp, synthetic construct
  source 1..17: mol_type = other DNA
gccactcatgcaggtgt

SEQ ID NO: 116688 - DNA, 17 bp, synthetic construct
  source 1..17: mol_type = other DNA
ccactcatgcaggtgtt

SEQ ID NO: 116689 - DNA, 17 bp, synthetic construct
  source 1..17: mol_type = other DNA
cactcatgcaggtgttt

SEQ ID NO: 116690 - DNA, 17 bp, synthetic construct
  source 1..17: mol_type = other DNA
actcatgcaggtgtttg

SEQ ID NO: 116691 - DNA, 17 bp, synthetic construct
  source 1..17: mol_type = other DNA
ctcatgcaggtgtttgt

SEQ ID NO: 116692 - DNA, 17 bp, synthetic construct
  source 1..17: mol_type = other DNA
tcatgcaggtgtttgtc

SEQ ID NO: 116693 - DNA, 17 bp, synthetic construct
  source 1..17: mol_type = other DNA
catgcaggtgtttgtca

SEQ ID NO: 116694 - DNA, 17 bp, synthetic construct
  source 1..17: mol_type = other DNA
atgcaggtgtttgtcag

SEQ ID NO: 116695 - DNA, 17 bp, synthetic construct
  source 1..17: mol_type = other DNA
tgcaggtgtttgtcagg

SEQ ID NO: 116696 - DNA, 17 bp, synthetic construct
  source 1..17: mol_type = other DNA
gcaggtgtttgtcaggc

SEQ ID NO: 116697 - DNA, 17 bp, synthetic construct
  source 1..17: mol_type = other DNA
caggtgtttgtcaggct

SEQ ID NO: 116698 - DNA, 17 bp, synthetic construct
  source 1..17: mol_type = other DNA
aggtgtttgtcaggctg

SEQ ID NO: 116699 - DNA, 17 bp, synthetic construct
  source 1..17: mol_type = other DNA
ggtgtttgtcaggctgg

SEQ ID NO: 116700 - DNA, 17 bp, synthetic construct
  source 1..17: mol_type = other DNA
gtgtttgtcaggctgga

SEQ ID NO: 116701 - DNA, 17 bp, synthetic construct
  source 1..17: mol_type = other DNA
tgtttgtcaggctggac

SEQ ID NO: 116702 - DNA, 17 bp, synthetic construct
  source 1..17: mol_type = other DNA
gtttgtcaggctggacc

SEQ ID NO: 116703 - DNA, 17 bp, synthetic construct
  source 1..17: mol_type = other DNA
tttgtcaggctggaccc

SEQ ID NO: 116704 - DNA, 17 bp, synthetic construct
  source 1..17: mol_type = other DNA
ttgtcaggctggacccc

SEQ ID NO: 116705 - DNA, 17 bp, synthetic construct
  source 1..17: mol_type = other DNA
tgtcaggctggaccccg

SEQ ID NO: 116706 - DNA, 17 bp, synthetic construct
  source 1..17: mol_type = other DNA
gtcaggctggaccccgc

SEQ ID NO: 116707 - DNA, 17 bp, synthetic construct
  source 1..17: mol_type = other DNA
tcaggctggaccccgcc

SEQ ID NO: 116708 - DNA, 17 bp, synthetic construct
  source 1..17: mol_type = other DNA
caggctggaccccgccc

SEQ ID NO: 116709 - DNA, 17 bp, synthetic construct
  source 1..17: mol_type = other DNA
aggctggaccccgccca

SEQ ID NO: 116710 - DNA, 17 bp, synthetic construct
  source 1..17: mol_type = other DNA
ggctggaccccgcccac

SEQ ID NO: 116711 - DNA, 17 bp, synthetic construct
  source 1..17: mol_type = other DNA
gctggaccccgcccacc

SEQ ID NO: 116712 - DNA, 17 bp, synthetic construct
  source 1..17: mol_type = other DNA
ctggaccccgcccacca

SEQ ID NO: 116713 - DNA, 17 bp, synthetic construct
  source 1..17: mol_type = other DNA
tggaccccgcccaccag

SEQ ID NO: 116714 - DNA, 17 bp, synthetic construct
  source 1..17: mol_type = other DNA
ggaccccgcccaccagg

SEQ ID NO: 116715 - DNA, 17 bp, synthetic construct
  source 1..17: mol_type = other DNA
gaccccgcccaccaggg

SEQ ID NO: 116716 - DNA, 17 bp, synthetic construct
  source 1..17: mol_type = other DNA
accccgcccaccagggc

SEQ ID NO: 116717 - DNA, 17 bp, synthetic construct
  source 1..17: mol_type = other DNA
ccccgcccaccagggcc

SEQ ID NO: 116718 - DNA, 17 bp, synthetic construct
  source 1..17: mol_type = other DNA
cccgcccaccagggcca

SEQ ID NO: 116719 - DNA, 17 bp, synthetic construct
  source 1..17: mol_type = other DNA
ccgcccaccagggccag

SEQ ID NO: 116720 - DNA, 17 bp, synthetic construct
  source 1..17: mol_type = other DNA
cgcccaccagggccaga

SEQ ID NO: 116721 - DNA, 17 bp, synthetic construct
  source 1..17: mol_type = other DNA
gcccaccagggccagat

SEQ ID NO: 116722 - DNA, 17 bp, synthetic construct
  source 1..17: mol_type = other DNA
cccaccagggccagatg

SEQ ID NO: 116723 - DNA, 17 bp, synthetic construct
  source 1..17: mol_type = other DNA
ccaccagggccagatgt

SEQ ID NO: 116724 - DNA, 17 bp, synthetic construct
  source 1..17: mol_type = other DNA
caccagggccagatgtg

SEQ ID NO: 116725 - DNA, 17 bp, synthetic construct
  source 1..17: mol_type = other DNA
accagggccagatgtgc

SEQ ID NO: 116726 - DNA, 17 bp, synthetic construct
  source 1..17: mol_type = other DNA
ccagggccagatgtgcg

SEQ ID NO: 116727 - DNA, 17 bp, synthetic construct
  source 1..17: mol_type = other DNA
cagggccagatgtgcgg

SEQ ID NO: 116728 - DNA, 17 bp, synthetic construct
  source 1..17: mol_type = other DNA
agggccagatgtgcggt

SEQ ID NO: 116729 - DNA, 17 bp, synthetic construct
  source 1..17: mol_type = other DNA
gggccagatgtgcggtg

SEQ ID NO: 116730 - DNA, 17 bp, synthetic construct
  source 1..17: mol_type = other DNA
ggccagatgtgcggtga

SEQ ID NO: 116731 - DNA, 17 bp, synthetic construct
  source 1..17: mol_type = other DNA
gccagatgtgcggtgag

SEQ ID NO: 116732 - DNA, 17 bp, synthetic construct
  source 1..17: mol_type = other DNA
ccagatgtgcggtgagg

SEQ ID NO: 116733 - DNA, 17 bp, synthetic construct
  source 1..17: mol_type = other DNA
cagatgtgcggtgaggc

SEQ ID NO: 116734 - DNA, 17 bp, synthetic construct
  source 1..17: mol_type = other DNA
agatgtgcggtgaggct

SEQ ID NO: 116735 - DNA, 17 bp, synthetic construct
  source 1..17: mol_type = other DNA
gatgtgcggtgaggctg

SEQ ID NO: 116736 - DNA, 17 bp, synthetic construct
  source 1..17: mol_type = other DNA
atgtgcggtgaggctgg

SEQ ID NO: 116737 - DNA, 17 bp, synthetic construct
  source 1..17: mol_type = other DNA
tgtgcggtgaggctggg

SEQ ID NO: 116738 - DNA, 17 bp, synthetic construct
  source 1..17: mol_type = other DNA
gtgcggtgaggctgggc

SEQ ID NO: 116739 - DNA, 17 bp, synthetic construct
  source 1..17: mol_type = other DNA
tgcggtgaggctgggca

SEQ ID NO: 116740 - DNA, 17 bp, synthetic construct
  source 1..17: mol_type = other DNA
gcggtgaggctgggcag

SEQ ID NO: 116741 - DNA, 17 bp, synthetic construct
  source 1..17: mol_type = other DNA
cggtgaggctgggcagg

SEQ ID NO: 116742 - DNA, 17 bp, synthetic construct
  source 1..17: mol_type = other DNA
ggtgaggctgggcaggg

SEQ ID NO: 116743 - DNA, 17 bp, synthetic construct
  source 1..17: mol_type = other DNA
gtgaggctgggcagggg

SEQ ID NO: 116744 - DNA, 17 bp, synthetic construct
  source 1..17: mol_type = other DNA
tgaggctgggcaggggc

SEQ ID NO: 116745 - DNA, 17 bp, synthetic construct
  source 1..17: mol_type = other DNA
gaggctgggcaggggcc

SEQ ID NO: 116746 - DNA, 17 bp, synthetic construct
  source 1..17: mol_type = other DNA
aggctgggcaggggcct

SEQ ID NO: 116747 - DNA, 17 bp, synthetic construct
  source 1..17: mol_type = other DNA
ggctgggcaggggcctt

SEQ ID NO: 116748 - DNA, 17 bp, synthetic construct
  source 1..17: mol_type = other DNA
gctgggcaggggccttc

SEQ ID NO: 116749 - DNA, 17 bp, synthetic construct
  source 1..17: mol_type = other DNA
ctgggcaggggccttcg

SEQ ID NO: 116750 - DNA, 17 bp, synthetic construct
  source 1..17: mol_type = other DNA
tgggcaggggccttcgg

SEQ ID NO: 116751 - DNA, 17 bp, synthetic construct
  source 1..17: mol_type = other DNA
gggcaggggccttcggg

SEQ ID NO: 116752 - DNA, 17 bp, synthetic construct
  source 1..17: mol_type = other DNA
ggcaggggccttcgggg

SEQ ID NO: 116753 - DNA, 17 bp, synthetic construct
  source 1..17: mol_type = other DNA
gcaggggccttcgggga

SEQ ID NO: 116754 - DNA, 17 bp, synthetic construct
  source 1..17: mol_type = other DNA
caggggccttcggggac

SEQ ID NO: 116755 - DNA, 17 bp, synthetic construct
  source 1..17: mol_type = other DNA
aggggccttcggggaca

SEQ ID NO: 116756 - DNA, 17 bp, synthetic construct
  source 1..17: mol_type = other DNA
ggggccttcggggacag

SEQ ID NO: 116757 - DNA, 17 bp, synthetic construct
  source 1..17: mol_type = other DNA
gggccttcggggacagg

SEQ ID NO: 116758 - DNA, 17 bp, synthetic construct
  source 1..17: mol_type = other DNA
ggccttcggggacaggg

SEQ ID NO: 116759 - DNA, 17 bp, synthetic construct
  source 1..17: mol_type = other DNA
gccttcggggacagggc

SEQ ID NO: 116760 - DNA, 17 bp, synthetic construct
  source 1..17: mol_type = other DNA
ccttcggggacagggcc

SEQ ID NO: 116761 - DNA, 17 bp, synthetic construct
  source 1..17: mol_type = other DNA
cttcggggacagggcca

SEQ ID NO: 116762 - DNA, 17 bp, synthetic construct
  source 1..17: mol_type = other DNA
ttcggggacagggccat

SEQ ID NO: 116763 - DNA, 17 bp, synthetic construct
  source 1..17: mol_type = other DNA
tcggggacagggccatt

SEQ ID NO: 116764 - DNA, 17 bp, synthetic construct
  source 1..17: mol_type = other DNA
cggggacagggccattg

SEQ ID NO: 116765 - DNA, 17 bp, synthetic construct
  source 1..17: mol_type = other DNA
ggggacagggccattgg

SEQ ID NO: 116766 - DNA, 17 bp, synthetic construct
  source 1..17: mol_type = other DNA
gggacagggccattggg

SEQ ID NO: 116767 - DNA, 17 bp, synthetic construct
  source 1..17: mol_type = other DNA
ggacagggccattgggg

SEQ ID NO: 116768 - DNA, 17 bp, synthetic construct
  source 1..17: mol_type = other DNA
gacagggccattgggga

SEQ ID NO: 116769 - DNA, 17 bp, synthetic construct
  source 1..17: mol_type = other DNA
acagggccattggggac

SEQ ID NO: 116770 - DNA, 17 bp, synthetic construct
  source 1..17: mol_type = other DNA
cagggccattggggacg

SEQ ID NO: 116771 - DNA, 17 bp, synthetic construct
  source 1..17: mol_type = other DNA
agggccattggggacgg

SEQ ID NO: 116772 - DNA, 17 bp, synthetic construct
  source 1..17: mol_type = other DNA
gggccattggggacggg

SEQ ID NO: 116773 - DNA, 17 bp, synthetic construct
  source 1..17: mol_type = other DNA
ggccattggggacgggg

SEQ ID NO: 116774 - DNA, 17 bp, synthetic construct
  source 1..17: mol_type = other DNA
gccattggggacggggc

SEQ ID NO: 116775 - DNA, 17 bp, synthetic construct
  source 1..17: mol_type = other DNA
ccattggggacggggcc

SEQ ID NO: 116776 - DNA, 17 bp, synthetic construct
  source 1..17: mol_type = other DNA
cattggggacggggcct

SEQ ID NO: 116777 - DNA, 17 bp, synthetic construct
  source 1..17: mol_type = other DNA
attggggacggggcctg

SEQ ID NO: 116778 - DNA, 17 bp, synthetic construct
  source 1..17: mol_type = other DNA
ttggggacggggcctgg

SEQ ID NO: 116779 - DNA, 17 bp, synthetic construct
  source 1..17: mol_type = other DNA
tggggacggggcctgga

SEQ ID NO: 116780 - DNA, 17 bp, synthetic construct
  source 1..17: mol_type = other DNA
ggggacggggcctggac

SEQ ID NO: 116781 - DNA, 17 bp, synthetic construct
  source 1..17: mol_type = other DNA
gggacggggcctggact

SEQ ID NO: 116782 - DNA, 17 bp, synthetic construct
  source 1..17: mol_type = other DNA
ggacggggcctggacta

SEQ ID NO: 116783 - DNA, 17 bp, synthetic construct
  source 1..17: mol_type = other DNA
gacggggcctggactag

SEQ ID NO: 116784 - DNA, 17 bp, synthetic construct
  source 1..17: mol_type = other DNA
acggggcctggactagc

SEQ ID NO: 116785 - DNA, 17 bp, synthetic construct
  source 1..17: mol_type = other DNA
cggggcctggactagcg

SEQ ID NO: 116786 - DNA, 17 bp, synthetic construct
  source 1..17: mol_type = other DNA
ggggcctggactagcgc

SEQ ID NO: 116787 - DNA, 17 bp, synthetic construct
  source 1..17: mol_type = other DNA
gggcctggactagcgcc

SEQ ID NO: 116788 - DNA, 17 bp, synthetic construct
  source 1..17: mol_type = other DNA
ggcctggactagcgcca

SEQ ID NO: 116789 - DNA, 17 bp, synthetic construct
  source 1..17: mol_type = other DNA
gcctggactagcgccag

SEQ ID NO: 116790 - DNA, 17 bp, synthetic construct
  source 1..17: mol_type = other DNA
cctggactagcgccagg

SEQ ID NO: 116791 - DNA, 17 bp, synthetic construct
  source 1..17: mol_type = other DNA
ctggactagcgccaggc

SEQ ID NO: 116792 - DNA, 17 bp, synthetic construct
  source 1..17: mol_type = other DNA
tggactagcgccaggct

SEQ ID NO: 116793 - DNA, 17 bp, synthetic construct
  source 1..17: mol_type = other DNA
ggactagcgccaggctg

SEQ ID NO: 116794 - DNA, 17 bp, synthetic construct
  source 1..17: mol_type = other DNA
gactagcgccaggctgc

SEQ ID NO: 116795 - DNA, 17 bp, synthetic construct
  source 1..17: mol_type = other DNA
actagcgccaggctgca

SEQ ID NO: 116796 - DNA, 17 bp, synthetic construct
  source 1..17: mol_type = other DNA
ctagcgccaggctgcag

SEQ ID NO: 116797 - DNA, 17 bp, synthetic construct
  source 1..17: mol_type = other DNA
tagcgccaggctgcagg

SEQ ID NO: 116798 - DNA, 17 bp, synthetic construct
  source 1..17: mol_type = other DNA
agcgccaggctgcaggg

SEQ ID NO: 116799 - DNA, 17 bp, synthetic construct
  source 1..17: mol_type = other DNA
gcgccaggctgcaggga

SEQ ID NO: 116800 - DNA, 17 bp, synthetic construct
  source 1..17: mol_type = other DNA
cgccaggctgcagggag

SEQ ID NO: 116801 - DNA, 17 bp, synthetic construct
  source 1..17: mol_type = other DNA
gccaggctgcagggagg

SEQ ID NO: 116802 - DNA, 17 bp, synthetic construct
  source 1..17: mol_type = other DNA
ccaggctgcagggaggg

SEQ ID NO: 116803 - DNA, 17 bp, synthetic construct
  source 1..17: mol_type = other DNA
caggctgcagggagggg

SEQ ID NO: 116804 - DNA, 17 bp, synthetic construct
  source 1..17: mol_type = other DNA
aggctgcagggaggggc

SEQ ID NO: 116805 - DNA, 17 bp, synthetic construct
  source 1..17: mol_type = other DNA
ggctgcagggaggggca

SEQ ID NO: 116806 - DNA, 17 bp, synthetic construct
  source 1..17: mol_type = other DNA
gctgcagggaggggcag

SEQ ID NO: 116807 - DNA, 17 bp, synthetic construct
  source 1..17: mol_type = other DNA
ctgcagggaggggcagg

SEQ ID NO: 116808 - DNA, 17 bp, synthetic construct
  source 1..17: mol_type = other DNA
tgcagggaggggcaggc

SEQ ID NO: 116809 - DNA, 17 bp, synthetic construct
  source 1..17: mol_type = other DNA
gcagggaggggcaggca

SEQ ID NO: 116810 - DNA, 17 bp, synthetic construct
  source 1..17: mol_type = other DNA
cagggaggggcaggcag

SEQ ID NO: 116811 - DNA, 17 bp, synthetic construct
  source 1..17: mol_type = other DNA
agggaggggcaggcaga

SEQ ID NO: 116812 - DNA, 17 bp, synthetic construct
  source 1..17: mol_type = other DNA
gggaggggcaggcagag

SEQ ID NO: 116813 - DNA, 17 bp, synthetic construct
  source 1..17: mol_type = other DNA
ggaggggcaggcagagg

SEQ ID NO: 116814 - DNA, 17 bp, synthetic construct
  source 1..17: mol_type = other DNA
gaggggcaggcagaggc

SEQ ID NO: 116815 - DNA, 17 bp, synthetic construct
  source 1..17: mol_type = other DNA
aggggcaggcagaggcg

SEQ ID NO: 116816 - DNA, 17 bp, synthetic construct
  source 1..17: mol_type = other DNA
ggggcaggcagaggcgg

SEQ ID NO: 116817 - DNA, 17 bp, synthetic construct
  source 1..17: mol_type = other DNA
gggcaggcagaggcggg

SEQ ID NO: 116818 - DNA, 17 bp, synthetic construct
  source 1..17: mol_type = other DNA
ggcaggcagaggcgggc

SEQ ID NO: 116819 - DNA, 17 bp, synthetic construct
  source 1..17: mol_type = other DNA
gcaggcagaggcgggca

SEQ ID NO: 116820 - DNA, 17 bp, synthetic construct
  source 1..17: mol_type = other DNA
caggcagaggcgggcag

SEQ ID NO: 116821 - DNA, 17 bp, synthetic construct
  source 1..17: mol_type = other DNA
aggcagaggcgggcagg

SEQ ID NO: 116822 - DNA, 17 bp, synthetic construct
  source 1..17: mol_type = other DNA
ggcagaggcgggcaggg

SEQ ID NO: 116823 - DNA, 17 bp, synthetic construct
  source 1..17: mol_type = other DNA
gcagaggcgggcagggg

SEQ ID NO: 116824 - DNA, 17 bp, synthetic construct
  source 1..17: mol_type = other DNA
cagaggcgggcagggga

SEQ ID NO: 116825 - DNA, 17 bp, synthetic construct
  source 1..17: mol_type = other DNA
agaggcgggcaggggac

SEQ ID NO: 116826 - DNA, 17 bp, synthetic construct
  source 1..17: mol_type = other DNA
gaggcgggcaggggacc

SEQ ID NO: 116827 - DNA, 17 bp, synthetic construct
  source 1..17: mol_type = other DNA
aggcgggcaggggaccg

SEQ ID NO: 116828 - DNA, 17 bp, synthetic construct
  source 1..17: mol_type = other DNA
ggcgggcaggggaccgg

SEQ ID NO: 116829 - DNA, 17 bp, synthetic construct
  source 1..17: mol_type = other DNA
gcgggcaggggaccggg

SEQ ID NO: 116830 - DNA, 17 bp, synthetic construct
  source 1..17: mol_type = other DNA
cgggcaggggaccgggg

SEQ ID NO: 116831 - DNA, 17 bp, synthetic construct
  source 1..17: mol_type = other DNA
gggcaggggaccgggga

SEQ ID NO: 116832 - DNA, 17 bp, synthetic construct
  source 1..17: mol_type = other DNA
ggcaggggaccggggag

SEQ ID NO: 116833 - DNA, 17 bp, synthetic construct
  source 1..17: mol_type = other DNA
gcaggggaccggggagg

SEQ ID NO: 116834 - DNA, 17 bp, synthetic construct
  source 1..17: mol_type = other DNA
caggggaccggggaggg

SEQ ID NO: 116835 - DNA, 17 bp, synthetic construct
  source 1..17: mol_type = other DNA
aggggaccggggagggg

SEQ ID NO: 116836 - DNA, 17 bp, synthetic construct
  source 1..17: mol_type = other DNA
ggggaccggggaggggg

SEQ ID NO: 116837 - DNA, 17 bp, synthetic construct
  source 1..17: mol_type = other DNA
gggaccggggagggggc

SEQ ID NO: 116838 - DNA, 17 bp, synthetic construct
  source 1..17: mol_type = other DNA
ggaccggggagggggct

SEQ ID NO: 116839 - DNA, 17 bp, synthetic construct
  source 1..17: mol_type = other DNA
gaccggggagggggctg

SEQ ID NO: 116840 - DNA, 17 bp, synthetic construct
  source 1..17: mol_type = other DNA
accggggagggggctgc

SEQ ID NO: 116841 - DNA, 17 bp, synthetic construct
  source 1..17: mol_type = other DNA
ccggggagggggctgcc

SEQ ID NO: 116842 - DNA, 17 bp, synthetic construct
  source 1..17: mol_type = other DNA
cggggagggggctgccc

SEQ ID NO: 116843 - DNA, 17 bp, synthetic construct
  source 1..17: mol_type = other DNA
ggggagggggctgcccc

SEQ ID NO: 116844 - DNA, 17 bp, synthetic construct
  source 1..17: mol_type = other DNA
gggagggggctgccccc

SEQ ID NO: 116845 - DNA, 17 bp, synthetic construct
  source 1..17: mol_type = other DNA
ggagggggctgccccca

SEQ ID NO: 116846 - DNA, 17 bp, synthetic construct
  source 1..17: mol_type = other DNA
gagggggctgcccccag

SEQ ID NO: 116847 - DNA, 17 bp, synthetic construct
  source 1..17: mol_type = other DNA
agggggctgcccccagg

SEQ ID NO: 116848 - DNA, 17 bp, synthetic construct
  source 1..17: mol_type = other DNA
gggggctgcccccaggg

SEQ ID NO: 116849 - DNA, 17 bp, synthetic construct
  source 1..17: mol_type = other DNA
ggggctgcccccagggc

SEQ ID NO: 116850 - DNA, 17 bp, synthetic construct
  source 1..17: mol_type = other DNA
gggctgcccccagggca

SEQ ID NO: 116851 - DNA, 17 bp, synthetic construct
  source 1..17: mol_type = other DNA
ggctgcccccagggcat

SEQ ID NO: 116852 - DNA, 17 bp, synthetic construct
  source 1..17: mol_type = other DNA
gctgcccccagggcatg

SEQ ID NO: 116853 - DNA, 17 bp, synthetic construct
  source 1..17: mol_type = other DNA
ctgcccccagggcatgg

SEQ ID NO: 116854 - DNA, 17 bp, synthetic construct
  source 1..17: mol_type = other DNA
tgcccccagggcatggc

SEQ ID NO: 116855 - DNA, 17 bp, synthetic construct
  source 1..17: mol_type = other DNA
gcccccagggcatggcg

SEQ ID NO: 116856 - DNA, 17 bp, synthetic construct
  source 1..17: mol_type = other DNA
cccccagggcatggcgg

SEQ ID NO: 116857 - DNA, 17 bp, synthetic construct
  source 1..17: mol_type = other DNA
ccccagggcatggcgga

SEQ ID NO: 116858 - DNA, 17 bp, synthetic construct
  source 1..17: mol_type = other DNA
cccagggcatggcggag

SEQ ID NO: 116859 - DNA, 17 bp, synthetic construct
  source 1..17: mol_type = other DNA
ccagggcatggcggaga

SEQ ID NO: 116860 - DNA, 17 bp, synthetic construct
  source 1..17: mol_type = other DNA
cagggcatggcggagat

SEQ ID NO: 116861 - DNA, 17 bp, synthetic construct
  source 1..17: mol_type = other DNA
agggcatggcggagatc

SEQ ID NO: 116862 - DNA, 17 bp, synthetic construct
  source 1..17: mol_type = other DNA
gggcatggcggagatcc

SEQ ID NO: 116863 - DNA, 17 bp, synthetic construct
  source 1..17: mol_type = other DNA
ggcatggcggagatcct

SEQ ID NO: 116864 - DNA, 17 bp, synthetic construct
  source 1..17: mol_type = other DNA
gcatggcggagatcctg

SEQ ID NO: 116865 - DNA, 17 bp, synthetic construct
  source 1..17: mol_type = other DNA
catggcggagatcctgg

SEQ ID NO: 116866 - DNA, 17 bp, synthetic construct
  source 1..17: mol_type = other DNA
atggcggagatcctggt

SEQ ID NO: 116867 - DNA, 17 bp, synthetic construct
  source 1..17: mol_type = other DNA
tggcggagatcctggtg

SEQ ID NO: 116868 - DNA, 17 bp, synthetic construct
  source 1..17: mol_type = other DNA
ggcggagatcctggtgc

SEQ ID NO: 116869 - DNA, 17 bp, synthetic construct
  source 1..17: mol_type = other DNA
gcggagatcctggtgcc

SEQ ID NO: 116870 - DNA, 17 bp, synthetic construct
  source 1..17: mol_type = other DNA
cggagatcctggtgcca

SEQ ID NO: 116871 - DNA, 17 bp, synthetic construct
  source 1..17: mol_type = other DNA
ggagatcctggtgccag

SEQ ID NO: 116872 - DNA, 17 bp, synthetic construct
  source 1..17: mol_type = other DNA
gagatcctggtgccagc

SEQ ID NO: 116873 - DNA, 17 bp, synthetic construct
  source 1..17: mol_type = other DNA
agatcctggtgccagcg

SEQ ID NO: 116874 - DNA, 17 bp, synthetic construct
  source 1..17: mol_type = other DNA
gatcctggtgccagcgc

SEQ ID NO: 116875 - DNA, 17 bp, synthetic construct
  source 1..17: mol_type = other DNA
atcctggtgccagcgca

SEQ ID NO: 116876 - DNA, 17 bp, synthetic construct
  source 1..17: mol_type = other DNA
tcctggtgccagcgcag

SEQ ID NO: 116877 - DNA, 17 bp, synthetic construct
  source 1..17: mol_type = other DNA
cctggtgccagcgcagg

SEQ ID NO: 116878 - DNA, 17 bp, synthetic construct
  source 1..17: mol_type = other DNA
ctggtgccagcgcagga

SEQ ID NO: 116879 - DNA, 17 bp, synthetic construct
  source 1..17: mol_type = other DNA
tggtgccagcgcaggac

SEQ ID NO: 116880 - DNA, 17 bp, synthetic construct
  source 1..17: mol_type = other DNA
ggtgccagcgcaggaca

SEQ ID NO: 116881 - DNA, 17 bp, synthetic construct
  source 1..17: mol_type = other DNA
gtgccagcgcaggacac

SEQ ID NO: 116882 - DNA, 17 bp, synthetic construct
  source 1..17: mol_type = other DNA
tgccagcgcaggacacc

SEQ ID NO: 116883 - DNA, 17 bp, synthetic construct
  source 1..17: mol_type = other DNA
gccagcgcaggacacca

SEQ ID NO: 116884 - DNA, 17 bp, synthetic construct
  source 1..17: mol_type = other DNA
ccagcgcaggacaccag

SEQ ID NO: 116885 - DNA, 17 bp, synthetic construct
  source 1..17: mol_type = other DNA
cagcgcaggacaccagc

SEQ ID NO: 116886 - DNA, 17 bp, synthetic construct
  source 1..17: mol_type = other DNA
agcgcaggacaccagca

SEQ ID NO: 116887 - DNA, 17 bp, synthetic construct
  source 1..17: mol_type = other DNA
gcgcaggacaccagcat

SEQ ID NO: 116888 - DNA, 17 bp, synthetic construct
  source 1..17: mol_type = other DNA
cgcaggacaccagcatt

SEQ ID NO: 116889 - DNA, 17 bp, synthetic construct
  source 1..17: mol_type = other DNA
gcaggacaccagcattg

SEQ ID NO: 116890 - DNA, 17 bp, synthetic construct
  source 1..17: mol_type = other DNA
caggacaccagcattgg

SEQ ID NO: 116891 - DNA, 17 bp, synthetic construct
  source 1..17: mol_type = other DNA
aggacaccagcattgga

SEQ ID NO: 116892 - DNA, 17 bp, synthetic construct
  source 1..17: mol_type = other DNA
ggacaccagcattggac

SEQ ID NO: 116893 - DNA, 17 bp, synthetic construct
  source 1..17: mol_type = other DNA
gacaccagcattggacc

SEQ ID NO: 116894 - DNA, 17 bp, synthetic construct
  source 1..17: mol_type = other DNA
acaccagcattggacca

SEQ ID NO: 116895 - DNA, 17 bp, synthetic construct
  source 1..17: mol_type = other DNA
caccagcattggaccag

SEQ ID NO: 116896 - DNA, 17 bp, synthetic construct
  source 1..17: mol_type = other DNA
accagcattggaccagc

SEQ ID NO: 116897 - DNA, 17 bp, synthetic construct
  source 1..17: mol_type = other DNA
ccagcattggaccagcg

SEQ ID NO: 116898 - DNA, 17 bp, synthetic construct
  source 1..17: mol_type = other DNA
cagcattggaccagcgg

SEQ ID NO: 116899 - DNA, 17 bp, synthetic construct
  source 1..17: mol_type = other DNA
agcattggaccagcggc

SEQ ID NO: 116900 - DNA, 17 bp, synthetic construct
  source 1..17: mol_type = other DNA
gcattggaccagcggcc

SEQ ID NO: 116901 - DNA, 17 bp, synthetic construct
  source 1..17: mol_type = other DNA
cattggaccagcggccc

SEQ ID NO: 116902 - DNA, 17 bp, synthetic construct
  source 1..17: mol_type = other DNA
attggaccagcggcccc

SEQ ID NO: 116903 - DNA, 17 bp, synthetic construct
  source 1..17: mol_type = other DNA
ttggaccagcggccccg

SEQ ID NO: 116904 - DNA, 17 bp, synthetic construct
  source 1..17: mol_type = other DNA
tggaccagcggccccgg

SEQ ID NO: 116905 - DNA, 17 bp, synthetic construct
  source 1..17: mol_type = other DNA
ggaccagcggccccgga

SEQ ID NO: 116906 - DNA, 17 bp, synthetic construct
  source 1..17: mol_type = other DNA
gaccagcggccccggaa

SEQ ID NO: 116907 - DNA, 17 bp, synthetic construct
  source 1..17: mol_type = other DNA
accagcggccccggaag

SEQ ID NO: 116908 - DNA, 17 bp, synthetic construct
  source 1..17: mol_type = other DNA
ccagcggccccggaagc

SEQ ID NO: 116909 - DNA, 17 bp, synthetic construct
  source 1..17: mol_type = other DNA
cagcggccccggaagca

SEQ ID NO: 116910 - DNA, 17 bp, synthetic construct
  source 1..17: mol_type = other DNA
agcggccccggaagcag

SEQ ID NO: 116911 - DNA, 17 bp, synthetic construct
  source 1..17: mol_type = other DNA
gcggccccggaagcagc

SEQ ID NO: 116912 - DNA, 17 bp, synthetic construct
  source 1..17: mol_type = other DNA
cggccccggaagcagcc

SEQ ID NO: 116913 - DNA, 17 bp, synthetic construct
  source 1..17: mol_type = other DNA
ggccccggaagcagcca

SEQ ID NO: 116914 - DNA, 17 bp, synthetic construct
  source 1..17: mol_type = other DNA
gccccggaagcagccag

SEQ ID NO: 116915 - DNA, 17 bp, synthetic construct
  source 1..17: mol_type = other DNA
ccccggaagcagccagc

SEQ ID NO: 116916 - DNA, 17 bp, synthetic construct
  source 1..17: mol_type = other DNA
cccggaagcagccagct

SEQ ID NO: 116917 - DNA, 17 bp, synthetic construct
  source 1..17: mol_type = other DNA
ccggaagcagccagctg

SEQ ID NO: 116918 - DNA, 17 bp, synthetic construct
  source 1..17: mol_type = other DNA
cggaagcagccagctgg

SEQ ID NO: 116919 - DNA, 17 bp, synthetic construct
  source 1..17: mol_type = other DNA
ggaagcagccagctggg

SEQ ID NO: 116920 - DNA, 17 bp, synthetic construct
  source 1..17: mol_type = other DNA
gaagcagccagctggga

SEQ ID NO: 116921 - DNA, 17 bp, synthetic construct
  source 1..17: mol_type = other DNA
aagcagccagctgggag

SEQ ID NO: 116922 - DNA, 17 bp, synthetic construct
  source 1..17: mol_type = other DNA
agcagccagctgggagg

SEQ ID NO: 116923 - DNA, 17 bp, synthetic construct
  source 1..17: mol_type = other DNA
gcagccagctgggagga

SEQ ID NO: 116924 - DNA, 17 bp, synthetic construct
  source 1..17: mol_type = other DNA
cagccagctgggaggat

SEQ ID NO: 116925 - DNA, 17 bp, synthetic construct
  source 1..17: mol_type = other DNA
agccagctgggaggatg

SEQ ID NO: 116926 - DNA, 17 bp, synthetic construct
  source 1..17: mol_type = other DNA
gccagctgggaggatgg

SEQ ID NO: 116927 - DNA, 17 bp, synthetic construct
  source 1..17: mol_type = other DNA
ccagctgggaggatgga

SEQ ID NO: 116928 - DNA, 17 bp, synthetic construct
  source 1..17: mol_type = other DNA
cagctgggaggatggag

SEQ ID NO: 116929 - DNA, 17 bp, synthetic construct
  source 1..17: mol_type = other DNA
agctgggaggatggagc

SEQ ID NO: 116930 - DNA, 17 bp, synthetic construct
  source 1..17: mol_type = other DNA
gctgggaggatggagcg

SEQ ID NO: 116931 - DNA, 17 bp, synthetic construct
  source 1..17: mol_type = other DNA
ctgggaggatggagcgg

SEQ ID NO: 116932 - DNA, 17 bp, synthetic construct
  source 1..17: mol_type = other DNA
tgggaggatggagcggg

SEQ ID NO: 116933 - DNA, 17 bp, synthetic construct
  source 1..17: mol_type = other DNA
gggaggatggagcgggc

SEQ ID NO: 116934 - DNA, 17 bp, synthetic construct
  source 1..17: mol_type = other DNA
ggaggatggagcgggca

SEQ ID NO: 116935 - DNA, 17 bp, synthetic construct
  source 1..17: mol_type = other DNA
gaggatggagcgggcag

SEQ ID NO: 116936 - DNA, 17 bp, synthetic construct
  source 1..17: mol_type = other DNA
aggatggagcgggcagc

SEQ ID NO: 116937 - DNA, 17 bp, synthetic construct
  source 1..17: mol_type = other DNA
ggatggagcgggcagcc

SEQ ID NO: 116938 - DNA, 17 bp, synthetic construct
  source 1..17: mol_type = other DNA
gatggagcgggcagccc

SEQ ID NO: 116939 - DNA, 17 bp, synthetic construct
  source 1..17: mol_type = other DNA
atggagcgggcagccct

SEQ ID NO: 116940 - DNA, 17 bp, synthetic construct
  source 1..17: mol_type = other DNA
tggagcgggcagccctg

SEQ ID NO: 116941 - DNA, 17 bp, synthetic construct
  source 1..17: mol_type = other DNA
ggagcgggcagccctgc

SEQ ID NO: 116942 - DNA, 17 bp, synthetic construct
  source 1..17: mol_type = other DNA
gagcgggcagccctgcc

SEQ ID NO: 116943 - DNA, 17 bp, synthetic construct
  source 1..17: mol_type = other DNA
agcgggcagccctgccc

SEQ ID NO: 116944 - DNA, 17 bp, synthetic construct
  source 1..17: mol_type = other DNA
gcgggcagccctgccct

SEQ ID NO: 116945 - DNA, 17 bp, synthetic construct
  source 1..17: mol_type = other DNA
cgggcagccctgccctg

SEQ ID NO: 116946 - DNA, 17 bp, synthetic construct
  source 1..17: mol_type = other DNA
gggcagccctgccctgg

SEQ ID NO: 116947 - DNA, 17 bp, synthetic construct
  source 1..17: mol_type = other DNA
ggcagccctgccctggc

SEQ ID NO: 116948 - DNA, 17 bp, synthetic construct
  source 1..17: mol_type = other DNA
gcagccctgccctggct

SEQ ID NO: 116949 - DNA, 17 bp, synthetic construct
  source 1..17: mol_type = other DNA
cagccctgccctggctc

SEQ ID NO: 116950 - DNA, 17 bp, synthetic construct
  source 1..17: mol_type = other DNA
agccctgccctggctca

SEQ ID NO: 116951 - DNA, 17 bp, synthetic construct
  source 1..17: mol_type = other DNA
gccctgccctggctcag

SEQ ID NO: 116952 - DNA, 17 bp, synthetic construct
  source 1..17: mol_type = other DNA
ccctgccctggctcagg

SEQ ID NO: 116953 - DNA, 17 bp, synthetic construct
  source 1..17: mol_type = other DNA
cctgccctggctcaggc

SEQ ID NO: 116954 - DNA, 17 bp, synthetic construct
  source 1..17: mol_type = other DNA
ctgccctggctcaggcc

SEQ ID NO: 116955 - DNA, 17 bp, synthetic construct
  source 1..17: mol_type = other DNA
tgccctggctcaggccg

SEQ ID NO: 116956 - DNA, 17 bp, synthetic construct
  source 1..17: mol_type = other DNA
gccctggctcaggccga

SEQ ID NO: 116957 - DNA, 17 bp, synthetic construct
  source 1..17: mol_type = other DNA
ccctggctcaggccgac

SEQ ID NO: 116958 - DNA, 17 bp, synthetic construct
  source 1..17: mol_type = other DNA
cctggctcaggccgact

SEQ ID NO: 116959 - DNA, 17 bp, synthetic construct
  source 1..17: mol_type = other DNA
ctggctcaggccgactt

SEQ ID NO: 116960 - DNA, 17 bp, synthetic construct
  source 1..17: mol_type = other DNA
tggctcaggccgacttt

SEQ ID NO: 116961 - DNA, 17 bp, synthetic construct
  source 1..17: mol_type = other DNA
ggctcaggccgactttg

SEQ ID NO: 116962 - DNA, 17 bp, synthetic construct
  source 1..17: mol_type = other DNA
gctcaggccgactttgc

SEQ ID NO: 116963 - DNA, 17 bp, synthetic construct
  source 1..17: mol_type = other DNA
ctcaggccgactttgca

SEQ ID NO: 116964 - DNA, 17 bp, synthetic construct
  source 1..17: mol_type = other DNA
tcaggccgactttgcac

SEQ ID NO: 116965 - DNA, 17 bp, synthetic construct
  source 1..17: mol_type = other DNA
caggccgactttgcaca

SEQ ID NO: 116966 - DNA, 17 bp, synthetic construct
  source 1..17: mol_type = other DNA
aggccgactttgcacag

SEQ ID NO: 116967 - DNA, 17 bp, synthetic construct
  source 1..17: mol_type = other DNA
ggccgactttgcacagg

SEQ ID NO: 116968 - DNA, 17 bp, synthetic construct
  source 1..17: mol_type = other DNA
gccgactttgcacaggg

SEQ ID NO: 116969 - DNA, 17 bp, synthetic construct
  source 1..17: mol_type = other DNA
ccgactttgcacagggg

SEQ ID NO: 116970 - DNA, 17 bp, synthetic construct
  source 1..17: mol_type = other DNA
cgactttgcacaggggc

SEQ ID NO: 116971 - DNA, 17 bp, synthetic construct
  source 1..17: mol_type = other DNA
gactttgcacaggggct

SEQ ID NO: 116972 - DNA, 17 bp, synthetic construct
  source 1..17: mol_type = other DNA
actttgcacaggggctg

SEQ ID NO: 116973 - DNA, 17 bp, synthetic construct
  source 1..17: mol_type = other DNA
ctttgcacaggggctgg

SEQ ID NO: 116974 - DNA, 17 bp, synthetic construct
  source 1..17: mol_type = other DNA
tttgcacaggggctggc

SEQ ID NO: 116975 - DNA, 17 bp, synthetic construct
  source 1..17: mol_type = other DNA
ttgcacaggggctggct

SEQ ID NO: 116976 - DNA, 17 bp, synthetic construct
  source 1..17: mol_type = other DNA
tgcacaggggctggctt

SEQ ID NO: 116977 - DNA, 17 bp, synthetic construct
  source 1..17: mol_type = other DNA
gcacaggggctggcttt

SEQ ID NO: 116978 - DNA, 17 bp, synthetic construct
  source 1..17: mol_type = other DNA
cacaggggctggctttg

SEQ ID NO: 116979 - DNA, 17 bp, synthetic construct
  source 1..17: mol_type = other DNA
acaggggctggctttgc

SEQ ID NO: 116980 - DNA, 17 bp, synthetic construct
  source 1..17: mol_type = other DNA
caggggctggctttgca

SEQ ID NO: 116981 - DNA, 17 bp, synthetic construct
  source 1..17: mol_type = other DNA
aggggctggctttgcac

SEQ ID NO: 116982 - DNA, 17 bp, synthetic construct
  source 1..17: mol_type = other DNA
ggggctggctttgcaca

SEQ ID NO: 116983 - DNA, 17 bp, synthetic construct
  source 1..17: mol_type = other DNA
gggctggctttgcacag

SEQ ID NO: 116984 - DNA, 17 bp, synthetic construct
  source 1..17: mol_type = other DNA
ggctggctttgcacagg

SEQ ID NO: 116985 - DNA, 17 bp, synthetic construct
  source 1..17: mol_type = other DNA
gctggctttgcacaggg

SEQ ID NO: 116986 - DNA, 17 bp, synthetic construct
  source 1..17: mol_type = other DNA
ctggctttgcacagggg

SEQ ID NO: 116987 - DNA, 17 bp, synthetic construct
  source 1..17: mol_type = other DNA
tggctttgcacaggggc

SEQ ID NO: 116988 - DNA, 17 bp, synthetic construct
  source 1..17: mol_type = other DNA
ggctttgcacaggggcc

SEQ ID NO: 116989 - DNA, 17 bp, synthetic construct
  source 1..17: mol_type = other DNA
gctttgcacaggggccg

SEQ ID NO: 116990 - DNA, 17 bp, synthetic construct
  source 1..17: mol_type = other DNA
ctttgcacaggggccga

SEQ ID NO: 116991 - DNA, 17 bp, synthetic construct
  source 1..17: mol_type = other DNA
tttgcacaggggccgac

SEQ ID NO: 116992 - DNA, 17 bp, synthetic construct
  source 1..17: mol_type = other DNA
ttgcacaggggccgact

SEQ ID NO: 116993 - DNA, 17 bp, synthetic construct
  source 1..17: mol_type = other DNA
tgcacaggggccgactg

SEQ ID NO: 116994 - DNA, 17 bp, synthetic construct
  source 1..17: mol_type = other DNA
gcacaggggccgactgc

SEQ ID NO: 116995 - DNA, 17 bp, synthetic construct
  source 1..17: mol_type = other DNA
cacaggggccgactgca

SEQ ID NO: 116996 - DNA, 17 bp, synthetic construct
  source 1..17: mol_type = other DNA
acaggggccgactgcac

SEQ ID NO: 116997 - DNA, 17 bp, synthetic construct
  source 1..17: mol_type = other DNA
caggggccgactgcaca

SEQ ID NO: 116998 - DNA, 17 bp, synthetic construct
  source 1..17: mol_type = other DNA
aggggccgactgcacag

SEQ ID NO: 116999 - DNA, 17 bp, synthetic construct
  source 1..17: mol_type = other DNA
ggggccgactgcacagg

SEQ ID NO: 117000 - DNA, 17 bp, synthetic construct
  source 1..17: mol_type = other DNA
gggccgactgcacaggg

SEQ ID NO: 117001 - DNA, 17 bp, synthetic construct
  source 1..17: mol_type = other DNA
ggccgactgcacagggg

SEQ ID NO: 117002 - DNA, 17 bp, synthetic construct
  source 1..17: mol_type = other DNA
gccgactgcacaggggc

SEQ ID NO: 117003 - DNA, 17 bp, synthetic construct
  source 1..17: mol_type = other DNA
ccgactgcacaggggcg

SEQ ID NO: 117004 - DNA, 17 bp, synthetic construct
  source 1..17: mol_type = other DNA
cgactgcacaggggcgc

SEQ ID NO: 117005 - DNA, 17 bp, synthetic construct
  source 1..17: mol_type = other DNA
gactgcacaggggcgcc

SEQ ID NO: 117006 - DNA, 17 bp, synthetic construct
  source 1..17: mol_type = other DNA
actgcacaggggcgccc

SEQ ID NO: 117007 - DNA, 17 bp, synthetic construct
  source 1..17: mol_type = other DNA
ctgcacaggggcgcccc

SEQ ID NO: 117008 - DNA, 17 bp, synthetic construct
  source 1..17: mol_type = other DNA
tgcacaggggcgccccc

SEQ ID NO: 117009 - DNA, 17 bp, synthetic construct
  source 1..17: mol_type = other DNA
gcacaggggcgcccccc

SEQ ID NO: 117010 - DNA, 17 bp, synthetic construct
  source 1..17: mol_type = other DNA
cacaggggcgccccccg

SEQ ID NO: 117011 - DNA, 17 bp, synthetic construct
  source 1..17: mol_type = other DNA
acaggggcgccccccgc

SEQ ID NO: 117012 - DNA, 17 bp, synthetic construct
  source 1..17: mol_type = other DNA
caggggcgccccccgcc

SEQ ID NO: 117013 - DNA, 17 bp, synthetic construct
  source 1..17: mol_type = other DNA
aggggcgccccccgcca

SEQ ID NO: 117014 - DNA, 17 bp, synthetic construct
  source 1..17: mol_type = other DNA
ggggcgccccccgccag

SEQ ID NO: 117015 - DNA, 17 bp, synthetic construct
  source 1..17: mol_type = other DNA
gggcgccccccgccagg

SEQ ID NO: 117016 - DNA, 17 bp, synthetic construct
  source 1..17: mol_type = other DNA
ggcgccccccgccaggg

SEQ ID NO: 117017 - DNA, 17 bp, synthetic construct
  source 1..17: mol_type = other DNA
gcgccccccgccagggc

SEQ ID NO: 117018 - DNA, 17 bp, synthetic construct
  source 1..17: mol_type = other DNA
cgccccccgccagggct

SEQ ID NO: 117019 - DNA, 17 bp, synthetic construct
  source 1..17: mol_type = other DNA
gccccccgccagggctt

SEQ ID NO: 117020 - DNA, 17 bp, synthetic construct
  source 1..17: mol_type = other DNA
ccccccgccagggctta

SEQ ID NO: 117021 - DNA, 17 bp, synthetic construct
  source 1..17: mol_type = other DNA
cccccgccagggcttat

SEQ ID NO: 117022 - DNA, 17 bp, synthetic construct
  source 1..17: mol_type = other DNA
ccccgccagggcttatc

SEQ ID NO: 117023 - DNA, 17 bp, synthetic construct
  source 1..17: mol_type = other DNA
cccgccagggcttatct

SEQ ID NO: 117024 - DNA, 17 bp, synthetic construct
  source 1..17: mol_type = other DNA
ccgccagggcttatctg

SEQ ID NO: 117025 - DNA, 17 bp, synthetic construct
  source 1..17: mol_type = other DNA
cgccagggcttatctgc

SEQ ID NO: 117026 - DNA, 17 bp, synthetic construct
  source 1..17: mol_type = other DNA
gccagggcttatctgca

SEQ ID NO: 117027 - DNA, 17 bp, synthetic construct
  source 1..17: mol_type = other DNA
ccagggcttatctgcag

SEQ ID NO: 117028 - DNA, 17 bp, synthetic construct
  source 1..17: mol_type = other DNA
cagggcttatctgcaga

SEQ ID NO: 117029 - DNA, 17 bp, synthetic construct
  source 1..17: mol_type = other DNA
agggcttatctgcagag

SEQ ID NO: 117030 - DNA, 17 bp, synthetic construct
  source 1..17: mol_type = other DNA
gggcttatctgcagagg

SEQ ID NO: 117031 - DNA, 17 bp, synthetic construct
  source 1..17: mol_type = other DNA
ggcttatctgcagaggg

SEQ ID NO: 117032 - DNA, 17 bp, synthetic construct
  source 1..17: mol_type = other DNA
gcttatctgcagagggt

SEQ ID NO: 117033 - DNA, 17 bp, synthetic construct
  source 1..17: mol_type = other DNA
cttatctgcagagggtt

SEQ ID NO: 117034 - DNA, 17 bp, synthetic construct
  source 1..17: mol_type = other DNA
ttatctgcagagggttc

SEQ ID NO: 117035 - DNA, 17 bp, synthetic construct
  source 1..17: mol_type = other DNA
tatctgcagagggttct

SEQ ID NO: 117036 - DNA, 17 bp, synthetic construct
  source 1..17: mol_type = other DNA
atctgcagagggttctg

SEQ ID NO: 117037 - DNA, 17 bp, synthetic construct
  source 1..17: mol_type = other DNA
tctgcagagggttctgg

SEQ ID NO: 117038 - DNA, 17 bp, synthetic construct
  source 1..17: mol_type = other DNA
ctgcagagggttctggg

SEQ ID NO: 117039 - DNA, 17 bp, synthetic construct
  source 1..17: mol_type = other DNA
tgcagagggttctggga

SEQ ID NO: 117040 - DNA, 17 bp, synthetic construct
  source 1..17: mol_type = other DNA
gcagagggttctgggag

SEQ ID NO: 117041 - DNA, 17 bp, synthetic construct
  source 1..17: mol_type = other DNA
cagagggttctgggagc

SEQ ID NO: 117042 - DNA, 17 bp, synthetic construct
  source 1..17: mol_type = other DNA
agagggttctgggagca

SEQ ID NO: 117043 - DNA, 17 bp, synthetic construct
  source 1..17: mol_type = other DNA
gagggttctgggagcag

SEQ ID NO: 117044 - DNA, 17 bp, synthetic construct
  source 1..17: mol_type = other DNA
agggttctgggagcaga

SEQ ID NO: 117045 - DNA, 17 bp, synthetic construct
  source 1..17: mol_type = other DNA
gggttctgggagcagaa

SEQ ID NO: 117046 - DNA, 17 bp, synthetic construct
  source 1..17: mol_type = other DNA
ggttctgggagcagaat

SEQ ID NO: 117047 - DNA, 17 bp, synthetic construct
  source 1..17: mol_type = other DNA
gttctgggagcagaatc

SEQ ID NO: 117048 - DNA, 17 bp, synthetic construct
  source 1..17: mol_type = other DNA
ttctgggagcagaatcc

SEQ ID NO: 117049 - DNA, 17 bp, synthetic construct
  source 1..17: mol_type = other DNA
tctgggagcagaatcct

SEQ ID NO: 117050 - DNA, 17 bp, synthetic construct
  source 1..17: mol_type = other DNA
ctgggagcagaatcctg

SEQ ID NO: 117051 - DNA, 17 bp, synthetic construct
  source 1..17: mol_type = other DNA
tgggagcagaatcctgg

SEQ ID NO: 117052 - DNA, 17 bp, synthetic construct
  source 1..17: mol_type = other DNA
gggagcagaatcctggg

SEQ ID NO: 117053 - DNA, 17 bp, synthetic construct
  source 1..17: mol_type = other DNA
ggagcagaatcctggga

SEQ ID NO: 117054 - DNA, 17 bp, synthetic construct
  source 1..17: mol_type = other DNA
gagcagaatcctgggac

SEQ ID NO: 117055 - DNA, 17 bp, synthetic construct
  source 1..17: mol_type = other DNA
agcagaatcctgggaca

SEQ ID NO: 117056 - DNA, 17 bp, synthetic construct
  source 1..17: mol_type = other DNA
gcagaatcctgggacag

SEQ ID NO: 117057 - DNA, 17 bp, synthetic construct
  source 1..17: mol_type = other DNA
cagaatcctgggacagg

SEQ ID NO: 117058 - DNA, 17 bp, synthetic construct
  source 1..17: mol_type = other DNA
agaatcctgggacaggg

SEQ ID NO: 117059 - DNA, 17 bp, synthetic construct
  source 1..17: mol_type = other DNA
gaatcctgggacagggc

SEQ ID NO: 117060 - DNA, 17 bp, synthetic construct
  source 1..17: mol_type = other DNA
aatcctgggacagggct

SEQ ID NO: 117061 - DNA, 17 bp, synthetic construct
  source 1..17: mol_type = other DNA
atcctgggacagggctc

SEQ ID NO: 117062 - DNA, 17 bp, synthetic construct
  source 1..17: mol_type = other DNA
tcctgggacagggctcc

SEQ ID NO: 117063 - DNA, 17 bp, synthetic construct
  source 1..17: mol_type = other DNA
cctgggacagggctccc

SEQ ID NO: 117064 - DNA, 17 bp, synthetic construct
  source 1..17: mol_type = other DNA
ctgggacagggctccca

SEQ ID NO: 117065 - DNA, 17 bp, synthetic construct
  source 1..17: mol_type = other DNA
tgggacagggctcccag

SEQ ID NO: 117066 - DNA, 17 bp, synthetic construct
  source 1..17: mol_type = other DNA
gggacagggctcccagc

SEQ ID NO: 117067 - DNA, 17 bp, synthetic construct
  source 1..17: mol_type = other DNA
ggacagggctcccagcc

SEQ ID NO: 117068 - DNA, 17 bp, synthetic construct
  source 1..17: mol_type = other DNA
gacagggctcccagccg

SEQ ID NO: 117069 - DNA, 17 bp, synthetic construct
  source 1..17: mol_type = other DNA
acagggctcccagccgt

SEQ ID NO: 117070 - DNA, 17 bp, synthetic construct
  source 1..17: mol_type = other DNA
cagggctcccagccgtt

SEQ ID NO: 117071 - DNA, 17 bp, synthetic construct
  source 1..17: mol_type = other DNA
agggctcccagccgttc

SEQ ID NO: 117072 - DNA, 17 bp, synthetic construct
  source 1..17: mol_type = other DNA
gggctcccagccgttcc

SEQ ID NO: 117073 - DNA, 17 bp, synthetic construct
  source 1..17: mol_type = other DNA
ggctcccagccgttcca

SEQ ID NO: 117074 - DNA, 17 bp, synthetic construct
  source 1..17: mol_type = other DNA
gctcccagccgttccac

SEQ ID NO: 117075 - DNA, 17 bp, synthetic construct
  source 1..17: mol_type = other DNA
ctcccagccgttccacc

SEQ ID NO: 117076 - DNA, 17 bp, synthetic construct
  source 1..17: mol_type = other DNA
tcccagccgttccaccc

SEQ ID NO: 117077 - DNA, 17 bp, synthetic construct
  source 1..17: mol_type = other DNA
cccagccgttccaccct

SEQ ID NO: 117078 - DNA, 17 bp, synthetic construct
  source 1..17: mol_type = other DNA
ccagccgttccaccctg

SEQ ID NO: 117079 - DNA, 17 bp, synthetic construct
  source 1..17: mol_type = other DNA
cagccgttccaccctgt

SEQ ID NO: 117080 - DNA, 17 bp, synthetic construct
  source 1..17: mol_type = other DNA
agccgttccaccctgtg

SEQ ID NO: 117081 - DNA, 17 bp, synthetic construct
  source 1..17: mol_type = other DNA
gccgttccaccctgtgt

SEQ ID NO: 117082 - DNA, 17 bp, synthetic construct
  source 1..17: mol_type = other DNA
ccgttccaccctgtgtg

SEQ ID NO: 117083 - DNA, 17 bp, synthetic construct
  source 1..17: mol_type = other DNA
cgttccaccctgtgtgg

SEQ ID NO: 117084 - DNA, 17 bp, synthetic construct
  source 1..17: mol_type = other DNA
gttccaccctgtgtggt

SEQ ID NO: 117085 - DNA, 17 bp, synthetic construct
  source 1..17: mol_type = other DNA
ttccaccctgtgtggtg

SEQ ID NO: 117086 - DNA, 17 bp, synthetic construct
  source 1..17: mol_type = other DNA
tccaccctgtgtggtgc

SEQ ID NO: 117087 - DNA, 17 bp, synthetic construct
  source 1..17: mol_type = other DNA
ccaccctgtgtggtgcc

SEQ ID NO: 117088 - DNA, 17 bp, synthetic construct
  source 1..17: mol_type = other DNA
caccctgtgtggtgcct

SEQ ID NO: 117089 - DNA, 17 bp, synthetic construct
  source 1..17: mol_type = other DNA
accctgtgtggtgcctg

SEQ ID NO: 117090 - DNA, 17 bp, synthetic construct
  source 1..17: mol_type = other DNA
ccctgtgtggtgcctgg

SEQ ID NO: 117091 - DNA, 17 bp, synthetic construct
  source 1..17: mol_type = other DNA
cctgtgtggtgcctgga

SEQ ID NO: 117092 - DNA, 17 bp, synthetic construct
  source 1..17: mol_type = other DNA
ctgtgtggtgcctggag

SEQ ID NO: 117093 - DNA, 17 bp, synthetic construct
  source 1..17: mol_type = other DNA
tgtgtggtgcctggagg

SEQ ID NO: 117094 - DNA, 17 bp, synthetic construct
  source 1..17: mol_type = other DNA
gtgtggtgcctggaggg

SEQ ID NO: 117095 - DNA, 17 bp, synthetic construct
  source 1..17: mol_type = other DNA
tgtggtgcctggaggga

SEQ ID NO: 117096 - DNA, 17 bp, synthetic construct
  source 1..17: mol_type = other DNA
gtggtgcctggagggat

SEQ ID NO: 117097 - DNA, 17 bp, synthetic construct
  source 1..17: mol_type = other DNA
tggtgcctggagggatg

SEQ ID NO: 117098 - DNA, 17 bp, synthetic construct
  source 1..17: mol_type = other DNA
ggtgcctggagggatgg

SEQ ID NO: 117099 - DNA, 17 bp, synthetic construct
  source 1..17: mol_type = other DNA
gtgcctggagggatggc

SEQ ID NO: 117100 - DNA, 17 bp, synthetic construct
  source 1..17: mol_type = other DNA
tgcctggagggatggca

SEQ ID NO: 117101 - DNA, 17 bp, synthetic construct
  source 1..17: mol_type = other DNA
gcctggagggatggcag

SEQ ID NO: 117102 - DNA, 17 bp, synthetic construct
  source 1..17: mol_type = other DNA
cctggagggatggcagg

SEQ ID NO: 117103 - DNA, 17 bp, synthetic construct
  source 1..17: mol_type = other DNA
ctggagggatggcaggg

SEQ ID NO: 117104 - DNA, 17 bp, synthetic construct
  source 1..17: mol_type = other DNA
tggagggatggcagggg

SEQ ID NO: 117105 - DNA, 17 bp, synthetic construct
  source 1..17: mol_type = other DNA
ggagggatggcaggggc

SEQ ID NO: 117106 - DNA, 17 bp, synthetic construct
  source 1..17: mol_type = other DNA
gagggatggcaggggcc

SEQ ID NO: 117107 - DNA, 17 bp, synthetic construct
  source 1..17: mol_type = other DNA
agggatggcaggggcca

SEQ ID NO: 117108 - DNA, 17 bp, synthetic construct
  source 1..17: mol_type = other DNA
gggatggcaggggccag

SEQ ID NO: 117109 - DNA, 17 bp, synthetic construct
  source 1..17: mol_type = other DNA
ggatggcaggggccagg

SEQ ID NO: 117110 - DNA, 17 bp, synthetic construct
  source 1..17: mol_type = other DNA
gatggcaggggccagga

SEQ ID NO: 117111 - DNA, 17 bp, synthetic construct
  source 1..17: mol_type = other DNA
atggcaggggccaggag

SEQ ID NO: 117112 - DNA, 17 bp, synthetic construct
  source 1..17: mol_type = other DNA
tggcaggggccaggagc

SEQ ID NO: 117113 - DNA, 17 bp, synthetic construct
  source 1..17: mol_type = other DNA
ggcaggggccaggagcc

SEQ ID NO: 117114 - DNA, 17 bp, synthetic construct
  source 1..17: mol_type = other DNA
gcaggggccaggagcca

SEQ ID NO: 117115 - DNA, 17 bp, synthetic construct
  source 1..17: mol_type = other DNA
caggggccaggagccag

SEQ ID NO: 117116 - DNA, 17 bp, synthetic construct
  source 1..17: mol_type = other DNA
aggggccaggagccagg

SEQ ID NO: 117117 - DNA, 17 bp, synthetic construct
  source 1..17: mol_type = other DNA
ggggccaggagccaggt

SEQ ID NO: 117118 - DNA, 17 bp, synthetic construct
  source 1..17: mol_type = other DNA
gggccaggagccaggtg

SEQ ID NO: 117119 - DNA, 17 bp, synthetic construct
  source 1..17: mol_type = other DNA
ggccaggagccaggtgg

SEQ ID NO: 117120 - DNA, 17 bp, synthetic construct
  source 1..17: mol_type = other DNA
gccaggagccaggtggg

SEQ ID NO: 117121 - DNA, 17 bp, synthetic construct
  source 1..17: mol_type = other DNA
ccaggagccaggtgggc

SEQ ID NO: 117122 - DNA, 17 bp, synthetic construct
  source 1..17: mol_type = other DNA
caggagccaggtgggcc

SEQ ID NO: 117123 - DNA, 17 bp, synthetic construct
  source 1..17: mol_type = other DNA
aggagccaggtgggccc

SEQ ID NO: 117124 - DNA, 17 bp, synthetic construct
  source 1..17: mol_type = other DNA
ggagccaggtgggccca

SEQ ID NO: 117125 - DNA, 17 bp, synthetic construct
  source 1..17: mol_type = other DNA
gagccaggtgggcccaa

SEQ ID NO: 117126 - DNA, 17 bp, synthetic construct
  source 1..17: mol_type = other DNA
agccaggtgggcccaac

SEQ ID NO: 117127 - DNA, 17 bp, synthetic construct
  source 1..17: mol_type = other DNA
gccaggtgggcccaaca

SEQ ID NO: 117128 - DNA, 17 bp, synthetic construct
  source 1..17: mol_type = other DNA
ccaggtgggcccaacag

SEQ ID NO: 117129 - DNA, 17 bp, synthetic construct
  source 1..17: mol_type = other DNA
caggtgggcccaacagt

SEQ ID NO: 117130 - DNA, 17 bp, synthetic construct
  source 1..17: mol_type = other DNA
aggtgggcccaacagtg

SEQ ID NO: 117131 - DNA, 17 bp, synthetic construct
  source 1..17: mol_type = other DNA
ggtgggcccaacagtgg

SEQ ID NO: 117132 - DNA, 17 bp, synthetic construct
  source 1..17: mol_type = other DNA
gtgggcccaacagtggc

SEQ ID NO: 117133 - DNA, 17 bp, synthetic construct
  source 1..17: mol_type = other DNA
tgggcccaacagtggcc

SEQ ID NO: 117134 - DNA, 17 bp, synthetic construct
  source 1..17: mol_type = other DNA
gggcccaacagtggccg

SEQ ID NO: 117135 - DNA, 17 bp, synthetic construct
  source 1..17: mol_type = other DNA
ggcccaacagtggccgc

SEQ ID NO: 117136 - DNA, 17 bp, synthetic construct
  source 1..17: mol_type = other DNA
gcccaacagtggccgct

SEQ ID NO: 117137 - DNA, 17 bp, synthetic construct
  source 1..17: mol_type = other DNA
cccaacagtggccgctg

SEQ ID NO: 117138 - DNA, 17 bp, synthetic construct
  source 1..17: mol_type = other DNA
ccaacagtggccgctga

SEQ ID NO: 117139 - DNA, 17 bp, synthetic construct
  source 1..17: mol_type = other DNA
caacagtggccgctgac

SEQ ID NO: 117140 - DNA, 17 bp, synthetic construct
  source 1..17: mol_type = other DNA
aacagtggccgctgaca

SEQ ID NO: 117141 - DNA, 17 bp, synthetic construct
  source 1..17: mol_type = other DNA
acagtggccgctgacat

SEQ ID NO: 117142 - DNA, 17 bp, synthetic construct
  source 1..17: mol_type = other DNA
cagtggccgctgacatc

SEQ ID NO: 117143 - DNA, 17 bp, synthetic construct
  source 1..17: mol_type = other DNA
agtggccgctgacatcc

SEQ ID NO: 117144 - DNA, 17 bp, synthetic construct
  source 1..17: mol_type = other DNA
gtggccgctgacatccc

SEQ ID NO: 117145 - DNA, 17 bp, synthetic construct
  source 1..17: mol_type = other DNA
tggccgctgacatcccc

SEQ ID NO: 117146 - DNA, 17 bp, synthetic construct
  source 1..17: mol_type = other DNA
ggccgctgacatccccc

SEQ ID NO: 117147 - DNA, 17 bp, synthetic construct
  source 1..17: mol_type = other DNA
gccgctgacatccccca

SEQ ID NO: 117148 - DNA, 17 bp, synthetic construct
  source 1..17: mol_type = other DNA
ccgctgacatcccccaa

SEQ ID NO: 117149 - DNA, 17 bp, synthetic construct
  source 1..17: mol_type = other DNA
cgctgacatcccccaac

SEQ ID NO: 117150 - DNA, 17 bp, synthetic construct
  source 1..17: mol_type = other DNA
gctgacatcccccaacc

SEQ ID NO: 117151 - DNA, 17 bp, synthetic construct
  source 1..17: mol_type = other DNA
ctgacatcccccaaccc

SEQ ID NO: 117152 - DNA, 17 bp, synthetic construct
  source 1..17: mol_type = other DNA
tgacatcccccaaccct

SEQ ID NO: 117153 - DNA, 17 bp, synthetic construct
  source 1..17: mol_type = other DNA
gacatcccccaaccctg

SEQ ID NO: 117154 - DNA, 17 bp, synthetic construct
  source 1..17: mol_type = other DNA
acatcccccaaccctgg

SEQ ID NO: 117155 - DNA, 17 bp, synthetic construct
  source 1..17: mol_type = other DNA
catcccccaaccctggc

SEQ ID NO: 117156 - DNA, 17 bp, synthetic construct
  source 1..17: mol_type = other DNA
atcccccaaccctggcc

SEQ ID NO: 117157 - DNA, 17 bp, synthetic construct
  source 1..17: mol_type = other DNA
tcccccaaccctggccc

SEQ ID NO: 117158 - DNA, 17 bp, synthetic construct
  source 1..17: mol_type = other DNA
cccccaaccctggcccc

SEQ ID NO: 117159 - DNA, 17 bp, synthetic construct
  source 1..17: mol_type = other DNA
ccccaaccctggccccc

SEQ ID NO: 117160 - DNA, 17 bp, synthetic construct
  source 1..17: mol_type = other DNA
cccaaccctggccccca

SEQ ID NO: 117161 - DNA, 17 bp, synthetic construct
  source 1..17: mol_type = other DNA
ccaaccctggcccccag

SEQ ID NO: 117162 - DNA, 17 bp, synthetic construct
  source 1..17: mol_type = other DNA
caaccctggcccccagg

SEQ ID NO: 117163 - DNA, 17 bp, synthetic construct
  source 1..17: mol_type = other DNA
aaccctggcccccaggc

SEQ ID NO: 117164 - DNA, 17 bp, synthetic construct
  source 1..17: mol_type = other DNA
accctggcccccaggcc

SEQ ID NO: 117165 - DNA, 17 bp, synthetic construct
  source 1..17: mol_type = other DNA
ccctggcccccaggcct

SEQ ID NO: 117166 - DNA, 17 bp, synthetic construct
  source 1..17: mol_type = other DNA
cctggcccccaggcctg

SEQ ID NO: 117167 - DNA, 17 bp, synthetic construct
  source 1..17: mol_type = other DNA
ctggcccccaggcctgt

SEQ ID NO: 117168 - DNA, 17 bp, synthetic construct
  source 1..17: mol_type = other DNA
tggcccccaggcctgtg

SEQ ID NO: 117169 - DNA, 17 bp, synthetic construct
  source 1..17: mol_type = other DNA
ggcccccaggcctgtgt

SEQ ID NO: 117170 - DNA, 17 bp, synthetic construct
  source 1..17: mol_type = other DNA
gcccccaggcctgtgtg

SEQ ID NO: 117171 - DNA, 17 bp, synthetic construct
  source 1..17: mol_type = other DNA
cccccaggcctgtgtgg

SEQ ID NO: 117172 - DNA, 17 bp, synthetic construct
  source 1..17: mol_type = other DNA
ccccaggcctgtgtggg

SEQ ID NO: 117173 - DNA, 17 bp, synthetic construct
  source 1..17: mol_type = other DNA
cccaggcctgtgtggga

SEQ ID NO: 117174 - DNA, 17 bp, synthetic construct
  source 1..17: mol_type = other DNA
ccaggcctgtgtgggaa

SEQ ID NO: 117175 - DNA, 17 bp, synthetic construct
  source 1..17: mol_type = other DNA
caggcctgtgtgggaac

SEQ ID NO: 117176 - DNA, 17 bp, synthetic construct
  source 1..17: mol_type = other DNA
aggcctgtgtgggaact

SEQ ID NO: 117177 - DNA, 17 bp, synthetic construct
  source 1..17: mol_type = other DNA
ggcctgtgtgggaactt

SEQ ID NO: 117178 - DNA, 17 bp, synthetic construct
  source 1..17: mol_type = other DNA
gcctgtgtgggaacttc

SEQ ID NO: 117179 - DNA, 17 bp, synthetic construct
  source 1..17: mol_type = other DNA
cctgtgtgggaacttca

SEQ ID NO: 117180 - DNA, 17 bp, synthetic construct
  source 1..17: mol_type = other DNA
ctgtgtgggaacttcaa

SEQ ID NO: 117181 - DNA, 17 bp, synthetic construct
  source 1..17: mol_type = other DNA
tgtgtgggaacttcaac

SEQ ID NO: 117182 - DNA, 17 bp, synthetic construct
  source 1..17: mol_type = other DNA
gtgtgggaacttcaacc

SEQ ID NO: 117183 - DNA, 17 bp, synthetic construct
  source 1..17: mol_type = other DNA
tgtgggaacttcaacca

SEQ ID NO: 117184 - DNA, 17 bp, synthetic construct
  source 1..17: mol_type = other DNA
gtgggaacttcaaccag

SEQ ID NO: 117185 - DNA, 17 bp, synthetic construct
  source 1..17: mol_type = other DNA
tgggaacttcaaccaga

SEQ ID NO: 117186 - DNA, 17 bp, synthetic construct
  source 1..17: mol_type = other DNA
gggaacttcaaccagaa

SEQ ID NO: 117187 - DNA, 17 bp, synthetic construct
  source 1..17: mol_type = other DNA
ggaacttcaaccagaac

SEQ ID NO: 117188 - DNA, 17 bp, synthetic construct
  source 1..17: mol_type = other DNA
gaacttcaaccagaacc

SEQ ID NO: 117189 - DNA, 17 bp, synthetic construct
  source 1..17: mol_type = other DNA
aacttcaaccagaacca

SEQ ID NO: 117190 - DNA, 17 bp, synthetic construct
  source 1..17: mol_type = other DNA
acttcaaccagaaccag

SEQ ID NO: 117191 - DNA, 17 bp, synthetic construct
  source 1..17: mol_type = other DNA
cttcaaccagaaccagg

SEQ ID NO: 117192 - DNA, 17 bp, synthetic construct
  source 1..17: mol_type = other DNA
ttcaaccagaaccaggc

SEQ ID NO: 117193 - DNA, 17 bp, synthetic construct
  source 1..17: mol_type = other DNA
tcaaccagaaccaggct

SEQ ID NO: 117194 - DNA, 17 bp, synthetic construct
  source 1..17: mol_type = other DNA
caaccagaaccaggctg

SEQ ID NO: 117195 - DNA, 17 bp, synthetic construct
  source 1..17: mol_type = other DNA
aaccagaaccaggctga

SEQ ID NO: 117196 - DNA, 17 bp, synthetic construct
  source 1..17: mol_type = other DNA
accagaaccaggctgac

SEQ ID NO: 117197 - DNA, 17 bp, synthetic construct
  source 1..17: mol_type = other DNA
ccagaaccaggctgacg

SEQ ID NO: 117198 - DNA, 17 bp, synthetic construct
  source 1..17: mol_type = other DNA
cagaaccaggctgacga

SEQ ID NO: 117199 - DNA, 17 bp, synthetic construct
  source 1..17: mol_type = other DNA
agaaccaggctgacgac

SEQ ID NO: 117200 - DNA, 17 bp, synthetic construct
  source 1..17: mol_type = other DNA
gaaccaggctgacgact

SEQ ID NO: 117201 - DNA, 17 bp, synthetic construct
  source 1..17: mol_type = other DNA
aaccaggctgacgactt

SEQ ID NO: 117202 - DNA, 17 bp, synthetic construct
  source 1..17: mol_type = other DNA
accaggctgacgacttc

SEQ ID NO: 117203 - DNA, 17 bp, synthetic construct
  source 1..17: mol_type = other DNA
ccaggctgacgacttca

SEQ ID NO: 117204 - DNA, 17 bp, synthetic construct
  source 1..17: mol_type = other DNA
caggctgacgacttcac

SEQ ID NO: 117205 - DNA, 17 bp, synthetic construct
  source 1..17: mol_type = other DNA
aggctgacgacttcacg

SEQ ID NO: 117206 - DNA, 17 bp, synthetic construct
  source 1..17: mol_type = other DNA
ggctgacgacttcacgg

SEQ ID NO: 117207 - DNA, 17 bp, synthetic construct
  source 1..17: mol_type = other DNA
gctgacgacttcacggc

SEQ ID NO: 117208 - DNA, 17 bp, synthetic construct
  source 1..17: mol_type = other DNA
ctgacgacttcacggcc

SEQ ID NO: 117209 - DNA, 17 bp, synthetic construct
  source 1..17: mol_type = other DNA
tgacgacttcacggccc

SEQ ID NO: 117210 - DNA, 17 bp, synthetic construct
  source 1..17: mol_type = other DNA
gacgacttcacggccct

SEQ ID NO: 117211 - DNA, 17 bp, synthetic construct
  source 1..17: mol_type = other DNA
acgacttcacggccctc

SEQ ID NO: 117212 - DNA, 17 bp, synthetic construct
  source 1..17: mol_type = other DNA
cgacttcacggccctca

SEQ ID NO: 117213 - DNA, 17 bp, synthetic construct
  source 1..17: mol_type = other DNA
gacttcacggccctcag

SEQ ID NO: 117214 - DNA, 17 bp, synthetic construct
  source 1..17: mol_type = other DNA
acttcacggccctcagc

SEQ ID NO: 117215 - DNA, 17 bp, synthetic construct
  source 1..17: mol_type = other DNA
cttcacggccctcagcg

SEQ ID NO: 117216 - DNA, 17 bp, synthetic construct
  source 1..17: mol_type = other DNA
ttcacggccctcagcgg

SEQ ID NO: 117217 - DNA, 17 bp, synthetic construct
  source 1..17: mol_type = other DNA
tcacggccctcagcggg

SEQ ID NO: 117218 - DNA, 17 bp, synthetic construct
  source 1..17: mol_type = other DNA
cacggccctcagcgggg

SEQ ID NO: 117219 - DNA, 17 bp, synthetic construct
  source 1..17: mol_type = other DNA
acggccctcagcggggt

SEQ ID NO: 117220 - DNA, 17 bp, synthetic construct
  source 1..17: mol_type = other DNA
cggccctcagcggggtg

SEQ ID NO: 117221 - DNA, 17 bp, synthetic construct
  source 1..17: mol_type = other DNA
ggccctcagcggggtgg

SEQ ID NO: 117222 - DNA, 17 bp, synthetic construct
  source 1..17: mol_type = other DNA
gccctcagcggggtggt

SEQ ID NO: 117223 - DNA, 17 bp, synthetic construct
  source 1..17: mol_type = other DNA
ccctcagcggggtggtg

SEQ ID NO: 117224 - DNA, 17 bp, synthetic construct
  source 1..17: mol_type = other DNA
cctcagcggggtggtgg

SEQ ID NO: 117225 - DNA, 17 bp, synthetic construct
  source 1..17: mol_type = other DNA
ctcagcggggtggtgga

SEQ ID NO: 117226 - DNA, 17 bp, synthetic construct
  source 1..17: mol_type = other DNA
tcagcggggtggtggag

SEQ ID NO: 117227 - DNA, 17 bp, synthetic construct
  source 1..17: mol_type = other DNA
cagcggggtggtggagg

SEQ ID NO: 117228 - DNA, 17 bp, synthetic construct
  source 1..17: mol_type = other DNA
agcggggtggtggaggc

SEQ ID NO: 117229 - DNA, 17 bp, synthetic construct
  source 1..17: mol_type = other DNA
gcggggtggtggaggcc

SEQ ID NO: 117230 - DNA, 17 bp, synthetic construct
  source 1..17: mol_type = other DNA
cggggtggtggaggcca

SEQ ID NO: 117231 - DNA, 17 bp, synthetic construct
  source 1..17: mol_type = other DNA
ggggtggtggaggccac

SEQ ID NO: 117232 - DNA, 17 bp, synthetic construct
  source 1..17: mol_type = other DNA
gggtggtggaggccacg

SEQ ID NO: 117233 - DNA, 17 bp, synthetic construct
  source 1..17: mol_type = other DNA
ggtggtggaggccacgg

SEQ ID NO: 117234 - DNA, 17 bp, synthetic construct
  source 1..17: mol_type = other DNA
gtggtggaggccacggg

SEQ ID NO: 117235 - DNA, 17 bp, synthetic construct
  source 1..17: mol_type = other DNA
tggtggaggccacgggc

SEQ ID NO: 117236 - DNA, 17 bp, synthetic construct
  source 1..17: mol_type = other DNA
ggtggaggccacgggcg

SEQ ID NO: 117237 - DNA, 17 bp, synthetic construct
  source 1..17: mol_type = other DNA
gtggaggccacgggcgc

SEQ ID NO: 117238 - DNA, 17 bp, synthetic construct
  source 1..17: mol_type = other DNA
tggaggccacgggcgca

SEQ ID NO: 117239 - DNA, 17 bp, synthetic construct
  source 1..17: mol_type = other DNA
ggaggccacgggcgcag

SEQ ID NO: 117240 - DNA, 17 bp, synthetic construct
  source 1..17: mol_type = other DNA
gaggccacgggcgcagc

SEQ ID NO: 117241 - DNA, 17 bp, synthetic construct
  source 1..17: mol_type = other DNA
aggccacgggcgcagcc

SEQ ID NO: 117242 - DNA, 17 bp, synthetic construct
  source 1..17: mol_type = other DNA
ggccacgggcgcagcct

SEQ ID NO: 117243 - DNA, 17 bp, synthetic construct
  source 1..17: mol_type = other DNA
gccacgggcgcagcctt

SEQ ID NO: 117244 - DNA, 17 bp, synthetic construct
  source 1..17: mol_type = other DNA
ccacgggcgcagccttc

SEQ ID NO: 117245 - DNA, 17 bp, synthetic construct
  source 1..17: mol_type = other DNA
cacgggcgcagccttcg

SEQ ID NO: 117246 - DNA, 17 bp, synthetic construct
  source 1..17: mol_type = other DNA
acgggcgcagccttcgc

SEQ ID NO: 117247 - DNA, 17 bp, synthetic construct
  source 1..17: mol_type = other DNA
cgggcgcagccttcgcc

SEQ ID NO: 117248 - DNA, 17 bp, synthetic construct
  source 1..17: mol_type = other DNA
gggcgcagccttcgcca

SEQ ID NO: 117249 - DNA, 17 bp, synthetic construct
  source 1..17: mol_type = other DNA
ggcgcagccttcgccaa

SEQ ID NO: 117250 - DNA, 17 bp, synthetic construct
  source 1..17: mol_type = other DNA
gcgcagccttcgccaac

SEQ ID NO: 117251 - DNA, 17 bp, synthetic construct
  source 1..17: mol_type = other DNA
cgcagccttcgccaaca

SEQ ID NO: 117252 - DNA, 17 bp, synthetic construct
  source 1..17: mol_type = other DNA
gcagccttcgccaacac

SEQ ID NO: 117253 - DNA, 17 bp, synthetic construct
  source 1..17: mol_type = other DNA
cagccttcgccaacacc

SEQ ID NO: 117254 - DNA, 17 bp, synthetic construct
  source 1..17: mol_type = other DNA
agccttcgccaacacct

SEQ ID NO: 117255 - DNA, 17 bp, synthetic construct
  source 1..17: mol_type = other DNA
gccttcgccaacacctg

SEQ ID NO: 117256 - DNA, 17 bp, synthetic construct
  source 1..17: mol_type = other DNA
ccttcgccaacacctgg

SEQ ID NO: 117257 - DNA, 17 bp, synthetic construct
  source 1..17: mol_type = other DNA
cttcgccaacacctgga

SEQ ID NO: 117258 - DNA, 17 bp, synthetic construct
  source 1..17: mol_type = other DNA
ttcgccaacacctggaa

SEQ ID NO: 117259 - DNA, 17 bp, synthetic construct
  source 1..17: mol_type = other DNA
tcgccaacacctggaag

SEQ ID NO: 117260 - DNA, 17 bp, synthetic construct
  source 1..17: mol_type = other DNA
cgccaacacctggaagg

SEQ ID NO: 117261 - DNA, 17 bp, synthetic construct
  source 1..17: mol_type = other DNA
gccaacacctggaaggc

SEQ ID NO: 117262 - DNA, 17 bp, synthetic construct
  source 1..17: mol_type = other DNA
ccaacacctggaaggcc

SEQ ID NO: 117263 - DNA, 17 bp, synthetic construct
  source 1..17: mol_type = other DNA
caacacctggaaggccc

SEQ ID NO: 117264 - DNA, 17 bp, synthetic construct
  source 1..17: mol_type = other DNA
aacacctggaaggccca

SEQ ID NO: 117265 - DNA, 17 bp, synthetic construct
  source 1..17: mol_type = other DNA
acacctggaaggcccag

SEQ ID NO: 117266 - DNA, 17 bp, synthetic construct
  source 1..17: mol_type = other DNA
cacctggaaggcccagg

SEQ ID NO: 117267 - DNA, 17 bp, synthetic construct
  source 1..17: mol_type = other DNA
acctggaaggcccaggc

SEQ ID NO: 117268 - DNA, 17 bp, synthetic construct
  source 1..17: mol_type = other DNA
cctggaaggcccaggct

SEQ ID NO: 117269 - DNA, 17 bp, synthetic construct
  source 1..17: mol_type = other DNA
ctggaaggcccaggctg

SEQ ID NO: 117270 - DNA, 17 bp, synthetic construct
  source 1..17: mol_type = other DNA
tggaaggcccaggctgc

SEQ ID NO: 117271 - DNA, 17 bp, synthetic construct
  source 1..17: mol_type = other DNA
ggaaggcccaggctgcc

SEQ ID NO: 117272 - DNA, 17 bp, synthetic construct
  source 1..17: mol_type = other DNA
gaaggcccaggctgcct

SEQ ID NO: 117273 - DNA, 17 bp, synthetic construct
  source 1..17: mol_type = other DNA
aaggcccaggctgcctg

SEQ ID NO: 117274 - DNA, 17 bp, synthetic construct
  source 1..17: mol_type = other DNA
aggcccaggctgcctgt

SEQ ID NO: 117275 - DNA, 17 bp, synthetic construct
  source 1..17: mol_type = other DNA
ggcccaggctgcctgtg

SEQ ID NO: 117276 - DNA, 17 bp, synthetic construct
  source 1..17: mol_type = other DNA
gcccaggctgcctgtgc

SEQ ID NO: 117277 - DNA, 17 bp, synthetic construct
  source 1..17: mol_type = other DNA
cccaggctgcctgtgcc

SEQ ID NO: 117278 - DNA, 17 bp, synthetic construct
  source 1..17: mol_type = other DNA
ccaggctgcctgtgcca

SEQ ID NO: 117279 - DNA, 17 bp, synthetic construct
  source 1..17: mol_type = other DNA
caggctgcctgtgccaa

SEQ ID NO: 117280 - DNA, 17 bp, synthetic construct
  source 1..17: mol_type = other DNA
aggctgcctgtgccaat

SEQ ID NO: 117281 - DNA, 17 bp, synthetic construct
  source 1..17: mol_type = other DNA
ggctgcctgtgccaatg

SEQ ID NO: 117282 - DNA, 17 bp, synthetic construct
  source 1..17: mol_type = other DNA
gctgcctgtgccaatgc

SEQ ID NO: 117283 - DNA, 17 bp, synthetic construct
  source 1..17: mol_type = other DNA
ctgcctgtgccaatgcc

SEQ ID NO: 117284 - DNA, 17 bp, synthetic construct
  source 1..17: mol_type = other DNA
tgcctgtgccaatgcca

SEQ ID NO: 117285 - DNA, 17 bp, synthetic construct
  source 1..17: mol_type = other DNA
gcctgtgccaatgccag

SEQ ID NO: 117286 - DNA, 17 bp, synthetic construct
  source 1..17: mol_type = other DNA
cctgtgccaatgccagg

SEQ ID NO: 117287 - DNA, 17 bp, synthetic construct
  source 1..17: mol_type = other DNA
ctgtgccaatgccagga

SEQ ID NO: 117288 - DNA, 17 bp, synthetic construct
  source 1..17: mol_type = other DNA
tgtgccaatgccaggaa

SEQ ID NO: 117289 - DNA, 17 bp, synthetic construct
  source 1..17: mol_type = other DNA
gtgccaatgccaggaac

SEQ ID NO: 117290 - DNA, 17 bp, synthetic construct
  source 1..17: mol_type = other DNA
tgccaatgccaggaaca

SEQ ID NO: 117291 - DNA, 17 bp, synthetic construct
  source 1..17: mol_type = other DNA
gccaatgccaggaacag

SEQ ID NO: 117292 - DNA, 17 bp, synthetic construct
  source 1..17: mol_type = other DNA
ccaatgccaggaacagc

SEQ ID NO: 117293 - DNA, 17 bp, synthetic construct
  source 1..17: mol_type = other DNA
caatgccaggaacagct

SEQ ID NO: 117294 - DNA, 17 bp, synthetic construct
  source 1..17: mol_type = other DNA
aatgccaggaacagctt

SEQ ID NO: 117295 - DNA, 17 bp, synthetic construct
  source 1..17: mol_type = other DNA
atgccaggaacagcttt

SEQ ID NO: 117296 - DNA, 17 bp, synthetic construct
  source 1..17: mol_type = other DNA
tgccaggaacagctttg

SEQ ID NO: 117297 - DNA, 17 bp, synthetic construct
  source 1..17: mol_type = other DNA
gccaggaacagctttga

SEQ ID NO: 117298 - DNA, 17 bp, synthetic construct
  source 1..17: mol_type = other DNA
ccaggaacagctttgag

SEQ ID NO: 117299 - DNA, 17 bp, synthetic construct
  source 1..17: mol_type = other DNA
caggaacagctttgagg

SEQ ID NO: 117300 - DNA, 17 bp, synthetic construct
  source 1..17: mol_type = other DNA
aggaacagctttgagga

SEQ ID NO: 117301 - DNA, 17 bp, synthetic construct
  source 1..17: mol_type = other DNA
ggaacagctttgaggac

SEQ ID NO: 117302 - DNA, 17 bp, synthetic construct
  source 1..17: mol_type = other DNA
gaacagctttgaggacc

SEQ ID NO: 117303 - DNA, 17 bp, synthetic construct
  source 1..17: mol_type = other DNA
aacagctttgaggaccc

SEQ ID NO: 117304 - DNA, 17 bp, synthetic construct
  source 1..17: mol_type = other DNA
acagctttgaggacccc

SEQ ID NO: 117305 - DNA, 17 bp, synthetic construct
  source 1..17: mol_type = other DNA
cagctttgaggacccct

SEQ ID NO: 117306 - DNA, 17 bp, synthetic construct
  source 1..17: mol_type = other DNA
agctttgaggacccctg

SEQ ID NO: 117307 - DNA, 17 bp, synthetic construct
  source 1..17: mol_type = other DNA
gctttgaggacccctgc

SEQ ID NO: 117308 - DNA, 17 bp, synthetic construct
  source 1..17: mol_type = other DNA
ctttgaggacccctgct

SEQ ID NO: 117309 - DNA, 17 bp, synthetic construct
  source 1..17: mol_type = other DNA
tttgaggacccctgctc

SEQ ID NO: 117310 - DNA, 17 bp, synthetic construct
  source 1..17: mol_type = other DNA
ttgaggacccctgctcc

SEQ ID NO: 117311 - DNA, 17 bp, synthetic construct
  source 1..17: mol_type = other DNA
tgaggacccctgctccc

SEQ ID NO: 117312 - DNA, 17 bp, synthetic construct
  source 1..17: mol_type = other DNA
gaggacccctgctccct

SEQ ID NO: 117313 - DNA, 17 bp, synthetic construct
  source 1..17: mol_type = other DNA
aggacccctgctccctc

SEQ ID NO: 117314 - DNA, 17 bp, synthetic construct
  source 1..17: mol_type = other DNA
ggacccctgctccctca

SEQ ID NO: 117315 - DNA, 17 bp, synthetic construct
  source 1..17: mol_type = other DNA
gacccctgctccctcag

SEQ ID NO: 117316 - DNA, 17 bp, synthetic construct
  source 1..17: mol_type = other DNA
acccctgctccctcagt

SEQ ID NO: 117317 - DNA, 17 bp, synthetic construct
  source 1..17: mol_type = other DNA
cccctgctccctcagtg

SEQ ID NO: 117318 - DNA, 17 bp, synthetic construct
  source 1..17: mol_type = other DNA
ccctgctccctcagtgt

SEQ ID NO: 117319 - DNA, 17 bp, synthetic construct
  source 1..17: mol_type = other DNA
cctgctccctcagtgtg

SEQ ID NO: 117320 - DNA, 17 bp, synthetic construct
  source 1..17: mol_type = other DNA
ctgctccctcagtgtgg

SEQ ID NO: 117321 - DNA, 17 bp, synthetic construct
  source 1..17: mol_type = other DNA
tgctccctcagtgtgga

SEQ ID NO: 117322 - DNA, 17 bp, synthetic construct
  source 1..17: mol_type = other DNA
gctccctcagtgtggag

SEQ ID NO: 117323 - DNA, 17 bp, synthetic construct
  source 1..17: mol_type = other DNA
ctccctcagtgtggaga

SEQ ID NO: 117324 - DNA, 17 bp, synthetic construct
  source 1..17: mol_type = other DNA
tccctcagtgtggagaa

SEQ ID NO: 117325 - DNA, 17 bp, synthetic construct
  source 1..17: mol_type = other DNA
ccctcagtgtggagaat

SEQ ID NO: 117326 - DNA, 17 bp, synthetic construct
  source 1..17: mol_type = other DNA
cctcagtgtggagaatg

SEQ ID NO: 117327 - DNA, 17 bp, synthetic construct
  source 1..17: mol_type = other DNA
ctcagtgtggagaatgg

SEQ ID NO: 117328 - DNA, 17 bp, synthetic construct
  source 1..17: mol_type = other DNA
tcagtgtggagaatggt

SEQ ID NO: 117329 - DNA, 17 bp, synthetic construct
  source 1..17: mol_type = other DNA
cagtgtggagaatggta

SEQ ID NO: 117330 - DNA, 17 bp, synthetic construct
  source 1..17: mol_type = other DNA
agtgtggagaatggtac

SEQ ID NO: 117331 - DNA, 17 bp, synthetic construct
  source 1..17: mol_type = other DNA
gtgtggagaatggtact

SEQ ID NO: 117332 - DNA, 17 bp, synthetic construct
  source 1..17: mol_type = other DNA
tgtggagaatggtactc

SEQ ID NO: 117333 - DNA, 17 bp, synthetic construct
  source 1..17: mol_type = other DNA
gtggagaatggtactcc

SEQ ID NO: 117334 - DNA, 17 bp, synthetic construct
  source 1..17: mol_type = other DNA
tggagaatggtactcct

SEQ ID NO: 117335 - DNA, 17 bp, synthetic construct
  source 1..17: mol_type = other DNA
ggagaatggtactcctc

SEQ ID NO: 117336 - DNA, 17 bp, synthetic construct
  source 1..17: mol_type = other DNA
gagaatggtactcctcg

SEQ ID NO: 117337 - DNA, 17 bp, synthetic construct
  source 1..17: mol_type = other DNA
agaatggtactcctcgc

SEQ ID NO: 117338 - DNA, 17 bp, synthetic construct
  source 1..17: mol_type = other DNA
gaatggtactcctcgcc

SEQ ID NO: 117339 - DNA, 17 bp, synthetic construct
  source 1..17: mol_type = other DNA
aatggtactcctcgccc

SEQ ID NO: 117340 - DNA, 17 bp, synthetic construct
  source 1..17: mol_type = other DNA
atggtactcctcgcccc

SEQ ID NO: 117341 - DNA, 17 bp, synthetic construct
  source 1..17: mol_type = other DNA
tggtactcctcgccccc

SEQ ID NO: 117342 - DNA, 17 bp, synthetic construct
  source 1..17: mol_type = other DNA
ggtactcctcgccccca

SEQ ID NO: 117343 - DNA, 17 bp, synthetic construct
  source 1..17: mol_type = other DNA
gtactcctcgcccccac

SEQ ID NO: 117344 - DNA, 17 bp, synthetic construct
  source 1..17: mol_type = other DNA
tactcctcgcccccacc

SEQ ID NO: 117345 - DNA, 17 bp, synthetic construct
  source 1..17: mol_type = other DNA
actcctcgcccccaccc

SEQ ID NO: 117346 - DNA, 17 bp, synthetic construct
  source 1..17: mol_type = other DNA
ctcctcgcccccacccc

SEQ ID NO: 117347 - DNA, 17 bp, synthetic construct
  source 1..17: mol_type = other DNA
tcctcgcccccaccccc

SEQ ID NO: 117348 - DNA, 17 bp, synthetic construct
  source 1..17: mol_type = other DNA
cctcgcccccaccccca

SEQ ID NO: 117349 - DNA, 17 bp, synthetic construct
  source 1..17: mol_type = other DNA
ctcgcccccacccccac

SEQ ID NO: 117350 - DNA, 17 bp, synthetic construct
  source 1..17: mol_type = other DNA
tcgcccccacccccaca

SEQ ID NO: 117351 - DNA, 17 bp, synthetic construct
  source 1..17: mol_type = other DNA
cgcccccacccccacag

SEQ ID NO: 117352 - DNA, 17 bp, synthetic construct
  source 1..17: mol_type = other DNA
gcccccacccccacagt

SEQ ID NO: 117353 - DNA, 17 bp, synthetic construct
  source 1..17: mol_type = other DNA
cccccacccccacagtc

SEQ ID NO: 117354 - DNA, 17 bp, synthetic construct
  source 1..17: mol_type = other DNA
ccccacccccacagtca

SEQ ID NO: 117355 - DNA, 17 bp, synthetic construct
  source 1..17: mol_type = other DNA
cccacccccacagtcac

SEQ ID NO: 117356 - DNA, 17 bp, synthetic construct
  source 1..17: mol_type = other DNA
ccacccccacagtcacc

SEQ ID NO: 117357 - DNA, 17 bp, synthetic construct
  source 1..17: mol_type = other DNA
cacccccacagtcaccc

SEQ ID NO: 117358 - DNA, 17 bp, synthetic construct
  source 1..17: mol_type = other DNA
acccccacagtcacccc

SEQ ID NO: 117359 - DNA, 17 bp, synthetic construct
  source 1..17: mol_type = other DNA
cccccacagtcacccca

SEQ ID NO: 117360 - DNA, 17 bp, synthetic construct
  source 1..17: mol_type = other DNA
ccccacagtcaccccag

SEQ ID NO: 117361 - DNA, 17 bp, synthetic construct
  source 1..17: mol_type = other DNA
cccacagtcaccccagg

SEQ ID NO: 117362 - DNA, 17 bp, synthetic construct
  source 1..17: mol_type = other DNA
ccacagtcaccccaggc

SEQ ID NO: 117363 - DNA, 17 bp, synthetic construct
  source 1..17: mol_type = other DNA
cacagtcaccccaggct

SEQ ID NO: 117364 - DNA, 17 bp, synthetic construct
  source 1..17: mol_type = other DNA
acagtcaccccaggctc

SEQ ID NO: 117365 - DNA, 17 bp, synthetic construct
  source 1..17: mol_type = other DNA
cagtcaccccaggctca

SEQ ID NO: 117366 - DNA, 17 bp, synthetic construct
  source 1..17: mol_type = other DNA
agtcaccccaggctcaa

SEQ ID NO: 117367 - DNA, 17 bp, synthetic construct
  source 1..17: mol_type = other DNA
gtcaccccaggctcaag

SEQ ID NO: 117368 - DNA, 17 bp, synthetic construct
  source 1..17: mol_type = other DNA
tcaccccaggctcaagt

SEQ ID NO: 117369 - DNA, 17 bp, synthetic construct
  source 1..17: mol_type = other DNA
caccccaggctcaagtc

SEQ ID NO: 117370 - DNA, 17 bp, synthetic construct
  source 1..17: mol_type = other DNA
accccaggctcaagtcc

SEQ ID NO: 117371 - DNA, 17 bp, synthetic construct
  source 1..17: mol_type = other DNA
ccccaggctcaagtccc

SEQ ID NO: 117372 - DNA, 17 bp, synthetic construct
  source 1..17: mol_type = other DNA
cccaggctcaagtccca

SEQ ID NO: 117373 - DNA, 17 bp, synthetic construct
  source 1..17: mol_type = other DNA
ccaggctcaagtcccac

SEQ ID NO: 117374 - DNA, 17 bp, synthetic construct
  source 1..17: mol_type = other DNA
caggctcaagtcccacc

SEQ ID NO: 117375 - DNA, 17 bp, synthetic construct
  source 1..17: mol_type = other DNA
aggctcaagtcccaccc

SEQ ID NO: 117376 - DNA, 17 bp, synthetic construct
  source 1..17: mol_type = other DNA
ggctcaagtcccaccca

SEQ ID NO: 117377 - DNA, 17 bp, synthetic construct
  source 1..17: mol_type = other DNA
gctcaagtcccacccag

SEQ ID NO: 117378 - DNA, 17 bp, synthetic construct
  source 1..17: mol_type = other DNA
ctcaagtcccacccagc

SEQ ID NO: 117379 - DNA, 17 bp, synthetic construct
  source 1..17: mol_type = other DNA
tcaagtcccacccagca

SEQ ID NO: 117380 - DNA, 17 bp, synthetic construct
  source 1..17: mol_type = other DNA
caagtcccacccagcac

SEQ ID NO: 117381 - DNA, 17 bp, synthetic construct
  source 1..17: mol_type = other DNA
aagtcccacccagcacc

SEQ ID NO: 117382 - DNA, 17 bp, synthetic construct
  source 1..17: mol_type = other DNA
agtcccacccagcacct

SEQ ID NO: 117383 - DNA, 17 bp, synthetic construct
  source 1..17: mol_type = other DNA
gtcccacccagcacctt

SEQ ID NO: 117384 - DNA, 17 bp, synthetic construct
  source 1..17: mol_type = other DNA
tcccacccagcaccttc

SEQ ID NO: 117385 - DNA, 17 bp, synthetic construct
  source 1..17: mol_type = other DNA
cccacccagcaccttcc

SEQ ID NO: 117386 - DNA, 17 bp, synthetic construct
  source 1..17: mol_type = other DNA
ccacccagcaccttcct

SEQ ID NO: 117387 - DNA, 17 bp, synthetic construct
  source 1..17: mol_type = other DNA
cacccagcaccttcctg

SEQ ID NO: 117388 - DNA, 17 bp, synthetic construct
  source 1..17: mol_type = other DNA
acccagcaccttcctgt

SEQ ID NO: 117389 - DNA, 17 bp, synthetic construct
  source 1..17: mol_type = other DNA
cccagcaccttcctgtc

SEQ ID NO: 117390 - DNA, 17 bp, synthetic construct
  source 1..17: mol_type = other DNA
ccagcaccttcctgtcc

SEQ ID NO: 117391 - DNA, 17 bp, synthetic construct
  source 1..17: mol_type = other DNA
cagcaccttcctgtccc

SEQ ID NO: 117392 - DNA, 17 bp, synthetic construct
  source 1..17: mol_type = other DNA
agcaccttcctgtcccc

SEQ ID NO: 117393 - DNA, 17 bp, synthetic construct
  source 1..17: mol_type = other DNA
gcaccttcctgtcccct

SEQ ID NO: 117394 - DNA, 17 bp, synthetic construct
  source 1..17: mol_type = other DNA
caccttcctgtcccctg

SEQ ID NO: 117395 - DNA, 17 bp, synthetic construct
  source 1..17: mol_type = other DNA
accttcctgtcccctgg

SEQ ID NO: 117396 - DNA, 17 bp, synthetic construct
  source 1..17: mol_type = other DNA
ccttcctgtcccctggg

SEQ ID NO: 117397 - DNA, 17 bp, synthetic construct
  source 1..17: mol_type = other DNA
cttcctgtcccctgggc

SEQ ID NO: 117398 - DNA, 17 bp, synthetic construct
  source 1..17: mol_type = other DNA
ttcctgtcccctgggcc

SEQ ID NO: 117399 - DNA, 17 bp, synthetic construct
  source 1..17: mol_type = other DNA
tcctgtcccctgggcca

SEQ ID NO: 117400 - DNA, 17 bp, synthetic construct
  source 1..17: mol_type = other DNA
cctgtcccctgggccac

SEQ ID NO: 117401 - DNA, 17 bp, synthetic construct
  source 1..17: mol_type = other DNA
ctgtcccctgggccacg

SEQ ID NO: 117402 - DNA, 17 bp, synthetic construct
  source 1..17: mol_type = other DNA
tgtcccctgggccacgg

SEQ ID NO: 117403 - DNA, 17 bp, synthetic construct
  source 1..17: mol_type = other DNA
gtcccctgggccacggg

SEQ ID NO: 117404 - DNA, 17 bp, synthetic construct
  source 1..17: mol_type = other DNA
tcccctgggccacgggg

SEQ ID NO: 117405 - DNA, 17 bp, synthetic construct
  source 1..17: mol_type = other DNA
cccctgggccacgggga

SEQ ID NO: 117406 - DNA, 17 bp, synthetic construct
  source 1..17: mol_type = other DNA
ccctgggccacggggac

SEQ ID NO: 117407 - DNA, 17 bp, synthetic construct
  source 1..17: mol_type = other DNA
cctgggccacggggacc

SEQ ID NO: 117408 - DNA, 17 bp, synthetic construct
  source 1..17: mol_type = other DNA
ctgggccacggggaccc

SEQ ID NO: 117409 - DNA, 17 bp, synthetic construct
  source 1..17: mol_type = other DNA
tgggccacggggacccc

SEQ ID NO: 117410 - DNA, 17 bp, synthetic construct
  source 1..17: mol_type = other DNA
gggccacggggacccct

SEQ ID NO: 117411 - DNA, 17 bp, synthetic construct
  source 1..17: mol_type = other DNA
ggccacggggacccctg

SEQ ID NO: 117412 - DNA, 17 bp, synthetic construct
  source 1..17: mol_type = other DNA
gccacggggacccctgg

SEQ ID NO: 117413 - DNA, 17 bp, synthetic construct
  source 1..17: mol_type = other DNA
ccacggggacccctggg

SEQ ID NO: 117414 - DNA, 17 bp, synthetic construct
  source 1..17: mol_type = other DNA
cacggggacccctgggt

SEQ ID NO: 117415 - DNA, 17 bp, synthetic construct
  source 1..17: mol_type = other DNA
acggggacccctgggtg

SEQ ID NO: 117416 - DNA, 17 bp, synthetic construct
  source 1..17: mol_type = other DNA
cggggacccctgggtgg

SEQ ID NO: 117417 - DNA, 17 bp, synthetic construct
  source 1..17: mol_type = other DNA
ggggacccctgggtggg

SEQ ID NO: 117418 - DNA, 17 bp, synthetic construct
  source 1..17: mol_type = other DNA
gggacccctgggtggga

SEQ ID NO: 117419 - DNA, 17 bp, synthetic construct
  source 1..17: mol_type = other DNA
ggacccctgggtgggat

SEQ ID NO: 117420 - DNA, 17 bp, synthetic construct
  source 1..17: mol_type = other DNA
gacccctgggtgggatt

SEQ ID NO: 117421 - DNA, 17 bp, synthetic construct
  source 1..17: mol_type = other DNA
acccctgggtgggattg

SEQ ID NO: 117422 - DNA, 17 bp, synthetic construct
  source 1..17: mol_type = other DNA
cccctgggtgggattgg

SEQ ID NO: 117423 - DNA, 17 bp, synthetic construct
  source 1..17: mol_type = other DNA
ccctgggtgggattggg

SEQ ID NO: 117424 - DNA, 17 bp, synthetic construct
  source 1..17: mol_type = other DNA
cctgggtgggattgggg

SEQ ID NO: 117425 - DNA, 17 bp, synthetic construct
  source 1..17: mol_type = other DNA
ctgggtgggattgggga

SEQ ID NO: 117426 - DNA, 17 bp, synthetic construct
  source 1..17: mol_type = other DNA
tgggtgggattggggac

SEQ ID NO: 117427 - DNA, 17 bp, synthetic construct
  source 1..17: mol_type = other DNA
gggtgggattggggacc

SEQ ID NO: 117428 - DNA, 17 bp, synthetic construct
  source 1..17: mol_type = other DNA
ggtgggattggggaccc

SEQ ID NO: 117429 - DNA, 17 bp, synthetic construct
  source 1..17: mol_type = other DNA
gtgggattggggacccc

SEQ ID NO: 117430 - DNA, 17 bp, synthetic construct
  source 1..17: mol_type = other DNA
tgggattggggacccca

SEQ ID NO: 117431 - DNA, 17 bp, synthetic construct
  source 1..17: mol_type = other DNA
gggattggggaccccat

SEQ ID NO: 117432 - DNA, 17 bp, synthetic construct
  source 1..17: mol_type = other DNA
ggattggggaccccatg

SEQ ID NO: 117433 - DNA, 17 bp, synthetic construct
  source 1..17: mol_type = other DNA
gattggggaccccatgg

SEQ ID NO: 117434 - DNA, 17 bp, synthetic construct
  source 1..17: mol_type = other DNA
attggggaccccatgga

SEQ ID NO: 117435 - DNA, 17 bp, synthetic construct
  source 1..17: mol_type = other DNA
ttggggaccccatggag

SEQ ID NO: 117436 - DNA, 17 bp, synthetic construct
  source 1..17: mol_type = other DNA
tggggaccccatggagg

SEQ ID NO: 117437 - DNA, 17 bp, synthetic construct
  source 1..17: mol_type = other DNA
ggggaccccatggaggc

SEQ ID NO: 117438 - DNA, 17 bp, synthetic construct
  source 1..17: mol_type = other DNA
gggaccccatggaggca

SEQ ID NO: 117439 - DNA, 17 bp, synthetic construct
  source 1..17: mol_type = other DNA
ggaccccatggaggcag

SEQ ID NO: 117440 - DNA, 17 bp, synthetic construct
  source 1..17: mol_type = other DNA
gaccccatggaggcagg

SEQ ID NO: 117441 - DNA, 17 bp, synthetic construct
  source 1..17: mol_type = other DNA
accccatggaggcaggt

SEQ ID NO: 117442 - DNA, 17 bp, synthetic construct
  source 1..17: mol_type = other DNA
ccccatggaggcaggtg

SEQ ID NO: 117443 - DNA, 17 bp, synthetic construct
  source 1..17: mol_type = other DNA
cccatggaggcaggtgg

SEQ ID NO: 117444 - DNA, 17 bp, synthetic construct
  source 1..17: mol_type = other DNA
ccatggaggcaggtggg

SEQ ID NO: 117445 - DNA, 17 bp, synthetic construct
  source 1..17: mol_type = other DNA
catggaggcaggtggga

SEQ ID NO: 117446 - DNA, 17 bp, synthetic construct
  source 1..17: mol_type = other DNA
atggaggcaggtgggag

SEQ ID NO: 117447 - DNA, 17 bp, synthetic construct
  source 1..17: mol_type = other DNA
tggaggcaggtgggagg

SEQ ID NO: 117448 - DNA, 17 bp, synthetic construct
  source 1..17: mol_type = other DNA
ggaggcaggtgggaggc

SEQ ID NO: 117449 - DNA, 17 bp, synthetic construct
  source 1..17: mol_type = other DNA
gaggcaggtgggaggca

SEQ ID NO: 117450 - DNA, 17 bp, synthetic construct
  source 1..17: mol_type = other DNA
aggcaggtgggaggcat

SEQ ID NO: 117451 - DNA, 17 bp, synthetic construct
  source 1..17: mol_type = other DNA
ggcaggtgggaggcatc

SEQ ID NO: 117452 - DNA, 17 bp, synthetic construct
  source 1..17: mol_type = other DNA
gcaggtgggaggcatca

SEQ ID NO: 117453 - DNA, 17 bp, synthetic construct
  source 1..17: mol_type = other DNA
caggtgggaggcatcag

SEQ ID NO: 117454 - DNA, 17 bp, synthetic construct
  source 1..17: mol_type = other DNA
aggtgggaggcatcagg

SEQ ID NO: 117455 - DNA, 17 bp, synthetic construct
  source 1..17: mol_type = other DNA
ggtgggaggcatcagga

SEQ ID NO: 117456 - DNA, 17 bp, synthetic construct
  source 1..17: mol_type = other DNA
gtgggaggcatcaggag

SEQ ID NO: 117457 - DNA, 17 bp, synthetic construct
  source 1..17: mol_type = other DNA
tgggaggcatcaggagg

SEQ ID NO: 117458 - DNA, 17 bp, synthetic construct
  source 1..17: mol_type = other DNA
gggaggcatcaggagga

SEQ ID NO: 117459 - DNA, 17 bp, synthetic construct
  source 1..17: mol_type = other DNA
ggaggcatcaggaggag

SEQ ID NO: 117460 - DNA, 17 bp, synthetic construct
  source 1..17: mol_type = other DNA
gaggcatcaggaggagg

SEQ ID NO: 117461 - DNA, 17 bp, synthetic construct
  source 1..17: mol_type = other DNA
aggcatcaggaggaggt

SEQ ID NO: 117462 - DNA, 17 bp, synthetic construct
  source 1..17: mol_type = other DNA
ggcatcaggaggaggtg

SEQ ID NO: 117463 - DNA, 17 bp, synthetic construct
  source 1..17: mol_type = other DNA
gcatcaggaggaggtgc

SEQ ID NO: 117464 - DNA, 17 bp, synthetic construct
  source 1..17: mol_type = other DNA
catcaggaggaggtgct

SEQ ID NO: 117465 - DNA, 17 bp, synthetic construct
  source 1..17: mol_type = other DNA
atcaggaggaggtgctt

SEQ ID NO: 117466 - DNA, 17 bp, synthetic construct
  source 1..17: mol_type = other DNA
tcaggaggaggtgcttg

SEQ ID NO: 117467 - DNA, 17 bp, synthetic construct
  source 1..17: mol_type = other DNA
caggaggaggtgcttgg

SEQ ID NO: 117468 - DNA, 17 bp, synthetic construct
  source 1..17: mol_type = other DNA
aggaggaggtgcttggg

SEQ ID NO: 117469 - DNA, 17 bp, synthetic construct
  source 1..17: mol_type = other DNA
ggaggaggtgcttgggg

SEQ ID NO: 117470 - DNA, 17 bp, synthetic construct
  source 1..17: mol_type = other DNA
gaggaggtgcttggggc

SEQ ID NO: 117471 - DNA, 17 bp, synthetic construct
  source 1..17: mol_type = other DNA
aggaggtgcttggggcc

SEQ ID NO: 117472 - DNA, 17 bp, synthetic construct
  source 1..17: mol_type = other DNA
ggaggtgcttggggcca

SEQ ID NO: 117473 - DNA, 17 bp, synthetic construct
  source 1..17: mol_type = other DNA
gaggtgcttggggccag

SEQ ID NO: 117474 - DNA, 17 bp, synthetic construct
  source 1..17: mol_type = other DNA
aggtgcttggggccagg

SEQ ID NO: 117475 - DNA, 17 bp, synthetic construct
  source 1..17: mol_type = other DNA
ggtgcttggggccaggc

SEQ ID NO: 117476 - DNA, 17 bp, synthetic construct
  source 1..17: mol_type = other DNA
gtgcttggggccaggcg

SEQ ID NO: 117477 - DNA, 17 bp, synthetic construct
  source 1..17: mol_type = other DNA
tgcttggggccaggcgg

SEQ ID NO: 117478 - DNA, 17 bp, synthetic construct
  source 1..17: mol_type = other DNA
gcttggggccaggcggc

SEQ ID NO: 117479 - DNA, 17 bp, synthetic construct
  source 1..17: mol_type = other DNA
cttggggccaggcggcc

SEQ ID NO: 117480 - DNA, 17 bp, synthetic construct
  source 1..17: mol_type = other DNA
ttggggccaggcggcca

SEQ ID NO: 117481 - DNA, 17 bp, synthetic construct
  source 1..17: mol_type = other DNA
tggggccaggcggccag

SEQ ID NO: 117482 - DNA, 17 bp, synthetic construct
  source 1..17: mol_type = other DNA
ggggccaggcggccaga

SEQ ID NO: 117483 - DNA, 17 bp, synthetic construct
  source 1..17: mol_type = other DNA
gggccaggcggccagaa

SEQ ID NO: 117484 - DNA, 17 bp, synthetic construct
  source 1..17: mol_type = other DNA
ggccaggcggccagaac

SEQ ID NO: 117485 - DNA, 17 bp, synthetic construct
  source 1..17: mol_type = other DNA
gccaggcggccagaacc

SEQ ID NO: 117486 - DNA, 17 bp, synthetic construct
  source 1..17: mol_type = other DNA
ccaggcggccagaaccc

SEQ ID NO: 117487 - DNA, 17 bp, synthetic construct
  source 1..17: mol_type = other DNA
caggcggccagaacccc

SEQ ID NO: 117488 - DNA, 17 bp, synthetic construct
  source 1..17: mol_type = other DNA
aggcggccagaaccccc

SEQ ID NO: 117489 - DNA, 17 bp, synthetic construct
  source 1..17: mol_type = other DNA
ggcggccagaacccccc

SEQ ID NO: 117490 - DNA, 17 bp, synthetic construct
  source 1..17: mol_type = other DNA
gcggccagaacccccca

SEQ ID NO: 117491 - DNA, 17 bp, synthetic construct
  source 1..17: mol_type = other DNA
cggccagaaccccccaa

SEQ ID NO: 117492 - DNA, 17 bp, synthetic construct
  source 1..17: mol_type = other DNA
ggccagaaccccccaag

SEQ ID NO: 117493 - DNA, 17 bp, synthetic construct
  source 1..17: mol_type = other DNA
gccagaaccccccaagg

SEQ ID NO: 117494 - DNA, 17 bp, synthetic construct
  source 1..17: mol_type = other DNA
ccagaaccccccaaggc

SEQ ID NO: 117495 - DNA, 17 bp, synthetic construct
  source 1..17: mol_type = other DNA
cagaaccccccaaggcg

SEQ ID NO: 117496 - DNA, 17 bp, synthetic construct
  source 1..17: mol_type = other DNA
agaaccccccaaggcgc

SEQ ID NO: 117497 - DNA, 17 bp, synthetic construct
  source 1..17: mol_type = other DNA
gaaccccccaaggcgca

SEQ ID NO: 117498 - DNA, 17 bp, synthetic construct
  source 1..17: mol_type = other DNA
aaccccccaaggcgcag

SEQ ID NO: 117499 - DNA, 17 bp, synthetic construct
  source 1..17: mol_type = other DNA
accccccaaggcgcagc

SEQ ID NO: 117500 - DNA, 17 bp, synthetic construct
  source 1..17: mol_type = other DNA
ccccccaaggcgcagca

SEQ ID NO: 117501 - DNA, 17 bp, synthetic construct
  source 1..17: mol_type = other DNA
cccccaaggcgcagcag

SEQ ID NO: 117502 - DNA, 17 bp, synthetic construct
  source 1..17: mol_type = other DNA
ccccaaggcgcagcagg

SEQ ID NO: 117503 - DNA, 17 bp, synthetic construct
  source 1..17: mol_type = other DNA
cccaaggcgcagcaggt

SEQ ID NO: 117504 - DNA, 17 bp, synthetic construct
  source 1..17: mol_type = other DNA
ccaaggcgcagcaggtg

SEQ ID NO: 117505 - DNA, 17 bp, synthetic construct
  source 1..17: mol_type = other DNA
caaggcgcagcaggtga

SEQ ID NO: 117506 - DNA, 17 bp, synthetic construct
  source 1..17: mol_type = other DNA
aaggcgcagcaggtgag

SEQ ID NO: 117507 - DNA, 17 bp, synthetic construct
  source 1..17: mol_type = other DNA
aggcgcagcaggtgagc

SEQ ID NO: 117508 - DNA, 17 bp, synthetic construct
  source 1..17: mol_type = other DNA
ggcgcagcaggtgagcc

SEQ ID NO: 117509 - DNA, 17 bp, synthetic construct
  source 1..17: mol_type = other DNA
gcgcagcaggtgagccg

SEQ ID NO: 117510 - DNA, 17 bp, synthetic construct
  source 1..17: mol_type = other DNA
cgcagcaggtgagccgc

SEQ ID NO: 117511 - DNA, 17 bp, synthetic construct
  source 1..17: mol_type = other DNA
gcagcaggtgagccgca

SEQ ID NO: 117512 - DNA, 17 bp, synthetic construct
  source 1..17: mol_type = other DNA
cagcaggtgagccgcaa

SEQ ID NO: 117513 - DNA, 17 bp, synthetic construct
  source 1..17: mol_type = other DNA
agcaggtgagccgcaaa

SEQ ID NO: 117514 - DNA, 17 bp, synthetic construct
  source 1..17: mol_type = other DNA
gcaggtgagccgcaaat

SEQ ID NO: 117515 - DNA, 17 bp, synthetic construct
  source 1..17: mol_type = other DNA
caggtgagccgcaaatt

SEQ ID NO: 117516 - DNA, 17 bp, synthetic construct
  source 1..17: mol_type = other DNA
aggtgagccgcaaattc

SEQ ID NO: 117517 - DNA, 17 bp, synthetic construct
  source 1..17: mol_type = other DNA
ggtgagccgcaaattcc

SEQ ID NO: 117518 - DNA, 17 bp, synthetic construct
  source 1..17: mol_type = other DNA
gtgagccgcaaattcca

SEQ ID NO: 117519 - DNA, 17 bp, synthetic construct
  source 1..17: mol_type = other DNA
tgagccgcaaattccaa

SEQ ID NO: 117520 - DNA, 17 bp, synthetic construct
  source 1..17: mol_type = other DNA
gagccgcaaattccaac

SEQ ID NO: 117521 - DNA, 17 bp, synthetic construct
  source 1..17: mol_type = other DNA
agccgcaaattccaact

SEQ ID NO: 117522 - DNA, 17 bp, synthetic construct
  source 1..17: mol_type = other DNA
gccgcaaattccaactc

SEQ ID NO: 117523 - DNA, 17 bp, synthetic construct
  source 1..17: mol_type = other DNA
ccgcaaattccaactca

SEQ ID NO: 117524 - DNA, 17 bp, synthetic construct
  source 1..17: mol_type = other DNA
cgcaaattccaactcac

SEQ ID NO: 117525 - DNA, 17 bp, synthetic construct
  source 1..17: mol_type = other DNA
gcaaattccaactcact

SEQ ID NO: 117526 - DNA, 17 bp, synthetic construct
  source 1..17: mol_type = other DNA
caaattccaactcactg

SEQ ID NO: 117527 - DNA, 17 bp, synthetic construct
  source 1..17: mol_type = other DNA
aaattccaactcactgt

SEQ ID NO: 117528 - DNA, 17 bp, synthetic construct
  source 1..17: mol_type = other DNA
aattccaactcactgtt

SEQ ID NO: 117529 - DNA, 17 bp, synthetic construct
  source 1..17: mol_type = other DNA
attccaactcactgttc

SEQ ID NO: 117530 - DNA, 17 bp, synthetic construct
  source 1..17: mol_type = other DNA
ttccaactcactgttcc

SEQ ID NO: 117531 - DNA, 17 bp, synthetic construct
  source 1..17: mol_type = other DNA
tccaactcactgttccc

SEQ ID NO: 117532 - DNA, 17 bp, synthetic construct
  source 1..17: mol_type = other DNA
ccaactcactgttcccc

SEQ ID NO: 117533 - DNA, 17 bp, synthetic construct
  source 1..17: mol_type = other DNA
caactcactgttccccg

SEQ ID NO: 117534 - DNA, 17 bp, synthetic construct
  source 1..17: mol_type = other DNA
aactcactgttccccgg

SEQ ID NO: 117535 - DNA, 17 bp, synthetic construct
  source 1..17: mol_type = other DNA
actcactgttccccggg

SEQ ID NO: 117536 - DNA, 17 bp, synthetic construct
  source 1..17: mol_type = other DNA
ctcactgttccccgggc

SEQ ID NO: 117537 - DNA, 17 bp, synthetic construct
  source 1..17: mol_type = other DNA
tcactgttccccgggct

SEQ ID NO: 117538 - DNA, 17 bp, synthetic construct
  source 1..17: mol_type = other DNA
cactgttccccgggctg

SEQ ID NO: 117539 - DNA, 17 bp, synthetic construct
  source 1..17: mol_type = other DNA
actgttccccgggctga

SEQ ID NO: 117540 - DNA, 17 bp, synthetic construct
  source 1..17: mol_type = other DNA
ctgttccccgggctgag

SEQ ID NO: 117541 - DNA, 17 bp, synthetic construct
  source 1..17: mol_type = other DNA
tgttccccgggctgagg

SEQ ID NO: 117542 - DNA, 17 bp, synthetic construct
  source 1..17: mol_type = other DNA
gttccccgggctgaggg

SEQ ID NO: 117543 - DNA, 17 bp, synthetic construct
  source 1..17: mol_type = other DNA
ttccccgggctgagggg

SEQ ID NO: 117544 - DNA, 17 bp, synthetic construct
  source 1..17: mol_type = other DNA
tccccgggctgaggggg

SEQ ID NO: 117545 - DNA, 17 bp, synthetic construct
  source 1..17: mol_type = other DNA
ccccgggctgagggggt

SEQ ID NO: 117546 - DNA, 17 bp, synthetic construct
  source 1..17: mol_type = other DNA
cccgggctgagggggtc

SEQ ID NO: 117547 - DNA, 17 bp, synthetic construct
  source 1..17: mol_type = other DNA
ccgggctgagggggtcg

SEQ ID NO: 117548 - DNA, 17 bp, synthetic construct
  source 1..17: mol_type = other DNA
cgggctgagggggtcgc

SEQ ID NO: 117549 - DNA, 17 bp, synthetic construct
  source 1..17: mol_type = other DNA
gggctgagggggtcgca

SEQ ID NO: 117550 - DNA, 17 bp, synthetic construct
  source 1..17: mol_type = other DNA
ggctgagggggtcgcag

SEQ ID NO: 117551 - DNA, 17 bp, synthetic construct
  source 1..17: mol_type = other DNA
gctgagggggtcgcagg

SEQ ID NO: 117552 - DNA, 17 bp, synthetic construct
  source 1..17: mol_type = other DNA
ctgagggggtcgcaggc

SEQ ID NO: 117553 - DNA, 17 bp, synthetic construct
  source 1..17: mol_type = other DNA
tgagggggtcgcaggcc

SEQ ID NO: 117554 - DNA, 17 bp, synthetic construct
  source 1..17: mol_type = other DNA
gagggggtcgcaggcct

SEQ ID NO: 117555 - DNA, 17 bp, synthetic construct
  source 1..17: mol_type = other DNA
agggggtcgcaggcctg

SEQ ID NO: 117556 - DNA, 17 bp, synthetic construct
  source 1..17: mol_type = other DNA
gggggtcgcaggcctgc

SEQ ID NO: 117557 - DNA, 17 bp, synthetic construct
  source 1..17: mol_type = other DNA
ggggtcgcaggcctgcg

SEQ ID NO: 117558 - DNA, 17 bp, synthetic construct
  source 1..17: mol_type = other DNA
gggtcgcaggcctgcgt

SEQ ID NO: 117559 - DNA, 17 bp, synthetic construct
  source 1..17: mol_type = other DNA
ggtcgcaggcctgcgtg

SEQ ID NO: 117560 - DNA, 17 bp, synthetic construct
  source 1..17: mol_type = other DNA
gtcgcaggcctgcgtgt

SEQ ID NO: 117561 - DNA, 17 bp, synthetic construct
  source 1..17: mol_type = other DNA
tcgcaggcctgcgtgtc

SEQ ID NO: 117562 - DNA, 17 bp, synthetic construct
  source 1..17: mol_type = other DNA
cgcaggcctgcgtgtca

SEQ ID NO: 117563 - DNA, 17 bp, synthetic construct
  source 1..17: mol_type = other DNA
gcaggcctgcgtgtcag

SEQ ID NO: 117564 - DNA, 17 bp, synthetic construct
  source 1..17: mol_type = other DNA
caggcctgcgtgtcagg

SEQ ID NO: 117565 - DNA, 17 bp, synthetic construct
  source 1..17: mol_type = other DNA
aggcctgcgtgtcaggg

SEQ ID NO: 117566 - DNA, 17 bp, synthetic construct
  source 1..17: mol_type = other DNA
ggcctgcgtgtcagggg

SEQ ID NO: 117567 - DNA, 17 bp, synthetic construct
  source 1..17: mol_type = other DNA
gcctgcgtgtcaggggt

SEQ ID NO: 117568 - DNA, 17 bp, synthetic construct
  source 1..17: mol_type = other DNA
cctgcgtgtcaggggtg

SEQ ID NO: 117569 - DNA, 17 bp, synthetic construct
  source 1..17: mol_type = other DNA
ctgcgtgtcaggggtgt

SEQ ID NO: 117570 - DNA, 17 bp, synthetic construct
  source 1..17: mol_type = other DNA
tgcgtgtcaggggtgtg

SEQ ID NO: 117571 - DNA, 17 bp, synthetic construct
  source 1..17: mol_type = other DNA
gcgtgtcaggggtgtgg

SEQ ID NO: 117572 - DNA, 17 bp, synthetic construct
  source 1..17: mol_type = other DNA
cgtgtcaggggtgtggg

SEQ ID NO: 117573 - DNA, 17 bp, synthetic construct
  source 1..17: mol_type = other DNA
gtgtcaggggtgtgggc

SEQ ID NO: 117574 - DNA, 17 bp, synthetic construct
  source 1..17: mol_type = other DNA
tgtcaggggtgtgggct

SEQ ID NO: 117575 - DNA, 17 bp, synthetic construct
  source 1..17: mol_type = other DNA
gtcaggggtgtgggctt

SEQ ID NO: 117576 - DNA, 17 bp, synthetic construct
  source 1..17: mol_type = other DNA
tcaggggtgtgggcttc

SEQ ID NO: 117577 - DNA, 17 bp, synthetic construct
  source 1..17: mol_type = other DNA
caggggtgtgggcttcg

SEQ ID NO: 117578 - DNA, 17 bp, synthetic construct
  source 1..17: mol_type = other DNA
aggggtgtgggcttcgg

SEQ ID NO: 117579 - DNA, 17 bp, synthetic construct
  source 1..17: mol_type = other DNA
ggggtgtgggcttcggg

SEQ ID NO: 117580 - DNA, 17 bp, synthetic construct
  source 1..17: mol_type = other DNA
gggtgtgggcttcgggg

SEQ ID NO: 117581 - DNA, 17 bp, synthetic construct
  source 1..17: mol_type = other DNA
ggtgtgggcttcggggc

SEQ ID NO: 117582 - DNA, 17 bp, synthetic construct
  source 1..17: mol_type = other DNA
gtgtgggcttcggggca

SEQ ID NO: 117583 - DNA, 17 bp, synthetic construct
  source 1..17: mol_type = other DNA
tgtgggcttcggggcag

SEQ ID NO: 117584 - DNA, 17 bp, synthetic construct
  source 1..17: mol_type = other DNA
gtgggcttcggggcagg

SEQ ID NO: 117585 - DNA, 17 bp, synthetic construct
  source 1..17: mol_type = other DNA
tgggcttcggggcaggg

SEQ ID NO: 117586 - DNA, 17 bp, synthetic construct
  source 1..17: mol_type = other DNA
gggcttcggggcagggc

SEQ ID NO: 117587 - DNA, 17 bp, synthetic construct
  source 1..17: mol_type = other DNA
ggcttcggggcagggcg

SEQ ID NO: 117588 - DNA, 17 bp, synthetic construct
  source 1..17: mol_type = other DNA
gcttcggggcagggcgt

SEQ ID NO: 117589 - DNA, 17 bp, synthetic construct
  source 1..17: mol_type = other DNA
cttcggggcagggcgtg

SEQ ID NO: 117590 - DNA, 17 bp, synthetic construct
  source 1..17: mol_type = other DNA
ttcggggcagggcgtgg

SEQ ID NO: 117591 - DNA, 17 bp, synthetic construct
  source 1..17: mol_type = other DNA
tcggggcagggcgtgga

SEQ ID NO: 117592 - DNA, 17 bp, synthetic construct
  source 1..17: mol_type = other DNA
cggggcagggcgtggag

SEQ ID NO: 117593 - DNA, 17 bp, synthetic construct
  source 1..17: mol_type = other DNA
ggggcagggcgtggaga

SEQ ID NO: 117594 - DNA, 17 bp, synthetic construct
  source 1..17: mol_type = other DNA
gggcagggcgtggagat

SEQ ID NO: 117595 - DNA, 17 bp, synthetic construct
  source 1..17: mol_type = other DNA
ggcagggcgtggagatg

SEQ ID NO: 117596 - DNA, 17 bp, synthetic construct
  source 1..17: mol_type = other DNA
gcagggcgtggagatga

SEQ ID NO: 117597 - DNA, 17 bp, synthetic construct
  source 1..17: mol_type = other DNA
cagggcgtggagatgag

SEQ ID NO: 117598 - DNA, 17 bp, synthetic construct
  source 1..17: mol_type = other DNA
agggcgtggagatgagg

SEQ ID NO: 117599 - DNA, 17 bp, synthetic construct
  source 1..17: mol_type = other DNA
gggcgtggagatgaggt

SEQ ID NO: 117600 - DNA, 17 bp, synthetic construct
  source 1..17: mol_type = other DNA
ggcgtggagatgaggtc

SEQ ID NO: 117601 - DNA, 17 bp, synthetic construct
  source 1..17: mol_type = other DNA
gcgtggagatgaggtca

SEQ ID NO: 117602 - DNA, 17 bp, synthetic construct
  source 1..17: mol_type = other DNA
cgtggagatgaggtcag

SEQ ID NO: 117603 - DNA, 17 bp, synthetic construct
  source 1..17: mol_type = other DNA
gtggagatgaggtcagg

SEQ ID NO: 117604 - DNA, 17 bp, synthetic construct
  source 1..17: mol_type = other DNA
tggagatgaggtcaggt

SEQ ID NO: 117605 - DNA, 17 bp, synthetic construct
  source 1..17: mol_type = other DNA
ggagatgaggtcaggtc

SEQ ID NO: 117606 - DNA, 17 bp, synthetic construct
  source 1..17: mol_type = other DNA
gagatgaggtcaggtct

SEQ ID NO: 117607 - DNA, 17 bp, synthetic construct
  source 1..17: mol_type = other DNA
agatgaggtcaggtctt

SEQ ID NO: 117608 - DNA, 17 bp, synthetic construct
  source 1..17: mol_type = other DNA
gatgaggtcaggtcttc

SEQ ID NO: 117609 - DNA, 17 bp, synthetic construct
  source 1..17: mol_type = other DNA
atgaggtcaggtcttcc

SEQ ID NO: 117610 - DNA, 17 bp, synthetic construct
  source 1..17: mol_type = other DNA
tgaggtcaggtcttccc

SEQ ID NO: 117611 - DNA, 17 bp, synthetic construct
  source 1..17: mol_type = other DNA
gaggtcaggtcttcccc

SEQ ID NO: 117612 - DNA, 17 bp, synthetic construct
  source 1..17: mol_type = other DNA
aggtcaggtcttcccca

SEQ ID NO: 117613 - DNA, 17 bp, synthetic construct
  source 1..17: mol_type = other DNA
ggtcaggtcttccccac

SEQ ID NO: 117614 - DNA, 17 bp, synthetic construct
  source 1..17: mol_type = other DNA
gtcaggtcttccccaca

SEQ ID NO: 117615 - DNA, 17 bp, synthetic construct
  source 1..17: mol_type = other DNA
tcaggtcttccccacag

SEQ ID NO: 117616 - DNA, 17 bp, synthetic construct
  source 1..17: mol_type = other DNA
caggtcttccccacaga

SEQ ID NO: 117617 - DNA, 17 bp, synthetic construct
  source 1..17: mol_type = other DNA
aggtcttccccacagag

SEQ ID NO: 117618 - DNA, 17 bp, synthetic construct
  source 1..17: mol_type = other DNA
ggtcttccccacagaga

SEQ ID NO: 117619 - DNA, 17 bp, synthetic construct
  source 1..17: mol_type = other DNA
gtcttccccacagagaa

SEQ ID NO: 117620 - DNA, 17 bp, synthetic construct
  source 1..17: mol_type = other DNA
tcttccccacagagaac

SEQ ID NO: 117621 - DNA, 17 bp, synthetic construct
  source 1..17: mol_type = other DNA
cttccccacagagaact

SEQ ID NO: 117622 - DNA, 17 bp, synthetic construct
  source 1..17: mol_type = other DNA
ttccccacagagaacta

SEQ ID NO: 117623 - DNA, 17 bp, synthetic construct
  source 1..17: mol_type = other DNA
tccccacagagaactac

SEQ ID NO: 117624 - DNA, 17 bp, synthetic construct
  source 1..17: mol_type = other DNA
ccccacagagaactacg

SEQ ID NO: 117625 - DNA, 17 bp, synthetic construct
  source 1..17: mol_type = other DNA
cccacagagaactacgc

SEQ ID NO: 117626 - DNA, 17 bp, synthetic construct
  source 1..17: mol_type = other DNA
ccacagagaactacgcc

SEQ ID NO: 117627 - DNA, 17 bp, synthetic construct
  source 1..17: mol_type = other DNA
cacagagaactacgccc

SEQ ID NO: 117628 - DNA, 17 bp, synthetic construct
  source 1..17: mol_type = other DNA
acagagaactacgcccg

SEQ ID NO: 117629 - DNA, 17 bp, synthetic construct
  source 1..17: mol_type = other DNA
cagagaactacgcccgg

SEQ ID NO: 117630 - DNA, 17 bp, synthetic construct
  source 1..17: mol_type = other DNA
agagaactacgcccggc

SEQ ID NO: 117631 - DNA, 17 bp, synthetic construct
  source 1..17: mol_type = other DNA
gagaactacgcccggca

SEQ ID NO: 117632 - DNA, 17 bp, synthetic construct
  source 1..17: mol_type = other DNA
agaactacgcccggcac

SEQ ID NO: 117633 - DNA, 17 bp, synthetic construct
  source 1..17: mol_type = other DNA
gaactacgcccggcact

SEQ ID NO: 117634 - DNA, 17 bp, synthetic construct
  source 1..17: mol_type = other DNA
aactacgcccggcactg

SEQ ID NO: 117635 - DNA, 17 bp, synthetic construct
  source 1..17: mol_type = other DNA
actacgcccggcactgg

SEQ ID NO: 117636 - DNA, 17 bp, synthetic construct
  source 1..17: mol_type = other DNA
ctacgcccggcactggt

SEQ ID NO: 117637 - DNA, 17 bp, synthetic construct
  source 1..17: mol_type = other DNA
tacgcccggcactggtg

SEQ ID NO: 117638 - DNA, 17 bp, synthetic construct
  source 1..17: mol_type = other DNA
acgcccggcactggtgc

SEQ ID NO: 117639 - DNA, 17 bp, synthetic construct
  source 1..17: mol_type = other DNA
cgcccggcactggtgct

SEQ ID NO: 117640 - DNA, 17 bp, synthetic construct
  source 1..17: mol_type = other DNA
gcccggcactggtgctc

SEQ ID NO: 117641 - DNA, 17 bp, synthetic construct
  source 1..17: mol_type = other DNA
cccggcactggtgctcg

SEQ ID NO: 117642 - DNA, 17 bp, synthetic construct
  source 1..17: mol_type = other DNA
ccggcactggtgctcgc

SEQ ID NO: 117643 - DNA, 17 bp, synthetic construct
  source 1..17: mol_type = other DNA
cggcactggtgctcgcg

SEQ ID NO: 117644 - DNA, 17 bp, synthetic construct
  source 1..17: mol_type = other DNA
ggcactggtgctcgcgc

SEQ ID NO: 117645 - DNA, 17 bp, synthetic construct
  source 1..17: mol_type = other DNA
gcactggtgctcgcgcc

SEQ ID NO: 117646 - DNA, 17 bp, synthetic construct
  source 1..17: mol_type = other DNA
cactggtgctcgcgcct

SEQ ID NO: 117647 - DNA, 17 bp, synthetic construct
  source 1..17: mol_type = other DNA
actggtgctcgcgcctg

SEQ ID NO: 117648 - DNA, 17 bp, synthetic construct
  source 1..17: mol_type = other DNA
ctggtgctcgcgcctga

SEQ ID NO: 117649 - DNA, 17 bp, synthetic construct
  source 1..17: mol_type = other DNA
tggtgctcgcgcctgac

SEQ ID NO: 117650 - DNA, 17 bp, synthetic construct
  source 1..17: mol_type = other DNA
ggtgctcgcgcctgacc

SEQ ID NO: 117651 - DNA, 17 bp, synthetic construct
  source 1..17: mol_type = other DNA
gtgctcgcgcctgaccg

SEQ ID NO: 117652 - DNA, 17 bp, synthetic construct
  source 1..17: mol_type = other DNA
tgctcgcgcctgaccga

SEQ ID NO: 117653 - DNA, 17 bp, synthetic construct
  source 1..17: mol_type = other DNA
gctcgcgcctgaccgat

SEQ ID NO: 117654 - DNA, 17 bp, synthetic construct
  source 1..17: mol_type = other DNA
ctcgcgcctgaccgatc

SEQ ID NO: 117655 - DNA, 17 bp, synthetic construct
  source 1..17: mol_type = other DNA
tcgcgcctgaccgatcc

SEQ ID NO: 117656 - DNA, 17 bp, synthetic construct
  source 1..17: mol_type = other DNA
cgcgcctgaccgatccc

SEQ ID NO: 117657 - DNA, 17 bp, synthetic construct
  source 1..17: mol_type = other DNA
gcgcctgaccgatccca

SEQ ID NO: 117658 - DNA, 17 bp, synthetic construct
  source 1..17: mol_type = other DNA
cgcctgaccgatcccaa

SEQ ID NO: 117659 - DNA, 17 bp, synthetic construct
  source 1..17: mol_type = other DNA
gcctgaccgatcccaac

SEQ ID NO: 117660 - DNA, 17 bp, synthetic construct
  source 1..17: mol_type = other DNA
cctgaccgatcccaaca

SEQ ID NO: 117661 - DNA, 17 bp, synthetic construct
  source 1..17: mol_type = other DNA
ctgaccgatcccaacag

SEQ ID NO: 117662 - DNA, 17 bp, synthetic construct
  source 1..17: mol_type = other DNA
tgaccgatcccaacagt

SEQ ID NO: 117663 - DNA, 17 bp, synthetic construct
  source 1..17: mol_type = other DNA
gaccgatcccaacagtg

SEQ ID NO: 117664 - DNA, 17 bp, synthetic construct
  source 1..17: mol_type = other DNA
accgatcccaacagtgc

SEQ ID NO: 117665 - DNA, 17 bp, synthetic construct
  source 1..17: mol_type = other DNA
ccgatcccaacagtgcc

SEQ ID NO: 117666 - DNA, 17 bp, synthetic construct
  source 1..17: mol_type = other DNA
cgatcccaacagtgcct

SEQ ID NO: 117667 - DNA, 17 bp, synthetic construct
  source 1..17: mol_type = other DNA
gatcccaacagtgcctt

SEQ ID NO: 117668 - DNA, 17 bp, synthetic construct
  source 1..17: mol_type = other DNA
atcccaacagtgccttc

SEQ ID NO: 117669 - DNA, 17 bp, synthetic construct
  source 1..17: mol_type = other DNA
tcccaacagtgccttct

SEQ ID NO: 117670 - DNA, 17 bp, synthetic construct
  source 1..17: mol_type = other DNA
cccaacagtgccttctc

SEQ ID NO: 117671 - DNA, 17 bp, synthetic construct
  source 1..17: mol_type = other DNA
ccaacagtgccttctcg

SEQ ID NO: 117672 - DNA, 17 bp, synthetic construct
  source 1..17: mol_type = other DNA
caacagtgccttctcgc

SEQ ID NO: 117673 - DNA, 17 bp, synthetic construct
  source 1..17: mol_type = other DNA
aacagtgccttctcgcg

SEQ ID NO: 117674 - DNA, 17 bp, synthetic construct
  source 1..17: mol_type = other DNA
acagtgccttctcgcgc

SEQ ID NO: 117675 - DNA, 17 bp, synthetic construct
  source 1..17: mol_type = other DNA
cagtgccttctcgcgct

SEQ ID NO: 117676 - DNA, 17 bp, synthetic construct
  source 1..17: mol_type = other DNA
agtgccttctcgcgctg

SEQ ID NO: 117677 - DNA, 17 bp, synthetic construct
  source 1..17: mol_type = other DNA
gtgccttctcgcgctgc

SEQ ID NO: 117678 - DNA, 17 bp, synthetic construct
  source 1..17: mol_type = other DNA
tgccttctcgcgctgcc

SEQ ID NO: 117679 - DNA, 17 bp, synthetic construct
  source 1..17: mol_type = other DNA
gccttctcgcgctgcca

SEQ ID NO: 117680 - DNA, 17 bp, synthetic construct
  source 1..17: mol_type = other DNA
ccttctcgcgctgccac

SEQ ID NO: 117681 - DNA, 17 bp, synthetic construct
  source 1..17: mol_type = other DNA
cttctcgcgctgccact

SEQ ID NO: 117682 - DNA, 17 bp, synthetic construct
  source 1..17: mol_type = other DNA
ttctcgcgctgccactc

SEQ ID NO: 117683 - DNA, 17 bp, synthetic construct
  source 1..17: mol_type = other DNA
tctcgcgctgccactcc

SEQ ID NO: 117684 - DNA, 17 bp, synthetic construct
  source 1..17: mol_type = other DNA
ctcgcgctgccactcca

SEQ ID NO: 117685 - DNA, 17 bp, synthetic construct
  source 1..17: mol_type = other DNA
tcgcgctgccactccat

SEQ ID NO: 117686 - DNA, 17 bp, synthetic construct
  source 1..17: mol_type = other DNA
cgcgctgccactccatc

SEQ ID NO: 117687 - DNA, 17 bp, synthetic construct
  source 1..17: mol_type = other DNA
gcgctgccactccatca

SEQ ID NO: 117688 - DNA, 17 bp, synthetic construct
  source 1..17: mol_type = other DNA
cgctgccactccatcat

SEQ ID NO: 117689 - DNA, 17 bp, synthetic construct
  source 1..17: mol_type = other DNA
gctgccactccatcatc

SEQ ID NO: 117690 - DNA, 17 bp, synthetic construct
  source 1..17: mol_type = other DNA
ctgccactccatcatca

SEQ ID NO: 117691 - DNA, 17 bp, synthetic construct
  source 1..17: mol_type = other DNA
tgccactccatcatcaa

SEQ ID NO: 117692 - DNA, 17 bp, synthetic construct
  source 1..17: mol_type = other DNA
gccactccatcatcaac

SEQ ID NO: 117693 - DNA, 17 bp, synthetic construct
  source 1..17: mol_type = other DNA
ccactccatcatcaacc

SEQ ID NO: 117694 - DNA, 17 bp, synthetic construct
  source 1..17: mol_type = other DNA
cactccatcatcaaccc

SEQ ID NO: 117695 - DNA, 17 bp, synthetic construct
  source 1..17: mol_type = other DNA
actccatcatcaacccc

SEQ ID NO: 117696 - DNA, 17 bp, synthetic construct
  source 1..17: mol_type = other DNA
ctccatcatcaacccca

SEQ ID NO: 117697 - DNA, 17 bp, synthetic construct
  source 1..17: mol_type = other DNA
tccatcatcaaccccaa

SEQ ID NO: 117698 - DNA, 17 bp, synthetic construct
  source 1..17: mol_type = other DNA
ccatcatcaaccccaag

SEQ ID NO: 117699 - DNA, 17 bp, synthetic construct
  source 1..17: mol_type = other DNA
catcatcaaccccaagc

SEQ ID NO: 117700 - DNA, 17 bp, synthetic construct
  source 1..17: mol_type = other DNA
atcatcaaccccaagcc

SEQ ID NO: 117701 - DNA, 17 bp, synthetic construct
  source 1..17: mol_type = other DNA
tcatcaaccccaagccc

SEQ ID NO: 117702 - DNA, 17 bp, synthetic construct
  source 1..17: mol_type = other DNA
catcaaccccaagccct

SEQ ID NO: 117703 - DNA, 17 bp, synthetic construct
  source 1..17: mol_type = other DNA
atcaaccccaagccctt

SEQ ID NO: 117704 - DNA, 17 bp, synthetic construct
  source 1..17: mol_type = other DNA
tcaaccccaagcccttc

SEQ ID NO: 117705 - DNA, 17 bp, synthetic construct
  source 1..17: mol_type = other DNA
caaccccaagcccttcc

SEQ ID NO: 117706 - DNA, 17 bp, synthetic construct
  source 1..17: mol_type = other DNA
aaccccaagcccttcca

SEQ ID NO: 117707 - DNA, 17 bp, synthetic construct
  source 1..17: mol_type = other DNA
accccaagcccttccac

SEQ ID NO: 117708 - DNA, 17 bp, synthetic construct
  source 1..17: mol_type = other DNA
ccccaagcccttccact

SEQ ID NO: 117709 - DNA, 17 bp, synthetic construct
  source 1..17: mol_type = other DNA
cccaagcccttccactc

SEQ ID NO: 117710 - DNA, 17 bp, synthetic construct
  source 1..17: mol_type = other DNA
ccaagcccttccactcg

SEQ ID NO: 117711 - DNA, 17 bp, synthetic construct
  source 1..17: mol_type = other DNA
caagcccttccactcgg

SEQ ID NO: 117712 - DNA, 17 bp, synthetic construct
  source 1..17: mol_type = other DNA
aagcccttccactcggt

SEQ ID NO: 117713 - DNA, 17 bp, synthetic construct
  source 1..17: mol_type = other DNA
agcccttccactcggtg

SEQ ID NO: 117714 - DNA, 17 bp, synthetic construct
  source 1..17: mol_type = other DNA
gcccttccactcggtga

SEQ ID NO: 117715 - DNA, 17 bp, synthetic construct
  source 1..17: mol_type = other DNA
cccttccactcggtgag

SEQ ID NO: 117716 - DNA, 17 bp, synthetic construct
  source 1..17: mol_type = other DNA
ccttccactcggtgaga

SEQ ID NO: 117717 - DNA, 17 bp, synthetic construct
  source 1..17: mol_type = other DNA
cttccactcggtgagag

SEQ ID NO: 117718 - DNA, 17 bp, synthetic construct
  source 1..17: mol_type = other DNA
ttccactcggtgagagg

SEQ ID NO: 117719 - DNA, 17 bp, synthetic construct
  source 1..17: mol_type = other DNA
tccactcggtgagaggc

SEQ ID NO: 117720 - DNA, 17 bp, synthetic construct
  source 1..17: mol_type = other DNA
ccactcggtgagaggct

SEQ ID NO: 117721 - DNA, 17 bp, synthetic construct
  source 1..17: mol_type = other DNA
cactcggtgagaggctg

SEQ ID NO: 117722 - DNA, 17 bp, synthetic construct
  source 1..17: mol_type = other DNA
actcggtgagaggctga

SEQ ID NO: 117723 - DNA, 17 bp, synthetic construct
  source 1..17: mol_type = other DNA
ctcggtgagaggctgag

SEQ ID NO: 117724 - DNA, 17 bp, synthetic construct
  source 1..17: mol_type = other DNA
tcggtgagaggctgagg

SEQ ID NO: 117725 - DNA, 17 bp, synthetic construct
  source 1..17: mol_type = other DNA
cggtgagaggctgaggc

SEQ ID NO: 117726 - DNA, 17 bp, synthetic construct
  source 1..17: mol_type = other DNA
ggtgagaggctgaggcc

SEQ ID NO: 117727 - DNA, 17 bp, synthetic construct
  source 1..17: mol_type = other DNA
gtgagaggctgaggcca

SEQ ID NO: 117728 - DNA, 17 bp, synthetic construct
  source 1..17: mol_type = other DNA
tgagaggctgaggccag

SEQ ID NO: 117729 - DNA, 17 bp, synthetic construct
  source 1..17: mol_type = other DNA
gagaggctgaggccaga

SEQ ID NO: 117730 - DNA, 17 bp, synthetic construct
  source 1..17: mol_type = other DNA
agaggctgaggccagac

SEQ ID NO: 117731 - DNA, 17 bp, synthetic construct
  source 1..17: mol_type = other DNA
gaggctgaggccagacc

SEQ ID NO: 117732 - DNA, 17 bp, synthetic construct
  source 1..17: mol_type = other DNA
aggctgaggccagaccc

SEQ ID NO: 117733 - DNA, 17 bp, synthetic construct
  source 1..17: mol_type = other DNA
ggctgaggccagacccc

SEQ ID NO: 117734 - DNA, 17 bp, synthetic construct
  source 1..17: mol_type = other DNA
gctgaggccagaccccc

SEQ ID NO: 117735 - DNA, 17 bp, synthetic construct
  source 1..17: mol_type = other DNA
ctgaggccagaccccca

SEQ ID NO: 117736 - DNA, 17 bp, synthetic construct
  source 1..17: mol_type = other DNA
tgaggccagacccccac

SEQ ID NO: 117737 - DNA, 17 bp, synthetic construct
  source 1..17: mol_type = other DNA
gaggccagacccccacg

SEQ ID NO: 117738 - DNA, 17 bp, synthetic construct
  source 1..17: mol_type = other DNA
aggccagacccccacgc

SEQ ID NO: 117739 - DNA, 17 bp, synthetic construct
  source 1..17: mol_type = other DNA
ggccagacccccacgcc

SEQ ID NO: 117740 - DNA, 17 bp, synthetic construct
  source 1..17: mol_type = other DNA
gccagacccccacgcct

SEQ ID NO: 117741 - DNA, 17 bp, synthetic construct
  source 1..17: mol_type = other DNA
ccagacccccacgcctg

SEQ ID NO: 117742 - DNA, 17 bp, synthetic construct
  source 1..17: mol_type = other DNA
cagacccccacgcctgg

SEQ ID NO: 117743 - DNA, 17 bp, synthetic construct
  source 1..17: mol_type = other DNA
agacccccacgcctggg

SEQ ID NO: 117744 - DNA, 17 bp, synthetic construct
  source 1..17: mol_type = other DNA
gacccccacgcctgggc

SEQ ID NO: 117745 - DNA, 17 bp, synthetic construct
  source 1..17: mol_type = other DNA
acccccacgcctgggca

SEQ ID NO: 117746 - DNA, 17 bp, synthetic construct
  source 1..17: mol_type = other DNA
cccccacgcctgggcag

SEQ ID NO: 117747 - DNA, 17 bp, synthetic construct
  source 1..17: mol_type = other DNA
ccccacgcctgggcagg

SEQ ID NO: 117748 - DNA, 17 bp, synthetic construct
  source 1..17: mol_type = other DNA
cccacgcctgggcagga

SEQ ID NO: 117749 - DNA, 17 bp, synthetic construct
  source 1..17: mol_type = other DNA
ccacgcctgggcaggat

SEQ ID NO: 117750 - DNA, 17 bp, synthetic construct
  source 1..17: mol_type = other DNA
cacgcctgggcaggatg

SEQ ID NO: 117751 - DNA, 17 bp, synthetic construct
  source 1..17: mol_type = other DNA
acgcctgggcaggatgg

SEQ ID NO: 117752 - DNA, 17 bp, synthetic construct
  source 1..17: mol_type = other DNA
cgcctgggcaggatggg

SEQ ID NO: 117753 - DNA, 17 bp, synthetic construct
  source 1..17: mol_type = other DNA
gcctgggcaggatgggt

SEQ ID NO: 117754 - DNA, 17 bp, synthetic construct
  source 1..17: mol_type = other DNA
cctgggcaggatgggtg

SEQ ID NO: 117755 - DNA, 17 bp, synthetic construct
  source 1..17: mol_type = other DNA
ctgggcaggatgggtgg

SEQ ID NO: 117756 - DNA, 17 bp, synthetic construct
  source 1..17: mol_type = other DNA
tgggcaggatgggtggg

SEQ ID NO: 117757 - DNA, 17 bp, synthetic construct
  source 1..17: mol_type = other DNA
gggcaggatgggtgggg

SEQ ID NO: 117758 - DNA, 17 bp, synthetic construct
  source 1..17: mol_type = other DNA
ggcaggatgggtggggg

SEQ ID NO: 117759 - DNA, 17 bp, synthetic construct
  source 1..17: mol_type = other DNA
gcaggatgggtggggga

SEQ ID NO: 117760 - DNA, 17 bp, synthetic construct
  source 1..17: mol_type = other DNA
caggatgggtgggggag

SEQ ID NO: 117761 - DNA, 17 bp, synthetic construct
  source 1..17: mol_type = other DNA
aggatgggtgggggagc

SEQ ID NO: 117762 - DNA, 17 bp, synthetic construct
  source 1..17: mol_type = other DNA
ggatgggtgggggagcc

SEQ ID NO: 117763 - DNA, 17 bp, synthetic construct
  source 1..17: mol_type = other DNA
gatgggtgggggagccc

SEQ ID NO: 117764 - DNA, 17 bp, synthetic construct
  source 1..17: mol_type = other DNA
atgggtgggggagccct

SEQ ID NO: 117765 - DNA, 17 bp, synthetic construct
  source 1..17: mol_type = other DNA
tgggtgggggagccctg

SEQ ID NO: 117766 - DNA, 17 bp, synthetic construct
  source 1..17: mol_type = other DNA
gggtgggggagccctgg

SEQ ID NO: 117767 - DNA, 17 bp, synthetic construct
  source 1..17: mol_type = other DNA
ggtgggggagccctggc

SEQ ID NO: 117768 - DNA, 17 bp, synthetic construct
  source 1..17: mol_type = other DNA
gtgggggagccctggca

SEQ ID NO: 117769 - DNA, 17 bp, synthetic construct
  source 1..17: mol_type = other DNA
tgggggagccctggcag

SEQ ID NO: 117770 - DNA, 17 bp, synthetic construct
  source 1..17: mol_type = other DNA
gggggagccctggcagg

SEQ ID NO: 117771 - DNA, 17 bp, synthetic construct
  source 1..17: mol_type = other DNA
ggggagccctggcaggc

SEQ ID NO: 117772 - DNA, 17 bp, synthetic construct
  source 1..17: mol_type = other DNA
gggagccctggcaggct

SEQ ID NO: 117773 - DNA, 17 bp, synthetic construct
  source 1..17: mol_type = other DNA
ggagccctggcaggctg

SEQ ID NO: 117774 - DNA, 17 bp, synthetic construct
  source 1..17: mol_type = other DNA
gagccctggcaggctgg

SEQ ID NO: 117775 - DNA, 17 bp, synthetic construct
  source 1..17: mol_type = other DNA
agccctggcaggctggg

SEQ ID NO: 117776 - DNA, 17 bp, synthetic construct
  source 1..17: mol_type = other DNA
gccctggcaggctgggg

SEQ ID NO: 117777 - DNA, 17 bp, synthetic construct
  source 1..17: mol_type = other DNA
ccctggcaggctggggt

SEQ ID NO: 117778 - DNA, 17 bp, synthetic construct
  source 1..17: mol_type = other DNA
cctggcaggctggggtc

SEQ ID NO: 117779 - DNA, 17 bp, synthetic construct
  source 1..17: mol_type = other DNA
ctggcaggctggggtcc

SEQ ID NO: 117780 - DNA, 17 bp, synthetic construct
  source 1..17: mol_type = other DNA
tggcaggctggggtccc

SEQ ID NO: 117781 - DNA, 17 bp, synthetic construct
  source 1..17: mol_type = other DNA
ggcaggctggggtccct

SEQ ID NO: 117782 - DNA, 17 bp, synthetic construct
  source 1..17: mol_type = other DNA
gcaggctggggtccctg

SEQ ID NO: 117783 - DNA, 17 bp, synthetic construct
  source 1..17: mol_type = other DNA
caggctggggtccctga

SEQ ID NO: 117784 - DNA, 17 bp, synthetic construct
  source 1..17: mol_type = other DNA
aggctggggtccctgac

SEQ ID NO: 117785 - DNA, 17 bp, synthetic construct
  source 1..17: mol_type = other DNA
ggctggggtccctgacg

SEQ ID NO: 117786 - DNA, 17 bp, synthetic construct
  source 1..17: mol_type = other DNA
gctggggtccctgacgc

SEQ ID NO: 117787 - DNA, 17 bp, synthetic construct
  source 1..17: mol_type = other DNA
ctggggtccctgacgcc

SEQ ID NO: 117788 - DNA, 17 bp, synthetic construct
  source 1..17: mol_type = other DNA
tggggtccctgacgccc

SEQ ID NO: 117789 - DNA, 17 bp, synthetic construct
  source 1..17: mol_type = other DNA
ggggtccctgacgcccc

SEQ ID NO: 117790 - DNA, 17 bp, synthetic construct
  source 1..17: mol_type = other DNA
gggtccctgacgccccg

SEQ ID NO: 117791 - DNA, 17 bp, synthetic construct
  source 1..17: mol_type = other DNA
ggtccctgacgccccga

SEQ ID NO: 117792 - DNA, 17 bp, synthetic construct
  source 1..17: mol_type = other DNA
gtccctgacgccccgat

SEQ ID NO: 117793 - DNA, 17 bp, synthetic construct
  source 1..17: mol_type = other DNA
tccctgacgccccgatg

SEQ ID NO: 117794 - DNA, 17 bp, synthetic construct
  source 1..17: mol_type = other DNA
ccctgacgccccgatgc

SEQ ID NO: 117795 - DNA, 17 bp, synthetic construct
  source 1..17: mol_type = other DNA
cctgacgccccgatgcc

SEQ ID NO: 117796 - DNA, 17 bp, synthetic construct
  source 1..17: mol_type = other DNA
ctgacgccccgatgcct

SEQ ID NO: 117797 - DNA, 17 bp, synthetic construct
  source 1..17: mol_type = other DNA
tgacgccccgatgcctc

SEQ ID NO: 117798 - DNA, 17 bp, synthetic construct
  source 1..17: mol_type = other DNA
gacgccccgatgcctcc

SEQ ID NO: 117799 - DNA, 17 bp, synthetic construct
  source 1..17: mol_type = other DNA
acgccccgatgcctccc

SEQ ID NO: 117800 - DNA, 17 bp, synthetic construct
  source 1..17: mol_type = other DNA
cgccccgatgcctccca

SEQ ID NO: 117801 - DNA, 17 bp, synthetic construct
  source 1..17: mol_type = other DNA
gccccgatgcctcccac

SEQ ID NO: 117802 - DNA, 17 bp, synthetic construct
  source 1..17: mol_type = other DNA
ccccgatgcctcccacc

SEQ ID NO: 117803 - DNA, 17 bp, synthetic construct
  source 1..17: mol_type = other DNA
cccgatgcctcccacct

SEQ ID NO: 117804 - DNA, 17 bp, synthetic construct
  source 1..17: mol_type = other DNA
ccgatgcctcccacctc

SEQ ID NO: 117805 - DNA, 17 bp, synthetic construct
  source 1..17: mol_type = other DNA
cgatgcctcccacctcc

SEQ ID NO: 117806 - DNA, 17 bp, synthetic construct
  source 1..17: mol_type = other DNA
gatgcctcccacctccg

SEQ ID NO: 117807 - DNA, 17 bp, synthetic construct
  source 1..17: mol_type = other DNA
atgcctcccacctccgc

SEQ ID NO: 117808 - DNA, 17 bp, synthetic construct
  source 1..17: mol_type = other DNA
tgcctcccacctccgca

SEQ ID NO: 117809 - DNA, 17 bp, synthetic construct
  source 1..17: mol_type = other DNA
gcctcccacctccgcag

SEQ ID NO: 117810 - DNA, 17 bp, synthetic construct
  source 1..17: mol_type = other DNA
cctcccacctccgcaga

SEQ ID NO: 117811 - DNA, 17 bp, synthetic construct
  source 1..17: mol_type = other DNA
ctcccacctccgcagaa

SEQ ID NO: 117812 - DNA, 17 bp, synthetic construct
  source 1..17: mol_type = other DNA
tcccacctccgcagaac

SEQ ID NO: 117813 - DNA, 17 bp, synthetic construct
  source 1..17: mol_type = other DNA
cccacctccgcagaact

SEQ ID NO: 117814 - DNA, 17 bp, synthetic construct
  source 1..17: mol_type = other DNA
ccacctccgcagaactg

SEQ ID NO: 117815 - DNA, 17 bp, synthetic construct
  source 1..17: mol_type = other DNA
cacctccgcagaactgc

SEQ ID NO: 117816 - DNA, 17 bp, synthetic construct
  source 1..17: mol_type = other DNA
acctccgcagaactgca

SEQ ID NO: 117817 - DNA, 17 bp, synthetic construct
  source 1..17: mol_type = other DNA
cctccgcagaactgcat

SEQ ID NO: 117818 - DNA, 17 bp, synthetic construct
  source 1..17: mol_type = other DNA
ctccgcagaactgcatg

SEQ ID NO: 117819 - DNA, 17 bp, synthetic construct
  source 1..17: mol_type = other DNA
tccgcagaactgcatgt

SEQ ID NO: 117820 - DNA, 17 bp, synthetic construct
  source 1..17: mol_type = other DNA
ccgcagaactgcatgtt

SEQ ID NO: 117821 - DNA, 17 bp, synthetic construct
  source 1..17: mol_type = other DNA
cgcagaactgcatgttt

SEQ ID NO: 117822 - DNA, 17 bp, synthetic construct
  source 1..17: mol_type = other DNA
gcagaactgcatgtttg

SEQ ID NO: 117823 - DNA, 17 bp, synthetic construct
  source 1..17: mol_type = other DNA
cagaactgcatgtttga

SEQ ID NO: 117824 - DNA, 17 bp, synthetic construct
  source 1..17: mol_type = other DNA
agaactgcatgtttgac

SEQ ID NO: 117825 - DNA, 17 bp, synthetic construct
  source 1..17: mol_type = other DNA
gaactgcatgtttgaca

SEQ ID NO: 117826 - DNA, 17 bp, synthetic construct
  source 1..17: mol_type = other DNA
aactgcatgtttgacac

SEQ ID NO: 117827 - DNA, 17 bp, synthetic construct
  source 1..17: mol_type = other DNA
actgcatgtttgacacc

SEQ ID NO: 117828 - DNA, 17 bp, synthetic construct
  source 1..17: mol_type = other DNA
ctgcatgtttgacacct

SEQ ID NO: 117829 - DNA, 17 bp, synthetic construct
  source 1..17: mol_type = other DNA
tgcatgtttgacacctg

SEQ ID NO: 117830 - DNA, 17 bp, synthetic construct
  source 1..17: mol_type = other DNA
gcatgtttgacacctgc

SEQ ID NO: 117831 - DNA, 17 bp, synthetic construct
  source 1..17: mol_type = other DNA
catgtttgacacctgca

SEQ ID NO: 117832 - DNA, 17 bp, synthetic construct
  source 1..17: mol_type = other DNA
atgtttgacacctgcaa

SEQ ID NO: 117833 - DNA, 17 bp, synthetic construct
  source 1..17: mol_type = other DNA
tgtttgacacctgcaac

SEQ ID NO: 117834 - DNA, 17 bp, synthetic construct
  source 1..17: mol_type = other DNA
gtttgacacctgcaact

SEQ ID NO: 117835 - DNA, 17 bp, synthetic construct
  source 1..17: mol_type = other DNA
tttgacacctgcaactg

SEQ ID NO: 117836 - DNA, 17 bp, synthetic construct
  source 1..17: mol_type = other DNA
ttgacacctgcaactgt

SEQ ID NO: 117837 - DNA, 17 bp, synthetic construct
  source 1..17: mol_type = other DNA
tgacacctgcaactgtg

SEQ ID NO: 117838 - DNA, 17 bp, synthetic construct
  source 1..17: mol_type = other DNA
gacacctgcaactgtga

SEQ ID NO: 117839 - DNA, 17 bp, synthetic construct
  source 1..17: mol_type = other DNA
acacctgcaactgtgag

SEQ ID NO: 117840 - DNA, 17 bp, synthetic construct
  source 1..17: mol_type = other DNA
cacctgcaactgtgagc

SEQ ID NO: 117841 - DNA, 17 bp, synthetic construct
  source 1..17: mol_type = other DNA
acctgcaactgtgagcg

SEQ ID NO: 117842 - DNA, 17 bp, synthetic construct
  source 1..17: mol_type = other DNA
cctgcaactgtgagcgg

SEQ ID NO: 117843 - DNA, 17 bp, synthetic construct
  source 1..17: mol_type = other DNA
ctgcaactgtgagcgga

SEQ ID NO: 117844 - DNA, 17 bp, synthetic construct
  source 1..17: mol_type = other DNA
tgcaactgtgagcggag

SEQ ID NO: 117845 - DNA, 17 bp, synthetic construct
  source 1..17: mol_type = other DNA
gcaactgtgagcggagc

SEQ ID NO: 117846 - DNA, 17 bp, synthetic construct
  source 1..17: mol_type = other DNA
caactgtgagcggagcg

SEQ ID NO: 117847 - DNA, 17 bp, synthetic construct
  source 1..17: mol_type = other DNA
aactgtgagcggagcga

SEQ ID NO: 117848 - DNA, 17 bp, synthetic construct
  source 1..17: mol_type = other DNA
actgtgagcggagcgag

SEQ ID NO: 117849 - DNA, 17 bp, synthetic construct
  source 1..17: mol_type = other DNA
ctgtgagcggagcgagg

SEQ ID NO: 117850 - DNA, 17 bp, synthetic construct
  source 1..17: mol_type = other DNA
tgtgagcggagcgagga

SEQ ID NO: 117851 - DNA, 17 bp, synthetic construct
  source 1..17: mol_type = other DNA
gtgagcggagcgaggac

SEQ ID NO: 117852 - DNA, 17 bp, synthetic construct
  source 1..17: mol_type = other DNA
tgagcggagcgaggact

SEQ ID NO: 117853 - DNA, 17 bp, synthetic construct
  source 1..17: mol_type = other DNA
gagcggagcgaggactg

SEQ ID NO: 117854 - DNA, 17 bp, synthetic construct
  source 1..17: mol_type = other DNA
agcggagcgaggactgc

SEQ ID NO: 117855 - DNA, 17 bp, synthetic construct
  source 1..17: mol_type = other DNA
gcggagcgaggactgcc

SEQ ID NO: 117856 - DNA, 17 bp, synthetic construct
  source 1..17: mol_type = other DNA
cggagcgaggactgcct

SEQ ID NO: 117857 - DNA, 17 bp, synthetic construct
  source 1..17: mol_type = other DNA
ggagcgaggactgcctg

SEQ ID NO: 117858 - DNA, 17 bp, synthetic construct
  source 1..17: mol_type = other DNA
gagcgaggactgcctgt

SEQ ID NO: 117859 - DNA, 17 bp, synthetic construct
  source 1..17: mol_type = other DNA
agcgaggactgcctgtg

SEQ ID NO: 117860 - DNA, 17 bp, synthetic construct
  source 1..17: mol_type = other DNA
gcgaggactgcctgtgc

SEQ ID NO: 117861 - DNA, 17 bp, synthetic construct
  source 1..17: mol_type = other DNA
cgaggactgcctgtgcg

SEQ ID NO: 117862 - DNA, 17 bp, synthetic construct
  source 1..17: mol_type = other DNA
gaggactgcctgtgcgc

SEQ ID NO: 117863 - DNA, 17 bp, synthetic construct
  source 1..17: mol_type = other DNA
aggactgcctgtgcgcc

SEQ ID NO: 117864 - DNA, 17 bp, synthetic construct
  source 1..17: mol_type = other DNA
ggactgcctgtgcgccg

SEQ ID NO: 117865 - DNA, 17 bp, synthetic construct
  source 1..17: mol_type = other DNA
gactgcctgtgcgccgc

SEQ ID NO: 117866 - DNA, 17 bp, synthetic construct
  source 1..17: mol_type = other DNA
actgcctgtgcgccgcg

SEQ ID NO: 117867 - DNA, 17 bp, synthetic construct
  source 1..17: mol_type = other DNA
ctgcctgtgcgccgcgc

SEQ ID NO: 117868 - DNA, 17 bp, synthetic construct
  source 1..17: mol_type = other DNA
tgcctgtgcgccgcgct

SEQ ID NO: 117869 - DNA, 17 bp, synthetic construct
  source 1..17: mol_type = other DNA
gcctgtgcgccgcgctg

SEQ ID NO: 117870 - DNA, 17 bp, synthetic construct
  source 1..17: mol_type = other DNA
cctgtgcgccgcgctgt

SEQ ID NO: 117871 - DNA, 17 bp, synthetic construct
  source 1..17: mol_type = other DNA
ctgtgcgccgcgctgtc

SEQ ID NO: 117872 - DNA, 17 bp, synthetic construct
  source 1..17: mol_type = other DNA
tgtgcgccgcgctgtcc

SEQ ID NO: 117873 - DNA, 17 bp, synthetic construct
  source 1..17: mol_type = other DNA
gtgcgccgcgctgtcct

SEQ ID NO: 117874 - DNA, 17 bp, synthetic construct
  source 1..17: mol_type = other DNA
tgcgccgcgctgtcctc

SEQ ID NO: 117875 - DNA, 17 bp, synthetic construct
  source 1..17: mol_type = other DNA
gcgccgcgctgtcctcc

SEQ ID NO: 117876 - DNA, 17 bp, synthetic construct
  source 1..17: mol_type = other DNA
cgccgcgctgtcctcct

SEQ ID NO: 117877 - DNA, 17 bp, synthetic construct
  source 1..17: mol_type = other DNA
gccgcgctgtcctccta

SEQ ID NO: 117878 - DNA, 17 bp, synthetic construct
  source 1..17: mol_type = other DNA
ccgcgctgtcctcctat

SEQ ID NO: 117879 - DNA, 17 bp, synthetic construct
  source 1..17: mol_type = other DNA
cgcgctgtcctcctatg

SEQ ID NO: 117880 - DNA, 17 bp, synthetic construct
  source 1..17: mol_type = other DNA
gcgctgtcctcctatgt

SEQ ID NO: 117881 - DNA, 17 bp, synthetic construct
  source 1..17: mol_type = other DNA
cgctgtcctcctatgtg

SEQ ID NO: 117882 - DNA, 17 bp, synthetic construct
  source 1..17: mol_type = other DNA
gctgtcctcctatgtgc

SEQ ID NO: 117883 - DNA, 17 bp, synthetic construct
  source 1..17: mol_type = other DNA
ctgtcctcctatgtgca

SEQ ID NO: 117884 - DNA, 17 bp, synthetic construct
  source 1..17: mol_type = other DNA
tgtcctcctatgtgcac

SEQ ID NO: 117885 - DNA, 17 bp, synthetic construct
  source 1..17: mol_type = other DNA
gtcctcctatgtgcacg

SEQ ID NO: 117886 - DNA, 17 bp, synthetic construct
  source 1..17: mol_type = other DNA
tcctcctatgtgcacgc

SEQ ID NO: 117887 - DNA, 17 bp, synthetic construct
  source 1..17: mol_type = other DNA
cctcctatgtgcacgcc

SEQ ID NO: 117888 - DNA, 17 bp, synthetic construct
  source 1..17: mol_type = other DNA
ctcctatgtgcacgcct

SEQ ID NO: 117889 - DNA, 17 bp, synthetic construct
  source 1..17: mol_type = other DNA
tcctatgtgcacgcctg

SEQ ID NO: 117890 - DNA, 17 bp, synthetic construct
  source 1..17: mol_type = other DNA
cctatgtgcacgcctgt

SEQ ID NO: 117891 - DNA, 17 bp, synthetic construct
  source 1..17: mol_type = other DNA
ctatgtgcacgcctgtg

SEQ ID NO: 117892 - DNA, 17 bp, synthetic construct
  source 1..17: mol_type = other DNA
tatgtgcacgcctgtgc

SEQ ID NO: 117893 - DNA, 17 bp, synthetic construct
  source 1..17: mol_type = other DNA
atgtgcacgcctgtgcc

SEQ ID NO: 117894 - DNA, 17 bp, synthetic construct
  source 1..17: mol_type = other DNA
tgtgcacgcctgtgccg

SEQ ID NO: 117895 - DNA, 17 bp, synthetic construct
  source 1..17: mol_type = other DNA
gtgcacgcctgtgccgc

SEQ ID NO: 117896 - DNA, 17 bp, synthetic construct
  source 1..17: mol_type = other DNA
tgcacgcctgtgccgcc

SEQ ID NO: 117897 - DNA, 17 bp, synthetic construct
  source 1..17: mol_type = other DNA
gcacgcctgtgccgcca

SEQ ID NO: 117898 - DNA, 17 bp, synthetic construct
  source 1..17: mol_type = other DNA
cacgcctgtgccgccaa

SEQ ID NO: 117899 - DNA, 17 bp, synthetic construct
  source 1..17: mol_type = other DNA
acgcctgtgccgccaag

SEQ ID NO: 117900 - DNA, 17 bp, synthetic construct
  source 1..17: mol_type = other DNA
cgcctgtgccgccaagg

SEQ ID NO: 117901 - DNA, 17 bp, synthetic construct
  source 1..17: mol_type = other DNA
gcctgtgccgccaaggg

SEQ ID NO: 117902 - DNA, 17 bp, synthetic construct
  source 1..17: mol_type = other DNA
cctgtgccgccaagggc

SEQ ID NO: 117903 - DNA, 17 bp, synthetic construct
  source 1..17: mol_type = other DNA
ctgtgccgccaagggcg

SEQ ID NO: 117904 - DNA, 17 bp, synthetic construct
  source 1..17: mol_type = other DNA
tgtgccgccaagggcgt

SEQ ID NO: 117905 - DNA, 17 bp, synthetic construct
  source 1..17: mol_type = other DNA
gtgccgccaagggcgta

SEQ ID NO: 117906 - DNA, 17 bp, synthetic construct
  source 1..17: mol_type = other DNA
tgccgccaagggcgtac

SEQ ID NO: 117907 - DNA, 17 bp, synthetic construct
  source 1..17: mol_type = other DNA
gccgccaagggcgtaca

SEQ ID NO: 117908 - DNA, 17 bp, synthetic construct
  source 1..17: mol_type = other DNA
ccgccaagggcgtacag

SEQ ID NO: 117909 - DNA, 17 bp, synthetic construct
  source 1..17: mol_type = other DNA
cgccaagggcgtacagc

SEQ ID NO: 117910 - DNA, 17 bp, synthetic construct
  source 1..17: mol_type = other DNA
gccaagggcgtacagct

SEQ ID NO: 117911 - DNA, 17 bp, synthetic construct
  source 1..17: mol_type = other DNA
ccaagggcgtacagctc

SEQ ID NO: 117912 - DNA, 17 bp, synthetic construct
  source 1..17: mol_type = other DNA
caagggcgtacagctca

SEQ ID NO: 117913 - DNA, 17 bp, synthetic construct
  source 1..17: mol_type = other DNA
aagggcgtacagctcag

SEQ ID NO: 117914 - DNA, 17 bp, synthetic construct
  source 1..17: mol_type = other DNA
agggcgtacagctcagc

SEQ ID NO: 117915 - DNA, 17 bp, synthetic construct
  source 1..17: mol_type = other DNA
gggcgtacagctcagcg

SEQ ID NO: 117916 - DNA, 17 bp, synthetic construct
  source 1..17: mol_type = other DNA
ggcgtacagctcagcga

SEQ ID NO: 117917 - DNA, 17 bp, synthetic construct
  source 1..17: mol_type = other DNA
gcgtacagctcagcgac

SEQ ID NO: 117918 - DNA, 17 bp, synthetic construct
  source 1..17: mol_type = other DNA
cgtacagctcagcgact

SEQ ID NO: 117919 - DNA, 17 bp, synthetic construct
  source 1..17: mol_type = other DNA
gtacagctcagcgactg

SEQ ID NO: 117920 - DNA, 17 bp, synthetic construct
  source 1..17: mol_type = other DNA
tacagctcagcgactgg

SEQ ID NO: 117921 - DNA, 17 bp, synthetic construct
  source 1..17: mol_type = other DNA
acagctcagcgactgga

SEQ ID NO: 117922 - DNA, 17 bp, synthetic construct
  source 1..17: mol_type = other DNA
cagctcagcgactggag

SEQ ID NO: 117923 - DNA, 17 bp, synthetic construct
  source 1..17: mol_type = other DNA
agctcagcgactggagg

SEQ ID NO: 117924 - DNA, 17 bp, synthetic construct
  source 1..17: mol_type = other DNA
gctcagcgactggaggg

SEQ ID NO: 117925 - DNA, 17 bp, synthetic construct
  source 1..17: mol_type = other DNA
ctcagcgactggaggga

SEQ ID NO: 117926 - DNA, 17 bp, synthetic construct
  source 1..17: mol_type = other DNA
tcagcgactggagggac

SEQ ID NO: 117927 - DNA, 17 bp, synthetic construct
  source 1..17: mol_type = other DNA
cagcgactggagggacg

SEQ ID NO: 117928 - DNA, 17 bp, synthetic construct
  source 1..17: mol_type = other DNA
agcgactggagggacgg

SEQ ID NO: 117929 - DNA, 17 bp, synthetic construct
  source 1..17: mol_type = other DNA
gcgactggagggacggc

SEQ ID NO: 117930 - DNA, 17 bp, synthetic construct
  source 1..17: mol_type = other DNA
cgactggagggacggcg

SEQ ID NO: 117931 - DNA, 17 bp, synthetic construct
  source 1..17: mol_type = other DNA
gactggagggacggcgt

SEQ ID NO: 117932 - DNA, 17 bp, synthetic construct
  source 1..17: mol_type = other DNA
actggagggacggcgtc

SEQ ID NO: 117933 - DNA, 17 bp, synthetic construct
  source 1..17: mol_type = other DNA
ctggagggacggcgtct

SEQ ID NO: 117934 - DNA, 17 bp, synthetic construct
  source 1..17: mol_type = other DNA
tggagggacggcgtctg

SEQ ID NO: 117935 - DNA, 17 bp, synthetic construct
  source 1..17: mol_type = other DNA
ggagggacggcgtctgc

SEQ ID NO: 117936 - DNA, 17 bp, synthetic construct
  source 1..17: mol_type = other DNA
gagggacggcgtctgca

SEQ ID NO: 117937 - DNA, 17 bp, synthetic construct
  source 1..17: mol_type = other DNA
agggacggcgtctgcag

SEQ ID NO: 117938 - DNA, 17 bp, synthetic construct
  source 1..17: mol_type = other DNA
gggacggcgtctgcagt

SEQ ID NO: 117939 - DNA, 17 bp, synthetic construct
  source 1..17: mol_type = other DNA
ggacggcgtctgcagtg

SEQ ID NO: 117940 - DNA, 17 bp, synthetic construct
  source 1..17: mol_type = other DNA
gacggcgtctgcagtga

SEQ ID NO: 117941 - DNA, 17 bp, synthetic construct
  source 1..17: mol_type = other DNA
acggcgtctgcagtgag

SEQ ID NO: 117942 - DNA, 17 bp, synthetic construct
  source 1..17: mol_type = other DNA
cggcgtctgcagtgagt

SEQ ID NO: 117943 - DNA, 17 bp, synthetic construct
  source 1..17: mol_type = other DNA
ggcgtctgcagtgagtg

SEQ ID NO: 117944 - DNA, 17 bp, synthetic construct
  source 1..17: mol_type = other DNA
gcgtctgcagtgagtgc

SEQ ID NO: 117945 - DNA, 17 bp, synthetic construct
  source 1..17: mol_type = other DNA
cgtctgcagtgagtgcc

SEQ ID NO: 117946 - DNA, 17 bp, synthetic construct
  source 1..17: mol_type = other DNA
gtctgcagtgagtgccc

SEQ ID NO: 117947 - DNA, 17 bp, synthetic construct
  source 1..17: mol_type = other DNA
tctgcagtgagtgccca

SEQ ID NO: 117948 - DNA, 17 bp, synthetic construct
  source 1..17: mol_type = other DNA
ctgcagtgagtgcccac

SEQ ID NO: 117949 - DNA, 17 bp, synthetic construct
  source 1..17: mol_type = other DNA
tgcagtgagtgcccacg

SEQ ID NO: 117950 - DNA, 17 bp, synthetic construct
  source 1..17: mol_type = other DNA
gcagtgagtgcccacgc

SEQ ID NO: 117951 - DNA, 17 bp, synthetic construct
  source 1..17: mol_type = other DNA
cagtgagtgcccacgct

SEQ ID NO: 117952 - DNA, 17 bp, synthetic construct
  source 1..17: mol_type = other DNA
agtgagtgcccacgctg

SEQ ID NO: 117953 - DNA, 17 bp, synthetic construct
  source 1..17: mol_type = other DNA
gtgagtgcccacgctgg

SEQ ID NO: 117954 - DNA, 17 bp, synthetic construct
  source 1..17: mol_type = other DNA
tgagtgcccacgctggg

SEQ ID NO: 117955 - DNA, 17 bp, synthetic construct
  source 1..17: mol_type = other DNA
gagtgcccacgctgggg

SEQ ID NO: 117956 - DNA, 17 bp, synthetic construct
  source 1..17: mol_type = other DNA
agtgcccacgctggggg

SEQ ID NO: 117957 - DNA, 17 bp, synthetic construct
  source 1..17: mol_type = other DNA
gtgcccacgctgggggt

SEQ ID NO: 117958 - DNA, 17 bp, synthetic construct
  source 1..17: mol_type = other DNA
tgcccacgctgggggtg

SEQ ID NO: 117959 - DNA, 17 bp, synthetic construct
  source 1..17: mol_type = other DNA
gcccacgctgggggtgg

SEQ ID NO: 117960 - DNA, 17 bp, synthetic construct
  source 1..17: mol_type = other DNA
cccacgctgggggtggg

SEQ ID NO: 117961 - DNA, 17 bp, synthetic construct
  source 1..17: mol_type = other DNA
ccacgctgggggtggga

SEQ ID NO: 117962 - DNA, 17 bp, synthetic construct
  source 1..17: mol_type = other DNA
cacgctgggggtgggat

SEQ ID NO: 117963 - DNA, 17 bp, synthetic construct
  source 1..17: mol_type = other DNA
acgctgggggtgggatg

SEQ ID NO: 117964 - DNA, 17 bp, synthetic construct
  source 1..17: mol_type = other DNA
cgctgggggtgggatgt

SEQ ID NO: 117965 - DNA, 17 bp, synthetic construct
  source 1..17: mol_type = other DNA
gctgggggtgggatgtg

SEQ ID NO: 117966 - DNA, 17 bp, synthetic construct
  source 1..17: mol_type = other DNA
ctgggggtgggatgtgt

SEQ ID NO: 117967 - DNA, 17 bp, synthetic construct
  source 1..17: mol_type = other DNA
tgggggtgggatgtgtc

SEQ ID NO: 117968 - DNA, 17 bp, synthetic construct
  source 1..17: mol_type = other DNA
gggggtgggatgtgtcc

SEQ ID NO: 117969 - DNA, 17 bp, synthetic construct
  source 1..17: mol_type = other DNA
ggggtgggatgtgtcca

SEQ ID NO: 117970 - DNA, 17 bp, synthetic construct
  source 1..17: mol_type = other DNA
gggtgggatgtgtccac

SEQ ID NO: 117971 - DNA, 17 bp, synthetic construct
  source 1..17: mol_type = other DNA
ggtgggatgtgtccaca

SEQ ID NO: 117972 - DNA, 17 bp, synthetic construct
  source 1..17: mol_type = other DNA
gtgggatgtgtccacac

SEQ ID NO: 117973 - DNA, 17 bp, synthetic construct
  source 1..17: mol_type = other DNA
tgggatgtgtccacacc

SEQ ID NO: 117974 - DNA, 17 bp, synthetic construct
  source 1..17: mol_type = other DNA
gggatgtgtccacaccg

SEQ ID NO: 117975 - DNA, 17 bp, synthetic construct
  source 1..17: mol_type = other DNA
ggatgtgtccacaccgc

SEQ ID NO: 117976 - DNA, 17 bp, synthetic construct
  source 1..17: mol_type = other DNA
gatgtgtccacaccgcg

SEQ ID NO: 117977 - DNA, 17 bp, synthetic construct
  source 1..17: mol_type = other DNA
atgtgtccacaccgcgt

SEQ ID NO: 117978 - DNA, 17 bp, synthetic construct
  source 1..17: mol_type = other DNA
tgtgtccacaccgcgtg

SEQ ID NO: 117979 - DNA, 17 bp, synthetic construct
  source 1..17: mol_type = other DNA
gtgtccacaccgcgtgg

SEQ ID NO: 117980 - DNA, 17 bp, synthetic construct
  source 1..17: mol_type = other DNA
tgtccacaccgcgtggg

SEQ ID NO: 117981 - DNA, 17 bp, synthetic construct
  source 1..17: mol_type = other DNA
gtccacaccgcgtgggg

SEQ ID NO: 117982 - DNA, 17 bp, synthetic construct
  source 1..17: mol_type = other DNA
tccacaccgcgtggggg

SEQ ID NO: 117983 - DNA, 17 bp, synthetic construct
  source 1..17: mol_type = other DNA
ccacaccgcgtgggggt

SEQ ID NO: 117984 - DNA, 17 bp, synthetic construct
  source 1..17: mol_type = other DNA
cacaccgcgtgggggtg

SEQ ID NO: 117985 - DNA, 17 bp, synthetic construct
  source 1..17: mol_type = other DNA
acaccgcgtgggggtgc

SEQ ID NO: 117986 - DNA, 17 bp, synthetic construct
  source 1..17: mol_type = other DNA
caccgcgtgggggtgcg

SEQ ID NO: 117987 - DNA, 17 bp, synthetic construct
  source 1..17: mol_type = other DNA
accgcgtgggggtgcgg

SEQ ID NO: 117988 - DNA, 17 bp, synthetic construct
  source 1..17: mol_type = other DNA
ccgcgtgggggtgcggg

SEQ ID NO: 117989 - DNA, 17 bp, synthetic construct
  source 1..17: mol_type = other DNA
cgcgtgggggtgcgggg

SEQ ID NO: 117990 - DNA, 17 bp, synthetic construct
  source 1..17: mol_type = other DNA
gcgtgggggtgcggggg

SEQ ID NO: 117991 - DNA, 17 bp, synthetic construct
  source 1..17: mol_type = other DNA
cgtgggggtgcggggga

SEQ ID NO: 117992 - DNA, 17 bp, synthetic construct
  source 1..17: mol_type = other DNA
gtgggggtgcgggggac

SEQ ID NO: 117993 - DNA, 17 bp, synthetic construct
  source 1..17: mol_type = other DNA
tgggggtgcgggggacc

SEQ ID NO: 117994 - DNA, 17 bp, synthetic construct
  source 1..17: mol_type = other DNA
gggggtgcgggggaccc

SEQ ID NO: 117995 - DNA, 17 bp, synthetic construct
  source 1..17: mol_type = other DNA
ggggtgcgggggaccct

SEQ ID NO: 117996 - DNA, 17 bp, synthetic construct
  source 1..17: mol_type = other DNA
gggtgcgggggaccctg

SEQ ID NO: 117997 - DNA, 17 bp, synthetic construct
  source 1..17: mol_type = other DNA
ggtgcgggggaccctgg

SEQ ID NO: 117998 - DNA, 17 bp, synthetic construct
  source 1..17: mol_type = other DNA
gtgcgggggaccctggc

SEQ ID NO: 117999 - DNA, 17 bp, synthetic construct
  source 1..17: mol_type = other DNA
tgcgggggaccctggcc

SEQ ID NO: 118000 - DNA, 17 bp, synthetic construct
  source 1..17: mol_type = other DNA
gcgggggaccctggccg

SEQ ID NO: 118001 - DNA, 17 bp, synthetic construct
  source 1..17: mol_type = other DNA
cgggggaccctggccgg

SEQ ID NO: 118002 - DNA, 17 bp, synthetic construct
  source 1..17: mol_type = other DNA
gggggaccctggccggc

SEQ ID NO: 118003 - DNA, 17 bp, synthetic construct
  source 1..17: mol_type = other DNA
ggggaccctggccggca

SEQ ID NO: 118004 - DNA, 17 bp, synthetic construct
  source 1..17: mol_type = other DNA
gggaccctggccggcag

SEQ ID NO: 118005 - DNA, 17 bp, synthetic construct
  source 1..17: mol_type = other DNA
ggaccctggccggcagc

SEQ ID NO: 118006 - DNA, 17 bp, synthetic construct
  source 1..17: mol_type = other DNA
gaccctggccggcagca

SEQ ID NO: 118007 - DNA, 17 bp, synthetic construct
  source 1..17: mol_type = other DNA
accctggccggcagcag

SEQ ID NO: 118008 - DNA, 17 bp, synthetic construct
  source 1..17: mol_type = other DNA
ccctggccggcagcagc

SEQ ID NO: 118009 - DNA, 17 bp, synthetic construct
  source 1..17: mol_type = other DNA
cctggccggcagcagcc

SEQ ID NO: 118010 - DNA, 17 bp, synthetic construct
  source 1..17: mol_type = other DNA
ctggccggcagcagccg

SEQ ID NO: 118011 - DNA, 17 bp, synthetic construct
  source 1..17: mol_type = other DNA
tggccggcagcagccgt

SEQ ID NO: 118012 - DNA, 17 bp, synthetic construct
  source 1..17: mol_type = other DNA
ggccggcagcagccgtc

SEQ ID NO: 118013 - DNA, 17 bp, synthetic construct
  source 1..17: mol_type = other DNA
gccggcagcagccgtca

SEQ ID NO: 118014 - DNA, 17 bp, synthetic construct
  source 1..17: mol_type = other DNA
ccggcagcagccgtcac

SEQ ID NO: 118015 - DNA, 17 bp, synthetic construct
  source 1..17: mol_type = other DNA
cggcagcagccgtcact

SEQ ID NO: 118016 - DNA, 17 bp, synthetic construct
  source 1..17: mol_type = other DNA
ggcagcagccgtcactc

SEQ ID NO: 118017 - DNA, 17 bp, synthetic construct
  source 1..17: mol_type = other DNA
gcagcagccgtcactca

SEQ ID NO: 118018 - DNA, 17 bp, synthetic construct
  source 1..17: mol_type = other DNA
cagcagccgtcactcac

SEQ ID NO: 118019 - DNA, 17 bp, synthetic construct
  source 1..17: mol_type = other DNA
agcagccgtcactcaca

SEQ ID NO: 118020 - DNA, 17 bp, synthetic construct
  source 1..17: mol_type = other DNA
gcagccgtcactcacac

SEQ ID NO: 118021 - DNA, 17 bp, synthetic construct
  source 1..17: mol_type = other DNA
cagccgtcactcacacg

SEQ ID NO: 118022 - DNA, 17 bp, synthetic construct
  source 1..17: mol_type = other DNA
agccgtcactcacacgg

SEQ ID NO: 118023 - DNA, 17 bp, synthetic construct
  source 1..17: mol_type = other DNA
gccgtcactcacacggt

SEQ ID NO: 118024 - DNA, 17 bp, synthetic construct
  source 1..17: mol_type = other DNA
ccgtcactcacacggtt

SEQ ID NO: 118025 - DNA, 17 bp, synthetic construct
  source 1..17: mol_type = other DNA
cgtcactcacacggttc

SEQ ID NO: 118026 - DNA, 17 bp, synthetic construct
  source 1..17: mol_type = other DNA
gtcactcacacggttct

SEQ ID NO: 118027 - DNA, 17 bp, synthetic construct
  source 1..17: mol_type = other DNA
tcactcacacggttctc

SEQ ID NO: 118028 - DNA, 17 bp, synthetic construct
  source 1..17: mol_type = other DNA
cactcacacggttctca

SEQ ID NO: 118029 - DNA, 17 bp, synthetic construct
  source 1..17: mol_type = other DNA
actcacacggttctcag

SEQ ID NO: 118030 - DNA, 17 bp, synthetic construct
  source 1..17: mol_type = other DNA
ctcacacggttctcagc

SEQ ID NO: 118031 - DNA, 17 bp, synthetic construct
  source 1..17: mol_type = other DNA
tcacacggttctcagcc

SEQ ID NO: 118032 - DNA, 17 bp, synthetic construct
  source 1..17: mol_type = other DNA
cacacggttctcagccc

SEQ ID NO: 118033 - DNA, 17 bp, synthetic construct
  source 1..17: mol_type = other DNA
acacggttctcagccca

SEQ ID NO: 118034 - DNA, 17 bp, synthetic construct
  source 1..17: mol_type = other DNA
cacggttctcagcccag

SEQ ID NO: 118035 - DNA, 17 bp, synthetic construct
  source 1..17: mol_type = other DNA
acggttctcagcccaga

SEQ ID NO: 118036 - DNA, 17 bp, synthetic construct
  source 1..17: mol_type = other DNA
cggttctcagcccagag

SEQ ID NO: 118037 - DNA, 17 bp, synthetic construct
  source 1..17: mol_type = other DNA
ggttctcagcccagagc

SEQ ID NO: 118038 - DNA, 17 bp, synthetic construct
  source 1..17: mol_type = other DNA
gttctcagcccagagct

SEQ ID NO: 118039 - DNA, 17 bp, synthetic construct
  source 1..17: mol_type = other DNA
ttctcagcccagagctt

SEQ ID NO: 118040 - DNA, 17 bp, synthetic construct
  source 1..17: mol_type = other DNA
tctcagcccagagcttt

SEQ ID NO: 118041 - DNA, 17 bp, synthetic construct
  source 1..17: mol_type = other DNA
ctcagcccagagctttg

SEQ ID NO: 118042 - DNA, 17 bp, synthetic construct
  source 1..17: mol_type = other DNA
tcagcccagagctttgc

SEQ ID NO: 118043 - DNA, 17 bp, synthetic construct
  source 1..17: mol_type = other DNA
cagcccagagctttgca

SEQ ID NO: 118044 - DNA, 17 bp, synthetic construct
  source 1..17: mol_type = other DNA
agcccagagctttgcac

SEQ ID NO: 118045 - DNA, 17 bp, synthetic construct
  source 1..17: mol_type = other DNA
gcccagagctttgcact

SEQ ID NO: 118046 - DNA, 17 bp, synthetic construct
  source 1..17: mol_type = other DNA
cccagagctttgcactt

SEQ ID NO: 118047 - DNA, 17 bp, synthetic construct
  source 1..17: mol_type = other DNA
ccagagctttgcacttc

SEQ ID NO: 118048 - DNA, 17 bp, synthetic construct
  source 1..17: mol_type = other DNA
cagagctttgcacttcc

SEQ ID NO: 118049 - DNA, 17 bp, synthetic construct
  source 1..17: mol_type = other DNA
agagctttgcacttcct

SEQ ID NO: 118050 - DNA, 17 bp, synthetic construct
  source 1..17: mol_type = other DNA
gagctttgcacttcctc

SEQ ID NO: 118051 - DNA, 17 bp, synthetic construct
  source 1..17: mol_type = other DNA
agctttgcacttcctca

SEQ ID NO: 118052 - DNA, 17 bp, synthetic construct
  source 1..17: mol_type = other DNA
gctttgcacttcctcat

SEQ ID NO: 118053 - DNA, 17 bp, synthetic construct
  source 1..17: mol_type = other DNA
ctttgcacttcctcatc

SEQ ID NO: 118054 - DNA, 17 bp, synthetic construct
  source 1..17: mol_type = other DNA
tttgcacttcctcatcc

SEQ ID NO: 118055 - DNA, 17 bp, synthetic construct
  source 1..17: mol_type = other DNA
ttgcacttcctcatccc

SEQ ID NO: 118056 - DNA, 17 bp, synthetic construct
  source 1..17: mol_type = other DNA
tgcacttcctcatccca

SEQ ID NO: 118057 - DNA, 17 bp, synthetic construct
  source 1..17: mol_type = other DNA
gcacttcctcatcccag

SEQ ID NO: 118058 - DNA, 17 bp, synthetic construct
  source 1..17: mol_type = other DNA
cacttcctcatcccagc

SEQ ID NO: 118059 - DNA, 17 bp, synthetic construct
  source 1..17: mol_type = other DNA
acttcctcatcccagcc

SEQ ID NO: 118060 - DNA, 17 bp, synthetic construct
  source 1..17: mol_type = other DNA
cttcctcatcccagcct

SEQ ID NO: 118061 - DNA, 17 bp, synthetic construct
  source 1..17: mol_type = other DNA
ttcctcatcccagcctc

SEQ ID NO: 118062 - DNA, 17 bp, synthetic construct
  source 1..17: mol_type = other DNA
tcctcatcccagcctcg

SEQ ID NO: 118063 - DNA, 17 bp, synthetic construct
  source 1..17: mol_type = other DNA
cctcatcccagcctcgc

SEQ ID NO: 118064 - DNA, 17 bp, synthetic construct
  source 1..17: mol_type = other DNA
ctcatcccagcctcgca

SEQ ID NO: 118065 - DNA, 17 bp, synthetic construct
  source 1..17: mol_type = other DNA
tcatcccagcctcgcaa

SEQ ID NO: 118066 - DNA, 17 bp, synthetic construct
  source 1..17: mol_type = other DNA
catcccagcctcgcaag

SEQ ID NO: 118067 - DNA, 17 bp, synthetic construct
  source 1..17: mol_type = other DNA
atcccagcctcgcaaga

SEQ ID NO: 118068 - DNA, 17 bp, synthetic construct
  source 1..17: mol_type = other DNA
tcccagcctcgcaagaa

SEQ ID NO: 118069 - DNA, 17 bp, synthetic construct
  source 1..17: mol_type = other DNA
cccagcctcgcaagaac

SEQ ID NO: 118070 - DNA, 17 bp, synthetic construct
  source 1..17: mol_type = other DNA
ccagcctcgcaagaacc

SEQ ID NO: 118071 - DNA, 17 bp, synthetic construct
  source 1..17: mol_type = other DNA
cagcctcgcaagaacct

SEQ ID NO: 118072 - DNA, 17 bp, synthetic construct
  source 1..17: mol_type = other DNA
agcctcgcaagaacctc

SEQ ID NO: 118073 - DNA, 17 bp, synthetic construct
  source 1..17: mol_type = other DNA
gcctcgcaagaacctca

SEQ ID NO: 118074 - DNA, 17 bp, synthetic construct
  source 1..17: mol_type = other DNA
cctcgcaagaacctcat

SEQ ID NO: 118075 - DNA, 17 bp, synthetic construct
  source 1..17: mol_type = other DNA
ctcgcaagaacctcatg

SEQ ID NO: 118076 - DNA, 17 bp, synthetic construct
  source 1..17: mol_type = other DNA
tcgcaagaacctcatgc

SEQ ID NO: 118077 - DNA, 17 bp, synthetic construct
  source 1..17: mol_type = other DNA
cgcaagaacctcatgcc

SEQ ID NO: 118078 - DNA, 17 bp, synthetic construct
  source 1..17: mol_type = other DNA
gcaagaacctcatgccc

SEQ ID NO: 118079 - DNA, 17 bp, synthetic construct
  source 1..17: mol_type = other DNA
caagaacctcatgccct

SEQ ID NO: 118080 - DNA, 17 bp, synthetic construct
  source 1..17: mol_type = other DNA
aagaacctcatgccctt

SEQ ID NO: 118081 - DNA, 17 bp, synthetic construct
  source 1..17: mol_type = other DNA
agaacctcatgcccttg

SEQ ID NO: 118082 - DNA, 17 bp, synthetic construct
  source 1..17: mol_type = other DNA
gaacctcatgcccttgc

SEQ ID NO: 118083 - DNA, 17 bp, synthetic construct
  source 1..17: mol_type = other DNA
aacctcatgcccttgcg

SEQ ID NO: 118084 - DNA, 17 bp, synthetic construct
  source 1..17: mol_type = other DNA
acctcatgcccttgcga

SEQ ID NO: 118085 - DNA, 17 bp, synthetic construct
  source 1..17: mol_type = other DNA
cctcatgcccttgcgat

SEQ ID NO: 118086 - DNA, 17 bp, synthetic construct
  source 1..17: mol_type = other DNA
ctcatgcccttgcgatc

SEQ ID NO: 118087 - DNA, 17 bp, synthetic construct
  source 1..17: mol_type = other DNA
tcatgcccttgcgatcc

SEQ ID NO: 118088 - DNA, 17 bp, synthetic construct
  source 1..17: mol_type = other DNA
catgcccttgcgatccc

SEQ ID NO: 118089 - DNA, 17 bp, synthetic construct
  source 1..17: mol_type = other DNA
atgcccttgcgatcccc

SEQ ID NO: 118090 - DNA, 17 bp, synthetic construct
  source 1..17: mol_type = other DNA
tgcccttgcgatcccca

SEQ ID NO: 118091 - DNA, 17 bp, synthetic construct
  source 1..17: mol_type = other DNA
gcccttgcgatccccac

SEQ ID NO: 118092 - DNA, 17 bp, synthetic construct
  source 1..17: mol_type = other DNA
cccttgcgatccccacg

SEQ ID NO: 118093 - DNA, 17 bp, synthetic construct
  source 1..17: mol_type = other DNA
ccttgcgatccccacgt

SEQ ID NO: 118094 - DNA, 17 bp, synthetic construct
  source 1..17: mol_type = other DNA
cttgcgatccccacgtc

SEQ ID NO: 118095 - DNA, 17 bp, synthetic construct
  source 1..17: mol_type = other DNA
ttgcgatccccacgtca

SEQ ID NO: 118096 - DNA, 17 bp, synthetic construct
  source 1..17: mol_type = other DNA
tgcgatccccacgtcac

SEQ ID NO: 118097 - DNA, 17 bp, synthetic construct
  source 1..17: mol_type = other DNA
gcgatccccacgtcaca

SEQ ID NO: 118098 - DNA, 17 bp, synthetic construct
  source 1..17: mol_type = other DNA
cgatccccacgtcacag

SEQ ID NO: 118099 - DNA, 17 bp, synthetic construct
  source 1..17: mol_type = other DNA
gatccccacgtcacaga

SEQ ID NO: 118100 - DNA, 17 bp, synthetic construct
  source 1..17: mol_type = other DNA
atccccacgtcacagac

SEQ ID NO: 118101 - DNA, 17 bp, synthetic construct
  source 1..17: mol_type = other DNA
tccccacgtcacagacg

SEQ ID NO: 118102 - DNA, 17 bp, synthetic construct
  source 1..17: mol_type = other DNA
ccccacgtcacagacgg

SEQ ID NO: 118103 - DNA, 17 bp, synthetic construct
  source 1..17: mol_type = other DNA
cccacgtcacagacggg

SEQ ID NO: 118104 - DNA, 17 bp, synthetic construct
  source 1..17: mol_type = other DNA
ccacgtcacagacgggg

SEQ ID NO: 118105 - DNA, 17 bp, synthetic construct
  source 1..17: mol_type = other DNA
cacgtcacagacgggga

SEQ ID NO: 118106 - DNA, 17 bp, synthetic construct
  source 1..17: mol_type = other DNA
acgtcacagacggggat

SEQ ID NO: 118107 - DNA, 17 bp, synthetic construct
  source 1..17: mol_type = other DNA
cgtcacagacggggatg

SEQ ID NO: 118108 - DNA, 17 bp, synthetic construct
  source 1..17: mol_type = other DNA
gtcacagacggggatgc

SEQ ID NO: 118109 - DNA, 17 bp, synthetic construct
  source 1..17: mol_type = other DNA
tcacagacggggatgct

SEQ ID NO: 118110 - DNA, 17 bp, synthetic construct
  source 1..17: mol_type = other DNA
cacagacggggatgctg

SEQ ID NO: 118111 - DNA, 17 bp, synthetic construct
  source 1..17: mol_type = other DNA
acagacggggatgctga

SEQ ID NO: 118112 - DNA, 17 bp, synthetic construct
  source 1..17: mol_type = other DNA
cagacggggatgctgag

SEQ ID NO: 118113 - DNA, 17 bp, synthetic construct
  source 1..17: mol_type = other DNA
agacggggatgctgagt

SEQ ID NO: 118114 - DNA, 17 bp, synthetic construct
  source 1..17: mol_type = other DNA
gacggggatgctgagtt

SEQ ID NO: 118115 - DNA, 17 bp, synthetic construct
  source 1..17: mol_type = other DNA
acggggatgctgagttg

SEQ ID NO: 118116 - DNA, 17 bp, synthetic construct
  source 1..17: mol_type = other DNA
cggggatgctgagttga

SEQ ID NO: 118117 - DNA, 17 bp, synthetic construct
  source 1..17: mol_type = other DNA
ggggatgctgagttgaa

SEQ ID NO: 118118 - DNA, 17 bp, synthetic construct
  source 1..17: mol_type = other DNA
gggatgctgagttgaag

SEQ ID NO: 118119 - DNA, 17 bp, synthetic construct
  source 1..17: mol_type = other DNA
ggatgctgagttgaaga

SEQ ID NO: 118120 - DNA, 17 bp, synthetic construct
  source 1..17: mol_type = other DNA
gatgctgagttgaagat

SEQ ID NO: 118121 - DNA, 17 bp, synthetic construct
  source 1..17: mol_type = other DNA
atgctgagttgaagatg

SEQ ID NO: 118122 - DNA, 17 bp, synthetic construct
  source 1..17: mol_type = other DNA
tgctgagttgaagatgg

SEQ ID NO: 118123 - DNA, 17 bp, synthetic construct
  source 1..17: mol_type = other DNA
gctgagttgaagatggg

SEQ ID NO: 118124 - DNA, 17 bp, synthetic construct
  source 1..17: mol_type = other DNA
ctgagttgaagatgggg

SEQ ID NO: 118125 - DNA, 17 bp, synthetic construct
  source 1..17: mol_type = other DNA
tgagttgaagatggggg

SEQ ID NO: 118126 - DNA, 17 bp, synthetic construct
  source 1..17: mol_type = other DNA
gagttgaagatgggggc

SEQ ID NO: 118127 - DNA, 17 bp, synthetic construct
  source 1..17: mol_type = other DNA
agttgaagatgggggct

SEQ ID NO: 118128 - DNA, 17 bp, synthetic construct
  source 1..17: mol_type = other DNA
gttgaagatgggggctg

SEQ ID NO: 118129 - DNA, 17 bp, synthetic construct
  source 1..17: mol_type = other DNA
ttgaagatgggggctgg

SEQ ID NO: 118130 - DNA, 17 bp, synthetic construct
  source 1..17: mol_type = other DNA
tgaagatgggggctggc

SEQ ID NO: 118131 - DNA, 17 bp, synthetic construct
  source 1..17: mol_type = other DNA
gaagatgggggctggcc

SEQ ID NO: 118132 - DNA, 17 bp, synthetic construct
  source 1..17: mol_type = other DNA
aagatgggggctggcca

SEQ ID NO: 118133 - DNA, 17 bp, synthetic construct
  source 1..17: mol_type = other DNA
agatgggggctggccag

SEQ ID NO: 118134 - DNA, 17 bp, synthetic construct
  source 1..17: mol_type = other DNA
gatgggggctggccagg

SEQ ID NO: 118135 - DNA, 17 bp, synthetic construct
  source 1..17: mol_type = other DNA
atgggggctggccaggc

SEQ ID NO: 118136 - DNA, 17 bp, synthetic construct
  source 1..17: mol_type = other DNA
tgggggctggccaggct

SEQ ID NO: 118137 - DNA, 17 bp, synthetic construct
  source 1..17: mol_type = other DNA
gggggctggccaggctg

SEQ ID NO: 118138 - DNA, 17 bp, synthetic construct
  source 1..17: mol_type = other DNA
ggggctggccaggctgc

SEQ ID NO: 118139 - DNA, 17 bp, synthetic construct
  source 1..17: mol_type = other DNA
gggctggccaggctgct

SEQ ID NO: 118140 - DNA, 17 bp, synthetic construct
  source 1..17: mol_type = other DNA
ggctggccaggctgctc

SEQ ID NO: 118141 - DNA, 17 bp, synthetic construct
  source 1..17: mol_type = other DNA
gctggccaggctgctcg

SEQ ID NO: 118142 - DNA, 17 bp, synthetic construct
  source 1..17: mol_type = other DNA
ctggccaggctgctcgg

SEQ ID NO: 118143 - DNA, 17 bp, synthetic construct
  source 1..17: mol_type = other DNA
tggccaggctgctcggc

SEQ ID NO: 118144 - DNA, 17 bp, synthetic construct
  source 1..17: mol_type = other DNA
ggccaggctgctcggcc

SEQ ID NO: 118145 - DNA, 17 bp, synthetic construct
  source 1..17: mol_type = other DNA
gccaggctgctcggccg

SEQ ID NO: 118146 - DNA, 17 bp, synthetic construct
  source 1..17: mol_type = other DNA
ccaggctgctcggccgc

SEQ ID NO: 118147 - DNA, 17 bp, synthetic construct
  source 1..17: mol_type = other DNA
caggctgctcggccgct

SEQ ID NO: 118148 - DNA, 17 bp, synthetic construct
  source 1..17: mol_type = other DNA
aggctgctcggccgctg

SEQ ID NO: 118149 - DNA, 17 bp, synthetic construct
  source 1..17: mol_type = other DNA
ggctgctcggccgctga

SEQ ID NO: 118150 - DNA, 17 bp, synthetic construct
  source 1..17: mol_type = other DNA
gctgctcggccgctgac

SEQ ID NO: 118151 - DNA, 17 bp, synthetic construct
  source 1..17: mol_type = other DNA
ctgctcggccgctgacc

SEQ ID NO: 118152 - DNA, 17 bp, synthetic construct
  source 1..17: mol_type = other DNA
tgctcggccgctgacct

SEQ ID NO: 118153 - DNA, 17 bp, synthetic construct
  source 1..17: mol_type = other DNA
gctcggccgctgacctg

SEQ ID NO: 118154 - DNA, 17 bp, synthetic construct
  source 1..17: mol_type = other DNA
ctcggccgctgacctgt

SEQ ID NO: 118155 - DNA, 17 bp, synthetic construct
  source 1..17: mol_type = other DNA
tcggccgctgacctgtc

SEQ ID NO: 118156 - DNA, 17 bp, synthetic construct
  source 1..17: mol_type = other DNA
cggccgctgacctgtcc

SEQ ID NO: 118157 - DNA, 17 bp, synthetic construct
  source 1..17: mol_type = other DNA
ggccgctgacctgtccc

SEQ ID NO: 118158 - DNA, 17 bp, synthetic construct
  source 1..17: mol_type = other DNA
gccgctgacctgtcccc

SEQ ID NO: 118159 - DNA, 17 bp, synthetic construct
  source 1..17: mol_type = other DNA
ccgctgacctgtccccc

SEQ ID NO: 118160 - DNA, 17 bp, synthetic construct
  source 1..17: mol_type = other DNA
cgctgacctgtcccccc

SEQ ID NO: 118161 - DNA, 17 bp, synthetic construct
  source 1..17: mol_type = other DNA
gctgacctgtcccccct

SEQ ID NO: 118162 - DNA, 17 bp, synthetic construct
  source 1..17: mol_type = other DNA
ctgacctgtcccccctg

SEQ ID NO: 118163 - DNA, 17 bp, synthetic construct
  source 1..17: mol_type = other DNA
tgacctgtcccccctgg

SEQ ID NO: 118164 - DNA, 17 bp, synthetic construct
  source 1..17: mol_type = other DNA
gacctgtcccccctggc

SEQ ID NO: 118165 - DNA, 17 bp, synthetic construct
  source 1..17: mol_type = other DNA
acctgtcccccctggcc

SEQ ID NO: 118166 - DNA, 17 bp, synthetic construct
  source 1..17: mol_type = other DNA
cctgtcccccctggccc

SEQ ID NO: 118167 - DNA, 17 bp, synthetic construct
  source 1..17: mol_type = other DNA
ctgtcccccctggcccc

SEQ ID NO: 118168 - DNA, 17 bp, synthetic construct
  source 1..17: mol_type = other DNA
tgtcccccctggcccca

SEQ ID NO: 118169 - DNA, 17 bp, synthetic construct
  source 1..17: mol_type = other DNA
gtcccccctggccccac

SEQ ID NO: 118170 - DNA, 17 bp, synthetic construct
  source 1..17: mol_type = other DNA
tcccccctggccccacc

SEQ ID NO: 118171 - DNA, 17 bp, synthetic construct
  source 1..17: mol_type = other DNA
cccccctggccccaccg

SEQ ID NO: 118172 - DNA, 17 bp, synthetic construct
  source 1..17: mol_type = other DNA
ccccctggccccaccga

SEQ ID NO: 118173 - DNA, 17 bp, synthetic construct
  source 1..17: mol_type = other DNA
cccctggccccaccgac

SEQ ID NO: 118174 - DNA, 17 bp, synthetic construct
  source 1..17: mol_type = other DNA
ccctggccccaccgacc

SEQ ID NO: 118175 - DNA, 17 bp, synthetic construct
  source 1..17: mol_type = other DNA
cctggccccaccgacca

SEQ ID NO: 118176 - DNA, 17 bp, synthetic construct
  source 1..17: mol_type = other DNA
ctggccccaccgaccac

SEQ ID NO: 118177 - DNA, 17 bp, synthetic construct
  source 1..17: mol_type = other DNA
tggccccaccgaccaca

SEQ ID NO: 118178 - DNA, 17 bp, synthetic construct
  source 1..17: mol_type = other DNA
ggccccaccgaccacag

SEQ ID NO: 118179 - DNA, 17 bp, synthetic construct
  source 1..17: mol_type = other DNA
gccccaccgaccacagc

SEQ ID NO: 118180 - DNA, 17 bp, synthetic construct
  source 1..17: mol_type = other DNA
ccccaccgaccacagcc

SEQ ID NO: 118181 - DNA, 17 bp, synthetic construct
  source 1..17: mol_type = other DNA
cccaccgaccacagcca

SEQ ID NO: 118182 - DNA, 17 bp, synthetic construct
  source 1..17: mol_type = other DNA
ccaccgaccacagccaa

SEQ ID NO: 118183 - DNA, 17 bp, synthetic construct
  source 1..17: mol_type = other DNA
caccgaccacagccaag

SEQ ID NO: 118184 - DNA, 17 bp, synthetic construct
  source 1..17: mol_type = other DNA
accgaccacagccaagt

SEQ ID NO: 118185 - DNA, 17 bp, synthetic construct
  source 1..17: mol_type = other DNA
ccgaccacagccaagta

SEQ ID NO: 118186 - DNA, 17 bp, synthetic construct
  source 1..17: mol_type = other DNA
cgaccacagccaagtac

SEQ ID NO: 118187 - DNA, 17 bp, synthetic construct
  source 1..17: mol_type = other DNA
gaccacagccaagtaca

SEQ ID NO: 118188 - DNA, 17 bp, synthetic construct
  source 1..17: mol_type = other DNA
accacagccaagtacat

SEQ ID NO: 118189 - DNA, 17 bp, synthetic construct
  source 1..17: mol_type = other DNA
ccacagccaagtacatg

SEQ ID NO: 118190 - DNA, 17 bp, synthetic construct
  source 1..17: mol_type = other DNA
cacagccaagtacatgc

SEQ ID NO: 118191 - DNA, 17 bp, synthetic construct
  source 1..17: mol_type = other DNA
acagccaagtacatgca

SEQ ID NO: 118192 - DNA, 17 bp, synthetic construct
  source 1..17: mol_type = other DNA
cagccaagtacatgcag

SEQ ID NO: 118193 - DNA, 17 bp, synthetic construct
  source 1..17: mol_type = other DNA
agccaagtacatgcaga

SEQ ID NO: 118194 - DNA, 17 bp, synthetic construct
  source 1..17: mol_type = other DNA
gccaagtacatgcagaa

SEQ ID NO: 118195 - DNA, 17 bp, synthetic construct
  source 1..17: mol_type = other DNA
ccaagtacatgcagaac

SEQ ID NO: 118196 - DNA, 17 bp, synthetic construct
  source 1..17: mol_type = other DNA
caagtacatgcagaact

SEQ ID NO: 118197 - DNA, 17 bp, synthetic construct
  source 1..17: mol_type = other DNA
aagtacatgcagaactg

SEQ ID NO: 118198 - DNA, 17 bp, synthetic construct
  source 1..17: mol_type = other DNA
agtacatgcagaactgc

SEQ ID NO: 118199 - DNA, 17 bp, synthetic construct
  source 1..17: mol_type = other DNA
gtacatgcagaactgcc

SEQ ID NO: 118200 - DNA, 17 bp, synthetic construct
  source 1..17: mol_type = other DNA
tacatgcagaactgccc

SEQ ID NO: 118201 - DNA, 17 bp, synthetic construct
  source 1..17: mol_type = other DNA
acatgcagaactgcccc

SEQ ID NO: 118202 - DNA, 17 bp, synthetic construct
  source 1..17: mol_type = other DNA
catgcagaactgcccca

SEQ ID NO: 118203 - DNA, 17 bp, synthetic construct
  source 1..17: mol_type = other DNA
atgcagaactgccccaa

SEQ ID NO: 118204 - DNA, 17 bp, synthetic construct
  source 1..17: mol_type = other DNA
tgcagaactgccccaag

SEQ ID NO: 118205 - DNA, 17 bp, synthetic construct
  source 1..17: mol_type = other DNA
gcagaactgccccaagt

SEQ ID NO: 118206 - DNA, 17 bp, synthetic construct
  source 1..17: mol_type = other DNA
cagaactgccccaagtc

SEQ ID NO: 118207 - DNA, 17 bp, synthetic construct
  source 1..17: mol_type = other DNA
agaactgccccaagtcc

SEQ ID NO: 118208 - DNA, 17 bp, synthetic construct
  source 1..17: mol_type = other DNA
gaactgccccaagtccc

SEQ ID NO: 118209 - DNA, 17 bp, synthetic construct
  source 1..17: mol_type = other DNA
aactgccccaagtccca

SEQ ID NO: 118210 - DNA, 17 bp, synthetic construct
  source 1..17: mol_type = other DNA
actgccccaagtcccag

SEQ ID NO: 118211 - DNA, 17 bp, synthetic construct
  source 1..17: mol_type = other DNA
ctgccccaagtcccagc

SEQ ID NO: 118212 - DNA, 17 bp, synthetic construct
  source 1..17: mol_type = other DNA
tgccccaagtcccagcg

SEQ ID NO: 118213 - DNA, 17 bp, synthetic construct
  source 1..17: mol_type = other DNA
gccccaagtcccagcgc

SEQ ID NO: 118214 - DNA, 17 bp, synthetic construct
  source 1..17: mol_type = other DNA
ccccaagtcccagcgct

SEQ ID NO: 118215 - DNA, 17 bp, synthetic construct
  source 1..17: mol_type = other DNA
cccaagtcccagcgcta

SEQ ID NO: 118216 - DNA, 17 bp, synthetic construct
  source 1..17: mol_type = other DNA
ccaagtcccagcgctac

SEQ ID NO: 118217 - DNA, 17 bp, synthetic construct
  source 1..17: mol_type = other DNA
caagtcccagcgctacg

SEQ ID NO: 118218 - DNA, 17 bp, synthetic construct
  source 1..17: mol_type = other DNA
aagtcccagcgctacgc

SEQ ID NO: 118219 - DNA, 17 bp, synthetic construct
  source 1..17: mol_type = other DNA
agtcccagcgctacgcc

SEQ ID NO: 118220 - DNA, 17 bp, synthetic construct
  source 1..17: mol_type = other DNA
gtcccagcgctacgcct

SEQ ID NO: 118221 - DNA, 17 bp, synthetic construct
  source 1..17: mol_type = other DNA
tcccagcgctacgccta

SEQ ID NO: 118222 - DNA, 17 bp, synthetic construct
  source 1..17: mol_type = other DNA
cccagcgctacgcctac

SEQ ID NO: 118223 - DNA, 17 bp, synthetic construct
  source 1..17: mol_type = other DNA
ccagcgctacgcctacg

SEQ ID NO: 118224 - DNA, 17 bp, synthetic construct
  source 1..17: mol_type = other DNA
cagcgctacgcctacgt

SEQ ID NO: 118225 - DNA, 17 bp, synthetic construct
  source 1..17: mol_type = other DNA
agcgctacgcctacgtg

SEQ ID NO: 118226 - DNA, 17 bp, synthetic construct
  source 1..17: mol_type = other DNA
gcgctacgcctacgtgg

SEQ ID NO: 118227 - DNA, 17 bp, synthetic construct
  source 1..17: mol_type = other DNA
cgctacgcctacgtggt

SEQ ID NO: 118228 - DNA, 17 bp, synthetic construct
  source 1..17: mol_type = other DNA
gctacgcctacgtggtg

SEQ ID NO: 118229 - DNA, 17 bp, synthetic construct
  source 1..17: mol_type = other DNA
ctacgcctacgtggtgg

SEQ ID NO: 118230 - DNA, 17 bp, synthetic construct
  source 1..17: mol_type = other DNA
tacgcctacgtggtgga

SEQ ID NO: 118231 - DNA, 17 bp, synthetic construct
  source 1..17: mol_type = other DNA
acgcctacgtggtggat

SEQ ID NO: 118232 - DNA, 17 bp, synthetic construct
  source 1..17: mol_type = other DNA
cgcctacgtggtggatg

SEQ ID NO: 118233 - DNA, 17 bp, synthetic construct
  source 1..17: mol_type = other DNA
gcctacgtggtggatgc

SEQ ID NO: 118234 - DNA, 17 bp, synthetic construct
  source 1..17: mol_type = other DNA
cctacgtggtggatgcc

SEQ ID NO: 118235 - DNA, 17 bp, synthetic construct
  source 1..17: mol_type = other DNA
ctacgtggtggatgcct

SEQ ID NO: 118236 - DNA, 17 bp, synthetic construct
  source 1..17: mol_type = other DNA
tacgtggtggatgcctg

SEQ ID NO: 118237 - DNA, 17 bp, synthetic construct
  source 1..17: mol_type = other DNA
acgtggtggatgcctgc

SEQ ID NO: 118238 - DNA, 17 bp, synthetic construct
  source 1..17: mol_type = other DNA
cgtggtggatgcctgcc

SEQ ID NO: 118239 - DNA, 17 bp, synthetic construct
  source 1..17: mol_type = other DNA
gtggtggatgcctgcca

SEQ ID NO: 118240 - DNA, 17 bp, synthetic construct
  source 1..17: mol_type = other DNA
tggtggatgcctgccag

SEQ ID NO: 118241 - DNA, 17 bp, synthetic construct
  source 1..17: mol_type = other DNA
ggtggatgcctgccagc

SEQ ID NO: 118242 - DNA, 17 bp, synthetic construct
  source 1..17: mol_type = other DNA
gtggatgcctgccagcc

SEQ ID NO: 118243 - DNA, 17 bp, synthetic construct
  source 1..17: mol_type = other DNA
tggatgcctgccagccc

SEQ ID NO: 118244 - DNA, 17 bp, synthetic construct
  source 1..17: mol_type = other DNA
ggatgcctgccagccca

SEQ ID NO: 118245 - DNA, 17 bp, synthetic construct
  source 1..17: mol_type = other DNA
gatgcctgccagcccac

SEQ ID NO: 118246 - DNA, 17 bp, synthetic construct
  source 1..17: mol_type = other DNA
atgcctgccagcccact

SEQ ID NO: 118247 - DNA, 17 bp, synthetic construct
  source 1..17: mol_type = other DNA
tgcctgccagcccactt

SEQ ID NO: 118248 - DNA, 17 bp, synthetic construct
  source 1..17: mol_type = other DNA
gcctgccagcccacttg

SEQ ID NO: 118249 - DNA, 17 bp, synthetic construct
  source 1..17: mol_type = other DNA
cctgccagcccacttgc

SEQ ID NO: 118250 - DNA, 17 bp, synthetic construct
  source 1..17: mol_type = other DNA
ctgccagcccacttgcc

SEQ ID NO: 118251 - DNA, 17 bp, synthetic construct
  source 1..17: mol_type = other DNA
tgccagcccacttgccg

SEQ ID NO: 118252 - DNA, 17 bp, synthetic construct
  source 1..17: mol_type = other DNA
gccagcccacttgccgc

SEQ ID NO: 118253 - DNA, 17 bp, synthetic construct
  source 1..17: mol_type = other DNA
ccagcccacttgccgcg

SEQ ID NO: 118254 - DNA, 17 bp, synthetic construct
  source 1..17: mol_type = other DNA
cagcccacttgccgcgg

SEQ ID NO: 118255 - DNA, 17 bp, synthetic construct
  source 1..17: mol_type = other DNA
agcccacttgccgcggc

SEQ ID NO: 118256 - DNA, 17 bp, synthetic construct
  source 1..17: mol_type = other DNA
gcccacttgccgcggcc

SEQ ID NO: 118257 - DNA, 17 bp, synthetic construct
  source 1..17: mol_type = other DNA
cccacttgccgcggcct

SEQ ID NO: 118258 - DNA, 17 bp, synthetic construct
  source 1..17: mol_type = other DNA
ccacttgccgcggcctg

SEQ ID NO: 118259 - DNA, 17 bp, synthetic construct
  source 1..17: mol_type = other DNA
cacttgccgcggcctga

SEQ ID NO: 118260 - DNA, 17 bp, synthetic construct
  source 1..17: mol_type = other DNA
acttgccgcggcctgag

SEQ ID NO: 118261 - DNA, 17 bp, synthetic construct
  source 1..17: mol_type = other DNA
cttgccgcggcctgagt

SEQ ID NO: 118262 - DNA, 17 bp, synthetic construct
  source 1..17: mol_type = other DNA
ttgccgcggcctgagtg

SEQ ID NO: 118263 - DNA, 17 bp, synthetic construct
  source 1..17: mol_type = other DNA
tgccgcggcctgagtga

SEQ ID NO: 118264 - DNA, 17 bp, synthetic construct
  source 1..17: mol_type = other DNA
gccgcggcctgagtgag

SEQ ID NO: 118265 - DNA, 17 bp, synthetic construct
  source 1..17: mol_type = other DNA
ccgcggcctgagtgagg

SEQ ID NO: 118266 - DNA, 17 bp, synthetic construct
  source 1..17: mol_type = other DNA
cgcggcctgagtgaggc

SEQ ID NO: 118267 - DNA, 17 bp, synthetic construct
  source 1..17: mol_type = other DNA
gcggcctgagtgaggcc

SEQ ID NO: 118268 - DNA, 17 bp, synthetic construct
  source 1..17: mol_type = other DNA
cggcctgagtgaggccg

SEQ ID NO: 118269 - DNA, 17 bp, synthetic construct
  source 1..17: mol_type = other DNA
ggcctgagtgaggccga

SEQ ID NO: 118270 - DNA, 17 bp, synthetic construct
  source 1..17: mol_type = other DNA
gcctgagtgaggccgac

SEQ ID NO: 118271 - DNA, 17 bp, synthetic construct
  source 1..17: mol_type = other DNA
cctgagtgaggccgacg

SEQ ID NO: 118272 - DNA, 17 bp, synthetic construct
  source 1..17: mol_type = other DNA
ctgagtgaggccgacgt

SEQ ID NO: 118273 - DNA, 17 bp, synthetic construct
  source 1..17: mol_type = other DNA
tgagtgaggccgacgtc

SEQ ID NO: 118274 - DNA, 17 bp, synthetic construct
  source 1..17: mol_type = other DNA
gagtgaggccgacgtca

SEQ ID NO: 118275 - DNA, 17 bp, synthetic construct
  source 1..17: mol_type = other DNA
agtgaggccgacgtcac

SEQ ID NO: 118276 - DNA, 17 bp, synthetic construct
  source 1..17: mol_type = other DNA
gtgaggccgacgtcacc

SEQ ID NO: 118277 - DNA, 17 bp, synthetic construct
  source 1..17: mol_type = other DNA
tgaggccgacgtcacct

SEQ ID NO: 118278 - DNA, 17 bp, synthetic construct
  source 1..17: mol_type = other DNA
gaggccgacgtcacctg

SEQ ID NO: 118279 - DNA, 17 bp, synthetic construct
  source 1..17: mol_type = other DNA
aggccgacgtcacctgc

SEQ ID NO: 118280 - DNA, 17 bp, synthetic construct
  source 1..17: mol_type = other DNA
ggccgacgtcacctgca

SEQ ID NO: 118281 - DNA, 17 bp, synthetic construct
  source 1..17: mol_type = other DNA
gccgacgtcacctgcag

SEQ ID NO: 118282 - DNA, 17 bp, synthetic construct
  source 1..17: mol_type = other DNA
ccgacgtcacctgcagc

SEQ ID NO: 118283 - DNA, 17 bp, synthetic construct
  source 1..17: mol_type = other DNA
cgacgtcacctgcagcg

SEQ ID NO: 118284 - DNA, 17 bp, synthetic construct
  source 1..17: mol_type = other DNA
gacgtcacctgcagcgt

SEQ ID NO: 118285 - DNA, 17 bp, synthetic construct
  source 1..17: mol_type = other DNA
acgtcacctgcagcgtt

SEQ ID NO: 118286 - DNA, 17 bp, synthetic construct
  source 1..17: mol_type = other DNA
cgtcacctgcagcgttt

SEQ ID NO: 118287 - DNA, 17 bp, synthetic construct
  source 1..17: mol_type = other DNA
gtcacctgcagcgtttc

SEQ ID NO: 118288 - DNA, 17 bp, synthetic construct
  source 1..17: mol_type = other DNA
tcacctgcagcgtttcc

SEQ ID NO: 118289 - DNA, 17 bp, synthetic construct
  source 1..17: mol_type = other DNA
cacctgcagcgtttcct

SEQ ID NO: 118290 - DNA, 17 bp, synthetic construct
  source 1..17: mol_type = other DNA
acctgcagcgtttcctt

SEQ ID NO: 118291 - DNA, 17 bp, synthetic construct
  source 1..17: mol_type = other DNA
cctgcagcgtttccttc

SEQ ID NO: 118292 - DNA, 17 bp, synthetic construct
  source 1..17: mol_type = other DNA
ctgcagcgtttccttcg

SEQ ID NO: 118293 - DNA, 17 bp, synthetic construct
  source 1..17: mol_type = other DNA
tgcagcgtttccttcgt

SEQ ID NO: 118294 - DNA, 17 bp, synthetic construct
  source 1..17: mol_type = other DNA
gcagcgtttccttcgtg

SEQ ID NO: 118295 - DNA, 17 bp, synthetic construct
  source 1..17: mol_type = other DNA
cagcgtttccttcgtgc

SEQ ID NO: 118296 - DNA, 17 bp, synthetic construct
  source 1..17: mol_type = other DNA
agcgtttccttcgtgcc

SEQ ID NO: 118297 - DNA, 17 bp, synthetic construct
  source 1..17: mol_type = other DNA
gcgtttccttcgtgcct

SEQ ID NO: 118298 - DNA, 17 bp, synthetic construct
  source 1..17: mol_type = other DNA
cgtttccttcgtgcctg

SEQ ID NO: 118299 - DNA, 17 bp, synthetic construct
  source 1..17: mol_type = other DNA
gtttccttcgtgcctgt

SEQ ID NO: 118300 - DNA, 17 bp, synthetic construct
  source 1..17: mol_type = other DNA
tttccttcgtgcctgtg

SEQ ID NO: 118301 - DNA, 17 bp, synthetic construct
  source 1..17: mol_type = other DNA
ttccttcgtgcctgtgg

SEQ ID NO: 118302 - DNA, 17 bp, synthetic construct
  source 1..17: mol_type = other DNA
tccttcgtgcctgtgga

SEQ ID NO: 118303 - DNA, 17 bp, synthetic construct
  source 1..17: mol_type = other DNA
ccttcgtgcctgtggac

SEQ ID NO: 118304 - DNA, 17 bp, synthetic construct
  source 1..17: mol_type = other DNA
cttcgtgcctgtggacg

SEQ ID NO: 118305 - DNA, 17 bp, synthetic construct
  source 1..17: mol_type = other DNA
ttcgtgcctgtggacgg

SEQ ID NO: 118306 - DNA, 17 bp, synthetic construct
  source 1..17: mol_type = other DNA
tcgtgcctgtggacggc

SEQ ID NO: 118307 - DNA, 17 bp, synthetic construct
  source 1..17: mol_type = other DNA
cgtgcctgtggacggct

SEQ ID NO: 118308 - DNA, 17 bp, synthetic construct
  source 1..17: mol_type = other DNA
gtgcctgtggacggctg

SEQ ID NO: 118309 - DNA, 17 bp, synthetic construct
  source 1..17: mol_type = other DNA
tgcctgtggacggctgc

SEQ ID NO: 118310 - DNA, 17 bp, synthetic construct
  source 1..17: mol_type = other DNA
gcctgtggacggctgca

SEQ ID NO: 118311 - DNA, 17 bp, synthetic construct
  source 1..17: mol_type = other DNA
cctgtggacggctgcac

SEQ ID NO: 118312 - DNA, 17 bp, synthetic construct
  source 1..17: mol_type = other DNA
ctgtggacggctgcacc

SEQ ID NO: 118313 - DNA, 17 bp, synthetic construct
  source 1..17: mol_type = other DNA
tgtggacggctgcacct

SEQ ID NO: 118314 - DNA, 17 bp, synthetic construct
  source 1..17: mol_type = other DNA
gtggacggctgcacctg

SEQ ID NO: 118315 - DNA, 17 bp, synthetic construct
  source 1..17: mol_type = other DNA
tggacggctgcacctgc

SEQ ID NO: 118316 - DNA, 17 bp, synthetic construct
  source 1..17: mol_type = other DNA
ggacggctgcacctgcc

SEQ ID NO: 118317 - DNA, 17 bp, synthetic construct
  source 1..17: mol_type = other DNA
gacggctgcacctgccc

SEQ ID NO: 118318 - DNA, 17 bp, synthetic construct
  source 1..17: mol_type = other DNA
acggctgcacctgcccc

SEQ ID NO: 118319 - DNA, 17 bp, synthetic construct
  source 1..17: mol_type = other DNA
cggctgcacctgccccg

SEQ ID NO: 118320 - DNA, 17 bp, synthetic construct
  source 1..17: mol_type = other DNA
ggctgcacctgccccgc

SEQ ID NO: 118321 - DNA, 17 bp, synthetic construct
  source 1..17: mol_type = other DNA
gctgcacctgccccgcg

SEQ ID NO: 118322 - DNA, 17 bp, synthetic construct
  source 1..17: mol_type = other DNA
ctgcacctgccccgcgg

SEQ ID NO: 118323 - DNA, 17 bp, synthetic construct
  source 1..17: mol_type = other DNA
tgcacctgccccgcggg

SEQ ID NO: 118324 - DNA, 17 bp, synthetic construct
  source 1..17: mol_type = other DNA
gcacctgccccgcgggc

SEQ ID NO: 118325 - DNA, 17 bp, synthetic construct
  source 1..17: mol_type = other DNA
cacctgccccgcgggca

SEQ ID NO: 118326 - DNA, 17 bp, synthetic construct
  source 1..17: mol_type = other DNA
acctgccccgcgggcac

SEQ ID NO: 118327 - DNA, 17 bp, synthetic construct
  source 1..17: mol_type = other DNA
cctgccccgcgggcacc

SEQ ID NO: 118328 - DNA, 17 bp, synthetic construct
  source 1..17: mol_type = other DNA
ctgccccgcgggcacct

SEQ ID NO: 118329 - DNA, 17 bp, synthetic construct
  source 1..17: mol_type = other DNA
tgccccgcgggcacctt

SEQ ID NO: 118330 - DNA, 17 bp, synthetic construct
  source 1..17: mol_type = other DNA
gccccgcgggcaccttc

SEQ ID NO: 118331 - DNA, 17 bp, synthetic construct
  source 1..17: mol_type = other DNA
ccccgcgggcaccttcc

SEQ ID NO: 118332 - DNA, 17 bp, synthetic construct
  source 1..17: mol_type = other DNA
cccgcgggcaccttcct

SEQ ID NO: 118333 - DNA, 17 bp, synthetic construct
  source 1..17: mol_type = other DNA
ccgcgggcaccttcctc

SEQ ID NO: 118334 - DNA, 17 bp, synthetic construct
  source 1..17: mol_type = other DNA
cgcgggcaccttcctca

SEQ ID NO: 118335 - DNA, 17 bp, synthetic construct
  source 1..17: mol_type = other DNA
gcgggcaccttcctcaa

SEQ ID NO: 118336 - DNA, 17 bp, synthetic construct
  source 1..17: mol_type = other DNA
cgggcaccttcctcaat

SEQ ID NO: 118337 - DNA, 17 bp, synthetic construct
  source 1..17: mol_type = other DNA
gggcaccttcctcaatg

SEQ ID NO: 118338 - DNA, 17 bp, synthetic construct
  source 1..17: mol_type = other DNA
ggcaccttcctcaatga

SEQ ID NO: 118339 - DNA, 17 bp, synthetic construct
  source 1..17: mol_type = other DNA
gcaccttcctcaatgac

SEQ ID NO: 118340 - DNA, 17 bp, synthetic construct
  source 1..17: mol_type = other DNA
caccttcctcaatgacg

SEQ ID NO: 118341 - DNA, 17 bp, synthetic construct
  source 1..17: mol_type = other DNA
accttcctcaatgacgc

SEQ ID NO: 118342 - DNA, 17 bp, synthetic construct
  source 1..17: mol_type = other DNA
ccttcctcaatgacgcg

SEQ ID NO: 118343 - DNA, 17 bp, synthetic construct
  source 1..17: mol_type = other DNA
cttcctcaatgacgcgg

SEQ ID NO: 118344 - DNA, 17 bp, synthetic construct
  source 1..17: mol_type = other DNA
ttcctcaatgacgcggg

SEQ ID NO: 118345 - DNA, 17 bp, synthetic construct
  source 1..17: mol_type = other DNA
tcctcaatgacgcgggc

SEQ ID NO: 118346 - DNA, 17 bp, synthetic construct
  source 1..17: mol_type = other DNA
cctcaatgacgcgggcg

SEQ ID NO: 118347 - DNA, 17 bp, synthetic construct
  source 1..17: mol_type = other DNA
ctcaatgacgcgggcgc

SEQ ID NO: 118348 - DNA, 17 bp, synthetic construct
  source 1..17: mol_type = other DNA
tcaatgacgcgggcgcc

SEQ ID NO: 118349 - DNA, 17 bp, synthetic construct
  source 1..17: mol_type = other DNA
caatgacgcgggcgcct

SEQ ID NO: 118350 - DNA, 17 bp, synthetic construct
  source 1..17: mol_type = other DNA
aatgacgcgggcgcctg

SEQ ID NO: 118351 - DNA, 17 bp, synthetic construct
  source 1..17: mol_type = other DNA
atgacgcgggcgcctgt

SEQ ID NO: 118352 - DNA, 17 bp, synthetic construct
  source 1..17: mol_type = other DNA
tgacgcgggcgcctgtg

SEQ ID NO: 118353 - DNA, 17 bp, synthetic construct
  source 1..17: mol_type = other DNA
gacgcgggcgcctgtgt

SEQ ID NO: 118354 - DNA, 17 bp, synthetic construct
  source 1..17: mol_type = other DNA
acgcgggcgcctgtgtg

SEQ ID NO: 118355 - DNA, 17 bp, synthetic construct
  source 1..17: mol_type = other DNA
cgcgggcgcctgtgtgc

SEQ ID NO: 118356 - DNA, 17 bp, synthetic construct
  source 1..17: mol_type = other DNA
gcgggcgcctgtgtgcc

SEQ ID NO: 118357 - DNA, 17 bp, synthetic construct
  source 1..17: mol_type = other DNA
cgggcgcctgtgtgccc

SEQ ID NO: 118358 - DNA, 17 bp, synthetic construct
  source 1..17: mol_type = other DNA
gggcgcctgtgtgcccg

SEQ ID NO: 118359 - DNA, 17 bp, synthetic construct
  source 1..17: mol_type = other DNA
ggcgcctgtgtgcccgc

SEQ ID NO: 118360 - DNA, 17 bp, synthetic construct
  source 1..17: mol_type = other DNA
gcgcctgtgtgcccgcc

SEQ ID NO: 118361 - DNA, 17 bp, synthetic construct
  source 1..17: mol_type = other DNA
cgcctgtgtgcccgccc

SEQ ID NO: 118362 - DNA, 17 bp, synthetic construct
  source 1..17: mol_type = other DNA
gcctgtgtgcccgccca

SEQ ID NO: 118363 - DNA, 17 bp, synthetic construct
  source 1..17: mol_type = other DNA
cctgtgtgcccgcccag

SEQ ID NO: 118364 - DNA, 17 bp, synthetic construct
  source 1..17: mol_type = other DNA
ctgtgtgcccgcccagg

SEQ ID NO: 118365 - DNA, 17 bp, synthetic construct
  source 1..17: mol_type = other DNA
tgtgtgcccgcccagga

SEQ ID NO: 118366 - DNA, 17 bp, synthetic construct
  source 1..17: mol_type = other DNA
gtgtgcccgcccaggag

SEQ ID NO: 118367 - DNA, 17 bp, synthetic construct
  source 1..17: mol_type = other DNA
tgtgcccgcccaggagt

SEQ ID NO: 118368 - DNA, 17 bp, synthetic construct
  source 1..17: mol_type = other DNA
gtgcccgcccaggagtg

SEQ ID NO: 118369 - DNA, 17 bp, synthetic construct
  source 1..17: mol_type = other DNA
tgcccgcccaggagtgc

SEQ ID NO: 118370 - DNA, 17 bp, synthetic construct
  source 1..17: mol_type = other DNA
gcccgcccaggagtgcc

SEQ ID NO: 118371 - DNA, 17 bp, synthetic construct
  source 1..17: mol_type = other DNA
cccgcccaggagtgccc

SEQ ID NO: 118372 - DNA, 17 bp, synthetic construct
  source 1..17: mol_type = other DNA
ccgcccaggagtgcccc

SEQ ID NO: 118373 - DNA, 17 bp, synthetic construct
  source 1..17: mol_type = other DNA
cgcccaggagtgcccct

SEQ ID NO: 118374 - DNA, 17 bp, synthetic construct
  source 1..17: mol_type = other DNA
gcccaggagtgcccctg

SEQ ID NO: 118375 - DNA, 17 bp, synthetic construct
  source 1..17: mol_type = other DNA
cccaggagtgcccctgc

SEQ ID NO: 118376 - DNA, 17 bp, synthetic construct
  source 1..17: mol_type = other DNA
ccaggagtgcccctgct

SEQ ID NO: 118377 - DNA, 17 bp, synthetic construct
  source 1..17: mol_type = other DNA
caggagtgcccctgcta

SEQ ID NO: 118378 - DNA, 17 bp, synthetic construct
  source 1..17: mol_type = other DNA
aggagtgcccctgctac

SEQ ID NO: 118379 - DNA, 17 bp, synthetic construct
  source 1..17: mol_type = other DNA
ggagtgcccctgctacg

SEQ ID NO: 118380 - DNA, 17 bp, synthetic construct
  source 1..17: mol_type = other DNA
gagtgcccctgctacgc

SEQ ID NO: 118381 - DNA, 17 bp, synthetic construct
  source 1..17: mol_type = other DNA
agtgcccctgctacgct

SEQ ID NO: 118382 - DNA, 17 bp, synthetic construct
  source 1..17: mol_type = other DNA
gtgcccctgctacgctc

SEQ ID NO: 118383 - DNA, 17 bp, synthetic construct
  source 1..17: mol_type = other DNA
tgcccctgctacgctca

SEQ ID NO: 118384 - DNA, 17 bp, synthetic construct
  source 1..17: mol_type = other DNA
gcccctgctacgctcac

SEQ ID NO: 118385 - DNA, 17 bp, synthetic construct
  source 1..17: mol_type = other DNA
cccctgctacgctcacg

SEQ ID NO: 118386 - DNA, 17 bp, synthetic construct
  source 1..17: mol_type = other DNA
ccctgctacgctcacgg

SEQ ID NO: 118387 - DNA, 17 bp, synthetic construct
  source 1..17: mol_type = other DNA
cctgctacgctcacggc

SEQ ID NO: 118388 - DNA, 17 bp, synthetic construct
  source 1..17: mol_type = other DNA
ctgctacgctcacggca

SEQ ID NO: 118389 - DNA, 17 bp, synthetic construct
  source 1..17: mol_type = other DNA
tgctacgctcacggcac

SEQ ID NO: 118390 - DNA, 17 bp, synthetic construct
  source 1..17: mol_type = other DNA
gctacgctcacggcacc

SEQ ID NO: 118391 - DNA, 17 bp, synthetic construct
  source 1..17: mol_type = other DNA
ctacgctcacggcaccg

SEQ ID NO: 118392 - DNA, 17 bp, synthetic construct
  source 1..17: mol_type = other DNA
tacgctcacggcaccgt

SEQ ID NO: 118393 - DNA, 17 bp, synthetic construct
  source 1..17: mol_type = other DNA
acgctcacggcaccgtg

SEQ ID NO: 118394 - DNA, 17 bp, synthetic construct
  source 1..17: mol_type = other DNA
cgctcacggcaccgtgc

SEQ ID NO: 118395 - DNA, 17 bp, synthetic construct
  source 1..17: mol_type = other DNA
gctcacggcaccgtgct

SEQ ID NO: 118396 - DNA, 17 bp, synthetic construct
  source 1..17: mol_type = other DNA
ctcacggcaccgtgctg

SEQ ID NO: 118397 - DNA, 17 bp, synthetic construct
  source 1..17: mol_type = other DNA
tcacggcaccgtgctgg

SEQ ID NO: 118398 - DNA, 17 bp, synthetic construct
  source 1..17: mol_type = other DNA
cacggcaccgtgctggc

SEQ ID NO: 118399 - DNA, 17 bp, synthetic construct
  source 1..17: mol_type = other DNA
acggcaccgtgctggct

SEQ ID NO: 118400 - DNA, 17 bp, synthetic construct
  source 1..17: mol_type = other DNA
cggcaccgtgctggctc

SEQ ID NO: 118401 - DNA, 17 bp, synthetic construct
  source 1..17: mol_type = other DNA
ggcaccgtgctggctcc

SEQ ID NO: 118402 - DNA, 17 bp, synthetic construct
  source 1..17: mol_type = other DNA
gcaccgtgctggctcct

SEQ ID NO: 118403 - DNA, 17 bp, synthetic construct
  source 1..17: mol_type = other DNA
caccgtgctggctcctg

SEQ ID NO: 118404 - DNA, 17 bp, synthetic construct
  source 1..17: mol_type = other DNA
accgtgctggctcctgg

SEQ ID NO: 118405 - DNA, 17 bp, synthetic construct
  source 1..17: mol_type = other DNA
ccgtgctggctcctgga

SEQ ID NO: 118406 - DNA, 17 bp, synthetic construct
  source 1..17: mol_type = other DNA
cgtgctggctcctggag

SEQ ID NO: 118407 - DNA, 17 bp, synthetic construct
  source 1..17: mol_type = other DNA
gtgctggctcctggaga

SEQ ID NO: 118408 - DNA, 17 bp, synthetic construct
  source 1..17: mol_type = other DNA
tgctggctcctggagag

SEQ ID NO: 118409 - DNA, 17 bp, synthetic construct
  source 1..17: mol_type = other DNA
gctggctcctggagagg

SEQ ID NO: 118410 - DNA, 17 bp, synthetic construct
  source 1..17: mol_type = other DNA
ctggctcctggagaggt

SEQ ID NO: 118411 - DNA, 17 bp, synthetic construct
  source 1..17: mol_type = other DNA
tggctcctggagaggtg

SEQ ID NO: 118412 - DNA, 17 bp, synthetic construct
  source 1..17: mol_type = other DNA
ggctcctggagaggtgg

SEQ ID NO: 118413 - DNA, 17 bp, synthetic construct
  source 1..17: mol_type = other DNA
gctcctggagaggtggt

SEQ ID NO: 118414 - DNA, 17 bp, synthetic construct
  source 1..17: mol_type = other DNA
ctcctggagaggtggtg

SEQ ID NO: 118415 - DNA, 17 bp, synthetic construct
  source 1..17: mol_type = other DNA
tcctggagaggtggtgc

SEQ ID NO: 118416 - DNA, 17 bp, synthetic construct
  source 1..17: mol_type = other DNA
cctggagaggtggtgca

SEQ ID NO: 118417 - DNA, 17 bp, synthetic construct
  source 1..17: mol_type = other DNA
ctggagaggtggtgcac

SEQ ID NO: 118418 - DNA, 17 bp, synthetic construct
  source 1..17: mol_type = other DNA
tggagaggtggtgcacg

SEQ ID NO: 118419 - DNA, 17 bp, synthetic construct
  source 1..17: mol_type = other DNA
ggagaggtggtgcacga

SEQ ID NO: 118420 - DNA, 17 bp, synthetic construct
  source 1..17: mol_type = other DNA
gagaggtggtgcacgac

SEQ ID NO: 118421 - DNA, 17 bp, synthetic construct
  source 1..17: mol_type = other DNA
agaggtggtgcacgacg

SEQ ID NO: 118422 - DNA, 17 bp, synthetic construct
  source 1..17: mol_type = other DNA
gaggtggtgcacgacga

SEQ ID NO: 118423 - DNA, 17 bp, synthetic construct
  source 1..17: mol_type = other DNA
aggtggtgcacgacgag

SEQ ID NO: 118424 - DNA, 17 bp, synthetic construct
  source 1..17: mol_type = other DNA
ggtggtgcacgacgagg

SEQ ID NO: 118425 - DNA, 17 bp, synthetic construct
  source 1..17: mol_type = other DNA
gtggtgcacgacgaggg

SEQ ID NO: 118426 - DNA, 17 bp, synthetic construct
  source 1..17: mol_type = other DNA
tggtgcacgacgagggc

SEQ ID NO: 118427 - DNA, 17 bp, synthetic construct
  source 1..17: mol_type = other DNA
ggtgcacgacgagggcg

SEQ ID NO: 118428 - DNA, 17 bp, synthetic construct
  source 1..17: mol_type = other DNA
gtgcacgacgagggcgc

SEQ ID NO: 118429 - DNA, 17 bp, synthetic construct
  source 1..17: mol_type = other DNA
tgcacgacgagggcgcc

SEQ ID NO: 118430 - DNA, 17 bp, synthetic construct
  source 1..17: mol_type = other DNA
gcacgacgagggcgccg

SEQ ID NO: 118431 - DNA, 17 bp, synthetic construct
  source 1..17: mol_type = other DNA
cacgacgagggcgccgt

SEQ ID NO: 118432 - DNA, 17 bp, synthetic construct
  source 1..17: mol_type = other DNA
acgacgagggcgccgtg

SEQ ID NO: 118433 - DNA, 17 bp, synthetic construct
  source 1..17: mol_type = other DNA
cgacgagggcgccgtgt

SEQ ID NO: 118434 - DNA, 17 bp, synthetic construct
  source 1..17: mol_type = other DNA
gacgagggcgccgtgtg

SEQ ID NO: 118435 - DNA, 17 bp, synthetic construct
  source 1..17: mol_type = other DNA
acgagggcgccgtgtgg

SEQ ID NO: 118436 - DNA, 17 bp, synthetic construct
  source 1..17: mol_type = other DNA
cgagggcgccgtgtggt

SEQ ID NO: 118437 - DNA, 17 bp, synthetic construct
  source 1..17: mol_type = other DNA
gagggcgccgtgtggta

SEQ ID NO: 118438 - DNA, 17 bp, synthetic construct
  source 1..17: mol_type = other DNA
agggcgccgtgtggtaa

SEQ ID NO: 118439 - DNA, 17 bp, synthetic construct
  source 1..17: mol_type = other DNA
gggcgccgtgtggtaag

SEQ ID NO: 118440 - DNA, 17 bp, synthetic construct
  source 1..17: mol_type = other DNA
ggcgccgtgtggtaagg

SEQ ID NO: 118441 - DNA, 17 bp, synthetic construct
  source 1..17: mol_type = other DNA
gcgccgtgtggtaaggg

SEQ ID NO: 118442 - DNA, 17 bp, synthetic construct
  source 1..17: mol_type = other DNA
cgccgtgtggtaagggt

SEQ ID NO: 118443 - DNA, 17 bp, synthetic construct
  source 1..17: mol_type = other DNA
gccgtgtggtaagggtc

SEQ ID NO: 118444 - DNA, 17 bp, synthetic construct
  source 1..17: mol_type = other DNA
ccgtgtggtaagggtct

SEQ ID NO: 118445 - DNA, 17 bp, synthetic construct
  source 1..17: mol_type = other DNA
cgtgtggtaagggtctg

SEQ ID NO: 118446 - DNA, 17 bp, synthetic construct
  source 1..17: mol_type = other DNA
gtgtggtaagggtctgg

SEQ ID NO: 118447 - DNA, 17 bp, synthetic construct
  source 1..17: mol_type = other DNA
tgtggtaagggtctggg

SEQ ID NO: 118448 - DNA, 17 bp, synthetic construct
  source 1..17: mol_type = other DNA
gtggtaagggtctgggg

SEQ ID NO: 118449 - DNA, 17 bp, synthetic construct
  source 1..17: mol_type = other DNA
tggtaagggtctggggg

SEQ ID NO: 118450 - DNA, 17 bp, synthetic construct
  source 1..17: mol_type = other DNA
ggtaagggtctgggggg

SEQ ID NO: 118451 - DNA, 17 bp, synthetic construct
  source 1..17: mol_type = other DNA
gtaagggtctgggggga

SEQ ID NO: 118452 - DNA, 17 bp, synthetic construct
  source 1..17: mol_type = other DNA
taagggtctggggggaa

SEQ ID NO: 118453 - DNA, 17 bp, synthetic construct
  source 1..17: mol_type = other DNA
aagggtctggggggaaa

SEQ ID NO: 118454 - DNA, 17 bp, synthetic construct
  source 1..17: mol_type = other DNA
agggtctggggggaaag

SEQ ID NO: 118455 - DNA, 17 bp, synthetic construct
  source 1..17: mol_type = other DNA
gggtctggggggaaagc

SEQ ID NO: 118456 - DNA, 17 bp, synthetic construct
  source 1..17: mol_type = other DNA
ggtctggggggaaagca

SEQ ID NO: 118457 - DNA, 17 bp, synthetic construct
  source 1..17: mol_type = other DNA
gtctggggggaaagcag

SEQ ID NO: 118458 - DNA, 17 bp, synthetic construct
  source 1..17: mol_type = other DNA
tctggggggaaagcagg

SEQ ID NO: 118459 - DNA, 17 bp, synthetic construct
  source 1..17: mol_type = other DNA
ctggggggaaagcaggc

SEQ ID NO: 118460 - DNA, 17 bp, synthetic construct
  source 1..17: mol_type = other DNA
tggggggaaagcaggcc

SEQ ID NO: 118461 - DNA, 17 bp, synthetic construct
  source 1..17: mol_type = other DNA
ggggggaaagcaggccc

SEQ ID NO: 118462 - DNA, 17 bp, synthetic construct
  source 1..17: mol_type = other DNA
gggggaaagcaggcccc

SEQ ID NO: 118463 - DNA, 17 bp, synthetic construct
  source 1..17: mol_type = other DNA
ggggaaagcaggccccc

SEQ ID NO: 118464 - DNA, 17 bp, synthetic construct
  source 1..17: mol_type = other DNA
gggaaagcaggcccccc

SEQ ID NO: 118465 - DNA, 17 bp, synthetic construct
  source 1..17: mol_type = other DNA
ggaaagcaggcccccca

SEQ ID NO: 118466 - DNA, 17 bp, synthetic construct
  source 1..17: mol_type = other DNA
gaaagcaggccccccag

SEQ ID NO: 118467 - DNA, 17 bp, synthetic construct
  source 1..17: mol_type = other DNA
aaagcaggccccccagg

SEQ ID NO: 118468 - DNA, 17 bp, synthetic construct
  source 1..17: mol_type = other DNA
aagcaggccccccaggt

SEQ ID NO: 118469 - DNA, 17 bp, synthetic construct
  source 1..17: mol_type = other DNA
agcaggccccccaggtg

SEQ ID NO: 118470 - DNA, 17 bp, synthetic construct
  source 1..17: mol_type = other DNA
gcaggccccccaggtgc

SEQ ID NO: 118471 - DNA, 17 bp, synthetic construct
  source 1..17: mol_type = other DNA
caggccccccaggtgct

SEQ ID NO: 118472 - DNA, 17 bp, synthetic construct
  source 1..17: mol_type = other DNA
aggccccccaggtgctc

SEQ ID NO: 118473 - DNA, 17 bp, synthetic construct
  source 1..17: mol_type = other DNA
ggccccccaggtgctcc

SEQ ID NO: 118474 - DNA, 17 bp, synthetic construct
  source 1..17: mol_type = other DNA
gccccccaggtgctcct

SEQ ID NO: 118475 - DNA, 17 bp, synthetic construct
  source 1..17: mol_type = other DNA
ccccccaggtgctcctc

SEQ ID NO: 118476 - DNA, 17 bp, synthetic construct
  source 1..17: mol_type = other DNA
cccccaggtgctcctca

SEQ ID NO: 118477 - DNA, 17 bp, synthetic construct
  source 1..17: mol_type = other DNA
ccccaggtgctcctcag

SEQ ID NO: 118478 - DNA, 17 bp, synthetic construct
  source 1..17: mol_type = other DNA
cccaggtgctcctcaga

SEQ ID NO: 118479 - DNA, 17 bp, synthetic construct
  source 1..17: mol_type = other DNA
ccaggtgctcctcagag

SEQ ID NO: 118480 - DNA, 17 bp, synthetic construct
  source 1..17: mol_type = other DNA
caggtgctcctcagagc

SEQ ID NO: 118481 - DNA, 17 bp, synthetic construct
  source 1..17: mol_type = other DNA
aggtgctcctcagagcc

SEQ ID NO: 118482 - DNA, 17 bp, synthetic construct
  source 1..17: mol_type = other DNA
ggtgctcctcagagcca

SEQ ID NO: 118483 - DNA, 17 bp, synthetic construct
  source 1..17: mol_type = other DNA
gtgctcctcagagccac

SEQ ID NO: 118484 - DNA, 17 bp, synthetic construct
  source 1..17: mol_type = other DNA
tgctcctcagagccact

SEQ ID NO: 118485 - DNA, 17 bp, synthetic construct
  source 1..17: mol_type = other DNA
gctcctcagagccactt

SEQ ID NO: 118486 - DNA, 17 bp, synthetic construct
  source 1..17: mol_type = other DNA
ctcctcagagccacttc

SEQ ID NO: 118487 - DNA, 17 bp, synthetic construct
  source 1..17: mol_type = other DNA
tcctcagagccacttcc

SEQ ID NO: 118488 - DNA, 17 bp, synthetic construct
  source 1..17: mol_type = other DNA
cctcagagccacttccc

SEQ ID NO: 118489 - DNA, 17 bp, synthetic construct
  source 1..17: mol_type = other DNA
ctcagagccacttcccg

SEQ ID NO: 118490 - DNA, 17 bp, synthetic construct
  source 1..17: mol_type = other DNA
tcagagccacttcccgc

SEQ ID NO: 118491 - DNA, 17 bp, synthetic construct
  source 1..17: mol_type = other DNA
cagagccacttcccgcc

SEQ ID NO: 118492 - DNA, 17 bp, synthetic construct
  source 1..17: mol_type = other DNA
agagccacttcccgccc

SEQ ID NO: 118493 - DNA, 17 bp, synthetic construct
  source 1..17: mol_type = other DNA
gagccacttcccgccct

SEQ ID NO: 118494 - DNA, 17 bp, synthetic construct
  source 1..17: mol_type = other DNA
agccacttcccgccctc

SEQ ID NO: 118495 - DNA, 17 bp, synthetic construct
  source 1..17: mol_type = other DNA
gccacttcccgccctcc

SEQ ID NO: 118496 - DNA, 17 bp, synthetic construct
  source 1..17: mol_type = other DNA
ccacttcccgccctccc

SEQ ID NO: 118497 - DNA, 17 bp, synthetic construct
  source 1..17: mol_type = other DNA
cacttcccgccctcccc

SEQ ID NO: 118498 - DNA, 17 bp, synthetic construct
  source 1..17: mol_type = other DNA
acttcccgccctccccg

SEQ ID NO: 118499 - DNA, 17 bp, synthetic construct
  source 1..17: mol_type = other DNA
cttcccgccctccccga

SEQ ID NO: 118500 - DNA, 17 bp, synthetic construct
  source 1..17: mol_type = other DNA
ttcccgccctccccgaa

SEQ ID NO: 118501 - DNA, 17 bp, synthetic construct
  source 1..17: mol_type = other DNA
tcccgccctccccgaag

SEQ ID NO: 118502 - DNA, 17 bp, synthetic construct
  source 1..17: mol_type = other DNA
cccgccctccccgaagg

SEQ ID NO: 118503 - DNA, 17 bp, synthetic construct
  source 1..17: mol_type = other DNA
ccgccctccccgaaggc

SEQ ID NO: 118504 - DNA, 17 bp, synthetic construct
  source 1..17: mol_type = other DNA
cgccctccccgaaggct

SEQ ID NO: 118505 - DNA, 17 bp, synthetic construct
  source 1..17: mol_type = other DNA
gccctccccgaaggctt

SEQ ID NO: 118506 - DNA, 17 bp, synthetic construct
  source 1..17: mol_type = other DNA
ccctccccgaaggcttc

SEQ ID NO: 118507 - DNA, 17 bp, synthetic construct
  source 1..17: mol_type = other DNA
cctccccgaaggcttct

SEQ ID NO: 118508 - DNA, 17 bp, synthetic construct
  source 1..17: mol_type = other DNA
ctccccgaaggcttctg

SEQ ID NO: 118509 - DNA, 17 bp, synthetic construct
  source 1..17: mol_type = other DNA
tccccgaaggcttctgt

SEQ ID NO: 118510 - DNA, 17 bp, synthetic construct
  source 1..17: mol_type = other DNA
ccccgaaggcttctgtg

SEQ ID NO: 118511 - DNA, 17 bp, synthetic construct
  source 1..17: mol_type = other DNA
cccgaaggcttctgtgc

SEQ ID NO: 118512 - DNA, 17 bp, synthetic construct
  source 1..17: mol_type = other DNA
ccgaaggcttctgtgcc

SEQ ID NO: 118513 - DNA, 17 bp, synthetic construct
  source 1..17: mol_type = other DNA
cgaaggcttctgtgcct

SEQ ID NO: 118514 - DNA, 17 bp, synthetic construct
  source 1..17: mol_type = other DNA
gaaggcttctgtgcctc

SEQ ID NO: 118515 - DNA, 17 bp, synthetic construct
  source 1..17: mol_type = other DNA
aaggcttctgtgcctcc

SEQ ID NO: 118516 - DNA, 17 bp, synthetic construct
  source 1..17: mol_type = other DNA
aggcttctgtgcctccc

SEQ ID NO: 118517 - DNA, 17 bp, synthetic construct
  source 1..17: mol_type = other DNA
ggcttctgtgcctcccc

SEQ ID NO: 118518 - DNA, 17 bp, synthetic construct
  source 1..17: mol_type = other DNA
gcttctgtgcctccccc

SEQ ID NO: 118519 - DNA, 17 bp, synthetic construct
  source 1..17: mol_type = other DNA
cttctgtgcctcccccc

SEQ ID NO: 118520 - DNA, 17 bp, synthetic construct
  source 1..17: mol_type = other DNA
ttctgtgcctccccccg

SEQ ID NO: 118521 - DNA, 17 bp, synthetic construct
  source 1..17: mol_type = other DNA
tctgtgcctccccccga

SEQ ID NO: 118522 - DNA, 17 bp, synthetic construct
  source 1..17: mol_type = other DNA
ctgtgcctccccccgag

SEQ ID NO: 118523 - DNA, 17 bp, synthetic construct
  source 1..17: mol_type = other DNA
tgtgcctccccccgagg

SEQ ID NO: 118524 - DNA, 17 bp, synthetic construct
  source 1..17: mol_type = other DNA
gtgcctccccccgaggg

SEQ ID NO: 118525 - DNA, 17 bp, synthetic construct
  source 1..17: mol_type = other DNA
tgcctccccccgagggt

SEQ ID NO: 118526 - DNA, 17 bp, synthetic construct
  source 1..17: mol_type = other DNA
gcctccccccgagggtt

SEQ ID NO: 118527 - DNA, 17 bp, synthetic construct
  source 1..17: mol_type = other DNA
cctccccccgagggttc

SEQ ID NO: 118528 - DNA, 17 bp, synthetic construct
  source 1..17: mol_type = other DNA
ctccccccgagggttct

SEQ ID NO: 118529 - DNA, 17 bp, synthetic construct
  source 1..17: mol_type = other DNA
tccccccgagggttctg

SEQ ID NO: 118530 - DNA, 17 bp, synthetic construct
  source 1..17: mol_type = other DNA
ccccccgagggttctga

SEQ ID NO: 118531 - DNA, 17 bp, synthetic construct
  source 1..17: mol_type = other DNA
cccccgagggttctgag

SEQ ID NO: 118532 - DNA, 17 bp, synthetic construct
  source 1..17: mol_type = other DNA
ccccgagggttctgaga

SEQ ID NO: 118533 - DNA, 17 bp, synthetic construct
  source 1..17: mol_type = other DNA
cccgagggttctgagac

SEQ ID NO: 118534 - DNA, 17 bp, synthetic construct
  source 1..17: mol_type = other DNA
ccgagggttctgagaca

SEQ ID NO: 118535 - DNA, 17 bp, synthetic construct
  source 1..17: mol_type = other DNA
cgagggttctgagacat

SEQ ID NO: 118536 - DNA, 17 bp, synthetic construct
  source 1..17: mol_type = other DNA
gagggttctgagacatg

SEQ ID NO: 118537 - DNA, 17 bp, synthetic construct
  source 1..17: mol_type = other DNA
agggttctgagacatga

SEQ ID NO: 118538 - DNA, 17 bp, synthetic construct
  source 1..17: mol_type = other DNA
gggttctgagacatgag

SEQ ID NO: 118539 - DNA, 17 bp, synthetic construct
  source 1..17: mol_type = other DNA
ggttctgagacatgagg

SEQ ID NO: 118540 - DNA, 17 bp, synthetic construct
  source 1..17: mol_type = other DNA
gttctgagacatgaggg

SEQ ID NO: 118541 - DNA, 17 bp, synthetic construct
  source 1..17: mol_type = other DNA
ttctgagacatgagggg

SEQ ID NO: 118542 - DNA, 17 bp, synthetic construct
  source 1..17: mol_type = other DNA
tctgagacatgaggggc

SEQ ID NO: 118543 - DNA, 17 bp, synthetic construct
  source 1..17: mol_type = other DNA
ctgagacatgaggggcc

SEQ ID NO: 118544 - DNA, 17 bp, synthetic construct
  source 1..17: mol_type = other DNA
tgagacatgaggggcca

SEQ ID NO: 118545 - DNA, 17 bp, synthetic construct
  source 1..17: mol_type = other DNA
gagacatgaggggccag

SEQ ID NO: 118546 - DNA, 17 bp, synthetic construct
  source 1..17: mol_type = other DNA
agacatgaggggccagg

SEQ ID NO: 118547 - DNA, 17 bp, synthetic construct
  source 1..17: mol_type = other DNA
gacatgaggggccaggc

SEQ ID NO: 118548 - DNA, 17 bp, synthetic construct
  source 1..17: mol_type = other DNA
acatgaggggccaggct

SEQ ID NO: 118549 - DNA, 17 bp, synthetic construct
  source 1..17: mol_type = other DNA
catgaggggccaggctg

SEQ ID NO: 118550 - DNA, 17 bp, synthetic construct
  source 1..17: mol_type = other DNA
atgaggggccaggctgg

SEQ ID NO: 118551 - DNA, 17 bp, synthetic construct
  source 1..17: mol_type = other DNA
tgaggggccaggctggg

SEQ ID NO: 118552 - DNA, 17 bp, synthetic construct
  source 1..17: mol_type = other DNA
gaggggccaggctgggg

SEQ ID NO: 118553 - DNA, 17 bp, synthetic construct
  source 1..17: mol_type = other DNA
aggggccaggctgggga

SEQ ID NO: 118554 - DNA, 17 bp, synthetic construct
  source 1..17: mol_type = other DNA
ggggccaggctggggag

SEQ ID NO: 118555 - DNA, 17 bp, synthetic construct
  source 1..17: mol_type = other DNA
gggccaggctggggaga

SEQ ID NO: 118556 - DNA, 17 bp, synthetic construct
  source 1..17: mol_type = other DNA
ggccaggctggggagag

SEQ ID NO: 118557 - DNA, 17 bp, synthetic construct
  source 1..17: mol_type = other DNA
gccaggctggggagagt

SEQ ID NO: 118558 - DNA, 17 bp, synthetic construct
  source 1..17: mol_type = other DNA
ccaggctggggagagtg

SEQ ID NO: 118559 - DNA, 17 bp, synthetic construct
  source 1..17: mol_type = other DNA
caggctggggagagtgg

SEQ ID NO: 118560 - DNA, 17 bp, synthetic construct
  source 1..17: mol_type = other DNA
aggctggggagagtggg

SEQ ID NO: 118561 - DNA, 17 bp, synthetic construct
  source 1..17: mol_type = other DNA
ggctggggagagtgggg

SEQ ID NO: 118562 - DNA, 17 bp, synthetic construct
  source 1..17: mol_type = other DNA
gctggggagagtggggc

SEQ ID NO: 118563 - DNA, 17 bp, synthetic construct
  source 1..17: mol_type = other DNA
ctggggagagtggggca

SEQ ID NO: 118564 - DNA, 17 bp, synthetic construct
  source 1..17: mol_type = other DNA
tggggagagtggggcag

SEQ ID NO: 118565 - DNA, 17 bp, synthetic construct
  source 1..17: mol_type = other DNA
ggggagagtggggcagg

SEQ ID NO: 118566 - DNA, 17 bp, synthetic construct
  source 1..17: mol_type = other DNA
gggagagtggggcaggg

SEQ ID NO: 118567 - DNA, 17 bp, synthetic construct
  source 1..17: mol_type = other DNA
ggagagtggggcagggt

SEQ ID NO: 118568 - DNA, 17 bp, synthetic construct
  source 1..17: mol_type = other DNA
gagagtggggcagggtg

SEQ ID NO: 118569 - DNA, 17 bp, synthetic construct
  source 1..17: mol_type = other DNA
agagtggggcagggtgg

SEQ ID NO: 118570 - DNA, 17 bp, synthetic construct
  source 1..17: mol_type = other DNA
gagtggggcagggtgga

SEQ ID NO: 118571 - DNA, 17 bp, synthetic construct
  source 1..17: mol_type = other DNA
agtggggcagggtggac

SEQ ID NO: 118572 - DNA, 17 bp, synthetic construct
  source 1..17: mol_type = other DNA
gtggggcagggtggacc

SEQ ID NO: 118573 - DNA, 17 bp, synthetic construct
  source 1..17: mol_type = other DNA
tggggcagggtggaccc

SEQ ID NO: 118574 - DNA, 17 bp, synthetic construct
  source 1..17: mol_type = other DNA
ggggcagggtggaccca

SEQ ID NO: 118575 - DNA, 17 bp, synthetic construct
  source 1..17: mol_type = other DNA
gggcagggtggacccag

SEQ ID NO: 118576 - DNA, 17 bp, synthetic construct
  source 1..17: mol_type = other DNA
ggcagggtggacccagc

SEQ ID NO: 118577 - DNA, 17 bp, synthetic construct
  source 1..17: mol_type = other DNA
gcagggtggacccagca

SEQ ID NO: 118578 - DNA, 17 bp, synthetic construct
  source 1..17: mol_type = other DNA
cagggtggacccagcac

SEQ ID NO: 118579 - DNA, 17 bp, synthetic construct
  source 1..17: mol_type = other DNA
agggtggacccagcaca

SEQ ID NO: 118580 - DNA, 17 bp, synthetic construct
  source 1..17: mol_type = other DNA
gggtggacccagcacat

SEQ ID NO: 118581 - DNA, 17 bp, synthetic construct
  source 1..17: mol_type = other DNA
ggtggacccagcacatt

SEQ ID NO: 118582 - DNA, 17 bp, synthetic construct
  source 1..17: mol_type = other DNA
gtggacccagcacattc

SEQ ID NO: 118583 - DNA, 17 bp, synthetic construct
  source 1..17: mol_type = other DNA
tggacccagcacattct

SEQ ID NO: 118584 - DNA, 17 bp, synthetic construct
  source 1..17: mol_type = other DNA
ggacccagcacattctg

SEQ ID NO: 118585 - DNA, 17 bp, synthetic construct
  source 1..17: mol_type = other DNA
gacccagcacattctga

SEQ ID NO: 118586 - DNA, 17 bp, synthetic construct
  source 1..17: mol_type = other DNA
acccagcacattctgaa

SEQ ID NO: 118587 - DNA, 17 bp, synthetic construct
  source 1..17: mol_type = other DNA
cccagcacattctgaag

SEQ ID NO: 118588 - DNA, 17 bp, synthetic construct
  source 1..17: mol_type = other DNA
ccagcacattctgaaga

SEQ ID NO: 118589 - DNA, 17 bp, synthetic construct
  source 1..17: mol_type = other DNA
cagcacattctgaagag

SEQ ID NO: 118590 - DNA, 17 bp, synthetic construct
  source 1..17: mol_type = other DNA
agcacattctgaagaga

SEQ ID NO: 118591 - DNA, 17 bp, synthetic construct
  source 1..17: mol_type = other DNA
gcacattctgaagagaa

SEQ ID NO: 118592 - DNA, 17 bp, synthetic construct
  source 1..17: mol_type = other DNA
cacattctgaagagaaa

SEQ ID NO: 118593 - DNA, 17 bp, synthetic construct
  source 1..17: mol_type = other DNA
acattctgaagagaaaa

SEQ ID NO: 118594 - DNA, 17 bp, synthetic construct
  source 1..17: mol_type = other DNA
cattctgaagagaaaat

SEQ ID NO: 118595 - DNA, 17 bp, synthetic construct
  source 1..17: mol_type = other DNA
attctgaagagaaaatt

SEQ ID NO: 118596 - DNA, 17 bp, synthetic construct
  source 1..17: mol_type = other DNA
ttctgaagagaaaattc

SEQ ID NO: 118597 - DNA, 17 bp, synthetic construct
  source 1..17: mol_type = other DNA
tctgaagagaaaattcc

SEQ ID NO: 118598 - DNA, 17 bp, synthetic construct
  source 1..17: mol_type = other DNA
ctgaagagaaaattccc

SEQ ID NO: 118599 - DNA, 17 bp, synthetic construct
  source 1..17: mol_type = other DNA
tgaagagaaaattccca

SEQ ID NO: 118600 - DNA, 17 bp, synthetic construct
  source 1..17: mol_type = other DNA
gaagagaaaattcccag

SEQ ID NO: 118601 - DNA, 17 bp, synthetic construct
  source 1..17: mol_type = other DNA
aagagaaaattcccagc

SEQ ID NO: 118602 - DNA, 17 bp, synthetic construct
  source 1..17: mol_type = other DNA
agagaaaattcccagct

SEQ ID NO: 118603 - DNA, 17 bp, synthetic construct
  source 1..17: mol_type = other DNA
gagaaaattcccagctg

SEQ ID NO: 118604 - DNA, 17 bp, synthetic construct
  source 1..17: mol_type = other DNA
agaaaattcccagctgg

SEQ ID NO: 118605 - DNA, 17 bp, synthetic construct
  source 1..17: mol_type = other DNA
gaaaattcccagctggg

SEQ ID NO: 118606 - DNA, 17 bp, synthetic construct
  source 1..17: mol_type = other DNA
aaaattcccagctggga

SEQ ID NO: 118607 - DNA, 17 bp, synthetic construct
  source 1..17: mol_type = other DNA
aaattcccagctgggaa

SEQ ID NO: 118608 - DNA, 17 bp, synthetic construct
  source 1..17: mol_type = other DNA
aattcccagctgggaaa

SEQ ID NO: 118609 - DNA, 17 bp, synthetic construct
  source 1..17: mol_type = other DNA
attcccagctgggaaag

SEQ ID NO: 118610 - DNA, 17 bp, synthetic construct
  source 1..17: mol_type = other DNA
ttcccagctgggaaaga

SEQ ID NO: 118611 - DNA, 17 bp, synthetic construct
  source 1..17: mol_type = other DNA
tcccagctgggaaagag

SEQ ID NO: 118612 - DNA, 17 bp, synthetic construct
  source 1..17: mol_type = other DNA
cccagctgggaaagagg

SEQ ID NO: 118613 - DNA, 17 bp, synthetic construct
  source 1..17: mol_type = other DNA
ccagctgggaaagaggc

SEQ ID NO: 118614 - DNA, 17 bp, synthetic construct
  source 1..17: mol_type = other DNA
cagctgggaaagaggcc

SEQ ID NO: 118615 - DNA, 17 bp, synthetic construct
  source 1..17: mol_type = other DNA
agctgggaaagaggcca

SEQ ID NO: 118616 - DNA, 17 bp, synthetic construct
  source 1..17: mol_type = other DNA
gctgggaaagaggccag

SEQ ID NO: 118617 - DNA, 17 bp, synthetic construct
  source 1..17: mol_type = other DNA
ctgggaaagaggccagg

SEQ ID NO: 118618 - DNA, 17 bp, synthetic construct
  source 1..17: mol_type = other DNA
tgggaaagaggccagga

SEQ ID NO: 118619 - DNA, 17 bp, synthetic construct
  source 1..17: mol_type = other DNA
gggaaagaggccaggag

SEQ ID NO: 118620 - DNA, 17 bp, synthetic construct
  source 1..17: mol_type = other DNA
ggaaagaggccaggaga

SEQ ID NO: 118621 - DNA, 17 bp, synthetic construct
  source 1..17: mol_type = other DNA
gaaagaggccaggagag

SEQ ID NO: 118622 - DNA, 17 bp, synthetic construct
  source 1..17: mol_type = other DNA
aaagaggccaggagagg

SEQ ID NO: 118623 - DNA, 17 bp, synthetic construct
  source 1..17: mol_type = other DNA
aagaggccaggagagga

SEQ ID NO: 118624 - DNA, 17 bp, synthetic construct
  source 1..17: mol_type = other DNA
agaggccaggagaggag

SEQ ID NO: 118625 - DNA, 17 bp, synthetic construct
  source 1..17: mol_type = other DNA
gaggccaggagaggagg

SEQ ID NO: 118626 - DNA, 17 bp, synthetic construct
  source 1..17: mol_type = other DNA
aggccaggagaggaggt

SEQ ID NO: 118627 - DNA, 17 bp, synthetic construct
  source 1..17: mol_type = other DNA
ggccaggagaggaggtg

SEQ ID NO: 118628 - DNA, 17 bp, synthetic construct
  source 1..17: mol_type = other DNA
gccaggagaggaggtgg

SEQ ID NO: 118629 - DNA, 17 bp, synthetic construct
  source 1..17: mol_type = other DNA
ccaggagaggaggtggc

SEQ ID NO: 118630 - DNA, 17 bp, synthetic construct
  source 1..17: mol_type = other DNA
caggagaggaggtggcc

SEQ ID NO: 118631 - DNA, 17 bp, synthetic construct
  source 1..17: mol_type = other DNA
aggagaggaggtggccc

SEQ ID NO: 118632 - DNA, 17 bp, synthetic construct
  source 1..17: mol_type = other DNA
ggagaggaggtggccct

SEQ ID NO: 118633 - DNA, 17 bp, synthetic construct
  source 1..17: mol_type = other DNA
gagaggaggtggccctg

SEQ ID NO: 118634 - DNA, 17 bp, synthetic construct
  source 1..17: mol_type = other DNA
agaggaggtggccctgg

SEQ ID NO: 118635 - DNA, 17 bp, synthetic construct
  source 1..17: mol_type = other DNA
gaggaggtggccctggg

SEQ ID NO: 118636 - DNA, 17 bp, synthetic construct
  source 1..17: mol_type = other DNA
aggaggtggccctggga

SEQ ID NO: 118637 - DNA, 17 bp, synthetic construct
  source 1..17: mol_type = other DNA
ggaggtggccctgggag

SEQ ID NO: 118638 - DNA, 17 bp, synthetic construct
  source 1..17: mol_type = other DNA
gaggtggccctgggagg

SEQ ID NO: 118639 - DNA, 17 bp, synthetic construct
  source 1..17: mol_type = other DNA
aggtggccctgggagga

SEQ ID NO: 118640 - DNA, 17 bp, synthetic construct
  source 1..17: mol_type = other DNA
ggtggccctgggaggac

SEQ ID NO: 118641 - DNA, 17 bp, synthetic construct
  source 1..17: mol_type = other DNA
gtggccctgggaggaca

SEQ ID NO: 118642 - DNA, 17 bp, synthetic construct
  source 1..17: mol_type = other DNA
tggccctgggaggacac

SEQ ID NO: 118643 - DNA, 17 bp, synthetic construct
  source 1..17: mol_type = other DNA
ggccctgggaggacacc

SEQ ID NO: 118644 - DNA, 17 bp, synthetic construct
  source 1..17: mol_type = other DNA
gccctgggaggacacct

SEQ ID NO: 118645 - DNA, 17 bp, synthetic construct
  source 1..17: mol_type = other DNA
ccctgggaggacacctg

SEQ ID NO: 118646 - DNA, 17 bp, synthetic construct
  source 1..17: mol_type = other DNA
cctgggaggacacctgc

SEQ ID NO: 118647 - DNA, 17 bp, synthetic construct
  source 1..17: mol_type = other DNA
ctgggaggacacctgct

SEQ ID NO: 118648 - DNA, 17 bp, synthetic construct
  source 1..17: mol_type = other DNA
tgggaggacacctgctg

SEQ ID NO: 118649 - DNA, 17 bp, synthetic construct
  source 1..17: mol_type = other DNA
gggaggacacctgctgg

SEQ ID NO: 118650 - DNA, 17 bp, synthetic construct
  source 1..17: mol_type = other DNA
ggaggacacctgctggc

SEQ ID NO: 118651 - DNA, 17 bp, synthetic construct
  source 1..17: mol_type = other DNA
gaggacacctgctggct

SEQ ID NO: 118652 - DNA, 17 bp, synthetic construct
  source 1..17: mol_type = other DNA
aggacacctgctggctg

SEQ ID NO: 118653 - DNA, 17 bp, synthetic construct
  source 1..17: mol_type = other DNA
ggacacctgctggctgt

SEQ ID NO: 118654 - DNA, 17 bp, synthetic construct
  source 1..17: mol_type = other DNA
gacacctgctggctgtt

SEQ ID NO: 118655 - DNA, 17 bp, synthetic construct
  source 1..17: mol_type = other DNA
acacctgctggctgttc

SEQ ID NO: 118656 - DNA, 17 bp, synthetic construct
  source 1..17: mol_type = other DNA
cacctgctggctgttct

SEQ ID NO: 118657 - DNA, 17 bp, synthetic construct
  source 1..17: mol_type = other DNA
acctgctggctgttctc

SEQ ID NO: 118658 - DNA, 17 bp, synthetic construct
  source 1..17: mol_type = other DNA
cctgctggctgttctca

SEQ ID NO: 118659 - DNA, 17 bp, synthetic construct
  source 1..17: mol_type = other DNA
ctgctggctgttctcag

SEQ ID NO: 118660 - DNA, 17 bp, synthetic construct
  source 1..17: mol_type = other DNA
tgctggctgttctcagc

SEQ ID NO: 118661 - DNA, 17 bp, synthetic construct
  source 1..17: mol_type = other DNA
gctggctgttctcagct

SEQ ID NO: 118662 - DNA, 17 bp, synthetic construct
  source 1..17: mol_type = other DNA
ctggctgttctcagctg

SEQ ID NO: 118663 - DNA, 17 bp, synthetic construct
  source 1..17: mol_type = other DNA
tggctgttctcagctgg

SEQ ID NO: 118664 - DNA, 17 bp, synthetic construct
  source 1..17: mol_type = other DNA
ggctgttctcagctggg

SEQ ID NO: 118665 - DNA, 17 bp, synthetic construct
  source 1..17: mol_type = other DNA
gctgttctcagctgggt

SEQ ID NO: 118666 - DNA, 17 bp, synthetic construct
  source 1..17: mol_type = other DNA
ctgttctcagctgggtc

SEQ ID NO: 118667 - DNA, 17 bp, synthetic construct
  source 1..17: mol_type = other DNA
tgttctcagctgggtcc

SEQ ID NO: 118668 - DNA, 17 bp, synthetic construct
  source 1..17: mol_type = other DNA
gttctcagctgggtcca

SEQ ID NO: 118669 - DNA, 17 bp, synthetic construct
  source 1..17: mol_type = other DNA
ttctcagctgggtccac

SEQ ID NO: 118670 - DNA, 17 bp, synthetic construct
  source 1..17: mol_type = other DNA
tctcagctgggtccaca

SEQ ID NO: 118671 - DNA, 17 bp, synthetic construct
  source 1..17: mol_type = other DNA
ctcagctgggtccacat

SEQ ID NO: 118672 - DNA, 17 bp, synthetic construct
  source 1..17: mol_type = other DNA
tcagctgggtccacatg

SEQ ID NO: 118673 - DNA, 17 bp, synthetic construct
  source 1..17: mol_type = other DNA
cagctgggtccacatgg

SEQ ID NO: 118674 - DNA, 17 bp, synthetic construct
  source 1..17: mol_type = other DNA
agctgggtccacatggc

SEQ ID NO: 118675 - DNA, 17 bp, synthetic construct
  source 1..17: mol_type = other DNA
gctgggtccacatggca

SEQ ID NO: 118676 - DNA, 17 bp, synthetic construct
  source 1..17: mol_type = other DNA
ctgggtccacatggcag

SEQ ID NO: 118677 - DNA, 17 bp, synthetic construct
  source 1..17: mol_type = other DNA
tgggtccacatggcagc

SEQ ID NO: 118678 - DNA, 17 bp, synthetic construct
  source 1..17: mol_type = other DNA
gggtccacatggcagcc

SEQ ID NO: 118679 - DNA, 17 bp, synthetic construct
  source 1..17: mol_type = other DNA
ggtccacatggcagccc

SEQ ID NO: 118680 - DNA, 17 bp, synthetic construct
  source 1..17: mol_type = other DNA
gtccacatggcagcccc

SEQ ID NO: 118681 - DNA, 17 bp, synthetic construct
  source 1..17: mol_type = other DNA
tccacatggcagcccct

SEQ ID NO: 118682 - DNA, 17 bp, synthetic construct
  source 1..17: mol_type = other DNA
ccacatggcagcccctg

SEQ ID NO: 118683 - DNA, 17 bp, synthetic construct
  source 1..17: mol_type = other DNA
cacatggcagcccctgc

SEQ ID NO: 118684 - DNA, 17 bp, synthetic construct
  source 1..17: mol_type = other DNA
acatggcagcccctgcc

SEQ ID NO: 118685 - DNA, 17 bp, synthetic construct
  source 1..17: mol_type = other DNA
catggcagcccctgcca

SEQ ID NO: 118686 - DNA, 17 bp, synthetic construct
  source 1..17: mol_type = other DNA
atggcagcccctgccag

SEQ ID NO: 118687 - DNA, 17 bp, synthetic construct
  source 1..17: mol_type = other DNA
tggcagcccctgccagg

SEQ ID NO: 118688 - DNA, 17 bp, synthetic construct
  source 1..17: mol_type = other DNA
ggcagcccctgccagga

SEQ ID NO: 118689 - DNA, 17 bp, synthetic construct
  source 1..17: mol_type = other DNA
gcagcccctgccaggaa

SEQ ID NO: 118690 - DNA, 17 bp, synthetic construct
  source 1..17: mol_type = other DNA
cagcccctgccaggaaa

SEQ ID NO: 118691 - DNA, 17 bp, synthetic construct
  source 1..17: mol_type = other DNA
agcccctgccaggaaag

SEQ ID NO: 118692 - DNA, 17 bp, synthetic construct
  source 1..17: mol_type = other DNA
gcccctgccaggaaagg

SEQ ID NO: 118693 - DNA, 17 bp, synthetic construct
  source 1..17: mol_type = other DNA
cccctgccaggaaaggt

SEQ ID NO: 118694 - DNA, 17 bp, synthetic construct
  source 1..17: mol_type = other DNA
ccctgccaggaaaggtg

SEQ ID NO: 118695 - DNA, 17 bp, synthetic construct
  source 1..17: mol_type = other DNA
cctgccaggaaaggtgg

SEQ ID NO: 118696 - DNA, 17 bp, synthetic construct
  source 1..17: mol_type = other DNA
ctgccaggaaaggtggg

SEQ ID NO: 118697 - DNA, 17 bp, synthetic construct
  source 1..17: mol_type = other DNA
tgccaggaaaggtgggt

SEQ ID NO: 118698 - DNA, 17 bp, synthetic construct
  source 1..17: mol_type = other DNA
gccaggaaaggtgggtg

SEQ ID NO: 118699 - DNA, 17 bp, synthetic construct
  source 1..17: mol_type = other DNA
ccaggaaaggtgggtgg

SEQ ID NO: 118700 - DNA, 17 bp, synthetic construct
  source 1..17: mol_type = other DNA
caggaaaggtgggtggc

SEQ ID NO: 118701 - DNA, 17 bp, synthetic construct
  source 1..17: mol_type = other DNA
aggaaaggtgggtggcc

SEQ ID NO: 118702 - DNA, 17 bp, synthetic construct
  source 1..17: mol_type = other DNA
ggaaaggtgggtggccc

SEQ ID NO: 118703 - DNA, 17 bp, synthetic construct
  source 1..17: mol_type = other DNA
gaaaggtgggtggcccc

SEQ ID NO: 118704 - DNA, 17 bp, synthetic construct
  source 1..17: mol_type = other DNA
aaaggtgggtggccccc

SEQ ID NO: 118705 - DNA, 17 bp, synthetic construct
  source 1..17: mol_type = other DNA
aaggtgggtggccccca

SEQ ID NO: 118706 - DNA, 17 bp, synthetic construct
  source 1..17: mol_type = other DNA
aggtgggtggcccccac

SEQ ID NO: 118707 - DNA, 17 bp, synthetic construct
  source 1..17: mol_type = other DNA
ggtgggtggcccccact

SEQ ID NO: 118708 - DNA, 17 bp, synthetic construct
  source 1..17: mol_type = other DNA
gtgggtggcccccactc

SEQ ID NO: 118709 - DNA, 17 bp, synthetic construct
  source 1..17: mol_type = other DNA
tgggtggcccccactcc

SEQ ID NO: 118710 - DNA, 17 bp, synthetic construct
  source 1..17: mol_type = other DNA
gggtggcccccactccc

SEQ ID NO: 118711 - DNA, 17 bp, synthetic construct
  source 1..17: mol_type = other DNA
ggtggcccccactccca

SEQ ID NO: 118712 - DNA, 17 bp, synthetic construct
  source 1..17: mol_type = other DNA
gtggcccccactcccac

SEQ ID NO: 118713 - DNA, 17 bp, synthetic construct
  source 1..17: mol_type = other DNA
tggcccccactcccacc

SEQ ID NO: 118714 - DNA, 17 bp, synthetic construct
  source 1..17: mol_type = other DNA
ggcccccactcccaccc

SEQ ID NO: 118715 - DNA, 17 bp, synthetic construct
  source 1..17: mol_type = other DNA
gcccccactcccaccct

SEQ ID NO: 118716 - DNA, 17 bp, synthetic construct
  source 1..17: mol_type = other DNA
cccccactcccaccctg

SEQ ID NO: 118717 - DNA, 17 bp, synthetic construct
  source 1..17: mol_type = other DNA
ccccactcccaccctgg

SEQ ID NO: 118718 - DNA, 17 bp, synthetic construct
  source 1..17: mol_type = other DNA
cccactcccaccctggg

SEQ ID NO: 118719 - DNA, 17 bp, synthetic construct
  source 1..17: mol_type = other DNA
ccactcccaccctgggc

SEQ ID NO: 118720 - DNA, 17 bp, synthetic construct
  source 1..17: mol_type = other DNA
cactcccaccctgggct

SEQ ID NO: 118721 - DNA, 17 bp, synthetic construct
  source 1..17: mol_type = other DNA
actcccaccctgggctc

SEQ ID NO: 118722 - DNA, 17 bp, synthetic construct
  source 1..17: mol_type = other DNA
ctcccaccctgggctca

SEQ ID NO: 118723 - DNA, 17 bp, synthetic construct
  source 1..17: mol_type = other DNA
tcccaccctgggctcaa

SEQ ID NO: 118724 - DNA, 17 bp, synthetic construct
  source 1..17: mol_type = other DNA
cccaccctgggctcaaa

SEQ ID NO: 118725 - DNA, 17 bp, synthetic construct
  source 1..17: mol_type = other DNA
ccaccctgggctcaaag

SEQ ID NO: 118726 - DNA, 17 bp, synthetic construct
  source 1..17: mol_type = other DNA
caccctgggctcaaagg

SEQ ID NO: 118727 - DNA, 17 bp, synthetic construct
  source 1..17: mol_type = other DNA
accctgggctcaaaggc

SEQ ID NO: 118728 - DNA, 17 bp, synthetic construct
  source 1..17: mol_type = other DNA
ccctgggctcaaaggcc

SEQ ID NO: 118729 - DNA, 17 bp, synthetic construct
  source 1..17: mol_type = other DNA
cctgggctcaaaggccg

SEQ ID NO: 118730 - DNA, 17 bp, synthetic construct
  source 1..17: mol_type = other DNA
ctgggctcaaaggccgc

SEQ ID NO: 118731 - DNA, 17 bp, synthetic construct
  source 1..17: mol_type = other DNA
tgggctcaaaggccgct

SEQ ID NO: 118732 - DNA, 17 bp, synthetic construct
  source 1..17: mol_type = other DNA
gggctcaaaggccgctc

SEQ ID NO: 118733 - DNA, 17 bp, synthetic construct
  source 1..17: mol_type = other DNA
ggctcaaaggccgctcc

SEQ ID NO: 118734 - DNA, 17 bp, synthetic construct
  source 1..17: mol_type = other DNA
gctcaaaggccgctcct

SEQ ID NO: 118735 - DNA, 17 bp, synthetic construct
  source 1..17: mol_type = other DNA
ctcaaaggccgctccta

SEQ ID NO: 118736 - DNA, 17 bp, synthetic construct
  source 1..17: mol_type = other DNA
tcaaaggccgctcctaa

SEQ ID NO: 118737 - DNA, 17 bp, synthetic construct
  source 1..17: mol_type = other DNA
caaaggccgctcctaac

SEQ ID NO: 118738 - DNA, 17 bp, synthetic construct
  source 1..17: mol_type = other DNA
aaaggccgctcctaacc

SEQ ID NO: 118739 - DNA, 17 bp, synthetic construct
  source 1..17: mol_type = other DNA
aaggccgctcctaaccc

SEQ ID NO: 118740 - DNA, 17 bp, synthetic construct
  source 1..17: mol_type = other DNA
aggccgctcctaacccc

SEQ ID NO: 118741 - DNA, 17 bp, synthetic construct
  source 1..17: mol_type = other DNA
ggccgctcctaacccca

SEQ ID NO: 118742 - DNA, 17 bp, synthetic construct
  source 1..17: mol_type = other DNA
gccgctcctaaccccag

SEQ ID NO: 118743 - DNA, 17 bp, synthetic construct
  source 1..17: mol_type = other DNA
ccgctcctaaccccagg

SEQ ID NO: 118744 - DNA, 17 bp, synthetic construct
  source 1..17: mol_type = other DNA
cgctcctaaccccaggg

SEQ ID NO: 118745 - DNA, 17 bp, synthetic construct
  source 1..17: mol_type = other DNA
gctcctaaccccagggt

SEQ ID NO: 118746 - DNA, 17 bp, synthetic construct
  source 1..17: mol_type = other DNA
ctcctaaccccagggtc

SEQ ID NO: 118747 - DNA, 17 bp, synthetic construct
  source 1..17: mol_type = other DNA
tcctaaccccagggtcc

SEQ ID NO: 118748 - DNA, 17 bp, synthetic construct
  source 1..17: mol_type = other DNA
cctaaccccagggtcct

SEQ ID NO: 118749 - DNA, 17 bp, synthetic construct
  source 1..17: mol_type = other DNA
ctaaccccagggtcctg

SEQ ID NO: 118750 - DNA, 17 bp, synthetic construct
  source 1..17: mol_type = other DNA
taaccccagggtcctgg

SEQ ID NO: 118751 - DNA, 17 bp, synthetic construct
  source 1..17: mol_type = other DNA
aaccccagggtcctggc

SEQ ID NO: 118752 - DNA, 17 bp, synthetic construct
  source 1..17: mol_type = other DNA
accccagggtcctggct

SEQ ID NO: 118753 - DNA, 17 bp, synthetic construct
  source 1..17: mol_type = other DNA
ccccagggtcctggctg

SEQ ID NO: 118754 - DNA, 17 bp, synthetic construct
  source 1..17: mol_type = other DNA
cccagggtcctggctgc

SEQ ID NO: 118755 - DNA, 17 bp, synthetic construct
  source 1..17: mol_type = other DNA
ccagggtcctggctgct

SEQ ID NO: 118756 - DNA, 17 bp, synthetic construct
  source 1..17: mol_type = other DNA
cagggtcctggctgctt

SEQ ID NO: 118757 - DNA, 17 bp, synthetic construct
  source 1..17: mol_type = other DNA
agggtcctggctgcttt

SEQ ID NO: 118758 - DNA, 17 bp, synthetic construct
  source 1..17: mol_type = other DNA
gggtcctggctgctttg

SEQ ID NO: 118759 - DNA, 17 bp, synthetic construct
  source 1..17: mol_type = other DNA
ggtcctggctgctttgc

SEQ ID NO: 118760 - DNA, 17 bp, synthetic construct
  source 1..17: mol_type = other DNA
gtcctggctgctttgct

SEQ ID NO: 118761 - DNA, 17 bp, synthetic construct
  source 1..17: mol_type = other DNA
tcctggctgctttgctg

SEQ ID NO: 118762 - DNA, 17 bp, synthetic construct
  source 1..17: mol_type = other DNA
cctggctgctttgctgc

SEQ ID NO: 118763 - DNA, 17 bp, synthetic construct
  source 1..17: mol_type = other DNA
ctggctgctttgctgcc

SEQ ID NO: 118764 - DNA, 17 bp, synthetic construct
  source 1..17: mol_type = other DNA
tggctgctttgctgccc

SEQ ID NO: 118765 - DNA, 17 bp, synthetic construct
  source 1..17: mol_type = other DNA
ggctgctttgctgcccc

SEQ ID NO: 118766 - DNA, 17 bp, synthetic construct
  source 1..17: mol_type = other DNA
gctgctttgctgccccc

SEQ ID NO: 118767 - DNA, 17 bp, synthetic construct
  source 1..17: mol_type = other DNA
ctgctttgctgcccccc

SEQ ID NO: 118768 - DNA, 17 bp, synthetic construct
  source 1..17: mol_type = other DNA
tgctttgctgcccccct

SEQ ID NO: 118769 - DNA, 17 bp, synthetic construct
  source 1..17: mol_type = other DNA
gctttgctgcccccctg

SEQ ID NO: 118770 - DNA, 17 bp, synthetic construct
  source 1..17: mol_type = other DNA
ctttgctgcccccctgt

SEQ ID NO: 118771 - DNA, 17 bp, synthetic construct
  source 1..17: mol_type = other DNA
tttgctgcccccctgtg

SEQ ID NO: 118772 - DNA, 17 bp, synthetic construct
  source 1..17: mol_type = other DNA
ttgctgcccccctgtgt

SEQ ID NO: 118773 - DNA, 17 bp, synthetic construct
  source 1..17: mol_type = other DNA
tgctgcccccctgtgtg

SEQ ID NO: 118774 - DNA, 17 bp, synthetic construct
  source 1..17: mol_type = other DNA
gctgcccccctgtgtgt

SEQ ID NO: 118775 - DNA, 17 bp, synthetic construct
  source 1..17: mol_type = other DNA
ctgcccccctgtgtgta

SEQ ID NO: 118776 - DNA, 17 bp, synthetic construct
  source 1..17: mol_type = other DNA
tgcccccctgtgtgtat

SEQ ID NO: 118777 - DNA, 17 bp, synthetic construct
  source 1..17: mol_type = other DNA
gcccccctgtgtgtatt

SEQ ID NO: 118778 - DNA, 17 bp, synthetic construct
  source 1..17: mol_type = other DNA
cccccctgtgtgtattt

SEQ ID NO: 118779 - DNA, 17 bp, synthetic construct
  source 1..17: mol_type = other DNA
ccccctgtgtgtattta

SEQ ID NO: 118780 - DNA, 17 bp, synthetic construct
  source 1..17: mol_type = other DNA
cccctgtgtgtatttac

SEQ ID NO: 118781 - DNA, 17 bp, synthetic construct
  source 1..17: mol_type = other DNA
ccctgtgtgtatttacc

SEQ ID NO: 118782 - DNA, 17 bp, synthetic construct
  source 1..17: mol_type = other DNA
cctgtgtgtatttaccc

SEQ ID NO: 118783 - DNA, 17 bp, synthetic construct
  source 1..17: mol_type = other DNA
ctgtgtgtatttaccca

SEQ ID NO: 118784 - DNA, 17 bp, synthetic construct
  source 1..17: mol_type = other DNA
tgtgtgtatttacccat

SEQ ID NO: 118785 - DNA, 17 bp, synthetic construct
  source 1..17: mol_type = other DNA
gtgtgtatttacccatg

SEQ ID NO: 118786 - DNA, 17 bp, synthetic construct
  source 1..17: mol_type = other DNA
tgtgtatttacccatgt

SEQ ID NO: 118787 - DNA, 17 bp, synthetic construct
  source 1..17: mol_type = other DNA
gtgtatttacccatgtg

SEQ ID NO: 118788 - DNA, 17 bp, synthetic construct
  source 1..17: mol_type = other DNA
tgtatttacccatgtgc

SEQ ID NO: 118789 - DNA, 17 bp, synthetic construct
  source 1..17: mol_type = other DNA
gtatttacccatgtgcc

SEQ ID NO: 118790 - DNA, 17 bp, synthetic construct
  source 1..17: mol_type = other DNA
tatttacccatgtgcct

SEQ ID NO: 118791 - DNA, 17 bp, synthetic construct
  source 1..17: mol_type = other DNA
atttacccatgtgcctc

SEQ ID NO: 118792 - DNA, 17 bp, synthetic construct
  source 1..17: mol_type = other DNA
tttacccatgtgcctcc

SEQ ID NO: 118793 - DNA, 17 bp, synthetic construct
  source 1..17: mol_type = other DNA
ttacccatgtgcctcca

SEQ ID NO: 118794 - DNA, 17 bp, synthetic construct
  source 1..17: mol_type = other DNA
tacccatgtgcctccag

SEQ ID NO: 118795 - DNA, 17 bp, synthetic construct
  source 1..17: mol_type = other DNA
acccatgtgcctccagg

SEQ ID NO: 118796 - DNA, 17 bp, synthetic construct
  source 1..17: mol_type = other DNA
cccatgtgcctccaggg

SEQ ID NO: 118797 - DNA, 17 bp, synthetic construct
  source 1..17: mol_type = other DNA
ccatgtgcctccagggg

SEQ ID NO: 118798 - DNA, 17 bp, synthetic construct
  source 1..17: mol_type = other DNA
catgtgcctccagggga

SEQ ID NO: 118799 - DNA, 17 bp, synthetic construct
  source 1..17: mol_type = other DNA
atgtgcctccaggggat

SEQ ID NO: 118800 - DNA, 17 bp, synthetic construct
  source 1..17: mol_type = other DNA
tgtgcctccaggggatt

SEQ ID NO: 118801 - DNA, 17 bp, synthetic construct
  source 1..17: mol_type = other DNA
gtgcctccaggggattt

SEQ ID NO: 118802 - DNA, 17 bp, synthetic construct
  source 1..17: mol_type = other DNA
tgcctccaggggatttg

SEQ ID NO: 118803 - DNA, 17 bp, synthetic construct
  source 1..17: mol_type = other DNA
gcctccaggggatttgg

SEQ ID NO: 118804 - DNA, 17 bp, synthetic construct
  source 1..17: mol_type = other DNA
cctccaggggatttggg

SEQ ID NO: 118805 - DNA, 17 bp, synthetic construct
  source 1..17: mol_type = other DNA
ctccaggggatttgggg

SEQ ID NO: 118806 - DNA, 17 bp, synthetic construct
  source 1..17: mol_type = other DNA
tccaggggatttggggg

SEQ ID NO: 118807 - DNA, 17 bp, synthetic construct
  source 1..17: mol_type = other DNA
ccaggggatttgggggc

SEQ ID NO: 118808 - DNA, 17 bp, synthetic construct
  source 1..17: mol_type = other DNA
caggggatttgggggct

SEQ ID NO: 118809 - DNA, 17 bp, synthetic construct
  source 1..17: mol_type = other DNA
aggggatttgggggctc

SEQ ID NO: 118810 - DNA, 17 bp, synthetic construct
  source 1..17: mol_type = other DNA
ggggatttgggggctcc

SEQ ID NO: 118811 - DNA, 17 bp, synthetic construct
  source 1..17: mol_type = other DNA
gggatttgggggctccc

SEQ ID NO: 118812 - DNA, 17 bp, synthetic construct
  source 1..17: mol_type = other DNA
ggatttgggggctccca

SEQ ID NO: 118813 - DNA, 17 bp, synthetic construct
  source 1..17: mol_type = other DNA
gatttgggggctcccag

SEQ ID NO: 118814 - DNA, 17 bp, synthetic construct
  source 1..17: mol_type = other DNA
atttgggggctcccagc

SEQ ID NO: 118815 - DNA, 17 bp, synthetic construct
  source 1..17: mol_type = other DNA
tttgggggctcccagca

SEQ ID NO: 118816 - DNA, 17 bp, synthetic construct
  source 1..17: mol_type = other DNA
ttgggggctcccagcaa

SEQ ID NO: 118817 - DNA, 17 bp, synthetic construct
  source 1..17: mol_type = other DNA
tgggggctcccagcaaa

SEQ ID NO: 118818 - DNA, 17 bp, synthetic construct
  source 1..17: mol_type = other DNA
gggggctcccagcaaac

SEQ ID NO: 118819 - DNA, 17 bp, synthetic construct
  source 1..17: mol_type = other DNA
ggggctcccagcaaaca

SEQ ID NO: 118820 - DNA, 17 bp, synthetic construct
  source 1..17: mol_type = other DNA
gggctcccagcaaacac

SEQ ID NO: 118821 - DNA, 17 bp, synthetic construct
  source 1..17: mol_type = other DNA
ggctcccagcaaacaca

SEQ ID NO: 118822 - DNA, 17 bp, synthetic construct
  source 1..17: mol_type = other DNA
gctcccagcaaacacag

SEQ ID NO: 118823 - DNA, 17 bp, synthetic construct
  source 1..17: mol_type = other DNA
ctcccagcaaacacagc

SEQ ID NO: 118824 - DNA, 17 bp, synthetic construct
  source 1..17: mol_type = other DNA
tcccagcaaacacagca

SEQ ID NO: 118825 - DNA, 17 bp, synthetic construct
  source 1..17: mol_type = other DNA
cccagcaaacacagcag

SEQ ID NO: 118826 - DNA, 17 bp, synthetic construct
  source 1..17: mol_type = other DNA
ccagcaaacacagcagc

SEQ ID NO: 118827 - DNA, 17 bp, synthetic construct
  source 1..17: mol_type = other DNA
cagcaaacacagcagca

SEQ ID NO: 118828 - DNA, 17 bp, synthetic construct
  source 1..17: mol_type = other DNA
agcaaacacagcagcag

SEQ ID NO: 118829 - DNA, 17 bp, synthetic construct
  source 1..17: mol_type = other DNA
gcaaacacagcagcagg

SEQ ID NO: 118830 - DNA, 17 bp, synthetic construct
  source 1..17: mol_type = other DNA
caaacacagcagcaggc

SEQ ID NO: 118831 - DNA, 17 bp, synthetic construct
  source 1..17: mol_type = other DNA
aaacacagcagcaggca

SEQ ID NO: 118832 - DNA, 17 bp, synthetic construct
  source 1..17: mol_type = other DNA
aacacagcagcaggcac

SEQ ID NO: 118833 - DNA, 17 bp, synthetic construct
  source 1..17: mol_type = other DNA
acacagcagcaggcacc

SEQ ID NO: 118834 - DNA, 17 bp, synthetic construct
  source 1..17: mol_type = other DNA
cacagcagcaggcaccg

SEQ ID NO: 118835 - DNA, 17 bp, synthetic construct
  source 1..17: mol_type = other DNA
acagcagcaggcaccgt

SEQ ID NO: 118836 - DNA, 17 bp, synthetic construct
  source 1..17: mol_type = other DNA
cagcagcaggcaccgtc

SEQ ID NO: 118837 - DNA, 17 bp, synthetic construct
  source 1..17: mol_type = other DNA
agcagcaggcaccgtct

SEQ ID NO: 118838 - DNA, 17 bp, synthetic construct
  source 1..17: mol_type = other DNA
gcagcaggcaccgtctg

SEQ ID NO: 118839 - DNA, 17 bp, synthetic construct
  source 1..17: mol_type = other DNA
cagcaggcaccgtctgg

SEQ ID NO: 118840 - DNA, 17 bp, synthetic construct
  source 1..17: mol_type = other DNA
agcaggcaccgtctggc

SEQ ID NO: 118841 - DNA, 17 bp, synthetic construct
  source 1..17: mol_type = other DNA
gcaggcaccgtctggcc

SEQ ID NO: 118842 - DNA, 17 bp, synthetic construct
  source 1..17: mol_type = other DNA
caggcaccgtctggcct

SEQ ID NO: 118843 - DNA, 17 bp, synthetic construct
  source 1..17: mol_type = other DNA
aggcaccgtctggcctt

SEQ ID NO: 118844 - DNA, 17 bp, synthetic construct
  source 1..17: mol_type = other DNA
ggcaccgtctggcctta

SEQ ID NO: 118845 - DNA, 17 bp, synthetic construct
  source 1..17: mol_type = other DNA
gcaccgtctggccttac

SEQ ID NO: 118846 - DNA, 17 bp, synthetic construct
  source 1..17: mol_type = other DNA
caccgtctggccttaca

SEQ ID NO: 118847 - DNA, 17 bp, synthetic construct
  source 1..17: mol_type = other DNA
accgtctggccttacaa

SEQ ID NO: 118848 - DNA, 17 bp, synthetic construct
  source 1..17: mol_type = other DNA
ccgtctggccttacaag

SEQ ID NO: 118849 - DNA, 17 bp, synthetic construct
  source 1..17: mol_type = other DNA
cgtctggccttacaagg

SEQ ID NO: 118850 - DNA, 17 bp, synthetic construct
  source 1..17: mol_type = other DNA
gtctggccttacaagga

SEQ ID NO: 118851 - DNA, 17 bp, synthetic construct
  source 1..17: mol_type = other DNA
tctggccttacaaggag

SEQ ID NO: 118852 - DNA, 17 bp, synthetic construct
  source 1..17: mol_type = other DNA
ctggccttacaaggagg

SEQ ID NO: 118853 - DNA, 17 bp, synthetic construct
  source 1..17: mol_type = other DNA
tggccttacaaggaggt

SEQ ID NO: 118854 - DNA, 17 bp, synthetic construct
  source 1..17: mol_type = other DNA
ggccttacaaggaggtg

SEQ ID NO: 118855 - DNA, 17 bp, synthetic construct
  source 1..17: mol_type = other DNA
gccttacaaggaggtgg

SEQ ID NO: 118856 - DNA, 17 bp, synthetic construct
  source 1..17: mol_type = other DNA
ccttacaaggaggtggc

SEQ ID NO: 118857 - DNA, 17 bp, synthetic construct
  source 1..17: mol_type = other DNA
cttacaaggaggtggcc

SEQ ID NO: 118858 - DNA, 17 bp, synthetic construct
  source 1..17: mol_type = other DNA
ttacaaggaggtggcca

SEQ ID NO: 118859 - DNA, 17 bp, synthetic construct
  source 1..17: mol_type = other DNA
tacaaggaggtggccag

SEQ ID NO: 118860 - DNA, 17 bp, synthetic construct
  source 1..17: mol_type = other DNA
acaaggaggtggccagg

SEQ ID NO: 118861 - DNA, 17 bp, synthetic construct
  source 1..17: mol_type = other DNA
caaggaggtggccaggc

SEQ ID NO: 118862 - DNA, 17 bp, synthetic construct
  source 1..17: mol_type = other DNA
aaggaggtggccaggct

SEQ ID NO: 118863 - DNA, 17 bp, synthetic construct
  source 1..17: mol_type = other DNA
aggaggtggccaggctg

SEQ ID NO: 118864 - DNA, 17 bp, synthetic construct
  source 1..17: mol_type = other DNA
ggaggtggccaggctgg

SEQ ID NO: 118865 - DNA, 17 bp, synthetic construct
  source 1..17: mol_type = other DNA
gaggtggccaggctggg

SEQ ID NO: 118866 - DNA, 17 bp, synthetic construct
  source 1..17: mol_type = other DNA
aggtggccaggctgggg

SEQ ID NO: 118867 - DNA, 17 bp, synthetic construct
  source 1..17: mol_type = other DNA
ggtggccaggctgggga

SEQ ID NO: 118868 - DNA, 17 bp, synthetic construct
  source 1..17: mol_type = other DNA
gtggccaggctggggag

SEQ ID NO: 118869 - DNA, 17 bp, synthetic construct
  source 1..17: mol_type = other DNA
tggccaggctggggagg

SEQ ID NO: 118870 - DNA, 17 bp, synthetic construct
  source 1..17: mol_type = other DNA
ggccaggctggggaggc

SEQ ID NO: 118871 - DNA, 17 bp, synthetic construct
  source 1..17: mol_type = other DNA
gccaggctggggaggcc

SEQ ID NO: 118872 - DNA, 17 bp, synthetic construct
  source 1..17: mol_type = other DNA
ccaggctggggaggccc

SEQ ID NO: 118873 - DNA, 17 bp, synthetic construct
  source 1..17: mol_type = other DNA
caggctggggaggccca

SEQ ID NO: 118874 - DNA, 17 bp, synthetic construct
  source 1..17: mol_type = other DNA
aggctggggaggcccag

SEQ ID NO: 118875 - DNA, 17 bp, synthetic construct
  source 1..17: mol_type = other DNA
ggctggggaggcccagc

SEQ ID NO: 118876 - DNA, 17 bp, synthetic construct
  source 1..17: mol_type = other DNA
gctggggaggcccagcg

SEQ ID NO: 118877 - DNA, 17 bp, synthetic construct
  source 1..17: mol_type = other DNA
ctggggaggcccagcgt

SEQ ID NO: 118878 - DNA, 17 bp, synthetic construct
  source 1..17: mol_type = other DNA
tggggaggcccagcgtt

SEQ ID NO: 118879 - DNA, 17 bp, synthetic construct
  source 1..17: mol_type = other DNA
ggggaggcccagcgttc

SEQ ID NO: 118880 - DNA, 17 bp, synthetic construct
  source 1..17: mol_type = other DNA
gggaggcccagcgttcg

SEQ ID NO: 118881 - DNA, 17 bp, synthetic construct
  source 1..17: mol_type = other DNA
ggaggcccagcgttcgg

SEQ ID NO: 118882 - DNA, 17 bp, synthetic construct
  source 1..17: mol_type = other DNA
gaggcccagcgttcggc

SEQ ID NO: 118883 - DNA, 17 bp, synthetic construct
  source 1..17: mol_type = other DNA
aggcccagcgttcggcg

SEQ ID NO: 118884 - DNA, 17 bp, synthetic construct
  source 1..17: mol_type = other DNA
ggcccagcgttcggcgg

SEQ ID NO: 118885 - DNA, 17 bp, synthetic construct
  source 1..17: mol_type = other DNA
gcccagcgttcggcggg

SEQ ID NO: 118886 - DNA, 17 bp, synthetic construct
  source 1..17: mol_type = other DNA
cccagcgttcggcgggg

SEQ ID NO: 118887 - DNA, 17 bp, synthetic construct
  source 1..17: mol_type = other DNA
ccagcgttcggcggggg

SEQ ID NO: 118888 - DNA, 17 bp, synthetic construct
  source 1..17: mol_type = other DNA
cagcgttcggcgggggc

SEQ ID NO: 118889 - DNA, 17 bp, synthetic construct
  source 1..17: mol_type = other DNA
agcgttcggcgggggct

SEQ ID NO: 118890 - DNA, 17 bp, synthetic construct
  source 1..17: mol_type = other DNA
gcgttcggcgggggctc

SEQ ID NO: 118891 - DNA, 17 bp, synthetic construct
  source 1..17: mol_type = other DNA
cgttcggcgggggctcg

SEQ ID NO: 118892 - DNA, 17 bp, synthetic construct
  source 1..17: mol_type = other DNA
gttcggcgggggctcgg

SEQ ID NO: 118893 - DNA, 17 bp, synthetic construct
  source 1..17: mol_type = other DNA
ttcggcgggggctcgga

SEQ ID NO: 118894 - DNA, 17 bp, synthetic construct
  source 1..17: mol_type = other DNA
tcggcgggggctcggaa

SEQ ID NO: 118895 - DNA, 17 bp, synthetic construct
  source 1..17: mol_type = other DNA
cggcgggggctcggaag

SEQ ID NO: 118896 - DNA, 17 bp, synthetic construct
  source 1..17: mol_type = other DNA
ggcgggggctcggaagc

SEQ ID NO: 118897 - DNA, 17 bp, synthetic construct
  source 1..17: mol_type = other DNA
gcgggggctcggaagcc

SEQ ID NO: 118898 - DNA, 17 bp, synthetic construct
  source 1..17: mol_type = other DNA
cgggggctcggaagccc

SEQ ID NO: 118899 - DNA, 17 bp, synthetic construct
  source 1..17: mol_type = other DNA
gggggctcggaagcccg

SEQ ID NO: 118900 - DNA, 17 bp, synthetic construct
  source 1..17: mol_type = other DNA
ggggctcggaagcccgg

SEQ ID NO: 118901 - DNA, 17 bp, synthetic construct
  source 1..17: mol_type = other DNA
gggctcggaagcccggg

SEQ ID NO: 118902 - DNA, 17 bp, synthetic construct
  source 1..17: mol_type = other DNA
ggctcggaagcccgggg

SEQ ID NO: 118903 - DNA, 17 bp, synthetic construct
  source 1..17: mol_type = other DNA
gctcggaagcccggggg

SEQ ID NO: 118904 - DNA, 17 bp, synthetic construct
  source 1..17: mol_type = other DNA
ctcggaagcccgggggt

SEQ ID NO: 118905 - DNA, 17 bp, synthetic construct
  source 1..17: mol_type = other DNA
tcggaagcccgggggtg

SEQ ID NO: 118906 - DNA, 17 bp, synthetic construct
  source 1..17: mol_type = other DNA
cggaagcccgggggtgg

SEQ ID NO: 118907 - DNA, 17 bp, synthetic construct
  source 1..17: mol_type = other DNA
ggaagcccgggggtggg

SEQ ID NO: 118908 - DNA, 17 bp, synthetic construct
  source 1..17: mol_type = other DNA
gaagcccgggggtgggg

SEQ ID NO: 118909 - DNA, 17 bp, synthetic construct
  source 1..17: mol_type = other DNA
aagcccgggggtggggt

SEQ ID NO: 118910 - DNA, 17 bp, synthetic construct
  source 1..17: mol_type = other DNA
agcccgggggtggggtc

SEQ ID NO: 118911 - DNA, 17 bp, synthetic construct
  source 1..17: mol_type = other DNA
gcccgggggtggggtct

SEQ ID NO: 118912 - DNA, 17 bp, synthetic construct
  source 1..17: mol_type = other DNA
cccgggggtggggtctg

SEQ ID NO: 118913 - DNA, 17 bp, synthetic construct
  source 1..17: mol_type = other DNA
ccgggggtggggtctgc

SEQ ID NO: 118914 - DNA, 17 bp, synthetic construct
  source 1..17: mol_type = other DNA
cgggggtggggtctgcg

SEQ ID NO: 118915 - DNA, 17 bp, synthetic construct
  source 1..17: mol_type = other DNA
gggggtggggtctgcgg

SEQ ID NO: 118916 - DNA, 17 bp, synthetic construct
  source 1..17: mol_type = other DNA
ggggtggggtctgcggg

SEQ ID NO: 118917 - DNA, 17 bp, synthetic construct
  source 1..17: mol_type = other DNA
gggtggggtctgcgggg

SEQ ID NO: 118918 - DNA, 17 bp, synthetic construct
  source 1..17: mol_type = other DNA
ggtggggtctgcggggt

SEQ ID NO: 118919 - DNA, 17 bp, synthetic construct
  source 1..17: mol_type = other DNA
gtggggtctgcggggtg

SEQ ID NO: 118920 - DNA, 17 bp, synthetic construct
  source 1..17: mol_type = other DNA
tggggtctgcggggtga

SEQ ID NO: 118921 - DNA, 17 bp, synthetic construct
  source 1..17: mol_type = other DNA
ggggtctgcggggtgag

SEQ ID NO: 118922 - DNA, 17 bp, synthetic construct
  source 1..17: mol_type = other DNA
gggtctgcggggtgagg

SEQ ID NO: 118923 - DNA, 17 bp, synthetic construct
  source 1..17: mol_type = other DNA
ggtctgcggggtgaggg

SEQ ID NO: 118924 - DNA, 17 bp, synthetic construct
  source 1..17: mol_type = other DNA
gtctgcggggtgagggc

SEQ ID NO: 118925 - DNA, 17 bp, synthetic construct
  source 1..17: mol_type = other DNA
tctgcggggtgagggcc

SEQ ID NO: 118926 - DNA, 17 bp, synthetic construct
  source 1..17: mol_type = other DNA
ctgcggggtgagggccg

SEQ ID NO: 118927 - DNA, 17 bp, synthetic construct
  source 1..17: mol_type = other DNA
tgcggggtgagggccgc

SEQ ID NO: 118928 - DNA, 17 bp, synthetic construct
  source 1..17: mol_type = other DNA
gcggggtgagggccgca

SEQ ID NO: 118929 - DNA, 17 bp, synthetic construct
  source 1..17: mol_type = other DNA
cggggtgagggccgcag

SEQ ID NO: 118930 - DNA, 17 bp, synthetic construct
  source 1..17: mol_type = other DNA
ggggtgagggccgcaga

SEQ ID NO: 118931 - DNA, 17 bp, synthetic construct
  source 1..17: mol_type = other DNA
gggtgagggccgcagat

SEQ ID NO: 118932 - DNA, 17 bp, synthetic construct
  source 1..17: mol_type = other DNA
ggtgagggccgcagatc

SEQ ID NO: 118933 - DNA, 17 bp, synthetic construct
  source 1..17: mol_type = other DNA
gtgagggccgcagatcc

SEQ ID NO: 118934 - DNA, 17 bp, synthetic construct
  source 1..17: mol_type = other DNA
tgagggccgcagatcca

SEQ ID NO: 118935 - DNA, 17 bp, synthetic construct
  source 1..17: mol_type = other DNA
gagggccgcagatccag

SEQ ID NO: 118936 - DNA, 17 bp, synthetic construct
  source 1..17: mol_type = other DNA
agggccgcagatccagg

SEQ ID NO: 118937 - DNA, 17 bp, synthetic construct
  source 1..17: mol_type = other DNA
gggccgcagatccaggc

SEQ ID NO: 118938 - DNA, 17 bp, synthetic construct
  source 1..17: mol_type = other DNA
ggccgcagatccaggct

SEQ ID NO: 118939 - DNA, 17 bp, synthetic construct
  source 1..17: mol_type = other DNA
gccgcagatccaggctg

SEQ ID NO: 118940 - DNA, 17 bp, synthetic construct
  source 1..17: mol_type = other DNA
ccgcagatccaggctgt

SEQ ID NO: 118941 - DNA, 17 bp, synthetic construct
  source 1..17: mol_type = other DNA
cgcagatccaggctgtg

SEQ ID NO: 118942 - DNA, 17 bp, synthetic construct
  source 1..17: mol_type = other DNA
gcagatccaggctgtgc

SEQ ID NO: 118943 - DNA, 17 bp, synthetic construct
  source 1..17: mol_type = other DNA
cagatccaggctgtgcc

SEQ ID NO: 118944 - DNA, 17 bp, synthetic construct
  source 1..17: mol_type = other DNA
agatccaggctgtgccg

SEQ ID NO: 118945 - DNA, 17 bp, synthetic construct
  source 1..17: mol_type = other DNA
gatccaggctgtgccgt

SEQ ID NO: 118946 - DNA, 17 bp, synthetic construct
  source 1..17: mol_type = other DNA
atccaggctgtgccgtc

SEQ ID NO: 118947 - DNA, 17 bp, synthetic construct
  source 1..17: mol_type = other DNA
tccaggctgtgccgtct

SEQ ID NO: 118948 - DNA, 17 bp, synthetic construct
  source 1..17: mol_type = other DNA
ccaggctgtgccgtctg

SEQ ID NO: 118949 - DNA, 17 bp, synthetic construct
  source 1..17: mol_type = other DNA
caggctgtgccgtctgt

SEQ ID NO: 118950 - DNA, 17 bp, synthetic construct
  source 1..17: mol_type = other DNA
aggctgtgccgtctgtc

SEQ ID NO: 118951 - DNA, 17 bp, synthetic construct
  source 1..17: mol_type = other DNA
ggctgtgccgtctgtct

SEQ ID NO: 118952 - DNA, 17 bp, synthetic construct
  source 1..17: mol_type = other DNA
gctgtgccgtctgtctc

SEQ ID NO: 118953 - DNA, 17 bp, synthetic construct
  source 1..17: mol_type = other DNA
ctgtgccgtctgtctct

SEQ ID NO: 118954 - DNA, 17 bp, synthetic construct
  source 1..17: mol_type = other DNA
tgtgccgtctgtctctt

SEQ ID NO: 118955 - DNA, 17 bp, synthetic construct
  source 1..17: mol_type = other DNA
gtgccgtctgtctcttg

SEQ ID NO: 118956 - DNA, 17 bp, synthetic construct
  source 1..17: mol_type = other DNA
tgccgtctgtctcttgt

SEQ ID NO: 118957 - DNA, 17 bp, synthetic construct
  source 1..17: mol_type = other DNA
gccgtctgtctcttgta

SEQ ID NO: 118958 - DNA, 17 bp, synthetic construct
  source 1..17: mol_type = other DNA
ccgtctgtctcttgtag

SEQ ID NO: 118959 - DNA, 17 bp, synthetic construct
  source 1..17: mol_type = other DNA
cgtctgtctcttgtagt

SEQ ID NO: 118960 - DNA, 17 bp, synthetic construct
  source 1..17: mol_type = other DNA
gtctgtctcttgtagtt

SEQ ID NO: 118961 - DNA, 17 bp, synthetic construct
  source 1..17: mol_type = other DNA
tctgtctcttgtagttc

SEQ ID NO: 118962 - DNA, 17 bp, synthetic construct
  source 1..17: mol_type = other DNA
ctgtctcttgtagttca

SEQ ID NO: 118963 - DNA, 17 bp, synthetic construct
  source 1..17: mol_type = other DNA
tgtctcttgtagttcat

SEQ ID NO: 118964 - DNA, 17 bp, synthetic construct
  source 1..17: mol_type = other DNA
gtctcttgtagttcatg

SEQ ID NO: 118965 - DNA, 17 bp, synthetic construct
  source 1..17: mol_type = other DNA
tctcttgtagttcatgt

SEQ ID NO: 118966 - DNA, 17 bp, synthetic construct
  source 1..17: mol_type = other DNA
ctcttgtagttcatgta

SEQ ID NO: 118967 - DNA, 17 bp, synthetic construct
  source 1..17: mol_type = other DNA
tcttgtagttcatgtac

SEQ ID NO: 118968 - DNA, 17 bp, synthetic construct
  source 1..17: mol_type = other DNA
cttgtagttcatgtacg

SEQ ID NO: 118969 - DNA, 17 bp, synthetic construct
  source 1..17: mol_type = other DNA
ttgtagttcatgtacgg

SEQ ID NO: 118970 - DNA, 17 bp, synthetic construct
  source 1..17: mol_type = other DNA
tgtagttcatgtacggg

SEQ ID NO: 118971 - DNA, 17 bp, synthetic construct
  source 1..17: mol_type = other DNA
gtagttcatgtacgggt

SEQ ID NO: 118972 - DNA, 17 bp, synthetic construct
  source 1..17: mol_type = other DNA
tagttcatgtacgggtg

SEQ ID NO: 118973 - DNA, 17 bp, synthetic construct
  source 1..17: mol_type = other DNA
agttcatgtacgggtgg

SEQ ID NO: 118974 - DNA, 17 bp, synthetic construct
  source 1..17: mol_type = other DNA
gttcatgtacgggtggg

SEQ ID NO: 118975 - DNA, 17 bp, synthetic construct
  source 1..17: mol_type = other DNA
ttcatgtacgggtggga

SEQ ID NO: 118976 - DNA, 17 bp, synthetic construct
  source 1..17: mol_type = other DNA
tcatgtacgggtgggaa

SEQ ID NO: 118977 - DNA, 17 bp, synthetic construct
  source 1..17: mol_type = other DNA
catgtacgggtgggaag

SEQ ID NO: 118978 - DNA, 17 bp, synthetic construct
  source 1..17: mol_type = other DNA
atgtacgggtgggaagc

SEQ ID NO: 118979 - DNA, 17 bp, synthetic construct
  source 1..17: mol_type = other DNA
tgtacgggtgggaagct

SEQ ID NO: 118980 - DNA, 17 bp, synthetic construct
  source 1..17: mol_type = other DNA
gtacgggtgggaagcta

SEQ ID NO: 118981 - DNA, 17 bp, synthetic construct
  source 1..17: mol_type = other DNA
tacgggtgggaagctaa

SEQ ID NO: 118982 - DNA, 17 bp, synthetic construct
  source 1..17: mol_type = other DNA
acgggtgggaagctaag

SEQ ID NO: 118983 - DNA, 17 bp, synthetic construct
  source 1..17: mol_type = other DNA
cgggtgggaagctaagc

SEQ ID NO: 118984 - DNA, 17 bp, synthetic construct
  source 1..17: mol_type = other DNA
gggtgggaagctaagct

SEQ ID NO: 118985 - DNA, 17 bp, synthetic construct
  source 1..17: mol_type = other DNA
ggtgggaagctaagctg

SEQ ID NO: 118986 - DNA, 17 bp, synthetic construct
  source 1..17: mol_type = other DNA
gtgggaagctaagctgc

SEQ ID NO: 118987 - DNA, 17 bp, synthetic construct
  source 1..17: mol_type = other DNA
tgggaagctaagctgcc

SEQ ID NO: 118988 - DNA, 17 bp, synthetic construct
  source 1..17: mol_type = other DNA
gggaagctaagctgcct

SEQ ID NO: 118989 - DNA, 17 bp, synthetic construct
  source 1..17: mol_type = other DNA
ggaagctaagctgcctg

SEQ ID NO: 118990 - DNA, 17 bp, synthetic construct
  source 1..17: mol_type = other DNA
gaagctaagctgcctgg

SEQ ID NO: 118991 - DNA, 17 bp, synthetic construct
  source 1..17: mol_type = other DNA
aagctaagctgcctggg

SEQ ID NO: 118992 - DNA, 17 bp, synthetic construct
  source 1..17: mol_type = other DNA
agctaagctgcctggga

SEQ ID NO: 118993 - DNA, 17 bp, synthetic construct
  source 1..17: mol_type = other DNA
gctaagctgcctgggag

SEQ ID NO: 118994 - DNA, 17 bp, synthetic construct
  source 1..17: mol_type = other DNA
ctaagctgcctgggagc

SEQ ID NO: 118995 - DNA, 17 bp, synthetic construct
  source 1..17: mol_type = other DNA
taagctgcctgggagcc

SEQ ID NO: 118996 - DNA, 17 bp, synthetic construct
  source 1..17: mol_type = other DNA
aagctgcctgggagcct

SEQ ID NO: 118997 - DNA, 17 bp, synthetic construct
  source 1..17: mol_type = other DNA
agctgcctgggagcctc

SEQ ID NO: 118998 - DNA, 17 bp, synthetic construct
  source 1..17: mol_type = other DNA
gctgcctgggagcctct

SEQ ID NO: 118999 - DNA, 17 bp, synthetic construct
  source 1..17: mol_type = other DNA
ctgcctgggagcctctc

SEQ ID NO: 119000 - DNA, 17 bp, synthetic construct
  source 1..17: mol_type = other DNA
tgcctgggagcctctct

SEQ ID NO: 119001 - DNA, 17 bp, synthetic construct
  source 1..17: mol_type = other DNA
gcctgggagcctctctg

SEQ ID NO: 119002 - DNA, 17 bp, synthetic construct
  source 1..17: mol_type = other DNA
cctgggagcctctctgc

SEQ ID NO: 119003 - DNA, 17 bp, synthetic construct
  source 1..17: mol_type = other DNA
ctgggagcctctctgca

SEQ ID NO: 119004 - DNA, 17 bp, synthetic construct
  source 1..17: mol_type = other DNA
tgggagcctctctgcag

SEQ ID NO: 119005 - DNA, 17 bp, synthetic construct
  source 1..17: mol_type = other DNA
gggagcctctctgcaga

SEQ ID NO: 119006 - DNA, 17 bp, synthetic construct
  source 1..17: mol_type = other DNA
ggagcctctctgcagaa

SEQ ID NO: 119007 - DNA, 17 bp, synthetic construct
  source 1..17: mol_type = other DNA
gagcctctctgcagaaa

SEQ ID NO: 119008 - DNA, 17 bp, synthetic construct
  source 1..17: mol_type = other DNA
agcctctctgcagaaaa

SEQ ID NO: 119009 - DNA, 17 bp, synthetic construct
  source 1..17: mol_type = other DNA
gcctctctgcagaaaag

SEQ ID NO: 119010 - DNA, 17 bp, synthetic construct
  source 1..17: mol_type = other DNA
cctctctgcagaaaagc

SEQ ID NO: 119011 - DNA, 17 bp, synthetic construct
  source 1..17: mol_type = other DNA
ctctctgcagaaaagca

SEQ ID NO: 119012 - DNA, 17 bp, synthetic construct
  source 1..17: mol_type = other DNA
tctctgcagaaaagcac

SEQ ID NO: 119013 - DNA, 17 bp, synthetic construct
  source 1..17: mol_type = other DNA
ctctgcagaaaagcaca

SEQ ID NO: 119014 - DNA, 17 bp, synthetic construct
  source 1..17: mol_type = other DNA
tctgcagaaaagcacag

SEQ ID NO: 119015 - DNA, 17 bp, synthetic construct
  source 1..17: mol_type = other DNA
ctgcagaaaagcacagg

SEQ ID NO: 119016 - DNA, 17 bp, synthetic construct
  source 1..17: mol_type = other DNA
tgcagaaaagcacaggt

SEQ ID NO: 119017 - DNA, 17 bp, synthetic construct
  source 1..17: mol_type = other DNA
gcagaaaagcacaggta

SEQ ID NO: 119018 - DNA, 17 bp, synthetic construct
  source 1..17: mol_type = other DNA
cagaaaagcacaggtaa

SEQ ID NO: 119019 - DNA, 17 bp, synthetic construct
  source 1..17: mol_type = other DNA
agaaaagcacaggtaag

SEQ ID NO: 119020 - DNA, 17 bp, synthetic construct
  source 1..17: mol_type = other DNA
gaaaagcacaggtaagt

SEQ ID NO: 119021 - DNA, 17 bp, synthetic construct
  source 1..17: mol_type = other DNA
aaaagcacaggtaagtg

SEQ ID NO: 119022 - DNA, 17 bp, synthetic construct
  source 1..17: mol_type = other DNA
aaagcacaggtaagtgc

SEQ ID NO: 119023 - DNA, 17 bp, synthetic construct
  source 1..17: mol_type = other DNA
aagcacaggtaagtgcc

SEQ ID NO: 119024 - DNA, 17 bp, synthetic construct
  source 1..17: mol_type = other DNA
agcacaggtaagtgcca

SEQ ID NO: 119025 - DNA, 17 bp, synthetic construct
  source 1..17: mol_type = other DNA
gcacaggtaagtgccac

SEQ ID NO: 119026 - DNA, 17 bp, synthetic construct
  source 1..17: mol_type = other DNA
cacaggtaagtgccacc

SEQ ID NO: 119027 - DNA, 17 bp, synthetic construct
  source 1..17: mol_type = other DNA
acaggtaagtgccaccc

SEQ ID NO: 119028 - DNA, 17 bp, synthetic construct
  source 1..17: mol_type = other DNA
caggtaagtgccacccc

SEQ ID NO: 119029 - DNA, 17 bp, synthetic construct
  source 1..17: mol_type = other DNA
aggtaagtgccacccct

SEQ ID NO: 119030 - DNA, 17 bp, synthetic construct
  source 1..17: mol_type = other DNA
ggtaagtgccacccctg

SEQ ID NO: 119031 - DNA, 17 bp, synthetic construct
  source 1..17: mol_type = other DNA
gtaagtgccacccctgc

SEQ ID NO: 119032 - DNA, 17 bp, synthetic construct
  source 1..17: mol_type = other DNA
taagtgccacccctgcc

SEQ ID NO: 119033 - DNA, 17 bp, synthetic construct
  source 1..17: mol_type = other DNA
aagtgccacccctgccc

SEQ ID NO: 119034 - DNA, 17 bp, synthetic construct
  source 1..17: mol_type = other DNA
agtgccacccctgccct

SEQ ID NO: 119035 - DNA, 17 bp, synthetic construct
  source 1..17: mol_type = other DNA
gtgccacccctgccctg

SEQ ID NO: 119036 - DNA, 17 bp, synthetic construct
  source 1..17: mol_type = other DNA
tgccacccctgccctgc

SEQ ID NO: 119037 - DNA, 17 bp, synthetic construct
  source 1..17: mol_type = other DNA
gccacccctgccctgcc

SEQ ID NO: 119038 - DNA, 17 bp, synthetic construct
  source 1..17: mol_type = other DNA
ccacccctgccctgccc

SEQ ID NO: 119039 - DNA, 17 bp, synthetic construct
  source 1..17: mol_type = other DNA
cacccctgccctgccct

SEQ ID NO: 119040 - DNA, 17 bp, synthetic construct
  source 1..17: mol_type = other DNA
acccctgccctgccctg

SEQ ID NO: 119041 - DNA, 17 bp, synthetic construct
  source 1..17: mol_type = other DNA
cccctgccctgccctgc

SEQ ID NO: 119042 - DNA, 17 bp, synthetic construct
  source 1..17: mol_type = other DNA
ccctgccctgccctgcc

SEQ ID NO: 119043 - DNA, 17 bp, synthetic construct
  source 1..17: mol_type = other DNA
cctgccctgccctgccc

SEQ ID NO: 119044 - DNA, 17 bp, synthetic construct
  source 1..17: mol_type = other DNA
ctgccctgccctgccct

SEQ ID NO: 119045 - DNA, 17 bp, synthetic construct
  source 1..17: mol_type = other DNA
tgccctgccctgccctg

SEQ ID NO: 119046 - DNA, 17 bp, synthetic construct
  source 1..17: mol_type = other DNA
gccctgccctgccctgc

SEQ ID NO: 119047 - DNA, 17 bp, synthetic construct
  source 1..17: mol_type = other DNA
ccctgccctgccctgcc

SEQ ID NO: 119048 - DNA, 17 bp, synthetic construct
  source 1..17: mol_type = other DNA
cctgccctgccctgccc

SEQ ID NO: 119049 - DNA, 17 bp, synthetic construct
  source 1..17: mol_type = other DNA
ctgccctgccctgcccc

SEQ ID NO: 119050 - DNA, 17 bp, synthetic construct
  source 1..17: mol_type = other DNA
tgccctgccctgccccg

SEQ ID NO: 119051 - DNA, 17 bp, synthetic construct
  source 1..17: mol_type = other DNA
gccctgccctgccccgc

SEQ ID NO: 119052 - DNA, 17 bp, synthetic construct
  source 1..17: mol_type = other DNA
ccctgccctgccccgcc

SEQ ID NO: 119053 - DNA, 17 bp, synthetic construct
  source 1..17: mol_type = other DNA
cctgccctgccccgccc

SEQ ID NO: 119054 - DNA, 17 bp, synthetic construct
  source 1..17: mol_type = other DNA
ctgccctgccccgcccc

SEQ ID NO: 119055 - DNA, 17 bp, synthetic construct
  source 1..17: mol_type = other DNA
tgccctgccccgccccg

SEQ ID NO: 119056 - DNA, 17 bp, synthetic construct
  source 1..17: mol_type = other DNA
gccctgccccgccccgc

SEQ ID NO: 119057 - DNA, 17 bp, synthetic construct
  source 1..17: mol_type = other DNA
ccctgccccgccccgca

SEQ ID NO: 119058 - DNA, 17 bp, synthetic construct
  source 1..17: mol_type = other DNA
cctgccccgccccgcat

SEQ ID NO: 119059 - DNA, 17 bp, synthetic construct
  source 1..17: mol_type = other DNA
ctgccccgccccgcatc

SEQ ID NO: 119060 - DNA, 17 bp, synthetic construct
  source 1..17: mol_type = other DNA
tgccccgccccgcatca

SEQ ID NO: 119061 - DNA, 17 bp, synthetic construct
  source 1..17: mol_type = other DNA
gccccgccccgcatcac

SEQ ID NO: 119062 - DNA, 17 bp, synthetic construct
  source 1..17: mol_type = other DNA
ccccgccccgcatcacc

SEQ ID NO: 119063 - DNA, 17 bp, synthetic construct
  source 1..17: mol_type = other DNA
cccgccccgcatcaccc

SEQ ID NO: 119064 - DNA, 17 bp, synthetic construct
  source 1..17: mol_type = other DNA
ccgccccgcatcacccc

SEQ ID NO: 119065 - DNA, 17 bp, synthetic construct
  source 1..17: mol_type = other DNA
cgccccgcatcaccccg

SEQ ID NO: 119066 - DNA, 17 bp, synthetic construct
  source 1..17: mol_type = other DNA
gccccgcatcaccccgc

SEQ ID NO: 119067 - DNA, 17 bp, synthetic construct
  source 1..17: mol_type = other DNA
ccccgcatcaccccgcc

SEQ ID NO: 119068 - DNA, 17 bp, synthetic construct
  source 1..17: mol_type = other DNA
cccgcatcaccccgcct

SEQ ID NO: 119069 - DNA, 17 bp, synthetic construct
  source 1..17: mol_type = other DNA
ccgcatcaccccgcctg

SEQ ID NO: 119070 - DNA, 17 bp, synthetic construct
  source 1..17: mol_type = other DNA
cgcatcaccccgcctgg

SEQ ID NO: 119071 - DNA, 17 bp, synthetic construct
  source 1..17: mol_type = other DNA
gcatcaccccgcctggc

SEQ ID NO: 119072 - DNA, 17 bp, synthetic construct
  source 1..17: mol_type = other DNA
catcaccccgcctggcc

SEQ ID NO: 119073 - DNA, 17 bp, synthetic construct
  source 1..17: mol_type = other DNA
atcaccccgcctggcct

SEQ ID NO: 119074 - DNA, 17 bp, synthetic construct
  source 1..17: mol_type = other DNA
tcaccccgcctggcctg

SEQ ID NO: 119075 - DNA, 17 bp, synthetic construct
  source 1..17: mol_type = other DNA
caccccgcctggcctgg

SEQ ID NO: 119076 - DNA, 17 bp, synthetic construct
  source 1..17: mol_type = other DNA
accccgcctggcctggc

SEQ ID NO: 119077 - DNA, 17 bp, synthetic construct
  source 1..17: mol_type = other DNA
ccccgcctggcctggcc

SEQ ID NO: 119078 - DNA, 17 bp, synthetic construct
  source 1..17: mol_type = other DNA
cccgcctggcctggccc

SEQ ID NO: 119079 - DNA, 17 bp, synthetic construct
  source 1..17: mol_type = other DNA
ccgcctggcctggcccc

SEQ ID NO: 119080 - DNA, 17 bp, synthetic construct
  source 1..17: mol_type = other DNA
cgcctggcctggcccca

SEQ ID NO: 119081 - DNA, 17 bp, synthetic construct
  source 1..17: mol_type = other DNA
gcctggcctggccccaa

SEQ ID NO: 119082 - DNA, 17 bp, synthetic construct
  source 1..17: mol_type = other DNA
cctggcctggccccaac

SEQ ID NO: 119083 - DNA, 17 bp, synthetic construct
  source 1..17: mol_type = other DNA
ctggcctggccccaaca

SEQ ID NO: 119084 - DNA, 17 bp, synthetic construct
  source 1..17: mol_type = other DNA
tggcctggccccaacac

SEQ ID NO: 119085 - DNA, 17 bp, synthetic construct
  source 1..17: mol_type = other DNA
ggcctggccccaacacg

SEQ ID NO: 119086 - DNA, 17 bp, synthetic construct
  source 1..17: mol_type = other DNA
gcctggccccaacacgc

SEQ ID NO: 119087 - DNA, 17 bp, synthetic construct
  source 1..17: mol_type = other DNA
cctggccccaacacgcc

SEQ ID NO: 119088 - DNA, 17 bp, synthetic construct
  source 1..17: mol_type = other DNA
ctggccccaacacgccc

SEQ ID NO: 119089 - DNA, 17 bp, synthetic construct
  source 1..17: mol_type = other DNA
tggccccaacacgcccc

SEQ ID NO: 119090 - DNA, 17 bp, synthetic construct
  source 1..17: mol_type = other DNA
ggccccaacacgcccca

SEQ ID NO: 119091 - DNA, 17 bp, synthetic construct
  source 1..17: mol_type = other DNA
gccccaacacgccccac

SEQ ID NO: 119092 - DNA, 17 bp, synthetic construct
  source 1..17: mol_type = other DNA
ccccaacacgccccacc

SEQ ID NO: 119093 - DNA, 17 bp, synthetic construct
  source 1..17: mol_type = other DNA
cccaacacgccccaccc

SEQ ID NO: 119094 - DNA, 17 bp, synthetic construct
  source 1..17: mol_type = other DNA
ccaacacgccccaccct

SEQ ID NO: 119095 - DNA, 17 bp, synthetic construct
  source 1..17: mol_type = other DNA
caacacgccccaccctg

SEQ ID NO: 119096 - DNA, 17 bp, synthetic construct
  source 1..17: mol_type = other DNA
aacacgccccaccctgc

SEQ ID NO: 119097 - DNA, 17 bp, synthetic construct
  source 1..17: mol_type = other DNA
acacgccccaccctgcc

SEQ ID NO: 119098 - DNA, 17 bp, synthetic construct
  source 1..17: mol_type = other DNA
cacgccccaccctgccc

SEQ ID NO: 119099 - DNA, 17 bp, synthetic construct
  source 1..17: mol_type = other DNA
acgccccaccctgcccc

SEQ ID NO: 119100 - DNA, 17 bp, synthetic construct
  source 1..17: mol_type = other DNA
cgccccaccctgcccca

SEQ ID NO: 119101 - DNA, 17 bp, synthetic construct
  source 1..17: mol_type = other DNA
gccccaccctgccccac

SEQ ID NO: 119102 - DNA, 17 bp, synthetic construct
  source 1..17: mol_type = other DNA
ccccaccctgccccacc

SEQ ID NO: 119103 - DNA, 17 bp, synthetic construct
  source 1..17: mol_type = other DNA
cccaccctgccccaccc

SEQ ID NO: 119104 - DNA, 17 bp, synthetic construct
  source 1..17: mol_type = other DNA
ccaccctgccccacccc

SEQ ID NO: 119105 - DNA, 17 bp, synthetic construct
  source 1..17: mol_type = other DNA
caccctgccccacccca

SEQ ID NO: 119106 - DNA, 17 bp, synthetic construct
  source 1..17: mol_type = other DNA
accctgccccaccccac

SEQ ID NO: 119107 - DNA, 17 bp, synthetic construct
  source 1..17: mol_type = other DNA
ccctgccccaccccacc

SEQ ID NO: 119108 - DNA, 17 bp, synthetic construct
  source 1..17: mol_type = other DNA
cctgccccaccccacct

SEQ ID NO: 119109 - DNA, 17 bp, synthetic construct
  source 1..17: mol_type = other DNA
ctgccccaccccacctg

SEQ ID NO: 119110 - DNA, 17 bp, synthetic construct
  source 1..17: mol_type = other DNA
tgccccaccccacctga

SEQ ID NO: 119111 - DNA, 17 bp, synthetic construct
  source 1..17: mol_type = other DNA
gccccaccccacctgaa

SEQ ID NO: 119112 - DNA, 17 bp, synthetic construct
  source 1..17: mol_type = other DNA
ccccaccccacctgaac

SEQ ID NO: 119113 - DNA, 17 bp, synthetic construct
  source 1..17: mol_type = other DNA
cccaccccacctgaacc

SEQ ID NO: 119114 - DNA, 17 bp, synthetic construct
  source 1..17: mol_type = other DNA
ccaccccacctgaaccc

SEQ ID NO: 119115 - DNA, 17 bp, synthetic construct
  source 1..17: mol_type = other DNA
caccccacctgaaccct

SEQ ID NO: 119116 - DNA, 17 bp, synthetic construct
  source 1..17: mol_type = other DNA
accccacctgaaccctg

SEQ ID NO: 119117 - DNA, 17 bp, synthetic construct
  source 1..17: mol_type = other DNA
ccccacctgaaccctgc

SEQ ID NO: 119118 - DNA, 17 bp, synthetic construct
  source 1..17: mol_type = other DNA
cccacctgaaccctgcc

SEQ ID NO: 119119 - DNA, 17 bp, synthetic construct
  source 1..17: mol_type = other DNA
ccacctgaaccctgccg

SEQ ID NO: 119120 - DNA, 17 bp, synthetic construct
  source 1..17: mol_type = other DNA
cacctgaaccctgccgg

SEQ ID NO: 119121 - DNA, 17 bp, synthetic construct
  source 1..17: mol_type = other DNA
acctgaaccctgccggg

SEQ ID NO: 119122 - DNA, 17 bp, synthetic construct
  source 1..17: mol_type = other DNA
cctgaaccctgccgggc

SEQ ID NO: 119123 - DNA, 17 bp, synthetic construct
  source 1..17: mol_type = other DNA
ctgaaccctgccgggcc

SEQ ID NO: 119124 - DNA, 17 bp, synthetic construct
  source 1..17: mol_type = other DNA
tgaaccctgccgggcca

SEQ ID NO: 119125 - DNA, 17 bp, synthetic construct
  source 1..17: mol_type = other DNA
gaaccctgccgggccag

SEQ ID NO: 119126 - DNA, 17 bp, synthetic construct
  source 1..17: mol_type = other DNA
aaccctgccgggccagg

SEQ ID NO: 119127 - DNA, 17 bp, synthetic construct
  source 1..17: mol_type = other DNA
accctgccgggccaggt

SEQ ID NO: 119128 - DNA, 17 bp, synthetic construct
  source 1..17: mol_type = other DNA
ccctgccgggccaggtc

SEQ ID NO: 119129 - DNA, 17 bp, synthetic construct
  source 1..17: mol_type = other DNA
cctgccgggccaggtca

SEQ ID NO: 119130 - DNA, 17 bp, synthetic construct
  source 1..17: mol_type = other DNA
ctgccgggccaggtcag

SEQ ID NO: 119131 - DNA, 17 bp, synthetic construct
  source 1..17: mol_type = other DNA
tgccgggccaggtcagt

SEQ ID NO: 119132 - DNA, 17 bp, synthetic construct
  source 1..17: mol_type = other DNA
gccgggccaggtcagtc

SEQ ID NO: 119133 - DNA, 17 bp, synthetic construct
  source 1..17: mol_type = other DNA
ccgggccaggtcagtcc

SEQ ID NO: 119134 - DNA, 17 bp, synthetic construct
  source 1..17: mol_type = other DNA
cgggccaggtcagtcct

SEQ ID NO: 119135 - DNA, 17 bp, synthetic construct
  source 1..17: mol_type = other DNA
gggccaggtcagtcctc

SEQ ID NO: 119136 - DNA, 17 bp, synthetic construct
  source 1..17: mol_type = other DNA
ggccaggtcagtcctca

SEQ ID NO: 119137 - DNA, 17 bp, synthetic construct
  source 1..17: mol_type = other DNA
gccaggtcagtcctcac

SEQ ID NO: 119138 - DNA, 17 bp, synthetic construct
  source 1..17: mol_type = other DNA
ccaggtcagtcctcacc

SEQ ID NO: 119139 - DNA, 17 bp, synthetic construct
  source 1..17: mol_type = other DNA
caggtcagtcctcacct

SEQ ID NO: 119140 - DNA, 17 bp, synthetic construct
  source 1..17: mol_type = other DNA
aggtcagtcctcacctg

SEQ ID NO: 119141 - DNA, 17 bp, synthetic construct
  source 1..17: mol_type = other DNA
ggtcagtcctcacctgg

SEQ ID NO: 119142 - DNA, 17 bp, synthetic construct
  source 1..17: mol_type = other DNA
gtcagtcctcacctggg

SEQ ID NO: 119143 - DNA, 17 bp, synthetic construct
  source 1..17: mol_type = other DNA
tcagtcctcacctgggc

SEQ ID NO: 119144 - DNA, 17 bp, synthetic construct
  source 1..17: mol_type = other DNA
cagtcctcacctgggct

SEQ ID NO: 119145 - DNA, 17 bp, synthetic construct
  source 1..17: mol_type = other DNA
agtcctcacctgggctc

SEQ ID NO: 119146 - DNA, 17 bp, synthetic construct
  source 1..17: mol_type = other DNA
gtcctcacctgggctct

SEQ ID NO: 119147 - DNA, 17 bp, synthetic construct
  source 1..17: mol_type = other DNA
tcctcacctgggctctg

SEQ ID NO: 119148 - DNA, 17 bp, synthetic construct
  source 1..17: mol_type = other DNA
cctcacctgggctctgc

SEQ ID NO: 119149 - DNA, 17 bp, synthetic construct
  source 1..17: mol_type = other DNA
ctcacctgggctctgcc

SEQ ID NO: 119150 - DNA, 17 bp, synthetic construct
  source 1..17: mol_type = other DNA
tcacctgggctctgcca

SEQ ID NO: 119151 - DNA, 17 bp, synthetic construct
  source 1..17: mol_type = other DNA
cacctgggctctgccac

SEQ ID NO: 119152 - DNA, 17 bp, synthetic construct
  source 1..17: mol_type = other DNA
acctgggctctgccaca

SEQ ID NO: 119153 - DNA, 17 bp, synthetic construct
  source 1..17: mol_type = other DNA
cctgggctctgccacag

SEQ ID NO: 119154 - DNA, 17 bp, synthetic construct
  source 1..17: mol_type = other DNA
ctgggctctgccacagg

SEQ ID NO: 119155 - DNA, 17 bp, synthetic construct
  source 1..17: mol_type = other DNA
tgggctctgccacaggc

SEQ ID NO: 119156 - DNA, 17 bp, synthetic construct
  source 1..17: mol_type = other DNA
gggctctgccacaggca

SEQ ID NO: 119157 - DNA, 17 bp, synthetic construct
  source 1..17: mol_type = other DNA
ggctctgccacaggcac

SEQ ID NO: 119158 - DNA, 17 bp, synthetic construct
  source 1..17: mol_type = other DNA
gctctgccacaggcacc

SEQ ID NO: 119159 - DNA, 17 bp, synthetic construct
  source 1..17: mol_type = other DNA
ctctgccacaggcaccc

SEQ ID NO: 119160 - DNA, 17 bp, synthetic construct
  source 1..17: mol_type = other DNA
tctgccacaggcaccca

SEQ ID NO: 119161 - DNA, 17 bp, synthetic construct
  source 1..17: mol_type = other DNA
ctgccacaggcacccat

SEQ ID NO: 119162 - DNA, 17 bp, synthetic construct
  source 1..17: mol_type = other DNA
tgccacaggcacccatg

SEQ ID NO: 119163 - DNA, 17 bp, synthetic construct
  source 1..17: mol_type = other DNA
gccacaggcacccatgc

SEQ ID NO: 119164 - DNA, 17 bp, synthetic construct
  source 1..17: mol_type = other DNA
ccacaggcacccatgcc

SEQ ID NO: 119165 - DNA, 17 bp, synthetic construct
  source 1..17: mol_type = other DNA
cacaggcacccatgccc

SEQ ID NO: 119166 - DNA, 17 bp, synthetic construct
  source 1..17: mol_type = other DNA
acaggcacccatgccct

SEQ ID NO: 119167 - DNA, 17 bp, synthetic construct
  source 1..17: mol_type = other DNA
caggcacccatgccctg

SEQ ID NO: 119168 - DNA, 17 bp, synthetic construct
  source 1..17: mol_type = other DNA
aggcacccatgccctga

SEQ ID NO: 119169 - DNA, 17 bp, synthetic construct
  source 1..17: mol_type = other DNA
ggcacccatgccctgac

SEQ ID NO: 119170 - DNA, 17 bp, synthetic construct
  source 1..17: mol_type = other DNA
gcacccatgccctgaca

SEQ ID NO: 119171 - DNA, 17 bp, synthetic construct
  source 1..17: mol_type = other DNA
cacccatgccctgacac

SEQ ID NO: 119172 - DNA, 17 bp, synthetic construct
  source 1..17: mol_type = other DNA
acccatgccctgacacg

SEQ ID NO: 119173 - DNA, 17 bp, synthetic construct
  source 1..17: mol_type = other DNA
cccatgccctgacacgc

SEQ ID NO: 119174 - DNA, 17 bp, synthetic construct
  source 1..17: mol_type = other DNA
ccatgccctgacacgcc

SEQ ID NO: 119175 - DNA, 17 bp, synthetic construct
  source 1..17: mol_type = other DNA
catgccctgacacgcca

SEQ ID NO: 119176 - DNA, 17 bp, synthetic construct
  source 1..17: mol_type = other DNA
atgccctgacacgccag

SEQ ID NO: 119177 - DNA, 17 bp, synthetic construct
  source 1..17: mol_type = other DNA
tgccctgacacgccagg

SEQ ID NO: 119178 - DNA, 17 bp, synthetic construct
  source 1..17: mol_type = other DNA
gccctgacacgccaggg

SEQ ID NO: 119179 - DNA, 17 bp, synthetic construct
  source 1..17: mol_type = other DNA
ccctgacacgccaggga

SEQ ID NO: 119180 - DNA, 17 bp, synthetic construct
  source 1..17: mol_type = other DNA
cctgacacgccagggac

SEQ ID NO: 119181 - DNA, 17 bp, synthetic construct
  source 1..17: mol_type = other DNA
ctgacacgccagggacg

SEQ ID NO: 119182 - DNA, 17 bp, synthetic construct
  source 1..17: mol_type = other DNA
tgacacgccagggacgg

SEQ ID NO: 119183 - DNA, 17 bp, synthetic construct
  source 1..17: mol_type = other DNA
gacacgccagggacgga

SEQ ID NO: 119184 - DNA, 17 bp, synthetic construct
  source 1..17: mol_type = other DNA
acacgccagggacggag

SEQ ID NO: 119185 - DNA, 17 bp, synthetic construct
  source 1..17: mol_type = other DNA
cacgccagggacggagg

SEQ ID NO: 119186 - DNA, 17 bp, synthetic construct
  source 1..17: mol_type = other DNA
acgccagggacggaggg

SEQ ID NO: 119187 - DNA, 17 bp, synthetic construct
  source 1..17: mol_type = other DNA
cgccagggacggagggg

SEQ ID NO: 119188 - DNA, 17 bp, synthetic construct
  source 1..17: mol_type = other DNA
gccagggacggaggggc

SEQ ID NO: 119189 - DNA, 17 bp, synthetic construct
  source 1..17: mol_type = other DNA
ccagggacggaggggcc

SEQ ID NO: 119190 - DNA, 17 bp, synthetic construct
  source 1..17: mol_type = other DNA
cagggacggaggggcca

SEQ ID NO: 119191 - DNA, 17 bp, synthetic construct
  source 1..17: mol_type = other DNA
agggacggaggggccag

SEQ ID NO: 119192 - DNA, 17 bp, synthetic construct
  source 1..17: mol_type = other DNA
gggacggaggggccagt

SEQ ID NO: 119193 - DNA, 17 bp, synthetic construct
  source 1..17: mol_type = other DNA
ggacggaggggccagtg

SEQ ID NO: 119194 - DNA, 17 bp, synthetic construct
  source 1..17: mol_type = other DNA
gacggaggggccagtgg

SEQ ID NO: 119195 - DNA, 17 bp, synthetic construct
  source 1..17: mol_type = other DNA
acggaggggccagtggg

SEQ ID NO: 119196 - DNA, 17 bp, synthetic construct
  source 1..17: mol_type = other DNA
cggaggggccagtgggt

SEQ ID NO: 119197 - DNA, 17 bp, synthetic construct
  source 1..17: mol_type = other DNA
ggaggggccagtgggtc

SEQ ID NO: 119198 - DNA, 17 bp, synthetic construct
  source 1..17: mol_type = other DNA
gaggggccagtgggtct

SEQ ID NO: 119199 - DNA, 17 bp, synthetic construct
  source 1..17: mol_type = other DNA
aggggccagtgggtctc

SEQ ID NO: 119200 - DNA, 17 bp, synthetic construct
  source 1..17: mol_type = other DNA
ggggccagtgggtctct

SEQ ID NO: 119201 - DNA, 17 bp, synthetic construct
  source 1..17: mol_type = other DNA
gggccagtgggtctctg

SEQ ID NO: 119202 - DNA, 17 bp, synthetic construct
  source 1..17: mol_type = other DNA
ggccagtgggtctctgc

SEQ ID NO: 119203 - DNA, 17 bp, synthetic construct
  source 1..17: mol_type = other DNA
gccagtgggtctctgcc

SEQ ID NO: 119204 - DNA, 17 bp, synthetic construct
  source 1..17: mol_type = other DNA
ccagtgggtctctgccc

SEQ ID NO: 119205 - DNA, 17 bp, synthetic construct
  source 1..17: mol_type = other DNA
cagtgggtctctgcccc

SEQ ID NO: 119206 - DNA, 17 bp, synthetic construct
  source 1..17: mol_type = other DNA
agtgggtctctgccccg

SEQ ID NO: 119207 - DNA, 17 bp, synthetic construct
  source 1..17: mol_type = other DNA
gtgggtctctgccccgc

SEQ ID NO: 119208 - DNA, 17 bp, synthetic construct
  source 1..17: mol_type = other DNA
tgggtctctgccccgca

SEQ ID NO: 119209 - DNA, 17 bp, synthetic construct
  source 1..17: mol_type = other DNA
gggtctctgccccgcag

SEQ ID NO: 119210 - DNA, 17 bp, synthetic construct
  source 1..17: mol_type = other DNA
ggtctctgccccgcagt

SEQ ID NO: 119211 - DNA, 17 bp, synthetic construct
  source 1..17: mol_type = other DNA
gtctctgccccgcagtg

SEQ ID NO: 119212 - DNA, 17 bp, synthetic construct
  source 1..17: mol_type = other DNA
tctctgccccgcagtgt

SEQ ID NO: 119213 - DNA, 17 bp, synthetic construct
  source 1..17: mol_type = other DNA
ctctgccccgcagtgtg

SEQ ID NO: 119214 - DNA, 17 bp, synthetic construct
  source 1..17: mol_type = other DNA
tctgccccgcagtgtgg

SEQ ID NO: 119215 - DNA, 17 bp, synthetic construct
  source 1..17: mol_type = other DNA
ctgccccgcagtgtggc

SEQ ID NO: 119216 - DNA, 17 bp, synthetic construct
  source 1..17: mol_type = other DNA
tgccccgcagtgtggcc

SEQ ID NO: 119217 - DNA, 17 bp, synthetic construct
  source 1..17: mol_type = other DNA
gccccgcagtgtggccg

SEQ ID NO: 119218 - DNA, 17 bp, synthetic construct
  source 1..17: mol_type = other DNA
ccccgcagtgtggccgg

SEQ ID NO: 119219 - DNA, 17 bp, synthetic construct
  source 1..17: mol_type = other DNA
cccgcagtgtggccggg

SEQ ID NO: 119220 - DNA, 17 bp, synthetic construct
  source 1..17: mol_type = other DNA
ccgcagtgtggccgggg

SEQ ID NO: 119221 - DNA, 17 bp, synthetic construct
  source 1..17: mol_type = other DNA
cgcagtgtggccggggt

SEQ ID NO: 119222 - DNA, 17 bp, synthetic construct
  source 1..17: mol_type = other DNA
gcagtgtggccggggtg

SEQ ID NO: 119223 - DNA, 17 bp, synthetic construct
  source 1..17: mol_type = other DNA
cagtgtggccggggtgt

SEQ ID NO: 119224 - DNA, 17 bp, synthetic construct
  source 1..17: mol_type = other DNA
agtgtggccggggtgtc

SEQ ID NO: 119225 - DNA, 17 bp, synthetic construct
  source 1..17: mol_type = other DNA
gtgtggccggggtgtcc

SEQ ID NO: 119226 - DNA, 17 bp, synthetic construct
  source 1..17: mol_type = other DNA
tgtggccggggtgtcct

SEQ ID NO: 119227 - DNA, 17 bp, synthetic construct
  source 1..17: mol_type = other DNA
gtggccggggtgtcctg

SEQ ID NO: 119228 - DNA, 17 bp, synthetic construct
  source 1..17: mol_type = other DNA
tggccggggtgtcctgg

SEQ ID NO: 119229 - DNA, 17 bp, synthetic construct
  source 1..17: mol_type = other DNA
ggccggggtgtcctggg

SEQ ID NO: 119230 - DNA, 17 bp, synthetic construct
  source 1..17: mol_type = other DNA
gccggggtgtcctgggg

SEQ ID NO: 119231 - DNA, 17 bp, synthetic construct
  source 1..17: mol_type = other DNA
ccggggtgtcctggggt

SEQ ID NO: 119232 - DNA, 17 bp, synthetic construct
  source 1..17: mol_type = other DNA
cggggtgtcctggggtt

SEQ ID NO: 119233 - DNA, 17 bp, synthetic construct
  source 1..17: mol_type = other DNA
ggggtgtcctggggttg

SEQ ID NO: 119234 - DNA, 17 bp, synthetic construct
  source 1..17: mol_type = other DNA
gggtgtcctggggttgg

SEQ ID NO: 119235 - DNA, 17 bp, synthetic construct
  source 1..17: mol_type = other DNA
ggtgtcctggggttggg

SEQ ID NO: 119236 - DNA, 17 bp, synthetic construct
  source 1..17: mol_type = other DNA
gtgtcctggggttgggg

SEQ ID NO: 119237 - DNA, 17 bp, synthetic construct
  source 1..17: mol_type = other DNA
tgtcctggggttggggg

SEQ ID NO: 119238 - DNA, 17 bp, synthetic construct
  source 1..17: mol_type = other DNA
gtcctggggttgggggc

SEQ ID NO: 119239 - DNA, 17 bp, synthetic construct
  source 1..17: mol_type = other DNA
tcctggggttgggggct

SEQ ID NO: 119240 - DNA, 17 bp, synthetic construct
  source 1..17: mol_type = other DNA
cctggggttgggggctg

SEQ ID NO: 119241 - DNA, 17 bp, synthetic construct
  source 1..17: mol_type = other DNA
ctggggttgggggctgc

SEQ ID NO: 119242 - DNA, 17 bp, synthetic construct
  source 1..17: mol_type = other DNA
tggggttgggggctgca

SEQ ID NO: 119243 - DNA, 17 bp, synthetic construct
  source 1..17: mol_type = other DNA
ggggttgggggctgcag

SEQ ID NO: 119244 - DNA, 17 bp, synthetic construct
  source 1..17: mol_type = other DNA
gggttgggggctgcagg

SEQ ID NO: 119245 - DNA, 17 bp, synthetic construct
  source 1..17: mol_type = other DNA
ggttgggggctgcaggt

SEQ ID NO: 119246 - DNA, 17 bp, synthetic construct
  source 1..17: mol_type = other DNA
gttgggggctgcaggtg

SEQ ID NO: 119247 - DNA, 17 bp, synthetic construct
  source 1..17: mol_type = other DNA
ttgggggctgcaggtgt

SEQ ID NO: 119248 - DNA, 17 bp, synthetic construct
  source 1..17: mol_type = other DNA
tgggggctgcaggtgtc

SEQ ID NO: 119249 - DNA, 17 bp, synthetic construct
  source 1..17: mol_type = other DNA
gggggctgcaggtgtca

SEQ ID NO: 119250 - DNA, 17 bp, synthetic construct
  source 1..17: mol_type = other DNA
ggggctgcaggtgtcat

SEQ ID NO: 119251 - DNA, 17 bp, synthetic construct
  source 1..17: mol_type = other DNA
gggctgcaggtgtcatg

SEQ ID NO: 119252 - DNA, 17 bp, synthetic construct
  source 1..17: mol_type = other DNA
ggctgcaggtgtcatgg

SEQ ID NO: 119253 - DNA, 17 bp, synthetic construct
  source 1..17: mol_type = other DNA
gctgcaggtgtcatgga

SEQ ID NO: 119254 - DNA, 17 bp, synthetic construct
  source 1..17: mol_type = other DNA
ctgcaggtgtcatggaa

SEQ ID NO: 119255 - DNA, 17 bp, synthetic construct
  source 1..17: mol_type = other DNA
tgcaggtgtcatggaag

SEQ ID NO: 119256 - DNA, 17 bp, synthetic construct
  source 1..17: mol_type = other DNA
gcaggtgtcatggaagc

SEQ ID NO: 119257 - DNA, 17 bp, synthetic construct
  source 1..17: mol_type = other DNA
caggtgtcatggaagct

SEQ ID NO: 119258 - DNA, 17 bp, synthetic construct
  source 1..17: mol_type = other DNA
aggtgtcatggaagctt

SEQ ID NO: 119259 - DNA, 17 bp, synthetic construct
  source 1..17: mol_type = other DNA
ggtgtcatggaagcttt

SEQ ID NO: 119260 - DNA, 17 bp, synthetic construct
  source 1..17: mol_type = other DNA
gtgtcatggaagctttg

SEQ ID NO: 119261 - DNA, 17 bp, synthetic construct
  source 1..17: mol_type = other DNA
tgtcatggaagctttgg

SEQ ID NO: 119262 - DNA, 17 bp, synthetic construct
  source 1..17: mol_type = other DNA
gtcatggaagctttggc

SEQ ID NO: 119263 - DNA, 17 bp, synthetic construct
  source 1..17: mol_type = other DNA
tcatggaagctttggct

SEQ ID NO: 119264 - DNA, 17 bp, synthetic construct
  source 1..17: mol_type = other DNA
catggaagctttggctc

SEQ ID NO: 119265 - DNA, 17 bp, synthetic construct
  source 1..17: mol_type = other DNA
atggaagctttggctcg

SEQ ID NO: 119266 - DNA, 17 bp, synthetic construct
  source 1..17: mol_type = other DNA
tggaagctttggctcgg

SEQ ID NO: 119267 - DNA, 17 bp, synthetic construct
  source 1..17: mol_type = other DNA
ggaagctttggctcggg

SEQ ID NO: 119268 - DNA, 17 bp, synthetic construct
  source 1..17: mol_type = other DNA
gaagctttggctcgggg

SEQ ID NO: 119269 - DNA, 17 bp, synthetic construct
  source 1..17: mol_type = other DNA
aagctttggctcggggg

SEQ ID NO: 119270 - DNA, 17 bp, synthetic construct
  source 1..17: mol_type = other DNA
agctttggctcgggggc

SEQ ID NO: 119271 - DNA, 17 bp, synthetic construct
  source 1..17: mol_type = other DNA
gctttggctcgggggct

SEQ ID NO: 119272 - DNA, 17 bp, synthetic construct
  source 1..17: mol_type = other DNA
ctttggctcgggggctg

SEQ ID NO: 119273 - DNA, 17 bp, synthetic construct
  source 1..17: mol_type = other DNA
tttggctcgggggctgt

SEQ ID NO: 119274 - DNA, 17 bp, synthetic construct
  source 1..17: mol_type = other DNA
ttggctcgggggctgtt

SEQ ID NO: 119275 - DNA, 17 bp, synthetic construct
  source 1..17: mol_type = other DNA
tggctcgggggctgtta

SEQ ID NO: 119276 - DNA, 17 bp, synthetic construct
  source 1..17: mol_type = other DNA
ggctcgggggctgttaa

SEQ ID NO: 119277 - DNA, 17 bp, synthetic construct
  source 1..17: mol_type = other DNA
gctcgggggctgttaac

SEQ ID NO: 119278 - DNA, 17 bp, synthetic construct
  source 1..17: mol_type = other DNA
ctcgggggctgttaact

SEQ ID NO: 119279 - DNA, 17 bp, synthetic construct
  source 1..17: mol_type = other DNA
tcgggggctgttaactt

SEQ ID NO: 119280 - DNA, 17 bp, synthetic construct
  source 1..17: mol_type = other DNA
cgggggctgttaacttg

SEQ ID NO: 119281 - DNA, 17 bp, synthetic construct
  source 1..17: mol_type = other DNA
gggggctgttaacttga

SEQ ID NO: 119282 - DNA, 17 bp, synthetic construct
  source 1..17: mol_type = other DNA
ggggctgttaacttgat

SEQ ID NO: 119283 - DNA, 17 bp, synthetic construct
  source 1..17: mol_type = other DNA
gggctgttaacttgatc

SEQ ID NO: 119284 - DNA, 17 bp, synthetic construct
  source 1..17: mol_type = other DNA
ggctgttaacttgatca

SEQ ID NO: 119285 - DNA, 17 bp, synthetic construct
  source 1..17: mol_type = other DNA
gctgttaacttgatcag

SEQ ID NO: 119286 - DNA, 17 bp, synthetic construct
  source 1..17: mol_type = other DNA
ctgttaacttgatcagc

SEQ ID NO: 119287 - DNA, 17 bp, synthetic construct
  source 1..17: mol_type = other DNA
tgttaacttgatcagca

SEQ ID NO: 119288 - DNA, 17 bp, synthetic construct
  source 1..17: mol_type = other DNA
gttaacttgatcagcag

SEQ ID NO: 119289 - DNA, 17 bp, synthetic construct
  source 1..17: mol_type = other DNA
ttaacttgatcagcagg

SEQ ID NO: 119290 - DNA, 17 bp, synthetic construct
  source 1..17: mol_type = other DNA
taacttgatcagcagga

SEQ ID NO: 119291 - DNA, 17 bp, synthetic construct
  source 1..17: mol_type = other DNA
aacttgatcagcaggac

SEQ ID NO: 119292 - DNA, 17 bp, synthetic construct
  source 1..17: mol_type = other DNA
acttgatcagcaggaca

SEQ ID NO: 119293 - DNA, 17 bp, synthetic construct
  source 1..17: mol_type = other DNA
cttgatcagcaggacag

SEQ ID NO: 119294 - DNA, 17 bp, synthetic construct
  source 1..17: mol_type = other DNA
ttgatcagcaggacagg

SEQ ID NO: 119295 - DNA, 17 bp, synthetic construct
  source 1..17: mol_type = other DNA
tgatcagcaggacaggc

SEQ ID NO: 119296 - DNA, 17 bp, synthetic construct
  source 1..17: mol_type = other DNA
gatcagcaggacaggct

SEQ ID NO: 119297 - DNA, 17 bp, synthetic construct
  source 1..17: mol_type = other DNA
atcagcaggacaggctc

SEQ ID NO: 119298 - DNA, 17 bp, synthetic construct
  source 1..17: mol_type = other DNA
tcagcaggacaggctca

SEQ ID NO: 119299 - DNA, 17 bp, synthetic construct
  source 1..17: mol_type = other DNA
cagcaggacaggctcag

SEQ ID NO: 119300 - DNA, 17 bp, synthetic construct
  source 1..17: mol_type = other DNA
agcaggacaggctcagg

SEQ ID NO: 119301 - DNA, 17 bp, synthetic construct
  source 1..17: mol_type = other DNA
gcaggacaggctcaggg

SEQ ID NO: 119302 - DNA, 17 bp, synthetic construct
  source 1..17: mol_type = other DNA
caggacaggctcagggc

SEQ ID NO: 119303 - DNA, 17 bp, synthetic construct
  source 1..17: mol_type = other DNA
aggacaggctcagggct

SEQ ID NO: 119304 - DNA, 17 bp, synthetic construct
  source 1..17: mol_type = other DNA
ggacaggctcagggctg

SEQ ID NO: 119305 - DNA, 17 bp, synthetic construct
  source 1..17: mol_type = other DNA
gacaggctcagggctgc

SEQ ID NO: 119306 - DNA, 17 bp, synthetic construct
  source 1..17: mol_type = other DNA
acaggctcagggctgcc

SEQ ID NO: 119307 - DNA, 17 bp, synthetic construct
  source 1..17: mol_type = other DNA
caggctcagggctgcct

SEQ ID NO: 119308 - DNA, 17 bp, synthetic construct
  source 1..17: mol_type = other DNA
aggctcagggctgcctg

SEQ ID NO: 119309 - DNA, 17 bp, synthetic construct
  source 1..17: mol_type = other DNA
ggctcagggctgcctgg

SEQ ID NO: 119310 - DNA, 17 bp, synthetic construct
  source 1..17: mol_type = other DNA
gctcagggctgcctggg

SEQ ID NO: 119311 - DNA, 17 bp, synthetic construct
  source 1..17: mol_type = other DNA
ctcagggctgcctgggg

SEQ ID NO: 119312 - DNA, 17 bp, synthetic construct
  source 1..17: mol_type = other DNA
tcagggctgcctggggt

SEQ ID NO: 119313 - DNA, 17 bp, synthetic construct
  source 1..17: mol_type = other DNA
cagggctgcctggggtc

SEQ ID NO: 119314 - DNA, 17 bp, synthetic construct
  source 1..17: mol_type = other DNA
agggctgcctggggtca

SEQ ID NO: 119315 - DNA, 17 bp, synthetic construct
  source 1..17: mol_type = other DNA
gggctgcctggggtcag

SEQ ID NO: 119316 - DNA, 17 bp, synthetic construct
  source 1..17: mol_type = other DNA
ggctgcctggggtcagt

SEQ ID NO: 119317 - DNA, 17 bp, synthetic construct
  source 1..17: mol_type = other DNA
gctgcctggggtcagtt

SEQ ID NO: 119318 - DNA, 17 bp, synthetic construct
  source 1..17: mol_type = other DNA
ctgcctggggtcagttg

SEQ ID NO: 119319 - DNA, 17 bp, synthetic construct
  source 1..17: mol_type = other DNA
tgcctggggtcagttga

SEQ ID NO: 119320 - DNA, 17 bp, synthetic construct
  source 1..17: mol_type = other DNA
gcctggggtcagttgag

SEQ ID NO: 119321 - DNA, 17 bp, synthetic construct
  source 1..17: mol_type = other DNA
cctggggtcagttgagg

SEQ ID NO: 119322 - DNA, 17 bp, synthetic construct
  source 1..17: mol_type = other DNA
ctggggtcagttgaggg

SEQ ID NO: 119323 - DNA, 17 bp, synthetic construct
  source 1..17: mol_type = other DNA
tggggtcagttgagggc

SEQ ID NO: 119324 - DNA, 17 bp, synthetic construct
  source 1..17: mol_type = other DNA
ggggtcagttgagggcc

SEQ ID NO: 119325 - DNA, 17 bp, synthetic construct
  source 1..17: mol_type = other DNA
gggtcagttgagggccg

SEQ ID NO: 119326 - DNA, 17 bp, synthetic construct
  source 1..17: mol_type = other DNA
ggtcagttgagggccgt

SEQ ID NO: 119327 - DNA, 17 bp, synthetic construct
  source 1..17: mol_type = other DNA
gtcagttgagggccgtg

SEQ ID NO: 119328 - DNA, 17 bp, synthetic construct
  source 1..17: mol_type = other DNA
tcagttgagggccgtgg

SEQ ID NO: 119329 - DNA, 17 bp, synthetic construct
  source 1..17: mol_type = other DNA
cagttgagggccgtggc

SEQ ID NO: 119330 - DNA, 17 bp, synthetic construct
  source 1..17: mol_type = other DNA
agttgagggccgtggct

SEQ ID NO: 119331 - DNA, 17 bp, synthetic construct
  source 1..17: mol_type = other DNA
gttgagggccgtggctg

SEQ ID NO: 119332 - DNA, 17 bp, synthetic construct
  source 1..17: mol_type = other DNA
ttgagggccgtggctgc

SEQ ID NO: 119333 - DNA, 17 bp, synthetic construct
  source 1..17: mol_type = other DNA
tgagggccgtggctgcc

SEQ ID NO: 119334 - DNA, 17 bp, synthetic construct
  source 1..17: mol_type = other DNA
gagggccgtggctgccc

SEQ ID NO: 119335 - DNA, 17 bp, synthetic construct
  source 1..17: mol_type = other DNA
agggccgtggctgccct

SEQ ID NO: 119336 - DNA, 17 bp, synthetic construct
  source 1..17: mol_type = other DNA
gggccgtggctgccctt

SEQ ID NO: 119337 - DNA, 17 bp, synthetic construct
  source 1..17: mol_type = other DNA
ggccgtggctgcccttc

SEQ ID NO: 119338 - DNA, 17 bp, synthetic construct
  source 1..17: mol_type = other DNA
gccgtggctgcccttcc

SEQ ID NO: 119339 - DNA, 17 bp, synthetic construct
  source 1..17: mol_type = other DNA
ccgtggctgcccttccc

SEQ ID NO: 119340 - DNA, 17 bp, synthetic construct
  source 1..17: mol_type = other DNA
cgtggctgcccttcccc

SEQ ID NO: 119341 - DNA, 17 bp, synthetic construct
  source 1..17: mol_type = other DNA
gtggctgcccttcccca

SEQ ID NO: 119342 - DNA, 17 bp, synthetic construct
  source 1..17: mol_type = other DNA
tggctgcccttccccag

SEQ ID NO: 119343 - DNA, 17 bp, synthetic construct
  source 1..17: mol_type = other DNA
ggctgcccttccccagg

SEQ ID NO: 119344 - DNA, 17 bp, synthetic construct
  source 1..17: mol_type = other DNA
gctgcccttccccagga

SEQ ID NO: 119345 - DNA, 17 bp, synthetic construct
  source 1..17: mol_type = other DNA
ctgcccttccccaggac

SEQ ID NO: 119346 - DNA, 17 bp, synthetic construct
  source 1..17: mol_type = other DNA
tgcccttccccaggacc

SEQ ID NO: 119347 - DNA, 17 bp, synthetic construct
  source 1..17: mol_type = other DNA
gcccttccccaggaccc

SEQ ID NO: 119348 - DNA, 17 bp, synthetic construct
  source 1..17: mol_type = other DNA
cccttccccaggacccc

SEQ ID NO: 119349 - DNA, 17 bp, synthetic construct
  source 1..17: mol_type = other DNA
ccttccccaggacccct

SEQ ID NO: 119350 - DNA, 17 bp, synthetic construct
  source 1..17: mol_type = other DNA
cttccccaggacccctc

SEQ ID NO: 119351 - DNA, 17 bp, synthetic construct
  source 1..17: mol_type = other DNA
ttccccaggacccctcc

SEQ ID NO: 119352 - DNA, 17 bp, synthetic construct
  source 1..17: mol_type = other DNA
tccccaggacccctccc

SEQ ID NO: 119353 - DNA, 17 bp, synthetic construct
  source 1..17: mol_type = other DNA
ccccaggacccctccca

SEQ ID NO: 119354 - DNA, 17 bp, synthetic construct
  source 1..17: mol_type = other DNA
cccaggacccctcccac

SEQ ID NO: 119355 - DNA, 17 bp, synthetic construct
  source 1..17: mol_type = other DNA
ccaggacccctcccacc

SEQ ID NO: 119356 - DNA, 17 bp, synthetic construct
  source 1..17: mol_type = other DNA
caggacccctcccacca

SEQ ID NO: 119357 - DNA, 17 bp, synthetic construct
  source 1..17: mol_type = other DNA
aggacccctcccaccaa

SEQ ID NO: 119358 - DNA, 17 bp, synthetic construct
  source 1..17: mol_type = other DNA
ggacccctcccaccaag

SEQ ID NO: 119359 - DNA, 17 bp, synthetic construct
  source 1..17: mol_type = other DNA
gacccctcccaccaagc

SEQ ID NO: 119360 - DNA, 17 bp, synthetic construct
  source 1..17: mol_type = other DNA
acccctcccaccaagct

SEQ ID NO: 119361 - DNA, 17 bp, synthetic construct
  source 1..17: mol_type = other DNA
cccctcccaccaagctc

SEQ ID NO: 119362 - DNA, 17 bp, synthetic construct
  source 1..17: mol_type = other DNA
ccctcccaccaagctct

SEQ ID NO: 119363 - DNA, 17 bp, synthetic construct
  source 1..17: mol_type = other DNA
cctcccaccaagctctg

SEQ ID NO: 119364 - DNA, 17 bp, synthetic construct
  source 1..17: mol_type = other DNA
ctcccaccaagctctgt

SEQ ID NO: 119365 - DNA, 17 bp, synthetic construct
  source 1..17: mol_type = other DNA
tcccaccaagctctgtc

SEQ ID NO: 119366 - DNA, 17 bp, synthetic construct
  source 1..17: mol_type = other DNA
cccaccaagctctgtcc

SEQ ID NO: 119367 - DNA, 17 bp, synthetic construct
  source 1..17: mol_type = other DNA
ccaccaagctctgtccc

SEQ ID NO: 119368 - DNA, 17 bp, synthetic construct
  source 1..17: mol_type = other DNA
caccaagctctgtcccc

SEQ ID NO: 119369 - DNA, 17 bp, synthetic construct
  source 1..17: mol_type = other DNA
accaagctctgtcccca

SEQ ID NO: 119370 - DNA, 17 bp, synthetic construct
  source 1..17: mol_type = other DNA
ccaagctctgtccccag

SEQ ID NO: 119371 - DNA, 17 bp, synthetic construct
  source 1..17: mol_type = other DNA
caagctctgtccccagg

SEQ ID NO: 119372 - DNA, 17 bp, synthetic construct
  source 1..17: mol_type = other DNA
aagctctgtccccaggg

SEQ ID NO: 119373 - DNA, 17 bp, synthetic construct
  source 1..17: mol_type = other DNA
agctctgtccccagggt

SEQ ID NO: 119374 - DNA, 17 bp, synthetic construct
  source 1..17: mol_type = other DNA
gctctgtccccagggtg

SEQ ID NO: 119375 - DNA, 17 bp, synthetic construct
  source 1..17: mol_type = other DNA
ctctgtccccagggtgt

SEQ ID NO: 119376 - DNA, 17 bp, synthetic construct
  source 1..17: mol_type = other DNA
tctgtccccagggtgtg

SEQ ID NO: 119377 - DNA, 17 bp, synthetic construct
  source 1..17: mol_type = other DNA
ctgtccccagggtgtgc

SEQ ID NO: 119378 - DNA, 17 bp, synthetic construct
  source 1..17: mol_type = other DNA
tgtccccagggtgtgca

SEQ ID NO: 119379 - DNA, 17 bp, synthetic construct
  source 1..17: mol_type = other DNA
gtccccagggtgtgcag

SEQ ID NO: 119380 - DNA, 17 bp, synthetic construct
  source 1..17: mol_type = other DNA
tccccagggtgtgcagc

SEQ ID NO: 119381 - DNA, 17 bp, synthetic construct
  source 1..17: mol_type = other DNA
ccccagggtgtgcagcc

SEQ ID NO: 119382 - DNA, 17 bp, synthetic construct
  source 1..17: mol_type = other DNA
cccagggtgtgcagccc

SEQ ID NO: 119383 - DNA, 17 bp, synthetic construct
  source 1..17: mol_type = other DNA
ccagggtgtgcagcccc

SEQ ID NO: 119384 - DNA, 17 bp, synthetic construct
  source 1..17: mol_type = other DNA
cagggtgtgcagccccc

SEQ ID NO: 119385 - DNA, 17 bp, synthetic construct
  source 1..17: mol_type = other DNA
agggtgtgcagccccca

SEQ ID NO: 119386 - DNA, 17 bp, synthetic construct
  source 1..17: mol_type = other DNA
gggtgtgcagcccccat

SEQ ID NO: 119387 - DNA, 17 bp, synthetic construct
  source 1..17: mol_type = other DNA
ggtgtgcagcccccatg

SEQ ID NO: 119388 - DNA, 17 bp, synthetic construct
  source 1..17: mol_type = other DNA
gtgtgcagcccccatgg

SEQ ID NO: 119389 - DNA, 17 bp, synthetic construct
  source 1..17: mol_type = other DNA
tgtgcagcccccatggt

SEQ ID NO: 119390 - DNA, 17 bp, synthetic construct
  source 1..17: mol_type = other DNA
gtgcagcccccatggtg

SEQ ID NO: 119391 - DNA, 17 bp, synthetic construct
  source 1..17: mol_type = other DNA
tgcagcccccatggtgt

SEQ ID NO: 119392 - DNA, 17 bp, synthetic construct
  source 1..17: mol_type = other DNA
gcagcccccatggtgta

SEQ ID NO: 119393 - DNA, 17 bp, synthetic construct
  source 1..17: mol_type = other DNA
cagcccccatggtgtac

SEQ ID NO: 119394 - DNA, 17 bp, synthetic construct
  source 1..17: mol_type = other DNA
agcccccatggtgtacc

SEQ ID NO: 119395 - DNA, 17 bp, synthetic construct
  source 1..17: mol_type = other DNA
gcccccatggtgtacct

SEQ ID NO: 119396 - DNA, 17 bp, synthetic construct
  source 1..17: mol_type = other DNA
cccccatggtgtacctg

SEQ ID NO: 119397 - DNA, 17 bp, synthetic construct
  source 1..17: mol_type = other DNA
ccccatggtgtacctgg

SEQ ID NO: 119398 - DNA, 17 bp, synthetic construct
  source 1..17: mol_type = other DNA
cccatggtgtacctgga

SEQ ID NO: 119399 - DNA, 17 bp, synthetic construct
  source 1..17: mol_type = other DNA
ccatggtgtacctggac

SEQ ID NO: 119400 - DNA, 17 bp, synthetic construct
  source 1..17: mol_type = other DNA
catggtgtacctggact

SEQ ID NO: 119401 - DNA, 17 bp, synthetic construct
  source 1..17: mol_type = other DNA
atggtgtacctggactg

SEQ ID NO: 119402 - DNA, 17 bp, synthetic construct
  source 1..17: mol_type = other DNA
tggtgtacctggactgc

SEQ ID NO: 119403 - DNA, 17 bp, synthetic construct
  source 1..17: mol_type = other DNA
ggtgtacctggactgca

SEQ ID NO: 119404 - DNA, 17 bp, synthetic construct
  source 1..17: mol_type = other DNA
gtgtacctggactgcag

SEQ ID NO: 119405 - DNA, 17 bp, synthetic construct
  source 1..17: mol_type = other DNA
tgtacctggactgcagc

SEQ ID NO: 119406 - DNA, 17 bp, synthetic construct
  source 1..17: mol_type = other DNA
gtacctggactgcagca

SEQ ID NO: 119407 - DNA, 17 bp, synthetic construct
  source 1..17: mol_type = other DNA
tacctggactgcagcaa

SEQ ID NO: 119408 - DNA, 17 bp, synthetic construct
  source 1..17: mol_type = other DNA
acctggactgcagcaac

SEQ ID NO: 119409 - DNA, 17 bp, synthetic construct
  source 1..17: mol_type = other DNA
cctggactgcagcaaca

SEQ ID NO: 119410 - DNA, 17 bp, synthetic construct
  source 1..17: mol_type = other DNA
ctggactgcagcaacag

SEQ ID NO: 119411 - DNA, 17 bp, synthetic construct
  source 1..17: mol_type = other DNA
tggactgcagcaacagc

SEQ ID NO: 119412 - DNA, 17 bp, synthetic construct
  source 1..17: mol_type = other DNA
ggactgcagcaacagct

SEQ ID NO: 119413 - DNA, 17 bp, synthetic construct
  source 1..17: mol_type = other DNA
gactgcagcaacagctc

SEQ ID NO: 119414 - DNA, 17 bp, synthetic construct
  source 1..17: mol_type = other DNA
actgcagcaacagctcg

SEQ ID NO: 119415 - DNA, 17 bp, synthetic construct
  source 1..17: mol_type = other DNA
ctgcagcaacagctcgg

SEQ ID NO: 119416 - DNA, 17 bp, synthetic construct
  source 1..17: mol_type = other DNA
tgcagcaacagctcggc

SEQ ID NO: 119417 - DNA, 17 bp, synthetic construct
  source 1..17: mol_type = other DNA
gcagcaacagctcggcg

SEQ ID NO: 119418 - DNA, 17 bp, synthetic construct
  source 1..17: mol_type = other DNA
cagcaacagctcggcgg

SEQ ID NO: 119419 - DNA, 17 bp, synthetic construct
  source 1..17: mol_type = other DNA
agcaacagctcggcggg

SEQ ID NO: 119420 - DNA, 17 bp, synthetic construct
  source 1..17: mol_type = other DNA
gcaacagctcggcgggc

SEQ ID NO: 119421 - DNA, 17 bp, synthetic construct
  source 1..17: mol_type = other DNA
caacagctcggcgggca

SEQ ID NO: 119422 - DNA, 17 bp, synthetic construct
  source 1..17: mol_type = other DNA
aacagctcggcgggcac

SEQ ID NO: 119423 - DNA, 17 bp, synthetic construct
  source 1..17: mol_type = other DNA
acagctcggcgggcacc

SEQ ID NO: 119424 - DNA, 17 bp, synthetic construct
  source 1..17: mol_type = other DNA
cagctcggcgggcaccc

SEQ ID NO: 119425 - DNA, 17 bp, synthetic construct
  source 1..17: mol_type = other DNA
agctcggcgggcacccc

SEQ ID NO: 119426 - DNA, 17 bp, synthetic construct
  source 1..17: mol_type = other DNA
gctcggcgggcacccct

SEQ ID NO: 119427 - DNA, 17 bp, synthetic construct
  source 1..17: mol_type = other DNA
ctcggcgggcacccctg

SEQ ID NO: 119428 - DNA, 17 bp, synthetic construct
  source 1..17: mol_type = other DNA
tcggcgggcacccctgg

SEQ ID NO: 119429 - DNA, 17 bp, synthetic construct
  source 1..17: mol_type = other DNA
cggcgggcacccctggg

SEQ ID NO: 119430 - DNA, 17 bp, synthetic construct
  source 1..17: mol_type = other DNA
ggcgggcacccctgggg

SEQ ID NO: 119431 - DNA, 17 bp, synthetic construct
  source 1..17: mol_type = other DNA
gcgggcacccctggggc

SEQ ID NO: 119432 - DNA, 17 bp, synthetic construct
  source 1..17: mol_type = other DNA
cgggcacccctggggcc

SEQ ID NO: 119433 - DNA, 17 bp, synthetic construct
  source 1..17: mol_type = other DNA
gggcacccctggggccg

SEQ ID NO: 119434 - DNA, 17 bp, synthetic construct
  source 1..17: mol_type = other DNA
ggcacccctggggccga

SEQ ID NO: 119435 - DNA, 17 bp, synthetic construct
  source 1..17: mol_type = other DNA
gcacccctggggccgag

SEQ ID NO: 119436 - DNA, 17 bp, synthetic construct
  source 1..17: mol_type = other DNA
cacccctggggccgagt

SEQ ID NO: 119437 - DNA, 17 bp, synthetic construct
  source 1..17: mol_type = other DNA
acccctggggccgagtg

SEQ ID NO: 119438 - DNA, 17 bp, synthetic construct
  source 1..17: mol_type = other DNA
cccctggggccgagtgc

SEQ ID NO: 119439 - DNA, 17 bp, synthetic construct
  source 1..17: mol_type = other DNA
ccctggggccgagtgcc

SEQ ID NO: 119440 - DNA, 17 bp, synthetic construct
  source 1..17: mol_type = other DNA
cctggggccgagtgcct

SEQ ID NO: 119441 - DNA, 17 bp, synthetic construct
  source 1..17: mol_type = other DNA
ctggggccgagtgcctc

SEQ ID NO: 119442 - DNA, 17 bp, synthetic construct
  source 1..17: mol_type = other DNA
tggggccgagtgcctcc

SEQ ID NO: 119443 - DNA, 17 bp, synthetic construct
  source 1..17: mol_type = other DNA
ggggccgagtgcctccg

SEQ ID NO: 119444 - DNA, 17 bp, synthetic construct
  source 1..17: mol_type = other DNA
gggccgagtgcctccgg

SEQ ID NO: 119445 - DNA, 17 bp, synthetic construct
  source 1..17: mol_type = other DNA
ggccgagtgcctccgga

SEQ ID NO: 119446 - DNA, 17 bp, synthetic construct
  source 1..17: mol_type = other DNA
gccgagtgcctccggag

SEQ ID NO: 119447 - DNA, 17 bp, synthetic construct
  source 1..17: mol_type = other DNA
ccgagtgcctccggagc

SEQ ID NO: 119448 - DNA, 17 bp, synthetic construct
  source 1..17: mol_type = other DNA
cgagtgcctccggagct

SEQ ID NO: 119449 - DNA, 17 bp, synthetic construct
  source 1..17: mol_type = other DNA
gagtgcctccggagctg

SEQ ID NO: 119450 - DNA, 17 bp, synthetic construct
  source 1..17: mol_type = other DNA
agtgcctccggagctgc

SEQ ID NO: 119451 - DNA, 17 bp, synthetic construct
  source 1..17: mol_type = other DNA
gtgcctccggagctgcc

SEQ ID NO: 119452 - DNA, 17 bp, synthetic construct
  source 1..17: mol_type = other DNA
tgcctccggagctgcca

SEQ ID NO: 119453 - DNA, 17 bp, synthetic construct
  source 1..17: mol_type = other DNA
gcctccggagctgccac

SEQ ID NO: 119454 - DNA, 17 bp, synthetic construct
  source 1..17: mol_type = other DNA
cctccggagctgccaca

SEQ ID NO: 119455 - DNA, 17 bp, synthetic construct
  source 1..17: mol_type = other DNA
ctccggagctgccacac

SEQ ID NO: 119456 - DNA, 17 bp, synthetic construct
  source 1..17: mol_type = other DNA
tccggagctgccacacg

SEQ ID NO: 119457 - DNA, 17 bp, synthetic construct
  source 1..17: mol_type = other DNA
ccggagctgccacacgc

SEQ ID NO: 119458 - DNA, 17 bp, synthetic construct
  source 1..17: mol_type = other DNA
cggagctgccacacgct

SEQ ID NO: 119459 - DNA, 17 bp, synthetic construct
  source 1..17: mol_type = other DNA
ggagctgccacacgctg

SEQ ID NO: 119460 - DNA, 17 bp, synthetic construct
  source 1..17: mol_type = other DNA
gagctgccacacgctgg

SEQ ID NO: 119461 - DNA, 17 bp, synthetic construct
  source 1..17: mol_type = other DNA
agctgccacacgctgga

SEQ ID NO: 119462 - DNA, 17 bp, synthetic construct
  source 1..17: mol_type = other DNA
gctgccacacgctggac

SEQ ID NO: 119463 - DNA, 17 bp, synthetic construct
  source 1..17: mol_type = other DNA
ctgccacacgctggacg

SEQ ID NO: 119464 - DNA, 17 bp, synthetic construct
  source 1..17: mol_type = other DNA
tgccacacgctggacgt

SEQ ID NO: 119465 - DNA, 17 bp, synthetic construct
  source 1..17: mol_type = other DNA
gccacacgctggacgtg

SEQ ID NO: 119466 - DNA, 17 bp, synthetic construct
  source 1..17: mol_type = other DNA
ccacacgctggacgtgg

SEQ ID NO: 119467 - DNA, 17 bp, synthetic construct
  source 1..17: mol_type = other DNA
cacacgctggacgtggg

SEQ ID NO: 119468 - DNA, 17 bp, synthetic construct
  source 1..17: mol_type = other DNA
acacgctggacgtgggc

SEQ ID NO: 119469 - DNA, 17 bp, synthetic construct
  source 1..17: mol_type = other DNA
cacgctggacgtgggct

SEQ ID NO: 119470 - DNA, 17 bp, synthetic construct
  source 1..17: mol_type = other DNA
acgctggacgtgggctg

SEQ ID NO: 119471 - DNA, 17 bp, synthetic construct
  source 1..17: mol_type = other DNA
cgctggacgtgggctgt

SEQ ID NO: 119472 - DNA, 17 bp, synthetic construct
  source 1..17: mol_type = other DNA
gctggacgtgggctgtg

SEQ ID NO: 119473 - DNA, 17 bp, synthetic construct
  source 1..17: mol_type = other DNA
ctggacgtgggctgtgt

SEQ ID NO: 119474 - DNA, 17 bp, synthetic construct
  source 1..17: mol_type = other DNA
tggacgtgggctgtgtg

SEQ ID NO: 119475 - DNA, 17 bp, synthetic construct
  source 1..17: mol_type = other DNA
ggacgtgggctgtgtga

SEQ ID NO: 119476 - DNA, 17 bp, synthetic construct
  source 1..17: mol_type = other DNA
gacgtgggctgtgtgag

SEQ ID NO: 119477 - DNA, 17 bp, synthetic construct
  source 1..17: mol_type = other DNA
acgtgggctgtgtgagt

SEQ ID NO: 119478 - DNA, 17 bp, synthetic construct
  source 1..17: mol_type = other DNA
cgtgggctgtgtgagtt

SEQ ID NO: 119479 - DNA, 17 bp, synthetic construct
  source 1..17: mol_type = other DNA
gtgggctgtgtgagttc

SEQ ID NO: 119480 - DNA, 17 bp, synthetic construct
  source 1..17: mol_type = other DNA
tgggctgtgtgagttcc

SEQ ID NO: 119481 - DNA, 17 bp, synthetic construct
  source 1..17: mol_type = other DNA
gggctgtgtgagttcca

SEQ ID NO: 119482 - DNA, 17 bp, synthetic construct
  source 1..17: mol_type = other DNA
ggctgtgtgagttccat

SEQ ID NO: 119483 - DNA, 17 bp, synthetic construct
  source 1..17: mol_type = other DNA
gctgtgtgagttccatg

SEQ ID NO: 119484 - DNA, 17 bp, synthetic construct
  source 1..17: mol_type = other DNA
ctgtgtgagttccatgc

SEQ ID NO: 119485 - DNA, 17 bp, synthetic construct
  source 1..17: mol_type = other DNA
tgtgtgagttccatgct

SEQ ID NO: 119486 - DNA, 17 bp, synthetic construct
  source 1..17: mol_type = other DNA
gtgtgagttccatgctt

SEQ ID NO: 119487 - DNA, 17 bp, synthetic construct
  source 1..17: mol_type = other DNA
tgtgagttccatgcttc

SEQ ID NO: 119488 - DNA, 17 bp, synthetic construct
  source 1..17: mol_type = other DNA
gtgagttccatgcttca

SEQ ID NO: 119489 - DNA, 17 bp, synthetic construct
  source 1..17: mol_type = other DNA
tgagttccatgcttcag

SEQ ID NO: 119490 - DNA, 17 bp, synthetic construct
  source 1..17: mol_type = other DNA
gagttccatgcttcagg

SEQ ID NO: 119491 - DNA, 17 bp, synthetic construct
  source 1..17: mol_type = other DNA
agttccatgcttcaggg

SEQ ID NO: 119492 - DNA, 17 bp, synthetic construct
  source 1..17: mol_type = other DNA
gttccatgcttcaggga

SEQ ID NO: 119493 - DNA, 17 bp, synthetic construct
  source 1..17: mol_type = other DNA
ttccatgcttcagggag

SEQ ID NO: 119494 - DNA, 17 bp, synthetic construct
  source 1..17: mol_type = other DNA
tccatgcttcagggagg

SEQ ID NO: 119495 - DNA, 17 bp, synthetic construct
  source 1..17: mol_type = other DNA
ccatgcttcagggaggg

SEQ ID NO: 119496 - DNA, 17 bp, synthetic construct
  source 1..17: mol_type = other DNA
catgcttcagggagggg

SEQ ID NO: 119497 - DNA, 17 bp, synthetic construct
  source 1..17: mol_type = other DNA
atgcttcagggaggggt

SEQ ID NO: 119498 - DNA, 17 bp, synthetic construct
  source 1..17: mol_type = other DNA
tgcttcagggaggggtg

SEQ ID NO: 119499 - DNA, 17 bp, synthetic construct
  source 1..17: mol_type = other DNA
gcttcagggaggggtgg

SEQ ID NO: 119500 - DNA, 17 bp, synthetic construct
  source 1..17: mol_type = other DNA
cttcagggaggggtggg

SEQ ID NO: 119501 - DNA, 17 bp, synthetic construct
  source 1..17: mol_type = other DNA
ttcagggaggggtgggc

SEQ ID NO: 119502 - DNA, 17 bp, synthetic construct
  source 1..17: mol_type = other DNA
tcagggaggggtgggca

SEQ ID NO: 119503 - DNA, 17 bp, synthetic construct
  source 1..17: mol_type = other DNA
cagggaggggtgggcag

SEQ ID NO: 119504 - DNA, 17 bp, synthetic construct
  source 1..17: mol_type = other DNA
agggaggggtgggcagg

SEQ ID NO: 119505 - DNA, 17 bp, synthetic construct
  source 1..17: mol_type = other DNA
gggaggggtgggcaggg

SEQ ID NO: 119506 - DNA, 17 bp, synthetic construct
  source 1..17: mol_type = other DNA
ggaggggtgggcaggga

SEQ ID NO: 119507 - DNA, 17 bp, synthetic construct
  source 1..17: mol_type = other DNA
gaggggtgggcagggaa

SEQ ID NO: 119508 - DNA, 17 bp, synthetic construct
  source 1..17: mol_type = other DNA
aggggtgggcagggaag

SEQ ID NO: 119509 - DNA, 17 bp, synthetic construct
  source 1..17: mol_type = other DNA
ggggtgggcagggaagg

SEQ ID NO: 119510 - DNA, 17 bp, synthetic construct
  source 1..17: mol_type = other DNA
gggtgggcagggaaggg

SEQ ID NO: 119511 - DNA, 17 bp, synthetic construct
  source 1..17: mol_type = other DNA
ggtgggcagggaagggg

SEQ ID NO: 119512 - DNA, 17 bp, synthetic construct
  source 1..17: mol_type = other DNA
gtgggcagggaaggggt

SEQ ID NO: 119513 - DNA, 17 bp, synthetic construct
  source 1..17: mol_type = other DNA
tgggcagggaaggggtc

SEQ ID NO: 119514 - DNA, 17 bp, synthetic construct
  source 1..17: mol_type = other DNA
gggcagggaaggggtcc

SEQ ID NO: 119515 - DNA, 17 bp, synthetic construct
  source 1..17: mol_type = other DNA
ggcagggaaggggtccc

SEQ ID NO: 119516 - DNA, 17 bp, synthetic construct
  source 1..17: mol_type = other DNA
gcagggaaggggtccca

SEQ ID NO: 119517 - DNA, 17 bp, synthetic construct
  source 1..17: mol_type = other DNA
cagggaaggggtcccag

SEQ ID NO: 119518 - DNA, 17 bp, synthetic construct
  source 1..17: mol_type = other DNA
agggaaggggtcccagc

SEQ ID NO: 119519 - DNA, 17 bp, synthetic construct
  source 1..17: mol_type = other DNA
gggaaggggtcccagct

SEQ ID NO: 119520 - DNA, 17 bp, synthetic construct
  source 1..17: mol_type = other DNA
ggaaggggtcccagctt

SEQ ID NO: 119521 - DNA, 17 bp, synthetic construct
  source 1..17: mol_type = other DNA
gaaggggtcccagcttt

SEQ ID NO: 119522 - DNA, 17 bp, synthetic construct
  source 1..17: mol_type = other DNA
aaggggtcccagctttc

SEQ ID NO: 119523 - DNA, 17 bp, synthetic construct
  source 1..17: mol_type = other DNA
aggggtcccagctttcc

SEQ ID NO: 119524 - DNA, 17 bp, synthetic construct
  source 1..17: mol_type = other DNA
ggggtcccagctttccc

SEQ ID NO: 119525 - DNA, 17 bp, synthetic construct
  source 1..17: mol_type = other DNA
gggtcccagctttccca

SEQ ID NO: 119526 - DNA, 17 bp, synthetic construct
  source 1..17: mol_type = other DNA
ggtcccagctttcccag

SEQ ID NO: 119527 - DNA, 17 bp, synthetic construct
  source 1..17: mol_type = other DNA
gtcccagctttcccagc

SEQ ID NO: 119528 - DNA, 17 bp, synthetic construct
  source 1..17: mol_type = other DNA
tcccagctttcccagct

SEQ ID NO: 119529 - DNA, 17 bp, synthetic construct
  source 1..17: mol_type = other DNA
cccagctttcccagctc

SEQ ID NO: 119530 - DNA, 17 bp, synthetic construct
  source 1..17: mol_type = other DNA
ccagctttcccagctcc

SEQ ID NO: 119531 - DNA, 17 bp, synthetic construct
  source 1..17: mol_type = other DNA
cagctttcccagctccc

SEQ ID NO: 119532 - DNA, 17 bp, synthetic construct
  source 1..17: mol_type = other DNA
agctttcccagctcccg

SEQ ID NO: 119533 - DNA, 17 bp, synthetic construct
  source 1..17: mol_type = other DNA
gctttcccagctcccga

SEQ ID NO: 119534 - DNA, 17 bp, synthetic construct
  source 1..17: mol_type = other DNA
ctttcccagctcccgag

SEQ ID NO: 119535 - DNA, 17 bp, synthetic construct
  source 1..17: mol_type = other DNA
tttcccagctcccgagc

SEQ ID NO: 119536 - DNA, 17 bp, synthetic construct
  source 1..17: mol_type = other DNA
ttcccagctcccgagcc

SEQ ID NO: 119537 - DNA, 17 bp, synthetic construct
  source 1..17: mol_type = other DNA
tcccagctcccgagccc

SEQ ID NO: 119538 - DNA, 17 bp, synthetic construct
  source 1..17: mol_type = other DNA
cccagctcccgagccca

SEQ ID NO: 119539 - DNA, 17 bp, synthetic construct
  source 1..17: mol_type = other DNA
ccagctcccgagcccag

SEQ ID NO: 119540 - DNA, 17 bp, synthetic construct
  source 1..17: mol_type = other DNA
cagctcccgagcccagg

SEQ ID NO: 119541 - DNA, 17 bp, synthetic construct
  source 1..17: mol_type = other DNA
agctcccgagcccaggg

SEQ ID NO: 119542 - DNA, 17 bp, synthetic construct
  source 1..17: mol_type = other DNA
gctcccgagcccaggga

SEQ ID NO: 119543 - DNA, 17 bp, synthetic construct
  source 1..17: mol_type = other DNA
ctcccgagcccagggat

SEQ ID NO: 119544 - DNA, 17 bp, synthetic construct
  source 1..17: mol_type = other DNA
tcccgagcccagggatc

SEQ ID NO: 119545 - DNA, 17 bp, synthetic construct
  source 1..17: mol_type = other DNA
cccgagcccagggatct

SEQ ID NO: 119546 - DNA, 17 bp, synthetic construct
  source 1..17: mol_type = other DNA
ccgagcccagggatctg

SEQ ID NO: 119547 - DNA, 17 bp, synthetic construct
  source 1..17: mol_type = other DNA
cgagcccagggatctgg

SEQ ID NO: 119548 - DNA, 17 bp, synthetic construct
  source 1..17: mol_type = other DNA
gagcccagggatctggt

SEQ ID NO: 119549 - DNA, 17 bp, synthetic construct
  source 1..17: mol_type = other DNA
agcccagggatctggtg

SEQ ID NO: 119550 - DNA, 17 bp, synthetic construct
  source 1..17: mol_type = other DNA
gcccagggatctggtgg

SEQ ID NO: 119551 - DNA, 17 bp, synthetic construct
  source 1..17: mol_type = other DNA
cccagggatctggtggt

SEQ ID NO: 119552 - DNA, 17 bp, synthetic construct
  source 1..17: mol_type = other DNA
ccagggatctggtggtc

SEQ ID NO: 119553 - DNA, 17 bp, synthetic construct
  source 1..17: mol_type = other DNA
cagggatctggtggtcc

SEQ ID NO: 119554 - DNA, 17 bp, synthetic construct
  source 1..17: mol_type = other DNA
agggatctggtggtcct

SEQ ID NO: 119555 - DNA, 17 bp, synthetic construct
  source 1..17: mol_type = other DNA
gggatctggtggtcctg

SEQ ID NO: 119556 - DNA, 17 bp, synthetic construct
  source 1..17: mol_type = other DNA
ggatctggtggtcctgg

SEQ ID NO: 119557 - DNA, 17 bp, synthetic construct
  source 1..17: mol_type = other DNA
gatctggtggtcctgga

SEQ ID NO: 119558 - DNA, 17 bp, synthetic construct
  source 1..17: mol_type = other DNA
atctggtggtcctggag

SEQ ID NO: 119559 - DNA, 17 bp, synthetic construct
  source 1..17: mol_type = other DNA
tctggtggtcctggaga

SEQ ID NO: 119560 - DNA, 17 bp, synthetic construct
  source 1..17: mol_type = other DNA
ctggtggtcctggagac

SEQ ID NO: 119561 - DNA, 17 bp, synthetic construct
  source 1..17: mol_type = other DNA
tggtggtcctggagaca

SEQ ID NO: 119562 - DNA, 17 bp, synthetic construct
  source 1..17: mol_type = other DNA
ggtggtcctggagacac

SEQ ID NO: 119563 - DNA, 17 bp, synthetic construct
  source 1..17: mol_type = other DNA
gtggtcctggagacact

SEQ ID NO: 119564 - DNA, 17 bp, synthetic construct
  source 1..17: mol_type = other DNA
tggtcctggagacactt

SEQ ID NO: 119565 - DNA, 17 bp, synthetic construct
  source 1..17: mol_type = other DNA
ggtcctggagacactta

SEQ ID NO: 119566 - DNA, 17 bp, synthetic construct
  source 1..17: mol_type = other DNA
gtcctggagacacttac

SEQ ID NO: 119567 - DNA, 17 bp, synthetic construct
  source 1..17: mol_type = other DNA
tcctggagacacttacc

SEQ ID NO: 119568 - DNA, 17 bp, synthetic construct
  source 1..17: mol_type = other DNA
cctggagacacttaccc

SEQ ID NO: 119569 - DNA, 17 bp, synthetic construct
  source 1..17: mol_type = other DNA
ctggagacacttaccca

SEQ ID NO: 119570 - DNA, 17 bp, synthetic construct
  source 1..17: mol_type = other DNA
tggagacacttacccac

SEQ ID NO: 119571 - DNA, 17 bp, synthetic construct
  source 1..17: mol_type = other DNA
ggagacacttacccacc

SEQ ID NO: 119572 - DNA, 17 bp, synthetic construct
  source 1..17: mol_type = other DNA
gagacacttacccacct

SEQ ID NO: 119573 - DNA, 17 bp, synthetic construct
  source 1..17: mol_type = other DNA
agacacttacccacctg

SEQ ID NO: 119574 - DNA, 17 bp, synthetic construct
  source 1..17: mol_type = other DNA
gacacttacccacctgg

SEQ ID NO: 119575 - DNA, 17 bp, synthetic construct
  source 1..17: mol_type = other DNA
acacttacccacctgga

SEQ ID NO: 119576 - DNA, 17 bp, synthetic construct
  source 1..17: mol_type = other DNA
cacttacccacctggaa

SEQ ID NO: 119577 - DNA, 17 bp, synthetic construct
  source 1..17: mol_type = other DNA
acttacccacctggaag

SEQ ID NO: 119578 - DNA, 17 bp, synthetic construct
  source 1..17: mol_type = other DNA
cttacccacctggaagc

SEQ ID NO: 119579 - DNA, 17 bp, synthetic construct
  source 1..17: mol_type = other DNA
ttacccacctggaagct

SEQ ID NO: 119580 - DNA, 17 bp, synthetic construct
  source 1..17: mol_type = other DNA
tacccacctggaagctc

SEQ ID NO: 119581 - DNA, 17 bp, synthetic construct
  source 1..17: mol_type = other DNA
acccacctggaagctcc

SEQ ID NO: 119582 - DNA, 17 bp, synthetic construct
  source 1..17: mol_type = other DNA
cccacctggaagctccg

SEQ ID NO: 119583 - DNA, 17 bp, synthetic construct
  source 1..17: mol_type = other DNA
ccacctggaagctccgc

SEQ ID NO: 119584 - DNA, 17 bp, synthetic construct
  source 1..17: mol_type = other DNA
cacctggaagctccgcc

SEQ ID NO: 119585 - DNA, 17 bp, synthetic construct
  source 1..17: mol_type = other DNA
acctggaagctccgccc

SEQ ID NO: 119586 - DNA, 17 bp, synthetic construct
  source 1..17: mol_type = other DNA
cctggaagctccgccct

SEQ ID NO: 119587 - DNA, 17 bp, synthetic construct
  source 1..17: mol_type = other DNA
ctggaagctccgccctg

SEQ ID NO: 119588 - DNA, 17 bp, synthetic construct
  source 1..17: mol_type = other DNA
tggaagctccgccctgg

SEQ ID NO: 119589 - DNA, 17 bp, synthetic construct
  source 1..17: mol_type = other DNA
ggaagctccgccctggc

SEQ ID NO: 119590 - DNA, 17 bp, synthetic construct
  source 1..17: mol_type = other DNA
gaagctccgccctggcc

SEQ ID NO: 119591 - DNA, 17 bp, synthetic construct
  source 1..17: mol_type = other DNA
aagctccgccctggccc

SEQ ID NO: 119592 - DNA, 17 bp, synthetic construct
  source 1..17: mol_type = other DNA
agctccgccctggccca

SEQ ID NO: 119593 - DNA, 17 bp, synthetic construct
  source 1..17: mol_type = other DNA
gctccgccctggcccat

SEQ ID NO: 119594 - DNA, 17 bp, synthetic construct
  source 1..17: mol_type = other DNA
ctccgccctggcccatg

SEQ ID NO: 119595 - DNA, 17 bp, synthetic construct
  source 1..17: mol_type = other DNA
tccgccctggcccatgc

SEQ ID NO: 119596 - DNA, 17 bp, synthetic construct
  source 1..17: mol_type = other DNA
ccgccctggcccatgcg

SEQ ID NO: 119597 - DNA, 17 bp, synthetic construct
  source 1..17: mol_type = other DNA
cgccctggcccatgcgt

SEQ ID NO: 119598 - DNA, 17 bp, synthetic construct
  source 1..17: mol_type = other DNA
gccctggcccatgcgtt

SEQ ID NO: 119599 - DNA, 17 bp, synthetic construct
  source 1..17: mol_type = other DNA
ccctggcccatgcgttg

SEQ ID NO: 119600 - DNA, 17 bp, synthetic construct
  source 1..17: mol_type = other DNA
cctggcccatgcgttgc

SEQ ID NO: 119601 - DNA, 17 bp, synthetic construct
  source 1..17: mol_type = other DNA
ctggcccatgcgttgcc

SEQ ID NO: 119602 - DNA, 17 bp, synthetic construct
  source 1..17: mol_type = other DNA
tggcccatgcgttgccc

SEQ ID NO: 119603 - DNA, 17 bp, synthetic construct
  source 1..17: mol_type = other DNA
ggcccatgcgttgccct

SEQ ID NO: 119604 - DNA, 17 bp, synthetic construct
  source 1..17: mol_type = other DNA
gcccatgcgttgccctg

SEQ ID NO: 119605 - DNA, 17 bp, synthetic construct
  source 1..17: mol_type = other DNA
cccatgcgttgccctgg

SEQ ID NO: 119606 - DNA, 17 bp, synthetic construct
  source 1..17: mol_type = other DNA
ccatgcgttgccctggg

SEQ ID NO: 119607 - DNA, 17 bp, synthetic construct
  source 1..17: mol_type = other DNA
catgcgttgccctgggt

SEQ ID NO: 119608 - DNA, 17 bp, synthetic construct
  source 1..17: mol_type = other DNA
atgcgttgccctgggtg

SEQ ID NO: 119609 - DNA, 17 bp, synthetic construct
  source 1..17: mol_type = other DNA
tgcgttgccctgggtgc

SEQ ID NO: 119610 - DNA, 17 bp, synthetic construct
  source 1..17: mol_type = other DNA
gcgttgccctgggtgct

SEQ ID NO: 119611 - DNA, 17 bp, synthetic construct
  source 1..17: mol_type = other DNA
cgttgccctgggtgctg

SEQ ID NO: 119612 - DNA, 17 bp, synthetic construct
  source 1..17: mol_type = other DNA
gttgccctgggtgctgc

SEQ ID NO: 119613 - DNA, 17 bp, synthetic construct
  source 1..17: mol_type = other DNA
ttgccctgggtgctgct

SEQ ID NO: 119614 - DNA, 17 bp, synthetic construct
  source 1..17: mol_type = other DNA
tgccctgggtgctgctg

SEQ ID NO: 119615 - DNA, 17 bp, synthetic construct
  source 1..17: mol_type = other DNA
gccctgggtgctgctgg

SEQ ID NO: 119616 - DNA, 17 bp, synthetic construct
  source 1..17: mol_type = other DNA
ccctgggtgctgctggg

SEQ ID NO: 119617 - DNA, 17 bp, synthetic construct
  source 1..17: mol_type = other DNA
cctgggtgctgctgggt

SEQ ID NO: 119618 - DNA, 17 bp, synthetic construct
  source 1..17: mol_type = other DNA
ctgggtgctgctgggtg

SEQ ID NO: 119619 - DNA, 17 bp, synthetic construct
  source 1..17: mol_type = other DNA
tgggtgctgctgggtgc

SEQ ID NO: 119620 - DNA, 17 bp, synthetic construct
  source 1..17: mol_type = other DNA
gggtgctgctgggtgcg

SEQ ID NO: 119621 - DNA, 17 bp, synthetic construct
  source 1..17: mol_type = other DNA
ggtgctgctgggtgcgc

SEQ ID NO: 119622 - DNA, 17 bp, synthetic construct
  source 1..17: mol_type = other DNA
gtgctgctgggtgcgcc

SEQ ID NO: 119623 - DNA, 17 bp, synthetic construct
  source 1..17: mol_type = other DNA
tgctgctgggtgcgcct

SEQ ID NO: 119624 - DNA, 17 bp, synthetic construct
  source 1..17: mol_type = other DNA
gctgctgggtgcgcctg

SEQ ID NO: 119625 - DNA, 17 bp, synthetic construct
  source 1..17: mol_type = other DNA
ctgctgggtgcgcctgt

SEQ ID NO: 119626 - DNA, 17 bp, synthetic construct
  source 1..17: mol_type = other DNA
tgctgggtgcgcctgtc

SEQ ID NO: 119627 - DNA, 17 bp, synthetic construct
  source 1..17: mol_type = other DNA
gctgggtgcgcctgtcc

SEQ ID NO: 119628 - DNA, 17 bp, synthetic construct
  source 1..17: mol_type = other DNA
ctgggtgcgcctgtccc

SEQ ID NO: 119629 - DNA, 17 bp, synthetic construct
  source 1..17: mol_type = other DNA
tgggtgcgcctgtccca

SEQ ID NO: 119630 - DNA, 17 bp, synthetic construct
  source 1..17: mol_type = other DNA
gggtgcgcctgtcccag

SEQ ID NO: 119631 - DNA, 17 bp, synthetic construct
  source 1..17: mol_type = other DNA
ggtgcgcctgtcccaga

SEQ ID NO: 119632 - DNA, 17 bp, synthetic construct
  source 1..17: mol_type = other DNA
gtgcgcctgtcccagag

SEQ ID NO: 119633 - DNA, 17 bp, synthetic construct
  source 1..17: mol_type = other DNA
tgcgcctgtcccagagg

SEQ ID NO: 119634 - DNA, 17 bp, synthetic construct
  source 1..17: mol_type = other DNA
gcgcctgtcccagaggg

SEQ ID NO: 119635 - DNA, 17 bp, synthetic construct
  source 1..17: mol_type = other DNA
cgcctgtcccagagggt

SEQ ID NO: 119636 - DNA, 17 bp, synthetic construct
  source 1..17: mol_type = other DNA
gcctgtcccagagggtg

SEQ ID NO: 119637 - DNA, 17 bp, synthetic construct
  source 1..17: mol_type = other DNA
cctgtcccagagggtga

SEQ ID NO: 119638 - DNA, 17 bp, synthetic construct
  source 1..17: mol_type = other DNA
ctgtcccagagggtgag

SEQ ID NO: 119639 - DNA, 17 bp, synthetic construct
  source 1..17: mol_type = other DNA
tgtcccagagggtgagt

SEQ ID NO: 119640 - DNA, 17 bp, synthetic construct
  source 1..17: mol_type = other DNA
gtcccagagggtgagtg

SEQ ID NO: 119641 - DNA, 17 bp, synthetic construct
  source 1..17: mol_type = other DNA
tcccagagggtgagtga

SEQ ID NO: 119642 - DNA, 17 bp, synthetic construct
  source 1..17: mol_type = other DNA
cccagagggtgagtgac

SEQ ID NO: 119643 - DNA, 17 bp, synthetic construct
  source 1..17: mol_type = other DNA
ccagagggtgagtgaca

SEQ ID NO: 119644 - DNA, 17 bp, synthetic construct
  source 1..17: mol_type = other DNA
cagagggtgagtgacat

SEQ ID NO: 119645 - DNA, 17 bp, synthetic construct
  source 1..17: mol_type = other DNA
agagggtgagtgacatc

SEQ ID NO: 119646 - DNA, 17 bp, synthetic construct
  source 1..17: mol_type = other DNA
gagggtgagtgacatct

SEQ ID NO: 119647 - DNA, 17 bp, synthetic construct
  source 1..17: mol_type = other DNA
agggtgagtgacatctg

SEQ ID NO: 119648 - DNA, 17 bp, synthetic construct
  source 1..17: mol_type = other DNA
gggtgagtgacatctgc

SEQ ID NO: 119649 - DNA, 17 bp, synthetic construct
  source 1..17: mol_type = other DNA
ggtgagtgacatctgcc

SEQ ID NO: 119650 - DNA, 17 bp, synthetic construct
  source 1..17: mol_type = other DNA
gtgagtgacatctgccc

SEQ ID NO: 119651 - DNA, 17 bp, synthetic construct
  source 1..17: mol_type = other DNA
tgagtgacatctgccca

SEQ ID NO: 119652 - DNA, 17 bp, synthetic construct
  source 1..17: mol_type = other DNA
gagtgacatctgcccac

SEQ ID NO: 119653 - DNA, 17 bp, synthetic construct
  source 1..17: mol_type = other DNA
agtgacatctgcccacc

SEQ ID NO: 119654 - DNA, 17 bp, synthetic construct
  source 1..17: mol_type = other DNA
gtgacatctgcccaccc

SEQ ID NO: 119655 - DNA, 17 bp, synthetic construct
  source 1..17: mol_type = other DNA
tgacatctgcccaccct

SEQ ID NO: 119656 - DNA, 17 bp, synthetic construct
  source 1..17: mol_type = other DNA
gacatctgcccaccctg

SEQ ID NO: 119657 - DNA, 17 bp, synthetic construct
  source 1..17: mol_type = other DNA
acatctgcccaccctgg

SEQ ID NO: 119658 - DNA, 17 bp, synthetic construct
  source 1..17: mol_type = other DNA
catctgcccaccctggt

SEQ ID NO: 119659 - DNA, 17 bp, synthetic construct
  source 1..17: mol_type = other DNA
atctgcccaccctggtg

SEQ ID NO: 119660 - DNA, 17 bp, synthetic construct
  source 1..17: mol_type = other DNA
tctgcccaccctggtgt

SEQ ID NO: 119661 - DNA, 17 bp, synthetic construct
  source 1..17: mol_type = other DNA
ctgcccaccctggtgtc

SEQ ID NO: 119662 - DNA, 17 bp, synthetic construct
  source 1..17: mol_type = other DNA
tgcccaccctggtgtcc

SEQ ID NO: 119663 - DNA, 17 bp, synthetic construct
  source 1..17: mol_type = other DNA
gcccaccctggtgtcca

SEQ ID NO: 119664 - DNA, 17 bp, synthetic construct
  source 1..17: mol_type = other DNA
cccaccctggtgtccag

SEQ ID NO: 119665 - DNA, 17 bp, synthetic construct
  source 1..17: mol_type = other DNA
ccaccctggtgtccagc

SEQ ID NO: 119666 - DNA, 17 bp, synthetic construct
  source 1..17: mol_type = other DNA
caccctggtgtccagcc

SEQ ID NO: 119667 - DNA, 17 bp, synthetic construct
  source 1..17: mol_type = other DNA
accctggtgtccagccc

SEQ ID NO: 119668 - DNA, 17 bp, synthetic construct
  source 1..17: mol_type = other DNA
ccctggtgtccagccct

SEQ ID NO: 119669 - DNA, 17 bp, synthetic construct
  source 1..17: mol_type = other DNA
cctggtgtccagccctg

SEQ ID NO: 119670 - DNA, 17 bp, synthetic construct
  source 1..17: mol_type = other DNA
ctggtgtccagccctga

SEQ ID NO: 119671 - DNA, 17 bp, synthetic construct
  source 1..17: mol_type = other DNA
tggtgtccagccctgac

SEQ ID NO: 119672 - DNA, 17 bp, synthetic construct
  source 1..17: mol_type = other DNA
ggtgtccagccctgacc

SEQ ID NO: 119673 - DNA, 17 bp, synthetic construct
  source 1..17: mol_type = other DNA
gtgtccagccctgaccg

SEQ ID NO: 119674 - DNA, 17 bp, synthetic construct
  source 1..17: mol_type = other DNA
tgtccagccctgaccgg

SEQ ID NO: 119675 - DNA, 17 bp, synthetic construct
  source 1..17: mol_type = other DNA
gtccagccctgaccggt

SEQ ID NO: 119676 - DNA, 17 bp, synthetic construct
  source 1..17: mol_type = other DNA
tccagccctgaccggta

SEQ ID NO: 119677 - DNA, 17 bp, synthetic construct
  source 1..17: mol_type = other DNA
ccagccctgaccggtac

SEQ ID NO: 119678 - DNA, 17 bp, synthetic construct
  source 1..17: mol_type = other DNA
cagccctgaccggtacc

SEQ ID NO: 119679 - DNA, 17 bp, synthetic construct
  source 1..17: mol_type = other DNA
agccctgaccggtacct

SEQ ID NO: 119680 - DNA, 17 bp, synthetic construct
  source 1..17: mol_type = other DNA
gccctgaccggtacctg

SEQ ID NO: 119681 - DNA, 17 bp, synthetic construct
  source 1..17: mol_type = other DNA
ccctgaccggtacctgc

SEQ ID NO: 119682 - DNA, 17 bp, synthetic construct
  source 1..17: mol_type = other DNA
cctgaccggtacctgcc

SEQ ID NO: 119683 - DNA, 17 bp, synthetic construct
  source 1..17: mol_type = other DNA
ctgaccggtacctgcct

SEQ ID NO: 119684 - DNA, 17 bp, synthetic construct
  source 1..17: mol_type = other DNA
tgaccggtacctgcctg

SEQ ID NO: 119685 - DNA, 17 bp, synthetic construct
  source 1..17: mol_type = other DNA
gaccggtacctgcctgg

SEQ ID NO: 119686 - DNA, 17 bp, synthetic construct
  source 1..17: mol_type = other DNA
accggtacctgcctggg

SEQ ID NO: 119687 - DNA, 17 bp, synthetic construct
  source 1..17: mol_type = other DNA
ccggtacctgcctgggc

SEQ ID NO: 119688 - DNA, 17 bp, synthetic construct
  source 1..17: mol_type = other DNA
cggtacctgcctgggcc

SEQ ID NO: 119689 - DNA, 17 bp, synthetic construct
  source 1..17: mol_type = other DNA
ggtacctgcctgggccc

SEQ ID NO: 119690 - DNA, 17 bp, synthetic construct
  source 1..17: mol_type = other DNA
gtacctgcctgggcccc

SEQ ID NO: 119691 - DNA, 17 bp, synthetic construct
  source 1..17: mol_type = other DNA
tacctgcctgggcccca

SEQ ID NO: 119692 - DNA, 17 bp, synthetic construct
  source 1..17: mol_type = other DNA
acctgcctgggccccac

SEQ ID NO: 119693 - DNA, 17 bp, synthetic construct
  source 1..17: mol_type = other DNA
cctgcctgggccccaca

SEQ ID NO: 119694 - DNA, 17 bp, synthetic construct
  source 1..17: mol_type = other DNA
ctgcctgggccccacag

SEQ ID NO: 119695 - DNA, 17 bp, synthetic construct
  source 1..17: mol_type = other DNA
tgcctgggccccacagt

SEQ ID NO: 119696 - DNA, 17 bp, synthetic construct
  source 1..17: mol_type = other DNA
gcctgggccccacagtt

SEQ ID NO: 119697 - DNA, 17 bp, synthetic construct
  source 1..17: mol_type = other DNA
cctgggccccacagttc

SEQ ID NO: 119698 - DNA, 17 bp, synthetic construct
  source 1..17: mol_type = other DNA
ctgggccccacagttca

SEQ ID NO: 119699 - DNA, 17 bp, synthetic construct
  source 1..17: mol_type = other DNA
tgggccccacagttcag

SEQ ID NO: 119700 - DNA, 17 bp, synthetic construct
  source 1..17: mol_type = other DNA
gggccccacagttcagc

SEQ ID NO: 119701 - DNA, 17 bp, synthetic construct
  source 1..17: mol_type = other DNA
ggccccacagttcagca

SEQ ID NO: 119702 - DNA, 17 bp, synthetic construct
  source 1..17: mol_type = other DNA
gccccacagttcagcac

SEQ ID NO: 119703 - DNA, 17 bp, synthetic construct
  source 1..17: mol_type = other DNA
ccccacagttcagcaca

SEQ ID NO: 119704 - DNA, 17 bp, synthetic construct
  source 1..17: mol_type = other DNA
cccacagttcagcacac

SEQ ID NO: 119705 - DNA, 17 bp, synthetic construct
  source 1..17: mol_type = other DNA
ccacagttcagcacaca

SEQ ID NO: 119706 - DNA, 17 bp, synthetic construct
  source 1..17: mol_type = other DNA
cacagttcagcacacac

SEQ ID NO: 119707 - DNA, 17 bp, synthetic construct
  source 1..17: mol_type = other DNA
acagttcagcacacact

SEQ ID NO: 119708 - DNA, 17 bp, synthetic construct
  source 1..17: mol_type = other DNA
cagttcagcacacactg

SEQ ID NO: 119709 - DNA, 17 bp, synthetic construct
  source 1..17: mol_type = other DNA
agttcagcacacactgc

SEQ ID NO: 119710 - DNA, 17 bp, synthetic construct
  source 1..17: mol_type = other DNA
gttcagcacacactgcg

SEQ ID NO: 119711 - DNA, 17 bp, synthetic construct
  source 1..17: mol_type = other DNA
ttcagcacacactgcgt

SEQ ID NO: 119712 - DNA, 17 bp, synthetic construct
  source 1..17: mol_type = other DNA
tcagcacacactgcgtg

SEQ ID NO: 119713 - DNA, 17 bp, synthetic construct
  source 1..17: mol_type = other DNA
cagcacacactgcgtgt

SEQ ID NO: 119714 - DNA, 17 bp, synthetic construct
  source 1..17: mol_type = other DNA
agcacacactgcgtgtc

SEQ ID NO: 119715 - DNA, 17 bp, synthetic construct
  source 1..17: mol_type = other DNA
gcacacactgcgtgtcc

SEQ ID NO: 119716 - DNA, 17 bp, synthetic construct
  source 1..17: mol_type = other DNA
cacacactgcgtgtccg

SEQ ID NO: 119717 - DNA, 17 bp, synthetic construct
  source 1..17: mol_type = other DNA
acacactgcgtgtccgg

SEQ ID NO: 119718 - DNA, 17 bp, synthetic construct
  source 1..17: mol_type = other DNA
cacactgcgtgtccggc

SEQ ID NO: 119719 - DNA, 17 bp, synthetic construct
  source 1..17: mol_type = other DNA
acactgcgtgtccggct

SEQ ID NO: 119720 - DNA, 17 bp, synthetic construct
  source 1..17: mol_type = other DNA
cactgcgtgtccggctg

SEQ ID NO: 119721 - DNA, 17 bp, synthetic construct
  source 1..17: mol_type = other DNA
actgcgtgtccggctgt

SEQ ID NO: 119722 - DNA, 17 bp, synthetic construct
  source 1..17: mol_type = other DNA
ctgcgtgtccggctgtg

SEQ ID NO: 119723 - DNA, 17 bp, synthetic construct
  source 1..17: mol_type = other DNA
tgcgtgtccggctgtgt

SEQ ID NO: 119724 - DNA, 17 bp, synthetic construct
  source 1..17: mol_type = other DNA
gcgtgtccggctgtgtc

SEQ ID NO: 119725 - DNA, 17 bp, synthetic construct
  source 1..17: mol_type = other DNA
cgtgtccggctgtgtct

SEQ ID NO: 119726 - DNA, 17 bp, synthetic construct
  source 1..17: mol_type = other DNA
gtgtccggctgtgtctg

SEQ ID NO: 119727 - DNA, 17 bp, synthetic construct
  source 1..17: mol_type = other DNA
tgtccggctgtgtctgt

SEQ ID NO: 119728 - DNA, 17 bp, synthetic construct
  source 1..17: mol_type = other DNA
gtccggctgtgtctgtc

SEQ ID NO: 119729 - DNA, 17 bp, synthetic construct
  source 1..17: mol_type = other DNA
tccggctgtgtctgtcc

SEQ ID NO: 119730 - DNA, 17 bp, synthetic construct
  source 1..17: mol_type = other DNA
ccggctgtgtctgtccc

SEQ ID NO: 119731 - DNA, 17 bp, synthetic construct
  source 1..17: mol_type = other DNA
cggctgtgtctgtcccc

SEQ ID NO: 119732 - DNA, 17 bp, synthetic construct
  source 1..17: mol_type = other DNA
ggctgtgtctgtccccc

SEQ ID NO: 119733 - DNA, 17 bp, synthetic construct
  source 1..17: mol_type = other DNA
gctgtgtctgtcccccg

SEQ ID NO: 119734 - DNA, 17 bp, synthetic construct
  source 1..17: mol_type = other DNA
ctgtgtctgtcccccgg

SEQ ID NO: 119735 - DNA, 17 bp, synthetic construct
  source 1..17: mol_type = other DNA
tgtgtctgtcccccggg

SEQ ID NO: 119736 - DNA, 17 bp, synthetic construct
  source 1..17: mol_type = other DNA
gtgtctgtcccccgggg

SEQ ID NO: 119737 - DNA, 17 bp, synthetic construct
  source 1..17: mol_type = other DNA
tgtctgtcccccggggc

SEQ ID NO: 119738 - DNA, 17 bp, synthetic construct
  source 1..17: mol_type = other DNA
gtctgtcccccggggct

SEQ ID NO: 119739 - DNA, 17 bp, synthetic construct
  source 1..17: mol_type = other DNA
tctgtcccccggggctg

SEQ ID NO: 119740 - DNA, 17 bp, synthetic construct
  source 1..17: mol_type = other DNA
ctgtcccccggggctgg

SEQ ID NO: 119741 - DNA, 17 bp, synthetic construct
  source 1..17: mol_type = other DNA
tgtcccccggggctggt

SEQ ID NO: 119742 - DNA, 17 bp, synthetic construct
  source 1..17: mol_type = other DNA
gtcccccggggctggtg

SEQ ID NO: 119743 - DNA, 17 bp, synthetic construct
  source 1..17: mol_type = other DNA
tcccccggggctggtgt

SEQ ID NO: 119744 - DNA, 17 bp, synthetic construct
  source 1..17: mol_type = other DNA
cccccggggctggtgtc

SEQ ID NO: 119745 - DNA, 17 bp, synthetic construct
  source 1..17: mol_type = other DNA
ccccggggctggtgtcg

SEQ ID NO: 119746 - DNA, 17 bp, synthetic construct
  source 1..17: mol_type = other DNA
cccggggctggtgtcgg

SEQ ID NO: 119747 - DNA, 17 bp, synthetic construct
  source 1..17: mol_type = other DNA
ccggggctggtgtcgga

SEQ ID NO: 119748 - DNA, 17 bp, synthetic construct
  source 1..17: mol_type = other DNA
cggggctggtgtcggat

SEQ ID NO: 119749 - DNA, 17 bp, synthetic construct
  source 1..17: mol_type = other DNA
ggggctggtgtcggatg

SEQ ID NO: 119750 - DNA, 17 bp, synthetic construct
  source 1..17: mol_type = other DNA
gggctggtgtcggatgg

SEQ ID NO: 119751 - DNA, 17 bp, synthetic construct
  source 1..17: mol_type = other DNA
ggctggtgtcggatggg

SEQ ID NO: 119752 - DNA, 17 bp, synthetic construct
  source 1..17: mol_type = other DNA
gctggtgtcggatggga

SEQ ID NO: 119753 - DNA, 17 bp, synthetic construct
  source 1..17: mol_type = other DNA
ctggtgtcggatgggag

SEQ ID NO: 119754 - DNA, 17 bp, synthetic construct
  source 1..17: mol_type = other DNA
tggtgtcggatgggagt

SEQ ID NO: 119755 - DNA, 17 bp, synthetic construct
  source 1..17: mol_type = other DNA
ggtgtcggatgggagtg

SEQ ID NO: 119756 - DNA, 17 bp, synthetic construct
  source 1..17: mol_type = other DNA
gtgtcggatgggagtgg

SEQ ID NO: 119757 - DNA, 17 bp, synthetic construct
  source 1..17: mol_type = other DNA
tgtcggatgggagtggg

SEQ ID NO: 119758 - DNA, 17 bp, synthetic construct
  source 1..17: mol_type = other DNA
gtcggatgggagtgggg

SEQ ID NO: 119759 - DNA, 17 bp, synthetic construct
  source 1..17: mol_type = other DNA
tcggatgggagtggggg

SEQ ID NO: 119760 - DNA, 17 bp, synthetic construct
  source 1..17: mol_type = other DNA
cggatgggagtgggggc

SEQ ID NO: 119761 - DNA, 17 bp, synthetic construct
  source 1..17: mol_type = other DNA
ggatgggagtgggggct

SEQ ID NO: 119762 - DNA, 17 bp, synthetic construct
  source 1..17: mol_type = other DNA
gatgggagtgggggctg

SEQ ID NO: 119763 - DNA, 17 bp, synthetic construct
  source 1..17: mol_type = other DNA
atgggagtgggggctgc

SEQ ID NO: 119764 - DNA, 17 bp, synthetic construct
  source 1..17: mol_type = other DNA
tgggagtgggggctgca

SEQ ID NO: 119765 - DNA, 17 bp, synthetic construct
  source 1..17: mol_type = other DNA
gggagtgggggctgcat

SEQ ID NO: 119766 - DNA, 17 bp, synthetic construct
  source 1..17: mol_type = other DNA
ggagtgggggctgcatt

SEQ ID NO: 119767 - DNA, 17 bp, synthetic construct
  source 1..17: mol_type = other DNA
gagtgggggctgcattg

SEQ ID NO: 119768 - DNA, 17 bp, synthetic construct
  source 1..17: mol_type = other DNA
agtgggggctgcattgc

SEQ ID NO: 119769 - DNA, 17 bp, synthetic construct
  source 1..17: mol_type = other DNA
gtgggggctgcattgcc

SEQ ID NO: 119770 - DNA, 17 bp, synthetic construct
  source 1..17: mol_type = other DNA
tgggggctgcattgccg

SEQ ID NO: 119771 - DNA, 17 bp, synthetic construct
  source 1..17: mol_type = other DNA
gggggctgcattgccga

SEQ ID NO: 119772 - DNA, 17 bp, synthetic construct
  source 1..17: mol_type = other DNA
ggggctgcattgccgag

SEQ ID NO: 119773 - DNA, 17 bp, synthetic construct
  source 1..17: mol_type = other DNA
gggctgcattgccgagg

SEQ ID NO: 119774 - DNA, 17 bp, synthetic construct
  source 1..17: mol_type = other DNA
ggctgcattgccgagga

SEQ ID NO: 119775 - DNA, 17 bp, synthetic construct
  source 1..17: mol_type = other DNA
gctgcattgccgaggag

SEQ ID NO: 119776 - DNA, 17 bp, synthetic construct
  source 1..17: mol_type = other DNA
ctgcattgccgaggagg

SEQ ID NO: 119777 - DNA, 17 bp, synthetic construct
  source 1..17: mol_type = other DNA
tgcattgccgaggagga

SEQ ID NO: 119778 - DNA, 17 bp, synthetic construct
  source 1..17: mol_type = other DNA
gcattgccgaggaggac

SEQ ID NO: 119779 - DNA, 17 bp, synthetic construct
  source 1..17: mol_type = other DNA
cattgccgaggaggact

SEQ ID NO: 119780 - DNA, 17 bp, synthetic construct
  source 1..17: mol_type = other DNA
attgccgaggaggactg

SEQ ID NO: 119781 - DNA, 17 bp, synthetic construct
  source 1..17: mol_type = other DNA
ttgccgaggaggactgc

SEQ ID NO: 119782 - DNA, 17 bp, synthetic construct
  source 1..17: mol_type = other DNA
tgccgaggaggactgcc

SEQ ID NO: 119783 - DNA, 17 bp, synthetic construct
  source 1..17: mol_type = other DNA
gccgaggaggactgccc

SEQ ID NO: 119784 - DNA, 17 bp, synthetic construct
  source 1..17: mol_type = other DNA
ccgaggaggactgcccc

SEQ ID NO: 119785 - DNA, 17 bp, synthetic construct
  source 1..17: mol_type = other DNA
cgaggaggactgcccct

SEQ ID NO: 119786 - DNA, 17 bp, synthetic construct
  source 1..17: mol_type = other DNA
gaggaggactgcccctg

SEQ ID NO: 119787 - DNA, 17 bp, synthetic construct
  source 1..17: mol_type = other DNA
aggaggactgcccctgt

SEQ ID NO: 119788 - DNA, 17 bp, synthetic construct
  source 1..17: mol_type = other DNA
ggaggactgcccctgtg

SEQ ID NO: 119789 - DNA, 17 bp, synthetic construct
  source 1..17: mol_type = other DNA
gaggactgcccctgtgt

SEQ ID NO: 119790 - DNA, 17 bp, synthetic construct
  source 1..17: mol_type = other DNA
aggactgcccctgtgtg

SEQ ID NO: 119791 - DNA, 17 bp, synthetic construct
  source 1..17: mol_type = other DNA
ggactgcccctgtgtgc

SEQ ID NO: 119792 - DNA, 17 bp, synthetic construct
  source 1..17: mol_type = other DNA
gactgcccctgtgtgca

SEQ ID NO: 119793 - DNA, 17 bp, synthetic construct
  source 1..17: mol_type = other DNA
actgcccctgtgtgcac

SEQ ID NO: 119794 - DNA, 17 bp, synthetic construct
  source 1..17: mol_type = other DNA
ctgcccctgtgtgcaca

SEQ ID NO: 119795 - DNA, 17 bp, synthetic construct
  source 1..17: mol_type = other DNA
tgcccctgtgtgcacaa

SEQ ID NO: 119796 - DNA, 17 bp, synthetic construct
  source 1..17: mol_type = other DNA
gcccctgtgtgcacaac

SEQ ID NO: 119797 - DNA, 17 bp, synthetic construct
  source 1..17: mol_type = other DNA
cccctgtgtgcacaacg

SEQ ID NO: 119798 - DNA, 17 bp, synthetic construct
  source 1..17: mol_type = other DNA
ccctgtgtgcacaacga

SEQ ID NO: 119799 - DNA, 17 bp, synthetic construct
  source 1..17: mol_type = other DNA
cctgtgtgcacaacgag

SEQ ID NO: 119800 - DNA, 17 bp, synthetic construct
  source 1..17: mol_type = other DNA
ctgtgtgcacaacgagg

SEQ ID NO: 119801 - DNA, 17 bp, synthetic construct
  source 1..17: mol_type = other DNA
tgtgtgcacaacgaggc

SEQ ID NO: 119802 - DNA, 17 bp, synthetic construct
  source 1..17: mol_type = other DNA
gtgtgcacaacgaggcc

SEQ ID NO: 119803 - DNA, 17 bp, synthetic construct
  source 1..17: mol_type = other DNA
tgtgcacaacgaggcca

SEQ ID NO: 119804 - DNA, 17 bp, synthetic construct
  source 1..17: mol_type = other DNA
gtgcacaacgaggccac

SEQ ID NO: 119805 - DNA, 17 bp, synthetic construct
  source 1..17: mol_type = other DNA
tgcacaacgaggccacc

SEQ ID NO: 119806 - DNA, 17 bp, synthetic construct
  source 1..17: mol_type = other DNA
gcacaacgaggccacct

SEQ ID NO: 119807 - DNA, 17 bp, synthetic construct
  source 1..17: mol_type = other DNA
cacaacgaggccaccta

SEQ ID NO: 119808 - DNA, 17 bp, synthetic construct
  source 1..17: mol_type = other DNA
acaacgaggccacctac

SEQ ID NO: 119809 - DNA, 17 bp, synthetic construct
  source 1..17: mol_type = other DNA
caacgaggccacctaca

SEQ ID NO: 119810 - DNA, 17 bp, synthetic construct
  source 1..17: mol_type = other DNA
aacgaggccacctacaa

SEQ ID NO: 119811 - DNA, 17 bp, synthetic construct
  source 1..17: mol_type = other DNA
acgaggccacctacaag

SEQ ID NO: 119812 - DNA, 17 bp, synthetic construct
  source 1..17: mol_type = other DNA
cgaggccacctacaagc

SEQ ID NO: 119813 - DNA, 17 bp, synthetic construct
  source 1..17: mol_type = other DNA
gaggccacctacaagcc

SEQ ID NO: 119814 - DNA, 17 bp, synthetic construct
  source 1..17: mol_type = other DNA
aggccacctacaagcct

SEQ ID NO: 119815 - DNA, 17 bp, synthetic construct
  source 1..17: mol_type = other DNA
ggccacctacaagcctg

SEQ ID NO: 119816 - DNA, 17 bp, synthetic construct
  source 1..17: mol_type = other DNA
gccacctacaagcctgg

SEQ ID NO: 119817 - DNA, 17 bp, synthetic construct
  source 1..17: mol_type = other DNA
ccacctacaagcctgga

SEQ ID NO: 119818 - DNA, 17 bp, synthetic construct
  source 1..17: mol_type = other DNA
cacctacaagcctggag

SEQ ID NO: 119819 - DNA, 17 bp, synthetic construct
  source 1..17: mol_type = other DNA
acctacaagcctggaga

SEQ ID NO: 119820 - DNA, 17 bp, synthetic construct
  source 1..17: mol_type = other DNA
cctacaagcctggagag

SEQ ID NO: 119821 - DNA, 17 bp, synthetic construct
  source 1..17: mol_type = other DNA
ctacaagcctggagaga

SEQ ID NO: 119822 - DNA, 17 bp, synthetic construct
  source 1..17: mol_type = other DNA
tacaagcctggagagac

SEQ ID NO: 119823 - DNA, 17 bp, synthetic construct
  source 1..17: mol_type = other DNA
acaagcctggagagacc

SEQ ID NO: 119824 - DNA, 17 bp, synthetic construct
  source 1..17: mol_type = other DNA
caagcctggagagacca

SEQ ID NO: 119825 - DNA, 17 bp, synthetic construct
  source 1..17: mol_type = other DNA
aagcctggagagaccat

SEQ ID NO: 119826 - DNA, 17 bp, synthetic construct
  source 1..17: mol_type = other DNA
agcctggagagaccatc

SEQ ID NO: 119827 - DNA, 17 bp, synthetic construct
  source 1..17: mol_type = other DNA
gcctggagagaccatca

SEQ ID NO: 119828 - DNA, 17 bp, synthetic construct
  source 1..17: mol_type = other DNA
cctggagagaccatcag

SEQ ID NO: 119829 - DNA, 17 bp, synthetic construct
  source 1..17: mol_type = other DNA
ctggagagaccatcagg

SEQ ID NO: 119830 - DNA, 17 bp, synthetic construct
  source 1..17: mol_type = other DNA
tggagagaccatcaggg

SEQ ID NO: 119831 - DNA, 17 bp, synthetic construct
  source 1..17: mol_type = other DNA
ggagagaccatcagggt

SEQ ID NO: 119832 - DNA, 17 bp, synthetic construct
  source 1..17: mol_type = other DNA
gagagaccatcagggtc

SEQ ID NO: 119833 - DNA, 17 bp, synthetic construct
  source 1..17: mol_type = other DNA
agagaccatcagggtcg

SEQ ID NO: 119834 - DNA, 17 bp, synthetic construct
  source 1..17: mol_type = other DNA
gagaccatcagggtcga

SEQ ID NO: 119835 - DNA, 17 bp, synthetic construct
  source 1..17: mol_type = other DNA
agaccatcagggtcgac

SEQ ID NO: 119836 - DNA, 17 bp, synthetic construct
  source 1..17: mol_type = other DNA
gaccatcagggtcgact

SEQ ID NO: 119837 - DNA, 17 bp, synthetic construct
  source 1..17: mol_type = other DNA
accatcagggtcgactg

SEQ ID NO: 119838 - DNA, 17 bp, synthetic construct
  source 1..17: mol_type = other DNA
ccatcagggtcgactgc

SEQ ID NO: 119839 - DNA, 17 bp, synthetic construct
  source 1..17: mol_type = other DNA
catcagggtcgactgca

SEQ ID NO: 119840 - DNA, 17 bp, synthetic construct
  source 1..17: mol_type = other DNA
atcagggtcgactgcaa

SEQ ID NO: 119841 - DNA, 17 bp, synthetic construct
  source 1..17: mol_type = other DNA
tcagggtcgactgcaac

SEQ ID NO: 119842 - DNA, 17 bp, synthetic construct
  source 1..17: mol_type = other DNA
cagggtcgactgcaaca

SEQ ID NO: 119843 - DNA, 17 bp, synthetic construct
  source 1..17: mol_type = other DNA
agggtcgactgcaacac

SEQ ID NO: 119844 - DNA, 17 bp, synthetic construct
  source 1..17: mol_type = other DNA
gggtcgactgcaacacc

SEQ ID NO: 119845 - DNA, 17 bp, synthetic construct
  source 1..17: mol_type = other DNA
ggtcgactgcaacacct

SEQ ID NO: 119846 - DNA, 17 bp, synthetic construct
  source 1..17: mol_type = other DNA
gtcgactgcaacacctg

SEQ ID NO: 119847 - DNA, 17 bp, synthetic construct
  source 1..17: mol_type = other DNA
tcgactgcaacacctgg

SEQ ID NO: 119848 - DNA, 17 bp, synthetic construct
  source 1..17: mol_type = other DNA
cgactgcaacacctggt

SEQ ID NO: 119849 - DNA, 17 bp, synthetic construct
  source 1..17: mol_type = other DNA
gactgcaacacctggtg

SEQ ID NO: 119850 - DNA, 17 bp, synthetic construct
  source 1..17: mol_type = other DNA
actgcaacacctggtgg

SEQ ID NO: 119851 - DNA, 17 bp, synthetic construct
  source 1..17: mol_type = other DNA
ctgcaacacctggtggg

SEQ ID NO: 119852 - DNA, 17 bp, synthetic construct
  source 1..17: mol_type = other DNA
tgcaacacctggtgggt

SEQ ID NO: 119853 - DNA, 17 bp, synthetic construct
  source 1..17: mol_type = other DNA
gcaacacctggtgggtc

SEQ ID NO: 119854 - DNA, 17 bp, synthetic construct
  source 1..17: mol_type = other DNA
caacacctggtgggtcg

SEQ ID NO: 119855 - DNA, 17 bp, synthetic construct
  source 1..17: mol_type = other DNA
aacacctggtgggtcgt

SEQ ID NO: 119856 - DNA, 17 bp, synthetic construct
  source 1..17: mol_type = other DNA
acacctggtgggtcgtg

SEQ ID NO: 119857 - DNA, 17 bp, synthetic construct
  source 1..17: mol_type = other DNA
cacctggtgggtcgtga

SEQ ID NO: 119858 - DNA, 17 bp, synthetic construct
  source 1..17: mol_type = other DNA
acctggtgggtcgtgag

SEQ ID NO: 119859 - DNA, 17 bp, synthetic construct
  source 1..17: mol_type = other DNA
cctggtgggtcgtgagt

SEQ ID NO: 119860 - DNA, 17 bp, synthetic construct
  source 1..17: mol_type = other DNA
ctggtgggtcgtgagtc

SEQ ID NO: 119861 - DNA, 17 bp, synthetic construct
  source 1..17: mol_type = other DNA
tggtgggtcgtgagtct

SEQ ID NO: 119862 - DNA, 17 bp, synthetic construct
  source 1..17: mol_type = other DNA
ggtgggtcgtgagtctc

SEQ ID NO: 119863 - DNA, 17 bp, synthetic construct
  source 1..17: mol_type = other DNA
gtgggtcgtgagtctct

SEQ ID NO: 119864 - DNA, 17 bp, synthetic construct
  source 1..17: mol_type = other DNA
tgggtcgtgagtctctc

SEQ ID NO: 119865 - DNA, 17 bp, synthetic construct
  source 1..17: mol_type = other DNA
gggtcgtgagtctctcg

SEQ ID NO: 119866 - DNA, 17 bp, synthetic construct
  source 1..17: mol_type = other DNA
ggtcgtgagtctctcgg

SEQ ID NO: 119867 - DNA, 17 bp, synthetic construct
  source 1..17: mol_type = other DNA
gtcgtgagtctctcgga

SEQ ID NO: 119868 - DNA, 17 bp, synthetic construct
  source 1..17: mol_type = other DNA
tcgtgagtctctcggag

SEQ ID NO: 119869 - DNA, 17 bp, synthetic construct
  source 1..17: mol_type = other DNA
cgtgagtctctcggagg

SEQ ID NO: 119870 - DNA, 17 bp, synthetic construct
  source 1..17: mol_type = other DNA
gtgagtctctcggaggc

SEQ ID NO: 119871 - DNA, 17 bp, synthetic construct
  source 1..17: mol_type = other DNA
tgagtctctcggaggca

SEQ ID NO: 119872 - DNA, 17 bp, synthetic construct
  source 1..17: mol_type = other DNA
gagtctctcggaggcag

SEQ ID NO: 119873 - DNA, 17 bp, synthetic construct
  source 1..17: mol_type = other DNA
agtctctcggaggcagc

SEQ ID NO: 119874 - DNA, 17 bp, synthetic construct
  source 1..17: mol_type = other DNA
gtctctcggaggcagca

SEQ ID NO: 119875 - DNA, 17 bp, synthetic construct
  source 1..17: mol_type = other DNA
tctctcggaggcagcag

SEQ ID NO: 119876 - DNA, 17 bp, synthetic construct
  source 1..17: mol_type = other DNA
ctctcggaggcagcagg

SEQ ID NO: 119877 - DNA, 17 bp, synthetic construct
  source 1..17: mol_type = other DNA
tctcggaggcagcaggt

SEQ ID NO: 119878 - DNA, 17 bp, synthetic construct
  source 1..17: mol_type = other DNA
ctcggaggcagcaggtg

SEQ ID NO: 119879 - DNA, 17 bp, synthetic construct
  source 1..17: mol_type = other DNA
tcggaggcagcaggtgg

SEQ ID NO: 119880 - DNA, 17 bp, synthetic construct
  source 1..17: mol_type = other DNA
cggaggcagcaggtggg

SEQ ID NO: 119881 - DNA, 17 bp, synthetic construct
  source 1..17: mol_type = other DNA
ggaggcagcaggtgggg

SEQ ID NO: 119882 - DNA, 17 bp, synthetic construct
  source 1..17: mol_type = other DNA
gaggcagcaggtgggga

SEQ ID NO: 119883 - DNA, 17 bp, synthetic construct
  source 1..17: mol_type = other DNA
aggcagcaggtggggag

SEQ ID NO: 119884 - DNA, 17 bp, synthetic construct
  source 1..17: mol_type = other DNA
ggcagcaggtggggagg

SEQ ID NO: 119885 - DNA, 17 bp, synthetic construct
  source 1..17: mol_type = other DNA
gcagcaggtggggaggg

SEQ ID NO: 119886 - DNA, 17 bp, synthetic construct
  source 1..17: mol_type = other DNA
cagcaggtggggagggc

SEQ ID NO: 119887 - DNA, 17 bp, synthetic construct
  source 1..17: mol_type = other DNA
agcaggtggggagggcg

SEQ ID NO: 119888 - DNA, 17 bp, synthetic construct
  source 1..17: mol_type = other DNA
gcaggtggggagggcgg

SEQ ID NO: 119889 - DNA, 17 bp, synthetic construct
  source 1..17: mol_type = other DNA
caggtggggagggcggg

SEQ ID NO: 119890 - DNA, 17 bp, synthetic construct
  source 1..17: mol_type = other DNA
aggtggggagggcgggg

SEQ ID NO: 119891 - DNA, 17 bp, synthetic construct
  source 1..17: mol_type = other DNA
ggtggggagggcggggg

SEQ ID NO: 119892 - DNA, 17 bp, synthetic construct
  source 1..17: mol_type = other DNA
gtggggagggcgggggc

SEQ ID NO: 119893 - DNA, 17 bp, synthetic construct
  source 1..17: mol_type = other DNA
tggggagggcgggggcg

SEQ ID NO: 119894 - DNA, 17 bp, synthetic construct
  source 1..17: mol_type = other DNA
ggggagggcgggggcgg

SEQ ID NO: 119895 - DNA, 17 bp, synthetic construct
  source 1..17: mol_type = other DNA
gggagggcgggggcggg

SEQ ID NO: 119896 - DNA, 17 bp, synthetic construct
  source 1..17: mol_type = other DNA
ggagggcgggggcgggg

SEQ ID NO: 119897 - DNA, 17 bp, synthetic construct
  source 1..17: mol_type = other DNA
gagggcgggggcgggga

SEQ ID NO: 119898 - DNA, 17 bp, synthetic construct
  source 1..17: mol_type = other DNA
agggcgggggcggggag

SEQ ID NO: 119899 - DNA, 17 bp, synthetic construct
  source 1..17: mol_type = other DNA
gggcgggggcggggagg

SEQ ID NO: 119900 - DNA, 17 bp, synthetic construct
  source 1..17: mol_type = other DNA
ggcgggggcggggaggg

SEQ ID NO: 119901 - DNA, 17 bp, synthetic construct
  source 1..17: mol_type = other DNA
gcgggggcggggagggc

SEQ ID NO: 119902 - DNA, 17 bp, synthetic construct
  source 1..17: mol_type = other DNA
cgggggcggggagggca

SEQ ID NO: 119903 - DNA, 17 bp, synthetic construct
  source 1..17: mol_type = other DNA
gggggcggggagggcag

SEQ ID NO: 119904 - DNA, 17 bp, synthetic construct
  source 1..17: mol_type = other DNA
ggggcggggagggcagc

SEQ ID NO: 119905 - DNA, 17 bp, synthetic construct
  source 1..17: mol_type = other DNA
gggcggggagggcagcg

SEQ ID NO: 119906 - DNA, 17 bp, synthetic construct
  source 1..17: mol_type = other DNA
ggcggggagggcagcgg

SEQ ID NO: 119907 - DNA, 17 bp, synthetic construct
  source 1..17: mol_type = other DNA
gcggggagggcagcggg

SEQ ID NO: 119908 - DNA, 17 bp, synthetic construct
  source 1..17: mol_type = other DNA
cggggagggcagcgggt

SEQ ID NO: 119909 - DNA, 17 bp, synthetic construct
  source 1..17: mol_type = other DNA
ggggagggcagcgggtg

SEQ ID NO: 119910 - DNA, 17 bp, synthetic construct
  source 1..17: mol_type = other DNA
gggagggcagcgggtgg

SEQ ID NO: 119911 - DNA, 17 bp, synthetic construct
  source 1..17: mol_type = other DNA
ggagggcagcgggtggg

SEQ ID NO: 119912 - DNA, 17 bp, synthetic construct
  source 1..17: mol_type = other DNA
gagggcagcgggtgggg

SEQ ID NO: 119913 - DNA, 17 bp, synthetic construct
  source 1..17: mol_type = other DNA
agggcagcgggtgggga

SEQ ID NO: 119914 - DNA, 17 bp, synthetic construct
  source 1..17: mol_type = other DNA
gggcagcgggtggggag

SEQ ID NO: 119915 - DNA, 17 bp, synthetic construct
  source 1..17: mol_type = other DNA
ggcagcgggtggggagg

SEQ ID NO: 119916 - DNA, 17 bp, synthetic construct
  source 1..17: mol_type = other DNA
gcagcgggtggggaggc

SEQ ID NO: 119917 - DNA, 17 bp, synthetic construct
  source 1..17: mol_type = other DNA
cagcgggtggggaggca

SEQ ID NO: 119918 - DNA, 17 bp, synthetic construct
  source 1..17: mol_type = other DNA
agcgggtggggaggcag

SEQ ID NO: 119919 - DNA, 17 bp, synthetic construct
  source 1..17: mol_type = other DNA
gcgggtggggaggcagc

SEQ ID NO: 119920 - DNA, 17 bp, synthetic construct
  source 1..17: mol_type = other DNA
cgggtggggaggcagcg

SEQ ID NO: 119921 - DNA, 17 bp, synthetic construct
  source 1..17: mol_type = other DNA
gggtggggaggcagcgg

SEQ ID NO: 119922 - DNA, 17 bp, synthetic construct
  source 1..17: mol_type = other DNA
ggtggggaggcagcggg

SEQ ID NO: 119923 - DNA, 17 bp, synthetic construct
  source 1..17: mol_type = other DNA
gtggggaggcagcgggc

SEQ ID NO: 119924 - DNA, 17 bp, synthetic construct
  source 1..17: mol_type = other DNA
tggggaggcagcgggca

SEQ ID NO: 119925 - DNA, 17 bp, synthetic construct
  source 1..17: mol_type = other DNA
ggggaggcagcgggcag

SEQ ID NO: 119926 - DNA, 17 bp, synthetic construct
  source 1..17: mol_type = other DNA
gggaggcagcgggcagg

SEQ ID NO: 119927 - DNA, 17 bp, synthetic construct
  source 1..17: mol_type = other DNA
ggaggcagcgggcaggg

SEQ ID NO: 119928 - DNA, 17 bp, synthetic construct
  source 1..17: mol_type = other DNA
gaggcagcgggcaggga

SEQ ID NO: 119929 - DNA, 17 bp, synthetic construct
  source 1..17: mol_type = other DNA
aggcagcgggcagggag

SEQ ID NO: 119930 - DNA, 17 bp, synthetic construct
  source 1..17: mol_type = other DNA
ggcagcgggcagggagg

SEQ ID NO: 119931 - DNA, 17 bp, synthetic construct
  source 1..17: mol_type = other DNA
gcagcgggcagggaggg

SEQ ID NO: 119932 - DNA, 17 bp, synthetic construct
  source 1..17: mol_type = other DNA
cagcgggcagggagggc

SEQ ID NO: 119933 - DNA, 17 bp, synthetic construct
  source 1..17: mol_type = other DNA
agcgggcagggagggca

SEQ ID NO: 119934 - DNA, 17 bp, synthetic construct
  source 1..17: mol_type = other DNA
gcgggcagggagggcag

SEQ ID NO: 119935 - DNA, 17 bp, synthetic construct
  source 1..17: mol_type = other DNA
cgggcagggagggcagg

SEQ ID NO: 119936 - DNA, 17 bp, synthetic construct
  source 1..17: mol_type = other DNA
gggcagggagggcaggg

SEQ ID NO: 119937 - DNA, 17 bp, synthetic construct
  source 1..17: mol_type = other DNA
ggcagggagggcagggg

SEQ ID NO: 119938 - DNA, 17 bp, synthetic construct
  source 1..17: mol_type = other DNA
gcagggagggcaggggg

SEQ ID NO: 119939 - DNA, 17 bp, synthetic construct
  source 1..17: mol_type = other DNA
cagggagggcagggggc

SEQ ID NO: 119940 - DNA, 17 bp, synthetic construct
  source 1..17: mol_type = other DNA
agggagggcagggggcg

SEQ ID NO: 119941 - DNA, 17 bp, synthetic construct
  source 1..17: mol_type = other DNA
gggagggcagggggcgg

SEQ ID NO: 119942 - DNA, 17 bp, synthetic construct
  source 1..17: mol_type = other DNA
ggagggcagggggcggg

SEQ ID NO: 119943 - DNA, 17 bp, synthetic construct
  source 1..17: mol_type = other DNA
gagggcagggggcgggg

SEQ ID NO: 119944 - DNA, 17 bp, synthetic construct
  source 1..17: mol_type = other DNA
agggcagggggcgggga

SEQ ID NO: 119945 - DNA, 17 bp, synthetic construct
  source 1..17: mol_type = other DNA
gggcagggggcggggag

SEQ ID NO: 119946 - DNA, 17 bp, synthetic construct
  source 1..17: mol_type = other DNA
ggcagggggcggggagg

SEQ ID NO: 119947 - DNA, 17 bp, synthetic construct
  source 1..17: mol_type = other DNA
gcagggggcggggaggg

SEQ ID NO: 119948 - DNA, 17 bp, synthetic construct
  source 1..17: mol_type = other DNA
cagggggcggggagggc

SEQ ID NO: 119949 - DNA, 17 bp, synthetic construct
  source 1..17: mol_type = other DNA
agggggcggggagggca

SEQ ID NO: 119950 - DNA, 17 bp, synthetic construct
  source 1..17: mol_type = other DNA
gggggcggggagggcag

SEQ ID NO: 119951 - DNA, 17 bp, synthetic construct
  source 1..17: mol_type = other DNA
ggggcggggagggcagg

SEQ ID NO: 119952 - DNA, 17 bp, synthetic construct
  source 1..17: mol_type = other DNA
gggcggggagggcaggg

SEQ ID NO: 119953 - DNA, 17 bp, synthetic construct
  source 1..17: mol_type = other DNA
ggcggggagggcagggg

SEQ ID NO: 119954 - DNA, 17 bp, synthetic construct
  source 1..17: mol_type = other DNA
gcggggagggcaggggg

SEQ ID NO: 119955 - DNA, 17 bp, synthetic construct
  source 1..17: mol_type = other DNA
cggggagggcagggggc

SEQ ID NO: 119956 - DNA, 17 bp, synthetic construct
  source 1..17: mol_type = other DNA
ggggagggcagggggcc

SEQ ID NO: 119957 - DNA, 17 bp, synthetic construct
  source 1..17: mol_type = other DNA
gggagggcagggggcca

SEQ ID NO: 119958 - DNA, 17 bp, synthetic construct
  source 1..17: mol_type = other DNA
ggagggcagggggccag

SEQ ID NO: 119959 - DNA, 17 bp, synthetic construct
  source 1..17: mol_type = other DNA
gagggcagggggccagc

SEQ ID NO: 119960 - DNA, 17 bp, synthetic construct
  source 1..17: mol_type = other DNA
agggcagggggccagct

SEQ ID NO: 119961 - DNA, 17 bp, synthetic construct
  source 1..17: mol_type = other DNA
gggcagggggccagctg

SEQ ID NO: 119962 - DNA, 17 bp, synthetic construct
  source 1..17: mol_type = other DNA
ggcagggggccagctgg

SEQ ID NO: 119963 - DNA, 17 bp, synthetic construct
  source 1..17: mol_type = other DNA
gcagggggccagctggc

SEQ ID NO: 119964 - DNA, 17 bp, synthetic construct
  source 1..17: mol_type = other DNA
cagggggccagctggcc

SEQ ID NO: 119965 - DNA, 17 bp, synthetic construct
  source 1..17: mol_type = other DNA
agggggccagctggcca

SEQ ID NO: 119966 - DNA, 17 bp, synthetic construct
  source 1..17: mol_type = other DNA
gggggccagctggccag

SEQ ID NO: 119967 - DNA, 17 bp, synthetic construct
  source 1..17: mol_type = other DNA
ggggccagctggccagg

SEQ ID NO: 119968 - DNA, 17 bp, synthetic construct
  source 1..17: mol_type = other DNA
gggccagctggccaggg

SEQ ID NO: 119969 - DNA, 17 bp, synthetic construct
  source 1..17: mol_type = other DNA
ggccagctggccagggt

SEQ ID NO: 119970 - DNA, 17 bp, synthetic construct
  source 1..17: mol_type = other DNA
gccagctggccagggtg

SEQ ID NO: 119971 - DNA, 17 bp, synthetic construct
  source 1..17: mol_type = other DNA
ccagctggccagggtga

SEQ ID NO: 119972 - DNA, 17 bp, synthetic construct
  source 1..17: mol_type = other DNA
cagctggccagggtgag

SEQ ID NO: 119973 - DNA, 17 bp, synthetic construct
  source 1..17: mol_type = other DNA
agctggccagggtgagg

SEQ ID NO: 119974 - DNA, 17 bp, synthetic construct
  source 1..17: mol_type = other DNA
gctggccagggtgaggt

SEQ ID NO: 119975 - DNA, 17 bp, synthetic construct
  source 1..17: mol_type = other DNA
ctggccagggtgaggtg

SEQ ID NO: 119976 - DNA, 17 bp, synthetic construct
  source 1..17: mol_type = other DNA
tggccagggtgaggtgg

SEQ ID NO: 119977 - DNA, 17 bp, synthetic construct
  source 1..17: mol_type = other DNA
ggccagggtgaggtggg

SEQ ID NO: 119978 - DNA, 17 bp, synthetic construct
  source 1..17: mol_type = other DNA
gccagggtgaggtgggg

SEQ ID NO: 119979 - DNA, 17 bp, synthetic construct
  source 1..17: mol_type = other DNA
ccagggtgaggtggggc

SEQ ID NO: 119980 - DNA, 17 bp, synthetic construct
  source 1..17: mol_type = other DNA
cagggtgaggtggggcc

SEQ ID NO: 119981 - DNA, 17 bp, synthetic construct
  source 1..17: mol_type = other DNA
agggtgaggtggggccg

SEQ ID NO: 119982 - DNA, 17 bp, synthetic construct
  source 1..17: mol_type = other DNA
gggtgaggtggggccgt

SEQ ID NO: 119983 - DNA, 17 bp, synthetic construct
  source 1..17: mol_type = other DNA
ggtgaggtggggccgtg

SEQ ID NO: 119984 - DNA, 17 bp, synthetic construct
  source 1..17: mol_type = other DNA
gtgaggtggggccgtgg

SEQ ID NO: 119985 - DNA, 17 bp, synthetic construct
  source 1..17: mol_type = other DNA
tgaggtggggccgtggc

SEQ ID NO: 119986 - DNA, 17 bp, synthetic construct
  source 1..17: mol_type = other DNA
gaggtggggccgtggca

SEQ ID NO: 119987 - DNA, 17 bp, synthetic construct
  source 1..17: mol_type = other DNA
aggtggggccgtggcag

SEQ ID NO: 119988 - DNA, 17 bp, synthetic construct
  source 1..17: mol_type = other DNA
ggtggggccgtggcagg

SEQ ID NO: 119989 - DNA, 17 bp, synthetic construct
  source 1..17: mol_type = other DNA
gtggggccgtggcagga

SEQ ID NO: 119990 - DNA, 17 bp, synthetic construct
  source 1..17: mol_type = other DNA
tggggccgtggcaggag

SEQ ID NO: 119991 - DNA, 17 bp, synthetic construct
  source 1..17: mol_type = other DNA
ggggccgtggcaggaga

SEQ ID NO: 119992 - DNA, 17 bp, synthetic construct
  source 1..17: mol_type = other DNA
gggccgtggcaggagag

SEQ ID NO: 119993 - DNA, 17 bp, synthetic construct
  source 1..17: mol_type = other DNA
ggccgtggcaggagaga

SEQ ID NO: 119994 - DNA, 17 bp, synthetic construct
  source 1..17: mol_type = other DNA
gccgtggcaggagagag

SEQ ID NO: 119995 - DNA, 17 bp, synthetic construct
  source 1..17: mol_type = other DNA
ccgtggcaggagagaga

SEQ ID NO: 119996 - DNA, 17 bp, synthetic construct
  source 1..17: mol_type = other DNA
cgtggcaggagagagag

SEQ ID NO: 119997 - DNA, 17 bp, synthetic construct
  source 1..17: mol_type = other DNA
gtggcaggagagagagt

SEQ ID NO: 119998 - DNA, 17 bp, synthetic construct
  source 1..17: mol_type = other DNA
tggcaggagagagagtt

SEQ ID NO: 119999 - DNA, 17 bp, synthetic construct
  source 1..17: mol_type = other DNA
ggcaggagagagagttg

SEQ ID NO: 120000 - DNA, 17 bp, synthetic construct
  source 1..17: mol_type = other DNA
gcaggagagagagttgc

SEQ ID NO: 120001 - DNA, 17 bp, synthetic construct
  source 1..17: mol_type = other DNA
caggagagagagttgct

SEQ ID NO: 120002 - DNA, 17 bp, synthetic construct
  source 1..17: mol_type = other DNA
aggagagagagttgcta

SEQ ID NO: 120003 - DNA, 17 bp, synthetic construct
  source 1..17: mol_type = other DNA
ggagagagagttgctag

SEQ ID NO: 120004 - DNA, 17 bp, synthetic construct
  source 1..17: mol_type = other DNA
gagagagagttgctagg

SEQ ID NO: 120005 - DNA, 17 bp, synthetic construct
  source 1..17: mol_type = other DNA
agagagagttgctagga

SEQ ID NO: 120006 - DNA, 17 bp, synthetic construct
  source 1..17: mol_type = other DNA
gagagagttgctaggaa

SEQ ID NO: 120007 - DNA, 17 bp, synthetic construct
  source 1..17: mol_type = other DNA
agagagttgctaggaaa

SEQ ID NO: 120008 - DNA, 17 bp, synthetic construct
  source 1..17: mol_type = other DNA
gagagttgctaggaaag

SEQ ID NO: 120009 - DNA, 17 bp, synthetic construct
  source 1..17: mol_type = other DNA
agagttgctaggaaagc

SEQ ID NO: 120010 - DNA, 17 bp, synthetic construct
  source 1..17: mol_type = other DNA
gagttgctaggaaagcc

SEQ ID NO: 120011 - DNA, 17 bp, synthetic construct
  source 1..17: mol_type = other DNA
agttgctaggaaagcca

SEQ ID NO: 120012 - DNA, 17 bp, synthetic construct
  source 1..17: mol_type = other DNA
gttgctaggaaagccat

SEQ ID NO: 120013 - DNA, 17 bp, synthetic construct
  source 1..17: mol_type = other DNA
ttgctaggaaagccatg

SEQ ID NO: 120014 - DNA, 17 bp, synthetic construct
  source 1..17: mol_type = other DNA
tgctaggaaagccatgg

SEQ ID NO: 120015 - DNA, 17 bp, synthetic construct
  source 1..17: mol_type = other DNA
gctaggaaagccatggg

SEQ ID NO: 120016 - DNA, 17 bp, synthetic construct
  source 1..17: mol_type = other DNA
ctaggaaagccatgggc

SEQ ID NO: 120017 - DNA, 17 bp, synthetic construct
  source 1..17: mol_type = other DNA
taggaaagccatgggcc

SEQ ID NO: 120018 - DNA, 17 bp, synthetic construct
  source 1..17: mol_type = other DNA
aggaaagccatgggccg

SEQ ID NO: 120019 - DNA, 17 bp, synthetic construct
  source 1..17: mol_type = other DNA
ggaaagccatgggccgt

SEQ ID NO: 120020 - DNA, 17 bp, synthetic construct
  source 1..17: mol_type = other DNA
gaaagccatgggccgtc

SEQ ID NO: 120021 - DNA, 17 bp, synthetic construct
  source 1..17: mol_type = other DNA
aaagccatgggccgtcc

SEQ ID NO: 120022 - DNA, 17 bp, synthetic construct
  source 1..17: mol_type = other DNA
aagccatgggccgtcct

SEQ ID NO: 120023 - DNA, 17 bp, synthetic construct
  source 1..17: mol_type = other DNA
agccatgggccgtcctg

SEQ ID NO: 120024 - DNA, 17 bp, synthetic construct
  source 1..17: mol_type = other DNA
gccatgggccgtcctgt

SEQ ID NO: 120025 - DNA, 17 bp, synthetic construct
  source 1..17: mol_type = other DNA
ccatgggccgtcctgtg

SEQ ID NO: 120026 - DNA, 17 bp, synthetic construct
  source 1..17: mol_type = other DNA
catgggccgtcctgtgc

SEQ ID NO: 120027 - DNA, 17 bp, synthetic construct
  source 1..17: mol_type = other DNA
atgggccgtcctgtgcg

SEQ ID NO: 120028 - DNA, 17 bp, synthetic construct
  source 1..17: mol_type = other DNA
tgggccgtcctgtgcgt

SEQ ID NO: 120029 - DNA, 17 bp, synthetic construct
  source 1..17: mol_type = other DNA
gggccgtcctgtgcgtc

SEQ ID NO: 120030 - DNA, 17 bp, synthetic construct
  source 1..17: mol_type = other DNA
ggccgtcctgtgcgtcc

SEQ ID NO: 120031 - DNA, 17 bp, synthetic construct
  source 1..17: mol_type = other DNA
gccgtcctgtgcgtcct

SEQ ID NO: 120032 - DNA, 17 bp, synthetic construct
  source 1..17: mol_type = other DNA
ccgtcctgtgcgtcctc

SEQ ID NO: 120033 - DNA, 17 bp, synthetic construct
  source 1..17: mol_type = other DNA
cgtcctgtgcgtcctct

SEQ ID NO: 120034 - DNA, 17 bp, synthetic construct
  source 1..17: mol_type = other DNA
gtcctgtgcgtcctctg

SEQ ID NO: 120035 - DNA, 17 bp, synthetic construct
  source 1..17: mol_type = other DNA
tcctgtgcgtcctctgg

SEQ ID NO: 120036 - DNA, 17 bp, synthetic construct
  source 1..17: mol_type = other DNA
cctgtgcgtcctctgga

SEQ ID NO: 120037 - DNA, 17 bp, synthetic construct
  source 1..17: mol_type = other DNA
ctgtgcgtcctctggaa

SEQ ID NO: 120038 - DNA, 17 bp, synthetic construct
  source 1..17: mol_type = other DNA
tgtgcgtcctctggaag

SEQ ID NO: 120039 - DNA, 17 bp, synthetic construct
  source 1..17: mol_type = other DNA
gtgcgtcctctggaagg

SEQ ID NO: 120040 - DNA, 17 bp, synthetic construct
  source 1..17: mol_type = other DNA
tgcgtcctctggaaggt

SEQ ID NO: 120041 - DNA, 17 bp, synthetic construct
  source 1..17: mol_type = other DNA
gcgtcctctggaaggtg

SEQ ID NO: 120042 - DNA, 17 bp, synthetic construct
  source 1..17: mol_type = other DNA
cgtcctctggaaggtgg

SEQ ID NO: 120043 - DNA, 17 bp, synthetic construct
  source 1..17: mol_type = other DNA
gtcctctggaaggtggc

SEQ ID NO: 120044 - DNA, 17 bp, synthetic construct
  source 1..17: mol_type = other DNA
tcctctggaaggtggcc

SEQ ID NO: 120045 - DNA, 17 bp, synthetic construct
  source 1..17: mol_type = other DNA
cctctggaaggtggccc

SEQ ID NO: 120046 - DNA, 17 bp, synthetic construct
  source 1..17: mol_type = other DNA
ctctggaaggtggccca

SEQ ID NO: 120047 - DNA, 17 bp, synthetic construct
  source 1..17: mol_type = other DNA
tctggaaggtggcccag

SEQ ID NO: 120048 - DNA, 17 bp, synthetic construct
  source 1..17: mol_type = other DNA
ctggaaggtggcccagg

SEQ ID NO: 120049 - DNA, 17 bp, synthetic construct
  source 1..17: mol_type = other DNA
tggaaggtggcccaggg

SEQ ID NO: 120050 - DNA, 17 bp, synthetic construct
  source 1..17: mol_type = other DNA
ggaaggtggcccagggg

SEQ ID NO: 120051 - DNA, 17 bp, synthetic construct
  source 1..17: mol_type = other DNA
gaaggtggcccaggggc

SEQ ID NO: 120052 - DNA, 17 bp, synthetic construct
  source 1..17: mol_type = other DNA
aaggtggcccaggggcc

SEQ ID NO: 120053 - DNA, 17 bp, synthetic construct
  source 1..17: mol_type = other DNA
aggtggcccaggggccg

SEQ ID NO: 120054 - DNA, 17 bp, synthetic construct
  source 1..17: mol_type = other DNA
ggtggcccaggggccgt

SEQ ID NO: 120055 - DNA, 17 bp, synthetic construct
  source 1..17: mol_type = other DNA
gtggcccaggggccgtg

SEQ ID NO: 120056 - DNA, 17 bp, synthetic construct
  source 1..17: mol_type = other DNA
tggcccaggggccgtgg

SEQ ID NO: 120057 - DNA, 17 bp, synthetic construct
  source 1..17: mol_type = other DNA
ggcccaggggccgtggt

SEQ ID NO: 120058 - DNA, 17 bp, synthetic construct
  source 1..17: mol_type = other DNA
gcccaggggccgtggtg

SEQ ID NO: 120059 - DNA, 17 bp, synthetic construct
  source 1..17: mol_type = other DNA
cccaggggccgtggtgc

SEQ ID NO: 120060 - DNA, 17 bp, synthetic construct
  source 1..17: mol_type = other DNA
ccaggggccgtggtgct

SEQ ID NO: 120061 - DNA, 17 bp, synthetic construct
  source 1..17: mol_type = other DNA
caggggccgtggtgcta

SEQ ID NO: 120062 - DNA, 17 bp, synthetic construct
  source 1..17: mol_type = other DNA
aggggccgtggtgctac

SEQ ID NO: 120063 - DNA, 17 bp, synthetic construct
  source 1..17: mol_type = other DNA
ggggccgtggtgctacc

SEQ ID NO: 120064 - DNA, 17 bp, synthetic construct
  source 1..17: mol_type = other DNA
gggccgtggtgctacca

SEQ ID NO: 120065 - DNA, 17 bp, synthetic construct
  source 1..17: mol_type = other DNA
ggccgtggtgctaccag

SEQ ID NO: 120066 - DNA, 17 bp, synthetic construct
  source 1..17: mol_type = other DNA
gccgtggtgctaccagg

SEQ ID NO: 120067 - DNA, 17 bp, synthetic construct
  source 1..17: mol_type = other DNA
ccgtggtgctaccagga

SEQ ID NO: 120068 - DNA, 17 bp, synthetic construct
  source 1..17: mol_type = other DNA
cgtggtgctaccaggag

SEQ ID NO: 120069 - DNA, 17 bp, synthetic construct
  source 1..17: mol_type = other DNA
gtggtgctaccaggagc

SEQ ID NO: 120070 - DNA, 17 bp, synthetic construct
  source 1..17: mol_type = other DNA
tggtgctaccaggagcc

SEQ ID NO: 120071 - DNA, 17 bp, synthetic construct
  source 1..17: mol_type = other DNA
ggtgctaccaggagcct

SEQ ID NO: 120072 - DNA, 17 bp, synthetic construct
  source 1..17: mol_type = other DNA
gtgctaccaggagcctg

SEQ ID NO: 120073 - DNA, 17 bp, synthetic construct
  source 1..17: mol_type = other DNA
tgctaccaggagcctgg

SEQ ID NO: 120074 - DNA, 17 bp, synthetic construct
  source 1..17: mol_type = other DNA
gctaccaggagcctggt

SEQ ID NO: 120075 - DNA, 17 bp, synthetic construct
  source 1..17: mol_type = other DNA
ctaccaggagcctggtg

SEQ ID NO: 120076 - DNA, 17 bp, synthetic construct
  source 1..17: mol_type = other DNA
taccaggagcctggtgg

SEQ ID NO: 120077 - DNA, 17 bp, synthetic construct
  source 1..17: mol_type = other DNA
accaggagcctggtggg

SEQ ID NO: 120078 - DNA, 17 bp, synthetic construct
  source 1..17: mol_type = other DNA
ccaggagcctggtgggg

SEQ ID NO: 120079 - DNA, 17 bp, synthetic construct
  source 1..17: mol_type = other DNA
caggagcctggtggggc

SEQ ID NO: 120080 - DNA, 17 bp, synthetic construct
  source 1..17: mol_type = other DNA
aggagcctggtggggct

SEQ ID NO: 120081 - DNA, 17 bp, synthetic construct
  source 1..17: mol_type = other DNA
ggagcctggtggggctg

SEQ ID NO: 120082 - DNA, 17 bp, synthetic construct
  source 1..17: mol_type = other DNA
gagcctggtggggctgc

SEQ ID NO: 120083 - DNA, 17 bp, synthetic construct
  source 1..17: mol_type = other DNA
agcctggtggggctgcg

SEQ ID NO: 120084 - DNA, 17 bp, synthetic construct
  source 1..17: mol_type = other DNA
gcctggtggggctgcgt

SEQ ID NO: 120085 - DNA, 17 bp, synthetic construct
  source 1..17: mol_type = other DNA
cctggtggggctgcgtg

SEQ ID NO: 120086 - DNA, 17 bp, synthetic construct
  source 1..17: mol_type = other DNA
ctggtggggctgcgtgc

SEQ ID NO: 120087 - DNA, 17 bp, synthetic construct
  source 1..17: mol_type = other DNA
tggtggggctgcgtgcc

SEQ ID NO: 120088 - DNA, 17 bp, synthetic construct
  source 1..17: mol_type = other DNA
ggtggggctgcgtgccc

SEQ ID NO: 120089 - DNA, 17 bp, synthetic construct
  source 1..17: mol_type = other DNA
gtggggctgcgtgccct

SEQ ID NO: 120090 - DNA, 17 bp, synthetic construct
  source 1..17: mol_type = other DNA
tggggctgcgtgccctg

SEQ ID NO: 120091 - DNA, 17 bp, synthetic construct
  source 1..17: mol_type = other DNA
ggggctgcgtgccctgc

SEQ ID NO: 120092 - DNA, 17 bp, synthetic construct
  source 1..17: mol_type = other DNA
gggctgcgtgccctgca

SEQ ID NO: 120093 - DNA, 17 bp, synthetic construct
  source 1..17: mol_type = other DNA
ggctgcgtgccctgcat

SEQ ID NO: 120094 - DNA, 17 bp, synthetic construct
  source 1..17: mol_type = other DNA
gctgcgtgccctgcatt

SEQ ID NO: 120095 - DNA, 17 bp, synthetic construct
  source 1..17: mol_type = other DNA
ctgcgtgccctgcattc

SEQ ID NO: 120096 - DNA, 17 bp, synthetic construct
  source 1..17: mol_type = other DNA
tgcgtgccctgcattca

SEQ ID NO: 120097 - DNA, 17 bp, synthetic construct
  source 1..17: mol_type = other DNA
gcgtgccctgcattcac

SEQ ID NO: 120098 - DNA, 17 bp, synthetic construct
  source 1..17: mol_type = other DNA
cgtgccctgcattcaca

SEQ ID NO: 120099 - DNA, 17 bp, synthetic construct
  source 1..17: mol_type = other DNA
gtgccctgcattcacag

SEQ ID NO: 120100 - DNA, 17 bp, synthetic construct
  source 1..17: mol_type = other DNA
tgccctgcattcacagt

SEQ ID NO: 120101 - DNA, 17 bp, synthetic construct
  source 1..17: mol_type = other DNA
gccctgcattcacagtg

SEQ ID NO: 120102 - DNA, 17 bp, synthetic construct
  source 1..17: mol_type = other DNA
ccctgcattcacagtgg

SEQ ID NO: 120103 - DNA, 17 bp, synthetic construct
  source 1..17: mol_type = other DNA
cctgcattcacagtggg

SEQ ID NO: 120104 - DNA, 17 bp, synthetic construct
  source 1..17: mol_type = other DNA
ctgcattcacagtgggg

SEQ ID NO: 120105 - DNA, 17 bp, synthetic construct
  source 1..17: mol_type = other DNA
tgcattcacagtggggg

SEQ ID NO: 120106 - DNA, 17 bp, synthetic construct
  source 1..17: mol_type = other DNA
gcattcacagtggggga

SEQ ID NO: 120107 - DNA, 17 bp, synthetic construct
  source 1..17: mol_type = other DNA
cattcacagtgggggac

SEQ ID NO: 120108 - DNA, 17 bp, synthetic construct
  source 1..17: mol_type = other DNA
attcacagtgggggaca

SEQ ID NO: 120109 - DNA, 17 bp, synthetic construct
  source 1..17: mol_type = other DNA
ttcacagtgggggacac

SEQ ID NO: 120110 - DNA, 17 bp, synthetic construct
  source 1..17: mol_type = other DNA
tcacagtgggggacacc

SEQ ID NO: 120111 - DNA, 17 bp, synthetic construct
  source 1..17: mol_type = other DNA
cacagtgggggacacca

SEQ ID NO: 120112 - DNA, 17 bp, synthetic construct
  source 1..17: mol_type = other DNA
acagtgggggacaccac

SEQ ID NO: 120113 - DNA, 17 bp, synthetic construct
  source 1..17: mol_type = other DNA
cagtgggggacaccact

SEQ ID NO: 120114 - DNA, 17 bp, synthetic construct
  source 1..17: mol_type = other DNA
agtgggggacaccactt

SEQ ID NO: 120115 - DNA, 17 bp, synthetic construct
  source 1..17: mol_type = other DNA
gtgggggacaccacttc

SEQ ID NO: 120116 - DNA, 17 bp, synthetic construct
  source 1..17: mol_type = other DNA
tgggggacaccacttct

SEQ ID NO: 120117 - DNA, 17 bp, synthetic construct
  source 1..17: mol_type = other DNA
gggggacaccacttctt

SEQ ID NO: 120118 - DNA, 17 bp, synthetic construct
  source 1..17: mol_type = other DNA
ggggacaccacttcttc

SEQ ID NO: 120119 - DNA, 17 bp, synthetic construct
  source 1..17: mol_type = other DNA
gggacaccacttcttcc

SEQ ID NO: 120120 - DNA, 17 bp, synthetic construct
  source 1..17: mol_type = other DNA
ggacaccacttcttcca

SEQ ID NO: 120121 - DNA, 17 bp, synthetic construct
  source 1..17: mol_type = other DNA
gacaccacttcttccac

SEQ ID NO: 120122 - DNA, 17 bp, synthetic construct
  source 1..17: mol_type = other DNA
acaccacttcttccacg

SEQ ID NO: 120123 - DNA, 17 bp, synthetic construct
  source 1..17: mol_type = other DNA
caccacttcttccacgg

SEQ ID NO: 120124 - DNA, 17 bp, synthetic construct
  source 1..17: mol_type = other DNA
accacttcttccacgga

SEQ ID NO: 120125 - DNA, 17 bp, synthetic construct
  source 1..17: mol_type = other DNA
ccacttcttccacggag

SEQ ID NO: 120126 - DNA, 17 bp, synthetic construct
  source 1..17: mol_type = other DNA
cacttcttccacggagg

SEQ ID NO: 120127 - DNA, 17 bp, synthetic construct
  source 1..17: mol_type = other DNA
acttcttccacggagga

SEQ ID NO: 120128 - DNA, 17 bp, synthetic construct
  source 1..17: mol_type = other DNA
cttcttccacggaggag

SEQ ID NO: 120129 - DNA, 17 bp, synthetic construct
  source 1..17: mol_type = other DNA
ttcttccacggaggagg

SEQ ID NO: 120130 - DNA, 17 bp, synthetic construct
  source 1..17: mol_type = other DNA
tcttccacggaggaggg

SEQ ID NO: 120131 - DNA, 17 bp, synthetic construct
  source 1..17: mol_type = other DNA
cttccacggaggagggg

SEQ ID NO: 120132 - DNA, 17 bp, synthetic construct
  source 1..17: mol_type = other DNA
ttccacggaggaggggt

SEQ ID NO: 120133 - DNA, 17 bp, synthetic construct
  source 1..17: mol_type = other DNA
tccacggaggaggggtc

SEQ ID NO: 120134 - DNA, 17 bp, synthetic construct
  source 1..17: mol_type = other DNA
ccacggaggaggggtca

SEQ ID NO: 120135 - DNA, 17 bp, synthetic construct
  source 1..17: mol_type = other DNA
cacggaggaggggtcag

SEQ ID NO: 120136 - DNA, 17 bp, synthetic construct
  source 1..17: mol_type = other DNA
acggaggaggggtcagg

SEQ ID NO: 120137 - DNA, 17 bp, synthetic construct
  source 1..17: mol_type = other DNA
cggaggaggggtcaggc

SEQ ID NO: 120138 - DNA, 17 bp, synthetic construct
  source 1..17: mol_type = other DNA
ggaggaggggtcaggct

SEQ ID NO: 120139 - DNA, 17 bp, synthetic construct
  source 1..17: mol_type = other DNA
gaggaggggtcaggctg

SEQ ID NO: 120140 - DNA, 17 bp, synthetic construct
  source 1..17: mol_type = other DNA
aggaggggtcaggctgg

SEQ ID NO: 120141 - DNA, 17 bp, synthetic construct
  source 1..17: mol_type = other DNA
ggaggggtcaggctggg

SEQ ID NO: 120142 - DNA, 17 bp, synthetic construct
  source 1..17: mol_type = other DNA
gaggggtcaggctgggc

SEQ ID NO: 120143 - DNA, 17 bp, synthetic construct
  source 1..17: mol_type = other DNA
aggggtcaggctgggcc

SEQ ID NO: 120144 - DNA, 17 bp, synthetic construct
  source 1..17: mol_type = other DNA
ggggtcaggctgggcct

SEQ ID NO: 120145 - DNA, 17 bp, synthetic construct
  source 1..17: mol_type = other DNA
gggtcaggctgggcctg

SEQ ID NO: 120146 - DNA, 17 bp, synthetic construct
  source 1..17: mol_type = other DNA
ggtcaggctgggcctgg

SEQ ID NO: 120147 - DNA, 17 bp, synthetic construct
  source 1..17: mol_type = other DNA
gtcaggctgggcctggg

SEQ ID NO: 120148 - DNA, 17 bp, synthetic construct
  source 1..17: mol_type = other DNA
tcaggctgggcctgggg

SEQ ID NO: 120149 - DNA, 17 bp, synthetic construct
  source 1..17: mol_type = other DNA
caggctgggcctgggga

SEQ ID NO: 120150 - DNA, 17 bp, synthetic construct
  source 1..17: mol_type = other DNA
aggctgggcctggggag

SEQ ID NO: 120151 - DNA, 17 bp, synthetic construct
  source 1..17: mol_type = other DNA
ggctgggcctggggagg

SEQ ID NO: 120152 - DNA, 17 bp, synthetic construct
  source 1..17: mol_type = other DNA
gctgggcctggggaggc

SEQ ID NO: 120153 - DNA, 17 bp, synthetic construct
  source 1..17: mol_type = other DNA
ctgggcctggggaggct

SEQ ID NO: 120154 - DNA, 17 bp, synthetic construct
  source 1..17: mol_type = other DNA
tgggcctggggaggctg

SEQ ID NO: 120155 - DNA, 17 bp, synthetic construct
  source 1..17: mol_type = other DNA
gggcctggggaggctga

SEQ ID NO: 120156 - DNA, 17 bp, synthetic construct
  source 1..17: mol_type = other DNA
ggcctggggaggctgag

SEQ ID NO: 120157 - DNA, 17 bp, synthetic construct
  source 1..17: mol_type = other DNA
gcctggggaggctgagg

SEQ ID NO: 120158 - DNA, 17 bp, synthetic construct
  source 1..17: mol_type = other DNA
cctggggaggctgaggc

SEQ ID NO: 120159 - DNA, 17 bp, synthetic construct
  source 1..17: mol_type = other DNA
ctggggaggctgaggcc

SEQ ID NO: 120160 - DNA, 17 bp, synthetic construct
  source 1..17: mol_type = other DNA
tggggaggctgaggccc

SEQ ID NO: 120161 - DNA, 17 bp, synthetic construct
  source 1..17: mol_type = other DNA
ggggaggctgaggcccc

SEQ ID NO: 120162 - DNA, 17 bp, synthetic construct
  source 1..17: mol_type = other DNA
gggaggctgaggccccg

SEQ ID NO: 120163 - DNA, 17 bp, synthetic construct
  source 1..17: mol_type = other DNA
ggaggctgaggccccgt

SEQ ID NO: 120164 - DNA, 17 bp, synthetic construct
  source 1..17: mol_type = other DNA
gaggctgaggccccgtg

SEQ ID NO: 120165 - DNA, 17 bp, synthetic construct
  source 1..17: mol_type = other DNA
aggctgaggccccgtgc

SEQ ID NO: 120166 - DNA, 17 bp, synthetic construct
  source 1..17: mol_type = other DNA
ggctgaggccccgtgct

SEQ ID NO: 120167 - DNA, 17 bp, synthetic construct
  source 1..17: mol_type = other DNA
gctgaggccccgtgctg

SEQ ID NO: 120168 - DNA, 17 bp, synthetic construct
  source 1..17: mol_type = other DNA
ctgaggccccgtgctga

SEQ ID NO: 120169 - DNA, 17 bp, synthetic construct
  source 1..17: mol_type = other DNA
tgaggccccgtgctgac

SEQ ID NO: 120170 - DNA, 17 bp, synthetic construct
  source 1..17: mol_type = other DNA
gaggccccgtgctgacc

SEQ ID NO: 120171 - DNA, 17 bp, synthetic construct
  source 1..17: mol_type = other DNA
aggccccgtgctgacct

SEQ ID NO: 120172 - DNA, 17 bp, synthetic construct
  source 1..17: mol_type = other DNA
ggccccgtgctgacctg

SEQ ID NO: 120173 - DNA, 17 bp, synthetic construct
  source 1..17: mol_type = other DNA
gccccgtgctgacctgc

SEQ ID NO: 120174 - DNA, 17 bp, synthetic construct
  source 1..17: mol_type = other DNA
ccccgtgctgacctgca

SEQ ID NO: 120175 - DNA, 17 bp, synthetic construct
  source 1..17: mol_type = other DNA
cccgtgctgacctgcac

SEQ ID NO: 120176 - DNA, 17 bp, synthetic construct
  source 1..17: mol_type = other DNA
ccgtgctgacctgcaca

SEQ ID NO: 120177 - DNA, 17 bp, synthetic construct
  source 1..17: mol_type = other DNA
cgtgctgacctgcacag

SEQ ID NO: 120178 - DNA, 17 bp, synthetic construct
  source 1..17: mol_type = other DNA
gtgctgacctgcacagg

SEQ ID NO: 120179 - DNA, 17 bp, synthetic construct
  source 1..17: mol_type = other DNA
tgctgacctgcacaggc

SEQ ID NO: 120180 - DNA, 17 bp, synthetic construct
  source 1..17: mol_type = other DNA
gctgacctgcacaggcc

SEQ ID NO: 120181 - DNA, 17 bp, synthetic construct
  source 1..17: mol_type = other DNA
ctgacctgcacaggcct

SEQ ID NO: 120182 - DNA, 17 bp, synthetic construct
  source 1..17: mol_type = other DNA
tgacctgcacaggcctg

SEQ ID NO: 120183 - DNA, 17 bp, synthetic construct
  source 1..17: mol_type = other DNA
gacctgcacaggcctgg

SEQ ID NO: 120184 - DNA, 17 bp, synthetic construct
  source 1..17: mol_type = other DNA
acctgcacaggcctggg

SEQ ID NO: 120185 - DNA, 17 bp, synthetic construct
  source 1..17: mol_type = other DNA
cctgcacaggcctgggt

SEQ ID NO: 120186 - DNA, 17 bp, synthetic construct
  source 1..17: mol_type = other DNA
ctgcacaggcctgggtg

SEQ ID NO: 120187 - DNA, 17 bp, synthetic construct
  source 1..17: mol_type = other DNA
tgcacaggcctgggtgc

SEQ ID NO: 120188 - DNA, 17 bp, synthetic construct
  source 1..17: mol_type = other DNA
gcacaggcctgggtgcc

SEQ ID NO: 120189 - DNA, 17 bp, synthetic construct
  source 1..17: mol_type = other DNA
cacaggcctgggtgccg

SEQ ID NO: 120190 - DNA, 17 bp, synthetic construct
  source 1..17: mol_type = other DNA
acaggcctgggtgccgg

SEQ ID NO: 120191 - DNA, 17 bp, synthetic construct
  source 1..17: mol_type = other DNA
caggcctgggtgccggg

SEQ ID NO: 120192 - DNA, 17 bp, synthetic construct
  source 1..17: mol_type = other DNA
aggcctgggtgccgggt

SEQ ID NO: 120193 - DNA, 17 bp, synthetic construct
  source 1..17: mol_type = other DNA
ggcctgggtgccgggtc

SEQ ID NO: 120194 - DNA, 17 bp, synthetic construct
  source 1..17: mol_type = other DNA
gcctgggtgccgggtct

SEQ ID NO: 120195 - DNA, 17 bp, synthetic construct
  source 1..17: mol_type = other DNA
cctgggtgccgggtctc

SEQ ID NO: 120196 - DNA, 17 bp, synthetic construct
  source 1..17: mol_type = other DNA
ctgggtgccgggtctca

SEQ ID NO: 120197 - DNA, 17 bp, synthetic construct
  source 1..17: mol_type = other DNA
tgggtgccgggtctcag

SEQ ID NO: 120198 - DNA, 17 bp, synthetic construct
  source 1..17: mol_type = other DNA
gggtgccgggtctcagg

SEQ ID NO: 120199 - DNA, 17 bp, synthetic construct
  source 1..17: mol_type = other DNA
ggtgccgggtctcagga

SEQ ID NO: 120200 - DNA, 17 bp, synthetic construct
  source 1..17: mol_type = other DNA
gtgccgggtctcaggaa

SEQ ID NO: 120201 - DNA, 17 bp, synthetic construct
  source 1..17: mol_type = other DNA
tgccgggtctcaggaag

SEQ ID NO: 120202 - DNA, 17 bp, synthetic construct
  source 1..17: mol_type = other DNA
gccgggtctcaggaagg

SEQ ID NO: 120203 - DNA, 17 bp, synthetic construct
  source 1..17: mol_type = other DNA
ccgggtctcaggaaggc

SEQ ID NO: 120204 - DNA, 17 bp, synthetic construct
  source 1..17: mol_type = other DNA
cgggtctcaggaaggcc

SEQ ID NO: 120205 - DNA, 17 bp, synthetic construct
  source 1..17: mol_type = other DNA
gggtctcaggaaggccg

SEQ ID NO: 120206 - DNA, 17 bp, synthetic construct
  source 1..17: mol_type = other DNA
ggtctcaggaaggccgg

SEQ ID NO: 120207 - DNA, 17 bp, synthetic construct
  source 1..17: mol_type = other DNA
gtctcaggaaggccggg

SEQ ID NO: 120208 - DNA, 17 bp, synthetic construct
  source 1..17: mol_type = other DNA
tctcaggaaggccggga

SEQ ID NO: 120209 - DNA, 17 bp, synthetic construct
  source 1..17: mol_type = other DNA
ctcaggaaggccgggag

SEQ ID NO: 120210 - DNA, 17 bp, synthetic construct
  source 1..17: mol_type = other DNA
tcaggaaggccgggaga

SEQ ID NO: 120211 - DNA, 17 bp, synthetic construct
  source 1..17: mol_type = other DNA
caggaaggccgggagag

SEQ ID NO: 120212 - DNA, 17 bp, synthetic construct
  source 1..17: mol_type = other DNA
aggaaggccgggagagc

SEQ ID NO: 120213 - DNA, 17 bp, synthetic construct
  source 1..17: mol_type = other DNA
ggaaggccgggagagca

SEQ ID NO: 120214 - DNA, 17 bp, synthetic construct
  source 1..17: mol_type = other DNA
gaaggccgggagagcag

SEQ ID NO: 120215 - DNA, 17 bp, synthetic construct
  source 1..17: mol_type = other DNA
aaggccgggagagcagg

SEQ ID NO: 120216 - DNA, 17 bp, synthetic construct
  source 1..17: mol_type = other DNA
aggccgggagagcaggc

SEQ ID NO: 120217 - DNA, 17 bp, synthetic construct
  source 1..17: mol_type = other DNA
ggccgggagagcaggcc

SEQ ID NO: 120218 - DNA, 17 bp, synthetic construct
  source 1..17: mol_type = other DNA
gccgggagagcaggccc

SEQ ID NO: 120219 - DNA, 17 bp, synthetic construct
  source 1..17: mol_type = other DNA
ccgggagagcaggcccc

SEQ ID NO: 120220 - DNA, 17 bp, synthetic construct
  source 1..17: mol_type = other DNA
cgggagagcaggcccct

SEQ ID NO: 120221 - DNA, 17 bp, synthetic construct
  source 1..17: mol_type = other DNA
gggagagcaggcccctg

SEQ ID NO: 120222 - DNA, 17 bp, synthetic construct
  source 1..17: mol_type = other DNA
ggagagcaggcccctgt

SEQ ID NO: 120223 - DNA, 17 bp, synthetic construct
  source 1..17: mol_type = other DNA
gagagcaggcccctgtg

SEQ ID NO: 120224 - DNA, 17 bp, synthetic construct
  source 1..17: mol_type = other DNA
agagcaggcccctgtga

SEQ ID NO: 120225 - DNA, 17 bp, synthetic construct
  source 1..17: mol_type = other DNA
gagcaggcccctgtgag

SEQ ID NO: 120226 - DNA, 17 bp, synthetic construct
  source 1..17: mol_type = other DNA
agcaggcccctgtgagc

SEQ ID NO: 120227 - DNA, 17 bp, synthetic construct
  source 1..17: mol_type = other DNA
gcaggcccctgtgagca

SEQ ID NO: 120228 - DNA, 17 bp, synthetic construct
  source 1..17: mol_type = other DNA
caggcccctgtgagcag

SEQ ID NO: 120229 - DNA, 17 bp, synthetic construct
  source 1..17: mol_type = other DNA
aggcccctgtgagcagg

SEQ ID NO: 120230 - DNA, 17 bp, synthetic construct
  source 1..17: mol_type = other DNA
ggcccctgtgagcaggc

SEQ ID NO: 120231 - DNA, 17 bp, synthetic construct
  source 1..17: mol_type = other DNA
gcccctgtgagcaggca

SEQ ID NO: 120232 - DNA, 17 bp, synthetic construct
  source 1..17: mol_type = other DNA
cccctgtgagcaggcac

SEQ ID NO: 120233 - DNA, 17 bp, synthetic construct
  source 1..17: mol_type = other DNA
ccctgtgagcaggcacc

SEQ ID NO: 120234 - DNA, 17 bp, synthetic construct
  source 1..17: mol_type = other DNA
cctgtgagcaggcacca

SEQ ID NO: 120235 - DNA, 17 bp, synthetic construct
  source 1..17: mol_type = other DNA
ctgtgagcaggcaccat

SEQ ID NO: 120236 - DNA, 17 bp, synthetic construct
  source 1..17: mol_type = other DNA
tgtgagcaggcaccatt

SEQ ID NO: 120237 - DNA, 17 bp, synthetic construct
  source 1..17: mol_type = other DNA
gtgagcaggcaccattg

SEQ ID NO: 120238 - DNA, 17 bp, synthetic construct
  source 1..17: mol_type = other DNA
tgagcaggcaccattgt

SEQ ID NO: 120239 - DNA, 17 bp, synthetic construct
  source 1..17: mol_type = other DNA
gagcaggcaccattgtg

SEQ ID NO: 120240 - DNA, 17 bp, synthetic construct
  source 1..17: mol_type = other DNA
agcaggcaccattgtgg

SEQ ID NO: 120241 - DNA, 17 bp, synthetic construct
  source 1..17: mol_type = other DNA
gcaggcaccattgtggc

SEQ ID NO: 120242 - DNA, 17 bp, synthetic construct
  source 1..17: mol_type = other DNA
caggcaccattgtggcc

SEQ ID NO: 120243 - DNA, 17 bp, synthetic construct
  source 1..17: mol_type = other DNA
aggcaccattgtggccc

SEQ ID NO: 120244 - DNA, 17 bp, synthetic construct
  source 1..17: mol_type = other DNA
ggcaccattgtggcccc

SEQ ID NO: 120245 - DNA, 17 bp, synthetic construct
  source 1..17: mol_type = other DNA
gcaccattgtggcccct

SEQ ID NO: 120246 - DNA, 17 bp, synthetic construct
  source 1..17: mol_type = other DNA
caccattgtggcccctt

SEQ ID NO: 120247 - DNA, 17 bp, synthetic construct
  source 1..17: mol_type = other DNA
accattgtggccccttg

SEQ ID NO: 120248 - DNA, 17 bp, synthetic construct
  source 1..17: mol_type = other DNA
ccattgtggccccttgc

SEQ ID NO: 120249 - DNA, 17 bp, synthetic construct
  source 1..17: mol_type = other DNA
cattgtggccccttgca

SEQ ID NO: 120250 - DNA, 17 bp, synthetic construct
  source 1..17: mol_type = other DNA
attgtggccccttgcag

SEQ ID NO: 120251 - DNA, 17 bp, synthetic construct
  source 1..17: mol_type = other DNA
ttgtggccccttgcagc

SEQ ID NO: 120252 - DNA, 17 bp, synthetic construct
  source 1..17: mol_type = other DNA
tgtggccccttgcagca

SEQ ID NO: 120253 - DNA, 17 bp, synthetic construct
  source 1..17: mol_type = other DNA
gtggccccttgcagcac

SEQ ID NO: 120254 - DNA, 17 bp, synthetic construct
  source 1..17: mol_type = other DNA
tggccccttgcagcacc

SEQ ID NO: 120255 - DNA, 17 bp, synthetic construct
  source 1..17: mol_type = other DNA
ggccccttgcagcacct

SEQ ID NO: 120256 - DNA, 17 bp, synthetic construct
  source 1..17: mol_type = other DNA
gccccttgcagcacctg

SEQ ID NO: 120257 - DNA, 17 bp, synthetic construct
  source 1..17: mol_type = other DNA
ccccttgcagcacctgc

SEQ ID NO: 120258 - DNA, 17 bp, synthetic construct
  source 1..17: mol_type = other DNA
cccttgcagcacctgca

SEQ ID NO: 120259 - DNA, 17 bp, synthetic construct
  source 1..17: mol_type = other DNA
ccttgcagcacctgcag

SEQ ID NO: 120260 - DNA, 17 bp, synthetic construct
  source 1..17: mol_type = other DNA
cttgcagcacctgcagg

SEQ ID NO: 120261 - DNA, 17 bp, synthetic construct
  source 1..17: mol_type = other DNA
ttgcagcacctgcagga

SEQ ID NO: 120262 - DNA, 17 bp, synthetic construct
  source 1..17: mol_type = other DNA
tgcagcacctgcaggaa

SEQ ID NO: 120263 - DNA, 17 bp, synthetic construct
  source 1..17: mol_type = other DNA
gcagcacctgcaggaac

SEQ ID NO: 120264 - DNA, 17 bp, synthetic construct
  source 1..17: mol_type = other DNA
cagcacctgcaggaacc

SEQ ID NO: 120265 - DNA, 17 bp, synthetic construct
  source 1..17: mol_type = other DNA
agcacctgcaggaaccg

SEQ ID NO: 120266 - DNA, 17 bp, synthetic construct
  source 1..17: mol_type = other DNA
gcacctgcaggaaccgg

SEQ ID NO: 120267 - DNA, 17 bp, synthetic construct
  source 1..17: mol_type = other DNA
cacctgcaggaaccgga

SEQ ID NO: 120268 - DNA, 17 bp, synthetic construct
  source 1..17: mol_type = other DNA
acctgcaggaaccggag

SEQ ID NO: 120269 - DNA, 17 bp, synthetic construct
  source 1..17: mol_type = other DNA
cctgcaggaaccggagg

SEQ ID NO: 120270 - DNA, 17 bp, synthetic construct
  source 1..17: mol_type = other DNA
ctgcaggaaccggaggt

SEQ ID NO: 120271 - DNA, 17 bp, synthetic construct
  source 1..17: mol_type = other DNA
tgcaggaaccggaggtg

SEQ ID NO: 120272 - DNA, 17 bp, synthetic construct
  source 1..17: mol_type = other DNA
gcaggaaccggaggtgg

SEQ ID NO: 120273 - DNA, 17 bp, synthetic construct
  source 1..17: mol_type = other DNA
caggaaccggaggtggg

SEQ ID NO: 120274 - DNA, 17 bp, synthetic construct
  source 1..17: mol_type = other DNA
aggaaccggaggtggga

SEQ ID NO: 120275 - DNA, 17 bp, synthetic construct
  source 1..17: mol_type = other DNA
ggaaccggaggtgggag

SEQ ID NO: 120276 - DNA, 17 bp, synthetic construct
  source 1..17: mol_type = other DNA
gaaccggaggtgggagt

SEQ ID NO: 120277 - DNA, 17 bp, synthetic construct
  source 1..17: mol_type = other DNA
aaccggaggtgggagtg

SEQ ID NO: 120278 - DNA, 17 bp, synthetic construct
  source 1..17: mol_type = other DNA
accggaggtgggagtgc

SEQ ID NO: 120279 - DNA, 17 bp, synthetic construct
  source 1..17: mol_type = other DNA
ccggaggtgggagtgca

SEQ ID NO: 120280 - DNA, 17 bp, synthetic construct
  source 1..17: mol_type = other DNA
cggaggtgggagtgcag

SEQ ID NO: 120281 - DNA, 17 bp, synthetic construct
  source 1..17: mol_type = other DNA
ggaggtgggagtgcagc

SEQ ID NO: 120282 - DNA, 17 bp, synthetic construct
  source 1..17: mol_type = other DNA
gaggtgggagtgcagcc

SEQ ID NO: 120283 - DNA, 17 bp, synthetic construct
  source 1..17: mol_type = other DNA
aggtgggagtgcagcca

SEQ ID NO: 120284 - DNA, 17 bp, synthetic construct
  source 1..17: mol_type = other DNA
ggtgggagtgcagccac

SEQ ID NO: 120285 - DNA, 17 bp, synthetic construct
  source 1..17: mol_type = other DNA
gtgggagtgcagccacc

SEQ ID NO: 120286 - DNA, 17 bp, synthetic construct
  source 1..17: mol_type = other DNA
tgggagtgcagccaccg

SEQ ID NO: 120287 - DNA, 17 bp, synthetic construct
  source 1..17: mol_type = other DNA
gggagtgcagccaccgg

SEQ ID NO: 120288 - DNA, 17 bp, synthetic construct
  source 1..17: mol_type = other DNA
ggagtgcagccaccggc

SEQ ID NO: 120289 - DNA, 17 bp, synthetic construct
  source 1..17: mol_type = other DNA
gagtgcagccaccggct

SEQ ID NO: 120290 - DNA, 17 bp, synthetic construct
  source 1..17: mol_type = other DNA
agtgcagccaccggctc

SEQ ID NO: 120291 - DNA, 17 bp, synthetic construct
  source 1..17: mol_type = other DNA
gtgcagccaccggctct

SEQ ID NO: 120292 - DNA, 17 bp, synthetic construct
  source 1..17: mol_type = other DNA
tgcagccaccggctctg

SEQ ID NO: 120293 - DNA, 17 bp, synthetic construct
  source 1..17: mol_type = other DNA
gcagccaccggctctgc

SEQ ID NO: 120294 - DNA, 17 bp, synthetic construct
  source 1..17: mol_type = other DNA
cagccaccggctctgcc

SEQ ID NO: 120295 - DNA, 17 bp, synthetic construct
  source 1..17: mol_type = other DNA
agccaccggctctgcct

SEQ ID NO: 120296 - DNA, 17 bp, synthetic construct
  source 1..17: mol_type = other DNA
gccaccggctctgcctg

SEQ ID NO: 120297 - DNA, 17 bp, synthetic construct
  source 1..17: mol_type = other DNA
ccaccggctctgcctgg

SEQ ID NO: 120298 - DNA, 17 bp, synthetic construct
  source 1..17: mol_type = other DNA
caccggctctgcctggg

SEQ ID NO: 120299 - DNA, 17 bp, synthetic construct
  source 1..17: mol_type = other DNA
accggctctgcctgggc

SEQ ID NO: 120300 - DNA, 17 bp, synthetic construct
  source 1..17: mol_type = other DNA
ccggctctgcctgggca

SEQ ID NO: 120301 - DNA, 17 bp, synthetic construct
  source 1..17: mol_type = other DNA
cggctctgcctgggcac

SEQ ID NO: 120302 - DNA, 17 bp, synthetic construct
  source 1..17: mol_type = other DNA
ggctctgcctgggcacc

SEQ ID NO: 120303 - DNA, 17 bp, synthetic construct
  source 1..17: mol_type = other DNA
gctctgcctgggcacct

SEQ ID NO: 120304 - DNA, 17 bp, synthetic construct
  source 1..17: mol_type = other DNA
ctctgcctgggcacctg

SEQ ID NO: 120305 - DNA, 17 bp, synthetic construct
  source 1..17: mol_type = other DNA
tctgcctgggcacctgc

SEQ ID NO: 120306 - DNA, 17 bp, synthetic construct
  source 1..17: mol_type = other DNA
ctgcctgggcacctgcg

SEQ ID NO: 120307 - DNA, 17 bp, synthetic construct
  source 1..17: mol_type = other DNA
tgcctgggcacctgcgt

SEQ ID NO: 120308 - DNA, 17 bp, synthetic construct
  source 1..17: mol_type = other DNA
gcctgggcacctgcgtg

SEQ ID NO: 120309 - DNA, 17 bp, synthetic construct
  source 1..17: mol_type = other DNA
cctgggcacctgcgtgg

SEQ ID NO: 120310 - DNA, 17 bp, synthetic construct
  source 1..17: mol_type = other DNA
ctgggcacctgcgtggc

SEQ ID NO: 120311 - DNA, 17 bp, synthetic construct
  source 1..17: mol_type = other DNA
tgggcacctgcgtggcc

SEQ ID NO: 120312 - DNA, 17 bp, synthetic construct
  source 1..17: mol_type = other DNA
gggcacctgcgtggcct

SEQ ID NO: 120313 - DNA, 17 bp, synthetic construct
  source 1..17: mol_type = other DNA
ggcacctgcgtggccta

SEQ ID NO: 120314 - DNA, 17 bp, synthetic construct
  source 1..17: mol_type = other DNA
gcacctgcgtggcctac

SEQ ID NO: 120315 - DNA, 17 bp, synthetic construct
  source 1..17: mol_type = other DNA
cacctgcgtggcctacg

SEQ ID NO: 120316 - DNA, 17 bp, synthetic construct
  source 1..17: mol_type = other DNA
acctgcgtggcctacgg

SEQ ID NO: 120317 - DNA, 17 bp, synthetic construct
  source 1..17: mol_type = other DNA
cctgcgtggcctacggg

SEQ ID NO: 120318 - DNA, 17 bp, synthetic construct
  source 1..17: mol_type = other DNA
ctgcgtggcctacgggg

SEQ ID NO: 120319 - DNA, 17 bp, synthetic construct
  source 1..17: mol_type = other DNA
tgcgtggcctacgggga

SEQ ID NO: 120320 - DNA, 17 bp, synthetic construct
  source 1..17: mol_type = other DNA
gcgtggcctacggggat

SEQ ID NO: 120321 - DNA, 17 bp, synthetic construct
  source 1..17: mol_type = other DNA
cgtggcctacggggatg

SEQ ID NO: 120322 - DNA, 17 bp, synthetic construct
  source 1..17: mol_type = other DNA
gtggcctacggggatgg

SEQ ID NO: 120323 - DNA, 17 bp, synthetic construct
  source 1..17: mol_type = other DNA
tggcctacggggatggc

SEQ ID NO: 120324 - DNA, 17 bp, synthetic construct
  source 1..17: mol_type = other DNA
ggcctacggggatggcc

SEQ ID NO: 120325 - DNA, 17 bp, synthetic construct
  source 1..17: mol_type = other DNA
gcctacggggatggcca

SEQ ID NO: 120326 - DNA, 17 bp, synthetic construct
  source 1..17: mol_type = other DNA
cctacggggatggccac

SEQ ID NO: 120327 - DNA, 17 bp, synthetic construct
  source 1..17: mol_type = other DNA
ctacggggatggccact

SEQ ID NO: 120328 - DNA, 17 bp, synthetic construct
  source 1..17: mol_type = other DNA
tacggggatggccactt

SEQ ID NO: 120329 - DNA, 17 bp, synthetic construct
  source 1..17: mol_type = other DNA
acggggatggccacttc

SEQ ID NO: 120330 - DNA, 17 bp, synthetic construct
  source 1..17: mol_type = other DNA
cggggatggccacttca

SEQ ID NO: 120331 - DNA, 17 bp, synthetic construct
  source 1..17: mol_type = other DNA
ggggatggccacttcat

SEQ ID NO: 120332 - DNA, 17 bp, synthetic construct
  source 1..17: mol_type = other DNA
gggatggccacttcatc

SEQ ID NO: 120333 - DNA, 17 bp, synthetic construct
  source 1..17: mol_type = other DNA
ggatggccacttcatca

SEQ ID NO: 120334 - DNA, 17 bp, synthetic construct
  source 1..17: mol_type = other DNA
gatggccacttcatcac

SEQ ID NO: 120335 - DNA, 17 bp, synthetic construct
  source 1..17: mol_type = other DNA
atggccacttcatcacc

SEQ ID NO: 120336 - DNA, 17 bp, synthetic construct
  source 1..17: mol_type = other DNA
tggccacttcatcacct

SEQ ID NO: 120337 - DNA, 17 bp, synthetic construct
  source 1..17: mol_type = other DNA
ggccacttcatcacctt

SEQ ID NO: 120338 - DNA, 17 bp, synthetic construct
  source 1..17: mol_type = other DNA
gccacttcatcaccttt

SEQ ID NO: 120339 - DNA, 17 bp, synthetic construct
  source 1..17: mol_type = other DNA
ccacttcatcacctttg

SEQ ID NO: 120340 - DNA, 17 bp, synthetic construct
  source 1..17: mol_type = other DNA
cacttcatcacctttga

SEQ ID NO: 120341 - DNA, 17 bp, synthetic construct
  source 1..17: mol_type = other DNA
acttcatcacctttgat

SEQ ID NO: 120342 - DNA, 17 bp, synthetic construct
  source 1..17: mol_type = other DNA
cttcatcacctttgatg

SEQ ID NO: 120343 - DNA, 17 bp, synthetic construct
  source 1..17: mol_type = other DNA
ttcatcacctttgatgg

SEQ ID NO: 120344 - DNA, 17 bp, synthetic construct
  source 1..17: mol_type = other DNA
tcatcacctttgatggc

SEQ ID NO: 120345 - DNA, 17 bp, synthetic construct
  source 1..17: mol_type = other DNA
catcacctttgatggcg

SEQ ID NO: 120346 - DNA, 17 bp, synthetic construct
  source 1..17: mol_type = other DNA
atcacctttgatggcga

SEQ ID NO: 120347 - DNA, 17 bp, synthetic construct
  source 1..17: mol_type = other DNA
tcacctttgatggcgat

SEQ ID NO: 120348 - DNA, 17 bp, synthetic construct
  source 1..17: mol_type = other DNA
cacctttgatggcgatc

SEQ ID NO: 120349 - DNA, 17 bp, synthetic construct
  source 1..17: mol_type = other DNA
acctttgatggcgatcg

SEQ ID NO: 120350 - DNA, 17 bp, synthetic construct
  source 1..17: mol_type = other DNA
cctttgatggcgatcgc

SEQ ID NO: 120351 - DNA, 17 bp, synthetic construct
  source 1..17: mol_type = other DNA
ctttgatggcgatcgct

SEQ ID NO: 120352 - DNA, 17 bp, synthetic construct
  source 1..17: mol_type = other DNA
tttgatggcgatcgcta

SEQ ID NO: 120353 - DNA, 17 bp, synthetic construct
  source 1..17: mol_type = other DNA
ttgatggcgatcgctac

SEQ ID NO: 120354 - DNA, 17 bp, synthetic construct
  source 1..17: mol_type = other DNA
tgatggcgatcgctaca

SEQ ID NO: 120355 - DNA, 17 bp, synthetic construct
  source 1..17: mol_type = other DNA
gatggcgatcgctacag

SEQ ID NO: 120356 - DNA, 17 bp, synthetic construct
  source 1..17: mol_type = other DNA
atggcgatcgctacagc

SEQ ID NO: 120357 - DNA, 17 bp, synthetic construct
  source 1..17: mol_type = other DNA
tggcgatcgctacagct

SEQ ID NO: 120358 - DNA, 17 bp, synthetic construct
  source 1..17: mol_type = other DNA
ggcgatcgctacagctt

SEQ ID NO: 120359 - DNA, 17 bp, synthetic construct
  source 1..17: mol_type = other DNA
gcgatcgctacagcttt

SEQ ID NO: 120360 - DNA, 17 bp, synthetic construct
  source 1..17: mol_type = other DNA
cgatcgctacagctttg

SEQ ID NO: 120361 - DNA, 17 bp, synthetic construct
  source 1..17: mol_type = other DNA
gatcgctacagctttga

SEQ ID NO: 120362 - DNA, 17 bp, synthetic construct
  source 1..17: mol_type = other DNA
atcgctacagctttgaa

SEQ ID NO: 120363 - DNA, 17 bp, synthetic construct
  source 1..17: mol_type = other DNA
tcgctacagctttgaag

SEQ ID NO: 120364 - DNA, 17 bp, synthetic construct
  source 1..17: mol_type = other DNA
cgctacagctttgaagg

SEQ ID NO: 120365 - DNA, 17 bp, synthetic construct
  source 1..17: mol_type = other DNA
gctacagctttgaaggc

SEQ ID NO: 120366 - DNA, 17 bp, synthetic construct
  source 1..17: mol_type = other DNA
ctacagctttgaaggca

SEQ ID NO: 120367 - DNA, 17 bp, synthetic construct
  source 1..17: mol_type = other DNA
tacagctttgaaggcag

SEQ ID NO: 120368 - DNA, 17 bp, synthetic construct
  source 1..17: mol_type = other DNA
acagctttgaaggcagc

SEQ ID NO: 120369 - DNA, 17 bp, synthetic construct
  source 1..17: mol_type = other DNA
cagctttgaaggcagct

SEQ ID NO: 120370 - DNA, 17 bp, synthetic construct
  source 1..17: mol_type = other DNA
agctttgaaggcagctg

SEQ ID NO: 120371 - DNA, 17 bp, synthetic construct
  source 1..17: mol_type = other DNA
gctttgaaggcagctgc

SEQ ID NO: 120372 - DNA, 17 bp, synthetic construct
  source 1..17: mol_type = other DNA
ctttgaaggcagctgcg

SEQ ID NO: 120373 - DNA, 17 bp, synthetic construct
  source 1..17: mol_type = other DNA
tttgaaggcagctgcga

SEQ ID NO: 120374 - DNA, 17 bp, synthetic construct
  source 1..17: mol_type = other DNA
ttgaaggcagctgcgag

SEQ ID NO: 120375 - DNA, 17 bp, synthetic construct
  source 1..17: mol_type = other DNA
tgaaggcagctgcgagt

SEQ ID NO: 120376 - DNA, 17 bp, synthetic construct
  source 1..17: mol_type = other DNA
gaaggcagctgcgagta

SEQ ID NO: 120377 - DNA, 17 bp, synthetic construct
  source 1..17: mol_type = other DNA
aaggcagctgcgagtac

SEQ ID NO: 120378 - DNA, 17 bp, synthetic construct
  source 1..17: mol_type = other DNA
aggcagctgcgagtaca

SEQ ID NO: 120379 - DNA, 17 bp, synthetic construct
  source 1..17: mol_type = other DNA
ggcagctgcgagtacat

SEQ ID NO: 120380 - DNA, 17 bp, synthetic construct
  source 1..17: mol_type = other DNA
gcagctgcgagtacatc

SEQ ID NO: 120381 - DNA, 17 bp, synthetic construct
  source 1..17: mol_type = other DNA
cagctgcgagtacatct

SEQ ID NO: 120382 - DNA, 17 bp, synthetic construct
  source 1..17: mol_type = other DNA
agctgcgagtacatctt

SEQ ID NO: 120383 - DNA, 17 bp, synthetic construct
  source 1..17: mol_type = other DNA
gctgcgagtacatcttg

SEQ ID NO: 120384 - DNA, 17 bp, synthetic construct
  source 1..17: mol_type = other DNA
ctgcgagtacatcttgg

SEQ ID NO: 120385 - DNA, 17 bp, synthetic construct
  source 1..17: mol_type = other DNA
tgcgagtacatcttggc

SEQ ID NO: 120386 - DNA, 17 bp, synthetic construct
  source 1..17: mol_type = other DNA
gcgagtacatcttggcc

SEQ ID NO: 120387 - DNA, 17 bp, synthetic construct
  source 1..17: mol_type = other DNA
cgagtacatcttggccc

SEQ ID NO: 120388 - DNA, 17 bp, synthetic construct
  source 1..17: mol_type = other DNA
gagtacatcttggccca

SEQ ID NO: 120389 - DNA, 17 bp, synthetic construct
  source 1..17: mol_type = other DNA
agtacatcttggcccag

SEQ ID NO: 120390 - DNA, 17 bp, synthetic construct
  source 1..17: mol_type = other DNA
gtacatcttggcccagg

SEQ ID NO: 120391 - DNA, 17 bp, synthetic construct
  source 1..17: mol_type = other DNA
tacatcttggcccaggt

SEQ ID NO: 120392 - DNA, 17 bp, synthetic construct
  source 1..17: mol_type = other DNA
acatcttggcccaggta

SEQ ID NO: 120393 - DNA, 17 bp, synthetic construct
  source 1..17: mol_type = other DNA
catcttggcccaggtac

SEQ ID NO: 120394 - DNA, 17 bp, synthetic construct
  source 1..17: mol_type = other DNA
atcttggcccaggtacg

SEQ ID NO: 120395 - DNA, 17 bp, synthetic construct
  source 1..17: mol_type = other DNA
tcttggcccaggtacgc

SEQ ID NO: 120396 - DNA, 17 bp, synthetic construct
  source 1..17: mol_type = other DNA
cttggcccaggtacgcc

SEQ ID NO: 120397 - DNA, 17 bp, synthetic construct
  source 1..17: mol_type = other DNA
ttggcccaggtacgccg

SEQ ID NO: 120398 - DNA, 17 bp, synthetic construct
  source 1..17: mol_type = other DNA
tggcccaggtacgccgc

SEQ ID NO: 120399 - DNA, 17 bp, synthetic construct
  source 1..17: mol_type = other DNA
ggcccaggtacgccgcc

SEQ ID NO: 120400 - DNA, 17 bp, synthetic construct
  source 1..17: mol_type = other DNA
gcccaggtacgccgccc

SEQ ID NO: 120401 - DNA, 17 bp, synthetic construct
  source 1..17: mol_type = other DNA
cccaggtacgccgcccc

SEQ ID NO: 120402 - DNA, 17 bp, synthetic construct
  source 1..17: mol_type = other DNA
ccaggtacgccgccccc

SEQ ID NO: 120403 - DNA, 17 bp, synthetic construct
  source 1..17: mol_type = other DNA
caggtacgccgccccct

SEQ ID NO: 120404 - DNA, 17 bp, synthetic construct
  source 1..17: mol_type = other DNA
aggtacgccgccccctc

SEQ ID NO: 120405 - DNA, 17 bp, synthetic construct
  source 1..17: mol_type = other DNA
ggtacgccgccccctcg

SEQ ID NO: 120406 - DNA, 17 bp, synthetic construct
  source 1..17: mol_type = other DNA
gtacgccgccccctcgc

SEQ ID NO: 120407 - DNA, 17 bp, synthetic construct
  source 1..17: mol_type = other DNA
tacgccgccccctcgcc

SEQ ID NO: 120408 - DNA, 17 bp, synthetic construct
  source 1..17: mol_type = other DNA
acgccgccccctcgccc

SEQ ID NO: 120409 - DNA, 17 bp, synthetic construct
  source 1..17: mol_type = other DNA
cgccgccccctcgccca

SEQ ID NO: 120410 - DNA, 17 bp, synthetic construct
  source 1..17: mol_type = other DNA
gccgccccctcgcccac

SEQ ID NO: 120411 - DNA, 17 bp, synthetic construct
  source 1..17: mol_type = other DNA
ccgccccctcgcccact

SEQ ID NO: 120412 - DNA, 17 bp, synthetic construct
  source 1..17: mol_type = other DNA
cgccccctcgcccactc

SEQ ID NO: 120413 - DNA, 17 bp, synthetic construct
  source 1..17: mol_type = other DNA
gccccctcgcccactcc

SEQ ID NO: 120414 - DNA, 17 bp, synthetic construct
  source 1..17: mol_type = other DNA
ccccctcgcccactcct

SEQ ID NO: 120415 - DNA, 17 bp, synthetic construct
  source 1..17: mol_type = other DNA
cccctcgcccactcctg

SEQ ID NO: 120416 - DNA, 17 bp, synthetic construct
  source 1..17: mol_type = other DNA
ccctcgcccactcctgc

SEQ ID NO: 120417 - DNA, 17 bp, synthetic construct
  source 1..17: mol_type = other DNA
cctcgcccactcctgca

SEQ ID NO: 120418 - DNA, 17 bp, synthetic construct
  source 1..17: mol_type = other DNA
ctcgcccactcctgcag

SEQ ID NO: 120419 - DNA, 17 bp, synthetic construct
  source 1..17: mol_type = other DNA
tcgcccactcctgcagg

SEQ ID NO: 120420 - DNA, 17 bp, synthetic construct
  source 1..17: mol_type = other DNA
cgcccactcctgcaggc

SEQ ID NO: 120421 - DNA, 17 bp, synthetic construct
  source 1..17: mol_type = other DNA
gcccactcctgcaggcc

SEQ ID NO: 120422 - DNA, 17 bp, synthetic construct
  source 1..17: mol_type = other DNA
cccactcctgcaggccg

SEQ ID NO: 120423 - DNA, 17 bp, synthetic construct
  source 1..17: mol_type = other DNA
ccactcctgcaggccgg

SEQ ID NO: 120424 - DNA, 17 bp, synthetic construct
  source 1..17: mol_type = other DNA
cactcctgcaggccggg

SEQ ID NO: 120425 - DNA, 17 bp, synthetic construct
  source 1..17: mol_type = other DNA
actcctgcaggccgggc

SEQ ID NO: 120426 - DNA, 17 bp, synthetic construct
  source 1..17: mol_type = other DNA
ctcctgcaggccgggca

SEQ ID NO: 120427 - DNA, 17 bp, synthetic construct
  source 1..17: mol_type = other DNA
tcctgcaggccgggcac

SEQ ID NO: 120428 - DNA, 17 bp, synthetic construct
  source 1..17: mol_type = other DNA
cctgcaggccgggcaca

SEQ ID NO: 120429 - DNA, 17 bp, synthetic construct
  source 1..17: mol_type = other DNA
ctgcaggccgggcacac

SEQ ID NO: 120430 - DNA, 17 bp, synthetic construct
  source 1..17: mol_type = other DNA
tgcaggccgggcacact

SEQ ID NO: 120431 - DNA, 17 bp, synthetic construct
  source 1..17: mol_type = other DNA
gcaggccgggcacactc

SEQ ID NO: 120432 - DNA, 17 bp, synthetic construct
  source 1..17: mol_type = other DNA
caggccgggcacactcc

SEQ ID NO: 120433 - DNA, 17 bp, synthetic construct
  source 1..17: mol_type = other DNA
aggccgggcacactcca

SEQ ID NO: 120434 - DNA, 17 bp, synthetic construct
  source 1..17: mol_type = other DNA
ggccgggcacactccag

SEQ ID NO: 120435 - DNA, 17 bp, synthetic construct
  source 1..17: mol_type = other DNA
gccgggcacactccagc

SEQ ID NO: 120436 - DNA, 17 bp, synthetic construct
  source 1..17: mol_type = other DNA
ccgggcacactccagcc

SEQ ID NO: 120437 - DNA, 17 bp, synthetic construct
  source 1..17: mol_type = other DNA
cgggcacactccagccc

SEQ ID NO: 120438 - DNA, 17 bp, synthetic construct
  source 1..17: mol_type = other DNA
gggcacactccagcccg

SEQ ID NO: 120439 - DNA, 17 bp, synthetic construct
  source 1..17: mol_type = other DNA
ggcacactccagcccgc

SEQ ID NO: 120440 - DNA, 17 bp, synthetic construct
  source 1..17: mol_type = other DNA
gcacactccagcccgcg

SEQ ID NO: 120441 - DNA, 17 bp, synthetic construct
  source 1..17: mol_type = other DNA
cacactccagcccgcgg

SEQ ID NO: 120442 - DNA, 17 bp, synthetic construct
  source 1..17: mol_type = other DNA
acactccagcccgcggc

SEQ ID NO: 120443 - DNA, 17 bp, synthetic construct
  source 1..17: mol_type = other DNA
cactccagcccgcggcc

SEQ ID NO: 120444 - DNA, 17 bp, synthetic construct
  source 1..17: mol_type = other DNA
actccagcccgcggcca

SEQ ID NO: 120445 - DNA, 17 bp, synthetic construct
  source 1..17: mol_type = other DNA
ctccagcccgcggccag

SEQ ID NO: 120446 - DNA, 17 bp, synthetic construct
  source 1..17: mol_type = other DNA
tccagcccgcggccagc

SEQ ID NO: 120447 - DNA, 17 bp, synthetic construct
  source 1..17: mol_type = other DNA
ccagcccgcggccagca

SEQ ID NO: 120448 - DNA, 17 bp, synthetic construct
  source 1..17: mol_type = other DNA
cagcccgcggccagcag

SEQ ID NO: 120449 - DNA, 17 bp, synthetic construct
  source 1..17: mol_type = other DNA
agcccgcggccagcagc

SEQ ID NO: 120450 - DNA, 17 bp, synthetic construct
  source 1..17: mol_type = other DNA
gcccgcggccagcagct

SEQ ID NO: 120451 - DNA, 17 bp, synthetic construct
  source 1..17: mol_type = other DNA
cccgcggccagcagctt

SEQ ID NO: 120452 - DNA, 17 bp, synthetic construct
  source 1..17: mol_type = other DNA
ccgcggccagcagcttg

SEQ ID NO: 120453 - DNA, 17 bp, synthetic construct
  source 1..17: mol_type = other DNA
cgcggccagcagcttgt

SEQ ID NO: 120454 - DNA, 17 bp, synthetic construct
  source 1..17: mol_type = other DNA
gcggccagcagcttgtc

SEQ ID NO: 120455 - DNA, 17 bp, synthetic construct
  source 1..17: mol_type = other DNA
cggccagcagcttgtct

SEQ ID NO: 120456 - DNA, 17 bp, synthetic construct
  source 1..17: mol_type = other DNA
ggccagcagcttgtctc

SEQ ID NO: 120457 - DNA, 17 bp, synthetic construct
  source 1..17: mol_type = other DNA
gccagcagcttgtctct

SEQ ID NO: 120458 - DNA, 17 bp, synthetic construct
  source 1..17: mol_type = other DNA
ccagcagcttgtctctt

SEQ ID NO: 120459 - DNA, 17 bp, synthetic construct
  source 1..17: mol_type = other DNA
cagcagcttgtctcttt

SEQ ID NO: 120460 - DNA, 17 bp, synthetic construct
  source 1..17: mol_type = other DNA
agcagcttgtctctttc

SEQ ID NO: 120461 - DNA, 17 bp, synthetic construct
  source 1..17: mol_type = other DNA
gcagcttgtctctttct

SEQ ID NO: 120462 - DNA, 17 bp, synthetic construct
  source 1..17: mol_type = other DNA
cagcttgtctctttctg

SEQ ID NO: 120463 - DNA, 17 bp, synthetic construct
  source 1..17: mol_type = other DNA
agcttgtctctttctgg

SEQ ID NO: 120464 - DNA, 17 bp, synthetic construct
  source 1..17: mol_type = other DNA
gcttgtctctttctggc

SEQ ID NO: 120465 - DNA, 17 bp, synthetic construct
  source 1..17: mol_type = other DNA
cttgtctctttctggcc

SEQ ID NO: 120466 - DNA, 17 bp, synthetic construct
  source 1..17: mol_type = other DNA
ttgtctctttctggccc

SEQ ID NO: 120467 - DNA, 17 bp, synthetic construct
  source 1..17: mol_type = other DNA
tgtctctttctggccca

SEQ ID NO: 120468 - DNA, 17 bp, synthetic construct
  source 1..17: mol_type = other DNA
gtctctttctggcccag

SEQ ID NO: 120469 - DNA, 17 bp, synthetic construct
  source 1..17: mol_type = other DNA
tctctttctggcccagg

SEQ ID NO: 120470 - DNA, 17 bp, synthetic construct
  source 1..17: mol_type = other DNA
ctctttctggcccagga

SEQ ID NO: 120471 - DNA, 17 bp, synthetic construct
  source 1..17: mol_type = other DNA
tctttctggcccaggac

SEQ ID NO: 120472 - DNA, 17 bp, synthetic construct
  source 1..17: mol_type = other DNA
ctttctggcccaggact

SEQ ID NO: 120473 - DNA, 17 bp, synthetic construct
  source 1..17: mol_type = other DNA
tttctggcccaggacta

SEQ ID NO: 120474 - DNA, 17 bp, synthetic construct
  source 1..17: mol_type = other DNA
ttctggcccaggactac

SEQ ID NO: 120475 - DNA, 17 bp, synthetic construct
  source 1..17: mol_type = other DNA
tctggcccaggactact

SEQ ID NO: 120476 - DNA, 17 bp, synthetic construct
  source 1..17: mol_type = other DNA
ctggcccaggactactg

SEQ ID NO: 120477 - DNA, 17 bp, synthetic construct
  source 1..17: mol_type = other DNA
tggcccaggactactgt

SEQ ID NO: 120478 - DNA, 17 bp, synthetic construct
  source 1..17: mol_type = other DNA
ggcccaggactactgtg

SEQ ID NO: 120479 - DNA, 17 bp, synthetic construct
  source 1..17: mol_type = other DNA
gcccaggactactgtgg

SEQ ID NO: 120480 - DNA, 17 bp, synthetic construct
  source 1..17: mol_type = other DNA
cccaggactactgtggg

SEQ ID NO: 120481 - DNA, 17 bp, synthetic construct
  source 1..17: mol_type = other DNA
ccaggactactgtgggg

SEQ ID NO: 120482 - DNA, 17 bp, synthetic construct
  source 1..17: mol_type = other DNA
caggactactgtgggga

SEQ ID NO: 120483 - DNA, 17 bp, synthetic construct
  source 1..17: mol_type = other DNA
aggactactgtggggac

SEQ ID NO: 120484 - DNA, 17 bp, synthetic construct
  source 1..17: mol_type = other DNA
ggactactgtggggaca

SEQ ID NO: 120485 - DNA, 17 bp, synthetic construct
  source 1..17: mol_type = other DNA
gactactgtggggacaa

SEQ ID NO: 120486 - DNA, 17 bp, synthetic construct
  source 1..17: mol_type = other DNA
actactgtggggacaac

SEQ ID NO: 120487 - DNA, 17 bp, synthetic construct
  source 1..17: mol_type = other DNA
ctactgtggggacaaca

SEQ ID NO: 120488 - DNA, 17 bp, synthetic construct
  source 1..17: mol_type = other DNA
tactgtggggacaacac

SEQ ID NO: 120489 - DNA, 17 bp, synthetic construct
  source 1..17: mol_type = other DNA
actgtggggacaacacc

SEQ ID NO: 120490 - DNA, 17 bp, synthetic construct
  source 1..17: mol_type = other DNA
ctgtggggacaacacca

SEQ ID NO: 120491 - DNA, 17 bp, synthetic construct
  source 1..17: mol_type = other DNA
tgtggggacaacaccac

SEQ ID NO: 120492 - DNA, 17 bp, synthetic construct
  source 1..17: mol_type = other DNA
gtggggacaacaccacc

SEQ ID NO: 120493 - DNA, 17 bp, synthetic construct
  source 1..17: mol_type = other DNA
tggggacaacaccaccc

SEQ ID NO: 120494 - DNA, 17 bp, synthetic construct
  source 1..17: mol_type = other DNA
ggggacaacaccaccca

SEQ ID NO: 120495 - DNA, 17 bp, synthetic construct
  source 1..17: mol_type = other DNA
gggacaacaccacccac

SEQ ID NO: 120496 - DNA, 17 bp, synthetic construct
  source 1..17: mol_type = other DNA
ggacaacaccacccacg

SEQ ID NO: 120497 - DNA, 17 bp, synthetic construct
  source 1..17: mol_type = other DNA
gacaacaccacccacgg

SEQ ID NO: 120498 - DNA, 17 bp, synthetic construct
  source 1..17: mol_type = other DNA
acaacaccacccacggg

SEQ ID NO: 120499 - DNA, 17 bp, synthetic construct
  source 1..17: mol_type = other DNA
caacaccacccacggga

SEQ ID NO: 120500 - DNA, 17 bp, synthetic construct
  source 1..17: mol_type = other DNA
aacaccacccacgggac

SEQ ID NO: 120501 - DNA, 17 bp, synthetic construct
  source 1..17: mol_type = other DNA
acaccacccacgggacc

SEQ ID NO: 120502 - DNA, 17 bp, synthetic construct
  source 1..17: mol_type = other DNA
caccacccacgggacct

SEQ ID NO: 120503 - DNA, 17 bp, synthetic construct
  source 1..17: mol_type = other DNA
accacccacgggacctt

SEQ ID NO: 120504 - DNA, 17 bp, synthetic construct
  source 1..17: mol_type = other DNA
ccacccacgggaccttc

SEQ ID NO: 120505 - DNA, 17 bp, synthetic construct
  source 1..17: mol_type = other DNA
cacccacgggaccttcc

SEQ ID NO: 120506 - DNA, 17 bp, synthetic construct
  source 1..17: mol_type = other DNA
acccacgggaccttccg

SEQ ID NO: 120507 - DNA, 17 bp, synthetic construct
  source 1..17: mol_type = other DNA
cccacgggaccttccgc

SEQ ID NO: 120508 - DNA, 17 bp, synthetic construct
  source 1..17: mol_type = other DNA
ccacgggaccttccgca

SEQ ID NO: 120509 - DNA, 17 bp, synthetic construct
  source 1..17: mol_type = other DNA
cacgggaccttccgcat

SEQ ID NO: 120510 - DNA, 17 bp, synthetic construct
  source 1..17: mol_type = other DNA
acgggaccttccgcatc

SEQ ID NO: 120511 - DNA, 17 bp, synthetic construct
  source 1..17: mol_type = other DNA
cgggaccttccgcatcg

SEQ ID NO: 120512 - DNA, 17 bp, synthetic construct
  source 1..17: mol_type = other DNA
gggaccttccgcatcgt

SEQ ID NO: 120513 - DNA, 17 bp, synthetic construct
  source 1..17: mol_type = other DNA
ggaccttccgcatcgtc

SEQ ID NO: 120514 - DNA, 17 bp, synthetic construct
  source 1..17: mol_type = other DNA
gaccttccgcatcgtca

SEQ ID NO: 120515 - DNA, 17 bp, synthetic construct
  source 1..17: mol_type = other DNA
accttccgcatcgtcac

SEQ ID NO: 120516 - DNA, 17 bp, synthetic construct
  source 1..17: mol_type = other DNA
ccttccgcatcgtcacc

SEQ ID NO: 120517 - DNA, 17 bp, synthetic construct
  source 1..17: mol_type = other DNA
cttccgcatcgtcaccg

SEQ ID NO: 120518 - DNA, 17 bp, synthetic construct
  source 1..17: mol_type = other DNA
ttccgcatcgtcaccga

SEQ ID NO: 120519 - DNA, 17 bp, synthetic construct
  source 1..17: mol_type = other DNA
tccgcatcgtcaccgag

SEQ ID NO: 120520 - DNA, 17 bp, synthetic construct
  source 1..17: mol_type = other DNA
ccgcatcgtcaccgaga

SEQ ID NO: 120521 - DNA, 17 bp, synthetic construct
  source 1..17: mol_type = other DNA
cgcatcgtcaccgagaa

SEQ ID NO: 120522 - DNA, 17 bp, synthetic construct
  source 1..17: mol_type = other DNA
gcatcgtcaccgagaac

SEQ ID NO: 120523 - DNA, 17 bp, synthetic construct
  source 1..17: mol_type = other DNA
catcgtcaccgagaaca

SEQ ID NO: 120524 - DNA, 17 bp, synthetic construct
  source 1..17: mol_type = other DNA
atcgtcaccgagaacat

SEQ ID NO: 120525 - DNA, 17 bp, synthetic construct
  source 1..17: mol_type = other DNA
tcgtcaccgagaacatc

SEQ ID NO: 120526 - DNA, 17 bp, synthetic construct
  source 1..17: mol_type = other DNA
cgtcaccgagaacatcc

SEQ ID NO: 120527 - DNA, 17 bp, synthetic construct
  source 1..17: mol_type = other DNA
gtcaccgagaacatccc

SEQ ID NO: 120528 - DNA, 17 bp, synthetic construct
  source 1..17: mol_type = other DNA
tcaccgagaacatcccc

SEQ ID NO: 120529 - DNA, 17 bp, synthetic construct
  source 1..17: mol_type = other DNA
caccgagaacatcccct

SEQ ID NO: 120530 - DNA, 17 bp, synthetic construct
  source 1..17: mol_type = other DNA
accgagaacatcccctg

SEQ ID NO: 120531 - DNA, 17 bp, synthetic construct
  source 1..17: mol_type = other DNA
ccgagaacatcccctgt

SEQ ID NO: 120532 - DNA, 17 bp, synthetic construct
  source 1..17: mol_type = other DNA
cgagaacatcccctgtg

SEQ ID NO: 120533 - DNA, 17 bp, synthetic construct
  source 1..17: mol_type = other DNA
gagaacatcccctgtgg

SEQ ID NO: 120534 - DNA, 17 bp, synthetic construct
  source 1..17: mol_type = other DNA
agaacatcccctgtggg

SEQ ID NO: 120535 - DNA, 17 bp, synthetic construct
  source 1..17: mol_type = other DNA
gaacatcccctgtggga

SEQ ID NO: 120536 - DNA, 17 bp, synthetic construct
  source 1..17: mol_type = other DNA
aacatcccctgtgggac

SEQ ID NO: 120537 - DNA, 17 bp, synthetic construct
  source 1..17: mol_type = other DNA
acatcccctgtgggacc

SEQ ID NO: 120538 - DNA, 17 bp, synthetic construct
  source 1..17: mol_type = other DNA
catcccctgtgggacca

SEQ ID NO: 120539 - DNA, 17 bp, synthetic construct
  source 1..17: mol_type = other DNA
atcccctgtgggaccac

SEQ ID NO: 120540 - DNA, 17 bp, synthetic construct
  source 1..17: mol_type = other DNA
tcccctgtgggaccacc

SEQ ID NO: 120541 - DNA, 17 bp, synthetic construct
  source 1..17: mol_type = other DNA
cccctgtgggaccaccg

SEQ ID NO: 120542 - DNA, 17 bp, synthetic construct
  source 1..17: mol_type = other DNA
ccctgtgggaccaccgg

SEQ ID NO: 120543 - DNA, 17 bp, synthetic construct
  source 1..17: mol_type = other DNA
cctgtgggaccaccggc

SEQ ID NO: 120544 - DNA, 17 bp, synthetic construct
  source 1..17: mol_type = other DNA
ctgtgggaccaccggca

SEQ ID NO: 120545 - DNA, 17 bp, synthetic construct
  source 1..17: mol_type = other DNA
tgtgggaccaccggcac

SEQ ID NO: 120546 - DNA, 17 bp, synthetic construct
  source 1..17: mol_type = other DNA
gtgggaccaccggcacc

SEQ ID NO: 120547 - DNA, 17 bp, synthetic construct
  source 1..17: mol_type = other DNA
tgggaccaccggcacca

SEQ ID NO: 120548 - DNA, 17 bp, synthetic construct
  source 1..17: mol_type = other DNA
gggaccaccggcaccac

SEQ ID NO: 120549 - DNA, 17 bp, synthetic construct
  source 1..17: mol_type = other DNA
ggaccaccggcaccacc

SEQ ID NO: 120550 - DNA, 17 bp, synthetic construct
  source 1..17: mol_type = other DNA
gaccaccggcaccacct

SEQ ID NO: 120551 - DNA, 17 bp, synthetic construct
  source 1..17: mol_type = other DNA
accaccggcaccacctg

SEQ ID NO: 120552 - DNA, 17 bp, synthetic construct
  source 1..17: mol_type = other DNA
ccaccggcaccacctgc

SEQ ID NO: 120553 - DNA, 17 bp, synthetic construct
  source 1..17: mol_type = other DNA
caccggcaccacctgct

SEQ ID NO: 120554 - DNA, 17 bp, synthetic construct
  source 1..17: mol_type = other DNA
accggcaccacctgctc

SEQ ID NO: 120555 - DNA, 17 bp, synthetic construct
  source 1..17: mol_type = other DNA
ccggcaccacctgctcc

SEQ ID NO: 120556 - DNA, 17 bp, synthetic construct
  source 1..17: mol_type = other DNA
cggcaccacctgctcca

SEQ ID NO: 120557 - DNA, 17 bp, synthetic construct
  source 1..17: mol_type = other DNA
ggcaccacctgctccaa

SEQ ID NO: 120558 - DNA, 17 bp, synthetic construct
  source 1..17: mol_type = other DNA
gcaccacctgctccaag

SEQ ID NO: 120559 - DNA, 17 bp, synthetic construct
  source 1..17: mol_type = other DNA
caccacctgctccaagg

SEQ ID NO: 120560 - DNA, 17 bp, synthetic construct
  source 1..17: mol_type = other DNA
accacctgctccaaggc

SEQ ID NO: 120561 - DNA, 17 bp, synthetic construct
  source 1..17: mol_type = other DNA
ccacctgctccaaggcc

SEQ ID NO: 120562 - DNA, 17 bp, synthetic construct
  source 1..17: mol_type = other DNA
cacctgctccaaggcca

SEQ ID NO: 120563 - DNA, 17 bp, synthetic construct
  source 1..17: mol_type = other DNA
acctgctccaaggccat

SEQ ID NO: 120564 - DNA, 17 bp, synthetic construct
  source 1..17: mol_type = other DNA
cctgctccaaggccatc

SEQ ID NO: 120565 - DNA, 17 bp, synthetic construct
  source 1..17: mol_type = other DNA
ctgctccaaggccatca

SEQ ID NO: 120566 - DNA, 17 bp, synthetic construct
  source 1..17: mol_type = other DNA
tgctccaaggccatcaa

SEQ ID NO: 120567 - DNA, 17 bp, synthetic construct
  source 1..17: mol_type = other DNA
gctccaaggccatcaag

SEQ ID NO: 120568 - DNA, 17 bp, synthetic construct
  source 1..17: mol_type = other DNA
ctccaaggccatcaagc

SEQ ID NO: 120569 - DNA, 17 bp, synthetic construct
  source 1..17: mol_type = other DNA
tccaaggccatcaagct

SEQ ID NO: 120570 - DNA, 17 bp, synthetic construct
  source 1..17: mol_type = other DNA
ccaaggccatcaagctc

SEQ ID NO: 120571 - DNA, 17 bp, synthetic construct
  source 1..17: mol_type = other DNA
caaggccatcaagctct

SEQ ID NO: 120572 - DNA, 17 bp, synthetic construct
  source 1..17: mol_type = other DNA
aaggccatcaagctctt

SEQ ID NO: 120573 - DNA, 17 bp, synthetic construct
  source 1..17: mol_type = other DNA
aggccatcaagctcttc

SEQ ID NO: 120574 - DNA, 17 bp, synthetic construct
  source 1..17: mol_type = other DNA
ggccatcaagctcttcg

SEQ ID NO: 120575 - DNA, 17 bp, synthetic construct
  source 1..17: mol_type = other DNA
gccatcaagctcttcgt

SEQ ID NO: 120576 - DNA, 17 bp, synthetic construct
  source 1..17: mol_type = other DNA
ccatcaagctcttcgtg

SEQ ID NO: 120577 - DNA, 17 bp, synthetic construct
  source 1..17: mol_type = other DNA
catcaagctcttcgtgg

SEQ ID NO: 120578 - DNA, 17 bp, synthetic construct
  source 1..17: mol_type = other DNA
atcaagctcttcgtgga

SEQ ID NO: 120579 - DNA, 17 bp, synthetic construct
  source 1..17: mol_type = other DNA
tcaagctcttcgtggag

SEQ ID NO: 120580 - DNA, 17 bp, synthetic construct
  source 1..17: mol_type = other DNA
caagctcttcgtggagg

SEQ ID NO: 120581 - DNA, 17 bp, synthetic construct
  source 1..17: mol_type = other DNA
aagctcttcgtggaggt

SEQ ID NO: 120582 - DNA, 17 bp, synthetic construct
  source 1..17: mol_type = other DNA
agctcttcgtggaggtg

SEQ ID NO: 120583 - DNA, 17 bp, synthetic construct
  source 1..17: mol_type = other DNA
gctcttcgtggaggtga

SEQ ID NO: 120584 - DNA, 17 bp, synthetic construct
  source 1..17: mol_type = other DNA
ctcttcgtggaggtgag

SEQ ID NO: 120585 - DNA, 17 bp, synthetic construct
  source 1..17: mol_type = other DNA
tcttcgtggaggtgaga

SEQ ID NO: 120586 - DNA, 17 bp, synthetic construct
  source 1..17: mol_type = other DNA
cttcgtggaggtgagaa

SEQ ID NO: 120587 - DNA, 17 bp, synthetic construct
  source 1..17: mol_type = other DNA
ttcgtggaggtgagaac

SEQ ID NO: 120588 - DNA, 17 bp, synthetic construct
  source 1..17: mol_type = other DNA
tcgtggaggtgagaacg

SEQ ID NO: 120589 - DNA, 17 bp, synthetic construct
  source 1..17: mol_type = other DNA
cgtggaggtgagaacgg

SEQ ID NO: 120590 - DNA, 17 bp, synthetic construct
  source 1..17: mol_type = other DNA
gtggaggtgagaacggc

SEQ ID NO: 120591 - DNA, 17 bp, synthetic construct
  source 1..17: mol_type = other DNA
tggaggtgagaacggcc

SEQ ID NO: 120592 - DNA, 17 bp, synthetic construct
  source 1..17: mol_type = other DNA
ggaggtgagaacggccc

SEQ ID NO: 120593 - DNA, 17 bp, synthetic construct
  source 1..17: mol_type = other DNA
gaggtgagaacggcccc

SEQ ID NO: 120594 - DNA, 17 bp, synthetic construct
  source 1..17: mol_type = other DNA
aggtgagaacggcccca

SEQ ID NO: 120595 - DNA, 17 bp, synthetic construct
  source 1..17: mol_type = other DNA
ggtgagaacggccccag

SEQ ID NO: 120596 - DNA, 17 bp, synthetic construct
  source 1..17: mol_type = other DNA
gtgagaacggccccagc

SEQ ID NO: 120597 - DNA, 17 bp, synthetic construct
  source 1..17: mol_type = other DNA
tgagaacggccccagct

SEQ ID NO: 120598 - DNA, 17 bp, synthetic construct
  source 1..17: mol_type = other DNA
gagaacggccccagctg

SEQ ID NO: 120599 - DNA, 17 bp, synthetic construct
  source 1..17: mol_type = other DNA
agaacggccccagctgt

SEQ ID NO: 120600 - DNA, 17 bp, synthetic construct
  source 1..17: mol_type = other DNA
gaacggccccagctgtg

SEQ ID NO: 120601 - DNA, 17 bp, synthetic construct
  source 1..17: mol_type = other DNA
aacggccccagctgtga

SEQ ID NO: 120602 - DNA, 17 bp, synthetic construct
  source 1..17: mol_type = other DNA
acggccccagctgtgag

SEQ ID NO: 120603 - DNA, 17 bp, synthetic construct
  source 1..17: mol_type = other DNA
cggccccagctgtgagc

SEQ ID NO: 120604 - DNA, 17 bp, synthetic construct
  source 1..17: mol_type = other DNA
ggccccagctgtgagca

SEQ ID NO: 120605 - DNA, 17 bp, synthetic construct
  source 1..17: mol_type = other DNA
gccccagctgtgagcac

SEQ ID NO: 120606 - DNA, 17 bp, synthetic construct
  source 1..17: mol_type = other DNA
ccccagctgtgagcacc

SEQ ID NO: 120607 - DNA, 17 bp, synthetic construct
  source 1..17: mol_type = other DNA
cccagctgtgagcaccc

SEQ ID NO: 120608 - DNA, 17 bp, synthetic construct
  source 1..17: mol_type = other DNA
ccagctgtgagcacccc

SEQ ID NO: 120609 - DNA, 17 bp, synthetic construct
  source 1..17: mol_type = other DNA
cagctgtgagcaccccc

SEQ ID NO: 120610 - DNA, 17 bp, synthetic construct
  source 1..17: mol_type = other DNA
agctgtgagcacccccg

SEQ ID NO: 120611 - DNA, 17 bp, synthetic construct
  source 1..17: mol_type = other DNA
gctgtgagcacccccga

SEQ ID NO: 120612 - DNA, 17 bp, synthetic construct
  source 1..17: mol_type = other DNA
ctgtgagcacccccgac

SEQ ID NO: 120613 - DNA, 17 bp, synthetic construct
  source 1..17: mol_type = other DNA
tgtgagcacccccgacc

SEQ ID NO: 120614 - DNA, 17 bp, synthetic construct
  source 1..17: mol_type = other DNA
gtgagcacccccgaccc

SEQ ID NO: 120615 - DNA, 17 bp, synthetic construct
  source 1..17: mol_type = other DNA
tgagcacccccgaccct

SEQ ID NO: 120616 - DNA, 17 bp, synthetic construct
  source 1..17: mol_type = other DNA
gagcacccccgaccctg

SEQ ID NO: 120617 - DNA, 17 bp, synthetic construct
  source 1..17: mol_type = other DNA
agcacccccgaccctgc

SEQ ID NO: 120618 - DNA, 17 bp, synthetic construct
  source 1..17: mol_type = other DNA
gcacccccgaccctgca

SEQ ID NO: 120619 - DNA, 17 bp, synthetic construct
  source 1..17: mol_type = other DNA
cacccccgaccctgcag

SEQ ID NO: 120620 - DNA, 17 bp, synthetic construct
  source 1..17: mol_type = other DNA
acccccgaccctgcagc

SEQ ID NO: 120621 - DNA, 17 bp, synthetic construct
  source 1..17: mol_type = other DNA
cccccgaccctgcagcc

SEQ ID NO: 120622 - DNA, 17 bp, synthetic construct
  source 1..17: mol_type = other DNA
ccccgaccctgcagcca

SEQ ID NO: 120623 - DNA, 17 bp, synthetic construct
  source 1..17: mol_type = other DNA
cccgaccctgcagccaa

SEQ ID NO: 120624 - DNA, 17 bp, synthetic construct
  source 1..17: mol_type = other DNA
ccgaccctgcagccaac

SEQ ID NO: 120625 - DNA, 17 bp, synthetic construct
  source 1..17: mol_type = other DNA
cgaccctgcagccaacg

SEQ ID NO: 120626 - DNA, 17 bp, synthetic construct
  source 1..17: mol_type = other DNA
gaccctgcagccaacga

SEQ ID NO: 120627 - DNA, 17 bp, synthetic construct
  source 1..17: mol_type = other DNA
accctgcagccaacgag

SEQ ID NO: 120628 - DNA, 17 bp, synthetic construct
  source 1..17: mol_type = other DNA
ccctgcagccaacgagc

SEQ ID NO: 120629 - DNA, 17 bp, synthetic construct
  source 1..17: mol_type = other DNA
cctgcagccaacgagcc

SEQ ID NO: 120630 - DNA, 17 bp, synthetic construct
  source 1..17: mol_type = other DNA
ctgcagccaacgagccg

SEQ ID NO: 120631 - DNA, 17 bp, synthetic construct
  source 1..17: mol_type = other DNA
tgcagccaacgagccgg

SEQ ID NO: 120632 - DNA, 17 bp, synthetic construct
  source 1..17: mol_type = other DNA
gcagccaacgagccggc

SEQ ID NO: 120633 - DNA, 17 bp, synthetic construct
  source 1..17: mol_type = other DNA
cagccaacgagccggcc

SEQ ID NO: 120634 - DNA, 17 bp, synthetic construct
  source 1..17: mol_type = other DNA
agccaacgagccggccc

SEQ ID NO: 120635 - DNA, 17 bp, synthetic construct
  source 1..17: mol_type = other DNA
gccaacgagccggcccc

SEQ ID NO: 120636 - DNA, 17 bp, synthetic construct
  source 1..17: mol_type = other DNA
ccaacgagccggccccc

SEQ ID NO: 120637 - DNA, 17 bp, synthetic construct
  source 1..17: mol_type = other DNA
caacgagccggccccca

SEQ ID NO: 120638 - DNA, 17 bp, synthetic construct
  source 1..17: mol_type = other DNA
aacgagccggcccccag

SEQ ID NO: 120639 - DNA, 17 bp, synthetic construct
  source 1..17: mol_type = other DNA
acgagccggcccccagg

SEQ ID NO: 120640 - DNA, 17 bp, synthetic construct
  source 1..17: mol_type = other DNA
cgagccggcccccaggg

SEQ ID NO: 120641 - DNA, 17 bp, synthetic construct
  source 1..17: mol_type = other DNA
gagccggcccccaggga

SEQ ID NO: 120642 - DNA, 17 bp, synthetic construct
  source 1..17: mol_type = other DNA
agccggcccccagggaa

SEQ ID NO: 120643 - DNA, 17 bp, synthetic construct
  source 1..17: mol_type = other DNA
gccggcccccagggaag

SEQ ID NO: 120644 - DNA, 17 bp, synthetic construct
  source 1..17: mol_type = other DNA
ccggcccccagggaagc

SEQ ID NO: 120645 - DNA, 17 bp, synthetic construct
  source 1..17: mol_type = other DNA
cggcccccagggaagct

SEQ ID NO: 120646 - DNA, 17 bp, synthetic construct
  source 1..17: mol_type = other DNA
ggcccccagggaagctt

SEQ ID NO: 120647 - DNA, 17 bp, synthetic construct
  source 1..17: mol_type = other DNA
gcccccagggaagcttc

SEQ ID NO: 120648 - DNA, 17 bp, synthetic construct
  source 1..17: mol_type = other DNA
cccccagggaagcttcg

SEQ ID NO: 120649 - DNA, 17 bp, synthetic construct
  source 1..17: mol_type = other DNA
ccccagggaagcttcgt

SEQ ID NO: 120650 - DNA, 17 bp, synthetic construct
  source 1..17: mol_type = other DNA
cccagggaagcttcgtg

SEQ ID NO: 120651 - DNA, 17 bp, synthetic construct
  source 1..17: mol_type = other DNA
ccagggaagcttcgtga

SEQ ID NO: 120652 - DNA, 17 bp, synthetic construct
  source 1..17: mol_type = other DNA
cagggaagcttcgtgag

SEQ ID NO: 120653 - DNA, 17 bp, synthetic construct
  source 1..17: mol_type = other DNA
agggaagcttcgtgagg

SEQ ID NO: 120654 - DNA, 17 bp, synthetic construct
  source 1..17: mol_type = other DNA
gggaagcttcgtgaggc

SEQ ID NO: 120655 - DNA, 17 bp, synthetic construct
  source 1..17: mol_type = other DNA
ggaagcttcgtgaggct

SEQ ID NO: 120656 - DNA, 17 bp, synthetic construct
  source 1..17: mol_type = other DNA
gaagcttcgtgaggctt

SEQ ID NO: 120657 - DNA, 17 bp, synthetic construct
  source 1..17: mol_type = other DNA
aagcttcgtgaggcttt

SEQ ID NO: 120658 - DNA, 17 bp, synthetic construct
  source 1..17: mol_type = other DNA
agcttcgtgaggcttta

SEQ ID NO: 120659 - DNA, 17 bp, synthetic construct
  source 1..17: mol_type = other DNA
gcttcgtgaggctttag

SEQ ID NO: 120660 - DNA, 17 bp, synthetic construct
  source 1..17: mol_type = other DNA
cttcgtgaggctttagc

SEQ ID NO: 120661 - DNA, 17 bp, synthetic construct
  source 1..17: mol_type = other DNA
ttcgtgaggctttagct

SEQ ID NO: 120662 - DNA, 17 bp, synthetic construct
  source 1..17: mol_type = other DNA
tcgtgaggctttagctg

SEQ ID NO: 120663 - DNA, 17 bp, synthetic construct
  source 1..17: mol_type = other DNA
cgtgaggctttagctgc

SEQ ID NO: 120664 - DNA, 17 bp, synthetic construct
  source 1..17: mol_type = other DNA
gtgaggctttagctgca

SEQ ID NO: 120665 - DNA, 17 bp, synthetic construct
  source 1..17: mol_type = other DNA
tgaggctttagctgcac

SEQ ID NO: 120666 - DNA, 17 bp, synthetic construct
  source 1..17: mol_type = other DNA
gaggctttagctgcacc

SEQ ID NO: 120667 - DNA, 17 bp, synthetic construct
  source 1..17: mol_type = other DNA
aggctttagctgcaccc

SEQ ID NO: 120668 - DNA, 17 bp, synthetic construct
  source 1..17: mol_type = other DNA
ggctttagctgcaccca

SEQ ID NO: 120669 - DNA, 17 bp, synthetic construct
  source 1..17: mol_type = other DNA
gctttagctgcacccac

SEQ ID NO: 120670 - DNA, 17 bp, synthetic construct
  source 1..17: mol_type = other DNA
ctttagctgcacccaca

SEQ ID NO: 120671 - DNA, 17 bp, synthetic construct
  source 1..17: mol_type = other DNA
tttagctgcacccacag

SEQ ID NO: 120672 - DNA, 17 bp, synthetic construct
  source 1..17: mol_type = other DNA
ttagctgcacccacagg

SEQ ID NO: 120673 - DNA, 17 bp, synthetic construct
  source 1..17: mol_type = other DNA
tagctgcacccacaggt

SEQ ID NO: 120674 - DNA, 17 bp, synthetic construct
  source 1..17: mol_type = other DNA
agctgcacccacaggtt

SEQ ID NO: 120675 - DNA, 17 bp, synthetic construct
  source 1..17: mol_type = other DNA
gctgcacccacaggttc

SEQ ID NO: 120676 - DNA, 17 bp, synthetic construct
  source 1..17: mol_type = other DNA
ctgcacccacaggttct

SEQ ID NO: 120677 - DNA, 17 bp, synthetic construct
  source 1..17: mol_type = other DNA
tgcacccacaggttctc

SEQ ID NO: 120678 - DNA, 17 bp, synthetic construct
  source 1..17: mol_type = other DNA
gcacccacaggttctca

SEQ ID NO: 120679 - DNA, 17 bp, synthetic construct
  source 1..17: mol_type = other DNA
cacccacaggttctcag

SEQ ID NO: 120680 - DNA, 17 bp, synthetic construct
  source 1..17: mol_type = other DNA
acccacaggttctcagc

SEQ ID NO: 120681 - DNA, 17 bp, synthetic construct
  source 1..17: mol_type = other DNA
cccacaggttctcagca

SEQ ID NO: 120682 - DNA, 17 bp, synthetic construct
  source 1..17: mol_type = other DNA
ccacaggttctcagcag

SEQ ID NO: 120683 - DNA, 17 bp, synthetic construct
  source 1..17: mol_type = other DNA
cacaggttctcagcagt

SEQ ID NO: 120684 - DNA, 17 bp, synthetic construct
  source 1..17: mol_type = other DNA
acaggttctcagcagtg

SEQ ID NO: 120685 - DNA, 17 bp, synthetic construct
  source 1..17: mol_type = other DNA
caggttctcagcagtgt

SEQ ID NO: 120686 - DNA, 17 bp, synthetic construct
  source 1..17: mol_type = other DNA
aggttctcagcagtgtc

SEQ ID NO: 120687 - DNA, 17 bp, synthetic construct
  source 1..17: mol_type = other DNA
ggttctcagcagtgtcc

SEQ ID NO: 120688 - DNA, 17 bp, synthetic construct
  source 1..17: mol_type = other DNA
gttctcagcagtgtcct

SEQ ID NO: 120689 - DNA, 17 bp, synthetic construct
  source 1..17: mol_type = other DNA
ttctcagcagtgtcctg

SEQ ID NO: 120690 - DNA, 17 bp, synthetic construct
  source 1..17: mol_type = other DNA
tctcagcagtgtcctgg

SEQ ID NO: 120691 - DNA, 17 bp, synthetic construct
  source 1..17: mol_type = other DNA
ctcagcagtgtcctggc

SEQ ID NO: 120692 - DNA, 17 bp, synthetic construct
  source 1..17: mol_type = other DNA
tcagcagtgtcctggcc

SEQ ID NO: 120693 - DNA, 17 bp, synthetic construct
  source 1..17: mol_type = other DNA
cagcagtgtcctggccc

SEQ ID NO: 120694 - DNA, 17 bp, synthetic construct
  source 1..17: mol_type = other DNA
agcagtgtcctggcccc

SEQ ID NO: 120695 - DNA, 17 bp, synthetic construct
  source 1..17: mol_type = other DNA
gcagtgtcctggccccg

SEQ ID NO: 120696 - DNA, 17 bp, synthetic construct
  source 1..17: mol_type = other DNA
cagtgtcctggccccgg

SEQ ID NO: 120697 - DNA, 17 bp, synthetic construct
  source 1..17: mol_type = other DNA
agtgtcctggccccggg

SEQ ID NO: 120698 - DNA, 17 bp, synthetic construct
  source 1..17: mol_type = other DNA
gtgtcctggccccgggc

SEQ ID NO: 120699 - DNA, 17 bp, synthetic construct
  source 1..17: mol_type = other DNA
tgtcctggccccgggct

SEQ ID NO: 120700 - DNA, 17 bp, synthetic construct
  source 1..17: mol_type = other DNA
gtcctggccccgggctg

SEQ ID NO: 120701 - DNA, 17 bp, synthetic construct
  source 1..17: mol_type = other DNA
tcctggccccgggctgc

SEQ ID NO: 120702 - DNA, 17 bp, synthetic construct
  source 1..17: mol_type = other DNA
cctggccccgggctgct

SEQ ID NO: 120703 - DNA, 17 bp, synthetic construct
  source 1..17: mol_type = other DNA
ctggccccgggctgctg

SEQ ID NO: 120704 - DNA, 17 bp, synthetic construct
  source 1..17: mol_type = other DNA
tggccccgggctgctgt

SEQ ID NO: 120705 - DNA, 17 bp, synthetic construct
  source 1..17: mol_type = other DNA
ggccccgggctgctgtt

SEQ ID NO: 120706 - DNA, 17 bp, synthetic construct
  source 1..17: mol_type = other DNA
gccccgggctgctgttc

SEQ ID NO: 120707 - DNA, 17 bp, synthetic construct
  source 1..17: mol_type = other DNA
ccccgggctgctgttcc

SEQ ID NO: 120708 - DNA, 17 bp, synthetic construct
  source 1..17: mol_type = other DNA
cccgggctgctgttcca

SEQ ID NO: 120709 - DNA, 17 bp, synthetic construct
  source 1..17: mol_type = other DNA
ccgggctgctgttccaa

SEQ ID NO: 120710 - DNA, 17 bp, synthetic construct
  source 1..17: mol_type = other DNA
cgggctgctgttccaag

SEQ ID NO: 120711 - DNA, 17 bp, synthetic construct
  source 1..17: mol_type = other DNA
gggctgctgttccaagc

SEQ ID NO: 120712 - DNA, 17 bp, synthetic construct
  source 1..17: mol_type = other DNA
ggctgctgttccaagca

SEQ ID NO: 120713 - DNA, 17 bp, synthetic construct
  source 1..17: mol_type = other DNA
gctgctgttccaagcag

SEQ ID NO: 120714 - DNA, 17 bp, synthetic construct
  source 1..17: mol_type = other DNA
ctgctgttccaagcagc

SEQ ID NO: 120715 - DNA, 17 bp, synthetic construct
  source 1..17: mol_type = other DNA
tgctgttccaagcagcc

SEQ ID NO: 120716 - DNA, 17 bp, synthetic construct
  source 1..17: mol_type = other DNA
gctgttccaagcagcca

SEQ ID NO: 120717 - DNA, 17 bp, synthetic construct
  source 1..17: mol_type = other DNA
ctgttccaagcagccac

SEQ ID NO: 120718 - DNA, 17 bp, synthetic construct
  source 1..17: mol_type = other DNA
tgttccaagcagccaca

SEQ ID NO: 120719 - DNA, 17 bp, synthetic construct
  source 1..17: mol_type = other DNA
gttccaagcagccacaa

SEQ ID NO: 120720 - DNA, 17 bp, synthetic construct
  source 1..17: mol_type = other DNA
ttccaagcagccacaaa

SEQ ID NO: 120721 - DNA, 17 bp, synthetic construct
  source 1..17: mol_type = other DNA
tccaagcagccacaaac

SEQ ID NO: 120722 - DNA, 17 bp, synthetic construct
  source 1..17: mol_type = other DNA
ccaagcagccacaaacc

SEQ ID NO: 120723 - DNA, 17 bp, synthetic construct
  source 1..17: mol_type = other DNA
caagcagccacaaacca

SEQ ID NO: 120724 - DNA, 17 bp, synthetic construct
  source 1..17: mol_type = other DNA
aagcagccacaaaccag

SEQ ID NO: 120725 - DNA, 17 bp, synthetic construct
  source 1..17: mol_type = other DNA
agcagccacaaaccagg

SEQ ID NO: 120726 - DNA, 17 bp, synthetic construct
  source 1..17: mol_type = other DNA
gcagccacaaaccaggg

SEQ ID NO: 120727 - DNA, 17 bp, synthetic construct
  source 1..17: mol_type = other DNA
cagccacaaaccagggg

SEQ ID NO: 120728 - DNA, 17 bp, synthetic construct
  source 1..17: mol_type = other DNA
agccacaaaccaggggg

SEQ ID NO: 120729 - DNA, 17 bp, synthetic construct
  source 1..17: mol_type = other DNA
gccacaaaccagggggc

SEQ ID NO: 120730 - DNA, 17 bp, synthetic construct
  source 1..17: mol_type = other DNA
ccacaaaccagggggct

SEQ ID NO: 120731 - DNA, 17 bp, synthetic construct
  source 1..17: mol_type = other DNA
cacaaaccagggggctt

SEQ ID NO: 120732 - DNA, 17 bp, synthetic construct
  source 1..17: mol_type = other DNA
acaaaccagggggctta

SEQ ID NO: 120733 - DNA, 17 bp, synthetic construct
  source 1..17: mol_type = other DNA
caaaccagggggcttag

SEQ ID NO: 120734 - DNA, 17 bp, synthetic construct
  source 1..17: mol_type = other DNA
aaaccagggggcttaga

SEQ ID NO: 120735 - DNA, 17 bp, synthetic construct
  source 1..17: mol_type = other DNA
aaccagggggcttagac

SEQ ID NO: 120736 - DNA, 17 bp, synthetic construct
  source 1..17: mol_type = other DNA
accagggggcttagaca

SEQ ID NO: 120737 - DNA, 17 bp, synthetic construct
  source 1..17: mol_type = other DNA
ccagggggcttagacaa

SEQ ID NO: 120738 - DNA, 17 bp, synthetic construct
  source 1..17: mol_type = other DNA
cagggggcttagacaac

SEQ ID NO: 120739 - DNA, 17 bp, synthetic construct
  source 1..17: mol_type = other DNA
agggggcttagacaaca

SEQ ID NO: 120740 - DNA, 17 bp, synthetic construct
  source 1..17: mol_type = other DNA
gggggcttagacaacag

SEQ ID NO: 120741 - DNA, 17 bp, synthetic construct
  source 1..17: mol_type = other DNA
ggggcttagacaacaga

SEQ ID NO: 120742 - DNA, 17 bp, synthetic construct
  source 1..17: mol_type = other DNA
gggcttagacaacagaa

SEQ ID NO: 120743 - DNA, 17 bp, synthetic construct
  source 1..17: mol_type = other DNA
ggcttagacaacagaaa

SEQ ID NO: 120744 - DNA, 17 bp, synthetic construct
  source 1..17: mol_type = other DNA
gcttagacaacagaaat

SEQ ID NO: 120745 - DNA, 17 bp, synthetic construct
  source 1..17: mol_type = other DNA
cttagacaacagaaatg

SEQ ID NO: 120746 - DNA, 17 bp, synthetic construct
  source 1..17: mol_type = other DNA
ttagacaacagaaatgc

SEQ ID NO: 120747 - DNA, 17 bp, synthetic construct
  source 1..17: mol_type = other DNA
tagacaacagaaatgca

SEQ ID NO: 120748 - DNA, 17 bp, synthetic construct
  source 1..17: mol_type = other DNA
agacaacagaaatgcat

SEQ ID NO: 120749 - DNA, 17 bp, synthetic construct
  source 1..17: mol_type = other DNA
gacaacagaaatgcatt

SEQ ID NO: 120750 - DNA, 17 bp, synthetic construct
  source 1..17: mol_type = other DNA
acaacagaaatgcattc

SEQ ID NO: 120751 - DNA, 17 bp, synthetic construct
  source 1..17: mol_type = other DNA
caacagaaatgcattct

SEQ ID NO: 120752 - DNA, 17 bp, synthetic construct
  source 1..17: mol_type = other DNA
aacagaaatgcattctc

SEQ ID NO: 120753 - DNA, 17 bp, synthetic construct
  source 1..17: mol_type = other DNA
acagaaatgcattctca

SEQ ID NO: 120754 - DNA, 17 bp, synthetic construct
  source 1..17: mol_type = other DNA
cagaaatgcattctcag

SEQ ID NO: 120755 - DNA, 17 bp, synthetic construct
  source 1..17: mol_type = other DNA
agaaatgcattctcagt

SEQ ID NO: 120756 - DNA, 17 bp, synthetic construct
  source 1..17: mol_type = other DNA
gaaatgcattctcagtc

SEQ ID NO: 120757 - DNA, 17 bp, synthetic construct
  source 1..17: mol_type = other DNA
aaatgcattctcagtcc

SEQ ID NO: 120758 - DNA, 17 bp, synthetic construct
  source 1..17: mol_type = other DNA
aatgcattctcagtcct

SEQ ID NO: 120759 - DNA, 17 bp, synthetic construct
  source 1..17: mol_type = other DNA
atgcattctcagtcctg

SEQ ID NO: 120760 - DNA, 17 bp, synthetic construct
  source 1..17: mol_type = other DNA
tgcattctcagtcctgg

SEQ ID NO: 120761 - DNA, 17 bp, synthetic construct
  source 1..17: mol_type = other DNA
gcattctcagtcctgga

SEQ ID NO: 120762 - DNA, 17 bp, synthetic construct
  source 1..17: mol_type = other DNA
cattctcagtcctggag

SEQ ID NO: 120763 - DNA, 17 bp, synthetic construct
  source 1..17: mol_type = other DNA
attctcagtcctggagc

SEQ ID NO: 120764 - DNA, 17 bp, synthetic construct
  source 1..17: mol_type = other DNA
ttctcagtcctggagcc

SEQ ID NO: 120765 - DNA, 17 bp, synthetic construct
  source 1..17: mol_type = other DNA
tctcagtcctggagccg

SEQ ID NO: 120766 - DNA, 17 bp, synthetic construct
  source 1..17: mol_type = other DNA
ctcagtcctggagccgg

SEQ ID NO: 120767 - DNA, 17 bp, synthetic construct
  source 1..17: mol_type = other DNA
tcagtcctggagccgga

SEQ ID NO: 120768 - DNA, 17 bp, synthetic construct
  source 1..17: mol_type = other DNA
cagtcctggagccggaa

SEQ ID NO: 120769 - DNA, 17 bp, synthetic construct
  source 1..17: mol_type = other DNA
agtcctggagccggaag

SEQ ID NO: 120770 - DNA, 17 bp, synthetic construct
  source 1..17: mol_type = other DNA
gtcctggagccggaagt

SEQ ID NO: 120771 - DNA, 17 bp, synthetic construct
  source 1..17: mol_type = other DNA
tcctggagccggaagtc

SEQ ID NO: 120772 - DNA, 17 bp, synthetic construct
  source 1..17: mol_type = other DNA
cctggagccggaagtca

SEQ ID NO: 120773 - DNA, 17 bp, synthetic construct
  source 1..17: mol_type = other DNA
ctggagccggaagtcag

SEQ ID NO: 120774 - DNA, 17 bp, synthetic construct
  source 1..17: mol_type = other DNA
tggagccggaagtcaga

SEQ ID NO: 120775 - DNA, 17 bp, synthetic construct
  source 1..17: mol_type = other DNA
ggagccggaagtcagag

SEQ ID NO: 120776 - DNA, 17 bp, synthetic construct
  source 1..17: mol_type = other DNA
gagccggaagtcagaga

SEQ ID NO: 120777 - DNA, 17 bp, synthetic construct
  source 1..17: mol_type = other DNA
agccggaagtcagagat

SEQ ID NO: 120778 - DNA, 17 bp, synthetic construct
  source 1..17: mol_type = other DNA
gccggaagtcagagatc

SEQ ID NO: 120779 - DNA, 17 bp, synthetic construct
  source 1..17: mol_type = other DNA
ccggaagtcagagatcc

SEQ ID NO: 120780 - DNA, 17 bp, synthetic construct
  source 1..17: mol_type = other DNA
cggaagtcagagatcca

SEQ ID NO: 120781 - DNA, 17 bp, synthetic construct
  source 1..17: mol_type = other DNA
ggaagtcagagatccag

SEQ ID NO: 120782 - DNA, 17 bp, synthetic construct
  source 1..17: mol_type = other DNA
gaagtcagagatccagg

SEQ ID NO: 120783 - DNA, 17 bp, synthetic construct
  source 1..17: mol_type = other DNA
aagtcagagatccaggc

SEQ ID NO: 120784 - DNA, 17 bp, synthetic construct
  source 1..17: mol_type = other DNA
agtcagagatccaggcg

SEQ ID NO: 120785 - DNA, 17 bp, synthetic construct
  source 1..17: mol_type = other DNA
gtcagagatccaggcgg

SEQ ID NO: 120786 - DNA, 17 bp, synthetic construct
  source 1..17: mol_type = other DNA
tcagagatccaggcggg

SEQ ID NO: 120787 - DNA, 17 bp, synthetic construct
  source 1..17: mol_type = other DNA
cagagatccaggcgggc

SEQ ID NO: 120788 - DNA, 17 bp, synthetic construct
  source 1..17: mol_type = other DNA
agagatccaggcgggca

SEQ ID NO: 120789 - DNA, 17 bp, synthetic construct
  source 1..17: mol_type = other DNA
gagatccaggcgggcag

SEQ ID NO: 120790 - DNA, 17 bp, synthetic construct
  source 1..17: mol_type = other DNA
agatccaggcgggcagg

SEQ ID NO: 120791 - DNA, 17 bp, synthetic construct
  source 1..17: mol_type = other DNA
gatccaggcgggcaggg

SEQ ID NO: 120792 - DNA, 17 bp, synthetic construct
  source 1..17: mol_type = other DNA
atccaggcgggcagggc

SEQ ID NO: 120793 - DNA, 17 bp, synthetic construct
  source 1..17: mol_type = other DNA
tccaggcgggcagggcc

SEQ ID NO: 120794 - DNA, 17 bp, synthetic construct
  source 1..17: mol_type = other DNA
ccaggcgggcagggcca

SEQ ID NO: 120795 - DNA, 17 bp, synthetic construct
  source 1..17: mol_type = other DNA
caggcgggcagggccac

SEQ ID NO: 120796 - DNA, 17 bp, synthetic construct
  source 1..17: mol_type = other DNA
aggcgggcagggccaca

SEQ ID NO: 120797 - DNA, 17 bp, synthetic construct
  source 1..17: mol_type = other DNA
ggcgggcagggccacac

SEQ ID NO: 120798 - DNA, 17 bp, synthetic construct
  source 1..17: mol_type = other DNA
gcgggcagggccacact

SEQ ID NO: 120799 - DNA, 17 bp, synthetic construct
  source 1..17: mol_type = other DNA
cgggcagggccacactc

SEQ ID NO: 120800 - DNA, 17 bp, synthetic construct
  source 1..17: mol_type = other DNA
gggcagggccacactcc

SEQ ID NO: 120801 - DNA, 17 bp, synthetic construct
  source 1..17: mol_type = other DNA
ggcagggccacactccc

SEQ ID NO: 120802 - DNA, 17 bp, synthetic construct
  source 1..17: mol_type = other DNA
gcagggccacactccct

SEQ ID NO: 120803 - DNA, 17 bp, synthetic construct
  source 1..17: mol_type = other DNA
cagggccacactccctg

SEQ ID NO: 120804 - DNA, 17 bp, synthetic construct
  source 1..17: mol_type = other DNA
agggccacactccctgt

SEQ ID NO: 120805 - DNA, 17 bp, synthetic construct
  source 1..17: mol_type = other DNA
gggccacactccctgtc

SEQ ID NO: 120806 - DNA, 17 bp, synthetic construct
  source 1..17: mol_type = other DNA
ggccacactccctgtcg

SEQ ID NO: 120807 - DNA, 17 bp, synthetic construct
  source 1..17: mol_type = other DNA
gccacactccctgtcga

SEQ ID NO: 120808 - DNA, 17 bp, synthetic construct
  source 1..17: mol_type = other DNA
ccacactccctgtcgag

SEQ ID NO: 120809 - DNA, 17 bp, synthetic construct
  source 1..17: mol_type = other DNA
cacactccctgtcgagg

SEQ ID NO: 120810 - DNA, 17 bp, synthetic construct
  source 1..17: mol_type = other DNA
acactccctgtcgaggg

SEQ ID NO: 120811 - DNA, 17 bp, synthetic construct
  source 1..17: mol_type = other DNA
cactccctgtcgagggt

SEQ ID NO: 120812 - DNA, 17 bp, synthetic construct
  source 1..17: mol_type = other DNA
actccctgtcgagggtc

SEQ ID NO: 120813 - DNA, 17 bp, synthetic construct
  source 1..17: mol_type = other DNA
ctccctgtcgagggtct

SEQ ID NO: 120814 - DNA, 17 bp, synthetic construct
  source 1..17: mol_type = other DNA
tccctgtcgagggtctg

SEQ ID NO: 120815 - DNA, 17 bp, synthetic construct
  source 1..17: mol_type = other DNA
ccctgtcgagggtctgg

SEQ ID NO: 120816 - DNA, 17 bp, synthetic construct
  source 1..17: mol_type = other DNA
cctgtcgagggtctggg

SEQ ID NO: 120817 - DNA, 17 bp, synthetic construct
  source 1..17: mol_type = other DNA
ctgtcgagggtctgggg

SEQ ID NO: 120818 - DNA, 17 bp, synthetic construct
  source 1..17: mol_type = other DNA
tgtcgagggtctgggga

SEQ ID NO: 120819 - DNA, 17 bp, synthetic construct
  source 1..17: mol_type = other DNA
gtcgagggtctggggag

SEQ ID NO: 120820 - DNA, 17 bp, synthetic construct
  source 1..17: mol_type = other DNA
tcgagggtctggggagg

SEQ ID NO: 120821 - DNA, 17 bp, synthetic construct
  source 1..17: mol_type = other DNA
cgagggtctggggaggt

SEQ ID NO: 120822 - DNA, 17 bp, synthetic construct
  source 1..17: mol_type = other DNA
gagggtctggggaggtc

SEQ ID NO: 120823 - DNA, 17 bp, synthetic construct
  source 1..17: mol_type = other DNA
agggtctggggaggtcc

SEQ ID NO: 120824 - DNA, 17 bp, synthetic construct
  source 1..17: mol_type = other DNA
gggtctggggaggtcct

SEQ ID NO: 120825 - DNA, 17 bp, synthetic construct
  source 1..17: mol_type = other DNA
ggtctggggaggtcctt

SEQ ID NO: 120826 - DNA, 17 bp, synthetic construct
  source 1..17: mol_type = other DNA
gtctggggaggtccttc

SEQ ID NO: 120827 - DNA, 17 bp, synthetic construct
  source 1..17: mol_type = other DNA
tctggggaggtccttcc

SEQ ID NO: 120828 - DNA, 17 bp, synthetic construct
  source 1..17: mol_type = other DNA
ctggggaggtccttcct

SEQ ID NO: 120829 - DNA, 17 bp, synthetic construct
  source 1..17: mol_type = other DNA
tggggaggtccttcctg

SEQ ID NO: 120830 - DNA, 17 bp, synthetic construct
  source 1..17: mol_type = other DNA
ggggaggtccttcctgc

SEQ ID NO: 120831 - DNA, 17 bp, synthetic construct
  source 1..17: mol_type = other DNA
gggaggtccttcctgcc

SEQ ID NO: 120832 - DNA, 17 bp, synthetic construct
  source 1..17: mol_type = other DNA
ggaggtccttcctgcct

SEQ ID NO: 120833 - DNA, 17 bp, synthetic construct
  source 1..17: mol_type = other DNA
gaggtccttcctgcctc

SEQ ID NO: 120834 - DNA, 17 bp, synthetic construct
  source 1..17: mol_type = other DNA
aggtccttcctgcctct

SEQ ID NO: 120835 - DNA, 17 bp, synthetic construct
  source 1..17: mol_type = other DNA
ggtccttcctgcctctc

SEQ ID NO: 120836 - DNA, 17 bp, synthetic construct
  source 1..17: mol_type = other DNA
gtccttcctgcctctcc

SEQ ID NO: 120837 - DNA, 17 bp, synthetic construct
  source 1..17: mol_type = other DNA
tccttcctgcctctccc

SEQ ID NO: 120838 - DNA, 17 bp, synthetic construct
  source 1..17: mol_type = other DNA
ccttcctgcctctccca

SEQ ID NO: 120839 - DNA, 17 bp, synthetic construct
  source 1..17: mol_type = other DNA
cttcctgcctctcccag

SEQ ID NO: 120840 - DNA, 17 bp, synthetic construct
  source 1..17: mol_type = other DNA
ttcctgcctctcccagc

SEQ ID NO: 120841 - DNA, 17 bp, synthetic construct
  source 1..17: mol_type = other DNA
tcctgcctctcccagct

SEQ ID NO: 120842 - DNA, 17 bp, synthetic construct
  source 1..17: mol_type = other DNA
cctgcctctcccagctt

SEQ ID NO: 120843 - DNA, 17 bp, synthetic construct
  source 1..17: mol_type = other DNA
ctgcctctcccagcttc

SEQ ID NO: 120844 - DNA, 17 bp, synthetic construct
  source 1..17: mol_type = other DNA
tgcctctcccagcttca

SEQ ID NO: 120845 - DNA, 17 bp, synthetic construct
  source 1..17: mol_type = other DNA
gcctctcccagcttcac

SEQ ID NO: 120846 - DNA, 17 bp, synthetic construct
  source 1..17: mol_type = other DNA
cctctcccagcttcaca

SEQ ID NO: 120847 - DNA, 17 bp, synthetic construct
  source 1..17: mol_type = other DNA
ctctcccagcttcacag

SEQ ID NO: 120848 - DNA, 17 bp, synthetic construct
  source 1..17: mol_type = other DNA
tctcccagcttcacagg

SEQ ID NO: 120849 - DNA, 17 bp, synthetic construct
  source 1..17: mol_type = other DNA
ctcccagcttcacaggc

SEQ ID NO: 120850 - DNA, 17 bp, synthetic construct
  source 1..17: mol_type = other DNA
tcccagcttcacaggcg

SEQ ID NO: 120851 - DNA, 17 bp, synthetic construct
  source 1..17: mol_type = other DNA
cccagcttcacaggcgg

SEQ ID NO: 120852 - DNA, 17 bp, synthetic construct
  source 1..17: mol_type = other DNA
ccagcttcacaggcggc

SEQ ID NO: 120853 - DNA, 17 bp, synthetic construct
  source 1..17: mol_type = other DNA
cagcttcacaggcggca

SEQ ID NO: 120854 - DNA, 17 bp, synthetic construct
  source 1..17: mol_type = other DNA
agcttcacaggcggcag

SEQ ID NO: 120855 - DNA, 17 bp, synthetic construct
  source 1..17: mol_type = other DNA
gcttcacaggcggcagg

SEQ ID NO: 120856 - DNA, 17 bp, synthetic construct
  source 1..17: mol_type = other DNA
cttcacaggcggcaggc

SEQ ID NO: 120857 - DNA, 17 bp, synthetic construct
  source 1..17: mol_type = other DNA
ttcacaggcggcaggcg

SEQ ID NO: 120858 - DNA, 17 bp, synthetic construct
  source 1..17: mol_type = other DNA
tcacaggcggcaggcgt

SEQ ID NO: 120859 - DNA, 17 bp, synthetic construct
  source 1..17: mol_type = other DNA
cacaggcggcaggcgtc

SEQ ID NO: 120860 - DNA, 17 bp, synthetic construct
  source 1..17: mol_type = other DNA
acaggcggcaggcgtcc

SEQ ID NO: 120861 - DNA, 17 bp, synthetic construct
  source 1..17: mol_type = other DNA
caggcggcaggcgtccc

SEQ ID NO: 120862 - DNA, 17 bp, synthetic construct
  source 1..17: mol_type = other DNA
aggcggcaggcgtccct

SEQ ID NO: 120863 - DNA, 17 bp, synthetic construct
  source 1..17: mol_type = other DNA
ggcggcaggcgtccctg

SEQ ID NO: 120864 - DNA, 17 bp, synthetic construct
  source 1..17: mol_type = other DNA
gcggcaggcgtccctgg

SEQ ID NO: 120865 - DNA, 17 bp, synthetic construct
  source 1..17: mol_type = other DNA
cggcaggcgtccctggg

SEQ ID NO: 120866 - DNA, 17 bp, synthetic construct
  source 1..17: mol_type = other DNA
ggcaggcgtccctgggc

SEQ ID NO: 120867 - DNA, 17 bp, synthetic construct
  source 1..17: mol_type = other DNA
gcaggcgtccctgggct

SEQ ID NO: 120868 - DNA, 17 bp, synthetic construct
  source 1..17: mol_type = other DNA
caggcgtccctgggctg

SEQ ID NO: 120869 - DNA, 17 bp, synthetic construct
  source 1..17: mol_type = other DNA
aggcgtccctgggctgt

SEQ ID NO: 120870 - DNA, 17 bp, synthetic construct
  source 1..17: mol_type = other DNA
ggcgtccctgggctgtg

SEQ ID NO: 120871 - DNA, 17 bp, synthetic construct
  source 1..17: mol_type = other DNA
gcgtccctgggctgtgg

SEQ ID NO: 120872 - DNA, 17 bp, synthetic construct
  source 1..17: mol_type = other DNA
cgtccctgggctgtggc

SEQ ID NO: 120873 - DNA, 17 bp, synthetic construct
  source 1..17: mol_type = other DNA
gtccctgggctgtggct

SEQ ID NO: 120874 - DNA, 17 bp, synthetic construct
  source 1..17: mol_type = other DNA
tccctgggctgtggctg

SEQ ID NO: 120875 - DNA, 17 bp, synthetic construct
  source 1..17: mol_type = other DNA
ccctgggctgtggctgc

SEQ ID NO: 120876 - DNA, 17 bp, synthetic construct
  source 1..17: mol_type = other DNA
cctgggctgtggctgcc

SEQ ID NO: 120877 - DNA, 17 bp, synthetic construct
  source 1..17: mol_type = other DNA
ctgggctgtggctgcct

SEQ ID NO: 120878 - DNA, 17 bp, synthetic construct
  source 1..17: mol_type = other DNA
tgggctgtggctgcctg

SEQ ID NO: 120879 - DNA, 17 bp, synthetic construct
  source 1..17: mol_type = other DNA
gggctgtggctgcctgt

SEQ ID NO: 120880 - DNA, 17 bp, synthetic construct
  source 1..17: mol_type = other DNA
ggctgtggctgcctgtg

SEQ ID NO: 120881 - DNA, 17 bp, synthetic construct
  source 1..17: mol_type = other DNA
gctgtggctgcctgtgg

SEQ ID NO: 120882 - DNA, 17 bp, synthetic construct
  source 1..17: mol_type = other DNA
ctgtggctgcctgtggc

SEQ ID NO: 120883 - DNA, 17 bp, synthetic construct
  source 1..17: mol_type = other DNA
tgtggctgcctgtggcc

SEQ ID NO: 120884 - DNA, 17 bp, synthetic construct
  source 1..17: mol_type = other DNA
gtggctgcctgtggcct

SEQ ID NO: 120885 - DNA, 17 bp, synthetic construct
  source 1..17: mol_type = other DNA
tggctgcctgtggcctc

SEQ ID NO: 120886 - DNA, 17 bp, synthetic construct
  source 1..17: mol_type = other DNA
ggctgcctgtggcctcc

SEQ ID NO: 120887 - DNA, 17 bp, synthetic construct
  source 1..17: mol_type = other DNA
gctgcctgtggcctccc

SEQ ID NO: 120888 - DNA, 17 bp, synthetic construct
  source 1..17: mol_type = other DNA
ctgcctgtggcctcccg

SEQ ID NO: 120889 - DNA, 17 bp, synthetic construct
  source 1..17: mol_type = other DNA
tgcctgtggcctcccgc

SEQ ID NO: 120890 - DNA, 17 bp, synthetic construct
  source 1..17: mol_type = other DNA
gcctgtggcctcccgct

SEQ ID NO: 120891 - DNA, 17 bp, synthetic construct
  source 1..17: mol_type = other DNA
cctgtggcctcccgctg

SEQ ID NO: 120892 - DNA, 17 bp, synthetic construct
  source 1..17: mol_type = other DNA
ctgtggcctcccgctgt

SEQ ID NO: 120893 - DNA, 17 bp, synthetic construct
  source 1..17: mol_type = other DNA
tgtggcctcccgctgtg

SEQ ID NO: 120894 - DNA, 17 bp, synthetic construct
  source 1..17: mol_type = other DNA
gtggcctcccgctgtgt

SEQ ID NO: 120895 - DNA, 17 bp, synthetic construct
  source 1..17: mol_type = other DNA
tggcctcccgctgtgtc

SEQ ID NO: 120896 - DNA, 17 bp, synthetic construct
  source 1..17: mol_type = other DNA
ggcctcccgctgtgtct

SEQ ID NO: 120897 - DNA, 17 bp, synthetic construct
  source 1..17: mol_type = other DNA
gcctcccgctgtgtctg

SEQ ID NO: 120898 - DNA, 17 bp, synthetic construct
  source 1..17: mol_type = other DNA
cctcccgctgtgtctgc

SEQ ID NO: 120899 - DNA, 17 bp, synthetic construct
  source 1..17: mol_type = other DNA
ctcccgctgtgtctgcg

SEQ ID NO: 120900 - DNA, 17 bp, synthetic construct
  source 1..17: mol_type = other DNA
tcccgctgtgtctgcgt

SEQ ID NO: 120901 - DNA, 17 bp, synthetic construct
  source 1..17: mol_type = other DNA
cccgctgtgtctgcgtc

SEQ ID NO: 120902 - DNA, 17 bp, synthetic construct
  source 1..17: mol_type = other DNA
ccgctgtgtctgcgtct

SEQ ID NO: 120903 - DNA, 17 bp, synthetic construct
  source 1..17: mol_type = other DNA
cgctgtgtctgcgtctg

SEQ ID NO: 120904 - DNA, 17 bp, synthetic construct
  source 1..17: mol_type = other DNA
gctgtgtctgcgtctgt

SEQ ID NO: 120905 - DNA, 17 bp, synthetic construct
  source 1..17: mol_type = other DNA
ctgtgtctgcgtctgtc

SEQ ID NO: 120906 - DNA, 17 bp, synthetic construct
  source 1..17: mol_type = other DNA
tgtgtctgcgtctgtct

SEQ ID NO: 120907 - DNA, 17 bp, synthetic construct
  source 1..17: mol_type = other DNA
gtgtctgcgtctgtctt

SEQ ID NO: 120908 - DNA, 17 bp, synthetic construct
  source 1..17: mol_type = other DNA
tgtctgcgtctgtcttc

SEQ ID NO: 120909 - DNA, 17 bp, synthetic construct
  source 1..17: mol_type = other DNA
gtctgcgtctgtcttct

SEQ ID NO: 120910 - DNA, 17 bp, synthetic construct
  source 1..17: mol_type = other DNA
tctgcgtctgtcttctc

SEQ ID NO: 120911 - DNA, 17 bp, synthetic construct
  source 1..17: mol_type = other DNA
ctgcgtctgtcttctct

SEQ ID NO: 120912 - DNA, 17 bp, synthetic construct
  source 1..17: mol_type = other DNA
tgcgtctgtcttctctc

SEQ ID NO: 120913 - DNA, 17 bp, synthetic construct
  source 1..17: mol_type = other DNA
gcgtctgtcttctctct

SEQ ID NO: 120914 - DNA, 17 bp, synthetic construct
  source 1..17: mol_type = other DNA
cgtctgtcttctctctg

SEQ ID NO: 120915 - DNA, 17 bp, synthetic construct
  source 1..17: mol_type = other DNA
gtctgtcttctctctgt

SEQ ID NO: 120916 - DNA, 17 bp, synthetic construct
  source 1..17: mol_type = other DNA
tctgtcttctctctgtt

SEQ ID NO: 120917 - DNA, 17 bp, synthetic construct
  source 1..17: mol_type = other DNA
ctgtcttctctctgttt

SEQ ID NO: 120918 - DNA, 17 bp, synthetic construct
  source 1..17: mol_type = other DNA
tgtcttctctctgtttt

SEQ ID NO: 120919 - DNA, 17 bp, synthetic construct
  source 1..17: mol_type = other DNA
gtcttctctctgttttt

SEQ ID NO: 120920 - DNA, 17 bp, synthetic construct
  source 1..17: mol_type = other DNA
tcttctctctgtttttc

SEQ ID NO: 120921 - DNA, 17 bp, synthetic construct
  source 1..17: mol_type = other DNA
cttctctctgtttttct

SEQ ID NO: 120922 - DNA, 17 bp, synthetic construct
  source 1..17: mol_type = other DNA
ttctctctgtttttctc

SEQ ID NO: 120923 - DNA, 17 bp, synthetic construct
  source 1..17: mol_type = other DNA
tctctctgtttttctct

SEQ ID NO: 120924 - DNA, 17 bp, synthetic construct
  source 1..17: mol_type = other DNA
ctctctgtttttctctt

SEQ ID NO: 120925 - DNA, 17 bp, synthetic construct
  source 1..17: mol_type = other DNA
tctctgtttttctcttc

SEQ ID NO: 120926 - DNA, 17 bp, synthetic construct
  source 1..17: mol_type = other DNA
ctctgtttttctcttct

SEQ ID NO: 120927 - DNA, 17 bp, synthetic construct
  source 1..17: mol_type = other DNA
tctgtttttctcttctg

SEQ ID NO: 120928 - DNA, 17 bp, synthetic construct
  source 1..17: mol_type = other DNA
ctgtttttctcttctgt

SEQ ID NO: 120929 - DNA, 17 bp, synthetic construct
  source 1..17: mol_type = other DNA
tgtttttctcttctgtc

SEQ ID NO: 120930 - DNA, 17 bp, synthetic construct
  source 1..17: mol_type = other DNA
gtttttctcttctgtct

SEQ ID NO: 120931 - DNA, 17 bp, synthetic construct
  source 1..17: mol_type = other DNA
tttttctcttctgtctc

SEQ ID NO: 120932 - DNA, 17 bp, synthetic construct
  source 1..17: mol_type = other DNA
ttttctcttctgtctct

SEQ ID NO: 120933 - DNA, 17 bp, synthetic construct
  source 1..17: mol_type = other DNA
tttctcttctgtctctt

SEQ ID NO: 120934 - DNA, 17 bp, synthetic construct
  source 1..17: mol_type = other DNA
ttctcttctgtctcttg

SEQ ID NO: 120935 - DNA, 17 bp, synthetic construct
  source 1..17: mol_type = other DNA
tctcttctgtctcttgt

SEQ ID NO: 120936 - DNA, 17 bp, synthetic construct
  source 1..17: mol_type = other DNA
ctcttctgtctcttgta

SEQ ID NO: 120937 - DNA, 17 bp, synthetic construct
  source 1..17: mol_type = other DNA
tcttctgtctcttgtaa

SEQ ID NO: 120938 - DNA, 17 bp, synthetic construct
  source 1..17: mol_type = other DNA
cttctgtctcttgtaag

SEQ ID NO: 120939 - DNA, 17 bp, synthetic construct
  source 1..17: mol_type = other DNA
ttctgtctcttgtaagg

SEQ ID NO: 120940 - DNA, 17 bp, synthetic construct
  source 1..17: mol_type = other DNA
tctgtctcttgtaagga

SEQ ID NO: 120941 - DNA, 17 bp, synthetic construct
  source 1..17: mol_type = other DNA
ctgtctcttgtaaggac

SEQ ID NO: 120942 - DNA, 17 bp, synthetic construct
  source 1..17: mol_type = other DNA
tgtctcttgtaaggaca

SEQ ID NO: 120943 - DNA, 17 bp, synthetic construct
  source 1..17: mol_type = other DNA
gtctcttgtaaggacac

SEQ ID NO: 120944 - DNA, 17 bp, synthetic construct
  source 1..17: mol_type = other DNA
tctcttgtaaggacact

SEQ ID NO: 120945 - DNA, 17 bp, synthetic construct
  source 1..17: mol_type = other DNA
ctcttgtaaggacactg

SEQ ID NO: 120946 - DNA, 17 bp, synthetic construct
  source 1..17: mol_type = other DNA
tcttgtaaggacactgg

SEQ ID NO: 120947 - DNA, 17 bp, synthetic construct
  source 1..17: mol_type = other DNA
cttgtaaggacactggt

SEQ ID NO: 120948 - DNA, 17 bp, synthetic construct
  source 1..17: mol_type = other DNA
ttgtaaggacactggtc

SEQ ID NO: 120949 - DNA, 17 bp, synthetic construct
  source 1..17: mol_type = other DNA
tgtaaggacactggtca

SEQ ID NO: 120950 - DNA, 17 bp, synthetic construct
  source 1..17: mol_type = other DNA
gtaaggacactggtcat

SEQ ID NO: 120951 - DNA, 17 bp, synthetic construct
  source 1..17: mol_type = other DNA
taaggacactggtcatt

SEQ ID NO: 120952 - DNA, 17 bp, synthetic construct
  source 1..17: mol_type = other DNA
aaggacactggtcattg

SEQ ID NO: 120953 - DNA, 17 bp, synthetic construct
  source 1..17: mol_type = other DNA
aggacactggtcattgg

SEQ ID NO: 120954 - DNA, 17 bp, synthetic construct
  source 1..17: mol_type = other DNA
ggacactggtcattgga

SEQ ID NO: 120955 - DNA, 17 bp, synthetic construct
  source 1..17: mol_type = other DNA
gacactggtcattggat

SEQ ID NO: 120956 - DNA, 17 bp, synthetic construct
  source 1..17: mol_type = other DNA
acactggtcattggatt

SEQ ID NO: 120957 - DNA, 17 bp, synthetic construct
  source 1..17: mol_type = other DNA
cactggtcattggattt

SEQ ID NO: 120958 - DNA, 17 bp, synthetic construct
  source 1..17: mol_type = other DNA
actggtcattggattta

SEQ ID NO: 120959 - DNA, 17 bp, synthetic construct
  source 1..17: mol_type = other DNA
ctggtcattggatttag

SEQ ID NO: 120960 - DNA, 17 bp, synthetic construct
  source 1..17: mol_type = other DNA
tggtcattggatttagg

SEQ ID NO: 120961 - DNA, 17 bp, synthetic construct
  source 1..17: mol_type = other DNA
ggtcattggatttaggg

SEQ ID NO: 120962 - DNA, 17 bp, synthetic construct
  source 1..17: mol_type = other DNA
gtcattggatttagggc

SEQ ID NO: 120963 - DNA, 17 bp, synthetic construct
  source 1..17: mol_type = other DNA
tcattggatttagggcc

SEQ ID NO: 120964 - DNA, 17 bp, synthetic construct
  source 1..17: mol_type = other DNA
cattggatttagggccc

SEQ ID NO: 120965 - DNA, 17 bp, synthetic construct
  source 1..17: mol_type = other DNA
attggatttagggcccc

SEQ ID NO: 120966 - DNA, 17 bp, synthetic construct
  source 1..17: mol_type = other DNA
ttggatttagggccccc

SEQ ID NO: 120967 - DNA, 17 bp, synthetic construct
  source 1..17: mol_type = other DNA
tggatttagggcccccc

SEQ ID NO: 120968 - DNA, 17 bp, synthetic construct
  source 1..17: mol_type = other DNA
ggatttagggccccccc

SEQ ID NO: 120969 - DNA, 17 bp, synthetic construct
  source 1..17: mol_type = other DNA
gatttagggcccccccc

SEQ ID NO: 120970 - DNA, 17 bp, synthetic construct
  source 1..17: mol_type = other DNA
atttagggccccccccc

SEQ ID NO: 120971 - DNA, 17 bp, synthetic construct
  source 1..17: mol_type = other DNA
tttagggcccccccccg

SEQ ID NO: 120972 - DNA, 17 bp, synthetic construct
  source 1..17: mol_type = other DNA
ttagggcccccccccgc

SEQ ID NO: 120973 - DNA, 17 bp, synthetic construct
  source 1..17: mol_type = other DNA
tagggcccccccccgcc

SEQ ID NO: 120974 - DNA, 17 bp, synthetic construct
  source 1..17: mol_type = other DNA
agggcccccccccgccc

SEQ ID NO: 120975 - DNA, 17 bp, synthetic construct
  source 1..17: mol_type = other DNA
gggcccccccccgcccc

SEQ ID NO: 120976 - DNA, 17 bp, synthetic construct
  source 1..17: mol_type = other DNA
ggcccccccccgccccc

SEQ ID NO: 120977 - DNA, 17 bp, synthetic construct
  source 1..17: mol_type = other DNA
gcccccccccgccccca

SEQ ID NO: 120978 - DNA, 17 bp, synthetic construct
  source 1..17: mol_type = other DNA
cccccccccgcccccac

SEQ ID NO: 120979 - DNA, 17 bp, synthetic construct
  source 1..17: mol_type = other DNA
ccccccccgcccccacg

SEQ ID NO: 120980 - DNA, 17 bp, synthetic construct
  source 1..17: mol_type = other DNA
cccccccgcccccacgt

SEQ ID NO: 120981 - DNA, 17 bp, synthetic construct
  source 1..17: mol_type = other DNA
ccccccgcccccacgta

SEQ ID NO: 120982 - DNA, 17 bp, synthetic construct
  source 1..17: mol_type = other DNA
cccccgcccccacgtag

SEQ ID NO: 120983 - DNA, 17 bp, synthetic construct
  source 1..17: mol_type = other DNA
ccccgcccccacgtagt

SEQ ID NO: 120984 - DNA, 17 bp, synthetic construct
  source 1..17: mol_type = other DNA
cccgcccccacgtagtc

SEQ ID NO: 120985 - DNA, 17 bp, synthetic construct
  source 1..17: mol_type = other DNA
ccgcccccacgtagtcc

SEQ ID NO: 120986 - DNA, 17 bp, synthetic construct
  source 1..17: mol_type = other DNA
cgcccccacgtagtcca

SEQ ID NO: 120987 - DNA, 17 bp, synthetic construct
  source 1..17: mol_type = other DNA
gcccccacgtagtccag

SEQ ID NO: 120988 - DNA, 17 bp, synthetic construct
  source 1..17: mol_type = other DNA
cccccacgtagtccagg

SEQ ID NO: 120989 - DNA, 17 bp, synthetic construct
  source 1..17: mol_type = other DNA
ccccacgtagtccagga

SEQ ID NO: 120990 - DNA, 17 bp, synthetic construct
  source 1..17: mol_type = other DNA
cccacgtagtccaggat

SEQ ID NO: 120991 - DNA, 17 bp, synthetic construct
  source 1..17: mol_type = other DNA
ccacgtagtccaggatg

SEQ ID NO: 120992 - DNA, 17 bp, synthetic construct
  source 1..17: mol_type = other DNA
cacgtagtccaggatga

SEQ ID NO: 120993 - DNA, 17 bp, synthetic construct
  source 1..17: mol_type = other DNA
acgtagtccaggatgat

SEQ ID NO: 120994 - DNA, 17 bp, synthetic construct
  source 1..17: mol_type = other DNA
cgtagtccaggatgatc

SEQ ID NO: 120995 - DNA, 17 bp, synthetic construct
  source 1..17: mol_type = other DNA
gtagtccaggatgatct

SEQ ID NO: 120996 - DNA, 17 bp, synthetic construct
  source 1..17: mol_type = other DNA
tagtccaggatgatctc

SEQ ID NO: 120997 - DNA, 17 bp, synthetic construct
  source 1..17: mol_type = other DNA
agtccaggatgatctca

SEQ ID NO: 120998 - DNA, 17 bp, synthetic construct
  source 1..17: mol_type = other DNA
gtccaggatgatctcat

SEQ ID NO: 120999 - DNA, 17 bp, synthetic construct
  source 1..17: mol_type = other DNA
tccaggatgatctcatt

SEQ ID NO: 121000 - DNA, 17 bp, synthetic construct
  source 1..17: mol_type = other DNA
ccaggatgatctcattt

SEQ ID NO: 121001 - DNA, 17 bp, synthetic construct
  source 1..17: mol_type = other DNA
caggatgatctcatttc

SEQ ID NO: 121002 - DNA, 17 bp, synthetic construct
  source 1..17: mol_type = other DNA
aggatgatctcatttca

SEQ ID NO: 121003 - DNA, 17 bp, synthetic construct
  source 1..17: mol_type = other DNA
ggatgatctcatttcaa

SEQ ID NO: 121004 - DNA, 17 bp, synthetic construct
  source 1..17: mol_type = other DNA
gatgatctcatttcaag

SEQ ID NO: 121005 - DNA, 17 bp, synthetic construct
  source 1..17: mol_type = other DNA
atgatctcatttcaaga

SEQ ID NO: 121006 - DNA, 17 bp, synthetic construct
  source 1..17: mol_type = other DNA
tgatctcatttcaagat

SEQ ID NO: 121007 - DNA, 17 bp, synthetic construct
  source 1..17: mol_type = other DNA
gatctcatttcaagatg

SEQ ID NO: 121008 - DNA, 17 bp, synthetic construct
  source 1..17: mol_type = other DNA
atctcatttcaagatgc

SEQ ID NO: 121009 - DNA, 17 bp, synthetic construct
  source 1..17: mol_type = other DNA
tctcatttcaagatgct

SEQ ID NO: 121010 - DNA, 17 bp, synthetic construct
  source 1..17: mol_type = other DNA
ctcatttcaagatgctt

SEQ ID NO: 121011 - DNA, 17 bp, synthetic construct
  source 1..17: mol_type = other DNA
tcatttcaagatgcttc

SEQ ID NO: 121012 - DNA, 17 bp, synthetic construct
  source 1..17: mol_type = other DNA
catttcaagatgcttca

SEQ ID NO: 121013 - DNA, 17 bp, synthetic construct
  source 1..17: mol_type = other DNA
atttcaagatgcttcac

SEQ ID NO: 121014 - DNA, 17 bp, synthetic construct
  source 1..17: mol_type = other DNA
tttcaagatgcttcact

SEQ ID NO: 121015 - DNA, 17 bp, synthetic construct
  source 1..17: mol_type = other DNA
ttcaagatgcttcactt

SEQ ID NO: 121016 - DNA, 17 bp, synthetic construct
  source 1..17: mol_type = other DNA
tcaagatgcttcactta

SEQ ID NO: 121017 - DNA, 17 bp, synthetic construct
  source 1..17: mol_type = other DNA
caagatgcttcacttaa

SEQ ID NO: 121018 - DNA, 17 bp, synthetic construct
  source 1..17: mol_type = other DNA
aagatgcttcacttaat

SEQ ID NO: 121019 - DNA, 17 bp, synthetic construct
  source 1..17: mol_type = other DNA
agatgcttcacttaatc

SEQ ID NO: 121020 - DNA, 17 bp, synthetic construct
  source 1..17: mol_type = other DNA
gatgcttcacttaatcc

SEQ ID NO: 121021 - DNA, 17 bp, synthetic construct
  source 1..17: mol_type = other DNA
atgcttcacttaatccc

SEQ ID NO: 121022 - DNA, 17 bp, synthetic construct
  source 1..17: mol_type = other DNA
tgcttcacttaatcccg

SEQ ID NO: 121023 - DNA, 17 bp, synthetic construct
  source 1..17: mol_type = other DNA
gcttcacttaatcccgt

SEQ ID NO: 121024 - DNA, 17 bp, synthetic construct
  source 1..17: mol_type = other DNA
cttcacttaatcccgtc

SEQ ID NO: 121025 - DNA, 17 bp, synthetic construct
  source 1..17: mol_type = other DNA
ttcacttaatcccgtct

SEQ ID NO: 121026 - DNA, 17 bp, synthetic construct
  source 1..17: mol_type = other DNA
tcacttaatcccgtctg

SEQ ID NO: 121027 - DNA, 17 bp, synthetic construct
  source 1..17: mol_type = other DNA
cacttaatcccgtctgc

SEQ ID NO: 121028 - DNA, 17 bp, synthetic construct
  source 1..17: mol_type = other DNA
acttaatcccgtctgca

SEQ ID NO: 121029 - DNA, 17 bp, synthetic construct
  source 1..17: mol_type = other DNA
cttaatcccgtctgcag

SEQ ID NO: 121030 - DNA, 17 bp, synthetic construct
  source 1..17: mol_type = other DNA
ttaatcccgtctgcaga

SEQ ID NO: 121031 - DNA, 17 bp, synthetic construct
  source 1..17: mol_type = other DNA
taatcccgtctgcagag

SEQ ID NO: 121032 - DNA, 17 bp, synthetic construct
  source 1..17: mol_type = other DNA
aatcccgtctgcagaga

SEQ ID NO: 121033 - DNA, 17 bp, synthetic construct
  source 1..17: mol_type = other DNA
atcccgtctgcagagat

SEQ ID NO: 121034 - DNA, 17 bp, synthetic construct
  source 1..17: mol_type = other DNA
tcccgtctgcagagatg

SEQ ID NO: 121035 - DNA, 17 bp, synthetic construct
  source 1..17: mol_type = other DNA
cccgtctgcagagatgc

SEQ ID NO: 121036 - DNA, 17 bp, synthetic construct
  source 1..17: mol_type = other DNA
ccgtctgcagagatgct

SEQ ID NO: 121037 - DNA, 17 bp, synthetic construct
  source 1..17: mol_type = other DNA
cgtctgcagagatgctt

SEQ ID NO: 121038 - DNA, 17 bp, synthetic construct
  source 1..17: mol_type = other DNA
gtctgcagagatgcttt

SEQ ID NO: 121039 - DNA, 17 bp, synthetic construct
  source 1..17: mol_type = other DNA
tctgcagagatgctttc

SEQ ID NO: 121040 - DNA, 17 bp, synthetic construct
  source 1..17: mol_type = other DNA
ctgcagagatgctttct

SEQ ID NO: 121041 - DNA, 17 bp, synthetic construct
  source 1..17: mol_type = other DNA
tgcagagatgctttctc

SEQ ID NO: 121042 - DNA, 17 bp, synthetic construct
  source 1..17: mol_type = other DNA
gcagagatgctttctcc

SEQ ID NO: 121043 - DNA, 17 bp, synthetic construct
  source 1..17: mol_type = other DNA
cagagatgctttctccc

SEQ ID NO: 121044 - DNA, 17 bp, synthetic construct
  source 1..17: mol_type = other DNA
agagatgctttctccca

SEQ ID NO: 121045 - DNA, 17 bp, synthetic construct
  source 1..17: mol_type = other DNA
gagatgctttctcccag

SEQ ID NO: 121046 - DNA, 17 bp, synthetic construct
  source 1..17: mol_type = other DNA
agatgctttctcccagt

SEQ ID NO: 121047 - DNA, 17 bp, synthetic construct
  source 1..17: mol_type = other DNA
gatgctttctcccagtg

SEQ ID NO: 121048 - DNA, 17 bp, synthetic construct
  source 1..17: mol_type = other DNA
atgctttctcccagtga

SEQ ID NO: 121049 - DNA, 17 bp, synthetic construct
  source 1..17: mol_type = other DNA
tgctttctcccagtgag

SEQ ID NO: 121050 - DNA, 17 bp, synthetic construct
  source 1..17: mol_type = other DNA
gctttctcccagtgagg

SEQ ID NO: 121051 - DNA, 17 bp, synthetic construct
  source 1..17: mol_type = other DNA
ctttctcccagtgaggg

SEQ ID NO: 121052 - DNA, 17 bp, synthetic construct
  source 1..17: mol_type = other DNA
tttctcccagtgagggc

SEQ ID NO: 121053 - DNA, 17 bp, synthetic construct
  source 1..17: mol_type = other DNA
ttctcccagtgagggcc

SEQ ID NO: 121054 - DNA, 17 bp, synthetic construct
  source 1..17: mol_type = other DNA
tctcccagtgagggccc

SEQ ID NO: 121055 - DNA, 17 bp, synthetic construct
  source 1..17: mol_type = other DNA
ctcccagtgagggcccg

SEQ ID NO: 121056 - DNA, 17 bp, synthetic construct
  source 1..17: mol_type = other DNA
tcccagtgagggcccgg

SEQ ID NO: 121057 - DNA, 17 bp, synthetic construct
  source 1..17: mol_type = other DNA
cccagtgagggcccggg

SEQ ID NO: 121058 - DNA, 17 bp, synthetic construct
  source 1..17: mol_type = other DNA
ccagtgagggcccgggc

SEQ ID NO: 121059 - DNA, 17 bp, synthetic construct
  source 1..17: mol_type = other DNA
cagtgagggcccgggct

SEQ ID NO: 121060 - DNA, 17 bp, synthetic construct
  source 1..17: mol_type = other DNA
agtgagggcccgggctg

SEQ ID NO: 121061 - DNA, 17 bp, synthetic construct
  source 1..17: mol_type = other DNA
gtgagggcccgggctga

SEQ ID NO: 121062 - DNA, 17 bp, synthetic construct
  source 1..17: mol_type = other DNA
tgagggcccgggctgag

SEQ ID NO: 121063 - DNA, 17 bp, synthetic construct
  source 1..17: mol_type = other DNA
gagggcccgggctgagg

SEQ ID NO: 121064 - DNA, 17 bp, synthetic construct
  source 1..17: mol_type = other DNA
agggcccgggctgaggt

SEQ ID NO: 121065 - DNA, 17 bp, synthetic construct
  source 1..17: mol_type = other DNA
gggcccgggctgaggtt

SEQ ID NO: 121066 - DNA, 17 bp, synthetic construct
  source 1..17: mol_type = other DNA
ggcccgggctgaggttc

SEQ ID NO: 121067 - DNA, 17 bp, synthetic construct
  source 1..17: mol_type = other DNA
gcccgggctgaggttct

SEQ ID NO: 121068 - DNA, 17 bp, synthetic construct
  source 1..17: mol_type = other DNA
cccgggctgaggttctg

SEQ ID NO: 121069 - DNA, 17 bp, synthetic construct
  source 1..17: mol_type = other DNA
ccgggctgaggttctgg

SEQ ID NO: 121070 - DNA, 17 bp, synthetic construct
  source 1..17: mol_type = other DNA
cgggctgaggttctggg

SEQ ID NO: 121071 - DNA, 17 bp, synthetic construct
  source 1..17: mol_type = other DNA
gggctgaggttctggga

SEQ ID NO: 121072 - DNA, 17 bp, synthetic construct
  source 1..17: mol_type = other DNA
ggctgaggttctgggag

SEQ ID NO: 121073 - DNA, 17 bp, synthetic construct
  source 1..17: mol_type = other DNA
gctgaggttctgggagt

SEQ ID NO: 121074 - DNA, 17 bp, synthetic construct
  source 1..17: mol_type = other DNA
ctgaggttctgggagtt

SEQ ID NO: 121075 - DNA, 17 bp, synthetic construct
  source 1..17: mol_type = other DNA
tgaggttctgggagttc

SEQ ID NO: 121076 - DNA, 17 bp, synthetic construct
  source 1..17: mol_type = other DNA
gaggttctgggagttcg

SEQ ID NO: 121077 - DNA, 17 bp, synthetic construct
  source 1..17: mol_type = other DNA
aggttctgggagttcgc

SEQ ID NO: 121078 - DNA, 17 bp, synthetic construct
  source 1..17: mol_type = other DNA
ggttctgggagttcgca

SEQ ID NO: 121079 - DNA, 17 bp, synthetic construct
  source 1..17: mol_type = other DNA
gttctgggagttcgcat

SEQ ID NO: 121080 - DNA, 17 bp, synthetic construct
  source 1..17: mol_type = other DNA
ttctgggagttcgcatg

SEQ ID NO: 121081 - DNA, 17 bp, synthetic construct
  source 1..17: mol_type = other DNA
tctgggagttcgcatgt

SEQ ID NO: 121082 - DNA, 17 bp, synthetic construct
  source 1..17: mol_type = other DNA
ctgggagttcgcatgtg

SEQ ID NO: 121083 - DNA, 17 bp, synthetic construct
  source 1..17: mol_type = other DNA
tgggagttcgcatgtgg

SEQ ID NO: 121084 - DNA, 17 bp, synthetic construct
  source 1..17: mol_type = other DNA
gggagttcgcatgtgga

SEQ ID NO: 121085 - DNA, 17 bp, synthetic construct
  source 1..17: mol_type = other DNA
ggagttcgcatgtggac

SEQ ID NO: 121086 - DNA, 17 bp, synthetic construct
  source 1..17: mol_type = other DNA
gagttcgcatgtggaca

SEQ ID NO: 121087 - DNA, 17 bp, synthetic construct
  source 1..17: mol_type = other DNA
agttcgcatgtggacag

SEQ ID NO: 121088 - DNA, 17 bp, synthetic construct
  source 1..17: mol_type = other DNA
gttcgcatgtggacagg

SEQ ID NO: 121089 - DNA, 17 bp, synthetic construct
  source 1..17: mol_type = other DNA
ttcgcatgtggacaggc

SEQ ID NO: 121090 - DNA, 17 bp, synthetic construct
  source 1..17: mol_type = other DNA
tcgcatgtggacaggca

SEQ ID NO: 121091 - DNA, 17 bp, synthetic construct
  source 1..17: mol_type = other DNA
cgcatgtggacaggcat

SEQ ID NO: 121092 - DNA, 17 bp, synthetic construct
  source 1..17: mol_type = other DNA
gcatgtggacaggcatt

SEQ ID NO: 121093 - DNA, 17 bp, synthetic construct
  source 1..17: mol_type = other DNA
catgtggacaggcattt

SEQ ID NO: 121094 - DNA, 17 bp, synthetic construct
  source 1..17: mol_type = other DNA
atgtggacaggcatttt

SEQ ID NO: 121095 - DNA, 17 bp, synthetic construct
  source 1..17: mol_type = other DNA
tgtggacaggcattttc

SEQ ID NO: 121096 - DNA, 17 bp, synthetic construct
  source 1..17: mol_type = other DNA
gtggacaggcattttca

SEQ ID NO: 121097 - DNA, 17 bp, synthetic construct
  source 1..17: mol_type = other DNA
tggacaggcattttcag

SEQ ID NO: 121098 - DNA, 17 bp, synthetic construct
  source 1..17: mol_type = other DNA
ggacaggcattttcagg

SEQ ID NO: 121099 - DNA, 17 bp, synthetic construct
  source 1..17: mol_type = other DNA
gacaggcattttcagga

SEQ ID NO: 121100 - DNA, 17 bp, synthetic construct
  source 1..17: mol_type = other DNA
acaggcattttcaggag

SEQ ID NO: 121101 - DNA, 17 bp, synthetic construct
  source 1..17: mol_type = other DNA
caggcattttcaggagc

SEQ ID NO: 121102 - DNA, 17 bp, synthetic construct
  source 1..17: mol_type = other DNA
aggcattttcaggagcc

SEQ ID NO: 121103 - DNA, 17 bp, synthetic construct
  source 1..17: mol_type = other DNA
ggcattttcaggagcca

SEQ ID NO: 121104 - DNA, 17 bp, synthetic construct
  source 1..17: mol_type = other DNA
gcattttcaggagccac

SEQ ID NO: 121105 - DNA, 17 bp, synthetic construct
  source 1..17: mol_type = other DNA
cattttcaggagccacg

SEQ ID NO: 121106 - DNA, 17 bp, synthetic construct
  source 1..17: mol_type = other DNA
attttcaggagccacga

SEQ ID NO: 121107 - DNA, 17 bp, synthetic construct
  source 1..17: mol_type = other DNA
ttttcaggagccacgat

SEQ ID NO: 121108 - DNA, 17 bp, synthetic construct
  source 1..17: mol_type = other DNA
tttcaggagccacgatt

SEQ ID NO: 121109 - DNA, 17 bp, synthetic construct
  source 1..17: mol_type = other DNA
ttcaggagccacgattc

SEQ ID NO: 121110 - DNA, 17 bp, synthetic construct
  source 1..17: mol_type = other DNA
tcaggagccacgattca

SEQ ID NO: 121111 - DNA, 17 bp, synthetic construct
  source 1..17: mol_type = other DNA
caggagccacgattcac

SEQ ID NO: 121112 - DNA, 17 bp, synthetic construct
  source 1..17: mol_type = other DNA
aggagccacgattcacc

SEQ ID NO: 121113 - DNA, 17 bp, synthetic construct
  source 1..17: mol_type = other DNA
ggagccacgattcaccc

SEQ ID NO: 121114 - DNA, 17 bp, synthetic construct
  source 1..17: mol_type = other DNA
gagccacgattcaccct

SEQ ID NO: 121115 - DNA, 17 bp, synthetic construct
  source 1..17: mol_type = other DNA
agccacgattcaccctg

SEQ ID NO: 121116 - DNA, 17 bp, synthetic construct
  source 1..17: mol_type = other DNA
gccacgattcaccctgc

SEQ ID NO: 121117 - DNA, 17 bp, synthetic construct
  source 1..17: mol_type = other DNA
ccacgattcaccctgcc

SEQ ID NO: 121118 - DNA, 17 bp, synthetic construct
  source 1..17: mol_type = other DNA
cacgattcaccctgcca

SEQ ID NO: 121119 - DNA, 17 bp, synthetic construct
  source 1..17: mol_type = other DNA
acgattcaccctgccac

SEQ ID NO: 121120 - DNA, 17 bp, synthetic construct
  source 1..17: mol_type = other DNA
cgattcaccctgccaca

SEQ ID NO: 121121 - DNA, 17 bp, synthetic construct
  source 1..17: mol_type = other DNA
gattcaccctgccacac

SEQ ID NO: 121122 - DNA, 17 bp, synthetic construct
  source 1..17: mol_type = other DNA
attcaccctgccacacc

SEQ ID NO: 121123 - DNA, 17 bp, synthetic construct
  source 1..17: mol_type = other DNA
ttcaccctgccacacct

SEQ ID NO: 121124 - DNA, 17 bp, synthetic construct
  source 1..17: mol_type = other DNA
tcaccctgccacaccta

SEQ ID NO: 121125 - DNA, 17 bp, synthetic construct
  source 1..17: mol_type = other DNA
caccctgccacacctag

SEQ ID NO: 121126 - DNA, 17 bp, synthetic construct
  source 1..17: mol_type = other DNA
accctgccacacctaga

SEQ ID NO: 121127 - DNA, 17 bp, synthetic construct
  source 1..17: mol_type = other DNA
ccctgccacacctagag

SEQ ID NO: 121128 - DNA, 17 bp, synthetic construct
  source 1..17: mol_type = other DNA
cctgccacacctagaga

SEQ ID NO: 121129 - DNA, 17 bp, synthetic construct
  source 1..17: mol_type = other DNA
ctgccacacctagagac

SEQ ID NO: 121130 - DNA, 17 bp, synthetic construct
  source 1..17: mol_type = other DNA
tgccacacctagagaca

SEQ ID NO: 121131 - DNA, 17 bp, synthetic construct
  source 1..17: mol_type = other DNA
gccacacctagagacac

SEQ ID NO: 121132 - DNA, 17 bp, synthetic construct
  source 1..17: mol_type = other DNA
ccacacctagagacacc

SEQ ID NO: 121133 - DNA, 17 bp, synthetic construct
  source 1..17: mol_type = other DNA
cacacctagagacaccc

SEQ ID NO: 121134 - DNA, 17 bp, synthetic construct
  source 1..17: mol_type = other DNA
acacctagagacaccca

SEQ ID NO: 121135 - DNA, 17 bp, synthetic construct
  source 1..17: mol_type = other DNA
cacctagagacacccac

SEQ ID NO: 121136 - DNA, 17 bp, synthetic construct
  source 1..17: mol_type = other DNA
acctagagacacccact

SEQ ID NO: 121137 - DNA, 17 bp, synthetic construct
  source 1..17: mol_type = other DNA
cctagagacacccactc

SEQ ID NO: 121138 - DNA, 17 bp, synthetic construct
  source 1..17: mol_type = other DNA
ctagagacacccactcc

SEQ ID NO: 121139 - DNA, 17 bp, synthetic construct
  source 1..17: mol_type = other DNA
tagagacacccactcca

SEQ ID NO: 121140 - DNA, 17 bp, synthetic construct
  source 1..17: mol_type = other DNA
agagacacccactccag

SEQ ID NO: 121141 - DNA, 17 bp, synthetic construct
  source 1..17: mol_type = other DNA
gagacacccactccagc

SEQ ID NO: 121142 - DNA, 17 bp, synthetic construct
  source 1..17: mol_type = other DNA
agacacccactccagca

SEQ ID NO: 121143 - DNA, 17 bp, synthetic construct
  source 1..17: mol_type = other DNA
gacacccactccagcaa

SEQ ID NO: 121144 - DNA, 17 bp, synthetic construct
  source 1..17: mol_type = other DNA
acacccactccagcaaa

SEQ ID NO: 121145 - DNA, 17 bp, synthetic construct
  source 1..17: mol_type = other DNA
cacccactccagcaaag

SEQ ID NO: 121146 - DNA, 17 bp, synthetic construct
  source 1..17: mol_type = other DNA
acccactccagcaaagg

SEQ ID NO: 121147 - DNA, 17 bp, synthetic construct
  source 1..17: mol_type = other DNA
cccactccagcaaaggg

SEQ ID NO: 121148 - DNA, 17 bp, synthetic construct
  source 1..17: mol_type = other DNA
ccactccagcaaagggg

SEQ ID NO: 121149 - DNA, 17 bp, synthetic construct
  source 1..17: mol_type = other DNA
cactccagcaaaggggg

SEQ ID NO: 121150 - DNA, 17 bp, synthetic construct
  source 1..17: mol_type = other DNA
actccagcaaagggggg

SEQ ID NO: 121151 - DNA, 17 bp, synthetic construct
  source 1..17: mol_type = other DNA
ctccagcaaaggggggc

SEQ ID NO: 121152 - DNA, 17 bp, synthetic construct
  source 1..17: mol_type = other DNA
tccagcaaaggggggcc

SEQ ID NO: 121153 - DNA, 17 bp, synthetic construct
  source 1..17: mol_type = other DNA
ccagcaaaggggggcca

SEQ ID NO: 121154 - DNA, 17 bp, synthetic construct
  source 1..17: mol_type = other DNA
cagcaaaggggggccag

SEQ ID NO: 121155 - DNA, 17 bp, synthetic construct
  source 1..17: mol_type = other DNA
agcaaaggggggccaga

SEQ ID NO: 121156 - DNA, 17 bp, synthetic construct
  source 1..17: mol_type = other DNA
gcaaaggggggccagag

SEQ ID NO: 121157 - DNA, 17 bp, synthetic construct
  source 1..17: mol_type = other DNA
caaaggggggccagagc

SEQ ID NO: 121158 - DNA, 17 bp, synthetic construct
  source 1..17: mol_type = other DNA
aaaggggggccagagct

SEQ ID NO: 121159 - DNA, 17 bp, synthetic construct
  source 1..17: mol_type = other DNA
aaggggggccagagctc

SEQ ID NO: 121160 - DNA, 17 bp, synthetic construct
  source 1..17: mol_type = other DNA
aggggggccagagctcc

SEQ ID NO: 121161 - DNA, 17 bp, synthetic construct
  source 1..17: mol_type = other DNA
ggggggccagagctccc

SEQ ID NO: 121162 - DNA, 17 bp, synthetic construct
  source 1..17: mol_type = other DNA
gggggccagagctccca

SEQ ID NO: 121163 - DNA, 17 bp, synthetic construct
  source 1..17: mol_type = other DNA
ggggccagagctcccag

SEQ ID NO: 121164 - DNA, 17 bp, synthetic construct
  source 1..17: mol_type = other DNA
gggccagagctcccagg

SEQ ID NO: 121165 - DNA, 17 bp, synthetic construct
  source 1..17: mol_type = other DNA
ggccagagctcccaggg

SEQ ID NO: 121166 - DNA, 17 bp, synthetic construct
  source 1..17: mol_type = other DNA
gccagagctcccagggg

SEQ ID NO: 121167 - DNA, 17 bp, synthetic construct
  source 1..17: mol_type = other DNA
ccagagctcccagggga

SEQ ID NO: 121168 - DNA, 17 bp, synthetic construct
  source 1..17: mol_type = other DNA
cagagctcccaggggat

SEQ ID NO: 121169 - DNA, 17 bp, synthetic construct
  source 1..17: mol_type = other DNA
agagctcccaggggata

SEQ ID NO: 121170 - DNA, 17 bp, synthetic construct
  source 1..17: mol_type = other DNA
gagctcccaggggataa

SEQ ID NO: 121171 - DNA, 17 bp, synthetic construct
  source 1..17: mol_type = other DNA
agctcccaggggataaa

SEQ ID NO: 121172 - DNA, 17 bp, synthetic construct
  source 1..17: mol_type = other DNA
gctcccaggggataaag

SEQ ID NO: 121173 - DNA, 17 bp, synthetic construct
  source 1..17: mol_type = other DNA
ctcccaggggataaagc

SEQ ID NO: 121174 - DNA, 17 bp, synthetic construct
  source 1..17: mol_type = other DNA
tcccaggggataaagca

SEQ ID NO: 121175 - DNA, 17 bp, synthetic construct
  source 1..17: mol_type = other DNA
cccaggggataaagcag

SEQ ID NO: 121176 - DNA, 17 bp, synthetic construct
  source 1..17: mol_type = other DNA
ccaggggataaagcagc

SEQ ID NO: 121177 - DNA, 17 bp, synthetic construct
  source 1..17: mol_type = other DNA
caggggataaagcagcg

SEQ ID NO: 121178 - DNA, 17 bp, synthetic construct
  source 1..17: mol_type = other DNA
aggggataaagcagcgc

SEQ ID NO: 121179 - DNA, 17 bp, synthetic construct
  source 1..17: mol_type = other DNA
ggggataaagcagcgcc

SEQ ID NO: 121180 - DNA, 17 bp, synthetic construct
  source 1..17: mol_type = other DNA
gggataaagcagcgccg

SEQ ID NO: 121181 - DNA, 17 bp, synthetic construct
  source 1..17: mol_type = other DNA
ggataaagcagcgccgc

SEQ ID NO: 121182 - DNA, 17 bp, synthetic construct
  source 1..17: mol_type = other DNA
gataaagcagcgccgct

SEQ ID NO: 121183 - DNA, 17 bp, synthetic construct
  source 1..17: mol_type = other DNA
ataaagcagcgccgctg

SEQ ID NO: 121184 - DNA, 17 bp, synthetic construct
  source 1..17: mol_type = other DNA
taaagcagcgccgctgg

SEQ ID NO: 121185 - DNA, 17 bp, synthetic construct
  source 1..17: mol_type = other DNA
aaagcagcgccgctggc

SEQ ID NO: 121186 - DNA, 17 bp, synthetic construct
  source 1..17: mol_type = other DNA
aagcagcgccgctggcc

SEQ ID NO: 121187 - DNA, 17 bp, synthetic construct
  source 1..17: mol_type = other DNA
agcagcgccgctggccg

SEQ ID NO: 121188 - DNA, 17 bp, synthetic construct
  source 1..17: mol_type = other DNA
gcagcgccgctggccgg

SEQ ID NO: 121189 - DNA, 17 bp, synthetic construct
  source 1..17: mol_type = other DNA
cagcgccgctggccggg

SEQ ID NO: 121190 - DNA, 17 bp, synthetic construct
  source 1..17: mol_type = other DNA
agcgccgctggccggga

SEQ ID NO: 121191 - DNA, 17 bp, synthetic construct
  source 1..17: mol_type = other DNA
gcgccgctggccgggat

SEQ ID NO: 121192 - DNA, 17 bp, synthetic construct
  source 1..17: mol_type = other DNA
cgccgctggccgggatg

SEQ ID NO: 121193 - DNA, 17 bp, synthetic construct
  source 1..17: mol_type = other DNA
gccgctggccgggatgc

SEQ ID NO: 121194 - DNA, 17 bp, synthetic construct
  source 1..17: mol_type = other DNA
ccgctggccgggatgct

SEQ ID NO: 121195 - DNA, 17 bp, synthetic construct
  source 1..17: mol_type = other DNA
cgctggccgggatgctc

SEQ ID NO: 121196 - DNA, 17 bp, synthetic construct
  source 1..17: mol_type = other DNA
gctggccgggatgctcc

SEQ ID NO: 121197 - DNA, 17 bp, synthetic construct
  source 1..17: mol_type = other DNA
ctggccgggatgctccc

SEQ ID NO: 121198 - DNA, 17 bp, synthetic construct
  source 1..17: mol_type = other DNA
tggccgggatgctccct

SEQ ID NO: 121199 - DNA, 17 bp, synthetic construct
  source 1..17: mol_type = other DNA
ggccgggatgctccctg

SEQ ID NO: 121200 - DNA, 17 bp, synthetic construct
  source 1..17: mol_type = other DNA
gccgggatgctccctgc

SEQ ID NO: 121201 - DNA, 17 bp, synthetic construct
  source 1..17: mol_type = other DNA
ccgggatgctccctgca

SEQ ID NO: 121202 - DNA, 17 bp, synthetic construct
  source 1..17: mol_type = other DNA
cgggatgctccctgcag

SEQ ID NO: 121203 - DNA, 17 bp, synthetic construct
  source 1..17: mol_type = other DNA
gggatgctccctgcaga

SEQ ID NO: 121204 - DNA, 17 bp, synthetic construct
  source 1..17: mol_type = other DNA
ggatgctccctgcagat

SEQ ID NO: 121205 - DNA, 17 bp, synthetic construct
  source 1..17: mol_type = other DNA
gatgctccctgcagatg

SEQ ID NO: 121206 - DNA, 17 bp, synthetic construct
  source 1..17: mol_type = other DNA
atgctccctgcagatgg

SEQ ID NO: 121207 - DNA, 17 bp, synthetic construct
  source 1..17: mol_type = other DNA
tgctccctgcagatggc

SEQ ID NO: 121208 - DNA, 17 bp, synthetic construct
  source 1..17: mol_type = other DNA
gctccctgcagatggcg

SEQ ID NO: 121209 - DNA, 17 bp, synthetic construct
  source 1..17: mol_type = other DNA
ctccctgcagatggcgg

SEQ ID NO: 121210 - DNA, 17 bp, synthetic construct
  source 1..17: mol_type = other DNA
tccctgcagatggcggg

SEQ ID NO: 121211 - DNA, 17 bp, synthetic construct
  source 1..17: mol_type = other DNA
ccctgcagatggcggga

SEQ ID NO: 121212 - DNA, 17 bp, synthetic construct
  source 1..17: mol_type = other DNA
cctgcagatggcgggag

SEQ ID NO: 121213 - DNA, 17 bp, synthetic construct
  source 1..17: mol_type = other DNA
ctgcagatggcgggagg

SEQ ID NO: 121214 - DNA, 17 bp, synthetic construct
  source 1..17: mol_type = other DNA
tgcagatggcgggaggg

SEQ ID NO: 121215 - DNA, 17 bp, synthetic construct
  source 1..17: mol_type = other DNA
gcagatggcgggagggg

SEQ ID NO: 121216 - DNA, 17 bp, synthetic construct
  source 1..17: mol_type = other DNA
cagatggcgggaggggc

SEQ ID NO: 121217 - DNA, 17 bp, synthetic construct
  source 1..17: mol_type = other DNA
agatggcgggaggggct

SEQ ID NO: 121218 - DNA, 17 bp, synthetic construct
  source 1..17: mol_type = other DNA
gatggcgggaggggctg

SEQ ID NO: 121219 - DNA, 17 bp, synthetic construct
  source 1..17: mol_type = other DNA
atggcgggaggggctga

SEQ ID NO: 121220 - DNA, 17 bp, synthetic construct
  source 1..17: mol_type = other DNA
tggcgggaggggctgag

SEQ ID NO: 121221 - DNA, 17 bp, synthetic construct
  source 1..17: mol_type = other DNA
ggcgggaggggctgagg

SEQ ID NO: 121222 - DNA, 17 bp, synthetic construct
  source 1..17: mol_type = other DNA
gcgggaggggctgagga

SEQ ID NO: 121223 - DNA, 17 bp, synthetic construct
  source 1..17: mol_type = other DNA
cgggaggggctgaggac

SEQ ID NO: 121224 - DNA, 17 bp, synthetic construct
  source 1..17: mol_type = other DNA
gggaggggctgaggacc

SEQ ID NO: 121225 - DNA, 17 bp, synthetic construct
  source 1..17: mol_type = other DNA
ggaggggctgaggaccg

SEQ ID NO: 121226 - DNA, 17 bp, synthetic construct
  source 1..17: mol_type = other DNA
gaggggctgaggaccgc

SEQ ID NO: 121227 - DNA, 17 bp, synthetic construct
  source 1..17: mol_type = other DNA
aggggctgaggaccgca

SEQ ID NO: 121228 - DNA, 17 bp, synthetic construct
  source 1..17: mol_type = other DNA
ggggctgaggaccgcag

SEQ ID NO: 121229 - DNA, 17 bp, synthetic construct
  source 1..17: mol_type = other DNA
gggctgaggaccgcagc

SEQ ID NO: 121230 - DNA, 17 bp, synthetic construct
  source 1..17: mol_type = other DNA
ggctgaggaccgcagcg

SEQ ID NO: 121231 - DNA, 17 bp, synthetic construct
  source 1..17: mol_type = other DNA
gctgaggaccgcagcgg

SEQ ID NO: 121232 - DNA, 17 bp, synthetic construct
  source 1..17: mol_type = other DNA
ctgaggaccgcagcggg

SEQ ID NO: 121233 - DNA, 17 bp, synthetic construct
  source 1..17: mol_type = other DNA
tgaggaccgcagcgggt

SEQ ID NO: 121234 - DNA, 17 bp, synthetic construct
  source 1..17: mol_type = other DNA
gaggaccgcagcgggtc

SEQ ID NO: 121235 - DNA, 17 bp, synthetic construct
  source 1..17: mol_type = other DNA
aggaccgcagcgggtca

SEQ ID NO: 121236 - DNA, 17 bp, synthetic construct
  source 1..17: mol_type = other DNA
ggaccgcagcgggtcag

SEQ ID NO: 121237 - DNA, 17 bp, synthetic construct
  source 1..17: mol_type = other DNA
gaccgcagcgggtcagg

SEQ ID NO: 121238 - DNA, 17 bp, synthetic construct
  source 1..17: mol_type = other DNA
accgcagcgggtcaggg

SEQ ID NO: 121239 - DNA, 17 bp, synthetic construct
  source 1..17: mol_type = other DNA
ccgcagcgggtcagggg

SEQ ID NO: 121240 - DNA, 17 bp, synthetic construct
  source 1..17: mol_type = other DNA
cgcagcgggtcagggga

SEQ ID NO: 121241 - DNA, 17 bp, synthetic construct
  source 1..17: mol_type = other DNA
gcagcgggtcaggggag

SEQ ID NO: 121242 - DNA, 17 bp, synthetic construct
  source 1..17: mol_type = other DNA
cagcgggtcaggggagg

SEQ ID NO: 121243 - DNA, 17 bp, synthetic construct
  source 1..17: mol_type = other DNA
agcgggtcaggggaggc

SEQ ID NO: 121244 - DNA, 17 bp, synthetic construct
  source 1..17: mol_type = other DNA
gcgggtcaggggaggct

SEQ ID NO: 121245 - DNA, 17 bp, synthetic construct
  source 1..17: mol_type = other DNA
cgggtcaggggaggctg

SEQ ID NO: 121246 - DNA, 17 bp, synthetic construct
  source 1..17: mol_type = other DNA
gggtcaggggaggctgg

SEQ ID NO: 121247 - DNA, 17 bp, synthetic construct
  source 1..17: mol_type = other DNA
ggtcaggggaggctggt

SEQ ID NO: 121248 - DNA, 17 bp, synthetic construct
  source 1..17: mol_type = other DNA
gtcaggggaggctggtg

SEQ ID NO: 121249 - DNA, 17 bp, synthetic construct
  source 1..17: mol_type = other DNA
tcaggggaggctggtgt

SEQ ID NO: 121250 - DNA, 17 bp, synthetic construct
  source 1..17: mol_type = other DNA
caggggaggctggtgtg

SEQ ID NO: 121251 - DNA, 17 bp, synthetic construct
  source 1..17: mol_type = other DNA
aggggaggctggtgtga

SEQ ID NO: 121252 - DNA, 17 bp, synthetic construct
  source 1..17: mol_type = other DNA
ggggaggctggtgtgag

SEQ ID NO: 121253 - DNA, 17 bp, synthetic construct
  source 1..17: mol_type = other DNA
gggaggctggtgtgagg

SEQ ID NO: 121254 - DNA, 17 bp, synthetic construct
  source 1..17: mol_type = other DNA
ggaggctggtgtgaggg

SEQ ID NO: 121255 - DNA, 17 bp, synthetic construct
  source 1..17: mol_type = other DNA
gaggctggtgtgagggc

SEQ ID NO: 121256 - DNA, 17 bp, synthetic construct
  source 1..17: mol_type = other DNA
aggctggtgtgagggcg

SEQ ID NO: 121257 - DNA, 17 bp, synthetic construct
  source 1..17: mol_type = other DNA
ggctggtgtgagggcgt

SEQ ID NO: 121258 - DNA, 17 bp, synthetic construct
  source 1..17: mol_type = other DNA
gctggtgtgagggcgtg

SEQ ID NO: 121259 - DNA, 17 bp, synthetic construct
  source 1..17: mol_type = other DNA
ctggtgtgagggcgtgg

SEQ ID NO: 121260 - DNA, 17 bp, synthetic construct
  source 1..17: mol_type = other DNA
tggtgtgagggcgtggg

SEQ ID NO: 121261 - DNA, 17 bp, synthetic construct
  source 1..17: mol_type = other DNA
ggtgtgagggcgtgggg

SEQ ID NO: 121262 - DNA, 17 bp, synthetic construct
  source 1..17: mol_type = other DNA
gtgtgagggcgtggggg

SEQ ID NO: 121263 - DNA, 17 bp, synthetic construct
  source 1..17: mol_type = other DNA
tgtgagggcgtgggggc

SEQ ID NO: 121264 - DNA, 17 bp, synthetic construct
  source 1..17: mol_type = other DNA
gtgagggcgtgggggct

SEQ ID NO: 121265 - DNA, 17 bp, synthetic construct
  source 1..17: mol_type = other DNA
tgagggcgtgggggctg

SEQ ID NO: 121266 - DNA, 17 bp, synthetic construct
  source 1..17: mol_type = other DNA
gagggcgtgggggctgc

SEQ ID NO: 121267 - DNA, 17 bp, synthetic construct
  source 1..17: mol_type = other DNA
agggcgtgggggctgca

SEQ ID NO: 121268 - DNA, 17 bp, synthetic construct
  source 1..17: mol_type = other DNA
gggcgtgggggctgcag

SEQ ID NO: 121269 - DNA, 17 bp, synthetic construct
  source 1..17: mol_type = other DNA
ggcgtgggggctgcagg

SEQ ID NO: 121270 - DNA, 17 bp, synthetic construct
  source 1..17: mol_type = other DNA
gcgtgggggctgcaggg

SEQ ID NO: 121271 - DNA, 17 bp, synthetic construct
  source 1..17: mol_type = other DNA
cgtgggggctgcagggc

SEQ ID NO: 121272 - DNA, 17 bp, synthetic construct
  source 1..17: mol_type = other DNA
gtgggggctgcagggct

SEQ ID NO: 121273 - DNA, 17 bp, synthetic construct
  source 1..17: mol_type = other DNA
tgggggctgcagggctg

SEQ ID NO: 121274 - DNA, 17 bp, synthetic construct
  source 1..17: mol_type = other DNA
gggggctgcagggctgg

SEQ ID NO: 121275 - DNA, 17 bp, synthetic construct
  source 1..17: mol_type = other DNA
ggggctgcagggctgga

SEQ ID NO: 121276 - DNA, 17 bp, synthetic construct
  source 1..17: mol_type = other DNA
gggctgcagggctggat

SEQ ID NO: 121277 - DNA, 17 bp, synthetic construct
  source 1..17: mol_type = other DNA
ggctgcagggctggatg

SEQ ID NO: 121278 - DNA, 17 bp, synthetic construct
  source 1..17: mol_type = other DNA
gctgcagggctggatgg

SEQ ID NO: 121279 - DNA, 17 bp, synthetic construct
  source 1..17: mol_type = other DNA
ctgcagggctggatggg

SEQ ID NO: 121280 - DNA, 17 bp, synthetic construct
  source 1..17: mol_type = other DNA
tgcagggctggatgggg

SEQ ID NO: 121281 - DNA, 17 bp, synthetic construct
  source 1..17: mol_type = other DNA
gcagggctggatgggga

SEQ ID NO: 121282 - DNA, 17 bp, synthetic construct
  source 1..17: mol_type = other DNA
cagggctggatggggag

SEQ ID NO: 121283 - DNA, 17 bp, synthetic construct
  source 1..17: mol_type = other DNA
agggctggatggggagc

SEQ ID NO: 121284 - DNA, 17 bp, synthetic construct
  source 1..17: mol_type = other DNA
gggctggatggggagca

SEQ ID NO: 121285 - DNA, 17 bp, synthetic construct
  source 1..17: mol_type = other DNA
ggctggatggggagcag

SEQ ID NO: 121286 - DNA, 17 bp, synthetic construct
  source 1..17: mol_type = other DNA
gctggatggggagcagg

SEQ ID NO: 121287 - DNA, 17 bp, synthetic construct
  source 1..17: mol_type = other DNA
ctggatggggagcaggg

SEQ ID NO: 121288 - DNA, 17 bp, synthetic construct
  source 1..17: mol_type = other DNA
tggatggggagcagggt

SEQ ID NO: 121289 - DNA, 17 bp, synthetic construct
  source 1..17: mol_type = other DNA
ggatggggagcagggtg

SEQ ID NO: 121290 - DNA, 17 bp, synthetic construct
  source 1..17: mol_type = other DNA
gatggggagcagggtgg

SEQ ID NO: 121291 - DNA, 17 bp, synthetic construct
  source 1..17: mol_type = other DNA
atggggagcagggtggg

SEQ ID NO: 121292 - DNA, 17 bp, synthetic construct
  source 1..17: mol_type = other DNA
tggggagcagggtgggg

SEQ ID NO: 121293 - DNA, 17 bp, synthetic construct
  source 1..17: mol_type = other DNA
ggggagcagggtggggt

SEQ ID NO: 121294 - DNA, 17 bp, synthetic construct
  source 1..17: mol_type = other DNA
gggagcagggtggggtg

SEQ ID NO: 121295 - DNA, 17 bp, synthetic construct
  source 1..17: mol_type = other DNA
ggagcagggtggggtgg

SEQ ID NO: 121296 - DNA, 17 bp, synthetic construct
  source 1..17: mol_type = other DNA
gagcagggtggggtgga

SEQ ID NO: 121297 - DNA, 17 bp, synthetic construct
  source 1..17: mol_type = other DNA
agcagggtggggtggag

SEQ ID NO: 121298 - DNA, 17 bp, synthetic construct
  source 1..17: mol_type = other DNA
gcagggtggggtggagt

SEQ ID NO: 121299 - DNA, 17 bp, synthetic construct
  source 1..17: mol_type = other DNA
cagggtggggtggagtg

SEQ ID NO: 121300 - DNA, 17 bp, synthetic construct
  source 1..17: mol_type = other DNA
agggtggggtggagtgg

SEQ ID NO: 121301 - DNA, 17 bp, synthetic construct
  source 1..17: mol_type = other DNA
gggtggggtggagtggg

SEQ ID NO: 121302 - DNA, 17 bp, synthetic construct
  source 1..17: mol_type = other DNA
ggtggggtggagtgggc

SEQ ID NO: 121303 - DNA, 17 bp, synthetic construct
  source 1..17: mol_type = other DNA
gtggggtggagtgggcc

SEQ ID NO: 121304 - DNA, 17 bp, synthetic construct
  source 1..17: mol_type = other DNA
tggggtggagtgggcct

SEQ ID NO: 121305 - DNA, 17 bp, synthetic construct
  source 1..17: mol_type = other DNA
ggggtggagtgggccta

SEQ ID NO: 121306 - DNA, 17 bp, synthetic construct
  source 1..17: mol_type = other DNA
gggtggagtgggcctac

SEQ ID NO: 121307 - DNA, 17 bp, synthetic construct
  source 1..17: mol_type = other DNA
ggtggagtgggcctact

SEQ ID NO: 121308 - DNA, 17 bp, synthetic construct
  source 1..17: mol_type = other DNA
gtggagtgggcctactg

SEQ ID NO: 121309 - DNA, 17 bp, synthetic construct
  source 1..17: mol_type = other DNA
tggagtgggcctactgc

SEQ ID NO: 121310 - DNA, 17 bp, synthetic construct
  source 1..17: mol_type = other DNA
ggagtgggcctactgca

SEQ ID NO: 121311 - DNA, 17 bp, synthetic construct
  source 1..17: mol_type = other DNA
gagtgggcctactgcag

SEQ ID NO: 121312 - DNA, 17 bp, synthetic construct
  source 1..17: mol_type = other DNA
agtgggcctactgcagc

SEQ ID NO: 121313 - DNA, 17 bp, synthetic construct
  source 1..17: mol_type = other DNA
gtgggcctactgcagcc

SEQ ID NO: 121314 - DNA, 17 bp, synthetic construct
  source 1..17: mol_type = other DNA
tgggcctactgcagcct

SEQ ID NO: 121315 - DNA, 17 bp, synthetic construct
  source 1..17: mol_type = other DNA
gggcctactgcagcctc

SEQ ID NO: 121316 - DNA, 17 bp, synthetic construct
  source 1..17: mol_type = other DNA
ggcctactgcagcctct

SEQ ID NO: 121317 - DNA, 17 bp, synthetic construct
  source 1..17: mol_type = other DNA
gcctactgcagcctctg

SEQ ID NO: 121318 - DNA, 17 bp, synthetic construct
  source 1..17: mol_type = other DNA
cctactgcagcctctgc

SEQ ID NO: 121319 - DNA, 17 bp, synthetic construct
  source 1..17: mol_type = other DNA
ctactgcagcctctgct

SEQ ID NO: 121320 - DNA, 17 bp, synthetic construct
  source 1..17: mol_type = other DNA
tactgcagcctctgctg

SEQ ID NO: 121321 - DNA, 17 bp, synthetic construct
  source 1..17: mol_type = other DNA
actgcagcctctgctgc

SEQ ID NO: 121322 - DNA, 17 bp, synthetic construct
  source 1..17: mol_type = other DNA
ctgcagcctctgctgct

SEQ ID NO: 121323 - DNA, 17 bp, synthetic construct
  source 1..17: mol_type = other DNA
tgcagcctctgctgctc

SEQ ID NO: 121324 - DNA, 17 bp, synthetic construct
  source 1..17: mol_type = other DNA
gcagcctctgctgctcc

SEQ ID NO: 121325 - DNA, 17 bp, synthetic construct
  source 1..17: mol_type = other DNA
cagcctctgctgctccc

SEQ ID NO: 121326 - DNA, 17 bp, synthetic construct
  source 1..17: mol_type = other DNA
agcctctgctgctcccg

SEQ ID NO: 121327 - DNA, 17 bp, synthetic construct
  source 1..17: mol_type = other DNA
gcctctgctgctcccgt

SEQ ID NO: 121328 - DNA, 17 bp, synthetic construct
  source 1..17: mol_type = other DNA
cctctgctgctcccgtg

SEQ ID NO: 121329 - DNA, 17 bp, synthetic construct
  source 1..17: mol_type = other DNA
ctctgctgctcccgtgc

SEQ ID NO: 121330 - DNA, 17 bp, synthetic construct
  source 1..17: mol_type = other DNA
tctgctgctcccgtgca

SEQ ID NO: 121331 - DNA, 17 bp, synthetic construct
  source 1..17: mol_type = other DNA
ctgctgctcccgtgcag

SEQ ID NO: 121332 - DNA, 17 bp, synthetic construct
  source 1..17: mol_type = other DNA
tgctgctcccgtgcagc

SEQ ID NO: 121333 - DNA, 17 bp, synthetic construct
  source 1..17: mol_type = other DNA
gctgctcccgtgcagcc

SEQ ID NO: 121334 - DNA, 17 bp, synthetic construct
  source 1..17: mol_type = other DNA
ctgctcccgtgcagccc

SEQ ID NO: 121335 - DNA, 17 bp, synthetic construct
  source 1..17: mol_type = other DNA
tgctcccgtgcagcccc

SEQ ID NO: 121336 - DNA, 17 bp, synthetic construct
  source 1..17: mol_type = other DNA
gctcccgtgcagcccca

SEQ ID NO: 121337 - DNA, 17 bp, synthetic construct
  source 1..17: mol_type = other DNA
ctcccgtgcagccccaa

SEQ ID NO: 121338 - DNA, 17 bp, synthetic construct
  source 1..17: mol_type = other DNA
tcccgtgcagccccaag

SEQ ID NO: 121339 - DNA, 17 bp, synthetic construct
  source 1..17: mol_type = other DNA
cccgtgcagccccaagg

SEQ ID NO: 121340 - DNA, 17 bp, synthetic construct
  source 1..17: mol_type = other DNA
ccgtgcagccccaaggt

SEQ ID NO: 121341 - DNA, 17 bp, synthetic construct
  source 1..17: mol_type = other DNA
cgtgcagccccaaggtt

SEQ ID NO: 121342 - DNA, 17 bp, synthetic construct
  source 1..17: mol_type = other DNA
gtgcagccccaaggttc

SEQ ID NO: 121343 - DNA, 17 bp, synthetic construct
  source 1..17: mol_type = other DNA
tgcagccccaaggttcc

SEQ ID NO: 121344 - DNA, 17 bp, synthetic construct
  source 1..17: mol_type = other DNA
gcagccccaaggttccc

SEQ ID NO: 121345 - DNA, 17 bp, synthetic construct
  source 1..17: mol_type = other DNA
cagccccaaggttccca

SEQ ID NO: 121346 - DNA, 17 bp, synthetic construct
  source 1..17: mol_type = other DNA
agccccaaggttcccag

SEQ ID NO: 121347 - DNA, 17 bp, synthetic construct
  source 1..17: mol_type = other DNA
gccccaaggttcccagg

SEQ ID NO: 121348 - DNA, 17 bp, synthetic construct
  source 1..17: mol_type = other DNA
ccccaaggttcccaggc

SEQ ID NO: 121349 - DNA, 17 bp, synthetic construct
  source 1..17: mol_type = other DNA
cccaaggttcccaggca

SEQ ID NO: 121350 - DNA, 17 bp, synthetic construct
  source 1..17: mol_type = other DNA
ccaaggttcccaggcag

SEQ ID NO: 121351 - DNA, 17 bp, synthetic construct
  source 1..17: mol_type = other DNA
caaggttcccaggcagc

SEQ ID NO: 121352 - DNA, 17 bp, synthetic construct
  source 1..17: mol_type = other DNA
aaggttcccaggcagcc

SEQ ID NO: 121353 - DNA, 17 bp, synthetic construct
  source 1..17: mol_type = other DNA
aggttcccaggcagccc

SEQ ID NO: 121354 - DNA, 17 bp, synthetic construct
  source 1..17: mol_type = other DNA
ggttcccaggcagcccc

SEQ ID NO: 121355 - DNA, 17 bp, synthetic construct
  source 1..17: mol_type = other DNA
gttcccaggcagcccct

SEQ ID NO: 121356 - DNA, 17 bp, synthetic construct
  source 1..17: mol_type = other DNA
ttcccaggcagcccctg

SEQ ID NO: 121357 - DNA, 17 bp, synthetic construct
  source 1..17: mol_type = other DNA
tcccaggcagcccctgt

SEQ ID NO: 121358 - DNA, 17 bp, synthetic construct
  source 1..17: mol_type = other DNA
cccaggcagcccctgtt

SEQ ID NO: 121359 - DNA, 17 bp, synthetic construct
  source 1..17: mol_type = other DNA
ccaggcagcccctgttc

SEQ ID NO: 121360 - DNA, 17 bp, synthetic construct
  source 1..17: mol_type = other DNA
caggcagcccctgttcc

SEQ ID NO: 121361 - DNA, 17 bp, synthetic construct
  source 1..17: mol_type = other DNA
aggcagcccctgttccc

SEQ ID NO: 121362 - DNA, 17 bp, synthetic construct
  source 1..17: mol_type = other DNA
ggcagcccctgttccca

SEQ ID NO: 121363 - DNA, 17 bp, synthetic construct
  source 1..17: mol_type = other DNA
gcagcccctgttcccag

SEQ ID NO: 121364 - DNA, 17 bp, synthetic construct
  source 1..17: mol_type = other DNA
cagcccctgttcccagc

SEQ ID NO: 121365 - DNA, 17 bp, synthetic construct
  source 1..17: mol_type = other DNA
agcccctgttcccagca

SEQ ID NO: 121366 - DNA, 17 bp, synthetic construct
  source 1..17: mol_type = other DNA
gcccctgttcccagcac

SEQ ID NO: 121367 - DNA, 17 bp, synthetic construct
  source 1..17: mol_type = other DNA
cccctgttcccagcact

SEQ ID NO: 121368 - DNA, 17 bp, synthetic construct
  source 1..17: mol_type = other DNA
ccctgttcccagcactt

SEQ ID NO: 121369 - DNA, 17 bp, synthetic construct
  source 1..17: mol_type = other DNA
cctgttcccagcacttc

SEQ ID NO: 121370 - DNA, 17 bp, synthetic construct
  source 1..17: mol_type = other DNA
ctgttcccagcacttcc

SEQ ID NO: 121371 - DNA, 17 bp, synthetic construct
  source 1..17: mol_type = other DNA
tgttcccagcacttcct

SEQ ID NO: 121372 - DNA, 17 bp, synthetic construct
  source 1..17: mol_type = other DNA
gttcccagcacttcctg

SEQ ID NO: 121373 - DNA, 17 bp, synthetic construct
  source 1..17: mol_type = other DNA
ttcccagcacttcctgg

SEQ ID NO: 121374 - DNA, 17 bp, synthetic construct
  source 1..17: mol_type = other DNA
tcccagcacttcctggc

SEQ ID NO: 121375 - DNA, 17 bp, synthetic construct
  source 1..17: mol_type = other DNA
cccagcacttcctggcc

SEQ ID NO: 121376 - DNA, 17 bp, synthetic construct
  source 1..17: mol_type = other DNA
ccagcacttcctggcca

SEQ ID NO: 121377 - DNA, 17 bp, synthetic construct
  source 1..17: mol_type = other DNA
cagcacttcctggccag

SEQ ID NO: 121378 - DNA, 17 bp, synthetic construct
  source 1..17: mol_type = other DNA
agcacttcctggccagc

SEQ ID NO: 121379 - DNA, 17 bp, synthetic construct
  source 1..17: mol_type = other DNA
gcacttcctggccagcc

SEQ ID NO: 121380 - DNA, 17 bp, synthetic construct
  source 1..17: mol_type = other DNA
cacttcctggccagcct

SEQ ID NO: 121381 - DNA, 17 bp, synthetic construct
  source 1..17: mol_type = other DNA
acttcctggccagcctc

SEQ ID NO: 121382 - DNA, 17 bp, synthetic construct
  source 1..17: mol_type = other DNA
cttcctggccagcctct

SEQ ID NO: 121383 - DNA, 17 bp, synthetic construct
  source 1..17: mol_type = other DNA
ttcctggccagcctctt

SEQ ID NO: 121384 - DNA, 17 bp, synthetic construct
  source 1..17: mol_type = other DNA
tcctggccagcctcttg

SEQ ID NO: 121385 - DNA, 17 bp, synthetic construct
  source 1..17: mol_type = other DNA
cctggccagcctcttgc

SEQ ID NO: 121386 - DNA, 17 bp, synthetic construct
  source 1..17: mol_type = other DNA
ctggccagcctcttgcc

SEQ ID NO: 121387 - DNA, 17 bp, synthetic construct
  source 1..17: mol_type = other DNA
tggccagcctcttgcca

SEQ ID NO: 121388 - DNA, 17 bp, synthetic construct
  source 1..17: mol_type = other DNA
ggccagcctcttgccaa

SEQ ID NO: 121389 - DNA, 17 bp, synthetic construct
  source 1..17: mol_type = other DNA
gccagcctcttgccaaa

SEQ ID NO: 121390 - DNA, 17 bp, synthetic construct
  source 1..17: mol_type = other DNA
ccagcctcttgccaaac

SEQ ID NO: 121391 - DNA, 17 bp, synthetic construct
  source 1..17: mol_type = other DNA
cagcctcttgccaaacc

SEQ ID NO: 121392 - DNA, 17 bp, synthetic construct
  source 1..17: mol_type = other DNA
agcctcttgccaaacct

SEQ ID NO: 121393 - DNA, 17 bp, synthetic construct
  source 1..17: mol_type = other DNA
gcctcttgccaaacctt

SEQ ID NO: 121394 - DNA, 17 bp, synthetic construct
  source 1..17: mol_type = other DNA
cctcttgccaaaccttc

SEQ ID NO: 121395 - DNA, 17 bp, synthetic construct
  source 1..17: mol_type = other DNA
ctcttgccaaaccttcg

SEQ ID NO: 121396 - DNA, 17 bp, synthetic construct
  source 1..17: mol_type = other DNA
tcttgccaaaccttcgc

SEQ ID NO: 121397 - DNA, 17 bp, synthetic construct
  source 1..17: mol_type = other DNA
cttgccaaaccttcgct

SEQ ID NO: 121398 - DNA, 17 bp, synthetic construct
  source 1..17: mol_type = other DNA
ttgccaaaccttcgctg

SEQ ID NO: 121399 - DNA, 17 bp, synthetic construct
  source 1..17: mol_type = other DNA
tgccaaaccttcgctga

SEQ ID NO: 121400 - DNA, 17 bp, synthetic construct
  source 1..17: mol_type = other DNA
gccaaaccttcgctgag

SEQ ID NO: 121401 - DNA, 17 bp, synthetic construct
  source 1..17: mol_type = other DNA
ccaaaccttcgctgagg

SEQ ID NO: 121402 - DNA, 17 bp, synthetic construct
  source 1..17: mol_type = other DNA
caaaccttcgctgaggg

SEQ ID NO: 121403 - DNA, 17 bp, synthetic construct
  source 1..17: mol_type = other DNA
aaaccttcgctgagggt

SEQ ID NO: 121404 - DNA, 17 bp, synthetic construct
  source 1..17: mol_type = other DNA
aaccttcgctgagggtc

SEQ ID NO: 121405 - DNA, 17 bp, synthetic construct
  source 1..17: mol_type = other DNA
accttcgctgagggtct

SEQ ID NO: 121406 - DNA, 17 bp, synthetic construct
  source 1..17: mol_type = other DNA
ccttcgctgagggtctc

SEQ ID NO: 121407 - DNA, 17 bp, synthetic construct
  source 1..17: mol_type = other DNA
cttcgctgagggtctca

SEQ ID NO: 121408 - DNA, 17 bp, synthetic construct
  source 1..17: mol_type = other DNA
ttcgctgagggtctcac

SEQ ID NO: 121409 - DNA, 17 bp, synthetic construct
  source 1..17: mol_type = other DNA
tcgctgagggtctcacg

SEQ ID NO: 121410 - DNA, 17 bp, synthetic construct
  source 1..17: mol_type = other DNA
cgctgagggtctcacgg

SEQ ID NO: 121411 - DNA, 17 bp, synthetic construct
  source 1..17: mol_type = other DNA
gctgagggtctcacgga

SEQ ID NO: 121412 - DNA, 17 bp, synthetic construct
  source 1..17: mol_type = other DNA
ctgagggtctcacggac

SEQ ID NO: 121413 - DNA, 17 bp, synthetic construct
  source 1..17: mol_type = other DNA
tgagggtctcacggacc

SEQ ID NO: 121414 - DNA, 17 bp, synthetic construct
  source 1..17: mol_type = other DNA
gagggtctcacggaccc

SEQ ID NO: 121415 - DNA, 17 bp, synthetic construct
  source 1..17: mol_type = other DNA
agggtctcacggaccca

SEQ ID NO: 121416 - DNA, 17 bp, synthetic construct
  source 1..17: mol_type = other DNA
gggtctcacggacccag

SEQ ID NO: 121417 - DNA, 17 bp, synthetic construct
  source 1..17: mol_type = other DNA
ggtctcacggacccagc

SEQ ID NO: 121418 - DNA, 17 bp, synthetic construct
  source 1..17: mol_type = other DNA
gtctcacggacccagct

SEQ ID NO: 121419 - DNA, 17 bp, synthetic construct
  source 1..17: mol_type = other DNA
tctcacggacccagctc

SEQ ID NO: 121420 - DNA, 17 bp, synthetic construct
  source 1..17: mol_type = other DNA
ctcacggacccagctca

SEQ ID NO: 121421 - DNA, 17 bp, synthetic construct
  source 1..17: mol_type = other DNA
tcacggacccagctcac

SEQ ID NO: 121422 - DNA, 17 bp, synthetic construct
  source 1..17: mol_type = other DNA
cacggacccagctcacc

SEQ ID NO: 121423 - DNA, 17 bp, synthetic construct
  source 1..17: mol_type = other DNA
acggacccagctcaccc

SEQ ID NO: 121424 - DNA, 17 bp, synthetic construct
  source 1..17: mol_type = other DNA
cggacccagctcacccc

SEQ ID NO: 121425 - DNA, 17 bp, synthetic construct
  source 1..17: mol_type = other DNA
ggacccagctcacccct

SEQ ID NO: 121426 - DNA, 17 bp, synthetic construct
  source 1..17: mol_type = other DNA
gacccagctcaccccta

SEQ ID NO: 121427 - DNA, 17 bp, synthetic construct
  source 1..17: mol_type = other DNA
acccagctcacccctaa

SEQ ID NO: 121428 - DNA, 17 bp, synthetic construct
  source 1..17: mol_type = other DNA
cccagctcacccctaac

SEQ ID NO: 121429 - DNA, 17 bp, synthetic construct
  source 1..17: mol_type = other DNA
ccagctcacccctaacg

SEQ ID NO: 121430 - DNA, 17 bp, synthetic construct
  source 1..17: mol_type = other DNA
cagctcacccctaacgc

SEQ ID NO: 121431 - DNA, 17 bp, synthetic construct
  source 1..17: mol_type = other DNA
agctcacccctaacgcc

SEQ ID NO: 121432 - DNA, 17 bp, synthetic construct
  source 1..17: mol_type = other DNA
gctcacccctaacgcca

SEQ ID NO: 121433 - DNA, 17 bp, synthetic construct
  source 1..17: mol_type = other DNA
ctcacccctaacgccag

SEQ ID NO: 121434 - DNA, 17 bp, synthetic construct
  source 1..17: mol_type = other DNA
tcacccctaacgccagc

SEQ ID NO: 121435 - DNA, 17 bp, synthetic construct
  source 1..17: mol_type = other DNA
cacccctaacgccagcc

SEQ ID NO: 121436 - DNA, 17 bp, synthetic construct
  source 1..17: mol_type = other DNA
acccctaacgccagccg

SEQ ID NO: 121437 - DNA, 17 bp, synthetic construct
  source 1..17: mol_type = other DNA
cccctaacgccagccgc

SEQ ID NO: 121438 - DNA, 17 bp, synthetic construct
  source 1..17: mol_type = other DNA
ccctaacgccagccgct

SEQ ID NO: 121439 - DNA, 17 bp, synthetic construct
  source 1..17: mol_type = other DNA
cctaacgccagccgctt

SEQ ID NO: 121440 - DNA, 17 bp, synthetic construct
  source 1..17: mol_type = other DNA
ctaacgccagccgcttg

SEQ ID NO: 121441 - DNA, 17 bp, synthetic construct
  source 1..17: mol_type = other DNA
taacgccagccgcttgt

SEQ ID NO: 121442 - DNA, 17 bp, synthetic construct
  source 1..17: mol_type = other DNA
aacgccagccgcttgtg

SEQ ID NO: 121443 - DNA, 17 bp, synthetic construct
  source 1..17: mol_type = other DNA
acgccagccgcttgtgc

SEQ ID NO: 121444 - DNA, 17 bp, synthetic construct
  source 1..17: mol_type = other DNA
cgccagccgcttgtgct

SEQ ID NO: 121445 - DNA, 17 bp, synthetic construct
  source 1..17: mol_type = other DNA
gccagccgcttgtgcta

SEQ ID NO: 121446 - DNA, 17 bp, synthetic construct
  source 1..17: mol_type = other DNA
ccagccgcttgtgctaa

SEQ ID NO: 121447 - DNA, 17 bp, synthetic construct
  source 1..17: mol_type = other DNA
cagccgcttgtgctaag

SEQ ID NO: 121448 - DNA, 17 bp, synthetic construct
  source 1..17: mol_type = other DNA
agccgcttgtgctaaga

SEQ ID NO: 121449 - DNA, 17 bp, synthetic construct
  source 1..17: mol_type = other DNA
gccgcttgtgctaagag

SEQ ID NO: 121450 - DNA, 17 bp, synthetic construct
  source 1..17: mol_type = other DNA
ccgcttgtgctaagagc

SEQ ID NO: 121451 - DNA, 17 bp, synthetic construct
  source 1..17: mol_type = other DNA
cgcttgtgctaagagcc

SEQ ID NO: 121452 - DNA, 17 bp, synthetic construct
  source 1..17: mol_type = other DNA
gcttgtgctaagagccc

SEQ ID NO: 121453 - DNA, 17 bp, synthetic construct
  source 1..17: mol_type = other DNA
cttgtgctaagagcccg

SEQ ID NO: 121454 - DNA, 17 bp, synthetic construct
  source 1..17: mol_type = other DNA
ttgtgctaagagcccgt

SEQ ID NO: 121455 - DNA, 17 bp, synthetic construct
  source 1..17: mol_type = other DNA
tgtgctaagagcccgtg

SEQ ID NO: 121456 - DNA, 17 bp, synthetic construct
  source 1..17: mol_type = other DNA
gtgctaagagcccgtgc

SEQ ID NO: 121457 - DNA, 17 bp, synthetic construct
  source 1..17: mol_type = other DNA
tgctaagagcccgtgcg

SEQ ID NO: 121458 - DNA, 17 bp, synthetic construct
  source 1..17: mol_type = other DNA
gctaagagcccgtgcgc

SEQ ID NO: 121459 - DNA, 17 bp, synthetic construct
  source 1..17: mol_type = other DNA
ctaagagcccgtgcgca

SEQ ID NO: 121460 - DNA, 17 bp, synthetic construct
  source 1..17: mol_type = other DNA
taagagcccgtgcgcac

SEQ ID NO: 121461 - DNA, 17 bp, synthetic construct
  source 1..17: mol_type = other DNA
aagagcccgtgcgcacc

SEQ ID NO: 121462 - DNA, 17 bp, synthetic construct
  source 1..17: mol_type = other DNA
agagcccgtgcgcacct

SEQ ID NO: 121463 - DNA, 17 bp, synthetic construct
  source 1..17: mol_type = other DNA
gagcccgtgcgcacctg

SEQ ID NO: 121464 - DNA, 17 bp, synthetic construct
  source 1..17: mol_type = other DNA
agcccgtgcgcacctgc

SEQ ID NO: 121465 - DNA, 17 bp, synthetic construct
  source 1..17: mol_type = other DNA
gcccgtgcgcacctgca

SEQ ID NO: 121466 - DNA, 17 bp, synthetic construct
  source 1..17: mol_type = other DNA
cccgtgcgcacctgcag

SEQ ID NO: 121467 - DNA, 17 bp, synthetic construct
  source 1..17: mol_type = other DNA
ccgtgcgcacctgcaga

SEQ ID NO: 121468 - DNA, 17 bp, synthetic construct
  source 1..17: mol_type = other DNA
cgtgcgcacctgcagag

SEQ ID NO: 121469 - DNA, 17 bp, synthetic construct
  source 1..17: mol_type = other DNA
gtgcgcacctgcagagc

SEQ ID NO: 121470 - DNA, 17 bp, synthetic construct
  source 1..17: mol_type = other DNA
tgcgcacctgcagagca

SEQ ID NO: 121471 - DNA, 17 bp, synthetic construct
  source 1..17: mol_type = other DNA
gcgcacctgcagagcac

SEQ ID NO: 121472 - DNA, 17 bp, synthetic construct
  source 1..17: mol_type = other DNA
cgcacctgcagagcact

SEQ ID NO: 121473 - DNA, 17 bp, synthetic construct
  source 1..17: mol_type = other DNA
gcacctgcagagcactg

SEQ ID NO: 121474 - DNA, 17 bp, synthetic construct
  source 1..17: mol_type = other DNA
cacctgcagagcactgg

SEQ ID NO: 121475 - DNA, 17 bp, synthetic construct
  source 1..17: mol_type = other DNA
acctgcagagcactggg

SEQ ID NO: 121476 - DNA, 17 bp, synthetic construct
  source 1..17: mol_type = other DNA
cctgcagagcactgggt

SEQ ID NO: 121477 - DNA, 17 bp, synthetic construct
  source 1..17: mol_type = other DNA
ctgcagagcactgggtg

SEQ ID NO: 121478 - DNA, 17 bp, synthetic construct
  source 1..17: mol_type = other DNA
tgcagagcactgggtgg

SEQ ID NO: 121479 - DNA, 17 bp, synthetic construct
  source 1..17: mol_type = other DNA
gcagagcactgggtggg

SEQ ID NO: 121480 - DNA, 17 bp, synthetic construct
  source 1..17: mol_type = other DNA
cagagcactgggtgggg

SEQ ID NO: 121481 - DNA, 17 bp, synthetic construct
  source 1..17: mol_type = other DNA
agagcactgggtggggc

SEQ ID NO: 121482 - DNA, 17 bp, synthetic construct
  source 1..17: mol_type = other DNA
gagcactgggtggggca

SEQ ID NO: 121483 - DNA, 17 bp, synthetic construct
  source 1..17: mol_type = other DNA
agcactgggtggggcat

SEQ ID NO: 121484 - DNA, 17 bp, synthetic construct
  source 1..17: mol_type = other DNA
gcactgggtggggcatc

SEQ ID NO: 121485 - DNA, 17 bp, synthetic construct
  source 1..17: mol_type = other DNA
cactgggtggggcatcc

SEQ ID NO: 121486 - DNA, 17 bp, synthetic construct
  source 1..17: mol_type = other DNA
actgggtggggcatccc

SEQ ID NO: 121487 - DNA, 17 bp, synthetic construct
  source 1..17: mol_type = other DNA
ctgggtggggcatccct

SEQ ID NO: 121488 - DNA, 17 bp, synthetic construct
  source 1..17: mol_type = other DNA
tgggtggggcatccctg

SEQ ID NO: 121489 - DNA, 17 bp, synthetic construct
  source 1..17: mol_type = other DNA
gggtggggcatccctgg

SEQ ID NO: 121490 - DNA, 17 bp, synthetic construct
  source 1..17: mol_type = other DNA
ggtggggcatccctggg

SEQ ID NO: 121491 - DNA, 17 bp, synthetic construct
  source 1..17: mol_type = other DNA
gtggggcatccctgggt

SEQ ID NO: 121492 - DNA, 17 bp, synthetic construct
  source 1..17: mol_type = other DNA
tggggcatccctgggtc

SEQ ID NO: 121493 - DNA, 17 bp, synthetic construct
  source 1..17: mol_type = other DNA
ggggcatccctgggtct

SEQ ID NO: 121494 - DNA, 17 bp, synthetic construct
  source 1..17: mol_type = other DNA
gggcatccctgggtctc

SEQ ID NO: 121495 - DNA, 17 bp, synthetic construct
  source 1..17: mol_type = other DNA
ggcatccctgggtctca

SEQ ID NO: 121496 - DNA, 17 bp, synthetic construct
  source 1..17: mol_type = other DNA
gcatccctgggtctcag

SEQ ID NO: 121497 - DNA, 17 bp, synthetic construct
  source 1..17: mol_type = other DNA
catccctgggtctcagg

SEQ ID NO: 121498 - DNA, 17 bp, synthetic construct
  source 1..17: mol_type = other DNA
atccctgggtctcaggc

SEQ ID NO: 121499 - DNA, 17 bp, synthetic construct
  source 1..17: mol_type = other DNA
tccctgggtctcaggcc

SEQ ID NO: 121500 - DNA, 17 bp, synthetic construct
  source 1..17: mol_type = other DNA
ccctgggtctcaggccc

SEQ ID NO: 121501 - DNA, 17 bp, synthetic construct
  source 1..17: mol_type = other DNA
cctgggtctcaggcccc

SEQ ID NO: 121502 - DNA, 17 bp, synthetic construct
  source 1..17: mol_type = other DNA
ctgggtctcaggcccct

SEQ ID NO: 121503 - DNA, 17 bp, synthetic construct
  source 1..17: mol_type = other DNA
tgggtctcaggcccctc

SEQ ID NO: 121504 - DNA, 17 bp, synthetic construct
  source 1..17: mol_type = other DNA
gggtctcaggcccctcc

SEQ ID NO: 121505 - DNA, 17 bp, synthetic construct
  source 1..17: mol_type = other DNA
ggtctcaggcccctccc

SEQ ID NO: 121506 - DNA, 17 bp, synthetic construct
  source 1..17: mol_type = other DNA
gtctcaggcccctccct

SEQ ID NO: 121507 - DNA, 17 bp, synthetic construct
  source 1..17: mol_type = other DNA
tctcaggcccctccctg

SEQ ID NO: 121508 - DNA, 17 bp, synthetic construct
  source 1..17: mol_type = other DNA
ctcaggcccctccctgg

SEQ ID NO: 121509 - DNA, 17 bp, synthetic construct
  source 1..17: mol_type = other DNA
tcaggcccctccctggg

SEQ ID NO: 121510 - DNA, 17 bp, synthetic construct
  source 1..17: mol_type = other DNA
caggcccctccctgggg

SEQ ID NO: 121511 - DNA, 17 bp, synthetic construct
  source 1..17: mol_type = other DNA
aggcccctccctggggg

SEQ ID NO: 121512 - DNA, 17 bp, synthetic construct
  source 1..17: mol_type = other DNA
ggcccctccctgggggc

SEQ ID NO: 121513 - DNA, 17 bp, synthetic construct
  source 1..17: mol_type = other DNA
gcccctccctgggggcc

SEQ ID NO: 121514 - DNA, 17 bp, synthetic construct
  source 1..17: mol_type = other DNA
cccctccctgggggcca

SEQ ID NO: 121515 - DNA, 17 bp, synthetic construct
  source 1..17: mol_type = other DNA
ccctccctgggggccac

SEQ ID NO: 121516 - DNA, 17 bp, synthetic construct
  source 1..17: mol_type = other DNA
cctccctgggggccaca

SEQ ID NO: 121517 - DNA, 17 bp, synthetic construct
  source 1..17: mol_type = other DNA
ctccctgggggccacag

SEQ ID NO: 121518 - DNA, 17 bp, synthetic construct
  source 1..17: mol_type = other DNA
tccctgggggccacagg

SEQ ID NO: 121519 - DNA, 17 bp, synthetic construct
  source 1..17: mol_type = other DNA
ccctgggggccacaggg

SEQ ID NO: 121520 - DNA, 17 bp, synthetic construct
  source 1..17: mol_type = other DNA
cctgggggccacagggt

SEQ ID NO: 121521 - DNA, 17 bp, synthetic construct
  source 1..17: mol_type = other DNA
ctgggggccacagggtc

SEQ ID NO: 121522 - DNA, 17 bp, synthetic construct
  source 1..17: mol_type = other DNA
tgggggccacagggtcg

SEQ ID NO: 121523 - DNA, 17 bp, synthetic construct
  source 1..17: mol_type = other DNA
gggggccacagggtcgg

SEQ ID NO: 121524 - DNA, 17 bp, synthetic construct
  source 1..17: mol_type = other DNA
ggggccacagggtcggc

SEQ ID NO: 121525 - DNA, 17 bp, synthetic construct
  source 1..17: mol_type = other DNA
gggccacagggtcggct

SEQ ID NO: 121526 - DNA, 17 bp, synthetic construct
  source 1..17: mol_type = other DNA
ggccacagggtcggctt

SEQ ID NO: 121527 - DNA, 17 bp, synthetic construct
  source 1..17: mol_type = other DNA
gccacagggtcggcttc

SEQ ID NO: 121528 - DNA, 17 bp, synthetic construct
  source 1..17: mol_type = other DNA
ccacagggtcggcttcc

SEQ ID NO: 121529 - DNA, 17 bp, synthetic construct
  source 1..17: mol_type = other DNA
cacagggtcggcttccg

SEQ ID NO: 121530 - DNA, 17 bp, synthetic construct
  source 1..17: mol_type = other DNA
acagggtcggcttccgg

SEQ ID NO: 121531 - DNA, 17 bp, synthetic construct
  source 1..17: mol_type = other DNA
cagggtcggcttccggc

SEQ ID NO: 121532 - DNA, 17 bp, synthetic construct
  source 1..17: mol_type = other DNA
agggtcggcttccggca

SEQ ID NO: 121533 - DNA, 17 bp, synthetic construct
  source 1..17: mol_type = other DNA
gggtcggcttccggcag

SEQ ID NO: 121534 - DNA, 17 bp, synthetic construct
  source 1..17: mol_type = other DNA
ggtcggcttccggcagc

SEQ ID NO: 121535 - DNA, 17 bp, synthetic construct
  source 1..17: mol_type = other DNA
gtcggcttccggcagcg

SEQ ID NO: 121536 - DNA, 17 bp, synthetic construct
  source 1..17: mol_type = other DNA
tcggcttccggcagcgt

SEQ ID NO: 121537 - DNA, 17 bp, synthetic construct
  source 1..17: mol_type = other DNA
cggcttccggcagcgtc

SEQ ID NO: 121538 - DNA, 17 bp, synthetic construct
  source 1..17: mol_type = other DNA
ggcttccggcagcgtct

SEQ ID NO: 121539 - DNA, 17 bp, synthetic construct
  source 1..17: mol_type = other DNA
gcttccggcagcgtctg

SEQ ID NO: 121540 - DNA, 17 bp, synthetic construct
  source 1..17: mol_type = other DNA
cttccggcagcgtctgc

SEQ ID NO: 121541 - DNA, 17 bp, synthetic construct
  source 1..17: mol_type = other DNA
ttccggcagcgtctgcc

SEQ ID NO: 121542 - DNA, 17 bp, synthetic construct
  source 1..17: mol_type = other DNA
tccggcagcgtctgcct

SEQ ID NO: 121543 - DNA, 17 bp, synthetic construct
  source 1..17: mol_type = other DNA
ccggcagcgtctgcctc

SEQ ID NO: 121544 - DNA, 17 bp, synthetic construct
  source 1..17: mol_type = other DNA
cggcagcgtctgcctcc

SEQ ID NO: 121545 - DNA, 17 bp, synthetic construct
  source 1..17: mol_type = other DNA
ggcagcgtctgcctccc

SEQ ID NO: 121546 - DNA, 17 bp, synthetic construct
  source 1..17: mol_type = other DNA
gcagcgtctgcctcccc

SEQ ID NO: 121547 - DNA, 17 bp, synthetic construct
  source 1..17: mol_type = other DNA
cagcgtctgcctcccct

SEQ ID NO: 121548 - DNA, 17 bp, synthetic construct
  source 1..17: mol_type = other DNA
agcgtctgcctcccctg

SEQ ID NO: 121549 - DNA, 17 bp, synthetic construct
  source 1..17: mol_type = other DNA
gcgtctgcctcccctgc

SEQ ID NO: 121550 - DNA, 17 bp, synthetic construct
  source 1..17: mol_type = other DNA
cgtctgcctcccctgca

SEQ ID NO: 121551 - DNA, 17 bp, synthetic construct
  source 1..17: mol_type = other DNA
gtctgcctcccctgcag

SEQ ID NO: 121552 - DNA, 17 bp, synthetic construct
  source 1..17: mol_type = other DNA
tctgcctcccctgcaga

SEQ ID NO: 121553 - DNA, 17 bp, synthetic construct
  source 1..17: mol_type = other DNA
ctgcctcccctgcagag

SEQ ID NO: 121554 - DNA, 17 bp, synthetic construct
  source 1..17: mol_type = other DNA
tgcctcccctgcagagc

SEQ ID NO: 121555 - DNA, 17 bp, synthetic construct
  source 1..17: mol_type = other DNA
gcctcccctgcagagct

SEQ ID NO: 121556 - DNA, 17 bp, synthetic construct
  source 1..17: mol_type = other DNA
cctcccctgcagagcta

SEQ ID NO: 121557 - DNA, 17 bp, synthetic construct
  source 1..17: mol_type = other DNA
ctcccctgcagagctac

SEQ ID NO: 121558 - DNA, 17 bp, synthetic construct
  source 1..17: mol_type = other DNA
tcccctgcagagctacg

SEQ ID NO: 121559 - DNA, 17 bp, synthetic construct
  source 1..17: mol_type = other DNA
cccctgcagagctacga

SEQ ID NO: 121560 - DNA, 17 bp, synthetic construct
  source 1..17: mol_type = other DNA
ccctgcagagctacgag

SEQ ID NO: 121561 - DNA, 17 bp, synthetic construct
  source 1..17: mol_type = other DNA
cctgcagagctacgagc

SEQ ID NO: 121562 - DNA, 17 bp, synthetic construct
  source 1..17: mol_type = other DNA
ctgcagagctacgagct

SEQ ID NO: 121563 - DNA, 17 bp, synthetic construct
  source 1..17: mol_type = other DNA
tgcagagctacgagctg

SEQ ID NO: 121564 - DNA, 17 bp, synthetic construct
  source 1..17: mol_type = other DNA
gcagagctacgagctga

SEQ ID NO: 121565 - DNA, 17 bp, synthetic construct
  source 1..17: mol_type = other DNA
cagagctacgagctgat

SEQ ID NO: 121566 - DNA, 17 bp, synthetic construct
  source 1..17: mol_type = other DNA
agagctacgagctgatc

SEQ ID NO: 121567 - DNA, 17 bp, synthetic construct
  source 1..17: mol_type = other DNA
gagctacgagctgatcc

SEQ ID NO: 121568 - DNA, 17 bp, synthetic construct
  source 1..17: mol_type = other DNA
agctacgagctgatcct

SEQ ID NO: 121569 - DNA, 17 bp, synthetic construct
  source 1..17: mol_type = other DNA
gctacgagctgatcctc

SEQ ID NO: 121570 - DNA, 17 bp, synthetic construct
  source 1..17: mol_type = other DNA
ctacgagctgatcctcc

SEQ ID NO: 121571 - DNA, 17 bp, synthetic construct
  source 1..17: mol_type = other DNA
tacgagctgatcctcca

SEQ ID NO: 121572 - DNA, 17 bp, synthetic construct
  source 1..17: mol_type = other DNA
acgagctgatcctccaa

SEQ ID NO: 121573 - DNA, 17 bp, synthetic construct
  source 1..17: mol_type = other DNA
cgagctgatcctccaag

SEQ ID NO: 121574 - DNA, 17 bp, synthetic construct
  source 1..17: mol_type = other DNA
gagctgatcctccaaga

SEQ ID NO: 121575 - DNA, 17 bp, synthetic construct
  source 1..17: mol_type = other DNA
agctgatcctccaagag

SEQ ID NO: 121576 - DNA, 17 bp, synthetic construct
  source 1..17: mol_type = other DNA
gctgatcctccaagagg

SEQ ID NO: 121577 - DNA, 17 bp, synthetic construct
  source 1..17: mol_type = other DNA
ctgatcctccaagaggg

SEQ ID NO: 121578 - DNA, 17 bp, synthetic construct
  source 1..17: mol_type = other DNA
tgatcctccaagagggg

SEQ ID NO: 121579 - DNA, 17 bp, synthetic construct
  source 1..17: mol_type = other DNA
gatcctccaagagggga

SEQ ID NO: 121580 - DNA, 17 bp, synthetic construct
  source 1..17: mol_type = other DNA
atcctccaagaggggac

SEQ ID NO: 121581 - DNA, 17 bp, synthetic construct
  source 1..17: mol_type = other DNA
tcctccaagaggggacc

SEQ ID NO: 121582 - DNA, 17 bp, synthetic construct
  source 1..17: mol_type = other DNA
cctccaagaggggacct

SEQ ID NO: 121583 - DNA, 17 bp, synthetic construct
  source 1..17: mol_type = other DNA
ctccaagaggggacctt

SEQ ID NO: 121584 - DNA, 17 bp, synthetic construct
  source 1..17: mol_type = other DNA
tccaagaggggaccttt

SEQ ID NO: 121585 - DNA, 17 bp, synthetic construct
  source 1..17: mol_type = other DNA
ccaagaggggaccttta

SEQ ID NO: 121586 - DNA, 17 bp, synthetic construct
  source 1..17: mol_type = other DNA
caagaggggacctttaa

SEQ ID NO: 121587 - DNA, 17 bp, synthetic construct
  source 1..17: mol_type = other DNA
aagaggggacctttaag

SEQ ID NO: 121588 - DNA, 17 bp, synthetic construct
  source 1..17: mol_type = other DNA
agaggggacctttaagg

SEQ ID NO: 121589 - DNA, 17 bp, synthetic construct
  source 1..17: mol_type = other DNA
gaggggacctttaaggc

SEQ ID NO: 121590 - DNA, 17 bp, synthetic construct
  source 1..17: mol_type = other DNA
aggggacctttaaggcg

SEQ ID NO: 121591 - DNA, 17 bp, synthetic construct
  source 1..17: mol_type = other DNA
ggggacctttaaggcgg

SEQ ID NO: 121592 - DNA, 17 bp, synthetic construct
  source 1..17: mol_type = other DNA
gggacctttaaggcggt

SEQ ID NO: 121593 - DNA, 17 bp, synthetic construct
  source 1..17: mol_type = other DNA
ggacctttaaggcggtg

SEQ ID NO: 121594 - DNA, 17 bp, synthetic construct
  source 1..17: mol_type = other DNA
gacctttaaggcggtgg

SEQ ID NO: 121595 - DNA, 17 bp, synthetic construct
  source 1..17: mol_type = other DNA
acctttaaggcggtggc

SEQ ID NO: 121596 - DNA, 17 bp, synthetic construct
  source 1..17: mol_type = other DNA
cctttaaggcggtggcg

SEQ ID NO: 121597 - DNA, 17 bp, synthetic construct
  source 1..17: mol_type = other DNA
ctttaaggcggtggcga

SEQ ID NO: 121598 - DNA, 17 bp, synthetic construct
  source 1..17: mol_type = other DNA
tttaaggcggtggcgag

SEQ ID NO: 121599 - DNA, 17 bp, synthetic construct
  source 1..17: mol_type = other DNA
ttaaggcggtggcgaga

SEQ ID NO: 121600 - DNA, 17 bp, synthetic construct
  source 1..17: mol_type = other DNA
taaggcggtggcgagag

SEQ ID NO: 121601 - DNA, 17 bp, synthetic construct
  source 1..17: mol_type = other DNA
aaggcggtggcgagagg

SEQ ID NO: 121602 - DNA, 17 bp, synthetic construct
  source 1..17: mol_type = other DNA
aggcggtggcgagaggg

SEQ ID NO: 121603 - DNA, 17 bp, synthetic construct
  source 1..17: mol_type = other DNA
ggcggtggcgagagggc

SEQ ID NO: 121604 - DNA, 17 bp, synthetic construct
  source 1..17: mol_type = other DNA
gcggtggcgagagggcc

SEQ ID NO: 121605 - DNA, 17 bp, synthetic construct
  source 1..17: mol_type = other DNA
cggtggcgagagggccg

SEQ ID NO: 121606 - DNA, 17 bp, synthetic construct
  source 1..17: mol_type = other DNA
ggtggcgagagggccgg

SEQ ID NO: 121607 - DNA, 17 bp, synthetic construct
  source 1..17: mol_type = other DNA
gtggcgagagggccggg

SEQ ID NO: 121608 - DNA, 17 bp, synthetic construct
  source 1..17: mol_type = other DNA
tggcgagagggccgggt

SEQ ID NO: 121609 - DNA, 17 bp, synthetic construct
  source 1..17: mol_type = other DNA
ggcgagagggccgggtg

SEQ ID NO: 121610 - DNA, 17 bp, synthetic construct
  source 1..17: mol_type = other DNA
gcgagagggccgggtgg

SEQ ID NO: 121611 - DNA, 17 bp, synthetic construct
  source 1..17: mol_type = other DNA
cgagagggccgggtggg

SEQ ID NO: 121612 - DNA, 17 bp, synthetic construct
  source 1..17: mol_type = other DNA
gagagggccgggtgggg

SEQ ID NO: 121613 - DNA, 17 bp, synthetic construct
  source 1..17: mol_type = other DNA
agagggccgggtgggga

SEQ ID NO: 121614 - DNA, 17 bp, synthetic construct
  source 1..17: mol_type = other DNA
gagggccgggtggggac

SEQ ID NO: 121615 - DNA, 17 bp, synthetic construct
  source 1..17: mol_type = other DNA
agggccgggtggggacc

SEQ ID NO: 121616 - DNA, 17 bp, synthetic construct
  source 1..17: mol_type = other DNA
gggccgggtggggaccc

SEQ ID NO: 121617 - DNA, 17 bp, synthetic construct
  source 1..17: mol_type = other DNA
ggccgggtggggaccca

SEQ ID NO: 121618 - DNA, 17 bp, synthetic construct
  source 1..17: mol_type = other DNA
gccgggtggggacccac

SEQ ID NO: 121619 - DNA, 17 bp, synthetic construct
  source 1..17: mol_type = other DNA
ccgggtggggacccacc

SEQ ID NO: 121620 - DNA, 17 bp, synthetic construct
  source 1..17: mol_type = other DNA
cgggtggggacccaccc

SEQ ID NO: 121621 - DNA, 17 bp, synthetic construct
  source 1..17: mol_type = other DNA
gggtggggacccaccct

SEQ ID NO: 121622 - DNA, 17 bp, synthetic construct
  source 1..17: mol_type = other DNA
ggtggggacccacccta

SEQ ID NO: 121623 - DNA, 17 bp, synthetic construct
  source 1..17: mol_type = other DNA
gtggggacccaccctac

SEQ ID NO: 121624 - DNA, 17 bp, synthetic construct
  source 1..17: mol_type = other DNA
tggggacccaccctaca

SEQ ID NO: 121625 - DNA, 17 bp, synthetic construct
  source 1..17: mol_type = other DNA
ggggacccaccctacaa

SEQ ID NO: 121626 - DNA, 17 bp, synthetic construct
  source 1..17: mol_type = other DNA
gggacccaccctacaag

SEQ ID NO: 121627 - DNA, 17 bp, synthetic construct
  source 1..17: mol_type = other DNA
ggacccaccctacaaga

SEQ ID NO: 121628 - DNA, 17 bp, synthetic construct
  source 1..17: mol_type = other DNA
gacccaccctacaagat

SEQ ID NO: 121629 - DNA, 17 bp, synthetic construct
  source 1..17: mol_type = other DNA
acccaccctacaagata

SEQ ID NO: 121630 - DNA, 17 bp, synthetic construct
  source 1..17: mol_type = other DNA
cccaccctacaagatac

SEQ ID NO: 121631 - DNA, 17 bp, synthetic construct
  source 1..17: mol_type = other DNA
ccaccctacaagatacg

SEQ ID NO: 121632 - DNA, 17 bp, synthetic construct
  source 1..17: mol_type = other DNA
caccctacaagatacgc

SEQ ID NO: 121633 - DNA, 17 bp, synthetic construct
  source 1..17: mol_type = other DNA
accctacaagatacgct

SEQ ID NO: 121634 - DNA, 17 bp, synthetic construct
  source 1..17: mol_type = other DNA
ccctacaagatacgcta

SEQ ID NO: 121635 - DNA, 17 bp, synthetic construct
  source 1..17: mol_type = other DNA
cctacaagatacgctac

SEQ ID NO: 121636 - DNA, 17 bp, synthetic construct
  source 1..17: mol_type = other DNA
ctacaagatacgctaca

SEQ ID NO: 121637 - DNA, 17 bp, synthetic construct
  source 1..17: mol_type = other DNA
tacaagatacgctacat

SEQ ID NO: 121638 - DNA, 17 bp, synthetic construct
  source 1..17: mol_type = other DNA
acaagatacgctacatg

SEQ ID NO: 121639 - DNA, 17 bp, synthetic construct
  source 1..17: mol_type = other DNA
caagatacgctacatgg

SEQ ID NO: 121640 - DNA, 17 bp, synthetic construct
  source 1..17: mol_type = other DNA
aagatacgctacatggg

SEQ ID NO: 121641 - DNA, 17 bp, synthetic construct
  source 1..17: mol_type = other DNA
agatacgctacatgggg

SEQ ID NO: 121642 - DNA, 17 bp, synthetic construct
  source 1..17: mol_type = other DNA
gatacgctacatgggga

SEQ ID NO: 121643 - DNA, 17 bp, synthetic construct
  source 1..17: mol_type = other DNA
atacgctacatggggat

SEQ ID NO: 121644 - DNA, 17 bp, synthetic construct
  source 1..17: mol_type = other DNA
tacgctacatggggatc

SEQ ID NO: 121645 - DNA, 17 bp, synthetic construct
  source 1..17: mol_type = other DNA
acgctacatggggatct

SEQ ID NO: 121646 - DNA, 17 bp, synthetic construct
  source 1..17: mol_type = other DNA
cgctacatggggatctt

SEQ ID NO: 121647 - DNA, 17 bp, synthetic construct
  source 1..17: mol_type = other DNA
gctacatggggatcttc

SEQ ID NO: 121648 - DNA, 17 bp, synthetic construct
  source 1..17: mol_type = other DNA
ctacatggggatcttcc

SEQ ID NO: 121649 - DNA, 17 bp, synthetic construct
  source 1..17: mol_type = other DNA
tacatggggatcttcct

SEQ ID NO: 121650 - DNA, 17 bp, synthetic construct
  source 1..17: mol_type = other DNA
acatggggatcttcctg

SEQ ID NO: 121651 - DNA, 17 bp, synthetic construct
  source 1..17: mol_type = other DNA
catggggatcttcctgg

SEQ ID NO: 121652 - DNA, 17 bp, synthetic construct
  source 1..17: mol_type = other DNA
atggggatcttcctggt

SEQ ID NO: 121653 - DNA, 17 bp, synthetic construct
  source 1..17: mol_type = other DNA
tggggatcttcctggtc

SEQ ID NO: 121654 - DNA, 17 bp, synthetic construct
  source 1..17: mol_type = other DNA
ggggatcttcctggtca

SEQ ID NO: 121655 - DNA, 17 bp, synthetic construct
  source 1..17: mol_type = other DNA
gggatcttcctggtcat

SEQ ID NO: 121656 - DNA, 17 bp, synthetic construct
  source 1..17: mol_type = other DNA
ggatcttcctggtcatc

SEQ ID NO: 121657 - DNA, 17 bp, synthetic construct
  source 1..17: mol_type = other DNA
gatcttcctggtcatcg

SEQ ID NO: 121658 - DNA, 17 bp, synthetic construct
  source 1..17: mol_type = other DNA
atcttcctggtcatcga

SEQ ID NO: 121659 - DNA, 17 bp, synthetic construct
  source 1..17: mol_type = other DNA
tcttcctggtcatcgag

SEQ ID NO: 121660 - DNA, 17 bp, synthetic construct
  source 1..17: mol_type = other DNA
cttcctggtcatcgaga

SEQ ID NO: 121661 - DNA, 17 bp, synthetic construct
  source 1..17: mol_type = other DNA
ttcctggtcatcgagac

SEQ ID NO: 121662 - DNA, 17 bp, synthetic construct
  source 1..17: mol_type = other DNA
tcctggtcatcgagacc

SEQ ID NO: 121663 - DNA, 17 bp, synthetic construct
  source 1..17: mol_type = other DNA
cctggtcatcgagaccc

SEQ ID NO: 121664 - DNA, 17 bp, synthetic construct
  source 1..17: mol_type = other DNA
ctggtcatcgagaccca

SEQ ID NO: 121665 - DNA, 17 bp, synthetic construct
  source 1..17: mol_type = other DNA
tggtcatcgagacccac

SEQ ID NO: 121666 - DNA, 17 bp, synthetic construct
  source 1..17: mol_type = other DNA
ggtcatcgagacccacg

SEQ ID NO: 121667 - DNA, 17 bp, synthetic construct
  source 1..17: mol_type = other DNA
gtcatcgagacccacgg

SEQ ID NO: 121668 - DNA, 17 bp, synthetic construct
  source 1..17: mol_type = other DNA
tcatcgagacccacggg

SEQ ID NO: 121669 - DNA, 17 bp, synthetic construct
  source 1..17: mol_type = other DNA
catcgagacccacggga

SEQ ID NO: 121670 - DNA, 17 bp, synthetic construct
  source 1..17: mol_type = other DNA
atcgagacccacgggat

SEQ ID NO: 121671 - DNA, 17 bp, synthetic construct
  source 1..17: mol_type = other DNA
tcgagacccacgggatg

SEQ ID NO: 121672 - DNA, 17 bp, synthetic construct
  source 1..17: mol_type = other DNA
cgagacccacgggatgg

SEQ ID NO: 121673 - DNA, 17 bp, synthetic construct
  source 1..17: mol_type = other DNA
gagacccacgggatggc

SEQ ID NO: 121674 - DNA, 17 bp, synthetic construct
  source 1..17: mol_type = other DNA
agacccacgggatggcc

SEQ ID NO: 121675 - DNA, 17 bp, synthetic construct
  source 1..17: mol_type = other DNA
gacccacgggatggccg

SEQ ID NO: 121676 - DNA, 17 bp, synthetic construct
  source 1..17: mol_type = other DNA
acccacgggatggccgt

SEQ ID NO: 121677 - DNA, 17 bp, synthetic construct
  source 1..17: mol_type = other DNA
cccacgggatggccgtg

SEQ ID NO: 121678 - DNA, 17 bp, synthetic construct
  source 1..17: mol_type = other DNA
ccacgggatggccgtgt

SEQ ID NO: 121679 - DNA, 17 bp, synthetic construct
  source 1..17: mol_type = other DNA
cacgggatggccgtgtc

SEQ ID NO: 121680 - DNA, 17 bp, synthetic construct
  source 1..17: mol_type = other DNA
acgggatggccgtgtcc

SEQ ID NO: 121681 - DNA, 17 bp, synthetic construct
  source 1..17: mol_type = other DNA
cgggatggccgtgtcct

SEQ ID NO: 121682 - DNA, 17 bp, synthetic construct
  source 1..17: mol_type = other DNA
gggatggccgtgtcctg

SEQ ID NO: 121683 - DNA, 17 bp, synthetic construct
  source 1..17: mol_type = other DNA
ggatggccgtgtcctgg

SEQ ID NO: 121684 - DNA, 17 bp, synthetic construct
  source 1..17: mol_type = other DNA
gatggccgtgtcctggg

SEQ ID NO: 121685 - DNA, 17 bp, synthetic construct
  source 1..17: mol_type = other DNA
atggccgtgtcctggga

SEQ ID NO: 121686 - DNA, 17 bp, synthetic construct
  source 1..17: mol_type = other DNA
tggccgtgtcctgggac

SEQ ID NO: 121687 - DNA, 17 bp, synthetic construct
  source 1..17: mol_type = other DNA
ggccgtgtcctgggacc

SEQ ID NO: 121688 - DNA, 17 bp, synthetic construct
  source 1..17: mol_type = other DNA
gccgtgtcctgggaccg

SEQ ID NO: 121689 - DNA, 17 bp, synthetic construct
  source 1..17: mol_type = other DNA
ccgtgtcctgggaccgg

SEQ ID NO: 121690 - DNA, 17 bp, synthetic construct
  source 1..17: mol_type = other DNA
cgtgtcctgggaccgga

SEQ ID NO: 121691 - DNA, 17 bp, synthetic construct
  source 1..17: mol_type = other DNA
gtgtcctgggaccggaa

SEQ ID NO: 121692 - DNA, 17 bp, synthetic construct
  source 1..17: mol_type = other DNA
tgtcctgggaccggaag

SEQ ID NO: 121693 - DNA, 17 bp, synthetic construct
  source 1..17: mol_type = other DNA
gtcctgggaccggaaga

SEQ ID NO: 121694 - DNA, 17 bp, synthetic construct
  source 1..17: mol_type = other DNA
tcctgggaccggaagac

SEQ ID NO: 121695 - DNA, 17 bp, synthetic construct
  source 1..17: mol_type = other DNA
cctgggaccggaagacc

SEQ ID NO: 121696 - DNA, 17 bp, synthetic construct
  source 1..17: mol_type = other DNA
ctgggaccggaagacca

SEQ ID NO: 121697 - DNA, 17 bp, synthetic construct
  source 1..17: mol_type = other DNA
tgggaccggaagaccag

SEQ ID NO: 121698 - DNA, 17 bp, synthetic construct
  source 1..17: mol_type = other DNA
gggaccggaagaccagc

SEQ ID NO: 121699 - DNA, 17 bp, synthetic construct
  source 1..17: mol_type = other DNA
ggaccggaagaccagcg

SEQ ID NO: 121700 - DNA, 17 bp, synthetic construct
  source 1..17: mol_type = other DNA
gaccggaagaccagcgt

SEQ ID NO: 121701 - DNA, 17 bp, synthetic construct
  source 1..17: mol_type = other DNA
accggaagaccagcgtg

SEQ ID NO: 121702 - DNA, 17 bp, synthetic construct
  source 1..17: mol_type = other DNA
ccggaagaccagcgtgt

SEQ ID NO: 121703 - DNA, 17 bp, synthetic construct
  source 1..17: mol_type = other DNA
cggaagaccagcgtgtt

SEQ ID NO: 121704 - DNA, 17 bp, synthetic construct
  source 1..17: mol_type = other DNA
ggaagaccagcgtgttc

SEQ ID NO: 121705 - DNA, 17 bp, synthetic construct
  source 1..17: mol_type = other DNA
gaagaccagcgtgttca

SEQ ID NO: 121706 - DNA, 17 bp, synthetic construct
  source 1..17: mol_type = other DNA
aagaccagcgtgttcat

SEQ ID NO: 121707 - DNA, 17 bp, synthetic construct
  source 1..17: mol_type = other DNA
agaccagcgtgttcatc

SEQ ID NO: 121708 - DNA, 17 bp, synthetic construct
  source 1..17: mol_type = other DNA
gaccagcgtgttcatcc

SEQ ID NO: 121709 - DNA, 17 bp, synthetic construct
  source 1..17: mol_type = other DNA
accagcgtgttcatccg

SEQ ID NO: 121710 - DNA, 17 bp, synthetic construct
  source 1..17: mol_type = other DNA
ccagcgtgttcatccga

SEQ ID NO: 121711 - DNA, 17 bp, synthetic construct
  source 1..17: mol_type = other DNA
cagcgtgttcatccgac

SEQ ID NO: 121712 - DNA, 17 bp, synthetic construct
  source 1..17: mol_type = other DNA
agcgtgttcatccgact

SEQ ID NO: 121713 - DNA, 17 bp, synthetic construct
  source 1..17: mol_type = other DNA
gcgtgttcatccgactg

SEQ ID NO: 121714 - DNA, 17 bp, synthetic construct
  source 1..17: mol_type = other DNA
cgtgttcatccgactgc

SEQ ID NO: 121715 - DNA, 17 bp, synthetic construct
  source 1..17: mol_type = other DNA
gtgttcatccgactgca

SEQ ID NO: 121716 - DNA, 17 bp, synthetic construct
  source 1..17: mol_type = other DNA
tgttcatccgactgcac

SEQ ID NO: 121717 - DNA, 17 bp, synthetic construct
  source 1..17: mol_type = other DNA
gttcatccgactgcacc

SEQ ID NO: 121718 - DNA, 17 bp, synthetic construct
  source 1..17: mol_type = other DNA
ttcatccgactgcacca

SEQ ID NO: 121719 - DNA, 17 bp, synthetic construct
  source 1..17: mol_type = other DNA
tcatccgactgcaccag

SEQ ID NO: 121720 - DNA, 17 bp, synthetic construct
  source 1..17: mol_type = other DNA
catccgactgcaccagg

SEQ ID NO: 121721 - DNA, 17 bp, synthetic construct
  source 1..17: mol_type = other DNA
atccgactgcaccagga

SEQ ID NO: 121722 - DNA, 17 bp, synthetic construct
  source 1..17: mol_type = other DNA
tccgactgcaccaggac

SEQ ID NO: 121723 - DNA, 17 bp, synthetic construct
  source 1..17: mol_type = other DNA
ccgactgcaccaggact

SEQ ID NO: 121724 - DNA, 17 bp, synthetic construct
  source 1..17: mol_type = other DNA
cgactgcaccaggacta

SEQ ID NO: 121725 - DNA, 17 bp, synthetic construct
  source 1..17: mol_type = other DNA
gactgcaccaggactac

SEQ ID NO: 121726 - DNA, 17 bp, synthetic construct
  source 1..17: mol_type = other DNA
actgcaccaggactaca

SEQ ID NO: 121727 - DNA, 17 bp, synthetic construct
  source 1..17: mol_type = other DNA
ctgcaccaggactacaa

SEQ ID NO: 121728 - DNA, 17 bp, synthetic construct
  source 1..17: mol_type = other DNA
tgcaccaggactacaag

SEQ ID NO: 121729 - DNA, 17 bp, synthetic construct
  source 1..17: mol_type = other DNA
gcaccaggactacaagg

SEQ ID NO: 121730 - DNA, 17 bp, synthetic construct
  source 1..17: mol_type = other DNA
caccaggactacaaggt

SEQ ID NO: 121731 - DNA, 17 bp, synthetic construct
  source 1..17: mol_type = other DNA
accaggactacaaggtg

SEQ ID NO: 121732 - DNA, 17 bp, synthetic construct
  source 1..17: mol_type = other DNA
ccaggactacaaggtga

SEQ ID NO: 121733 - DNA, 17 bp, synthetic construct
  source 1..17: mol_type = other DNA
caggactacaaggtgag

SEQ ID NO: 121734 - DNA, 17 bp, synthetic construct
  source 1..17: mol_type = other DNA
aggactacaaggtgagc

SEQ ID NO: 121735 - DNA, 17 bp, synthetic construct
  source 1..17: mol_type = other DNA
ggactacaaggtgagct

SEQ ID NO: 121736 - DNA, 17 bp, synthetic construct
  source 1..17: mol_type = other DNA
gactacaaggtgagctc

SEQ ID NO: 121737 - DNA, 17 bp, synthetic construct
  source 1..17: mol_type = other DNA
actacaaggtgagctcg

SEQ ID NO: 121738 - DNA, 17 bp, synthetic construct
  source 1..17: mol_type = other DNA
ctacaaggtgagctcgg

SEQ ID NO: 121739 - DNA, 17 bp, synthetic construct
  source 1..17: mol_type = other DNA
tacaaggtgagctcggg

SEQ ID NO: 121740 - DNA, 17 bp, synthetic construct
  source 1..17: mol_type = other DNA
acaaggtgagctcgggc

SEQ ID NO: 121741 - DNA, 17 bp, synthetic construct
  source 1..17: mol_type = other DNA
caaggtgagctcgggcc

SEQ ID NO: 121742 - DNA, 17 bp, synthetic construct
  source 1..17: mol_type = other DNA
aaggtgagctcgggccg

SEQ ID NO: 121743 - DNA, 17 bp, synthetic construct
  source 1..17: mol_type = other DNA
aggtgagctcgggccgt

SEQ ID NO: 121744 - DNA, 17 bp, synthetic construct
  source 1..17: mol_type = other DNA
ggtgagctcgggccgtg

SEQ ID NO: 121745 - DNA, 17 bp, synthetic construct
  source 1..17: mol_type = other DNA
gtgagctcgggccgtgc

SEQ ID NO: 121746 - DNA, 17 bp, synthetic construct
  source 1..17: mol_type = other DNA
tgagctcgggccgtgca

SEQ ID NO: 121747 - DNA, 17 bp, synthetic construct
  source 1..17: mol_type = other DNA
gagctcgggccgtgcac

SEQ ID NO: 121748 - DNA, 17 bp, synthetic construct
  source 1..17: mol_type = other DNA
agctcgggccgtgcact

SEQ ID NO: 121749 - DNA, 17 bp, synthetic construct
  source 1..17: mol_type = other DNA
gctcgggccgtgcactc

SEQ ID NO: 121750 - DNA, 17 bp, synthetic construct
  source 1..17: mol_type = other DNA
ctcgggccgtgcactcc

SEQ ID NO: 121751 - DNA, 17 bp, synthetic construct
  source 1..17: mol_type = other DNA
tcgggccgtgcactcct

SEQ ID NO: 121752 - DNA, 17 bp, synthetic construct
  source 1..17: mol_type = other DNA
cgggccgtgcactccta

SEQ ID NO: 121753 - DNA, 17 bp, synthetic construct
  source 1..17: mol_type = other DNA
gggccgtgcactcctag

SEQ ID NO: 121754 - DNA, 17 bp, synthetic construct
  source 1..17: mol_type = other DNA
ggccgtgcactcctagg

SEQ ID NO: 121755 - DNA, 17 bp, synthetic construct
  source 1..17: mol_type = other DNA
gccgtgcactcctaggc

SEQ ID NO: 121756 - DNA, 17 bp, synthetic construct
  source 1..17: mol_type = other DNA
ccgtgcactcctaggcc

SEQ ID NO: 121757 - DNA, 17 bp, synthetic construct
  source 1..17: mol_type = other DNA
cgtgcactcctaggccc

SEQ ID NO: 121758 - DNA, 17 bp, synthetic construct
  source 1..17: mol_type = other DNA
gtgcactcctaggccct

SEQ ID NO: 121759 - DNA, 17 bp, synthetic construct
  source 1..17: mol_type = other DNA
tgcactcctaggccctg

SEQ ID NO: 121760 - DNA, 17 bp, synthetic construct
  source 1..17: mol_type = other DNA
gcactcctaggccctgc

SEQ ID NO: 121761 - DNA, 17 bp, synthetic construct
  source 1..17: mol_type = other DNA
cactcctaggccctgca

SEQ ID NO: 121762 - DNA, 17 bp, synthetic construct
  source 1..17: mol_type = other DNA
actcctaggccctgcag

SEQ ID NO: 121763 - DNA, 17 bp, synthetic construct
  source 1..17: mol_type = other DNA
ctcctaggccctgcagg

SEQ ID NO: 121764 - DNA, 17 bp, synthetic construct
  source 1..17: mol_type = other DNA
tcctaggccctgcagga

SEQ ID NO: 121765 - DNA, 17 bp, synthetic construct
  source 1..17: mol_type = other DNA
cctaggccctgcaggac

SEQ ID NO: 121766 - DNA, 17 bp, synthetic construct
  source 1..17: mol_type = other DNA
ctaggccctgcaggacc

SEQ ID NO: 121767 - DNA, 17 bp, synthetic construct
  source 1..17: mol_type = other DNA
taggccctgcaggaccc

SEQ ID NO: 121768 - DNA, 17 bp, synthetic construct
  source 1..17: mol_type = other DNA
aggccctgcaggaccct

SEQ ID NO: 121769 - DNA, 17 bp, synthetic construct
  source 1..17: mol_type = other DNA
ggccctgcaggaccctc

SEQ ID NO: 121770 - DNA, 17 bp, synthetic construct
  source 1..17: mol_type = other DNA
gccctgcaggaccctct

SEQ ID NO: 121771 - DNA, 17 bp, synthetic construct
  source 1..17: mol_type = other DNA
ccctgcaggaccctctc

SEQ ID NO: 121772 - DNA, 17 bp, synthetic construct
  source 1..17: mol_type = other DNA
cctgcaggaccctctca

SEQ ID NO: 121773 - DNA, 17 bp, synthetic construct
  source 1..17: mol_type = other DNA
ctgcaggaccctctcac

SEQ ID NO: 121774 - DNA, 17 bp, synthetic construct
  source 1..17: mol_type = other DNA
tgcaggaccctctcaca

SEQ ID NO: 121775 - DNA, 17 bp, synthetic construct
  source 1..17: mol_type = other DNA
gcaggaccctctcacag

SEQ ID NO: 121776 - DNA, 17 bp, synthetic construct
  source 1..17: mol_type = other DNA
caggaccctctcacagt

SEQ ID NO: 121777 - DNA, 17 bp, synthetic construct
  source 1..17: mol_type = other DNA
aggaccctctcacagtg

SEQ ID NO: 121778 - DNA, 17 bp, synthetic construct
  source 1..17: mol_type = other DNA
ggaccctctcacagtga

SEQ ID NO: 121779 - DNA, 17 bp, synthetic construct
  source 1..17: mol_type = other DNA
gaccctctcacagtgac

SEQ ID NO: 121780 - DNA, 17 bp, synthetic construct
  source 1..17: mol_type = other DNA
accctctcacagtgaca

SEQ ID NO: 121781 - DNA, 17 bp, synthetic construct
  source 1..17: mol_type = other DNA
ccctctcacagtgacag

SEQ ID NO: 121782 - DNA, 17 bp, synthetic construct
  source 1..17: mol_type = other DNA
cctctcacagtgacaga

SEQ ID NO: 121783 - DNA, 17 bp, synthetic construct
  source 1..17: mol_type = other DNA
ctctcacagtgacagaa

SEQ ID NO: 121784 - DNA, 17 bp, synthetic construct
  source 1..17: mol_type = other DNA
tctcacagtgacagaaa

SEQ ID NO: 121785 - DNA, 17 bp, synthetic construct
  source 1..17: mol_type = other DNA
ctcacagtgacagaaac

SEQ ID NO: 121786 - DNA, 17 bp, synthetic construct
  source 1..17: mol_type = other DNA
tcacagtgacagaaacc

SEQ ID NO: 121787 - DNA, 17 bp, synthetic construct
  source 1..17: mol_type = other DNA
cacagtgacagaaaccc

SEQ ID NO: 121788 - DNA, 17 bp, synthetic construct
  source 1..17: mol_type = other DNA
acagtgacagaaaccct

SEQ ID NO: 121789 - DNA, 17 bp, synthetic construct
  source 1..17: mol_type = other DNA
cagtgacagaaaccctg

SEQ ID NO: 121790 - DNA, 17 bp, synthetic construct
  source 1..17: mol_type = other DNA
agtgacagaaaccctgg

SEQ ID NO: 121791 - DNA, 17 bp, synthetic construct
  source 1..17: mol_type = other DNA
gtgacagaaaccctggt

SEQ ID NO: 121792 - DNA, 17 bp, synthetic construct
  source 1..17: mol_type = other DNA
tgacagaaaccctggtg

SEQ ID NO: 121793 - DNA, 17 bp, synthetic construct
  source 1..17: mol_type = other DNA
gacagaaaccctggtgc

SEQ ID NO: 121794 - DNA, 17 bp, synthetic construct
  source 1..17: mol_type = other DNA
acagaaaccctggtgcc

SEQ ID NO: 121795 - DNA, 17 bp, synthetic construct
  source 1..17: mol_type = other DNA
cagaaaccctggtgcca

SEQ ID NO: 121796 - DNA, 17 bp, synthetic construct
  source 1..17: mol_type = other DNA
agaaaccctggtgccag

SEQ ID NO: 121797 - DNA, 17 bp, synthetic construct
  source 1..17: mol_type = other DNA
gaaaccctggtgccagg

SEQ ID NO: 121798 - DNA, 17 bp, synthetic construct
  source 1..17: mol_type = other DNA
aaaccctggtgccaggt

SEQ ID NO: 121799 - DNA, 17 bp, synthetic construct
  source 1..17: mol_type = other DNA
aaccctggtgccaggtg

SEQ ID NO: 121800 - DNA, 17 bp, synthetic construct
  source 1..17: mol_type = other DNA
accctggtgccaggtgg

SEQ ID NO: 121801 - DNA, 17 bp, synthetic construct
  source 1..17: mol_type = other DNA
ccctggtgccaggtggg

SEQ ID NO: 121802 - DNA, 17 bp, synthetic construct
  source 1..17: mol_type = other DNA
cctggtgccaggtgggg

SEQ ID NO: 121803 - DNA, 17 bp, synthetic construct
  source 1..17: mol_type = other DNA
ctggtgccaggtggggt

SEQ ID NO: 121804 - DNA, 17 bp, synthetic construct
  source 1..17: mol_type = other DNA
tggtgccaggtggggtc

SEQ ID NO: 121805 - DNA, 17 bp, synthetic construct
  source 1..17: mol_type = other DNA
ggtgccaggtggggtct

SEQ ID NO: 121806 - DNA, 17 bp, synthetic construct
  source 1..17: mol_type = other DNA
gtgccaggtggggtctg

SEQ ID NO: 121807 - DNA, 17 bp, synthetic construct
  source 1..17: mol_type = other DNA
tgccaggtggggtctgt

SEQ ID NO: 121808 - DNA, 17 bp, synthetic construct
  source 1..17: mol_type = other DNA
gccaggtggggtctgtg

SEQ ID NO: 121809 - DNA, 17 bp, synthetic construct
  source 1..17: mol_type = other DNA
ccaggtggggtctgtgg

SEQ ID NO: 121810 - DNA, 17 bp, synthetic construct
  source 1..17: mol_type = other DNA
caggtggggtctgtggg

SEQ ID NO: 121811 - DNA, 17 bp, synthetic construct
  source 1..17: mol_type = other DNA
aggtggggtctgtggga

SEQ ID NO: 121812 - DNA, 17 bp, synthetic construct
  source 1..17: mol_type = other DNA
ggtggggtctgtgggac

SEQ ID NO: 121813 - DNA, 17 bp, synthetic construct
  source 1..17: mol_type = other DNA
gtggggtctgtgggact

SEQ ID NO: 121814 - DNA, 17 bp, synthetic construct
  source 1..17: mol_type = other DNA
tggggtctgtgggactc

SEQ ID NO: 121815 - DNA, 17 bp, synthetic construct
  source 1..17: mol_type = other DNA
ggggtctgtgggactcg

SEQ ID NO: 121816 - DNA, 17 bp, synthetic construct
  source 1..17: mol_type = other DNA
gggtctgtgggactcgc

SEQ ID NO: 121817 - DNA, 17 bp, synthetic construct
  source 1..17: mol_type = other DNA
ggtctgtgggactcgct

SEQ ID NO: 121818 - DNA, 17 bp, synthetic construct
  source 1..17: mol_type = other DNA
gtctgtgggactcgctg

SEQ ID NO: 121819 - DNA, 17 bp, synthetic construct
  source 1..17: mol_type = other DNA
tctgtgggactcgctga

SEQ ID NO: 121820 - DNA, 17 bp, synthetic construct
  source 1..17: mol_type = other DNA
ctgtgggactcgctgac

SEQ ID NO: 121821 - DNA, 17 bp, synthetic construct
  source 1..17: mol_type = other DNA
tgtgggactcgctgacc

SEQ ID NO: 121822 - DNA, 17 bp, synthetic construct
  source 1..17: mol_type = other DNA
gtgggactcgctgaccc

SEQ ID NO: 121823 - DNA, 17 bp, synthetic construct
  source 1..17: mol_type = other DNA
tgggactcgctgacccg

SEQ ID NO: 121824 - DNA, 17 bp, synthetic construct
  source 1..17: mol_type = other DNA
gggactcgctgacccgt

SEQ ID NO: 121825 - DNA, 17 bp, synthetic construct
  source 1..17: mol_type = other DNA
ggactcgctgacccgtg

SEQ ID NO: 121826 - DNA, 17 bp, synthetic construct
  source 1..17: mol_type = other DNA
gactcgctgacccgtgg

SEQ ID NO: 121827 - DNA, 17 bp, synthetic construct
  source 1..17: mol_type = other DNA
actcgctgacccgtggg

SEQ ID NO: 121828 - DNA, 17 bp, synthetic construct
  source 1..17: mol_type = other DNA
ctcgctgacccgtgggt

SEQ ID NO: 121829 - DNA, 17 bp, synthetic construct
  source 1..17: mol_type = other DNA
tcgctgacccgtgggtg

SEQ ID NO: 121830 - DNA, 17 bp, synthetic construct
  source 1..17: mol_type = other DNA
cgctgacccgtgggtgc

SEQ ID NO: 121831 - DNA, 17 bp, synthetic construct
  source 1..17: mol_type = other DNA
gctgacccgtgggtgcg

SEQ ID NO: 121832 - DNA, 17 bp, synthetic construct
  source 1..17: mol_type = other DNA
ctgacccgtgggtgcgt

SEQ ID NO: 121833 - DNA, 17 bp, synthetic construct
  source 1..17: mol_type = other DNA
tgacccgtgggtgcgtg

SEQ ID NO: 121834 - DNA, 17 bp, synthetic construct
  source 1..17: mol_type = other DNA
gacccgtgggtgcgtga

SEQ ID NO: 121835 - DNA, 17 bp, synthetic construct
  source 1..17: mol_type = other DNA
acccgtgggtgcgtgag

SEQ ID NO: 121836 - DNA, 17 bp, synthetic construct
  source 1..17: mol_type = other DNA
cccgtgggtgcgtgagc

SEQ ID NO: 121837 - DNA, 17 bp, synthetic construct
  source 1..17: mol_type = other DNA
ccgtgggtgcgtgagcc

SEQ ID NO: 121838 - DNA, 17 bp, synthetic construct
  source 1..17: mol_type = other DNA
cgtgggtgcgtgagcct

SEQ ID NO: 121839 - DNA, 17 bp, synthetic construct
  source 1..17: mol_type = other DNA
gtgggtgcgtgagcctg

SEQ ID NO: 121840 - DNA, 17 bp, synthetic construct
  source 1..17: mol_type = other DNA
tgggtgcgtgagcctgg

SEQ ID NO: 121841 - DNA, 17 bp, synthetic construct
  source 1..17: mol_type = other DNA
gggtgcgtgagcctggc

SEQ ID NO: 121842 - DNA, 17 bp, synthetic construct
  source 1..17: mol_type = other DNA
ggtgcgtgagcctggct

SEQ ID NO: 121843 - DNA, 17 bp, synthetic construct
  source 1..17: mol_type = other DNA
gtgcgtgagcctggctg

SEQ ID NO: 121844 - DNA, 17 bp, synthetic construct
  source 1..17: mol_type = other DNA
tgcgtgagcctggctgg

SEQ ID NO: 121845 - DNA, 17 bp, synthetic construct
  source 1..17: mol_type = other DNA
gcgtgagcctggctggt

SEQ ID NO: 121846 - DNA, 17 bp, synthetic construct
  source 1..17: mol_type = other DNA
cgtgagcctggctggtg

SEQ ID NO: 121847 - DNA, 17 bp, synthetic construct
  source 1..17: mol_type = other DNA
gtgagcctggctggtga

SEQ ID NO: 121848 - DNA, 17 bp, synthetic construct
  source 1..17: mol_type = other DNA
tgagcctggctggtgag

SEQ ID NO: 121849 - DNA, 17 bp, synthetic construct
  source 1..17: mol_type = other DNA
gagcctggctggtgagg

SEQ ID NO: 121850 - DNA, 17 bp, synthetic construct
  source 1..17: mol_type = other DNA
agcctggctggtgaggg

SEQ ID NO: 121851 - DNA, 17 bp, synthetic construct
  source 1..17: mol_type = other DNA
gcctggctggtgagggc

SEQ ID NO: 121852 - DNA, 17 bp, synthetic construct
  source 1..17: mol_type = other DNA
cctggctggtgagggcc

SEQ ID NO: 121853 - DNA, 17 bp, synthetic construct
  source 1..17: mol_type = other DNA
ctggctggtgagggccc

SEQ ID NO: 121854 - DNA, 17 bp, synthetic construct
  source 1..17: mol_type = other DNA
tggctggtgagggccct

SEQ ID NO: 121855 - DNA, 17 bp, synthetic construct
  source 1..17: mol_type = other DNA
ggctggtgagggccctg

SEQ ID NO: 121856 - DNA, 17 bp, synthetic construct
  source 1..17: mol_type = other DNA
gctggtgagggccctgc

SEQ ID NO: 121857 - DNA, 17 bp, synthetic construct
  source 1..17: mol_type = other DNA
ctggtgagggccctgcc

SEQ ID NO: 121858 - DNA, 17 bp, synthetic construct
  source 1..17: mol_type = other DNA
tggtgagggccctgcct

SEQ ID NO: 121859 - DNA, 17 bp, synthetic construct
  source 1..17: mol_type = other DNA
ggtgagggccctgcctg

SEQ ID NO: 121860 - DNA, 17 bp, synthetic construct
  source 1..17: mol_type = other DNA
gtgagggccctgcctgt

SEQ ID NO: 121861 - DNA, 17 bp, synthetic construct
  source 1..17: mol_type = other DNA
tgagggccctgcctgtg

SEQ ID NO: 121862 - DNA, 17 bp, synthetic construct
  source 1..17: mol_type = other DNA
gagggccctgcctgtgg

SEQ ID NO: 121863 - DNA, 17 bp, synthetic construct
  source 1..17: mol_type = other DNA
agggccctgcctgtggc

SEQ ID NO: 121864 - DNA, 17 bp, synthetic construct
  source 1..17: mol_type = other DNA
gggccctgcctgtggcc

SEQ ID NO: 121865 - DNA, 17 bp, synthetic construct
  source 1..17: mol_type = other DNA
ggccctgcctgtggcct

SEQ ID NO: 121866 - DNA, 17 bp, synthetic construct
  source 1..17: mol_type = other DNA
gccctgcctgtggcctc

SEQ ID NO: 121867 - DNA, 17 bp, synthetic construct
  source 1..17: mol_type = other DNA
ccctgcctgtggcctcc

SEQ ID NO: 121868 - DNA, 17 bp, synthetic construct
  source 1..17: mol_type = other DNA
cctgcctgtggcctcca

SEQ ID NO: 121869 - DNA, 17 bp, synthetic construct
  source 1..17: mol_type = other DNA
ctgcctgtggcctccac

SEQ ID NO: 121870 - DNA, 17 bp, synthetic construct
  source 1..17: mol_type = other DNA
tgcctgtggcctccaca

SEQ ID NO: 121871 - DNA, 17 bp, synthetic construct
  source 1..17: mol_type = other DNA
gcctgtggcctccacag

SEQ ID NO: 121872 - DNA, 17 bp, synthetic construct
  source 1..17: mol_type = other DNA
cctgtggcctccacagt

SEQ ID NO: 121873 - DNA, 17 bp, synthetic construct
  source 1..17: mol_type = other DNA
ctgtggcctccacagtg

SEQ ID NO: 121874 - DNA, 17 bp, synthetic construct
  source 1..17: mol_type = other DNA
tgtggcctccacagtgg

SEQ ID NO: 121875 - DNA, 17 bp, synthetic construct
  source 1..17: mol_type = other DNA
gtggcctccacagtggg

SEQ ID NO: 121876 - DNA, 17 bp, synthetic construct
  source 1..17: mol_type = other DNA
tggcctccacagtgggc

SEQ ID NO: 121877 - DNA, 17 bp, synthetic construct
  source 1..17: mol_type = other DNA
ggcctccacagtgggca

SEQ ID NO: 121878 - DNA, 17 bp, synthetic construct
  source 1..17: mol_type = other DNA
gcctccacagtgggcag

SEQ ID NO: 121879 - DNA, 17 bp, synthetic construct
  source 1..17: mol_type = other DNA
cctccacagtgggcaga

SEQ ID NO: 121880 - DNA, 17 bp, synthetic construct
  source 1..17: mol_type = other DNA
ctccacagtgggcagag

SEQ ID NO: 121881 - DNA, 17 bp, synthetic construct
  source 1..17: mol_type = other DNA
tccacagtgggcagagg

SEQ ID NO: 121882 - DNA, 17 bp, synthetic construct
  source 1..17: mol_type = other DNA
ccacagtgggcagagga

SEQ ID NO: 121883 - DNA, 17 bp, synthetic construct
  source 1..17: mol_type = other DNA
cacagtgggcagaggat

SEQ ID NO: 121884 - DNA, 17 bp, synthetic construct
  source 1..17: mol_type = other DNA
acagtgggcagaggatt

SEQ ID NO: 121885 - DNA, 17 bp, synthetic construct
  source 1..17: mol_type = other DNA
cagtgggcagaggattt

SEQ ID NO: 121886 - DNA, 17 bp, synthetic construct
  source 1..17: mol_type = other DNA
agtgggcagaggatttt

SEQ ID NO: 121887 - DNA, 17 bp, synthetic construct
  source 1..17: mol_type = other DNA
gtgggcagaggattttg

SEQ ID NO: 121888 - DNA, 17 bp, synthetic construct
  source 1..17: mol_type = other DNA
tgggcagaggattttgc

SEQ ID NO: 121889 - DNA, 17 bp, synthetic construct
  source 1..17: mol_type = other DNA
gggcagaggattttgca

SEQ ID NO: 121890 - DNA, 17 bp, synthetic construct
  source 1..17: mol_type = other DNA
ggcagaggattttgcag

SEQ ID NO: 121891 - DNA, 17 bp, synthetic construct
  source 1..17: mol_type = other DNA
gcagaggattttgcagg

SEQ ID NO: 121892 - DNA, 17 bp, synthetic construct
  source 1..17: mol_type = other DNA
cagaggattttgcaggg

SEQ ID NO: 121893 - DNA, 17 bp, synthetic construct
  source 1..17: mol_type = other DNA
agaggattttgcaggga

SEQ ID NO: 121894 - DNA, 17 bp, synthetic construct
  source 1..17: mol_type = other DNA
gaggattttgcagggaa

SEQ ID NO: 121895 - DNA, 17 bp, synthetic construct
  source 1..17: mol_type = other DNA
aggattttgcagggaag

SEQ ID NO: 121896 - DNA, 17 bp, synthetic construct
  source 1..17: mol_type = other DNA
ggattttgcagggaagc

SEQ ID NO: 121897 - DNA, 17 bp, synthetic construct
  source 1..17: mol_type = other DNA
gattttgcagggaagca

SEQ ID NO: 121898 - DNA, 17 bp, synthetic construct
  source 1..17: mol_type = other DNA
attttgcagggaagcag

SEQ ID NO: 121899 - DNA, 17 bp, synthetic construct
  source 1..17: mol_type = other DNA
ttttgcagggaagcagg

SEQ ID NO: 121900 - DNA, 17 bp, synthetic construct
  source 1..17: mol_type = other DNA
tttgcagggaagcaggt

SEQ ID NO: 121901 - DNA, 17 bp, synthetic construct
  source 1..17: mol_type = other DNA
ttgcagggaagcaggtg

SEQ ID NO: 121902 - DNA, 17 bp, synthetic construct
  source 1..17: mol_type = other DNA
tgcagggaagcaggtgc

SEQ ID NO: 121903 - DNA, 17 bp, synthetic construct
  source 1..17: mol_type = other DNA
gcagggaagcaggtgcc

SEQ ID NO: 121904 - DNA, 17 bp, synthetic construct
  source 1..17: mol_type = other DNA
cagggaagcaggtgcca

SEQ ID NO: 121905 - DNA, 17 bp, synthetic construct
  source 1..17: mol_type = other DNA
agggaagcaggtgccac

SEQ ID NO: 121906 - DNA, 17 bp, synthetic construct
  source 1..17: mol_type = other DNA
gggaagcaggtgccacc

SEQ ID NO: 121907 - DNA, 17 bp, synthetic construct
  source 1..17: mol_type = other DNA
ggaagcaggtgccaccc

SEQ ID NO: 121908 - DNA, 17 bp, synthetic construct
  source 1..17: mol_type = other DNA
gaagcaggtgccaccca

SEQ ID NO: 121909 - DNA, 17 bp, synthetic construct
  source 1..17: mol_type = other DNA
aagcaggtgccacccag

SEQ ID NO: 121910 - DNA, 17 bp, synthetic construct
  source 1..17: mol_type = other DNA
agcaggtgccacccagc

SEQ ID NO: 121911 - DNA, 17 bp, synthetic construct
  source 1..17: mol_type = other DNA
gcaggtgccacccagcg

SEQ ID NO: 121912 - DNA, 17 bp, synthetic construct
  source 1..17: mol_type = other DNA
caggtgccacccagcgg

SEQ ID NO: 121913 - DNA, 17 bp, synthetic construct
  source 1..17: mol_type = other DNA
aggtgccacccagcggc

SEQ ID NO: 121914 - DNA, 17 bp, synthetic construct
  source 1..17: mol_type = other DNA
ggtgccacccagcggcc

SEQ ID NO: 121915 - DNA, 17 bp, synthetic construct
  source 1..17: mol_type = other DNA
gtgccacccagcggccc

SEQ ID NO: 121916 - DNA, 17 bp, synthetic construct
  source 1..17: mol_type = other DNA
tgccacccagcggccca

SEQ ID NO: 121917 - DNA, 17 bp, synthetic construct
  source 1..17: mol_type = other DNA
gccacccagcggcccac

SEQ ID NO: 121918 - DNA, 17 bp, synthetic construct
  source 1..17: mol_type = other DNA
ccacccagcggcccacc

SEQ ID NO: 121919 - DNA, 17 bp, synthetic construct
  source 1..17: mol_type = other DNA
cacccagcggcccaccc

SEQ ID NO: 121920 - DNA, 17 bp, synthetic construct
  source 1..17: mol_type = other DNA
acccagcggcccaccca

SEQ ID NO: 121921 - DNA, 17 bp, synthetic construct
  source 1..17: mol_type = other DNA
cccagcggcccacccag

SEQ ID NO: 121922 - DNA, 17 bp, synthetic construct
  source 1..17: mol_type = other DNA
ccagcggcccacccagg

SEQ ID NO: 121923 - DNA, 17 bp, synthetic construct
  source 1..17: mol_type = other DNA
cagcggcccacccaggg

SEQ ID NO: 121924 - DNA, 17 bp, synthetic construct
  source 1..17: mol_type = other DNA
agcggcccacccaggga

SEQ ID NO: 121925 - DNA, 17 bp, synthetic construct
  source 1..17: mol_type = other DNA
gcggcccacccagggac

SEQ ID NO: 121926 - DNA, 17 bp, synthetic construct
  source 1..17: mol_type = other DNA
cggcccacccagggacc

SEQ ID NO: 121927 - DNA, 17 bp, synthetic construct
  source 1..17: mol_type = other DNA
ggcccacccagggaccc

SEQ ID NO: 121928 - DNA, 17 bp, synthetic construct
  source 1..17: mol_type = other DNA
gcccacccagggaccca

SEQ ID NO: 121929 - DNA, 17 bp, synthetic construct
  source 1..17: mol_type = other DNA
cccacccagggacccac

SEQ ID NO: 121930 - DNA, 17 bp, synthetic construct
  source 1..17: mol_type = other DNA
ccacccagggacccact

SEQ ID NO: 121931 - DNA, 17 bp, synthetic construct
  source 1..17: mol_type = other DNA
cacccagggacccactg

SEQ ID NO: 121932 - DNA, 17 bp, synthetic construct
  source 1..17: mol_type = other DNA
acccagggacccactgc

SEQ ID NO: 121933 - DNA, 17 bp, synthetic construct
  source 1..17: mol_type = other DNA
cccagggacccactgca

SEQ ID NO: 121934 - DNA, 17 bp, synthetic construct
  source 1..17: mol_type = other DNA
ccagggacccactgcac

SEQ ID NO: 121935 - DNA, 17 bp, synthetic construct
  source 1..17: mol_type = other DNA
cagggacccactgcaca

SEQ ID NO: 121936 - DNA, 17 bp, synthetic construct
  source 1..17: mol_type = other DNA
agggacccactgcacac

SEQ ID NO: 121937 - DNA, 17 bp, synthetic construct
  source 1..17: mol_type = other DNA
gggacccactgcacacc

SEQ ID NO: 121938 - DNA, 17 bp, synthetic construct
  source 1..17: mol_type = other DNA
ggacccactgcacacct

SEQ ID NO: 121939 - DNA, 17 bp, synthetic construct
  source 1..17: mol_type = other DNA
gacccactgcacacctg

SEQ ID NO: 121940 - DNA, 17 bp, synthetic construct
  source 1..17: mol_type = other DNA
acccactgcacacctgt

SEQ ID NO: 121941 - DNA, 17 bp, synthetic construct
  source 1..17: mol_type = other DNA
cccactgcacacctgtc

SEQ ID NO: 121942 - DNA, 17 bp, synthetic construct
  source 1..17: mol_type = other DNA
ccactgcacacctgtct

SEQ ID NO: 121943 - DNA, 17 bp, synthetic construct
  source 1..17: mol_type = other DNA
cactgcacacctgtctc

SEQ ID NO: 121944 - DNA, 17 bp, synthetic construct
  source 1..17: mol_type = other DNA
actgcacacctgtctcc

SEQ ID NO: 121945 - DNA, 17 bp, synthetic construct
  source 1..17: mol_type = other DNA
ctgcacacctgtctcct

SEQ ID NO: 121946 - DNA, 17 bp, synthetic construct
  source 1..17: mol_type = other DNA
tgcacacctgtctccta

SEQ ID NO: 121947 - DNA, 17 bp, synthetic construct
  source 1..17: mol_type = other DNA
gcacacctgtctcctac

SEQ ID NO: 121948 - DNA, 17 bp, synthetic construct
  source 1..17: mol_type = other DNA
cacacctgtctcctaca

SEQ ID NO: 121949 - DNA, 17 bp, synthetic construct
  source 1..17: mol_type = other DNA
acacctgtctcctacaa

SEQ ID NO: 121950 - DNA, 17 bp, synthetic construct
  source 1..17: mol_type = other DNA
cacctgtctcctacaag

SEQ ID NO: 121951 - DNA, 17 bp, synthetic construct
  source 1..17: mol_type = other DNA
acctgtctcctacaagt

SEQ ID NO: 121952 - DNA, 17 bp, synthetic construct
  source 1..17: mol_type = other DNA
cctgtctcctacaagtt

SEQ ID NO: 121953 - DNA, 17 bp, synthetic construct
  source 1..17: mol_type = other DNA
ctgtctcctacaagttc

SEQ ID NO: 121954 - DNA, 17 bp, synthetic construct
  source 1..17: mol_type = other DNA
tgtctcctacaagttca

SEQ ID NO: 121955 - DNA, 17 bp, synthetic construct
  source 1..17: mol_type = other DNA
gtctcctacaagttcac

SEQ ID NO: 121956 - DNA, 17 bp, synthetic construct
  source 1..17: mol_type = other DNA
tctcctacaagttcacc

SEQ ID NO: 121957 - DNA, 17 bp, synthetic construct
  source 1..17: mol_type = other DNA
ctcctacaagttcacca

SEQ ID NO: 121958 - DNA, 17 bp, synthetic construct
  source 1..17: mol_type = other DNA
tcctacaagttcaccag

SEQ ID NO: 121959 - DNA, 17 bp, synthetic construct
  source 1..17: mol_type = other DNA
cctacaagttcaccagg

SEQ ID NO: 121960 - DNA, 17 bp, synthetic construct
  source 1..17: mol_type = other DNA
ctacaagttcaccaggc

SEQ ID NO: 121961 - DNA, 17 bp, synthetic construct
  source 1..17: mol_type = other DNA
tacaagttcaccaggca

SEQ ID NO: 121962 - DNA, 17 bp, synthetic construct
  source 1..17: mol_type = other DNA
acaagttcaccaggcac

SEQ ID NO: 121963 - DNA, 17 bp, synthetic construct
  source 1..17: mol_type = other DNA
caagttcaccaggcact

SEQ ID NO: 121964 - DNA, 17 bp, synthetic construct
  source 1..17: mol_type = other DNA
aagttcaccaggcactg

SEQ ID NO: 121965 - DNA, 17 bp, synthetic construct
  source 1..17: mol_type = other DNA
agttcaccaggcactgc

SEQ ID NO: 121966 - DNA, 17 bp, synthetic construct
  source 1..17: mol_type = other DNA
gttcaccaggcactgcc

SEQ ID NO: 121967 - DNA, 17 bp, synthetic construct
  source 1..17: mol_type = other DNA
ttcaccaggcactgcct

SEQ ID NO: 121968 - DNA, 17 bp, synthetic construct
  source 1..17: mol_type = other DNA
tcaccaggcactgcctg

SEQ ID NO: 121969 - DNA, 17 bp, synthetic construct
  source 1..17: mol_type = other DNA
caccaggcactgcctgg

SEQ ID NO: 121970 - DNA, 17 bp, synthetic construct
  source 1..17: mol_type = other DNA
accaggcactgcctggg

SEQ ID NO: 121971 - DNA, 17 bp, synthetic construct
  source 1..17: mol_type = other DNA
ccaggcactgcctgggg

SEQ ID NO: 121972 - DNA, 17 bp, synthetic construct
  source 1..17: mol_type = other DNA
caggcactgcctgggga

SEQ ID NO: 121973 - DNA, 17 bp, synthetic construct
  source 1..17: mol_type = other DNA
aggcactgcctggggaa

SEQ ID NO: 121974 - DNA, 17 bp, synthetic construct
  source 1..17: mol_type = other DNA
ggcactgcctggggaac

SEQ ID NO: 121975 - DNA, 17 bp, synthetic construct
  source 1..17: mol_type = other DNA
gcactgcctggggaacc

SEQ ID NO: 121976 - DNA, 17 bp, synthetic construct
  source 1..17: mol_type = other DNA
cactgcctggggaaccg

SEQ ID NO: 121977 - DNA, 17 bp, synthetic construct
  source 1..17: mol_type = other DNA
actgcctggggaaccgg

SEQ ID NO: 121978 - DNA, 17 bp, synthetic construct
  source 1..17: mol_type = other DNA
ctgcctggggaaccggc

SEQ ID NO: 121979 - DNA, 17 bp, synthetic construct
  source 1..17: mol_type = other DNA
tgcctggggaaccggct

SEQ ID NO: 121980 - DNA, 17 bp, synthetic construct
  source 1..17: mol_type = other DNA
gcctggggaaccggctg

SEQ ID NO: 121981 - DNA, 17 bp, synthetic construct
  source 1..17: mol_type = other DNA
cctggggaaccggctgc

SEQ ID NO: 121982 - DNA, 17 bp, synthetic construct
  source 1..17: mol_type = other DNA
ctggggaaccggctgcc

SEQ ID NO: 121983 - DNA, 17 bp, synthetic construct
  source 1..17: mol_type = other DNA
tggggaaccggctgccc

SEQ ID NO: 121984 - DNA, 17 bp, synthetic construct
  source 1..17: mol_type = other DNA
ggggaaccggctgccct

SEQ ID NO: 121985 - DNA, 17 bp, synthetic construct
  source 1..17: mol_type = other DNA
gggaaccggctgccctc

SEQ ID NO: 121986 - DNA, 17 bp, synthetic construct
  source 1..17: mol_type = other DNA
ggaaccggctgccctcc

SEQ ID NO: 121987 - DNA, 17 bp, synthetic construct
  source 1..17: mol_type = other DNA
gaaccggctgccctccc

SEQ ID NO: 121988 - DNA, 17 bp, synthetic construct
  source 1..17: mol_type = other DNA
aaccggctgccctccct

SEQ ID NO: 121989 - DNA, 17 bp, synthetic construct
  source 1..17: mol_type = other DNA
accggctgccctccctc

SEQ ID NO: 121990 - DNA, 17 bp, synthetic construct
  source 1..17: mol_type = other DNA
ccggctgccctccctcc

SEQ ID NO: 121991 - DNA, 17 bp, synthetic construct
  source 1..17: mol_type = other DNA
cggctgccctccctcca

SEQ ID NO: 121992 - DNA, 17 bp, synthetic construct
  source 1..17: mol_type = other DNA
ggctgccctccctccat

SEQ ID NO: 121993 - DNA, 17 bp, synthetic construct
  source 1..17: mol_type = other DNA
gctgccctccctccatc

SEQ ID NO: 121994 - DNA, 17 bp, synthetic construct
  source 1..17: mol_type = other DNA
ctgccctccctccatcc

SEQ ID NO: 121995 - DNA, 17 bp, synthetic construct
  source 1..17: mol_type = other DNA
tgccctccctccatccc

SEQ ID NO: 121996 - DNA, 17 bp, synthetic construct
  source 1..17: mol_type = other DNA
gccctccctccatcccc

SEQ ID NO: 121997 - DNA, 17 bp, synthetic construct
  source 1..17: mol_type = other DNA
ccctccctccatccccc

SEQ ID NO: 121998 - DNA, 17 bp, synthetic construct
  source 1..17: mol_type = other DNA
cctccctccatcccccg

SEQ ID NO: 121999 - DNA, 17 bp, synthetic construct
  source 1..17: mol_type = other DNA
ctccctccatcccccga

SEQ ID NO: 122000 - DNA, 17 bp, synthetic construct
  source 1..17: mol_type = other DNA
tccctccatcccccgag

SEQ ID NO: 122001 - DNA, 17 bp, synthetic construct
  source 1..17: mol_type = other DNA
ccctccatcccccgagg

SEQ ID NO: 122002 - DNA, 17 bp, synthetic construct
  source 1..17: mol_type = other DNA
cctccatcccccgaggg

SEQ ID NO: 122003 - DNA, 17 bp, synthetic construct
  source 1..17: mol_type = other DNA
ctccatcccccgagggc

SEQ ID NO: 122004 - DNA, 17 bp, synthetic construct
  source 1..17: mol_type = other DNA
tccatcccccgagggct

SEQ ID NO: 122005 - DNA, 17 bp, synthetic construct
  source 1..17: mol_type = other DNA
ccatcccccgagggctc

SEQ ID NO: 122006 - DNA, 17 bp, synthetic construct
  source 1..17: mol_type = other DNA
catcccccgagggctct

SEQ ID NO: 122007 - DNA, 17 bp, synthetic construct
  source 1..17: mol_type = other DNA
atcccccgagggctctg

SEQ ID NO: 122008 - DNA, 17 bp, synthetic construct
  source 1..17: mol_type = other DNA
tcccccgagggctctgg

SEQ ID NO: 122009 - DNA, 17 bp, synthetic construct
  source 1..17: mol_type = other DNA
cccccgagggctctgga

SEQ ID NO: 122010 - DNA, 17 bp, synthetic construct
  source 1..17: mol_type = other DNA
ccccgagggctctggag

SEQ ID NO: 122011 - DNA, 17 bp, synthetic construct
  source 1..17: mol_type = other DNA
cccgagggctctggagc

SEQ ID NO: 122012 - DNA, 17 bp, synthetic construct
  source 1..17: mol_type = other DNA
ccgagggctctggagcc

SEQ ID NO: 122013 - DNA, 17 bp, synthetic construct
  source 1..17: mol_type = other DNA
cgagggctctggagccc

SEQ ID NO: 122014 - DNA, 17 bp, synthetic construct
  source 1..17: mol_type = other DNA
gagggctctggagccca

SEQ ID NO: 122015 - DNA, 17 bp, synthetic construct
  source 1..17: mol_type = other DNA
agggctctggagcccag

SEQ ID NO: 122016 - DNA, 17 bp, synthetic construct
  source 1..17: mol_type = other DNA
gggctctggagcccagg

SEQ ID NO: 122017 - DNA, 17 bp, synthetic construct
  source 1..17: mol_type = other DNA
ggctctggagcccaggg

SEQ ID NO: 122018 - DNA, 17 bp, synthetic construct
  source 1..17: mol_type = other DNA
gctctggagcccagggt

SEQ ID NO: 122019 - DNA, 17 bp, synthetic construct
  source 1..17: mol_type = other DNA
ctctggagcccagggtg

SEQ ID NO: 122020 - DNA, 17 bp, synthetic construct
  source 1..17: mol_type = other DNA
tctggagcccagggtgg

SEQ ID NO: 122021 - DNA, 17 bp, synthetic construct
  source 1..17: mol_type = other DNA
ctggagcccagggtggg

SEQ ID NO: 122022 - DNA, 17 bp, synthetic construct
  source 1..17: mol_type = other DNA
tggagcccagggtgggc

SEQ ID NO: 122023 - DNA, 17 bp, synthetic construct
  source 1..17: mol_type = other DNA
ggagcccagggtgggct

SEQ ID NO: 122024 - DNA, 17 bp, synthetic construct
  source 1..17: mol_type = other DNA
gagcccagggtgggctc

SEQ ID NO: 122025 - DNA, 17 bp, synthetic construct
  source 1..17: mol_type = other DNA
agcccagggtgggctct

SEQ ID NO: 122026 - DNA, 17 bp, synthetic construct
  source 1..17: mol_type = other DNA
gcccagggtgggctctg

SEQ ID NO: 122027 - DNA, 17 bp, synthetic construct
  source 1..17: mol_type = other DNA
cccagggtgggctctgt

SEQ ID NO: 122028 - DNA, 17 bp, synthetic construct
  source 1..17: mol_type = other DNA
ccagggtgggctctgtg

SEQ ID NO: 122029 - DNA, 17 bp, synthetic construct
  source 1..17: mol_type = other DNA
cagggtgggctctgtgc

SEQ ID NO: 122030 - DNA, 17 bp, synthetic construct
  source 1..17: mol_type = other DNA
agggtgggctctgtgct

SEQ ID NO: 122031 - DNA, 17 bp, synthetic construct
  source 1..17: mol_type = other DNA
gggtgggctctgtgctg

SEQ ID NO: 122032 - DNA, 17 bp, synthetic construct
  source 1..17: mol_type = other DNA
ggtgggctctgtgctgc

SEQ ID NO: 122033 - DNA, 17 bp, synthetic construct
  source 1..17: mol_type = other DNA
gtgggctctgtgctgcc

SEQ ID NO: 122034 - DNA, 17 bp, synthetic construct
  source 1..17: mol_type = other DNA
tgggctctgtgctgcct

SEQ ID NO: 122035 - DNA, 17 bp, synthetic construct
  source 1..17: mol_type = other DNA
gggctctgtgctgcctc

SEQ ID NO: 122036 - DNA, 17 bp, synthetic construct
  source 1..17: mol_type = other DNA
ggctctgtgctgcctcc

SEQ ID NO: 122037 - DNA, 17 bp, synthetic construct
  source 1..17: mol_type = other DNA
gctctgtgctgcctccc

SEQ ID NO: 122038 - DNA, 17 bp, synthetic construct
  source 1..17: mol_type = other DNA
ctctgtgctgcctccca

SEQ ID NO: 122039 - DNA, 17 bp, synthetic construct
  source 1..17: mol_type = other DNA
tctgtgctgcctcccac

SEQ ID NO: 122040 - DNA, 17 bp, synthetic construct
  source 1..17: mol_type = other DNA
ctgtgctgcctcccacg

SEQ ID NO: 122041 - DNA, 17 bp, synthetic construct
  source 1..17: mol_type = other DNA
tgtgctgcctcccacgg

SEQ ID NO: 122042 - DNA, 17 bp, synthetic construct
  source 1..17: mol_type = other DNA
gtgctgcctcccacggg

SEQ ID NO: 122043 - DNA, 17 bp, synthetic construct
  source 1..17: mol_type = other DNA
tgctgcctcccacgggt

SEQ ID NO: 122044 - DNA, 17 bp, synthetic construct
  source 1..17: mol_type = other DNA
gctgcctcccacgggtg

SEQ ID NO: 122045 - DNA, 17 bp, synthetic construct
  source 1..17: mol_type = other DNA
ctgcctcccacgggtgc

SEQ ID NO: 122046 - DNA, 17 bp, synthetic construct
  source 1..17: mol_type = other DNA
tgcctcccacgggtgcc

SEQ ID NO: 122047 - DNA, 17 bp, synthetic construct
  source 1..17: mol_type = other DNA
gcctcccacgggtgcct

SEQ ID NO: 122048 - DNA, 17 bp, synthetic construct
  source 1..17: mol_type = other DNA
cctcccacgggtgcctg

SEQ ID NO: 122049 - DNA, 17 bp, synthetic construct
  source 1..17: mol_type = other DNA
ctcccacgggtgcctgt

SEQ ID NO: 122050 - DNA, 17 bp, synthetic construct
  source 1..17: mol_type = other DNA
tcccacgggtgcctgtg

SEQ ID NO: 122051 - DNA, 17 bp, synthetic construct
  source 1..17: mol_type = other DNA
cccacgggtgcctgtgg

SEQ ID NO: 122052 - DNA, 17 bp, synthetic construct
  source 1..17: mol_type = other DNA
ccacgggtgcctgtggc

SEQ ID NO: 122053 - DNA, 17 bp, synthetic construct
  source 1..17: mol_type = other DNA
cacgggtgcctgtggcc

SEQ ID NO: 122054 - DNA, 17 bp, synthetic construct
  source 1..17: mol_type = other DNA
acgggtgcctgtggccc

SEQ ID NO: 122055 - DNA, 17 bp, synthetic construct
  source 1..17: mol_type = other DNA
cgggtgcctgtggcccc

SEQ ID NO: 122056 - DNA, 17 bp, synthetic construct
  source 1..17: mol_type = other DNA
gggtgcctgtggcccca

SEQ ID NO: 122057 - DNA, 17 bp, synthetic construct
  source 1..17: mol_type = other DNA
ggtgcctgtggccccag

SEQ ID NO: 122058 - DNA, 17 bp, synthetic construct
  source 1..17: mol_type = other DNA
gtgcctgtggccccagc

SEQ ID NO: 122059 - DNA, 17 bp, synthetic construct
  source 1..17: mol_type = other DNA
tgcctgtggccccagct

SEQ ID NO: 122060 - DNA, 17 bp, synthetic construct
  source 1..17: mol_type = other DNA
gcctgtggccccagctc

SEQ ID NO: 122061 - DNA, 17 bp, synthetic construct
  source 1..17: mol_type = other DNA
cctgtggccccagctcc

SEQ ID NO: 122062 - DNA, 17 bp, synthetic construct
  source 1..17: mol_type = other DNA
ctgtggccccagctcca

SEQ ID NO: 122063 - DNA, 17 bp, synthetic construct
  source 1..17: mol_type = other DNA
tgtggccccagctccag

SEQ ID NO: 122064 - DNA, 17 bp, synthetic construct
  source 1..17: mol_type = other DNA
gtggccccagctccagg

SEQ ID NO: 122065 - DNA, 17 bp, synthetic construct
  source 1..17: mol_type = other DNA
tggccccagctccaggg

SEQ ID NO: 122066 - DNA, 17 bp, synthetic construct
  source 1..17: mol_type = other DNA
ggccccagctccagggc

SEQ ID NO: 122067 - DNA, 17 bp, synthetic construct
  source 1..17: mol_type = other DNA
gccccagctccagggcc

SEQ ID NO: 122068 - DNA, 17 bp, synthetic construct
  source 1..17: mol_type = other DNA
ccccagctccagggccc

SEQ ID NO: 122069 - DNA, 17 bp, synthetic construct
  source 1..17: mol_type = other DNA
cccagctccagggcccc

SEQ ID NO: 122070 - DNA, 17 bp, synthetic construct
  source 1..17: mol_type = other DNA
ccagctccagggcccca

SEQ ID NO: 122071 - DNA, 17 bp, synthetic construct
  source 1..17: mol_type = other DNA
cagctccagggccccac

SEQ ID NO: 122072 - DNA, 17 bp, synthetic construct
  source 1..17: mol_type = other DNA
agctccagggccccact

SEQ ID NO: 122073 - DNA, 17 bp, synthetic construct
  source 1..17: mol_type = other DNA
gctccagggccccactc

SEQ ID NO: 122074 - DNA, 17 bp, synthetic construct
  source 1..17: mol_type = other DNA
ctccagggccccactct

SEQ ID NO: 122075 - DNA, 17 bp, synthetic construct
  source 1..17: mol_type = other DNA
tccagggccccactctc

SEQ ID NO: 122076 - DNA, 17 bp, synthetic construct
  source 1..17: mol_type = other DNA
ccagggccccactctct

SEQ ID NO: 122077 - DNA, 17 bp, synthetic construct
  source 1..17: mol_type = other DNA
cagggccccactctctc

SEQ ID NO: 122078 - DNA, 17 bp, synthetic construct
  source 1..17: mol_type = other DNA
agggccccactctctcg

SEQ ID NO: 122079 - DNA, 17 bp, synthetic construct
  source 1..17: mol_type = other DNA
gggccccactctctcgc

SEQ ID NO: 122080 - DNA, 17 bp, synthetic construct
  source 1..17: mol_type = other DNA
ggccccactctctcgct

SEQ ID NO: 122081 - DNA, 17 bp, synthetic construct
  source 1..17: mol_type = other DNA
gccccactctctcgctg

SEQ ID NO: 122082 - DNA, 17 bp, synthetic construct
  source 1..17: mol_type = other DNA
ccccactctctcgctgc

SEQ ID NO: 122083 - DNA, 17 bp, synthetic construct
  source 1..17: mol_type = other DNA
cccactctctcgctgcc

SEQ ID NO: 122084 - DNA, 17 bp, synthetic construct
  source 1..17: mol_type = other DNA
ccactctctcgctgcct

SEQ ID NO: 122085 - DNA, 17 bp, synthetic construct
  source 1..17: mol_type = other DNA
cactctctcgctgcctc

SEQ ID NO: 122086 - DNA, 17 bp, synthetic construct
  source 1..17: mol_type = other DNA
actctctcgctgcctct

SEQ ID NO: 122087 - DNA, 17 bp, synthetic construct
  source 1..17: mol_type = other DNA
ctctctcgctgcctctg

SEQ ID NO: 122088 - DNA, 17 bp, synthetic construct
  source 1..17: mol_type = other DNA
tctctcgctgcctctgc

SEQ ID NO: 122089 - DNA, 17 bp, synthetic construct
  source 1..17: mol_type = other DNA
ctctcgctgcctctgca

SEQ ID NO: 122090 - DNA, 17 bp, synthetic construct
  source 1..17: mol_type = other DNA
tctcgctgcctctgcag

SEQ ID NO: 122091 - DNA, 17 bp, synthetic construct
  source 1..17: mol_type = other DNA
ctcgctgcctctgcagg

SEQ ID NO: 122092 - DNA, 17 bp, synthetic construct
  source 1..17: mol_type = other DNA
tcgctgcctctgcaggg

SEQ ID NO: 122093 - DNA, 17 bp, synthetic construct
  source 1..17: mol_type = other DNA
cgctgcctctgcagggc

SEQ ID NO: 122094 - DNA, 17 bp, synthetic construct
  source 1..17: mol_type = other DNA
gctgcctctgcagggca

SEQ ID NO: 122095 - DNA, 17 bp, synthetic construct
  source 1..17: mol_type = other DNA
ctgcctctgcagggcag

SEQ ID NO: 122096 - DNA, 17 bp, synthetic construct
  source 1..17: mol_type = other DNA
tgcctctgcagggcagg

SEQ ID NO: 122097 - DNA, 17 bp, synthetic construct
  source 1..17: mol_type = other DNA
gcctctgcagggcaggg

SEQ ID NO: 122098 - DNA, 17 bp, synthetic construct
  source 1..17: mol_type = other DNA
cctctgcagggcagggt

SEQ ID NO: 122099 - DNA, 17 bp, synthetic construct
  source 1..17: mol_type = other DNA
ctctgcagggcagggtc

SEQ ID NO: 122100 - DNA, 17 bp, synthetic construct
  source 1..17: mol_type = other DNA
tctgcagggcagggtct

SEQ ID NO: 122101 - DNA, 17 bp, synthetic construct
  source 1..17: mol_type = other DNA
ctgcagggcagggtctg

SEQ ID NO: 122102 - DNA, 17 bp, synthetic construct
  source 1..17: mol_type = other DNA
tgcagggcagggtctgc

SEQ ID NO: 122103 - DNA, 17 bp, synthetic construct
  source 1..17: mol_type = other DNA
gcagggcagggtctgcg

SEQ ID NO: 122104 - DNA, 17 bp, synthetic construct
  source 1..17: mol_type = other DNA
cagggcagggtctgcgg

SEQ ID NO: 122105 - DNA, 17 bp, synthetic construct
  source 1..17: mol_type = other DNA
agggcagggtctgcggc

SEQ ID NO: 122106 - DNA, 17 bp, synthetic construct
  source 1..17: mol_type = other DNA
gggcagggtctgcggcc

SEQ ID NO: 122107 - DNA, 17 bp, synthetic construct
  source 1..17: mol_type = other DNA
ggcagggtctgcggcct

SEQ ID NO: 122108 - DNA, 17 bp, synthetic construct
  source 1..17: mol_type = other DNA
gcagggtctgcggcctg

SEQ ID NO: 122109 - DNA, 17 bp, synthetic construct
  source 1..17: mol_type = other DNA
cagggtctgcggcctgt

SEQ ID NO: 122110 - DNA, 17 bp, synthetic construct
  source 1..17: mol_type = other DNA
agggtctgcggcctgtg

SEQ ID NO: 122111 - DNA, 17 bp, synthetic construct
  source 1..17: mol_type = other DNA
gggtctgcggcctgtgc

SEQ ID NO: 122112 - DNA, 17 bp, synthetic construct
  source 1..17: mol_type = other DNA
ggtctgcggcctgtgcg

SEQ ID NO: 122113 - DNA, 17 bp, synthetic construct
  source 1..17: mol_type = other DNA
gtctgcggcctgtgcgg

SEQ ID NO: 122114 - DNA, 17 bp, synthetic construct
  source 1..17: mol_type = other DNA
tctgcggcctgtgcggg

SEQ ID NO: 122115 - DNA, 17 bp, synthetic construct
  source 1..17: mol_type = other DNA
ctgcggcctgtgcggga

SEQ ID NO: 122116 - DNA, 17 bp, synthetic construct
  source 1..17: mol_type = other DNA
tgcggcctgtgcgggaa

SEQ ID NO: 122117 - DNA, 17 bp, synthetic construct
  source 1..17: mol_type = other DNA
gcggcctgtgcgggaac

SEQ ID NO: 122118 - DNA, 17 bp, synthetic construct
  source 1..17: mol_type = other DNA
cggcctgtgcgggaact

SEQ ID NO: 122119 - DNA, 17 bp, synthetic construct
  source 1..17: mol_type = other DNA
ggcctgtgcgggaactt

SEQ ID NO: 122120 - DNA, 17 bp, synthetic construct
  source 1..17: mol_type = other DNA
gcctgtgcgggaacttc

SEQ ID NO: 122121 - DNA, 17 bp, synthetic construct
  source 1..17: mol_type = other DNA
cctgtgcgggaacttcg

SEQ ID NO: 122122 - DNA, 17 bp, synthetic construct
  source 1..17: mol_type = other DNA
ctgtgcgggaacttcga

SEQ ID NO: 122123 - DNA, 17 bp, synthetic construct
  source 1..17: mol_type = other DNA
tgtgcgggaacttcgac

SEQ ID NO: 122124 - DNA, 17 bp, synthetic construct
  source 1..17: mol_type = other DNA
gtgcgggaacttcgacg

SEQ ID NO: 122125 - DNA, 17 bp, synthetic construct
  source 1..17: mol_type = other DNA
tgcgggaacttcgacga

SEQ ID NO: 122126 - DNA, 17 bp, synthetic construct
  source 1..17: mol_type = other DNA
gcgggaacttcgacgac

SEQ ID NO: 122127 - DNA, 17 bp, synthetic construct
  source 1..17: mol_type = other DNA
cgggaacttcgacgaca

SEQ ID NO: 122128 - DNA, 17 bp, synthetic construct
  source 1..17: mol_type = other DNA
gggaacttcgacgacaa

SEQ ID NO: 122129 - DNA, 17 bp, synthetic construct
  source 1..17: mol_type = other DNA
ggaacttcgacgacaat

SEQ ID NO: 122130 - DNA, 17 bp, synthetic construct
  source 1..17: mol_type = other DNA
gaacttcgacgacaatg

SEQ ID NO: 122131 - DNA, 17 bp, synthetic construct
  source 1..17: mol_type = other DNA
aacttcgacgacaatgc

SEQ ID NO: 122132 - DNA, 17 bp, synthetic construct
  source 1..17: mol_type = other DNA
acttcgacgacaatgcc

SEQ ID NO: 122133 - DNA, 17 bp, synthetic construct
  source 1..17: mol_type = other DNA
cttcgacgacaatgcca

SEQ ID NO: 122134 - DNA, 17 bp, synthetic construct
  source 1..17: mol_type = other DNA
ttcgacgacaatgccat

SEQ ID NO: 122135 - DNA, 17 bp, synthetic construct
  source 1..17: mol_type = other DNA
tcgacgacaatgccatc

SEQ ID NO: 122136 - DNA, 17 bp, synthetic construct
  source 1..17: mol_type = other DNA
cgacgacaatgccatca

SEQ ID NO: 122137 - DNA, 17 bp, synthetic construct
  source 1..17: mol_type = other DNA
gacgacaatgccatcaa

SEQ ID NO: 122138 - DNA, 17 bp, synthetic construct
  source 1..17: mol_type = other DNA
acgacaatgccatcaat

SEQ ID NO: 122139 - DNA, 17 bp, synthetic construct
  source 1..17: mol_type = other DNA
cgacaatgccatcaatg

SEQ ID NO: 122140 - DNA, 17 bp, synthetic construct
  source 1..17: mol_type = other DNA
gacaatgccatcaatga

SEQ ID NO: 122141 - DNA, 17 bp, synthetic construct
  source 1..17: mol_type = other DNA
acaatgccatcaatgac

SEQ ID NO: 122142 - DNA, 17 bp, synthetic construct
  source 1..17: mol_type = other DNA
caatgccatcaatgact

SEQ ID NO: 122143 - DNA, 17 bp, synthetic construct
  source 1..17: mol_type = other DNA
aatgccatcaatgactt

SEQ ID NO: 122144 - DNA, 17 bp, synthetic construct
  source 1..17: mol_type = other DNA
atgccatcaatgacttt

SEQ ID NO: 122145 - DNA, 17 bp, synthetic construct
  source 1..17: mol_type = other DNA
tgccatcaatgactttg

SEQ ID NO: 122146 - DNA, 17 bp, synthetic construct
  source 1..17: mol_type = other DNA
gccatcaatgactttgc

SEQ ID NO: 122147 - DNA, 17 bp, synthetic construct
  source 1..17: mol_type = other DNA
ccatcaatgactttgcc

SEQ ID NO: 122148 - DNA, 17 bp, synthetic construct
  source 1..17: mol_type = other DNA
catcaatgactttgcca

SEQ ID NO: 122149 - DNA, 17 bp, synthetic construct
  source 1..17: mol_type = other DNA
atcaatgactttgccac

SEQ ID NO: 122150 - DNA, 17 bp, synthetic construct
  source 1..17: mol_type = other DNA
tcaatgactttgccacg

SEQ ID NO: 122151 - DNA, 17 bp, synthetic construct
  source 1..17: mol_type = other DNA
caatgactttgccacgc

SEQ ID NO: 122152 - DNA, 17 bp, synthetic construct
  source 1..17: mol_type = other DNA
aatgactttgccacgcg

SEQ ID NO: 122153 - DNA, 17 bp, synthetic construct
  source 1..17: mol_type = other DNA
atgactttgccacgcgt

SEQ ID NO: 122154 - DNA, 17 bp, synthetic construct
  source 1..17: mol_type = other DNA
tgactttgccacgcgta

SEQ ID NO: 122155 - DNA, 17 bp, synthetic construct
  source 1..17: mol_type = other DNA
gactttgccacgcgtag

SEQ ID NO: 122156 - DNA, 17 bp, synthetic construct
  source 1..17: mol_type = other DNA
actttgccacgcgtagc

SEQ ID NO: 122157 - DNA, 17 bp, synthetic construct
  source 1..17: mol_type = other DNA
ctttgccacgcgtagcc

SEQ ID NO: 122158 - DNA, 17 bp, synthetic construct
  source 1..17: mol_type = other DNA
tttgccacgcgtagccg

SEQ ID NO: 122159 - DNA, 17 bp, synthetic construct
  source 1..17: mol_type = other DNA
ttgccacgcgtagccgg

SEQ ID NO: 122160 - DNA, 17 bp, synthetic construct
  source 1..17: mol_type = other DNA
tgccacgcgtagccggt

SEQ ID NO: 122161 - DNA, 17 bp, synthetic construct
  source 1..17: mol_type = other DNA
gccacgcgtagccggtc

SEQ ID NO: 122162 - DNA, 17 bp, synthetic construct
  source 1..17: mol_type = other DNA
ccacgcgtagccggtcc

SEQ ID NO: 122163 - DNA, 17 bp, synthetic construct
  source 1..17: mol_type = other DNA
cacgcgtagccggtccg

SEQ ID NO: 122164 - DNA, 17 bp, synthetic construct
  source 1..17: mol_type = other DNA
acgcgtagccggtccgt

SEQ ID NO: 122165 - DNA, 17 bp, synthetic construct
  source 1..17: mol_type = other DNA
cgcgtagccggtccgtg

SEQ ID NO: 122166 - DNA, 17 bp, synthetic construct
  source 1..17: mol_type = other DNA
gcgtagccggtccgtgg

SEQ ID NO: 122167 - DNA, 17 bp, synthetic construct
  source 1..17: mol_type = other DNA
cgtagccggtccgtggt

SEQ ID NO: 122168 - DNA, 17 bp, synthetic construct
  source 1..17: mol_type = other DNA
gtagccggtccgtggtg

SEQ ID NO: 122169 - DNA, 17 bp, synthetic construct
  source 1..17: mol_type = other DNA
tagccggtccgtggtgg

SEQ ID NO: 122170 - DNA, 17 bp, synthetic construct
  source 1..17: mol_type = other DNA
agccggtccgtggtggg

SEQ ID NO: 122171 - DNA, 17 bp, synthetic construct
  source 1..17: mol_type = other DNA
gccggtccgtggtgggg

SEQ ID NO: 122172 - DNA, 17 bp, synthetic construct
  source 1..17: mol_type = other DNA
ccggtccgtggtggggg

SEQ ID NO: 122173 - DNA, 17 bp, synthetic construct
  source 1..17: mol_type = other DNA
cggtccgtggtggggga

SEQ ID NO: 122174 - DNA, 17 bp, synthetic construct
  source 1..17: mol_type = other DNA
ggtccgtggtgggggac

SEQ ID NO: 122175 - DNA, 17 bp, synthetic construct
  source 1..17: mol_type = other DNA
gtccgtggtgggggacg

SEQ ID NO: 122176 - DNA, 17 bp, synthetic construct
  source 1..17: mol_type = other DNA
tccgtggtgggggacgc

SEQ ID NO: 122177 - DNA, 17 bp, synthetic construct
  source 1..17: mol_type = other DNA
ccgtggtgggggacgca

SEQ ID NO: 122178 - DNA, 17 bp, synthetic construct
  source 1..17: mol_type = other DNA
cgtggtgggggacgcac

SEQ ID NO: 122179 - DNA, 17 bp, synthetic construct
  source 1..17: mol_type = other DNA
gtggtgggggacgcact

SEQ ID NO: 122180 - DNA, 17 bp, synthetic construct
  source 1..17: mol_type = other DNA
tggtgggggacgcactg

SEQ ID NO: 122181 - DNA, 17 bp, synthetic construct
  source 1..17: mol_type = other DNA
ggtgggggacgcactgg

SEQ ID NO: 122182 - DNA, 17 bp, synthetic construct
  source 1..17: mol_type = other DNA
gtgggggacgcactgga

SEQ ID NO: 122183 - DNA, 17 bp, synthetic construct
  source 1..17: mol_type = other DNA
tgggggacgcactggag

SEQ ID NO: 122184 - DNA, 17 bp, synthetic construct
  source 1..17: mol_type = other DNA
gggggacgcactggagt

SEQ ID NO: 122185 - DNA, 17 bp, synthetic construct
  source 1..17: mol_type = other DNA
ggggacgcactggagtt

SEQ ID NO: 122186 - DNA, 17 bp, synthetic construct
  source 1..17: mol_type = other DNA
gggacgcactggagttt

SEQ ID NO: 122187 - DNA, 17 bp, synthetic construct
  source 1..17: mol_type = other DNA
ggacgcactggagtttg

SEQ ID NO: 122188 - DNA, 17 bp, synthetic construct
  source 1..17: mol_type = other DNA
gacgcactggagtttgg

SEQ ID NO: 122189 - DNA, 17 bp, synthetic construct
  source 1..17: mol_type = other DNA
acgcactggagtttggg

SEQ ID NO: 122190 - DNA, 17 bp, synthetic construct
  source 1..17: mol_type = other DNA
cgcactggagtttggga

SEQ ID NO: 122191 - DNA, 17 bp, synthetic construct
  source 1..17: mol_type = other DNA
gcactggagtttgggaa

SEQ ID NO: 122192 - DNA, 17 bp, synthetic construct
  source 1..17: mol_type = other DNA
cactggagtttgggaac

SEQ ID NO: 122193 - DNA, 17 bp, synthetic construct
  source 1..17: mol_type = other DNA
actggagtttgggaaca

SEQ ID NO: 122194 - DNA, 17 bp, synthetic construct
  source 1..17: mol_type = other DNA
ctggagtttgggaacag

SEQ ID NO: 122195 - DNA, 17 bp, synthetic construct
  source 1..17: mol_type = other DNA
tggagtttgggaacagc

SEQ ID NO: 122196 - DNA, 17 bp, synthetic construct
  source 1..17: mol_type = other DNA
ggagtttgggaacagct

SEQ ID NO: 122197 - DNA, 17 bp, synthetic construct
  source 1..17: mol_type = other DNA
gagtttgggaacagctg

SEQ ID NO: 122198 - DNA, 17 bp, synthetic construct
  source 1..17: mol_type = other DNA
agtttgggaacagctgg

SEQ ID NO: 122199 - DNA, 17 bp, synthetic construct
  source 1..17: mol_type = other DNA
gtttgggaacagctgga

SEQ ID NO: 122200 - DNA, 17 bp, synthetic construct
  source 1..17: mol_type = other DNA
tttgggaacagctggaa

SEQ ID NO: 122201 - DNA, 17 bp, synthetic construct
  source 1..17: mol_type = other DNA
ttgggaacagctggaag

SEQ ID NO: 122202 - DNA, 17 bp, synthetic construct
  source 1..17: mol_type = other DNA
tgggaacagctggaagc

SEQ ID NO: 122203 - DNA, 17 bp, synthetic construct
  source 1..17: mol_type = other DNA
gggaacagctggaagct

SEQ ID NO: 122204 - DNA, 17 bp, synthetic construct
  source 1..17: mol_type = other DNA
ggaacagctggaagctc

SEQ ID NO: 122205 - DNA, 17 bp, synthetic construct
  source 1..17: mol_type = other DNA
gaacagctggaagctct

SEQ ID NO: 122206 - DNA, 17 bp, synthetic construct
  source 1..17: mol_type = other DNA
aacagctggaagctctc

SEQ ID NO: 122207 - DNA, 17 bp, synthetic construct
  source 1..17: mol_type = other DNA
acagctggaagctctcc

SEQ ID NO: 122208 - DNA, 17 bp, synthetic construct
  source 1..17: mol_type = other DNA
cagctggaagctctccc

SEQ ID NO: 122209 - DNA, 17 bp, synthetic construct
  source 1..17: mol_type = other DNA
agctggaagctctcccc

SEQ ID NO: 122210 - DNA, 17 bp, synthetic construct
  source 1..17: mol_type = other DNA
gctggaagctctccccc

SEQ ID NO: 122211 - DNA, 17 bp, synthetic construct
  source 1..17: mol_type = other DNA
ctggaagctctccccct

SEQ ID NO: 122212 - DNA, 17 bp, synthetic construct
  source 1..17: mol_type = other DNA
tggaagctctccccctc

SEQ ID NO: 122213 - DNA, 17 bp, synthetic construct
  source 1..17: mol_type = other DNA
ggaagctctccccctcc

SEQ ID NO: 122214 - DNA, 17 bp, synthetic construct
  source 1..17: mol_type = other DNA
gaagctctccccctcct

SEQ ID NO: 122215 - DNA, 17 bp, synthetic construct
  source 1..17: mol_type = other DNA
aagctctccccctcctg

SEQ ID NO: 122216 - DNA, 17 bp, synthetic construct
  source 1..17: mol_type = other DNA
agctctccccctcctgc

SEQ ID NO: 122217 - DNA, 17 bp, synthetic construct
  source 1..17: mol_type = other DNA
gctctccccctcctgcc

SEQ ID NO: 122218 - DNA, 17 bp, synthetic construct
  source 1..17: mol_type = other DNA
ctctccccctcctgccc

SEQ ID NO: 122219 - DNA, 17 bp, synthetic construct
  source 1..17: mol_type = other DNA
tctccccctcctgcccg

SEQ ID NO: 122220 - DNA, 17 bp, synthetic construct
  source 1..17: mol_type = other DNA
ctccccctcctgcccgg

SEQ ID NO: 122221 - DNA, 17 bp, synthetic construct
  source 1..17: mol_type = other DNA
tccccctcctgcccgga

SEQ ID NO: 122222 - DNA, 17 bp, synthetic construct
  source 1..17: mol_type = other DNA
ccccctcctgcccggac

SEQ ID NO: 122223 - DNA, 17 bp, synthetic construct
  source 1..17: mol_type = other DNA
cccctcctgcccggacg

SEQ ID NO: 122224 - DNA, 17 bp, synthetic construct
  source 1..17: mol_type = other DNA
ccctcctgcccggacgc

SEQ ID NO: 122225 - DNA, 17 bp, synthetic construct
  source 1..17: mol_type = other DNA
cctcctgcccggacgcc

SEQ ID NO: 122226 - DNA, 17 bp, synthetic construct
  source 1..17: mol_type = other DNA
ctcctgcccggacgccc

SEQ ID NO: 122227 - DNA, 17 bp, synthetic construct
  source 1..17: mol_type = other DNA
tcctgcccggacgccct

SEQ ID NO: 122228 - DNA, 17 bp, synthetic construct
  source 1..17: mol_type = other DNA
cctgcccggacgccctg

SEQ ID NO: 122229 - DNA, 17 bp, synthetic construct
  source 1..17: mol_type = other DNA
ctgcccggacgccctgg

SEQ ID NO: 122230 - DNA, 17 bp, synthetic construct
  source 1..17: mol_type = other DNA
tgcccggacgccctggc

SEQ ID NO: 122231 - DNA, 17 bp, synthetic construct
  source 1..17: mol_type = other DNA
gcccggacgccctggca

SEQ ID NO: 122232 - DNA, 17 bp, synthetic construct
  source 1..17: mol_type = other DNA
cccggacgccctggcac

SEQ ID NO: 122233 - DNA, 17 bp, synthetic construct
  source 1..17: mol_type = other DNA
ccggacgccctggcacc

SEQ ID NO: 122234 - DNA, 17 bp, synthetic construct
  source 1..17: mol_type = other DNA
cggacgccctggcaccc

SEQ ID NO: 122235 - DNA, 17 bp, synthetic construct
  source 1..17: mol_type = other DNA
ggacgccctggcaccca

SEQ ID NO: 122236 - DNA, 17 bp, synthetic construct
  source 1..17: mol_type = other DNA
gacgccctggcacccaa

SEQ ID NO: 122237 - DNA, 17 bp, synthetic construct
  source 1..17: mol_type = other DNA
acgccctggcacccaag

SEQ ID NO: 122238 - DNA, 17 bp, synthetic construct
  source 1..17: mol_type = other DNA
cgccctggcacccaagg

SEQ ID NO: 122239 - DNA, 17 bp, synthetic construct
  source 1..17: mol_type = other DNA
gccctggcacccaagga

SEQ ID NO: 122240 - DNA, 17 bp, synthetic construct
  source 1..17: mol_type = other DNA
ccctggcacccaaggac

SEQ ID NO: 122241 - DNA, 17 bp, synthetic construct
  source 1..17: mol_type = other DNA
cctggcacccaaggacc

SEQ ID NO: 122242 - DNA, 17 bp, synthetic construct
  source 1..17: mol_type = other DNA
ctggcacccaaggaccc

SEQ ID NO: 122243 - DNA, 17 bp, synthetic construct
  source 1..17: mol_type = other DNA
tggcacccaaggacccc

SEQ ID NO: 122244 - DNA, 17 bp, synthetic construct
  source 1..17: mol_type = other DNA
ggcacccaaggacccct

SEQ ID NO: 122245 - DNA, 17 bp, synthetic construct
  source 1..17: mol_type = other DNA
gcacccaaggacccctg

SEQ ID NO: 122246 - DNA, 17 bp, synthetic construct
  source 1..17: mol_type = other DNA
cacccaaggacccctgc

SEQ ID NO: 122247 - DNA, 17 bp, synthetic construct
  source 1..17: mol_type = other DNA
acccaaggacccctgca

SEQ ID NO: 122248 - DNA, 17 bp, synthetic construct
  source 1..17: mol_type = other DNA
cccaaggacccctgcac

SEQ ID NO: 122249 - DNA, 17 bp, synthetic construct
  source 1..17: mol_type = other DNA
ccaaggacccctgcacg

SEQ ID NO: 122250 - DNA, 17 bp, synthetic construct
  source 1..17: mol_type = other DNA
caaggacccctgcacgg

SEQ ID NO: 122251 - DNA, 17 bp, synthetic construct
  source 1..17: mol_type = other DNA
aaggacccctgcacggc

SEQ ID NO: 122252 - DNA, 17 bp, synthetic construct
  source 1..17: mol_type = other DNA
aggacccctgcacggcc

SEQ ID NO: 122253 - DNA, 17 bp, synthetic construct
  source 1..17: mol_type = other DNA
ggacccctgcacggcca

SEQ ID NO: 122254 - DNA, 17 bp, synthetic construct
  source 1..17: mol_type = other DNA
gacccctgcacggccaa

SEQ ID NO: 122255 - DNA, 17 bp, synthetic construct
  source 1..17: mol_type = other DNA
acccctgcacggccaac

SEQ ID NO: 122256 - DNA, 17 bp, synthetic construct
  source 1..17: mol_type = other DNA
cccctgcacggccaacc

SEQ ID NO: 122257 - DNA, 17 bp, synthetic construct
  source 1..17: mol_type = other DNA
ccctgcacggccaaccc

SEQ ID NO: 122258 - DNA, 17 bp, synthetic construct
  source 1..17: mol_type = other DNA
cctgcacggccaacccc

SEQ ID NO: 122259 - DNA, 17 bp, synthetic construct
  source 1..17: mol_type = other DNA
ctgcacggccaacccct

SEQ ID NO: 122260 - DNA, 17 bp, synthetic construct
  source 1..17: mol_type = other DNA
tgcacggccaacccctt

SEQ ID NO: 122261 - DNA, 17 bp, synthetic construct
  source 1..17: mol_type = other DNA
gcacggccaaccccttc

SEQ ID NO: 122262 - DNA, 17 bp, synthetic construct
  source 1..17: mol_type = other DNA
cacggccaaccccttcc

SEQ ID NO: 122263 - DNA, 17 bp, synthetic construct
  source 1..17: mol_type = other DNA
acggccaaccccttccg

SEQ ID NO: 122264 - DNA, 17 bp, synthetic construct
  source 1..17: mol_type = other DNA
cggccaaccccttccgc

SEQ ID NO: 122265 - DNA, 17 bp, synthetic construct
  source 1..17: mol_type = other DNA
ggccaaccccttccgca

SEQ ID NO: 122266 - DNA, 17 bp, synthetic construct
  source 1..17: mol_type = other DNA
gccaaccccttccgcaa

SEQ ID NO: 122267 - DNA, 17 bp, synthetic construct
  source 1..17: mol_type = other DNA
ccaaccccttccgcaag

SEQ ID NO: 122268 - DNA, 17 bp, synthetic construct
  source 1..17: mol_type = other DNA
caaccccttccgcaagt

SEQ ID NO: 122269 - DNA, 17 bp, synthetic construct
  source 1..17: mol_type = other DNA
aaccccttccgcaagtc

SEQ ID NO: 122270 - DNA, 17 bp, synthetic construct
  source 1..17: mol_type = other DNA
accccttccgcaagtcc

SEQ ID NO: 122271 - DNA, 17 bp, synthetic construct
  source 1..17: mol_type = other DNA
ccccttccgcaagtcct

SEQ ID NO: 122272 - DNA, 17 bp, synthetic construct
  source 1..17: mol_type = other DNA
cccttccgcaagtcctg

SEQ ID NO: 122273 - DNA, 17 bp, synthetic construct
  source 1..17: mol_type = other DNA
ccttccgcaagtcctgg

SEQ ID NO: 122274 - DNA, 17 bp, synthetic construct
  source 1..17: mol_type = other DNA
cttccgcaagtcctggg

SEQ ID NO: 122275 - DNA, 17 bp, synthetic construct
  source 1..17: mol_type = other DNA
ttccgcaagtcctgggc

SEQ ID NO: 122276 - DNA, 17 bp, synthetic construct
  source 1..17: mol_type = other DNA
tccgcaagtcctgggcc

SEQ ID NO: 122277 - DNA, 17 bp, synthetic construct
  source 1..17: mol_type = other DNA
ccgcaagtcctgggccc

SEQ ID NO: 122278 - DNA, 17 bp, synthetic construct
  source 1..17: mol_type = other DNA
cgcaagtcctgggccca

SEQ ID NO: 122279 - DNA, 17 bp, synthetic construct
  source 1..17: mol_type = other DNA
gcaagtcctgggcccag

SEQ ID NO: 122280 - DNA, 17 bp, synthetic construct
  source 1..17: mol_type = other DNA
caagtcctgggcccaga

SEQ ID NO: 122281 - DNA, 17 bp, synthetic construct
  source 1..17: mol_type = other DNA
aagtcctgggcccagaa

SEQ ID NO: 122282 - DNA, 17 bp, synthetic construct
  source 1..17: mol_type = other DNA
agtcctgggcccagaag

SEQ ID NO: 122283 - DNA, 17 bp, synthetic construct
  source 1..17: mol_type = other DNA
gtcctgggcccagaagc

SEQ ID NO: 122284 - DNA, 17 bp, synthetic construct
  source 1..17: mol_type = other DNA
tcctgggcccagaagca

SEQ ID NO: 122285 - DNA, 17 bp, synthetic construct
  source 1..17: mol_type = other DNA
cctgggcccagaagcag

SEQ ID NO: 122286 - DNA, 17 bp, synthetic construct
  source 1..17: mol_type = other DNA
ctgggcccagaagcagt

SEQ ID NO: 122287 - DNA, 17 bp, synthetic construct
  source 1..17: mol_type = other DNA
tgggcccagaagcagtg

SEQ ID NO: 122288 - DNA, 17 bp, synthetic construct
  source 1..17: mol_type = other DNA
gggcccagaagcagtgc

SEQ ID NO: 122289 - DNA, 17 bp, synthetic construct
  source 1..17: mol_type = other DNA
ggcccagaagcagtgca

SEQ ID NO: 122290 - DNA, 17 bp, synthetic construct
  source 1..17: mol_type = other DNA
gcccagaagcagtgcag

SEQ ID NO: 122291 - DNA, 17 bp, synthetic construct
  source 1..17: mol_type = other DNA
cccagaagcagtgcagc

SEQ ID NO: 122292 - DNA, 17 bp, synthetic construct
  source 1..17: mol_type = other DNA
ccagaagcagtgcagca

SEQ ID NO: 122293 - DNA, 17 bp, synthetic construct
  source 1..17: mol_type = other DNA
cagaagcagtgcagcat

SEQ ID NO: 122294 - DNA, 17 bp, synthetic construct
  source 1..17: mol_type = other DNA
agaagcagtgcagcatc

SEQ ID NO: 122295 - DNA, 17 bp, synthetic construct
  source 1..17: mol_type = other DNA
gaagcagtgcagcatcc

SEQ ID NO: 122296 - DNA, 17 bp, synthetic construct
  source 1..17: mol_type = other DNA
aagcagtgcagcatcct

SEQ ID NO: 122297 - DNA, 17 bp, synthetic construct
  source 1..17: mol_type = other DNA
agcagtgcagcatcctc

SEQ ID NO: 122298 - DNA, 17 bp, synthetic construct
  source 1..17: mol_type = other DNA
gcagtgcagcatcctcc

SEQ ID NO: 122299 - DNA, 17 bp, synthetic construct
  source 1..17: mol_type = other DNA
cagtgcagcatcctcca

SEQ ID NO: 122300 - DNA, 17 bp, synthetic construct
  source 1..17: mol_type = other DNA
agtgcagcatcctccac

SEQ ID NO: 122301 - DNA, 17 bp, synthetic construct
  source 1..17: mol_type = other DNA
gtgcagcatcctccacg

SEQ ID NO: 122302 - DNA, 17 bp, synthetic construct
  source 1..17: mol_type = other DNA
tgcagcatcctccacgg

SEQ ID NO: 122303 - DNA, 17 bp, synthetic construct
  source 1..17: mol_type = other DNA
gcagcatcctccacggc

SEQ ID NO: 122304 - DNA, 17 bp, synthetic construct
  source 1..17: mol_type = other DNA
cagcatcctccacggcc

SEQ ID NO: 122305 - DNA, 17 bp, synthetic construct
  source 1..17: mol_type = other DNA
agcatcctccacggccc

SEQ ID NO: 122306 - DNA, 17 bp, synthetic construct
  source 1..17: mol_type = other DNA
gcatcctccacggcccc

SEQ ID NO: 122307 - DNA, 17 bp, synthetic construct
  source 1..17: mol_type = other DNA
catcctccacggcccca

SEQ ID NO: 122308 - DNA, 17 bp, synthetic construct
  source 1..17: mol_type = other DNA
atcctccacggccccac

SEQ ID NO: 122309 - DNA, 17 bp, synthetic construct
  source 1..17: mol_type = other DNA
tcctccacggccccacc

SEQ ID NO: 122310 - DNA, 17 bp, synthetic construct
  source 1..17: mol_type = other DNA
cctccacggccccacct

SEQ ID NO: 122311 - DNA, 17 bp, synthetic construct
  source 1..17: mol_type = other DNA
ctccacggccccacctt

SEQ ID NO: 122312 - DNA, 17 bp, synthetic construct
  source 1..17: mol_type = other DNA
tccacggccccaccttc

SEQ ID NO: 122313 - DNA, 17 bp, synthetic construct
  source 1..17: mol_type = other DNA
ccacggccccaccttcg

SEQ ID NO: 122314 - DNA, 17 bp, synthetic construct
  source 1..17: mol_type = other DNA
cacggccccaccttcgc

SEQ ID NO: 122315 - DNA, 17 bp, synthetic construct
  source 1..17: mol_type = other DNA
acggccccaccttcgcc

SEQ ID NO: 122316 - DNA, 17 bp, synthetic construct
  source 1..17: mol_type = other DNA
cggccccaccttcgccg

SEQ ID NO: 122317 - DNA, 17 bp, synthetic construct
  source 1..17: mol_type = other DNA
ggccccaccttcgccgc

SEQ ID NO: 122318 - DNA, 17 bp, synthetic construct
  source 1..17: mol_type = other DNA
gccccaccttcgccgcc

SEQ ID NO: 122319 - DNA, 17 bp, synthetic construct
  source 1..17: mol_type = other DNA
ccccaccttcgccgcct

SEQ ID NO: 122320 - DNA, 17 bp, synthetic construct
  source 1..17: mol_type = other DNA
cccaccttcgccgcctg

SEQ ID NO: 122321 - DNA, 17 bp, synthetic construct
  source 1..17: mol_type = other DNA
ccaccttcgccgcctgc

SEQ ID NO: 122322 - DNA, 17 bp, synthetic construct
  source 1..17: mol_type = other DNA
caccttcgccgcctgcc

SEQ ID NO: 122323 - DNA, 17 bp, synthetic construct
  source 1..17: mol_type = other DNA
accttcgccgcctgccg

SEQ ID NO: 122324 - DNA, 17 bp, synthetic construct
  source 1..17: mol_type = other DNA
ccttcgccgcctgccgc

SEQ ID NO: 122325 - DNA, 17 bp, synthetic construct
  source 1..17: mol_type = other DNA
cttcgccgcctgccgct

SEQ ID NO: 122326 - DNA, 17 bp, synthetic construct
  source 1..17: mol_type = other DNA
ttcgccgcctgccgctc

SEQ ID NO: 122327 - DNA, 17 bp, synthetic construct
  source 1..17: mol_type = other DNA
tcgccgcctgccgctcc

SEQ ID NO: 122328 - DNA, 17 bp, synthetic construct
  source 1..17: mol_type = other DNA
cgccgcctgccgctccc

SEQ ID NO: 122329 - DNA, 17 bp, synthetic construct
  source 1..17: mol_type = other DNA
gccgcctgccgctccca

SEQ ID NO: 122330 - DNA, 17 bp, synthetic construct
  source 1..17: mol_type = other DNA
ccgcctgccgctcccag

SEQ ID NO: 122331 - DNA, 17 bp, synthetic construct
  source 1..17: mol_type = other DNA
cgcctgccgctcccagg

SEQ ID NO: 122332 - DNA, 17 bp, synthetic construct
  source 1..17: mol_type = other DNA
gcctgccgctcccaggt

SEQ ID NO: 122333 - DNA, 17 bp, synthetic construct
  source 1..17: mol_type = other DNA
cctgccgctcccaggtg

SEQ ID NO: 122334 - DNA, 17 bp, synthetic construct
  source 1..17: mol_type = other DNA
ctgccgctcccaggtgg

SEQ ID NO: 122335 - DNA, 17 bp, synthetic construct
  source 1..17: mol_type = other DNA
tgccgctcccaggtggg

SEQ ID NO: 122336 - DNA, 17 bp, synthetic construct
  source 1..17: mol_type = other DNA
gccgctcccaggtgggg

SEQ ID NO: 122337 - DNA, 17 bp, synthetic construct
  source 1..17: mol_type = other DNA
ccgctcccaggtggggc

SEQ ID NO: 122338 - DNA, 17 bp, synthetic construct
  source 1..17: mol_type = other DNA
cgctcccaggtggggct

SEQ ID NO: 122339 - DNA, 17 bp, synthetic construct
  source 1..17: mol_type = other DNA
gctcccaggtggggctc

SEQ ID NO: 122340 - DNA, 17 bp, synthetic construct
  source 1..17: mol_type = other DNA
ctcccaggtggggctct

SEQ ID NO: 122341 - DNA, 17 bp, synthetic construct
  source 1..17: mol_type = other DNA
tcccaggtggggctctg

SEQ ID NO: 122342 - DNA, 17 bp, synthetic construct
  source 1..17: mol_type = other DNA
cccaggtggggctctgg

SEQ ID NO: 122343 - DNA, 17 bp, synthetic construct
  source 1..17: mol_type = other DNA
ccaggtggggctctggt

SEQ ID NO: 122344 - DNA, 17 bp, synthetic construct
  source 1..17: mol_type = other DNA
caggtggggctctggtc

SEQ ID NO: 122345 - DNA, 17 bp, synthetic construct
  source 1..17: mol_type = other DNA
aggtggggctctggtct

SEQ ID NO: 122346 - DNA, 17 bp, synthetic construct
  source 1..17: mol_type = other DNA
ggtggggctctggtctt

SEQ ID NO: 122347 - DNA, 17 bp, synthetic construct
  source 1..17: mol_type = other DNA
gtggggctctggtcttg

SEQ ID NO: 122348 - DNA, 17 bp, synthetic construct
  source 1..17: mol_type = other DNA
tggggctctggtcttgg

SEQ ID NO: 122349 - DNA, 17 bp, synthetic construct
  source 1..17: mol_type = other DNA
ggggctctggtcttggc

SEQ ID NO: 122350 - DNA, 17 bp, synthetic construct
  source 1..17: mol_type = other DNA
gggctctggtcttggca

SEQ ID NO: 122351 - DNA, 17 bp, synthetic construct
  source 1..17: mol_type = other DNA
ggctctggtcttggcag

SEQ ID NO: 122352 - DNA, 17 bp, synthetic construct
  source 1..17: mol_type = other DNA
gctctggtcttggcagg

SEQ ID NO: 122353 - DNA, 17 bp, synthetic construct
  source 1..17: mol_type = other DNA
ctctggtcttggcaggc

SEQ ID NO: 122354 - DNA, 17 bp, synthetic construct
  source 1..17: mol_type = other DNA
tctggtcttggcaggca

SEQ ID NO: 122355 - DNA, 17 bp, synthetic construct
  source 1..17: mol_type = other DNA
ctggtcttggcaggcag

SEQ ID NO: 122356 - DNA, 17 bp, synthetic construct
  source 1..17: mol_type = other DNA
tggtcttggcaggcagg

SEQ ID NO: 122357 - DNA, 17 bp, synthetic construct
  source 1..17: mol_type = other DNA
ggtcttggcaggcaggg

SEQ ID NO: 122358 - DNA, 17 bp, synthetic construct
  source 1..17: mol_type = other DNA
gtcttggcaggcagggt

SEQ ID NO: 122359 - DNA, 17 bp, synthetic construct
  source 1..17: mol_type = other DNA
tcttggcaggcagggtc

SEQ ID NO: 122360 - DNA, 17 bp, synthetic construct
  source 1..17: mol_type = other DNA
cttggcaggcagggtct

SEQ ID NO: 122361 - DNA, 17 bp, synthetic construct
  source 1..17: mol_type = other DNA
ttggcaggcagggtctg

SEQ ID NO: 122362 - DNA, 17 bp, synthetic construct
  source 1..17: mol_type = other DNA
tggcaggcagggtctgg

SEQ ID NO: 122363 - DNA, 17 bp, synthetic construct
  source 1..17: mol_type = other DNA
ggcaggcagggtctggt

SEQ ID NO: 122364 - DNA, 17 bp, synthetic construct
  source 1..17: mol_type = other DNA
gcaggcagggtctggtg

SEQ ID NO: 122365 - DNA, 17 bp, synthetic construct
  source 1..17: mol_type = other DNA
caggcagggtctggtgg

SEQ ID NO: 122366 - DNA, 17 bp, synthetic construct
  source 1..17: mol_type = other DNA
aggcagggtctggtggg

SEQ ID NO: 122367 - DNA, 17 bp, synthetic construct
  source 1..17: mol_type = other DNA
ggcagggtctggtgggg

SEQ ID NO: 122368 - DNA, 17 bp, synthetic construct
  source 1..17: mol_type = other DNA
gcagggtctggtgggga

SEQ ID NO: 122369 - DNA, 17 bp, synthetic construct
  source 1..17: mol_type = other DNA
cagggtctggtggggat

SEQ ID NO: 122370 - DNA, 17 bp, synthetic construct
  source 1..17: mol_type = other DNA
agggtctggtggggatg

SEQ ID NO: 122371 - DNA, 17 bp, synthetic construct
  source 1..17: mol_type = other DNA
gggtctggtggggatgg

SEQ ID NO: 122372 - DNA, 17 bp, synthetic construct
  source 1..17: mol_type = other DNA
ggtctggtggggatggc

SEQ ID NO: 122373 - DNA, 17 bp, synthetic construct
  source 1..17: mol_type = other DNA
gtctggtggggatggca

SEQ ID NO: 122374 - DNA, 17 bp, synthetic construct
  source 1..17: mol_type = other DNA
tctggtggggatggcag

SEQ ID NO: 122375 - DNA, 17 bp, synthetic construct
  source 1..17: mol_type = other DNA
ctggtggggatggcagt

SEQ ID NO: 122376 - DNA, 17 bp, synthetic construct
  source 1..17: mol_type = other DNA
tggtggggatggcagtt

SEQ ID NO: 122377 - DNA, 17 bp, synthetic construct
  source 1..17: mol_type = other DNA
ggtggggatggcagttg

SEQ ID NO: 122378 - DNA, 17 bp, synthetic construct
  source 1..17: mol_type = other DNA
gtggggatggcagttgc

SEQ ID NO: 122379 - DNA, 17 bp, synthetic construct
  source 1..17: mol_type = other DNA
tggggatggcagttgct

SEQ ID NO: 122380 - DNA, 17 bp, synthetic construct
  source 1..17: mol_type = other DNA
ggggatggcagttgctt

SEQ ID NO: 122381 - DNA, 17 bp, synthetic construct
  source 1..17: mol_type = other DNA
gggatggcagttgcttc

SEQ ID NO: 122382 - DNA, 17 bp, synthetic construct
  source 1..17: mol_type = other DNA
ggatggcagttgcttcc

SEQ ID NO: 122383 - DNA, 17 bp, synthetic construct
  source 1..17: mol_type = other DNA
gatggcagttgcttcct

SEQ ID NO: 122384 - DNA, 17 bp, synthetic construct
  source 1..17: mol_type = other DNA
atggcagttgcttcctt

SEQ ID NO: 122385 - DNA, 17 bp, synthetic construct
  source 1..17: mol_type = other DNA
tggcagttgcttccttc

SEQ ID NO: 122386 - DNA, 17 bp, synthetic construct
  source 1..17: mol_type = other DNA
ggcagttgcttccttcc

SEQ ID NO: 122387 - DNA, 17 bp, synthetic construct
  source 1..17: mol_type = other DNA
gcagttgcttccttccc

SEQ ID NO: 122388 - DNA, 17 bp, synthetic construct
  source 1..17: mol_type = other DNA
cagttgcttccttcccg

SEQ ID NO: 122389 - DNA, 17 bp, synthetic construct
  source 1..17: mol_type = other DNA
agttgcttccttcccgc

SEQ ID NO: 122390 - DNA, 17 bp, synthetic construct
  source 1..17: mol_type = other DNA
gttgcttccttcccgcc

SEQ ID NO: 122391 - DNA, 17 bp, synthetic construct
  source 1..17: mol_type = other DNA
ttgcttccttcccgccg

SEQ ID NO: 122392 - DNA, 17 bp, synthetic construct
  source 1..17: mol_type = other DNA
tgcttccttcccgccga

SEQ ID NO: 122393 - DNA, 17 bp, synthetic construct
  source 1..17: mol_type = other DNA
gcttccttcccgccgag

SEQ ID NO: 122394 - DNA, 17 bp, synthetic construct
  source 1..17: mol_type = other DNA
cttccttcccgccgaga

SEQ ID NO: 122395 - DNA, 17 bp, synthetic construct
  source 1..17: mol_type = other DNA
ttccttcccgccgagaa

SEQ ID NO: 122396 - DNA, 17 bp, synthetic construct
  source 1..17: mol_type = other DNA
tccttcccgccgagaac

SEQ ID NO: 122397 - DNA, 17 bp, synthetic construct
  source 1..17: mol_type = other DNA
ccttcccgccgagaact

SEQ ID NO: 122398 - DNA, 17 bp, synthetic construct
  source 1..17: mol_type = other DNA
cttcccgccgagaactg

SEQ ID NO: 122399 - DNA, 17 bp, synthetic construct
  source 1..17: mol_type = other DNA
ttcccgccgagaactgg

SEQ ID NO: 122400 - DNA, 17 bp, synthetic construct
  source 1..17: mol_type = other DNA
tcccgccgagaactggg

SEQ ID NO: 122401 - DNA, 17 bp, synthetic construct
  source 1..17: mol_type = other DNA
cccgccgagaactgggt

SEQ ID NO: 122402 - DNA, 17 bp, synthetic construct
  source 1..17: mol_type = other DNA
ccgccgagaactgggtc

SEQ ID NO: 122403 - DNA, 17 bp, synthetic construct
  source 1..17: mol_type = other DNA
cgccgagaactgggtct

SEQ ID NO: 122404 - DNA, 17 bp, synthetic construct
  source 1..17: mol_type = other DNA
gccgagaactgggtctt

SEQ ID NO: 122405 - DNA, 17 bp, synthetic construct
  source 1..17: mol_type = other DNA
ccgagaactgggtcttc

SEQ ID NO: 122406 - DNA, 17 bp, synthetic construct
  source 1..17: mol_type = other DNA
cgagaactgggtcttct

SEQ ID NO: 122407 - DNA, 17 bp, synthetic construct
  source 1..17: mol_type = other DNA
gagaactgggtcttctg

SEQ ID NO: 122408 - DNA, 17 bp, synthetic construct
  source 1..17: mol_type = other DNA
agaactgggtcttctgg

SEQ ID NO: 122409 - DNA, 17 bp, synthetic construct
  source 1..17: mol_type = other DNA
gaactgggtcttctggg

SEQ ID NO: 122410 - DNA, 17 bp, synthetic construct
  source 1..17: mol_type = other DNA
aactgggtcttctgggc

SEQ ID NO: 122411 - DNA, 17 bp, synthetic construct
  source 1..17: mol_type = other DNA
actgggtcttctgggca

SEQ ID NO: 122412 - DNA, 17 bp, synthetic construct
  source 1..17: mol_type = other DNA
ctgggtcttctgggcag

SEQ ID NO: 122413 - DNA, 17 bp, synthetic construct
  source 1..17: mol_type = other DNA
tgggtcttctgggcaga

SEQ ID NO: 122414 - DNA, 17 bp, synthetic construct
  source 1..17: mol_type = other DNA
gggtcttctgggcagac

SEQ ID NO: 122415 - DNA, 17 bp, synthetic construct
  source 1..17: mol_type = other DNA
ggtcttctgggcagaca

SEQ ID NO: 122416 - DNA, 17 bp, synthetic construct
  source 1..17: mol_type = other DNA
gtcttctgggcagacag

SEQ ID NO: 122417 - DNA, 17 bp, synthetic construct
  source 1..17: mol_type = other DNA
tcttctgggcagacagc

SEQ ID NO: 122418 - DNA, 17 bp, synthetic construct
  source 1..17: mol_type = other DNA
cttctgggcagacagca

SEQ ID NO: 122419 - DNA, 17 bp, synthetic construct
  source 1..17: mol_type = other DNA
ttctgggcagacagcag

SEQ ID NO: 122420 - DNA, 17 bp, synthetic construct
  source 1..17: mol_type = other DNA
tctgggcagacagcagc

SEQ ID NO: 122421 - DNA, 17 bp, synthetic construct
  source 1..17: mol_type = other DNA
ctgggcagacagcagcg

SEQ ID NO: 122422 - DNA, 17 bp, synthetic construct
  source 1..17: mol_type = other DNA
tgggcagacagcagcgc

SEQ ID NO: 122423 - DNA, 17 bp, synthetic construct
  source 1..17: mol_type = other DNA
gggcagacagcagcgct

SEQ ID NO: 122424 - DNA, 17 bp, synthetic construct
  source 1..17: mol_type = other DNA
ggcagacagcagcgctc

SEQ ID NO: 122425 - DNA, 17 bp, synthetic construct
  source 1..17: mol_type = other DNA
gcagacagcagcgctcc

SEQ ID NO: 122426 - DNA, 17 bp, synthetic construct
  source 1..17: mol_type = other DNA
cagacagcagcgctcca

SEQ ID NO: 122427 - DNA, 17 bp, synthetic construct
  source 1..17: mol_type = other DNA
agacagcagcgctccaa

SEQ ID NO: 122428 - DNA, 17 bp, synthetic construct
  source 1..17: mol_type = other DNA
gacagcagcgctccaag

SEQ ID NO: 122429 - DNA, 17 bp, synthetic construct
  source 1..17: mol_type = other DNA
acagcagcgctccaagg

SEQ ID NO: 122430 - DNA, 17 bp, synthetic construct
  source 1..17: mol_type = other DNA
cagcagcgctccaagga

SEQ ID NO: 122431 - DNA, 17 bp, synthetic construct
  source 1..17: mol_type = other DNA
agcagcgctccaaggag

SEQ ID NO: 122432 - DNA, 17 bp, synthetic construct
  source 1..17: mol_type = other DNA
gcagcgctccaaggagg

SEQ ID NO: 122433 - DNA, 17 bp, synthetic construct
  source 1..17: mol_type = other DNA
cagcgctccaaggaggg

SEQ ID NO: 122434 - DNA, 17 bp, synthetic construct
  source 1..17: mol_type = other DNA
agcgctccaaggagggt

SEQ ID NO: 122435 - DNA, 17 bp, synthetic construct
  source 1..17: mol_type = other DNA
gcgctccaaggagggtc

SEQ ID NO: 122436 - DNA, 17 bp, synthetic construct
  source 1..17: mol_type = other DNA
cgctccaaggagggtct

SEQ ID NO: 122437 - DNA, 17 bp, synthetic construct
  source 1..17: mol_type = other DNA
gctccaaggagggtctg

SEQ ID NO: 122438 - DNA, 17 bp, synthetic construct
  source 1..17: mol_type = other DNA
ctccaaggagggtctga

SEQ ID NO: 122439 - DNA, 17 bp, synthetic construct
  source 1..17: mol_type = other DNA
tccaaggagggtctgac

SEQ ID NO: 122440 - DNA, 17 bp, synthetic construct
  source 1..17: mol_type = other DNA
ccaaggagggtctgacc

SEQ ID NO: 122441 - DNA, 17 bp, synthetic construct
  source 1..17: mol_type = other DNA
caaggagggtctgacca

SEQ ID NO: 122442 - DNA, 17 bp, synthetic construct
  source 1..17: mol_type = other DNA
aaggagggtctgaccat

SEQ ID NO: 122443 - DNA, 17 bp, synthetic construct
  source 1..17: mol_type = other DNA
aggagggtctgaccatg

SEQ ID NO: 122444 - DNA, 17 bp, synthetic construct
  source 1..17: mol_type = other DNA
ggagggtctgaccatgt

SEQ ID NO: 122445 - DNA, 17 bp, synthetic construct
  source 1..17: mol_type = other DNA
gagggtctgaccatgtc

SEQ ID NO: 122446 - DNA, 17 bp, synthetic construct
  source 1..17: mol_type = other DNA
agggtctgaccatgtcc

SEQ ID NO: 122447 - DNA, 17 bp, synthetic construct
  source 1..17: mol_type = other DNA
gggtctgaccatgtccc

SEQ ID NO: 122448 - DNA, 17 bp, synthetic construct
  source 1..17: mol_type = other DNA
ggtctgaccatgtccca

SEQ ID NO: 122449 - DNA, 17 bp, synthetic construct
  source 1..17: mol_type = other DNA
gtctgaccatgtcccac

SEQ ID NO: 122450 - DNA, 17 bp, synthetic construct
  source 1..17: mol_type = other DNA
tctgaccatgtcccacg

SEQ ID NO: 122451 - DNA, 17 bp, synthetic construct
  source 1..17: mol_type = other DNA
ctgaccatgtcccacgg

SEQ ID NO: 122452 - DNA, 17 bp, synthetic construct
  source 1..17: mol_type = other DNA
tgaccatgtcccacggc

SEQ ID NO: 122453 - DNA, 17 bp, synthetic construct
  source 1..17: mol_type = other DNA
gaccatgtcccacggca

SEQ ID NO: 122454 - DNA, 17 bp, synthetic construct
  source 1..17: mol_type = other DNA
accatgtcccacggcac

SEQ ID NO: 122455 - DNA, 17 bp, synthetic construct
  source 1..17: mol_type = other DNA
ccatgtcccacggcaca

SEQ ID NO: 122456 - DNA, 17 bp, synthetic construct
  source 1..17: mol_type = other DNA
catgtcccacggcacac

SEQ ID NO: 122457 - DNA, 17 bp, synthetic construct
  source 1..17: mol_type = other DNA
atgtcccacggcacaca

SEQ ID NO: 122458 - DNA, 17 bp, synthetic construct
  source 1..17: mol_type = other DNA
tgtcccacggcacacag

SEQ ID NO: 122459 - DNA, 17 bp, synthetic construct
  source 1..17: mol_type = other DNA
gtcccacggcacacagt

SEQ ID NO: 122460 - DNA, 17 bp, synthetic construct
  source 1..17: mol_type = other DNA
tcccacggcacacagtc

SEQ ID NO: 122461 - DNA, 17 bp, synthetic construct
  source 1..17: mol_type = other DNA
cccacggcacacagtcc

SEQ ID NO: 122462 - DNA, 17 bp, synthetic construct
  source 1..17: mol_type = other DNA
ccacggcacacagtcct

SEQ ID NO: 122463 - DNA, 17 bp, synthetic construct
  source 1..17: mol_type = other DNA
cacggcacacagtcctg

SEQ ID NO: 122464 - DNA, 17 bp, synthetic construct
  source 1..17: mol_type = other DNA
acggcacacagtcctgg

SEQ ID NO: 122465 - DNA, 17 bp, synthetic construct
  source 1..17: mol_type = other DNA
cggcacacagtcctgga

SEQ ID NO: 122466 - DNA, 17 bp, synthetic construct
  source 1..17: mol_type = other DNA
ggcacacagtcctggat

SEQ ID NO: 122467 - DNA, 17 bp, synthetic construct
  source 1..17: mol_type = other DNA
gcacacagtcctggatg

SEQ ID NO: 122468 - DNA, 17 bp, synthetic construct
  source 1..17: mol_type = other DNA
cacacagtcctggatgt

SEQ ID NO: 122469 - DNA, 17 bp, synthetic construct
  source 1..17: mol_type = other DNA
acacagtcctggatgtc

SEQ ID NO: 122470 - DNA, 17 bp, synthetic construct
  source 1..17: mol_type = other DNA
cacagtcctggatgtca

SEQ ID NO: 122471 - DNA, 17 bp, synthetic construct
  source 1..17: mol_type = other DNA
acagtcctggatgtcag

SEQ ID NO: 122472 - DNA, 17 bp, synthetic construct
  source 1..17: mol_type = other DNA
cagtcctggatgtcagg

SEQ ID NO: 122473 - DNA, 17 bp, synthetic construct
  source 1..17: mol_type = other DNA
agtcctggatgtcaggt

SEQ ID NO: 122474 - DNA, 17 bp, synthetic construct
  source 1..17: mol_type = other DNA
gtcctggatgtcaggtc

SEQ ID NO: 122475 - DNA, 17 bp, synthetic construct
  source 1..17: mol_type = other DNA
tcctggatgtcaggtcc

SEQ ID NO: 122476 - DNA, 17 bp, synthetic construct
  source 1..17: mol_type = other DNA
cctggatgtcaggtccc

SEQ ID NO: 122477 - DNA, 17 bp, synthetic construct
  source 1..17: mol_type = other DNA
ctggatgtcaggtccca

SEQ ID NO: 122478 - DNA, 17 bp, synthetic construct
  source 1..17: mol_type = other DNA
tggatgtcaggtcccaa

SEQ ID NO: 122479 - DNA, 17 bp, synthetic construct
  source 1..17: mol_type = other DNA
ggatgtcaggtcccaag

SEQ ID NO: 122480 - DNA, 17 bp, synthetic construct
  source 1..17: mol_type = other DNA
gatgtcaggtcccaagt

SEQ ID NO: 122481 - DNA, 17 bp, synthetic construct
  source 1..17: mol_type = other DNA
atgtcaggtcccaagtc

SEQ ID NO: 122482 - DNA, 17 bp, synthetic construct
  source 1..17: mol_type = other DNA
tgtcaggtcccaagtcc

SEQ ID NO: 122483 - DNA, 17 bp, synthetic construct
  source 1..17: mol_type = other DNA
gtcaggtcccaagtccg

SEQ ID NO: 122484 - DNA, 17 bp, synthetic construct
  source 1..17: mol_type = other DNA
tcaggtcccaagtccgg

SEQ ID NO: 122485 - DNA, 17 bp, synthetic construct
  source 1..17: mol_type = other DNA
caggtcccaagtccgga

SEQ ID NO: 122486 - DNA, 17 bp, synthetic construct
  source 1..17: mol_type = other DNA
aggtcccaagtccggat

SEQ ID NO: 122487 - DNA, 17 bp, synthetic construct
  source 1..17: mol_type = other DNA
ggtcccaagtccggatc

SEQ ID NO: 122488 - DNA, 17 bp, synthetic construct
  source 1..17: mol_type = other DNA
gtcccaagtccggatct

SEQ ID NO: 122489 - DNA, 17 bp, synthetic construct
  source 1..17: mol_type = other DNA
tcccaagtccggatctc

SEQ ID NO: 122490 - DNA, 17 bp, synthetic construct
  source 1..17: mol_type = other DNA
cccaagtccggatctcc

SEQ ID NO: 122491 - DNA, 17 bp, synthetic construct
  source 1..17: mol_type = other DNA
ccaagtccggatctccc

SEQ ID NO: 122492 - DNA, 17 bp, synthetic construct
  source 1..17: mol_type = other DNA
caagtccggatctcccg

SEQ ID NO: 122493 - DNA, 17 bp, synthetic construct
  source 1..17: mol_type = other DNA
aagtccggatctcccgt

SEQ ID NO: 122494 - DNA, 17 bp, synthetic construct
  source 1..17: mol_type = other DNA
agtccggatctcccgtc

SEQ ID NO: 122495 - DNA, 17 bp, synthetic construct
  source 1..17: mol_type = other DNA
gtccggatctcccgtca

SEQ ID NO: 122496 - DNA, 17 bp, synthetic construct
  source 1..17: mol_type = other DNA
tccggatctcccgtcag

SEQ ID NO: 122497 - DNA, 17 bp, synthetic construct
  source 1..17: mol_type = other DNA
ccggatctcccgtcagc

SEQ ID NO: 122498 - DNA, 17 bp, synthetic construct
  source 1..17: mol_type = other DNA
cggatctcccgtcagcc

SEQ ID NO: 122499 - DNA, 17 bp, synthetic construct
  source 1..17: mol_type = other DNA
ggatctcccgtcagccc

SEQ ID NO: 122500 - DNA, 17 bp, synthetic construct
  source 1..17: mol_type = other DNA
gatctcccgtcagcccc

SEQ ID NO: 122501 - DNA, 17 bp, synthetic construct
  source 1..17: mol_type = other DNA
atctcccgtcagcccca

SEQ ID NO: 122502 - DNA, 17 bp, synthetic construct
  source 1..17: mol_type = other DNA
tctcccgtcagccccac

SEQ ID NO: 122503 - DNA, 17 bp, synthetic construct
  source 1..17: mol_type = other DNA
ctcccgtcagccccaca

SEQ ID NO: 122504 - DNA, 17 bp, synthetic construct
  source 1..17: mol_type = other DNA
tcccgtcagccccacac

SEQ ID NO: 122505 - DNA, 17 bp, synthetic construct
  source 1..17: mol_type = other DNA
cccgtcagccccacacc

SEQ ID NO: 122506 - DNA, 17 bp, synthetic construct
  source 1..17: mol_type = other DNA
ccgtcagccccacacct

SEQ ID NO: 122507 - DNA, 17 bp, synthetic construct
  source 1..17: mol_type = other DNA
cgtcagccccacacctg

SEQ ID NO: 122508 - DNA, 17 bp, synthetic construct
  source 1..17: mol_type = other DNA
gtcagccccacacctgt

SEQ ID NO: 122509 - DNA, 17 bp, synthetic construct
  source 1..17: mol_type = other DNA
tcagccccacacctgtg

SEQ ID NO: 122510 - DNA, 17 bp, synthetic construct
  source 1..17: mol_type = other DNA
cagccccacacctgtgc

SEQ ID NO: 122511 - DNA, 17 bp, synthetic construct
  source 1..17: mol_type = other DNA
agccccacacctgtgcc

SEQ ID NO: 122512 - DNA, 17 bp, synthetic construct
  source 1..17: mol_type = other DNA
gccccacacctgtgcct

SEQ ID NO: 122513 - DNA, 17 bp, synthetic construct
  source 1..17: mol_type = other DNA
ccccacacctgtgcctc

SEQ ID NO: 122514 - DNA, 17 bp, synthetic construct
  source 1..17: mol_type = other DNA
cccacacctgtgcctct

SEQ ID NO: 122515 - DNA, 17 bp, synthetic construct
  source 1..17: mol_type = other DNA
ccacacctgtgcctctt

SEQ ID NO: 122516 - DNA, 17 bp, synthetic construct
  source 1..17: mol_type = other DNA
cacacctgtgcctcttg

SEQ ID NO: 122517 - DNA, 17 bp, synthetic construct
  source 1..17: mol_type = other DNA
acacctgtgcctcttgc

SEQ ID NO: 122518 - DNA, 17 bp, synthetic construct
  source 1..17: mol_type = other DNA
cacctgtgcctcttgcc

SEQ ID NO: 122519 - DNA, 17 bp, synthetic construct
  source 1..17: mol_type = other DNA
acctgtgcctcttgccc

SEQ ID NO: 122520 - DNA, 17 bp, synthetic construct
  source 1..17: mol_type = other DNA
cctgtgcctcttgcccc

SEQ ID NO: 122521 - DNA, 17 bp, synthetic construct
  source 1..17: mol_type = other DNA
ctgtgcctcttgcccct

SEQ ID NO: 122522 - DNA, 17 bp, synthetic construct
  source 1..17: mol_type = other DNA
tgtgcctcttgcccctg

SEQ ID NO: 122523 - DNA, 17 bp, synthetic construct
  source 1..17: mol_type = other DNA
gtgcctcttgcccctgg

SEQ ID NO: 122524 - DNA, 17 bp, synthetic construct
  source 1..17: mol_type = other DNA
tgcctcttgcccctggc

SEQ ID NO: 122525 - DNA, 17 bp, synthetic construct
  source 1..17: mol_type = other DNA
gcctcttgcccctggca

SEQ ID NO: 122526 - DNA, 17 bp, synthetic construct
  source 1..17: mol_type = other DNA
cctcttgcccctggcac

SEQ ID NO: 122527 - DNA, 17 bp, synthetic construct
  source 1..17: mol_type = other DNA
ctcttgcccctggcacg

SEQ ID NO: 122528 - DNA, 17 bp, synthetic construct
  source 1..17: mol_type = other DNA
tcttgcccctggcacga

SEQ ID NO: 122529 - DNA, 17 bp, synthetic construct
  source 1..17: mol_type = other DNA
cttgcccctggcacgaa

SEQ ID NO: 122530 - DNA, 17 bp, synthetic construct
  source 1..17: mol_type = other DNA
ttgcccctggcacgaag

SEQ ID NO: 122531 - DNA, 17 bp, synthetic construct
  source 1..17: mol_type = other DNA
tgcccctggcacgaagc

SEQ ID NO: 122532 - DNA, 17 bp, synthetic construct
  source 1..17: mol_type = other DNA
gcccctggcacgaagcc

SEQ ID NO: 122533 - DNA, 17 bp, synthetic construct
  source 1..17: mol_type = other DNA
cccctggcacgaagcca

SEQ ID NO: 122534 - DNA, 17 bp, synthetic construct
  source 1..17: mol_type = other DNA
ccctggcacgaagccat

SEQ ID NO: 122535 - DNA, 17 bp, synthetic construct
  source 1..17: mol_type = other DNA
cctggcacgaagccatc

SEQ ID NO: 122536 - DNA, 17 bp, synthetic construct
  source 1..17: mol_type = other DNA
ctggcacgaagccatct

SEQ ID NO: 122537 - DNA, 17 bp, synthetic construct
  source 1..17: mol_type = other DNA
tggcacgaagccatctt

SEQ ID NO: 122538 - DNA, 17 bp, synthetic construct
  source 1..17: mol_type = other DNA
ggcacgaagccatcttg

SEQ ID NO: 122539 - DNA, 17 bp, synthetic construct
  source 1..17: mol_type = other DNA
gcacgaagccatcttgg

SEQ ID NO: 122540 - DNA, 17 bp, synthetic construct
  source 1..17: mol_type = other DNA
cacgaagccatcttggc

SEQ ID NO: 122541 - DNA, 17 bp, synthetic construct
  source 1..17: mol_type = other DNA
acgaagccatcttggct

SEQ ID NO: 122542 - DNA, 17 bp, synthetic construct
  source 1..17: mol_type = other DNA
cgaagccatcttggctg

SEQ ID NO: 122543 - DNA, 17 bp, synthetic construct
  source 1..17: mol_type = other DNA
gaagccatcttggctgt

SEQ ID NO: 122544 - DNA, 17 bp, synthetic construct
  source 1..17: mol_type = other DNA
aagccatcttggctgtt

SEQ ID NO: 122545 - DNA, 17 bp, synthetic construct
  source 1..17: mol_type = other DNA
agccatcttggctgttt

SEQ ID NO: 122546 - DNA, 17 bp, synthetic construct
  source 1..17: mol_type = other DNA
gccatcttggctgtttc

SEQ ID NO: 122547 - DNA, 17 bp, synthetic construct
  source 1..17: mol_type = other DNA
ccatcttggctgtttcc

SEQ ID NO: 122548 - DNA, 17 bp, synthetic construct
  source 1..17: mol_type = other DNA
catcttggctgtttccc

SEQ ID NO: 122549 - DNA, 17 bp, synthetic construct
  source 1..17: mol_type = other DNA
atcttggctgtttcccg

SEQ ID NO: 122550 - DNA, 17 bp, synthetic construct
  source 1..17: mol_type = other DNA
tcttggctgtttcccgg

SEQ ID NO: 122551 - DNA, 17 bp, synthetic construct
  source 1..17: mol_type = other DNA
cttggctgtttcccggc

SEQ ID NO: 122552 - DNA, 17 bp, synthetic construct
  source 1..17: mol_type = other DNA
ttggctgtttcccggcc

SEQ ID NO: 122553 - DNA, 17 bp, synthetic construct
  source 1..17: mol_type = other DNA
tggctgtttcccggcca

SEQ ID NO: 122554 - DNA, 17 bp, synthetic construct
  source 1..17: mol_type = other DNA
ggctgtttcccggccac

SEQ ID NO: 122555 - DNA, 17 bp, synthetic construct
  source 1..17: mol_type = other DNA
gctgtttcccggccact

SEQ ID NO: 122556 - DNA, 17 bp, synthetic construct
  source 1..17: mol_type = other DNA
ctgtttcccggccactc

SEQ ID NO: 122557 - DNA, 17 bp, synthetic construct
  source 1..17: mol_type = other DNA
tgtttcccggccactcc

SEQ ID NO: 122558 - DNA, 17 bp, synthetic construct
  source 1..17: mol_type = other DNA
gtttcccggccactcct

SEQ ID NO: 122559 - DNA, 17 bp, synthetic construct
  source 1..17: mol_type = other DNA
tttcccggccactcctt

SEQ ID NO: 122560 - DNA, 17 bp, synthetic construct
  source 1..17: mol_type = other DNA
ttcccggccactccttt

SEQ ID NO: 122561 - DNA, 17 bp, synthetic construct
  source 1..17: mol_type = other DNA
tcccggccactcctttg

SEQ ID NO: 122562 - DNA, 17 bp, synthetic construct
  source 1..17: mol_type = other DNA
cccggccactcctttga

SEQ ID NO: 122563 - DNA, 17 bp, synthetic construct
  source 1..17: mol_type = other DNA
ccggccactcctttgac

SEQ ID NO: 122564 - DNA, 17 bp, synthetic construct
  source 1..17: mol_type = other DNA
cggccactcctttgacc

SEQ ID NO: 122565 - DNA, 17 bp, synthetic construct
  source 1..17: mol_type = other DNA
ggccactcctttgacca

SEQ ID NO: 122566 - DNA, 17 bp, synthetic construct
  source 1..17: mol_type = other DNA
gccactcctttgaccac

SEQ ID NO: 122567 - DNA, 17 bp, synthetic construct
  source 1..17: mol_type = other DNA
ccactcctttgaccaca

SEQ ID NO: 122568 - DNA, 17 bp, synthetic construct
  source 1..17: mol_type = other DNA
cactcctttgaccacag

SEQ ID NO: 122569 - DNA, 17 bp, synthetic construct
  source 1..17: mol_type = other DNA
actcctttgaccacagc

SEQ ID NO: 122570 - DNA, 17 bp, synthetic construct
  source 1..17: mol_type = other DNA
ctcctttgaccacagcc

SEQ ID NO: 122571 - DNA, 17 bp, synthetic construct
  source 1..17: mol_type = other DNA
tcctttgaccacagcct

SEQ ID NO: 122572 - DNA, 17 bp, synthetic construct
  source 1..17: mol_type = other DNA
cctttgaccacagcctc

SEQ ID NO: 122573 - DNA, 17 bp, synthetic construct
  source 1..17: mol_type = other DNA
ctttgaccacagcctca

SEQ ID NO: 122574 - DNA, 17 bp, synthetic construct
  source 1..17: mol_type = other DNA
tttgaccacagcctcag

SEQ ID NO: 122575 - DNA, 17 bp, synthetic construct
  source 1..17: mol_type = other DNA
ttgaccacagcctcagt

SEQ ID NO: 122576 - DNA, 17 bp, synthetic construct
  source 1..17: mol_type = other DNA
tgaccacagcctcagtc

SEQ ID NO: 122577 - DNA, 17 bp, synthetic construct
  source 1..17: mol_type = other DNA
gaccacagcctcagtca

SEQ ID NO: 122578 - DNA, 17 bp, synthetic construct
  source 1..17: mol_type = other DNA
accacagcctcagtcac

SEQ ID NO: 122579 - DNA, 17 bp, synthetic construct
  source 1..17: mol_type = other DNA
ccacagcctcagtcaca

SEQ ID NO: 122580 - DNA, 17 bp, synthetic construct
  source 1..17: mol_type = other DNA
cacagcctcagtcacac

SEQ ID NO: 122581 - DNA, 17 bp, synthetic construct
  source 1..17: mol_type = other DNA
acagcctcagtcacacc

SEQ ID NO: 122582 - DNA, 17 bp, synthetic construct
  source 1..17: mol_type = other DNA
cagcctcagtcacaccc

SEQ ID NO: 122583 - DNA, 17 bp, synthetic construct
  source 1..17: mol_type = other DNA
agcctcagtcacaccca

SEQ ID NO: 122584 - DNA, 17 bp, synthetic construct
  source 1..17: mol_type = other DNA
gcctcagtcacacccag

SEQ ID NO: 122585 - DNA, 17 bp, synthetic construct
  source 1..17: mol_type = other DNA
cctcagtcacacccaga

SEQ ID NO: 122586 - DNA, 17 bp, synthetic construct
  source 1..17: mol_type = other DNA
ctcagtcacacccagag

SEQ ID NO: 122587 - DNA, 17 bp, synthetic construct
  source 1..17: mol_type = other DNA
tcagtcacacccagagg

SEQ ID NO: 122588 - DNA, 17 bp, synthetic construct
  source 1..17: mol_type = other DNA
cagtcacacccagaggc

SEQ ID NO: 122589 - DNA, 17 bp, synthetic construct
  source 1..17: mol_type = other DNA
agtcacacccagaggct

SEQ ID NO: 122590 - DNA, 17 bp, synthetic construct
  source 1..17: mol_type = other DNA
gtcacacccagaggctc

SEQ ID NO: 122591 - DNA, 17 bp, synthetic construct
  source 1..17: mol_type = other DNA
tcacacccagaggctca

SEQ ID NO: 122592 - DNA, 17 bp, synthetic construct
  source 1..17: mol_type = other DNA
cacacccagaggctcac

SEQ ID NO: 122593 - DNA, 17 bp, synthetic construct
  source 1..17: mol_type = other DNA
acacccagaggctcaca

SEQ ID NO: 122594 - DNA, 17 bp, synthetic construct
  source 1..17: mol_type = other DNA
cacccagaggctcacag

SEQ ID NO: 122595 - DNA, 17 bp, synthetic construct
  source 1..17: mol_type = other DNA
acccagaggctcacagg

SEQ ID NO: 122596 - DNA, 17 bp, synthetic construct
  source 1..17: mol_type = other DNA
cccagaggctcacaggg

SEQ ID NO: 122597 - DNA, 17 bp, synthetic construct
  source 1..17: mol_type = other DNA
ccagaggctcacaggga

SEQ ID NO: 122598 - DNA, 17 bp, synthetic construct
  source 1..17: mol_type = other DNA
cagaggctcacagggag

SEQ ID NO: 122599 - DNA, 17 bp, synthetic construct
  source 1..17: mol_type = other DNA
agaggctcacagggagg

SEQ ID NO: 122600 - DNA, 17 bp, synthetic construct
  source 1..17: mol_type = other DNA
gaggctcacagggaggg

SEQ ID NO: 122601 - DNA, 17 bp, synthetic construct
  source 1..17: mol_type = other DNA
aggctcacagggagggg

SEQ ID NO: 122602 - DNA, 17 bp, synthetic construct
  source 1..17: mol_type = other DNA
ggctcacagggaggggc

SEQ ID NO: 122603 - DNA, 17 bp, synthetic construct
  source 1..17: mol_type = other DNA
gctcacagggaggggca

SEQ ID NO: 122604 - DNA, 17 bp, synthetic construct
  source 1..17: mol_type = other DNA
ctcacagggaggggcag

SEQ ID NO: 122605 - DNA, 17 bp, synthetic construct
  source 1..17: mol_type = other DNA
tcacagggaggggcagc

SEQ ID NO: 122606 - DNA, 17 bp, synthetic construct
  source 1..17: mol_type = other DNA
cacagggaggggcagcc

SEQ ID NO: 122607 - DNA, 17 bp, synthetic construct
  source 1..17: mol_type = other DNA
acagggaggggcagccc

SEQ ID NO: 122608 - DNA, 17 bp, synthetic construct
  source 1..17: mol_type = other DNA
cagggaggggcagccct

SEQ ID NO: 122609 - DNA, 17 bp, synthetic construct
  source 1..17: mol_type = other DNA
agggaggggcagccctc

SEQ ID NO: 122610 - DNA, 17 bp, synthetic construct
  source 1..17: mol_type = other DNA
gggaggggcagccctct

SEQ ID NO: 122611 - DNA, 17 bp, synthetic construct
  source 1..17: mol_type = other DNA
ggaggggcagccctcta

SEQ ID NO: 122612 - DNA, 17 bp, synthetic construct
  source 1..17: mol_type = other DNA
gaggggcagccctctat

SEQ ID NO: 122613 - DNA, 17 bp, synthetic construct
  source 1..17: mol_type = other DNA
aggggcagccctctatg

SEQ ID NO: 122614 - DNA, 17 bp, synthetic construct
  source 1..17: mol_type = other DNA
ggggcagccctctatgt

SEQ ID NO: 122615 - DNA, 17 bp, synthetic construct
  source 1..17: mol_type = other DNA
gggcagccctctatgtg

SEQ ID NO: 122616 - DNA, 17 bp, synthetic construct
  source 1..17: mol_type = other DNA
ggcagccctctatgtgg

SEQ ID NO: 122617 - DNA, 17 bp, synthetic construct
  source 1..17: mol_type = other DNA
gcagccctctatgtggc

SEQ ID NO: 122618 - DNA, 17 bp, synthetic construct
  source 1..17: mol_type = other DNA
cagccctctatgtggcc

SEQ ID NO: 122619 - DNA, 17 bp, synthetic construct
  source 1..17: mol_type = other DNA
agccctctatgtggccc

SEQ ID NO: 122620 - DNA, 17 bp, synthetic construct
  source 1..17: mol_type = other DNA
gccctctatgtggcccc

SEQ ID NO: 122621 - DNA, 17 bp, synthetic construct
  source 1..17: mol_type = other DNA
ccctctatgtggcccct

SEQ ID NO: 122622 - DNA, 17 bp, synthetic construct
  source 1..17: mol_type = other DNA
cctctatgtggccccta

SEQ ID NO: 122623 - DNA, 17 bp, synthetic construct
  source 1..17: mol_type = other DNA
ctctatgtggcccctag

SEQ ID NO: 122624 - DNA, 17 bp, synthetic construct
  source 1..17: mol_type = other DNA
tctatgtggcccctagc

SEQ ID NO: 122625 - DNA, 17 bp, synthetic construct
  source 1..17: mol_type = other DNA
ctatgtggcccctagcc

SEQ ID NO: 122626 - DNA, 17 bp, synthetic construct
  source 1..17: mol_type = other DNA
tatgtggcccctagcca

SEQ ID NO: 122627 - DNA, 17 bp, synthetic construct
  source 1..17: mol_type = other DNA
atgtggcccctagccac

SEQ ID NO: 122628 - DNA, 17 bp, synthetic construct
  source 1..17: mol_type = other DNA
tgtggcccctagccacc

SEQ ID NO: 122629 - DNA, 17 bp, synthetic construct
  source 1..17: mol_type = other DNA
gtggcccctagccaccc

SEQ ID NO: 122630 - DNA, 17 bp, synthetic construct
  source 1..17: mol_type = other DNA
tggcccctagccaccct

SEQ ID NO: 122631 - DNA, 17 bp, synthetic construct
  source 1..17: mol_type = other DNA
ggcccctagccaccctc

SEQ ID NO: 122632 - DNA, 17 bp, synthetic construct
  source 1..17: mol_type = other DNA
gcccctagccaccctcc

SEQ ID NO: 122633 - DNA, 17 bp, synthetic construct
  source 1..17: mol_type = other DNA
cccctagccaccctcct

SEQ ID NO: 122634 - DNA, 17 bp, synthetic construct
  source 1..17: mol_type = other DNA
ccctagccaccctcctc

SEQ ID NO: 122635 - DNA, 17 bp, synthetic construct
  source 1..17: mol_type = other DNA
cctagccaccctcctct

SEQ ID NO: 122636 - DNA, 17 bp, synthetic construct
  source 1..17: mol_type = other DNA
ctagccaccctcctcta

SEQ ID NO: 122637 - DNA, 17 bp, synthetic construct
  source 1..17: mol_type = other DNA
tagccaccctcctctat

SEQ ID NO: 122638 - DNA, 17 bp, synthetic construct
  source 1..17: mol_type = other DNA
agccaccctcctctatg

SEQ ID NO: 122639 - DNA, 17 bp, synthetic construct
  source 1..17: mol_type = other DNA
gccaccctcctctatga

SEQ ID NO: 122640 - DNA, 17 bp, synthetic construct
  source 1..17: mol_type = other DNA
ccaccctcctctatgat

SEQ ID NO: 122641 - DNA, 17 bp, synthetic construct
  source 1..17: mol_type = other DNA
caccctcctctatgatc

SEQ ID NO: 122642 - DNA, 17 bp, synthetic construct
  source 1..17: mol_type = other DNA
accctcctctatgatcc

SEQ ID NO: 122643 - DNA, 17 bp, synthetic construct
  source 1..17: mol_type = other DNA
ccctcctctatgatccc

SEQ ID NO: 122644 - DNA, 17 bp, synthetic construct
  source 1..17: mol_type = other DNA
cctcctctatgatcccc

SEQ ID NO: 122645 - DNA, 17 bp, synthetic construct
  source 1..17: mol_type = other DNA
ctcctctatgatcccca

SEQ ID NO: 122646 - DNA, 17 bp, synthetic construct
  source 1..17: mol_type = other DNA
tcctctatgatccccag

SEQ ID NO: 122647 - DNA, 17 bp, synthetic construct
  source 1..17: mol_type = other DNA
cctctatgatccccaga

SEQ ID NO: 122648 - DNA, 17 bp, synthetic construct
  source 1..17: mol_type = other DNA
ctctatgatccccagac

SEQ ID NO: 122649 - DNA, 17 bp, synthetic construct
  source 1..17: mol_type = other DNA
tctatgatccccagacc

SEQ ID NO: 122650 - DNA, 17 bp, synthetic construct
  source 1..17: mol_type = other DNA
ctatgatccccagacct

SEQ ID NO: 122651 - DNA, 17 bp, synthetic construct
  source 1..17: mol_type = other DNA
tatgatccccagacctg

SEQ ID NO: 122652 - DNA, 17 bp, synthetic construct
  source 1..17: mol_type = other DNA
atgatccccagacctgc

SEQ ID NO: 122653 - DNA, 17 bp, synthetic construct
  source 1..17: mol_type = other DNA
tgatccccagacctgcc

SEQ ID NO: 122654 - DNA, 17 bp, synthetic construct
  source 1..17: mol_type = other DNA
gatccccagacctgccc

SEQ ID NO: 122655 - DNA, 17 bp, synthetic construct
  source 1..17: mol_type = other DNA
atccccagacctgccca

SEQ ID NO: 122656 - DNA, 17 bp, synthetic construct
  source 1..17: mol_type = other DNA
tccccagacctgcccag

SEQ ID NO: 122657 - DNA, 17 bp, synthetic construct
  source 1..17: mol_type = other DNA
ccccagacctgcccagt

SEQ ID NO: 122658 - DNA, 17 bp, synthetic construct
  source 1..17: mol_type = other DNA
cccagacctgcccagtc

SEQ ID NO: 122659 - DNA, 17 bp, synthetic construct
  source 1..17: mol_type = other DNA
ccagacctgcccagtcc

SEQ ID NO: 122660 - DNA, 17 bp, synthetic construct
  source 1..17: mol_type = other DNA
cagacctgcccagtcct

SEQ ID NO: 122661 - DNA, 17 bp, synthetic construct
  source 1..17: mol_type = other DNA
agacctgcccagtcctc

SEQ ID NO: 122662 - DNA, 17 bp, synthetic construct
  source 1..17: mol_type = other DNA
gacctgcccagtcctca

SEQ ID NO: 122663 - DNA, 17 bp, synthetic construct
  source 1..17: mol_type = other DNA
acctgcccagtcctcag

SEQ ID NO: 122664 - DNA, 17 bp, synthetic construct
  source 1..17: mol_type = other DNA
cctgcccagtcctcagc

SEQ ID NO: 122665 - DNA, 17 bp, synthetic construct
  source 1..17: mol_type = other DNA
ctgcccagtcctcagca

SEQ ID NO: 122666 - DNA, 17 bp, synthetic construct
  source 1..17: mol_type = other DNA
tgcccagtcctcagcac

SEQ ID NO: 122667 - DNA, 17 bp, synthetic construct
  source 1..17: mol_type = other DNA
gcccagtcctcagcaca

SEQ ID NO: 122668 - DNA, 17 bp, synthetic construct
  source 1..17: mol_type = other DNA
cccagtcctcagcacaa

SEQ ID NO: 122669 - DNA, 17 bp, synthetic construct
  source 1..17: mol_type = other DNA
ccagtcctcagcacaaa

SEQ ID NO: 122670 - DNA, 17 bp, synthetic construct
  source 1..17: mol_type = other DNA
cagtcctcagcacaaac

SEQ ID NO: 122671 - DNA, 17 bp, synthetic construct
  source 1..17: mol_type = other DNA
agtcctcagcacaaact

SEQ ID NO: 122672 - DNA, 17 bp, synthetic construct
  source 1..17: mol_type = other DNA
gtcctcagcacaaactg

SEQ ID NO: 122673 - DNA, 17 bp, synthetic construct
  source 1..17: mol_type = other DNA
tcctcagcacaaactgg

SEQ ID NO: 122674 - DNA, 17 bp, synthetic construct
  source 1..17: mol_type = other DNA
cctcagcacaaactgga

SEQ ID NO: 122675 - DNA, 17 bp, synthetic construct
  source 1..17: mol_type = other DNA
ctcagcacaaactggaa

SEQ ID NO: 122676 - DNA, 17 bp, synthetic construct
  source 1..17: mol_type = other DNA
tcagcacaaactggaat

SEQ ID NO: 122677 - DNA, 17 bp, synthetic construct
  source 1..17: mol_type = other DNA
cagcacaaactggaatg

SEQ ID NO: 122678 - DNA, 17 bp, synthetic construct
  source 1..17: mol_type = other DNA
agcacaaactggaatgc

SEQ ID NO: 122679 - DNA, 17 bp, synthetic construct
  source 1..17: mol_type = other DNA
gcacaaactggaatgcc

SEQ ID NO: 122680 - DNA, 17 bp, synthetic construct
  source 1..17: mol_type = other DNA
cacaaactggaatgcca

SEQ ID NO: 122681 - DNA, 17 bp, synthetic construct
  source 1..17: mol_type = other DNA
acaaactggaatgccag

SEQ ID NO: 122682 - DNA, 17 bp, synthetic construct
  source 1..17: mol_type = other DNA
caaactggaatgccagc

SEQ ID NO: 122683 - DNA, 17 bp, synthetic construct
  source 1..17: mol_type = other DNA
aaactggaatgccagcc

SEQ ID NO: 122684 - DNA, 17 bp, synthetic construct
  source 1..17: mol_type = other DNA
aactggaatgccagcct

SEQ ID NO: 122685 - DNA, 17 bp, synthetic construct
  source 1..17: mol_type = other DNA
actggaatgccagcctg

SEQ ID NO: 122686 - DNA, 17 bp, synthetic construct
  source 1..17: mol_type = other DNA
ctggaatgccagcctgg

SEQ ID NO: 122687 - DNA, 17 bp, synthetic construct
  source 1..17: mol_type = other DNA
tggaatgccagcctggc

SEQ ID NO: 122688 - DNA, 17 bp, synthetic construct
  source 1..17: mol_type = other DNA
ggaatgccagcctggct

SEQ ID NO: 122689 - DNA, 17 bp, synthetic construct
  source 1..17: mol_type = other DNA
gaatgccagcctggctc

SEQ ID NO: 122690 - DNA, 17 bp, synthetic construct
  source 1..17: mol_type = other DNA
aatgccagcctggctcc

SEQ ID NO: 122691 - DNA, 17 bp, synthetic construct
  source 1..17: mol_type = other DNA
atgccagcctggctccc

SEQ ID NO: 122692 - DNA, 17 bp, synthetic construct
  source 1..17: mol_type = other DNA
tgccagcctggctcccc

SEQ ID NO: 122693 - DNA, 17 bp, synthetic construct
  source 1..17: mol_type = other DNA
gccagcctggctccccg

SEQ ID NO: 122694 - DNA, 17 bp, synthetic construct
  source 1..17: mol_type = other DNA
ccagcctggctccccgc

SEQ ID NO: 122695 - DNA, 17 bp, synthetic construct
  source 1..17: mol_type = other DNA
cagcctggctccccgct

SEQ ID NO: 122696 - DNA, 17 bp, synthetic construct
  source 1..17: mol_type = other DNA
agcctggctccccgctc

SEQ ID NO: 122697 - DNA, 17 bp, synthetic construct
  source 1..17: mol_type = other DNA
gcctggctccccgctca

SEQ ID NO: 122698 - DNA, 17 bp, synthetic construct
  source 1..17: mol_type = other DNA
cctggctccccgctcag

SEQ ID NO: 122699 - DNA, 17 bp, synthetic construct
  source 1..17: mol_type = other DNA
ctggctccccgctcagc

SEQ ID NO: 122700 - DNA, 17 bp, synthetic construct
  source 1..17: mol_type = other DNA
tggctccccgctcagcc

SEQ ID NO: 122701 - DNA, 17 bp, synthetic construct
  source 1..17: mol_type = other DNA
ggctccccgctcagcca

SEQ ID NO: 122702 - DNA, 17 bp, synthetic construct
  source 1..17: mol_type = other DNA
gctccccgctcagccag

SEQ ID NO: 122703 - DNA, 17 bp, synthetic construct
  source 1..17: mol_type = other DNA
ctccccgctcagccagg

SEQ ID NO: 122704 - DNA, 17 bp, synthetic construct
  source 1..17: mol_type = other DNA
tccccgctcagccaggg

SEQ ID NO: 122705 - DNA, 17 bp, synthetic construct
  source 1..17: mol_type = other DNA
ccccgctcagccaggga

SEQ ID NO: 122706 - DNA, 17 bp, synthetic construct
  source 1..17: mol_type = other DNA
cccgctcagccagggag

SEQ ID NO: 122707 - DNA, 17 bp, synthetic construct
  source 1..17: mol_type = other DNA
ccgctcagccagggagg

SEQ ID NO: 122708 - DNA, 17 bp, synthetic construct
  source 1..17: mol_type = other DNA
cgctcagccagggagga

SEQ ID NO: 122709 - DNA, 17 bp, synthetic construct
  source 1..17: mol_type = other DNA
gctcagccagggaggaa

SEQ ID NO: 122710 - DNA, 17 bp, synthetic construct
  source 1..17: mol_type = other DNA
ctcagccagggaggaat

SEQ ID NO: 122711 - DNA, 17 bp, synthetic construct
  source 1..17: mol_type = other DNA
tcagccagggaggaatc

SEQ ID NO: 122712 - DNA, 17 bp, synthetic construct
  source 1..17: mol_type = other DNA
cagccagggaggaatca

SEQ ID NO: 122713 - DNA, 17 bp, synthetic construct
  source 1..17: mol_type = other DNA
agccagggaggaatcag

SEQ ID NO: 122714 - DNA, 17 bp, synthetic construct
  source 1..17: mol_type = other DNA
gccagggaggaatcaga

SEQ ID NO: 122715 - DNA, 17 bp, synthetic construct
  source 1..17: mol_type = other DNA
ccagggaggaatcagag

SEQ ID NO: 122716 - DNA, 17 bp, synthetic construct
  source 1..17: mol_type = other DNA
cagggaggaatcagaga

SEQ ID NO: 122717 - DNA, 17 bp, synthetic construct
  source 1..17: mol_type = other DNA
agggaggaatcagagat

SEQ ID NO: 122718 - DNA, 17 bp, synthetic construct
  source 1..17: mol_type = other DNA
gggaggaatcagagatc

SEQ ID NO: 122719 - DNA, 17 bp, synthetic construct
  source 1..17: mol_type = other DNA
ggaggaatcagagatct

SEQ ID NO: 122720 - DNA, 17 bp, synthetic construct
  source 1..17: mol_type = other DNA
gaggaatcagagatctg

SEQ ID NO: 122721 - DNA, 17 bp, synthetic construct
  source 1..17: mol_type = other DNA
aggaatcagagatctgc

SEQ ID NO: 122722 - DNA, 17 bp, synthetic construct
  source 1..17: mol_type = other DNA
ggaatcagagatctgcc

SEQ ID NO: 122723 - DNA, 17 bp, synthetic construct
  source 1..17: mol_type = other DNA
gaatcagagatctgccc

SEQ ID NO: 122724 - DNA, 17 bp, synthetic construct
  source 1..17: mol_type = other DNA
aatcagagatctgccct

SEQ ID NO: 122725 - DNA, 17 bp, synthetic construct
  source 1..17: mol_type = other DNA
atcagagatctgcccta

SEQ ID NO: 122726 - DNA, 17 bp, synthetic construct
  source 1..17: mol_type = other DNA
tcagagatctgccctaa

SEQ ID NO: 122727 - DNA, 17 bp, synthetic construct
  source 1..17: mol_type = other DNA
cagagatctgccctaag

SEQ ID NO: 122728 - DNA, 17 bp, synthetic construct
  source 1..17: mol_type = other DNA
agagatctgccctaagc

SEQ ID NO: 122729 - DNA, 17 bp, synthetic construct
  source 1..17: mol_type = other DNA
gagatctgccctaagca

SEQ ID NO: 122730 - DNA, 17 bp, synthetic construct
  source 1..17: mol_type = other DNA
agatctgccctaagcag

SEQ ID NO: 122731 - DNA, 17 bp, synthetic construct
  source 1..17: mol_type = other DNA
gatctgccctaagcaga

SEQ ID NO: 122732 - DNA, 17 bp, synthetic construct
  source 1..17: mol_type = other DNA
atctgccctaagcagag

SEQ ID NO: 122733 - DNA, 17 bp, synthetic construct
  source 1..17: mol_type = other DNA
tctgccctaagcagaga

SEQ ID NO: 122734 - DNA, 17 bp, synthetic construct
  source 1..17: mol_type = other DNA
ctgccctaagcagagac

SEQ ID NO: 122735 - DNA, 17 bp, synthetic construct
  source 1..17: mol_type = other DNA
tgccctaagcagagact

SEQ ID NO: 122736 - DNA, 17 bp, synthetic construct
  source 1..17: mol_type = other DNA
gccctaagcagagactt

SEQ ID NO: 122737 - DNA, 17 bp, synthetic construct
  source 1..17: mol_type = other DNA
ccctaagcagagacttc

SEQ ID NO: 122738 - DNA, 17 bp, synthetic construct
  source 1..17: mol_type = other DNA
cctaagcagagacttcc

SEQ ID NO: 122739 - DNA, 17 bp, synthetic construct
  source 1..17: mol_type = other DNA
ctaagcagagacttcca

SEQ ID NO: 122740 - DNA, 17 bp, synthetic construct
  source 1..17: mol_type = other DNA
taagcagagacttccaa

SEQ ID NO: 122741 - DNA, 17 bp, synthetic construct
  source 1..17: mol_type = other DNA
aagcagagacttccaaa

SEQ ID NO: 122742 - DNA, 17 bp, synthetic construct
  source 1..17: mol_type = other DNA
agcagagacttccaaaa

SEQ ID NO: 122743 - DNA, 17 bp, synthetic construct
  source 1..17: mol_type = other DNA
gcagagacttccaaaaa

SEQ ID NO: 122744 - DNA, 17 bp, synthetic construct
  source 1..17: mol_type = other DNA
cagagacttccaaaaag

SEQ ID NO: 122745 - DNA, 17 bp, synthetic construct
  source 1..17: mol_type = other DNA
agagacttccaaaaagc

SEQ ID NO: 122746 - DNA, 17 bp, synthetic construct
  source 1..17: mol_type = other DNA
gagacttccaaaaagca

SEQ ID NO: 122747 - DNA, 17 bp, synthetic construct
  source 1..17: mol_type = other DNA
agacttccaaaaagcag

SEQ ID NO: 122748 - DNA, 17 bp, synthetic construct
  source 1..17: mol_type = other DNA
gacttccaaaaagcagt

SEQ ID NO: 122749 - DNA, 17 bp, synthetic construct
  source 1..17: mol_type = other DNA
acttccaaaaagcagtt

SEQ ID NO: 122750 - DNA, 17 bp, synthetic construct
  source 1..17: mol_type = other DNA
cttccaaaaagcagttt

SEQ ID NO: 122751 - DNA, 17 bp, synthetic construct
  source 1..17: mol_type = other DNA
ttccaaaaagcagtttc

SEQ ID NO: 122752 - DNA, 17 bp, synthetic construct
  source 1..17: mol_type = other DNA
tccaaaaagcagtttcc

SEQ ID NO: 122753 - DNA, 17 bp, synthetic construct
  source 1..17: mol_type = other DNA
ccaaaaagcagtttcct

SEQ ID NO: 122754 - DNA, 17 bp, synthetic construct
  source 1..17: mol_type = other DNA
caaaaagcagtttcctg

SEQ ID NO: 122755 - DNA, 17 bp, synthetic construct
  source 1..17: mol_type = other DNA
aaaaagcagtttcctga

SEQ ID NO: 122756 - DNA, 17 bp, synthetic construct
  source 1..17: mol_type = other DNA
aaaagcagtttcctgac

SEQ ID NO: 122757 - DNA, 17 bp, synthetic construct
  source 1..17: mol_type = other DNA
aaagcagtttcctgact

SEQ ID NO: 122758 - DNA, 17 bp, synthetic construct
  source 1..17: mol_type = other DNA
aagcagtttcctgactg

SEQ ID NO: 122759 - DNA, 17 bp, synthetic construct
  source 1..17: mol_type = other DNA
agcagtttcctgactgg

SEQ ID NO: 122760 - DNA, 17 bp, synthetic construct
  source 1..17: mol_type = other DNA
gcagtttcctgactggg

SEQ ID NO: 122761 - DNA, 17 bp, synthetic construct
  source 1..17: mol_type = other DNA
cagtttcctgactgggc

SEQ ID NO: 122762 - DNA, 17 bp, synthetic construct
  source 1..17: mol_type = other DNA
agtttcctgactgggcg

SEQ ID NO: 122763 - DNA, 17 bp, synthetic construct
  source 1..17: mol_type = other DNA
gtttcctgactgggcgc

SEQ ID NO: 122764 - DNA, 17 bp, synthetic construct
  source 1..17: mol_type = other DNA
tttcctgactgggcgcg

SEQ ID NO: 122765 - DNA, 17 bp, synthetic construct
  source 1..17: mol_type = other DNA
ttcctgactgggcgcgg

SEQ ID NO: 122766 - DNA, 17 bp, synthetic construct
  source 1..17: mol_type = other DNA
tcctgactgggcgcggt

SEQ ID NO: 122767 - DNA, 17 bp, synthetic construct
  source 1..17: mol_type = other DNA
cctgactgggcgcggtg

SEQ ID NO: 122768 - DNA, 17 bp, synthetic construct
  source 1..17: mol_type = other DNA
ctgactgggcgcggtgg

SEQ ID NO: 122769 - DNA, 17 bp, synthetic construct
  source 1..17: mol_type = other DNA
tgactgggcgcggtggc

SEQ ID NO: 122770 - DNA, 17 bp, synthetic construct
  source 1..17: mol_type = other DNA
gactgggcgcggtggct

SEQ ID NO: 122771 - DNA, 17 bp, synthetic construct
  source 1..17: mol_type = other DNA
actgggcgcggtggctc

SEQ ID NO: 122772 - DNA, 17 bp, synthetic construct
  source 1..17: mol_type = other DNA
ctgggcgcggtggctca

SEQ ID NO: 122773 - DNA, 17 bp, synthetic construct
  source 1..17: mol_type = other DNA
tgggcgcggtggctcat

SEQ ID NO: 122774 - DNA, 17 bp, synthetic construct
  source 1..17: mol_type = other DNA
gggcgcggtggctcatg

SEQ ID NO: 122775 - DNA, 17 bp, synthetic construct
  source 1..17: mol_type = other DNA
ggcgcggtggctcatgt

SEQ ID NO: 122776 - DNA, 17 bp, synthetic construct
  source 1..17: mol_type = other DNA
gcgcggtggctcatgtc

SEQ ID NO: 122777 - DNA, 17 bp, synthetic construct
  source 1..17: mol_type = other DNA
cgcggtggctcatgtct

SEQ ID NO: 122778 - DNA, 17 bp, synthetic construct
  source 1..17: mol_type = other DNA
gcggtggctcatgtctg

SEQ ID NO: 122779 - DNA, 17 bp, synthetic construct
  source 1..17: mol_type = other DNA
cggtggctcatgtctgt

SEQ ID NO: 122780 - DNA, 17 bp, synthetic construct
  source 1..17: mol_type = other DNA
ggtggctcatgtctgta

SEQ ID NO: 122781 - DNA, 17 bp, synthetic construct
  source 1..17: mol_type = other DNA
gtggctcatgtctgtaa

SEQ ID NO: 122782 - DNA, 17 bp, synthetic construct
  source 1..17: mol_type = other DNA
tggctcatgtctgtaat

SEQ ID NO: 122783 - DNA, 17 bp, synthetic construct
  source 1..17: mol_type = other DNA
ggctcatgtctgtaatc

SEQ ID NO: 122784 - DNA, 17 bp, synthetic construct
  source 1..17: mol_type = other DNA
gctcatgtctgtaatcc

SEQ ID NO: 122785 - DNA, 17 bp, synthetic construct
  source 1..17: mol_type = other DNA
ctcatgtctgtaatccc

SEQ ID NO: 122786 - DNA, 17 bp, synthetic construct
  source 1..17: mol_type = other DNA
tcatgtctgtaatccca

SEQ ID NO: 122787 - DNA, 17 bp, synthetic construct
  source 1..17: mol_type = other DNA
catgtctgtaatcccag

SEQ ID NO: 122788 - DNA, 17 bp, synthetic construct
  source 1..17: mol_type = other DNA
atgtctgtaatcccagc

SEQ ID NO: 122789 - DNA, 17 bp, synthetic construct
  source 1..17: mol_type = other DNA
tgtctgtaatcccagca

SEQ ID NO: 122790 - DNA, 17 bp, synthetic construct
  source 1..17: mol_type = other DNA
gtctgtaatcccagcac

SEQ ID NO: 122791 - DNA, 17 bp, synthetic construct
  source 1..17: mol_type = other DNA
tctgtaatcccagcact

SEQ ID NO: 122792 - DNA, 17 bp, synthetic construct
  source 1..17: mol_type = other DNA
ctgtaatcccagcactt

SEQ ID NO: 122793 - DNA, 17 bp, synthetic construct
  source 1..17: mol_type = other DNA
tgtaatcccagcacttt

SEQ ID NO: 122794 - DNA, 17 bp, synthetic construct
  source 1..17: mol_type = other DNA
gtaatcccagcactttg

SEQ ID NO: 122795 - DNA, 17 bp, synthetic construct
  source 1..17: mol_type = other DNA
taatcccagcactttgg

SEQ ID NO: 122796 - DNA, 17 bp, synthetic construct
  source 1..17: mol_type = other DNA
aatcccagcactttggg

SEQ ID NO: 122797 - DNA, 17 bp, synthetic construct
  source 1..17: mol_type = other DNA
atcccagcactttggga

SEQ ID NO: 122798 - DNA, 17 bp, synthetic construct
  source 1..17: mol_type = other DNA
tcccagcactttgggac

SEQ ID NO: 122799 - DNA, 17 bp, synthetic construct
  source 1..17: mol_type = other DNA
cccagcactttgggacg

SEQ ID NO: 122800 - DNA, 17 bp, synthetic construct
  source 1..17: mol_type = other DNA
ccagcactttgggacgc

SEQ ID NO: 122801 - DNA, 17 bp, synthetic construct
  source 1..17: mol_type = other DNA
cagcactttgggacgct

SEQ ID NO: 122802 - DNA, 17 bp, synthetic construct
  source 1..17: mol_type = other DNA
agcactttgggacgctg

SEQ ID NO: 122803 - DNA, 17 bp, synthetic construct
  source 1..17: mol_type = other DNA
gcactttgggacgctga

SEQ ID NO: 122804 - DNA, 17 bp, synthetic construct
  source 1..17: mol_type = other DNA
cactttgggacgctgag

SEQ ID NO: 122805 - DNA, 17 bp, synthetic construct
  source 1..17: mol_type = other DNA
actttgggacgctgagg

SEQ ID NO: 122806 - DNA, 17 bp, synthetic construct
  source 1..17: mol_type = other DNA
ctttgggacgctgaggc

SEQ ID NO: 122807 - DNA, 17 bp, synthetic construct
  source 1..17: mol_type = other DNA
tttgggacgctgaggca

SEQ ID NO: 122808 - DNA, 17 bp, synthetic construct
  source 1..17: mol_type = other DNA
ttgggacgctgaggcag

SEQ ID NO: 122809 - DNA, 17 bp, synthetic construct
  source 1..17: mol_type = other DNA
tgggacgctgaggcagg

SEQ ID NO: 122810 - DNA, 17 bp, synthetic construct
  source 1..17: mol_type = other DNA
gggacgctgaggcaggt

SEQ ID NO: 122811 - DNA, 17 bp, synthetic construct
  source 1..17: mol_type = other DNA
ggacgctgaggcaggtg

SEQ ID NO: 122812 - DNA, 17 bp, synthetic construct
  source 1..17: mol_type = other DNA
gacgctgaggcaggtgg

SEQ ID NO: 122813 - DNA, 17 bp, synthetic construct
  source 1..17: mol_type = other DNA
acgctgaggcaggtgga

SEQ ID NO: 122814 - DNA, 17 bp, synthetic construct
  source 1..17: mol_type = other DNA
cgctgaggcaggtggat

SEQ ID NO: 122815 - DNA, 17 bp, synthetic construct
  source 1..17: mol_type = other DNA
gctgaggcaggtggatc

SEQ ID NO: 122816 - DNA, 17 bp, synthetic construct
  source 1..17: mol_type = other DNA
ctgaggcaggtggatca

SEQ ID NO: 122817 - DNA, 17 bp, synthetic construct
  source 1..17: mol_type = other DNA
tgaggcaggtggatcac

SEQ ID NO: 122818 - DNA, 17 bp, synthetic construct
  source 1..17: mol_type = other DNA
gaggcaggtggatcacc

SEQ ID NO: 122819 - DNA, 17 bp, synthetic construct
  source 1..17: mol_type = other DNA
aggcaggtggatcacct

SEQ ID NO: 122820 - DNA, 17 bp, synthetic construct
  source 1..17: mol_type = other DNA
ggcaggtggatcacctg

SEQ ID NO: 122821 - DNA, 17 bp, synthetic construct
  source 1..17: mol_type = other DNA
gcaggtggatcacctga

SEQ ID NO: 122822 - DNA, 17 bp, synthetic construct
  source 1..17: mol_type = other DNA
caggtggatcacctgag

SEQ ID NO: 122823 - DNA, 17 bp, synthetic construct
  source 1..17: mol_type = other DNA
aggtggatcacctgagg

SEQ ID NO: 122824 - DNA, 17 bp, synthetic construct
  source 1..17: mol_type = other DNA
ggtggatcacctgaggt

SEQ ID NO: 122825 - DNA, 17 bp, synthetic construct
  source 1..17: mol_type = other DNA
gtggatcacctgaggtc

SEQ ID NO: 122826 - DNA, 17 bp, synthetic construct
  source 1..17: mol_type = other DNA
tggatcacctgaggtca

SEQ ID NO: 122827 - DNA, 17 bp, synthetic construct
  source 1..17: mol_type = other DNA
ggatcacctgaggtcag

SEQ ID NO: 122828 - DNA, 17 bp, synthetic construct
  source 1..17: mol_type = other DNA
gatcacctgaggtcagg

SEQ ID NO: 122829 - DNA, 17 bp, synthetic construct
  source 1..17: mol_type = other DNA
atcacctgaggtcagga

SEQ ID NO: 122830 - DNA, 17 bp, synthetic construct
  source 1..17: mol_type = other DNA
tcacctgaggtcaggag

SEQ ID NO: 122831 - DNA, 17 bp, synthetic construct
  source 1..17: mol_type = other DNA
cacctgaggtcaggagt

SEQ ID NO: 122832 - DNA, 17 bp, synthetic construct
  source 1..17: mol_type = other DNA
acctgaggtcaggagtt

SEQ ID NO: 122833 - DNA, 17 bp, synthetic construct
  source 1..17: mol_type = other DNA
cctgaggtcaggagttt

SEQ ID NO: 122834 - DNA, 17 bp, synthetic construct
  source 1..17: mol_type = other DNA
ctgaggtcaggagtttg

SEQ ID NO: 122835 - DNA, 17 bp, synthetic construct
  source 1..17: mol_type = other DNA
tgaggtcaggagtttga

SEQ ID NO: 122836 - DNA, 17 bp, synthetic construct
  source 1..17: mol_type = other DNA
gaggtcaggagtttgag

SEQ ID NO: 122837 - DNA, 17 bp, synthetic construct
  source 1..17: mol_type = other DNA
aggtcaggagtttgaga

SEQ ID NO: 122838 - DNA, 17 bp, synthetic construct
  source 1..17: mol_type = other DNA
ggtcaggagtttgagac

SEQ ID NO: 122839 - DNA, 17 bp, synthetic construct
  source 1..17: mol_type = other DNA
gtcaggagtttgagacc

SEQ ID NO: 122840 - DNA, 17 bp, synthetic construct
  source 1..17: mol_type = other DNA
tcaggagtttgagacca

SEQ ID NO: 122841 - DNA, 17 bp, synthetic construct
  source 1..17: mol_type = other DNA
caggagtttgagaccag

SEQ ID NO: 122842 - DNA, 17 bp, synthetic construct
  source 1..17: mol_type = other DNA
aggagtttgagaccagc

SEQ ID NO: 122843 - DNA, 17 bp, synthetic construct
  source 1..17: mol_type = other DNA
ggagtttgagaccagcc

SEQ ID NO: 122844 - DNA, 17 bp, synthetic construct
  source 1..17: mol_type = other DNA
gagtttgagaccagcct

SEQ ID NO: 122845 - DNA, 17 bp, synthetic construct
  source 1..17: mol_type = other DNA
agtttgagaccagcctg

SEQ ID NO: 122846 - DNA, 17 bp, synthetic construct
  source 1..17: mol_type = other DNA
gtttgagaccagcctgg

SEQ ID NO: 122847 - DNA, 17 bp, synthetic construct
  source 1..17: mol_type = other DNA
tttgagaccagcctggt

SEQ ID NO: 122848 - DNA, 17 bp, synthetic construct
  source 1..17: mol_type = other DNA
ttgagaccagcctggtc

SEQ ID NO: 122849 - DNA, 17 bp, synthetic construct
  source 1..17: mol_type = other DNA
tgagaccagcctggtca

SEQ ID NO: 122850 - DNA, 17 bp, synthetic construct
  source 1..17: mol_type = other DNA
gagaccagcctggtcaa

SEQ ID NO: 122851 - DNA, 17 bp, synthetic construct
  source 1..17: mol_type = other DNA
agaccagcctggtcaac

SEQ ID NO: 122852 - DNA, 17 bp, synthetic construct
  source 1..17: mol_type = other DNA
gaccagcctggtcaaca

SEQ ID NO: 122853 - DNA, 17 bp, synthetic construct
  source 1..17: mol_type = other DNA
accagcctggtcaacat

SEQ ID NO: 122854 - DNA, 17 bp, synthetic construct
  source 1..17: mol_type = other DNA
ccagcctggtcaacatg

SEQ ID NO: 122855 - DNA, 17 bp, synthetic construct
  source 1..17: mol_type = other DNA
cagcctggtcaacatgg

SEQ ID NO: 122856 - DNA, 17 bp, synthetic construct
  source 1..17: mol_type = other DNA
agcctggtcaacatggc

SEQ ID NO: 122857 - DNA, 17 bp, synthetic construct
  source 1..17: mol_type = other DNA
gcctggtcaacatggcg

SEQ ID NO: 122858 - DNA, 17 bp, synthetic construct
  source 1..17: mol_type = other DNA
cctggtcaacatggcga

SEQ ID NO: 122859 - DNA, 17 bp, synthetic construct
  source 1..17: mol_type = other DNA
ctggtcaacatggcgaa

SEQ ID NO: 122860 - DNA, 17 bp, synthetic construct
  source 1..17: mol_type = other DNA
tggtcaacatggcgaaa

SEQ ID NO: 122861 - DNA, 17 bp, synthetic construct
  source 1..17: mol_type = other DNA
ggtcaacatggcgaaac

SEQ ID NO: 122862 - DNA, 17 bp, synthetic construct
  source 1..17: mol_type = other DNA
gtcaacatggcgaaacc

SEQ ID NO: 122863 - DNA, 17 bp, synthetic construct
  source 1..17: mol_type = other DNA
tcaacatggcgaaaccc

SEQ ID NO: 122864 - DNA, 17 bp, synthetic construct
  source 1..17: mol_type = other DNA
caacatggcgaaacccc

SEQ ID NO: 122865 - DNA, 17 bp, synthetic construct
  source 1..17: mol_type = other DNA
aacatggcgaaaccccg

SEQ ID NO: 122866 - DNA, 17 bp, synthetic construct
  source 1..17: mol_type = other DNA
acatggcgaaaccccgt

SEQ ID NO: 122867 - DNA, 17 bp, synthetic construct
  source 1..17: mol_type = other DNA
catggcgaaaccccgtc

SEQ ID NO: 122868 - DNA, 17 bp, synthetic construct
  source 1..17: mol_type = other DNA
atggcgaaaccccgtct

SEQ ID NO: 122869 - DNA, 17 bp, synthetic construct
  source 1..17: mol_type = other DNA
tggcgaaaccccgtctc

SEQ ID NO: 122870 - DNA, 17 bp, synthetic construct
  source 1..17: mol_type = other DNA
ggcgaaaccccgtctct

SEQ ID NO: 122871 - DNA, 17 bp, synthetic construct
  source 1..17: mol_type = other DNA
gcgaaaccccgtctcta

SEQ ID NO: 122872 - DNA, 17 bp, synthetic construct
  source 1..17: mol_type = other DNA
cgaaaccccgtctctac

SEQ ID NO: 122873 - DNA, 17 bp, synthetic construct
  source 1..17: mol_type = other DNA
gaaaccccgtctctaca

SEQ ID NO: 122874 - DNA, 17 bp, synthetic construct
  source 1..17: mol_type = other DNA
aaaccccgtctctacaa

SEQ ID NO: 122875 - DNA, 17 bp, synthetic construct
  source 1..17: mol_type = other DNA
aaccccgtctctacaaa

SEQ ID NO: 122876 - DNA, 17 bp, synthetic construct
  source 1..17: mol_type = other DNA
accccgtctctacaaaa

SEQ ID NO: 122877 - DNA, 17 bp, synthetic construct
  source 1..17: mol_type = other DNA
ccccgtctctacaaaaa

SEQ ID NO: 122878 - DNA, 17 bp, synthetic construct
  source 1..17: mol_type = other DNA
cccgtctctacaaaaaa

SEQ ID NO: 122879 - DNA, 17 bp, synthetic construct
  source 1..17: mol_type = other DNA
ccgtctctacaaaaaat

SEQ ID NO: 122880 - DNA, 17 bp, synthetic construct
  source 1..17: mol_type = other DNA
cgtctctacaaaaaata

SEQ ID NO: 122881 - DNA, 17 bp, synthetic construct
  source 1..17: mol_type = other DNA
gtctctacaaaaaatac

SEQ ID NO: 122882 - DNA, 17 bp, synthetic construct
  source 1..17: mol_type = other DNA
tctctacaaaaaataca

SEQ ID NO: 122883 - DNA, 17 bp, synthetic construct
  source 1..17: mol_type = other DNA
ctctacaaaaaatacaa

SEQ ID NO: 122884 - DNA, 17 bp, synthetic construct
  source 1..17: mol_type = other DNA
tctacaaaaaatacaaa

SEQ ID NO: 122885 - DNA, 17 bp, synthetic construct
  source 1..17: mol_type = other DNA
ctacaaaaaatacaaaa

SEQ ID NO: 122886 - DNA, 17 bp, synthetic construct
  source 1..17: mol_type = other DNA
tacaaaaaatacaaaaa

SEQ ID NO: 122887 - DNA, 17 bp, synthetic construct
  source 1..17: mol_type = other DNA
acaaaaaatacaaaaat

SEQ ID NO: 122888 - DNA, 17 bp, synthetic construct
  source 1..17: mol_type = other DNA
caaaaaatacaaaaata

SEQ ID NO: 122889 - DNA, 17 bp, synthetic construct
  source 1..17: mol_type = other DNA
aaaaaatacaaaaatag

SEQ ID NO: 122890 - DNA, 17 bp, synthetic construct
  source 1..17: mol_type = other DNA
aaaaatacaaaaatagc

SEQ ID NO: 122891 - DNA, 17 bp, synthetic construct
  source 1..17: mol_type = other DNA
aaaatacaaaaatagcc

SEQ ID NO: 122892 - DNA, 17 bp, synthetic construct
  source 1..17: mol_type = other DNA
aaatacaaaaatagccg

SEQ ID NO: 122893 - DNA, 17 bp, synthetic construct
  source 1..17: mol_type = other DNA
aatacaaaaatagccgg

SEQ ID NO: 122894 - DNA, 17 bp, synthetic construct
  source 1..17: mol_type = other DNA
atacaaaaatagccggg

SEQ ID NO: 122895 - DNA, 17 bp, synthetic construct
  source 1..17: mol_type = other DNA
tacaaaaatagccgggt

SEQ ID NO: 122896 - DNA, 17 bp, synthetic construct
  source 1..17: mol_type = other DNA
acaaaaatagccgggtg

SEQ ID NO: 122897 - DNA, 17 bp, synthetic construct
  source 1..17: mol_type = other DNA
caaaaatagccgggtgt

SEQ ID NO: 122898 - DNA, 17 bp, synthetic construct
  source 1..17: mol_type = other DNA
aaaaatagccgggtgtg

SEQ ID NO: 122899 - DNA, 17 bp, synthetic construct
  source 1..17: mol_type = other DNA
aaaatagccgggtgtgg

SEQ ID NO: 122900 - DNA, 17 bp, synthetic construct
  source 1..17: mol_type = other DNA
aaatagccgggtgtggt

SEQ ID NO: 122901 - DNA, 17 bp, synthetic construct
  source 1..17: mol_type = other DNA
aatagccgggtgtggtg

SEQ ID NO: 122902 - DNA, 17 bp, synthetic construct
  source 1..17: mol_type = other DNA
atagccgggtgtggtgg

SEQ ID NO: 122903 - DNA, 17 bp, synthetic construct
  source 1..17: mol_type = other DNA
tagccgggtgtggtggt

SEQ ID NO: 122904 - DNA, 17 bp, synthetic construct
  source 1..17: mol_type = other DNA
agccgggtgtggtggtg

SEQ ID NO: 122905 - DNA, 17 bp, synthetic construct
  source 1..17: mol_type = other DNA
gccgggtgtggtggtgt

SEQ ID NO: 122906 - DNA, 17 bp, synthetic construct
  source 1..17: mol_type = other DNA
ccgggtgtggtggtgtg

SEQ ID NO: 122907 - DNA, 17 bp, synthetic construct
  source 1..17: mol_type = other DNA
cgggtgtggtggtgtgt

SEQ ID NO: 122908 - DNA, 17 bp, synthetic construct
  source 1..17: mol_type = other DNA
gggtgtggtggtgtgtg

SEQ ID NO: 122909 - DNA, 17 bp, synthetic construct
  source 1..17: mol_type = other DNA
ggtgtggtggtgtgtgc

SEQ ID NO: 122910 - DNA, 17 bp, synthetic construct
  source 1..17: mol_type = other DNA
gtgtggtggtgtgtgcc

SEQ ID NO: 122911 - DNA, 17 bp, synthetic construct
  source 1..17: mol_type = other DNA
tgtggtggtgtgtgcct

SEQ ID NO: 122912 - DNA, 17 bp, synthetic construct
  source 1..17: mol_type = other DNA
gtggtggtgtgtgcctg

SEQ ID NO: 122913 - DNA, 17 bp, synthetic construct
  source 1..17: mol_type = other DNA
tggtggtgtgtgcctgt

SEQ ID NO: 122914 - DNA, 17 bp, synthetic construct
  source 1..17: mol_type = other DNA
ggtggtgtgtgcctgta

SEQ ID NO: 122915 - DNA, 17 bp, synthetic construct
  source 1..17: mol_type = other DNA
gtggtgtgtgcctgtaa

SEQ ID NO: 122916 - DNA, 17 bp, synthetic construct
  source 1..17: mol_type = other DNA
tggtgtgtgcctgtaat

SEQ ID NO: 122917 - DNA, 17 bp, synthetic construct
  source 1..17: mol_type = other DNA
ggtgtgtgcctgtaatc

SEQ ID NO: 122918 - DNA, 17 bp, synthetic construct
  source 1..17: mol_type = other DNA
gtgtgtgcctgtaatcc

SEQ ID NO: 122919 - DNA, 17 bp, synthetic construct
  source 1..17: mol_type = other DNA
tgtgtgcctgtaatccc

SEQ ID NO: 122920 - DNA, 17 bp, synthetic construct
  source 1..17: mol_type = other DNA
gtgtgcctgtaatccca

SEQ ID NO: 122921 - DNA, 17 bp, synthetic construct
  source 1..17: mol_type = other DNA
tgtgcctgtaatcccag

SEQ ID NO: 122922 - DNA, 17 bp, synthetic construct
  source 1..17: mol_type = other DNA
gtgcctgtaatcccagc

SEQ ID NO: 122923 - DNA, 17 bp, synthetic construct
  source 1..17: mol_type = other DNA
tgcctgtaatcccagct

SEQ ID NO: 122924 - DNA, 17 bp, synthetic construct
  source 1..17: mol_type = other DNA
gcctgtaatcccagcta

SEQ ID NO: 122925 - DNA, 17 bp, synthetic construct
  source 1..17: mol_type = other DNA
cctgtaatcccagctac

SEQ ID NO: 122926 - DNA, 17 bp, synthetic construct
  source 1..17: mol_type = other DNA
ctgtaatcccagctact

SEQ ID NO: 122927 - DNA, 17 bp, synthetic construct
  source 1..17: mol_type = other DNA
tgtaatcccagctactc

SEQ ID NO: 122928 - DNA, 17 bp, synthetic construct
  source 1..17: mol_type = other DNA
gtaatcccagctactcg

SEQ ID NO: 122929 - DNA, 17 bp, synthetic construct
  source 1..17: mol_type = other DNA
taatcccagctactcgg

SEQ ID NO: 122930 - DNA, 17 bp, synthetic construct
  source 1..17: mol_type = other DNA
aatcccagctactcggg

SEQ ID NO: 122931 - DNA, 17 bp, synthetic construct
  source 1..17: mol_type = other DNA
atcccagctactcggga

SEQ ID NO: 122932 - DNA, 17 bp, synthetic construct
  source 1..17: mol_type = other DNA
tcccagctactcgggag

SEQ ID NO: 122933 - DNA, 17 bp, synthetic construct
  source 1..17: mol_type = other DNA
cccagctactcgggagg

SEQ ID NO: 122934 - DNA, 17 bp, synthetic construct
  source 1..17: mol_type = other DNA
ccagctactcgggaggc

SEQ ID NO: 122935 - DNA, 17 bp, synthetic construct
  source 1..17: mol_type = other DNA
cagctactcgggaggct

SEQ ID NO: 122936 - DNA, 17 bp, synthetic construct
  source 1..17: mol_type = other DNA
agctactcgggaggctg

SEQ ID NO: 122937 - DNA, 17 bp, synthetic construct
  source 1..17: mol_type = other DNA
gctactcgggaggctga

SEQ ID NO: 122938 - DNA, 17 bp, synthetic construct
  source 1..17: mol_type = other DNA
ctactcgggaggctgag

SEQ ID NO: 122939 - DNA, 17 bp, synthetic construct
  source 1..17: mol_type = other DNA
tactcgggaggctgagg

SEQ ID NO: 122940 - DNA, 17 bp, synthetic construct
  source 1..17: mol_type = other DNA
actcgggaggctgaggc

SEQ ID NO: 122941 - DNA, 17 bp, synthetic construct
  source 1..17: mol_type = other DNA
ctcgggaggctgaggca

SEQ ID NO: 122942 - DNA, 17 bp, synthetic construct
  source 1..17: mol_type = other DNA
tcgggaggctgaggcag

SEQ ID NO: 122943 - DNA, 17 bp, synthetic construct
  source 1..17: mol_type = other DNA
cgggaggctgaggcagg

SEQ ID NO: 122944 - DNA, 17 bp, synthetic construct
  source 1..17: mol_type = other DNA
gggaggctgaggcagga

SEQ ID NO: 122945 - DNA, 17 bp, synthetic construct
  source 1..17: mol_type = other DNA
ggaggctgaggcaggag

SEQ ID NO: 122946 - DNA, 17 bp, synthetic construct
  source 1..17: mol_type = other DNA
gaggctgaggcaggaga

SEQ ID NO: 122947 - DNA, 17 bp, synthetic construct
  source 1..17: mol_type = other DNA
aggctgaggcaggagaa

SEQ ID NO: 122948 - DNA, 17 bp, synthetic construct
  source 1..17: mol_type = other DNA
ggctgaggcaggagaat

SEQ ID NO: 122949 - DNA, 17 bp, synthetic construct
  source 1..17: mol_type = other DNA
gctgaggcaggagaatc

SEQ ID NO: 122950 - DNA, 17 bp, synthetic construct
  source 1..17: mol_type = other DNA
ctgaggcaggagaatca

SEQ ID NO: 122951 - DNA, 17 bp, synthetic construct
  source 1..17: mol_type = other DNA
tgaggcaggagaatcac

SEQ ID NO: 122952 - DNA, 17 bp, synthetic construct
  source 1..17: mol_type = other DNA
gaggcaggagaatcact

SEQ ID NO: 122953 - DNA, 17 bp, synthetic construct
  source 1..17: mol_type = other DNA
aggcaggagaatcactt

SEQ ID NO: 122954 - DNA, 17 bp, synthetic construct
  source 1..17: mol_type = other DNA
ggcaggagaatcacttg

SEQ ID NO: 122955 - DNA, 17 bp, synthetic construct
  source 1..17: mol_type = other DNA
gcaggagaatcacttga

SEQ ID NO: 122956 - DNA, 17 bp, synthetic construct
  source 1..17: mol_type = other DNA
caggagaatcacttgaa

SEQ ID NO: 122957 - DNA, 17 bp, synthetic construct
  source 1..17: mol_type = other DNA
aggagaatcacttgaac

SEQ ID NO: 122958 - DNA, 17 bp, synthetic construct
  source 1..17: mol_type = other DNA
ggagaatcacttgaacc

SEQ ID NO: 122959 - DNA, 17 bp, synthetic construct
  source 1..17: mol_type = other DNA
gagaatcacttgaacct

SEQ ID NO: 122960 - DNA, 17 bp, synthetic construct
  source 1..17: mol_type = other DNA
agaatcacttgaacctg

SEQ ID NO: 122961 - DNA, 17 bp, synthetic construct
  source 1..17: mol_type = other DNA
gaatcacttgaacctgg

SEQ ID NO: 122962 - DNA, 17 bp, synthetic construct
  source 1..17: mol_type = other DNA
aatcacttgaacctggg

SEQ ID NO: 122963 - DNA, 17 bp, synthetic construct
  source 1..17: mol_type = other DNA
atcacttgaacctggga

SEQ ID NO: 122964 - DNA, 17 bp, synthetic construct
  source 1..17: mol_type = other DNA
tcacttgaacctgggaa

SEQ ID NO: 122965 - DNA, 17 bp, synthetic construct
  source 1..17: mol_type = other DNA
cacttgaacctgggaag

SEQ ID NO: 122966 - DNA, 17 bp, synthetic construct
  source 1..17: mol_type = other DNA
acttgaacctgggaaga

SEQ ID NO: 122967 - DNA, 17 bp, synthetic construct
  source 1..17: mol_type = other DNA
cttgaacctgggaagag

SEQ ID NO: 122968 - DNA, 17 bp, synthetic construct
  source 1..17: mol_type = other DNA
ttgaacctgggaagagg

SEQ ID NO: 122969 - DNA, 17 bp, synthetic construct
  source 1..17: mol_type = other DNA
tgaacctgggaagagga

SEQ ID NO: 122970 - DNA, 17 bp, synthetic construct
  source 1..17: mol_type = other DNA
gaacctgggaagaggag

SEQ ID NO: 122971 - DNA, 17 bp, synthetic construct
  source 1..17: mol_type = other DNA
aacctgggaagaggagg

SEQ ID NO: 122972 - DNA, 17 bp, synthetic construct
  source 1..17: mol_type = other DNA
acctgggaagaggaggt

SEQ ID NO: 122973 - DNA, 17 bp, synthetic construct
  source 1..17: mol_type = other DNA
cctgggaagaggaggtt

SEQ ID NO: 122974 - DNA, 17 bp, synthetic construct
  source 1..17: mol_type = other DNA
ctgggaagaggaggttg

SEQ ID NO: 122975 - DNA, 17 bp, synthetic construct
  source 1..17: mol_type = other DNA
tgggaagaggaggttgc

SEQ ID NO: 122976 - DNA, 17 bp, synthetic construct
  source 1..17: mol_type = other DNA
gggaagaggaggttgca

SEQ ID NO: 122977 - DNA, 17 bp, synthetic construct
  source 1..17: mol_type = other DNA
ggaagaggaggttgcag

SEQ ID NO: 122978 - DNA, 17 bp, synthetic construct
  source 1..17: mol_type = other DNA
gaagaggaggttgcagt

SEQ ID NO: 122979 - DNA, 17 bp, synthetic construct
  source 1..17: mol_type = other DNA
aagaggaggttgcagtg

SEQ ID NO: 122980 - DNA, 17 bp, synthetic construct
  source 1..17: mol_type = other DNA
agaggaggttgcagtga

SEQ ID NO: 122981 - DNA, 17 bp, synthetic construct
  source 1..17: mol_type = other DNA
gaggaggttgcagtgag

SEQ ID NO: 122982 - DNA, 17 bp, synthetic construct
  source 1..17: mol_type = other DNA
aggaggttgcagtgagc

SEQ ID NO: 122983 - DNA, 17 bp, synthetic construct
  source 1..17: mol_type = other DNA
ggaggttgcagtgagcc

SEQ ID NO: 122984 - DNA, 17 bp, synthetic construct
  source 1..17: mol_type = other DNA
gaggttgcagtgagcca

SEQ ID NO: 122985 - DNA, 17 bp, synthetic construct
  source 1..17: mol_type = other DNA
aggttgcagtgagccaa

SEQ ID NO: 122986 - DNA, 17 bp, synthetic construct
  source 1..17: mol_type = other DNA
ggttgcagtgagccaag

SEQ ID NO: 122987 - DNA, 17 bp, synthetic construct
  source 1..17: mol_type = other DNA
gttgcagtgagccaaga

SEQ ID NO: 122988 - DNA, 17 bp, synthetic construct
  source 1..17: mol_type = other DNA
ttgcagtgagccaagat

SEQ ID NO: 122989 - DNA, 17 bp, synthetic construct
  source 1..17: mol_type = other DNA
tgcagtgagccaagatc

SEQ ID NO: 122990 - DNA, 17 bp, synthetic construct
  source 1..17: mol_type = other DNA
gcagtgagccaagatcg

SEQ ID NO: 122991 - DNA, 17 bp, synthetic construct
  source 1..17: mol_type = other DNA
cagtgagccaagatcgt

SEQ ID NO: 122992 - DNA, 17 bp, synthetic construct
  source 1..17: mol_type = other DNA
agtgagccaagatcgtg

SEQ ID NO: 122993 - DNA, 17 bp, synthetic construct
  source 1..17: mol_type = other DNA
gtgagccaagatcgtgc

SEQ ID NO: 122994 - DNA, 17 bp, synthetic construct
  source 1..17: mol_type = other DNA
tgagccaagatcgtgcc

SEQ ID NO: 122995 - DNA, 17 bp, synthetic construct
  source 1..17: mol_type = other DNA
gagccaagatcgtgcca

SEQ ID NO: 122996 - DNA, 17 bp, synthetic construct
  source 1..17: mol_type = other DNA
agccaagatcgtgccac

SEQ ID NO: 122997 - DNA, 17 bp, synthetic construct
  source 1..17: mol_type = other DNA
gccaagatcgtgccact

SEQ ID NO: 122998 - DNA, 17 bp, synthetic construct
  source 1..17: mol_type = other DNA
ccaagatcgtgccactg

SEQ ID NO: 122999 - DNA, 17 bp, synthetic construct
  source 1..17: mol_type = other DNA
caagatcgtgccactgc

SEQ ID NO: 123000 - DNA, 17 bp, synthetic construct
  source 1..17: mol_type = other DNA
aagatcgtgccactgca

SEQ ID NO: 123001 - DNA, 17 bp, synthetic construct
  source 1..17: mol_type = other DNA
agatcgtgccactgcac

SEQ ID NO: 123002 - DNA, 17 bp, synthetic construct
  source 1..17: mol_type = other DNA
gatcgtgccactgcact

SEQ ID NO: 123003 - DNA, 17 bp, synthetic construct
  source 1..17: mol_type = other DNA
atcgtgccactgcactc

SEQ ID NO: 123004 - DNA, 17 bp, synthetic construct
  source 1..17: mol_type = other DNA
tcgtgccactgcactcc

SEQ ID NO: 123005 - DNA, 17 bp, synthetic construct
  source 1..17: mol_type = other DNA
cgtgccactgcactcca

SEQ ID NO: 123006 - DNA, 17 bp, synthetic construct
  source 1..17: mol_type = other DNA
gtgccactgcactccag

SEQ ID NO: 123007 - DNA, 17 bp, synthetic construct
  source 1..17: mol_type = other DNA
tgccactgcactccagc

SEQ ID NO: 123008 - DNA, 17 bp, synthetic construct
  source 1..17: mol_type = other DNA
gccactgcactccagcc

SEQ ID NO: 123009 - DNA, 17 bp, synthetic construct
  source 1..17: mol_type = other DNA
ccactgcactccagcct

SEQ ID NO: 123010 - DNA, 17 bp, synthetic construct
  source 1..17: mol_type = other DNA
cactgcactccagccta

SEQ ID NO: 123011 - DNA, 17 bp, synthetic construct
  source 1..17: mol_type = other DNA
actgcactccagcctaa

SEQ ID NO: 123012 - DNA, 17 bp, synthetic construct
  source 1..17: mol_type = other DNA
ctgcactccagcctaag

SEQ ID NO: 123013 - DNA, 17 bp, synthetic construct
  source 1..17: mol_type = other DNA
tgcactccagcctaagc

SEQ ID NO: 123014 - DNA, 17 bp, synthetic construct
  source 1..17: mol_type = other DNA
gcactccagcctaagca

SEQ ID NO: 123015 - DNA, 17 bp, synthetic construct
  source 1..17: mol_type = other DNA
cactccagcctaagcaa

SEQ ID NO: 123016 - DNA, 17 bp, synthetic construct
  source 1..17: mol_type = other DNA
actccagcctaagcaaa

SEQ ID NO: 123017 - DNA, 17 bp, synthetic construct
  source 1..17: mol_type = other DNA
ctccagcctaagcaaaa

SEQ ID NO: 123018 - DNA, 17 bp, synthetic construct
  source 1..17: mol_type = other DNA
tccagcctaagcaaaaa

SEQ ID NO: 123019 - DNA, 17 bp, synthetic construct
  source 1..17: mol_type = other DNA
ccagcctaagcaaaaag

SEQ ID NO: 123020 - DNA, 17 bp, synthetic construct
  source 1..17: mol_type = other DNA
cagcctaagcaaaaaga

SEQ ID NO: 123021 - DNA, 17 bp, synthetic construct
  source 1..17: mol_type = other DNA
agcctaagcaaaaagag

SEQ ID NO: 123022 - DNA, 17 bp, synthetic construct
  source 1..17: mol_type = other DNA
gcctaagcaaaaagagt

SEQ ID NO: 123023 - DNA, 17 bp, synthetic construct
  source 1..17: mol_type = other DNA
cctaagcaaaaagagtg

SEQ ID NO: 123024 - DNA, 17 bp, synthetic construct
  source 1..17: mol_type = other DNA
ctaagcaaaaagagtga

SEQ ID NO: 123025 - DNA, 17 bp, synthetic construct
  source 1..17: mol_type = other DNA
taagcaaaaagagtgag

SEQ ID NO: 123026 - DNA, 17 bp, synthetic construct
  source 1..17: mol_type = other DNA
aagcaaaaagagtgaga

SEQ ID NO: 123027 - DNA, 17 bp, synthetic construct
  source 1..17: mol_type = other DNA
agcaaaaagagtgagac

SEQ ID NO: 123028 - DNA, 17 bp, synthetic construct
  source 1..17: mol_type = other DNA
gcaaaaagagtgagact

SEQ ID NO: 123029 - DNA, 17 bp, synthetic construct
  source 1..17: mol_type = other DNA
caaaaagagtgagactc

SEQ ID NO: 123030 - DNA, 17 bp, synthetic construct
  source 1..17: mol_type = other DNA
aaaaagagtgagactct

SEQ ID NO: 123031 - DNA, 17 bp, synthetic construct
  source 1..17: mol_type = other DNA
aaaagagtgagactctg

SEQ ID NO: 123032 - DNA, 17 bp, synthetic construct
  source 1..17: mol_type = other DNA
aaagagtgagactctgt

SEQ ID NO: 123033 - DNA, 17 bp, synthetic construct
  source 1..17: mol_type = other DNA
aagagtgagactctgtc

SEQ ID NO: 123034 - DNA, 17 bp, synthetic construct
  source 1..17: mol_type = other DNA
agagtgagactctgtct

SEQ ID NO: 123035 - DNA, 17 bp, synthetic construct
  source 1..17: mol_type = other DNA
gagtgagactctgtctc

SEQ ID NO: 123036 - DNA, 17 bp, synthetic construct
  source 1..17: mol_type = other DNA
agtgagactctgtctca

SEQ ID NO: 123037 - DNA, 17 bp, synthetic construct
  source 1..17: mol_type = other DNA
gtgagactctgtctcaa

SEQ ID NO: 123038 - DNA, 17 bp, synthetic construct
  source 1..17: mol_type = other DNA
tgagactctgtctcaaa

SEQ ID NO: 123039 - DNA, 17 bp, synthetic construct
  source 1..17: mol_type = other DNA
gagactctgtctcaaaa

SEQ ID NO: 123040 - DNA, 17 bp, synthetic construct
  source 1..17: mol_type = other DNA
agactctgtctcaaaac

SEQ ID NO: 123041 - DNA, 17 bp, synthetic construct
  source 1..17: mol_type = other DNA
gactctgtctcaaaaca

SEQ ID NO: 123042 - DNA, 17 bp, synthetic construct
  source 1..17: mol_type = other DNA
actctgtctcaaaacaa

SEQ ID NO: 123043 - DNA, 17 bp, synthetic construct
  source 1..17: mol_type = other DNA
ctctgtctcaaaacaaa

SEQ ID NO: 123044 - DNA, 17 bp, synthetic construct
  source 1..17: mol_type = other DNA
tctgtctcaaaacaaaa

SEQ ID NO: 123045 - DNA, 17 bp, synthetic construct
  source 1..17: mol_type = other DNA
ctgtctcaaaacaaaac

SEQ ID NO: 123046 - DNA, 17 bp, synthetic construct
  source 1..17: mol_type = other DNA
tgtctcaaaacaaaaca

SEQ ID NO: 123047 - DNA, 17 bp, synthetic construct
  source 1..17: mol_type = other DNA
gtctcaaaacaaaacaa

SEQ ID NO: 123048 - DNA, 17 bp, synthetic construct
  source 1..17: mol_type = other DNA
tctcaaaacaaaacaac

SEQ ID NO: 123049 - DNA, 17 bp, synthetic construct
  source 1..17: mol_type = other DNA
ctcaaaacaaaacaaca

SEQ ID NO: 123050 - DNA, 17 bp, synthetic construct
  source 1..17: mol_type = other DNA
tcaaaacaaaacaacaa

SEQ ID NO: 123051 - DNA, 17 bp, synthetic construct
  source 1..17: mol_type = other DNA
caaaacaaaacaacaaa

SEQ ID NO: 123052 - DNA, 17 bp, synthetic construct
  source 1..17: mol_type = other DNA
aaaacaaaacaacaaaa

SEQ ID NO: 123053 - DNA, 17 bp, synthetic construct
  source 1..17: mol_type = other DNA
aaacaaaacaacaaaaa

SEQ ID NO: 123054 - DNA, 17 bp, synthetic construct
  source 1..17: mol_type = other DNA
aacaaaacaacaaaaaa

SEQ ID NO: 123055 - DNA, 17 bp, synthetic construct
  source 1..17: mol_type = other DNA
acaaaacaacaaaaaac

SEQ ID NO: 123056 - DNA, 17 bp, synthetic construct
  source 1..17: mol_type = other DNA
caaaacaacaaaaaacc

SEQ ID NO: 123057 - DNA, 17 bp, synthetic construct
  source 1..17: mol_type = other DNA
aaaacaacaaaaaacca

SEQ ID NO: 123058 - DNA, 17 bp, synthetic construct
  source 1..17: mol_type = other DNA
aaacaacaaaaaaccaa

SEQ ID NO: 123059 - DNA, 17 bp, synthetic construct
  source 1..17: mol_type = other DNA
aacaacaaaaaaccaaa

SEQ ID NO: 123060 - DNA, 17 bp, synthetic construct
  source 1..17: mol_type = other DNA
acaacaaaaaaccaaaa

SEQ ID NO: 123061 - DNA, 17 bp, synthetic construct
  source 1..17: mol_type = other DNA
caacaaaaaaccaaaaa

SEQ ID NO: 123062 - DNA, 17 bp, synthetic construct
  source 1..17: mol_type = other DNA
aacaaaaaaccaaaaag

SEQ ID NO: 123063 - DNA, 17 bp, synthetic construct
  source 1..17: mol_type = other DNA
acaaaaaaccaaaaagc

SEQ ID NO: 123064 - DNA, 17 bp, synthetic construct
  source 1..17: mol_type = other DNA
caaaaaaccaaaaagca

SEQ ID NO: 123065 - DNA, 17 bp, synthetic construct
  source 1..17: mol_type = other DNA
aaaaaaccaaaaagcag

SEQ ID NO: 123066 - DNA, 17 bp, synthetic construct
  source 1..17: mol_type = other DNA
aaaaaccaaaaagcagt

SEQ ID NO: 123067 - DNA, 17 bp, synthetic construct
  source 1..17: mol_type = other DNA
aaaaccaaaaagcagtt

SEQ ID NO: 123068 - DNA, 17 bp, synthetic construct
  source 1..17: mol_type = other DNA
aaaccaaaaagcagttt

SEQ ID NO: 123069 - DNA, 17 bp, synthetic construct
  source 1..17: mol_type = other DNA
aaccaaaaagcagtttc

SEQ ID NO: 123070 - DNA, 17 bp, synthetic construct
  source 1..17: mol_type = other DNA
accaaaaagcagtttcg

SEQ ID NO: 123071 - DNA, 17 bp, synthetic construct
  source 1..17: mol_type = other DNA
ccaaaaagcagtttcgt

SEQ ID NO: 123072 - DNA, 17 bp, synthetic construct
  source 1..17: mol_type = other DNA
caaaaagcagtttcgtg

SEQ ID NO: 123073 - DNA, 17 bp, synthetic construct
  source 1..17: mol_type = other DNA
aaaaagcagtttcgtgt

SEQ ID NO: 123074 - DNA, 17 bp, synthetic construct
  source 1..17: mol_type = other DNA
aaaagcagtttcgtgtc

SEQ ID NO: 123075 - DNA, 17 bp, synthetic construct
  source 1..17: mol_type = other DNA
aaagcagtttcgtgtca

SEQ ID NO: 123076 - DNA, 17 bp, synthetic construct
  source 1..17: mol_type = other DNA
aagcagtttcgtgtcat

SEQ ID NO: 123077 - DNA, 17 bp, synthetic construct
  source 1..17: mol_type = other DNA
agcagtttcgtgtcatc

SEQ ID NO: 123078 - DNA, 17 bp, synthetic construct
  source 1..17: mol_type = other DNA
gcagtttcgtgtcatct

SEQ ID NO: 123079 - DNA, 17 bp, synthetic construct
  source 1..17: mol_type = other DNA
cagtttcgtgtcatctt

SEQ ID NO: 123080 - DNA, 17 bp, synthetic construct
  source 1..17: mol_type = other DNA
agtttcgtgtcatctta

SEQ ID NO: 123081 - DNA, 17 bp, synthetic construct
  source 1..17: mol_type = other DNA
gtttcgtgtcatcttaa

SEQ ID NO: 123082 - DNA, 17 bp, synthetic construct
  source 1..17: mol_type = other DNA
tttcgtgtcatcttaag

SEQ ID NO: 123083 - DNA, 17 bp, synthetic construct
  source 1..17: mol_type = other DNA
ttcgtgtcatcttaagg

SEQ ID NO: 123084 - DNA, 17 bp, synthetic construct
  source 1..17: mol_type = other DNA
tcgtgtcatcttaagga

SEQ ID NO: 123085 - DNA, 17 bp, synthetic construct
  source 1..17: mol_type = other DNA
cgtgtcatcttaaggaa

SEQ ID NO: 123086 - DNA, 17 bp, synthetic construct
  source 1..17: mol_type = other DNA
gtgtcatcttaaggaag

SEQ ID NO: 123087 - DNA, 17 bp, synthetic construct
  source 1..17: mol_type = other DNA
tgtcatcttaaggaaga

SEQ ID NO: 123088 - DNA, 17 bp, synthetic construct
  source 1..17: mol_type = other DNA
gtcatcttaaggaagac

SEQ ID NO: 123089 - DNA, 17 bp, synthetic construct
  source 1..17: mol_type = other DNA
tcatcttaaggaagact

SEQ ID NO: 123090 - DNA, 17 bp, synthetic construct
  source 1..17: mol_type = other DNA
catcttaaggaagactt

SEQ ID NO: 123091 - DNA, 17 bp, synthetic construct
  source 1..17: mol_type = other DNA
atcttaaggaagacttg

SEQ ID NO: 123092 - DNA, 17 bp, synthetic construct
  source 1..17: mol_type = other DNA
tcttaaggaagacttga

SEQ ID NO: 123093 - DNA, 17 bp, synthetic construct
  source 1..17: mol_type = other DNA
cttaaggaagacttgag

SEQ ID NO: 123094 - DNA, 17 bp, synthetic construct
  source 1..17: mol_type = other DNA
ttaaggaagacttgagt

SEQ ID NO: 123095 - DNA, 17 bp, synthetic construct
  source 1..17: mol_type = other DNA
taaggaagacttgagtg

SEQ ID NO: 123096 - DNA, 17 bp, synthetic construct
  source 1..17: mol_type = other DNA
aaggaagacttgagtgc

SEQ ID NO: 123097 - DNA, 17 bp, synthetic construct
  source 1..17: mol_type = other DNA
aggaagacttgagtgcc

SEQ ID NO: 123098 - DNA, 17 bp, synthetic construct
  source 1..17: mol_type = other DNA
ggaagacttgagtgccc

SEQ ID NO: 123099 - DNA, 17 bp, synthetic construct
  source 1..17: mol_type = other DNA
gaagacttgagtgccca

SEQ ID NO: 123100 - DNA, 17 bp, synthetic construct
  source 1..17: mol_type = other DNA
aagacttgagtgcccac

SEQ ID NO: 123101 - DNA, 17 bp, synthetic construct
  source 1..17: mol_type = other DNA
agacttgagtgcccact

SEQ ID NO: 123102 - DNA, 17 bp, synthetic construct
  source 1..17: mol_type = other DNA
gacttgagtgcccactt

SEQ ID NO: 123103 - DNA, 17 bp, synthetic construct
  source 1..17: mol_type = other DNA
acttgagtgcccactta

SEQ ID NO: 123104 - DNA, 17 bp, synthetic construct
  source 1..17: mol_type = other DNA
cttgagtgcccacttag

SEQ ID NO: 123105 - DNA, 17 bp, synthetic construct
  source 1..17: mol_type = other DNA
ttgagtgcccacttagg

SEQ ID NO: 123106 - DNA, 17 bp, synthetic construct
  source 1..17: mol_type = other DNA
tgagtgcccacttaggc

SEQ ID NO: 123107 - DNA, 17 bp, synthetic construct
  source 1..17: mol_type = other DNA
gagtgcccacttaggca

SEQ ID NO: 123108 - DNA, 17 bp, synthetic construct
  source 1..17: mol_type = other DNA
agtgcccacttaggcac

SEQ ID NO: 123109 - DNA, 17 bp, synthetic construct
  source 1..17: mol_type = other DNA
gtgcccacttaggcaca

SEQ ID NO: 123110 - DNA, 17 bp, synthetic construct
  source 1..17: mol_type = other DNA
tgcccacttaggcacac

SEQ ID NO: 123111 - DNA, 17 bp, synthetic construct
  source 1..17: mol_type = other DNA
gcccacttaggcacaca

SEQ ID NO: 123112 - DNA, 17 bp, synthetic construct
  source 1..17: mol_type = other DNA
cccacttaggcacacag

SEQ ID NO: 123113 - DNA, 17 bp, synthetic construct
  source 1..17: mol_type = other DNA
ccacttaggcacacagc

SEQ ID NO: 123114 - DNA, 17 bp, synthetic construct
  source 1..17: mol_type = other DNA
cacttaggcacacagca

SEQ ID NO: 123115 - DNA, 17 bp, synthetic construct
  source 1..17: mol_type = other DNA
acttaggcacacagcat

SEQ ID NO: 123116 - DNA, 17 bp, synthetic construct
  source 1..17: mol_type = other DNA
cttaggcacacagcatg

SEQ ID NO: 123117 - DNA, 17 bp, synthetic construct
  source 1..17: mol_type = other DNA
ttaggcacacagcatgg

SEQ ID NO: 123118 - DNA, 17 bp, synthetic construct
  source 1..17: mol_type = other DNA
taggcacacagcatggt

SEQ ID NO: 123119 - DNA, 17 bp, synthetic construct
  source 1..17: mol_type = other DNA
aggcacacagcatggtg

SEQ ID NO: 123120 - DNA, 17 bp, synthetic construct
  source 1..17: mol_type = other DNA
ggcacacagcatggtgg

SEQ ID NO: 123121 - DNA, 17 bp, synthetic construct
  source 1..17: mol_type = other DNA
gcacacagcatggtggc

SEQ ID NO: 123122 - DNA, 17 bp, synthetic construct
  source 1..17: mol_type = other DNA
cacacagcatggtggct

SEQ ID NO: 123123 - DNA, 17 bp, synthetic construct
  source 1..17: mol_type = other DNA
acacagcatggtggctc

SEQ ID NO: 123124 - DNA, 17 bp, synthetic construct
  source 1..17: mol_type = other DNA
cacagcatggtggctca

SEQ ID NO: 123125 - DNA, 17 bp, synthetic construct
  source 1..17: mol_type = other DNA
acagcatggtggctcag

SEQ ID NO: 123126 - DNA, 17 bp, synthetic construct
  source 1..17: mol_type = other DNA
cagcatggtggctcagg

SEQ ID NO: 123127 - DNA, 17 bp, synthetic construct
  source 1..17: mol_type = other DNA
agcatggtggctcagga

SEQ ID NO: 123128 - DNA, 17 bp, synthetic construct
  source 1..17: mol_type = other DNA
gcatggtggctcaggag

SEQ ID NO: 123129 - DNA, 17 bp, synthetic construct
  source 1..17: mol_type = other DNA
catggtggctcaggagc

SEQ ID NO: 123130 - DNA, 17 bp, synthetic construct
  source 1..17: mol_type = other DNA
atggtggctcaggagct

SEQ ID NO: 123131 - DNA, 17 bp, synthetic construct
  source 1..17: mol_type = other DNA
tggtggctcaggagctg

SEQ ID NO: 123132 - DNA, 17 bp, synthetic construct
  source 1..17: mol_type = other DNA
ggtggctcaggagctga

SEQ ID NO: 123133 - DNA, 17 bp, synthetic construct
  source 1..17: mol_type = other DNA
gtggctcaggagctgag

SEQ ID NO: 123134 - DNA, 17 bp, synthetic construct
  source 1..17: mol_type = other DNA
tggctcaggagctgaga

SEQ ID NO: 123135 - DNA, 17 bp, synthetic construct
  source 1..17: mol_type = other DNA
ggctcaggagctgagat

SEQ ID NO: 123136 - DNA, 17 bp, synthetic construct
  source 1..17: mol_type = other DNA
gctcaggagctgagatg

SEQ ID NO: 123137 - DNA, 17 bp, synthetic construct
  source 1..17: mol_type = other DNA
ctcaggagctgagatga

SEQ ID NO: 123138 - DNA, 17 bp, synthetic construct
  source 1..17: mol_type = other DNA
tcaggagctgagatgag

SEQ ID NO: 123139 - DNA, 17 bp, synthetic construct
  source 1..17: mol_type = other DNA
caggagctgagatgagg

SEQ ID NO: 123140 - DNA, 17 bp, synthetic construct
  source 1..17: mol_type = other DNA
aggagctgagatgaggg

SEQ ID NO: 123141 - DNA, 17 bp, synthetic construct
  source 1..17: mol_type = other DNA
ggagctgagatgagggg

SEQ ID NO: 123142 - DNA, 17 bp, synthetic construct
  source 1..17: mol_type = other DNA
gagctgagatgaggggc

SEQ ID NO: 123143 - DNA, 17 bp, synthetic construct
  source 1..17: mol_type = other DNA
agctgagatgaggggct

SEQ ID NO: 123144 - DNA, 17 bp, synthetic construct
  source 1..17: mol_type = other DNA
gctgagatgaggggctg

SEQ ID NO: 123145 - DNA, 17 bp, synthetic construct
  source 1..17: mol_type = other DNA
ctgagatgaggggctgg

SEQ ID NO: 123146 - DNA, 17 bp, synthetic construct
  source 1..17: mol_type = other DNA
tgagatgaggggctggc

SEQ ID NO: 123147 - DNA, 17 bp, synthetic construct
  source 1..17: mol_type = other DNA
gagatgaggggctggcg

SEQ ID NO: 123148 - DNA, 17 bp, synthetic construct
  source 1..17: mol_type = other DNA
agatgaggggctggcgt

SEQ ID NO: 123149 - DNA, 17 bp, synthetic construct
  source 1..17: mol_type = other DNA
gatgaggggctggcgta

SEQ ID NO: 123150 - DNA, 17 bp, synthetic construct
  source 1..17: mol_type = other DNA
atgaggggctggcgtag

SEQ ID NO: 123151 - DNA, 17 bp, synthetic construct
  source 1..17: mol_type = other DNA
tgaggggctggcgtagg

SEQ ID NO: 123152 - DNA, 17 bp, synthetic construct
  source 1..17: mol_type = other DNA
gaggggctggcgtaggg

SEQ ID NO: 123153 - DNA, 17 bp, synthetic construct
  source 1..17: mol_type = other DNA
aggggctggcgtagggg

SEQ ID NO: 123154 - DNA, 17 bp, synthetic construct
  source 1..17: mol_type = other DNA
ggggctggcgtaggggc

SEQ ID NO: 123155 - DNA, 17 bp, synthetic construct
  source 1..17: mol_type = other DNA
gggctggcgtaggggca

SEQ ID NO: 123156 - DNA, 17 bp, synthetic construct
  source 1..17: mol_type = other DNA
ggctggcgtaggggcag

SEQ ID NO: 123157 - DNA, 17 bp, synthetic construct
  source 1..17: mol_type = other DNA
gctggcgtaggggcagc

SEQ ID NO: 123158 - DNA, 17 bp, synthetic construct
  source 1..17: mol_type = other DNA
ctggcgtaggggcagca

SEQ ID NO: 123159 - DNA, 17 bp, synthetic construct
  source 1..17: mol_type = other DNA
tggcgtaggggcagcag

SEQ ID NO: 123160 - DNA, 17 bp, synthetic construct
  source 1..17: mol_type = other DNA
ggcgtaggggcagcagt

SEQ ID NO: 123161 - DNA, 17 bp, synthetic construct
  source 1..17: mol_type = other DNA
gcgtaggggcagcagtg

SEQ ID NO: 123162 - DNA, 17 bp, synthetic construct
  source 1..17: mol_type = other DNA
cgtaggggcagcagtgg

SEQ ID NO: 123163 - DNA, 17 bp, synthetic construct
  source 1..17: mol_type = other DNA
gtaggggcagcagtggg

SEQ ID NO: 123164 - DNA, 17 bp, synthetic construct
  source 1..17: mol_type = other DNA
taggggcagcagtgggc

SEQ ID NO: 123165 - DNA, 17 bp, synthetic construct
  source 1..17: mol_type = other DNA
aggggcagcagtgggca

SEQ ID NO: 123166 - DNA, 17 bp, synthetic construct
  source 1..17: mol_type = other DNA
ggggcagcagtgggcat

SEQ ID NO: 123167 - DNA, 17 bp, synthetic construct
  source 1..17: mol_type = other DNA
gggcagcagtgggcata

SEQ ID NO: 123168 - DNA, 17 bp, synthetic construct
  source 1..17: mol_type = other DNA
ggcagcagtgggcatac

SEQ ID NO: 123169 - DNA, 17 bp, synthetic construct
  source 1..17: mol_type = other DNA
gcagcagtgggcatact

SEQ ID NO: 123170 - DNA, 17 bp, synthetic construct
  source 1..17: mol_type = other DNA
cagcagtgggcatactc

SEQ ID NO: 123171 - DNA, 17 bp, synthetic construct
  source 1..17: mol_type = other DNA
agcagtgggcatactcg

SEQ ID NO: 123172 - DNA, 17 bp, synthetic construct
  source 1..17: mol_type = other DNA
gcagtgggcatactcgc

SEQ ID NO: 123173 - DNA, 17 bp, synthetic construct
  source 1..17: mol_type = other DNA
cagtgggcatactcgct

SEQ ID NO: 123174 - DNA, 17 bp, synthetic construct
  source 1..17: mol_type = other DNA
agtgggcatactcgctc

SEQ ID NO: 123175 - DNA, 17 bp, synthetic construct
  source 1..17: mol_type = other DNA
gtgggcatactcgctcg

SEQ ID NO: 123176 - DNA, 17 bp, synthetic construct
  source 1..17: mol_type = other DNA
tgggcatactcgctcgt

SEQ ID NO: 123177 - DNA, 17 bp, synthetic construct
  source 1..17: mol_type = other DNA
gggcatactcgctcgtg

SEQ ID NO: 123178 - DNA, 17 bp, synthetic construct
  source 1..17: mol_type = other DNA
ggcatactcgctcgtgg

SEQ ID NO: 123179 - DNA, 17 bp, synthetic construct
  source 1..17: mol_type = other DNA
gcatactcgctcgtggg

SEQ ID NO: 123180 - DNA, 17 bp, synthetic construct
  source 1..17: mol_type = other DNA
catactcgctcgtggga

SEQ ID NO: 123181 - DNA, 17 bp, synthetic construct
  source 1..17: mol_type = other DNA
atactcgctcgtgggag

SEQ ID NO: 123182 - DNA, 17 bp, synthetic construct
  source 1..17: mol_type = other DNA
tactcgctcgtgggagg

SEQ ID NO: 123183 - DNA, 17 bp, synthetic construct
  source 1..17: mol_type = other DNA
actcgctcgtgggaggc

SEQ ID NO: 123184 - DNA, 17 bp, synthetic construct
  source 1..17: mol_type = other DNA
ctcgctcgtgggaggcc

SEQ ID NO: 123185 - DNA, 17 bp, synthetic construct
  source 1..17: mol_type = other DNA
tcgctcgtgggaggccc

SEQ ID NO: 123186 - DNA, 17 bp, synthetic construct
  source 1..17: mol_type = other DNA
cgctcgtgggaggccct

SEQ ID NO: 123187 - DNA, 17 bp, synthetic construct
  source 1..17: mol_type = other DNA
gctcgtgggaggccctg

SEQ ID NO: 123188 - DNA, 17 bp, synthetic construct
  source 1..17: mol_type = other DNA
ctcgtgggaggccctga

SEQ ID NO: 123189 - DNA, 17 bp, synthetic construct
  source 1..17: mol_type = other DNA
tcgtgggaggccctgaa

SEQ ID NO: 123190 - DNA, 17 bp, synthetic construct
  source 1..17: mol_type = other DNA
cgtgggaggccctgaag

SEQ ID NO: 123191 - DNA, 17 bp, synthetic construct
  source 1..17: mol_type = other DNA
gtgggaggccctgaagc

SEQ ID NO: 123192 - DNA, 17 bp, synthetic construct
  source 1..17: mol_type = other DNA
tgggaggccctgaagca

SEQ ID NO: 123193 - DNA, 17 bp, synthetic construct
  source 1..17: mol_type = other DNA
gggaggccctgaagcac

SEQ ID NO: 123194 - DNA, 17 bp, synthetic construct
  source 1..17: mol_type = other DNA
ggaggccctgaagcact

SEQ ID NO: 123195 - DNA, 17 bp, synthetic construct
  source 1..17: mol_type = other DNA
gaggccctgaagcactc

SEQ ID NO: 123196 - DNA, 17 bp, synthetic construct
  source 1..17: mol_type = other DNA
aggccctgaagcactct

SEQ ID NO: 123197 - DNA, 17 bp, synthetic construct
  source 1..17: mol_type = other DNA
ggccctgaagcactctc

SEQ ID NO: 123198 - DNA, 17 bp, synthetic construct
  source 1..17: mol_type = other DNA
gccctgaagcactctca

SEQ ID NO: 123199 - DNA, 17 bp, synthetic construct
  source 1..17: mol_type = other DNA
ccctgaagcactctcat

SEQ ID NO: 123200 - DNA, 17 bp, synthetic construct
  source 1..17: mol_type = other DNA
cctgaagcactctcatg

SEQ ID NO: 123201 - DNA, 17 bp, synthetic construct
  source 1..17: mol_type = other DNA
ctgaagcactctcatgt

SEQ ID NO: 123202 - DNA, 17 bp, synthetic construct
  source 1..17: mol_type = other DNA
tgaagcactctcatgtc

SEQ ID NO: 123203 - DNA, 17 bp, synthetic construct
  source 1..17: mol_type = other DNA
gaagcactctcatgtcg

SEQ ID NO: 123204 - DNA, 17 bp, synthetic construct
  source 1..17: mol_type = other DNA
aagcactctcatgtcgg

SEQ ID NO: 123205 - DNA, 17 bp, synthetic construct
  source 1..17: mol_type = other DNA
agcactctcatgtcggc

SEQ ID NO: 123206 - DNA, 17 bp, synthetic construct
  source 1..17: mol_type = other DNA
gcactctcatgtcggcc

SEQ ID NO: 123207 - DNA, 17 bp, synthetic construct
  source 1..17: mol_type = other DNA
cactctcatgtcggccg

SEQ ID NO: 123208 - DNA, 17 bp, synthetic construct
  source 1..17: mol_type = other DNA
actctcatgtcggccgc

SEQ ID NO: 123209 - DNA, 17 bp, synthetic construct
  source 1..17: mol_type = other DNA
ctctcatgtcggccgcc

SEQ ID NO: 123210 - DNA, 17 bp, synthetic construct
  source 1..17: mol_type = other DNA
tctcatgtcggccgccg

SEQ ID NO: 123211 - DNA, 17 bp, synthetic construct
  source 1..17: mol_type = other DNA
ctcatgtcggccgccgc

SEQ ID NO: 123212 - DNA, 17 bp, synthetic construct
  source 1..17: mol_type = other DNA
tcatgtcggccgccgct

SEQ ID NO: 123213 - DNA, 17 bp, synthetic construct
  source 1..17: mol_type = other DNA
catgtcggccgccgctt

SEQ ID NO: 123214 - DNA, 17 bp, synthetic construct
  source 1..17: mol_type = other DNA
atgtcggccgccgcttg

SEQ ID NO: 123215 - DNA, 17 bp, synthetic construct
  source 1..17: mol_type = other DNA
tgtcggccgccgcttgc

SEQ ID NO: 123216 - DNA, 17 bp, synthetic construct
  source 1..17: mol_type = other DNA
gtcggccgccgcttgcc

SEQ ID NO: 123217 - DNA, 17 bp, synthetic construct
  source 1..17: mol_type = other DNA
tcggccgccgcttgccc

SEQ ID NO: 123218 - DNA, 17 bp, synthetic construct
  source 1..17: mol_type = other DNA
cggccgccgcttgccct

SEQ ID NO: 123219 - DNA, 17 bp, synthetic construct
  source 1..17: mol_type = other DNA
ggccgccgcttgccctc

SEQ ID NO: 123220 - DNA, 17 bp, synthetic construct
  source 1..17: mol_type = other DNA
gccgccgcttgccctct

SEQ ID NO: 123221 - DNA, 17 bp, synthetic construct
  source 1..17: mol_type = other DNA
ccgccgcttgccctctt

SEQ ID NO: 123222 - DNA, 17 bp, synthetic construct
  source 1..17: mol_type = other DNA
cgccgcttgccctcttg

SEQ ID NO: 123223 - DNA, 17 bp, synthetic construct
  source 1..17: mol_type = other DNA
gccgcttgccctcttga

SEQ ID NO: 123224 - DNA, 17 bp, synthetic construct
  source 1..17: mol_type = other DNA
ccgcttgccctcttgag

SEQ ID NO: 123225 - DNA, 17 bp, synthetic construct
  source 1..17: mol_type = other DNA
cgcttgccctcttgaga

SEQ ID NO: 123226 - DNA, 17 bp, synthetic construct
  source 1..17: mol_type = other DNA
gcttgccctcttgagaa

SEQ ID NO: 123227 - DNA, 17 bp, synthetic construct
  source 1..17: mol_type = other DNA
cttgccctcttgagaag

SEQ ID NO: 123228 - DNA, 17 bp, synthetic construct
  source 1..17: mol_type = other DNA
ttgccctcttgagaagg

SEQ ID NO: 123229 - DNA, 17 bp, synthetic construct
  source 1..17: mol_type = other DNA
tgccctcttgagaaggc

SEQ ID NO: 123230 - DNA, 17 bp, synthetic construct
  source 1..17: mol_type = other DNA
gccctcttgagaaggca

SEQ ID NO: 123231 - DNA, 17 bp, synthetic construct
  source 1..17: mol_type = other DNA
ccctcttgagaaggcag

SEQ ID NO: 123232 - DNA, 17 bp, synthetic construct
  source 1..17: mol_type = other DNA
cctcttgagaaggcagc

SEQ ID NO: 123233 - DNA, 17 bp, synthetic construct
  source 1..17: mol_type = other DNA
ctcttgagaaggcagct

SEQ ID NO: 123234 - DNA, 17 bp, synthetic construct
  source 1..17: mol_type = other DNA
tcttgagaaggcagctg

SEQ ID NO: 123235 - DNA, 17 bp, synthetic construct
  source 1..17: mol_type = other DNA
cttgagaaggcagctgg

SEQ ID NO: 123236 - DNA, 17 bp, synthetic construct
  source 1..17: mol_type = other DNA
ttgagaaggcagctggt

SEQ ID NO: 123237 - DNA, 17 bp, synthetic construct
  source 1..17: mol_type = other DNA
tgagaaggcagctggtg

SEQ ID NO: 123238 - DNA, 17 bp, synthetic construct
  source 1..17: mol_type = other DNA
gagaaggcagctggtga

SEQ ID NO: 123239 - DNA, 17 bp, synthetic construct
  source 1..17: mol_type = other DNA
agaaggcagctggtgac

SEQ ID NO: 123240 - DNA, 17 bp, synthetic construct
  source 1..17: mol_type = other DNA
gaaggcagctggtgacc

SEQ ID NO: 123241 - DNA, 17 bp, synthetic construct
  source 1..17: mol_type = other DNA
aaggcagctggtgaccc

SEQ ID NO: 123242 - DNA, 17 bp, synthetic construct
  source 1..17: mol_type = other DNA
aggcagctggtgacccc

SEQ ID NO: 123243 - DNA, 17 bp, synthetic construct
  source 1..17: mol_type = other DNA
ggcagctggtgacccct

SEQ ID NO: 123244 - DNA, 17 bp, synthetic construct
  source 1..17: mol_type = other DNA
gcagctggtgacccctt

SEQ ID NO: 123245 - DNA, 17 bp, synthetic construct
  source 1..17: mol_type = other DNA
cagctggtgaccccttg

SEQ ID NO: 123246 - DNA, 17 bp, synthetic construct
  source 1..17: mol_type = other DNA
agctggtgaccccttgg

SEQ ID NO: 123247 - DNA, 17 bp, synthetic construct
  source 1..17: mol_type = other DNA
gctggtgaccccttgga

SEQ ID NO: 123248 - DNA, 17 bp, synthetic construct
  source 1..17: mol_type = other DNA
ctggtgaccccttggaa

SEQ ID NO: 123249 - DNA, 17 bp, synthetic construct
  source 1..17: mol_type = other DNA
tggtgaccccttggaag

SEQ ID NO: 123250 - DNA, 17 bp, synthetic construct
  source 1..17: mol_type = other DNA
ggtgaccccttggaagg

SEQ ID NO: 123251 - DNA, 17 bp, synthetic construct
  source 1..17: mol_type = other DNA
gtgaccccttggaaggt

SEQ ID NO: 123252 - DNA, 17 bp, synthetic construct
  source 1..17: mol_type = other DNA
tgaccccttggaaggtc

SEQ ID NO: 123253 - DNA, 17 bp, synthetic construct
  source 1..17: mol_type = other DNA
gaccccttggaaggtcc

SEQ ID NO: 123254 - DNA, 17 bp, synthetic construct
  source 1..17: mol_type = other DNA
accccttggaaggtcct

SEQ ID NO: 123255 - DNA, 17 bp, synthetic construct
  source 1..17: mol_type = other DNA
ccccttggaaggtcctg

SEQ ID NO: 123256 - DNA, 17 bp, synthetic construct
  source 1..17: mol_type = other DNA
cccttggaaggtcctgt

SEQ ID NO: 123257 - DNA, 17 bp, synthetic construct
  source 1..17: mol_type = other DNA
ccttggaaggtcctgtg

SEQ ID NO: 123258 - DNA, 17 bp, synthetic construct
  source 1..17: mol_type = other DNA
cttggaaggtcctgtgg

SEQ ID NO: 123259 - DNA, 17 bp, synthetic construct
  source 1..17: mol_type = other DNA
ttggaaggtcctgtggc

SEQ ID NO: 123260 - DNA, 17 bp, synthetic construct
  source 1..17: mol_type = other DNA
tggaaggtcctgtggcc

SEQ ID NO: 123261 - DNA, 17 bp, synthetic construct
  source 1..17: mol_type = other DNA
ggaaggtcctgtggcct

SEQ ID NO: 123262 - DNA, 17 bp, synthetic construct
  source 1..17: mol_type = other DNA
gaaggtcctgtggcctg

SEQ ID NO: 123263 - DNA, 17 bp, synthetic construct
  source 1..17: mol_type = other DNA
aaggtcctgtggcctga

SEQ ID NO: 123264 - DNA, 17 bp, synthetic construct
  source 1..17: mol_type = other DNA
aggtcctgtggcctgac

SEQ ID NO: 123265 - DNA, 17 bp, synthetic construct
  source 1..17: mol_type = other DNA
ggtcctgtggcctgaca

SEQ ID NO: 123266 - DNA, 17 bp, synthetic construct
  source 1..17: mol_type = other DNA
gtcctgtggcctgacaa

SEQ ID NO: 123267 - DNA, 17 bp, synthetic construct
  source 1..17: mol_type = other DNA
tcctgtggcctgacaaa

SEQ ID NO: 123268 - DNA, 17 bp, synthetic construct
  source 1..17: mol_type = other DNA
cctgtggcctgacaaag

SEQ ID NO: 123269 - DNA, 17 bp, synthetic construct
  source 1..17: mol_type = other DNA
ctgtggcctgacaaagc

SEQ ID NO: 123270 - DNA, 17 bp, synthetic construct
  source 1..17: mol_type = other DNA
tgtggcctgacaaagct

SEQ ID NO: 123271 - DNA, 17 bp, synthetic construct
  source 1..17: mol_type = other DNA
gtggcctgacaaagctg

SEQ ID NO: 123272 - DNA, 17 bp, synthetic construct
  source 1..17: mol_type = other DNA
tggcctgacaaagctga

SEQ ID NO: 123273 - DNA, 17 bp, synthetic construct
  source 1..17: mol_type = other DNA
ggcctgacaaagctgag

SEQ ID NO: 123274 - DNA, 17 bp, synthetic construct
  source 1..17: mol_type = other DNA
gcctgacaaagctgagc

SEQ ID NO: 123275 - DNA, 17 bp, synthetic construct
  source 1..17: mol_type = other DNA
cctgacaaagctgagcc

SEQ ID NO: 123276 - DNA, 17 bp, synthetic construct
  source 1..17: mol_type = other DNA
ctgacaaagctgagccc

SEQ ID NO: 123277 - DNA, 17 bp, synthetic construct
  source 1..17: mol_type = other DNA
tgacaaagctgagccca

SEQ ID NO: 123278 - DNA, 17 bp, synthetic construct
  source 1..17: mol_type = other DNA
gacaaagctgagcccag

SEQ ID NO: 123279 - DNA, 17 bp, synthetic construct
  source 1..17: mol_type = other DNA
acaaagctgagcccagg

SEQ ID NO: 123280 - DNA, 17 bp, synthetic construct
  source 1..17: mol_type = other DNA
caaagctgagcccaggt

SEQ ID NO: 123281 - DNA, 17 bp, synthetic construct
  source 1..17: mol_type = other DNA
aaagctgagcccaggtt

SEQ ID NO: 123282 - DNA, 17 bp, synthetic construct
  source 1..17: mol_type = other DNA
aagctgagcccaggttc

SEQ ID NO: 123283 - DNA, 17 bp, synthetic construct
  source 1..17: mol_type = other DNA
agctgagcccaggttca

SEQ ID NO: 123284 - DNA, 17 bp, synthetic construct
  source 1..17: mol_type = other DNA
gctgagcccaggttcag

SEQ ID NO: 123285 - DNA, 17 bp, synthetic construct
  source 1..17: mol_type = other DNA
ctgagcccaggttcaga

SEQ ID NO: 123286 - DNA, 17 bp, synthetic construct
  source 1..17: mol_type = other DNA
tgagcccaggttcagat

SEQ ID NO: 123287 - DNA, 17 bp, synthetic construct
  source 1..17: mol_type = other DNA
gagcccaggttcagatg

SEQ ID NO: 123288 - DNA, 17 bp, synthetic construct
  source 1..17: mol_type = other DNA
agcccaggttcagatgg

SEQ ID NO: 123289 - DNA, 17 bp, synthetic construct
  source 1..17: mol_type = other DNA
gcccaggttcagatggg

SEQ ID NO: 123290 - DNA, 17 bp, synthetic construct
  source 1..17: mol_type = other DNA
cccaggttcagatgggg

SEQ ID NO: 123291 - DNA, 17 bp, synthetic construct
  source 1..17: mol_type = other DNA
ccaggttcagatggggc

SEQ ID NO: 123292 - DNA, 17 bp, synthetic construct
  source 1..17: mol_type = other DNA
caggttcagatggggcc

SEQ ID NO: 123293 - DNA, 17 bp, synthetic construct
  source 1..17: mol_type = other DNA
aggttcagatggggcct

SEQ ID NO: 123294 - DNA, 17 bp, synthetic construct
  source 1..17: mol_type = other DNA
ggttcagatggggcctg

SEQ ID NO: 123295 - DNA, 17 bp, synthetic construct
  source 1..17: mol_type = other DNA
gttcagatggggcctgg

SEQ ID NO: 123296 - DNA, 17 bp, synthetic construct
  source 1..17: mol_type = other DNA
ttcagatggggcctggg

SEQ ID NO: 123297 - DNA, 17 bp, synthetic construct
  source 1..17: mol_type = other DNA
tcagatggggcctggga

SEQ ID NO: 123298 - DNA, 17 bp, synthetic construct
  source 1..17: mol_type = other DNA
cagatggggcctgggag

SEQ ID NO: 123299 - DNA, 17 bp, synthetic construct
  source 1..17: mol_type = other DNA
agatggggcctgggagg

SEQ ID NO: 123300 - DNA, 17 bp, synthetic construct
  source 1..17: mol_type = other DNA
gatggggcctgggaggg

SEQ ID NO: 123301 - DNA, 17 bp, synthetic construct
  source 1..17: mol_type = other DNA
atggggcctgggagggg

SEQ ID NO: 123302 - DNA, 17 bp, synthetic construct
  source 1..17: mol_type = other DNA
tggggcctgggaggggt

SEQ ID NO: 123303 - DNA, 17 bp, synthetic construct
  source 1..17: mol_type = other DNA
ggggcctgggaggggtg

SEQ ID NO: 123304 - DNA, 17 bp, synthetic construct
  source 1..17: mol_type = other DNA
gggcctgggaggggtgt

SEQ ID NO: 123305 - DNA, 17 bp, synthetic construct
  source 1..17: mol_type = other DNA
ggcctgggaggggtgtg

SEQ ID NO: 123306 - DNA, 17 bp, synthetic construct
  source 1..17: mol_type = other DNA
gcctgggaggggtgtgg

SEQ ID NO: 123307 - DNA, 17 bp, synthetic construct
  source 1..17: mol_type = other DNA
cctgggaggggtgtggg

SEQ ID NO: 123308 - DNA, 17 bp, synthetic construct
  source 1..17: mol_type = other DNA
ctgggaggggtgtgggc

SEQ ID NO: 123309 - DNA, 17 bp, synthetic construct
  source 1..17: mol_type = other DNA
tgggaggggtgtgggct

SEQ ID NO: 123310 - DNA, 17 bp, synthetic construct
  source 1..17: mol_type = other DNA
gggaggggtgtgggctg

SEQ ID NO: 123311 - DNA, 17 bp, synthetic construct
  source 1..17: mol_type = other DNA
ggaggggtgtgggctgc

SEQ ID NO: 123312 - DNA, 17 bp, synthetic construct
  source 1..17: mol_type = other DNA
gaggggtgtgggctgcc

SEQ ID NO: 123313 - DNA, 17 bp, synthetic construct
  source 1..17: mol_type = other DNA
aggggtgtgggctgcct

SEQ ID NO: 123314 - DNA, 17 bp, synthetic construct
  source 1..17: mol_type = other DNA
ggggtgtgggctgcctg

SEQ ID NO: 123315 - DNA, 17 bp, synthetic construct
  source 1..17: mol_type = other DNA
gggtgtgggctgcctgg

SEQ ID NO: 123316 - DNA, 17 bp, synthetic construct
  source 1..17: mol_type = other DNA
ggtgtgggctgcctgga

SEQ ID NO: 123317 - DNA, 17 bp, synthetic construct
  source 1..17: mol_type = other DNA
gtgtgggctgcctggag

SEQ ID NO: 123318 - DNA, 17 bp, synthetic construct
  source 1..17: mol_type = other DNA
tgtgggctgcctggagg

SEQ ID NO: 123319 - DNA, 17 bp, synthetic construct
  source 1..17: mol_type = other DNA
gtgggctgcctggagga

SEQ ID NO: 123320 - DNA, 17 bp, synthetic construct
  source 1..17: mol_type = other DNA
tgggctgcctggaggaa

SEQ ID NO: 123321 - DNA, 17 bp, synthetic construct
  source 1..17: mol_type = other DNA
gggctgcctggaggaag

SEQ ID NO: 123322 - DNA, 17 bp, synthetic construct
  source 1..17: mol_type = other DNA
ggctgcctggaggaagc

SEQ ID NO: 123323 - DNA, 17 bp, synthetic construct
  source 1..17: mol_type = other DNA
gctgcctggaggaagca

SEQ ID NO: 123324 - DNA, 17 bp, synthetic construct
  source 1..17: mol_type = other DNA
ctgcctggaggaagcag

SEQ ID NO: 123325 - DNA, 17 bp, synthetic construct
  source 1..17: mol_type = other DNA
tgcctggaggaagcagg

SEQ ID NO: 123326 - DNA, 17 bp, synthetic construct
  source 1..17: mol_type = other DNA
gcctggaggaagcaggc

SEQ ID NO: 123327 - DNA, 17 bp, synthetic construct
  source 1..17: mol_type = other DNA
cctggaggaagcaggca

SEQ ID NO: 123328 - DNA, 17 bp, synthetic construct
  source 1..17: mol_type = other DNA
ctggaggaagcaggcag

SEQ ID NO: 123329 - DNA, 17 bp, synthetic construct
  source 1..17: mol_type = other DNA
tggaggaagcaggcagc

SEQ ID NO: 123330 - DNA, 17 bp, synthetic construct
  source 1..17: mol_type = other DNA
ggaggaagcaggcagct

SEQ ID NO: 123331 - DNA, 17 bp, synthetic construct
  source 1..17: mol_type = other DNA
gaggaagcaggcagctt

SEQ ID NO: 123332 - DNA, 17 bp, synthetic construct
  source 1..17: mol_type = other DNA
aggaagcaggcagcttc

SEQ ID NO: 123333 - DNA, 17 bp, synthetic construct
  source 1..17: mol_type = other DNA
ggaagcaggcagcttcc

SEQ ID NO: 123334 - DNA, 17 bp, synthetic construct
  source 1..17: mol_type = other DNA
gaagcaggcagcttccc

SEQ ID NO: 123335 - DNA, 17 bp, synthetic construct
  source 1..17: mol_type = other DNA
aagcaggcagcttccca

SEQ ID NO: 123336 - DNA, 17 bp, synthetic construct
  source 1..17: mol_type = other DNA
agcaggcagcttcccat

SEQ ID NO: 123337 - DNA, 17 bp, synthetic construct
  source 1..17: mol_type = other DNA
gcaggcagcttcccatg

SEQ ID NO: 123338 - DNA, 17 bp, synthetic construct
  source 1..17: mol_type = other DNA
caggcagcttcccatgg

SEQ ID NO: 123339 - DNA, 17 bp, synthetic construct
  source 1..17: mol_type = other DNA
aggcagcttcccatggt

SEQ ID NO: 123340 - DNA, 17 bp, synthetic construct
  source 1..17: mol_type = other DNA
ggcagcttcccatggtc

SEQ ID NO: 123341 - DNA, 17 bp, synthetic construct
  source 1..17: mol_type = other DNA
gcagcttcccatggtca

SEQ ID NO: 123342 - DNA, 17 bp, synthetic construct
  source 1..17: mol_type = other DNA
cagcttcccatggtcag

SEQ ID NO: 123343 - DNA, 17 bp, synthetic construct
  source 1..17: mol_type = other DNA
agcttcccatggtcagg

SEQ ID NO: 123344 - DNA, 17 bp, synthetic construct
  source 1..17: mol_type = other DNA
gcttcccatggtcagga

SEQ ID NO: 123345 - DNA, 17 bp, synthetic construct
  source 1..17: mol_type = other DNA
cttcccatggtcaggac

SEQ ID NO: 123346 - DNA, 17 bp, synthetic construct
  source 1..17: mol_type = other DNA
ttcccatggtcaggacg

SEQ ID NO: 123347 - DNA, 17 bp, synthetic construct
  source 1..17: mol_type = other DNA
tcccatggtcaggacgc

SEQ ID NO: 123348 - DNA, 17 bp, synthetic construct
  source 1..17: mol_type = other DNA
cccatggtcaggacgca

SEQ ID NO: 123349 - DNA, 17 bp, synthetic construct
  source 1..17: mol_type = other DNA
ccatggtcaggacgcat

SEQ ID NO: 123350 - DNA, 17 bp, synthetic construct
  source 1..17: mol_type = other DNA
catggtcaggacgcatt

SEQ ID NO: 123351 - DNA, 17 bp, synthetic construct
  source 1..17: mol_type = other DNA
atggtcaggacgcattc

SEQ ID NO: 123352 - DNA, 17 bp, synthetic construct
  source 1..17: mol_type = other DNA
tggtcaggacgcattca

SEQ ID NO: 123353 - DNA, 17 bp, synthetic construct
  source 1..17: mol_type = other DNA
ggtcaggacgcattcac

SEQ ID NO: 123354 - DNA, 17 bp, synthetic construct
  source 1..17: mol_type = other DNA
gtcaggacgcattcaca

SEQ ID NO: 123355 - DNA, 17 bp, synthetic construct
  source 1..17: mol_type = other DNA
tcaggacgcattcacag

SEQ ID NO: 123356 - DNA, 17 bp, synthetic construct
  source 1..17: mol_type = other DNA
caggacgcattcacagc

SEQ ID NO: 123357 - DNA, 17 bp, synthetic construct
  source 1..17: mol_type = other DNA
aggacgcattcacagct

SEQ ID NO: 123358 - DNA, 17 bp, synthetic construct
  source 1..17: mol_type = other DNA
ggacgcattcacagctc

SEQ ID NO: 123359 - DNA, 17 bp, synthetic construct
  source 1..17: mol_type = other DNA
gacgcattcacagctca

SEQ ID NO: 123360 - DNA, 17 bp, synthetic construct
  source 1..17: mol_type = other DNA
acgcattcacagctcag

SEQ ID NO: 123361 - DNA, 17 bp, synthetic construct
  source 1..17: mol_type = other DNA
cgcattcacagctcagc

SEQ ID NO: 123362 - DNA, 17 bp, synthetic construct
  source 1..17: mol_type = other DNA
gcattcacagctcagct

SEQ ID NO: 123363 - DNA, 17 bp, synthetic construct
  source 1..17: mol_type = other DNA
cattcacagctcagctc

SEQ ID NO: 123364 - DNA, 17 bp, synthetic construct
  source 1..17: mol_type = other DNA
attcacagctcagctcc

SEQ ID NO: 123365 - DNA, 17 bp, synthetic construct
  source 1..17: mol_type = other DNA
ttcacagctcagctccc

SEQ ID NO: 123366 - DNA, 17 bp, synthetic construct
  source 1..17: mol_type = other DNA
tcacagctcagctcccc

SEQ ID NO: 123367 - DNA, 17 bp, synthetic construct
  source 1..17: mol_type = other DNA
cacagctcagctccccg

SEQ ID NO: 123368 - DNA, 17 bp, synthetic construct
  source 1..17: mol_type = other DNA
acagctcagctccccgc

SEQ ID NO: 123369 - DNA, 17 bp, synthetic construct
  source 1..17: mol_type = other DNA
cagctcagctccccgcg

SEQ ID NO: 123370 - DNA, 17 bp, synthetic construct
  source 1..17: mol_type = other DNA
agctcagctccccgcgt

SEQ ID NO: 123371 - DNA, 17 bp, synthetic construct
  source 1..17: mol_type = other DNA
gctcagctccccgcgtg

SEQ ID NO: 123372 - DNA, 17 bp, synthetic construct
  source 1..17: mol_type = other DNA
ctcagctccccgcgtgg

SEQ ID NO: 123373 - DNA, 17 bp, synthetic construct
  source 1..17: mol_type = other DNA
tcagctccccgcgtggc

SEQ ID NO: 123374 - DNA, 17 bp, synthetic construct
  source 1..17: mol_type = other DNA
cagctccccgcgtggct

SEQ ID NO: 123375 - DNA, 17 bp, synthetic construct
  source 1..17: mol_type = other DNA
agctccccgcgtggctg

SEQ ID NO: 123376 - DNA, 17 bp, synthetic construct
  source 1..17: mol_type = other DNA
gctccccgcgtggctgg

SEQ ID NO: 123377 - DNA, 17 bp, synthetic construct
  source 1..17: mol_type = other DNA
ctccccgcgtggctggt

SEQ ID NO: 123378 - DNA, 17 bp, synthetic construct
  source 1..17: mol_type = other DNA
tccccgcgtggctggtc

SEQ ID NO: 123379 - DNA, 17 bp, synthetic construct
  source 1..17: mol_type = other DNA
ccccgcgtggctggtct

SEQ ID NO: 123380 - DNA, 17 bp, synthetic construct
  source 1..17: mol_type = other DNA
cccgcgtggctggtctg

SEQ ID NO: 123381 - DNA, 17 bp, synthetic construct
  source 1..17: mol_type = other DNA
ccgcgtggctggtctgg

SEQ ID NO: 123382 - DNA, 17 bp, synthetic construct
  source 1..17: mol_type = other DNA
cgcgtggctggtctgga

SEQ ID NO: 123383 - DNA, 17 bp, synthetic construct
  source 1..17: mol_type = other DNA
gcgtggctggtctggaa

SEQ ID NO: 123384 - DNA, 17 bp, synthetic construct
  source 1..17: mol_type = other DNA
cgtggctggtctggaaa

SEQ ID NO: 123385 - DNA, 17 bp, synthetic construct
  source 1..17: mol_type = other DNA
gtggctggtctggaaag

SEQ ID NO: 123386 - DNA, 17 bp, synthetic construct
  source 1..17: mol_type = other DNA
tggctggtctggaaagg

SEQ ID NO: 123387 - DNA, 17 bp, synthetic construct
  source 1..17: mol_type = other DNA
ggctggtctggaaagga

SEQ ID NO: 123388 - DNA, 17 bp, synthetic construct
  source 1..17: mol_type = other DNA
gctggtctggaaaggaa

SEQ ID NO: 123389 - DNA, 17 bp, synthetic construct
  source 1..17: mol_type = other DNA
ctggtctggaaaggaag

SEQ ID NO: 123390 - DNA, 17 bp, synthetic construct
  source 1..17: mol_type = other DNA
tggtctggaaaggaagt

SEQ ID NO: 123391 - DNA, 17 bp, synthetic construct
  source 1..17: mol_type = other DNA
ggtctggaaaggaagtg

SEQ ID NO: 123392 - DNA, 17 bp, synthetic construct
  source 1..17: mol_type = other DNA
gtctggaaaggaagtga

SEQ ID NO: 123393 - DNA, 17 bp, synthetic construct
  source 1..17: mol_type = other DNA
tctggaaaggaagtgac

SEQ ID NO: 123394 - DNA, 17 bp, synthetic construct
  source 1..17: mol_type = other DNA
ctggaaaggaagtgacc

SEQ ID NO: 123395 - DNA, 17 bp, synthetic construct
  source 1..17: mol_type = other DNA
tggaaaggaagtgacca

SEQ ID NO: 123396 - DNA, 17 bp, synthetic construct
  source 1..17: mol_type = other DNA
ggaaaggaagtgaccac

SEQ ID NO: 123397 - DNA, 17 bp, synthetic construct
  source 1..17: mol_type = other DNA
gaaaggaagtgaccact

SEQ ID NO: 123398 - DNA, 17 bp, synthetic construct
  source 1..17: mol_type = other DNA
aaaggaagtgaccactc

SEQ ID NO: 123399 - DNA, 17 bp, synthetic construct
  source 1..17: mol_type = other DNA
aaggaagtgaccactcc

SEQ ID NO: 123400 - DNA, 17 bp, synthetic construct
  source 1..17: mol_type = other DNA
aggaagtgaccactcct

SEQ ID NO: 123401 - DNA, 17 bp, synthetic construct
  source 1..17: mol_type = other DNA
ggaagtgaccactcctt

SEQ ID NO: 123402 - DNA, 17 bp, synthetic construct
  source 1..17: mol_type = other DNA
gaagtgaccactccttc

SEQ ID NO: 123403 - DNA, 17 bp, synthetic construct
  source 1..17: mol_type = other DNA
aagtgaccactccttcc

SEQ ID NO: 123404 - DNA, 17 bp, synthetic construct
  source 1..17: mol_type = other DNA
agtgaccactccttcct

SEQ ID NO: 123405 - DNA, 17 bp, synthetic construct
  source 1..17: mol_type = other DNA
gtgaccactccttcctt

SEQ ID NO: 123406 - DNA, 17 bp, synthetic construct
  source 1..17: mol_type = other DNA
tgaccactccttcctta

SEQ ID NO: 123407 - DNA, 17 bp, synthetic construct
  source 1..17: mol_type = other DNA
gaccactccttccttag

SEQ ID NO: 123408 - DNA, 17 bp, synthetic construct
  source 1..17: mol_type = other DNA
accactccttccttagt

SEQ ID NO: 123409 - DNA, 17 bp, synthetic construct
  source 1..17: mol_type = other DNA
ccactccttccttagtg

SEQ ID NO: 123410 - DNA, 17 bp, synthetic construct
  source 1..17: mol_type = other DNA
cactccttccttagtgc

SEQ ID NO: 123411 - DNA, 17 bp, synthetic construct
  source 1..17: mol_type = other DNA
actccttccttagtgca

SEQ ID NO: 123412 - DNA, 17 bp, synthetic construct
  source 1..17: mol_type = other DNA
ctccttccttagtgcac

SEQ ID NO: 123413 - DNA, 17 bp, synthetic construct
  source 1..17: mol_type = other DNA
tccttccttagtgcaca

SEQ ID NO: 123414 - DNA, 17 bp, synthetic construct
  source 1..17: mol_type = other DNA
ccttccttagtgcacat

SEQ ID NO: 123415 - DNA, 17 bp, synthetic construct
  source 1..17: mol_type = other DNA
cttccttagtgcacatt

SEQ ID NO: 123416 - DNA, 17 bp, synthetic construct
  source 1..17: mol_type = other DNA
ttccttagtgcacattc

SEQ ID NO: 123417 - DNA, 17 bp, synthetic construct
  source 1..17: mol_type = other DNA
tccttagtgcacattca

SEQ ID NO: 123418 - DNA, 17 bp, synthetic construct
  source 1..17: mol_type = other DNA
ccttagtgcacattcac

SEQ ID NO: 123419 - DNA, 17 bp, synthetic construct
  source 1..17: mol_type = other DNA
cttagtgcacattcact

SEQ ID NO: 123420 - DNA, 17 bp, synthetic construct
  source 1..17: mol_type = other DNA
ttagtgcacattcactg

SEQ ID NO: 123421 - DNA, 17 bp, synthetic construct
  source 1..17: mol_type = other DNA
tagtgcacattcactgg

SEQ ID NO: 123422 - DNA, 17 bp, synthetic construct
  source 1..17: mol_type = other DNA
agtgcacattcactggg

SEQ ID NO: 123423 - DNA, 17 bp, synthetic construct
  source 1..17: mol_type = other DNA
gtgcacattcactgggt

SEQ ID NO: 123424 - DNA, 17 bp, synthetic construct
  source 1..17: mol_type = other DNA
tgcacattcactgggtg

SEQ ID NO: 123425 - DNA, 17 bp, synthetic construct
  source 1..17: mol_type = other DNA
gcacattcactgggtgc

SEQ ID NO: 123426 - DNA, 17 bp, synthetic construct
  source 1..17: mol_type = other DNA
cacattcactgggtgcc

SEQ ID NO: 123427 - DNA, 17 bp, synthetic construct
  source 1..17: mol_type = other DNA
acattcactgggtgcct

SEQ ID NO: 123428 - DNA, 17 bp, synthetic construct
  source 1..17: mol_type = other DNA
cattcactgggtgcctg

SEQ ID NO: 123429 - DNA, 17 bp, synthetic construct
  source 1..17: mol_type = other DNA
attcactgggtgcctgg

SEQ ID NO: 123430 - DNA, 17 bp, synthetic construct
  source 1..17: mol_type = other DNA
ttcactgggtgcctgga

SEQ ID NO: 123431 - DNA, 17 bp, synthetic construct
  source 1..17: mol_type = other DNA
tcactgggtgcctggaa

SEQ ID NO: 123432 - DNA, 17 bp, synthetic construct
  source 1..17: mol_type = other DNA
cactgggtgcctggaat

SEQ ID NO: 123433 - DNA, 17 bp, synthetic construct
  source 1..17: mol_type = other DNA
actgggtgcctggaata

SEQ ID NO: 123434 - DNA, 17 bp, synthetic construct
  source 1..17: mol_type = other DNA
ctgggtgcctggaatag

SEQ ID NO: 123435 - DNA, 17 bp, synthetic construct
  source 1..17: mol_type = other DNA
tgggtgcctggaatagc

SEQ ID NO: 123436 - DNA, 17 bp, synthetic construct
  source 1..17: mol_type = other DNA
gggtgcctggaatagcc

SEQ ID NO: 123437 - DNA, 17 bp, synthetic construct
  source 1..17: mol_type = other DNA
ggtgcctggaatagcct

SEQ ID NO: 123438 - DNA, 17 bp, synthetic construct
  source 1..17: mol_type = other DNA
gtgcctggaatagcctg

SEQ ID NO: 123439 - DNA, 17 bp, synthetic construct
  source 1..17: mol_type = other DNA
tgcctggaatagcctgg

SEQ ID NO: 123440 - DNA, 17 bp, synthetic construct
  source 1..17: mol_type = other DNA
gcctggaatagcctggc

SEQ ID NO: 123441 - DNA, 17 bp, synthetic construct
  source 1..17: mol_type = other DNA
cctggaatagcctggca

SEQ ID NO: 123442 - DNA, 17 bp, synthetic construct
  source 1..17: mol_type = other DNA
ctggaatagcctggcat

SEQ ID NO: 123443 - DNA, 17 bp, synthetic construct
  source 1..17: mol_type = other DNA
tggaatagcctggcatg

SEQ ID NO: 123444 - DNA, 17 bp, synthetic construct
  source 1..17: mol_type = other DNA
ggaatagcctggcatgt

SEQ ID NO: 123445 - DNA, 17 bp, synthetic construct
  source 1..17: mol_type = other DNA
gaatagcctggcatgtt

SEQ ID NO: 123446 - DNA, 17 bp, synthetic construct
  source 1..17: mol_type = other DNA
aatagcctggcatgttc

SEQ ID NO: 123447 - DNA, 17 bp, synthetic construct
  source 1..17: mol_type = other DNA
atagcctggcatgttct

SEQ ID NO: 123448 - DNA, 17 bp, synthetic construct
  source 1..17: mol_type = other DNA
tagcctggcatgttctg

SEQ ID NO: 123449 - DNA, 17 bp, synthetic construct
  source 1..17: mol_type = other DNA
agcctggcatgttctgg

SEQ ID NO: 123450 - DNA, 17 bp, synthetic construct
  source 1..17: mol_type = other DNA
gcctggcatgttctggg

SEQ ID NO: 123451 - DNA, 17 bp, synthetic construct
  source 1..17: mol_type = other DNA
cctggcatgttctgggc

SEQ ID NO: 123452 - DNA, 17 bp, synthetic construct
  source 1..17: mol_type = other DNA
ctggcatgttctgggct

SEQ ID NO: 123453 - DNA, 17 bp, synthetic construct
  source 1..17: mol_type = other DNA
tggcatgttctgggctc

SEQ ID NO: 123454 - DNA, 17 bp, synthetic construct
  source 1..17: mol_type = other DNA
ggcatgttctgggctca

SEQ ID NO: 123455 - DNA, 17 bp, synthetic construct
  source 1..17: mol_type = other DNA
gcatgttctgggctcac

SEQ ID NO: 123456 - DNA, 17 bp, synthetic construct
  source 1..17: mol_type = other DNA
catgttctgggctcacc

SEQ ID NO: 123457 - DNA, 17 bp, synthetic construct
  source 1..17: mol_type = other DNA
atgttctgggctcaccc

SEQ ID NO: 123458 - DNA, 17 bp, synthetic construct
  source 1..17: mol_type = other DNA
tgttctgggctcacccc

SEQ ID NO: 123459 - DNA, 17 bp, synthetic construct
  source 1..17: mol_type = other DNA
gttctgggctcacccca

SEQ ID NO: 123460 - DNA, 17 bp, synthetic construct
  source 1..17: mol_type = other DNA
ttctgggctcaccccag

SEQ ID NO: 123461 - DNA, 17 bp, synthetic construct
  source 1..17: mol_type = other DNA
tctgggctcaccccagt

SEQ ID NO: 123462 - DNA, 17 bp, synthetic construct
  source 1..17: mol_type = other DNA
ctgggctcaccccagtg

SEQ ID NO: 123463 - DNA, 17 bp, synthetic construct
  source 1..17: mol_type = other DNA
tgggctcaccccagtga

SEQ ID NO: 123464 - DNA, 17 bp, synthetic construct
  source 1..17: mol_type = other DNA
gggctcaccccagtgat

SEQ ID NO: 123465 - DNA, 17 bp, synthetic construct
  source 1..17: mol_type = other DNA
ggctcaccccagtgatc

SEQ ID NO: 123466 - DNA, 17 bp, synthetic construct
  source 1..17: mol_type = other DNA
gctcaccccagtgatca

SEQ ID NO: 123467 - DNA, 17 bp, synthetic construct
  source 1..17: mol_type = other DNA
ctcaccccagtgatcag

SEQ ID NO: 123468 - DNA, 17 bp, synthetic construct
  source 1..17: mol_type = other DNA
tcaccccagtgatcagg

SEQ ID NO: 123469 - DNA, 17 bp, synthetic construct
  source 1..17: mol_type = other DNA
caccccagtgatcaggg

SEQ ID NO: 123470 - DNA, 17 bp, synthetic construct
  source 1..17: mol_type = other DNA
accccagtgatcagggg

SEQ ID NO: 123471 - DNA, 17 bp, synthetic construct
  source 1..17: mol_type = other DNA
ccccagtgatcagggga

SEQ ID NO: 123472 - DNA, 17 bp, synthetic construct
  source 1..17: mol_type = other DNA
cccagtgatcaggggac

SEQ ID NO: 123473 - DNA, 17 bp, synthetic construct
  source 1..17: mol_type = other DNA
ccagtgatcaggggacg

SEQ ID NO: 123474 - DNA, 17 bp, synthetic construct
  source 1..17: mol_type = other DNA
cagtgatcaggggacga

SEQ ID NO: 123475 - DNA, 17 bp, synthetic construct
  source 1..17: mol_type = other DNA
agtgatcaggggacgag

SEQ ID NO: 123476 - DNA, 17 bp, synthetic construct
  source 1..17: mol_type = other DNA
gtgatcaggggacgagg

SEQ ID NO: 123477 - DNA, 17 bp, synthetic construct
  source 1..17: mol_type = other DNA
tgatcaggggacgaggc

SEQ ID NO: 123478 - DNA, 17 bp, synthetic construct
  source 1..17: mol_type = other DNA
gatcaggggacgaggct

SEQ ID NO: 123479 - DNA, 17 bp, synthetic construct
  source 1..17: mol_type = other DNA
atcaggggacgaggctg

SEQ ID NO: 123480 - DNA, 17 bp, synthetic construct
  source 1..17: mol_type = other DNA
tcaggggacgaggctga

SEQ ID NO: 123481 - DNA, 17 bp, synthetic construct
  source 1..17: mol_type = other DNA
caggggacgaggctgac

SEQ ID NO: 123482 - DNA, 17 bp, synthetic construct
  source 1..17: mol_type = other DNA
aggggacgaggctgacc

SEQ ID NO: 123483 - DNA, 17 bp, synthetic construct
  source 1..17: mol_type = other DNA
ggggacgaggctgaccc

SEQ ID NO: 123484 - DNA, 17 bp, synthetic construct
  source 1..17: mol_type = other DNA
gggacgaggctgaccct

SEQ ID NO: 123485 - DNA, 17 bp, synthetic construct
  source 1..17: mol_type = other DNA
ggacgaggctgaccctc

SEQ ID NO: 123486 - DNA, 17 bp, synthetic construct
  source 1..17: mol_type = other DNA
gacgaggctgaccctca

SEQ ID NO: 123487 - DNA, 17 bp, synthetic construct
  source 1..17: mol_type = other DNA
acgaggctgaccctcac

SEQ ID NO: 123488 - DNA, 17 bp, synthetic construct
  source 1..17: mol_type = other DNA
cgaggctgaccctcaca

SEQ ID NO: 123489 - DNA, 17 bp, synthetic construct
  source 1..17: mol_type = other DNA
gaggctgaccctcacag

SEQ ID NO: 123490 - DNA, 17 bp, synthetic construct
  source 1..17: mol_type = other DNA
aggctgaccctcacaga

SEQ ID NO: 123491 - DNA, 17 bp, synthetic construct
  source 1..17: mol_type = other DNA
ggctgaccctcacagag

SEQ ID NO: 123492 - DNA, 17 bp, synthetic construct
  source 1..17: mol_type = other DNA
gctgaccctcacagagc

SEQ ID NO: 123493 - DNA, 17 bp, synthetic construct
  source 1..17: mol_type = other DNA
ctgaccctcacagagct

SEQ ID NO: 123494 - DNA, 17 bp, synthetic construct
  source 1..17: mol_type = other DNA
tgaccctcacagagctt

SEQ ID NO: 123495 - DNA, 17 bp, synthetic construct
  source 1..17: mol_type = other DNA
gaccctcacagagcttc

SEQ ID NO: 123496 - DNA, 17 bp, synthetic construct
  source 1..17: mol_type = other DNA
accctcacagagcttcc

SEQ ID NO: 123497 - DNA, 17 bp, synthetic construct
  source 1..17: mol_type = other DNA
ccctcacagagcttcca

SEQ ID NO: 123498 - DNA, 17 bp, synthetic construct
  source 1..17: mol_type = other DNA
cctcacagagcttccag

SEQ ID NO: 123499 - DNA, 17 bp, synthetic construct
  source 1..17: mol_type = other DNA
ctcacagagcttccaga

SEQ ID NO: 123500 - DNA, 17 bp, synthetic construct
  source 1..17: mol_type = other DNA
tcacagagcttccagag

SEQ ID NO: 123501 - DNA, 17 bp, synthetic construct
  source 1..17: mol_type = other DNA
cacagagcttccagagg

SEQ ID NO: 123502 - DNA, 17 bp, synthetic construct
  source 1..17: mol_type = other DNA
acagagcttccagagga

SEQ ID NO: 123503 - DNA, 17 bp, synthetic construct
  source 1..17: mol_type = other DNA
cagagcttccagaggag

SEQ ID NO: 123504 - DNA, 17 bp, synthetic construct
  source 1..17: mol_type = other DNA
agagcttccagaggagg

SEQ ID NO: 123505 - DNA, 17 bp, synthetic construct
  source 1..17: mol_type = other DNA
gagcttccagaggaggc

SEQ ID NO: 123506 - DNA, 17 bp, synthetic construct
  source 1..17: mol_type = other DNA
agcttccagaggaggca

SEQ ID NO: 123507 - DNA, 17 bp, synthetic construct
  source 1..17: mol_type = other DNA
gcttccagaggaggcag

SEQ ID NO: 123508 - DNA, 17 bp, synthetic construct
  source 1..17: mol_type = other DNA
cttccagaggaggcaga

SEQ ID NO: 123509 - DNA, 17 bp, synthetic construct
  source 1..17: mol_type = other DNA
ttccagaggaggcagaa

SEQ ID NO: 123510 - DNA, 17 bp, synthetic construct
  source 1..17: mol_type = other DNA
tccagaggaggcagaaa

SEQ ID NO: 123511 - DNA, 17 bp, synthetic construct
  source 1..17: mol_type = other DNA
ccagaggaggcagaaag

SEQ ID NO: 123512 - DNA, 17 bp, synthetic construct
  source 1..17: mol_type = other DNA
cagaggaggcagaaagg

SEQ ID NO: 123513 - DNA, 17 bp, synthetic construct
  source 1..17: mol_type = other DNA
agaggaggcagaaaggc

SEQ ID NO: 123514 - DNA, 17 bp, synthetic construct
  source 1..17: mol_type = other DNA
gaggaggcagaaaggcg

SEQ ID NO: 123515 - DNA, 17 bp, synthetic construct
  source 1..17: mol_type = other DNA
aggaggcagaaaggcgg

SEQ ID NO: 123516 - DNA, 17 bp, synthetic construct
  source 1..17: mol_type = other DNA
ggaggcagaaaggcggt

SEQ ID NO: 123517 - DNA, 17 bp, synthetic construct
  source 1..17: mol_type = other DNA
gaggcagaaaggcggtg

SEQ ID NO: 123518 - DNA, 17 bp, synthetic construct
  source 1..17: mol_type = other DNA
aggcagaaaggcggtgg

SEQ ID NO: 123519 - DNA, 17 bp, synthetic construct
  source 1..17: mol_type = other DNA
ggcagaaaggcggtggg

SEQ ID NO: 123520 - DNA, 17 bp, synthetic construct
  source 1..17: mol_type = other DNA
gcagaaaggcggtgggt

SEQ ID NO: 123521 - DNA, 17 bp, synthetic construct
  source 1..17: mol_type = other DNA
cagaaaggcggtgggtg

SEQ ID NO: 123522 - DNA, 17 bp, synthetic construct
  source 1..17: mol_type = other DNA
agaaaggcggtgggtgc

SEQ ID NO: 123523 - DNA, 17 bp, synthetic construct
  source 1..17: mol_type = other DNA
gaaaggcggtgggtgct

SEQ ID NO: 123524 - DNA, 17 bp, synthetic construct
  source 1..17: mol_type = other DNA
aaaggcggtgggtgctg

SEQ ID NO: 123525 - DNA, 17 bp, synthetic construct
  source 1..17: mol_type = other DNA
aaggcggtgggtgctgg

SEQ ID NO: 123526 - DNA, 17 bp, synthetic construct
  source 1..17: mol_type = other DNA
aggcggtgggtgctggg

SEQ ID NO: 123527 - DNA, 17 bp, synthetic construct
  source 1..17: mol_type = other DNA
ggcggtgggtgctgggt

SEQ ID NO: 123528 - DNA, 17 bp, synthetic construct
  source 1..17: mol_type = other DNA
gcggtgggtgctgggtg

SEQ ID NO: 123529 - DNA, 17 bp, synthetic construct
  source 1..17: mol_type = other DNA
cggtgggtgctgggtgg

SEQ ID NO: 123530 - DNA, 17 bp, synthetic construct
  source 1..17: mol_type = other DNA
ggtgggtgctgggtggt

SEQ ID NO: 123531 - DNA, 17 bp, synthetic construct
  source 1..17: mol_type = other DNA
gtgggtgctgggtggtc

SEQ ID NO: 123532 - DNA, 17 bp, synthetic construct
  source 1..17: mol_type = other DNA
tgggtgctgggtggtcg

SEQ ID NO: 123533 - DNA, 17 bp, synthetic construct
  source 1..17: mol_type = other DNA
gggtgctgggtggtcgg

SEQ ID NO: 123534 - DNA, 17 bp, synthetic construct
  source 1..17: mol_type = other DNA
ggtgctgggtggtcgga

SEQ ID NO: 123535 - DNA, 17 bp, synthetic construct
  source 1..17: mol_type = other DNA
gtgctgggtggtcggat

SEQ ID NO: 123536 - DNA, 17 bp, synthetic construct
  source 1..17: mol_type = other DNA
tgctgggtggtcggatg

SEQ ID NO: 123537 - DNA, 17 bp, synthetic construct
  source 1..17: mol_type = other DNA
gctgggtggtcggatgc

SEQ ID NO: 123538 - DNA, 17 bp, synthetic construct
  source 1..17: mol_type = other DNA
ctgggtggtcggatgct

SEQ ID NO: 123539 - DNA, 17 bp, synthetic construct
  source 1..17: mol_type = other DNA
tgggtggtcggatgcta

SEQ ID NO: 123540 - DNA, 17 bp, synthetic construct
  source 1..17: mol_type = other DNA
gggtggtcggatgctag

SEQ ID NO: 123541 - DNA, 17 bp, synthetic construct
  source 1..17: mol_type = other DNA
ggtggtcggatgctagg

SEQ ID NO: 123542 - DNA, 17 bp, synthetic construct
  source 1..17: mol_type = other DNA
gtggtcggatgctagga

SEQ ID NO: 123543 - DNA, 17 bp, synthetic construct
  source 1..17: mol_type = other DNA
tggtcggatgctaggat

SEQ ID NO: 123544 - DNA, 17 bp, synthetic construct
  source 1..17: mol_type = other DNA
ggtcggatgctaggatg

SEQ ID NO: 123545 - DNA, 17 bp, synthetic construct
  source 1..17: mol_type = other DNA
gtcggatgctaggatgt

SEQ ID NO: 123546 - DNA, 17 bp, synthetic construct
  source 1..17: mol_type = other DNA
tcggatgctaggatgtg

SEQ ID NO: 123547 - DNA, 17 bp, synthetic construct
  source 1..17: mol_type = other DNA
cggatgctaggatgtgg

SEQ ID NO: 123548 - DNA, 17 bp, synthetic construct
  source 1..17: mol_type = other DNA
ggatgctaggatgtgga

SEQ ID NO: 123549 - DNA, 17 bp, synthetic construct
  source 1..17: mol_type = other DNA
gatgctaggatgtggag

SEQ ID NO: 123550 - DNA, 17 bp, synthetic construct
  source 1..17: mol_type = other DNA
atgctaggatgtggagg

SEQ ID NO: 123551 - DNA, 17 bp, synthetic construct
  source 1..17: mol_type = other DNA
tgctaggatgtggaggg

SEQ ID NO: 123552 - DNA, 17 bp, synthetic construct
  source 1..17: mol_type = other DNA
gctaggatgtggagggc

SEQ ID NO: 123553 - DNA, 17 bp, synthetic construct
  source 1..17: mol_type = other DNA
ctaggatgtggagggcc

SEQ ID NO: 123554 - DNA, 17 bp, synthetic construct
  source 1..17: mol_type = other DNA
taggatgtggagggccc

SEQ ID NO: 123555 - DNA, 17 bp, synthetic construct
  source 1..17: mol_type = other DNA
aggatgtggagggccct

SEQ ID NO: 123556 - DNA, 17 bp, synthetic construct
  source 1..17: mol_type = other DNA
ggatgtggagggccctg

SEQ ID NO: 123557 - DNA, 17 bp, synthetic construct
  source 1..17: mol_type = other DNA
gatgtggagggccctgg

SEQ ID NO: 123558 - DNA, 17 bp, synthetic construct
  source 1..17: mol_type = other DNA
atgtggagggccctggc

SEQ ID NO: 123559 - DNA, 17 bp, synthetic construct
  source 1..17: mol_type = other DNA
tgtggagggccctggcc

SEQ ID NO: 123560 - DNA, 17 bp, synthetic construct
  source 1..17: mol_type = other DNA
gtggagggccctggccg

SEQ ID NO: 123561 - DNA, 17 bp, synthetic construct
  source 1..17: mol_type = other DNA
tggagggccctggccgg

SEQ ID NO: 123562 - DNA, 17 bp, synthetic construct
  source 1..17: mol_type = other DNA
ggagggccctggccggg

SEQ ID NO: 123563 - DNA, 17 bp, synthetic construct
  source 1..17: mol_type = other DNA
gagggccctggccgggg

SEQ ID NO: 123564 - DNA, 17 bp, synthetic construct
  source 1..17: mol_type = other DNA
agggccctggccggggg

SEQ ID NO: 123565 - DNA, 17 bp, synthetic construct
  source 1..17: mol_type = other DNA
gggccctggccgggggt

SEQ ID NO: 123566 - DNA, 17 bp, synthetic construct
  source 1..17: mol_type = other DNA
ggccctggccgggggtt

SEQ ID NO: 123567 - DNA, 17 bp, synthetic construct
  source 1..17: mol_type = other DNA
gccctggccgggggttg

SEQ ID NO: 123568 - DNA, 17 bp, synthetic construct
  source 1..17: mol_type = other DNA
ccctggccgggggttgg

SEQ ID NO: 123569 - DNA, 17 bp, synthetic construct
  source 1..17: mol_type = other DNA
cctggccgggggttggt

SEQ ID NO: 123570 - DNA, 17 bp, synthetic construct
  source 1..17: mol_type = other DNA
ctggccgggggttggtt

SEQ ID NO: 123571 - DNA, 17 bp, synthetic construct
  source 1..17: mol_type = other DNA
tggccgggggttggttc

SEQ ID NO: 123572 - DNA, 17 bp, synthetic construct
  source 1..17: mol_type = other DNA
ggccgggggttggttcc

SEQ ID NO: 123573 - DNA, 17 bp, synthetic construct
  source 1..17: mol_type = other DNA
gccgggggttggttccg

SEQ ID NO: 123574 - DNA, 17 bp, synthetic construct
  source 1..17: mol_type = other DNA
ccgggggttggttccgc

SEQ ID NO: 123575 - DNA, 17 bp, synthetic construct
  source 1..17: mol_type = other DNA
cgggggttggttccgct

SEQ ID NO: 123576 - DNA, 17 bp, synthetic construct
  source 1..17: mol_type = other DNA
gggggttggttccgctg

SEQ ID NO: 123577 - DNA, 17 bp, synthetic construct
  source 1..17: mol_type = other DNA
ggggttggttccgctgg

SEQ ID NO: 123578 - DNA, 17 bp, synthetic construct
  source 1..17: mol_type = other DNA
gggttggttccgctgga

SEQ ID NO: 123579 - DNA, 17 bp, synthetic construct
  source 1..17: mol_type = other DNA
ggttggttccgctggag

SEQ ID NO: 123580 - DNA, 17 bp, synthetic construct
  source 1..17: mol_type = other DNA
gttggttccgctggagg

SEQ ID NO: 123581 - DNA, 17 bp, synthetic construct
  source 1..17: mol_type = other DNA
ttggttccgctggaggg

SEQ ID NO: 123582 - DNA, 17 bp, synthetic construct
  source 1..17: mol_type = other DNA
tggttccgctggaggga

SEQ ID NO: 123583 - DNA, 17 bp, synthetic construct
  source 1..17: mol_type = other DNA
ggttccgctggagggaa

SEQ ID NO: 123584 - DNA, 17 bp, synthetic construct
  source 1..17: mol_type = other DNA
gttccgctggagggaag

SEQ ID NO: 123585 - DNA, 17 bp, synthetic construct
  source 1..17: mol_type = other DNA
ttccgctggagggaagg

SEQ ID NO: 123586 - DNA, 17 bp, synthetic construct
  source 1..17: mol_type = other DNA
tccgctggagggaaggc

SEQ ID NO: 123587 - DNA, 17 bp, synthetic construct
  source 1..17: mol_type = other DNA
ccgctggagggaaggcc

SEQ ID NO: 123588 - DNA, 17 bp, synthetic construct
  source 1..17: mol_type = other DNA
cgctggagggaaggccc

SEQ ID NO: 123589 - DNA, 17 bp, synthetic construct
  source 1..17: mol_type = other DNA
gctggagggaaggcccc

SEQ ID NO: 123590 - DNA, 17 bp, synthetic construct
  source 1..17: mol_type = other DNA
ctggagggaaggccccc

SEQ ID NO: 123591 - DNA, 17 bp, synthetic construct
  source 1..17: mol_type = other DNA
tggagggaaggccccca

SEQ ID NO: 123592 - DNA, 17 bp, synthetic construct
  source 1..17: mol_type = other DNA
ggagggaaggcccccag

SEQ ID NO: 123593 - DNA, 17 bp, synthetic construct
  source 1..17: mol_type = other DNA
gagggaaggcccccagg

SEQ ID NO: 123594 - DNA, 17 bp, synthetic construct
  source 1..17: mol_type = other DNA
agggaaggcccccaggt

SEQ ID NO: 123595 - DNA, 17 bp, synthetic construct
  source 1..17: mol_type = other DNA
gggaaggcccccaggtg

SEQ ID NO: 123596 - DNA, 17 bp, synthetic construct
  source 1..17: mol_type = other DNA
ggaaggcccccaggtgg

SEQ ID NO: 123597 - DNA, 17 bp, synthetic construct
  source 1..17: mol_type = other DNA
gaaggcccccaggtgga

SEQ ID NO: 123598 - DNA, 17 bp, synthetic construct
  source 1..17: mol_type = other DNA
aaggcccccaggtggaa

SEQ ID NO: 123599 - DNA, 17 bp, synthetic construct
  source 1..17: mol_type = other DNA
aggcccccaggtggaaa

SEQ ID NO: 123600 - DNA, 17 bp, synthetic construct
  source 1..17: mol_type = other DNA
ggcccccaggtggaaag

SEQ ID NO: 123601 - DNA, 17 bp, synthetic construct
  source 1..17: mol_type = other DNA
gcccccaggtggaaagg

SEQ ID NO: 123602 - DNA, 17 bp, synthetic construct
  source 1..17: mol_type = other DNA
cccccaggtggaaagga

SEQ ID NO: 123603 - DNA, 17 bp, synthetic construct
  source 1..17: mol_type = other DNA
ccccaggtggaaaggag

SEQ ID NO: 123604 - DNA, 17 bp, synthetic construct
  source 1..17: mol_type = other DNA
cccaggtggaaaggagg

SEQ ID NO: 123605 - DNA, 17 bp, synthetic construct
  source 1..17: mol_type = other DNA
ccaggtggaaaggaggc

SEQ ID NO: 123606 - DNA, 17 bp, synthetic construct
  source 1..17: mol_type = other DNA
caggtggaaaggaggcc

SEQ ID NO: 123607 - DNA, 17 bp, synthetic construct
  source 1..17: mol_type = other DNA
aggtggaaaggaggcca

SEQ ID NO: 123608 - DNA, 17 bp, synthetic construct
  source 1..17: mol_type = other DNA
ggtggaaaggaggccag

SEQ ID NO: 123609 - DNA, 17 bp, synthetic construct
  source 1..17: mol_type = other DNA
gtggaaaggaggccagt

SEQ ID NO: 123610 - DNA, 17 bp, synthetic construct
  source 1..17: mol_type = other DNA
tggaaaggaggccagta

SEQ ID NO: 123611 - DNA, 17 bp, synthetic construct
  source 1..17: mol_type = other DNA
ggaaaggaggccagtac

SEQ ID NO: 123612 - DNA, 17 bp, synthetic construct
  source 1..17: mol_type = other DNA
gaaaggaggccagtacg

SEQ ID NO: 123613 - DNA, 17 bp, synthetic construct
  source 1..17: mol_type = other DNA
aaaggaggccagtacga

SEQ ID NO: 123614 - DNA, 17 bp, synthetic construct
  source 1..17: mol_type = other DNA
aaggaggccagtacgac

SEQ ID NO: 123615 - DNA, 17 bp, synthetic construct
  source 1..17: mol_type = other DNA
aggaggccagtacgact

SEQ ID NO: 123616 - DNA, 17 bp, synthetic construct
  source 1..17: mol_type = other DNA
ggaggccagtacgactg

SEQ ID NO: 123617 - DNA, 17 bp, synthetic construct
  source 1..17: mol_type = other DNA
gaggccagtacgactgc

SEQ ID NO: 123618 - DNA, 17 bp, synthetic construct
  source 1..17: mol_type = other DNA
aggccagtacgactgca

SEQ ID NO: 123619 - DNA, 17 bp, synthetic construct
  source 1..17: mol_type = other DNA
ggccagtacgactgcag

SEQ ID NO: 123620 - DNA, 17 bp, synthetic construct
  source 1..17: mol_type = other DNA
gccagtacgactgcagc

SEQ ID NO: 123621 - DNA, 17 bp, synthetic construct
  source 1..17: mol_type = other DNA
ccagtacgactgcagcg

SEQ ID NO: 123622 - DNA, 17 bp, synthetic construct
  source 1..17: mol_type = other DNA
cagtacgactgcagcgg

SEQ ID NO: 123623 - DNA, 17 bp, synthetic construct
  source 1..17: mol_type = other DNA
agtacgactgcagcgga

SEQ ID NO: 123624 - DNA, 17 bp, synthetic construct
  source 1..17: mol_type = other DNA
gtacgactgcagcggag

SEQ ID NO: 123625 - DNA, 17 bp, synthetic construct
  source 1..17: mol_type = other DNA
tacgactgcagcggagg

SEQ ID NO: 123626 - DNA, 17 bp, synthetic construct
  source 1..17: mol_type = other DNA
acgactgcagcggaggg

SEQ ID NO: 123627 - DNA, 17 bp, synthetic construct
  source 1..17: mol_type = other DNA
cgactgcagcggaggga

SEQ ID NO: 123628 - DNA, 17 bp, synthetic construct
  source 1..17: mol_type = other DNA
gactgcagcggagggag

SEQ ID NO: 123629 - DNA, 17 bp, synthetic construct
  source 1..17: mol_type = other DNA
actgcagcggagggagg

SEQ ID NO: 123630 - DNA, 17 bp, synthetic construct
  source 1..17: mol_type = other DNA
ctgcagcggagggaggt

SEQ ID NO: 123631 - DNA, 17 bp, synthetic construct
  source 1..17: mol_type = other DNA
tgcagcggagggaggtg

SEQ ID NO: 123632 - DNA, 17 bp, synthetic construct
  source 1..17: mol_type = other DNA
gcagcggagggaggtgg

SEQ ID NO: 123633 - DNA, 17 bp, synthetic construct
  source 1..17: mol_type = other DNA
cagcggagggaggtggg

SEQ ID NO: 123634 - DNA, 17 bp, synthetic construct
  source 1..17: mol_type = other DNA
agcggagggaggtgggg

SEQ ID NO: 123635 - DNA, 17 bp, synthetic construct
  source 1..17: mol_type = other DNA
gcggagggaggtggggg

SEQ ID NO: 123636 - DNA, 17 bp, synthetic construct
  source 1..17: mol_type = other DNA
cggagggaggtgggggc

SEQ ID NO: 123637 - DNA, 17 bp, synthetic construct
  source 1..17: mol_type = other DNA
ggagggaggtgggggcg

SEQ ID NO: 123638 - DNA, 17 bp, synthetic construct
  source 1..17: mol_type = other DNA
gagggaggtgggggcga

SEQ ID NO: 123639 - DNA, 17 bp, synthetic construct
  source 1..17: mol_type = other DNA
agggaggtgggggcgag

SEQ ID NO: 123640 - DNA, 17 bp, synthetic construct
  source 1..17: mol_type = other DNA
gggaggtgggggcgagg

SEQ ID NO: 123641 - DNA, 17 bp, synthetic construct
  source 1..17: mol_type = other DNA
ggaggtgggggcgaggg

SEQ ID NO: 123642 - DNA, 17 bp, synthetic construct
  source 1..17: mol_type = other DNA
gaggtgggggcgagggc

SEQ ID NO: 123643 - DNA, 17 bp, synthetic construct
  source 1..17: mol_type = other DNA
aggtgggggcgagggca

SEQ ID NO: 123644 - DNA, 17 bp, synthetic construct
  source 1..17: mol_type = other DNA
ggtgggggcgagggcag

SEQ ID NO: 123645 - DNA, 17 bp, synthetic construct
  source 1..17: mol_type = other DNA
gtgggggcgagggcaga

SEQ ID NO: 123646 - DNA, 17 bp, synthetic construct
  source 1..17: mol_type = other DNA
tgggggcgagggcagag

SEQ ID NO: 123647 - DNA, 17 bp, synthetic construct
  source 1..17: mol_type = other DNA
gggggcgagggcagagg

SEQ ID NO: 123648 - DNA, 17 bp, synthetic construct
  source 1..17: mol_type = other DNA
ggggcgagggcagaggg

SEQ ID NO: 123649 - DNA, 17 bp, synthetic construct
  source 1..17: mol_type = other DNA
gggcgagggcagagggt

SEQ ID NO: 123650 - DNA, 17 bp, synthetic construct
  source 1..17: mol_type = other DNA
ggcgagggcagagggta

SEQ ID NO: 123651 - DNA, 17 bp, synthetic construct
  source 1..17: mol_type = other DNA
gcgagggcagagggtaa

SEQ ID NO: 123652 - DNA, 17 bp, synthetic construct
  source 1..17: mol_type = other DNA
cgagggcagagggtaag

SEQ ID NO: 123653 - DNA, 17 bp, synthetic construct
  source 1..17: mol_type = other DNA
gagggcagagggtaagc

SEQ ID NO: 123654 - DNA, 17 bp, synthetic construct
  source 1..17: mol_type = other DNA
agggcagagggtaagca

SEQ ID NO: 123655 - DNA, 17 bp, synthetic construct
  source 1..17: mol_type = other DNA
gggcagagggtaagcag

SEQ ID NO: 123656 - DNA, 17 bp, synthetic construct
  source 1..17: mol_type = other DNA
ggcagagggtaagcagg

SEQ ID NO: 123657 - DNA, 17 bp, synthetic construct
  source 1..17: mol_type = other DNA
gcagagggtaagcaggg

SEQ ID NO: 123658 - DNA, 17 bp, synthetic construct
  source 1..17: mol_type = other DNA
cagagggtaagcagggg

SEQ ID NO: 123659 - DNA, 17 bp, synthetic construct
  source 1..17: mol_type = other DNA
agagggtaagcaggggt

SEQ ID NO: 123660 - DNA, 17 bp, synthetic construct
  source 1..17: mol_type = other DNA
gagggtaagcaggggtg

SEQ ID NO: 123661 - DNA, 17 bp, synthetic construct
  source 1..17: mol_type = other DNA
agggtaagcaggggtgc

SEQ ID NO: 123662 - DNA, 17 bp, synthetic construct
  source 1..17: mol_type = other DNA
gggtaagcaggggtgct

SEQ ID NO: 123663 - DNA, 17 bp, synthetic construct
  source 1..17: mol_type = other DNA
ggtaagcaggggtgcta

SEQ ID NO: 123664 - DNA, 17 bp, synthetic construct
  source 1..17: mol_type = other DNA
gtaagcaggggtgctat

SEQ ID NO: 123665 - DNA, 17 bp, synthetic construct
  source 1..17: mol_type = other DNA
taagcaggggtgctatg

SEQ ID NO: 123666 - DNA, 17 bp, synthetic construct
  source 1..17: mol_type = other DNA
aagcaggggtgctatgc

SEQ ID NO: 123667 - DNA, 17 bp, synthetic construct
  source 1..17: mol_type = other DNA
agcaggggtgctatgct

SEQ ID NO: 123668 - DNA, 17 bp, synthetic construct
  source 1..17: mol_type = other DNA
gcaggggtgctatgctc

SEQ ID NO: 123669 - DNA, 17 bp, synthetic construct
  source 1..17: mol_type = other DNA
caggggtgctatgctcc

SEQ ID NO: 123670 - DNA, 17 bp, synthetic construct
  source 1..17: mol_type = other DNA
aggggtgctatgctcca

SEQ ID NO: 123671 - DNA, 17 bp, synthetic construct
  source 1..17: mol_type = other DNA
ggggtgctatgctccac

SEQ ID NO: 123672 - DNA, 17 bp, synthetic construct
  source 1..17: mol_type = other DNA
gggtgctatgctccaca

SEQ ID NO: 123673 - DNA, 17 bp, synthetic construct
  source 1..17: mol_type = other DNA
ggtgctatgctccacat

SEQ ID NO: 123674 - DNA, 17 bp, synthetic construct
  source 1..17: mol_type = other DNA
gtgctatgctccacatg

SEQ ID NO: 123675 - DNA, 17 bp, synthetic construct
  source 1..17: mol_type = other DNA
tgctatgctccacatgg

SEQ ID NO: 123676 - DNA, 17 bp, synthetic construct
  source 1..17: mol_type = other DNA
gctatgctccacatggg

SEQ ID NO: 123677 - DNA, 17 bp, synthetic construct
  source 1..17: mol_type = other DNA
ctatgctccacatgggt

SEQ ID NO: 123678 - DNA, 17 bp, synthetic construct
  source 1..17: mol_type = other DNA
tatgctccacatgggtt

SEQ ID NO: 123679 - DNA, 17 bp, synthetic construct
  source 1..17: mol_type = other DNA
atgctccacatgggttt

SEQ ID NO: 123680 - DNA, 17 bp, synthetic construct
  source 1..17: mol_type = other DNA
tgctccacatgggtttg

SEQ ID NO: 123681 - DNA, 17 bp, synthetic construct
  source 1..17: mol_type = other DNA
gctccacatgggtttga

SEQ ID NO: 123682 - DNA, 17 bp, synthetic construct
  source 1..17: mol_type = other DNA
ctccacatgggtttgaa

SEQ ID NO: 123683 - DNA, 17 bp, synthetic construct
  source 1..17: mol_type = other DNA
tccacatgggtttgaaa

SEQ ID NO: 123684 - DNA, 17 bp, synthetic construct
  source 1..17: mol_type = other DNA
ccacatgggtttgaaac

SEQ ID NO: 123685 - DNA, 17 bp, synthetic construct
  source 1..17: mol_type = other DNA
cacatgggtttgaaacc

SEQ ID NO: 123686 - DNA, 17 bp, synthetic construct
  source 1..17: mol_type = other DNA
acatgggtttgaaacct

SEQ ID NO: 123687 - DNA, 17 bp, synthetic construct
  source 1..17: mol_type = other DNA
catgggtttgaaacctg

SEQ ID NO: 123688 - DNA, 17 bp, synthetic construct
  source 1..17: mol_type = other DNA
atgggtttgaaacctgt

SEQ ID NO: 123689 - DNA, 17 bp, synthetic construct
  source 1..17: mol_type = other DNA
tgggtttgaaacctgtg

SEQ ID NO: 123690 - DNA, 17 bp, synthetic construct
  source 1..17: mol_type = other DNA
gggtttgaaacctgtgg

SEQ ID NO: 123691 - DNA, 17 bp, synthetic construct
  source 1..17: mol_type = other DNA
ggtttgaaacctgtggg

SEQ ID NO: 123692 - DNA, 17 bp, synthetic construct
  source 1..17: mol_type = other DNA
gtttgaaacctgtgggc

SEQ ID NO: 123693 - DNA, 17 bp, synthetic construct
  source 1..17: mol_type = other DNA
tttgaaacctgtgggcc

SEQ ID NO: 123694 - DNA, 17 bp, synthetic construct
  source 1..17: mol_type = other DNA
ttgaaacctgtgggcca

SEQ ID NO: 123695 - DNA, 17 bp, synthetic construct
  source 1..17: mol_type = other DNA
tgaaacctgtgggccac

SEQ ID NO: 123696 - DNA, 17 bp, synthetic construct
  source 1..17: mol_type = other DNA
gaaacctgtgggccaca

SEQ ID NO: 123697 - DNA, 17 bp, synthetic construct
  source 1..17: mol_type = other DNA
aaacctgtgggccacat

SEQ ID NO: 123698 - DNA, 17 bp, synthetic construct
  source 1..17: mol_type = other DNA
aacctgtgggccacatg

SEQ ID NO: 123699 - DNA, 17 bp, synthetic construct
  source 1..17: mol_type = other DNA
acctgtgggccacatga

SEQ ID NO: 123700 - DNA, 17 bp, synthetic construct
  source 1..17: mol_type = other DNA
cctgtgggccacatgac

SEQ ID NO: 123701 - DNA, 17 bp, synthetic construct
  source 1..17: mol_type = other DNA
ctgtgggccacatgacc

SEQ ID NO: 123702 - DNA, 17 bp, synthetic construct
  source 1..17: mol_type = other DNA
tgtgggccacatgacca

SEQ ID NO: 123703 - DNA, 17 bp, synthetic construct
  source 1..17: mol_type = other DNA
gtgggccacatgaccag

SEQ ID NO: 123704 - DNA, 17 bp, synthetic construct
  source 1..17: mol_type = other DNA
tgggccacatgaccaga

SEQ ID NO: 123705 - DNA, 17 bp, synthetic construct
  source 1..17: mol_type = other DNA
gggccacatgaccagat

SEQ ID NO: 123706 - DNA, 17 bp, synthetic construct
  source 1..17: mol_type = other DNA
ggccacatgaccagatc

SEQ ID NO: 123707 - DNA, 17 bp, synthetic construct
  source 1..17: mol_type = other DNA
gccacatgaccagatcc

SEQ ID NO: 123708 - DNA, 17 bp, synthetic construct
  source 1..17: mol_type = other DNA
ccacatgaccagatcca

SEQ ID NO: 123709 - DNA, 17 bp, synthetic construct
  source 1..17: mol_type = other DNA
cacatgaccagatccac

SEQ ID NO: 123710 - DNA, 17 bp, synthetic construct
  source 1..17: mol_type = other DNA
acatgaccagatccacg

SEQ ID NO: 123711 - DNA, 17 bp, synthetic construct
  source 1..17: mol_type = other DNA
catgaccagatccacgt

SEQ ID NO: 123712 - DNA, 17 bp, synthetic construct
  source 1..17: mol_type = other DNA
atgaccagatccacgtg

SEQ ID NO: 123713 - DNA, 17 bp, synthetic construct
  source 1..17: mol_type = other DNA
tgaccagatccacgtga

SEQ ID NO: 123714 - DNA, 17 bp, synthetic construct
  source 1..17: mol_type = other DNA
gaccagatccacgtgat

SEQ ID NO: 123715 - DNA, 17 bp, synthetic construct
  source 1..17: mol_type = other DNA
accagatccacgtgata

SEQ ID NO: 123716 - DNA, 17 bp, synthetic construct
  source 1..17: mol_type = other DNA
ccagatccacgtgatag

SEQ ID NO: 123717 - DNA, 17 bp, synthetic construct
  source 1..17: mol_type = other DNA
cagatccacgtgataga

SEQ ID NO: 123718 - DNA, 17 bp, synthetic construct
  source 1..17: mol_type = other DNA
agatccacgtgatagaa

SEQ ID NO: 123719 - DNA, 17 bp, synthetic construct
  source 1..17: mol_type = other DNA
gatccacgtgatagaaa

SEQ ID NO: 123720 - DNA, 17 bp, synthetic construct
  source 1..17: mol_type = other DNA
atccacgtgatagaaag

SEQ ID NO: 123721 - DNA, 17 bp, synthetic construct
  source 1..17: mol_type = other DNA
tccacgtgatagaaaga

SEQ ID NO: 123722 - DNA, 17 bp, synthetic construct
  source 1..17: mol_type = other DNA
ccacgtgatagaaagat

SEQ ID NO: 123723 - DNA, 17 bp, synthetic construct
  source 1..17: mol_type = other DNA
cacgtgatagaaagatc

SEQ ID NO: 123724 - DNA, 17 bp, synthetic construct
  source 1..17: mol_type = other DNA
acgtgatagaaagatcc

SEQ ID NO: 123725 - DNA, 17 bp, synthetic construct
  source 1..17: mol_type = other DNA
cgtgatagaaagatcca

SEQ ID NO: 123726 - DNA, 17 bp, synthetic construct
  source 1..17: mol_type = other DNA
gtgatagaaagatccaa

SEQ ID NO: 123727 - DNA, 17 bp, synthetic construct
  source 1..17: mol_type = other DNA
tgatagaaagatccaaa

SEQ ID NO: 123728 - DNA, 17 bp, synthetic construct
  source 1..17: mol_type = other DNA
gatagaaagatccaaag

SEQ ID NO: 123729 - DNA, 17 bp, synthetic construct
  source 1..17: mol_type = other DNA
atagaaagatccaaaga

SEQ ID NO: 123730 - DNA, 17 bp, synthetic construct
  source 1..17: mol_type = other DNA
tagaaagatccaaagag

SEQ ID NO: 123731 - DNA, 17 bp, synthetic construct
  source 1..17: mol_type = other DNA
agaaagatccaaagagc

SEQ ID NO: 123732 - DNA, 17 bp, synthetic construct
  source 1..17: mol_type = other DNA
gaaagatccaaagagca

SEQ ID NO: 123733 - DNA, 17 bp, synthetic construct
  source 1..17: mol_type = other DNA
aaagatccaaagagcac

SEQ ID NO: 123734 - DNA, 17 bp, synthetic construct
  source 1..17: mol_type = other DNA
aagatccaaagagcaca

SEQ ID NO: 123735 - DNA, 17 bp, synthetic construct
  source 1..17: mol_type = other DNA
agatccaaagagcacat

SEQ ID NO: 123736 - DNA, 17 bp, synthetic construct
  source 1..17: mol_type = other DNA
gatccaaagagcacatg

SEQ ID NO: 123737 - DNA, 17 bp, synthetic construct
  source 1..17: mol_type = other DNA
atccaaagagcacatgt

SEQ ID NO: 123738 - DNA, 17 bp, synthetic construct
  source 1..17: mol_type = other DNA
tccaaagagcacatgtg

SEQ ID NO: 123739 - DNA, 17 bp, synthetic construct
  source 1..17: mol_type = other DNA
ccaaagagcacatgtga

SEQ ID NO: 123740 - DNA, 17 bp, synthetic construct
  source 1..17: mol_type = other DNA
caaagagcacatgtgaa

SEQ ID NO: 123741 - DNA, 17 bp, synthetic construct
  source 1..17: mol_type = other DNA
aaagagcacatgtgaag

SEQ ID NO: 123742 - DNA, 17 bp, synthetic construct
  source 1..17: mol_type = other DNA
aagagcacatgtgaagg

SEQ ID NO: 123743 - DNA, 17 bp, synthetic construct
  source 1..17: mol_type = other DNA
agagcacatgtgaaggc

SEQ ID NO: 123744 - DNA, 17 bp, synthetic construct
  source 1..17: mol_type = other DNA
gagcacatgtgaaggca

SEQ ID NO: 123745 - DNA, 17 bp, synthetic construct
  source 1..17: mol_type = other DNA
agcacatgtgaaggcag

SEQ ID NO: 123746 - DNA, 17 bp, synthetic construct
  source 1..17: mol_type = other DNA
gcacatgtgaaggcagg

SEQ ID NO: 123747 - DNA, 17 bp, synthetic construct
  source 1..17: mol_type = other DNA
cacatgtgaaggcaggc

SEQ ID NO: 123748 - DNA, 17 bp, synthetic construct
  source 1..17: mol_type = other DNA
acatgtgaaggcaggca

SEQ ID NO: 123749 - DNA, 17 bp, synthetic construct
  source 1..17: mol_type = other DNA
catgtgaaggcaggcag

SEQ ID NO: 123750 - DNA, 17 bp, synthetic construct
  source 1..17: mol_type = other DNA
atgtgaaggcaggcaga

SEQ ID NO: 123751 - DNA, 17 bp, synthetic construct
  source 1..17: mol_type = other DNA
tgtgaaggcaggcagat

SEQ ID NO: 123752 - DNA, 17 bp, synthetic construct
  source 1..17: mol_type = other DNA
gtgaaggcaggcagatg

SEQ ID NO: 123753 - DNA, 17 bp, synthetic construct
  source 1..17: mol_type = other DNA
tgaaggcaggcagatgg

SEQ ID NO: 123754 - DNA, 17 bp, synthetic construct
  source 1..17: mol_type = other DNA
gaaggcaggcagatggg

SEQ ID NO: 123755 - DNA, 17 bp, synthetic construct
  source 1..17: mol_type = other DNA
aaggcaggcagatgggc

SEQ ID NO: 123756 - DNA, 17 bp, synthetic construct
  source 1..17: mol_type = other DNA
aggcaggcagatgggca

SEQ ID NO: 123757 - DNA, 17 bp, synthetic construct
  source 1..17: mol_type = other DNA
ggcaggcagatgggcag

SEQ ID NO: 123758 - DNA, 17 bp, synthetic construct
  source 1..17: mol_type = other DNA
gcaggcagatgggcagg

SEQ ID NO: 123759 - DNA, 17 bp, synthetic construct
  source 1..17: mol_type = other DNA
caggcagatgggcaggt

SEQ ID NO: 123760 - DNA, 17 bp, synthetic construct
  source 1..17: mol_type = other DNA
aggcagatgggcaggtg

SEQ ID NO: 123761 - DNA, 17 bp, synthetic construct
  source 1..17: mol_type = other DNA
ggcagatgggcaggtgc

SEQ ID NO: 123762 - DNA, 17 bp, synthetic construct
  source 1..17: mol_type = other DNA
gcagatgggcaggtgca

SEQ ID NO: 123763 - DNA, 17 bp, synthetic construct
  source 1..17: mol_type = other DNA
cagatgggcaggtgcat

SEQ ID NO: 123764 - DNA, 17 bp, synthetic construct
  source 1..17: mol_type = other DNA
agatgggcaggtgcata

SEQ ID NO: 123765 - DNA, 17 bp, synthetic construct
  source 1..17: mol_type = other DNA
gatgggcaggtgcatag

SEQ ID NO: 123766 - DNA, 17 bp, synthetic construct
  source 1..17: mol_type = other DNA
atgggcaggtgcatagg

SEQ ID NO: 123767 - DNA, 17 bp, synthetic construct
  source 1..17: mol_type = other DNA
tgggcaggtgcataggt

SEQ ID NO: 123768 - DNA, 17 bp, synthetic construct
  source 1..17: mol_type = other DNA
gggcaggtgcataggtg

SEQ ID NO: 123769 - DNA, 17 bp, synthetic construct
  source 1..17: mol_type = other DNA
ggcaggtgcataggtgg

SEQ ID NO: 123770 - DNA, 17 bp, synthetic construct
  source 1..17: mol_type = other DNA
gcaggtgcataggtggg

SEQ ID NO: 123771 - DNA, 17 bp, synthetic construct
  source 1..17: mol_type = other DNA
caggtgcataggtgggc

SEQ ID NO: 123772 - DNA, 17 bp, synthetic construct
  source 1..17: mol_type = other DNA
aggtgcataggtgggca

SEQ ID NO: 123773 - DNA, 17 bp, synthetic construct
  source 1..17: mol_type = other DNA
ggtgcataggtgggcag

SEQ ID NO: 123774 - DNA, 17 bp, synthetic construct
  source 1..17: mol_type = other DNA
gtgcataggtgggcagg

SEQ ID NO: 123775 - DNA, 17 bp, synthetic construct
  source 1..17: mol_type = other DNA
tgcataggtgggcaggt

SEQ ID NO: 123776 - DNA, 17 bp, synthetic construct
  source 1..17: mol_type = other DNA
gcataggtgggcaggtg

SEQ ID NO: 123777 - DNA, 17 bp, synthetic construct
  source 1..17: mol_type = other DNA
cataggtgggcaggtgc

SEQ ID NO: 123778 - DNA, 17 bp, synthetic construct
  source 1..17: mol_type = other DNA
ataggtgggcaggtgca

SEQ ID NO: 123779 - DNA, 17 bp, synthetic construct
  source 1..17: mol_type = other DNA
taggtgggcaggtgcat

SEQ ID NO: 123780 - DNA, 17 bp, synthetic construct
  source 1..17: mol_type = other DNA
aggtgggcaggtgcata

SEQ ID NO: 123781 - DNA, 17 bp, synthetic construct
  source 1..17: mol_type = other DNA
ggtgggcaggtgcatag

SEQ ID NO: 123782 - DNA, 17 bp, synthetic construct
  source 1..17: mol_type = other DNA
gtgggcaggtgcatagg

SEQ ID NO: 123783 - DNA, 17 bp, synthetic construct
  source 1..17: mol_type = other DNA
tgggcaggtgcataggt

SEQ ID NO: 123784 - DNA, 17 bp, synthetic construct
  source 1..17: mol_type = other DNA
gggcaggtgcataggtg

SEQ ID NO: 123785 - DNA, 17 bp, synthetic construct
  source 1..17: mol_type = other DNA
ggcaggtgcataggtgg

SEQ ID NO: 123786 - DNA, 17 bp, synthetic construct
  source 1..17: mol_type = other DNA
gcaggtgcataggtggg

SEQ ID NO: 123787 - DNA, 17 bp, synthetic construct
  source 1..17: mol_type = other DNA
caggtgcataggtgggc

SEQ ID NO: 123788 - DNA, 17 bp, synthetic construct
  source 1..17: mol_type = other DNA
aggtgcataggtgggca

SEQ ID NO: 123789 - DNA, 17 bp, synthetic construct
  source 1..17: mol_type = other DNA
ggtgcataggtgggcag

SEQ ID NO: 123790 - DNA, 17 bp, synthetic construct
  source 1..17: mol_type = other DNA
gtgcataggtgggcaga

SEQ ID NO: 123791 - DNA, 17 bp, synthetic construct
  source 1..17: mol_type = other DNA
tgcataggtgggcagat

SEQ ID NO: 123792 - DNA, 17 bp, synthetic construct
  source 1..17: mol_type = other DNA
gcataggtgggcagatg

SEQ ID NO: 123793 - DNA, 17 bp, synthetic construct
  source 1..17: mol_type = other DNA
cataggtgggcagatgg

SEQ ID NO: 123794 - DNA, 17 bp, synthetic construct
  source 1..17: mol_type = other DNA
ataggtgggcagatgga

SEQ ID NO: 123795 - DNA, 17 bp, synthetic construct
  source 1..17: mol_type = other DNA
taggtgggcagatggac

SEQ ID NO: 123796 - DNA, 17 bp, synthetic construct
  source 1..17: mol_type = other DNA
aggtgggcagatggaca

SEQ ID NO: 123797 - DNA, 17 bp, synthetic construct
  source 1..17: mol_type = other DNA
ggtgggcagatggacag

SEQ ID NO: 123798 - DNA, 17 bp, synthetic construct
  source 1..17: mol_type = other DNA
gtgggcagatggacagg

SEQ ID NO: 123799 - DNA, 17 bp, synthetic construct
  source 1..17: mol_type = other DNA
tgggcagatggacaggt

SEQ ID NO: 123800 - DNA, 17 bp, synthetic construct
  source 1..17: mol_type = other DNA
gggcagatggacaggtg

SEQ ID NO: 123801 - DNA, 17 bp, synthetic construct
  source 1..17: mol_type = other DNA
ggcagatggacaggtgg

SEQ ID NO: 123802 - DNA, 17 bp, synthetic construct
  source 1..17: mol_type = other DNA
gcagatggacaggtggg

SEQ ID NO: 123803 - DNA, 17 bp, synthetic construct
  source 1..17: mol_type = other DNA
cagatggacaggtgggc

SEQ ID NO: 123804 - DNA, 17 bp, synthetic construct
  source 1..17: mol_type = other DNA
agatggacaggtgggca

SEQ ID NO: 123805 - DNA, 17 bp, synthetic construct
  source 1..17: mol_type = other DNA
gatggacaggtgggcag

SEQ ID NO: 123806 - DNA, 17 bp, synthetic construct
  source 1..17: mol_type = other DNA
atggacaggtgggcaga

SEQ ID NO: 123807 - DNA, 17 bp, synthetic construct
  source 1..17: mol_type = other DNA
tggacaggtgggcagat

SEQ ID NO: 123808 - DNA, 17 bp, synthetic construct
  source 1..17: mol_type = other DNA
ggacaggtgggcagatg

SEQ ID NO: 123809 - DNA, 17 bp, synthetic construct
  source 1..17: mol_type = other DNA
gacaggtgggcagatgg

SEQ ID NO: 123810 - DNA, 17 bp, synthetic construct
  source 1..17: mol_type = other DNA
acaggtgggcagatggg

SEQ ID NO: 123811 - DNA, 17 bp, synthetic construct
  source 1..17: mol_type = other DNA
caggtgggcagatgggc

SEQ ID NO: 123812 - DNA, 17 bp, synthetic construct
  source 1..17: mol_type = other DNA
aggtgggcagatgggca

SEQ ID NO: 123813 - DNA, 17 bp, synthetic construct
  source 1..17: mol_type = other DNA
ggtgggcagatgggcag

SEQ ID NO: 123814 - DNA, 17 bp, synthetic construct
  source 1..17: mol_type = other DNA
gtgggcagatgggcagg

SEQ ID NO: 123815 - DNA, 17 bp, synthetic construct
  source 1..17: mol_type = other DNA
tgggcagatgggcaggt

SEQ ID NO: 123816 - DNA, 17 bp, synthetic construct
  source 1..17: mol_type = other DNA
gggcagatgggcaggtg

SEQ ID NO: 123817 - DNA, 17 bp, synthetic construct
  source 1..17: mol_type = other DNA
ggcagatgggcaggtgg

SEQ ID NO: 123818 - DNA, 17 bp, synthetic construct
  source 1..17: mol_type = other DNA
gcagatgggcaggtggg

SEQ ID NO: 123819 - DNA, 17 bp, synthetic construct
  source 1..17: mol_type = other DNA
cagatgggcaggtgggc

SEQ ID NO: 123820 - DNA, 17 bp, synthetic construct
  source 1..17: mol_type = other DNA
agatgggcaggtgggca

SEQ ID NO: 123821 - DNA, 17 bp, synthetic construct
  source 1..17: mol_type = other DNA
gatgggcaggtgggcag

SEQ ID NO: 123822 - DNA, 17 bp, synthetic construct
  source 1..17: mol_type = other DNA
atgggcaggtgggcagg

SEQ ID NO: 123823 - DNA, 17 bp, synthetic construct
  source 1..17: mol_type = other DNA
tgggcaggtgggcaggg

SEQ ID NO: 123824 - DNA, 17 bp, synthetic construct
  source 1..17: mol_type = other DNA
gggcaggtgggcaggga

SEQ ID NO: 123825 - DNA, 17 bp, synthetic construct
  source 1..17: mol_type = other DNA
ggcaggtgggcagggat

SEQ ID NO: 123826 - DNA, 17 bp, synthetic construct
  source 1..17: mol_type = other DNA
gcaggtgggcagggata

SEQ ID NO: 123827 - DNA, 17 bp, synthetic construct
  source 1..17: mol_type = other DNA
caggtgggcagggatat

SEQ ID NO: 123828 - DNA, 17 bp, synthetic construct
  source 1..17: mol_type = other DNA
aggtgggcagggatata

SEQ ID NO: 123829 - DNA, 17 bp, synthetic construct
  source 1..17: mol_type = other DNA
ggtgggcagggatatag

SEQ ID NO: 123830 - DNA, 17 bp, synthetic construct
  source 1..17: mol_type = other DNA
gtgggcagggatatagg

SEQ ID NO: 123831 - DNA, 17 bp, synthetic construct
  source 1..17: mol_type = other DNA
tgggcagggatataggt

SEQ ID NO: 123832 - DNA, 17 bp, synthetic construct
  source 1..17: mol_type = other DNA
gggcagggatataggtg

SEQ ID NO: 123833 - DNA, 17 bp, synthetic construct
  source 1..17: mol_type = other DNA
ggcagggatataggtgg

SEQ ID NO: 123834 - DNA, 17 bp, synthetic construct
  source 1..17: mol_type = other DNA
gcagggatataggtgga

SEQ ID NO: 123835 - DNA, 17 bp, synthetic construct
  source 1..17: mol_type = other DNA
cagggatataggtggac

SEQ ID NO: 123836 - DNA, 17 bp, synthetic construct
  source 1..17: mol_type = other DNA
agggatataggtggacg

SEQ ID NO: 123837 - DNA, 17 bp, synthetic construct
  source 1..17: mol_type = other DNA
gggatataggtggacga

SEQ ID NO: 123838 - DNA, 17 bp, synthetic construct
  source 1..17: mol_type = other DNA
ggatataggtggacgag

SEQ ID NO: 123839 - DNA, 17 bp, synthetic construct
  source 1..17: mol_type = other DNA
gatataggtggacgagg

SEQ ID NO: 123840 - DNA, 17 bp, synthetic construct
  source 1..17: mol_type = other DNA
atataggtggacgaggg

SEQ ID NO: 123841 - DNA, 17 bp, synthetic construct
  source 1..17: mol_type = other DNA
tataggtggacgagggc

SEQ ID NO: 123842 - DNA, 17 bp, synthetic construct
  source 1..17: mol_type = other DNA
ataggtggacgagggca

SEQ ID NO: 123843 - DNA, 17 bp, synthetic construct
  source 1..17: mol_type = other DNA
taggtggacgagggcac

SEQ ID NO: 123844 - DNA, 17 bp, synthetic construct
  source 1..17: mol_type = other DNA
aggtggacgagggcaca

SEQ ID NO: 123845 - DNA, 17 bp, synthetic construct
  source 1..17: mol_type = other DNA
ggtggacgagggcacag

SEQ ID NO: 123846 - DNA, 17 bp, synthetic construct
  source 1..17: mol_type = other DNA
gtggacgagggcacagg

SEQ ID NO: 123847 - DNA, 17 bp, synthetic construct
  source 1..17: mol_type = other DNA
tggacgagggcacaggt

SEQ ID NO: 123848 - DNA, 17 bp, synthetic construct
  source 1..17: mol_type = other DNA
ggacgagggcacaggtg

SEQ ID NO: 123849 - DNA, 17 bp, synthetic construct
  source 1..17: mol_type = other DNA
gacgagggcacaggtgg

SEQ ID NO: 123850 - DNA, 17 bp, synthetic construct
  source 1..17: mol_type = other DNA
acgagggcacaggtggg

SEQ ID NO: 123851 - DNA, 17 bp, synthetic construct
  source 1..17: mol_type = other DNA
cgagggcacaggtgggc

SEQ ID NO: 123852 - DNA, 17 bp, synthetic construct
  source 1..17: mol_type = other DNA
gagggcacaggtgggct

SEQ ID NO: 123853 - DNA, 17 bp, synthetic construct
  source 1..17: mol_type = other DNA
agggcacaggtgggctg

SEQ ID NO: 123854 - DNA, 17 bp, synthetic construct
  source 1..17: mol_type = other DNA
gggcacaggtgggctgg

SEQ ID NO: 123855 - DNA, 17 bp, synthetic construct
  source 1..17: mol_type = other DNA
ggcacaggtgggctgga

SEQ ID NO: 123856 - DNA, 17 bp, synthetic construct
  source 1..17: mol_type = other DNA
gcacaggtgggctggag

SEQ ID NO: 123857 - DNA, 17 bp, synthetic construct
  source 1..17: mol_type = other DNA
cacaggtgggctggaga

SEQ ID NO: 123858 - DNA, 17 bp, synthetic construct
  source 1..17: mol_type = other DNA
acaggtgggctggagaa

SEQ ID NO: 123859 - DNA, 17 bp, synthetic construct
  source 1..17: mol_type = other DNA
caggtgggctggagaag

SEQ ID NO: 123860 - DNA, 17 bp, synthetic construct
  source 1..17: mol_type = other DNA
aggtgggctggagaagt

SEQ ID NO: 123861 - DNA, 17 bp, synthetic construct
  source 1..17: mol_type = other DNA
ggtgggctggagaagtg

SEQ ID NO: 123862 - DNA, 17 bp, synthetic construct
  source 1..17: mol_type = other DNA
gtgggctggagaagtgc

SEQ ID NO: 123863 - DNA, 17 bp, synthetic construct
  source 1..17: mol_type = other DNA
tgggctggagaagtgct

SEQ ID NO: 123864 - DNA, 17 bp, synthetic construct
  source 1..17: mol_type = other DNA
gggctggagaagtgctg

SEQ ID NO: 123865 - DNA, 17 bp, synthetic construct
  source 1..17: mol_type = other DNA
ggctggagaagtgctgg

SEQ ID NO: 123866 - DNA, 17 bp, synthetic construct
  source 1..17: mol_type = other DNA
gctggagaagtgctggg

SEQ ID NO: 123867 - DNA, 17 bp, synthetic construct
  source 1..17: mol_type = other DNA
ctggagaagtgctgggg

SEQ ID NO: 123868 - DNA, 17 bp, synthetic construct
  source 1..17: mol_type = other DNA
tggagaagtgctggggc

SEQ ID NO: 123869 - DNA, 17 bp, synthetic construct
  source 1..17: mol_type = other DNA
ggagaagtgctggggca

SEQ ID NO: 123870 - DNA, 17 bp, synthetic construct
  source 1..17: mol_type = other DNA
gagaagtgctggggcag

SEQ ID NO: 123871 - DNA, 17 bp, synthetic construct
  source 1..17: mol_type = other DNA
agaagtgctggggcagc

SEQ ID NO: 123872 - DNA, 17 bp, synthetic construct
  source 1..17: mol_type = other DNA
gaagtgctggggcagct

SEQ ID NO: 123873 - DNA, 17 bp, synthetic construct
  source 1..17: mol_type = other DNA
aagtgctggggcagctc

SEQ ID NO: 123874 - DNA, 17 bp, synthetic construct
  source 1..17: mol_type = other DNA
agtgctggggcagctcc

SEQ ID NO: 123875 - DNA, 17 bp, synthetic construct
  source 1..17: mol_type = other DNA
gtgctggggcagctccc

SEQ ID NO: 123876 - DNA, 17 bp, synthetic construct
  source 1..17: mol_type = other DNA
tgctggggcagctccca

SEQ ID NO: 123877 - DNA, 17 bp, synthetic construct
  source 1..17: mol_type = other DNA
gctggggcagctcccat

SEQ ID NO: 123878 - DNA, 17 bp, synthetic construct
  source 1..17: mol_type = other DNA
ctggggcagctcccatt

SEQ ID NO: 123879 - DNA, 17 bp, synthetic construct
  source 1..17: mol_type = other DNA
tggggcagctcccattt

SEQ ID NO: 123880 - DNA, 17 bp, synthetic construct
  source 1..17: mol_type = other DNA
ggggcagctcccatttg

SEQ ID NO: 123881 - DNA, 17 bp, synthetic construct
  source 1..17: mol_type = other DNA
gggcagctcccatttgg

SEQ ID NO: 123882 - DNA, 17 bp, synthetic construct
  source 1..17: mol_type = other DNA
ggcagctcccatttggg

SEQ ID NO: 123883 - DNA, 17 bp, synthetic construct
  source 1..17: mol_type = other DNA
gcagctcccatttgggg

SEQ ID NO: 123884 - DNA, 17 bp, synthetic construct
  source 1..17: mol_type = other DNA
cagctcccatttggggc

SEQ ID NO: 123885 - DNA, 17 bp, synthetic construct
  source 1..17: mol_type = other DNA
agctcccatttggggca

SEQ ID NO: 123886 - DNA, 17 bp, synthetic construct
  source 1..17: mol_type = other DNA
gctcccatttggggcac

SEQ ID NO: 123887 - DNA, 17 bp, synthetic construct
  source 1..17: mol_type = other DNA
ctcccatttggggcacg

SEQ ID NO: 123888 - DNA, 17 bp, synthetic construct
  source 1..17: mol_type = other DNA
tcccatttggggcacgc

SEQ ID NO: 123889 - DNA, 17 bp, synthetic construct
  source 1..17: mol_type = other DNA
cccatttggggcacgct

SEQ ID NO: 123890 - DNA, 17 bp, synthetic construct
  source 1..17: mol_type = other DNA
ccatttggggcacgctc

SEQ ID NO: 123891 - DNA, 17 bp, synthetic construct
  source 1..17: mol_type = other DNA
catttggggcacgctct

SEQ ID NO: 123892 - DNA, 17 bp, synthetic construct
  source 1..17: mol_type = other DNA
atttggggcacgctctg

SEQ ID NO: 123893 - DNA, 17 bp, synthetic construct
  source 1..17: mol_type = other DNA
tttggggcacgctctga

SEQ ID NO: 123894 - DNA, 17 bp, synthetic construct
  source 1..17: mol_type = other DNA
ttggggcacgctctgag

SEQ ID NO: 123895 - DNA, 17 bp, synthetic construct
  source 1..17: mol_type = other DNA
tggggcacgctctgagg

SEQ ID NO: 123896 - DNA, 17 bp, synthetic construct
  source 1..17: mol_type = other DNA
ggggcacgctctgaggt

SEQ ID NO: 123897 - DNA, 17 bp, synthetic construct
  source 1..17: mol_type = other DNA
gggcacgctctgaggta

SEQ ID NO: 123898 - DNA, 17 bp, synthetic construct
  source 1..17: mol_type = other DNA
ggcacgctctgaggtat

SEQ ID NO: 123899 - DNA, 17 bp, synthetic construct
  source 1..17: mol_type = other DNA
gcacgctctgaggtatt

SEQ ID NO: 123900 - DNA, 17 bp, synthetic construct
  source 1..17: mol_type = other DNA
cacgctctgaggtattc

SEQ ID NO: 123901 - DNA, 17 bp, synthetic construct
  source 1..17: mol_type = other DNA
acgctctgaggtattcc

SEQ ID NO: 123902 - DNA, 17 bp, synthetic construct
  source 1..17: mol_type = other DNA
cgctctgaggtattcca

SEQ ID NO: 123903 - DNA, 17 bp, synthetic construct
  source 1..17: mol_type = other DNA
gctctgaggtattccag

SEQ ID NO: 123904 - DNA, 17 bp, synthetic construct
  source 1..17: mol_type = other DNA
ctctgaggtattccagg

SEQ ID NO: 123905 - DNA, 17 bp, synthetic construct
  source 1..17: mol_type = other DNA
tctgaggtattccaggc

SEQ ID NO: 123906 - DNA, 17 bp, synthetic construct
  source 1..17: mol_type = other DNA
ctgaggtattccaggcc

SEQ ID NO: 123907 - DNA, 17 bp, synthetic construct
  source 1..17: mol_type = other DNA
tgaggtattccaggccc

SEQ ID NO: 123908 - DNA, 17 bp, synthetic construct
  source 1..17: mol_type = other DNA
gaggtattccaggcccc

SEQ ID NO: 123909 - DNA, 17 bp, synthetic construct
  source 1..17: mol_type = other DNA
aggtattccaggcccca

SEQ ID NO: 123910 - DNA, 17 bp, synthetic construct
  source 1..17: mol_type = other DNA
ggtattccaggccccag

SEQ ID NO: 123911 - DNA, 17 bp, synthetic construct
  source 1..17: mol_type = other DNA
gtattccaggccccagg

SEQ ID NO: 123912 - DNA, 17 bp, synthetic construct
  source 1..17: mol_type = other DNA
tattccaggccccagga

SEQ ID NO: 123913 - DNA, 17 bp, synthetic construct
  source 1..17: mol_type = other DNA
attccaggccccaggag

SEQ ID NO: 123914 - DNA, 17 bp, synthetic construct
  source 1..17: mol_type = other DNA
ttccaggccccaggagc

SEQ ID NO: 123915 - DNA, 17 bp, synthetic construct
  source 1..17: mol_type = other DNA
tccaggccccaggagct

SEQ ID NO: 123916 - DNA, 17 bp, synthetic construct
  source 1..17: mol_type = other DNA
ccaggccccaggagctc

SEQ ID NO: 123917 - DNA, 17 bp, synthetic construct
  source 1..17: mol_type = other DNA
caggccccaggagctca

SEQ ID NO: 123918 - DNA, 17 bp, synthetic construct
  source 1..17: mol_type = other DNA
aggccccaggagctcag

SEQ ID NO: 123919 - DNA, 17 bp, synthetic construct
  source 1..17: mol_type = other DNA
ggccccaggagctcaga

SEQ ID NO: 123920 - DNA, 17 bp, synthetic construct
  source 1..17: mol_type = other DNA
gccccaggagctcagag

SEQ ID NO: 123921 - DNA, 17 bp, synthetic construct
  source 1..17: mol_type = other DNA
ccccaggagctcagaga

SEQ ID NO: 123922 - DNA, 17 bp, synthetic construct
  source 1..17: mol_type = other DNA
cccaggagctcagagag

SEQ ID NO: 123923 - DNA, 17 bp, synthetic construct
  source 1..17: mol_type = other DNA
ccaggagctcagagagc

SEQ ID NO: 123924 - DNA, 17 bp, synthetic construct
  source 1..17: mol_type = other DNA
caggagctcagagagct

SEQ ID NO: 123925 - DNA, 17 bp, synthetic construct
  source 1..17: mol_type = other DNA
aggagctcagagagctg

SEQ ID NO: 123926 - DNA, 17 bp, synthetic construct
  source 1..17: mol_type = other DNA
ggagctcagagagctgc

SEQ ID NO: 123927 - DNA, 17 bp, synthetic construct
  source 1..17: mol_type = other DNA
gagctcagagagctgcc

SEQ ID NO: 123928 - DNA, 17 bp, synthetic construct
  source 1..17: mol_type = other DNA
agctcagagagctgcca

SEQ ID NO: 123929 - DNA, 17 bp, synthetic construct
  source 1..17: mol_type = other DNA
gctcagagagctgccat

SEQ ID NO: 123930 - DNA, 17 bp, synthetic construct
  source 1..17: mol_type = other DNA
ctcagagagctgccatg

SEQ ID NO: 123931 - DNA, 17 bp, synthetic construct
  source 1..17: mol_type = other DNA
tcagagagctgccatgg

SEQ ID NO: 123932 - DNA, 17 bp, synthetic construct
  source 1..17: mol_type = other DNA
cagagagctgccatggg

SEQ ID NO: 123933 - DNA, 17 bp, synthetic construct
  source 1..17: mol_type = other DNA
agagagctgccatgggg

SEQ ID NO: 123934 - DNA, 17 bp, synthetic construct
  source 1..17: mol_type = other DNA
gagagctgccatggggg

SEQ ID NO: 123935 - DNA, 17 bp, synthetic construct
  source 1..17: mol_type = other DNA
agagctgccatgggggg

SEQ ID NO: 123936 - DNA, 17 bp, synthetic construct
  source 1..17: mol_type = other DNA
gagctgccatggggggt

SEQ ID NO: 123937 - DNA, 17 bp, synthetic construct
  source 1..17: mol_type = other DNA
agctgccatggggggtg

SEQ ID NO: 123938 - DNA, 17 bp, synthetic construct
  source 1..17: mol_type = other DNA
gctgccatggggggtgt

SEQ ID NO: 123939 - DNA, 17 bp, synthetic construct
  source 1..17: mol_type = other DNA
ctgccatggggggtgtt

SEQ ID NO: 123940 - DNA, 17 bp, synthetic construct
  source 1..17: mol_type = other DNA
tgccatggggggtgttg

SEQ ID NO: 123941 - DNA, 17 bp, synthetic construct
  source 1..17: mol_type = other DNA
gccatggggggtgttga

SEQ ID NO: 123942 - DNA, 17 bp, synthetic construct
  source 1..17: mol_type = other DNA
ccatggggggtgttgaa

SEQ ID NO: 123943 - DNA, 17 bp, synthetic construct
  source 1..17: mol_type = other DNA
catggggggtgttgaaa

SEQ ID NO: 123944 - DNA, 17 bp, synthetic construct
  source 1..17: mol_type = other DNA
atggggggtgttgaaat

SEQ ID NO: 123945 - DNA, 17 bp, synthetic construct
  source 1..17: mol_type = other DNA
tggggggtgttgaaata

SEQ ID NO: 123946 - DNA, 17 bp, synthetic construct
  source 1..17: mol_type = other DNA
ggggggtgttgaaatac

SEQ ID NO: 123947 - DNA, 17 bp, synthetic construct
  source 1..17: mol_type = other DNA
gggggtgttgaaataca

SEQ ID NO: 123948 - DNA, 17 bp, synthetic construct
  source 1..17: mol_type = other DNA
ggggtgttgaaatacag

SEQ ID NO: 123949 - DNA, 17 bp, synthetic construct
  source 1..17: mol_type = other DNA
gggtgttgaaatacaga

SEQ ID NO: 123950 - DNA, 17 bp, synthetic construct
  source 1..17: mol_type = other DNA
ggtgttgaaatacagat

SEQ ID NO: 123951 - DNA, 17 bp, synthetic construct
  source 1..17: mol_type = other DNA
gtgttgaaatacagatg

SEQ ID NO: 123952 - DNA, 17 bp, synthetic construct
  source 1..17: mol_type = other DNA
tgttgaaatacagatgg

SEQ ID NO: 123953 - DNA, 17 bp, synthetic construct
  source 1..17: mol_type = other DNA
gttgaaatacagatggt

SEQ ID NO: 123954 - DNA, 17 bp, synthetic construct
  source 1..17: mol_type = other DNA
ttgaaatacagatggtt

SEQ ID NO: 123955 - DNA, 17 bp, synthetic construct
  source 1..17: mol_type = other DNA
tgaaatacagatggttc

SEQ ID NO: 123956 - DNA, 17 bp, synthetic construct
  source 1..17: mol_type = other DNA
gaaatacagatggttcc

SEQ ID NO: 123957 - DNA, 17 bp, synthetic construct
  source 1..17: mol_type = other DNA
aaatacagatggttcca

SEQ ID NO: 123958 - DNA, 17 bp, synthetic construct
  source 1..17: mol_type = other DNA
aatacagatggttccag

SEQ ID NO: 123959 - DNA, 17 bp, synthetic construct
  source 1..17: mol_type = other DNA
atacagatggttccagc

SEQ ID NO: 123960 - DNA, 17 bp, synthetic construct
  source 1..17: mol_type = other DNA
tacagatggttccagca

SEQ ID NO: 123961 - DNA, 17 bp, synthetic construct
  source 1..17: mol_type = other DNA
acagatggttccagcaa

SEQ ID NO: 123962 - DNA, 17 bp, synthetic construct
  source 1..17: mol_type = other DNA
cagatggttccagcaac

SEQ ID NO: 123963 - DNA, 17 bp, synthetic construct
  source 1..17: mol_type = other DNA
agatggttccagcaact

SEQ ID NO: 123964 - DNA, 17 bp, synthetic construct
  source 1..17: mol_type = other DNA
gatggttccagcaactg

SEQ ID NO: 123965 - DNA, 17 bp, synthetic construct
  source 1..17: mol_type = other DNA
atggttccagcaactgg

SEQ ID NO: 123966 - DNA, 17 bp, synthetic construct
  source 1..17: mol_type = other DNA
tggttccagcaactggc

SEQ ID NO: 123967 - DNA, 17 bp, synthetic construct
  source 1..17: mol_type = other DNA
ggttccagcaactggcc

SEQ ID NO: 123968 - DNA, 17 bp, synthetic construct
  source 1..17: mol_type = other DNA
gttccagcaactggccc

SEQ ID NO: 123969 - DNA, 17 bp, synthetic construct
  source 1..17: mol_type = other DNA
ttccagcaactggccct

SEQ ID NO: 123970 - DNA, 17 bp, synthetic construct
  source 1..17: mol_type = other DNA
tccagcaactggccctg

SEQ ID NO: 123971 - DNA, 17 bp, synthetic construct
  source 1..17: mol_type = other DNA
ccagcaactggccctgg

SEQ ID NO: 123972 - DNA, 17 bp, synthetic construct
  source 1..17: mol_type = other DNA
cagcaactggccctggg

SEQ ID NO: 123973 - DNA, 17 bp, synthetic construct
  source 1..17: mol_type = other DNA
agcaactggccctgggc

SEQ ID NO: 123974 - DNA, 17 bp, synthetic construct
  source 1..17: mol_type = other DNA
gcaactggccctgggcc

SEQ ID NO: 123975 - DNA, 17 bp, synthetic construct
  source 1..17: mol_type = other DNA
caactggccctgggcca

SEQ ID NO: 123976 - DNA, 17 bp, synthetic construct
  source 1..17: mol_type = other DNA
aactggccctgggccag

SEQ ID NO: 123977 - DNA, 17 bp, synthetic construct
  source 1..17: mol_type = other DNA
actggccctgggccagc

SEQ ID NO: 123978 - DNA, 17 bp, synthetic construct
  source 1..17: mol_type = other DNA
ctggccctgggccagcc

SEQ ID NO: 123979 - DNA, 17 bp, synthetic construct
  source 1..17: mol_type = other DNA
tggccctgggccagcca

SEQ ID NO: 123980 - DNA, 17 bp, synthetic construct
  source 1..17: mol_type = other DNA
ggccctgggccagccac

SEQ ID NO: 123981 - DNA, 17 bp, synthetic construct
  source 1..17: mol_type = other DNA
gccctgggccagccacc

SEQ ID NO: 123982 - DNA, 17 bp, synthetic construct
  source 1..17: mol_type = other DNA
ccctgggccagccaccc

SEQ ID NO: 123983 - DNA, 17 bp, synthetic construct
  source 1..17: mol_type = other DNA
cctgggccagccacccc

SEQ ID NO: 123984 - DNA, 17 bp, synthetic construct
  source 1..17: mol_type = other DNA
ctgggccagccaccccc

SEQ ID NO: 123985 - DNA, 17 bp, synthetic construct
  source 1..17: mol_type = other DNA
tgggccagccaccccct

SEQ ID NO: 123986 - DNA, 17 bp, synthetic construct
  source 1..17: mol_type = other DNA
gggccagccaccccctg

SEQ ID NO: 123987 - DNA, 17 bp, synthetic construct
  source 1..17: mol_type = other DNA
ggccagccaccccctgg

SEQ ID NO: 123988 - DNA, 17 bp, synthetic construct
  source 1..17: mol_type = other DNA
gccagccaccccctggc

SEQ ID NO: 123989 - DNA, 17 bp, synthetic construct
  source 1..17: mol_type = other DNA
ccagccaccccctggcc

SEQ ID NO: 123990 - DNA, 17 bp, synthetic construct
  source 1..17: mol_type = other DNA
cagccaccccctggccg

SEQ ID NO: 123991 - DNA, 17 bp, synthetic construct
  source 1..17: mol_type = other DNA
agccaccccctggccgg

SEQ ID NO: 123992 - DNA, 17 bp, synthetic construct
  source 1..17: mol_type = other DNA
gccaccccctggccggg

SEQ ID NO: 123993 - DNA, 17 bp, synthetic construct
  source 1..17: mol_type = other DNA
ccaccccctggccgggg

SEQ ID NO: 123994 - DNA, 17 bp, synthetic construct
  source 1..17: mol_type = other DNA
caccccctggccggggg

SEQ ID NO: 123995 - DNA, 17 bp, synthetic construct
  source 1..17: mol_type = other DNA
accccctggccgggggg

SEQ ID NO: 123996 - DNA, 17 bp, synthetic construct
  source 1..17: mol_type = other DNA
ccccctggccggggggg

SEQ ID NO: 123997 - DNA, 17 bp, synthetic construct
  source 1..17: mol_type = other DNA
cccctggccgggggggc

SEQ ID NO: 123998 - DNA, 17 bp, synthetic construct
  source 1..17: mol_type = other DNA
ccctggccgggggggcc

SEQ ID NO: 123999 - DNA, 17 bp, synthetic construct
  source 1..17: mol_type = other DNA
cctggccgggggggcca

SEQ ID NO: 124000 - DNA, 17 bp, synthetic construct
  source 1..17: mol_type = other DNA
ctggccgggggggccat

SEQ ID NO: 124001 - DNA, 17 bp, synthetic construct
  source 1..17: mol_type = other DNA
tggccgggggggccatt

SEQ ID NO: 124002 - DNA, 17 bp, synthetic construct
  source 1..17: mol_type = other DNA
ggccgggggggccattg

SEQ ID NO: 124003 - DNA, 17 bp, synthetic construct
  source 1..17: mol_type = other DNA
gccgggggggccattgt

SEQ ID NO: 124004 - DNA, 17 bp, synthetic construct
  source 1..17: mol_type = other DNA
ccgggggggccattgtc

SEQ ID NO: 124005 - DNA, 17 bp, synthetic construct
  source 1..17: mol_type = other DNA
cgggggggccattgtcc

SEQ ID NO: 124006 - DNA, 17 bp, synthetic construct
  source 1..17: mol_type = other DNA
gggggggccattgtccc

SEQ ID NO: 124007 - DNA, 17 bp, synthetic construct
  source 1..17: mol_type = other DNA
ggggggccattgtcccg

SEQ ID NO: 124008 - DNA, 17 bp, synthetic construct
  source 1..17: mol_type = other DNA
gggggccattgtcccgg

SEQ ID NO: 124009 - DNA, 17 bp, synthetic construct
  source 1..17: mol_type = other DNA
ggggccattgtcccggc

SEQ ID NO: 124010 - DNA, 17 bp, synthetic construct
  source 1..17: mol_type = other DNA
gggccattgtcccggct

SEQ ID NO: 124011 - DNA, 17 bp, synthetic construct
  source 1..17: mol_type = other DNA
ggccattgtcccggctg

SEQ ID NO: 124012 - DNA, 17 bp, synthetic construct
  source 1..17: mol_type = other DNA
gccattgtcccggctga

SEQ ID NO: 124013 - DNA, 17 bp, synthetic construct
  source 1..17: mol_type = other DNA
ccattgtcccggctgag

SEQ ID NO: 124014 - DNA, 17 bp, synthetic construct
  source 1..17: mol_type = other DNA
cattgtcccggctgagc

SEQ ID NO: 124015 - DNA, 17 bp, synthetic construct
  source 1..17: mol_type = other DNA
attgtcccggctgagct

SEQ ID NO: 124016 - DNA, 17 bp, synthetic construct
  source 1..17: mol_type = other DNA
ttgtcccggctgagctg

SEQ ID NO: 124017 - DNA, 17 bp, synthetic construct
  source 1..17: mol_type = other DNA
tgtcccggctgagctgc

SEQ ID NO: 124018 - DNA, 17 bp, synthetic construct
  source 1..17: mol_type = other DNA
gtcccggctgagctgca

SEQ ID NO: 124019 - DNA, 17 bp, synthetic construct
  source 1..17: mol_type = other DNA
tcccggctgagctgcac

SEQ ID NO: 124020 - DNA, 17 bp, synthetic construct
  source 1..17: mol_type = other DNA
cccggctgagctgcacc

SEQ ID NO: 124021 - DNA, 17 bp, synthetic construct
  source 1..17: mol_type = other DNA
ccggctgagctgcacct

SEQ ID NO: 124022 - DNA, 17 bp, synthetic construct
  source 1..17: mol_type = other DNA
cggctgagctgcacctt

SEQ ID NO: 124023 - DNA, 17 bp, synthetic construct
  source 1..17: mol_type = other DNA
ggctgagctgcaccttg

SEQ ID NO: 124024 - DNA, 17 bp, synthetic construct
  source 1..17: mol_type = other DNA
gctgagctgcaccttgg

SEQ ID NO: 124025 - DNA, 17 bp, synthetic construct
  source 1..17: mol_type = other DNA
ctgagctgcaccttggc

SEQ ID NO: 124026 - DNA, 17 bp, synthetic construct
  source 1..17: mol_type = other DNA
tgagctgcaccttggcc

SEQ ID NO: 124027 - DNA, 17 bp, synthetic construct
  source 1..17: mol_type = other DNA
gagctgcaccttggcct

SEQ ID NO: 124028 - DNA, 17 bp, synthetic construct
  source 1..17: mol_type = other DNA
agctgcaccttggcctc

SEQ ID NO: 124029 - DNA, 17 bp, synthetic construct
  source 1..17: mol_type = other DNA
gctgcaccttggcctca

SEQ ID NO: 124030 - DNA, 17 bp, synthetic construct
  source 1..17: mol_type = other DNA
ctgcaccttggcctcac

SEQ ID NO: 124031 - DNA, 17 bp, synthetic construct
  source 1..17: mol_type = other DNA
tgcaccttggcctcacc

SEQ ID NO: 124032 - DNA, 17 bp, synthetic construct
  source 1..17: mol_type = other DNA
gcaccttggcctcaccc

SEQ ID NO: 124033 - DNA, 17 bp, synthetic construct
  source 1..17: mol_type = other DNA
caccttggcctcacccg

SEQ ID NO: 124034 - DNA, 17 bp, synthetic construct
  source 1..17: mol_type = other DNA
accttggcctcacccgc

SEQ ID NO: 124035 - DNA, 17 bp, synthetic construct
  source 1..17: mol_type = other DNA
ccttggcctcacccgca

SEQ ID NO: 124036 - DNA, 17 bp, synthetic construct
  source 1..17: mol_type = other DNA
cttggcctcacccgcag

SEQ ID NO: 124037 - DNA, 17 bp, synthetic construct
  source 1..17: mol_type = other DNA
ttggcctcacccgcagg

SEQ ID NO: 124038 - DNA, 17 bp, synthetic construct
  source 1..17: mol_type = other DNA
tggcctcacccgcaggt

SEQ ID NO: 124039 - DNA, 17 bp, synthetic construct
  source 1..17: mol_type = other DNA
ggcctcacccgcaggtt

SEQ ID NO: 124040 - DNA, 17 bp, synthetic construct
  source 1..17: mol_type = other DNA
gcctcacccgcaggttg

SEQ ID NO: 124041 - DNA, 17 bp, synthetic construct
  source 1..17: mol_type = other DNA
cctcacccgcaggttga

SEQ ID NO: 124042 - DNA, 17 bp, synthetic construct
  source 1..17: mol_type = other DNA
ctcacccgcaggttgac

SEQ ID NO: 124043 - DNA, 17 bp, synthetic construct
  source 1..17: mol_type = other DNA
tcacccgcaggttgact

SEQ ID NO: 124044 - DNA, 17 bp, synthetic construct
  source 1..17: mol_type = other DNA
cacccgcaggttgactc

SEQ ID NO: 124045 - DNA, 17 bp, synthetic construct
  source 1..17: mol_type = other DNA
acccgcaggttgactcc

SEQ ID NO: 124046 - DNA, 17 bp, synthetic construct
  source 1..17: mol_type = other DNA
cccgcaggttgactcca

SEQ ID NO: 124047 - DNA, 17 bp, synthetic construct
  source 1..17: mol_type = other DNA
ccgcaggttgactccac

SEQ ID NO: 124048 - DNA, 17 bp, synthetic construct
  source 1..17: mol_type = other DNA
cgcaggttgactccacc

SEQ ID NO: 124049 - DNA, 17 bp, synthetic construct
  source 1..17: mol_type = other DNA
gcaggttgactccacca

SEQ ID NO: 124050 - DNA, 17 bp, synthetic construct
  source 1..17: mol_type = other DNA
caggttgactccaccaa

SEQ ID NO: 124051 - DNA, 17 bp, synthetic construct
  source 1..17: mol_type = other DNA
aggttgactccaccaag

SEQ ID NO: 124052 - DNA, 17 bp, synthetic construct
  source 1..17: mol_type = other DNA
ggttgactccaccaagt

SEQ ID NO: 124053 - DNA, 17 bp, synthetic construct
  source 1..17: mol_type = other DNA
gttgactccaccaagta

SEQ ID NO: 124054 - DNA, 17 bp, synthetic construct
  source 1..17: mol_type = other DNA
ttgactccaccaagtac

SEQ ID NO: 124055 - DNA, 17 bp, synthetic construct
  source 1..17: mol_type = other DNA
tgactccaccaagtact

SEQ ID NO: 124056 - DNA, 17 bp, synthetic construct
  source 1..17: mol_type = other DNA
gactccaccaagtacta

SEQ ID NO: 124057 - DNA, 17 bp, synthetic construct
  source 1..17: mol_type = other DNA
actccaccaagtactac

SEQ ID NO: 124058 - DNA, 17 bp, synthetic construct
  source 1..17: mol_type = other DNA
ctccaccaagtactacg

SEQ ID NO: 124059 - DNA, 17 bp, synthetic construct
  source 1..17: mol_type = other DNA
tccaccaagtactacga

SEQ ID NO: 124060 - DNA, 17 bp, synthetic construct
  source 1..17: mol_type = other DNA
ccaccaagtactacgag

SEQ ID NO: 124061 - DNA, 17 bp, synthetic construct
  source 1..17: mol_type = other DNA
caccaagtactacgagg

SEQ ID NO: 124062 - DNA, 17 bp, synthetic construct
  source 1..17: mol_type = other DNA
accaagtactacgaggc

SEQ ID NO: 124063 - DNA, 17 bp, synthetic construct
  source 1..17: mol_type = other DNA
ccaagtactacgaggcc

SEQ ID NO: 124064 - DNA, 17 bp, synthetic construct
  source 1..17: mol_type = other DNA
caagtactacgaggcct

SEQ ID NO: 124065 - DNA, 17 bp, synthetic construct
  source 1..17: mol_type = other DNA
aagtactacgaggcctg

SEQ ID NO: 124066 - DNA, 17 bp, synthetic construct
  source 1..17: mol_type = other DNA
agtactacgaggcctgc

SEQ ID NO: 124067 - DNA, 17 bp, synthetic construct
  source 1..17: mol_type = other DNA
gtactacgaggcctgcg

SEQ ID NO: 124068 - DNA, 17 bp, synthetic construct
  source 1..17: mol_type = other DNA
tactacgaggcctgcgt

SEQ ID NO: 124069 - DNA, 17 bp, synthetic construct
  source 1..17: mol_type = other DNA
actacgaggcctgcgtg

SEQ ID NO: 124070 - DNA, 17 bp, synthetic construct
  source 1..17: mol_type = other DNA
ctacgaggcctgcgtga

SEQ ID NO: 124071 - DNA, 17 bp, synthetic construct
  source 1..17: mol_type = other DNA
tacgaggcctgcgtgaa

SEQ ID NO: 124072 - DNA, 17 bp, synthetic construct
  source 1..17: mol_type = other DNA
acgaggcctgcgtgaac

SEQ ID NO: 124073 - DNA, 17 bp, synthetic construct
  source 1..17: mol_type = other DNA
cgaggcctgcgtgaacg

SEQ ID NO: 124074 - DNA, 17 bp, synthetic construct
  source 1..17: mol_type = other DNA
gaggcctgcgtgaacga

SEQ ID NO: 124075 - DNA, 17 bp, synthetic construct
  source 1..17: mol_type = other DNA
aggcctgcgtgaacgac

SEQ ID NO: 124076 - DNA, 17 bp, synthetic construct
  source 1..17: mol_type = other DNA
ggcctgcgtgaacgacg

SEQ ID NO: 124077 - DNA, 17 bp, synthetic construct
  source 1..17: mol_type = other DNA
gcctgcgtgaacgacgc

SEQ ID NO: 124078 - DNA, 17 bp, synthetic construct
  source 1..17: mol_type = other DNA
cctgcgtgaacgacgcg

SEQ ID NO: 124079 - DNA, 17 bp, synthetic construct
  source 1..17: mol_type = other DNA
ctgcgtgaacgacgcgt

SEQ ID NO: 124080 - DNA, 17 bp, synthetic construct
  source 1..17: mol_type = other DNA
tgcgtgaacgacgcgtg

SEQ ID NO: 124081 - DNA, 17 bp, synthetic construct
  source 1..17: mol_type = other DNA
gcgtgaacgacgcgtgt

SEQ ID NO: 124082 - DNA, 17 bp, synthetic construct
  source 1..17: mol_type = other DNA
cgtgaacgacgcgtgtg

SEQ ID NO: 124083 - DNA, 17 bp, synthetic construct
  source 1..17: mol_type = other DNA
gtgaacgacgcgtgtgc

SEQ ID NO: 124084 - DNA, 17 bp, synthetic construct
  source 1..17: mol_type = other DNA
tgaacgacgcgtgtgcc

SEQ ID NO: 124085 - DNA, 17 bp, synthetic construct
  source 1..17: mol_type = other DNA
gaacgacgcgtgtgcct

SEQ ID NO: 124086 - DNA, 17 bp, synthetic construct
  source 1..17: mol_type = other DNA
aacgacgcgtgtgcctg

SEQ ID NO: 124087 - DNA, 17 bp, synthetic construct
  source 1..17: mol_type = other DNA
acgacgcgtgtgcctgc

SEQ ID NO: 124088 - DNA, 17 bp, synthetic construct
  source 1..17: mol_type = other DNA
cgacgcgtgtgcctgcg

SEQ ID NO: 124089 - DNA, 17 bp, synthetic construct
  source 1..17: mol_type = other DNA
gacgcgtgtgcctgcga

SEQ ID NO: 124090 - DNA, 17 bp, synthetic construct
  source 1..17: mol_type = other DNA
acgcgtgtgcctgcgac

SEQ ID NO: 124091 - DNA, 17 bp, synthetic construct
  source 1..17: mol_type = other DNA
cgcgtgtgcctgcgact

SEQ ID NO: 124092 - DNA, 17 bp, synthetic construct
  source 1..17: mol_type = other DNA
gcgtgtgcctgcgactc

SEQ ID NO: 124093 - DNA, 17 bp, synthetic construct
  source 1..17: mol_type = other DNA
cgtgtgcctgcgactcg

SEQ ID NO: 124094 - DNA, 17 bp, synthetic construct
  source 1..17: mol_type = other DNA
gtgtgcctgcgactcgg

SEQ ID NO: 124095 - DNA, 17 bp, synthetic construct
  source 1..17: mol_type = other DNA
tgtgcctgcgactcggg

SEQ ID NO: 124096 - DNA, 17 bp, synthetic construct
  source 1..17: mol_type = other DNA
gtgcctgcgactcgggt

SEQ ID NO: 124097 - DNA, 17 bp, synthetic construct
  source 1..17: mol_type = other DNA
tgcctgcgactcgggtg

SEQ ID NO: 124098 - DNA, 17 bp, synthetic construct
  source 1..17: mol_type = other DNA
gcctgcgactcgggtgg

SEQ ID NO: 124099 - DNA, 17 bp, synthetic construct
  source 1..17: mol_type = other DNA
cctgcgactcgggtggc

SEQ ID NO: 124100 - DNA, 17 bp, synthetic construct
  source 1..17: mol_type = other DNA
ctgcgactcgggtggcg

SEQ ID NO: 124101 - DNA, 17 bp, synthetic construct
  source 1..17: mol_type = other DNA
tgcgactcgggtggcga

SEQ ID NO: 124102 - DNA, 17 bp, synthetic construct
  source 1..17: mol_type = other DNA
gcgactcgggtggcgac

SEQ ID NO: 124103 - DNA, 17 bp, synthetic construct
  source 1..17: mol_type = other DNA
cgactcgggtggcgact

SEQ ID NO: 124104 - DNA, 17 bp, synthetic construct
  source 1..17: mol_type = other DNA
gactcgggtggcgactg

SEQ ID NO: 124105 - DNA, 17 bp, synthetic construct
  source 1..17: mol_type = other DNA
actcgggtggcgactgc

SEQ ID NO: 124106 - DNA, 17 bp, synthetic construct
  source 1..17: mol_type = other DNA
ctcgggtggcgactgcg

SEQ ID NO: 124107 - DNA, 17 bp, synthetic construct
  source 1..17: mol_type = other DNA
tcgggtggcgactgcga

SEQ ID NO: 124108 - DNA, 17 bp, synthetic construct
  source 1..17: mol_type = other DNA
cgggtggcgactgcgag

SEQ ID NO: 124109 - DNA, 17 bp, synthetic construct
  source 1..17: mol_type = other DNA
gggtggcgactgcgagt

SEQ ID NO: 124110 - DNA, 17 bp, synthetic construct
  source 1..17: mol_type = other DNA
ggtggcgactgcgagtg

SEQ ID NO: 124111 - DNA, 17 bp, synthetic construct
  source 1..17: mol_type = other DNA
gtggcgactgcgagtgt

SEQ ID NO: 124112 - DNA, 17 bp, synthetic construct
  source 1..17: mol_type = other DNA
tggcgactgcgagtgtt

SEQ ID NO: 124113 - DNA, 17 bp, synthetic construct
  source 1..17: mol_type = other DNA
ggcgactgcgagtgttt

SEQ ID NO: 124114 - DNA, 17 bp, synthetic construct
  source 1..17: mol_type = other DNA
gcgactgcgagtgtttc

SEQ ID NO: 124115 - DNA, 17 bp, synthetic construct
  source 1..17: mol_type = other DNA
cgactgcgagtgtttct

SEQ ID NO: 124116 - DNA, 17 bp, synthetic construct
  source 1..17: mol_type = other DNA
gactgcgagtgtttctg

SEQ ID NO: 124117 - DNA, 17 bp, synthetic construct
  source 1..17: mol_type = other DNA
actgcgagtgtttctgc

SEQ ID NO: 124118 - DNA, 17 bp, synthetic construct
  source 1..17: mol_type = other DNA
ctgcgagtgtttctgca

SEQ ID NO: 124119 - DNA, 17 bp, synthetic construct
  source 1..17: mol_type = other DNA
tgcgagtgtttctgcac

SEQ ID NO: 124120 - DNA, 17 bp, synthetic construct
  source 1..17: mol_type = other DNA
gcgagtgtttctgcacg

SEQ ID NO: 124121 - DNA, 17 bp, synthetic construct
  source 1..17: mol_type = other DNA
cgagtgtttctgcacgg

SEQ ID NO: 124122 - DNA, 17 bp, synthetic construct
  source 1..17: mol_type = other DNA
gagtgtttctgcacggc

SEQ ID NO: 124123 - DNA, 17 bp, synthetic construct
  source 1..17: mol_type = other DNA
agtgtttctgcacggct

SEQ ID NO: 124124 - DNA, 17 bp, synthetic construct
  source 1..17: mol_type = other DNA
gtgtttctgcacggctg

SEQ ID NO: 124125 - DNA, 17 bp, synthetic construct
  source 1..17: mol_type = other DNA
tgtttctgcacggctgt

SEQ ID NO: 124126 - DNA, 17 bp, synthetic construct
  source 1..17: mol_type = other DNA
gtttctgcacggctgtg

SEQ ID NO: 124127 - DNA, 17 bp, synthetic construct
  source 1..17: mol_type = other DNA
tttctgcacggctgtgg

SEQ ID NO: 124128 - DNA, 17 bp, synthetic construct
  source 1..17: mol_type = other DNA
ttctgcacggctgtggc

SEQ ID NO: 124129 - DNA, 17 bp, synthetic construct
  source 1..17: mol_type = other DNA
tctgcacggctgtggct

SEQ ID NO: 124130 - DNA, 17 bp, synthetic construct
  source 1..17: mol_type = other DNA
ctgcacggctgtggctg

SEQ ID NO: 124131 - DNA, 17 bp, synthetic construct
  source 1..17: mol_type = other DNA
tgcacggctgtggctgc

SEQ ID NO: 124132 - DNA, 17 bp, synthetic construct
  source 1..17: mol_type = other DNA
gcacggctgtggctgcc

SEQ ID NO: 124133 - DNA, 17 bp, synthetic construct
  source 1..17: mol_type = other DNA
cacggctgtggctgcct

SEQ ID NO: 124134 - DNA, 17 bp, synthetic construct
  source 1..17: mol_type = other DNA
acggctgtggctgccta

SEQ ID NO: 124135 - DNA, 17 bp, synthetic construct
  source 1..17: mol_type = other DNA
cggctgtggctgcctac

SEQ ID NO: 124136 - DNA, 17 bp, synthetic construct
  source 1..17: mol_type = other DNA
ggctgtggctgcctacg

SEQ ID NO: 124137 - DNA, 17 bp, synthetic construct
  source 1..17: mol_type = other DNA
gctgtggctgcctacgc

SEQ ID NO: 124138 - DNA, 17 bp, synthetic construct
  source 1..17: mol_type = other DNA
ctgtggctgcctacgcc

SEQ ID NO: 124139 - DNA, 17 bp, synthetic construct
  source 1..17: mol_type = other DNA
tgtggctgcctacgccc

SEQ ID NO: 124140 - DNA, 17 bp, synthetic construct
  source 1..17: mol_type = other DNA
gtggctgcctacgccca

SEQ ID NO: 124141 - DNA, 17 bp, synthetic construct
  source 1..17: mol_type = other DNA
tggctgcctacgcccag

SEQ ID NO: 124142 - DNA, 17 bp, synthetic construct
  source 1..17: mol_type = other DNA
ggctgcctacgcccagg

SEQ ID NO: 124143 - DNA, 17 bp, synthetic construct
  source 1..17: mol_type = other DNA
gctgcctacgcccaggc

SEQ ID NO: 124144 - DNA, 17 bp, synthetic construct
  source 1..17: mol_type = other DNA
ctgcctacgcccaggcc

SEQ ID NO: 124145 - DNA, 17 bp, synthetic construct
  source 1..17: mol_type = other DNA
tgcctacgcccaggcct

SEQ ID NO: 124146 - DNA, 17 bp, synthetic construct
  source 1..17: mol_type = other DNA
gcctacgcccaggcctg

SEQ ID NO: 124147 - DNA, 17 bp, synthetic construct
  source 1..17: mol_type = other DNA
cctacgcccaggcctgc

SEQ ID NO: 124148 - DNA, 17 bp, synthetic construct
  source 1..17: mol_type = other DNA
ctacgcccaggcctgcc

SEQ ID NO: 124149 - DNA, 17 bp, synthetic construct
  source 1..17: mol_type = other DNA
tacgcccaggcctgcca

SEQ ID NO: 124150 - DNA, 17 bp, synthetic construct
  source 1..17: mol_type = other DNA
acgcccaggcctgccac

SEQ ID NO: 124151 - DNA, 17 bp, synthetic construct
  source 1..17: mol_type = other DNA
cgcccaggcctgccacg

SEQ ID NO: 124152 - DNA, 17 bp, synthetic construct
  source 1..17: mol_type = other DNA
gcccaggcctgccacga

SEQ ID NO: 124153 - DNA, 17 bp, synthetic construct
  source 1..17: mol_type = other DNA
cccaggcctgccacgac

SEQ ID NO: 124154 - DNA, 17 bp, synthetic construct
  source 1..17: mol_type = other DNA
ccaggcctgccacgacg

SEQ ID NO: 124155 - DNA, 17 bp, synthetic construct
  source 1..17: mol_type = other DNA
caggcctgccacgacgc

SEQ ID NO: 124156 - DNA, 17 bp, synthetic construct
  source 1..17: mol_type = other DNA
aggcctgccacgacgcg

SEQ ID NO: 124157 - DNA, 17 bp, synthetic construct
  source 1..17: mol_type = other DNA
ggcctgccacgacgcgg

SEQ ID NO: 124158 - DNA, 17 bp, synthetic construct
  source 1..17: mol_type = other DNA
gcctgccacgacgcggg

SEQ ID NO: 124159 - DNA, 17 bp, synthetic construct
  source 1..17: mol_type = other DNA
cctgccacgacgcgggc

SEQ ID NO: 124160 - DNA, 17 bp, synthetic construct
  source 1..17: mol_type = other DNA
ctgccacgacgcgggcc

SEQ ID NO: 124161 - DNA, 17 bp, synthetic construct
  source 1..17: mol_type = other DNA
tgccacgacgcgggcct

SEQ ID NO: 124162 - DNA, 17 bp, synthetic construct
  source 1..17: mol_type = other DNA
gccacgacgcgggcctg

SEQ ID NO: 124163 - DNA, 17 bp, synthetic construct
  source 1..17: mol_type = other DNA
ccacgacgcgggcctgt

SEQ ID NO: 124164 - DNA, 17 bp, synthetic construct
  source 1..17: mol_type = other DNA
cacgacgcgggcctgtg

SEQ ID NO: 124165 - DNA, 17 bp, synthetic construct
  source 1..17: mol_type = other DNA
acgacgcgggcctgtgt

SEQ ID NO: 124166 - DNA, 17 bp, synthetic construct
  source 1..17: mol_type = other DNA
cgacgcgggcctgtgtg

SEQ ID NO: 124167 - DNA, 17 bp, synthetic construct
  source 1..17: mol_type = other DNA
gacgcgggcctgtgtgt

SEQ ID NO: 124168 - DNA, 17 bp, synthetic construct
  source 1..17: mol_type = other DNA
acgcgggcctgtgtgtg

SEQ ID NO: 124169 - DNA, 17 bp, synthetic construct
  source 1..17: mol_type = other DNA
cgcgggcctgtgtgtgt

SEQ ID NO: 124170 - DNA, 17 bp, synthetic construct
  source 1..17: mol_type = other DNA
gcgggcctgtgtgtgtc

SEQ ID NO: 124171 - DNA, 17 bp, synthetic construct
  source 1..17: mol_type = other DNA
cgggcctgtgtgtgtcc

SEQ ID NO: 124172 - DNA, 17 bp, synthetic construct
  source 1..17: mol_type = other DNA
gggcctgtgtgtgtcct

SEQ ID NO: 124173 - DNA, 17 bp, synthetic construct
  source 1..17: mol_type = other DNA
ggcctgtgtgtgtcctg

SEQ ID NO: 124174 - DNA, 17 bp, synthetic construct
  source 1..17: mol_type = other DNA
gcctgtgtgtgtcctgg

SEQ ID NO: 124175 - DNA, 17 bp, synthetic construct
  source 1..17: mol_type = other DNA
cctgtgtgtgtcctggc

SEQ ID NO: 124176 - DNA, 17 bp, synthetic construct
  source 1..17: mol_type = other DNA
ctgtgtgtgtcctggcg

SEQ ID NO: 124177 - DNA, 17 bp, synthetic construct
  source 1..17: mol_type = other DNA
tgtgtgtgtcctggcgg

SEQ ID NO: 124178 - DNA, 17 bp, synthetic construct
  source 1..17: mol_type = other DNA
gtgtgtgtcctggcgga

SEQ ID NO: 124179 - DNA, 17 bp, synthetic construct
  source 1..17: mol_type = other DNA
tgtgtgtcctggcggac

SEQ ID NO: 124180 - DNA, 17 bp, synthetic construct
  source 1..17: mol_type = other DNA
gtgtgtcctggcggact

SEQ ID NO: 124181 - DNA, 17 bp, synthetic construct
  source 1..17: mol_type = other DNA
tgtgtcctggcggactc

SEQ ID NO: 124182 - DNA, 17 bp, synthetic construct
  source 1..17: mol_type = other DNA
gtgtcctggcggactcc

SEQ ID NO: 124183 - DNA, 17 bp, synthetic construct
  source 1..17: mol_type = other DNA
tgtcctggcggactccg

SEQ ID NO: 124184 - DNA, 17 bp, synthetic construct
  source 1..17: mol_type = other DNA
gtcctggcggactccgg

SEQ ID NO: 124185 - DNA, 17 bp, synthetic construct
  source 1..17: mol_type = other DNA
tcctggcggactccgga

SEQ ID NO: 124186 - DNA, 17 bp, synthetic construct
  source 1..17: mol_type = other DNA
cctggcggactccggac

SEQ ID NO: 124187 - DNA, 17 bp, synthetic construct
  source 1..17: mol_type = other DNA
ctggcggactccggaca

SEQ ID NO: 124188 - DNA, 17 bp, synthetic construct
  source 1..17: mol_type = other DNA
tggcggactccggacac

SEQ ID NO: 124189 - DNA, 17 bp, synthetic construct
  source 1..17: mol_type = other DNA
ggcggactccggacacc

SEQ ID NO: 124190 - DNA, 17 bp, synthetic construct
  source 1..17: mol_type = other DNA
gcggactccggacacct

SEQ ID NO: 124191 - DNA, 17 bp, synthetic construct
  source 1..17: mol_type = other DNA
cggactccggacacctg

SEQ ID NO: 124192 - DNA, 17 bp, synthetic construct
  source 1..17: mol_type = other DNA
ggactccggacacctgc

SEQ ID NO: 124193 - DNA, 17 bp, synthetic construct
  source 1..17: mol_type = other DNA
gactccggacacctgcc

SEQ ID NO: 124194 - DNA, 17 bp, synthetic construct
  source 1..17: mol_type = other DNA
actccggacacctgccg

SEQ ID NO: 124195 - DNA, 17 bp, synthetic construct
  source 1..17: mol_type = other DNA
ctccggacacctgccgt

SEQ ID NO: 124196 - DNA, 17 bp, synthetic construct
  source 1..17: mol_type = other DNA
tccggacacctgccgtg

SEQ ID NO: 124197 - DNA, 17 bp, synthetic construct
  source 1..17: mol_type = other DNA
ccggacacctgccgtga

SEQ ID NO: 124198 - DNA, 17 bp, synthetic construct
  source 1..17: mol_type = other DNA
cggacacctgccgtgag

SEQ ID NO: 124199 - DNA, 17 bp, synthetic construct
  source 1..17: mol_type = other DNA
ggacacctgccgtgagt

SEQ ID NO: 124200 - DNA, 17 bp, synthetic construct
  source 1..17: mol_type = other DNA
gacacctgccgtgagtc

SEQ ID NO: 124201 - DNA, 17 bp, synthetic construct
  source 1..17: mol_type = other DNA
acacctgccgtgagtcg

SEQ ID NO: 124202 - DNA, 17 bp, synthetic construct
  source 1..17: mol_type = other DNA
cacctgccgtgagtcgg

SEQ ID NO: 124203 - DNA, 17 bp, synthetic construct
  source 1..17: mol_type = other DNA
acctgccgtgagtcggg

SEQ ID NO: 124204 - DNA, 17 bp, synthetic construct
  source 1..17: mol_type = other DNA
cctgccgtgagtcgggc

SEQ ID NO: 124205 - DNA, 17 bp, synthetic construct
  source 1..17: mol_type = other DNA
ctgccgtgagtcgggct

SEQ ID NO: 124206 - DNA, 17 bp, synthetic construct
  source 1..17: mol_type = other DNA
tgccgtgagtcgggctc

SEQ ID NO: 124207 - DNA, 17 bp, synthetic construct
  source 1..17: mol_type = other DNA
gccgtgagtcgggctct

SEQ ID NO: 124208 - DNA, 17 bp, synthetic construct
  source 1..17: mol_type = other DNA
ccgtgagtcgggctctg

SEQ ID NO: 124209 - DNA, 17 bp, synthetic construct
  source 1..17: mol_type = other DNA
cgtgagtcgggctctgt

SEQ ID NO: 124210 - DNA, 17 bp, synthetic construct
  source 1..17: mol_type = other DNA
gtgagtcgggctctgtc

SEQ ID NO: 124211 - DNA, 17 bp, synthetic construct
  source 1..17: mol_type = other DNA
tgagtcgggctctgtcc

SEQ ID NO: 124212 - DNA, 17 bp, synthetic construct
  source 1..17: mol_type = other DNA
gagtcgggctctgtccg

SEQ ID NO: 124213 - DNA, 17 bp, synthetic construct
  source 1..17: mol_type = other DNA
agtcgggctctgtccgt

SEQ ID NO: 124214 - DNA, 17 bp, synthetic construct
  source 1..17: mol_type = other DNA
gtcgggctctgtccgtg

SEQ ID NO: 124215 - DNA, 17 bp, synthetic construct
  source 1..17: mol_type = other DNA
tcgggctctgtccgtgg

SEQ ID NO: 124216 - DNA, 17 bp, synthetic construct
  source 1..17: mol_type = other DNA
cgggctctgtccgtggt

SEQ ID NO: 124217 - DNA, 17 bp, synthetic construct
  source 1..17: mol_type = other DNA
gggctctgtccgtggtg

SEQ ID NO: 124218 - DNA, 17 bp, synthetic construct
  source 1..17: mol_type = other DNA
ggctctgtccgtggtgc

SEQ ID NO: 124219 - DNA, 17 bp, synthetic construct
  source 1..17: mol_type = other DNA
gctctgtccgtggtgct

SEQ ID NO: 124220 - DNA, 17 bp, synthetic construct
  source 1..17: mol_type = other DNA
ctctgtccgtggtgctg

SEQ ID NO: 124221 - DNA, 17 bp, synthetic construct
  source 1..17: mol_type = other DNA
tctgtccgtggtgctga

SEQ ID NO: 124222 - DNA, 17 bp, synthetic construct
  source 1..17: mol_type = other DNA
ctgtccgtggtgctgaa

SEQ ID NO: 124223 - DNA, 17 bp, synthetic construct
  source 1..17: mol_type = other DNA
tgtccgtggtgctgaag

SEQ ID NO: 124224 - DNA, 17 bp, synthetic construct
  source 1..17: mol_type = other DNA
gtccgtggtgctgaagg

SEQ ID NO: 124225 - DNA, 17 bp, synthetic construct
  source 1..17: mol_type = other DNA
tccgtggtgctgaaggg

SEQ ID NO: 124226 - DNA, 17 bp, synthetic construct
  source 1..17: mol_type = other DNA
ccgtggtgctgaagggt

SEQ ID NO: 124227 - DNA, 17 bp, synthetic construct
  source 1..17: mol_type = other DNA
cgtggtgctgaagggtg

SEQ ID NO: 124228 - DNA, 17 bp, synthetic construct
  source 1..17: mol_type = other DNA
gtggtgctgaagggtgg

SEQ ID NO: 124229 - DNA, 17 bp, synthetic construct
  source 1..17: mol_type = other DNA
tggtgctgaagggtgga

SEQ ID NO: 124230 - DNA, 17 bp, synthetic construct
  source 1..17: mol_type = other DNA
ggtgctgaagggtggag

SEQ ID NO: 124231 - DNA, 17 bp, synthetic construct
  source 1..17: mol_type = other DNA
gtgctgaagggtggagc

SEQ ID NO: 124232 - DNA, 17 bp, synthetic construct
  source 1..17: mol_type = other DNA
tgctgaagggtggagct

SEQ ID NO: 124233 - DNA, 17 bp, synthetic construct
  source 1..17: mol_type = other DNA
gctgaagggtggagctg

SEQ ID NO: 124234 - DNA, 17 bp, synthetic construct
  source 1..17: mol_type = other DNA
ctgaagggtggagctgc

SEQ ID NO: 124235 - DNA, 17 bp, synthetic construct
  source 1..17: mol_type = other DNA
tgaagggtggagctgct

SEQ ID NO: 124236 - DNA, 17 bp, synthetic construct
  source 1..17: mol_type = other DNA
gaagggtggagctgctg

SEQ ID NO: 124237 - DNA, 17 bp, synthetic construct
  source 1..17: mol_type = other DNA
aagggtggagctgctgg

SEQ ID NO: 124238 - DNA, 17 bp, synthetic construct
  source 1..17: mol_type = other DNA
agggtggagctgctggg

SEQ ID NO: 124239 - DNA, 17 bp, synthetic construct
  source 1..17: mol_type = other DNA
gggtggagctgctgggg

SEQ ID NO: 124240 - DNA, 17 bp, synthetic construct
  source 1..17: mol_type = other DNA
ggtggagctgctggggc

SEQ ID NO: 124241 - DNA, 17 bp, synthetic construct
  source 1..17: mol_type = other DNA
gtggagctgctggggca

SEQ ID NO: 124242 - DNA, 17 bp, synthetic construct
  source 1..17: mol_type = other DNA
tggagctgctggggcag

SEQ ID NO: 124243 - DNA, 17 bp, synthetic construct
  source 1..17: mol_type = other DNA
ggagctgctggggcagg

SEQ ID NO: 124244 - DNA, 17 bp, synthetic construct
  source 1..17: mol_type = other DNA
gagctgctggggcaggg

SEQ ID NO: 124245 - DNA, 17 bp, synthetic construct
  source 1..17: mol_type = other DNA
agctgctggggcagggg

SEQ ID NO: 124246 - DNA, 17 bp, synthetic construct
  source 1..17: mol_type = other DNA
gctgctggggcagggga

SEQ ID NO: 124247 - DNA, 17 bp, synthetic construct
  source 1..17: mol_type = other DNA
ctgctggggcaggggag

SEQ ID NO: 124248 - DNA, 17 bp, synthetic construct
  source 1..17: mol_type = other DNA
tgctggggcaggggagg

SEQ ID NO: 124249 - DNA, 17 bp, synthetic construct
  source 1..17: mol_type = other DNA
gctggggcaggggagga

SEQ ID NO: 124250 - DNA, 17 bp, synthetic construct
  source 1..17: mol_type = other DNA
ctggggcaggggaggag

SEQ ID NO: 124251 - DNA, 17 bp, synthetic construct
  source 1..17: mol_type = other DNA
tggggcaggggaggagg

SEQ ID NO: 124252 - DNA, 17 bp, synthetic construct
  source 1..17: mol_type = other DNA
ggggcaggggaggaggt

SEQ ID NO: 124253 - DNA, 17 bp, synthetic construct
  source 1..17: mol_type = other DNA
gggcaggggaggaggtg

SEQ ID NO: 124254 - DNA, 17 bp, synthetic construct
  source 1..17: mol_type = other DNA
ggcaggggaggaggtgt

SEQ ID NO: 124255 - DNA, 17 bp, synthetic construct
  source 1..17: mol_type = other DNA
gcaggggaggaggtgtg

SEQ ID NO: 124256 - DNA, 17 bp, synthetic construct
  source 1..17: mol_type = other DNA
caggggaggaggtgtgg

SEQ ID NO: 124257 - DNA, 17 bp, synthetic construct
  source 1..17: mol_type = other DNA
aggggaggaggtgtggc

SEQ ID NO: 124258 - DNA, 17 bp, synthetic construct
  source 1..17: mol_type = other DNA
ggggaggaggtgtggca

SEQ ID NO: 124259 - DNA, 17 bp, synthetic construct
  source 1..17: mol_type = other DNA
gggaggaggtgtggcag

SEQ ID NO: 124260 - DNA, 17 bp, synthetic construct
  source 1..17: mol_type = other DNA
ggaggaggtgtggcagc

SEQ ID NO: 124261 - DNA, 17 bp, synthetic construct
  source 1..17: mol_type = other DNA
gaggaggtgtggcagcc

SEQ ID NO: 124262 - DNA, 17 bp, synthetic construct
  source 1..17: mol_type = other DNA
aggaggtgtggcagcct

SEQ ID NO: 124263 - DNA, 17 bp, synthetic construct
  source 1..17: mol_type = other DNA
ggaggtgtggcagcctc

SEQ ID NO: 124264 - DNA, 17 bp, synthetic construct
  source 1..17: mol_type = other DNA
gaggtgtggcagcctcc

SEQ ID NO: 124265 - DNA, 17 bp, synthetic construct
  source 1..17: mol_type = other DNA
aggtgtggcagcctccg

SEQ ID NO: 124266 - DNA, 17 bp, synthetic construct
  source 1..17: mol_type = other DNA
ggtgtggcagcctccga

SEQ ID NO: 124267 - DNA, 17 bp, synthetic construct
  source 1..17: mol_type = other DNA
gtgtggcagcctccgaa

SEQ ID NO: 124268 - DNA, 17 bp, synthetic construct
  source 1..17: mol_type = other DNA
tgtggcagcctccgaag

SEQ ID NO: 124269 - DNA, 17 bp, synthetic construct
  source 1..17: mol_type = other DNA
gtggcagcctccgaagg

SEQ ID NO: 124270 - DNA, 17 bp, synthetic construct
  source 1..17: mol_type = other DNA
tggcagcctccgaaggt

SEQ ID NO: 124271 - DNA, 17 bp, synthetic construct
  source 1..17: mol_type = other DNA
ggcagcctccgaaggtg

SEQ ID NO: 124272 - DNA, 17 bp, synthetic construct
  source 1..17: mol_type = other DNA
gcagcctccgaaggtgc

SEQ ID NO: 124273 - DNA, 17 bp, synthetic construct
  source 1..17: mol_type = other DNA
cagcctccgaaggtgca

SEQ ID NO: 124274 - DNA, 17 bp, synthetic construct
  source 1..17: mol_type = other DNA
agcctccgaaggtgcat

SEQ ID NO: 124275 - DNA, 17 bp, synthetic construct
  source 1..17: mol_type = other DNA
gcctccgaaggtgcatt

SEQ ID NO: 124276 - DNA, 17 bp, synthetic construct
  source 1..17: mol_type = other DNA
cctccgaaggtgcattg

SEQ ID NO: 124277 - DNA, 17 bp, synthetic construct
  source 1..17: mol_type = other DNA
ctccgaaggtgcattga

SEQ ID NO: 124278 - DNA, 17 bp, synthetic construct
  source 1..17: mol_type = other DNA
tccgaaggtgcattgac

SEQ ID NO: 124279 - DNA, 17 bp, synthetic construct
  source 1..17: mol_type = other DNA
ccgaaggtgcattgacc

SEQ ID NO: 124280 - DNA, 17 bp, synthetic construct
  source 1..17: mol_type = other DNA
cgaaggtgcattgacct

SEQ ID NO: 124281 - DNA, 17 bp, synthetic construct
  source 1..17: mol_type = other DNA
gaaggtgcattgacctg

SEQ ID NO: 124282 - DNA, 17 bp, synthetic construct
  source 1..17: mol_type = other DNA
aaggtgcattgacctgg

SEQ ID NO: 124283 - DNA, 17 bp, synthetic construct
  source 1..17: mol_type = other DNA
aggtgcattgacctggg

SEQ ID NO: 124284 - DNA, 17 bp, synthetic construct
  source 1..17: mol_type = other DNA
ggtgcattgacctgggc

SEQ ID NO: 124285 - DNA, 17 bp, synthetic construct
  source 1..17: mol_type = other DNA
gtgcattgacctgggcc

SEQ ID NO: 124286 - DNA, 17 bp, synthetic construct
  source 1..17: mol_type = other DNA
tgcattgacctgggcct

SEQ ID NO: 124287 - DNA, 17 bp, synthetic construct
  source 1..17: mol_type = other DNA
gcattgacctgggcctg

SEQ ID NO: 124288 - DNA, 17 bp, synthetic construct
  source 1..17: mol_type = other DNA
cattgacctgggcctga

SEQ ID NO: 124289 - DNA, 17 bp, synthetic construct
  source 1..17: mol_type = other DNA
attgacctgggcctgag

SEQ ID NO: 124290 - DNA, 17 bp, synthetic construct
  source 1..17: mol_type = other DNA
ttgacctgggcctgagc

SEQ ID NO: 124291 - DNA, 17 bp, synthetic construct
  source 1..17: mol_type = other DNA
tgacctgggcctgagcc

SEQ ID NO: 124292 - DNA, 17 bp, synthetic construct
  source 1..17: mol_type = other DNA
gacctgggcctgagccg

SEQ ID NO: 124293 - DNA, 17 bp, synthetic construct
  source 1..17: mol_type = other DNA
acctgggcctgagccgc

SEQ ID NO: 124294 - DNA, 17 bp, synthetic construct
  source 1..17: mol_type = other DNA
cctgggcctgagccgca

SEQ ID NO: 124295 - DNA, 17 bp, synthetic construct
  source 1..17: mol_type = other DNA
ctgggcctgagccgcac

SEQ ID NO: 124296 - DNA, 17 bp, synthetic construct
  source 1..17: mol_type = other DNA
tgggcctgagccgcaca

SEQ ID NO: 124297 - DNA, 17 bp, synthetic construct
  source 1..17: mol_type = other DNA
gggcctgagccgcacac

SEQ ID NO: 124298 - DNA, 17 bp, synthetic construct
  source 1..17: mol_type = other DNA
ggcctgagccgcacaca

SEQ ID NO: 124299 - DNA, 17 bp, synthetic construct
  source 1..17: mol_type = other DNA
gcctgagccgcacacag

SEQ ID NO: 124300 - DNA, 17 bp, synthetic construct
  source 1..17: mol_type = other DNA
cctgagccgcacacaga

SEQ ID NO: 124301 - DNA, 17 bp, synthetic construct
  source 1..17: mol_type = other DNA
ctgagccgcacacagac

SEQ ID NO: 124302 - DNA, 17 bp, synthetic construct
  source 1..17: mol_type = other DNA
tgagccgcacacagaca

SEQ ID NO: 124303 - DNA, 17 bp, synthetic construct
  source 1..17: mol_type = other DNA
gagccgcacacagacat

SEQ ID NO: 124304 - DNA, 17 bp, synthetic construct
  source 1..17: mol_type = other DNA
agccgcacacagacatc

SEQ ID NO: 124305 - DNA, 17 bp, synthetic construct
  source 1..17: mol_type = other DNA
gccgcacacagacatcc

SEQ ID NO: 124306 - DNA, 17 bp, synthetic construct
  source 1..17: mol_type = other DNA
ccgcacacagacatcca

SEQ ID NO: 124307 - DNA, 17 bp, synthetic construct
  source 1..17: mol_type = other DNA
cgcacacagacatccaa

SEQ ID NO: 124308 - DNA, 17 bp, synthetic construct
  source 1..17: mol_type = other DNA
gcacacagacatccaac

SEQ ID NO: 124309 - DNA, 17 bp, synthetic construct
  source 1..17: mol_type = other DNA
cacacagacatccaaca

SEQ ID NO: 124310 - DNA, 17 bp, synthetic construct
  source 1..17: mol_type = other DNA
acacagacatccaacac

SEQ ID NO: 124311 - DNA, 17 bp, synthetic construct
  source 1..17: mol_type = other DNA
cacagacatccaacacg

SEQ ID NO: 124312 - DNA, 17 bp, synthetic construct
  source 1..17: mol_type = other DNA
acagacatccaacacgc

SEQ ID NO: 124313 - DNA, 17 bp, synthetic construct
  source 1..17: mol_type = other DNA
cagacatccaacacgca

SEQ ID NO: 124314 - DNA, 17 bp, synthetic construct
  source 1..17: mol_type = other DNA
agacatccaacacgcat

SEQ ID NO: 124315 - DNA, 17 bp, synthetic construct
  source 1..17: mol_type = other DNA
gacatccaacacgcatg

SEQ ID NO: 124316 - DNA, 17 bp, synthetic construct
  source 1..17: mol_type = other DNA
acatccaacacgcatgt

SEQ ID NO: 124317 - DNA, 17 bp, synthetic construct
  source 1..17: mol_type = other DNA
catccaacacgcatgtg

SEQ ID NO: 124318 - DNA, 17 bp, synthetic construct
  source 1..17: mol_type = other DNA
atccaacacgcatgtgc

SEQ ID NO: 124319 - DNA, 17 bp, synthetic construct
  source 1..17: mol_type = other DNA
tccaacacgcatgtgcc

SEQ ID NO: 124320 - DNA, 17 bp, synthetic construct
  source 1..17: mol_type = other DNA
ccaacacgcatgtgcct

SEQ ID NO: 124321 - DNA, 17 bp, synthetic construct
  source 1..17: mol_type = other DNA
caacacgcatgtgcctc

SEQ ID NO: 124322 - DNA, 17 bp, synthetic construct
  source 1..17: mol_type = other DNA
aacacgcatgtgcctcc

SEQ ID NO: 124323 - DNA, 17 bp, synthetic construct
  source 1..17: mol_type = other DNA
acacgcatgtgcctcca

SEQ ID NO: 124324 - DNA, 17 bp, synthetic construct
  source 1..17: mol_type = other DNA
cacgcatgtgcctccat

SEQ ID NO: 124325 - DNA, 17 bp, synthetic construct
  source 1..17: mol_type = other DNA
acgcatgtgcctccatg

SEQ ID NO: 124326 - DNA, 17 bp, synthetic construct
  source 1..17: mol_type = other DNA
cgcatgtgcctccatgt

SEQ ID NO: 124327 - DNA, 17 bp, synthetic construct
  source 1..17: mol_type = other DNA
gcatgtgcctccatgtg

SEQ ID NO: 124328 - DNA, 17 bp, synthetic construct
  source 1..17: mol_type = other DNA
catgtgcctccatgtga

SEQ ID NO: 124329 - DNA, 17 bp, synthetic construct
  source 1..17: mol_type = other DNA
atgtgcctccatgtgag

SEQ ID NO: 124330 - DNA, 17 bp, synthetic construct
  source 1..17: mol_type = other DNA
tgtgcctccatgtgagt

SEQ ID NO: 124331 - DNA, 17 bp, synthetic construct
  source 1..17: mol_type = other DNA
gtgcctccatgtgagtg

SEQ ID NO: 124332 - DNA, 17 bp, synthetic construct
  source 1..17: mol_type = other DNA
tgcctccatgtgagtgc

SEQ ID NO: 124333 - DNA, 17 bp, synthetic construct
  source 1..17: mol_type = other DNA
gcctccatgtgagtgca

SEQ ID NO: 124334 - DNA, 17 bp, synthetic construct
  source 1..17: mol_type = other DNA
cctccatgtgagtgcac

SEQ ID NO: 124335 - DNA, 17 bp, synthetic construct
  source 1..17: mol_type = other DNA
ctccatgtgagtgcaca

SEQ ID NO: 124336 - DNA, 17 bp, synthetic construct
  source 1..17: mol_type = other DNA
tccatgtgagtgcacaa

SEQ ID NO: 124337 - DNA, 17 bp, synthetic construct
  source 1..17: mol_type = other DNA
ccatgtgagtgcacaag

SEQ ID NO: 124338 - DNA, 17 bp, synthetic construct
  source 1..17: mol_type = other DNA
catgtgagtgcacaagt

SEQ ID NO: 124339 - DNA, 17 bp, synthetic construct
  source 1..17: mol_type = other DNA
atgtgagtgcacaagtt

SEQ ID NO: 124340 - DNA, 17 bp, synthetic construct
  source 1..17: mol_type = other DNA
tgtgagtgcacaagttt

SEQ ID NO: 124341 - DNA, 17 bp, synthetic construct
  source 1..17: mol_type = other DNA
gtgagtgcacaagtttc

SEQ ID NO: 124342 - DNA, 17 bp, synthetic construct
  source 1..17: mol_type = other DNA
tgagtgcacaagtttct

SEQ ID NO: 124343 - DNA, 17 bp, synthetic construct
  source 1..17: mol_type = other DNA
gagtgcacaagtttcta

SEQ ID NO: 124344 - DNA, 17 bp, synthetic construct
  source 1..17: mol_type = other DNA
agtgcacaagtttctat

SEQ ID NO: 124345 - DNA, 17 bp, synthetic construct
  source 1..17: mol_type = other DNA
gtgcacaagtttctatg

SEQ ID NO: 124346 - DNA, 17 bp, synthetic construct
  source 1..17: mol_type = other DNA
tgcacaagtttctatgc

SEQ ID NO: 124347 - DNA, 17 bp, synthetic construct
  source 1..17: mol_type = other DNA
gcacaagtttctatgca

SEQ ID NO: 124348 - DNA, 17 bp, synthetic construct
  source 1..17: mol_type = other DNA
cacaagtttctatgcac

SEQ ID NO: 124349 - DNA, 17 bp, synthetic construct
  source 1..17: mol_type = other DNA
acaagtttctatgcaca

SEQ ID NO: 124350 - DNA, 17 bp, synthetic construct
  source 1..17: mol_type = other DNA
caagtttctatgcacag

SEQ ID NO: 124351 - DNA, 17 bp, synthetic construct
  source 1..17: mol_type = other DNA
aagtttctatgcacaga

SEQ ID NO: 124352 - DNA, 17 bp, synthetic construct
  source 1..17: mol_type = other DNA
agtttctatgcacagag

SEQ ID NO: 124353 - DNA, 17 bp, synthetic construct
  source 1..17: mol_type = other DNA
gtttctatgcacagagg

SEQ ID NO: 124354 - DNA, 17 bp, synthetic construct
  source 1..17: mol_type = other DNA
tttctatgcacagagga

SEQ ID NO: 124355 - DNA, 17 bp, synthetic construct
  source 1..17: mol_type = other DNA
ttctatgcacagaggaa

SEQ ID NO: 124356 - DNA, 17 bp, synthetic construct
  source 1..17: mol_type = other DNA
tctatgcacagaggaag

SEQ ID NO: 124357 - DNA, 17 bp, synthetic construct
  source 1..17: mol_type = other DNA
ctatgcacagaggaaga

SEQ ID NO: 124358 - DNA, 17 bp, synthetic construct
  source 1..17: mol_type = other DNA
tatgcacagaggaagac

SEQ ID NO: 124359 - DNA, 17 bp, synthetic construct
  source 1..17: mol_type = other DNA
atgcacagaggaagacc

SEQ ID NO: 124360 - DNA, 17 bp, synthetic construct
  source 1..17: mol_type = other DNA
tgcacagaggaagacct

SEQ ID NO: 124361 - DNA, 17 bp, synthetic construct
  source 1..17: mol_type = other DNA
gcacagaggaagacctg

SEQ ID NO: 124362 - DNA, 17 bp, synthetic construct
  source 1..17: mol_type = other DNA
cacagaggaagacctgt

SEQ ID NO: 124363 - DNA, 17 bp, synthetic construct
  source 1..17: mol_type = other DNA
acagaggaagacctgtg

SEQ ID NO: 124364 - DNA, 17 bp, synthetic construct
  source 1..17: mol_type = other DNA
cagaggaagacctgtgc

SEQ ID NO: 124365 - DNA, 17 bp, synthetic construct
  source 1..17: mol_type = other DNA
agaggaagacctgtgca

SEQ ID NO: 124366 - DNA, 17 bp, synthetic construct
  source 1..17: mol_type = other DNA
gaggaagacctgtgcaa

SEQ ID NO: 124367 - DNA, 17 bp, synthetic construct
  source 1..17: mol_type = other DNA
aggaagacctgtgcaaa

SEQ ID NO: 124368 - DNA, 17 bp, synthetic construct
  source 1..17: mol_type = other DNA
ggaagacctgtgcaaaa

SEQ ID NO: 124369 - DNA, 17 bp, synthetic construct
  source 1..17: mol_type = other DNA
gaagacctgtgcaaaac

SEQ ID NO: 124370 - DNA, 17 bp, synthetic construct
  source 1..17: mol_type = other DNA
aagacctgtgcaaaacc

SEQ ID NO: 124371 - DNA, 17 bp, synthetic construct
  source 1..17: mol_type = other DNA
agacctgtgcaaaacca

SEQ ID NO: 124372 - DNA, 17 bp, synthetic construct
  source 1..17: mol_type = other DNA
gacctgtgcaaaaccac

SEQ ID NO: 124373 - DNA, 17 bp, synthetic construct
  source 1..17: mol_type = other DNA
acctgtgcaaaaccacc

SEQ ID NO: 124374 - DNA, 17 bp, synthetic construct
  source 1..17: mol_type = other DNA
cctgtgcaaaaccacca

SEQ ID NO: 124375 - DNA, 17 bp, synthetic construct
  source 1..17: mol_type = other DNA
ctgtgcaaaaccaccag

SEQ ID NO: 124376 - DNA, 17 bp, synthetic construct
  source 1..17: mol_type = other DNA
tgtgcaaaaccaccaga

SEQ ID NO: 124377 - DNA, 17 bp, synthetic construct
  source 1..17: mol_type = other DNA
gtgcaaaaccaccagac

SEQ ID NO: 124378 - DNA, 17 bp, synthetic construct
  source 1..17: mol_type = other DNA
tgcaaaaccaccagaca

SEQ ID NO: 124379 - DNA, 17 bp, synthetic construct
  source 1..17: mol_type = other DNA
gcaaaaccaccagacag

SEQ ID NO: 124380 - DNA, 17 bp, synthetic construct
  source 1..17: mol_type = other DNA
caaaaccaccagacagg

SEQ ID NO: 124381 - DNA, 17 bp, synthetic construct
  source 1..17: mol_type = other DNA
aaaaccaccagacaggt

SEQ ID NO: 124382 - DNA, 17 bp, synthetic construct
  source 1..17: mol_type = other DNA
aaaccaccagacaggtt

SEQ ID NO: 124383 - DNA, 17 bp, synthetic construct
  source 1..17: mol_type = other DNA
aaccaccagacaggttg

SEQ ID NO: 124384 - DNA, 17 bp, synthetic construct
  source 1..17: mol_type = other DNA
accaccagacaggttgc

SEQ ID NO: 124385 - DNA, 17 bp, synthetic construct
  source 1..17: mol_type = other DNA
ccaccagacaggttgcc

SEQ ID NO: 124386 - DNA, 17 bp, synthetic construct
  source 1..17: mol_type = other DNA
caccagacaggttgccc

SEQ ID NO: 124387 - DNA, 17 bp, synthetic construct
  source 1..17: mol_type = other DNA
accagacaggttgcccc

SEQ ID NO: 124388 - DNA, 17 bp, synthetic construct
  source 1..17: mol_type = other DNA
ccagacaggttgcccca

SEQ ID NO: 124389 - DNA, 17 bp, synthetic construct
  source 1..17: mol_type = other DNA
cagacaggttgccccag

SEQ ID NO: 124390 - DNA, 17 bp, synthetic construct
  source 1..17: mol_type = other DNA
agacaggttgccccagc

SEQ ID NO: 124391 - DNA, 17 bp, synthetic construct
  source 1..17: mol_type = other DNA
gacaggttgccccagca

SEQ ID NO: 124392 - DNA, 17 bp, synthetic construct
  source 1..17: mol_type = other DNA
acaggttgccccagcat

SEQ ID NO: 124393 - DNA, 17 bp, synthetic construct
  source 1..17: mol_type = other DNA
caggttgccccagcatg

SEQ ID NO: 124394 - DNA, 17 bp, synthetic construct
  source 1..17: mol_type = other DNA
aggttgccccagcatga

SEQ ID NO: 124395 - DNA, 17 bp, synthetic construct
  source 1..17: mol_type = other DNA
ggttgccccagcatgag

SEQ ID NO: 124396 - DNA, 17 bp, synthetic construct
  source 1..17: mol_type = other DNA
gttgccccagcatgaga

SEQ ID NO: 124397 - DNA, 17 bp, synthetic construct
  source 1..17: mol_type = other DNA
ttgccccagcatgagac

SEQ ID NO: 124398 - DNA, 17 bp, synthetic construct
  source 1..17: mol_type = other DNA
tgccccagcatgagaca

SEQ ID NO: 124399 - DNA, 17 bp, synthetic construct
  source 1..17: mol_type = other DNA
gccccagcatgagacag

SEQ ID NO: 124400 - DNA, 17 bp, synthetic construct
  source 1..17: mol_type = other DNA
ccccagcatgagacagc

SEQ ID NO: 124401 - DNA, 17 bp, synthetic construct
  source 1..17: mol_type = other DNA
cccagcatgagacagct

SEQ ID NO: 124402 - DNA, 17 bp, synthetic construct
  source 1..17: mol_type = other DNA
ccagcatgagacagctc

SEQ ID NO: 124403 - DNA, 17 bp, synthetic construct
  source 1..17: mol_type = other DNA
cagcatgagacagctcc

SEQ ID NO: 124404 - DNA, 17 bp, synthetic construct
  source 1..17: mol_type = other DNA
agcatgagacagctcct

SEQ ID NO: 124405 - DNA, 17 bp, synthetic construct
  source 1..17: mol_type = other DNA
gcatgagacagctccta

SEQ ID NO: 124406 - DNA, 17 bp, synthetic construct
  source 1..17: mol_type = other DNA
catgagacagctcctag

SEQ ID NO: 124407 - DNA, 17 bp, synthetic construct
  source 1..17: mol_type = other DNA
atgagacagctcctagg

SEQ ID NO: 124408 - DNA, 17 bp, synthetic construct
  source 1..17: mol_type = other DNA
tgagacagctcctaggg

SEQ ID NO: 124409 - DNA, 17 bp, synthetic construct
  source 1..17: mol_type = other DNA
gagacagctcctagggg

SEQ ID NO: 124410 - DNA, 17 bp, synthetic construct
  source 1..17: mol_type = other DNA
agacagctcctagggga

SEQ ID NO: 124411 - DNA, 17 bp, synthetic construct
  source 1..17: mol_type = other DNA
gacagctcctaggggac

SEQ ID NO: 124412 - DNA, 17 bp, synthetic construct
  source 1..17: mol_type = other DNA
acagctcctaggggaca

SEQ ID NO: 124413 - DNA, 17 bp, synthetic construct
  source 1..17: mol_type = other DNA
cagctcctaggggacaa

SEQ ID NO: 124414 - DNA, 17 bp, synthetic construct
  source 1..17: mol_type = other DNA
agctcctaggggacaag

SEQ ID NO: 124415 - DNA, 17 bp, synthetic construct
  source 1..17: mol_type = other DNA
gctcctaggggacaaga

SEQ ID NO: 124416 - DNA, 17 bp, synthetic construct
  source 1..17: mol_type = other DNA
ctcctaggggacaagag

SEQ ID NO: 124417 - DNA, 17 bp, synthetic construct
  source 1..17: mol_type = other DNA
tcctaggggacaagagt

SEQ ID NO: 124418 - DNA, 17 bp, synthetic construct
  source 1..17: mol_type = other DNA
cctaggggacaagagtt

SEQ ID NO: 124419 - DNA, 17 bp, synthetic construct
  source 1..17: mol_type = other DNA
ctaggggacaagagttc

SEQ ID NO: 124420 - DNA, 17 bp, synthetic construct
  source 1..17: mol_type = other DNA
taggggacaagagttcc

SEQ ID NO: 124421 - DNA, 17 bp, synthetic construct
  source 1..17: mol_type = other DNA
aggggacaagagttcca

SEQ ID NO: 124422 - DNA, 17 bp, synthetic construct
  source 1..17: mol_type = other DNA
ggggacaagagttccaa

SEQ ID NO: 124423 - DNA, 17 bp, synthetic construct
  source 1..17: mol_type = other DNA
gggacaagagttccaag

SEQ ID NO: 124424 - DNA, 17 bp, synthetic construct
  source 1..17: mol_type = other DNA
ggacaagagttccaagg

SEQ ID NO: 124425 - DNA, 17 bp, synthetic construct
  source 1..17: mol_type = other DNA
gacaagagttccaaggg

SEQ ID NO: 124426 - DNA, 17 bp, synthetic construct
  source 1..17: mol_type = other DNA
acaagagttccaagggc

SEQ ID NO: 124427 - DNA, 17 bp, synthetic construct
  source 1..17: mol_type = other DNA
caagagttccaagggca

SEQ ID NO: 124428 - DNA, 17 bp, synthetic construct
  source 1..17: mol_type = other DNA
aagagttccaagggcag

SEQ ID NO: 124429 - DNA, 17 bp, synthetic construct
  source 1..17: mol_type = other DNA
agagttccaagggcagg

SEQ ID NO: 124430 - DNA, 17 bp, synthetic construct
  source 1..17: mol_type = other DNA
gagttccaagggcaggg

SEQ ID NO: 124431 - DNA, 17 bp, synthetic construct
  source 1..17: mol_type = other DNA
agttccaagggcagggc

SEQ ID NO: 124432 - DNA, 17 bp, synthetic construct
  source 1..17: mol_type = other DNA
gttccaagggcagggct

SEQ ID NO: 124433 - DNA, 17 bp, synthetic construct
  source 1..17: mol_type = other DNA
ttccaagggcagggctg

SEQ ID NO: 124434 - DNA, 17 bp, synthetic construct
  source 1..17: mol_type = other DNA
tccaagggcagggctgg

SEQ ID NO: 124435 - DNA, 17 bp, synthetic construct
  source 1..17: mol_type = other DNA
ccaagggcagggctggg

SEQ ID NO: 124436 - DNA, 17 bp, synthetic construct
  source 1..17: mol_type = other DNA
caagggcagggctgggg

SEQ ID NO: 124437 - DNA, 17 bp, synthetic construct
  source 1..17: mol_type = other DNA
aagggcagggctgggga

SEQ ID NO: 124438 - DNA, 17 bp, synthetic construct
  source 1..17: mol_type = other DNA
agggcagggctggggag

SEQ ID NO: 124439 - DNA, 17 bp, synthetic construct
  source 1..17: mol_type = other DNA
gggcagggctggggagt

SEQ ID NO: 124440 - DNA, 17 bp, synthetic construct
  source 1..17: mol_type = other DNA
ggcagggctggggagtg

SEQ ID NO: 124441 - DNA, 17 bp, synthetic construct
  source 1..17: mol_type = other DNA
gcagggctggggagtgg

SEQ ID NO: 124442 - DNA, 17 bp, synthetic construct
  source 1..17: mol_type = other DNA
cagggctggggagtgga

SEQ ID NO: 124443 - DNA, 17 bp, synthetic construct
  source 1..17: mol_type = other DNA
agggctggggagtggag

SEQ ID NO: 124444 - DNA, 17 bp, synthetic construct
  source 1..17: mol_type = other DNA
gggctggggagtggagg

SEQ ID NO: 124445 - DNA, 17 bp, synthetic construct
  source 1..17: mol_type = other DNA
ggctggggagtggaggg

SEQ ID NO: 124446 - DNA, 17 bp, synthetic construct
  source 1..17: mol_type = other DNA
gctggggagtggagggg

SEQ ID NO: 124447 - DNA, 17 bp, synthetic construct
  source 1..17: mol_type = other DNA
ctggggagtggagggga

SEQ ID NO: 124448 - DNA, 17 bp, synthetic construct
  source 1..17: mol_type = other DNA
tggggagtggaggggaa

SEQ ID NO: 124449 - DNA, 17 bp, synthetic construct
  source 1..17: mol_type = other DNA
ggggagtggaggggaag

SEQ ID NO: 124450 - DNA, 17 bp, synthetic construct
  source 1..17: mol_type = other DNA
gggagtggaggggaagg

SEQ ID NO: 124451 - DNA, 17 bp, synthetic construct
  source 1..17: mol_type = other DNA
ggagtggaggggaaggt

SEQ ID NO: 124452 - DNA, 17 bp, synthetic construct
  source 1..17: mol_type = other DNA
gagtggaggggaaggtg

SEQ ID NO: 124453 - DNA, 17 bp, synthetic construct
  source 1..17: mol_type = other DNA
agtggaggggaaggtga

SEQ ID NO: 124454 - DNA, 17 bp, synthetic construct
  source 1..17: mol_type = other DNA
gtggaggggaaggtgag

SEQ ID NO: 124455 - DNA, 17 bp, synthetic construct
  source 1..17: mol_type = other DNA
tggaggggaaggtgagg

SEQ ID NO: 124456 - DNA, 17 bp, synthetic construct
  source 1..17: mol_type = other DNA
ggaggggaaggtgaggc

SEQ ID NO: 124457 - DNA, 17 bp, synthetic construct
  source 1..17: mol_type = other DNA
gaggggaaggtgaggca

SEQ ID NO: 124458 - DNA, 17 bp, synthetic construct
  source 1..17: mol_type = other DNA
aggggaaggtgaggcac

SEQ ID NO: 124459 - DNA, 17 bp, synthetic construct
  source 1..17: mol_type = other DNA
ggggaaggtgaggcacc

SEQ ID NO: 124460 - DNA, 17 bp, synthetic construct
  source 1..17: mol_type = other DNA
gggaaggtgaggcacca

SEQ ID NO: 124461 - DNA, 17 bp, synthetic construct
  source 1..17: mol_type = other DNA
ggaaggtgaggcaccac

SEQ ID NO: 124462 - DNA, 17 bp, synthetic construct
  source 1..17: mol_type = other DNA
gaaggtgaggcaccacc

SEQ ID NO: 124463 - DNA, 17 bp, synthetic construct
  source 1..17: mol_type = other DNA
aaggtgaggcaccaccc

SEQ ID NO: 124464 - DNA, 17 bp, synthetic construct
  source 1..17: mol_type = other DNA
aggtgaggcaccacccg

SEQ ID NO: 124465 - DNA, 17 bp, synthetic construct
  source 1..17: mol_type = other DNA
ggtgaggcaccacccgg

SEQ ID NO: 124466 - DNA, 17 bp, synthetic construct
  source 1..17: mol_type = other DNA
gtgaggcaccacccggc

SEQ ID NO: 124467 - DNA, 17 bp, synthetic construct
  source 1..17: mol_type = other DNA
tgaggcaccacccggcc

SEQ ID NO: 124468 - DNA, 17 bp, synthetic construct
  source 1..17: mol_type = other DNA
gaggcaccacccggccg

SEQ ID NO: 124469 - DNA, 17 bp, synthetic construct
  source 1..17: mol_type = other DNA
aggcaccacccggccga

SEQ ID NO: 124470 - DNA, 17 bp, synthetic construct
  source 1..17: mol_type = other DNA
ggcaccacccggccgag

SEQ ID NO: 124471 - DNA, 17 bp, synthetic construct
  source 1..17: mol_type = other DNA
gcaccacccggccgagg

SEQ ID NO: 124472 - DNA, 17 bp, synthetic construct
  source 1..17: mol_type = other DNA
caccacccggccgaggc

SEQ ID NO: 124473 - DNA, 17 bp, synthetic construct
  source 1..17: mol_type = other DNA
accacccggccgaggcc

SEQ ID NO: 124474 - DNA, 17 bp, synthetic construct
  source 1..17: mol_type = other DNA
ccacccggccgaggccc

SEQ ID NO: 124475 - DNA, 17 bp, synthetic construct
  source 1..17: mol_type = other DNA
cacccggccgaggccct

SEQ ID NO: 124476 - DNA, 17 bp, synthetic construct
  source 1..17: mol_type = other DNA
acccggccgaggccctg

SEQ ID NO: 124477 - DNA, 17 bp, synthetic construct
  source 1..17: mol_type = other DNA
cccggccgaggccctgc

SEQ ID NO: 124478 - DNA, 17 bp, synthetic construct
  source 1..17: mol_type = other DNA
ccggccgaggccctgca

SEQ ID NO: 124479 - DNA, 17 bp, synthetic construct
  source 1..17: mol_type = other DNA
cggccgaggccctgcat

SEQ ID NO: 124480 - DNA, 17 bp, synthetic construct
  source 1..17: mol_type = other DNA
ggccgaggccctgcatg

SEQ ID NO: 124481 - DNA, 17 bp, synthetic construct
  source 1..17: mol_type = other DNA
gccgaggccctgcatgt

SEQ ID NO: 124482 - DNA, 17 bp, synthetic construct
  source 1..17: mol_type = other DNA
ccgaggccctgcatgtc

SEQ ID NO: 124483 - DNA, 17 bp, synthetic construct
  source 1..17: mol_type = other DNA
cgaggccctgcatgtct

SEQ ID NO: 124484 - DNA, 17 bp, synthetic construct
  source 1..17: mol_type = other DNA
gaggccctgcatgtctg

SEQ ID NO: 124485 - DNA, 17 bp, synthetic construct
  source 1..17: mol_type = other DNA
aggccctgcatgtctgg

SEQ ID NO: 124486 - DNA, 17 bp, synthetic construct
  source 1..17: mol_type = other DNA
ggccctgcatgtctggg

SEQ ID NO: 124487 - DNA, 17 bp, synthetic construct
  source 1..17: mol_type = other DNA
gccctgcatgtctggga

SEQ ID NO: 124488 - DNA, 17 bp, synthetic construct
  source 1..17: mol_type = other DNA
ccctgcatgtctgggac

SEQ ID NO: 124489 - DNA, 17 bp, synthetic construct
  source 1..17: mol_type = other DNA
cctgcatgtctgggaca

SEQ ID NO: 124490 - DNA, 17 bp, synthetic construct
  source 1..17: mol_type = other DNA
ctgcatgtctgggacaa

SEQ ID NO: 124491 - DNA, 17 bp, synthetic construct
  source 1..17: mol_type = other DNA
tgcatgtctgggacaag

SEQ ID NO: 124492 - DNA, 17 bp, synthetic construct
  source 1..17: mol_type = other DNA
gcatgtctgggacaagc

SEQ ID NO: 124493 - DNA, 17 bp, synthetic construct
  source 1..17: mol_type = other DNA
catgtctgggacaagcc

SEQ ID NO: 124494 - DNA, 17 bp, synthetic construct
  source 1..17: mol_type = other DNA
atgtctgggacaagccc

SEQ ID NO: 124495 - DNA, 17 bp, synthetic construct
  source 1..17: mol_type = other DNA
tgtctgggacaagcccg

SEQ ID NO: 124496 - DNA, 17 bp, synthetic construct
  source 1..17: mol_type = other DNA
gtctgggacaagcccgg

SEQ ID NO: 124497 - DNA, 17 bp, synthetic construct
  source 1..17: mol_type = other DNA
tctgggacaagcccggg

SEQ ID NO: 124498 - DNA, 17 bp, synthetic construct
  source 1..17: mol_type = other DNA
ctgggacaagcccgggt

SEQ ID NO: 124499 - DNA, 17 bp, synthetic construct
  source 1..17: mol_type = other DNA
tgggacaagcccgggtc

SEQ ID NO: 124500 - DNA, 17 bp, synthetic construct
  source 1..17: mol_type = other DNA
gggacaagcccgggtct

SEQ ID NO: 124501 - DNA, 17 bp, synthetic construct
  source 1..17: mol_type = other DNA
ggacaagcccgggtctg

SEQ ID NO: 124502 - DNA, 17 bp, synthetic construct
  source 1..17: mol_type = other DNA
gacaagcccgggtctgg

SEQ ID NO: 124503 - DNA, 17 bp, synthetic construct
  source 1..17: mol_type = other DNA
acaagcccgggtctggc

SEQ ID NO: 124504 - DNA, 17 bp, synthetic construct
  source 1..17: mol_type = other DNA
caagcccgggtctggct

SEQ ID NO: 124505 - DNA, 17 bp, synthetic construct
  source 1..17: mol_type = other DNA
aagcccgggtctggctc

SEQ ID NO: 124506 - DNA, 17 bp, synthetic construct
  source 1..17: mol_type = other DNA
agcccgggtctggctct

SEQ ID NO: 124507 - DNA, 17 bp, synthetic construct
  source 1..17: mol_type = other DNA
gcccgggtctggctctg

SEQ ID NO: 124508 - DNA, 17 bp, synthetic construct
  source 1..17: mol_type = other DNA
cccgggtctggctctgg

SEQ ID NO: 124509 - DNA, 17 bp, synthetic construct
  source 1..17: mol_type = other DNA
ccgggtctggctctggg

SEQ ID NO: 124510 - DNA, 17 bp, synthetic construct
  source 1..17: mol_type = other DNA
cgggtctggctctgggg

SEQ ID NO: 124511 - DNA, 17 bp, synthetic construct
  source 1..17: mol_type = other DNA
gggtctggctctgggga

SEQ ID NO: 124512 - DNA, 17 bp, synthetic construct
  source 1..17: mol_type = other DNA
ggtctggctctggggac

SEQ ID NO: 124513 - DNA, 17 bp, synthetic construct
  source 1..17: mol_type = other DNA
gtctggctctggggaca

SEQ ID NO: 124514 - DNA, 17 bp, synthetic construct
  source 1..17: mol_type = other DNA
tctggctctggggacac

SEQ ID NO: 124515 - DNA, 17 bp, synthetic construct
  source 1..17: mol_type = other DNA
ctggctctggggacacc

SEQ ID NO: 124516 - DNA, 17 bp, synthetic construct
  source 1..17: mol_type = other DNA
tggctctggggacaccg

SEQ ID NO: 124517 - DNA, 17 bp, synthetic construct
  source 1..17: mol_type = other DNA
ggctctggggacaccgg

SEQ ID NO: 124518 - DNA, 17 bp, synthetic construct
  source 1..17: mol_type = other DNA
gctctggggacaccggc

SEQ ID NO: 124519 - DNA, 17 bp, synthetic construct
  source 1..17: mol_type = other DNA
ctctggggacaccggcc

SEQ ID NO: 124520 - DNA, 17 bp, synthetic construct
  source 1..17: mol_type = other DNA
tctggggacaccggccc

SEQ ID NO: 124521 - DNA, 17 bp, synthetic construct
  source 1..17: mol_type = other DNA
ctggggacaccggcccc

SEQ ID NO: 124522 - DNA, 17 bp, synthetic construct
  source 1..17: mol_type = other DNA
tggggacaccggccccc

SEQ ID NO: 124523 - DNA, 17 bp, synthetic construct
  source 1..17: mol_type = other DNA
ggggacaccggccccca

SEQ ID NO: 124524 - DNA, 17 bp, synthetic construct
  source 1..17: mol_type = other DNA
gggacaccggcccccac

SEQ ID NO: 124525 - DNA, 17 bp, synthetic construct
  source 1..17: mol_type = other DNA
ggacaccggcccccacg

SEQ ID NO: 124526 - DNA, 17 bp, synthetic construct
  source 1..17: mol_type = other DNA
gacaccggcccccacgc

SEQ ID NO: 124527 - DNA, 17 bp, synthetic construct
  source 1..17: mol_type = other DNA
acaccggcccccacgcc

SEQ ID NO: 124528 - DNA, 17 bp, synthetic construct
  source 1..17: mol_type = other DNA
caccggcccccacgccc

SEQ ID NO: 124529 - DNA, 17 bp, synthetic construct
  source 1..17: mol_type = other DNA
accggcccccacgcccg

SEQ ID NO: 124530 - DNA, 17 bp, synthetic construct
  source 1..17: mol_type = other DNA
ccggcccccacgcccgg

SEQ ID NO: 124531 - DNA, 17 bp, synthetic construct
  source 1..17: mol_type = other DNA
cggcccccacgcccggg

SEQ ID NO: 124532 - DNA, 17 bp, synthetic construct
  source 1..17: mol_type = other DNA
ggcccccacgcccgggg

SEQ ID NO: 124533 - DNA, 17 bp, synthetic construct
  source 1..17: mol_type = other DNA
gcccccacgcccggggt

SEQ ID NO: 124534 - DNA, 17 bp, synthetic construct
  source 1..17: mol_type = other DNA
cccccacgcccggggta

SEQ ID NO: 124535 - DNA, 17 bp, synthetic construct
  source 1..17: mol_type = other DNA
ccccacgcccggggtag

SEQ ID NO: 124536 - DNA, 17 bp, synthetic construct
  source 1..17: mol_type = other DNA
cccacgcccggggtagg

SEQ ID NO: 124537 - DNA, 17 bp, synthetic construct
  source 1..17: mol_type = other DNA
ccacgcccggggtaggg

SEQ ID NO: 124538 - DNA, 17 bp, synthetic construct
  source 1..17: mol_type = other DNA
cacgcccggggtagggg

SEQ ID NO: 124539 - DNA, 17 bp, synthetic construct
  source 1..17: mol_type = other DNA
acgcccggggtaggggc

SEQ ID NO: 124540 - DNA, 17 bp, synthetic construct
  source 1..17: mol_type = other DNA
cgcccggggtaggggct

SEQ ID NO: 124541 - DNA, 17 bp, synthetic construct
  source 1..17: mol_type = other DNA
gcccggggtaggggctg

SEQ ID NO: 124542 - DNA, 17 bp, synthetic construct
  source 1..17: mol_type = other DNA
cccggggtaggggctgc

SEQ ID NO: 124543 - DNA, 17 bp, synthetic construct
  source 1..17: mol_type = other DNA
ccggggtaggggctgcc

SEQ ID NO: 124544 - DNA, 17 bp, synthetic construct
  source 1..17: mol_type = other DNA
cggggtaggggctgccc

SEQ ID NO: 124545 - DNA, 17 bp, synthetic construct
  source 1..17: mol_type = other DNA
ggggtaggggctgccct

SEQ ID NO: 124546 - DNA, 17 bp, synthetic construct
  source 1..17: mol_type = other DNA
gggtaggggctgccctg

SEQ ID NO: 124547 - DNA, 17 bp, synthetic construct
  source 1..17: mol_type = other DNA
ggtaggggctgccctgc

SEQ ID NO: 124548 - DNA, 17 bp, synthetic construct
  source 1..17: mol_type = other DNA
gtaggggctgccctgca

SEQ ID NO: 124549 - DNA, 17 bp, synthetic construct
  source 1..17: mol_type = other DNA
taggggctgccctgcac

SEQ ID NO: 124550 - DNA, 17 bp, synthetic construct
  source 1..17: mol_type = other DNA
aggggctgccctgcaca

SEQ ID NO: 124551 - DNA, 17 bp, synthetic construct
  source 1..17: mol_type = other DNA
ggggctgccctgcacaa

SEQ ID NO: 124552 - DNA, 17 bp, synthetic construct
  source 1..17: mol_type = other DNA
gggctgccctgcacaac

SEQ ID NO: 124553 - DNA, 17 bp, synthetic construct
  source 1..17: mol_type = other DNA
ggctgccctgcacaaca

SEQ ID NO: 124554 - DNA, 17 bp, synthetic construct
  source 1..17: mol_type = other DNA
gctgccctgcacaacag

SEQ ID NO: 124555 - DNA, 17 bp, synthetic construct
  source 1..17: mol_type = other DNA
ctgccctgcacaacagg

SEQ ID NO: 124556 - DNA, 17 bp, synthetic construct
  source 1..17: mol_type = other DNA
tgccctgcacaacaggg

SEQ ID NO: 124557 - DNA, 17 bp, synthetic construct
  source 1..17: mol_type = other DNA
gccctgcacaacagggg

SEQ ID NO: 124558 - DNA, 17 bp, synthetic construct
  source 1..17: mol_type = other DNA
ccctgcacaacaggggt

SEQ ID NO: 124559 - DNA, 17 bp, synthetic construct
  source 1..17: mol_type = other DNA
cctgcacaacaggggtg

SEQ ID NO: 124560 - DNA, 17 bp, synthetic construct
  source 1..17: mol_type = other DNA
ctgcacaacaggggtga

SEQ ID NO: 124561 - DNA, 17 bp, synthetic construct
  source 1..17: mol_type = other DNA
tgcacaacaggggtgag

SEQ ID NO: 124562 - DNA, 17 bp, synthetic construct
  source 1..17: mol_type = other DNA
gcacaacaggggtgagg

SEQ ID NO: 124563 - DNA, 17 bp, synthetic construct
  source 1..17: mol_type = other DNA
cacaacaggggtgaggg

SEQ ID NO: 124564 - DNA, 17 bp, synthetic construct
  source 1..17: mol_type = other DNA
acaacaggggtgagggc

SEQ ID NO: 124565 - DNA, 17 bp, synthetic construct
  source 1..17: mol_type = other DNA
caacaggggtgagggct

SEQ ID NO: 124566 - DNA, 17 bp, synthetic construct
  source 1..17: mol_type = other DNA
aacaggggtgagggctg

SEQ ID NO: 124567 - DNA, 17 bp, synthetic construct
  source 1..17: mol_type = other DNA
acaggggtgagggctgg

SEQ ID NO: 124568 - DNA, 17 bp, synthetic construct
  source 1..17: mol_type = other DNA
caggggtgagggctggt

SEQ ID NO: 124569 - DNA, 17 bp, synthetic construct
  source 1..17: mol_type = other DNA
aggggtgagggctggtg

SEQ ID NO: 124570 - DNA, 17 bp, synthetic construct
  source 1..17: mol_type = other DNA
ggggtgagggctggtgg

SEQ ID NO: 124571 - DNA, 17 bp, synthetic construct
  source 1..17: mol_type = other DNA
gggtgagggctggtggg

SEQ ID NO: 124572 - DNA, 17 bp, synthetic construct
  source 1..17: mol_type = other DNA
ggtgagggctggtgggc

SEQ ID NO: 124573 - DNA, 17 bp, synthetic construct
  source 1..17: mol_type = other DNA
gtgagggctggtgggcg

SEQ ID NO: 124574 - DNA, 17 bp, synthetic construct
  source 1..17: mol_type = other DNA
tgagggctggtgggcgc

SEQ ID NO: 124575 - DNA, 17 bp, synthetic construct
  source 1..17: mol_type = other DNA
gagggctggtgggcgcc

SEQ ID NO: 124576 - DNA, 17 bp, synthetic construct
  source 1..17: mol_type = other DNA
agggctggtgggcgcct

SEQ ID NO: 124577 - DNA, 17 bp, synthetic construct
  source 1..17: mol_type = other DNA
gggctggtgggcgcctc

SEQ ID NO: 124578 - DNA, 17 bp, synthetic construct
  source 1..17: mol_type = other DNA
ggctggtgggcgcctcc

SEQ ID NO: 124579 - DNA, 17 bp, synthetic construct
  source 1..17: mol_type = other DNA
gctggtgggcgcctcct

SEQ ID NO: 124580 - DNA, 17 bp, synthetic construct
  source 1..17: mol_type = other DNA
ctggtgggcgcctcctt

SEQ ID NO: 124581 - DNA, 17 bp, synthetic construct
  source 1..17: mol_type = other DNA
tggtgggcgcctcctta

SEQ ID NO: 124582 - DNA, 17 bp, synthetic construct
  source 1..17: mol_type = other DNA
ggtgggcgcctccttag

SEQ ID NO: 124583 - DNA, 17 bp, synthetic construct
  source 1..17: mol_type = other DNA
gtgggcgcctccttagc

SEQ ID NO: 124584 - DNA, 17 bp, synthetic construct
  source 1..17: mol_type = other DNA
tgggcgcctccttagcc

SEQ ID NO: 124585 - DNA, 17 bp, synthetic construct
  source 1..17: mol_type = other DNA
gggcgcctccttagcct

SEQ ID NO: 124586 - DNA, 17 bp, synthetic construct
  source 1..17: mol_type = other DNA
ggcgcctccttagcctc

SEQ ID NO: 124587 - DNA, 17 bp, synthetic construct
  source 1..17: mol_type = other DNA
gcgcctccttagcctct

SEQ ID NO: 124588 - DNA, 17 bp, synthetic construct
  source 1..17: mol_type = other DNA
cgcctccttagcctctg

SEQ ID NO: 124589 - DNA, 17 bp, synthetic construct
  source 1..17: mol_type = other DNA
gcctccttagcctctgc

SEQ ID NO: 124590 - DNA, 17 bp, synthetic construct
  source 1..17: mol_type = other DNA
cctccttagcctctgcc

SEQ ID NO: 124591 - DNA, 17 bp, synthetic construct
  source 1..17: mol_type = other DNA
ctccttagcctctgccc

SEQ ID NO: 124592 - DNA, 17 bp, synthetic construct
  source 1..17: mol_type = other DNA
tccttagcctctgccct

SEQ ID NO: 124593 - DNA, 17 bp, synthetic construct
  source 1..17: mol_type = other DNA
ccttagcctctgccctc

SEQ ID NO: 124594 - DNA, 17 bp, synthetic construct
  source 1..17: mol_type = other DNA
cttagcctctgccctct

SEQ ID NO: 124595 - DNA, 17 bp, synthetic construct
  source 1..17: mol_type = other DNA
ttagcctctgccctctg

SEQ ID NO: 124596 - DNA, 17 bp, synthetic construct
  source 1..17: mol_type = other DNA
tagcctctgccctctgt

SEQ ID NO: 124597 - DNA, 17 bp, synthetic construct
  source 1..17: mol_type = other DNA
agcctctgccctctgtg

SEQ ID NO: 124598 - DNA, 17 bp, synthetic construct
  source 1..17: mol_type = other DNA
gcctctgccctctgtgc

SEQ ID NO: 124599 - DNA, 17 bp, synthetic construct
  source 1..17: mol_type = other DNA
cctctgccctctgtgcc

SEQ ID NO: 124600 - DNA, 17 bp, synthetic construct
  source 1..17: mol_type = other DNA
ctctgccctctgtgccc

SEQ ID NO: 124601 - DNA, 17 bp, synthetic construct
  source 1..17: mol_type = other DNA
tctgccctctgtgcccc

SEQ ID NO: 124602 - DNA, 17 bp, synthetic construct
  source 1..17: mol_type = other DNA
ctgccctctgtgcccca

SEQ ID NO: 124603 - DNA, 17 bp, synthetic construct
  source 1..17: mol_type = other DNA
tgccctctgtgccccag

SEQ ID NO: 124604 - DNA, 17 bp, synthetic construct
  source 1..17: mol_type = other DNA
gccctctgtgccccagc

SEQ ID NO: 124605 - DNA, 17 bp, synthetic construct
  source 1..17: mol_type = other DNA
ccctctgtgccccagcc

SEQ ID NO: 124606 - DNA, 17 bp, synthetic construct
  source 1..17: mol_type = other DNA
cctctgtgccccagcct

SEQ ID NO: 124607 - DNA, 17 bp, synthetic construct
  source 1..17: mol_type = other DNA
ctctgtgccccagcctt

SEQ ID NO: 124608 - DNA, 17 bp, synthetic construct
  source 1..17: mol_type = other DNA
tctgtgccccagccttg

SEQ ID NO: 124609 - DNA, 17 bp, synthetic construct
  source 1..17: mol_type = other DNA
ctgtgccccagccttgt

SEQ ID NO: 124610 - DNA, 17 bp, synthetic construct
  source 1..17: mol_type = other DNA
tgtgccccagccttgtt

SEQ ID NO: 124611 - DNA, 17 bp, synthetic construct
  source 1..17: mol_type = other DNA
gtgccccagccttgttc

SEQ ID NO: 124612 - DNA, 17 bp, synthetic construct
  source 1..17: mol_type = other DNA
tgccccagccttgttct

SEQ ID NO: 124613 - DNA, 17 bp, synthetic construct
  source 1..17: mol_type = other DNA
gccccagccttgttctg

SEQ ID NO: 124614 - DNA, 17 bp, synthetic construct
  source 1..17: mol_type = other DNA
ccccagccttgttctgt

SEQ ID NO: 124615 - DNA, 17 bp, synthetic construct
  source 1..17: mol_type = other DNA
cccagccttgttctgtg

SEQ ID NO: 124616 - DNA, 17 bp, synthetic construct
  source 1..17: mol_type = other DNA
ccagccttgttctgtga

SEQ ID NO: 124617 - DNA, 17 bp, synthetic construct
  source 1..17: mol_type = other DNA
cagccttgttctgtgac

SEQ ID NO: 124618 - DNA, 17 bp, synthetic construct
  source 1..17: mol_type = other DNA
agccttgttctgtgact

SEQ ID NO: 124619 - DNA, 17 bp, synthetic construct
  source 1..17: mol_type = other DNA
gccttgttctgtgactt

SEQ ID NO: 124620 - DNA, 17 bp, synthetic construct
  source 1..17: mol_type = other DNA
ccttgttctgtgacttc

SEQ ID NO: 124621 - DNA, 17 bp, synthetic construct
  source 1..17: mol_type = other DNA
cttgttctgtgacttct

SEQ ID NO: 124622 - DNA, 17 bp, synthetic construct
  source 1..17: mol_type = other DNA
ttgttctgtgacttcta

SEQ ID NO: 124623 - DNA, 17 bp, synthetic construct
  source 1..17: mol_type = other DNA
tgttctgtgacttctac

SEQ ID NO: 124624 - DNA, 17 bp, synthetic construct
  source 1..17: mol_type = other DNA
gttctgtgacttctaca

SEQ ID NO: 124625 - DNA, 17 bp, synthetic construct
  source 1..17: mol_type = other DNA
ttctgtgacttctacaa

SEQ ID NO: 124626 - DNA, 17 bp, synthetic construct
  source 1..17: mol_type = other DNA
tctgtgacttctacaac

SEQ ID NO: 124627 - DNA, 17 bp, synthetic construct
  source 1..17: mol_type = other DNA
ctgtgacttctacaacc

SEQ ID NO: 124628 - DNA, 17 bp, synthetic construct
  source 1..17: mol_type = other DNA
tgtgacttctacaaccc

SEQ ID NO: 124629 - DNA, 17 bp, synthetic construct
  source 1..17: mol_type = other DNA
gtgacttctacaaccca

SEQ ID NO: 124630 - DNA, 17 bp, synthetic construct
  source 1..17: mol_type = other DNA
tgacttctacaacccac

SEQ ID NO: 124631 - DNA, 17 bp, synthetic construct
  source 1..17: mol_type = other DNA
gacttctacaacccaca

SEQ ID NO: 124632 - DNA, 17 bp, synthetic construct
  source 1..17: mol_type = other DNA
acttctacaacccacat

SEQ ID NO: 124633 - DNA, 17 bp, synthetic construct
  source 1..17: mol_type = other DNA
cttctacaacccacatg

SEQ ID NO: 124634 - DNA, 17 bp, synthetic construct
  source 1..17: mol_type = other DNA
ttctacaacccacatgg

SEQ ID NO: 124635 - DNA, 17 bp, synthetic construct
  source 1..17: mol_type = other DNA
tctacaacccacatggg

SEQ ID NO: 124636 - DNA, 17 bp, synthetic construct
  source 1..17: mol_type = other DNA
ctacaacccacatgggg

SEQ ID NO: 124637 - DNA, 17 bp, synthetic construct
  source 1..17: mol_type = other DNA
tacaacccacatggggg

SEQ ID NO: 124638 - DNA, 17 bp, synthetic construct
  source 1..17: mol_type = other DNA
acaacccacatgggggc

SEQ ID NO: 124639 - DNA, 17 bp, synthetic construct
  source 1..17: mol_type = other DNA
caacccacatgggggct

SEQ ID NO: 124640 - DNA, 17 bp, synthetic construct
  source 1..17: mol_type = other DNA
aacccacatgggggctg

SEQ ID NO: 124641 - DNA, 17 bp, synthetic construct
  source 1..17: mol_type = other DNA
acccacatgggggctgt

SEQ ID NO: 124642 - DNA, 17 bp, synthetic construct
  source 1..17: mol_type = other DNA
cccacatgggggctgtg

SEQ ID NO: 124643 - DNA, 17 bp, synthetic construct
  source 1..17: mol_type = other DNA
ccacatgggggctgtga

SEQ ID NO: 124644 - DNA, 17 bp, synthetic construct
  source 1..17: mol_type = other DNA
cacatgggggctgtgag

SEQ ID NO: 124645 - DNA, 17 bp, synthetic construct
  source 1..17: mol_type = other DNA
acatgggggctgtgagt

SEQ ID NO: 124646 - DNA, 17 bp, synthetic construct
  source 1..17: mol_type = other DNA
catgggggctgtgagtg

SEQ ID NO: 124647 - DNA, 17 bp, synthetic construct
  source 1..17: mol_type = other DNA
atgggggctgtgagtgg

SEQ ID NO: 124648 - DNA, 17 bp, synthetic construct
  source 1..17: mol_type = other DNA
tgggggctgtgagtggc

SEQ ID NO: 124649 - DNA, 17 bp, synthetic construct
  source 1..17: mol_type = other DNA
gggggctgtgagtggca

SEQ ID NO: 124650 - DNA, 17 bp, synthetic construct
  source 1..17: mol_type = other DNA
ggggctgtgagtggcac

SEQ ID NO: 124651 - DNA, 17 bp, synthetic construct
  source 1..17: mol_type = other DNA
gggctgtgagtggcact

SEQ ID NO: 124652 - DNA, 17 bp, synthetic construct
  source 1..17: mol_type = other DNA
ggctgtgagtggcacta

SEQ ID NO: 124653 - DNA, 17 bp, synthetic construct
  source 1..17: mol_type = other DNA
gctgtgagtggcactac

SEQ ID NO: 124654 - DNA, 17 bp, synthetic construct
  source 1..17: mol_type = other DNA
ctgtgagtggcactacc

SEQ ID NO: 124655 - DNA, 17 bp, synthetic construct
  source 1..17: mol_type = other DNA
tgtgagtggcactacca

SEQ ID NO: 124656 - DNA, 17 bp, synthetic construct
  source 1..17: mol_type = other DNA
gtgagtggcactaccag

SEQ ID NO: 124657 - DNA, 17 bp, synthetic construct
  source 1..17: mol_type = other DNA
tgagtggcactaccagc

SEQ ID NO: 124658 - DNA, 17 bp, synthetic construct
  source 1..17: mol_type = other DNA
gagtggcactaccagcc

SEQ ID NO: 124659 - DNA, 17 bp, synthetic construct
  source 1..17: mol_type = other DNA
agtggcactaccagccc

SEQ ID NO: 124660 - DNA, 17 bp, synthetic construct
  source 1..17: mol_type = other DNA
gtggcactaccagccct

SEQ ID NO: 124661 - DNA, 17 bp, synthetic construct
  source 1..17: mol_type = other DNA
tggcactaccagccctg

SEQ ID NO: 124662 - DNA, 17 bp, synthetic construct
  source 1..17: mol_type = other DNA
ggcactaccagccctgc

SEQ ID NO: 124663 - DNA, 17 bp, synthetic construct
  source 1..17: mol_type = other DNA
gcactaccagccctgcg

SEQ ID NO: 124664 - DNA, 17 bp, synthetic construct
  source 1..17: mol_type = other DNA
cactaccagccctgcgg

SEQ ID NO: 124665 - DNA, 17 bp, synthetic construct
  source 1..17: mol_type = other DNA
actaccagccctgcggg

SEQ ID NO: 124666 - DNA, 17 bp, synthetic construct
  source 1..17: mol_type = other DNA
ctaccagccctgcgggg

SEQ ID NO: 124667 - DNA, 17 bp, synthetic construct
  source 1..17: mol_type = other DNA
taccagccctgcggggc

SEQ ID NO: 124668 - DNA, 17 bp, synthetic construct
  source 1..17: mol_type = other DNA
accagccctgcggggca

SEQ ID NO: 124669 - DNA, 17 bp, synthetic construct
  source 1..17: mol_type = other DNA
ccagccctgcggggcac

SEQ ID NO: 124670 - DNA, 17 bp, synthetic construct
  source 1..17: mol_type = other DNA
cagccctgcggggcacc

SEQ ID NO: 124671 - DNA, 17 bp, synthetic construct
  source 1..17: mol_type = other DNA
agccctgcggggcaccc

SEQ ID NO: 124672 - DNA, 17 bp, synthetic construct
  source 1..17: mol_type = other DNA
gccctgcggggcaccct

SEQ ID NO: 124673 - DNA, 17 bp, synthetic construct
  source 1..17: mol_type = other DNA
ccctgcggggcaccctg

SEQ ID NO: 124674 - DNA, 17 bp, synthetic construct
  source 1..17: mol_type = other DNA
cctgcggggcaccctgc

SEQ ID NO: 124675 - DNA, 17 bp, synthetic construct
  source 1..17: mol_type = other DNA
ctgcggggcaccctgcc

SEQ ID NO: 124676 - DNA, 17 bp, synthetic construct
  source 1..17: mol_type = other DNA
tgcggggcaccctgcct

SEQ ID NO: 124677 - DNA, 17 bp, synthetic construct
  source 1..17: mol_type = other DNA
gcggggcaccctgccta

SEQ ID NO: 124678 - DNA, 17 bp, synthetic construct
  source 1..17: mol_type = other DNA
cggggcaccctgcctaa

SEQ ID NO: 124679 - DNA, 17 bp, synthetic construct
  source 1..17: mol_type = other DNA
ggggcaccctgcctaaa

SEQ ID NO: 124680 - DNA, 17 bp, synthetic construct
  source 1..17: mol_type = other DNA
gggcaccctgcctaaaa

SEQ ID NO: 124681 - DNA, 17 bp, synthetic construct
  source 1..17: mol_type = other DNA
ggcaccctgcctaaaaa

SEQ ID NO: 124682 - DNA, 17 bp, synthetic construct
  source 1..17: mol_type = other DNA
gcaccctgcctaaaaac

SEQ ID NO: 124683 - DNA, 17 bp, synthetic construct
  source 1..17: mol_type = other DNA
caccctgcctaaaaacc

SEQ ID NO: 124684 - DNA, 17 bp, synthetic construct
  source 1..17: mol_type = other DNA
accctgcctaaaaacct

SEQ ID NO: 124685 - DNA, 17 bp, synthetic construct
  source 1..17: mol_type = other DNA
ccctgcctaaaaacctg

SEQ ID NO: 124686 - DNA, 17 bp, synthetic construct
  source 1..17: mol_type = other DNA
cctgcctaaaaacctgc

SEQ ID NO: 124687 - DNA, 17 bp, synthetic construct
  source 1..17: mol_type = other DNA
ctgcctaaaaacctgcc

SEQ ID NO: 124688 - DNA, 17 bp, synthetic construct
  source 1..17: mol_type = other DNA
tgcctaaaaacctgccg

SEQ ID NO: 124689 - DNA, 17 bp, synthetic construct
  source 1..17: mol_type = other DNA
gcctaaaaacctgccgg

SEQ ID NO: 124690 - DNA, 17 bp, synthetic construct
  source 1..17: mol_type = other DNA
cctaaaaacctgccgga

SEQ ID NO: 124691 - DNA, 17 bp, synthetic construct
  source 1..17: mol_type = other DNA
ctaaaaacctgccggaa

SEQ ID NO: 124692 - DNA, 17 bp, synthetic construct
  source 1..17: mol_type = other DNA
taaaaacctgccggaac

SEQ ID NO: 124693 - DNA, 17 bp, synthetic construct
  source 1..17: mol_type = other DNA
aaaaacctgccggaacc

SEQ ID NO: 124694 - DNA, 17 bp, synthetic construct
  source 1..17: mol_type = other DNA
aaaacctgccggaaccc

SEQ ID NO: 124695 - DNA, 17 bp, synthetic construct
  source 1..17: mol_type = other DNA
aaacctgccggaacccc

SEQ ID NO: 124696 - DNA, 17 bp, synthetic construct
  source 1..17: mol_type = other DNA
aacctgccggaacccca

SEQ ID NO: 124697 - DNA, 17 bp, synthetic construct
  source 1..17: mol_type = other DNA
acctgccggaaccccag

SEQ ID NO: 124698 - DNA, 17 bp, synthetic construct
  source 1..17: mol_type = other DNA
cctgccggaaccccagt

SEQ ID NO: 124699 - DNA, 17 bp, synthetic construct
  source 1..17: mol_type = other DNA
ctgccggaaccccagtg

SEQ ID NO: 124700 - DNA, 17 bp, synthetic construct
  source 1..17: mol_type = other DNA
tgccggaaccccagtgg

SEQ ID NO: 124701 - DNA, 17 bp, synthetic construct
  source 1..17: mol_type = other DNA
gccggaaccccagtggg

SEQ ID NO: 124702 - DNA, 17 bp, synthetic construct
  source 1..17: mol_type = other DNA
ccggaaccccagtgggc

SEQ ID NO: 124703 - DNA, 17 bp, synthetic construct
  source 1..17: mol_type = other DNA
cggaaccccagtgggca

SEQ ID NO: 124704 - DNA, 17 bp, synthetic construct
  source 1..17: mol_type = other DNA
ggaaccccagtgggcac

SEQ ID NO: 124705 - DNA, 17 bp, synthetic construct
  source 1..17: mol_type = other DNA
gaaccccagtgggcact

SEQ ID NO: 124706 - DNA, 17 bp, synthetic construct
  source 1..17: mol_type = other DNA
aaccccagtgggcactg

SEQ ID NO: 124707 - DNA, 17 bp, synthetic construct
  source 1..17: mol_type = other DNA
accccagtgggcactgc

SEQ ID NO: 124708 - DNA, 17 bp, synthetic construct
  source 1..17: mol_type = other DNA
ccccagtgggcactgcc

SEQ ID NO: 124709 - DNA, 17 bp, synthetic construct
  source 1..17: mol_type = other DNA
cccagtgggcactgcct

SEQ ID NO: 124710 - DNA, 17 bp, synthetic construct
  source 1..17: mol_type = other DNA
ccagtgggcactgcctg

SEQ ID NO: 124711 - DNA, 17 bp, synthetic construct
  source 1..17: mol_type = other DNA
cagtgggcactgcctgg

SEQ ID NO: 124712 - DNA, 17 bp, synthetic construct
  source 1..17: mol_type = other DNA
agtgggcactgcctggt

SEQ ID NO: 124713 - DNA, 17 bp, synthetic construct
  source 1..17: mol_type = other DNA
gtgggcactgcctggtg

SEQ ID NO: 124714 - DNA, 17 bp, synthetic construct
  source 1..17: mol_type = other DNA
tgggcactgcctggtgg

SEQ ID NO: 124715 - DNA, 17 bp, synthetic construct
  source 1..17: mol_type = other DNA
gggcactgcctggtgga

SEQ ID NO: 124716 - DNA, 17 bp, synthetic construct
  source 1..17: mol_type = other DNA
ggcactgcctggtggac

SEQ ID NO: 124717 - DNA, 17 bp, synthetic construct
  source 1..17: mol_type = other DNA
gcactgcctggtggacc

SEQ ID NO: 124718 - DNA, 17 bp, synthetic construct
  source 1..17: mol_type = other DNA
cactgcctggtggacct

SEQ ID NO: 124719 - DNA, 17 bp, synthetic construct
  source 1..17: mol_type = other DNA
actgcctggtggacctg

SEQ ID NO: 124720 - DNA, 17 bp, synthetic construct
  source 1..17: mol_type = other DNA
ctgcctggtggacctgc

SEQ ID NO: 124721 - DNA, 17 bp, synthetic construct
  source 1..17: mol_type = other DNA
tgcctggtggacctgcc

SEQ ID NO: 124722 - DNA, 17 bp, synthetic construct
  source 1..17: mol_type = other DNA
gcctggtggacctgcct

SEQ ID NO: 124723 - DNA, 17 bp, synthetic construct
  source 1..17: mol_type = other DNA
cctggtggacctgcctg

SEQ ID NO: 124724 - DNA, 17 bp, synthetic construct
  source 1..17: mol_type = other DNA
ctggtggacctgcctgg

SEQ ID NO: 124725 - DNA, 17 bp, synthetic construct
  source 1..17: mol_type = other DNA
tggtggacctgcctggc

SEQ ID NO: 124726 - DNA, 17 bp, synthetic construct
  source 1..17: mol_type = other DNA
ggtggacctgcctggcc

SEQ ID NO: 124727 - DNA, 17 bp, synthetic construct
  source 1..17: mol_type = other DNA
gtggacctgcctggcct

SEQ ID NO: 124728 - DNA, 17 bp, synthetic construct
  source 1..17: mol_type = other DNA
tggacctgcctggcctg

SEQ ID NO: 124729 - DNA, 17 bp, synthetic construct
  source 1..17: mol_type = other DNA
ggacctgcctggcctgg

SEQ ID NO: 124730 - DNA, 17 bp, synthetic construct
  source 1..17: mol_type = other DNA
gacctgcctggcctgga

SEQ ID NO: 124731 - DNA, 17 bp, synthetic construct
  source 1..17: mol_type = other DNA
acctgcctggcctggaa

SEQ ID NO: 124732 - DNA, 17 bp, synthetic construct
  source 1..17: mol_type = other DNA
cctgcctggcctggaag

SEQ ID NO: 124733 - DNA, 17 bp, synthetic construct
  source 1..17: mol_type = other DNA
ctgcctggcctggaagg

SEQ ID NO: 124734 - DNA, 17 bp, synthetic construct
  source 1..17: mol_type = other DNA
tgcctggcctggaaggt

SEQ ID NO: 124735 - DNA, 17 bp, synthetic construct
  source 1..17: mol_type = other DNA
gcctggcctggaaggtg

SEQ ID NO: 124736 - DNA, 17 bp, synthetic construct
  source 1..17: mol_type = other DNA
cctggcctggaaggtga

SEQ ID NO: 124737 - DNA, 17 bp, synthetic construct
  source 1..17: mol_type = other DNA
ctggcctggaaggtgag

SEQ ID NO: 124738 - DNA, 17 bp, synthetic construct
  source 1..17: mol_type = other DNA
tggcctggaaggtgagg

SEQ ID NO: 124739 - DNA, 17 bp, synthetic construct
  source 1..17: mol_type = other DNA
ggcctggaaggtgaggg

SEQ ID NO: 124740 - DNA, 17 bp, synthetic construct
  source 1..17: mol_type = other DNA
gcctggaaggtgagggg

SEQ ID NO: 124741 - DNA, 17 bp, synthetic construct
  source 1..17: mol_type = other DNA
cctggaaggtgaggggc

SEQ ID NO: 124742 - DNA, 17 bp, synthetic construct
  source 1..17: mol_type = other DNA
ctggaaggtgaggggca

SEQ ID NO: 124743 - DNA, 17 bp, synthetic construct
  source 1..17: mol_type = other DNA
tggaaggtgaggggcag

SEQ ID NO: 124744 - DNA, 17 bp, synthetic construct
  source 1..17: mol_type = other DNA
ggaaggtgaggggcagc

SEQ ID NO: 124745 - DNA, 17 bp, synthetic construct
  source 1..17: mol_type = other DNA
gaaggtgaggggcagcc

SEQ ID NO: 124746 - DNA, 17 bp, synthetic construct
  source 1..17: mol_type = other DNA
aaggtgaggggcagcct

SEQ ID NO: 124747 - DNA, 17 bp, synthetic construct
  source 1..17: mol_type = other DNA
aggtgaggggcagcctt

SEQ ID NO: 124748 - DNA, 17 bp, synthetic construct
  source 1..17: mol_type = other DNA
ggtgaggggcagccttt

SEQ ID NO: 124749 - DNA, 17 bp, synthetic construct
  source 1..17: mol_type = other DNA
gtgaggggcagcctttc

SEQ ID NO: 124750 - DNA, 17 bp, synthetic construct
  source 1..17: mol_type = other DNA
tgaggggcagcctttct

SEQ ID NO: 124751 - DNA, 17 bp, synthetic construct
  source 1..17: mol_type = other DNA
gaggggcagcctttctt

SEQ ID NO: 124752 - DNA, 17 bp, synthetic construct
  source 1..17: mol_type = other DNA
aggggcagcctttcttg

SEQ ID NO: 124753 - DNA, 17 bp, synthetic construct
  source 1..17: mol_type = other DNA
ggggcagcctttcttgg

SEQ ID NO: 124754 - DNA, 17 bp, synthetic construct
  source 1..17: mol_type = other DNA
gggcagcctttcttgga

SEQ ID NO: 124755 - DNA, 17 bp, synthetic construct
  source 1..17: mol_type = other DNA
ggcagcctttcttggat

SEQ ID NO: 124756 - DNA, 17 bp, synthetic construct
  source 1..17: mol_type = other DNA
gcagcctttcttggatg

SEQ ID NO: 124757 - DNA, 17 bp, synthetic construct
  source 1..17: mol_type = other DNA
cagcctttcttggatgg

SEQ ID NO: 124758 - DNA, 17 bp, synthetic construct
  source 1..17: mol_type = other DNA
agcctttcttggatgga

SEQ ID NO: 124759 - DNA, 17 bp, synthetic construct
  source 1..17: mol_type = other DNA
gcctttcttggatggag

SEQ ID NO: 124760 - DNA, 17 bp, synthetic construct
  source 1..17: mol_type = other DNA
cctttcttggatggagc

SEQ ID NO: 124761 - DNA, 17 bp, synthetic construct
  source 1..17: mol_type = other DNA
ctttcttggatggagcc

SEQ ID NO: 124762 - DNA, 17 bp, synthetic construct
  source 1..17: mol_type = other DNA
tttcttggatggagcct

SEQ ID NO: 124763 - DNA, 17 bp, synthetic construct
  source 1..17: mol_type = other DNA
ttcttggatggagcctc

SEQ ID NO: 124764 - DNA, 17 bp, synthetic construct
  source 1..17: mol_type = other DNA
tcttggatggagcctcc

SEQ ID NO: 124765 - DNA, 17 bp, synthetic construct
  source 1..17: mol_type = other DNA
cttggatggagcctcct

SEQ ID NO: 124766 - DNA, 17 bp, synthetic construct
  source 1..17: mol_type = other DNA
ttggatggagcctcctc

SEQ ID NO: 124767 - DNA, 17 bp, synthetic construct
  source 1..17: mol_type = other DNA
tggatggagcctcctct

SEQ ID NO: 124768 - DNA, 17 bp, synthetic construct
  source 1..17: mol_type = other DNA
ggatggagcctcctctc

SEQ ID NO: 124769 - DNA, 17 bp, synthetic construct
  source 1..17: mol_type = other DNA
gatggagcctcctctcc

SEQ ID NO: 124770 - DNA, 17 bp, synthetic construct
  source 1..17: mol_type = other DNA
atggagcctcctctcct

SEQ ID NO: 124771 - DNA, 17 bp, synthetic construct
  source 1..17: mol_type = other DNA
tggagcctcctctcctt

SEQ ID NO: 124772 - DNA, 17 bp, synthetic construct
  source 1..17: mol_type = other DNA
ggagcctcctctccttg

SEQ ID NO: 124773 - DNA, 17 bp, synthetic construct
  source 1..17: mol_type = other DNA
gagcctcctctccttgg

SEQ ID NO: 124774 - DNA, 17 bp, synthetic construct
  source 1..17: mol_type = other DNA
agcctcctctccttggg

SEQ ID NO: 124775 - DNA, 17 bp, synthetic construct
  source 1..17: mol_type = other DNA
gcctcctctccttgggt

SEQ ID NO: 124776 - DNA, 17 bp, synthetic construct
  source 1..17: mol_type = other DNA
cctcctctccttgggtt

SEQ ID NO: 124777 - DNA, 17 bp, synthetic construct
  source 1..17: mol_type = other DNA
ctcctctccttgggttc

SEQ ID NO: 124778 - DNA, 17 bp, synthetic construct
  source 1..17: mol_type = other DNA
tcctctccttgggttcc

SEQ ID NO: 124779 - DNA, 17 bp, synthetic construct
  source 1..17: mol_type = other DNA
cctctccttgggttccc

SEQ ID NO: 124780 - DNA, 17 bp, synthetic construct
  source 1..17: mol_type = other DNA
ctctccttgggttcccg

SEQ ID NO: 124781 - DNA, 17 bp, synthetic construct
  source 1..17: mol_type = other DNA
tctccttgggttcccga

SEQ ID NO: 124782 - DNA, 17 bp, synthetic construct
  source 1..17: mol_type = other DNA
ctccttgggttcccgag

SEQ ID NO: 124783 - DNA, 17 bp, synthetic construct
  source 1..17: mol_type = other DNA
tccttgggttcccgagt

SEQ ID NO: 124784 - DNA, 17 bp, synthetic construct
  source 1..17: mol_type = other DNA
ccttgggttcccgagtg

SEQ ID NO: 124785 - DNA, 17 bp, synthetic construct
  source 1..17: mol_type = other DNA
cttgggttcccgagtgt

SEQ ID NO: 124786 - DNA, 17 bp, synthetic construct
  source 1..17: mol_type = other DNA
ttgggttcccgagtgta

SEQ ID NO: 124787 - DNA, 17 bp, synthetic construct
  source 1..17: mol_type = other DNA
tgggttcccgagtgtac

SEQ ID NO: 124788 - DNA, 17 bp, synthetic construct
  source 1..17: mol_type = other DNA
gggttcccgagtgtacg

SEQ ID NO: 124789 - DNA, 17 bp, synthetic construct
  source 1..17: mol_type = other DNA
ggttcccgagtgtacgt

SEQ ID NO: 124790 - DNA, 17 bp, synthetic construct
  source 1..17: mol_type = other DNA
gttcccgagtgtacgtg

SEQ ID NO: 124791 - DNA, 17 bp, synthetic construct
  source 1..17: mol_type = other DNA
ttcccgagtgtacgtgg

SEQ ID NO: 124792 - DNA, 17 bp, synthetic construct
  source 1..17: mol_type = other DNA
tcccgagtgtacgtggg

SEQ ID NO: 124793 - DNA, 17 bp, synthetic construct
  source 1..17: mol_type = other DNA
cccgagtgtacgtgggg

SEQ ID NO: 124794 - DNA, 17 bp, synthetic construct
  source 1..17: mol_type = other DNA
ccgagtgtacgtggggg

SEQ ID NO: 124795 - DNA, 17 bp, synthetic construct
  source 1..17: mol_type = other DNA
cgagtgtacgtgggggg

SEQ ID NO: 124796 - DNA, 17 bp, synthetic construct
  source 1..17: mol_type = other DNA
gagtgtacgtggggggg

SEQ ID NO: 124797 - DNA, 17 bp, synthetic construct
  source 1..17: mol_type = other DNA
agtgtacgtgggggggc

SEQ ID NO: 124798 - DNA, 17 bp, synthetic construct
  source 1..17: mol_type = other DNA
gtgtacgtgggggggcg

SEQ ID NO: 124799 - DNA, 17 bp, synthetic construct
  source 1..17: mol_type = other DNA
tgtacgtgggggggcgg

SEQ ID NO: 124800 - DNA, 17 bp, synthetic construct
  source 1..17: mol_type = other DNA
gtacgtgggggggcggg

SEQ ID NO: 124801 - DNA, 17 bp, synthetic construct
  source 1..17: mol_type = other DNA
tacgtgggggggcgggg

SEQ ID NO: 124802 - DNA, 17 bp, synthetic construct
  source 1..17: mol_type = other DNA
acgtgggggggcgggga

SEQ ID NO: 124803 - DNA, 17 bp, synthetic construct
  source 1..17: mol_type = other DNA
cgtgggggggcggggat

SEQ ID NO: 124804 - DNA, 17 bp, synthetic construct
  source 1..17: mol_type = other DNA
gtgggggggcggggatc

SEQ ID NO: 124805 - DNA, 17 bp, synthetic construct
  source 1..17: mol_type = other DNA
tgggggggcggggatcc

SEQ ID NO: 124806 - DNA, 17 bp, synthetic construct
  source 1..17: mol_type = other DNA
gggggggcggggatccc

SEQ ID NO: 124807 - DNA, 17 bp, synthetic construct
  source 1..17: mol_type = other DNA
ggggggcggggatcccc

SEQ ID NO: 124808 - DNA, 17 bp, synthetic construct
  source 1..17: mol_type = other DNA
gggggcggggatcccca

SEQ ID NO: 124809 - DNA, 17 bp, synthetic construct
  source 1..17: mol_type = other DNA
ggggcggggatccccag

SEQ ID NO: 124810 - DNA, 17 bp, synthetic construct
  source 1..17: mol_type = other DNA
gggcggggatccccagg

SEQ ID NO: 124811 - DNA, 17 bp, synthetic construct
  source 1..17: mol_type = other DNA
ggcggggatccccaggg

SEQ ID NO: 124812 - DNA, 17 bp, synthetic construct
  source 1..17: mol_type = other DNA
gcggggatccccaggga

SEQ ID NO: 124813 - DNA, 17 bp, synthetic construct
  source 1..17: mol_type = other DNA
cggggatccccagggac

SEQ ID NO: 124814 - DNA, 17 bp, synthetic construct
  source 1..17: mol_type = other DNA
ggggatccccagggacg

SEQ ID NO: 124815 - DNA, 17 bp, synthetic construct
  source 1..17: mol_type = other DNA
gggatccccagggacgc

SEQ ID NO: 124816 - DNA, 17 bp, synthetic construct
  source 1..17: mol_type = other DNA
ggatccccagggacgcg

SEQ ID NO: 124817 - DNA, 17 bp, synthetic construct
  source 1..17: mol_type = other DNA
gatccccagggacgcgg

SEQ ID NO: 124818 - DNA, 17 bp, synthetic construct
  source 1..17: mol_type = other DNA
atccccagggacgcggt

SEQ ID NO: 124819 - DNA, 17 bp, synthetic construct
  source 1..17: mol_type = other DNA
tccccagggacgcggtg

SEQ ID NO: 124820 - DNA, 17 bp, synthetic construct
  source 1..17: mol_type = other DNA
ccccagggacgcggtgt

SEQ ID NO: 124821 - DNA, 17 bp, synthetic construct
  source 1..17: mol_type = other DNA
cccagggacgcggtgta

SEQ ID NO: 124822 - DNA, 17 bp, synthetic construct
  source 1..17: mol_type = other DNA
ccagggacgcggtgtag

SEQ ID NO: 124823 - DNA, 17 bp, synthetic construct
  source 1..17: mol_type = other DNA
cagggacgcggtgtagg

SEQ ID NO: 124824 - DNA, 17 bp, synthetic construct
  source 1..17: mol_type = other DNA
agggacgcggtgtaggc

SEQ ID NO: 124825 - DNA, 17 bp, synthetic construct
  source 1..17: mol_type = other DNA
gggacgcggtgtaggct

SEQ ID NO: 124826 - DNA, 17 bp, synthetic construct
  source 1..17: mol_type = other DNA
ggacgcggtgtaggctc

SEQ ID NO: 124827 - DNA, 17 bp, synthetic construct
  source 1..17: mol_type = other DNA
gacgcggtgtaggctcc

SEQ ID NO: 124828 - DNA, 17 bp, synthetic construct
  source 1..17: mol_type = other DNA
acgcggtgtaggctccc

SEQ ID NO: 124829 - DNA, 17 bp, synthetic construct
  source 1..17: mol_type = other DNA
cgcggtgtaggctcccg

SEQ ID NO: 124830 - DNA, 17 bp, synthetic construct
  source 1..17: mol_type = other DNA
gcggtgtaggctcccgt

SEQ ID NO: 124831 - DNA, 17 bp, synthetic construct
  source 1..17: mol_type = other DNA
cggtgtaggctcccgta

SEQ ID NO: 124832 - DNA, 17 bp, synthetic construct
  source 1..17: mol_type = other DNA
ggtgtaggctcccgtaa

SEQ ID NO: 124833 - DNA, 17 bp, synthetic construct
  source 1..17: mol_type = other DNA
gtgtaggctcccgtaaa

SEQ ID NO: 124834 - DNA, 17 bp, synthetic construct
  source 1..17: mol_type = other DNA
tgtaggctcccgtaaac

SEQ ID NO: 124835 - DNA, 17 bp, synthetic construct
  source 1..17: mol_type = other DNA
gtaggctcccgtaaact

SEQ ID NO: 124836 - DNA, 17 bp, synthetic construct
  source 1..17: mol_type = other DNA
taggctcccgtaaactg

SEQ ID NO: 124837 - DNA, 17 bp, synthetic construct
  source 1..17: mol_type = other DNA
aggctcccgtaaactgc

SEQ ID NO: 124838 - DNA, 17 bp, synthetic construct
  source 1..17: mol_type = other DNA
ggctcccgtaaactgca

SEQ ID NO: 124839 - DNA, 17 bp, synthetic construct
  source 1..17: mol_type = other DNA
gctcccgtaaactgcac

SEQ ID NO: 124840 - DNA, 17 bp, synthetic construct
  source 1..17: mol_type = other DNA
ctcccgtaaactgcaca

SEQ ID NO: 124841 - DNA, 17 bp, synthetic construct
  source 1..17: mol_type = other DNA
tcccgtaaactgcacaa

SEQ ID NO: 124842 - DNA, 17 bp, synthetic construct
  source 1..17: mol_type = other DNA
cccgtaaactgcacaat

SEQ ID NO: 124843 - DNA, 17 bp, synthetic construct
  source 1..17: mol_type = other DNA
ccgtaaactgcacaatg

SEQ ID NO: 124844 - DNA, 17 bp, synthetic construct
  source 1..17: mol_type = other DNA
cgtaaactgcacaatgc

SEQ ID NO: 124845 - DNA, 17 bp, synthetic construct
  source 1..17: mol_type = other DNA
gtaaactgcacaatgca

SEQ ID NO: 124846 - DNA, 17 bp, synthetic construct
  source 1..17: mol_type = other DNA
taaactgcacaatgcaa

SEQ ID NO: 124847 - DNA, 17 bp, synthetic construct
  source 1..17: mol_type = other DNA
aaactgcacaatgcaag

SEQ ID NO: 124848 - DNA, 17 bp, synthetic construct
  source 1..17: mol_type = other DNA
aactgcacaatgcaagc

SEQ ID NO: 124849 - DNA, 17 bp, synthetic construct
  source 1..17: mol_type = other DNA
actgcacaatgcaagcc

SEQ ID NO: 124850 - DNA, 17 bp, synthetic construct
  source 1..17: mol_type = other DNA
ctgcacaatgcaagcct

SEQ ID NO: 124851 - DNA, 17 bp, synthetic construct
  source 1..17: mol_type = other DNA
tgcacaatgcaagcctt

SEQ ID NO: 124852 - DNA, 17 bp, synthetic construct
  source 1..17: mol_type = other DNA
gcacaatgcaagccttg

SEQ ID NO: 124853 - DNA, 17 bp, synthetic construct
  source 1..17: mol_type = other DNA
cacaatgcaagccttga

SEQ ID NO: 124854 - DNA, 17 bp, synthetic construct
  source 1..17: mol_type = other DNA
acaatgcaagccttgag

SEQ ID NO: 124855 - DNA, 17 bp, synthetic construct
  source 1..17: mol_type = other DNA
caatgcaagccttgagg

SEQ ID NO: 124856 - DNA, 17 bp, synthetic construct
  source 1..17: mol_type = other DNA
aatgcaagccttgaggg

SEQ ID NO: 124857 - DNA, 17 bp, synthetic construct
  source 1..17: mol_type = other DNA
atgcaagccttgagggc

SEQ ID NO: 124858 - DNA, 17 bp, synthetic construct
  source 1..17: mol_type = other DNA
tgcaagccttgagggca

SEQ ID NO: 124859 - DNA, 17 bp, synthetic construct
  source 1..17: mol_type = other DNA
gcaagccttgagggcag

SEQ ID NO: 124860 - DNA, 17 bp, synthetic construct
  source 1..17: mol_type = other DNA
caagccttgagggcagg

SEQ ID NO: 124861 - DNA, 17 bp, synthetic construct
  source 1..17: mol_type = other DNA
aagccttgagggcaggc

SEQ ID NO: 124862 - DNA, 17 bp, synthetic construct
  source 1..17: mol_type = other DNA
agccttgagggcaggcc

SEQ ID NO: 124863 - DNA, 17 bp, synthetic construct
  source 1..17: mol_type = other DNA
gccttgagggcaggccc

SEQ ID NO: 124864 - DNA, 17 bp, synthetic construct
  source 1..17: mol_type = other DNA
ccttgagggcaggcccc

SEQ ID NO: 124865 - DNA, 17 bp, synthetic construct
  source 1..17: mol_type = other DNA
cttgagggcaggcccct

SEQ ID NO: 124866 - DNA, 17 bp, synthetic construct
  source 1..17: mol_type = other DNA
ttgagggcaggcccctg

SEQ ID NO: 124867 - DNA, 17 bp, synthetic construct
  source 1..17: mol_type = other DNA
tgagggcaggcccctgc

SEQ ID NO: 124868 - DNA, 17 bp, synthetic construct
  source 1..17: mol_type = other DNA
gagggcaggcccctgct

SEQ ID NO: 124869 - DNA, 17 bp, synthetic construct
  source 1..17: mol_type = other DNA
agggcaggcccctgctg

SEQ ID NO: 124870 - DNA, 17 bp, synthetic construct
  source 1..17: mol_type = other DNA
gggcaggcccctgctgg

SEQ ID NO: 124871 - DNA, 17 bp, synthetic construct
  source 1..17: mol_type = other DNA
ggcaggcccctgctggc

SEQ ID NO: 124872 - DNA, 17 bp, synthetic construct
  source 1..17: mol_type = other DNA
gcaggcccctgctggct

SEQ ID NO: 124873 - DNA, 17 bp, synthetic construct
  source 1..17: mol_type = other DNA
caggcccctgctggctg

SEQ ID NO: 124874 - DNA, 17 bp, synthetic construct
  source 1..17: mol_type = other DNA
aggcccctgctggctgg

SEQ ID NO: 124875 - DNA, 17 bp, synthetic construct
  source 1..17: mol_type = other DNA
ggcccctgctggctggt

SEQ ID NO: 124876 - DNA, 17 bp, synthetic construct
  source 1..17: mol_type = other DNA
gcccctgctggctggtg

SEQ ID NO: 124877 - DNA, 17 bp, synthetic construct
  source 1..17: mol_type = other DNA
cccctgctggctggtgg

SEQ ID NO: 124878 - DNA, 17 bp, synthetic construct
  source 1..17: mol_type = other DNA
ccctgctggctggtggg

SEQ ID NO: 124879 - DNA, 17 bp, synthetic construct
  source 1..17: mol_type = other DNA
cctgctggctggtgggg

SEQ ID NO: 124880 - DNA, 17 bp, synthetic construct
  source 1..17: mol_type = other DNA
ctgctggctggtggggg

SEQ ID NO: 124881 - DNA, 17 bp, synthetic construct
  source 1..17: mol_type = other DNA
tgctggctggtgggggg

SEQ ID NO: 124882 - DNA, 17 bp, synthetic construct
  source 1..17: mol_type = other DNA
gctggctggtggggggc

SEQ ID NO: 124883 - DNA, 17 bp, synthetic construct
  source 1..17: mol_type = other DNA
ctggctggtggggggcg

SEQ ID NO: 124884 - DNA, 17 bp, synthetic construct
  source 1..17: mol_type = other DNA
tggctggtggggggcgg

SEQ ID NO: 124885 - DNA, 17 bp, synthetic construct
  source 1..17: mol_type = other DNA
ggctggtggggggcggc

SEQ ID NO: 124886 - DNA, 17 bp, synthetic construct
  source 1..17: mol_type = other DNA
gctggtggggggcggct

SEQ ID NO: 124887 - DNA, 17 bp, synthetic construct
  source 1..17: mol_type = other DNA
ctggtggggggcggcta

SEQ ID NO: 124888 - DNA, 17 bp, synthetic construct
  source 1..17: mol_type = other DNA
tggtggggggcggctac

SEQ ID NO: 124889 - DNA, 17 bp, synthetic construct
  source 1..17: mol_type = other DNA
ggtggggggcggctact

SEQ ID NO: 124890 - DNA, 17 bp, synthetic construct
  source 1..17: mol_type = other DNA
gtggggggcggctactc

SEQ ID NO: 124891 - DNA, 17 bp, synthetic construct
  source 1..17: mol_type = other DNA
tggggggcggctactcc

SEQ ID NO: 124892 - DNA, 17 bp, synthetic construct
  source 1..17: mol_type = other DNA
ggggggcggctactccc

SEQ ID NO: 124893 - DNA, 17 bp, synthetic construct
  source 1..17: mol_type = other DNA
gggggcggctactccct

SEQ ID NO: 124894 - DNA, 17 bp, synthetic construct
  source 1..17: mol_type = other DNA
ggggcggctactccctg

SEQ ID NO: 124895 - DNA, 17 bp, synthetic construct
  source 1..17: mol_type = other DNA
gggcggctactccctgc

SEQ ID NO: 124896 - DNA, 17 bp, synthetic construct
  source 1..17: mol_type = other DNA
ggcggctactccctgca

SEQ ID NO: 124897 - DNA, 17 bp, synthetic construct
  source 1..17: mol_type = other DNA
gcggctactccctgcag

SEQ ID NO: 124898 - DNA, 17 bp, synthetic construct
  source 1..17: mol_type = other DNA
cggctactccctgcagc

SEQ ID NO: 124899 - DNA, 17 bp, synthetic construct
  source 1..17: mol_type = other DNA
ggctactccctgcagca

SEQ ID NO: 124900 - DNA, 17 bp, synthetic construct
  source 1..17: mol_type = other DNA
gctactccctgcagcat

SEQ ID NO: 124901 - DNA, 17 bp, synthetic construct
  source 1..17: mol_type = other DNA
ctactccctgcagcatg

SEQ ID NO: 124902 - DNA, 17 bp, synthetic construct
  source 1..17: mol_type = other DNA
tactccctgcagcatgg

SEQ ID NO: 124903 - DNA, 17 bp, synthetic construct
  source 1..17: mol_type = other DNA
actccctgcagcatgga

SEQ ID NO: 124904 - DNA, 17 bp, synthetic construct
  source 1..17: mol_type = other DNA
ctccctgcagcatggag

SEQ ID NO: 124905 - DNA, 17 bp, synthetic construct
  source 1..17: mol_type = other DNA
tccctgcagcatggagc

SEQ ID NO: 124906 - DNA, 17 bp, synthetic construct
  source 1..17: mol_type = other DNA
ccctgcagcatggagcc

SEQ ID NO: 124907 - DNA, 17 bp, synthetic construct
  source 1..17: mol_type = other DNA
cctgcagcatggagccc

SEQ ID NO: 124908 - DNA, 17 bp, synthetic construct
  source 1..17: mol_type = other DNA
ctgcagcatggagcccc

SEQ ID NO: 124909 - DNA, 17 bp, synthetic construct
  source 1..17: mol_type = other DNA
tgcagcatggagcccct

SEQ ID NO: 124910 - DNA, 17 bp, synthetic construct
  source 1..17: mol_type = other DNA
gcagcatggagcccctg

SEQ ID NO: 124911 - DNA, 17 bp, synthetic construct
  source 1..17: mol_type = other DNA
cagcatggagcccctgg

SEQ ID NO: 124912 - DNA, 17 bp, synthetic construct
  source 1..17: mol_type = other DNA
agcatggagcccctggc

SEQ ID NO: 124913 - DNA, 17 bp, synthetic construct
  source 1..17: mol_type = other DNA
gcatggagcccctggct

SEQ ID NO: 124914 - DNA, 17 bp, synthetic construct
  source 1..17: mol_type = other DNA
catggagcccctggctg

SEQ ID NO: 124915 - DNA, 17 bp, synthetic construct
  source 1..17: mol_type = other DNA
atggagcccctggctgg

SEQ ID NO: 124916 - DNA, 17 bp, synthetic construct
  source 1..17: mol_type = other DNA
tggagcccctggctgga

SEQ ID NO: 124917 - DNA, 17 bp, synthetic construct
  source 1..17: mol_type = other DNA
ggagcccctggctggag

SEQ ID NO: 124918 - DNA, 17 bp, synthetic construct
  source 1..17: mol_type = other DNA
gagcccctggctggaga

SEQ ID NO: 124919 - DNA, 17 bp, synthetic construct
  source 1..17: mol_type = other DNA
agcccctggctggagag

SEQ ID NO: 124920 - DNA, 17 bp, synthetic construct
  source 1..17: mol_type = other DNA
gcccctggctggagaga

SEQ ID NO: 124921 - DNA, 17 bp, synthetic construct
  source 1..17: mol_type = other DNA
cccctggctggagagac

SEQ ID NO: 124922 - DNA, 17 bp, synthetic construct
  source 1..17: mol_type = other DNA
ccctggctggagagact

SEQ ID NO: 124923 - DNA, 17 bp, synthetic construct
  source 1..17: mol_type = other DNA
cctggctggagagacta

SEQ ID NO: 124924 - DNA, 17 bp, synthetic construct
  source 1..17: mol_type = other DNA
ctggctggagagactaa

SEQ ID NO: 124925 - DNA, 17 bp, synthetic construct
  source 1..17: mol_type = other DNA
tggctggagagactaaa

SEQ ID NO: 124926 - DNA, 17 bp, synthetic construct
  source 1..17: mol_type = other DNA
ggctggagagactaaag

SEQ ID NO: 124927 - DNA, 17 bp, synthetic construct
  source 1..17: mol_type = other DNA
gctggagagactaaagg

SEQ ID NO: 124928 - DNA, 17 bp, synthetic construct
  source 1..17: mol_type = other DNA
ctggagagactaaaggg

SEQ ID NO: 124929 - DNA, 17 bp, synthetic construct
  source 1..17: mol_type = other DNA
tggagagactaaagggc

SEQ ID NO: 124930 - DNA, 17 bp, synthetic construct
  source 1..17: mol_type = other DNA
ggagagactaaagggcc

SEQ ID NO: 124931 - DNA, 17 bp, synthetic construct
  source 1..17: mol_type = other DNA
gagagactaaagggccc

SEQ ID NO: 124932 - DNA, 17 bp, synthetic construct
  source 1..17: mol_type = other DNA
agagactaaagggccct

SEQ ID NO: 124933 - DNA, 17 bp, synthetic construct
  source 1..17: mol_type = other DNA
gagactaaagggccctg

SEQ ID NO: 124934 - DNA, 17 bp, synthetic construct
  source 1..17: mol_type = other DNA
agactaaagggccctgg

SEQ ID NO: 124935 - DNA, 17 bp, synthetic construct
  source 1..17: mol_type = other DNA
gactaaagggccctggt

SEQ ID NO: 124936 - DNA, 17 bp, synthetic construct
  source 1..17: mol_type = other DNA
actaaagggccctggtg

SEQ ID NO: 124937 - DNA, 17 bp, synthetic construct
  source 1..17: mol_type = other DNA
ctaaagggccctggtga

SEQ ID NO: 124938 - DNA, 17 bp, synthetic construct
  source 1..17: mol_type = other DNA
taaagggccctggtgag

SEQ ID NO: 124939 - DNA, 17 bp, synthetic construct
  source 1..17: mol_type = other DNA
aaagggccctggtgagt

SEQ ID NO: 124940 - DNA, 17 bp, synthetic construct
  source 1..17: mol_type = other DNA
aagggccctggtgagtc

SEQ ID NO: 124941 - DNA, 17 bp, synthetic construct
  source 1..17: mol_type = other DNA
agggccctggtgagtct

SEQ ID NO: 124942 - DNA, 17 bp, synthetic construct
  source 1..17: mol_type = other DNA
gggccctggtgagtctt

SEQ ID NO: 124943 - DNA, 17 bp, synthetic construct
  source 1..17: mol_type = other DNA
ggccctggtgagtcttc

SEQ ID NO: 124944 - DNA, 17 bp, synthetic construct
  source 1..17: mol_type = other DNA
gccctggtgagtcttct

SEQ ID NO: 124945 - DNA, 17 bp, synthetic construct
  source 1..17: mol_type = other DNA
ccctggtgagtcttctg

SEQ ID NO: 124946 - DNA, 17 bp, synthetic construct
  source 1..17: mol_type = other DNA
cctggtgagtcttctgc

SEQ ID NO: 124947 - DNA, 17 bp, synthetic construct
  source 1..17: mol_type = other DNA
ctggtgagtcttctgct

SEQ ID NO: 124948 - DNA, 17 bp, synthetic construct
  source 1..17: mol_type = other DNA
tggtgagtcttctgctc

SEQ ID NO: 124949 - DNA, 17 bp, synthetic construct
  source 1..17: mol_type = other DNA
ggtgagtcttctgctca

SEQ ID NO: 124950 - DNA, 17 bp, synthetic construct
  source 1..17: mol_type = other DNA
gtgagtcttctgctcac

SEQ ID NO: 124951 - DNA, 17 bp, synthetic construct
  source 1..17: mol_type = other DNA
tgagtcttctgctcacc

SEQ ID NO: 124952 - DNA, 17 bp, synthetic construct
  source 1..17: mol_type = other DNA
gagtcttctgctcaccc

SEQ ID NO: 124953 - DNA, 17 bp, synthetic construct
  source 1..17: mol_type = other DNA
agtcttctgctcaccct

SEQ ID NO: 124954 - DNA, 17 bp, synthetic construct
  source 1..17: mol_type = other DNA
gtcttctgctcaccctg

SEQ ID NO: 124955 - DNA, 17 bp, synthetic construct
  source 1..17: mol_type = other DNA
tcttctgctcaccctgc

SEQ ID NO: 124956 - DNA, 17 bp, synthetic construct
  source 1..17: mol_type = other DNA
cttctgctcaccctgcc

SEQ ID NO: 124957 - DNA, 17 bp, synthetic construct
  source 1..17: mol_type = other DNA
ttctgctcaccctgccg

SEQ ID NO: 124958 - DNA, 17 bp, synthetic construct
  source 1..17: mol_type = other DNA
tctgctcaccctgccgg

SEQ ID NO: 124959 - DNA, 17 bp, synthetic construct
  source 1..17: mol_type = other DNA
ctgctcaccctgccggc

SEQ ID NO: 124960 - DNA, 17 bp, synthetic construct
  source 1..17: mol_type = other DNA
tgctcaccctgccggcc

SEQ ID NO: 124961 - DNA, 17 bp, synthetic construct
  source 1..17: mol_type = other DNA
gctcaccctgccggccc

SEQ ID NO: 124962 - DNA, 17 bp, synthetic construct
  source 1..17: mol_type = other DNA
ctcaccctgccggccct

SEQ ID NO: 124963 - DNA, 17 bp, synthetic construct
  source 1..17: mol_type = other DNA
tcaccctgccggcccta

SEQ ID NO: 124964 - DNA, 17 bp, synthetic construct
  source 1..17: mol_type = other DNA
caccctgccggccctag

SEQ ID NO: 124965 - DNA, 17 bp, synthetic construct
  source 1..17: mol_type = other DNA
accctgccggccctagg

SEQ ID NO: 124966 - DNA, 17 bp, synthetic construct
  source 1..17: mol_type = other DNA
ccctgccggccctaggc

SEQ ID NO: 124967 - DNA, 17 bp, synthetic construct
  source 1..17: mol_type = other DNA
cctgccggccctaggct

SEQ ID NO: 124968 - DNA, 17 bp, synthetic construct
  source 1..17: mol_type = other DNA
ctgccggccctaggctg

SEQ ID NO: 124969 - DNA, 17 bp, synthetic construct
  source 1..17: mol_type = other DNA
tgccggccctaggctgc

SEQ ID NO: 124970 - DNA, 17 bp, synthetic construct
  source 1..17: mol_type = other DNA
gccggccctaggctgct

SEQ ID NO: 124971 - DNA, 17 bp, synthetic construct
  source 1..17: mol_type = other DNA
ccggccctaggctgcta

SEQ ID NO: 124972 - DNA, 17 bp, synthetic construct
  source 1..17: mol_type = other DNA
cggccctaggctgctac

SEQ ID NO: 124973 - DNA, 17 bp, synthetic construct
  source 1..17: mol_type = other DNA
ggccctaggctgctacc

SEQ ID NO: 124974 - DNA, 17 bp, synthetic construct
  source 1..17: mol_type = other DNA
gccctaggctgctaccc

SEQ ID NO: 124975 - DNA, 17 bp, synthetic construct
  source 1..17: mol_type = other DNA
ccctaggctgctacccg

SEQ ID NO: 124976 - DNA, 17 bp, synthetic construct
  source 1..17: mol_type = other DNA
cctaggctgctacccga

SEQ ID NO: 124977 - DNA, 17 bp, synthetic construct
  source 1..17: mol_type = other DNA
ctaggctgctacccgaa

SEQ ID NO: 124978 - DNA, 17 bp, synthetic construct
  source 1..17: mol_type = other DNA
taggctgctacccgaag

SEQ ID NO: 124979 - DNA, 17 bp, synthetic construct
  source 1..17: mol_type = other DNA
aggctgctacccgaagt

SEQ ID NO: 124980 - DNA, 17 bp, synthetic construct
  source 1..17: mol_type = other DNA
ggctgctacccgaagtg

SEQ ID NO: 124981 - DNA, 17 bp, synthetic construct
  source 1..17: mol_type = other DNA
gctgctacccgaagtgc

SEQ ID NO: 124982 - DNA, 17 bp, synthetic construct
  source 1..17: mol_type = other DNA
ctgctacccgaagtgcc

SEQ ID NO: 124983 - DNA, 17 bp, synthetic construct
  source 1..17: mol_type = other DNA
tgctacccgaagtgccc

SEQ ID NO: 124984 - DNA, 17 bp, synthetic construct
  source 1..17: mol_type = other DNA
gctacccgaagtgccca

SEQ ID NO: 124985 - DNA, 17 bp, synthetic construct
  source 1..17: mol_type = other DNA
ctacccgaagtgcccac

SEQ ID NO: 124986 - DNA, 17 bp, synthetic construct
  source 1..17: mol_type = other DNA
tacccgaagtgcccacc

SEQ ID NO: 124987 - DNA, 17 bp, synthetic construct
  source 1..17: mol_type = other DNA
acccgaagtgcccaccc

SEQ ID NO: 124988 - DNA, 17 bp, synthetic construct
  source 1..17: mol_type = other DNA
cccgaagtgcccaccca

SEQ ID NO: 124989 - DNA, 17 bp, synthetic construct
  source 1..17: mol_type = other DNA
ccgaagtgcccacccag

SEQ ID NO: 124990 - DNA, 17 bp, synthetic construct
  source 1..17: mol_type = other DNA
cgaagtgcccacccagc

SEQ ID NO: 124991 - DNA, 17 bp, synthetic construct
  source 1..17: mol_type = other DNA
gaagtgcccacccagcc

SEQ ID NO: 124992 - DNA, 17 bp, synthetic construct
  source 1..17: mol_type = other DNA
aagtgcccacccagcca

SEQ ID NO: 124993 - DNA, 17 bp, synthetic construct
  source 1..17: mol_type = other DNA
agtgcccacccagccag

SEQ ID NO: 124994 - DNA, 17 bp, synthetic construct
  source 1..17: mol_type = other DNA
gtgcccacccagccagc

SEQ ID NO: 124995 - DNA, 17 bp, synthetic construct
  source 1..17: mol_type = other DNA
tgcccacccagccagcc

SEQ ID NO: 124996 - DNA, 17 bp, synthetic construct
  source 1..17: mol_type = other DNA
gcccacccagccagccc

SEQ ID NO: 124997 - DNA, 17 bp, synthetic construct
  source 1..17: mol_type = other DNA
cccacccagccagccct

SEQ ID NO: 124998 - DNA, 17 bp, synthetic construct
  source 1..17: mol_type = other DNA
ccacccagccagccctt

SEQ ID NO: 124999 - DNA, 17 bp, synthetic construct
  source 1..17: mol_type = other DNA
cacccagccagcccttc

SEQ ID NO: 125000 - DNA, 17 bp, synthetic construct
  source 1..17: mol_type = other DNA
acccagccagcccttct

SEQ ID NO: 125001 - DNA, 17 bp, synthetic construct
  source 1..17: mol_type = other DNA
cccagccagcccttctt

SEQ ID NO: 125002 - DNA, 17 bp, synthetic construct
  source 1..17: mol_type = other DNA
ccagccagcccttcttc

SEQ ID NO: 125003 - DNA, 17 bp, synthetic construct
  source 1..17: mol_type = other DNA
cagccagcccttcttca

SEQ ID NO: 125004 - DNA, 17 bp, synthetic construct
  source 1..17: mol_type = other DNA
agccagcccttcttcaa

SEQ ID NO: 125005 - DNA, 17 bp, synthetic construct
  source 1..17: mol_type = other DNA
gccagcccttcttcaat

SEQ ID NO: 125006 - DNA, 17 bp, synthetic construct
  source 1..17: mol_type = other DNA
ccagcccttcttcaatg

SEQ ID NO: 125007 - DNA, 17 bp, synthetic construct
  source 1..17: mol_type = other DNA
cagcccttcttcaatga

SEQ ID NO: 125008 - DNA, 17 bp, synthetic construct
  source 1..17: mol_type = other DNA
agcccttcttcaatgag

SEQ ID NO: 125009 - DNA, 17 bp, synthetic construct
  source 1..17: mol_type = other DNA
gcccttcttcaatgagg

SEQ ID NO: 125010 - DNA, 17 bp, synthetic construct
  source 1..17: mol_type = other DNA
cccttcttcaatgagga

SEQ ID NO: 125011 - DNA, 17 bp, synthetic construct
  source 1..17: mol_type = other DNA
ccttcttcaatgaggac

SEQ ID NO: 125012 - DNA, 17 bp, synthetic construct
  source 1..17: mol_type = other DNA
cttcttcaatgaggacc

SEQ ID NO: 125013 - DNA, 17 bp, synthetic construct
  source 1..17: mol_type = other DNA
ttcttcaatgaggacca

SEQ ID NO: 125014 - DNA, 17 bp, synthetic construct
  source 1..17: mol_type = other DNA
tcttcaatgaggaccag

SEQ ID NO: 125015 - DNA, 17 bp, synthetic construct
  source 1..17: mol_type = other DNA
cttcaatgaggaccaga

SEQ ID NO: 125016 - DNA, 17 bp, synthetic construct
  source 1..17: mol_type = other DNA
ttcaatgaggaccagat

SEQ ID NO: 125017 - DNA, 17 bp, synthetic construct
  source 1..17: mol_type = other DNA
tcaatgaggaccagatg

SEQ ID NO: 125018 - DNA, 17 bp, synthetic construct
  source 1..17: mol_type = other DNA
caatgaggaccagatga

SEQ ID NO: 125019 - DNA, 17 bp, synthetic construct
  source 1..17: mol_type = other DNA
aatgaggaccagatgaa

SEQ ID NO: 125020 - DNA, 17 bp, synthetic construct
  source 1..17: mol_type = other DNA
atgaggaccagatgaag

SEQ ID NO: 125021 - DNA, 17 bp, synthetic construct
  source 1..17: mol_type = other DNA
tgaggaccagatgaagt

SEQ ID NO: 125022 - DNA, 17 bp, synthetic construct
  source 1..17: mol_type = other DNA
gaggaccagatgaagtg

SEQ ID NO: 125023 - DNA, 17 bp, synthetic construct
  source 1..17: mol_type = other DNA
aggaccagatgaagtgc

SEQ ID NO: 125024 - DNA, 17 bp, synthetic construct
  source 1..17: mol_type = other DNA
ggaccagatgaagtgcg

SEQ ID NO: 125025 - DNA, 17 bp, synthetic construct
  source 1..17: mol_type = other DNA
gaccagatgaagtgcgt

SEQ ID NO: 125026 - DNA, 17 bp, synthetic construct
  source 1..17: mol_type = other DNA
accagatgaagtgcgtg

SEQ ID NO: 125027 - DNA, 17 bp, synthetic construct
  source 1..17: mol_type = other DNA
ccagatgaagtgcgtgg

SEQ ID NO: 125028 - DNA, 17 bp, synthetic construct
  source 1..17: mol_type = other DNA
cagatgaagtgcgtggc

SEQ ID NO: 125029 - DNA, 17 bp, synthetic construct
  source 1..17: mol_type = other DNA
agatgaagtgcgtggcc

SEQ ID NO: 125030 - DNA, 17 bp, synthetic construct
  source 1..17: mol_type = other DNA
gatgaagtgcgtggccc

SEQ ID NO: 125031 - DNA, 17 bp, synthetic construct
  source 1..17: mol_type = other DNA
atgaagtgcgtggccca

SEQ ID NO: 125032 - DNA, 17 bp, synthetic construct
  source 1..17: mol_type = other DNA
tgaagtgcgtggcccag

SEQ ID NO: 125033 - DNA, 17 bp, synthetic construct
  source 1..17: mol_type = other DNA
gaagtgcgtggcccagt

SEQ ID NO: 125034 - DNA, 17 bp, synthetic construct
  source 1..17: mol_type = other DNA
aagtgcgtggcccagtg

SEQ ID NO: 125035 - DNA, 17 bp, synthetic construct
  source 1..17: mol_type = other DNA
agtgcgtggcccagtgt

SEQ ID NO: 125036 - DNA, 17 bp, synthetic construct
  source 1..17: mol_type = other DNA
gtgcgtggcccagtgtg

SEQ ID NO: 125037 - DNA, 17 bp, synthetic construct
  source 1..17: mol_type = other DNA
tgcgtggcccagtgtgg

SEQ ID NO: 125038 - DNA, 17 bp, synthetic construct
  source 1..17: mol_type = other DNA
gcgtggcccagtgtggc

SEQ ID NO: 125039 - DNA, 17 bp, synthetic construct
  source 1..17: mol_type = other DNA
cgtggcccagtgtggct

SEQ ID NO: 125040 - DNA, 17 bp, synthetic construct
  source 1..17: mol_type = other DNA
gtggcccagtgtggctg

SEQ ID NO: 125041 - DNA, 17 bp, synthetic construct
  source 1..17: mol_type = other DNA
tggcccagtgtggctgc

SEQ ID NO: 125042 - DNA, 17 bp, synthetic construct
  source 1..17: mol_type = other DNA
ggcccagtgtggctgct

SEQ ID NO: 125043 - DNA, 17 bp, synthetic construct
  source 1..17: mol_type = other DNA
gcccagtgtggctgcta

SEQ ID NO: 125044 - DNA, 17 bp, synthetic construct
  source 1..17: mol_type = other DNA
cccagtgtggctgctac

SEQ ID NO: 125045 - DNA, 17 bp, synthetic construct
  source 1..17: mol_type = other DNA
ccagtgtggctgctacg

SEQ ID NO: 125046 - DNA, 17 bp, synthetic construct
  source 1..17: mol_type = other DNA
cagtgtggctgctacga

SEQ ID NO: 125047 - DNA, 17 bp, synthetic construct
  source 1..17: mol_type = other DNA
agtgtggctgctacgac

SEQ ID NO: 125048 - DNA, 17 bp, synthetic construct
  source 1..17: mol_type = other DNA
gtgtggctgctacgaca

SEQ ID NO: 125049 - DNA, 17 bp, synthetic construct
  source 1..17: mol_type = other DNA
tgtggctgctacgacaa

SEQ ID NO: 125050 - DNA, 17 bp, synthetic construct
  source 1..17: mol_type = other DNA
gtggctgctacgacaag

SEQ ID NO: 125051 - DNA, 17 bp, synthetic construct
  source 1..17: mol_type = other DNA
tggctgctacgacaagg

SEQ ID NO: 125052 - DNA, 17 bp, synthetic construct
  source 1..17: mol_type = other DNA
ggctgctacgacaagga

SEQ ID NO: 125053 - DNA, 17 bp, synthetic construct
  source 1..17: mol_type = other DNA
gctgctacgacaaggac

SEQ ID NO: 125054 - DNA, 17 bp, synthetic construct
  source 1..17: mol_type = other DNA
ctgctacgacaaggacg

SEQ ID NO: 125055 - DNA, 17 bp, synthetic construct
  source 1..17: mol_type = other DNA
tgctacgacaaggacgg

SEQ ID NO: 125056 - DNA, 17 bp, synthetic construct
  source 1..17: mol_type = other DNA
gctacgacaaggacgga

SEQ ID NO: 125057 - DNA, 17 bp, synthetic construct
  source 1..17: mol_type = other DNA
ctacgacaaggacggaa

SEQ ID NO: 125058 - DNA, 17 bp, synthetic construct
  source 1..17: mol_type = other DNA
tacgacaaggacggaaa

SEQ ID NO: 125059 - DNA, 17 bp, synthetic construct
  source 1..17: mol_type = other DNA
acgacaaggacggaaac

SEQ ID NO: 125060 - DNA, 17 bp, synthetic construct
  source 1..17: mol_type = other DNA
cgacaaggacggaaact

SEQ ID NO: 125061 - DNA, 17 bp, synthetic construct
  source 1..17: mol_type = other DNA
gacaaggacggaaacta

SEQ ID NO: 125062 - DNA, 17 bp, synthetic construct
  source 1..17: mol_type = other DNA
acaaggacggaaactac

SEQ ID NO: 125063 - DNA, 17 bp, synthetic construct
  source 1..17: mol_type = other DNA
caaggacggaaactact

SEQ ID NO: 125064 - DNA, 17 bp, synthetic construct
  source 1..17: mol_type = other DNA
aaggacggaaactacta

SEQ ID NO: 125065 - DNA, 17 bp, synthetic construct
  source 1..17: mol_type = other DNA
aggacggaaactactat

SEQ ID NO: 125066 - DNA, 17 bp, synthetic construct
  source 1..17: mol_type = other DNA
ggacggaaactactatg

SEQ ID NO: 125067 - DNA, 17 bp, synthetic construct
  source 1..17: mol_type = other DNA
gacggaaactactatga

SEQ ID NO: 125068 - DNA, 17 bp, synthetic construct
  source 1..17: mol_type = other DNA
acggaaactactatgac

SEQ ID NO: 125069 - DNA, 17 bp, synthetic construct
  source 1..17: mol_type = other DNA
cggaaactactatgacg

SEQ ID NO: 125070 - DNA, 17 bp, synthetic construct
  source 1..17: mol_type = other DNA
ggaaactactatgacgt

SEQ ID NO: 125071 - DNA, 17 bp, synthetic construct
  source 1..17: mol_type = other DNA
gaaactactatgacgtc

SEQ ID NO: 125072 - DNA, 17 bp, synthetic construct
  source 1..17: mol_type = other DNA
aaactactatgacgtcg

SEQ ID NO: 125073 - DNA, 17 bp, synthetic construct
  source 1..17: mol_type = other DNA
aactactatgacgtcgg

SEQ ID NO: 125074 - DNA, 17 bp, synthetic construct
  source 1..17: mol_type = other DNA
actactatgacgtcggt

SEQ ID NO: 125075 - DNA, 17 bp, synthetic construct
  source 1..17: mol_type = other DNA
ctactatgacgtcggtg

SEQ ID NO: 125076 - DNA, 17 bp, synthetic construct
  source 1..17: mol_type = other DNA
tactatgacgtcggtgc

SEQ ID NO: 125077 - DNA, 17 bp, synthetic construct
  source 1..17: mol_type = other DNA
actatgacgtcggtgca

SEQ ID NO: 125078 - DNA, 17 bp, synthetic construct
  source 1..17: mol_type = other DNA
ctatgacgtcggtgcaa

SEQ ID NO: 125079 - DNA, 17 bp, synthetic construct
  source 1..17: mol_type = other DNA
tatgacgtcggtgcaag

SEQ ID NO: 125080 - DNA, 17 bp, synthetic construct
  source 1..17: mol_type = other DNA
atgacgtcggtgcaagg

SEQ ID NO: 125081 - DNA, 17 bp, synthetic construct
  source 1..17: mol_type = other DNA
tgacgtcggtgcaaggg

SEQ ID NO: 125082 - DNA, 17 bp, synthetic construct
  source 1..17: mol_type = other DNA
gacgtcggtgcaagggt

SEQ ID NO: 125083 - DNA, 17 bp, synthetic construct
  source 1..17: mol_type = other DNA
acgtcggtgcaagggtc

SEQ ID NO: 125084 - DNA, 17 bp, synthetic construct
  source 1..17: mol_type = other DNA
cgtcggtgcaagggtcc

SEQ ID NO: 125085 - DNA, 17 bp, synthetic construct
  source 1..17: mol_type = other DNA
gtcggtgcaagggtccc

SEQ ID NO: 125086 - DNA, 17 bp, synthetic construct
  source 1..17: mol_type = other DNA
tcggtgcaagggtcccc

SEQ ID NO: 125087 - DNA, 17 bp, synthetic construct
  source 1..17: mol_type = other DNA
cggtgcaagggtcccca

SEQ ID NO: 125088 - DNA, 17 bp, synthetic construct
  source 1..17: mol_type = other DNA
ggtgcaagggtccccac

SEQ ID NO: 125089 - DNA, 17 bp, synthetic construct
  source 1..17: mol_type = other DNA
gtgcaagggtccccaca

SEQ ID NO: 125090 - DNA, 17 bp, synthetic construct
  source 1..17: mol_type = other DNA
tgcaagggtccccacag

SEQ ID NO: 125091 - DNA, 17 bp, synthetic construct
  source 1..17: mol_type = other DNA
gcaagggtccccacagc

SEQ ID NO: 125092 - DNA, 17 bp, synthetic construct
  source 1..17: mol_type = other DNA
caagggtccccacagcg

SEQ ID NO: 125093 - DNA, 17 bp, synthetic construct
  source 1..17: mol_type = other DNA
aagggtccccacagcgg

SEQ ID NO: 125094 - DNA, 17 bp, synthetic construct
  source 1..17: mol_type = other DNA
agggtccccacagcgga

SEQ ID NO: 125095 - DNA, 17 bp, synthetic construct
  source 1..17: mol_type = other DNA
gggtccccacagcggag

SEQ ID NO: 125096 - DNA, 17 bp, synthetic construct
  source 1..17: mol_type = other DNA
ggtccccacagcggaga

SEQ ID NO: 125097 - DNA, 17 bp, synthetic construct
  source 1..17: mol_type = other DNA
gtccccacagcggagaa

SEQ ID NO: 125098 - DNA, 17 bp, synthetic construct
  source 1..17: mol_type = other DNA
tccccacagcggagaac

SEQ ID NO: 125099 - DNA, 17 bp, synthetic construct
  source 1..17: mol_type = other DNA
ccccacagcggagaact

SEQ ID NO: 125100 - DNA, 17 bp, synthetic construct
  source 1..17: mol_type = other DNA
cccacagcggagaactg

SEQ ID NO: 125101 - DNA, 17 bp, synthetic construct
  source 1..17: mol_type = other DNA
ccacagcggagaactgc

SEQ ID NO: 125102 - DNA, 17 bp, synthetic construct
  source 1..17: mol_type = other DNA
cacagcggagaactgcc

SEQ ID NO: 125103 - DNA, 17 bp, synthetic construct
  source 1..17: mol_type = other DNA
acagcggagaactgcca

SEQ ID NO: 125104 - DNA, 17 bp, synthetic construct
  source 1..17: mol_type = other DNA
cagcggagaactgccag

SEQ ID NO: 125105 - DNA, 17 bp, synthetic construct
  source 1..17: mol_type = other DNA
agcggagaactgccaga

SEQ ID NO: 125106 - DNA, 17 bp, synthetic construct
  source 1..17: mol_type = other DNA
gcggagaactgccagag

SEQ ID NO: 125107 - DNA, 17 bp, synthetic construct
  source 1..17: mol_type = other DNA
cggagaactgccagagc

SEQ ID NO: 125108 - DNA, 17 bp, synthetic construct
  source 1..17: mol_type = other DNA
ggagaactgccagagct

SEQ ID NO: 125109 - DNA, 17 bp, synthetic construct
  source 1..17: mol_type = other DNA
gagaactgccagagctg

SEQ ID NO: 125110 - DNA, 17 bp, synthetic construct
  source 1..17: mol_type = other DNA
agaactgccagagctgg

SEQ ID NO: 125111 - DNA, 17 bp, synthetic construct
  source 1..17: mol_type = other DNA
gaactgccagagctggt

SEQ ID NO: 125112 - DNA, 17 bp, synthetic construct
  source 1..17: mol_type = other DNA
aactgccagagctggtg

SEQ ID NO: 125113 - DNA, 17 bp, synthetic construct
  source 1..17: mol_type = other DNA
actgccagagctggtga

SEQ ID NO: 125114 - DNA, 17 bp, synthetic construct
  source 1..17: mol_type = other DNA
ctgccagagctggtgag

SEQ ID NO: 125115 - DNA, 17 bp, synthetic construct
  source 1..17: mol_type = other DNA
tgccagagctggtgagg

SEQ ID NO: 125116 - DNA, 17 bp, synthetic construct
  source 1..17: mol_type = other DNA
gccagagctggtgaggg

SEQ ID NO: 125117 - DNA, 17 bp, synthetic construct
  source 1..17: mol_type = other DNA
ccagagctggtgagggg

SEQ ID NO: 125118 - DNA, 17 bp, synthetic construct
  source 1..17: mol_type = other DNA
cagagctggtgaggggg

SEQ ID NO: 125119 - DNA, 17 bp, synthetic construct
  source 1..17: mol_type = other DNA
agagctggtgagggggt

SEQ ID NO: 125120 - DNA, 17 bp, synthetic construct
  source 1..17: mol_type = other DNA
gagctggtgagggggtg

SEQ ID NO: 125121 - DNA, 17 bp, synthetic construct
  source 1..17: mol_type = other DNA
agctggtgagggggtgg

SEQ ID NO: 125122 - DNA, 17 bp, synthetic construct
  source 1..17: mol_type = other DNA
gctggtgagggggtggg

SEQ ID NO: 125123 - DNA, 17 bp, synthetic construct
  source 1..17: mol_type = other DNA
ctggtgagggggtggga

SEQ ID NO: 125124 - DNA, 17 bp, synthetic construct
  source 1..17: mol_type = other DNA
tggtgagggggtgggaa

SEQ ID NO: 125125 - DNA, 17 bp, synthetic construct
  source 1..17: mol_type = other DNA
ggtgagggggtgggaag

SEQ ID NO: 125126 - DNA, 17 bp, synthetic construct
  source 1..17: mol_type = other DNA
gtgagggggtgggaagc

SEQ ID NO: 125127 - DNA, 17 bp, synthetic construct
  source 1..17: mol_type = other DNA
tgagggggtgggaagcg

SEQ ID NO: 125128 - DNA, 17 bp, synthetic construct
  source 1..17: mol_type = other DNA
gagggggtgggaagcgg

SEQ ID NO: 125129 - DNA, 17 bp, synthetic construct
  source 1..17: mol_type = other DNA
agggggtgggaagcggg

SEQ ID NO: 125130 - DNA, 17 bp, synthetic construct
  source 1..17: mol_type = other DNA
gggggtgggaagcgggt

SEQ ID NO: 125131 - DNA, 17 bp, synthetic construct
  source 1..17: mol_type = other DNA
ggggtgggaagcgggtg

SEQ ID NO: 125132 - DNA, 17 bp, synthetic construct
  source 1..17: mol_type = other DNA
gggtgggaagcgggtgg

SEQ ID NO: 125133 - DNA, 17 bp, synthetic construct
  source 1..17: mol_type = other DNA
ggtgggaagcgggtggc

SEQ ID NO: 125134 - DNA, 17 bp, synthetic construct
  source 1..17: mol_type = other DNA
gtgggaagcgggtggcg

SEQ ID NO: 125135 - DNA, 17 bp, synthetic construct
  source 1..17: mol_type = other DNA
tgggaagcgggtggcgc

SEQ ID NO: 125136 - DNA, 17 bp, synthetic construct
  source 1..17: mol_type = other DNA
gggaagcgggtggcgct

SEQ ID NO: 125137 - DNA, 17 bp, synthetic construct
  source 1..17: mol_type = other DNA
ggaagcgggtggcgctg

SEQ ID NO: 125138 - DNA, 17 bp, synthetic construct
  source 1..17: mol_type = other DNA
gaagcgggtggcgctgg

SEQ ID NO: 125139 - DNA, 17 bp, synthetic construct
  source 1..17: mol_type = other DNA
aagcgggtggcgctggg

SEQ ID NO: 125140 - DNA, 17 bp, synthetic construct
  source 1..17: mol_type = other DNA
agcgggtggcgctgggg

SEQ ID NO: 125141 - DNA, 17 bp, synthetic construct
  source 1..17: mol_type = other DNA
gcgggtggcgctggggg

SEQ ID NO: 125142 - DNA, 17 bp, synthetic construct
  source 1..17: mol_type = other DNA
cgggtggcgctggggga

SEQ ID NO: 125143 - DNA, 17 bp, synthetic construct
  source 1..17: mol_type = other DNA
gggtggcgctgggggag

SEQ ID NO: 125144 - DNA, 17 bp, synthetic construct
  source 1..17: mol_type = other DNA
ggtggcgctgggggagc

SEQ ID NO: 125145 - DNA, 17 bp, synthetic construct
  source 1..17: mol_type = other DNA
gtggcgctgggggagca

SEQ ID NO: 125146 - DNA, 17 bp, synthetic construct
  source 1..17: mol_type = other DNA
tggcgctgggggagcag

SEQ ID NO: 125147 - DNA, 17 bp, synthetic construct
  source 1..17: mol_type = other DNA
ggcgctgggggagcagg

SEQ ID NO: 125148 - DNA, 17 bp, synthetic construct
  source 1..17: mol_type = other DNA
gcgctgggggagcaggg

SEQ ID NO: 125149 - DNA, 17 bp, synthetic construct
  source 1..17: mol_type = other DNA
cgctgggggagcagggc

SEQ ID NO: 125150 - DNA, 17 bp, synthetic construct
  source 1..17: mol_type = other DNA
gctgggggagcagggct

SEQ ID NO: 125151 - DNA, 17 bp, synthetic construct
  source 1..17: mol_type = other DNA
ctgggggagcagggctg

SEQ ID NO: 125152 - DNA, 17 bp, synthetic construct
  source 1..17: mol_type = other DNA
tgggggagcagggctgg

SEQ ID NO: 125153 - DNA, 17 bp, synthetic construct
  source 1..17: mol_type = other DNA
gggggagcagggctggg

SEQ ID NO: 125154 - DNA, 17 bp, synthetic construct
  source 1..17: mol_type = other DNA
ggggagcagggctgggg

SEQ ID NO: 125155 - DNA, 17 bp, synthetic construct
  source 1..17: mol_type = other DNA
gggagcagggctgggga

SEQ ID NO: 125156 - DNA, 17 bp, synthetic construct
  source 1..17: mol_type = other DNA
ggagcagggctggggag

SEQ ID NO: 125157 - DNA, 17 bp, synthetic construct
  source 1..17: mol_type = other DNA
gagcagggctggggagc

SEQ ID NO: 125158 - DNA, 17 bp, synthetic construct
  source 1..17: mol_type = other DNA
agcagggctggggagca

SEQ ID NO: 125159 - DNA, 17 bp, synthetic construct
  source 1..17: mol_type = other DNA
gcagggctggggagcag

SEQ ID NO: 125160 - DNA, 17 bp, synthetic construct
  source 1..17: mol_type = other DNA
cagggctggggagcagg

SEQ ID NO: 125161 - DNA, 17 bp, synthetic construct
  source 1..17: mol_type = other DNA
agggctggggagcaggc

SEQ ID NO: 125162 - DNA, 17 bp, synthetic construct
  source 1..17: mol_type = other DNA
gggctggggagcaggcc

SEQ ID NO: 125163 - DNA, 17 bp, synthetic construct
  source 1..17: mol_type = other DNA
ggctggggagcaggccc

SEQ ID NO: 125164 - DNA, 17 bp, synthetic construct
  source 1..17: mol_type = other DNA
gctggggagcaggccct

SEQ ID NO: 125165 - DNA, 17 bp, synthetic construct
  source 1..17: mol_type = other DNA
ctggggagcaggccctg

SEQ ID NO: 125166 - DNA, 17 bp, synthetic construct
  source 1..17: mol_type = other DNA
tggggagcaggccctgc

SEQ ID NO: 125167 - DNA, 17 bp, synthetic construct
  source 1..17: mol_type = other DNA
ggggagcaggccctgca

SEQ ID NO: 125168 - DNA, 17 bp, synthetic construct
  source 1..17: mol_type = other DNA
gggagcaggccctgcag

SEQ ID NO: 125169 - DNA, 17 bp, synthetic construct
  source 1..17: mol_type = other DNA
ggagcaggccctgcagg

SEQ ID NO: 125170 - DNA, 17 bp, synthetic construct
  source 1..17: mol_type = other DNA
gagcaggccctgcaggc

SEQ ID NO: 125171 - DNA, 17 bp, synthetic construct
  source 1..17: mol_type = other DNA
agcaggccctgcaggct

SEQ ID NO: 125172 - DNA, 17 bp, synthetic construct
  source 1..17: mol_type = other DNA
gcaggccctgcaggctg

SEQ ID NO: 125173 - DNA, 17 bp, synthetic construct
  source 1..17: mol_type = other DNA
caggccctgcaggctgc

SEQ ID NO: 125174 - DNA, 17 bp, synthetic construct
  source 1..17: mol_type = other DNA
aggccctgcaggctgcc

SEQ ID NO: 125175 - DNA, 17 bp, synthetic construct
  source 1..17: mol_type = other DNA
ggccctgcaggctgccc

SEQ ID NO: 125176 - DNA, 17 bp, synthetic construct
  source 1..17: mol_type = other DNA
gccctgcaggctgcccc

SEQ ID NO: 125177 - DNA, 17 bp, synthetic construct
  source 1..17: mol_type = other DNA
ccctgcaggctgccccc

SEQ ID NO: 125178 - DNA, 17 bp, synthetic construct
  source 1..17: mol_type = other DNA
cctgcaggctgcccccc

SEQ ID NO: 125179 - DNA, 17 bp, synthetic construct
  source 1..17: mol_type = other DNA
ctgcaggctgcccccca

SEQ ID NO: 125180 - DNA, 17 bp, synthetic construct
  source 1..17: mol_type = other DNA
tgcaggctgccccccag

SEQ ID NO: 125181 - DNA, 17 bp, synthetic construct
  source 1..17: mol_type = other DNA
gcaggctgccccccagg

SEQ ID NO: 125182 - DNA, 17 bp, synthetic construct
  source 1..17: mol_type = other DNA
caggctgccccccaggc

SEQ ID NO: 125183 - DNA, 17 bp, synthetic construct
  source 1..17: mol_type = other DNA
aggctgccccccaggcc

SEQ ID NO: 125184 - DNA, 17 bp, synthetic construct
  source 1..17: mol_type = other DNA
ggctgccccccaggccc

SEQ ID NO: 125185 - DNA, 17 bp, synthetic construct
  source 1..17: mol_type = other DNA
gctgccccccaggccct

SEQ ID NO: 125186 - DNA, 17 bp, synthetic construct
  source 1..17: mol_type = other DNA
ctgccccccaggccctc

SEQ ID NO: 125187 - DNA, 17 bp, synthetic construct
  source 1..17: mol_type = other DNA
tgccccccaggccctca

SEQ ID NO: 125188 - DNA, 17 bp, synthetic construct
  source 1..17: mol_type = other DNA
gccccccaggccctcag

SEQ ID NO: 125189 - DNA, 17 bp, synthetic construct
  source 1..17: mol_type = other DNA
ccccccaggccctcagc

SEQ ID NO: 125190 - DNA, 17 bp, synthetic construct
  source 1..17: mol_type = other DNA
cccccaggccctcagct

SEQ ID NO: 125191 - DNA, 17 bp, synthetic construct
  source 1..17: mol_type = other DNA
ccccaggccctcagctc

SEQ ID NO: 125192 - DNA, 17 bp, synthetic construct
  source 1..17: mol_type = other DNA
cccaggccctcagctcg

SEQ ID NO: 125193 - DNA, 17 bp, synthetic construct
  source 1..17: mol_type = other DNA
ccaggccctcagctcgc

SEQ ID NO: 125194 - DNA, 17 bp, synthetic construct
  source 1..17: mol_type = other DNA
caggccctcagctcgcc

SEQ ID NO: 125195 - DNA, 17 bp, synthetic construct
  source 1..17: mol_type = other DNA
aggccctcagctcgcct

SEQ ID NO: 125196 - DNA, 17 bp, synthetic construct
  source 1..17: mol_type = other DNA
ggccctcagctcgcctc

SEQ ID NO: 125197 - DNA, 17 bp, synthetic construct
  source 1..17: mol_type = other DNA
gccctcagctcgcctct

SEQ ID NO: 125198 - DNA, 17 bp, synthetic construct
  source 1..17: mol_type = other DNA
ccctcagctcgcctctc

SEQ ID NO: 125199 - DNA, 17 bp, synthetic construct
  source 1..17: mol_type = other DNA
cctcagctcgcctctcc

SEQ ID NO: 125200 - DNA, 17 bp, synthetic construct
  source 1..17: mol_type = other DNA
ctcagctcgcctctccc

SEQ ID NO: 125201 - DNA, 17 bp, synthetic construct
  source 1..17: mol_type = other DNA
tcagctcgcctctcccc

SEQ ID NO: 125202 - DNA, 17 bp, synthetic construct
  source 1..17: mol_type = other DNA
cagctcgcctctccccc

SEQ ID NO: 125203 - DNA, 17 bp, synthetic construct
  source 1..17: mol_type = other DNA
agctcgcctctccccca

SEQ ID NO: 125204 - DNA, 17 bp, synthetic construct
  source 1..17: mol_type = other DNA
gctcgcctctcccccac

SEQ ID NO: 125205 - DNA, 17 bp, synthetic construct
  source 1..17: mol_type = other DNA
ctcgcctctcccccacc

SEQ ID NO: 125206 - DNA, 17 bp, synthetic construct
  source 1..17: mol_type = other DNA
tcgcctctcccccaccc

SEQ ID NO: 125207 - DNA, 17 bp, synthetic construct
  source 1..17: mol_type = other DNA
cgcctctcccccacccc

SEQ ID NO: 125208 - DNA, 17 bp, synthetic construct
  source 1..17: mol_type = other DNA
gcctctcccccacccct

SEQ ID NO: 125209 - DNA, 17 bp, synthetic construct
  source 1..17: mol_type = other DNA
cctctcccccaccccta

SEQ ID NO: 125210 - DNA, 17 bp, synthetic construct
  source 1..17: mol_type = other DNA
ctctcccccacccctag

SEQ ID NO: 125211 - DNA, 17 bp, synthetic construct
  source 1..17: mol_type = other DNA
tctcccccacccctagt

SEQ ID NO: 125212 - DNA, 17 bp, synthetic construct
  source 1..17: mol_type = other DNA
ctcccccacccctagta

SEQ ID NO: 125213 - DNA, 17 bp, synthetic construct
  source 1..17: mol_type = other DNA
tcccccacccctagtaa

SEQ ID NO: 125214 - DNA, 17 bp, synthetic construct
  source 1..17: mol_type = other DNA
cccccacccctagtaac

SEQ ID NO: 125215 - DNA, 17 bp, synthetic construct
  source 1..17: mol_type = other DNA
ccccacccctagtaact

SEQ ID NO: 125216 - DNA, 17 bp, synthetic construct
  source 1..17: mol_type = other DNA
cccacccctagtaactg

SEQ ID NO: 125217 - DNA, 17 bp, synthetic construct
  source 1..17: mol_type = other DNA
ccacccctagtaactgc

SEQ ID NO: 125218 - DNA, 17 bp, synthetic construct
  source 1..17: mol_type = other DNA
cacccctagtaactgca

SEQ ID NO: 125219 - DNA, 17 bp, synthetic construct
  source 1..17: mol_type = other DNA
acccctagtaactgcac

SEQ ID NO: 125220 - DNA, 17 bp, synthetic construct
  source 1..17: mol_type = other DNA
cccctagtaactgcaca

SEQ ID NO: 125221 - DNA, 17 bp, synthetic construct
  source 1..17: mol_type = other DNA
ccctagtaactgcacac

SEQ ID NO: 125222 - DNA, 17 bp, synthetic construct
  source 1..17: mol_type = other DNA
cctagtaactgcacacc

SEQ ID NO: 125223 - DNA, 17 bp, synthetic construct
  source 1..17: mol_type = other DNA
ctagtaactgcacaccc

SEQ ID NO: 125224 - DNA, 17 bp, synthetic construct
  source 1..17: mol_type = other DNA
tagtaactgcacaccca

SEQ ID NO: 125225 - DNA, 17 bp, synthetic construct
  source 1..17: mol_type = other DNA
agtaactgcacacccag

SEQ ID NO: 125226 - DNA, 17 bp, synthetic construct
  source 1..17: mol_type = other DNA
gtaactgcacacccagt

SEQ ID NO: 125227 - DNA, 17 bp, synthetic construct
  source 1..17: mol_type = other DNA
taactgcacacccagtg

SEQ ID NO: 125228 - DNA, 17 bp, synthetic construct
  source 1..17: mol_type = other DNA
aactgcacacccagtgg

SEQ ID NO: 125229 - DNA, 17 bp, synthetic construct
  source 1..17: mol_type = other DNA
actgcacacccagtggc

SEQ ID NO: 125230 - DNA, 17 bp, synthetic construct
  source 1..17: mol_type = other DNA
ctgcacacccagtggca

SEQ ID NO: 125231 - DNA, 17 bp, synthetic construct
  source 1..17: mol_type = other DNA
tgcacacccagtggcat

SEQ ID NO: 125232 - DNA, 17 bp, synthetic construct
  source 1..17: mol_type = other DNA
gcacacccagtggcatc

SEQ ID NO: 125233 - DNA, 17 bp, synthetic construct
  source 1..17: mol_type = other DNA
cacacccagtggcatcc

SEQ ID NO: 125234 - DNA, 17 bp, synthetic construct
  source 1..17: mol_type = other DNA
acacccagtggcatcca

SEQ ID NO: 125235 - DNA, 17 bp, synthetic construct
  source 1..17: mol_type = other DNA
cacccagtggcatccag

SEQ ID NO: 125236 - DNA, 17 bp, synthetic construct
  source 1..17: mol_type = other DNA
acccagtggcatccagt

SEQ ID NO: 125237 - DNA, 17 bp, synthetic construct
  source 1..17: mol_type = other DNA
cccagtggcatccagtg

SEQ ID NO: 125238 - DNA, 17 bp, synthetic construct
  source 1..17: mol_type = other DNA
ccagtggcatccagtgc

SEQ ID NO: 125239 - DNA, 17 bp, synthetic construct
  source 1..17: mol_type = other DNA
cagtggcatccagtgcg

SEQ ID NO: 125240 - DNA, 17 bp, synthetic construct
  source 1..17: mol_type = other DNA
agtggcatccagtgcgc

SEQ ID NO: 125241 - DNA, 17 bp, synthetic construct
  source 1..17: mol_type = other DNA
gtggcatccagtgcgct

SEQ ID NO: 125242 - DNA, 17 bp, synthetic construct
  source 1..17: mol_type = other DNA
tggcatccagtgcgctc

SEQ ID NO: 125243 - DNA, 17 bp, synthetic construct
  source 1..17: mol_type = other DNA
ggcatccagtgcgctca

SEQ ID NO: 125244 - DNA, 17 bp, synthetic construct
  source 1..17: mol_type = other DNA
gcatccagtgcgctcac

SEQ ID NO: 125245 - DNA, 17 bp, synthetic construct
  source 1..17: mol_type = other DNA
catccagtgcgctcaca

SEQ ID NO: 125246 - DNA, 17 bp, synthetic construct
  source 1..17: mol_type = other DNA
atccagtgcgctcacag

SEQ ID NO: 125247 - DNA, 17 bp, synthetic construct
  source 1..17: mol_type = other DNA
tccagtgcgctcacagc

SEQ ID NO: 125248 - DNA, 17 bp, synthetic construct
  source 1..17: mol_type = other DNA
ccagtgcgctcacagcc

SEQ ID NO: 125249 - DNA, 17 bp, synthetic construct
  source 1..17: mol_type = other DNA
cagtgcgctcacagcct

SEQ ID NO: 125250 - DNA, 17 bp, synthetic construct
  source 1..17: mol_type = other DNA
agtgcgctcacagcctt

SEQ ID NO: 125251 - DNA, 17 bp, synthetic construct
  source 1..17: mol_type = other DNA
gtgcgctcacagccttg

SEQ ID NO: 125252 - DNA, 17 bp, synthetic construct
  source 1..17: mol_type = other DNA
tgcgctcacagccttga

SEQ ID NO: 125253 - DNA, 17 bp, synthetic construct
  source 1..17: mol_type = other DNA
gcgctcacagccttgag

SEQ ID NO: 125254 - DNA, 17 bp, synthetic construct
  source 1..17: mol_type = other DNA
cgctcacagccttgagg

SEQ ID NO: 125255 - DNA, 17 bp, synthetic construct
  source 1..17: mol_type = other DNA
gctcacagccttgaggg

SEQ ID NO: 125256 - DNA, 17 bp, synthetic construct
  source 1..17: mol_type = other DNA
ctcacagccttgagggt

SEQ ID NO: 125257 - DNA, 17 bp, synthetic construct
  source 1..17: mol_type = other DNA
tcacagccttgagggta

SEQ ID NO: 125258 - DNA, 17 bp, synthetic construct
  source 1..17: mol_type = other DNA
cacagccttgagggtaa

SEQ ID NO: 125259 - DNA, 17 bp, synthetic construct
  source 1..17: mol_type = other DNA
acagccttgagggtaag

SEQ ID NO: 125260 - DNA, 17 bp, synthetic construct
  source 1..17: mol_type = other DNA
cagccttgagggtaagg

SEQ ID NO: 125261 - DNA, 17 bp, synthetic construct
  source 1..17: mol_type = other DNA
agccttgagggtaagga

SEQ ID NO: 125262 - DNA, 17 bp, synthetic construct
  source 1..17: mol_type = other DNA
gccttgagggtaaggaa

SEQ ID NO: 125263 - DNA, 17 bp, synthetic construct
  source 1..17: mol_type = other DNA
ccttgagggtaaggaag

SEQ ID NO: 125264 - DNA, 17 bp, synthetic construct
  source 1..17: mol_type = other DNA
cttgagggtaaggaagg

SEQ ID NO: 125265 - DNA, 17 bp, synthetic construct
  source 1..17: mol_type = other DNA
ttgagggtaaggaaggg

SEQ ID NO: 125266 - DNA, 17 bp, synthetic construct
  source 1..17: mol_type = other DNA
tgagggtaaggaagggc

SEQ ID NO: 125267 - DNA, 17 bp, synthetic construct
  source 1..17: mol_type = other DNA
gagggtaaggaagggcc

SEQ ID NO: 125268 - DNA, 17 bp, synthetic construct
  source 1..17: mol_type = other DNA
agggtaaggaagggccg

SEQ ID NO: 125269 - DNA, 17 bp, synthetic construct
  source 1..17: mol_type = other DNA
gggtaaggaagggccgg

SEQ ID NO: 125270 - DNA, 17 bp, synthetic construct
  source 1..17: mol_type = other DNA
ggtaaggaagggccggg

SEQ ID NO: 125271 - DNA, 17 bp, synthetic construct
  source 1..17: mol_type = other DNA
gtaaggaagggccgggg

SEQ ID NO: 125272 - DNA, 17 bp, synthetic construct
  source 1..17: mol_type = other DNA
taaggaagggccggggg

SEQ ID NO: 125273 - DNA, 17 bp, synthetic construct
  source 1..17: mol_type = other DNA
aaggaagggccgggggg

SEQ ID NO: 125274 - DNA, 17 bp, synthetic construct
  source 1..17: mol_type = other DNA
aggaagggccggggggt

SEQ ID NO: 125275 - DNA, 17 bp, synthetic construct
  source 1..17: mol_type = other DNA
ggaagggccggggggtt

SEQ ID NO: 125276 - DNA, 17 bp, synthetic construct
  source 1..17: mol_type = other DNA
gaagggccggggggtta

SEQ ID NO: 125277 - DNA, 17 bp, synthetic construct
  source 1..17: mol_type = other DNA
aagggccggggggttag

SEQ ID NO: 125278 - DNA, 17 bp, synthetic construct
  source 1..17: mol_type = other DNA
agggccggggggttagt

SEQ ID NO: 125279 - DNA, 17 bp, synthetic construct
  source 1..17: mol_type = other DNA
gggccggggggttagtg

SEQ ID NO: 125280 - DNA, 17 bp, synthetic construct
  source 1..17: mol_type = other DNA
ggccggggggttagtgg

SEQ ID NO: 125281 - DNA, 17 bp, synthetic construct
  source 1..17: mol_type = other DNA
gccggggggttagtggg

SEQ ID NO: 125282 - DNA, 17 bp, synthetic construct
  source 1..17: mol_type = other DNA
ccggggggttagtgggc

SEQ ID NO: 125283 - DNA, 17 bp, synthetic construct
  source 1..17: mol_type = other DNA
cggggggttagtgggcc

SEQ ID NO: 125284 - DNA, 17 bp, synthetic construct
  source 1..17: mol_type = other DNA
ggggggttagtgggccg

SEQ ID NO: 125285 - DNA, 17 bp, synthetic construct
  source 1..17: mol_type = other DNA
gggggttagtgggccgg

SEQ ID NO: 125286 - DNA, 17 bp, synthetic construct
  source 1..17: mol_type = other DNA
ggggttagtgggccggt

SEQ ID NO: 125287 - DNA, 17 bp, synthetic construct
  source 1..17: mol_type = other DNA
gggttagtgggccggtg

SEQ ID NO: 125288 - DNA, 17 bp, synthetic construct
  source 1..17: mol_type = other DNA
ggttagtgggccggtga

SEQ ID NO: 125289 - DNA, 17 bp, synthetic construct
  source 1..17: mol_type = other DNA
gttagtgggccggtgaa

SEQ ID NO: 125290 - DNA, 17 bp, synthetic construct
  source 1..17: mol_type = other DNA
ttagtgggccggtgaag

SEQ ID NO: 125291 - DNA, 17 bp, synthetic construct
  source 1..17: mol_type = other DNA
tagtgggccggtgaagg

SEQ ID NO: 125292 - DNA, 17 bp, synthetic construct
  source 1..17: mol_type = other DNA
agtgggccggtgaaggc

SEQ ID NO: 125293 - DNA, 17 bp, synthetic construct
  source 1..17: mol_type = other DNA
gtgggccggtgaaggct

SEQ ID NO: 125294 - DNA, 17 bp, synthetic construct
  source 1..17: mol_type = other DNA
tgggccggtgaaggctg

SEQ ID NO: 125295 - DNA, 17 bp, synthetic construct
  source 1..17: mol_type = other DNA
gggccggtgaaggctgg

SEQ ID NO: 125296 - DNA, 17 bp, synthetic construct
  source 1..17: mol_type = other DNA
ggccggtgaaggctggg

SEQ ID NO: 125297 - DNA, 17 bp, synthetic construct
  source 1..17: mol_type = other DNA
gccggtgaaggctgggg

SEQ ID NO: 125298 - DNA, 17 bp, synthetic construct
  source 1..17: mol_type = other DNA
ccggtgaaggctggggc

SEQ ID NO: 125299 - DNA, 17 bp, synthetic construct
  source 1..17: mol_type = other DNA
cggtgaaggctggggcc

SEQ ID NO: 125300 - DNA, 17 bp, synthetic construct
  source 1..17: mol_type = other DNA
ggtgaaggctggggcca

SEQ ID NO: 125301 - DNA, 17 bp, synthetic construct
  source 1..17: mol_type = other DNA
gtgaaggctggggccag

SEQ ID NO: 125302 - DNA, 17 bp, synthetic construct
  source 1..17: mol_type = other DNA
tgaaggctggggccagg

SEQ ID NO: 125303 - DNA, 17 bp, synthetic construct
  source 1..17: mol_type = other DNA
gaaggctggggccaggg

SEQ ID NO: 125304 - DNA, 17 bp, synthetic construct
  source 1..17: mol_type = other DNA
aaggctggggccagggg

SEQ ID NO: 125305 - DNA, 17 bp, synthetic construct
  source 1..17: mol_type = other DNA
aggctggggccaggggc

SEQ ID NO: 125306 - DNA, 17 bp, synthetic construct
  source 1..17: mol_type = other DNA
ggctggggccaggggct

SEQ ID NO: 125307 - DNA, 17 bp, synthetic construct
  source 1..17: mol_type = other DNA
gctggggccaggggctc

SEQ ID NO: 125308 - DNA, 17 bp, synthetic construct
  source 1..17: mol_type = other DNA
ctggggccaggggctcg

SEQ ID NO: 125309 - DNA, 17 bp, synthetic construct
  source 1..17: mol_type = other DNA
tggggccaggggctcgg

SEQ ID NO: 125310 - DNA, 17 bp, synthetic construct
  source 1..17: mol_type = other DNA
ggggccaggggctcgga

SEQ ID NO: 125311 - DNA, 17 bp, synthetic construct
  source 1..17: mol_type = other DNA
gggccaggggctcggag

SEQ ID NO: 125312 - DNA, 17 bp, synthetic construct
  source 1..17: mol_type = other DNA
ggccaggggctcggagg

SEQ ID NO: 125313 - DNA, 17 bp, synthetic construct
  source 1..17: mol_type = other DNA
gccaggggctcggaggc

SEQ ID NO: 125314 - DNA, 17 bp, synthetic construct
  source 1..17: mol_type = other DNA
ccaggggctcggaggcc

SEQ ID NO: 125315 - DNA, 17 bp, synthetic construct
  source 1..17: mol_type = other DNA
caggggctcggaggccc

SEQ ID NO: 125316 - DNA, 17 bp, synthetic construct
  source 1..17: mol_type = other DNA
aggggctcggaggccct

SEQ ID NO: 125317 - DNA, 17 bp, synthetic construct
  source 1..17: mol_type = other DNA
ggggctcggaggccctg

SEQ ID NO: 125318 - DNA, 17 bp, synthetic construct
  source 1..17: mol_type = other DNA
gggctcggaggccctgg

SEQ ID NO: 125319 - DNA, 17 bp, synthetic construct
  source 1..17: mol_type = other DNA
ggctcggaggccctggg

SEQ ID NO: 125320 - DNA, 17 bp, synthetic construct
  source 1..17: mol_type = other DNA
gctcggaggccctgggt

SEQ ID NO: 125321 - DNA, 17 bp, synthetic construct
  source 1..17: mol_type = other DNA
ctcggaggccctgggtg

SEQ ID NO: 125322 - DNA, 17 bp, synthetic construct
  source 1..17: mol_type = other DNA
tcggaggccctgggtga

SEQ ID NO: 125323 - DNA, 17 bp, synthetic construct
  source 1..17: mol_type = other DNA
cggaggccctgggtgac

SEQ ID NO: 125324 - DNA, 17 bp, synthetic construct
  source 1..17: mol_type = other DNA
ggaggccctgggtgact

SEQ ID NO: 125325 - DNA, 17 bp, synthetic construct
  source 1..17: mol_type = other DNA
gaggccctgggtgactc

SEQ ID NO: 125326 - DNA, 17 bp, synthetic construct
  source 1..17: mol_type = other DNA
aggccctgggtgactct

SEQ ID NO: 125327 - DNA, 17 bp, synthetic construct
  source 1..17: mol_type = other DNA
ggccctgggtgactctg

SEQ ID NO: 125328 - DNA, 17 bp, synthetic construct
  source 1..17: mol_type = other DNA
gccctgggtgactctgc

SEQ ID NO: 125329 - DNA, 17 bp, synthetic construct
  source 1..17: mol_type = other DNA
ccctgggtgactctgcc

SEQ ID NO: 125330 - DNA, 17 bp, synthetic construct
  source 1..17: mol_type = other DNA
cctgggtgactctgccg

SEQ ID NO: 125331 - DNA, 17 bp, synthetic construct
  source 1..17: mol_type = other DNA
ctgggtgactctgccgg

SEQ ID NO: 125332 - DNA, 17 bp, synthetic construct
  source 1..17: mol_type = other DNA
tgggtgactctgccggc

SEQ ID NO: 125333 - DNA, 17 bp, synthetic construct
  source 1..17: mol_type = other DNA
gggtgactctgccggct

SEQ ID NO: 125334 - DNA, 17 bp, synthetic construct
  source 1..17: mol_type = other DNA
ggtgactctgccggctc

SEQ ID NO: 125335 - DNA, 17 bp, synthetic construct
  source 1..17: mol_type = other DNA
gtgactctgccggctcc

SEQ ID NO: 125336 - DNA, 17 bp, synthetic construct
  source 1..17: mol_type = other DNA
tgactctgccggctcca

SEQ ID NO: 125337 - DNA, 17 bp, synthetic construct
  source 1..17: mol_type = other DNA
gactctgccggctccat

SEQ ID NO: 125338 - DNA, 17 bp, synthetic construct
  source 1..17: mol_type = other DNA
actctgccggctccatc

SEQ ID NO: 125339 - DNA, 17 bp, synthetic construct
  source 1..17: mol_type = other DNA
ctctgccggctccatcc

SEQ ID NO: 125340 - DNA, 17 bp, synthetic construct
  source 1..17: mol_type = other DNA
tctgccggctccatccc

SEQ ID NO: 125341 - DNA, 17 bp, synthetic construct
  source 1..17: mol_type = other DNA
ctgccggctccatcccc

SEQ ID NO: 125342 - DNA, 17 bp, synthetic construct
  source 1..17: mol_type = other DNA
tgccggctccatcccca

SEQ ID NO: 125343 - DNA, 17 bp, synthetic construct
  source 1..17: mol_type = other DNA
gccggctccatccccag

SEQ ID NO: 125344 - DNA, 17 bp, synthetic construct
  source 1..17: mol_type = other DNA
ccggctccatccccagc

SEQ ID NO: 125345 - DNA, 17 bp, synthetic construct
  source 1..17: mol_type = other DNA
cggctccatccccagcc

SEQ ID NO: 125346 - DNA, 17 bp, synthetic construct
  source 1..17: mol_type = other DNA
ggctccatccccagcct

SEQ ID NO: 125347 - DNA, 17 bp, synthetic construct
  source 1..17: mol_type = other DNA
gctccatccccagcctg

SEQ ID NO: 125348 - DNA, 17 bp, synthetic construct
  source 1..17: mol_type = other DNA
ctccatccccagcctgc

SEQ ID NO: 125349 - DNA, 17 bp, synthetic construct
  source 1..17: mol_type = other DNA
tccatccccagcctgca

SEQ ID NO: 125350 - DNA, 17 bp, synthetic construct
  source 1..17: mol_type = other DNA
ccatccccagcctgcac

SEQ ID NO: 125351 - DNA, 17 bp, synthetic construct
  source 1..17: mol_type = other DNA
catccccagcctgcacc

SEQ ID NO: 125352 - DNA, 17 bp, synthetic construct
  source 1..17: mol_type = other DNA
atccccagcctgcacct

SEQ ID NO: 125353 - DNA, 17 bp, synthetic construct
  source 1..17: mol_type = other DNA
tccccagcctgcacctg

SEQ ID NO: 125354 - DNA, 17 bp, synthetic construct
  source 1..17: mol_type = other DNA
ccccagcctgcacctgc

SEQ ID NO: 125355 - DNA, 17 bp, synthetic construct
  source 1..17: mol_type = other DNA
cccagcctgcacctgca

SEQ ID NO: 125356 - DNA, 17 bp, synthetic construct
  source 1..17: mol_type = other DNA
ccagcctgcacctgcac

SEQ ID NO: 125357 - DNA, 17 bp, synthetic construct
  source 1..17: mol_type = other DNA
cagcctgcacctgcacc

SEQ ID NO: 125358 - DNA, 17 bp, synthetic construct
  source 1..17: mol_type = other DNA
agcctgcacctgcacct

SEQ ID NO: 125359 - DNA, 17 bp, synthetic construct
  source 1..17: mol_type = other DNA
gcctgcacctgcaccta

SEQ ID NO: 125360 - DNA, 17 bp, synthetic construct
  source 1..17: mol_type = other DNA
cctgcacctgcacctat

SEQ ID NO: 125361 - DNA, 17 bp, synthetic construct
  source 1..17: mol_type = other DNA
ctgcacctgcacctatg

SEQ ID NO: 125362 - DNA, 17 bp, synthetic construct
  source 1..17: mol_type = other DNA
tgcacctgcacctatga

SEQ ID NO: 125363 - DNA, 17 bp, synthetic construct
  source 1..17: mol_type = other DNA
gcacctgcacctatgag

SEQ ID NO: 125364 - DNA, 17 bp, synthetic construct
  source 1..17: mol_type = other DNA
cacctgcacctatgagg

SEQ ID NO: 125365 - DNA, 17 bp, synthetic construct
  source 1..17: mol_type = other DNA
acctgcacctatgagga

SEQ ID NO: 125366 - DNA, 17 bp, synthetic construct
  source 1..17: mol_type = other DNA
cctgcacctatgaggac

SEQ ID NO: 125367 - DNA, 17 bp, synthetic construct
  source 1..17: mol_type = other DNA
ctgcacctatgaggaca

SEQ ID NO: 125368 - DNA, 17 bp, synthetic construct
  source 1..17: mol_type = other DNA
tgcacctatgaggacag

SEQ ID NO: 125369 - DNA, 17 bp, synthetic construct
  source 1..17: mol_type = other DNA
gcacctatgaggacagg

SEQ ID NO: 125370 - DNA, 17 bp, synthetic construct
  source 1..17: mol_type = other DNA
cacctatgaggacagga

SEQ ID NO: 125371 - DNA, 17 bp, synthetic construct
  source 1..17: mol_type = other DNA
acctatgaggacaggac

SEQ ID NO: 125372 - DNA, 17 bp, synthetic construct
  source 1..17: mol_type = other DNA
cctatgaggacaggacc

SEQ ID NO: 125373 - DNA, 17 bp, synthetic construct
  source 1..17: mol_type = other DNA
ctatgaggacaggacct

SEQ ID NO: 125374 - DNA, 17 bp, synthetic construct
  source 1..17: mol_type = other DNA
tatgaggacaggaccta

SEQ ID NO: 125375 - DNA, 17 bp, synthetic construct
  source 1..17: mol_type = other DNA
atgaggacaggacctac

SEQ ID NO: 125376 - DNA, 17 bp, synthetic construct
  source 1..17: mol_type = other DNA
tgaggacaggacctaca

SEQ ID NO: 125377 - DNA, 17 bp, synthetic construct
  source 1..17: mol_type = other DNA
gaggacaggacctacag

SEQ ID NO: 125378 - DNA, 17 bp, synthetic construct
  source 1..17: mol_type = other DNA
aggacaggacctacagc

SEQ ID NO: 125379 - DNA, 17 bp, synthetic construct
  source 1..17: mol_type = other DNA
ggacaggacctacagct

SEQ ID NO: 125380 - DNA, 17 bp, synthetic construct
  source 1..17: mol_type = other DNA
gacaggacctacagcta

SEQ ID NO: 125381 - DNA, 17 bp, synthetic construct
  source 1..17: mol_type = other DNA
acaggacctacagctac

SEQ ID NO: 125382 - DNA, 17 bp, synthetic construct
  source 1..17: mol_type = other DNA
caggacctacagctacc

SEQ ID NO: 125383 - DNA, 17 bp, synthetic construct
  source 1..17: mol_type = other DNA
aggacctacagctacca

SEQ ID NO: 125384 - DNA, 17 bp, synthetic construct
  source 1..17: mol_type = other DNA
ggacctacagctaccag

SEQ ID NO: 125385 - DNA, 17 bp, synthetic construct
  source 1..17: mol_type = other DNA
gacctacagctaccagg

SEQ ID NO: 125386 - DNA, 17 bp, synthetic construct
  source 1..17: mol_type = other DNA
acctacagctaccagga

SEQ ID NO: 125387 - DNA, 17 bp, synthetic construct
  source 1..17: mol_type = other DNA
cctacagctaccaggac

SEQ ID NO: 125388 - DNA, 17 bp, synthetic construct
  source 1..17: mol_type = other DNA
ctacagctaccaggacg

SEQ ID NO: 125389 - DNA, 17 bp, synthetic construct
  source 1..17: mol_type = other DNA
tacagctaccaggacgt

SEQ ID NO: 125390 - DNA, 17 bp, synthetic construct
  source 1..17: mol_type = other DNA
acagctaccaggacgtc

SEQ ID NO: 125391 - DNA, 17 bp, synthetic construct
  source 1..17: mol_type = other DNA
cagctaccaggacgtca

SEQ ID NO: 125392 - DNA, 17 bp, synthetic construct
  source 1..17: mol_type = other DNA
agctaccaggacgtcat

SEQ ID NO: 125393 - DNA, 17 bp, synthetic construct
  source 1..17: mol_type = other DNA
gctaccaggacgtcatc

SEQ ID NO: 125394 - DNA, 17 bp, synthetic construct
  source 1..17: mol_type = other DNA
ctaccaggacgtcatct

SEQ ID NO: 125395 - DNA, 17 bp, synthetic construct
  source 1..17: mol_type = other DNA
taccaggacgtcatcta

SEQ ID NO: 125396 - DNA, 17 bp, synthetic construct
  source 1..17: mol_type = other DNA
accaggacgtcatctac

SEQ ID NO: 125397 - DNA, 17 bp, synthetic construct
  source 1..17: mol_type = other DNA
ccaggacgtcatctaca

SEQ ID NO: 125398 - DNA, 17 bp, synthetic construct
  source 1..17: mol_type = other DNA
caggacgtcatctacaa

SEQ ID NO: 125399 - DNA, 17 bp, synthetic construct
  source 1..17: mol_type = other DNA
aggacgtcatctacaac

SEQ ID NO: 125400 - DNA, 17 bp, synthetic construct
  source 1..17: mol_type = other DNA
ggacgtcatctacaaca

SEQ ID NO: 125401 - DNA, 17 bp, synthetic construct
  source 1..17: mol_type = other DNA
gacgtcatctacaacac

SEQ ID NO: 125402 - DNA, 17 bp, synthetic construct
  source 1..17: mol_type = other DNA
acgtcatctacaacacc

SEQ ID NO: 125403 - DNA, 17 bp, synthetic construct
  source 1..17: mol_type = other DNA
cgtcatctacaacacca

SEQ ID NO: 125404 - DNA, 17 bp, synthetic construct
  source 1..17: mol_type = other DNA
gtcatctacaacaccac

SEQ ID NO: 125405 - DNA, 17 bp, synthetic construct
  source 1..17: mol_type = other DNA
tcatctacaacaccacc

SEQ ID NO: 125406 - DNA, 17 bp, synthetic construct
  source 1..17: mol_type = other DNA
catctacaacaccaccg

SEQ ID NO: 125407 - DNA, 17 bp, synthetic construct
  source 1..17: mol_type = other DNA
atctacaacaccaccga

SEQ ID NO: 125408 - DNA, 17 bp, synthetic construct
  source 1..17: mol_type = other DNA
tctacaacaccaccgat

SEQ ID NO: 125409 - DNA, 17 bp, synthetic construct
  source 1..17: mol_type = other DNA
ctacaacaccaccgatg

SEQ ID NO: 125410 - DNA, 17 bp, synthetic construct
  source 1..17: mol_type = other DNA
tacaacaccaccgatgg

SEQ ID NO: 125411 - DNA, 17 bp, synthetic construct
  source 1..17: mol_type = other DNA
acaacaccaccgatggg

SEQ ID NO: 125412 - DNA, 17 bp, synthetic construct
  source 1..17: mol_type = other DNA
caacaccaccgatgggc

SEQ ID NO: 125413 - DNA, 17 bp, synthetic construct
  source 1..17: mol_type = other DNA
aacaccaccgatgggct

SEQ ID NO: 125414 - DNA, 17 bp, synthetic construct
  source 1..17: mol_type = other DNA
acaccaccgatgggctt

SEQ ID NO: 125415 - DNA, 17 bp, synthetic construct
  source 1..17: mol_type = other DNA
caccaccgatgggcttg

SEQ ID NO: 125416 - DNA, 17 bp, synthetic construct
  source 1..17: mol_type = other DNA
accaccgatgggcttgg

SEQ ID NO: 125417 - DNA, 17 bp, synthetic construct
  source 1..17: mol_type = other DNA
ccaccgatgggcttggc

SEQ ID NO: 125418 - DNA, 17 bp, synthetic construct
  source 1..17: mol_type = other DNA
caccgatgggcttggcg

SEQ ID NO: 125419 - DNA, 17 bp, synthetic construct
  source 1..17: mol_type = other DNA
accgatgggcttggcgc

SEQ ID NO: 125420 - DNA, 17 bp, synthetic construct
  source 1..17: mol_type = other DNA
ccgatgggcttggcgcc

SEQ ID NO: 125421 - DNA, 17 bp, synthetic construct
  source 1..17: mol_type = other DNA
cgatgggcttggcgcct

SEQ ID NO: 125422 - DNA, 17 bp, synthetic construct
  source 1..17: mol_type = other DNA
gatgggcttggcgcctg

SEQ ID NO: 125423 - DNA, 17 bp, synthetic construct
  source 1..17: mol_type = other DNA
atgggcttggcgcctgc

SEQ ID NO: 125424 - DNA, 17 bp, synthetic construct
  source 1..17: mol_type = other DNA
tgggcttggcgcctgct

SEQ ID NO: 125425 - DNA, 17 bp, synthetic construct
  source 1..17: mol_type = other DNA
gggcttggcgcctgctt

SEQ ID NO: 125426 - DNA, 17 bp, synthetic construct
  source 1..17: mol_type = other DNA
ggcttggcgcctgcttg

SEQ ID NO: 125427 - DNA, 17 bp, synthetic construct
  source 1..17: mol_type = other DNA
gcttggcgcctgcttga

SEQ ID NO: 125428 - DNA, 17 bp, synthetic construct
  source 1..17: mol_type = other DNA
cttggcgcctgcttgat

SEQ ID NO: 125429 - DNA, 17 bp, synthetic construct
  source 1..17: mol_type = other DNA
ttggcgcctgcttgatc

SEQ ID NO: 125430 - DNA, 17 bp, synthetic construct
  source 1..17: mol_type = other DNA
tggcgcctgcttgatcg

SEQ ID NO: 125431 - DNA, 17 bp, synthetic construct
  source 1..17: mol_type = other DNA
ggcgcctgcttgatcgc

SEQ ID NO: 125432 - DNA, 17 bp, synthetic construct
  source 1..17: mol_type = other DNA
gcgcctgcttgatcgcc

SEQ ID NO: 125433 - DNA, 17 bp, synthetic construct
  source 1..17: mol_type = other DNA
cgcctgcttgatcgcca

SEQ ID NO: 125434 - DNA, 17 bp, synthetic construct
  source 1..17: mol_type = other DNA
gcctgcttgatcgccat

SEQ ID NO: 125435 - DNA, 17 bp, synthetic construct
  source 1..17: mol_type = other DNA
cctgcttgatcgccatc

SEQ ID NO: 125436 - DNA, 17 bp, synthetic construct
  source 1..17: mol_type = other DNA
ctgcttgatcgccatct

SEQ ID NO: 125437 - DNA, 17 bp, synthetic construct
  source 1..17: mol_type = other DNA
tgcttgatcgccatctg

SEQ ID NO: 125438 - DNA, 17 bp, synthetic construct
  source 1..17: mol_type = other DNA
gcttgatcgccatctgc

SEQ ID NO: 125439 - DNA, 17 bp, synthetic construct
  source 1..17: mol_type = other DNA
cttgatcgccatctgcg

SEQ ID NO: 125440 - DNA, 17 bp, synthetic construct
  source 1..17: mol_type = other DNA
ttgatcgccatctgcgg

SEQ ID NO: 125441 - DNA, 17 bp, synthetic construct
  source 1..17: mol_type = other DNA
tgatcgccatctgcgga

SEQ ID NO: 125442 - DNA, 17 bp, synthetic construct
  source 1..17: mol_type = other DNA
gatcgccatctgcggaa

SEQ ID NO: 125443 - DNA, 17 bp, synthetic construct
  source 1..17: mol_type = other DNA
atcgccatctgcggaag

SEQ ID NO: 125444 - DNA, 17 bp, synthetic construct
  source 1..17: mol_type = other DNA
tcgccatctgcggaagc

SEQ ID NO: 125445 - DNA, 17 bp, synthetic construct
  source 1..17: mol_type = other DNA
cgccatctgcggaagca

SEQ ID NO: 125446 - DNA, 17 bp, synthetic construct
  source 1..17: mol_type = other DNA
gccatctgcggaagcaa

SEQ ID NO: 125447 - DNA, 17 bp, synthetic construct
  source 1..17: mol_type = other DNA
ccatctgcggaagcaac

SEQ ID NO: 125448 - DNA, 17 bp, synthetic construct
  source 1..17: mol_type = other DNA
catctgcggaagcaacg

SEQ ID NO: 125449 - DNA, 17 bp, synthetic construct
  source 1..17: mol_type = other DNA
atctgcggaagcaacgg

SEQ ID NO: 125450 - DNA, 17 bp, synthetic construct
  source 1..17: mol_type = other DNA
tctgcggaagcaacggc

SEQ ID NO: 125451 - DNA, 17 bp, synthetic construct
  source 1..17: mol_type = other DNA
ctgcggaagcaacggca

SEQ ID NO: 125452 - DNA, 17 bp, synthetic construct
  source 1..17: mol_type = other DNA
tgcggaagcaacggcac

SEQ ID NO: 125453 - DNA, 17 bp, synthetic construct
  source 1..17: mol_type = other DNA
gcggaagcaacggcacc

SEQ ID NO: 125454 - DNA, 17 bp, synthetic construct
  source 1..17: mol_type = other DNA
cggaagcaacggcacca

SEQ ID NO: 125455 - DNA, 17 bp, synthetic construct
  source 1..17: mol_type = other DNA
ggaagcaacggcaccat

SEQ ID NO: 125456 - DNA, 17 bp, synthetic construct
  source 1..17: mol_type = other DNA
gaagcaacggcaccatc

SEQ ID NO: 125457 - DNA, 17 bp, synthetic construct
  source 1..17: mol_type = other DNA
aagcaacggcaccatca

SEQ ID NO: 125458 - DNA, 17 bp, synthetic construct
  source 1..17: mol_type = other DNA
agcaacggcaccatcat

SEQ ID NO: 125459 - DNA, 17 bp, synthetic construct
  source 1..17: mol_type = other DNA
gcaacggcaccatcatc

SEQ ID NO: 125460 - DNA, 17 bp, synthetic construct
  source 1..17: mol_type = other DNA
caacggcaccatcatca

SEQ ID NO: 125461 - DNA, 17 bp, synthetic construct
  source 1..17: mol_type = other DNA
aacggcaccatcatcag

SEQ ID NO: 125462 - DNA, 17 bp, synthetic construct
  source 1..17: mol_type = other DNA
acggcaccatcatcagg

SEQ ID NO: 125463 - DNA, 17 bp, synthetic construct
  source 1..17: mol_type = other DNA
cggcaccatcatcagga

SEQ ID NO: 125464 - DNA, 17 bp, synthetic construct
  source 1..17: mol_type = other DNA
ggcaccatcatcaggaa

SEQ ID NO: 125465 - DNA, 17 bp, synthetic construct
  source 1..17: mol_type = other DNA
gcaccatcatcaggaag

SEQ ID NO: 125466 - DNA, 17 bp, synthetic construct
  source 1..17: mol_type = other DNA
caccatcatcaggaagg

SEQ ID NO: 125467 - DNA, 17 bp, synthetic construct
  source 1..17: mol_type = other DNA
accatcatcaggaaggc

SEQ ID NO: 125468 - DNA, 17 bp, synthetic construct
  source 1..17: mol_type = other DNA
ccatcatcaggaaggct

SEQ ID NO: 125469 - DNA, 17 bp, synthetic construct
  source 1..17: mol_type = other DNA
catcatcaggaaggctg

SEQ ID NO: 125470 - DNA, 17 bp, synthetic construct
  source 1..17: mol_type = other DNA
atcatcaggaaggctgt

SEQ ID NO: 125471 - DNA, 17 bp, synthetic construct
  source 1..17: mol_type = other DNA
tcatcaggaaggctgtg

SEQ ID NO: 125472 - DNA, 17 bp, synthetic construct
  source 1..17: mol_type = other DNA
catcaggaaggctgtgg

SEQ ID NO: 125473 - DNA, 17 bp, synthetic construct
  source 1..17: mol_type = other DNA
atcaggaaggctgtggc

SEQ ID NO: 125474 - DNA, 17 bp, synthetic construct
  source 1..17: mol_type = other DNA
tcaggaaggctgtggca

SEQ ID NO: 125475 - DNA, 17 bp, synthetic construct
  source 1..17: mol_type = other DNA
caggaaggctgtggcat

SEQ ID NO: 125476 - DNA, 17 bp, synthetic construct
  source 1..17: mol_type = other DNA
aggaaggctgtggcatg

SEQ ID NO: 125477 - DNA, 17 bp, synthetic construct
  source 1..17: mol_type = other DNA
ggaaggctgtggcatgt

SEQ ID NO: 125478 - DNA, 17 bp, synthetic construct
  source 1..17: mol_type = other DNA
gaaggctgtggcatgtc

SEQ ID NO: 125479 - DNA, 17 bp, synthetic construct
  source 1..17: mol_type = other DNA
aaggctgtggcatgtcc

SEQ ID NO: 125480 - DNA, 17 bp, synthetic construct
  source 1..17: mol_type = other DNA
aggctgtggcatgtcct

SEQ ID NO: 125481 - DNA, 17 bp, synthetic construct
  source 1..17: mol_type = other DNA
ggctgtggcatgtcctg

SEQ ID NO: 125482 - DNA, 17 bp, synthetic construct
  source 1..17: mol_type = other DNA
gctgtggcatgtcctgg

SEQ ID NO: 125483 - DNA, 17 bp, synthetic construct
  source 1..17: mol_type = other DNA
ctgtggcatgtcctgga

SEQ ID NO: 125484 - DNA, 17 bp, synthetic construct
  source 1..17: mol_type = other DNA
tgtggcatgtcctggaa

SEQ ID NO: 125485 - DNA, 17 bp, synthetic construct
  source 1..17: mol_type = other DNA
gtggcatgtcctggaac

SEQ ID NO: 125486 - DNA, 17 bp, synthetic construct
  source 1..17: mol_type = other DNA
tggcatgtcctggaact

SEQ ID NO: 125487 - DNA, 17 bp, synthetic construct
  source 1..17: mol_type = other DNA
ggcatgtcctggaactc

SEQ ID NO: 125488 - DNA, 17 bp, synthetic construct
  source 1..17: mol_type = other DNA
gcatgtcctggaactcc

SEQ ID NO: 125489 - DNA, 17 bp, synthetic construct
  source 1..17: mol_type = other DNA
catgtcctggaactcca

SEQ ID NO: 125490 - DNA, 17 bp, synthetic construct
  source 1..17: mol_type = other DNA
atgtcctggaactccag

SEQ ID NO: 125491 - DNA, 17 bp, synthetic construct
  source 1..17: mol_type = other DNA
tgtcctggaactccagc

SEQ ID NO: 125492 - DNA, 17 bp, synthetic construct
  source 1..17: mol_type = other DNA
gtcctggaactccagcc

SEQ ID NO: 125493 - DNA, 17 bp, synthetic construct
  source 1..17: mol_type = other DNA
tcctggaactccagcca

SEQ ID NO: 125494 - DNA, 17 bp, synthetic construct
  source 1..17: mol_type = other DNA
cctggaactccagccac

SEQ ID NO: 125495 - DNA, 17 bp, synthetic construct
  source 1..17: mol_type = other DNA
ctggaactccagccaca

SEQ ID NO: 125496 - DNA, 17 bp, synthetic construct
  source 1..17: mol_type = other DNA
tggaactccagccacaa

SEQ ID NO: 125497 - DNA, 17 bp, synthetic construct
  source 1..17: mol_type = other DNA
ggaactccagccacaac

SEQ ID NO: 125498 - DNA, 17 bp, synthetic construct
  source 1..17: mol_type = other DNA
gaactccagccacaacg

SEQ ID NO: 125499 - DNA, 17 bp, synthetic construct
  source 1..17: mol_type = other DNA
aactccagccacaacgc

SEQ ID NO: 125500 - DNA, 17 bp, synthetic construct
  source 1..17: mol_type = other DNA
actccagccacaacgcc

SEQ ID NO: 125501 - DNA, 17 bp, synthetic construct
  source 1..17: mol_type = other DNA
ctccagccacaacgcca

SEQ ID NO: 125502 - DNA, 17 bp, synthetic construct
  source 1..17: mol_type = other DNA
tccagccacaacgccat

SEQ ID NO: 125503 - DNA, 17 bp, synthetic construct
  source 1..17: mol_type = other DNA
ccagccacaacgccatt

SEQ ID NO: 125504 - DNA, 17 bp, synthetic construct
  source 1..17: mol_type = other DNA
cagccacaacgccattc

SEQ ID NO: 125505 - DNA, 17 bp, synthetic construct
  source 1..17: mol_type = other DNA
agccacaacgccattca

SEQ ID NO: 125506 - DNA, 17 bp, synthetic construct
  source 1..17: mol_type = other DNA
gccacaacgccattcac

SEQ ID NO: 125507 - DNA, 17 bp, synthetic construct
  source 1..17: mol_type = other DNA
ccacaacgccattcacc

SEQ ID NO: 125508 - DNA, 17 bp, synthetic construct
  source 1..17: mol_type = other DNA
cacaacgccattcacct

SEQ ID NO: 125509 - DNA, 17 bp, synthetic construct
  source 1..17: mol_type = other DNA
acaacgccattcacctt

SEQ ID NO: 125510 - DNA, 17 bp, synthetic construct
  source 1..17: mol_type = other DNA
caacgccattcaccttc

SEQ ID NO: 125511 - DNA, 17 bp, synthetic construct
  source 1..17: mol_type = other DNA
aacgccattcaccttca

SEQ ID NO: 125512 - DNA, 17 bp, synthetic construct
  source 1..17: mol_type = other DNA
acgccattcaccttcac

SEQ ID NO: 125513 - DNA, 17 bp, synthetic construct
  source 1..17: mol_type = other DNA
cgccattcaccttcacc

SEQ ID NO: 125514 - DNA, 17 bp, synthetic construct
  source 1..17: mol_type = other DNA
gccattcaccttcacca

SEQ ID NO: 125515 - DNA, 17 bp, synthetic construct
  source 1..17: mol_type = other DNA
ccattcaccttcaccac

SEQ ID NO: 125516 - DNA, 17 bp, synthetic construct
  source 1..17: mol_type = other DNA
cattcaccttcaccacc

SEQ ID NO: 125517 - DNA, 17 bp, synthetic construct
  source 1..17: mol_type = other DNA
attcaccttcaccaccg

SEQ ID NO: 125518 - DNA, 17 bp, synthetic construct
  source 1..17: mol_type = other DNA
ttcaccttcaccaccgc

SEQ ID NO: 125519 - DNA, 17 bp, synthetic construct
  source 1..17: mol_type = other DNA
tcaccttcaccaccgcc

SEQ ID NO: 125520 - DNA, 17 bp, synthetic construct
  source 1..17: mol_type = other DNA
caccttcaccaccgcct

SEQ ID NO: 125521 - DNA, 17 bp, synthetic construct
  source 1..17: mol_type = other DNA
accttcaccaccgcctg

SEQ ID NO: 125522 - DNA, 17 bp, synthetic construct
  source 1..17: mol_type = other DNA
ccttcaccaccgcctgg

SEQ ID NO: 125523 - DNA, 17 bp, synthetic construct
  source 1..17: mol_type = other DNA
cttcaccaccgcctggg

SEQ ID NO: 125524 - DNA, 17 bp, synthetic construct
  source 1..17: mol_type = other DNA
ttcaccaccgcctgggt

SEQ ID NO: 125525 - DNA, 17 bp, synthetic construct
  source 1..17: mol_type = other DNA
tcaccaccgcctgggtc

SEQ ID NO: 125526 - DNA, 17 bp, synthetic construct
  source 1..17: mol_type = other DNA
caccaccgcctgggtcc

SEQ ID NO: 125527 - DNA, 17 bp, synthetic construct
  source 1..17: mol_type = other DNA
accaccgcctgggtccc

SEQ ID NO: 125528 - DNA, 17 bp, synthetic construct
  source 1..17: mol_type = other DNA
ccaccgcctgggtcccc

SEQ ID NO: 125529 - DNA, 17 bp, synthetic construct
  source 1..17: mol_type = other DNA
caccgcctgggtccccc

SEQ ID NO: 125530 - DNA, 17 bp, synthetic construct
  source 1..17: mol_type = other DNA
accgcctgggtccccca

SEQ ID NO: 125531 - DNA, 17 bp, synthetic construct
  source 1..17: mol_type = other DNA
ccgcctgggtcccccac

SEQ ID NO: 125532 - DNA, 17 bp, synthetic construct
  source 1..17: mol_type = other DNA
cgcctgggtcccccact

SEQ ID NO: 125533 - DNA, 17 bp, synthetic construct
  source 1..17: mol_type = other DNA
gcctgggtcccccactc

SEQ ID NO: 125534 - DNA, 17 bp, synthetic construct
  source 1..17: mol_type = other DNA
cctgggtcccccactcc

SEQ ID NO: 125535 - DNA, 17 bp, synthetic construct
  source 1..17: mol_type = other DNA
ctgggtcccccactcca

SEQ ID NO: 125536 - DNA, 17 bp, synthetic construct
  source 1..17: mol_type = other DNA
tgggtcccccactccac

SEQ ID NO: 125537 - DNA, 17 bp, synthetic construct
  source 1..17: mol_type = other DNA
gggtcccccactccacg

SEQ ID NO: 125538 - DNA, 17 bp, synthetic construct
  source 1..17: mol_type = other DNA
ggtcccccactccacga

SEQ ID NO: 125539 - DNA, 17 bp, synthetic construct
  source 1..17: mol_type = other DNA
gtcccccactccacgac

SEQ ID NO: 125540 - DNA, 17 bp, synthetic construct
  source 1..17: mol_type = other DNA
tcccccactccacgaca

SEQ ID NO: 125541 - DNA, 17 bp, synthetic construct
  source 1..17: mol_type = other DNA
cccccactccacgacaa

SEQ ID NO: 125542 - DNA, 17 bp, synthetic construct
  source 1..17: mol_type = other DNA
ccccactccacgacaag

SEQ ID NO: 125543 - DNA, 17 bp, synthetic construct
  source 1..17: mol_type = other DNA
cccactccacgacaagt

SEQ ID NO: 125544 - DNA, 17 bp, synthetic construct
  source 1..17: mol_type = other DNA
ccactccacgacaagta

SEQ ID NO: 125545 - DNA, 17 bp, synthetic construct
  source 1..17: mol_type = other DNA
cactccacgacaagtaa

SEQ ID NO: 125546 - DNA, 17 bp, synthetic construct
  source 1..17: mol_type = other DNA
actccacgacaagtaag

SEQ ID NO: 125547 - DNA, 17 bp, synthetic construct
  source 1..17: mol_type = other DNA
ctccacgacaagtaagc

SEQ ID NO: 125548 - DNA, 17 bp, synthetic construct
  source 1..17: mol_type = other DNA
tccacgacaagtaagcc

SEQ ID NO: 125549 - DNA, 17 bp, synthetic construct
  source 1..17: mol_type = other DNA
ccacgacaagtaagccc

SEQ ID NO: 125550 - DNA, 17 bp, synthetic construct
  source 1..17: mol_type = other DNA
cacgacaagtaagccct

SEQ ID NO: 125551 - DNA, 17 bp, synthetic construct
  source 1..17: mol_type = other DNA
acgacaagtaagccctg

SEQ ID NO: 125552 - DNA, 17 bp, synthetic construct
  source 1..17: mol_type = other DNA
cgacaagtaagccctgc

SEQ ID NO: 125553 - DNA, 17 bp, synthetic construct
  source 1..17: mol_type = other DNA
gacaagtaagccctgcc

SEQ ID NO: 125554 - DNA, 17 bp, synthetic construct
  source 1..17: mol_type = other DNA
acaagtaagccctgcct

SEQ ID NO: 125555 - DNA, 17 bp, synthetic construct
  source 1..17: mol_type = other DNA
caagtaagccctgcctg

SEQ ID NO: 125556 - DNA, 17 bp, synthetic construct
  source 1..17: mol_type = other DNA
aagtaagccctgcctgg

SEQ ID NO: 125557 - DNA, 17 bp, synthetic construct
  source 1..17: mol_type = other DNA
agtaagccctgcctggc

SEQ ID NO: 125558 - DNA, 17 bp, synthetic construct
  source 1..17: mol_type = other DNA
gtaagccctgcctggct

SEQ ID NO: 125559 - DNA, 17 bp, synthetic construct
  source 1..17: mol_type = other DNA
taagccctgcctggctc

SEQ ID NO: 125560 - DNA, 17 bp, synthetic construct
  source 1..17: mol_type = other DNA
aagccctgcctggctct

SEQ ID NO: 125561 - DNA, 17 bp, synthetic construct
  source 1..17: mol_type = other DNA
agccctgcctggctctc

SEQ ID NO: 125562 - DNA, 17 bp, synthetic construct
  source 1..17: mol_type = other DNA
gccctgcctggctctcc

SEQ ID NO: 125563 - DNA, 17 bp, synthetic construct
  source 1..17: mol_type = other DNA
ccctgcctggctctcct

SEQ ID NO: 125564 - DNA, 17 bp, synthetic construct
  source 1..17: mol_type = other DNA
cctgcctggctctcctg

SEQ ID NO: 125565 - DNA, 17 bp, synthetic construct
  source 1..17: mol_type = other DNA
ctgcctggctctcctga

SEQ ID NO: 125566 - DNA, 17 bp, synthetic construct
  source 1..17: mol_type = other DNA
tgcctggctctcctgag

SEQ ID NO: 125567 - DNA, 17 bp, synthetic construct
  source 1..17: mol_type = other DNA
gcctggctctcctgagg

SEQ ID NO: 125568 - DNA, 17 bp, synthetic construct
  source 1..17: mol_type = other DNA
cctggctctcctgaggc

SEQ ID NO: 125569 - DNA, 17 bp, synthetic construct
  source 1..17: mol_type = other DNA
ctggctctcctgaggcc

SEQ ID NO: 125570 - DNA, 17 bp, synthetic construct
  source 1..17: mol_type = other DNA
tggctctcctgaggccc

SEQ ID NO: 125571 - DNA, 17 bp, synthetic construct
  source 1..17: mol_type = other DNA
ggctctcctgaggccca

SEQ ID NO: 125572 - DNA, 17 bp, synthetic construct
  source 1..17: mol_type = other DNA
gctctcctgaggcccag

SEQ ID NO: 125573 - DNA, 17 bp, synthetic construct
  source 1..17: mol_type = other DNA
ctctcctgaggcccagt

SEQ ID NO: 125574 - DNA, 17 bp, synthetic construct
  source 1..17: mol_type = other DNA
tctcctgaggcccagta

SEQ ID NO: 125575 - DNA, 17 bp, synthetic construct
  source 1..17: mol_type = other DNA
ctcctgaggcccagtac

SEQ ID NO: 125576 - DNA, 17 bp, synthetic construct
  source 1..17: mol_type = other DNA
tcctgaggcccagtacc

SEQ ID NO: 125577 - DNA, 17 bp, synthetic construct
  source 1..17: mol_type = other DNA
cctgaggcccagtaccg

SEQ ID NO: 125578 - DNA, 17 bp, synthetic construct
  source 1..17: mol_type = other DNA
ctgaggcccagtaccgt

SEQ ID NO: 125579 - DNA, 17 bp, synthetic construct
  source 1..17: mol_type = other DNA
tgaggcccagtaccgtc

SEQ ID NO: 125580 - DNA, 17 bp, synthetic construct
  source 1..17: mol_type = other DNA
gaggcccagtaccgtct

SEQ ID NO: 125581 - DNA, 17 bp, synthetic construct
  source 1..17: mol_type = other DNA
aggcccagtaccgtctg

SEQ ID NO: 125582 - DNA, 17 bp, synthetic construct
  source 1..17: mol_type = other DNA
ggcccagtaccgtctgg

SEQ ID NO: 125583 - DNA, 17 bp, synthetic construct
  source 1..17: mol_type = other DNA
gcccagtaccgtctggg

SEQ ID NO: 125584 - DNA, 17 bp, synthetic construct
  source 1..17: mol_type = other DNA
cccagtaccgtctgggt

SEQ ID NO: 125585 - DNA, 17 bp, synthetic construct
  source 1..17: mol_type = other DNA
ccagtaccgtctgggtg

SEQ ID NO: 125586 - DNA, 17 bp, synthetic construct
  source 1..17: mol_type = other DNA
cagtaccgtctgggtga

SEQ ID NO: 125587 - DNA, 17 bp, synthetic construct
  source 1..17: mol_type = other DNA
agtaccgtctgggtgac

SEQ ID NO: 125588 - DNA, 17 bp, synthetic construct
  source 1..17: mol_type = other DNA
gtaccgtctgggtgaca

SEQ ID NO: 125589 - DNA, 17 bp, synthetic construct
  source 1..17: mol_type = other DNA
taccgtctgggtgacaa

SEQ ID NO: 125590 - DNA, 17 bp, synthetic construct
  source 1..17: mol_type = other DNA
accgtctgggtgacaag

SEQ ID NO: 125591 - DNA, 17 bp, synthetic construct
  source 1..17: mol_type = other DNA
ccgtctgggtgacaagg

SEQ ID NO: 125592 - DNA, 17 bp, synthetic construct
  source 1..17: mol_type = other DNA
cgtctgggtgacaagga

SEQ ID NO: 125593 - DNA, 17 bp, synthetic construct
  source 1..17: mol_type = other DNA
gtctgggtgacaaggag

SEQ ID NO: 125594 - DNA, 17 bp, synthetic construct
  source 1..17: mol_type = other DNA
tctgggtgacaaggagg

SEQ ID NO: 125595 - DNA, 17 bp, synthetic construct
  source 1..17: mol_type = other DNA
ctgggtgacaaggagga

SEQ ID NO: 125596 - DNA, 17 bp, synthetic construct
  source 1..17: mol_type = other DNA
tgggtgacaaggaggac

SEQ ID NO: 125597 - DNA, 17 bp, synthetic construct
  source 1..17: mol_type = other DNA
gggtgacaaggaggacc

SEQ ID NO: 125598 - DNA, 17 bp, synthetic construct
  source 1..17: mol_type = other DNA
ggtgacaaggaggaccc

SEQ ID NO: 125599 - DNA, 17 bp, synthetic construct
  source 1..17: mol_type = other DNA
gtgacaaggaggacccc

SEQ ID NO: 125600 - DNA, 17 bp, synthetic construct
  source 1..17: mol_type = other DNA
tgacaaggaggaccccc

SEQ ID NO: 125601 - DNA, 17 bp, synthetic construct
  source 1..17: mol_type = other DNA
gacaaggaggaccccct

SEQ ID NO: 125602 - DNA, 17 bp, synthetic construct
  source 1..17: mol_type = other DNA
acaaggaggaccccctg

SEQ ID NO: 125603 - DNA, 17 bp, synthetic construct
  source 1..17: mol_type = other DNA
caaggaggaccccctgg

SEQ ID NO: 125604 - DNA, 17 bp, synthetic construct
  source 1..17: mol_type = other DNA
aaggaggaccccctggg

SEQ ID NO: 125605 - DNA, 17 bp, synthetic construct
  source 1..17: mol_type = other DNA
aggaggaccccctgggc

SEQ ID NO: 125606 - DNA, 17 bp, synthetic construct
  source 1..17: mol_type = other DNA
ggaggaccccctgggct

SEQ ID NO: 125607 - DNA, 17 bp, synthetic construct
  source 1..17: mol_type = other DNA
gaggaccccctgggctc

SEQ ID NO: 125608 - DNA, 17 bp, synthetic construct
  source 1..17: mol_type = other DNA
aggaccccctgggctct

SEQ ID NO: 125609 - DNA, 17 bp, synthetic construct
  source 1..17: mol_type = other DNA
ggaccccctgggctctt

SEQ ID NO: 125610 - DNA, 17 bp, synthetic construct
  source 1..17: mol_type = other DNA
gaccccctgggctctta

SEQ ID NO: 125611 - DNA, 17 bp, synthetic construct
  source 1..17: mol_type = other DNA
accccctgggctcttag

SEQ ID NO: 125612 - DNA, 17 bp, synthetic construct
  source 1..17: mol_type = other DNA
ccccctgggctcttagt

SEQ ID NO: 125613 - DNA, 17 bp, synthetic construct
  source 1..17: mol_type = other DNA
cccctgggctcttagtg

SEQ ID NO: 125614 - DNA, 17 bp, synthetic construct
  source 1..17: mol_type = other DNA
ccctgggctcttagtgc

SEQ ID NO: 125615 - DNA, 17 bp, synthetic construct
  source 1..17: mol_type = other DNA
cctgggctcttagtgca

SEQ ID NO: 125616 - DNA, 17 bp, synthetic construct
  source 1..17: mol_type = other DNA
ctgggctcttagtgcag

SEQ ID NO: 125617 - DNA, 17 bp, synthetic construct
  source 1..17: mol_type = other DNA
tgggctcttagtgcagg

SEQ ID NO: 125618 - DNA, 17 bp, synthetic construct
  source 1..17: mol_type = other DNA
gggctcttagtgcaggt

SEQ ID NO: 125619 - DNA, 17 bp, synthetic construct
  source 1..17: mol_type = other DNA
ggctcttagtgcaggtg

SEQ ID NO: 125620 - DNA, 17 bp, synthetic construct
  source 1..17: mol_type = other DNA
gctcttagtgcaggtgc

SEQ ID NO: 125621 - DNA, 17 bp, synthetic construct
  source 1..17: mol_type = other DNA
ctcttagtgcaggtgcc

SEQ ID NO: 125622 - DNA, 17 bp, synthetic construct
  source 1..17: mol_type = other DNA
tcttagtgcaggtgccc

SEQ ID NO: 125623 - DNA, 17 bp, synthetic construct
  source 1..17: mol_type = other DNA
cttagtgcaggtgccct

SEQ ID NO: 125624 - DNA, 17 bp, synthetic construct
  source 1..17: mol_type = other DNA
ttagtgcaggtgccctg

SEQ ID NO: 125625 - DNA, 17 bp, synthetic construct
  source 1..17: mol_type = other DNA
tagtgcaggtgccctgt

SEQ ID NO: 125626 - DNA, 17 bp, synthetic construct
  source 1..17: mol_type = other DNA
agtgcaggtgccctgta

SEQ ID NO: 125627 - DNA, 17 bp, synthetic construct
  source 1..17: mol_type = other DNA
gtgcaggtgccctgtat

SEQ ID NO: 125628 - DNA, 17 bp, synthetic construct
  source 1..17: mol_type = other DNA
tgcaggtgccctgtatg

SEQ ID NO: 125629 - DNA, 17 bp, synthetic construct
  source 1..17: mol_type = other DNA
gcaggtgccctgtatgg

SEQ ID NO: 125630 - DNA, 17 bp, synthetic construct
  source 1..17: mol_type = other DNA
caggtgccctgtatggt

SEQ ID NO: 125631 - DNA, 17 bp, synthetic construct
  source 1..17: mol_type = other DNA
aggtgccctgtatggta

SEQ ID NO: 125632 - DNA, 17 bp, synthetic construct
  source 1..17: mol_type = other DNA
ggtgccctgtatggtag

SEQ ID NO: 125633 - DNA, 17 bp, synthetic construct
  source 1..17: mol_type = other DNA
gtgccctgtatggtagc

SEQ ID NO: 125634 - DNA, 17 bp, synthetic construct
  source 1..17: mol_type = other DNA
tgccctgtatggtagcg

SEQ ID NO: 125635 - DNA, 17 bp, synthetic construct
  source 1..17: mol_type = other DNA
gccctgtatggtagcga

SEQ ID NO: 125636 - DNA, 17 bp, synthetic construct
  source 1..17: mol_type = other DNA
ccctgtatggtagcgac

SEQ ID NO: 125637 - DNA, 17 bp, synthetic construct
  source 1..17: mol_type = other DNA
cctgtatggtagcgaca

SEQ ID NO: 125638 - DNA, 17 bp, synthetic construct
  source 1..17: mol_type = other DNA
ctgtatggtagcgacag

SEQ ID NO: 125639 - DNA, 17 bp, synthetic construct
  source 1..17: mol_type = other DNA
tgtatggtagcgacagt

SEQ ID NO: 125640 - DNA, 17 bp, synthetic construct
  source 1..17: mol_type = other DNA
gtatggtagcgacagtc

SEQ ID NO: 125641 - DNA, 17 bp, synthetic construct
  source 1..17: mol_type = other DNA
tatggtagcgacagtcc

SEQ ID NO: 125642 - DNA, 17 bp, synthetic construct
  source 1..17: mol_type = other DNA
atggtagcgacagtccc

SEQ ID NO: 125643 - DNA, 17 bp, synthetic construct
  source 1..17: mol_type = other DNA
tggtagcgacagtccca

SEQ ID NO: 125644 - DNA, 17 bp, synthetic construct
  source 1..17: mol_type = other DNA
ggtagcgacagtcccaa

SEQ ID NO: 125645 - DNA, 17 bp, synthetic construct
  source 1..17: mol_type = other DNA
gtagcgacagtcccaat

SEQ ID NO: 125646 - DNA, 17 bp, synthetic construct
  source 1..17: mol_type = other DNA
tagcgacagtcccaatc

SEQ ID NO: 125647 - DNA, 17 bp, synthetic construct
  source 1..17: mol_type = other DNA
agcgacagtcccaatcc

SEQ ID NO: 125648 - DNA, 17 bp, synthetic construct
  source 1..17: mol_type = other DNA
gcgacagtcccaatcca

SEQ ID NO: 125649 - DNA, 17 bp, synthetic construct
  source 1..17: mol_type = other DNA
cgacagtcccaatccac

SEQ ID NO: 125650 - DNA, 17 bp, synthetic construct
  source 1..17: mol_type = other DNA
gacagtcccaatccact

SEQ ID NO: 125651 - DNA, 17 bp, synthetic construct
  source 1..17: mol_type = other DNA
acagtcccaatccactg

SEQ ID NO: 125652 - DNA, 17 bp, synthetic construct
  source 1..17: mol_type = other DNA
cagtcccaatccactga

SEQ ID NO: 125653 - DNA, 17 bp, synthetic construct
  source 1..17: mol_type = other DNA
agtcccaatccactgac

SEQ ID NO: 125654 - DNA, 17 bp, synthetic construct
  source 1..17: mol_type = other DNA
gtcccaatccactgacc

SEQ ID NO: 125655 - DNA, 17 bp, synthetic construct
  source 1..17: mol_type = other DNA
tcccaatccactgacct

SEQ ID NO: 125656 - DNA, 17 bp, synthetic construct
  source 1..17: mol_type = other DNA
cccaatccactgacctt

SEQ ID NO: 125657 - DNA, 17 bp, synthetic construct
  source 1..17: mol_type = other DNA
ccaatccactgaccttc

SEQ ID NO: 125658 - DNA, 17 bp, synthetic construct
  source 1..17: mol_type = other DNA
caatccactgaccttcc

SEQ ID NO: 125659 - DNA, 17 bp, synthetic construct
  source 1..17: mol_type = other DNA
aatccactgaccttccg

SEQ ID NO: 125660 - DNA, 17 bp, synthetic construct
  source 1..17: mol_type = other DNA
atccactgaccttccgg

SEQ ID NO: 125661 - DNA, 17 bp, synthetic construct
  source 1..17: mol_type = other DNA
tccactgaccttccggg

SEQ ID NO: 125662 - DNA, 17 bp, synthetic construct
  source 1..17: mol_type = other DNA
ccactgaccttccgggc

SEQ ID NO: 125663 - DNA, 17 bp, synthetic construct
  source 1..17: mol_type = other DNA
cactgaccttccgggct

SEQ ID NO: 125664 - DNA, 17 bp, synthetic construct
  source 1..17: mol_type = other DNA
actgaccttccgggctc

SEQ ID NO: 125665 - DNA, 17 bp, synthetic construct
  source 1..17: mol_type = other DNA
ctgaccttccgggctct

SEQ ID NO: 125666 - DNA, 17 bp, synthetic construct
  source 1..17: mol_type = other DNA
tgaccttccgggctctg

SEQ ID NO: 125667 - DNA, 17 bp, synthetic construct
  source 1..17: mol_type = other DNA
gaccttccgggctctgt

SEQ ID NO: 125668 - DNA, 17 bp, synthetic construct
  source 1..17: mol_type = other DNA
accttccgggctctgtc

SEQ ID NO: 125669 - DNA, 17 bp, synthetic construct
  source 1..17: mol_type = other DNA
ccttccgggctctgtct

SEQ ID NO: 125670 - DNA, 17 bp, synthetic construct
  source 1..17: mol_type = other DNA
cttccgggctctgtcta

SEQ ID NO: 125671 - DNA, 17 bp, synthetic construct
  source 1..17: mol_type = other DNA
ttccgggctctgtctag

SEQ ID NO: 125672 - DNA, 17 bp, synthetic construct
  source 1..17: mol_type = other DNA
tccgggctctgtctagg

SEQ ID NO: 125673 - DNA, 17 bp, synthetic construct
  source 1..17: mol_type = other DNA
ccgggctctgtctaggg

SEQ ID NO: 125674 - DNA, 17 bp, synthetic construct
  source 1..17: mol_type = other DNA
cgggctctgtctagggg

SEQ ID NO: 125675 - DNA, 17 bp, synthetic construct
  source 1..17: mol_type = other DNA
gggctctgtctaggggt

SEQ ID NO: 125676 - DNA, 17 bp, synthetic construct
  source 1..17: mol_type = other DNA
ggctctgtctaggggtg

SEQ ID NO: 125677 - DNA, 17 bp, synthetic construct
  source 1..17: mol_type = other DNA
gctctgtctaggggtgc

SEQ ID NO: 125678 - DNA, 17 bp, synthetic construct
  source 1..17: mol_type = other DNA
ctctgtctaggggtgca

SEQ ID NO: 125679 - DNA, 17 bp, synthetic construct
  source 1..17: mol_type = other DNA
tctgtctaggggtgcac

SEQ ID NO: 125680 - DNA, 17 bp, synthetic construct
  source 1..17: mol_type = other DNA
ctgtctaggggtgcacg

SEQ ID NO: 125681 - DNA, 17 bp, synthetic construct
  source 1..17: mol_type = other DNA
tgtctaggggtgcacgg

SEQ ID NO: 125682 - DNA, 17 bp, synthetic construct
  source 1..17: mol_type = other DNA
gtctaggggtgcacggc

SEQ ID NO: 125683 - DNA, 17 bp, synthetic construct
  source 1..17: mol_type = other DNA
tctaggggtgcacggcc

SEQ ID NO: 125684 - DNA, 17 bp, synthetic construct
  source 1..17: mol_type = other DNA
ctaggggtgcacggccc

SEQ ID NO: 125685 - DNA, 17 bp, synthetic construct
  source 1..17: mol_type = other DNA
taggggtgcacggcccc

SEQ ID NO: 125686 - DNA, 17 bp, synthetic construct
  source 1..17: mol_type = other DNA
aggggtgcacggcccct

SEQ ID NO: 125687 - DNA, 17 bp, synthetic construct
  source 1..17: mol_type = other DNA
ggggtgcacggcccctc

SEQ ID NO: 125688 - DNA, 17 bp, synthetic construct
  source 1..17: mol_type = other DNA
gggtgcacggcccctca

SEQ ID NO: 125689 - DNA, 17 bp, synthetic construct
  source 1..17: mol_type = other DNA
ggtgcacggcccctcaa

SEQ ID NO: 125690 - DNA, 17 bp, synthetic construct
  source 1..17: mol_type = other DNA
gtgcacggcccctcaac

SEQ ID NO: 125691 - DNA, 17 bp, synthetic construct
  source 1..17: mol_type = other DNA
tgcacggcccctcaaca

SEQ ID NO: 125692 - DNA, 17 bp, synthetic construct
  source 1..17: mol_type = other DNA
gcacggcccctcaacac

SEQ ID NO: 125693 - DNA, 17 bp, synthetic construct
  source 1..17: mol_type = other DNA
cacggcccctcaacacc

SEQ ID NO: 125694 - DNA, 17 bp, synthetic construct
  source 1..17: mol_type = other DNA
acggcccctcaacaccc

SEQ ID NO: 125695 - DNA, 17 bp, synthetic construct
  source 1..17: mol_type = other DNA
cggcccctcaacaccct

SEQ ID NO: 125696 - DNA, 17 bp, synthetic construct
  source 1..17: mol_type = other DNA
ggcccctcaacaccctg

SEQ ID NO: 125697 - DNA, 17 bp, synthetic construct
  source 1..17: mol_type = other DNA
gcccctcaacaccctgc

SEQ ID NO: 125698 - DNA, 17 bp, synthetic construct
  source 1..17: mol_type = other DNA
cccctcaacaccctgcg

SEQ ID NO: 125699 - DNA, 17 bp, synthetic construct
  source 1..17: mol_type = other DNA
ccctcaacaccctgcgt

SEQ ID NO: 125700 - DNA, 17 bp, synthetic construct
  source 1..17: mol_type = other DNA
cctcaacaccctgcgtg

SEQ ID NO: 125701 - DNA, 17 bp, synthetic construct
  source 1..17: mol_type = other DNA
ctcaacaccctgcgtgt

SEQ ID NO: 125702 - DNA, 17 bp, synthetic construct
  source 1..17: mol_type = other DNA
tcaacaccctgcgtgtc

SEQ ID NO: 125703 - DNA, 17 bp, synthetic construct
  source 1..17: mol_type = other DNA
caacaccctgcgtgtct

SEQ ID NO: 125704 - DNA, 17 bp, synthetic construct
  source 1..17: mol_type = other DNA
aacaccctgcgtgtctc

SEQ ID NO: 125705 - DNA, 17 bp, synthetic construct
  source 1..17: mol_type = other DNA
acaccctgcgtgtctcc

SEQ ID NO: 125706 - DNA, 17 bp, synthetic construct
  source 1..17: mol_type = other DNA
caccctgcgtgtctcca

SEQ ID NO: 125707 - DNA, 17 bp, synthetic construct
  source 1..17: mol_type = other DNA
accctgcgtgtctccag

SEQ ID NO: 125708 - DNA, 17 bp, synthetic construct
  source 1..17: mol_type = other DNA
ccctgcgtgtctccagg

SEQ ID NO: 125709 - DNA, 17 bp, synthetic construct
  source 1..17: mol_type = other DNA
cctgcgtgtctccaggg

SEQ ID NO: 125710 - DNA, 17 bp, synthetic construct
  source 1..17: mol_type = other DNA
ctgcgtgtctccagggg

SEQ ID NO: 125711 - DNA, 17 bp, synthetic construct
  source 1..17: mol_type = other DNA
tgcgtgtctccaggggc

SEQ ID NO: 125712 - DNA, 17 bp, synthetic construct
  source 1..17: mol_type = other DNA
gcgtgtctccaggggct

SEQ ID NO: 125713 - DNA, 17 bp, synthetic construct
  source 1..17: mol_type = other DNA
cgtgtctccaggggctc

SEQ ID NO: 125714 - DNA, 17 bp, synthetic construct
  source 1..17: mol_type = other DNA
gtgtctccaggggctcc

SEQ ID NO: 125715 - DNA, 17 bp, synthetic construct
  source 1..17: mol_type = other DNA
tgtctccaggggctccc

SEQ ID NO: 125716 - DNA, 17 bp, synthetic construct
  source 1..17: mol_type = other DNA
gtctccaggggctcccc

SEQ ID NO: 125717 - DNA, 17 bp, synthetic construct
  source 1..17: mol_type = other DNA
tctccaggggctcccca

SEQ ID NO: 125718 - DNA, 17 bp, synthetic construct
  source 1..17: mol_type = other DNA
ctccaggggctccccac

SEQ ID NO: 125719 - DNA, 17 bp, synthetic construct
  source 1..17: mol_type = other DNA
tccaggggctccccacg

SEQ ID NO: 125720 - DNA, 17 bp, synthetic construct
  source 1..17: mol_type = other DNA
ccaggggctccccacga

SEQ ID NO: 125721 - DNA, 17 bp, synthetic construct
  source 1..17: mol_type = other DNA
caggggctccccacgaa

SEQ ID NO: 125722 - DNA, 17 bp, synthetic construct
  source 1..17: mol_type = other DNA
aggggctccccacgaag

SEQ ID NO: 125723 - DNA, 17 bp, synthetic construct
  source 1..17: mol_type = other DNA
ggggctccccacgaagc

SEQ ID NO: 125724 - DNA, 17 bp, synthetic construct
  source 1..17: mol_type = other DNA
gggctccccacgaagcc

SEQ ID NO: 125725 - DNA, 17 bp, synthetic construct
  source 1..17: mol_type = other DNA
ggctccccacgaagcct

SEQ ID NO: 125726 - DNA, 17 bp, synthetic construct
  source 1..17: mol_type = other DNA
gctccccacgaagcctc

SEQ ID NO: 125727 - DNA, 17 bp, synthetic construct
  source 1..17: mol_type = other DNA
ctccccacgaagcctca

SEQ ID NO: 125728 - DNA, 17 bp, synthetic construct
  source 1..17: mol_type = other DNA
tccccacgaagcctcag

SEQ ID NO: 125729 - DNA, 17 bp, synthetic construct
  source 1..17: mol_type = other DNA
ccccacgaagcctcagc

SEQ ID NO: 125730 - DNA, 17 bp, synthetic construct
  source 1..17: mol_type = other DNA
cccacgaagcctcagca

SEQ ID NO: 125731 - DNA, 17 bp, synthetic construct
  source 1..17: mol_type = other DNA
ccacgaagcctcagcac

SEQ ID NO: 125732 - DNA, 17 bp, synthetic construct
  source 1..17: mol_type = other DNA
cacgaagcctcagcaca

SEQ ID NO: 125733 - DNA, 17 bp, synthetic construct
  source 1..17: mol_type = other DNA
acgaagcctcagcacaa

SEQ ID NO: 125734 - DNA, 17 bp, synthetic construct
  source 1..17: mol_type = other DNA
cgaagcctcagcacaat

SEQ ID NO: 125735 - DNA, 17 bp, synthetic construct
  source 1..17: mol_type = other DNA
gaagcctcagcacaatg

SEQ ID NO: 125736 - DNA, 17 bp, synthetic construct
  source 1..17: mol_type = other DNA
aagcctcagcacaatga

SEQ ID NO: 125737 - DNA, 17 bp, synthetic construct
  source 1..17: mol_type = other DNA
agcctcagcacaatgat

SEQ ID NO: 125738 - DNA, 17 bp, synthetic construct
  source 1..17: mol_type = other DNA
gcctcagcacaatgatt

SEQ ID NO: 125739 - DNA, 17 bp, synthetic construct
  source 1..17: mol_type = other DNA
cctcagcacaatgattg

SEQ ID NO: 125740 - DNA, 17 bp, synthetic construct
  source 1..17: mol_type = other DNA
ctcagcacaatgattga

SEQ ID NO: 125741 - DNA, 17 bp, synthetic construct
  source 1..17: mol_type = other DNA
tcagcacaatgattgat

SEQ ID NO: 125742 - DNA, 17 bp, synthetic construct
  source 1..17: mol_type = other DNA
cagcacaatgattgatg

SEQ ID NO: 125743 - DNA, 17 bp, synthetic construct
  source 1..17: mol_type = other DNA
agcacaatgattgatgg

SEQ ID NO: 125744 - DNA, 17 bp, synthetic construct
  source 1..17: mol_type = other DNA
gcacaatgattgatggg

SEQ ID NO: 125745 - DNA, 17 bp, synthetic construct
  source 1..17: mol_type = other DNA
cacaatgattgatggga

SEQ ID NO: 125746 - DNA, 17 bp, synthetic construct
  source 1..17: mol_type = other DNA
acaatgattgatgggat

SEQ ID NO: 125747 - DNA, 17 bp, synthetic construct
  source 1..17: mol_type = other DNA
caatgattgatgggata

SEQ ID NO: 125748 - DNA, 17 bp, synthetic construct
  source 1..17: mol_type = other DNA
aatgattgatgggatac

SEQ ID NO: 125749 - DNA, 17 bp, synthetic construct
  source 1..17: mol_type = other DNA
atgattgatgggatacc

SEQ ID NO: 125750 - DNA, 17 bp, synthetic construct
  source 1..17: mol_type = other DNA
tgattgatgggataccc

SEQ ID NO: 125751 - DNA, 17 bp, synthetic construct
  source 1..17: mol_type = other DNA
gattgatgggatacccc

SEQ ID NO: 125752 - DNA, 17 bp, synthetic construct
  source 1..17: mol_type = other DNA
attgatgggatacccca

SEQ ID NO: 125753 - DNA, 17 bp, synthetic construct
  source 1..17: mol_type = other DNA
ttgatgggataccccaa

SEQ ID NO: 125754 - DNA, 17 bp, synthetic construct
  source 1..17: mol_type = other DNA
tgatgggataccccaag

SEQ ID NO: 125755 - DNA, 17 bp, synthetic construct
  source 1..17: mol_type = other DNA
gatgggataccccaagg

SEQ ID NO: 125756 - DNA, 17 bp, synthetic construct
  source 1..17: mol_type = other DNA
atgggataccccaagga

SEQ ID NO: 125757 - DNA, 17 bp, synthetic construct
  source 1..17: mol_type = other DNA
tgggataccccaaggag

SEQ ID NO: 125758 - DNA, 17 bp, synthetic construct
  source 1..17: mol_type = other DNA
gggataccccaaggaga

SEQ ID NO: 125759 - DNA, 17 bp, synthetic construct
  source 1..17: mol_type = other DNA
ggataccccaaggagac

SEQ ID NO: 125760 - DNA, 17 bp, synthetic construct
  source 1..17: mol_type = other DNA
gataccccaaggagaca

SEQ ID NO: 125761 - DNA, 17 bp, synthetic construct
  source 1..17: mol_type = other DNA
ataccccaaggagacaa

SEQ ID NO: 125762 - DNA, 17 bp, synthetic construct
  source 1..17: mol_type = other DNA
taccccaaggagacaat

SEQ ID NO: 125763 - DNA, 17 bp, synthetic construct
  source 1..17: mol_type = other DNA
accccaaggagacaata

SEQ ID NO: 125764 - DNA, 17 bp, synthetic construct
  source 1..17: mol_type = other DNA
ccccaaggagacaataa

SEQ ID NO: 125765 - DNA, 17 bp, synthetic construct
  source 1..17: mol_type = other DNA
cccaaggagacaataaa

SEQ ID NO: 125766 - DNA, 17 bp, synthetic construct
  source 1..17: mol_type = other DNA
ccaaggagacaataaag

SEQ ID NO: 125767 - DNA, 17 bp, synthetic construct
  source 1..17: mol_type = other DNA
caaggagacaataaagc

SEQ ID NO: 125768 - DNA, 17 bp, synthetic construct
  source 1..17: mol_type = other DNA
aaggagacaataaagct

SEQ ID NO: 125769 - DNA, 17 bp, synthetic construct
  source 1..17: mol_type = other DNA
aggagacaataaagctt

SEQ ID NO: 125770 - DNA, 17 bp, synthetic construct
  source 1..17: mol_type = other DNA
ggagacaataaagcttt

SEQ ID NO: 125771 - DNA, 17 bp, synthetic construct
  source 1..17: mol_type = other DNA
gagacaataaagctttc

SEQ ID NO: 125772 - DNA, 17 bp, synthetic construct
  source 1..17: mol_type = other DNA
agacaataaagctttcc

SEQ ID NO: 125773 - DNA, 17 bp, synthetic construct
  source 1..17: mol_type = other DNA
gacaataaagctttcct

SEQ ID NO: 125774 - DNA, 17 bp, synthetic construct
  source 1..17: mol_type = other DNA
acaataaagctttcctg

SEQ ID NO: 125775 - DNA, 17 bp, synthetic construct
  source 1..17: mol_type = other DNA
caataaagctttcctgg

SEQ ID NO: 125776 - DNA, 17 bp, synthetic construct
  source 1..17: mol_type = other DNA
aataaagctttcctgga

SEQ ID NO: 125777 - DNA, 17 bp, synthetic construct
  source 1..17: mol_type = other DNA
ataaagctttcctggac

SEQ ID NO: 125778 - DNA, 17 bp, synthetic construct
  source 1..17: mol_type = other DNA
taaagctttcctggact

SEQ ID NO: 125779 - DNA, 17 bp, synthetic construct
  source 1..17: mol_type = other DNA
aaagctttcctggactc

SEQ ID NO: 125780 - DNA, 17 bp, synthetic construct
  source 1..17: mol_type = other DNA
aagctttcctggactcc

SEQ ID NO: 125781 - DNA, 17 bp, synthetic construct
  source 1..17: mol_type = other DNA
agctttcctggactccg

SEQ ID NO: 125782 - DNA, 17 bp, synthetic construct
  source 1..17: mol_type = other DNA
gctttcctggactccgt

SEQ ID NO: 125783 - DNA, 17 bp, synthetic construct
  source 1..17: mol_type = other DNA
ctttcctggactccgtc

SEQ ID NO: 125784 - DNA, 17 bp, synthetic construct
  source 1..17: mol_type = other DNA
tttcctggactccgtcc

SEQ ID NO: 125785 - DNA, 17 bp, synthetic construct
  source 1..17: mol_type = other DNA
ttcctggactccgtccc

SEQ ID NO: 125786 - DNA, 17 bp, synthetic construct
  source 1..17: mol_type = other DNA
tcctggactccgtccca

SEQ ID NO: 125787 - DNA, 17 bp, synthetic construct
  source 1..17: mol_type = other DNA
cctggactccgtcccat

SEQ ID NO: 125788 - DNA, 17 bp, synthetic construct
  source 1..17: mol_type = other DNA
ctggactccgtcccatc

SEQ ID NO: 125789 - DNA, 17 bp, synthetic construct
  source 1..17: mol_type = other DNA
tggactccgtcccatcc

SEQ ID NO: 125790 - DNA, 17 bp, synthetic construct
  source 1..17: mol_type = other DNA
ggactccgtcccatccc

SEQ ID NO: 125791 - DNA, 17 bp, synthetic construct
  source 1..17: mol_type = other DNA
gactccgtcccatccct

SEQ ID NO: 125792 - DNA, 17 bp, synthetic construct
  source 1..17: mol_type = other DNA
actccgtcccatccctc

SEQ ID NO: 125793 - DNA, 17 bp, synthetic construct
  source 1..17: mol_type = other DNA
ctccgtcccatccctca

SEQ ID NO: 125794 - DNA, 17 bp, synthetic construct
  source 1..17: mol_type = other DNA
tccgtcccatccctcag

SEQ ID NO: 125795 - DNA, 17 bp, synthetic construct
  source 1..17: mol_type = other DNA
ccgtcccatccctcagc

SEQ ID NO: 125796 - DNA, 17 bp, synthetic construct
  source 1..17: mol_type = other DNA
cgtcccatccctcagca

SEQ ID NO: 125797 - DNA, 17 bp, synthetic construct
  source 1..17: mol_type = other DNA
gtcccatccctcagcac

SEQ ID NO: 125798 - DNA, 17 bp, synthetic construct
  source 1..17: mol_type = other DNA
tcccatccctcagcacg

SEQ ID NO: 125799 - DNA, 17 bp, synthetic construct
  source 1..17: mol_type = other DNA
cccatccctcagcacgg

SEQ ID NO: 125800 - DNA, 17 bp, synthetic construct
  source 1..17: mol_type = other DNA
ccatccctcagcacggc

SEQ ID NO: 125801 - DNA, 17 bp, synthetic construct
  source 1..17: mol_type = other DNA
catccctcagcacggcc

SEQ ID NO: 125802 - DNA, 17 bp, synthetic construct
  source 1..17: mol_type = other DNA
atccctcagcacggcct

SEQ ID NO: 125803 - DNA, 17 bp, synthetic construct
  source 1..17: mol_type = other DNA
tccctcagcacggccta

SEQ ID NO: 125804 - DNA, 17 bp, synthetic construct
  source 1..17: mol_type = other DNA
ccctcagcacggcctat

SEQ ID NO: 125805 - DNA, 17 bp, synthetic construct
  source 1..17: mol_type = other DNA
cctcagcacggcctatc

SEQ ID NO: 125806 - DNA, 17 bp, synthetic construct
  source 1..17: mol_type = other DNA
ctcagcacggcctatcc

SEQ ID NO: 125807 - DNA, 17 bp, synthetic construct
  source 1..17: mol_type = other DNA
tcagcacggcctatccc

SEQ ID NO: 125808 - DNA, 17 bp, synthetic construct
  source 1..17: mol_type = other DNA
cagcacggcctatccca

SEQ ID NO: 125809 - DNA, 17 bp, synthetic construct
  source 1..17: mol_type = other DNA
agcacggcctatcccag

SEQ ID NO: 125810 - DNA, 17 bp, synthetic construct
  source 1..17: mol_type = other DNA
gcacggcctatcccagc

SEQ ID NO: 125811 - DNA, 17 bp, synthetic construct
  source 1..17: mol_type = other DNA
cacggcctatcccagcc

SEQ ID NO: 125812 - DNA, 17 bp, synthetic construct
  source 1..17: mol_type = other DNA
acggcctatcccagcca

SEQ ID NO: 125813 - DNA, 17 bp, synthetic construct
  source 1..17: mol_type = other DNA
cggcctatcccagccag

SEQ ID NO: 125814 - DNA, 17 bp, synthetic construct
  source 1..17: mol_type = other DNA
ggcctatcccagccagc

SEQ ID NO: 125815 - DNA, 17 bp, synthetic construct
  source 1..17: mol_type = other DNA
gcctatcccagccagcc

SEQ ID NO: 125816 - DNA, 17 bp, synthetic construct
  source 1..17: mol_type = other DNA
cctatcccagccagcca

SEQ ID NO: 125817 - DNA, 17 bp, synthetic construct
  source 1..17: mol_type = other DNA
ctatcccagccagccag

SEQ ID NO: 125818 - DNA, 17 bp, synthetic construct
  source 1..17: mol_type = other DNA
tatcccagccagccagc

SEQ ID NO: 125819 - DNA, 17 bp, synthetic construct
  source 1..17: mol_type = other DNA
atcccagccagccagct

SEQ ID NO: 125820 - DNA, 17 bp, synthetic construct
  source 1..17: mol_type = other DNA
tcccagccagccagctc

SEQ ID NO: 125821 - DNA, 17 bp, synthetic construct
  source 1..17: mol_type = other DNA
cccagccagccagctcc

SEQ ID NO: 125822 - DNA, 17 bp, synthetic construct
  source 1..17: mol_type = other DNA
ccagccagccagctccc

SEQ ID NO: 125823 - DNA, 17 bp, synthetic construct
  source 1..17: mol_type = other DNA
cagccagccagctccct

SEQ ID NO: 125824 - DNA, 17 bp, synthetic construct
  source 1..17: mol_type = other DNA
agccagccagctccctc

SEQ ID NO: 125825 - DNA, 17 bp, synthetic construct
  source 1..17: mol_type = other DNA
gccagccagctccctca

SEQ ID NO: 125826 - DNA, 17 bp, synthetic construct
  source 1..17: mol_type = other DNA
ccagccagctccctcaa

SEQ ID NO: 125827 - DNA, 17 bp, synthetic construct
  source 1..17: mol_type = other DNA
cagccagctccctcaag

SEQ ID NO: 125828 - DNA, 17 bp, synthetic construct
  source 1..17: mol_type = other DNA
agccagctccctcaagg

SEQ ID NO: 125829 - DNA, 17 bp, synthetic construct
  source 1..17: mol_type = other DNA
gccagctccctcaaggc

SEQ ID NO: 125830 - DNA, 17 bp, synthetic construct
  source 1..17: mol_type = other DNA
ccagctccctcaaggcc

SEQ ID NO: 125831 - DNA, 17 bp, synthetic construct
  source 1..17: mol_type = other DNA
cagctccctcaaggcca

SEQ ID NO: 125832 - DNA, 17 bp, synthetic construct
  source 1..17: mol_type = other DNA
agctccctcaaggccag

SEQ ID NO: 125833 - DNA, 17 bp, synthetic construct
  source 1..17: mol_type = other DNA
gctccctcaaggccagg

SEQ ID NO: 125834 - DNA, 17 bp, synthetic construct
  source 1..17: mol_type = other DNA
ctccctcaaggccaggc

SEQ ID NO: 125835 - DNA, 17 bp, synthetic construct
  source 1..17: mol_type = other DNA
tccctcaaggccaggct

SEQ ID NO: 125836 - DNA, 17 bp, synthetic construct
  source 1..17: mol_type = other DNA
ccctcaaggccaggctg

SEQ ID NO: 125837 - DNA, 17 bp, synthetic construct
  source 1..17: mol_type = other DNA
cctcaaggccaggctgc

SEQ ID NO: 125838 - DNA, 17 bp, synthetic construct
  source 1..17: mol_type = other DNA
ctcaaggccaggctgcc

SEQ ID NO: 125839 - DNA, 17 bp, synthetic construct
  source 1..17: mol_type = other DNA
tcaaggccaggctgcca

SEQ ID NO: 125840 - DNA, 17 bp, synthetic construct
  source 1..17: mol_type = other DNA
caaggccaggctgccag

SEQ ID NO: 125841 - DNA, 17 bp, synthetic construct
  source 1..17: mol_type = other DNA
aaggccaggctgccagg

SEQ ID NO: 125842 - DNA, 17 bp, synthetic construct
  source 1..17: mol_type = other DNA
aggccaggctgccaggc

SEQ ID NO: 125843 - DNA, 17 bp, synthetic construct
  source 1..17: mol_type = other DNA
ggccaggctgccaggcc

SEQ ID NO: 125844 - DNA, 17 bp, synthetic construct
  source 1..17: mol_type = other DNA
gccaggctgccaggccc

SEQ ID NO: 125845 - DNA, 17 bp, synthetic construct
  source 1..17: mol_type = other DNA
ccaggctgccaggcccc

SEQ ID NO: 125846 - DNA, 17 bp, synthetic construct
  source 1..17: mol_type = other DNA
caggctgccaggcccca

SEQ ID NO: 125847 - DNA, 17 bp, synthetic construct
  source 1..17: mol_type = other DNA
aggctgccaggccccag

SEQ ID NO: 125848 - DNA, 17 bp, synthetic construct
  source 1..17: mol_type = other DNA
ggctgccaggccccagt

SEQ ID NO: 125849 - DNA, 17 bp, synthetic construct
  source 1..17: mol_type = other DNA
gctgccaggccccagtc

SEQ ID NO: 125850 - DNA, 17 bp, synthetic construct
  source 1..17: mol_type = other DNA
ctgccaggccccagtcc

SEQ ID NO: 125851 - DNA, 17 bp, synthetic construct
  source 1..17: mol_type = other DNA
tgccaggccccagtccc

SEQ ID NO: 125852 - DNA, 17 bp, synthetic construct
  source 1..17: mol_type = other DNA
gccaggccccagtccct

SEQ ID NO: 125853 - DNA, 17 bp, synthetic construct
  source 1..17: mol_type = other DNA
ccaggccccagtccctc

SEQ ID NO: 125854 - DNA, 17 bp, synthetic construct
  source 1..17: mol_type = other DNA
caggccccagtccctca

SEQ ID NO: 125855 - DNA, 17 bp, synthetic construct
  source 1..17: mol_type = other DNA
aggccccagtccctcat

SEQ ID NO: 125856 - DNA, 17 bp, synthetic construct
  source 1..17: mol_type = other DNA
ggccccagtccctcatg

SEQ ID NO: 125857 - DNA, 17 bp, synthetic construct
  source 1..17: mol_type = other DNA
gccccagtccctcatgc

SEQ ID NO: 125858 - DNA, 17 bp, synthetic construct
  source 1..17: mol_type = other DNA
ccccagtccctcatgca

SEQ ID NO: 125859 - DNA, 17 bp, synthetic construct
  source 1..17: mol_type = other DNA
cccagtccctcatgcag

SEQ ID NO: 125860 - DNA, 17 bp, synthetic construct
  source 1..17: mol_type = other DNA
ccagtccctcatgcaga

SEQ ID NO: 125861 - DNA, 17 bp, synthetic construct
  source 1..17: mol_type = other DNA
cagtccctcatgcagaa

SEQ ID NO: 125862 - DNA, 17 bp, synthetic construct
  source 1..17: mol_type = other DNA
agtccctcatgcagaaa

SEQ ID NO: 125863 - DNA, 17 bp, synthetic construct
  source 1..17: mol_type = other DNA
gtccctcatgcagaaac

SEQ ID NO: 125864 - DNA, 17 bp, synthetic construct
  source 1..17: mol_type = other DNA
tccctcatgcagaaacg

SEQ ID NO: 125865 - DNA, 17 bp, synthetic construct
  source 1..17: mol_type = other DNA
ccctcatgcagaaacgg

SEQ ID NO: 125866 - DNA, 17 bp, synthetic construct
  source 1..17: mol_type = other DNA
cctcatgcagaaacggc

SEQ ID NO: 125867 - DNA, 17 bp, synthetic construct
  source 1..17: mol_type = other DNA
ctcatgcagaaacggct

SEQ ID NO: 125868 - DNA, 17 bp, synthetic construct
  source 1..17: mol_type = other DNA
tcatgcagaaacggctc

SEQ ID NO: 125869 - DNA, 17 bp, synthetic construct
  source 1..17: mol_type = other DNA
catgcagaaacggctct

SEQ ID NO: 125870 - DNA, 17 bp, synthetic construct
  source 1..17: mol_type = other DNA
atgcagaaacggctcta

SEQ ID NO: 125871 - DNA, 17 bp, synthetic construct
  source 1..17: mol_type = other DNA
tgcagaaacggctctaa

SEQ ID NO: 125872 - DNA, 17 bp, synthetic construct
  source 1..17: mol_type = other DNA
gcagaaacggctctaac

SEQ ID NO: 125873 - DNA, 17 bp, synthetic construct
  source 1..17: mol_type = other DNA
cagaaacggctctaacc

SEQ ID NO: 125874 - DNA, 17 bp, synthetic construct
  source 1..17: mol_type = other DNA
agaaacggctctaacca

SEQ ID NO: 125875 - DNA, 17 bp, synthetic construct
  source 1..17: mol_type = other DNA
gaaacggctctaaccaa

SEQ ID NO: 125876 - DNA, 17 bp, synthetic construct
  source 1..17: mol_type = other DNA
aaacggctctaaccaag

SEQ ID NO: 125877 - DNA, 17 bp, synthetic construct
  source 1..17: mol_type = other DNA
aacggctctaaccaagg

SEQ ID NO: 125878 - DNA, 17 bp, synthetic construct
  source 1..17: mol_type = other DNA
acggctctaaccaaggc

SEQ ID NO: 125879 - DNA, 17 bp, synthetic construct
  source 1..17: mol_type = other DNA
cggctctaaccaaggct

SEQ ID NO: 125880 - DNA, 17 bp, synthetic construct
  source 1..17: mol_type = other DNA
ggctctaaccaaggctg

SEQ ID NO: 125881 - DNA, 17 bp, synthetic construct
  source 1..17: mol_type = other DNA
gctctaaccaaggctga

SEQ ID NO: 125882 - DNA, 17 bp, synthetic construct
  source 1..17: mol_type = other DNA
ctctaaccaaggctgag

SEQ ID NO: 125883 - DNA, 17 bp, synthetic construct
  source 1..17: mol_type = other DNA
tctaaccaaggctgagg

SEQ ID NO: 125884 - DNA, 17 bp, synthetic construct
  source 1..17: mol_type = other DNA
ctaaccaaggctgaggc

SEQ ID NO: 125885 - DNA, 17 bp, synthetic construct
  source 1..17: mol_type = other DNA
taaccaaggctgaggca

SEQ ID NO: 125886 - DNA, 17 bp, synthetic construct
  source 1..17: mol_type = other DNA
aaccaaggctgaggcag

SEQ ID NO: 125887 - DNA, 17 bp, synthetic construct
  source 1..17: mol_type = other DNA
accaaggctgaggcagg

SEQ ID NO: 125888 - DNA, 17 bp, synthetic construct
  source 1..17: mol_type = other DNA
ccaaggctgaggcaggc

SEQ ID NO: 125889 - DNA, 17 bp, synthetic construct
  source 1..17: mol_type = other DNA
caaggctgaggcaggca

SEQ ID NO: 125890 - DNA, 17 bp, synthetic construct
  source 1..17: mol_type = other DNA
aaggctgaggcaggcac

SEQ ID NO: 125891 - DNA, 17 bp, synthetic construct
  source 1..17: mol_type = other DNA
aggctgaggcaggcact

SEQ ID NO: 125892 - DNA, 17 bp, synthetic construct
  source 1..17: mol_type = other DNA
ggctgaggcaggcactg

SEQ ID NO: 125893 - DNA, 17 bp, synthetic construct
  source 1..17: mol_type = other DNA
gctgaggcaggcactgg

SEQ ID NO: 125894 - DNA, 17 bp, synthetic construct
  source 1..17: mol_type = other DNA
ctgaggcaggcactggg

SEQ ID NO: 125895 - DNA, 17 bp, synthetic construct
  source 1..17: mol_type = other DNA
tgaggcaggcactgggg

SEQ ID NO: 125896 - DNA, 17 bp, synthetic construct
  source 1..17: mol_type = other DNA
gaggcaggcactggggt

SEQ ID NO: 125897 - DNA, 17 bp, synthetic construct
  source 1..17: mol_type = other DNA
aggcaggcactggggtc

SEQ ID NO: 125898 - DNA, 17 bp, synthetic construct
  source 1..17: mol_type = other DNA
ggcaggcactggggtcc

SEQ ID NO: 125899 - DNA, 17 bp, synthetic construct
  source 1..17: mol_type = other DNA
gcaggcactggggtccc

SEQ ID NO: 125900 - DNA, 17 bp, synthetic construct
  source 1..17: mol_type = other DNA
caggcactggggtcccc

SEQ ID NO: 125901 - DNA, 17 bp, synthetic construct
  source 1..17: mol_type = other DNA
aggcactggggtcccca

SEQ ID NO: 125902 - DNA, 17 bp, synthetic construct
  source 1..17: mol_type = other DNA
ggcactggggtccccag

SEQ ID NO: 125903 - DNA, 17 bp, synthetic construct
  source 1..17: mol_type = other DNA
gcactggggtccccagt

SEQ ID NO: 125904 - DNA, 17 bp, synthetic construct
  source 1..17: mol_type = other DNA
cactggggtccccagta

SEQ ID NO: 125905 - DNA, 17 bp, synthetic construct
  source 1..17: mol_type = other DNA
actggggtccccagtat

SEQ ID NO: 125906 - DNA, 17 bp, synthetic construct
  source 1..17: mol_type = other DNA
ctggggtccccagtatc

SEQ ID NO: 125907 - DNA, 17 bp, synthetic construct
  source 1..17: mol_type = other DNA
tggggtccccagtatcc

SEQ ID NO: 125908 - DNA, 17 bp, synthetic construct
  source 1..17: mol_type = other DNA
ggggtccccagtatccc

SEQ ID NO: 125909 - DNA, 17 bp, synthetic construct
  source 1..17: mol_type = other DNA
gggtccccagtatccca

SEQ ID NO: 125910 - DNA, 17 bp, synthetic construct
  source 1..17: mol_type = other DNA
ggtccccagtatcccac

SEQ ID NO: 125911 - DNA, 17 bp, synthetic construct
  source 1..17: mol_type = other DNA
gtccccagtatcccaca

SEQ ID NO: 125912 - DNA, 17 bp, synthetic construct
  source 1..17: mol_type = other DNA
tccccagtatcccacag

SEQ ID NO: 125913 - DNA, 17 bp, synthetic construct
  source 1..17: mol_type = other DNA
ccccagtatcccacagg

SEQ ID NO: 125914 - DNA, 17 bp, synthetic construct
  source 1..17: mol_type = other DNA
cccagtatcccacaggg

SEQ ID NO: 125915 - DNA, 17 bp, synthetic construct
  source 1..17: mol_type = other DNA
ccagtatcccacagggg

SEQ ID NO: 125916 - DNA, 17 bp, synthetic construct
  source 1..17: mol_type = other DNA
cagtatcccacaggggc

SEQ ID NO: 125917 - DNA, 17 bp, synthetic construct
  source 1..17: mol_type = other DNA
agtatcccacaggggca

SEQ ID NO: 125918 - DNA, 17 bp, synthetic construct
  source 1..17: mol_type = other DNA
gtatcccacaggggcag

SEQ ID NO: 125919 - DNA, 17 bp, synthetic construct
  source 1..17: mol_type = other DNA
tatcccacaggggcagg

SEQ ID NO: 125920 - DNA, 17 bp, synthetic construct
  source 1..17: mol_type = other DNA
atcccacaggggcaggg

SEQ ID NO: 125921 - DNA, 17 bp, synthetic construct
  source 1..17: mol_type = other DNA
tcccacaggggcagggc

SEQ ID NO: 125922 - DNA, 17 bp, synthetic construct
  source 1..17: mol_type = other DNA
cccacaggggcagggcc

SEQ ID NO: 125923 - DNA, 17 bp, synthetic construct
  source 1..17: mol_type = other DNA
ccacaggggcagggcca

SEQ ID NO: 125924 - DNA, 17 bp, synthetic construct
  source 1..17: mol_type = other DNA
cacaggggcagggccag

SEQ ID NO: 125925 - DNA, 17 bp, synthetic construct
  source 1..17: mol_type = other DNA
acaggggcagggccagc

SEQ ID NO: 125926 - DNA, 17 bp, synthetic construct
  source 1..17: mol_type = other DNA
caggggcagggccagcc

SEQ ID NO: 125927 - DNA, 17 bp, synthetic construct
  source 1..17: mol_type = other DNA
aggggcagggccagccc

SEQ ID NO: 125928 - DNA, 17 bp, synthetic construct
  source 1..17: mol_type = other DNA
ggggcagggccagccct

SEQ ID NO: 125929 - DNA, 17 bp, synthetic construct
  source 1..17: mol_type = other DNA
gggcagggccagccctg

SEQ ID NO: 125930 - DNA, 17 bp, synthetic construct
  source 1..17: mol_type = other DNA
ggcagggccagccctgg

SEQ ID NO: 125931 - DNA, 17 bp, synthetic construct
  source 1..17: mol_type = other DNA
gcagggccagccctggg

SEQ ID NO: 125932 - DNA, 17 bp, synthetic construct
  source 1..17: mol_type = other DNA
cagggccagccctgggg

SEQ ID NO: 125933 - DNA, 17 bp, synthetic construct
  source 1..17: mol_type = other DNA
agggccagccctgggga

SEQ ID NO: 125934 - DNA, 17 bp, synthetic construct
  source 1..17: mol_type = other DNA
gggccagccctggggaa

SEQ ID NO: 125935 - DNA, 17 bp, synthetic construct
  source 1..17: mol_type = other DNA
ggccagccctggggaaa

SEQ ID NO: 125936 - DNA, 17 bp, synthetic construct
  source 1..17: mol_type = other DNA
gccagccctggggaaag

SEQ ID NO: 125937 - DNA, 17 bp, synthetic construct
  source 1..17: mol_type = other DNA
ccagccctggggaaagg

SEQ ID NO: 125938 - DNA, 17 bp, synthetic construct
  source 1..17: mol_type = other DNA
cagccctggggaaaggg

SEQ ID NO: 125939 - DNA, 17 bp, synthetic construct
  source 1..17: mol_type = other DNA
agccctggggaaagggt

SEQ ID NO: 125940 - DNA, 17 bp, synthetic construct
  source 1..17: mol_type = other DNA
gccctggggaaagggtc

SEQ ID NO: 125941 - DNA, 17 bp, synthetic construct
  source 1..17: mol_type = other DNA
ccctggggaaagggtcc

SEQ ID NO: 125942 - DNA, 17 bp, synthetic construct
  source 1..17: mol_type = other DNA
cctggggaaagggtcct

SEQ ID NO: 125943 - DNA, 17 bp, synthetic construct
  source 1..17: mol_type = other DNA
ctggggaaagggtcctc

SEQ ID NO: 125944 - DNA, 17 bp, synthetic construct
  source 1..17: mol_type = other DNA
tggggaaagggtcctct

SEQ ID NO: 125945 - DNA, 17 bp, synthetic construct
  source 1..17: mol_type = other DNA
ggggaaagggtcctctg

SEQ ID NO: 125946 - DNA, 17 bp, synthetic construct
  source 1..17: mol_type = other DNA
gggaaagggtcctctgg

SEQ ID NO: 125947 - DNA, 17 bp, synthetic construct
  source 1..17: mol_type = other DNA
ggaaagggtcctctggg

SEQ ID NO: 125948 - DNA, 17 bp, synthetic construct
  source 1..17: mol_type = other DNA
gaaagggtcctctgggg

SEQ ID NO: 125949 - DNA, 17 bp, synthetic construct
  source 1..17: mol_type = other DNA
aaagggtcctctggggc

SEQ ID NO: 125950 - DNA, 17 bp, synthetic construct
  source 1..17: mol_type = other DNA
aagggtcctctggggcc

SEQ ID NO: 125951 - DNA, 17 bp, synthetic construct
  source 1..17: mol_type = other DNA
agggtcctctggggccc

SEQ ID NO: 125952 - DNA, 17 bp, synthetic construct
  source 1..17: mol_type = other DNA
gggtcctctggggcccc

SEQ ID NO: 125953 - DNA, 17 bp, synthetic construct
  source 1..17: mol_type = other DNA
ggtcctctggggcccct

SEQ ID NO: 125954 - DNA, 17 bp, synthetic construct
  source 1..17: mol_type = other DNA
gtcctctggggcccctc

SEQ ID NO: 125955 - DNA, 17 bp, synthetic construct
  source 1..17: mol_type = other DNA
tcctctggggcccctcc

SEQ ID NO: 125956 - DNA, 17 bp, synthetic construct
  source 1..17: mol_type = other DNA
cctctggggcccctcca

SEQ ID NO: 125957 - DNA, 17 bp, synthetic construct
  source 1..17: mol_type = other DNA
ctctggggcccctccac

SEQ ID NO: 125958 - DNA, 17 bp, synthetic construct
  source 1..17: mol_type = other DNA
tctggggcccctccacc

SEQ ID NO: 125959 - DNA, 17 bp, synthetic construct
  source 1..17: mol_type = other DNA
ctggggcccctccacct

SEQ ID NO: 125960 - DNA, 17 bp, synthetic construct
  source 1..17: mol_type = other DNA
tggggcccctccacctt

SEQ ID NO: 125961 - DNA, 17 bp, synthetic construct
  source 1..17: mol_type = other DNA
ggggcccctccaccttg

SEQ ID NO: 125962 - DNA, 17 bp, synthetic construct
  source 1..17: mol_type = other DNA
gggcccctccaccttgt

SEQ ID NO: 125963 - DNA, 17 bp, synthetic construct
  source 1..17: mol_type = other DNA
ggcccctccaccttgtg

SEQ ID NO: 125964 - DNA, 17 bp, synthetic construct
  source 1..17: mol_type = other DNA
gcccctccaccttgtga

SEQ ID NO: 125965 - DNA, 17 bp, synthetic construct
  source 1..17: mol_type = other DNA
cccctccaccttgtgag

SEQ ID NO: 125966 - DNA, 17 bp, synthetic construct
  source 1..17: mol_type = other DNA
ccctccaccttgtgagg

SEQ ID NO: 125967 - DNA, 17 bp, synthetic construct
  source 1..17: mol_type = other DNA
cctccaccttgtgaggc

SEQ ID NO: 125968 - DNA, 17 bp, synthetic construct
  source 1..17: mol_type = other DNA
ctccaccttgtgaggcc

SEQ ID NO: 125969 - DNA, 17 bp, synthetic construct
  source 1..17: mol_type = other DNA
tccaccttgtgaggcca

SEQ ID NO: 125970 - DNA, 17 bp, synthetic construct
  source 1..17: mol_type = other DNA
ccaccttgtgaggccag

SEQ ID NO: 125971 - DNA, 17 bp, synthetic construct
  source 1..17: mol_type = other DNA
caccttgtgaggccagg

SEQ ID NO: 125972 - DNA, 17 bp, synthetic construct
  source 1..17: mol_type = other DNA
accttgtgaggccagga

SEQ ID NO: 125973 - DNA, 17 bp, synthetic construct
  source 1..17: mol_type = other DNA
ccttgtgaggccaggac

SEQ ID NO: 125974 - DNA, 17 bp, synthetic construct
  source 1..17: mol_type = other DNA
cttgtgaggccaggact

SEQ ID NO: 125975 - DNA, 17 bp, synthetic construct
  source 1..17: mol_type = other DNA
ttgtgaggccaggactg

SEQ ID NO: 125976 - DNA, 17 bp, synthetic construct
  source 1..17: mol_type = other DNA
tgtgaggccaggactgg

SEQ ID NO: 125977 - DNA, 17 bp, synthetic construct
  source 1..17: mol_type = other DNA
gtgaggccaggactgga

SEQ ID NO: 125978 - DNA, 17 bp, synthetic construct
  source 1..17: mol_type = other DNA
tgaggccaggactggag

SEQ ID NO: 125979 - DNA, 17 bp, synthetic construct
  source 1..17: mol_type = other DNA
gaggccaggactggagg

SEQ ID NO: 125980 - DNA, 17 bp, synthetic construct
  source 1..17: mol_type = other DNA
aggccaggactggagga

SEQ ID NO: 125981 - DNA, 17 bp, synthetic construct
  source 1..17: mol_type = other DNA
ggccaggactggaggat

SEQ ID NO: 125982 - DNA, 17 bp, synthetic construct
  source 1..17: mol_type = other DNA
gccaggactggaggatg

SEQ ID NO: 125983 - DNA, 17 bp, synthetic construct
  source 1..17: mol_type = other DNA
ccaggactggaggatgc

SEQ ID NO: 125984 - DNA, 17 bp, synthetic construct
  source 1..17: mol_type = other DNA
caggactggaggatgct

SEQ ID NO: 125985 - DNA, 17 bp, synthetic construct
  source 1..17: mol_type = other DNA
aggactggaggatgctg

SEQ ID NO: 125986 - DNA, 17 bp, synthetic construct
  source 1..17: mol_type = other DNA
ggactggaggatgctga

SEQ ID NO: 125987 - DNA, 17 bp, synthetic construct
  source 1..17: mol_type = other DNA
gactggaggatgctgag

SEQ ID NO: 125988 - DNA, 17 bp, synthetic construct
  source 1..17: mol_type = other DNA
actggaggatgctgagc

SEQ ID NO: 125989 - DNA, 17 bp, synthetic construct
  source 1..17: mol_type = other DNA
ctggaggatgctgagcc

SEQ ID NO: 125990 - DNA, 17 bp, synthetic construct
  source 1..17: mol_type = other DNA
tggaggatgctgagcca

SEQ ID NO: 125991 - DNA, 17 bp, synthetic construct
  source 1..17: mol_type = other DNA
ggaggatgctgagccag

SEQ ID NO: 125992 - DNA, 17 bp, synthetic construct
  source 1..17: mol_type = other DNA
gaggatgctgagccagg

SEQ ID NO: 125993 - DNA, 17 bp, synthetic construct
  source 1..17: mol_type = other DNA
aggatgctgagccagga

SEQ ID NO: 125994 - DNA, 17 bp, synthetic construct
  source 1..17: mol_type = other DNA
ggatgctgagccaggac

SEQ ID NO: 125995 - DNA, 17 bp, synthetic construct
  source 1..17: mol_type = other DNA
gatgctgagccaggacc

SEQ ID NO: 125996 - DNA, 17 bp, synthetic construct
  source 1..17: mol_type = other DNA
atgctgagccaggaccc

SEQ ID NO: 125997 - DNA, 17 bp, synthetic construct
  source 1..17: mol_type = other DNA
tgctgagccaggacccc

SEQ ID NO: 125998 - DNA, 17 bp, synthetic construct
  source 1..17: mol_type = other DNA
gctgagccaggacccct

SEQ ID NO: 125999 - DNA, 17 bp, synthetic construct
  source 1..17: mol_type = other DNA
ctgagccaggacccctt

SEQ ID NO: 126000 - DNA, 17 bp, synthetic construct
  source 1..17: mol_type = other DNA
tgagccaggaccccttt

SEQ ID NO: 126001 - DNA, 17 bp, synthetic construct
  source 1..17: mol_type = other DNA
gagccaggacccctttc

SEQ ID NO: 126002 - DNA, 17 bp, synthetic construct
  source 1..17: mol_type = other DNA
agccaggacccctttcc

SEQ ID NO: 126003 - DNA, 17 bp, synthetic construct
  source 1..17: mol_type = other DNA
gccaggacccctttccc

SEQ ID NO: 126004 - DNA, 17 bp, synthetic construct
  source 1..17: mol_type = other DNA
ccaggacccctttccca

SEQ ID NO: 126005 - DNA, 17 bp, synthetic construct
  source 1..17: mol_type = other DNA
caggacccctttcccat

SEQ ID NO: 126006 - DNA, 17 bp, synthetic construct
  source 1..17: mol_type = other DNA
aggacccctttcccatg

SEQ ID NO: 126007 - DNA, 17 bp, synthetic construct
  source 1..17: mol_type = other DNA
ggacccctttcccatgc

SEQ ID NO: 126008 - DNA, 17 bp, synthetic construct
  source 1..17: mol_type = other DNA
gacccctttcccatgcc

SEQ ID NO: 126009 - DNA, 17 bp, synthetic construct
  source 1..17: mol_type = other DNA
acccctttcccatgccc

SEQ ID NO: 126010 - DNA, 17 bp, synthetic construct
  source 1..17: mol_type = other DNA
cccctttcccatgcccc

SEQ ID NO: 126011 - DNA, 17 bp, synthetic construct
  source 1..17: mol_type = other DNA
ccctttcccatgcccct

SEQ ID NO: 126012 - DNA, 17 bp, synthetic construct
  source 1..17: mol_type = other DNA
cctttcccatgcccctt

SEQ ID NO: 126013 - DNA, 17 bp, synthetic construct
  source 1..17: mol_type = other DNA
ctttcccatgccccttg

SEQ ID NO: 126014 - DNA, 17 bp, synthetic construct
  source 1..17: mol_type = other DNA
tttcccatgccccttgc

SEQ ID NO: 126015 - DNA, 17 bp, synthetic construct
  source 1..17: mol_type = other DNA
ttcccatgccccttgca

SEQ ID NO: 126016 - DNA, 17 bp, synthetic construct
  source 1..17: mol_type = other DNA
tcccatgccccttgcag

SEQ ID NO: 126017 - DNA, 17 bp, synthetic construct
  source 1..17: mol_type = other DNA
cccatgccccttgcagg

SEQ ID NO: 126018 - DNA, 17 bp, synthetic construct
  source 1..17: mol_type = other DNA
ccatgccccttgcaggc

SEQ ID NO: 126019 - DNA, 17 bp, synthetic construct
  source 1..17: mol_type = other DNA
catgccccttgcaggcc

SEQ ID NO: 126020 - DNA, 17 bp, synthetic construct
  source 1..17: mol_type = other DNA
atgccccttgcaggccc

SEQ ID NO: 126021 - DNA, 17 bp, synthetic construct
  source 1..17: mol_type = other DNA
tgccccttgcaggcccg

SEQ ID NO: 126022 - DNA, 17 bp, synthetic construct
  source 1..17: mol_type = other DNA
gccccttgcaggcccgg

SEQ ID NO: 126023 - DNA, 17 bp, synthetic construct
  source 1..17: mol_type = other DNA
ccccttgcaggcccggc

SEQ ID NO: 126024 - DNA, 17 bp, synthetic construct
  source 1..17: mol_type = other DNA
cccttgcaggcccggcc

SEQ ID NO: 126025 - DNA, 17 bp, synthetic construct
  source 1..17: mol_type = other DNA
ccttgcaggcccggccc

SEQ ID NO: 126026 - DNA, 17 bp, synthetic construct
  source 1..17: mol_type = other DNA
cttgcaggcccggccct

SEQ ID NO: 126027 - DNA, 17 bp, synthetic construct
  source 1..17: mol_type = other DNA
ttgcaggcccggccctc

SEQ ID NO: 126028 - DNA, 17 bp, synthetic construct
  source 1..17: mol_type = other DNA
tgcaggcccggccctcc

SEQ ID NO: 126029 - DNA, 17 bp, synthetic construct
  source 1..17: mol_type = other DNA
gcaggcccggccctccc

SEQ ID NO: 126030 - DNA, 17 bp, synthetic construct
  source 1..17: mol_type = other DNA
caggcccggccctcccg

SEQ ID NO: 126031 - DNA, 17 bp, synthetic construct
  source 1..17: mol_type = other DNA
aggcccggccctcccgg

SEQ ID NO: 126032 - DNA, 17 bp, synthetic construct
  source 1..17: mol_type = other DNA
ggcccggccctcccggt

SEQ ID NO: 126033 - DNA, 17 bp, synthetic construct
  source 1..17: mol_type = other DNA
gcccggccctcccggtc

SEQ ID NO: 126034 - DNA, 17 bp, synthetic construct
  source 1..17: mol_type = other DNA
cccggccctcccggtct

SEQ ID NO: 126035 - DNA, 17 bp, synthetic construct
  source 1..17: mol_type = other DNA
ccggccctcccggtctc

SEQ ID NO: 126036 - DNA, 17 bp, synthetic construct
  source 1..17: mol_type = other DNA
cggccctcccggtctcc

SEQ ID NO: 126037 - DNA, 17 bp, synthetic construct
  source 1..17: mol_type = other DNA
ggccctcccggtctcca

SEQ ID NO: 126038 - DNA, 17 bp, synthetic construct
  source 1..17: mol_type = other DNA
gccctcccggtctccac

SEQ ID NO: 126039 - DNA, 17 bp, synthetic construct
  source 1..17: mol_type = other DNA
ccctcccggtctccacc

SEQ ID NO: 126040 - DNA, 17 bp, synthetic construct
  source 1..17: mol_type = other DNA
cctcccggtctccaccg

SEQ ID NO: 126041 - DNA, 17 bp, synthetic construct
  source 1..17: mol_type = other DNA
ctcccggtctccaccgt

SEQ ID NO: 126042 - DNA, 17 bp, synthetic construct
  source 1..17: mol_type = other DNA
tcccggtctccaccgtg

SEQ ID NO: 126043 - DNA, 17 bp, synthetic construct
  source 1..17: mol_type = other DNA
cccggtctccaccgtgt

SEQ ID NO: 126044 - DNA, 17 bp, synthetic construct
  source 1..17: mol_type = other DNA
ccggtctccaccgtgtg

SEQ ID NO: 126045 - DNA, 17 bp, synthetic construct
  source 1..17: mol_type = other DNA
cggtctccaccgtgtgt

SEQ ID NO: 126046 - DNA, 17 bp, synthetic construct
  source 1..17: mol_type = other DNA
ggtctccaccgtgtgtg

SEQ ID NO: 126047 - DNA, 17 bp, synthetic construct
  source 1..17: mol_type = other DNA
gtctccaccgtgtgtgt

SEQ ID NO: 126048 - DNA, 17 bp, synthetic construct
  source 1..17: mol_type = other DNA
tctccaccgtgtgtgtc

SEQ ID NO: 126049 - DNA, 17 bp, synthetic construct
  source 1..17: mol_type = other DNA
ctccaccgtgtgtgtcc

SEQ ID NO: 126050 - DNA, 17 bp, synthetic construct
  source 1..17: mol_type = other DNA
tccaccgtgtgtgtccg

SEQ ID NO: 126051 - DNA, 17 bp, synthetic construct
  source 1..17: mol_type = other DNA
ccaccgtgtgtgtccgc

SEQ ID NO: 126052 - DNA, 17 bp, synthetic construct
  source 1..17: mol_type = other DNA
caccgtgtgtgtccgcg

SEQ ID NO: 126053 - DNA, 17 bp, synthetic construct
  source 1..17: mol_type = other DNA
accgtgtgtgtccgcga

SEQ ID NO: 126054 - DNA, 17 bp, synthetic construct
  source 1..17: mol_type = other DNA
ccgtgtgtgtccgcgag

SEQ ID NO: 126055 - DNA, 17 bp, synthetic construct
  source 1..17: mol_type = other DNA
cgtgtgtgtccgcgagg

SEQ ID NO: 126056 - DNA, 17 bp, synthetic construct
  source 1..17: mol_type = other DNA
gtgtgtgtccgcgaggt

SEQ ID NO: 126057 - DNA, 17 bp, synthetic construct
  source 1..17: mol_type = other DNA
tgtgtgtccgcgaggtc

SEQ ID NO: 126058 - DNA, 17 bp, synthetic construct
  source 1..17: mol_type = other DNA
gtgtgtccgcgaggtct

SEQ ID NO: 126059 - DNA, 17 bp, synthetic construct
  source 1..17: mol_type = other DNA
tgtgtccgcgaggtctg

SEQ ID NO: 126060 - DNA, 17 bp, synthetic construct
  source 1..17: mol_type = other DNA
gtgtccgcgaggtctgc

SEQ ID NO: 126061 - DNA, 17 bp, synthetic construct
  source 1..17: mol_type = other DNA
tgtccgcgaggtctgcc

SEQ ID NO: 126062 - DNA, 17 bp, synthetic construct
  source 1..17: mol_type = other DNA
gtccgcgaggtctgccg

SEQ ID NO: 126063 - DNA, 17 bp, synthetic construct
  source 1..17: mol_type = other DNA
tccgcgaggtctgccgc

SEQ ID NO: 126064 - DNA, 17 bp, synthetic construct
  source 1..17: mol_type = other DNA
ccgcgaggtctgccgct

SEQ ID NO: 126065 - DNA, 17 bp, synthetic construct
  source 1..17: mol_type = other DNA
cgcgaggtctgccgctg

SEQ ID NO: 126066 - DNA, 17 bp, synthetic construct
  source 1..17: mol_type = other DNA
gcgaggtctgccgctgg

SEQ ID NO: 126067 - DNA, 17 bp, synthetic construct
  source 1..17: mol_type = other DNA
cgaggtctgccgctggt

SEQ ID NO: 126068 - DNA, 17 bp, synthetic construct
  source 1..17: mol_type = other DNA
gaggtctgccgctggtc

SEQ ID NO: 126069 - DNA, 17 bp, synthetic construct
  source 1..17: mol_type = other DNA
aggtctgccgctggtcc

SEQ ID NO: 126070 - DNA, 17 bp, synthetic construct
  source 1..17: mol_type = other DNA
ggtctgccgctggtcca

SEQ ID NO: 126071 - DNA, 17 bp, synthetic construct
  source 1..17: mol_type = other DNA
gtctgccgctggtccag

SEQ ID NO: 126072 - DNA, 17 bp, synthetic construct
  source 1..17: mol_type = other DNA
tctgccgctggtccagc

SEQ ID NO: 126073 - DNA, 17 bp, synthetic construct
  source 1..17: mol_type = other DNA
ctgccgctggtccagct

SEQ ID NO: 126074 - DNA, 17 bp, synthetic construct
  source 1..17: mol_type = other DNA
tgccgctggtccagctg

SEQ ID NO: 126075 - DNA, 17 bp, synthetic construct
  source 1..17: mol_type = other DNA
gccgctggtccagctgg

SEQ ID NO: 126076 - DNA, 17 bp, synthetic construct
  source 1..17: mol_type = other DNA
ccgctggtccagctggt

SEQ ID NO: 126077 - DNA, 17 bp, synthetic construct
  source 1..17: mol_type = other DNA
cgctggtccagctggta

SEQ ID NO: 126078 - DNA, 17 bp, synthetic construct
  source 1..17: mol_type = other DNA
gctggtccagctggtac

SEQ ID NO: 126079 - DNA, 17 bp, synthetic construct
  source 1..17: mol_type = other DNA
ctggtccagctggtaca

SEQ ID NO: 126080 - DNA, 17 bp, synthetic construct
  source 1..17: mol_type = other DNA
tggtccagctggtacaa

SEQ ID NO: 126081 - DNA, 17 bp, synthetic construct
  source 1..17: mol_type = other DNA
ggtccagctggtacaat

SEQ ID NO: 126082 - DNA, 17 bp, synthetic construct
  source 1..17: mol_type = other DNA
gtccagctggtacaatg

SEQ ID NO: 126083 - DNA, 17 bp, synthetic construct
  source 1..17: mol_type = other DNA
tccagctggtacaatgg

SEQ ID NO: 126084 - DNA, 17 bp, synthetic construct
  source 1..17: mol_type = other DNA
ccagctggtacaatggg

SEQ ID NO: 126085 - DNA, 17 bp, synthetic construct
  source 1..17: mol_type = other DNA
cagctggtacaatgggc

SEQ ID NO: 126086 - DNA, 17 bp, synthetic construct
  source 1..17: mol_type = other DNA
agctggtacaatgggca

SEQ ID NO: 126087 - DNA, 17 bp, synthetic construct
  source 1..17: mol_type = other DNA
gctggtacaatgggcac

SEQ ID NO: 126088 - DNA, 17 bp, synthetic construct
  source 1..17: mol_type = other DNA
ctggtacaatgggcacc

SEQ ID NO: 126089 - DNA, 17 bp, synthetic construct
  source 1..17: mol_type = other DNA
tggtacaatgggcaccg

SEQ ID NO: 126090 - DNA, 17 bp, synthetic construct
  source 1..17: mol_type = other DNA
ggtacaatgggcaccgc

SEQ ID NO: 126091 - DNA, 17 bp, synthetic construct
  source 1..17: mol_type = other DNA
gtacaatgggcaccgcc

SEQ ID NO: 126092 - DNA, 17 bp, synthetic construct
  source 1..17: mol_type = other DNA
tacaatgggcaccgccc

SEQ ID NO: 126093 - DNA, 17 bp, synthetic construct
  source 1..17: mol_type = other DNA
acaatgggcaccgccca

SEQ ID NO: 126094 - DNA, 17 bp, synthetic construct
  source 1..17: mol_type = other DNA
caatgggcaccgcccag

SEQ ID NO: 126095 - DNA, 17 bp, synthetic construct
  source 1..17: mol_type = other DNA
aatgggcaccgcccaga

SEQ ID NO: 126096 - DNA, 17 bp, synthetic construct
  source 1..17: mol_type = other DNA
atgggcaccgcccagag

SEQ ID NO: 126097 - DNA, 17 bp, synthetic construct
  source 1..17: mol_type = other DNA
tgggcaccgcccagagc

SEQ ID NO: 126098 - DNA, 17 bp, synthetic construct
  source 1..17: mol_type = other DNA
gggcaccgcccagagcc

SEQ ID NO: 126099 - DNA, 17 bp, synthetic construct
  source 1..17: mol_type = other DNA
ggcaccgcccagagccc

SEQ ID NO: 126100 - DNA, 17 bp, synthetic construct
  source 1..17: mol_type = other DNA
gcaccgcccagagcccg

SEQ ID NO: 126101 - DNA, 17 bp, synthetic construct
  source 1..17: mol_type = other DNA
caccgcccagagcccgg

SEQ ID NO: 126102 - DNA, 17 bp, synthetic construct
  source 1..17: mol_type = other DNA
accgcccagagcccggc

SEQ ID NO: 126103 - DNA, 17 bp, synthetic construct
  source 1..17: mol_type = other DNA
ccgcccagagcccggcc

SEQ ID NO: 126104 - DNA, 17 bp, synthetic construct
  source 1..17: mol_type = other DNA
cgcccagagcccggcct

SEQ ID NO: 126105 - DNA, 17 bp, synthetic construct
  source 1..17: mol_type = other DNA
gcccagagcccggcctg

SEQ ID NO: 126106 - DNA, 17 bp, synthetic construct
  source 1..17: mol_type = other DNA
cccagagcccggcctgg

SEQ ID NO: 126107 - DNA, 17 bp, synthetic construct
  source 1..17: mol_type = other DNA
ccagagcccggcctggg

SEQ ID NO: 126108 - DNA, 17 bp, synthetic construct
  source 1..17: mol_type = other DNA
cagagcccggcctggga

SEQ ID NO: 126109 - DNA, 17 bp, synthetic construct
  source 1..17: mol_type = other DNA
agagcccggcctgggag

SEQ ID NO: 126110 - DNA, 17 bp, synthetic construct
  source 1..17: mol_type = other DNA
gagcccggcctgggagg

SEQ ID NO: 126111 - DNA, 17 bp, synthetic construct
  source 1..17: mol_type = other DNA
agcccggcctgggaggc

SEQ ID NO: 126112 - DNA, 17 bp, synthetic construct
  source 1..17: mol_type = other DNA
gcccggcctgggaggcg

SEQ ID NO: 126113 - DNA, 17 bp, synthetic construct
  source 1..17: mol_type = other DNA
cccggcctgggaggcgg

SEQ ID NO: 126114 - DNA, 17 bp, synthetic construct
  source 1..17: mol_type = other DNA
ccggcctgggaggcgga

SEQ ID NO: 126115 - DNA, 17 bp, synthetic construct
  source 1..17: mol_type = other DNA
cggcctgggaggcggag

SEQ ID NO: 126116 - DNA, 17 bp, synthetic construct
  source 1..17: mol_type = other DNA
ggcctgggaggcggaga

SEQ ID NO: 126117 - DNA, 17 bp, synthetic construct
  source 1..17: mol_type = other DNA
gcctgggaggcggagac

SEQ ID NO: 126118 - DNA, 17 bp, synthetic construct
  source 1..17: mol_type = other DNA
cctgggaggcggagact

SEQ ID NO: 126119 - DNA, 17 bp, synthetic construct
  source 1..17: mol_type = other DNA
ctgggaggcggagactt

SEQ ID NO: 126120 - DNA, 17 bp, synthetic construct
  source 1..17: mol_type = other DNA
tgggaggcggagacttt

SEQ ID NO: 126121 - DNA, 17 bp, synthetic construct
  source 1..17: mol_type = other DNA
gggaggcggagactttg

SEQ ID NO: 126122 - DNA, 17 bp, synthetic construct
  source 1..17: mol_type = other DNA
ggaggcggagactttga

SEQ ID NO: 126123 - DNA, 17 bp, synthetic construct
  source 1..17: mol_type = other DNA
gaggcggagactttgag

SEQ ID NO: 126124 - DNA, 17 bp, synthetic construct
  source 1..17: mol_type = other DNA
aggcggagactttgaga

SEQ ID NO: 126125 - DNA, 17 bp, synthetic construct
  source 1..17: mol_type = other DNA
ggcggagactttgagac

SEQ ID NO: 126126 - DNA, 17 bp, synthetic construct
  source 1..17: mol_type = other DNA
gcggagactttgagacg

SEQ ID NO: 126127 - DNA, 17 bp, synthetic construct
  source 1..17: mol_type = other DNA
cggagactttgagacgt

SEQ ID NO: 126128 - DNA, 17 bp, synthetic construct
  source 1..17: mol_type = other DNA
ggagactttgagacgtt

SEQ ID NO: 126129 - DNA, 17 bp, synthetic construct
  source 1..17: mol_type = other DNA
gagactttgagacgttt

SEQ ID NO: 126130 - DNA, 17 bp, synthetic construct
  source 1..17: mol_type = other DNA
agactttgagacgtttg

SEQ ID NO: 126131 - DNA, 17 bp, synthetic construct
  source 1..17: mol_type = other DNA
gactttgagacgtttga

SEQ ID NO: 126132 - DNA, 17 bp, synthetic construct
  source 1..17: mol_type = other DNA
actttgagacgtttgaa

SEQ ID NO: 126133 - DNA, 17 bp, synthetic construct
  source 1..17: mol_type = other DNA
ctttgagacgtttgaaa

SEQ ID NO: 126134 - DNA, 17 bp, synthetic construct
  source 1..17: mol_type = other DNA
tttgagacgtttgaaaa

SEQ ID NO: 126135 - DNA, 17 bp, synthetic construct
  source 1..17: mol_type = other DNA
ttgagacgtttgaaaac

SEQ ID NO: 126136 - DNA, 17 bp, synthetic construct
  source 1..17: mol_type = other DNA
tgagacgtttgaaaacc

SEQ ID NO: 126137 - DNA, 17 bp, synthetic construct
  source 1..17: mol_type = other DNA
gagacgtttgaaaacct

SEQ ID NO: 126138 - DNA, 17 bp, synthetic construct
  source 1..17: mol_type = other DNA
agacgtttgaaaacctg

SEQ ID NO: 126139 - DNA, 17 bp, synthetic construct
  source 1..17: mol_type = other DNA
gacgtttgaaaacctga

SEQ ID NO: 126140 - DNA, 17 bp, synthetic construct
  source 1..17: mol_type = other DNA
acgtttgaaaacctgag

SEQ ID NO: 126141 - DNA, 17 bp, synthetic construct
  source 1..17: mol_type = other DNA
cgtttgaaaacctgagg

SEQ ID NO: 126142 - DNA, 17 bp, synthetic construct
  source 1..17: mol_type = other DNA
gtttgaaaacctgaggc

SEQ ID NO: 126143 - DNA, 17 bp, synthetic construct
  source 1..17: mol_type = other DNA
tttgaaaacctgaggca

SEQ ID NO: 126144 - DNA, 17 bp, synthetic construct
  source 1..17: mol_type = other DNA
ttgaaaacctgaggcag

SEQ ID NO: 126145 - DNA, 17 bp, synthetic construct
  source 1..17: mol_type = other DNA
tgaaaacctgaggcaga

SEQ ID NO: 126146 - DNA, 17 bp, synthetic construct
  source 1..17: mol_type = other DNA
gaaaacctgaggcagag

SEQ ID NO: 126147 - DNA, 17 bp, synthetic construct
  source 1..17: mol_type = other DNA
aaaacctgaggcagaga

SEQ ID NO: 126148 - DNA, 17 bp, synthetic construct
  source 1..17: mol_type = other DNA
aaacctgaggcagagag

SEQ ID NO: 126149 - DNA, 17 bp, synthetic construct
  source 1..17: mol_type = other DNA
aacctgaggcagagagg

SEQ ID NO: 126150 - DNA, 17 bp, synthetic construct
  source 1..17: mol_type = other DNA
acctgaggcagagaggg

SEQ ID NO: 126151 - DNA, 17 bp, synthetic construct
  source 1..17: mol_type = other DNA
cctgaggcagagagggt

SEQ ID NO: 126152 - DNA, 17 bp, synthetic construct
  source 1..17: mol_type = other DNA
ctgaggcagagagggta

SEQ ID NO: 126153 - DNA, 17 bp, synthetic construct
  source 1..17: mol_type = other DNA
tgaggcagagagggtac

SEQ ID NO: 126154 - DNA, 17 bp, synthetic construct
  source 1..17: mol_type = other DNA
gaggcagagagggtacc

SEQ ID NO: 126155 - DNA, 17 bp, synthetic construct
  source 1..17: mol_type = other DNA
aggcagagagggtacca

SEQ ID NO: 126156 - DNA, 17 bp, synthetic construct
  source 1..17: mol_type = other DNA
ggcagagagggtaccag

SEQ ID NO: 126157 - DNA, 17 bp, synthetic construct
  source 1..17: mol_type = other DNA
gcagagagggtaccagg

SEQ ID NO: 126158 - DNA, 17 bp, synthetic construct
  source 1..17: mol_type = other DNA
cagagagggtaccaggt

SEQ ID NO: 126159 - DNA, 17 bp, synthetic construct
  source 1..17: mol_type = other DNA
agagagggtaccaggta

SEQ ID NO: 126160 - DNA, 17 bp, synthetic construct
  source 1..17: mol_type = other DNA
gagagggtaccaggtat

SEQ ID NO: 126161 - DNA, 17 bp, synthetic construct
  source 1..17: mol_type = other DNA
agagggtaccaggtatg

SEQ ID NO: 126162 - DNA, 17 bp, synthetic construct
  source 1..17: mol_type = other DNA
gagggtaccaggtatgc

SEQ ID NO: 126163 - DNA, 17 bp, synthetic construct
  source 1..17: mol_type = other DNA
agggtaccaggtatgcc

SEQ ID NO: 126164 - DNA, 17 bp, synthetic construct
  source 1..17: mol_type = other DNA
gggtaccaggtatgccc

SEQ ID NO: 126165 - DNA, 17 bp, synthetic construct
  source 1..17: mol_type = other DNA
ggtaccaggtatgccct

SEQ ID NO: 126166 - DNA, 17 bp, synthetic construct
  source 1..17: mol_type = other DNA
gtaccaggtatgccctg

SEQ ID NO: 126167 - DNA, 17 bp, synthetic construct
  source 1..17: mol_type = other DNA
taccaggtatgccctgt

SEQ ID NO: 126168 - DNA, 17 bp, synthetic construct
  source 1..17: mol_type = other DNA
accaggtatgccctgtg

SEQ ID NO: 126169 - DNA, 17 bp, synthetic construct
  source 1..17: mol_type = other DNA
ccaggtatgccctgtgc

SEQ ID NO: 126170 - DNA, 17 bp, synthetic construct
  source 1..17: mol_type = other DNA
caggtatgccctgtgct

SEQ ID NO: 126171 - DNA, 17 bp, synthetic construct
  source 1..17: mol_type = other DNA
aggtatgccctgtgctg

SEQ ID NO: 126172 - DNA, 17 bp, synthetic construct
  source 1..17: mol_type = other DNA
ggtatgccctgtgctgg

SEQ ID NO: 126173 - DNA, 17 bp, synthetic construct
  source 1..17: mol_type = other DNA
gtatgccctgtgctggc

SEQ ID NO: 126174 - DNA, 17 bp, synthetic construct
  source 1..17: mol_type = other DNA
tatgccctgtgctggct

SEQ ID NO: 126175 - DNA, 17 bp, synthetic construct
  source 1..17: mol_type = other DNA
atgccctgtgctggctg

SEQ ID NO: 126176 - DNA, 17 bp, synthetic construct
  source 1..17: mol_type = other DNA
tgccctgtgctggctga

SEQ ID NO: 126177 - DNA, 17 bp, synthetic construct
  source 1..17: mol_type = other DNA
gccctgtgctggctgac

SEQ ID NO: 126178 - DNA, 17 bp, synthetic construct
  source 1..17: mol_type = other DNA
ccctgtgctggctgaca

SEQ ID NO: 126179 - DNA, 17 bp, synthetic construct
  source 1..17: mol_type = other DNA
cctgtgctggctgacat

SEQ ID NO: 126180 - DNA, 17 bp, synthetic construct
  source 1..17: mol_type = other DNA
ctgtgctggctgacatc

SEQ ID NO: 126181 - DNA, 17 bp, synthetic construct
  source 1..17: mol_type = other DNA
tgtgctggctgacatcg

SEQ ID NO: 126182 - DNA, 17 bp, synthetic construct
  source 1..17: mol_type = other DNA
gtgctggctgacatcga

SEQ ID NO: 126183 - DNA, 17 bp, synthetic construct
  source 1..17: mol_type = other DNA
tgctggctgacatcgag

SEQ ID NO: 126184 - DNA, 17 bp, synthetic construct
  source 1..17: mol_type = other DNA
gctggctgacatcgagt

SEQ ID NO: 126185 - DNA, 17 bp, synthetic construct
  source 1..17: mol_type = other DNA
ctggctgacatcgagtg

SEQ ID NO: 126186 - DNA, 17 bp, synthetic construct
  source 1..17: mol_type = other DNA
tggctgacatcgagtgc

SEQ ID NO: 126187 - DNA, 17 bp, synthetic construct
  source 1..17: mol_type = other DNA
ggctgacatcgagtgcc

SEQ ID NO: 126188 - DNA, 17 bp, synthetic construct
  source 1..17: mol_type = other DNA
gctgacatcgagtgccg

SEQ ID NO: 126189 - DNA, 17 bp, synthetic construct
  source 1..17: mol_type = other DNA
ctgacatcgagtgccgg

SEQ ID NO: 126190 - DNA, 17 bp, synthetic construct
  source 1..17: mol_type = other DNA
tgacatcgagtgccggg

SEQ ID NO: 126191 - DNA, 17 bp, synthetic construct
  source 1..17: mol_type = other DNA
gacatcgagtgccgggc

SEQ ID NO: 126192 - DNA, 17 bp, synthetic construct
  source 1..17: mol_type = other DNA
acatcgagtgccgggcg

SEQ ID NO: 126193 - DNA, 17 bp, synthetic construct
  source 1..17: mol_type = other DNA
catcgagtgccgggcgg

SEQ ID NO: 126194 - DNA, 17 bp, synthetic construct
  source 1..17: mol_type = other DNA
atcgagtgccgggcggc

SEQ ID NO: 126195 - DNA, 17 bp, synthetic construct
  source 1..17: mol_type = other DNA
tcgagtgccgggcggcg

SEQ ID NO: 126196 - DNA, 17 bp, synthetic construct
  source 1..17: mol_type = other DNA
cgagtgccgggcggcgc

SEQ ID NO: 126197 - DNA, 17 bp, synthetic construct
  source 1..17: mol_type = other DNA
gagtgccgggcggcgca

SEQ ID NO: 126198 - DNA, 17 bp, synthetic construct
  source 1..17: mol_type = other DNA
agtgccgggcggcgcag

SEQ ID NO: 126199 - DNA, 17 bp, synthetic construct
  source 1..17: mol_type = other DNA
gtgccgggcggcgcagc

SEQ ID NO: 126200 - DNA, 17 bp, synthetic construct
  source 1..17: mol_type = other DNA
tgccgggcggcgcagct

SEQ ID NO: 126201 - DNA, 17 bp, synthetic construct
  source 1..17: mol_type = other DNA
gccgggcggcgcagctt

SEQ ID NO: 126202 - DNA, 17 bp, synthetic construct
  source 1..17: mol_type = other DNA
ccgggcggcgcagcttc

SEQ ID NO: 126203 - DNA, 17 bp, synthetic construct
  source 1..17: mol_type = other DNA
cgggcggcgcagcttcc

SEQ ID NO: 126204 - DNA, 17 bp, synthetic construct
  source 1..17: mol_type = other DNA
gggcggcgcagcttccc

SEQ ID NO: 126205 - DNA, 17 bp, synthetic construct
  source 1..17: mol_type = other DNA
ggcggcgcagcttcccg

SEQ ID NO: 126206 - DNA, 17 bp, synthetic construct
  source 1..17: mol_type = other DNA
gcggcgcagcttcccga

SEQ ID NO: 126207 - DNA, 17 bp, synthetic construct
  source 1..17: mol_type = other DNA
cggcgcagcttcccgac

SEQ ID NO: 126208 - DNA, 17 bp, synthetic construct
  source 1..17: mol_type = other DNA
ggcgcagcttcccgaca

SEQ ID NO: 126209 - DNA, 17 bp, synthetic construct
  source 1..17: mol_type = other DNA
gcgcagcttcccgacat

SEQ ID NO: 126210 - DNA, 17 bp, synthetic construct
  source 1..17: mol_type = other DNA
cgcagcttcccgacatg

SEQ ID NO: 126211 - DNA, 17 bp, synthetic construct
  source 1..17: mol_type = other DNA
gcagcttcccgacatgc

SEQ ID NO: 126212 - DNA, 17 bp, synthetic construct
  source 1..17: mol_type = other DNA
cagcttcccgacatgcc

SEQ ID NO: 126213 - DNA, 17 bp, synthetic construct
  source 1..17: mol_type = other DNA
agcttcccgacatgccg

SEQ ID NO: 126214 - DNA, 17 bp, synthetic construct
  source 1..17: mol_type = other DNA
gcttcccgacatgccgc

SEQ ID NO: 126215 - DNA, 17 bp, synthetic construct
  source 1..17: mol_type = other DNA
cttcccgacatgccgct

SEQ ID NO: 126216 - DNA, 17 bp, synthetic construct
  source 1..17: mol_type = other DNA
ttcccgacatgccgctg

SEQ ID NO: 126217 - DNA, 17 bp, synthetic construct
  source 1..17: mol_type = other DNA
tcccgacatgccgctgg

SEQ ID NO: 126218 - DNA, 17 bp, synthetic construct
  source 1..17: mol_type = other DNA
cccgacatgccgctgga

SEQ ID NO: 126219 - DNA, 17 bp, synthetic construct
  source 1..17: mol_type = other DNA
ccgacatgccgctggag

SEQ ID NO: 126220 - DNA, 17 bp, synthetic construct
  source 1..17: mol_type = other DNA
cgacatgccgctggagg

SEQ ID NO: 126221 - DNA, 17 bp, synthetic construct
  source 1..17: mol_type = other DNA
gacatgccgctggagga

SEQ ID NO: 126222 - DNA, 17 bp, synthetic construct
  source 1..17: mol_type = other DNA
acatgccgctggaggag

SEQ ID NO: 126223 - DNA, 17 bp, synthetic construct
  source 1..17: mol_type = other DNA
catgccgctggaggagc

SEQ ID NO: 126224 - DNA, 17 bp, synthetic construct
  source 1..17: mol_type = other DNA
atgccgctggaggagct

SEQ ID NO: 126225 - DNA, 17 bp, synthetic construct
  source 1..17: mol_type = other DNA
tgccgctggaggagctg

SEQ ID NO: 126226 - DNA, 17 bp, synthetic construct
  source 1..17: mol_type = other DNA
gccgctggaggagctgg

SEQ ID NO: 126227 - DNA, 17 bp, synthetic construct
  source 1..17: mol_type = other DNA
ccgctggaggagctggg

SEQ ID NO: 126228 - DNA, 17 bp, synthetic construct
  source 1..17: mol_type = other DNA
cgctggaggagctgggc

SEQ ID NO: 126229 - DNA, 17 bp, synthetic construct
  source 1..17: mol_type = other DNA
gctggaggagctgggcc

SEQ ID NO: 126230 - DNA, 17 bp, synthetic construct
  source 1..17: mol_type = other DNA
ctggaggagctgggcca

SEQ ID NO: 126231 - DNA, 17 bp, synthetic construct
  source 1..17: mol_type = other DNA
tggaggagctgggccag

SEQ ID NO: 126232 - DNA, 17 bp, synthetic construct
  source 1..17: mol_type = other DNA
ggaggagctgggccagc

SEQ ID NO: 126233 - DNA, 17 bp, synthetic construct
  source 1..17: mol_type = other DNA
gaggagctgggccagca

SEQ ID NO: 126234 - DNA, 17 bp, synthetic construct
  source 1..17: mol_type = other DNA
aggagctgggccagcag

SEQ ID NO: 126235 - DNA, 17 bp, synthetic construct
  source 1..17: mol_type = other DNA
ggagctgggccagcagg

SEQ ID NO: 126236 - DNA, 17 bp, synthetic construct
  source 1..17: mol_type = other DNA
gagctgggccagcaggt

SEQ ID NO: 126237 - DNA, 17 bp, synthetic construct
  source 1..17: mol_type = other DNA
agctgggccagcaggtg

SEQ ID NO: 126238 - DNA, 17 bp, synthetic construct
  source 1..17: mol_type = other DNA
gctgggccagcaggtgg

SEQ ID NO: 126239 - DNA, 17 bp, synthetic construct
  source 1..17: mol_type = other DNA
ctgggccagcaggtgga

SEQ ID NO: 126240 - DNA, 17 bp, synthetic construct
  source 1..17: mol_type = other DNA
tgggccagcaggtggac

SEQ ID NO: 126241 - DNA, 17 bp, synthetic construct
  source 1..17: mol_type = other DNA
gggccagcaggtggact

SEQ ID NO: 126242 - DNA, 17 bp, synthetic construct
  source 1..17: mol_type = other DNA
ggccagcaggtggactg

SEQ ID NO: 126243 - DNA, 17 bp, synthetic construct
  source 1..17: mol_type = other DNA
gccagcaggtggactgt

SEQ ID NO: 126244 - DNA, 17 bp, synthetic construct
  source 1..17: mol_type = other DNA
ccagcaggtggactgtg

SEQ ID NO: 126245 - DNA, 17 bp, synthetic construct
  source 1..17: mol_type = other DNA
cagcaggtggactgtga

SEQ ID NO: 126246 - DNA, 17 bp, synthetic construct
  source 1..17: mol_type = other DNA
agcaggtggactgtgac

SEQ ID NO: 126247 - DNA, 17 bp, synthetic construct
  source 1..17: mol_type = other DNA
gcaggtggactgtgacc

SEQ ID NO: 126248 - DNA, 17 bp, synthetic construct
  source 1..17: mol_type = other DNA
caggtggactgtgaccg

SEQ ID NO: 126249 - DNA, 17 bp, synthetic construct
  source 1..17: mol_type = other DNA
aggtggactgtgaccgc

SEQ ID NO: 126250 - DNA, 17 bp, synthetic construct
  source 1..17: mol_type = other DNA
ggtggactgtgaccgca

SEQ ID NO: 126251 - DNA, 17 bp, synthetic construct
  source 1..17: mol_type = other DNA
gtggactgtgaccgcat

SEQ ID NO: 126252 - DNA, 17 bp, synthetic construct
  source 1..17: mol_type = other DNA
tggactgtgaccgcatg

SEQ ID NO: 126253 - DNA, 17 bp, synthetic construct
  source 1..17: mol_type = other DNA
ggactgtgaccgcatgc

SEQ ID NO: 126254 - DNA, 17 bp, synthetic construct
  source 1..17: mol_type = other DNA
gactgtgaccgcatgcg

SEQ ID NO: 126255 - DNA, 17 bp, synthetic construct
  source 1..17: mol_type = other DNA
actgtgaccgcatgcgg

SEQ ID NO: 126256 - DNA, 17 bp, synthetic construct
  source 1..17: mol_type = other DNA
ctgtgaccgcatgcggg

SEQ ID NO: 126257 - DNA, 17 bp, synthetic construct
  source 1..17: mol_type = other DNA
tgtgaccgcatgcgggg

SEQ ID NO: 126258 - DNA, 17 bp, synthetic construct
  source 1..17: mol_type = other DNA
gtgaccgcatgcggggg

SEQ ID NO: 126259 - DNA, 17 bp, synthetic construct
  source 1..17: mol_type = other DNA
tgaccgcatgcgggggc

SEQ ID NO: 126260 - DNA, 17 bp, synthetic construct
  source 1..17: mol_type = other DNA
gaccgcatgcgggggct

SEQ ID NO: 126261 - DNA, 17 bp, synthetic construct
  source 1..17: mol_type = other DNA
accgcatgcgggggctg

SEQ ID NO: 126262 - DNA, 17 bp, synthetic construct
  source 1..17: mol_type = other DNA
ccgcatgcgggggctga

SEQ ID NO: 126263 - DNA, 17 bp, synthetic construct
  source 1..17: mol_type = other DNA
cgcatgcgggggctgat

SEQ ID NO: 126264 - DNA, 17 bp, synthetic construct
  source 1..17: mol_type = other DNA
gcatgcgggggctgatg

SEQ ID NO: 126265 - DNA, 17 bp, synthetic construct
  source 1..17: mol_type = other DNA
catgcgggggctgatgt

SEQ ID NO: 126266 - DNA, 17 bp, synthetic construct
  source 1..17: mol_type = other DNA
atgcgggggctgatgtg

SEQ ID NO: 126267 - DNA, 17 bp, synthetic construct
  source 1..17: mol_type = other DNA
tgcgggggctgatgtgc

SEQ ID NO: 126268 - DNA, 17 bp, synthetic construct
  source 1..17: mol_type = other DNA
gcgggggctgatgtgcg

SEQ ID NO: 126269 - DNA, 17 bp, synthetic construct
  source 1..17: mol_type = other DNA
cgggggctgatgtgcgc

SEQ ID NO: 126270 - DNA, 17 bp, synthetic construct
  source 1..17: mol_type = other DNA
gggggctgatgtgcgcc

SEQ ID NO: 126271 - DNA, 17 bp, synthetic construct
  source 1..17: mol_type = other DNA
ggggctgatgtgcgcca

SEQ ID NO: 126272 - DNA, 17 bp, synthetic construct
  source 1..17: mol_type = other DNA
gggctgatgtgcgccaa

SEQ ID NO: 126273 - DNA, 17 bp, synthetic construct
  source 1..17: mol_type = other DNA
ggctgatgtgcgccaac

SEQ ID NO: 126274 - DNA, 17 bp, synthetic construct
  source 1..17: mol_type = other DNA
gctgatgtgcgccaaca

SEQ ID NO: 126275 - DNA, 17 bp, synthetic construct
  source 1..17: mol_type = other DNA
ctgatgtgcgccaacag

SEQ ID NO: 126276 - DNA, 17 bp, synthetic construct
  source 1..17: mol_type = other DNA
tgatgtgcgccaacagc

SEQ ID NO: 126277 - DNA, 17 bp, synthetic construct
  source 1..17: mol_type = other DNA
gatgtgcgccaacagcc

SEQ ID NO: 126278 - DNA, 17 bp, synthetic construct
  source 1..17: mol_type = other DNA
atgtgcgccaacagcca

SEQ ID NO: 126279 - DNA, 17 bp, synthetic construct
  source 1..17: mol_type = other DNA
tgtgcgccaacagccaa

SEQ ID NO: 126280 - DNA, 17 bp, synthetic construct
  source 1..17: mol_type = other DNA
gtgcgccaacagccaac

SEQ ID NO: 126281 - DNA, 17 bp, synthetic construct
  source 1..17: mol_type = other DNA
tgcgccaacagccaaca

SEQ ID NO: 126282 - DNA, 17 bp, synthetic construct
  source 1..17: mol_type = other DNA
gcgccaacagccaacag

SEQ ID NO: 126283 - DNA, 17 bp, synthetic construct
  source 1..17: mol_type = other DNA
cgccaacagccaacaga

SEQ ID NO: 126284 - DNA, 17 bp, synthetic construct
  source 1..17: mol_type = other DNA
gccaacagccaacagag

SEQ ID NO: 126285 - DNA, 17 bp, synthetic construct
  source 1..17: mol_type = other DNA
ccaacagccaacagagt

SEQ ID NO: 126286 - DNA, 17 bp, synthetic construct
  source 1..17: mol_type = other DNA
caacagccaacagagtc

SEQ ID NO: 126287 - DNA, 17 bp, synthetic construct
  source 1..17: mol_type = other DNA
aacagccaacagagtcc

SEQ ID NO: 126288 - DNA, 17 bp, synthetic construct
  source 1..17: mol_type = other DNA
acagccaacagagtccc

SEQ ID NO: 126289 - DNA, 17 bp, synthetic construct
  source 1..17: mol_type = other DNA
cagccaacagagtcccc

SEQ ID NO: 126290 - DNA, 17 bp, synthetic construct
  source 1..17: mol_type = other DNA
agccaacagagtccccc

SEQ ID NO: 126291 - DNA, 17 bp, synthetic construct
  source 1..17: mol_type = other DNA
gccaacagagtcccccg

SEQ ID NO: 126292 - DNA, 17 bp, synthetic construct
  source 1..17: mol_type = other DNA
ccaacagagtcccccgc

SEQ ID NO: 126293 - DNA, 17 bp, synthetic construct
  source 1..17: mol_type = other DNA
caacagagtcccccgct

SEQ ID NO: 126294 - DNA, 17 bp, synthetic construct
  source 1..17: mol_type = other DNA
aacagagtcccccgctc

SEQ ID NO: 126295 - DNA, 17 bp, synthetic construct
  source 1..17: mol_type = other DNA
acagagtcccccgctct

SEQ ID NO: 126296 - DNA, 17 bp, synthetic construct
  source 1..17: mol_type = other DNA
cagagtcccccgctctg

SEQ ID NO: 126297 - DNA, 17 bp, synthetic construct
  source 1..17: mol_type = other DNA
agagtcccccgctctgt

SEQ ID NO: 126298 - DNA, 17 bp, synthetic construct
  source 1..17: mol_type = other DNA
gagtcccccgctctgtc

SEQ ID NO: 126299 - DNA, 17 bp, synthetic construct
  source 1..17: mol_type = other DNA
agtcccccgctctgtca

SEQ ID NO: 126300 - DNA, 17 bp, synthetic construct
  source 1..17: mol_type = other DNA
gtcccccgctctgtcac

SEQ ID NO: 126301 - DNA, 17 bp, synthetic construct
  source 1..17: mol_type = other DNA
tcccccgctctgtcacg

SEQ ID NO: 126302 - DNA, 17 bp, synthetic construct
  source 1..17: mol_type = other DNA
cccccgctctgtcacga

SEQ ID NO: 126303 - DNA, 17 bp, synthetic construct
  source 1..17: mol_type = other DNA
ccccgctctgtcacgac

SEQ ID NO: 126304 - DNA, 17 bp, synthetic construct
  source 1..17: mol_type = other DNA
cccgctctgtcacgact

SEQ ID NO: 126305 - DNA, 17 bp, synthetic construct
  source 1..17: mol_type = other DNA
ccgctctgtcacgacta

SEQ ID NO: 126306 - DNA, 17 bp, synthetic construct
  source 1..17: mol_type = other DNA
cgctctgtcacgactac

SEQ ID NO: 126307 - DNA, 17 bp, synthetic construct
  source 1..17: mol_type = other DNA
gctctgtcacgactacg

SEQ ID NO: 126308 - DNA, 17 bp, synthetic construct
  source 1..17: mol_type = other DNA
ctctgtcacgactacga

SEQ ID NO: 126309 - DNA, 17 bp, synthetic construct
  source 1..17: mol_type = other DNA
tctgtcacgactacgag

SEQ ID NO: 126310 - DNA, 17 bp, synthetic construct
  source 1..17: mol_type = other DNA
ctgtcacgactacgagc

SEQ ID NO: 126311 - DNA, 17 bp, synthetic construct
  source 1..17: mol_type = other DNA
tgtcacgactacgagct

SEQ ID NO: 126312 - DNA, 17 bp, synthetic construct
  source 1..17: mol_type = other DNA
gtcacgactacgagctg

SEQ ID NO: 126313 - DNA, 17 bp, synthetic construct
  source 1..17: mol_type = other DNA
tcacgactacgagctgc

SEQ ID NO: 126314 - DNA, 17 bp, synthetic construct
  source 1..17: mol_type = other DNA
cacgactacgagctgcg

SEQ ID NO: 126315 - DNA, 17 bp, synthetic construct
  source 1..17: mol_type = other DNA
acgactacgagctgcgg

SEQ ID NO: 126316 - DNA, 17 bp, synthetic construct
  source 1..17: mol_type = other DNA
cgactacgagctgcggg

SEQ ID NO: 126317 - DNA, 17 bp, synthetic construct
  source 1..17: mol_type = other DNA
gactacgagctgcgggt

SEQ ID NO: 126318 - DNA, 17 bp, synthetic construct
  source 1..17: mol_type = other DNA
actacgagctgcgggtt

SEQ ID NO: 126319 - DNA, 17 bp, synthetic construct
  source 1..17: mol_type = other DNA
ctacgagctgcgggttc

SEQ ID NO: 126320 - DNA, 17 bp, synthetic construct
  source 1..17: mol_type = other DNA
tacgagctgcgggttct

SEQ ID NO: 126321 - DNA, 17 bp, synthetic construct
  source 1..17: mol_type = other DNA
acgagctgcgggttctc

SEQ ID NO: 126322 - DNA, 17 bp, synthetic construct
  source 1..17: mol_type = other DNA
cgagctgcgggttctct

SEQ ID NO: 126323 - DNA, 17 bp, synthetic construct
  source 1..17: mol_type = other DNA
gagctgcgggttctctg

SEQ ID NO: 126324 - DNA, 17 bp, synthetic construct
  source 1..17: mol_type = other DNA
agctgcgggttctctgc

SEQ ID NO: 126325 - DNA, 17 bp, synthetic construct
  source 1..17: mol_type = other DNA
gctgcgggttctctgct

SEQ ID NO: 126326 - DNA, 17 bp, synthetic construct
  source 1..17: mol_type = other DNA
ctgcgggttctctgctg

SEQ ID NO: 126327 - DNA, 17 bp, synthetic construct
  source 1..17: mol_type = other DNA
tgcgggttctctgctgc

SEQ ID NO: 126328 - DNA, 17 bp, synthetic construct
  source 1..17: mol_type = other DNA
gcgggttctctgctgcg

SEQ ID NO: 126329 - DNA, 17 bp, synthetic construct
  source 1..17: mol_type = other DNA
cgggttctctgctgcga

SEQ ID NO: 126330 - DNA, 17 bp, synthetic construct
  source 1..17: mol_type = other DNA
gggttctctgctgcgaa

SEQ ID NO: 126331 - DNA, 17 bp, synthetic construct
  source 1..17: mol_type = other DNA
ggttctctgctgcgaat

SEQ ID NO: 126332 - DNA, 17 bp, synthetic construct
  source 1..17: mol_type = other DNA
gttctctgctgcgaata

SEQ ID NO: 126333 - DNA, 17 bp, synthetic construct
  source 1..17: mol_type = other DNA
ttctctgctgcgaatac

SEQ ID NO: 126334 - DNA, 17 bp, synthetic construct
  source 1..17: mol_type = other DNA
tctctgctgcgaatacg

SEQ ID NO: 126335 - DNA, 17 bp, synthetic construct
  source 1..17: mol_type = other DNA
ctctgctgcgaatacgt

SEQ ID NO: 126336 - DNA, 17 bp, synthetic construct
  source 1..17: mol_type = other DNA
tctgctgcgaatacgtg

SEQ ID NO: 126337 - DNA, 17 bp, synthetic construct
  source 1..17: mol_type = other DNA
ctgctgcgaatacgtgc

SEQ ID NO: 126338 - DNA, 17 bp, synthetic construct
  source 1..17: mol_type = other DNA
tgctgcgaatacgtgcc

SEQ ID NO: 126339 - DNA, 17 bp, synthetic construct
  source 1..17: mol_type = other DNA
gctgcgaatacgtgccc

SEQ ID NO: 126340 - DNA, 17 bp, synthetic construct
  source 1..17: mol_type = other DNA
ctgcgaatacgtgccct

SEQ ID NO: 126341 - DNA, 17 bp, synthetic construct
  source 1..17: mol_type = other DNA
tgcgaatacgtgccctg

SEQ ID NO: 126342 - DNA, 17 bp, synthetic construct
  source 1..17: mol_type = other DNA
gcgaatacgtgccctgt

SEQ ID NO: 126343 - DNA, 17 bp, synthetic construct
  source 1..17: mol_type = other DNA
cgaatacgtgccctgtg

SEQ ID NO: 126344 - DNA, 17 bp, synthetic construct
  source 1..17: mol_type = other DNA
gaatacgtgccctgtgg

SEQ ID NO: 126345 - DNA, 17 bp, synthetic construct
  source 1..17: mol_type = other DNA
aatacgtgccctgtggc

SEQ ID NO: 126346 - DNA, 17 bp, synthetic construct
  source 1..17: mol_type = other DNA
atacgtgccctgtggcc

SEQ ID NO: 126347 - DNA, 17 bp, synthetic construct
  source 1..17: mol_type = other DNA
tacgtgccctgtggccc

SEQ ID NO: 126348 - DNA, 17 bp, synthetic construct
  source 1..17: mol_type = other DNA
acgtgccctgtggcccc

SEQ ID NO: 126349 - DNA, 17 bp, synthetic construct
  source 1..17: mol_type = other DNA
cgtgccctgtggcccct

SEQ ID NO: 126350 - DNA, 17 bp, synthetic construct
  source 1..17: mol_type = other DNA
gtgccctgtggcccctc

SEQ ID NO: 126351 - DNA, 17 bp, synthetic construct
  source 1..17: mol_type = other DNA
tgccctgtggcccctcc

SEQ ID NO: 126352 - DNA, 17 bp, synthetic construct
  source 1..17: mol_type = other DNA
gccctgtggcccctccc

SEQ ID NO: 126353 - DNA, 17 bp, synthetic construct
  source 1..17: mol_type = other DNA
ccctgtggcccctcccc

SEQ ID NO: 126354 - DNA, 17 bp, synthetic construct
  source 1..17: mol_type = other DNA
cctgtggcccctccccg

SEQ ID NO: 126355 - DNA, 17 bp, synthetic construct
  source 1..17: mol_type = other DNA
ctgtggcccctccccgg

SEQ ID NO: 126356 - DNA, 17 bp, synthetic construct
  source 1..17: mol_type = other DNA
tgtggcccctccccggc

SEQ ID NO: 126357 - DNA, 17 bp, synthetic construct
  source 1..17: mol_type = other DNA
gtggcccctccccggcc

SEQ ID NO: 126358 - DNA, 17 bp, synthetic construct
  source 1..17: mol_type = other DNA
tggcccctccccggccc

SEQ ID NO: 126359 - DNA, 17 bp, synthetic construct
  source 1..17: mol_type = other DNA
ggcccctccccggcccc

SEQ ID NO: 126360 - DNA, 17 bp, synthetic construct
  source 1..17: mol_type = other DNA
gcccctccccggcccca

SEQ ID NO: 126361 - DNA, 17 bp, synthetic construct
  source 1..17: mol_type = other DNA
cccctccccggccccag

SEQ ID NO: 126362 - DNA, 17 bp, synthetic construct
  source 1..17: mol_type = other DNA
ccctccccggccccagg

SEQ ID NO: 126363 - DNA, 17 bp, synthetic construct
  source 1..17: mol_type = other DNA
cctccccggccccaggc

SEQ ID NO: 126364 - DNA, 17 bp, synthetic construct
  source 1..17: mol_type = other DNA
ctccccggccccaggca

SEQ ID NO: 126365 - DNA, 17 bp, synthetic construct
  source 1..17: mol_type = other DNA
tccccggccccaggcac

SEQ ID NO: 126366 - DNA, 17 bp, synthetic construct
  source 1..17: mol_type = other DNA
ccccggccccaggcacc

SEQ ID NO: 126367 - DNA, 17 bp, synthetic construct
  source 1..17: mol_type = other DNA
cccggccccaggcacca

SEQ ID NO: 126368 - DNA, 17 bp, synthetic construct
  source 1..17: mol_type = other DNA
ccggccccaggcaccag

SEQ ID NO: 126369 - DNA, 17 bp, synthetic construct
  source 1..17: mol_type = other DNA
cggccccaggcaccagc

SEQ ID NO: 126370 - DNA, 17 bp, synthetic construct
  source 1..17: mol_type = other DNA
ggccccaggcaccagcc

SEQ ID NO: 126371 - DNA, 17 bp, synthetic construct
  source 1..17: mol_type = other DNA
gccccaggcaccagccc

SEQ ID NO: 126372 - DNA, 17 bp, synthetic construct
  source 1..17: mol_type = other DNA
ccccaggcaccagccct

SEQ ID NO: 126373 - DNA, 17 bp, synthetic construct
  source 1..17: mol_type = other DNA
cccaggcaccagccctc

SEQ ID NO: 126374 - DNA, 17 bp, synthetic construct
  source 1..17: mol_type = other DNA
ccaggcaccagccctca

SEQ ID NO: 126375 - DNA, 17 bp, synthetic construct
  source 1..17: mol_type = other DNA
caggcaccagccctcag

SEQ ID NO: 126376 - DNA, 17 bp, synthetic construct
  source 1..17: mol_type = other DNA
aggcaccagccctcagc

SEQ ID NO: 126377 - DNA, 17 bp, synthetic construct
  source 1..17: mol_type = other DNA
ggcaccagccctcagcc

SEQ ID NO: 126378 - DNA, 17 bp, synthetic construct
  source 1..17: mol_type = other DNA
gcaccagccctcagccc

SEQ ID NO: 126379 - DNA, 17 bp, synthetic construct
  source 1..17: mol_type = other DNA
caccagccctcagccct

SEQ ID NO: 126380 - DNA, 17 bp, synthetic construct
  source 1..17: mol_type = other DNA
accagccctcagccctc

SEQ ID NO: 126381 - DNA, 17 bp, synthetic construct
  source 1..17: mol_type = other DNA
ccagccctcagccctcc

SEQ ID NO: 126382 - DNA, 17 bp, synthetic construct
  source 1..17: mol_type = other DNA
cagccctcagccctccc

SEQ ID NO: 126383 - DNA, 17 bp, synthetic construct
  source 1..17: mol_type = other DNA
agccctcagccctccct

SEQ ID NO: 126384 - DNA, 17 bp, synthetic construct
  source 1..17: mol_type = other DNA
gccctcagccctccctc

SEQ ID NO: 126385 - DNA, 17 bp, synthetic construct
  source 1..17: mol_type = other DNA
ccctcagccctccctca

SEQ ID NO: 126386 - DNA, 17 bp, synthetic construct
  source 1..17: mol_type = other DNA
cctcagccctccctcag

SEQ ID NO: 126387 - DNA, 17 bp, synthetic construct
  source 1..17: mol_type = other DNA
ctcagccctccctcagt

SEQ ID NO: 126388 - DNA, 17 bp, synthetic construct
  source 1..17: mol_type = other DNA
tcagccctccctcagtg

SEQ ID NO: 126389 - DNA, 17 bp, synthetic construct
  source 1..17: mol_type = other DNA
cagccctccctcagtgc

SEQ ID NO: 126390 - DNA, 17 bp, synthetic construct
  source 1..17: mol_type = other DNA
agccctccctcagtgcc

SEQ ID NO: 126391 - DNA, 17 bp, synthetic construct
  source 1..17: mol_type = other DNA
gccctccctcagtgcca

SEQ ID NO: 126392 - DNA, 17 bp, synthetic construct
  source 1..17: mol_type = other DNA
ccctccctcagtgccag

SEQ ID NO: 126393 - DNA, 17 bp, synthetic construct
  source 1..17: mol_type = other DNA
cctccctcagtgccagc

SEQ ID NO: 126394 - DNA, 17 bp, synthetic construct
  source 1..17: mol_type = other DNA
ctccctcagtgccagca

SEQ ID NO: 126395 - DNA, 17 bp, synthetic construct
  source 1..17: mol_type = other DNA
tccctcagtgccagcac

SEQ ID NO: 126396 - DNA, 17 bp, synthetic construct
  source 1..17: mol_type = other DNA
ccctcagtgccagcacg

SEQ ID NO: 126397 - DNA, 17 bp, synthetic construct
  source 1..17: mol_type = other DNA
cctcagtgccagcacgg

SEQ ID NO: 126398 - DNA, 17 bp, synthetic construct
  source 1..17: mol_type = other DNA
ctcagtgccagcacgga

SEQ ID NO: 126399 - DNA, 17 bp, synthetic construct
  source 1..17: mol_type = other DNA
tcagtgccagcacggag

SEQ ID NO: 126400 - DNA, 17 bp, synthetic construct
  source 1..17: mol_type = other DNA
cagtgccagcacggagc

SEQ ID NO: 126401 - DNA, 17 bp, synthetic construct
  source 1..17: mol_type = other DNA
agtgccagcacggagcc

SEQ ID NO: 126402 - DNA, 17 bp, synthetic construct
  source 1..17: mol_type = other DNA
gtgccagcacggagcct

SEQ ID NO: 126403 - DNA, 17 bp, synthetic construct
  source 1..17: mol_type = other DNA
tgccagcacggagcctg

SEQ ID NO: 126404 - DNA, 17 bp, synthetic construct
  source 1..17: mol_type = other DNA
gccagcacggagcctgc

SEQ ID NO: 126405 - DNA, 17 bp, synthetic construct
  source 1..17: mol_type = other DNA
ccagcacggagcctgct

SEQ ID NO: 126406 - DNA, 17 bp, synthetic construct
  source 1..17: mol_type = other DNA
cagcacggagcctgctg

SEQ ID NO: 126407 - DNA, 17 bp, synthetic construct
  source 1..17: mol_type = other DNA
agcacggagcctgctgt

SEQ ID NO: 126408 - DNA, 17 bp, synthetic construct
  source 1..17: mol_type = other DNA
gcacggagcctgctgtg

SEQ ID NO: 126409 - DNA, 17 bp, synthetic construct
  source 1..17: mol_type = other DNA
cacggagcctgctgtgc

SEQ ID NO: 126410 - DNA, 17 bp, synthetic construct
  source 1..17: mol_type = other DNA
acggagcctgctgtgcc

SEQ ID NO: 126411 - DNA, 17 bp, synthetic construct
  source 1..17: mol_type = other DNA
cggagcctgctgtgcct

SEQ ID NO: 126412 - DNA, 17 bp, synthetic construct
  source 1..17: mol_type = other DNA
ggagcctgctgtgccta

SEQ ID NO: 126413 - DNA, 17 bp, synthetic construct
  source 1..17: mol_type = other DNA
gagcctgctgtgcctac

SEQ ID NO: 126414 - DNA, 17 bp, synthetic construct
  source 1..17: mol_type = other DNA
agcctgctgtgcctacc

SEQ ID NO: 126415 - DNA, 17 bp, synthetic construct
  source 1..17: mol_type = other DNA
gcctgctgtgcctaccc

SEQ ID NO: 126416 - DNA, 17 bp, synthetic construct
  source 1..17: mol_type = other DNA
cctgctgtgcctacccc

SEQ ID NO: 126417 - DNA, 17 bp, synthetic construct
  source 1..17: mol_type = other DNA
ctgctgtgcctacccca

SEQ ID NO: 126418 - DNA, 17 bp, synthetic construct
  source 1..17: mol_type = other DNA
tgctgtgcctaccccaa

SEQ ID NO: 126419 - DNA, 17 bp, synthetic construct
  source 1..17: mol_type = other DNA
gctgtgcctaccccaac

SEQ ID NO: 126420 - DNA, 17 bp, synthetic construct
  source 1..17: mol_type = other DNA
ctgtgcctaccccaacc

SEQ ID NO: 126421 - DNA, 17 bp, synthetic construct
  source 1..17: mol_type = other DNA
tgtgcctaccccaaccc

SEQ ID NO: 126422 - DNA, 17 bp, synthetic construct
  source 1..17: mol_type = other DNA
gtgcctaccccaaccca

SEQ ID NO: 126423 - DNA, 17 bp, synthetic construct
  source 1..17: mol_type = other DNA
tgcctaccccaacccag

SEQ ID NO: 126424 - DNA, 17 bp, synthetic construct
  source 1..17: mol_type = other DNA
gcctaccccaacccaga

SEQ ID NO: 126425 - DNA, 17 bp, synthetic construct
  source 1..17: mol_type = other DNA
cctaccccaacccagac

SEQ ID NO: 126426 - DNA, 17 bp, synthetic construct
  source 1..17: mol_type = other DNA
ctaccccaacccagacc

SEQ ID NO: 126427 - DNA, 17 bp, synthetic construct
  source 1..17: mol_type = other DNA
taccccaacccagacca

SEQ ID NO: 126428 - DNA, 17 bp, synthetic construct
  source 1..17: mol_type = other DNA
accccaacccagaccac

SEQ ID NO: 126429 - DNA, 17 bp, synthetic construct
  source 1..17: mol_type = other DNA
ccccaacccagaccaca

SEQ ID NO: 126430 - DNA, 17 bp, synthetic construct
  source 1..17: mol_type = other DNA
cccaacccagaccacag

SEQ ID NO: 126431 - DNA, 17 bp, synthetic construct
  source 1..17: mol_type = other DNA
ccaacccagaccacagc

SEQ ID NO: 126432 - DNA, 17 bp, synthetic construct
  source 1..17: mol_type = other DNA
caacccagaccacagca

SEQ ID NO: 126433 - DNA, 17 bp, synthetic construct
  source 1..17: mol_type = other DNA
aacccagaccacagcaa

SEQ ID NO: 126434 - DNA, 17 bp, synthetic construct
  source 1..17: mol_type = other DNA
acccagaccacagcaac

SEQ ID NO: 126435 - DNA, 17 bp, synthetic construct
  source 1..17: mol_type = other DNA
cccagaccacagcaacc

SEQ ID NO: 126436 - DNA, 17 bp, synthetic construct
  source 1..17: mol_type = other DNA
ccagaccacagcaaccg

SEQ ID NO: 126437 - DNA, 17 bp, synthetic construct
  source 1..17: mol_type = other DNA
cagaccacagcaaccga

SEQ ID NO: 126438 - DNA, 17 bp, synthetic construct
  source 1..17: mol_type = other DNA
agaccacagcaaccgaa

SEQ ID NO: 126439 - DNA, 17 bp, synthetic construct
  source 1..17: mol_type = other DNA
gaccacagcaaccgaaa

SEQ ID NO: 126440 - DNA, 17 bp, synthetic construct
  source 1..17: mol_type = other DNA
accacagcaaccgaaaa

SEQ ID NO: 126441 - DNA, 17 bp, synthetic construct
  source 1..17: mol_type = other DNA
ccacagcaaccgaaaag

SEQ ID NO: 126442 - DNA, 17 bp, synthetic construct
  source 1..17: mol_type = other DNA
cacagcaaccgaaaaga

SEQ ID NO: 126443 - DNA, 17 bp, synthetic construct
  source 1..17: mol_type = other DNA
acagcaaccgaaaagac

SEQ ID NO: 126444 - DNA, 17 bp, synthetic construct
  source 1..17: mol_type = other DNA
cagcaaccgaaaagacc

SEQ ID NO: 126445 - DNA, 17 bp, synthetic construct
  source 1..17: mol_type = other DNA
agcaaccgaaaagacca

SEQ ID NO: 126446 - DNA, 17 bp, synthetic construct
  source 1..17: mol_type = other DNA
gcaaccgaaaagaccac

SEQ ID NO: 126447 - DNA, 17 bp, synthetic construct
  source 1..17: mol_type = other DNA
caaccgaaaagaccacc

SEQ ID NO: 126448 - DNA, 17 bp, synthetic construct
  source 1..17: mol_type = other DNA
aaccgaaaagaccaccc

SEQ ID NO: 126449 - DNA, 17 bp, synthetic construct
  source 1..17: mol_type = other DNA
accgaaaagaccaccct

SEQ ID NO: 126450 - DNA, 17 bp, synthetic construct
  source 1..17: mol_type = other DNA
ccgaaaagaccacccta

SEQ ID NO: 126451 - DNA, 17 bp, synthetic construct
  source 1..17: mol_type = other DNA
cgaaaagaccaccctat

SEQ ID NO: 126452 - DNA, 17 bp, synthetic construct
  source 1..17: mol_type = other DNA
gaaaagaccaccctatg

SEQ ID NO: 126453 - DNA, 17 bp, synthetic construct
  source 1..17: mol_type = other DNA
aaaagaccaccctatgg

SEQ ID NO: 126454 - DNA, 17 bp, synthetic construct
  source 1..17: mol_type = other DNA
aaagaccaccctatggg

SEQ ID NO: 126455 - DNA, 17 bp, synthetic construct
  source 1..17: mol_type = other DNA
aagaccaccctatgggt

SEQ ID NO: 126456 - DNA, 17 bp, synthetic construct
  source 1..17: mol_type = other DNA
agaccaccctatgggtg

SEQ ID NO: 126457 - DNA, 17 bp, synthetic construct
  source 1..17: mol_type = other DNA
gaccaccctatgggtga

SEQ ID NO: 126458 - DNA, 17 bp, synthetic construct
  source 1..17: mol_type = other DNA
accaccctatgggtgac

SEQ ID NO: 126459 - DNA, 17 bp, synthetic construct
  source 1..17: mol_type = other DNA
ccaccctatgggtgacc

SEQ ID NO: 126460 - DNA, 17 bp, synthetic construct
  source 1..17: mol_type = other DNA
caccctatgggtgaccc

SEQ ID NO: 126461 - DNA, 17 bp, synthetic construct
  source 1..17: mol_type = other DNA
accctatgggtgacccc

SEQ ID NO: 126462 - DNA, 17 bp, synthetic construct
  source 1..17: mol_type = other DNA
ccctatgggtgaccccg

SEQ ID NO: 126463 - DNA, 17 bp, synthetic construct
  source 1..17: mol_type = other DNA
cctatgggtgaccccga

SEQ ID NO: 126464 - DNA, 17 bp, synthetic construct
  source 1..17: mol_type = other DNA
ctatgggtgaccccgag

SEQ ID NO: 126465 - DNA, 17 bp, synthetic construct
  source 1..17: mol_type = other DNA
tatgggtgaccccgagc

SEQ ID NO: 126466 - DNA, 17 bp, synthetic construct
  source 1..17: mol_type = other DNA
atgggtgaccccgagca

SEQ ID NO: 126467 - DNA, 17 bp, synthetic construct
  source 1..17: mol_type = other DNA
tgggtgaccccgagcat

SEQ ID NO: 126468 - DNA, 17 bp, synthetic construct
  source 1..17: mol_type = other DNA
gggtgaccccgagcatc

SEQ ID NO: 126469 - DNA, 17 bp, synthetic construct
  source 1..17: mol_type = other DNA
ggtgaccccgagcatcc

SEQ ID NO: 126470 - DNA, 17 bp, synthetic construct
  source 1..17: mol_type = other DNA
gtgaccccgagcatccg

SEQ ID NO: 126471 - DNA, 17 bp, synthetic construct
  source 1..17: mol_type = other DNA
tgaccccgagcatccgg

SEQ ID NO: 126472 - DNA, 17 bp, synthetic construct
  source 1..17: mol_type = other DNA
gaccccgagcatccggt

SEQ ID NO: 126473 - DNA, 17 bp, synthetic construct
  source 1..17: mol_type = other DNA
accccgagcatccggtc

SEQ ID NO: 126474 - DNA, 17 bp, synthetic construct
  source 1..17: mol_type = other DNA
ccccgagcatccggtcg

SEQ ID NO: 126475 - DNA, 17 bp, synthetic construct
  source 1..17: mol_type = other DNA
cccgagcatccggtcga

SEQ ID NO: 126476 - DNA, 17 bp, synthetic construct
  source 1..17: mol_type = other DNA
ccgagcatccggtcgac

SEQ ID NO: 126477 - DNA, 17 bp, synthetic construct
  source 1..17: mol_type = other DNA
cgagcatccggtcgacg

SEQ ID NO: 126478 - DNA, 17 bp, synthetic construct
  source 1..17: mol_type = other DNA
gagcatccggtcgacgg

SEQ ID NO: 126479 - DNA, 17 bp, synthetic construct
  source 1..17: mol_type = other DNA
agcatccggtcgacggc

SEQ ID NO: 126480 - DNA, 17 bp, synthetic construct
  source 1..17: mol_type = other DNA
gcatccggtcgacggcg

SEQ ID NO: 126481 - DNA, 17 bp, synthetic construct
  source 1..17: mol_type = other DNA
catccggtcgacggcgg

SEQ ID NO: 126482 - DNA, 17 bp, synthetic construct
  source 1..17: mol_type = other DNA
atccggtcgacggcggc

SEQ ID NO: 126483 - DNA, 17 bp, synthetic construct
  source 1..17: mol_type = other DNA
tccggtcgacggcggcc

SEQ ID NO: 126484 - DNA, 17 bp, synthetic construct
  source 1..17: mol_type = other DNA
ccggtcgacggcggccc

SEQ ID NO: 126485 - DNA, 17 bp, synthetic construct
  source 1..17: mol_type = other DNA
cggtcgacggcggccct

SEQ ID NO: 126486 - DNA, 17 bp, synthetic construct
  source 1..17: mol_type = other DNA
ggtcgacggcggccctc

SEQ ID NO: 126487 - DNA, 17 bp, synthetic construct
  source 1..17: mol_type = other DNA
gtcgacggcggccctca

SEQ ID NO: 126488 - DNA, 17 bp, synthetic construct
  source 1..17: mol_type = other DNA
tcgacggcggccctcac

SEQ ID NO: 126489 - DNA, 17 bp, synthetic construct
  source 1..17: mol_type = other DNA
cgacggcggccctcacc

SEQ ID NO: 126490 - DNA, 17 bp, synthetic construct
  source 1..17: mol_type = other DNA
gacggcggccctcacct

SEQ ID NO: 126491 - DNA, 17 bp, synthetic construct
  source 1..17: mol_type = other DNA
acggcggccctcacctc

SEQ ID NO: 126492 - DNA, 17 bp, synthetic construct
  source 1..17: mol_type = other DNA
cggcggccctcacctcg

SEQ ID NO: 126493 - DNA, 17 bp, synthetic construct
  source 1..17: mol_type = other DNA
ggcggccctcacctcgc

SEQ ID NO: 126494 - DNA, 17 bp, synthetic construct
  source 1..17: mol_type = other DNA
gcggccctcacctcgca

SEQ ID NO: 126495 - DNA, 17 bp, synthetic construct
  source 1..17: mol_type = other DNA
cggccctcacctcgcag

SEQ ID NO: 126496 - DNA, 17 bp, synthetic construct
  source 1..17: mol_type = other DNA
ggccctcacctcgcaga

SEQ ID NO: 126497 - DNA, 17 bp, synthetic construct
  source 1..17: mol_type = other DNA
gccctcacctcgcagac

SEQ ID NO: 126498 - DNA, 17 bp, synthetic construct
  source 1..17: mol_type = other DNA
ccctcacctcgcagact

SEQ ID NO: 126499 - DNA, 17 bp, synthetic construct
  source 1..17: mol_type = other DNA
cctcacctcgcagactg

SEQ ID NO: 126500 - DNA, 17 bp, synthetic construct
  source 1..17: mol_type = other DNA
ctcacctcgcagactgg

SEQ ID NO: 126501 - DNA, 17 bp, synthetic construct
  source 1..17: mol_type = other DNA
tcacctcgcagactggg

SEQ ID NO: 126502 - DNA, 17 bp, synthetic construct
  source 1..17: mol_type = other DNA
cacctcgcagactgggt

SEQ ID NO: 126503 - DNA, 17 bp, synthetic construct
  source 1..17: mol_type = other DNA
acctcgcagactgggtc

SEQ ID NO: 126504 - DNA, 17 bp, synthetic construct
  source 1..17: mol_type = other DNA
cctcgcagactgggtcc

SEQ ID NO: 126505 - DNA, 17 bp, synthetic construct
  source 1..17: mol_type = other DNA
ctcgcagactgggtcca

SEQ ID NO: 126506 - DNA, 17 bp, synthetic construct
  source 1..17: mol_type = other DNA
tcgcagactgggtccag

SEQ ID NO: 126507 - DNA, 17 bp, synthetic construct
  source 1..17: mol_type = other DNA
cgcagactgggtccagc

SEQ ID NO: 126508 - DNA, 17 bp, synthetic construct
  source 1..17: mol_type = other DNA
gcagactgggtccagct

SEQ ID NO: 126509 - DNA, 17 bp, synthetic construct
  source 1..17: mol_type = other DNA
cagactgggtccagctc

SEQ ID NO: 126510 - DNA, 17 bp, synthetic construct
  source 1..17: mol_type = other DNA
agactgggtccagctca

SEQ ID NO: 126511 - DNA, 17 bp, synthetic construct
  source 1..17: mol_type = other DNA
gactgggtccagctcag

SEQ ID NO: 126512 - DNA, 17 bp, synthetic construct
  source 1..17: mol_type = other DNA
actgggtccagctcagg

SEQ ID NO: 126513 - DNA, 17 bp, synthetic construct
  source 1..17: mol_type = other DNA
ctgggtccagctcaggc

SEQ ID NO: 126514 - DNA, 17 bp, synthetic construct
  source 1..17: mol_type = other DNA
tgggtccagctcaggcc

SEQ ID NO: 126515 - DNA, 17 bp, synthetic construct
  source 1..17: mol_type = other DNA
gggtccagctcaggccc

SEQ ID NO: 126516 - DNA, 17 bp, synthetic construct
  source 1..17: mol_type = other DNA
ggtccagctcaggcccc

SEQ ID NO: 126517 - DNA, 17 bp, synthetic construct
  source 1..17: mol_type = other DNA
gtccagctcaggccccg

SEQ ID NO: 126518 - DNA, 17 bp, synthetic construct
  source 1..17: mol_type = other DNA
tccagctcaggccccgt

SEQ ID NO: 126519 - DNA, 17 bp, synthetic construct
  source 1..17: mol_type = other DNA
ccagctcaggccccgtg

SEQ ID NO: 126520 - DNA, 17 bp, synthetic construct
  source 1..17: mol_type = other DNA
cagctcaggccccgtga

SEQ ID NO: 126521 - DNA, 17 bp, synthetic construct
  source 1..17: mol_type = other DNA
agctcaggccccgtgac

SEQ ID NO: 126522 - DNA, 17 bp, synthetic construct
  source 1..17: mol_type = other DNA
gctcaggccccgtgacg

SEQ ID NO: 126523 - DNA, 17 bp, synthetic construct
  source 1..17: mol_type = other DNA
ctcaggccccgtgacgg

SEQ ID NO: 126524 - DNA, 17 bp, synthetic construct
  source 1..17: mol_type = other DNA
tcaggccccgtgacggt

SEQ ID NO: 126525 - DNA, 17 bp, synthetic construct
  source 1..17: mol_type = other DNA
caggccccgtgacggtc

SEQ ID NO: 126526 - DNA, 17 bp, synthetic construct
  source 1..17: mol_type = other DNA
aggccccgtgacggtca

SEQ ID NO: 126527 - DNA, 17 bp, synthetic construct
  source 1..17: mol_type = other DNA
ggccccgtgacggtcac

SEQ ID NO: 126528 - DNA, 17 bp, synthetic construct
  source 1..17: mol_type = other DNA
gccccgtgacggtcacc

SEQ ID NO: 126529 - DNA, 17 bp, synthetic construct
  source 1..17: mol_type = other DNA
ccccgtgacggtcaccc

SEQ ID NO: 126530 - DNA, 17 bp, synthetic construct
  source 1..17: mol_type = other DNA
cccgtgacggtcacccc

SEQ ID NO: 126531 - DNA, 17 bp, synthetic construct
  source 1..17: mol_type = other DNA
ccgtgacggtcaccccc

SEQ ID NO: 126532 - DNA, 17 bp, synthetic construct
  source 1..17: mol_type = other DNA
cgtgacggtcaccccct

SEQ ID NO: 126533 - DNA, 17 bp, synthetic construct
  source 1..17: mol_type = other DNA
gtgacggtcaccccctc

SEQ ID NO: 126534 - DNA, 17 bp, synthetic construct
  source 1..17: mol_type = other DNA
tgacggtcaccccctcg

SEQ ID NO: 126535 - DNA, 17 bp, synthetic construct
  source 1..17: mol_type = other DNA
gacggtcaccccctcgg

SEQ ID NO: 126536 - DNA, 17 bp, synthetic construct
  source 1..17: mol_type = other DNA
acggtcaccccctcggc

SEQ ID NO: 126537 - DNA, 17 bp, synthetic construct
  source 1..17: mol_type = other DNA
cggtcaccccctcggcc

SEQ ID NO: 126538 - DNA, 17 bp, synthetic construct
  source 1..17: mol_type = other DNA
ggtcaccccctcggccc

SEQ ID NO: 126539 - DNA, 17 bp, synthetic construct
  source 1..17: mol_type = other DNA
gtcaccccctcggcccc

SEQ ID NO: 126540 - DNA, 17 bp, synthetic construct
  source 1..17: mol_type = other DNA
tcaccccctcggcccca

SEQ ID NO: 126541 - DNA, 17 bp, synthetic construct
  source 1..17: mol_type = other DNA
caccccctcggccccag

SEQ ID NO: 126542 - DNA, 17 bp, synthetic construct
  source 1..17: mol_type = other DNA
accccctcggccccagg

SEQ ID NO: 126543 - DNA, 17 bp, synthetic construct
  source 1..17: mol_type = other DNA
ccccctcggccccaggt

SEQ ID NO: 126544 - DNA, 17 bp, synthetic construct
  source 1..17: mol_type = other DNA
cccctcggccccaggta

SEQ ID NO: 126545 - DNA, 17 bp, synthetic construct
  source 1..17: mol_type = other DNA
ccctcggccccaggtac

SEQ ID NO: 126546 - DNA, 17 bp, synthetic construct
  source 1..17: mol_type = other DNA
cctcggccccaggtacc

SEQ ID NO: 126547 - DNA, 17 bp, synthetic construct
  source 1..17: mol_type = other DNA
ctcggccccaggtacca

SEQ ID NO: 126548 - DNA, 17 bp, synthetic construct
  source 1..17: mol_type = other DNA
tcggccccaggtaccac

SEQ ID NO: 126549 - DNA, 17 bp, synthetic construct
  source 1..17: mol_type = other DNA
cggccccaggtaccacc

SEQ ID NO: 126550 - DNA, 17 bp, synthetic construct
  source 1..17: mol_type = other DNA
ggccccaggtaccacca

SEQ ID NO: 126551 - DNA, 17 bp, synthetic construct
  source 1..17: mol_type = other DNA
gccccaggtaccaccac

SEQ ID NO: 126552 - DNA, 17 bp, synthetic construct
  source 1..17: mol_type = other DNA
ccccaggtaccaccacc

SEQ ID NO: 126553 - DNA, 17 bp, synthetic construct
  source 1..17: mol_type = other DNA
cccaggtaccaccacct

SEQ ID NO: 126554 - DNA, 17 bp, synthetic construct
  source 1..17: mol_type = other DNA
ccaggtaccaccacctg

SEQ ID NO: 126555 - DNA, 17 bp, synthetic construct
  source 1..17: mol_type = other DNA
caggtaccaccacctgc

SEQ ID NO: 126556 - DNA, 17 bp, synthetic construct
  source 1..17: mol_type = other DNA
aggtaccaccacctgcc

SEQ ID NO: 126557 - DNA, 17 bp, synthetic construct
  source 1..17: mol_type = other DNA
ggtaccaccacctgcca

SEQ ID NO: 126558 - DNA, 17 bp, synthetic construct
  source 1..17: mol_type = other DNA
gtaccaccacctgccag

SEQ ID NO: 126559 - DNA, 17 bp, synthetic construct
  source 1..17: mol_type = other DNA
taccaccacctgccagc

SEQ ID NO: 126560 - DNA, 17 bp, synthetic construct
  source 1..17: mol_type = other DNA
accaccacctgccagcc

SEQ ID NO: 126561 - DNA, 17 bp, synthetic construct
  source 1..17: mol_type = other DNA
ccaccacctgccagccc

SEQ ID NO: 126562 - DNA, 17 bp, synthetic construct
  source 1..17: mol_type = other DNA
caccacctgccagcccc

SEQ ID NO: 126563 - DNA, 17 bp, synthetic construct
  source 1..17: mol_type = other DNA
accacctgccagccccg

SEQ ID NO: 126564 - DNA, 17 bp, synthetic construct
  source 1..17: mol_type = other DNA
ccacctgccagccccgg

SEQ ID NO: 126565 - DNA, 17 bp, synthetic construct
  source 1..17: mol_type = other DNA
cacctgccagccccggt

SEQ ID NO: 126566 - DNA, 17 bp, synthetic construct
  source 1..17: mol_type = other DNA
acctgccagccccggtg

SEQ ID NO: 126567 - DNA, 17 bp, synthetic construct
  source 1..17: mol_type = other DNA
cctgccagccccggtgt

SEQ ID NO: 126568 - DNA, 17 bp, synthetic construct
  source 1..17: mol_type = other DNA
ctgccagccccggtgtc

SEQ ID NO: 126569 - DNA, 17 bp, synthetic construct
  source 1..17: mol_type = other DNA
tgccagccccggtgtca

SEQ ID NO: 126570 - DNA, 17 bp, synthetic construct
  source 1..17: mol_type = other DNA
gccagccccggtgtcag

SEQ ID NO: 126571 - DNA, 17 bp, synthetic construct
  source 1..17: mol_type = other DNA
ccagccccggtgtcagt

SEQ ID NO: 126572 - DNA, 17 bp, synthetic construct
  source 1..17: mol_type = other DNA
cagccccggtgtcagtg

SEQ ID NO: 126573 - DNA, 17 bp, synthetic construct
  source 1..17: mol_type = other DNA
agccccggtgtcagtgg

SEQ ID NO: 126574 - DNA, 17 bp, synthetic construct
  source 1..17: mol_type = other DNA
gccccggtgtcagtgga

SEQ ID NO: 126575 - DNA, 17 bp, synthetic construct
  source 1..17: mol_type = other DNA
ccccggtgtcagtggac

SEQ ID NO: 126576 - DNA, 17 bp, synthetic construct
  source 1..17: mol_type = other DNA
cccggtgtcagtggaca

SEQ ID NO: 126577 - DNA, 17 bp, synthetic construct
  source 1..17: mol_type = other DNA
ccggtgtcagtggacag

SEQ ID NO: 126578 - DNA, 17 bp, synthetic construct
  source 1..17: mol_type = other DNA
cggtgtcagtggacaga

SEQ ID NO: 126579 - DNA, 17 bp, synthetic construct
  source 1..17: mol_type = other DNA
ggtgtcagtggacagag

SEQ ID NO: 126580 - DNA, 17 bp, synthetic construct
  source 1..17: mol_type = other DNA
gtgtcagtggacagagt

SEQ ID NO: 126581 - DNA, 17 bp, synthetic construct
  source 1..17: mol_type = other DNA
tgtcagtggacagagtg

SEQ ID NO: 126582 - DNA, 17 bp, synthetic construct
  source 1..17: mol_type = other DNA
gtcagtggacagagtgg

SEQ ID NO: 126583 - DNA, 17 bp, synthetic construct
  source 1..17: mol_type = other DNA
tcagtggacagagtggt

SEQ ID NO: 126584 - DNA, 17 bp, synthetic construct
  source 1..17: mol_type = other DNA
cagtggacagagtggtt

SEQ ID NO: 126585 - DNA, 17 bp, synthetic construct
  source 1..17: mol_type = other DNA
agtggacagagtggttt

SEQ ID NO: 126586 - DNA, 17 bp, synthetic construct
  source 1..17: mol_type = other DNA
gtggacagagtggtttg

SEQ ID NO: 126587 - DNA, 17 bp, synthetic construct
  source 1..17: mol_type = other DNA
tggacagagtggtttga

SEQ ID NO: 126588 - DNA, 17 bp, synthetic construct
  source 1..17: mol_type = other DNA
ggacagagtggtttgat

SEQ ID NO: 126589 - DNA, 17 bp, synthetic construct
  source 1..17: mol_type = other DNA
gacagagtggtttgatg

SEQ ID NO: 126590 - DNA, 17 bp, synthetic construct
  source 1..17: mol_type = other DNA
acagagtggtttgatga

SEQ ID NO: 126591 - DNA, 17 bp, synthetic construct
  source 1..17: mol_type = other DNA
cagagtggtttgatgag

SEQ ID NO: 126592 - DNA, 17 bp, synthetic construct
  source 1..17: mol_type = other DNA
agagtggtttgatgagg

SEQ ID NO: 126593 - DNA, 17 bp, synthetic construct
  source 1..17: mol_type = other DNA
gagtggtttgatgagga

SEQ ID NO: 126594 - DNA, 17 bp, synthetic construct
  source 1..17: mol_type = other DNA
agtggtttgatgaggac

SEQ ID NO: 126595 - DNA, 17 bp, synthetic construct
  source 1..17: mol_type = other DNA
gtggtttgatgaggact

SEQ ID NO: 126596 - DNA, 17 bp, synthetic construct
  source 1..17: mol_type = other DNA
tggtttgatgaggacta

SEQ ID NO: 126597 - DNA, 17 bp, synthetic construct
  source 1..17: mol_type = other DNA
ggtttgatgaggactac

SEQ ID NO: 126598 - DNA, 17 bp, synthetic construct
  source 1..17: mol_type = other DNA
gtttgatgaggactacc

SEQ ID NO: 126599 - DNA, 17 bp, synthetic construct
  source 1..17: mol_type = other DNA
tttgatgaggactaccc

SEQ ID NO: 126600 - DNA, 17 bp, synthetic construct
  source 1..17: mol_type = other DNA
ttgatgaggactacccc

SEQ ID NO: 126601 - DNA, 17 bp, synthetic construct
  source 1..17: mol_type = other DNA
tgatgaggactacccca

SEQ ID NO: 126602 - DNA, 17 bp, synthetic construct
  source 1..17: mol_type = other DNA
gatgaggactaccccaa

SEQ ID NO: 126603 - DNA, 17 bp, synthetic construct
  source 1..17: mol_type = other DNA
atgaggactaccccaag

SEQ ID NO: 126604 - DNA, 17 bp, synthetic construct
  source 1..17: mol_type = other DNA
tgaggactaccccaagt

SEQ ID NO: 126605 - DNA, 17 bp, synthetic construct
  source 1..17: mol_type = other DNA
gaggactaccccaagtc

SEQ ID NO: 126606 - DNA, 17 bp, synthetic construct
  source 1..17: mol_type = other DNA
aggactaccccaagtct

SEQ ID NO: 126607 - DNA, 17 bp, synthetic construct
  source 1..17: mol_type = other DNA
ggactaccccaagtctg

SEQ ID NO: 126608 - DNA, 17 bp, synthetic construct
  source 1..17: mol_type = other DNA
gactaccccaagtctga

SEQ ID NO: 126609 - DNA, 17 bp, synthetic construct
  source 1..17: mol_type = other DNA
actaccccaagtctgaa

SEQ ID NO: 126610 - DNA, 17 bp, synthetic construct
  source 1..17: mol_type = other DNA
ctaccccaagtctgaac

SEQ ID NO: 126611 - DNA, 17 bp, synthetic construct
  source 1..17: mol_type = other DNA
taccccaagtctgaaca

SEQ ID NO: 126612 - DNA, 17 bp, synthetic construct
  source 1..17: mol_type = other DNA
accccaagtctgaacaa

SEQ ID NO: 126613 - DNA, 17 bp, synthetic construct
  source 1..17: mol_type = other DNA
ccccaagtctgaacaac

SEQ ID NO: 126614 - DNA, 17 bp, synthetic construct
  source 1..17: mol_type = other DNA
cccaagtctgaacaact

SEQ ID NO: 126615 - DNA, 17 bp, synthetic construct
  source 1..17: mol_type = other DNA
ccaagtctgaacaactt

SEQ ID NO: 126616 - DNA, 17 bp, synthetic construct
  source 1..17: mol_type = other DNA
caagtctgaacaacttg

SEQ ID NO: 126617 - DNA, 17 bp, synthetic construct
  source 1..17: mol_type = other DNA
aagtctgaacaacttgg

SEQ ID NO: 126618 - DNA, 17 bp, synthetic construct
  source 1..17: mol_type = other DNA
agtctgaacaacttgga

SEQ ID NO: 126619 - DNA, 17 bp, synthetic construct
  source 1..17: mol_type = other DNA
gtctgaacaacttggag

SEQ ID NO: 126620 - DNA, 17 bp, synthetic construct
  source 1..17: mol_type = other DNA
tctgaacaacttggagg

SEQ ID NO: 126621 - DNA, 17 bp, synthetic construct
  source 1..17: mol_type = other DNA
ctgaacaacttggaggg

SEQ ID NO: 126622 - DNA, 17 bp, synthetic construct
  source 1..17: mol_type = other DNA
tgaacaacttggagggg

SEQ ID NO: 126623 - DNA, 17 bp, synthetic construct
  source 1..17: mol_type = other DNA
gaacaacttggagggga

SEQ ID NO: 126624 - DNA, 17 bp, synthetic construct
  source 1..17: mol_type = other DNA
aacaacttggaggggac

SEQ ID NO: 126625 - DNA, 17 bp, synthetic construct
  source 1..17: mol_type = other DNA
acaacttggaggggacg

SEQ ID NO: 126626 - DNA, 17 bp, synthetic construct
  source 1..17: mol_type = other DNA
caacttggaggggacgt

SEQ ID NO: 126627 - DNA, 17 bp, synthetic construct
  source 1..17: mol_type = other DNA
aacttggaggggacgtt

SEQ ID NO: 126628 - DNA, 17 bp, synthetic construct
  source 1..17: mol_type = other DNA
acttggaggggacgttg

SEQ ID NO: 126629 - DNA, 17 bp, synthetic construct
  source 1..17: mol_type = other DNA
cttggaggggacgttga

SEQ ID NO: 126630 - DNA, 17 bp, synthetic construct
  source 1..17: mol_type = other DNA
ttggaggggacgttgag

SEQ ID NO: 126631 - DNA, 17 bp, synthetic construct
  source 1..17: mol_type = other DNA
tggaggggacgttgagt

SEQ ID NO: 126632 - DNA, 17 bp, synthetic construct
  source 1..17: mol_type = other DNA
ggaggggacgttgagtc

SEQ ID NO: 126633 - DNA, 17 bp, synthetic construct
  source 1..17: mol_type = other DNA
gaggggacgttgagtcc

SEQ ID NO: 126634 - DNA, 17 bp, synthetic construct
  source 1..17: mol_type = other DNA
aggggacgttgagtcct

SEQ ID NO: 126635 - DNA, 17 bp, synthetic construct
  source 1..17: mol_type = other DNA
ggggacgttgagtccta

SEQ ID NO: 126636 - DNA, 17 bp, synthetic construct
  source 1..17: mol_type = other DNA
gggacgttgagtcctac

SEQ ID NO: 126637 - DNA, 17 bp, synthetic construct
  source 1..17: mol_type = other DNA
ggacgttgagtcctacg

SEQ ID NO: 126638 - DNA, 17 bp, synthetic construct
  source 1..17: mol_type = other DNA
gacgttgagtcctacga

SEQ ID NO: 126639 - DNA, 17 bp, synthetic construct
  source 1..17: mol_type = other DNA
acgttgagtcctacgat

SEQ ID NO: 126640 - DNA, 17 bp, synthetic construct
  source 1..17: mol_type = other DNA
cgttgagtcctacgata

SEQ ID NO: 126641 - DNA, 17 bp, synthetic construct
  source 1..17: mol_type = other DNA
gttgagtcctacgataa

SEQ ID NO: 126642 - DNA, 17 bp, synthetic construct
  source 1..17: mol_type = other DNA
ttgagtcctacgataag

SEQ ID NO: 126643 - DNA, 17 bp, synthetic construct
  source 1..17: mol_type = other DNA
tgagtcctacgataaga

SEQ ID NO: 126644 - DNA, 17 bp, synthetic construct
  source 1..17: mol_type = other DNA
gagtcctacgataagat

SEQ ID NO: 126645 - DNA, 17 bp, synthetic construct
  source 1..17: mol_type = other DNA
agtcctacgataagatc

SEQ ID NO: 126646 - DNA, 17 bp, synthetic construct
  source 1..17: mol_type = other DNA
gtcctacgataagatca

SEQ ID NO: 126647 - DNA, 17 bp, synthetic construct
  source 1..17: mol_type = other DNA
tcctacgataagatcag

SEQ ID NO: 126648 - DNA, 17 bp, synthetic construct
  source 1..17: mol_type = other DNA
cctacgataagatcagg

SEQ ID NO: 126649 - DNA, 17 bp, synthetic construct
  source 1..17: mol_type = other DNA
ctacgataagatcaggg

SEQ ID NO: 126650 - DNA, 17 bp, synthetic construct
  source 1..17: mol_type = other DNA
tacgataagatcagggc

SEQ ID NO: 126651 - DNA, 17 bp, synthetic construct
  source 1..17: mol_type = other DNA
acgataagatcagggcc

SEQ ID NO: 126652 - DNA, 17 bp, synthetic construct
  source 1..17: mol_type = other DNA
cgataagatcagggccg

SEQ ID NO: 126653 - DNA, 17 bp, synthetic construct
  source 1..17: mol_type = other DNA
gataagatcagggccgc

SEQ ID NO: 126654 - DNA, 17 bp, synthetic construct
  source 1..17: mol_type = other DNA
ataagatcagggccgct

SEQ ID NO: 126655 - DNA, 17 bp, synthetic construct
  source 1..17: mol_type = other DNA
taagatcagggccgctg

SEQ ID NO: 126656 - DNA, 17 bp, synthetic construct
  source 1..17: mol_type = other DNA
aagatcagggccgctgg

SEQ ID NO: 126657 - DNA, 17 bp, synthetic construct
  source 1..17: mol_type = other DNA
agatcagggccgctgga

SEQ ID NO: 126658 - DNA, 17 bp, synthetic construct
  source 1..17: mol_type = other DNA
gatcagggccgctggag

SEQ ID NO: 126659 - DNA, 17 bp, synthetic construct
  source 1..17: mol_type = other DNA
atcagggccgctggagg

SEQ ID NO: 126660 - DNA, 17 bp, synthetic construct
  source 1..17: mol_type = other DNA
tcagggccgctggaggg

SEQ ID NO: 126661 - DNA, 17 bp, synthetic construct
  source 1..17: mol_type = other DNA
cagggccgctggagggc

SEQ ID NO: 126662 - DNA, 17 bp, synthetic construct
  source 1..17: mol_type = other DNA
agggccgctggagggca

SEQ ID NO: 126663 - DNA, 17 bp, synthetic construct
  source 1..17: mol_type = other DNA
gggccgctggagggcac

SEQ ID NO: 126664 - DNA, 17 bp, synthetic construct
  source 1..17: mol_type = other DNA
ggccgctggagggcact

SEQ ID NO: 126665 - DNA, 17 bp, synthetic construct
  source 1..17: mol_type = other DNA
gccgctggagggcactt

SEQ ID NO: 126666 - DNA, 17 bp, synthetic construct
  source 1..17: mol_type = other DNA
ccgctggagggcactta

SEQ ID NO: 126667 - DNA, 17 bp, synthetic construct
  source 1..17: mol_type = other DNA
cgctggagggcacttat

SEQ ID NO: 126668 - DNA, 17 bp, synthetic construct
  source 1..17: mol_type = other DNA
gctggagggcacttatg

SEQ ID NO: 126669 - DNA, 17 bp, synthetic construct
  source 1..17: mol_type = other DNA
ctggagggcacttatgc

SEQ ID NO: 126670 - DNA, 17 bp, synthetic construct
  source 1..17: mol_type = other DNA
tggagggcacttatgcc

SEQ ID NO: 126671 - DNA, 17 bp, synthetic construct
  source 1..17: mol_type = other DNA
ggagggcacttatgcca

SEQ ID NO: 126672 - DNA, 17 bp, synthetic construct
  source 1..17: mol_type = other DNA
gagggcacttatgccag

SEQ ID NO: 126673 - DNA, 17 bp, synthetic construct
  source 1..17: mol_type = other DNA
agggcacttatgccagc

SEQ ID NO: 126674 - DNA, 17 bp, synthetic construct
  source 1..17: mol_type = other DNA
gggcacttatgccagca

SEQ ID NO: 126675 - DNA, 17 bp, synthetic construct
  source 1..17: mol_type = other DNA
ggcacttatgccagcag

SEQ ID NO: 126676 - DNA, 17 bp, synthetic construct
  source 1..17: mol_type = other DNA
gcacttatgccagcagc

SEQ ID NO: 126677 - DNA, 17 bp, synthetic construct
  source 1..17: mol_type = other DNA
cacttatgccagcagcc

SEQ ID NO: 126678 - DNA, 17 bp, synthetic construct
  source 1..17: mol_type = other DNA
acttatgccagcagcct

SEQ ID NO: 126679 - DNA, 17 bp, synthetic construct
  source 1..17: mol_type = other DNA
cttatgccagcagccta

SEQ ID NO: 126680 - DNA, 17 bp, synthetic construct
  source 1..17: mol_type = other DNA
ttatgccagcagcctaa

SEQ ID NO: 126681 - DNA, 17 bp, synthetic construct
  source 1..17: mol_type = other DNA
tatgccagcagcctaag

SEQ ID NO: 126682 - DNA, 17 bp, synthetic construct
  source 1..17: mol_type = other DNA
atgccagcagcctaagg

SEQ ID NO: 126683 - DNA, 17 bp, synthetic construct
  source 1..17: mol_type = other DNA
tgccagcagcctaagga

SEQ ID NO: 126684 - DNA, 17 bp, synthetic construct
  source 1..17: mol_type = other DNA
gccagcagcctaaggac

SEQ ID NO: 126685 - DNA, 17 bp, synthetic construct
  source 1..17: mol_type = other DNA
ccagcagcctaaggaca

SEQ ID NO: 126686 - DNA, 17 bp, synthetic construct
  source 1..17: mol_type = other DNA
cagcagcctaaggacat

SEQ ID NO: 126687 - DNA, 17 bp, synthetic construct
  source 1..17: mol_type = other DNA
agcagcctaaggacata

SEQ ID NO: 126688 - DNA, 17 bp, synthetic construct
  source 1..17: mol_type = other DNA
gcagcctaaggacatag

SEQ ID NO: 126689 - DNA, 17 bp, synthetic construct
  source 1..17: mol_type = other DNA
cagcctaaggacataga

SEQ ID NO: 126690 - DNA, 17 bp, synthetic construct
  source 1..17: mol_type = other DNA
agcctaaggacatagag

SEQ ID NO: 126691 - DNA, 17 bp, synthetic construct
  source 1..17: mol_type = other DNA
gcctaaggacatagagt

SEQ ID NO: 126692 - DNA, 17 bp, synthetic construct
  source 1..17: mol_type = other DNA
cctaaggacatagagtg

SEQ ID NO: 126693 - DNA, 17 bp, synthetic construct
  source 1..17: mol_type = other DNA
ctaaggacatagagtgc

SEQ ID NO: 126694 - DNA, 17 bp, synthetic construct
  source 1..17: mol_type = other DNA
taaggacatagagtgcc

SEQ ID NO: 126695 - DNA, 17 bp, synthetic construct
  source 1..17: mol_type = other DNA
aaggacatagagtgcca

SEQ ID NO: 126696 - DNA, 17 bp, synthetic construct
  source 1..17: mol_type = other DNA
aggacatagagtgccag

SEQ ID NO: 126697 - DNA, 17 bp, synthetic construct
  source 1..17: mol_type = other DNA
ggacatagagtgccagg

SEQ ID NO: 126698 - DNA, 17 bp, synthetic construct
  source 1..17: mol_type = other DNA
gacatagagtgccaggc

SEQ ID NO: 126699 - DNA, 17 bp, synthetic construct
  source 1..17: mol_type = other DNA
acatagagtgccaggcc

SEQ ID NO: 126700 - DNA, 17 bp, synthetic construct
  source 1..17: mol_type = other DNA
catagagtgccaggccg

SEQ ID NO: 126701 - DNA, 17 bp, synthetic construct
  source 1..17: mol_type = other DNA
atagagtgccaggccga

SEQ ID NO: 126702 - DNA, 17 bp, synthetic construct
  source 1..17: mol_type = other DNA
tagagtgccaggccgag

SEQ ID NO: 126703 - DNA, 17 bp, synthetic construct
  source 1..17: mol_type = other DNA
agagtgccaggccgaga

SEQ ID NO: 126704 - DNA, 17 bp, synthetic construct
  source 1..17: mol_type = other DNA
gagtgccaggccgagag

SEQ ID NO: 126705 - DNA, 17 bp, synthetic construct
  source 1..17: mol_type = other DNA
agtgccaggccgagagc

SEQ ID NO: 126706 - DNA, 17 bp, synthetic construct
  source 1..17: mol_type = other DNA
gtgccaggccgagagct

SEQ ID NO: 126707 - DNA, 17 bp, synthetic construct
  source 1..17: mol_type = other DNA
tgccaggccgagagctt

SEQ ID NO: 126708 - DNA, 17 bp, synthetic construct
  source 1..17: mol_type = other DNA
gccaggccgagagcttc

SEQ ID NO: 126709 - DNA, 17 bp, synthetic construct
  source 1..17: mol_type = other DNA
ccaggccgagagcttcc

SEQ ID NO: 126710 - DNA, 17 bp, synthetic construct
  source 1..17: mol_type = other DNA
caggccgagagcttccc

SEQ ID NO: 126711 - DNA, 17 bp, synthetic construct
  source 1..17: mol_type = other DNA
aggccgagagcttcccc

SEQ ID NO: 126712 - DNA, 17 bp, synthetic construct
  source 1..17: mol_type = other DNA
ggccgagagcttcccca

SEQ ID NO: 126713 - DNA, 17 bp, synthetic construct
  source 1..17: mol_type = other DNA
gccgagagcttccccaa

SEQ ID NO: 126714 - DNA, 17 bp, synthetic construct
  source 1..17: mol_type = other DNA
ccgagagcttccccaac

SEQ ID NO: 126715 - DNA, 17 bp, synthetic construct
  source 1..17: mol_type = other DNA
cgagagcttccccaact

SEQ ID NO: 126716 - DNA, 17 bp, synthetic construct
  source 1..17: mol_type = other DNA
gagagcttccccaactg

SEQ ID NO: 126717 - DNA, 17 bp, synthetic construct
  source 1..17: mol_type = other DNA
agagcttccccaactgg

SEQ ID NO: 126718 - DNA, 17 bp, synthetic construct
  source 1..17: mol_type = other DNA
gagcttccccaactgga

SEQ ID NO: 126719 - DNA, 17 bp, synthetic construct
  source 1..17: mol_type = other DNA
agcttccccaactggac

SEQ ID NO: 126720 - DNA, 17 bp, synthetic construct
  source 1..17: mol_type = other DNA
gcttccccaactggacc

SEQ ID NO: 126721 - DNA, 17 bp, synthetic construct
  source 1..17: mol_type = other DNA
cttccccaactggaccc

SEQ ID NO: 126722 - DNA, 17 bp, synthetic construct
  source 1..17: mol_type = other DNA
ttccccaactggaccct

SEQ ID NO: 126723 - DNA, 17 bp, synthetic construct
  source 1..17: mol_type = other DNA
tccccaactggaccctg

SEQ ID NO: 126724 - DNA, 17 bp, synthetic construct
  source 1..17: mol_type = other DNA
ccccaactggaccctgg

SEQ ID NO: 126725 - DNA, 17 bp, synthetic construct
  source 1..17: mol_type = other DNA
cccaactggaccctggc

SEQ ID NO: 126726 - DNA, 17 bp, synthetic construct
  source 1..17: mol_type = other DNA
ccaactggaccctggca

SEQ ID NO: 126727 - DNA, 17 bp, synthetic construct
  source 1..17: mol_type = other DNA
caactggaccctggcac

SEQ ID NO: 126728 - DNA, 17 bp, synthetic construct
  source 1..17: mol_type = other DNA
aactggaccctggcaca

SEQ ID NO: 126729 - DNA, 17 bp, synthetic construct
  source 1..17: mol_type = other DNA
actggaccctggcacag

SEQ ID NO: 126730 - DNA, 17 bp, synthetic construct
  source 1..17: mol_type = other DNA
ctggaccctggcacagg

SEQ ID NO: 126731 - DNA, 17 bp, synthetic construct
  source 1..17: mol_type = other DNA
tggaccctggcacaggt

SEQ ID NO: 126732 - DNA, 17 bp, synthetic construct
  source 1..17: mol_type = other DNA
ggaccctggcacaggtg

SEQ ID NO: 126733 - DNA, 17 bp, synthetic construct
  source 1..17: mol_type = other DNA
gaccctggcacaggtgg

SEQ ID NO: 126734 - DNA, 17 bp, synthetic construct
  source 1..17: mol_type = other DNA
accctggcacaggtggg

SEQ ID NO: 126735 - DNA, 17 bp, synthetic construct
  source 1..17: mol_type = other DNA
ccctggcacaggtgggg

SEQ ID NO: 126736 - DNA, 17 bp, synthetic construct
  source 1..17: mol_type = other DNA
cctggcacaggtggggc

SEQ ID NO: 126737 - DNA, 17 bp, synthetic construct
  source 1..17: mol_type = other DNA
ctggcacaggtggggca

SEQ ID NO: 126738 - DNA, 17 bp, synthetic construct
  source 1..17: mol_type = other DNA
tggcacaggtggggcag

SEQ ID NO: 126739 - DNA, 17 bp, synthetic construct
  source 1..17: mol_type = other DNA
ggcacaggtggggcaga

SEQ ID NO: 126740 - DNA, 17 bp, synthetic construct
  source 1..17: mol_type = other DNA
gcacaggtggggcagaa

SEQ ID NO: 126741 - DNA, 17 bp, synthetic construct
  source 1..17: mol_type = other DNA
cacaggtggggcagaag

SEQ ID NO: 126742 - DNA, 17 bp, synthetic construct
  source 1..17: mol_type = other DNA
acaggtggggcagaagg

SEQ ID NO: 126743 - DNA, 17 bp, synthetic construct
  source 1..17: mol_type = other DNA
caggtggggcagaaggt

SEQ ID NO: 126744 - DNA, 17 bp, synthetic construct
  source 1..17: mol_type = other DNA
aggtggggcagaaggtg

SEQ ID NO: 126745 - DNA, 17 bp, synthetic construct
  source 1..17: mol_type = other DNA
ggtggggcagaaggtgc

SEQ ID NO: 126746 - DNA, 17 bp, synthetic construct
  source 1..17: mol_type = other DNA
gtggggcagaaggtgca

SEQ ID NO: 126747 - DNA, 17 bp, synthetic construct
  source 1..17: mol_type = other DNA
tggggcagaaggtgcac

SEQ ID NO: 126748 - DNA, 17 bp, synthetic construct
  source 1..17: mol_type = other DNA
ggggcagaaggtgcact

SEQ ID NO: 126749 - DNA, 17 bp, synthetic construct
  source 1..17: mol_type = other DNA
gggcagaaggtgcactg

SEQ ID NO: 126750 - DNA, 17 bp, synthetic construct
  source 1..17: mol_type = other DNA
ggcagaaggtgcactgt

SEQ ID NO: 126751 - DNA, 17 bp, synthetic construct
  source 1..17: mol_type = other DNA
gcagaaggtgcactgtg

SEQ ID NO: 126752 - DNA, 17 bp, synthetic construct
  source 1..17: mol_type = other DNA
cagaaggtgcactgtga

SEQ ID NO: 126753 - DNA, 17 bp, synthetic construct
  source 1..17: mol_type = other DNA
agaaggtgcactgtgac

SEQ ID NO: 126754 - DNA, 17 bp, synthetic construct
  source 1..17: mol_type = other DNA
gaaggtgcactgtgacg

SEQ ID NO: 126755 - DNA, 17 bp, synthetic construct
  source 1..17: mol_type = other DNA
aaggtgcactgtgacgt

SEQ ID NO: 126756 - DNA, 17 bp, synthetic construct
  source 1..17: mol_type = other DNA
aggtgcactgtgacgtc

SEQ ID NO: 126757 - DNA, 17 bp, synthetic construct
  source 1..17: mol_type = other DNA
ggtgcactgtgacgtcc

SEQ ID NO: 126758 - DNA, 17 bp, synthetic construct
  source 1..17: mol_type = other DNA
gtgcactgtgacgtcca

SEQ ID NO: 126759 - DNA, 17 bp, synthetic construct
  source 1..17: mol_type = other DNA
tgcactgtgacgtccac

SEQ ID NO: 126760 - DNA, 17 bp, synthetic construct
  source 1..17: mol_type = other DNA
gcactgtgacgtccact

SEQ ID NO: 126761 - DNA, 17 bp, synthetic construct
  source 1..17: mol_type = other DNA
cactgtgacgtccactt

SEQ ID NO: 126762 - DNA, 17 bp, synthetic construct
  source 1..17: mol_type = other DNA
actgtgacgtccacttc

SEQ ID NO: 126763 - DNA, 17 bp, synthetic construct
  source 1..17: mol_type = other DNA
ctgtgacgtccacttcg

SEQ ID NO: 126764 - DNA, 17 bp, synthetic construct
  source 1..17: mol_type = other DNA
tgtgacgtccacttcgg

SEQ ID NO: 126765 - DNA, 17 bp, synthetic construct
  source 1..17: mol_type = other DNA
gtgacgtccacttcggc

SEQ ID NO: 126766 - DNA, 17 bp, synthetic construct
  source 1..17: mol_type = other DNA
tgacgtccacttcggcc

SEQ ID NO: 126767 - DNA, 17 bp, synthetic construct
  source 1..17: mol_type = other DNA
gacgtccacttcggcct

SEQ ID NO: 126768 - DNA, 17 bp, synthetic construct
  source 1..17: mol_type = other DNA
acgtccacttcggcctg

SEQ ID NO: 126769 - DNA, 17 bp, synthetic construct
  source 1..17: mol_type = other DNA
cgtccacttcggcctgg

SEQ ID NO: 126770 - DNA, 17 bp, synthetic construct
  source 1..17: mol_type = other DNA
gtccacttcggcctggt

SEQ ID NO: 126771 - DNA, 17 bp, synthetic construct
  source 1..17: mol_type = other DNA
tccacttcggcctggtg

SEQ ID NO: 126772 - DNA, 17 bp, synthetic construct
  source 1..17: mol_type = other DNA
ccacttcggcctggtgt

SEQ ID NO: 126773 - DNA, 17 bp, synthetic construct
  source 1..17: mol_type = other DNA
cacttcggcctggtgtg

SEQ ID NO: 126774 - DNA, 17 bp, synthetic construct
  source 1..17: mol_type = other DNA
acttcggcctggtgtgc

SEQ ID NO: 126775 - DNA, 17 bp, synthetic construct
  source 1..17: mol_type = other DNA
cttcggcctggtgtgca

SEQ ID NO: 126776 - DNA, 17 bp, synthetic construct
  source 1..17: mol_type = other DNA
ttcggcctggtgtgcag

SEQ ID NO: 126777 - DNA, 17 bp, synthetic construct
  source 1..17: mol_type = other DNA
tcggcctggtgtgcagg

SEQ ID NO: 126778 - DNA, 17 bp, synthetic construct
  source 1..17: mol_type = other DNA
cggcctggtgtgcagga

SEQ ID NO: 126779 - DNA, 17 bp, synthetic construct
  source 1..17: mol_type = other DNA
ggcctggtgtgcaggaa

SEQ ID NO: 126780 - DNA, 17 bp, synthetic construct
  source 1..17: mol_type = other DNA
gcctggtgtgcaggaac

SEQ ID NO: 126781 - DNA, 17 bp, synthetic construct
  source 1..17: mol_type = other DNA
cctggtgtgcaggaact

SEQ ID NO: 126782 - DNA, 17 bp, synthetic construct
  source 1..17: mol_type = other DNA
ctggtgtgcaggaactg

SEQ ID NO: 126783 - DNA, 17 bp, synthetic construct
  source 1..17: mol_type = other DNA
tggtgtgcaggaactgg

SEQ ID NO: 126784 - DNA, 17 bp, synthetic construct
  source 1..17: mol_type = other DNA
ggtgtgcaggaactggg

SEQ ID NO: 126785 - DNA, 17 bp, synthetic construct
  source 1..17: mol_type = other DNA
gtgtgcaggaactggga

SEQ ID NO: 126786 - DNA, 17 bp, synthetic construct
  source 1..17: mol_type = other DNA
tgtgcaggaactgggag

SEQ ID NO: 126787 - DNA, 17 bp, synthetic construct
  source 1..17: mol_type = other DNA
gtgcaggaactgggagc

SEQ ID NO: 126788 - DNA, 17 bp, synthetic construct
  source 1..17: mol_type = other DNA
tgcaggaactgggagca

SEQ ID NO: 126789 - DNA, 17 bp, synthetic construct
  source 1..17: mol_type = other DNA
gcaggaactgggagcag

SEQ ID NO: 126790 - DNA, 17 bp, synthetic construct
  source 1..17: mol_type = other DNA
caggaactgggagcagg

SEQ ID NO: 126791 - DNA, 17 bp, synthetic construct
  source 1..17: mol_type = other DNA
aggaactgggagcagga

SEQ ID NO: 126792 - DNA, 17 bp, synthetic construct
  source 1..17: mol_type = other DNA
ggaactgggagcaggag

SEQ ID NO: 126793 - DNA, 17 bp, synthetic construct
  source 1..17: mol_type = other DNA
gaactgggagcaggagg

SEQ ID NO: 126794 - DNA, 17 bp, synthetic construct
  source 1..17: mol_type = other DNA
aactgggagcaggaggg

SEQ ID NO: 126795 - DNA, 17 bp, synthetic construct
  source 1..17: mol_type = other DNA
actgggagcaggagggc

SEQ ID NO: 126796 - DNA, 17 bp, synthetic construct
  source 1..17: mol_type = other DNA
ctgggagcaggagggcg

SEQ ID NO: 126797 - DNA, 17 bp, synthetic construct
  source 1..17: mol_type = other DNA
tgggagcaggagggcgt

SEQ ID NO: 126798 - DNA, 17 bp, synthetic construct
  source 1..17: mol_type = other DNA
gggagcaggagggcgtc

SEQ ID NO: 126799 - DNA, 17 bp, synthetic construct
  source 1..17: mol_type = other DNA
ggagcaggagggcgtct

SEQ ID NO: 126800 - DNA, 17 bp, synthetic construct
  source 1..17: mol_type = other DNA
gagcaggagggcgtctt

SEQ ID NO: 126801 - DNA, 17 bp, synthetic construct
  source 1..17: mol_type = other DNA
agcaggagggcgtcttc

SEQ ID NO: 126802 - DNA, 17 bp, synthetic construct
  source 1..17: mol_type = other DNA
gcaggagggcgtcttca

SEQ ID NO: 126803 - DNA, 17 bp, synthetic construct
  source 1..17: mol_type = other DNA
caggagggcgtcttcaa

SEQ ID NO: 126804 - DNA, 17 bp, synthetic construct
  source 1..17: mol_type = other DNA
aggagggcgtcttcaag

SEQ ID NO: 126805 - DNA, 17 bp, synthetic construct
  source 1..17: mol_type = other DNA
ggagggcgtcttcaaga

SEQ ID NO: 126806 - DNA, 17 bp, synthetic construct
  source 1..17: mol_type = other DNA
gagggcgtcttcaagat

SEQ ID NO: 126807 - DNA, 17 bp, synthetic construct
  source 1..17: mol_type = other DNA
agggcgtcttcaagatg

SEQ ID NO: 126808 - DNA, 17 bp, synthetic construct
  source 1..17: mol_type = other DNA
gggcgtcttcaagatgt

SEQ ID NO: 126809 - DNA, 17 bp, synthetic construct
  source 1..17: mol_type = other DNA
ggcgtcttcaagatgtg

SEQ ID NO: 126810 - DNA, 17 bp, synthetic construct
  source 1..17: mol_type = other DNA
gcgtcttcaagatgtgc

SEQ ID NO: 126811 - DNA, 17 bp, synthetic construct
  source 1..17: mol_type = other DNA
cgtcttcaagatgtgct

SEQ ID NO: 126812 - DNA, 17 bp, synthetic construct
  source 1..17: mol_type = other DNA
gtcttcaagatgtgcta

SEQ ID NO: 126813 - DNA, 17 bp, synthetic construct
  source 1..17: mol_type = other DNA
tcttcaagatgtgctac

SEQ ID NO: 126814 - DNA, 17 bp, synthetic construct
  source 1..17: mol_type = other DNA
cttcaagatgtgctaca

SEQ ID NO: 126815 - DNA, 17 bp, synthetic construct
  source 1..17: mol_type = other DNA
ttcaagatgtgctacaa

SEQ ID NO: 126816 - DNA, 17 bp, synthetic construct
  source 1..17: mol_type = other DNA
tcaagatgtgctacaac

SEQ ID NO: 126817 - DNA, 17 bp, synthetic construct
  source 1..17: mol_type = other DNA
caagatgtgctacaact

SEQ ID NO: 126818 - DNA, 17 bp, synthetic construct
  source 1..17: mol_type = other DNA
aagatgtgctacaacta

SEQ ID NO: 126819 - DNA, 17 bp, synthetic construct
  source 1..17: mol_type = other DNA
agatgtgctacaactac

SEQ ID NO: 126820 - DNA, 17 bp, synthetic construct
  source 1..17: mol_type = other DNA
gatgtgctacaactaca

SEQ ID NO: 126821 - DNA, 17 bp, synthetic construct
  source 1..17: mol_type = other DNA
atgtgctacaactacag

SEQ ID NO: 126822 - DNA, 17 bp, synthetic construct
  source 1..17: mol_type = other DNA
tgtgctacaactacagg

SEQ ID NO: 126823 - DNA, 17 bp, synthetic construct
  source 1..17: mol_type = other DNA
gtgctacaactacagga

SEQ ID NO: 126824 - DNA, 17 bp, synthetic construct
  source 1..17: mol_type = other DNA
tgctacaactacaggat

SEQ ID NO: 126825 - DNA, 17 bp, synthetic construct
  source 1..17: mol_type = other DNA
gctacaactacaggatc

SEQ ID NO: 126826 - DNA, 17 bp, synthetic construct
  source 1..17: mol_type = other DNA
ctacaactacaggatcc

SEQ ID NO: 126827 - DNA, 17 bp, synthetic construct
  source 1..17: mol_type = other DNA
tacaactacaggatccg

SEQ ID NO: 126828 - DNA, 17 bp, synthetic construct
  source 1..17: mol_type = other DNA
acaactacaggatccgg

SEQ ID NO: 126829 - DNA, 17 bp, synthetic construct
  source 1..17: mol_type = other DNA
caactacaggatccggg

SEQ ID NO: 126830 - DNA, 17 bp, synthetic construct
  source 1..17: mol_type = other DNA
aactacaggatccgggt

SEQ ID NO: 126831 - DNA, 17 bp, synthetic construct
  source 1..17: mol_type = other DNA
actacaggatccgggtc

SEQ ID NO: 126832 - DNA, 17 bp, synthetic construct
  source 1..17: mol_type = other DNA
ctacaggatccgggtcc

SEQ ID NO: 126833 - DNA, 17 bp, synthetic construct
  source 1..17: mol_type = other DNA
tacaggatccgggtcct

SEQ ID NO: 126834 - DNA, 17 bp, synthetic construct
  source 1..17: mol_type = other DNA
acaggatccgggtcctc

SEQ ID NO: 126835 - DNA, 17 bp, synthetic construct
  source 1..17: mol_type = other DNA
caggatccgggtcctct

SEQ ID NO: 126836 - DNA, 17 bp, synthetic construct
  source 1..17: mol_type = other DNA
aggatccgggtcctctg

SEQ ID NO: 126837 - DNA, 17 bp, synthetic construct
  source 1..17: mol_type = other DNA
ggatccgggtcctctgc

SEQ ID NO: 126838 - DNA, 17 bp, synthetic construct
  source 1..17: mol_type = other DNA
gatccgggtcctctgct

SEQ ID NO: 126839 - DNA, 17 bp, synthetic construct
  source 1..17: mol_type = other DNA
atccgggtcctctgctg

SEQ ID NO: 126840 - DNA, 17 bp, synthetic construct
  source 1..17: mol_type = other DNA
tccgggtcctctgctgc

SEQ ID NO: 126841 - DNA, 17 bp, synthetic construct
  source 1..17: mol_type = other DNA
ccgggtcctctgctgca

SEQ ID NO: 126842 - DNA, 17 bp, synthetic construct
  source 1..17: mol_type = other DNA
cgggtcctctgctgcag

SEQ ID NO: 126843 - DNA, 17 bp, synthetic construct
  source 1..17: mol_type = other DNA
gggtcctctgctgcagt

SEQ ID NO: 126844 - DNA, 17 bp, synthetic construct
  source 1..17: mol_type = other DNA
ggtcctctgctgcagtg

SEQ ID NO: 126845 - DNA, 17 bp, synthetic construct
  source 1..17: mol_type = other DNA
gtcctctgctgcagtga

SEQ ID NO: 126846 - DNA, 17 bp, synthetic construct
  source 1..17: mol_type = other DNA
tcctctgctgcagtgac

SEQ ID NO: 126847 - DNA, 17 bp, synthetic construct
  source 1..17: mol_type = other DNA
cctctgctgcagtgacg

SEQ ID NO: 126848 - DNA, 17 bp, synthetic construct
  source 1..17: mol_type = other DNA
ctctgctgcagtgacga

SEQ ID NO: 126849 - DNA, 17 bp, synthetic construct
  source 1..17: mol_type = other DNA
tctgctgcagtgacgac

SEQ ID NO: 126850 - DNA, 17 bp, synthetic construct
  source 1..17: mol_type = other DNA
ctgctgcagtgacgacc

SEQ ID NO: 126851 - DNA, 17 bp, synthetic construct
  source 1..17: mol_type = other DNA
tgctgcagtgacgacca

SEQ ID NO: 126852 - DNA, 17 bp, synthetic construct
  source 1..17: mol_type = other DNA
gctgcagtgacgaccac

SEQ ID NO: 126853 - DNA, 17 bp, synthetic construct
  source 1..17: mol_type = other DNA
ctgcagtgacgaccact

SEQ ID NO: 126854 - DNA, 17 bp, synthetic construct
  source 1..17: mol_type = other DNA
tgcagtgacgaccactg

SEQ ID NO: 126855 - DNA, 17 bp, synthetic construct
  source 1..17: mol_type = other DNA
gcagtgacgaccactgc

SEQ ID NO: 126856 - DNA, 17 bp, synthetic construct
  source 1..17: mol_type = other DNA
cagtgacgaccactgca

SEQ ID NO: 126857 - DNA, 17 bp, synthetic construct
  source 1..17: mol_type = other DNA
agtgacgaccactgcag

SEQ ID NO: 126858 - DNA, 17 bp, synthetic construct
  source 1..17: mol_type = other DNA
gtgacgaccactgcagg

SEQ ID NO: 126859 - DNA, 17 bp, synthetic construct
  source 1..17: mol_type = other DNA
tgacgaccactgcaggg

SEQ ID NO: 126860 - DNA, 17 bp, synthetic construct
  source 1..17: mol_type = other DNA
gacgaccactgcagggg

SEQ ID NO: 126861 - DNA, 17 bp, synthetic construct
  source 1..17: mol_type = other DNA
acgaccactgcagggga

SEQ ID NO: 126862 - DNA, 17 bp, synthetic construct
  source 1..17: mol_type = other DNA
cgaccactgcaggggac

SEQ ID NO: 126863 - DNA, 17 bp, synthetic construct
  source 1..17: mol_type = other DNA
gaccactgcaggggacg

SEQ ID NO: 126864 - DNA, 17 bp, synthetic construct
  source 1..17: mol_type = other DNA
accactgcaggggacgt

SEQ ID NO: 126865 - DNA, 17 bp, synthetic construct
  source 1..17: mol_type = other DNA
ccactgcaggggacgtg

SEQ ID NO: 126866 - DNA, 17 bp, synthetic construct
  source 1..17: mol_type = other DNA
cactgcaggggacgtgc

SEQ ID NO: 126867 - DNA, 17 bp, synthetic construct
  source 1..17: mol_type = other DNA
actgcaggggacgtgcc

SEQ ID NO: 126868 - DNA, 17 bp, synthetic construct
  source 1..17: mol_type = other DNA
ctgcaggggacgtgcca

SEQ ID NO: 126869 - DNA, 17 bp, synthetic construct
  source 1..17: mol_type = other DNA
tgcaggggacgtgccac

SEQ ID NO: 126870 - DNA, 17 bp, synthetic construct
  source 1..17: mol_type = other DNA
gcaggggacgtgccaca

SEQ ID NO: 126871 - DNA, 17 bp, synthetic construct
  source 1..17: mol_type = other DNA
caggggacgtgccacaa

SEQ ID NO: 126872 - DNA, 17 bp, synthetic construct
  source 1..17: mol_type = other DNA
aggggacgtgccacaac

SEQ ID NO: 126873 - DNA, 17 bp, synthetic construct
  source 1..17: mol_type = other DNA
ggggacgtgccacaacc

SEQ ID NO: 126874 - DNA, 17 bp, synthetic construct
  source 1..17: mol_type = other DNA
gggacgtgccacaaccc

SEQ ID NO: 126875 - DNA, 17 bp, synthetic construct
  source 1..17: mol_type = other DNA
ggacgtgccacaacccc

SEQ ID NO: 126876 - DNA, 17 bp, synthetic construct
  source 1..17: mol_type = other DNA
gacgtgccacaaccccg

SEQ ID NO: 126877 - DNA, 17 bp, synthetic construct
  source 1..17: mol_type = other DNA
acgtgccacaaccccgc

SEQ ID NO: 126878 - DNA, 17 bp, synthetic construct
  source 1..17: mol_type = other DNA
cgtgccacaaccccgcc

SEQ ID NO: 126879 - DNA, 17 bp, synthetic construct
  source 1..17: mol_type = other DNA
gtgccacaaccccgcca

SEQ ID NO: 126880 - DNA, 17 bp, synthetic construct
  source 1..17: mol_type = other DNA
tgccacaaccccgccac

SEQ ID NO: 126881 - DNA, 17 bp, synthetic construct
  source 1..17: mol_type = other DNA
gccacaaccccgccacc

SEQ ID NO: 126882 - DNA, 17 bp, synthetic construct
  source 1..17: mol_type = other DNA
ccacaaccccgccaccg

SEQ ID NO: 126883 - DNA, 17 bp, synthetic construct
  source 1..17: mol_type = other DNA
cacaaccccgccaccga

SEQ ID NO: 126884 - DNA, 17 bp, synthetic construct
  source 1..17: mol_type = other DNA
acaaccccgccaccgac

SEQ ID NO: 126885 - DNA, 17 bp, synthetic construct
  source 1..17: mol_type = other DNA
caaccccgccaccgacc

SEQ ID NO: 126886 - DNA, 17 bp, synthetic construct
  source 1..17: mol_type = other DNA
aaccccgccaccgacca

SEQ ID NO: 126887 - DNA, 17 bp, synthetic construct
  source 1..17: mol_type = other DNA
accccgccaccgaccac

SEQ ID NO: 126888 - DNA, 17 bp, synthetic construct
  source 1..17: mol_type = other DNA
ccccgccaccgaccaca

SEQ ID NO: 126889 - DNA, 17 bp, synthetic construct
  source 1..17: mol_type = other DNA
cccgccaccgaccacag

SEQ ID NO: 126890 - DNA, 17 bp, synthetic construct
  source 1..17: mol_type = other DNA
ccgccaccgaccacaga

SEQ ID NO: 126891 - DNA, 17 bp, synthetic construct
  source 1..17: mol_type = other DNA
cgccaccgaccacagag

SEQ ID NO: 126892 - DNA, 17 bp, synthetic construct
  source 1..17: mol_type = other DNA
gccaccgaccacagagc

SEQ ID NO: 126893 - DNA, 17 bp, synthetic construct
  source 1..17: mol_type = other DNA
ccaccgaccacagagct

SEQ ID NO: 126894 - DNA, 17 bp, synthetic construct
  source 1..17: mol_type = other DNA
caccgaccacagagctg

SEQ ID NO: 126895 - DNA, 17 bp, synthetic construct
  source 1..17: mol_type = other DNA
accgaccacagagctgg

SEQ ID NO: 126896 - DNA, 17 bp, synthetic construct
  source 1..17: mol_type = other DNA
ccgaccacagagctgga

SEQ ID NO: 126897 - DNA, 17 bp, synthetic construct
  source 1..17: mol_type = other DNA
cgaccacagagctggag

SEQ ID NO: 126898 - DNA, 17 bp, synthetic construct
  source 1..17: mol_type = other DNA
gaccacagagctggaga

SEQ ID NO: 126899 - DNA, 17 bp, synthetic construct
  source 1..17: mol_type = other DNA
accacagagctggagac

SEQ ID NO: 126900 - DNA, 17 bp, synthetic construct
  source 1..17: mol_type = other DNA
ccacagagctggagacg

SEQ ID NO: 126901 - DNA, 17 bp, synthetic construct
  source 1..17: mol_type = other DNA
cacagagctggagacgg

SEQ ID NO: 126902 - DNA, 17 bp, synthetic construct
  source 1..17: mol_type = other DNA
acagagctggagacggc

SEQ ID NO: 126903 - DNA, 17 bp, synthetic construct
  source 1..17: mol_type = other DNA
cagagctggagacggcc

SEQ ID NO: 126904 - DNA, 17 bp, synthetic construct
  source 1..17: mol_type = other DNA
agagctggagacggcca

SEQ ID NO: 126905 - DNA, 17 bp, synthetic construct
  source 1..17: mol_type = other DNA
gagctggagacggccac

SEQ ID NO: 126906 - DNA, 17 bp, synthetic construct
  source 1..17: mol_type = other DNA
agctggagacggccacc

SEQ ID NO: 126907 - DNA, 17 bp, synthetic construct
  source 1..17: mol_type = other DNA
gctggagacggccacca

SEQ ID NO: 126908 - DNA, 17 bp, synthetic construct
  source 1..17: mol_type = other DNA
ctggagacggccaccac

SEQ ID NO: 126909 - DNA, 17 bp, synthetic construct
  source 1..17: mol_type = other DNA
tggagacggccaccacc

SEQ ID NO: 126910 - DNA, 17 bp, synthetic construct
  source 1..17: mol_type = other DNA
ggagacggccaccacca

SEQ ID NO: 126911 - DNA, 17 bp, synthetic construct
  source 1..17: mol_type = other DNA
gagacggccaccaccac

SEQ ID NO: 126912 - DNA, 17 bp, synthetic construct
  source 1..17: mol_type = other DNA
agacggccaccaccacc

SEQ ID NO: 126913 - DNA, 17 bp, synthetic construct
  source 1..17: mol_type = other DNA
gacggccaccaccacca

SEQ ID NO: 126914 - DNA, 17 bp, synthetic construct
  source 1..17: mol_type = other DNA
acggccaccaccaccac

SEQ ID NO: 126915 - DNA, 17 bp, synthetic construct
  source 1..17: mol_type = other DNA
cggccaccaccaccacc

SEQ ID NO: 126916 - DNA, 17 bp, synthetic construct
  source 1..17: mol_type = other DNA
ggccaccaccaccacca

SEQ ID NO: 126917 - DNA, 17 bp, synthetic construct
  source 1..17: mol_type = other DNA
gccaccaccaccaccac

SEQ ID NO: 126918 - DNA, 17 bp, synthetic construct
  source 1..17: mol_type = other DNA
ccaccaccaccaccacc

SEQ ID NO: 126919 - DNA, 17 bp, synthetic construct
  source 1..17: mol_type = other DNA
caccaccaccaccaccc

SEQ ID NO: 126920 - DNA, 17 bp, synthetic construct
  source 1..17: mol_type = other DNA
accaccaccaccaccca

SEQ ID NO: 126921 - DNA, 17 bp, synthetic construct
  source 1..17: mol_type = other DNA
ccaccaccaccacccag

SEQ ID NO: 126922 - DNA, 17 bp, synthetic construct
  source 1..17: mol_type = other DNA
caccaccaccacccagg

SEQ ID NO: 126923 - DNA, 17 bp, synthetic construct
  source 1..17: mol_type = other DNA
accaccaccacccaggc

SEQ ID NO: 126924 - DNA, 17 bp, synthetic construct
  source 1..17: mol_type = other DNA
ccaccaccacccaggcc

SEQ ID NO: 126925 - DNA, 17 bp, synthetic construct
  source 1..17: mol_type = other DNA
caccaccacccaggccc

SEQ ID NO: 126926 - DNA, 17 bp, synthetic construct
  source 1..17: mol_type = other DNA
accaccacccaggccct

SEQ ID NO: 126927 - DNA, 17 bp, synthetic construct
  source 1..17: mol_type = other DNA
ccaccacccaggccctg

SEQ ID NO: 126928 - DNA, 17 bp, synthetic construct
  source 1..17: mol_type = other DNA
caccacccaggccctgt

SEQ ID NO: 126929 - DNA, 17 bp, synthetic construct
  source 1..17: mol_type = other DNA
accacccaggccctgtt

SEQ ID NO: 126930 - DNA, 17 bp, synthetic construct
  source 1..17: mol_type = other DNA
ccacccaggccctgttc

SEQ ID NO: 126931 - DNA, 17 bp, synthetic construct
  source 1..17: mol_type = other DNA
cacccaggccctgttct

SEQ ID NO: 126932 - DNA, 17 bp, synthetic construct
  source 1..17: mol_type = other DNA
acccaggccctgttctc

SEQ ID NO: 126933 - DNA, 17 bp, synthetic construct
  source 1..17: mol_type = other DNA
cccaggccctgttctca

SEQ ID NO: 126934 - DNA, 17 bp, synthetic construct
  source 1..17: mol_type = other DNA
ccaggccctgttctcaa

SEQ ID NO: 126935 - DNA, 17 bp, synthetic construct
  source 1..17: mol_type = other DNA
caggccctgttctcaac

SEQ ID NO: 126936 - DNA, 17 bp, synthetic construct
  source 1..17: mol_type = other DNA
aggccctgttctcaacg

SEQ ID NO: 126937 - DNA, 17 bp, synthetic construct
  source 1..17: mol_type = other DNA
ggccctgttctcaacgc

SEQ ID NO: 126938 - DNA, 17 bp, synthetic construct
  source 1..17: mol_type = other DNA
gccctgttctcaacgcc

SEQ ID NO: 126939 - DNA, 17 bp, synthetic construct
  source 1..17: mol_type = other DNA
ccctgttctcaacgccg

SEQ ID NO: 126940 - DNA, 17 bp, synthetic construct
  source 1..17: mol_type = other DNA
cctgttctcaacgccgc

SEQ ID NO: 126941 - DNA, 17 bp, synthetic construct
  source 1..17: mol_type = other DNA
ctgttctcaacgccgca

SEQ ID NO: 126942 - DNA, 17 bp, synthetic construct
  source 1..17: mol_type = other DNA
tgttctcaacgccgcag

SEQ ID NO: 126943 - DNA, 17 bp, synthetic construct
  source 1..17: mol_type = other DNA
gttctcaacgccgcagc

SEQ ID NO: 126944 - DNA, 17 bp, synthetic construct
  source 1..17: mol_type = other DNA
ttctcaacgccgcagcc

SEQ ID NO: 126945 - DNA, 17 bp, synthetic construct
  source 1..17: mol_type = other DNA
tctcaacgccgcagcct

SEQ ID NO: 126946 - DNA, 17 bp, synthetic construct
  source 1..17: mol_type = other DNA
ctcaacgccgcagccta

SEQ ID NO: 126947 - DNA, 17 bp, synthetic construct
  source 1..17: mol_type = other DNA
tcaacgccgcagcctac

SEQ ID NO: 126948 - DNA, 17 bp, synthetic construct
  source 1..17: mol_type = other DNA
caacgccgcagcctacg

SEQ ID NO: 126949 - DNA, 17 bp, synthetic construct
  source 1..17: mol_type = other DNA
aacgccgcagcctacga

SEQ ID NO: 126950 - DNA, 17 bp, synthetic construct
  source 1..17: mol_type = other DNA
acgccgcagcctacgag

SEQ ID NO: 126951 - DNA, 17 bp, synthetic construct
  source 1..17: mol_type = other DNA
cgccgcagcctacgagt

SEQ ID NO: 126952 - DNA, 17 bp, synthetic construct
  source 1..17: mol_type = other DNA
gccgcagcctacgagta

SEQ ID NO: 126953 - DNA, 17 bp, synthetic construct
  source 1..17: mol_type = other DNA
ccgcagcctacgagtag

SEQ ID NO: 126954 - DNA, 17 bp, synthetic construct
  source 1..17: mol_type = other DNA
cgcagcctacgagtagc

SEQ ID NO: 126955 - DNA, 17 bp, synthetic construct
  source 1..17: mol_type = other DNA
gcagcctacgagtagcc

SEQ ID NO: 126956 - DNA, 17 bp, synthetic construct
  source 1..17: mol_type = other DNA
cagcctacgagtagccc

SEQ ID NO: 126957 - DNA, 17 bp, synthetic construct
  source 1..17: mol_type = other DNA
agcctacgagtagcccg

SEQ ID NO: 126958 - DNA, 17 bp, synthetic construct
  source 1..17: mol_type = other DNA
gcctacgagtagcccgg

SEQ ID NO: 126959 - DNA, 17 bp, synthetic construct
  source 1..17: mol_type = other DNA
cctacgagtagcccggg

SEQ ID NO: 126960 - DNA, 17 bp, synthetic construct
  source 1..17: mol_type = other DNA
ctacgagtagcccgggg

SEQ ID NO: 126961 - DNA, 17 bp, synthetic construct
  source 1..17: mol_type = other DNA
tacgagtagcccggggc

SEQ ID NO: 126962 - DNA, 17 bp, synthetic construct
  source 1..17: mol_type = other DNA
acgagtagcccggggct

SEQ ID NO: 126963 - DNA, 17 bp, synthetic construct
  source 1..17: mol_type = other DNA
cgagtagcccggggctg

SEQ ID NO: 126964 - DNA, 17 bp, synthetic construct
  source 1..17: mol_type = other DNA
gagtagcccggggctga

SEQ ID NO: 126965 - DNA, 17 bp, synthetic construct
  source 1..17: mol_type = other DNA
agtagcccggggctgac

SEQ ID NO: 126966 - DNA, 17 bp, synthetic construct
  source 1..17: mol_type = other DNA
gtagcccggggctgacc

SEQ ID NO: 126967 - DNA, 17 bp, synthetic construct
  source 1..17: mol_type = other DNA
tagcccggggctgacca

SEQ ID NO: 126968 - DNA, 17 bp, synthetic construct
  source 1..17: mol_type = other DNA
agcccggggctgaccag

SEQ ID NO: 126969 - DNA, 17 bp, synthetic construct
  source 1..17: mol_type = other DNA
gcccggggctgaccagg

SEQ ID NO: 126970 - DNA, 17 bp, synthetic construct
  source 1..17: mol_type = other DNA
cccggggctgaccaggg

SEQ ID NO: 126971 - DNA, 17 bp, synthetic construct
  source 1..17: mol_type = other DNA
ccggggctgaccagggc

SEQ ID NO: 126972 - DNA, 17 bp, synthetic construct
  source 1..17: mol_type = other DNA
cggggctgaccagggct

SEQ ID NO: 126973 - DNA, 17 bp, synthetic construct
  source 1..17: mol_type = other DNA
ggggctgaccagggctc

SEQ ID NO: 126974 - DNA, 17 bp, synthetic construct
  source 1..17: mol_type = other DNA
gggctgaccagggctcc

SEQ ID NO: 126975 - DNA, 17 bp, synthetic construct
  source 1..17: mol_type = other DNA
ggctgaccagggctccc

SEQ ID NO: 126976 - DNA, 17 bp, synthetic construct
  source 1..17: mol_type = other DNA
gctgaccagggctcccc

SEQ ID NO: 126977 - DNA, 17 bp, synthetic construct
  source 1..17: mol_type = other DNA
ctgaccagggctccccc

SEQ ID NO: 126978 - DNA, 17 bp, synthetic construct
  source 1..17: mol_type = other DNA
tgaccagggctcccccg

SEQ ID NO: 126979 - DNA, 17 bp, synthetic construct
  source 1..17: mol_type = other DNA
gaccagggctcccccgg

SEQ ID NO: 126980 - DNA, 17 bp, synthetic construct
  source 1..17: mol_type = other DNA
accagggctcccccggc

SEQ ID NO: 126981 - DNA, 17 bp, synthetic construct
  source 1..17: mol_type = other DNA
ccagggctcccccggcc

SEQ ID NO: 126982 - DNA, 17 bp, synthetic construct
  source 1..17: mol_type = other DNA
cagggctcccccggcca

SEQ ID NO: 126983 - DNA, 17 bp, synthetic construct
  source 1..17: mol_type = other DNA
agggctcccccggccag

SEQ ID NO: 126984 - DNA, 17 bp, synthetic construct
  source 1..17: mol_type = other DNA
gggctcccccggccagc

SEQ ID NO: 126985 - DNA, 17 bp, synthetic construct
  source 1..17: mol_type = other DNA
ggctcccccggccagca

SEQ ID NO: 126986 - DNA, 17 bp, synthetic construct
  source 1..17: mol_type = other DNA
gctcccccggccagcac

SEQ ID NO: 126987 - DNA, 17 bp, synthetic construct
  source 1..17: mol_type = other DNA
ctcccccggccagcacc

SEQ ID NO: 126988 - DNA, 17 bp, synthetic construct
  source 1..17: mol_type = other DNA
tcccccggccagcacca

SEQ ID NO: 126989 - DNA, 17 bp, synthetic construct
  source 1..17: mol_type = other DNA
cccccggccagcaccac

SEQ ID NO: 126990 - DNA, 17 bp, synthetic construct
  source 1..17: mol_type = other DNA
ccccggccagcaccaca

SEQ ID NO: 126991 - DNA, 17 bp, synthetic construct
  source 1..17: mol_type = other DNA
cccggccagcaccacag

SEQ ID NO: 126992 - DNA, 17 bp, synthetic construct
  source 1..17: mol_type = other DNA
ccggccagcaccacagc

SEQ ID NO: 126993 - DNA, 17 bp, synthetic construct
  source 1..17: mol_type = other DNA
cggccagcaccacagca

SEQ ID NO: 126994 - DNA, 17 bp, synthetic construct
  source 1..17: mol_type = other DNA
ggccagcaccacagcag

SEQ ID NO: 126995 - DNA, 17 bp, synthetic construct
  source 1..17: mol_type = other DNA
gccagcaccacagcagt

SEQ ID NO: 126996 - DNA, 17 bp, synthetic construct
  source 1..17: mol_type = other DNA
ccagcaccacagcagtc

SEQ ID NO: 126997 - DNA, 17 bp, synthetic construct
  source 1..17: mol_type = other DNA
cagcaccacagcagtcc

SEQ ID NO: 126998 - DNA, 17 bp, synthetic construct
  source 1..17: mol_type = other DNA
agcaccacagcagtccc

SEQ ID NO: 126999 - DNA, 17 bp, synthetic construct
  source 1..17: mol_type = other DNA
gcaccacagcagtcccc

SEQ ID NO: 127000 - DNA, 17 bp, synthetic construct
  source 1..17: mol_type = other DNA
caccacagcagtcccca

SEQ ID NO: 127001 - DNA, 17 bp, synthetic construct
  source 1..17: mol_type = other DNA
accacagcagtccccac

SEQ ID NO: 127002 - DNA, 17 bp, synthetic construct
  source 1..17: mol_type = other DNA
ccacagcagtccccacc

SEQ ID NO: 127003 - DNA, 17 bp, synthetic construct
  source 1..17: mol_type = other DNA
cacagcagtccccaccc

SEQ ID NO: 127004 - DNA, 17 bp, synthetic construct
  source 1..17: mol_type = other DNA
acagcagtccccaccct

SEQ ID NO: 127005 - DNA, 17 bp, synthetic construct
  source 1..17: mol_type = other DNA
cagcagtccccaccctc

SEQ ID NO: 127006 - DNA, 17 bp, synthetic construct
  source 1..17: mol_type = other DNA
agcagtccccaccctct

SEQ ID NO: 127007 - DNA, 17 bp, synthetic construct
  source 1..17: mol_type = other DNA
gcagtccccaccctctc

SEQ ID NO: 127008 - DNA, 17 bp, synthetic construct
  source 1..17: mol_type = other DNA
cagtccccaccctctca

SEQ ID NO: 127009 - DNA, 17 bp, synthetic construct
  source 1..17: mol_type = other DNA
agtccccaccctctcag

SEQ ID NO: 127010 - DNA, 17 bp, synthetic construct
  source 1..17: mol_type = other DNA
gtccccaccctctcaga

SEQ ID NO: 127011 - DNA, 17 bp, synthetic construct
  source 1..17: mol_type = other DNA
tccccaccctctcagaa

SEQ ID NO: 127012 - DNA, 17 bp, synthetic construct
  source 1..17: mol_type = other DNA
ccccaccctctcagaag

SEQ ID NO: 127013 - DNA, 17 bp, synthetic construct
  source 1..17: mol_type = other DNA
cccaccctctcagaagg

SEQ ID NO: 127014 - DNA, 17 bp, synthetic construct
  source 1..17: mol_type = other DNA
ccaccctctcagaagga

SEQ ID NO: 127015 - DNA, 17 bp, synthetic construct
  source 1..17: mol_type = other DNA
caccctctcagaaggac

SEQ ID NO: 127016 - DNA, 17 bp, synthetic construct
  source 1..17: mol_type = other DNA
accctctcagaaggact

SEQ ID NO: 127017 - DNA, 17 bp, synthetic construct
  source 1..17: mol_type = other DNA
ccctctcagaaggactg

SEQ ID NO: 127018 - DNA, 17 bp, synthetic construct
  source 1..17: mol_type = other DNA
cctctcagaaggactga

SEQ ID NO: 127019 - DNA, 17 bp, synthetic construct
  source 1..17: mol_type = other DNA
ctctcagaaggactgac

SEQ ID NO: 127020 - DNA, 17 bp, synthetic construct
  source 1..17: mol_type = other DNA
tctcagaaggactgaca

SEQ ID NO: 127021 - DNA, 17 bp, synthetic construct
  source 1..17: mol_type = other DNA
ctcagaaggactgacat

SEQ ID NO: 127022 - DNA, 17 bp, synthetic construct
  source 1..17: mol_type = other DNA
tcagaaggactgacatc

SEQ ID NO: 127023 - DNA, 17 bp, synthetic construct
  source 1..17: mol_type = other DNA
cagaaggactgacatcc

SEQ ID NO: 127024 - DNA, 17 bp, synthetic construct
  source 1..17: mol_type = other DNA
agaaggactgacatccc

SEQ ID NO: 127025 - DNA, 17 bp, synthetic construct
  source 1..17: mol_type = other DNA
gaaggactgacatcccc

SEQ ID NO: 127026 - DNA, 17 bp, synthetic construct
  source 1..17: mol_type = other DNA
aaggactgacatccccc

SEQ ID NO: 127027 - DNA, 17 bp, synthetic construct
  source 1..17: mol_type = other DNA
aggactgacatccccca

SEQ ID NO: 127028 - DNA, 17 bp, synthetic construct
  source 1..17: mol_type = other DNA
ggactgacatcccccag

SEQ ID NO: 127029 - DNA, 17 bp, synthetic construct
  source 1..17: mol_type = other DNA
gactgacatcccccaga

SEQ ID NO: 127030 - DNA, 17 bp, synthetic construct
  source 1..17: mol_type = other DNA
actgacatcccccagat

SEQ ID NO: 127031 - DNA, 17 bp, synthetic construct
  source 1..17: mol_type = other DNA
ctgacatcccccagata

SEQ ID NO: 127032 - DNA, 17 bp, synthetic construct
  source 1..17: mol_type = other DNA
tgacatcccccagatac

SEQ ID NO: 127033 - DNA, 17 bp, synthetic construct
  source 1..17: mol_type = other DNA
gacatcccccagataca

SEQ ID NO: 127034 - DNA, 17 bp, synthetic construct
  source 1..17: mol_type = other DNA
acatcccccagatacac

SEQ ID NO: 127035 - DNA, 17 bp, synthetic construct
  source 1..17: mol_type = other DNA
catcccccagatacaca

SEQ ID NO: 127036 - DNA, 17 bp, synthetic construct
  source 1..17: mol_type = other DNA
atcccccagatacacaa

SEQ ID NO: 127037 - DNA, 17 bp, synthetic construct
  source 1..17: mol_type = other DNA
tcccccagatacacaag

SEQ ID NO: 127038 - DNA, 17 bp, synthetic construct
  source 1..17: mol_type = other DNA
cccccagatacacaagc

SEQ ID NO: 127039 - DNA, 17 bp, synthetic construct
  source 1..17: mol_type = other DNA
ccccagatacacaagca

SEQ ID NO: 127040 - DNA, 17 bp, synthetic construct
  source 1..17: mol_type = other DNA
cccagatacacaagcac

SEQ ID NO: 127041 - DNA, 17 bp, synthetic construct
  source 1..17: mol_type = other DNA
ccagatacacaagcacc

SEQ ID NO: 127042 - DNA, 17 bp, synthetic construct
  source 1..17: mol_type = other DNA
cagatacacaagcaccc

SEQ ID NO: 127043 - DNA, 17 bp, synthetic construct
  source 1..17: mol_type = other DNA
agatacacaagcaccct

SEQ ID NO: 127044 - DNA, 17 bp, synthetic construct
  source 1..17: mol_type = other DNA
gatacacaagcaccctt

SEQ ID NO: 127045 - DNA, 17 bp, synthetic construct
  source 1..17: mol_type = other DNA
atacacaagcacccttg

SEQ ID NO: 127046 - DNA, 17 bp, synthetic construct
  source 1..17: mol_type = other DNA
tacacaagcacccttgg

SEQ ID NO: 127047 - DNA, 17 bp, synthetic construct
  source 1..17: mol_type = other DNA
acacaagcacccttggt

SEQ ID NO: 127048 - DNA, 17 bp, synthetic construct
  source 1..17: mol_type = other DNA
cacaagcacccttggta

SEQ ID NO: 127049 - DNA, 17 bp, synthetic construct
  source 1..17: mol_type = other DNA
acaagcacccttggtac

SEQ ID NO: 127050 - DNA, 17 bp, synthetic construct
  source 1..17: mol_type = other DNA
caagcacccttggtaca

SEQ ID NO: 127051 - DNA, 17 bp, synthetic construct
  source 1..17: mol_type = other DNA
aagcacccttggtacag

SEQ ID NO: 127052 - DNA, 17 bp, synthetic construct
  source 1..17: mol_type = other DNA
agcacccttggtacagc

SEQ ID NO: 127053 - DNA, 17 bp, synthetic construct
  source 1..17: mol_type = other DNA
gcacccttggtacagcc

SEQ ID NO: 127054 - DNA, 17 bp, synthetic construct
  source 1..17: mol_type = other DNA
cacccttggtacagcca

SEQ ID NO: 127055 - DNA, 17 bp, synthetic construct
  source 1..17: mol_type = other DNA
acccttggtacagccac

SEQ ID NO: 127056 - DNA, 17 bp, synthetic construct
  source 1..17: mol_type = other DNA
cccttggtacagccacc

SEQ ID NO: 127057 - DNA, 17 bp, synthetic construct
  source 1..17: mol_type = other DNA
ccttggtacagccacca

SEQ ID NO: 127058 - DNA, 17 bp, synthetic construct
  source 1..17: mol_type = other DNA
cttggtacagccaccac

SEQ ID NO: 127059 - DNA, 17 bp, synthetic construct
  source 1..17: mol_type = other DNA
ttggtacagccaccacg

SEQ ID NO: 127060 - DNA, 17 bp, synthetic construct
  source 1..17: mol_type = other DNA
tggtacagccaccacgg

SEQ ID NO: 127061 - DNA, 17 bp, synthetic construct
  source 1..17: mol_type = other DNA
ggtacagccaccacggg

SEQ ID NO: 127062 - DNA, 17 bp, synthetic construct
  source 1..17: mol_type = other DNA
gtacagccaccacggga

SEQ ID NO: 127063 - DNA, 17 bp, synthetic construct
  source 1..17: mol_type = other DNA
tacagccaccacgggag

SEQ ID NO: 127064 - DNA, 17 bp, synthetic construct
  source 1..17: mol_type = other DNA
acagccaccacgggagg

SEQ ID NO: 127065 - DNA, 17 bp, synthetic construct
  source 1..17: mol_type = other DNA
cagccaccacgggaggc

SEQ ID NO: 127066 - DNA, 17 bp, synthetic construct
  source 1..17: mol_type = other DNA
agccaccacgggaggcc

SEQ ID NO: 127067 - DNA, 17 bp, synthetic construct
  source 1..17: mol_type = other DNA
gccaccacgggaggccc

SEQ ID NO: 127068 - DNA, 17 bp, synthetic construct
  source 1..17: mol_type = other DNA
ccaccacgggaggcccc

SEQ ID NO: 127069 - DNA, 17 bp, synthetic construct
  source 1..17: mol_type = other DNA
caccacgggaggcccca

SEQ ID NO: 127070 - DNA, 17 bp, synthetic construct
  source 1..17: mol_type = other DNA
accacgggaggccccac

SEQ ID NO: 127071 - DNA, 17 bp, synthetic construct
  source 1..17: mol_type = other DNA
ccacgggaggccccacg

SEQ ID NO: 127072 - DNA, 17 bp, synthetic construct
  source 1..17: mol_type = other DNA
cacgggaggccccacga

SEQ ID NO: 127073 - DNA, 17 bp, synthetic construct
  source 1..17: mol_type = other DNA
acgggaggccccacgac

SEQ ID NO: 127074 - DNA, 17 bp, synthetic construct
  source 1..17: mol_type = other DNA
cgggaggccccacgacg

SEQ ID NO: 127075 - DNA, 17 bp, synthetic construct
  source 1..17: mol_type = other DNA
gggaggccccacgacgc

SEQ ID NO: 127076 - DNA, 17 bp, synthetic construct
  source 1..17: mol_type = other DNA
ggaggccccacgacgcc

SEQ ID NO: 127077 - DNA, 17 bp, synthetic construct
  source 1..17: mol_type = other DNA
gaggccccacgacgcct

SEQ ID NO: 127078 - DNA, 17 bp, synthetic construct
  source 1..17: mol_type = other DNA
aggccccacgacgcctg

SEQ ID NO: 127079 - DNA, 17 bp, synthetic construct
  source 1..17: mol_type = other DNA
ggccccacgacgcctgc

SEQ ID NO: 127080 - DNA, 17 bp, synthetic construct
  source 1..17: mol_type = other DNA
gccccacgacgcctgca

SEQ ID NO: 127081 - DNA, 17 bp, synthetic construct
  source 1..17: mol_type = other DNA
ccccacgacgcctgcag

SEQ ID NO: 127082 - DNA, 17 bp, synthetic construct
  source 1..17: mol_type = other DNA
cccacgacgcctgcagg

SEQ ID NO: 127083 - DNA, 17 bp, synthetic construct
  source 1..17: mol_type = other DNA
ccacgacgcctgcaggc

SEQ ID NO: 127084 - DNA, 17 bp, synthetic construct
  source 1..17: mol_type = other DNA
cacgacgcctgcaggct

SEQ ID NO: 127085 - DNA, 17 bp, synthetic construct
  source 1..17: mol_type = other DNA
acgacgcctgcaggctc

SEQ ID NO: 127086 - DNA, 17 bp, synthetic construct
  source 1..17: mol_type = other DNA
cgacgcctgcaggctcc

SEQ ID NO: 127087 - DNA, 17 bp, synthetic construct
  source 1..17: mol_type = other DNA
gacgcctgcaggctcca

SEQ ID NO: 127088 - DNA, 17 bp, synthetic construct
  source 1..17: mol_type = other DNA
acgcctgcaggctccac

SEQ ID NO: 127089 - DNA, 17 bp, synthetic construct
  source 1..17: mol_type = other DNA
cgcctgcaggctccaca

SEQ ID NO: 127090 - DNA, 17 bp, synthetic construct
  source 1..17: mol_type = other DNA
gcctgcaggctccacag

SEQ ID NO: 127091 - DNA, 17 bp, synthetic construct
  source 1..17: mol_type = other DNA
cctgcaggctccacaga

SEQ ID NO: 127092 - DNA, 17 bp, synthetic construct
  source 1..17: mol_type = other DNA
ctgcaggctccacagaa

SEQ ID NO: 127093 - DNA, 17 bp, synthetic construct
  source 1..17: mol_type = other DNA
tgcaggctccacagaac

SEQ ID NO: 127094 - DNA, 17 bp, synthetic construct
  source 1..17: mol_type = other DNA
gcaggctccacagaacc

SEQ ID NO: 127095 - DNA, 17 bp, synthetic construct
  source 1..17: mol_type = other DNA
caggctccacagaaccc

SEQ ID NO: 127096 - DNA, 17 bp, synthetic construct
  source 1..17: mol_type = other DNA
aggctccacagaaccca

SEQ ID NO: 127097 - DNA, 17 bp, synthetic construct
  source 1..17: mol_type = other DNA
ggctccacagaacccac

SEQ ID NO: 127098 - DNA, 17 bp, synthetic construct
  source 1..17: mol_type = other DNA
gctccacagaacccact

SEQ ID NO: 127099 - DNA, 17 bp, synthetic construct
  source 1..17: mol_type = other DNA
ctccacagaacccactg

SEQ ID NO: 127100 - DNA, 17 bp, synthetic construct
  source 1..17: mol_type = other DNA
tccacagaacccactgt

SEQ ID NO: 127101 - DNA, 17 bp, synthetic construct
  source 1..17: mol_type = other DNA
ccacagaacccactgtc

SEQ ID NO: 127102 - DNA, 17 bp, synthetic construct
  source 1..17: mol_type = other DNA
cacagaacccactgtcc

SEQ ID NO: 127103 - DNA, 17 bp, synthetic construct
  source 1..17: mol_type = other DNA
acagaacccactgtccc

SEQ ID NO: 127104 - DNA, 17 bp, synthetic construct
  source 1..17: mol_type = other DNA
cagaacccactgtccca

SEQ ID NO: 127105 - DNA, 17 bp, synthetic construct
  source 1..17: mol_type = other DNA
agaacccactgtcccag

SEQ ID NO: 127106 - DNA, 17 bp, synthetic construct
  source 1..17: mol_type = other DNA
gaacccactgtcccagg

SEQ ID NO: 127107 - DNA, 17 bp, synthetic construct
  source 1..17: mol_type = other DNA
aacccactgtcccaggg

SEQ ID NO: 127108 - DNA, 17 bp, synthetic construct
  source 1..17: mol_type = other DNA
acccactgtcccagggg

SEQ ID NO: 127109 - DNA, 17 bp, synthetic construct
  source 1..17: mol_type = other DNA
cccactgtcccaggggt

SEQ ID NO: 127110 - DNA, 17 bp, synthetic construct
  source 1..17: mol_type = other DNA
ccactgtcccaggggtg

SEQ ID NO: 127111 - DNA, 17 bp, synthetic construct
  source 1..17: mol_type = other DNA
cactgtcccaggggtgg

SEQ ID NO: 127112 - DNA, 17 bp, synthetic construct
  source 1..17: mol_type = other DNA
actgtcccaggggtggc

SEQ ID NO: 127113 - DNA, 17 bp, synthetic construct
  source 1..17: mol_type = other DNA
ctgtcccaggggtggcc

SEQ ID NO: 127114 - DNA, 17 bp, synthetic construct
  source 1..17: mol_type = other DNA
tgtcccaggggtggcca

SEQ ID NO: 127115 - DNA, 17 bp, synthetic construct
  source 1..17: mol_type = other DNA
gtcccaggggtggccac

SEQ ID NO: 127116 - DNA, 17 bp, synthetic construct
  source 1..17: mol_type = other DNA
tcccaggggtggccaca

SEQ ID NO: 127117 - DNA, 17 bp, synthetic construct
  source 1..17: mol_type = other DNA
cccaggggtggccacat

SEQ ID NO: 127118 - DNA, 17 bp, synthetic construct
  source 1..17: mol_type = other DNA
ccaggggtggccacatc

SEQ ID NO: 127119 - DNA, 17 bp, synthetic construct
  source 1..17: mol_type = other DNA
caggggtggccacatcc

SEQ ID NO: 127120 - DNA, 17 bp, synthetic construct
  source 1..17: mol_type = other DNA
aggggtggccacatcca

SEQ ID NO: 127121 - DNA, 17 bp, synthetic construct
  source 1..17: mol_type = other DNA
ggggtggccacatccac

SEQ ID NO: 127122 - DNA, 17 bp, synthetic construct
  source 1..17: mol_type = other DNA
gggtggccacatccacc

SEQ ID NO: 127123 - DNA, 17 bp, synthetic construct
  source 1..17: mol_type = other DNA
ggtggccacatccaccc

SEQ ID NO: 127124 - DNA, 17 bp, synthetic construct
  source 1..17: mol_type = other DNA
gtggccacatccaccct

SEQ ID NO: 127125 - DNA, 17 bp, synthetic construct
  source 1..17: mol_type = other DNA
tggccacatccaccctt

SEQ ID NO: 127126 - DNA, 17 bp, synthetic construct
  source 1..17: mol_type = other DNA
ggccacatccacccttc

SEQ ID NO: 127127 - DNA, 17 bp, synthetic construct
  source 1..17: mol_type = other DNA
gccacatccacccttcc

SEQ ID NO: 127128 - DNA, 17 bp, synthetic construct
  source 1..17: mol_type = other DNA
ccacatccacccttcca

SEQ ID NO: 127129 - DNA, 17 bp, synthetic construct
  source 1..17: mol_type = other DNA
cacatccacccttccaa

SEQ ID NO: 127130 - DNA, 17 bp, synthetic construct
  source 1..17: mol_type = other DNA
acatccacccttccaac

SEQ ID NO: 127131 - DNA, 17 bp, synthetic construct
  source 1..17: mol_type = other DNA
catccacccttccaaca

SEQ ID NO: 127132 - DNA, 17 bp, synthetic construct
  source 1..17: mol_type = other DNA
atccacccttccaacac

SEQ ID NO: 127133 - DNA, 17 bp, synthetic construct
  source 1..17: mol_type = other DNA
tccacccttccaacacg

SEQ ID NO: 127134 - DNA, 17 bp, synthetic construct
  source 1..17: mol_type = other DNA
ccacccttccaacacgc

SEQ ID NO: 127135 - DNA, 17 bp, synthetic construct
  source 1..17: mol_type = other DNA
cacccttccaacacgct

SEQ ID NO: 127136 - DNA, 17 bp, synthetic construct
  source 1..17: mol_type = other DNA
acccttccaacacgctc

SEQ ID NO: 127137 - DNA, 17 bp, synthetic construct
  source 1..17: mol_type = other DNA
cccttccaacacgctca

SEQ ID NO: 127138 - DNA, 17 bp, synthetic construct
  source 1..17: mol_type = other DNA
ccttccaacacgctcag

SEQ ID NO: 127139 - DNA, 17 bp, synthetic construct
  source 1..17: mol_type = other DNA
cttccaacacgctcagc

SEQ ID NO: 127140 - DNA, 17 bp, synthetic construct
  source 1..17: mol_type = other DNA
ttccaacacgctcagcc

SEQ ID NO: 127141 - DNA, 17 bp, synthetic construct
  source 1..17: mol_type = other DNA
tccaacacgctcagccc

SEQ ID NO: 127142 - DNA, 17 bp, synthetic construct
  source 1..17: mol_type = other DNA
ccaacacgctcagccct

SEQ ID NO: 127143 - DNA, 17 bp, synthetic construct
  source 1..17: mol_type = other DNA
caacacgctcagccctt

SEQ ID NO: 127144 - DNA, 17 bp, synthetic construct
  source 1..17: mol_type = other DNA
aacacgctcagcccttc

SEQ ID NO: 127145 - DNA, 17 bp, synthetic construct
  source 1..17: mol_type = other DNA
acacgctcagcccttcc

SEQ ID NO: 127146 - DNA, 17 bp, synthetic construct
  source 1..17: mol_type = other DNA
cacgctcagcccttcca

SEQ ID NO: 127147 - DNA, 17 bp, synthetic construct
  source 1..17: mol_type = other DNA
acgctcagcccttccag

SEQ ID NO: 127148 - DNA, 17 bp, synthetic construct
  source 1..17: mol_type = other DNA
cgctcagcccttccagg

SEQ ID NO: 127149 - DNA, 17 bp, synthetic construct
  source 1..17: mol_type = other DNA
gctcagcccttccaggg

SEQ ID NO: 127150 - DNA, 17 bp, synthetic construct
  source 1..17: mol_type = other DNA
ctcagcccttccaggga

SEQ ID NO: 127151 - DNA, 17 bp, synthetic construct
  source 1..17: mol_type = other DNA
tcagcccttccagggac

SEQ ID NO: 127152 - DNA, 17 bp, synthetic construct
  source 1..17: mol_type = other DNA
cagcccttccagggacg

SEQ ID NO: 127153 - DNA, 17 bp, synthetic construct
  source 1..17: mol_type = other DNA
agcccttccagggacga

SEQ ID NO: 127154 - DNA, 17 bp, synthetic construct
  source 1..17: mol_type = other DNA
gcccttccagggacgac

SEQ ID NO: 127155 - DNA, 17 bp, synthetic construct
  source 1..17: mol_type = other DNA
cccttccagggacgacg

SEQ ID NO: 127156 - DNA, 17 bp, synthetic construct
  source 1..17: mol_type = other DNA
ccttccagggacgacgg

SEQ ID NO: 127157 - DNA, 17 bp, synthetic construct
  source 1..17: mol_type = other DNA
cttccagggacgacggg

SEQ ID NO: 127158 - DNA, 17 bp, synthetic construct
  source 1..17: mol_type = other DNA
ttccagggacgacgggg

SEQ ID NO: 127159 - DNA, 17 bp, synthetic construct
  source 1..17: mol_type = other DNA
tccagggacgacgggga

SEQ ID NO: 127160 - DNA, 17 bp, synthetic construct
  source 1..17: mol_type = other DNA
ccagggacgacggggag

SEQ ID NO: 127161 - DNA, 17 bp, synthetic construct
  source 1..17: mol_type = other DNA
cagggacgacggggagc

SEQ ID NO: 127162 - DNA, 17 bp, synthetic construct
  source 1..17: mol_type = other DNA
agggacgacggggagct

SEQ ID NO: 127163 - DNA, 17 bp, synthetic construct
  source 1..17: mol_type = other DNA
gggacgacggggagctt

SEQ ID NO: 127164 - DNA, 17 bp, synthetic construct
  source 1..17: mol_type = other DNA
ggacgacggggagcttg

SEQ ID NO: 127165 - DNA, 17 bp, synthetic construct
  source 1..17: mol_type = other DNA
gacgacggggagcttgg

SEQ ID NO: 127166 - DNA, 17 bp, synthetic construct
  source 1..17: mol_type = other DNA
acgacggggagcttggg

SEQ ID NO: 127167 - DNA, 17 bp, synthetic construct
  source 1..17: mol_type = other DNA
cgacggggagcttgggc

SEQ ID NO: 127168 - DNA, 17 bp, synthetic construct
  source 1..17: mol_type = other DNA
gacggggagcttgggca

SEQ ID NO: 127169 - DNA, 17 bp, synthetic construct
  source 1..17: mol_type = other DNA
acggggagcttgggcac

SEQ ID NO: 127170 - DNA, 17 bp, synthetic construct
  source 1..17: mol_type = other DNA
cggggagcttgggcaca

SEQ ID NO: 127171 - DNA, 17 bp, synthetic construct
  source 1..17: mol_type = other DNA
ggggagcttgggcacat

SEQ ID NO: 127172 - DNA, 17 bp, synthetic construct
  source 1..17: mol_type = other DNA
gggagcttgggcacatg

SEQ ID NO: 127173 - DNA, 17 bp, synthetic construct
  source 1..17: mol_type = other DNA
ggagcttgggcacatgg

SEQ ID NO: 127174 - DNA, 17 bp, synthetic construct
  source 1..17: mol_type = other DNA
gagcttgggcacatggc

SEQ ID NO: 127175 - DNA, 17 bp, synthetic construct
  source 1..17: mol_type = other DNA
agcttgggcacatggcg

SEQ ID NO: 127176 - DNA, 17 bp, synthetic construct
  source 1..17: mol_type = other DNA
gcttgggcacatggcgc

SEQ ID NO: 127177 - DNA, 17 bp, synthetic construct
  source 1..17: mol_type = other DNA
cttgggcacatggcgcc

SEQ ID NO: 127178 - DNA, 17 bp, synthetic construct
  source 1..17: mol_type = other DNA
ttgggcacatggcgccc

SEQ ID NO: 127179 - DNA, 17 bp, synthetic construct
  source 1..17: mol_type = other DNA
tgggcacatggcgcccc

SEQ ID NO: 127180 - DNA, 17 bp, synthetic construct
  source 1..17: mol_type = other DNA
gggcacatggcgcccct

SEQ ID NO: 127181 - DNA, 17 bp, synthetic construct
  source 1..17: mol_type = other DNA
ggcacatggcgcccctc

SEQ ID NO: 127182 - DNA, 17 bp, synthetic construct
  source 1..17: mol_type = other DNA
gcacatggcgcccctca

SEQ ID NO: 127183 - DNA, 17 bp, synthetic construct
  source 1..17: mol_type = other DNA
cacatggcgcccctcac

SEQ ID NO: 127184 - DNA, 17 bp, synthetic construct
  source 1..17: mol_type = other DNA
acatggcgcccctcaca

SEQ ID NO: 127185 - DNA, 17 bp, synthetic construct
  source 1..17: mol_type = other DNA
catggcgcccctcacag

SEQ ID NO: 127186 - DNA, 17 bp, synthetic construct
  source 1..17: mol_type = other DNA
atggcgcccctcacagc

SEQ ID NO: 127187 - DNA, 17 bp, synthetic construct
  source 1..17: mol_type = other DNA
tggcgcccctcacagcc

SEQ ID NO: 127188 - DNA, 17 bp, synthetic construct
  source 1..17: mol_type = other DNA
ggcgcccctcacagcca

SEQ ID NO: 127189 - DNA, 17 bp, synthetic construct
  source 1..17: mol_type = other DNA
gcgcccctcacagccac

SEQ ID NO: 127190 - DNA, 17 bp, synthetic construct
  source 1..17: mol_type = other DNA
cgcccctcacagccacc

SEQ ID NO: 127191 - DNA, 17 bp, synthetic construct
  source 1..17: mol_type = other DNA
gcccctcacagccaccc

SEQ ID NO: 127192 - DNA, 17 bp, synthetic construct
  source 1..17: mol_type = other DNA
cccctcacagccaccca

SEQ ID NO: 127193 - DNA, 17 bp, synthetic construct
  source 1..17: mol_type = other DNA
ccctcacagccacccac

SEQ ID NO: 127194 - DNA, 17 bp, synthetic construct
  source 1..17: mol_type = other DNA
cctcacagccacccacg

SEQ ID NO: 127195 - DNA, 17 bp, synthetic construct
  source 1..17: mol_type = other DNA
ctcacagccacccacgc

SEQ ID NO: 127196 - DNA, 17 bp, synthetic construct
  source 1..17: mol_type = other DNA
tcacagccacccacgct

SEQ ID NO: 127197 - DNA, 17 bp, synthetic construct
  source 1..17: mol_type = other DNA
cacagccacccacgctg

SEQ ID NO: 127198 - DNA, 17 bp, synthetic construct
  source 1..17: mol_type = other DNA
acagccacccacgctgg

SEQ ID NO: 127199 - DNA, 17 bp, synthetic construct
  source 1..17: mol_type = other DNA
cagccacccacgctggc

SEQ ID NO: 127200 - DNA, 17 bp, synthetic construct
  source 1..17: mol_type = other DNA
agccacccacgctggcc

SEQ ID NO: 127201 - DNA, 17 bp, synthetic construct
  source 1..17: mol_type = other DNA
gccacccacgctggccc

SEQ ID NO: 127202 - DNA, 17 bp, synthetic construct
  source 1..17: mol_type = other DNA
ccacccacgctggcccc

SEQ ID NO: 127203 - DNA, 17 bp, synthetic construct
  source 1..17: mol_type = other DNA
cacccacgctggcccca

SEQ ID NO: 127204 - DNA, 17 bp, synthetic construct
  source 1..17: mol_type = other DNA
acccacgctggccccaa

SEQ ID NO: 127205 - DNA, 17 bp, synthetic construct
  source 1..17: mol_type = other DNA
cccacgctggccccaac

SEQ ID NO: 127206 - DNA, 17 bp, synthetic construct
  source 1..17: mol_type = other DNA
ccacgctggccccaaca

SEQ ID NO: 127207 - DNA, 17 bp, synthetic construct
  source 1..17: mol_type = other DNA
cacgctggccccaacaa

SEQ ID NO: 127208 - DNA, 17 bp, synthetic construct
  source 1..17: mol_type = other DNA
acgctggccccaacaac

SEQ ID NO: 127209 - DNA, 17 bp, synthetic construct
  source 1..17: mol_type = other DNA
cgctggccccaacaaca

SEQ ID NO: 127210 - DNA, 17 bp, synthetic construct
  source 1..17: mol_type = other DNA
gctggccccaacaacaa

SEQ ID NO: 127211 - DNA, 17 bp, synthetic construct
  source 1..17: mol_type = other DNA
ctggccccaacaacaat

SEQ ID NO: 127212 - DNA, 17 bp, synthetic construct
  source 1..17: mol_type = other DNA
tggccccaacaacaatg

SEQ ID NO: 127213 - DNA, 17 bp, synthetic construct
  source 1..17: mol_type = other DNA
ggccccaacaacaatgg

SEQ ID NO: 127214 - DNA, 17 bp, synthetic construct
  source 1..17: mol_type = other DNA
gccccaacaacaatggc

SEQ ID NO: 127215 - DNA, 17 bp, synthetic construct
  source 1..17: mol_type = other DNA
ccccaacaacaatggca

SEQ ID NO: 127216 - DNA, 17 bp, synthetic construct
  source 1..17: mol_type = other DNA
cccaacaacaatggcaa

SEQ ID NO: 127217 - DNA, 17 bp, synthetic construct
  source 1..17: mol_type = other DNA
ccaacaacaatggcaac

SEQ ID NO: 127218 - DNA, 17 bp, synthetic construct
  source 1..17: mol_type = other DNA
caacaacaatggcaacc

SEQ ID NO: 127219 - DNA, 17 bp, synthetic construct
  source 1..17: mol_type = other DNA
aacaacaatggcaacct

SEQ ID NO: 127220 - DNA, 17 bp, synthetic construct
  source 1..17: mol_type = other DNA
acaacaatggcaacctc

SEQ ID NO: 127221 - DNA, 17 bp, synthetic construct
  source 1..17: mol_type = other DNA
caacaatggcaacctcc

SEQ ID NO: 127222 - DNA, 17 bp, synthetic construct
  source 1..17: mol_type = other DNA
aacaatggcaacctcca

SEQ ID NO: 127223 - DNA, 17 bp, synthetic construct
  source 1..17: mol_type = other DNA
acaatggcaacctccag

SEQ ID NO: 127224 - DNA, 17 bp, synthetic construct
  source 1..17: mol_type = other DNA
caatggcaacctccaga

SEQ ID NO: 127225 - DNA, 17 bp, synthetic construct
  source 1..17: mol_type = other DNA
aatggcaacctccagag

SEQ ID NO: 127226 - DNA, 17 bp, synthetic construct
  source 1..17: mol_type = other DNA
atggcaacctccagagc

SEQ ID NO: 127227 - DNA, 17 bp, synthetic construct
  source 1..17: mol_type = other DNA
tggcaacctccagagct

SEQ ID NO: 127228 - DNA, 17 bp, synthetic construct
  source 1..17: mol_type = other DNA
ggcaacctccagagctc

SEQ ID NO: 127229 - DNA, 17 bp, synthetic construct
  source 1..17: mol_type = other DNA
gcaacctccagagctcg

SEQ ID NO: 127230 - DNA, 17 bp, synthetic construct
  source 1..17: mol_type = other DNA
caacctccagagctcgc

SEQ ID NO: 127231 - DNA, 17 bp, synthetic construct
  source 1..17: mol_type = other DNA
aacctccagagctcgcc

SEQ ID NO: 127232 - DNA, 17 bp, synthetic construct
  source 1..17: mol_type = other DNA
acctccagagctcgccc

SEQ ID NO: 127233 - DNA, 17 bp, synthetic construct
  source 1..17: mol_type = other DNA
cctccagagctcgcccg

SEQ ID NO: 127234 - DNA, 17 bp, synthetic construct
  source 1..17: mol_type = other DNA
ctccagagctcgcccga

SEQ ID NO: 127235 - DNA, 17 bp, synthetic construct
  source 1..17: mol_type = other DNA
tccagagctcgcccgac

SEQ ID NO: 127236 - DNA, 17 bp, synthetic construct
  source 1..17: mol_type = other DNA
ccagagctcgcccgaca

SEQ ID NO: 127237 - DNA, 17 bp, synthetic construct
  source 1..17: mol_type = other DNA
cagagctcgcccgacag

SEQ ID NO: 127238 - DNA, 17 bp, synthetic construct
  source 1..17: mol_type = other DNA
agagctcgcccgacagg

SEQ ID NO: 127239 - DNA, 17 bp, synthetic construct
  source 1..17: mol_type = other DNA
gagctcgcccgacaggc

SEQ ID NO: 127240 - DNA, 17 bp, synthetic construct
  source 1..17: mol_type = other DNA
agctcgcccgacaggca

SEQ ID NO: 127241 - DNA, 17 bp, synthetic construct
  source 1..17: mol_type = other DNA
gctcgcccgacaggcac

SEQ ID NO: 127242 - DNA, 17 bp, synthetic construct
  source 1..17: mol_type = other DNA
ctcgcccgacaggcaca

SEQ ID NO: 127243 - DNA, 17 bp, synthetic construct
  source 1..17: mol_type = other DNA
tcgcccgacaggcacag

SEQ ID NO: 127244 - DNA, 17 bp, synthetic construct
  source 1..17: mol_type = other DNA
cgcccgacaggcacagc

SEQ ID NO: 127245 - DNA, 17 bp, synthetic construct
  source 1..17: mol_type = other DNA
gcccgacaggcacagcc

SEQ ID NO: 127246 - DNA, 17 bp, synthetic construct
  source 1..17: mol_type = other DNA
cccgacaggcacagcca

SEQ ID NO: 127247 - DNA, 17 bp, synthetic construct
  source 1..17: mol_type = other DNA
ccgacaggcacagccag

SEQ ID NO: 127248 - DNA, 17 bp, synthetic construct
  source 1..17: mol_type = other DNA
cgacaggcacagccagc

SEQ ID NO: 127249 - DNA, 17 bp, synthetic construct
  source 1..17: mol_type = other DNA
gacaggcacagccagca

SEQ ID NO: 127250 - DNA, 17 bp, synthetic construct
  source 1..17: mol_type = other DNA
acaggcacagccagcac

SEQ ID NO: 127251 - DNA, 17 bp, synthetic construct
  source 1..17: mol_type = other DNA
caggcacagccagcacc

SEQ ID NO: 127252 - DNA, 17 bp, synthetic construct
  source 1..17: mol_type = other DNA
aggcacagccagcaccg

SEQ ID NO: 127253 - DNA, 17 bp, synthetic construct
  source 1..17: mol_type = other DNA
ggcacagccagcaccgc

SEQ ID NO: 127254 - DNA, 17 bp, synthetic construct
  source 1..17: mol_type = other DNA
gcacagccagcaccgct

SEQ ID NO: 127255 - DNA, 17 bp, synthetic construct
  source 1..17: mol_type = other DNA
cacagccagcaccgctt

SEQ ID NO: 127256 - DNA, 17 bp, synthetic construct
  source 1..17: mol_type = other DNA
acagccagcaccgcttc

SEQ ID NO: 127257 - DNA, 17 bp, synthetic construct
  source 1..17: mol_type = other DNA
cagccagcaccgcttcc

SEQ ID NO: 127258 - DNA, 17 bp, synthetic construct
  source 1..17: mol_type = other DNA
agccagcaccgcttcca

SEQ ID NO: 127259 - DNA, 17 bp, synthetic construct
  source 1..17: mol_type = other DNA
gccagcaccgcttccaa

SEQ ID NO: 127260 - DNA, 17 bp, synthetic construct
  source 1..17: mol_type = other DNA
ccagcaccgcttccaaa

SEQ ID NO: 127261 - DNA, 17 bp, synthetic construct
  source 1..17: mol_type = other DNA
cagcaccgcttccaaag

SEQ ID NO: 127262 - DNA, 17 bp, synthetic construct
  source 1..17: mol_type = other DNA
agcaccgcttccaaaga

SEQ ID NO: 127263 - DNA, 17 bp, synthetic construct
  source 1..17: mol_type = other DNA
gcaccgcttccaaagag

SEQ ID NO: 127264 - DNA, 17 bp, synthetic construct
  source 1..17: mol_type = other DNA
caccgcttccaaagagc

SEQ ID NO: 127265 - DNA, 17 bp, synthetic construct
  source 1..17: mol_type = other DNA
accgcttccaaagagcc

SEQ ID NO: 127266 - DNA, 17 bp, synthetic construct
  source 1..17: mol_type = other DNA
ccgcttccaaagagccg

SEQ ID NO: 127267 - DNA, 17 bp, synthetic construct
  source 1..17: mol_type = other DNA
cgcttccaaagagccgc

SEQ ID NO: 127268 - DNA, 17 bp, synthetic construct
  source 1..17: mol_type = other DNA
gcttccaaagagccgct

SEQ ID NO: 127269 - DNA, 17 bp, synthetic construct
  source 1..17: mol_type = other DNA
cttccaaagagccgctg

SEQ ID NO: 127270 - DNA, 17 bp, synthetic construct
  source 1..17: mol_type = other DNA
ttccaaagagccgctga

SEQ ID NO: 127271 - DNA, 17 bp, synthetic construct
  source 1..17: mol_type = other DNA
tccaaagagccgctgac

SEQ ID NO: 127272 - DNA, 17 bp, synthetic construct
  source 1..17: mol_type = other DNA
ccaaagagccgctgacc

SEQ ID NO: 127273 - DNA, 17 bp, synthetic construct
  source 1..17: mol_type = other DNA
caaagagccgctgacca

SEQ ID NO: 127274 - DNA, 17 bp, synthetic construct
  source 1..17: mol_type = other DNA
aaagagccgctgaccac

SEQ ID NO: 127275 - DNA, 17 bp, synthetic construct
  source 1..17: mol_type = other DNA
aagagccgctgaccacg

SEQ ID NO: 127276 - DNA, 17 bp, synthetic construct
  source 1..17: mol_type = other DNA
agagccgctgaccacga

SEQ ID NO: 127277 - DNA, 17 bp, synthetic construct
  source 1..17: mol_type = other DNA
gagccgctgaccacgag

SEQ ID NO: 127278 - DNA, 17 bp, synthetic construct
  source 1..17: mol_type = other DNA
agccgctgaccacgagc

SEQ ID NO: 127279 - DNA, 17 bp, synthetic construct
  source 1..17: mol_type = other DNA
gccgctgaccacgagcc

SEQ ID NO: 127280 - DNA, 17 bp, synthetic construct
  source 1..17: mol_type = other DNA
ccgctgaccacgagcct

SEQ ID NO: 127281 - DNA, 17 bp, synthetic construct
  source 1..17: mol_type = other DNA
cgctgaccacgagcctg

SEQ ID NO: 127282 - DNA, 17 bp, synthetic construct
  source 1..17: mol_type = other DNA
gctgaccacgagcctgg

SEQ ID NO: 127283 - DNA, 17 bp, synthetic construct
  source 1..17: mol_type = other DNA
ctgaccacgagcctggc

SEQ ID NO: 127284 - DNA, 17 bp, synthetic construct
  source 1..17: mol_type = other DNA
tgaccacgagcctggcg

SEQ ID NO: 127285 - DNA, 17 bp, synthetic construct
  source 1..17: mol_type = other DNA
gaccacgagcctggcgc

SEQ ID NO: 127286 - DNA, 17 bp, synthetic construct
  source 1..17: mol_type = other DNA
accacgagcctggcgcc

SEQ ID NO: 127287 - DNA, 17 bp, synthetic construct
  source 1..17: mol_type = other DNA
ccacgagcctggcgcca

SEQ ID NO: 127288 - DNA, 17 bp, synthetic construct
  source 1..17: mol_type = other DNA
cacgagcctggcgccaa

SEQ ID NO: 127289 - DNA, 17 bp, synthetic construct
  source 1..17: mol_type = other DNA
acgagcctggcgccaac

SEQ ID NO: 127290 - DNA, 17 bp, synthetic construct
  source 1..17: mol_type = other DNA
cgagcctggcgccaaca

SEQ ID NO: 127291 - DNA, 17 bp, synthetic construct
  source 1..17: mol_type = other DNA
gagcctggcgccaacac

SEQ ID NO: 127292 - DNA, 17 bp, synthetic construct
  source 1..17: mol_type = other DNA
agcctggcgccaacact

SEQ ID NO: 127293 - DNA, 17 bp, synthetic construct
  source 1..17: mol_type = other DNA
gcctggcgccaacactc

SEQ ID NO: 127294 - DNA, 17 bp, synthetic construct
  source 1..17: mol_type = other DNA
cctggcgccaacactca

SEQ ID NO: 127295 - DNA, 17 bp, synthetic construct
  source 1..17: mol_type = other DNA
ctggcgccaacactcac

SEQ ID NO: 127296 - DNA, 17 bp, synthetic construct
  source 1..17: mol_type = other DNA
tggcgccaacactcacg

SEQ ID NO: 127297 - DNA, 17 bp, synthetic construct
  source 1..17: mol_type = other DNA
ggcgccaacactcacga

SEQ ID NO: 127298 - DNA, 17 bp, synthetic construct
  source 1..17: mol_type = other DNA
gcgccaacactcacgag

SEQ ID NO: 127299 - DNA, 17 bp, synthetic construct
  source 1..17: mol_type = other DNA
cgccaacactcacgagc

SEQ ID NO: 127300 - DNA, 17 bp, synthetic construct
  source 1..17: mol_type = other DNA
gccaacactcacgagcg

SEQ ID NO: 127301 - DNA, 17 bp, synthetic construct
  source 1..17: mol_type = other DNA
ccaacactcacgagcga

SEQ ID NO: 127302 - DNA, 17 bp, synthetic construct
  source 1..17: mol_type = other DNA
caacactcacgagcgag

SEQ ID NO: 127303 - DNA, 17 bp, synthetic construct
  source 1..17: mol_type = other DNA
aacactcacgagcgagc

SEQ ID NO: 127304 - DNA, 17 bp, synthetic construct
  source 1..17: mol_type = other DNA
acactcacgagcgagct

SEQ ID NO: 127305 - DNA, 17 bp, synthetic construct
  source 1..17: mol_type = other DNA
cactcacgagcgagctg

SEQ ID NO: 127306 - DNA, 17 bp, synthetic construct
  source 1..17: mol_type = other DNA
actcacgagcgagctgt

SEQ ID NO: 127307 - DNA, 17 bp, synthetic construct
  source 1..17: mol_type = other DNA
ctcacgagcgagctgtc

SEQ ID NO: 127308 - DNA, 17 bp, synthetic construct
  source 1..17: mol_type = other DNA
tcacgagcgagctgtcc

SEQ ID NO: 127309 - DNA, 17 bp, synthetic construct
  source 1..17: mol_type = other DNA
cacgagcgagctgtcca

SEQ ID NO: 127310 - DNA, 17 bp, synthetic construct
  source 1..17: mol_type = other DNA
acgagcgagctgtccac

SEQ ID NO: 127311 - DNA, 17 bp, synthetic construct
  source 1..17: mol_type = other DNA
cgagcgagctgtccacc

SEQ ID NO: 127312 - DNA, 17 bp, synthetic construct
  source 1..17: mol_type = other DNA
gagcgagctgtccacct

SEQ ID NO: 127313 - DNA, 17 bp, synthetic construct
  source 1..17: mol_type = other DNA
agcgagctgtccacctc

SEQ ID NO: 127314 - DNA, 17 bp, synthetic construct
  source 1..17: mol_type = other DNA
gcgagctgtccacctct

SEQ ID NO: 127315 - DNA, 17 bp, synthetic construct
  source 1..17: mol_type = other DNA
cgagctgtccacctctc

SEQ ID NO: 127316 - DNA, 17 bp, synthetic construct
  source 1..17: mol_type = other DNA
gagctgtccacctctca

SEQ ID NO: 127317 - DNA, 17 bp, synthetic construct
  source 1..17: mol_type = other DNA
agctgtccacctctcag

SEQ ID NO: 127318 - DNA, 17 bp, synthetic construct
  source 1..17: mol_type = other DNA
gctgtccacctctcagg

SEQ ID NO: 127319 - DNA, 17 bp, synthetic construct
  source 1..17: mol_type = other DNA
ctgtccacctctcaggc

SEQ ID NO: 127320 - DNA, 17 bp, synthetic construct
  source 1..17: mol_type = other DNA
tgtccacctctcaggcc

SEQ ID NO: 127321 - DNA, 17 bp, synthetic construct
  source 1..17: mol_type = other DNA
gtccacctctcaggccg

SEQ ID NO: 127322 - DNA, 17 bp, synthetic construct
  source 1..17: mol_type = other DNA
tccacctctcaggccga

SEQ ID NO: 127323 - DNA, 17 bp, synthetic construct
  source 1..17: mol_type = other DNA
ccacctctcaggccgag

SEQ ID NO: 127324 - DNA, 17 bp, synthetic construct
  source 1..17: mol_type = other DNA
cacctctcaggccgaga

SEQ ID NO: 127325 - DNA, 17 bp, synthetic construct
  source 1..17: mol_type = other DNA
acctctcaggccgagac

SEQ ID NO: 127326 - DNA, 17 bp, synthetic construct
  source 1..17: mol_type = other DNA
cctctcaggccgagacc

SEQ ID NO: 127327 - DNA, 17 bp, synthetic construct
  source 1..17: mol_type = other DNA
ctctcaggccgagacca

SEQ ID NO: 127328 - DNA, 17 bp, synthetic construct
  source 1..17: mol_type = other DNA
tctcaggccgagaccag

SEQ ID NO: 127329 - DNA, 17 bp, synthetic construct
  source 1..17: mol_type = other DNA
ctcaggccgagaccagc

SEQ ID NO: 127330 - DNA, 17 bp, synthetic construct
  source 1..17: mol_type = other DNA
tcaggccgagaccagca

SEQ ID NO: 127331 - DNA, 17 bp, synthetic construct
  source 1..17: mol_type = other DNA
caggccgagaccagcac

SEQ ID NO: 127332 - DNA, 17 bp, synthetic construct
  source 1..17: mol_type = other DNA
aggccgagaccagcacg

SEQ ID NO: 127333 - DNA, 17 bp, synthetic construct
  source 1..17: mol_type = other DNA
ggccgagaccagcacgc

SEQ ID NO: 127334 - DNA, 17 bp, synthetic construct
  source 1..17: mol_type = other DNA
gccgagaccagcacgcc

SEQ ID NO: 127335 - DNA, 17 bp, synthetic construct
  source 1..17: mol_type = other DNA
ccgagaccagcacgccc

SEQ ID NO: 127336 - DNA, 17 bp, synthetic construct
  source 1..17: mol_type = other DNA
cgagaccagcacgccca

SEQ ID NO: 127337 - DNA, 17 bp, synthetic construct
  source 1..17: mol_type = other DNA
gagaccagcacgcccag

SEQ ID NO: 127338 - DNA, 17 bp, synthetic construct
  source 1..17: mol_type = other DNA
agaccagcacgcccagg

SEQ ID NO: 127339 - DNA, 17 bp, synthetic construct
  source 1..17: mol_type = other DNA
gaccagcacgcccagga

SEQ ID NO: 127340 - DNA, 17 bp, synthetic construct
  source 1..17: mol_type = other DNA
accagcacgcccaggac

SEQ ID NO: 127341 - DNA, 17 bp, synthetic construct
  source 1..17: mol_type = other DNA
ccagcacgcccaggaca

SEQ ID NO: 127342 - DNA, 17 bp, synthetic construct
  source 1..17: mol_type = other DNA
cagcacgcccaggacag

SEQ ID NO: 127343 - DNA, 17 bp, synthetic construct
  source 1..17: mol_type = other DNA
agcacgcccaggacaga

SEQ ID NO: 127344 - DNA, 17 bp, synthetic construct
  source 1..17: mol_type = other DNA
gcacgcccaggacagag

SEQ ID NO: 127345 - DNA, 17 bp, synthetic construct
  source 1..17: mol_type = other DNA
cacgcccaggacagaga

SEQ ID NO: 127346 - DNA, 17 bp, synthetic construct
  source 1..17: mol_type = other DNA
acgcccaggacagagac

SEQ ID NO: 127347 - DNA, 17 bp, synthetic construct
  source 1..17: mol_type = other DNA
cgcccaggacagagacg

SEQ ID NO: 127348 - DNA, 17 bp, synthetic construct
  source 1..17: mol_type = other DNA
gcccaggacagagacga

SEQ ID NO: 127349 - DNA, 17 bp, synthetic construct
  source 1..17: mol_type = other DNA
cccaggacagagacgac

SEQ ID NO: 127350 - DNA, 17 bp, synthetic construct
  source 1..17: mol_type = other DNA
ccaggacagagacgaca

SEQ ID NO: 127351 - DNA, 17 bp, synthetic construct
  source 1..17: mol_type = other DNA
caggacagagacgacaa

SEQ ID NO: 127352 - DNA, 17 bp, synthetic construct
  source 1..17: mol_type = other DNA
aggacagagacgacaat

SEQ ID NO: 127353 - DNA, 17 bp, synthetic construct
  source 1..17: mol_type = other DNA
ggacagagacgacaatg

SEQ ID NO: 127354 - DNA, 17 bp, synthetic construct
  source 1..17: mol_type = other DNA
gacagagacgacaatga

SEQ ID NO: 127355 - DNA, 17 bp, synthetic construct
  source 1..17: mol_type = other DNA
acagagacgacaatgag

SEQ ID NO: 127356 - DNA, 17 bp, synthetic construct
  source 1..17: mol_type = other DNA
cagagacgacaatgagc

SEQ ID NO: 127357 - DNA, 17 bp, synthetic construct
  source 1..17: mol_type = other DNA
agagacgacaatgagcc

SEQ ID NO: 127358 - DNA, 17 bp, synthetic construct
  source 1..17: mol_type = other DNA
gagacgacaatgagccc

SEQ ID NO: 127359 - DNA, 17 bp, synthetic construct
  source 1..17: mol_type = other DNA
agacgacaatgagcccc

SEQ ID NO: 127360 - DNA, 17 bp, synthetic construct
  source 1..17: mol_type = other DNA
gacgacaatgagcccct

SEQ ID NO: 127361 - DNA, 17 bp, synthetic construct
  source 1..17: mol_type = other DNA
acgacaatgagcccctt

SEQ ID NO: 127362 - DNA, 17 bp, synthetic construct
  source 1..17: mol_type = other DNA
cgacaatgagccccttg

SEQ ID NO: 127363 - DNA, 17 bp, synthetic construct
  source 1..17: mol_type = other DNA
gacaatgagccccttga

SEQ ID NO: 127364 - DNA, 17 bp, synthetic construct
  source 1..17: mol_type = other DNA
acaatgagccccttgac

SEQ ID NO: 127365 - DNA, 17 bp, synthetic construct
  source 1..17: mol_type = other DNA
caatgagccccttgact

SEQ ID NO: 127366 - DNA, 17 bp, synthetic construct
  source 1..17: mol_type = other DNA
aatgagccccttgacta

SEQ ID NO: 127367 - DNA, 17 bp, synthetic construct
  source 1..17: mol_type = other DNA
atgagccccttgactaa

SEQ ID NO: 127368 - DNA, 17 bp, synthetic construct
  source 1..17: mol_type = other DNA
tgagccccttgactaac

SEQ ID NO: 127369 - DNA, 17 bp, synthetic construct
  source 1..17: mol_type = other DNA
gagccccttgactaaca

SEQ ID NO: 127370 - DNA, 17 bp, synthetic construct
  source 1..17: mol_type = other DNA
agccccttgactaacac

SEQ ID NO: 127371 - DNA, 17 bp, synthetic construct
  source 1..17: mol_type = other DNA
gccccttgactaacacc

SEQ ID NO: 127372 - DNA, 17 bp, synthetic construct
  source 1..17: mol_type = other DNA
ccccttgactaacacca

SEQ ID NO: 127373 - DNA, 17 bp, synthetic construct
  source 1..17: mol_type = other DNA
cccttgactaacaccac

SEQ ID NO: 127374 - DNA, 17 bp, synthetic construct
  source 1..17: mol_type = other DNA
ccttgactaacaccacc

SEQ ID NO: 127375 - DNA, 17 bp, synthetic construct
  source 1..17: mol_type = other DNA
cttgactaacaccacca

SEQ ID NO: 127376 - DNA, 17 bp, synthetic construct
  source 1..17: mol_type = other DNA
ttgactaacaccaccac

SEQ ID NO: 127377 - DNA, 17 bp, synthetic construct
  source 1..17: mol_type = other DNA
tgactaacaccaccacc

SEQ ID NO: 127378 - DNA, 17 bp, synthetic construct
  source 1..17: mol_type = other DNA
gactaacaccaccacca

SEQ ID NO: 127379 - DNA, 17 bp, synthetic construct
  source 1..17: mol_type = other DNA
actaacaccaccaccag

SEQ ID NO: 127380 - DNA, 17 bp, synthetic construct
  source 1..17: mol_type = other DNA
ctaacaccaccaccagc

SEQ ID NO: 127381 - DNA, 17 bp, synthetic construct
  source 1..17: mol_type = other DNA
taacaccaccaccagcc

SEQ ID NO: 127382 - DNA, 17 bp, synthetic construct
  source 1..17: mol_type = other DNA
aacaccaccaccagcca

SEQ ID NO: 127383 - DNA, 17 bp, synthetic construct
  source 1..17: mol_type = other DNA
acaccaccaccagccag

SEQ ID NO: 127384 - DNA, 17 bp, synthetic construct
  source 1..17: mol_type = other DNA
caccaccaccagccagg

SEQ ID NO: 127385 - DNA, 17 bp, synthetic construct
  source 1..17: mol_type = other DNA
accaccaccagccaggg

SEQ ID NO: 127386 - DNA, 17 bp, synthetic construct
  source 1..17: mol_type = other DNA
ccaccaccagccagggc

SEQ ID NO: 127387 - DNA, 17 bp, synthetic construct
  source 1..17: mol_type = other DNA
caccaccagccagggca

SEQ ID NO: 127388 - DNA, 17 bp, synthetic construct
  source 1..17: mol_type = other DNA
accaccagccagggcac

SEQ ID NO: 127389 - DNA, 17 bp, synthetic construct
  source 1..17: mol_type = other DNA
ccaccagccagggcacg

SEQ ID NO: 127390 - DNA, 17 bp, synthetic construct
  source 1..17: mol_type = other DNA
caccagccagggcacga

SEQ ID NO: 127391 - DNA, 17 bp, synthetic construct
  source 1..17: mol_type = other DNA
accagccagggcacgac

SEQ ID NO: 127392 - DNA, 17 bp, synthetic construct
  source 1..17: mol_type = other DNA
ccagccagggcacgacc

SEQ ID NO: 127393 - DNA, 17 bp, synthetic construct
  source 1..17: mol_type = other DNA
cagccagggcacgaccc

SEQ ID NO: 127394 - DNA, 17 bp, synthetic construct
  source 1..17: mol_type = other DNA
agccagggcacgacccg

SEQ ID NO: 127395 - DNA, 17 bp, synthetic construct
  source 1..17: mol_type = other DNA
gccagggcacgacccgc

SEQ ID NO: 127396 - DNA, 17 bp, synthetic construct
  source 1..17: mol_type = other DNA
ccagggcacgacccgct

SEQ ID NO: 127397 - DNA, 17 bp, synthetic construct
  source 1..17: mol_type = other DNA
cagggcacgacccgctg

SEQ ID NO: 127398 - DNA, 17 bp, synthetic construct
  source 1..17: mol_type = other DNA
agggcacgacccgctgt

SEQ ID NO: 127399 - DNA, 17 bp, synthetic construct
  source 1..17: mol_type = other DNA
gggcacgacccgctgtc

SEQ ID NO: 127400 - DNA, 17 bp, synthetic construct
  source 1..17: mol_type = other DNA
ggcacgacccgctgtca

SEQ ID NO: 127401 - DNA, 17 bp, synthetic construct
  source 1..17: mol_type = other DNA
gcacgacccgctgtcaa

SEQ ID NO: 127402 - DNA, 17 bp, synthetic construct
  source 1..17: mol_type = other DNA
cacgacccgctgtcaac

SEQ ID NO: 127403 - DNA, 17 bp, synthetic construct
  source 1..17: mol_type = other DNA
acgacccgctgtcaacc

SEQ ID NO: 127404 - DNA, 17 bp, synthetic construct
  source 1..17: mol_type = other DNA
cgacccgctgtcaaccg

SEQ ID NO: 127405 - DNA, 17 bp, synthetic construct
  source 1..17: mol_type = other DNA
gacccgctgtcaaccga

SEQ ID NO: 127406 - DNA, 17 bp, synthetic construct
  source 1..17: mol_type = other DNA
acccgctgtcaaccgaa

SEQ ID NO: 127407 - DNA, 17 bp, synthetic construct
  source 1..17: mol_type = other DNA
cccgctgtcaaccgaag

SEQ ID NO: 127408 - DNA, 17 bp, synthetic construct
  source 1..17: mol_type = other DNA
ccgctgtcaaccgaagt

SEQ ID NO: 127409 - DNA, 17 bp, synthetic construct
  source 1..17: mol_type = other DNA
cgctgtcaaccgaagtg

SEQ ID NO: 127410 - DNA, 17 bp, synthetic construct
  source 1..17: mol_type = other DNA
gctgtcaaccgaagtgt

SEQ ID NO: 127411 - DNA, 17 bp, synthetic construct
  source 1..17: mol_type = other DNA
ctgtcaaccgaagtgtg

SEQ ID NO: 127412 - DNA, 17 bp, synthetic construct
  source 1..17: mol_type = other DNA
tgtcaaccgaagtgtga

SEQ ID NO: 127413 - DNA, 17 bp, synthetic construct
  source 1..17: mol_type = other DNA
gtcaaccgaagtgtgag

SEQ ID NO: 127414 - DNA, 17 bp, synthetic construct
  source 1..17: mol_type = other DNA
tcaaccgaagtgtgagt

SEQ ID NO: 127415 - DNA, 17 bp, synthetic construct
  source 1..17: mol_type = other DNA
caaccgaagtgtgagtg

SEQ ID NO: 127416 - DNA, 17 bp, synthetic construct
  source 1..17: mol_type = other DNA
aaccgaagtgtgagtgg

SEQ ID NO: 127417 - DNA, 17 bp, synthetic construct
  source 1..17: mol_type = other DNA
accgaagtgtgagtgga

SEQ ID NO: 127418 - DNA, 17 bp, synthetic construct
  source 1..17: mol_type = other DNA
ccgaagtgtgagtggac

SEQ ID NO: 127419 - DNA, 17 bp, synthetic construct
  source 1..17: mol_type = other DNA
cgaagtgtgagtggaca

SEQ ID NO: 127420 - DNA, 17 bp, synthetic construct
  source 1..17: mol_type = other DNA
gaagtgtgagtggacag

SEQ ID NO: 127421 - DNA, 17 bp, synthetic construct
  source 1..17: mol_type = other DNA
aagtgtgagtggacaga

SEQ ID NO: 127422 - DNA, 17 bp, synthetic construct
  source 1..17: mol_type = other DNA
agtgtgagtggacagag

SEQ ID NO: 127423 - DNA, 17 bp, synthetic construct
  source 1..17: mol_type = other DNA
gtgtgagtggacagagt

SEQ ID NO: 127424 - DNA, 17 bp, synthetic construct
  source 1..17: mol_type = other DNA
tgtgagtggacagagtg

SEQ ID NO: 127425 - DNA, 17 bp, synthetic construct
  source 1..17: mol_type = other DNA
gtgagtggacagagtgg

SEQ ID NO: 127426 - DNA, 17 bp, synthetic construct
  source 1..17: mol_type = other DNA
tgagtggacagagtggt

SEQ ID NO: 127427 - DNA, 17 bp, synthetic construct
  source 1..17: mol_type = other DNA
gagtggacagagtggtt

SEQ ID NO: 127428 - DNA, 17 bp, synthetic construct
  source 1..17: mol_type = other DNA
agtggacagagtggttt

SEQ ID NO: 127429 - DNA, 17 bp, synthetic construct
  source 1..17: mol_type = other DNA
gtggacagagtggtttg

SEQ ID NO: 127430 - DNA, 17 bp, synthetic construct
  source 1..17: mol_type = other DNA
tggacagagtggtttga

SEQ ID NO: 127431 - DNA, 17 bp, synthetic construct
  source 1..17: mol_type = other DNA
ggacagagtggtttgac

SEQ ID NO: 127432 - DNA, 17 bp, synthetic construct
  source 1..17: mol_type = other DNA
gacagagtggtttgacg

SEQ ID NO: 127433 - DNA, 17 bp, synthetic construct
  source 1..17: mol_type = other DNA
acagagtggtttgacgt

SEQ ID NO: 127434 - DNA, 17 bp, synthetic construct
  source 1..17: mol_type = other DNA
cagagtggtttgacgtg

SEQ ID NO: 127435 - DNA, 17 bp, synthetic construct
  source 1..17: mol_type = other DNA
agagtggtttgacgtgg

SEQ ID NO: 127436 - DNA, 17 bp, synthetic construct
  source 1..17: mol_type = other DNA
gagtggtttgacgtgga

SEQ ID NO: 127437 - DNA, 17 bp, synthetic construct
  source 1..17: mol_type = other DNA
agtggtttgacgtggac

SEQ ID NO: 127438 - DNA, 17 bp, synthetic construct
  source 1..17: mol_type = other DNA
gtggtttgacgtggact

SEQ ID NO: 127439 - DNA, 17 bp, synthetic construct
  source 1..17: mol_type = other DNA
tggtttgacgtggactt

SEQ ID NO: 127440 - DNA, 17 bp, synthetic construct
  source 1..17: mol_type = other DNA
ggtttgacgtggacttc

SEQ ID NO: 127441 - DNA, 17 bp, synthetic construct
  source 1..17: mol_type = other DNA
gtttgacgtggacttcc

SEQ ID NO: 127442 - DNA, 17 bp, synthetic construct
  source 1..17: mol_type = other DNA
tttgacgtggacttccc

SEQ ID NO: 127443 - DNA, 17 bp, synthetic construct
  source 1..17: mol_type = other DNA
ttgacgtggacttccca

SEQ ID NO: 127444 - DNA, 17 bp, synthetic construct
  source 1..17: mol_type = other DNA
tgacgtggacttcccaa

SEQ ID NO: 127445 - DNA, 17 bp, synthetic construct
  source 1..17: mol_type = other DNA
gacgtggacttcccaac

SEQ ID NO: 127446 - DNA, 17 bp, synthetic construct
  source 1..17: mol_type = other DNA
acgtggacttcccaacc

SEQ ID NO: 127447 - DNA, 17 bp, synthetic construct
  source 1..17: mol_type = other DNA
cgtggacttcccaacct

SEQ ID NO: 127448 - DNA, 17 bp, synthetic construct
  source 1..17: mol_type = other DNA
gtggacttcccaacctc

SEQ ID NO: 127449 - DNA, 17 bp, synthetic construct
  source 1..17: mol_type = other DNA
tggacttcccaacctca

SEQ ID NO: 127450 - DNA, 17 bp, synthetic construct
  source 1..17: mol_type = other DNA
ggacttcccaacctcag

SEQ ID NO: 127451 - DNA, 17 bp, synthetic construct
  source 1..17: mol_type = other DNA
gacttcccaacctcagg

SEQ ID NO: 127452 - DNA, 17 bp, synthetic construct
  source 1..17: mol_type = other DNA
acttcccaacctcaggg

SEQ ID NO: 127453 - DNA, 17 bp, synthetic construct
  source 1..17: mol_type = other DNA
cttcccaacctcagggg

SEQ ID NO: 127454 - DNA, 17 bp, synthetic construct
  source 1..17: mol_type = other DNA
ttcccaacctcaggggt

SEQ ID NO: 127455 - DNA, 17 bp, synthetic construct
  source 1..17: mol_type = other DNA
tcccaacctcaggggtt

SEQ ID NO: 127456 - DNA, 17 bp, synthetic construct
  source 1..17: mol_type = other DNA
cccaacctcaggggttg

SEQ ID NO: 127457 - DNA, 17 bp, synthetic construct
  source 1..17: mol_type = other DNA
ccaacctcaggggttgc

SEQ ID NO: 127458 - DNA, 17 bp, synthetic construct
  source 1..17: mol_type = other DNA
caacctcaggggttgca

SEQ ID NO: 127459 - DNA, 17 bp, synthetic construct
  source 1..17: mol_type = other DNA
aacctcaggggttgcag

SEQ ID NO: 127460 - DNA, 17 bp, synthetic construct
  source 1..17: mol_type = other DNA
acctcaggggttgcagg

SEQ ID NO: 127461 - DNA, 17 bp, synthetic construct
  source 1..17: mol_type = other DNA
cctcaggggttgcaggc

SEQ ID NO: 127462 - DNA, 17 bp, synthetic construct
  source 1..17: mol_type = other DNA
ctcaggggttgcaggcg

SEQ ID NO: 127463 - DNA, 17 bp, synthetic construct
  source 1..17: mol_type = other DNA
tcaggggttgcaggcgg

SEQ ID NO: 127464 - DNA, 17 bp, synthetic construct
  source 1..17: mol_type = other DNA
caggggttgcaggcggg

SEQ ID NO: 127465 - DNA, 17 bp, synthetic construct
  source 1..17: mol_type = other DNA
aggggttgcaggcgggg

SEQ ID NO: 127466 - DNA, 17 bp, synthetic construct
  source 1..17: mol_type = other DNA
ggggttgcaggcgggga

SEQ ID NO: 127467 - DNA, 17 bp, synthetic construct
  source 1..17: mol_type = other DNA
gggttgcaggcggggac

SEQ ID NO: 127468 - DNA, 17 bp, synthetic construct
  source 1..17: mol_type = other DNA
ggttgcaggcggggaca

SEQ ID NO: 127469 - DNA, 17 bp, synthetic construct
  source 1..17: mol_type = other DNA
gttgcaggcggggacat

SEQ ID NO: 127470 - DNA, 17 bp, synthetic construct
  source 1..17: mol_type = other DNA
ttgcaggcggggacatg

SEQ ID NO: 127471 - DNA, 17 bp, synthetic construct
  source 1..17: mol_type = other DNA
tgcaggcggggacatgg

SEQ ID NO: 127472 - DNA, 17 bp, synthetic construct
  source 1..17: mol_type = other DNA
gcaggcggggacatgga

SEQ ID NO: 127473 - DNA, 17 bp, synthetic construct
  source 1..17: mol_type = other DNA
caggcggggacatggaa

SEQ ID NO: 127474 - DNA, 17 bp, synthetic construct
  source 1..17: mol_type = other DNA
aggcggggacatggaaa

SEQ ID NO: 127475 - DNA, 17 bp, synthetic construct
  source 1..17: mol_type = other DNA
ggcggggacatggaaac

SEQ ID NO: 127476 - DNA, 17 bp, synthetic construct
  source 1..17: mol_type = other DNA
gcggggacatggaaact

SEQ ID NO: 127477 - DNA, 17 bp, synthetic construct
  source 1..17: mol_type = other DNA
cggggacatggaaactt

SEQ ID NO: 127478 - DNA, 17 bp, synthetic construct
  source 1..17: mol_type = other DNA
ggggacatggaaacttt

SEQ ID NO: 127479 - DNA, 17 bp, synthetic construct
  source 1..17: mol_type = other DNA
gggacatggaaactttt

SEQ ID NO: 127480 - DNA, 17 bp, synthetic construct
  source 1..17: mol_type = other DNA
ggacatggaaacttttg

SEQ ID NO: 127481 - DNA, 17 bp, synthetic construct
  source 1..17: mol_type = other DNA
gacatggaaacttttga

SEQ ID NO: 127482 - DNA, 17 bp, synthetic construct
  source 1..17: mol_type = other DNA
acatggaaacttttgaa

SEQ ID NO: 127483 - DNA, 17 bp, synthetic construct
  source 1..17: mol_type = other DNA
catggaaacttttgaaa

SEQ ID NO: 127484 - DNA, 17 bp, synthetic construct
  source 1..17: mol_type = other DNA
atggaaacttttgaaaa

SEQ ID NO: 127485 - DNA, 17 bp, synthetic construct
  source 1..17: mol_type = other DNA
tggaaacttttgaaaac

SEQ ID NO: 127486 - DNA, 17 bp, synthetic construct
  source 1..17: mol_type = other DNA
ggaaacttttgaaaaca

SEQ ID NO: 127487 - DNA, 17 bp, synthetic construct
  source 1..17: mol_type = other DNA
gaaacttttgaaaacat

SEQ ID NO: 127488 - DNA, 17 bp, synthetic construct
  source 1..17: mol_type = other DNA
aaacttttgaaaacatc

SEQ ID NO: 127489 - DNA, 17 bp, synthetic construct
  source 1..17: mol_type = other DNA
aacttttgaaaacatca

SEQ ID NO: 127490 - DNA, 17 bp, synthetic construct
  source 1..17: mol_type = other DNA
acttttgaaaacatcag

SEQ ID NO: 127491 - DNA, 17 bp, synthetic construct
  source 1..17: mol_type = other DNA
cttttgaaaacatcagg

SEQ ID NO: 127492 - DNA, 17 bp, synthetic construct
  source 1..17: mol_type = other DNA
ttttgaaaacatcaggg

SEQ ID NO: 127493 - DNA, 17 bp, synthetic construct
  source 1..17: mol_type = other DNA
tttgaaaacatcagggc

SEQ ID NO: 127494 - DNA, 17 bp, synthetic construct
  source 1..17: mol_type = other DNA
ttgaaaacatcagggct

SEQ ID NO: 127495 - DNA, 17 bp, synthetic construct
  source 1..17: mol_type = other DNA
tgaaaacatcagggctg

SEQ ID NO: 127496 - DNA, 17 bp, synthetic construct
  source 1..17: mol_type = other DNA
gaaaacatcagggctgc

SEQ ID NO: 127497 - DNA, 17 bp, synthetic construct
  source 1..17: mol_type = other DNA
aaaacatcagggctgct

SEQ ID NO: 127498 - DNA, 17 bp, synthetic construct
  source 1..17: mol_type = other DNA
aaacatcagggctgctg

SEQ ID NO: 127499 - DNA, 17 bp, synthetic construct
  source 1..17: mol_type = other DNA
aacatcagggctgctgg

SEQ ID NO: 127500 - DNA, 17 bp, synthetic construct
  source 1..17: mol_type = other DNA
acatcagggctgctggg

SEQ ID NO: 127501 - DNA, 17 bp, synthetic construct
  source 1..17: mol_type = other DNA
catcagggctgctgggg

SEQ ID NO: 127502 - DNA, 17 bp, synthetic construct
  source 1..17: mol_type = other DNA
atcagggctgctggggg

SEQ ID NO: 127503 - DNA, 17 bp, synthetic construct
  source 1..17: mol_type = other DNA
tcagggctgctgggggc

SEQ ID NO: 127504 - DNA, 17 bp, synthetic construct
  source 1..17: mol_type = other DNA
cagggctgctgggggca

SEQ ID NO: 127505 - DNA, 17 bp, synthetic construct
  source 1..17: mol_type = other DNA
agggctgctgggggcaa

SEQ ID NO: 127506 - DNA, 17 bp, synthetic construct
  source 1..17: mol_type = other DNA
gggctgctgggggcaag

SEQ ID NO: 127507 - DNA, 17 bp, synthetic construct
  source 1..17: mol_type = other DNA
ggctgctgggggcaaga

SEQ ID NO: 127508 - DNA, 17 bp, synthetic construct
  source 1..17: mol_type = other DNA
gctgctgggggcaagat

SEQ ID NO: 127509 - DNA, 17 bp, synthetic construct
  source 1..17: mol_type = other DNA
ctgctgggggcaagatg

SEQ ID NO: 127510 - DNA, 17 bp, synthetic construct
  source 1..17: mol_type = other DNA
tgctgggggcaagatgt

SEQ ID NO: 127511 - DNA, 17 bp, synthetic construct
  source 1..17: mol_type = other DNA
gctgggggcaagatgtg

SEQ ID NO: 127512 - DNA, 17 bp, synthetic construct
  source 1..17: mol_type = other DNA
ctgggggcaagatgtgc

SEQ ID NO: 127513 - DNA, 17 bp, synthetic construct
  source 1..17: mol_type = other DNA
tgggggcaagatgtgct

SEQ ID NO: 127514 - DNA, 17 bp, synthetic construct
  source 1..17: mol_type = other DNA
gggggcaagatgtgctg

SEQ ID NO: 127515 - DNA, 17 bp, synthetic construct
  source 1..17: mol_type = other DNA
ggggcaagatgtgctgg

SEQ ID NO: 127516 - DNA, 17 bp, synthetic construct
  source 1..17: mol_type = other DNA
gggcaagatgtgctggg

SEQ ID NO: 127517 - DNA, 17 bp, synthetic construct
  source 1..17: mol_type = other DNA
ggcaagatgtgctgggc

SEQ ID NO: 127518 - DNA, 17 bp, synthetic construct
  source 1..17: mol_type = other DNA
gcaagatgtgctgggca

SEQ ID NO: 127519 - DNA, 17 bp, synthetic construct
  source 1..17: mol_type = other DNA
caagatgtgctgggcac

SEQ ID NO: 127520 - DNA, 17 bp, synthetic construct
  source 1..17: mol_type = other DNA
aagatgtgctgggcacc

SEQ ID NO: 127521 - DNA, 17 bp, synthetic construct
  source 1..17: mol_type = other DNA
agatgtgctgggcacca

SEQ ID NO: 127522 - DNA, 17 bp, synthetic construct
  source 1..17: mol_type = other DNA
gatgtgctgggcaccaa

SEQ ID NO: 127523 - DNA, 17 bp, synthetic construct
  source 1..17: mol_type = other DNA
atgtgctgggcaccaaa

SEQ ID NO: 127524 - DNA, 17 bp, synthetic construct
  source 1..17: mol_type = other DNA
tgtgctgggcaccaaag

SEQ ID NO: 127525 - DNA, 17 bp, synthetic construct
  source 1..17: mol_type = other DNA
gtgctgggcaccaaaga

SEQ ID NO: 127526 - DNA, 17 bp, synthetic construct
  source 1..17: mol_type = other DNA
tgctgggcaccaaagag

SEQ ID NO: 127527 - DNA, 17 bp, synthetic construct
  source 1..17: mol_type = other DNA
gctgggcaccaaagagc

SEQ ID NO: 127528 - DNA, 17 bp, synthetic construct
  source 1..17: mol_type = other DNA
ctgggcaccaaagagca

SEQ ID NO: 127529 - DNA, 17 bp, synthetic construct
  source 1..17: mol_type = other DNA
tgggcaccaaagagcat

SEQ ID NO: 127530 - DNA, 17 bp, synthetic construct
  source 1..17: mol_type = other DNA
gggcaccaaagagcata

SEQ ID NO: 127531 - DNA, 17 bp, synthetic construct
  source 1..17: mol_type = other DNA
ggcaccaaagagcatag

SEQ ID NO: 127532 - DNA, 17 bp, synthetic construct
  source 1..17: mol_type = other DNA
gcaccaaagagcataga

SEQ ID NO: 127533 - DNA, 17 bp, synthetic construct
  source 1..17: mol_type = other DNA
caccaaagagcatagag

SEQ ID NO: 127534 - DNA, 17 bp, synthetic construct
  source 1..17: mol_type = other DNA
accaaagagcatagagt

SEQ ID NO: 127535 - DNA, 17 bp, synthetic construct
  source 1..17: mol_type = other DNA
ccaaagagcatagagtg

SEQ ID NO: 127536 - DNA, 17 bp, synthetic construct
  source 1..17: mol_type = other DNA
caaagagcatagagtgc

SEQ ID NO: 127537 - DNA, 17 bp, synthetic construct
  source 1..17: mol_type = other DNA
aaagagcatagagtgcc

SEQ ID NO: 127538 - DNA, 17 bp, synthetic construct
  source 1..17: mol_type = other DNA
aagagcatagagtgccg

SEQ ID NO: 127539 - DNA, 17 bp, synthetic construct
  source 1..17: mol_type = other DNA
agagcatagagtgccgg

SEQ ID NO: 127540 - DNA, 17 bp, synthetic construct
  source 1..17: mol_type = other DNA
gagcatagagtgccggg

SEQ ID NO: 127541 - DNA, 17 bp, synthetic construct
  source 1..17: mol_type = other DNA
agcatagagtgccgggc

SEQ ID NO: 127542 - DNA, 17 bp, synthetic construct
  source 1..17: mol_type = other DNA
gcatagagtgccgggcg

SEQ ID NO: 127543 - DNA, 17 bp, synthetic construct
  source 1..17: mol_type = other DNA
catagagtgccgggcgg

SEQ ID NO: 127544 - DNA, 17 bp, synthetic construct
  source 1..17: mol_type = other DNA
atagagtgccgggcgga

SEQ ID NO: 127545 - DNA, 17 bp, synthetic construct
  source 1..17: mol_type = other DNA
tagagtgccgggcggag

SEQ ID NO: 127546 - DNA, 17 bp, synthetic construct
  source 1..17: mol_type = other DNA
agagtgccgggcggaga

SEQ ID NO: 127547 - DNA, 17 bp, synthetic construct
  source 1..17: mol_type = other DNA
gagtgccgggcggagaa

SEQ ID NO: 127548 - DNA, 17 bp, synthetic construct
  source 1..17: mol_type = other DNA
agtgccgggcggagaac

SEQ ID NO: 127549 - DNA, 17 bp, synthetic construct
  source 1..17: mol_type = other DNA
gtgccgggcggagaact

SEQ ID NO: 127550 - DNA, 17 bp, synthetic construct
  source 1..17: mol_type = other DNA
tgccgggcggagaacta

SEQ ID NO: 127551 - DNA, 17 bp, synthetic construct
  source 1..17: mol_type = other DNA
gccgggcggagaactac

SEQ ID NO: 127552 - DNA, 17 bp, synthetic construct
  source 1..17: mol_type = other DNA
ccgggcggagaactacc

SEQ ID NO: 127553 - DNA, 17 bp, synthetic construct
  source 1..17: mol_type = other DNA
cgggcggagaactaccc

SEQ ID NO: 127554 - DNA, 17 bp, synthetic construct
  source 1..17: mol_type = other DNA
gggcggagaactacccc

SEQ ID NO: 127555 - DNA, 17 bp, synthetic construct
  source 1..17: mol_type = other DNA
ggcggagaactaccccg

SEQ ID NO: 127556 - DNA, 17 bp, synthetic construct
  source 1..17: mol_type = other DNA
gcggagaactaccccga

SEQ ID NO: 127557 - DNA, 17 bp, synthetic construct
  source 1..17: mol_type = other DNA
cggagaactaccccgag

SEQ ID NO: 127558 - DNA, 17 bp, synthetic construct
  source 1..17: mol_type = other DNA
ggagaactaccccgagg

SEQ ID NO: 127559 - DNA, 17 bp, synthetic construct
  source 1..17: mol_type = other DNA
gagaactaccccgaggt

SEQ ID NO: 127560 - DNA, 17 bp, synthetic construct
  source 1..17: mol_type = other DNA
agaactaccccgaggta

SEQ ID NO: 127561 - DNA, 17 bp, synthetic construct
  source 1..17: mol_type = other DNA
gaactaccccgaggtaa

SEQ ID NO: 127562 - DNA, 17 bp, synthetic construct
  source 1..17: mol_type = other DNA
aactaccccgaggtaag

SEQ ID NO: 127563 - DNA, 17 bp, synthetic construct
  source 1..17: mol_type = other DNA
actaccccgaggtaagc

SEQ ID NO: 127564 - DNA, 17 bp, synthetic construct
  source 1..17: mol_type = other DNA
ctaccccgaggtaagca

SEQ ID NO: 127565 - DNA, 17 bp, synthetic construct
  source 1..17: mol_type = other DNA
taccccgaggtaagcat

SEQ ID NO: 127566 - DNA, 17 bp, synthetic construct
  source 1..17: mol_type = other DNA
accccgaggtaagcatc

SEQ ID NO: 127567 - DNA, 17 bp, synthetic construct
  source 1..17: mol_type = other DNA
ccccgaggtaagcatcg

SEQ ID NO: 127568 - DNA, 17 bp, synthetic construct
  source 1..17: mol_type = other DNA
cccgaggtaagcatcga

SEQ ID NO: 127569 - DNA, 17 bp, synthetic construct
  source 1..17: mol_type = other DNA
ccgaggtaagcatcgac

SEQ ID NO: 127570 - DNA, 17 bp, synthetic construct
  source 1..17: mol_type = other DNA
cgaggtaagcatcgacc

SEQ ID NO: 127571 - DNA, 17 bp, synthetic construct
  source 1..17: mol_type = other DNA
gaggtaagcatcgacca

SEQ ID NO: 127572 - DNA, 17 bp, synthetic construct
  source 1..17: mol_type = other DNA
aggtaagcatcgaccag

SEQ ID NO: 127573 - DNA, 17 bp, synthetic construct
  source 1..17: mol_type = other DNA
ggtaagcatcgaccagg

SEQ ID NO: 127574 - DNA, 17 bp, synthetic construct
  source 1..17: mol_type = other DNA
gtaagcatcgaccaggt

SEQ ID NO: 127575 - DNA, 17 bp, synthetic construct
  source 1..17: mol_type = other DNA
taagcatcgaccaggtc

SEQ ID NO: 127576 - DNA, 17 bp, synthetic construct
  source 1..17: mol_type = other DNA
aagcatcgaccaggtcg

SEQ ID NO: 127577 - DNA, 17 bp, synthetic construct
  source 1..17: mol_type = other DNA
agcatcgaccaggtcgg

SEQ ID NO: 127578 - DNA, 17 bp, synthetic construct
  source 1..17: mol_type = other DNA
gcatcgaccaggtcggg

SEQ ID NO: 127579 - DNA, 17 bp, synthetic construct
  source 1..17: mol_type = other DNA
catcgaccaggtcgggc

SEQ ID NO: 127580 - DNA, 17 bp, synthetic construct
  source 1..17: mol_type = other DNA
atcgaccaggtcgggca

SEQ ID NO: 127581 - DNA, 17 bp, synthetic construct
  source 1..17: mol_type = other DNA
tcgaccaggtcgggcag

SEQ ID NO: 127582 - DNA, 17 bp, synthetic construct
  source 1..17: mol_type = other DNA
cgaccaggtcgggcagg

SEQ ID NO: 127583 - DNA, 17 bp, synthetic construct
  source 1..17: mol_type = other DNA
gaccaggtcgggcaggt

SEQ ID NO: 127584 - DNA, 17 bp, synthetic construct
  source 1..17: mol_type = other DNA
accaggtcgggcaggtg

SEQ ID NO: 127585 - DNA, 17 bp, synthetic construct
  source 1..17: mol_type = other DNA
ccaggtcgggcaggtgc

SEQ ID NO: 127586 - DNA, 17 bp, synthetic construct
  source 1..17: mol_type = other DNA
caggtcgggcaggtgct

SEQ ID NO: 127587 - DNA, 17 bp, synthetic construct
  source 1..17: mol_type = other DNA
aggtcgggcaggtgctg

SEQ ID NO: 127588 - DNA, 17 bp, synthetic construct
  source 1..17: mol_type = other DNA
ggtcgggcaggtgctga

SEQ ID NO: 127589 - DNA, 17 bp, synthetic construct
  source 1..17: mol_type = other DNA
gtcgggcaggtgctgac

SEQ ID NO: 127590 - DNA, 17 bp, synthetic construct
  source 1..17: mol_type = other DNA
tcgggcaggtgctgacc

SEQ ID NO: 127591 - DNA, 17 bp, synthetic construct
  source 1..17: mol_type = other DNA
cgggcaggtgctgacct

SEQ ID NO: 127592 - DNA, 17 bp, synthetic construct
  source 1..17: mol_type = other DNA
gggcaggtgctgacctg

SEQ ID NO: 127593 - DNA, 17 bp, synthetic construct
  source 1..17: mol_type = other DNA
ggcaggtgctgacctgc

SEQ ID NO: 127594 - DNA, 17 bp, synthetic construct
  source 1..17: mol_type = other DNA
gcaggtgctgacctgca

SEQ ID NO: 127595 - DNA, 17 bp, synthetic construct
  source 1..17: mol_type = other DNA
caggtgctgacctgcag

SEQ ID NO: 127596 - DNA, 17 bp, synthetic construct
  source 1..17: mol_type = other DNA
aggtgctgacctgcagc

SEQ ID NO: 127597 - DNA, 17 bp, synthetic construct
  source 1..17: mol_type = other DNA
ggtgctgacctgcagcc

SEQ ID NO: 127598 - DNA, 17 bp, synthetic construct
  source 1..17: mol_type = other DNA
gtgctgacctgcagcct

SEQ ID NO: 127599 - DNA, 17 bp, synthetic construct
  source 1..17: mol_type = other DNA
tgctgacctgcagcctg

SEQ ID NO: 127600 - DNA, 17 bp, synthetic construct
  source 1..17: mol_type = other DNA
gctgacctgcagcctgg

SEQ ID NO: 127601 - DNA, 17 bp, synthetic construct
  source 1..17: mol_type = other DNA
ctgacctgcagcctgga

SEQ ID NO: 127602 - DNA, 17 bp, synthetic construct
  source 1..17: mol_type = other DNA
tgacctgcagcctggag

SEQ ID NO: 127603 - DNA, 17 bp, synthetic construct
  source 1..17: mol_type = other DNA
gacctgcagcctggaga

SEQ ID NO: 127604 - DNA, 17 bp, synthetic construct
  source 1..17: mol_type = other DNA
acctgcagcctggagac

SEQ ID NO: 127605 - DNA, 17 bp, synthetic construct
  source 1..17: mol_type = other DNA
cctgcagcctggagacg

SEQ ID NO: 127606 - DNA, 17 bp, synthetic construct
  source 1..17: mol_type = other DNA
ctgcagcctggagacgg

SEQ ID NO: 127607 - DNA, 17 bp, synthetic construct
  source 1..17: mol_type = other DNA
tgcagcctggagacggg

SEQ ID NO: 127608 - DNA, 17 bp, synthetic construct
  source 1..17: mol_type = other DNA
gcagcctggagacgggg

SEQ ID NO: 127609 - DNA, 17 bp, synthetic construct
  source 1..17: mol_type = other DNA
cagcctggagacggggc

SEQ ID NO: 127610 - DNA, 17 bp, synthetic construct
  source 1..17: mol_type = other DNA
agcctggagacggggct

SEQ ID NO: 127611 - DNA, 17 bp, synthetic construct
  source 1..17: mol_type = other DNA
gcctggagacggggctg

SEQ ID NO: 127612 - DNA, 17 bp, synthetic construct
  source 1..17: mol_type = other DNA
cctggagacggggctga

SEQ ID NO: 127613 - DNA, 17 bp, synthetic construct
  source 1..17: mol_type = other DNA
ctggagacggggctgac

SEQ ID NO: 127614 - DNA, 17 bp, synthetic construct
  source 1..17: mol_type = other DNA
tggagacggggctgacc

SEQ ID NO: 127615 - DNA, 17 bp, synthetic construct
  source 1..17: mol_type = other DNA
ggagacggggctgacct

SEQ ID NO: 127616 - DNA, 17 bp, synthetic construct
  source 1..17: mol_type = other DNA
gagacggggctgacctg

SEQ ID NO: 127617 - DNA, 17 bp, synthetic construct
  source 1..17: mol_type = other DNA
agacggggctgacctgc

SEQ ID NO: 127618 - DNA, 17 bp, synthetic construct
  source 1..17: mol_type = other DNA
gacggggctgacctgca

SEQ ID NO: 127619 - DNA, 17 bp, synthetic construct
  source 1..17: mol_type = other DNA
acggggctgacctgcaa

SEQ ID NO: 127620 - DNA, 17 bp, synthetic construct
  source 1..17: mol_type = other DNA
cggggctgacctgcaag

SEQ ID NO: 127621 - DNA, 17 bp, synthetic construct
  source 1..17: mol_type = other DNA
ggggctgacctgcaaga

SEQ ID NO: 127622 - DNA, 17 bp, synthetic construct
  source 1..17: mol_type = other DNA
gggctgacctgcaagaa

SEQ ID NO: 127623 - DNA, 17 bp, synthetic construct
  source 1..17: mol_type = other DNA
ggctgacctgcaagaac

SEQ ID NO: 127624 - DNA, 17 bp, synthetic construct
  source 1..17: mol_type = other DNA
gctgacctgcaagaacg

SEQ ID NO: 127625 - DNA, 17 bp, synthetic construct
  source 1..17: mol_type = other DNA
ctgacctgcaagaacga

SEQ ID NO: 127626 - DNA, 17 bp, synthetic construct
  source 1..17: mol_type = other DNA
tgacctgcaagaacgaa

SEQ ID NO: 127627 - DNA, 17 bp, synthetic construct
  source 1..17: mol_type = other DNA
gacctgcaagaacgaag

SEQ ID NO: 127628 - DNA, 17 bp, synthetic construct
  source 1..17: mol_type = other DNA
acctgcaagaacgaaga

SEQ ID NO: 127629 - DNA, 17 bp, synthetic construct
  source 1..17: mol_type = other DNA
cctgcaagaacgaagac

SEQ ID NO: 127630 - DNA, 17 bp, synthetic construct
  source 1..17: mol_type = other DNA
ctgcaagaacgaagacc

SEQ ID NO: 127631 - DNA, 17 bp, synthetic construct
  source 1..17: mol_type = other DNA
tgcaagaacgaagacca

SEQ ID NO: 127632 - DNA, 17 bp, synthetic construct
  source 1..17: mol_type = other DNA
gcaagaacgaagaccag

SEQ ID NO: 127633 - DNA, 17 bp, synthetic construct
  source 1..17: mol_type = other DNA
caagaacgaagaccaga

SEQ ID NO: 127634 - DNA, 17 bp, synthetic construct
  source 1..17: mol_type = other DNA
aagaacgaagaccagac

SEQ ID NO: 127635 - DNA, 17 bp, synthetic construct
  source 1..17: mol_type = other DNA
agaacgaagaccagaca

SEQ ID NO: 127636 - DNA, 17 bp, synthetic construct
  source 1..17: mol_type = other DNA
gaacgaagaccagacag

SEQ ID NO: 127637 - DNA, 17 bp, synthetic construct
  source 1..17: mol_type = other DNA
aacgaagaccagacagg

SEQ ID NO: 127638 - DNA, 17 bp, synthetic construct
  source 1..17: mol_type = other DNA
acgaagaccagacaggc

SEQ ID NO: 127639 - DNA, 17 bp, synthetic construct
  source 1..17: mol_type = other DNA
cgaagaccagacaggca

SEQ ID NO: 127640 - DNA, 17 bp, synthetic construct
  source 1..17: mol_type = other DNA
gaagaccagacaggcag

SEQ ID NO: 127641 - DNA, 17 bp, synthetic construct
  source 1..17: mol_type = other DNA
aagaccagacaggcagg

SEQ ID NO: 127642 - DNA, 17 bp, synthetic construct
  source 1..17: mol_type = other DNA
agaccagacaggcaggt

SEQ ID NO: 127643 - DNA, 17 bp, synthetic construct
  source 1..17: mol_type = other DNA
gaccagacaggcaggtt

SEQ ID NO: 127644 - DNA, 17 bp, synthetic construct
  source 1..17: mol_type = other DNA
accagacaggcaggttc

SEQ ID NO: 127645 - DNA, 17 bp, synthetic construct
  source 1..17: mol_type = other DNA
ccagacaggcaggttca

SEQ ID NO: 127646 - DNA, 17 bp, synthetic construct
  source 1..17: mol_type = other DNA
cagacaggcaggttcaa

SEQ ID NO: 127647 - DNA, 17 bp, synthetic construct
  source 1..17: mol_type = other DNA
agacaggcaggttcaac

SEQ ID NO: 127648 - DNA, 17 bp, synthetic construct
  source 1..17: mol_type = other DNA
gacaggcaggttcaaca

SEQ ID NO: 127649 - DNA, 17 bp, synthetic construct
  source 1..17: mol_type = other DNA
acaggcaggttcaacat

SEQ ID NO: 127650 - DNA, 17 bp, synthetic construct
  source 1..17: mol_type = other DNA
caggcaggttcaacatg

SEQ ID NO: 127651 - DNA, 17 bp, synthetic construct
  source 1..17: mol_type = other DNA
aggcaggttcaacatgt

SEQ ID NO: 127652 - DNA, 17 bp, synthetic construct
  source 1..17: mol_type = other DNA
ggcaggttcaacatgtg

SEQ ID NO: 127653 - DNA, 17 bp, synthetic construct
  source 1..17: mol_type = other DNA
gcaggttcaacatgtgc

SEQ ID NO: 127654 - DNA, 17 bp, synthetic construct
  source 1..17: mol_type = other DNA
caggttcaacatgtgct

SEQ ID NO: 127655 - DNA, 17 bp, synthetic construct
  source 1..17: mol_type = other DNA
aggttcaacatgtgctt

SEQ ID NO: 127656 - DNA, 17 bp, synthetic construct
  source 1..17: mol_type = other DNA
ggttcaacatgtgcttc

SEQ ID NO: 127657 - DNA, 17 bp, synthetic construct
  source 1..17: mol_type = other DNA
gttcaacatgtgcttca

SEQ ID NO: 127658 - DNA, 17 bp, synthetic construct
  source 1..17: mol_type = other DNA
ttcaacatgtgcttcaa

SEQ ID NO: 127659 - DNA, 17 bp, synthetic construct
  source 1..17: mol_type = other DNA
tcaacatgtgcttcaac

SEQ ID NO: 127660 - DNA, 17 bp, synthetic construct
  source 1..17: mol_type = other DNA
caacatgtgcttcaact

SEQ ID NO: 127661 - DNA, 17 bp, synthetic construct
  source 1..17: mol_type = other DNA
aacatgtgcttcaacta

SEQ ID NO: 127662 - DNA, 17 bp, synthetic construct
  source 1..17: mol_type = other DNA
acatgtgcttcaactac

SEQ ID NO: 127663 - DNA, 17 bp, synthetic construct
  source 1..17: mol_type = other DNA
catgtgcttcaactaca

SEQ ID NO: 127664 - DNA, 17 bp, synthetic construct
  source 1..17: mol_type = other DNA
atgtgcttcaactacaa

SEQ ID NO: 127665 - DNA, 17 bp, synthetic construct
  source 1..17: mol_type = other DNA
tgtgcttcaactacaac

SEQ ID NO: 127666 - DNA, 17 bp, synthetic construct
  source 1..17: mol_type = other DNA
gtgcttcaactacaacg

SEQ ID NO: 127667 - DNA, 17 bp, synthetic construct
  source 1..17: mol_type = other DNA
tgcttcaactacaacgt

SEQ ID NO: 127668 - DNA, 17 bp, synthetic construct
  source 1..17: mol_type = other DNA
gcttcaactacaacgtg

SEQ ID NO: 127669 - DNA, 17 bp, synthetic construct
  source 1..17: mol_type = other DNA
cttcaactacaacgtgc

SEQ ID NO: 127670 - DNA, 17 bp, synthetic construct
  source 1..17: mol_type = other DNA
ttcaactacaacgtgcg

SEQ ID NO: 127671 - DNA, 17 bp, synthetic construct
  source 1..17: mol_type = other DNA
tcaactacaacgtgcgt

SEQ ID NO: 127672 - DNA, 17 bp, synthetic construct
  source 1..17: mol_type = other DNA
caactacaacgtgcgtg

SEQ ID NO: 127673 - DNA, 17 bp, synthetic construct
  source 1..17: mol_type = other DNA
aactacaacgtgcgtgt

SEQ ID NO: 127674 - DNA, 17 bp, synthetic construct
  source 1..17: mol_type = other DNA
actacaacgtgcgtgtg

SEQ ID NO: 127675 - DNA, 17 bp, synthetic construct
  source 1..17: mol_type = other DNA
ctacaacgtgcgtgtgc

SEQ ID NO: 127676 - DNA, 17 bp, synthetic construct
  source 1..17: mol_type = other DNA
tacaacgtgcgtgtgct

SEQ ID NO: 127677 - DNA, 17 bp, synthetic construct
  source 1..17: mol_type = other DNA
acaacgtgcgtgtgctt

SEQ ID NO: 127678 - DNA, 17 bp, synthetic construct
  source 1..17: mol_type = other DNA
caacgtgcgtgtgcttt

SEQ ID NO: 127679 - DNA, 17 bp, synthetic construct
  source 1..17: mol_type = other DNA
aacgtgcgtgtgctttg

SEQ ID NO: 127680 - DNA, 17 bp, synthetic construct
  source 1..17: mol_type = other DNA
acgtgcgtgtgctttgc

SEQ ID NO: 127681 - DNA, 17 bp, synthetic construct
  source 1..17: mol_type = other DNA
cgtgcgtgtgctttgct

SEQ ID NO: 127682 - DNA, 17 bp, synthetic construct
  source 1..17: mol_type = other DNA
gtgcgtgtgctttgctg

SEQ ID NO: 127683 - DNA, 17 bp, synthetic construct
  source 1..17: mol_type = other DNA
tgcgtgtgctttgctgt

SEQ ID NO: 127684 - DNA, 17 bp, synthetic construct
  source 1..17: mol_type = other DNA
gcgtgtgctttgctgtg

SEQ ID NO: 127685 - DNA, 17 bp, synthetic construct
  source 1..17: mol_type = other DNA
cgtgtgctttgctgtga

SEQ ID NO: 127686 - DNA, 17 bp, synthetic construct
  source 1..17: mol_type = other DNA
gtgtgctttgctgtgac

SEQ ID NO: 127687 - DNA, 17 bp, synthetic construct
  source 1..17: mol_type = other DNA
tgtgctttgctgtgacg

SEQ ID NO: 127688 - DNA, 17 bp, synthetic construct
  source 1..17: mol_type = other DNA
gtgctttgctgtgacga

SEQ ID NO: 127689 - DNA, 17 bp, synthetic construct
  source 1..17: mol_type = other DNA
tgctttgctgtgacgac

SEQ ID NO: 127690 - DNA, 17 bp, synthetic construct
  source 1..17: mol_type = other DNA
gctttgctgtgacgact

SEQ ID NO: 127691 - DNA, 17 bp, synthetic construct
  source 1..17: mol_type = other DNA
ctttgctgtgacgacta

SEQ ID NO: 127692 - DNA, 17 bp, synthetic construct
  source 1..17: mol_type = other DNA
tttgctgtgacgactac

SEQ ID NO: 127693 - DNA, 17 bp, synthetic construct
  source 1..17: mol_type = other DNA
ttgctgtgacgactaca

SEQ ID NO: 127694 - DNA, 17 bp, synthetic construct
  source 1..17: mol_type = other DNA
tgctgtgacgactacag

SEQ ID NO: 127695 - DNA, 17 bp, synthetic construct
  source 1..17: mol_type = other DNA
gctgtgacgactacagc

SEQ ID NO: 127696 - DNA, 17 bp, synthetic construct
  source 1..17: mol_type = other DNA
ctgtgacgactacagcc

SEQ ID NO: 127697 - DNA, 17 bp, synthetic construct
  source 1..17: mol_type = other DNA
tgtgacgactacagcca

SEQ ID NO: 127698 - DNA, 17 bp, synthetic construct
  source 1..17: mol_type = other DNA
gtgacgactacagccac

SEQ ID NO: 127699 - DNA, 17 bp, synthetic construct
  source 1..17: mol_type = other DNA
tgacgactacagccact

SEQ ID NO: 127700 - DNA, 17 bp, synthetic construct
  source 1..17: mol_type = other DNA
gacgactacagccactg

SEQ ID NO: 127701 - DNA, 17 bp, synthetic construct
  source 1..17: mol_type = other DNA
acgactacagccactgc

SEQ ID NO: 127702 - DNA, 17 bp, synthetic construct
  source 1..17: mol_type = other DNA
cgactacagccactgcc

SEQ ID NO: 127703 - DNA, 17 bp, synthetic construct
  source 1..17: mol_type = other DNA
gactacagccactgccc

SEQ ID NO: 127704 - DNA, 17 bp, synthetic construct
  source 1..17: mol_type = other DNA
actacagccactgcccc

SEQ ID NO: 127705 - DNA, 17 bp, synthetic construct
  source 1..17: mol_type = other DNA
ctacagccactgcccca

SEQ ID NO: 127706 - DNA, 17 bp, synthetic construct
  source 1..17: mol_type = other DNA
tacagccactgccccag

SEQ ID NO: 127707 - DNA, 17 bp, synthetic construct
  source 1..17: mol_type = other DNA
acagccactgccccagt

SEQ ID NO: 127708 - DNA, 17 bp, synthetic construct
  source 1..17: mol_type = other DNA
cagccactgccccagta

SEQ ID NO: 127709 - DNA, 17 bp, synthetic construct
  source 1..17: mol_type = other DNA
agccactgccccagtac

SEQ ID NO: 127710 - DNA, 17 bp, synthetic construct
  source 1..17: mol_type = other DNA
gccactgccccagtacc

SEQ ID NO: 127711 - DNA, 17 bp, synthetic construct
  source 1..17: mol_type = other DNA
ccactgccccagtaccc

SEQ ID NO: 127712 - DNA, 17 bp, synthetic construct
  source 1..17: mol_type = other DNA
cactgccccagtacccc

SEQ ID NO: 127713 - DNA, 17 bp, synthetic construct
  source 1..17: mol_type = other DNA
actgccccagtacccca

SEQ ID NO: 127714 - DNA, 17 bp, synthetic construct
  source 1..17: mol_type = other DNA
ctgccccagtaccccag

SEQ ID NO: 127715 - DNA, 17 bp, synthetic construct
  source 1..17: mol_type = other DNA
tgccccagtaccccagc

SEQ ID NO: 127716 - DNA, 17 bp, synthetic construct
  source 1..17: mol_type = other DNA
gccccagtaccccagcc

SEQ ID NO: 127717 - DNA, 17 bp, synthetic construct
  source 1..17: mol_type = other DNA
ccccagtaccccagcca

SEQ ID NO: 127718 - DNA, 17 bp, synthetic construct
  source 1..17: mol_type = other DNA
cccagtaccccagccac

SEQ ID NO: 127719 - DNA, 17 bp, synthetic construct
  source 1..17: mol_type = other DNA
ccagtaccccagccacc

SEQ ID NO: 127720 - DNA, 17 bp, synthetic construct
  source 1..17: mol_type = other DNA
cagtaccccagccacca

SEQ ID NO: 127721 - DNA, 17 bp, synthetic construct
  source 1..17: mol_type = other DNA
agtaccccagccaccag

SEQ ID NO: 127722 - DNA, 17 bp, synthetic construct
  source 1..17: mol_type = other DNA
gtaccccagccaccagc

SEQ ID NO: 127723 - DNA, 17 bp, synthetic construct
  source 1..17: mol_type = other DNA
taccccagccaccagct

SEQ ID NO: 127724 - DNA, 17 bp, synthetic construct
  source 1..17: mol_type = other DNA
accccagccaccagctc

SEQ ID NO: 127725 - DNA, 17 bp, synthetic construct
  source 1..17: mol_type = other DNA
ccccagccaccagctcc

SEQ ID NO: 127726 - DNA, 17 bp, synthetic construct
  source 1..17: mol_type = other DNA
cccagccaccagctcca

SEQ ID NO: 127727 - DNA, 17 bp, synthetic construct
  source 1..17: mol_type = other DNA
ccagccaccagctccac

SEQ ID NO: 127728 - DNA, 17 bp, synthetic construct
  source 1..17: mol_type = other DNA
cagccaccagctccacg

SEQ ID NO: 127729 - DNA, 17 bp, synthetic construct
  source 1..17: mol_type = other DNA
agccaccagctccacgg

SEQ ID NO: 127730 - DNA, 17 bp, synthetic construct
  source 1..17: mol_type = other DNA
gccaccagctccacggc

SEQ ID NO: 127731 - DNA, 17 bp, synthetic construct
  source 1..17: mol_type = other DNA
ccaccagctccacggcc

SEQ ID NO: 127732 - DNA, 17 bp, synthetic construct
  source 1..17: mol_type = other DNA
caccagctccacggcca

SEQ ID NO: 127733 - DNA, 17 bp, synthetic construct
  source 1..17: mol_type = other DNA
accagctccacggccac

SEQ ID NO: 127734 - DNA, 17 bp, synthetic construct
  source 1..17: mol_type = other DNA
ccagctccacggccacg

SEQ ID NO: 127735 - DNA, 17 bp, synthetic construct
  source 1..17: mol_type = other DNA
cagctccacggccacgc

SEQ ID NO: 127736 - DNA, 17 bp, synthetic construct
  source 1..17: mol_type = other DNA
agctccacggccacgcc

SEQ ID NO: 127737 - DNA, 17 bp, synthetic construct
  source 1..17: mol_type = other DNA
gctccacggccacgccc

SEQ ID NO: 127738 - DNA, 17 bp, synthetic construct
  source 1..17: mol_type = other DNA
ctccacggccacgccct

SEQ ID NO: 127739 - DNA, 17 bp, synthetic construct
  source 1..17: mol_type = other DNA
tccacggccacgccctc

SEQ ID NO: 127740 - DNA, 17 bp, synthetic construct
  source 1..17: mol_type = other DNA
ccacggccacgccctcc

SEQ ID NO: 127741 - DNA, 17 bp, synthetic construct
  source 1..17: mol_type = other DNA
cacggccacgccctcct

SEQ ID NO: 127742 - DNA, 17 bp, synthetic construct
  source 1..17: mol_type = other DNA
acggccacgccctcctc

SEQ ID NO: 127743 - DNA, 17 bp, synthetic construct
  source 1..17: mol_type = other DNA
cggccacgccctcctca

SEQ ID NO: 127744 - DNA, 17 bp, synthetic construct
  source 1..17: mol_type = other DNA
ggccacgccctcctcaa

SEQ ID NO: 127745 - DNA, 17 bp, synthetic construct
  source 1..17: mol_type = other DNA
gccacgccctcctcaac

SEQ ID NO: 127746 - DNA, 17 bp, synthetic construct
  source 1..17: mol_type = other DNA
ccacgccctcctcaact

SEQ ID NO: 127747 - DNA, 17 bp, synthetic construct
  source 1..17: mol_type = other DNA
cacgccctcctcaactc

SEQ ID NO: 127748 - DNA, 17 bp, synthetic construct
  source 1..17: mol_type = other DNA
acgccctcctcaactcc

SEQ ID NO: 127749 - DNA, 17 bp, synthetic construct
  source 1..17: mol_type = other DNA
cgccctcctcaactccg

SEQ ID NO: 127750 - DNA, 17 bp, synthetic construct
  source 1..17: mol_type = other DNA
gccctcctcaactccgg

SEQ ID NO: 127751 - DNA, 17 bp, synthetic construct
  source 1..17: mol_type = other DNA
ccctcctcaactccggg

SEQ ID NO: 127752 - DNA, 17 bp, synthetic construct
  source 1..17: mol_type = other DNA
cctcctcaactccgggg

SEQ ID NO: 127753 - DNA, 17 bp, synthetic construct
  source 1..17: mol_type = other DNA
ctcctcaactccgggga

SEQ ID NO: 127754 - DNA, 17 bp, synthetic construct
  source 1..17: mol_type = other DNA
tcctcaactccggggac

SEQ ID NO: 127755 - DNA, 17 bp, synthetic construct
  source 1..17: mol_type = other DNA
cctcaactccggggacg

SEQ ID NO: 127756 - DNA, 17 bp, synthetic construct
  source 1..17: mol_type = other DNA
ctcaactccggggacga

SEQ ID NO: 127757 - DNA, 17 bp, synthetic construct
  source 1..17: mol_type = other DNA
tcaactccggggacgac

SEQ ID NO: 127758 - DNA, 17 bp, synthetic construct
  source 1..17: mol_type = other DNA
caactccggggacgacc

SEQ ID NO: 127759 - DNA, 17 bp, synthetic construct
  source 1..17: mol_type = other DNA
aactccggggacgacct

SEQ ID NO: 127760 - DNA, 17 bp, synthetic construct
  source 1..17: mol_type = other DNA
actccggggacgacctg

SEQ ID NO: 127761 - DNA, 17 bp, synthetic construct
  source 1..17: mol_type = other DNA
ctccggggacgacctgg

SEQ ID NO: 127762 - DNA, 17 bp, synthetic construct
  source 1..17: mol_type = other DNA
tccggggacgacctgga

SEQ ID NO: 127763 - DNA, 17 bp, synthetic construct
  source 1..17: mol_type = other DNA
ccggggacgacctggat

SEQ ID NO: 127764 - DNA, 17 bp, synthetic construct
  source 1..17: mol_type = other DNA
cggggacgacctggatc

SEQ ID NO: 127765 - DNA, 17 bp, synthetic construct
  source 1..17: mol_type = other DNA
ggggacgacctggatcc

SEQ ID NO: 127766 - DNA, 17 bp, synthetic construct
  source 1..17: mol_type = other DNA
gggacgacctggatcct

SEQ ID NO: 127767 - DNA, 17 bp, synthetic construct
  source 1..17: mol_type = other DNA
ggacgacctggatcctc

SEQ ID NO: 127768 - DNA, 17 bp, synthetic construct
  source 1..17: mol_type = other DNA
gacgacctggatcctca

SEQ ID NO: 127769 - DNA, 17 bp, synthetic construct
  source 1..17: mol_type = other DNA
acgacctggatcctcac

SEQ ID NO: 127770 - DNA, 17 bp, synthetic construct
  source 1..17: mol_type = other DNA
cgacctggatcctcaca

SEQ ID NO: 127771 - DNA, 17 bp, synthetic construct
  source 1..17: mol_type = other DNA
gacctggatcctcacaa

SEQ ID NO: 127772 - DNA, 17 bp, synthetic construct
  source 1..17: mol_type = other DNA
acctggatcctcacaaa

SEQ ID NO: 127773 - DNA, 17 bp, synthetic construct
  source 1..17: mol_type = other DNA
cctggatcctcacaaag

SEQ ID NO: 127774 - DNA, 17 bp, synthetic construct
  source 1..17: mol_type = other DNA
ctggatcctcacaaagc

SEQ ID NO: 127775 - DNA, 17 bp, synthetic construct
  source 1..17: mol_type = other DNA
tggatcctcacaaagcc

SEQ ID NO: 127776 - DNA, 17 bp, synthetic construct
  source 1..17: mol_type = other DNA
ggatcctcacaaagccg

SEQ ID NO: 127777 - DNA, 17 bp, synthetic construct
  source 1..17: mol_type = other DNA
gatcctcacaaagccga

SEQ ID NO: 127778 - DNA, 17 bp, synthetic construct
  source 1..17: mol_type = other DNA
atcctcacaaagccgac

SEQ ID NO: 127779 - DNA, 17 bp, synthetic construct
  source 1..17: mol_type = other DNA
tcctcacaaagccgacc

SEQ ID NO: 127780 - DNA, 17 bp, synthetic construct
  source 1..17: mol_type = other DNA
cctcacaaagccgacca

SEQ ID NO: 127781 - DNA, 17 bp, synthetic construct
  source 1..17: mol_type = other DNA
ctcacaaagccgaccac

SEQ ID NO: 127782 - DNA, 17 bp, synthetic construct
  source 1..17: mol_type = other DNA
tcacaaagccgaccaca

SEQ ID NO: 127783 - DNA, 17 bp, synthetic construct
  source 1..17: mol_type = other DNA
cacaaagccgaccacaa

SEQ ID NO: 127784 - DNA, 17 bp, synthetic construct
  source 1..17: mol_type = other DNA
acaaagccgaccacaac

SEQ ID NO: 127785 - DNA, 17 bp, synthetic construct
  source 1..17: mol_type = other DNA
caaagccgaccacaaca

SEQ ID NO: 127786 - DNA, 17 bp, synthetic construct
  source 1..17: mol_type = other DNA
aaagccgaccacaacag

SEQ ID NO: 127787 - DNA, 17 bp, synthetic construct
  source 1..17: mol_type = other DNA
aagccgaccacaacagc

SEQ ID NO: 127788 - DNA, 17 bp, synthetic construct
  source 1..17: mol_type = other DNA
agccgaccacaacagcc

SEQ ID NO: 127789 - DNA, 17 bp, synthetic construct
  source 1..17: mol_type = other DNA
gccgaccacaacagcca

SEQ ID NO: 127790 - DNA, 17 bp, synthetic construct
  source 1..17: mol_type = other DNA
ccgaccacaacagccac

SEQ ID NO: 127791 - DNA, 17 bp, synthetic construct
  source 1..17: mol_type = other DNA
cgaccacaacagccact

SEQ ID NO: 127792 - DNA, 17 bp, synthetic construct
  source 1..17: mol_type = other DNA
gaccacaacagccacta

SEQ ID NO: 127793 - DNA, 17 bp, synthetic construct
  source 1..17: mol_type = other DNA
accacaacagccactac

SEQ ID NO: 127794 - DNA, 17 bp, synthetic construct
  source 1..17: mol_type = other DNA
ccacaacagccactacg

SEQ ID NO: 127795 - DNA, 17 bp, synthetic construct
  source 1..17: mol_type = other DNA
cacaacagccactacga

SEQ ID NO: 127796 - DNA, 17 bp, synthetic construct
  source 1..17: mol_type = other DNA
acaacagccactacgac

SEQ ID NO: 127797 - DNA, 17 bp, synthetic construct
  source 1..17: mol_type = other DNA
caacagccactacgact

SEQ ID NO: 127798 - DNA, 17 bp, synthetic construct
  source 1..17: mol_type = other DNA
aacagccactacgactg

SEQ ID NO: 127799 - DNA, 17 bp, synthetic construct
  source 1..17: mol_type = other DNA
acagccactacgactgc

SEQ ID NO: 127800 - DNA, 17 bp, synthetic construct
  source 1..17: mol_type = other DNA
cagccactacgactgcg

SEQ ID NO: 127801 - DNA, 17 bp, synthetic construct
  source 1..17: mol_type = other DNA
agccactacgactgcgt

SEQ ID NO: 127802 - DNA, 17 bp, synthetic construct
  source 1..17: mol_type = other DNA
gccactacgactgcgtc

SEQ ID NO: 127803 - DNA, 17 bp, synthetic construct
  source 1..17: mol_type = other DNA
ccactacgactgcgtcc

SEQ ID NO: 127804 - DNA, 17 bp, synthetic construct
  source 1..17: mol_type = other DNA
cactacgactgcgtcca

SEQ ID NO: 127805 - DNA, 17 bp, synthetic construct
  source 1..17: mol_type = other DNA
actacgactgcgtccac

SEQ ID NO: 127806 - DNA, 17 bp, synthetic construct
  source 1..17: mol_type = other DNA
ctacgactgcgtccact

SEQ ID NO: 127807 - DNA, 17 bp, synthetic construct
  source 1..17: mol_type = other DNA
tacgactgcgtccactg

SEQ ID NO: 127808 - DNA, 17 bp, synthetic construct
  source 1..17: mol_type = other DNA
acgactgcgtccactgg

SEQ ID NO: 127809 - DNA, 17 bp, synthetic construct
  source 1..17: mol_type = other DNA
cgactgcgtccactgga

SEQ ID NO: 127810 - DNA, 17 bp, synthetic construct
  source 1..17: mol_type = other DNA
gactgcgtccactggat

SEQ ID NO: 127811 - DNA, 17 bp, synthetic construct
  source 1..17: mol_type = other DNA
actgcgtccactggatc

SEQ ID NO: 127812 - DNA, 17 bp, synthetic construct
  source 1..17: mol_type = other DNA
ctgcgtccactggatcc

SEQ ID NO: 127813 - DNA, 17 bp, synthetic construct
  source 1..17: mol_type = other DNA
tgcgtccactggatcca

SEQ ID NO: 127814 - DNA, 17 bp, synthetic construct
  source 1..17: mol_type = other DNA
gcgtccactggatccac

SEQ ID NO: 127815 - DNA, 17 bp, synthetic construct
  source 1..17: mol_type = other DNA
cgtccactggatccacg

SEQ ID NO: 127816 - DNA, 17 bp, synthetic construct
  source 1..17: mol_type = other DNA
gtccactggatccacgg

SEQ ID NO: 127817 - DNA, 17 bp, synthetic construct
  source 1..17: mol_type = other DNA
tccactggatccacggc

SEQ ID NO: 127818 - DNA, 17 bp, synthetic construct
  source 1..17: mol_type = other DNA
ccactggatccacggcc

SEQ ID NO: 127819 - DNA, 17 bp, synthetic construct
  source 1..17: mol_type = other DNA
cactggatccacggcca

SEQ ID NO: 127820 - DNA, 17 bp, synthetic construct
  source 1..17: mol_type = other DNA
actggatccacggccac

SEQ ID NO: 127821 - DNA, 17 bp, synthetic construct
  source 1..17: mol_type = other DNA
ctggatccacggccacc

SEQ ID NO: 127822 - DNA, 17 bp, synthetic construct
  source 1..17: mol_type = other DNA
tggatccacggccaccc

SEQ ID NO: 127823 - DNA, 17 bp, synthetic construct
  source 1..17: mol_type = other DNA
ggatccacggccacccc

SEQ ID NO: 127824 - DNA, 17 bp, synthetic construct
  source 1..17: mol_type = other DNA
gatccacggccaccccg

SEQ ID NO: 127825 - DNA, 17 bp, synthetic construct
  source 1..17: mol_type = other DNA
atccacggccaccccga

SEQ ID NO: 127826 - DNA, 17 bp, synthetic construct
  source 1..17: mol_type = other DNA
tccacggccaccccgac

SEQ ID NO: 127827 - DNA, 17 bp, synthetic construct
  source 1..17: mol_type = other DNA
ccacggccaccccgacc

SEQ ID NO: 127828 - DNA, 17 bp, synthetic construct
  source 1..17: mol_type = other DNA
cacggccaccccgacct

SEQ ID NO: 127829 - DNA, 17 bp, synthetic construct
  source 1..17: mol_type = other DNA
acggccaccccgacctc

SEQ ID NO: 127830 - DNA, 17 bp, synthetic construct
  source 1..17: mol_type = other DNA
cggccaccccgacctcc

SEQ ID NO: 127831 - DNA, 17 bp, synthetic construct
  source 1..17: mol_type = other DNA
ggccaccccgacctcca

SEQ ID NO: 127832 - DNA, 17 bp, synthetic construct
  source 1..17: mol_type = other DNA
gccaccccgacctccac

SEQ ID NO: 127833 - DNA, 17 bp, synthetic construct
  source 1..17: mol_type = other DNA
ccaccccgacctccacc

SEQ ID NO: 127834 - DNA, 17 bp, synthetic construct
  source 1..17: mol_type = other DNA
caccccgacctccaccc

SEQ ID NO: 127835 - DNA, 17 bp, synthetic construct
  source 1..17: mol_type = other DNA
accccgacctccaccct

SEQ ID NO: 127836 - DNA, 17 bp, synthetic construct
  source 1..17: mol_type = other DNA
ccccgacctccaccctg

SEQ ID NO: 127837 - DNA, 17 bp, synthetic construct
  source 1..17: mol_type = other DNA
cccgacctccaccctga

SEQ ID NO: 127838 - DNA, 17 bp, synthetic construct
  source 1..17: mol_type = other DNA
ccgacctccaccctgag

SEQ ID NO: 127839 - DNA, 17 bp, synthetic construct
  source 1..17: mol_type = other DNA
cgacctccaccctgaga

SEQ ID NO: 127840 - DNA, 17 bp, synthetic construct
  source 1..17: mol_type = other DNA
gacctccaccctgagaa

SEQ ID NO: 127841 - DNA, 17 bp, synthetic construct
  source 1..17: mol_type = other DNA
acctccaccctgagaac

SEQ ID NO: 127842 - DNA, 17 bp, synthetic construct
  source 1..17: mol_type = other DNA
cctccaccctgagaaca

SEQ ID NO: 127843 - DNA, 17 bp, synthetic construct
  source 1..17: mol_type = other DNA
ctccaccctgagaacag

SEQ ID NO: 127844 - DNA, 17 bp, synthetic construct
  source 1..17: mol_type = other DNA
tccaccctgagaacagc

SEQ ID NO: 127845 - DNA, 17 bp, synthetic construct
  source 1..17: mol_type = other DNA
ccaccctgagaacagct

SEQ ID NO: 127846 - DNA, 17 bp, synthetic construct
  source 1..17: mol_type = other DNA
caccctgagaacagctc

SEQ ID NO: 127847 - DNA, 17 bp, synthetic construct
  source 1..17: mol_type = other DNA
accctgagaacagctcc

SEQ ID NO: 127848 - DNA, 17 bp, synthetic construct
  source 1..17: mol_type = other DNA
ccctgagaacagctccc

SEQ ID NO: 127849 - DNA, 17 bp, synthetic construct
  source 1..17: mol_type = other DNA
cctgagaacagctcccc

SEQ ID NO: 127850 - DNA, 17 bp, synthetic construct
  source 1..17: mol_type = other DNA
ctgagaacagctccccc

SEQ ID NO: 127851 - DNA, 17 bp, synthetic construct
  source 1..17: mol_type = other DNA
tgagaacagctccccct

SEQ ID NO: 127852 - DNA, 17 bp, synthetic construct
  source 1..17: mol_type = other DNA
gagaacagctccccctc

SEQ ID NO: 127853 - DNA, 17 bp, synthetic construct
  source 1..17: mol_type = other DNA
agaacagctccccctcc

SEQ ID NO: 127854 - DNA, 17 bp, synthetic construct
  source 1..17: mol_type = other DNA
gaacagctccccctccc

SEQ ID NO: 127855 - DNA, 17 bp, synthetic construct
  source 1..17: mol_type = other DNA
aacagctccccctccca

SEQ ID NO: 127856 - DNA, 17 bp, synthetic construct
  source 1..17: mol_type = other DNA
acagctccccctcccaa

SEQ ID NO: 127857 - DNA, 17 bp, synthetic construct
  source 1..17: mol_type = other DNA
cagctccccctcccaaa

SEQ ID NO: 127858 - DNA, 17 bp, synthetic construct
  source 1..17: mol_type = other DNA
agctccccctcccaaag

SEQ ID NO: 127859 - DNA, 17 bp, synthetic construct
  source 1..17: mol_type = other DNA
gctccccctcccaaagt

SEQ ID NO: 127860 - DNA, 17 bp, synthetic construct
  source 1..17: mol_type = other DNA
ctccccctcccaaagtg

SEQ ID NO: 127861 - DNA, 17 bp, synthetic construct
  source 1..17: mol_type = other DNA
tccccctcccaaagtgc

SEQ ID NO: 127862 - DNA, 17 bp, synthetic construct
  source 1..17: mol_type = other DNA
ccccctcccaaagtgct

SEQ ID NO: 127863 - DNA, 17 bp, synthetic construct
  source 1..17: mol_type = other DNA
cccctcccaaagtgctg

SEQ ID NO: 127864 - DNA, 17 bp, synthetic construct
  source 1..17: mol_type = other DNA
ccctcccaaagtgctga

SEQ ID NO: 127865 - DNA, 17 bp, synthetic construct
  source 1..17: mol_type = other DNA
cctcccaaagtgctgac

SEQ ID NO: 127866 - DNA, 17 bp, synthetic construct
  source 1..17: mol_type = other DNA
ctcccaaagtgctgacc

SEQ ID NO: 127867 - DNA, 17 bp, synthetic construct
  source 1..17: mol_type = other DNA
tcccaaagtgctgacca

SEQ ID NO: 127868 - DNA, 17 bp, synthetic construct
  source 1..17: mol_type = other DNA
cccaaagtgctgaccac

SEQ ID NO: 127869 - DNA, 17 bp, synthetic construct
  source 1..17: mol_type = other DNA
ccaaagtgctgaccacc

SEQ ID NO: 127870 - DNA, 17 bp, synthetic construct
  source 1..17: mol_type = other DNA
caaagtgctgaccacca

SEQ ID NO: 127871 - DNA, 17 bp, synthetic construct
  source 1..17: mol_type = other DNA
aaagtgctgaccaccac

SEQ ID NO: 127872 - DNA, 17 bp, synthetic construct
  source 1..17: mol_type = other DNA
aagtgctgaccaccacg

SEQ ID NO: 127873 - DNA, 17 bp, synthetic construct
  source 1..17: mol_type = other DNA
agtgctgaccaccacgg

SEQ ID NO: 127874 - DNA, 17 bp, synthetic construct
  source 1..17: mol_type = other DNA
gtgctgaccaccacggc

SEQ ID NO: 127875 - DNA, 17 bp, synthetic construct
  source 1..17: mol_type = other DNA
tgctgaccaccacggcc

SEQ ID NO: 127876 - DNA, 17 bp, synthetic construct
  source 1..17: mol_type = other DNA
gctgaccaccacggcca

SEQ ID NO: 127877 - DNA, 17 bp, synthetic construct
  source 1..17: mol_type = other DNA
ctgaccaccacggccac

SEQ ID NO: 127878 - DNA, 17 bp, synthetic construct
  source 1..17: mol_type = other DNA
tgaccaccacggccacc

SEQ ID NO: 127879 - DNA, 17 bp, synthetic construct
  source 1..17: mol_type = other DNA
gaccaccacggccacca

SEQ ID NO: 127880 - DNA, 17 bp, synthetic construct
  source 1..17: mol_type = other DNA
accaccacggccaccac

SEQ ID NO: 127881 - DNA, 17 bp, synthetic construct
  source 1..17: mol_type = other DNA
ccaccacggccaccaca

SEQ ID NO: 127882 - DNA, 17 bp, synthetic construct
  source 1..17: mol_type = other DNA
caccacggccaccacac

SEQ ID NO: 127883 - DNA, 17 bp, synthetic construct
  source 1..17: mol_type = other DNA
accacggccaccacacc

SEQ ID NO: 127884 - DNA, 17 bp, synthetic construct
  source 1..17: mol_type = other DNA
ccacggccaccacaccc

SEQ ID NO: 127885 - DNA, 17 bp, synthetic construct
  source 1..17: mol_type = other DNA
cacggccaccacaccca

SEQ ID NO: 127886 - DNA, 17 bp, synthetic construct
  source 1..17: mol_type = other DNA
acggccaccacacccac

SEQ ID NO: 127887 - DNA, 17 bp, synthetic construct
  source 1..17: mol_type = other DNA
cggccaccacacccaca

SEQ ID NO: 127888 - DNA, 17 bp, synthetic construct
  source 1..17: mol_type = other DNA
ggccaccacacccacag

SEQ ID NO: 127889 - DNA, 17 bp, synthetic construct
  source 1..17: mol_type = other DNA
gccaccacacccacagt

SEQ ID NO: 127890 - DNA, 17 bp, synthetic construct
  source 1..17: mol_type = other DNA
ccaccacacccacagtc

SEQ ID NO: 127891 - DNA, 17 bp, synthetic construct
  source 1..17: mol_type = other DNA
caccacacccacagtca

SEQ ID NO: 127892 - DNA, 17 bp, synthetic construct
  source 1..17: mol_type = other DNA
accacacccacagtcac

SEQ ID NO: 127893 - DNA, 17 bp, synthetic construct
  source 1..17: mol_type = other DNA
ccacacccacagtcacc

SEQ ID NO: 127894 - DNA, 17 bp, synthetic construct
  source 1..17: mol_type = other DNA
cacacccacagtcacca

SEQ ID NO: 127895 - DNA, 17 bp, synthetic construct
  source 1..17: mol_type = other DNA
acacccacagtcaccag

SEQ ID NO: 127896 - DNA, 17 bp, synthetic construct
  source 1..17: mol_type = other DNA
cacccacagtcaccagc

SEQ ID NO: 127897 - DNA, 17 bp, synthetic construct
  source 1..17: mol_type = other DNA
acccacagtcaccagct

SEQ ID NO: 127898 - DNA, 17 bp, synthetic construct
  source 1..17: mol_type = other DNA
cccacagtcaccagctc

SEQ ID NO: 127899 - DNA, 17 bp, synthetic construct
  source 1..17: mol_type = other DNA
ccacagtcaccagctcc

SEQ ID NO: 127900 - DNA, 17 bp, synthetic construct
  source 1..17: mol_type = other DNA
cacagtcaccagctcca

SEQ ID NO: 127901 - DNA, 17 bp, synthetic construct
  source 1..17: mol_type = other DNA
acagtcaccagctccaa

SEQ ID NO: 127902 - DNA, 17 bp, synthetic construct
  source 1..17: mol_type = other DNA
cagtcaccagctccaaa

SEQ ID NO: 127903 - DNA, 17 bp, synthetic construct
  source 1..17: mol_type = other DNA
agtcaccagctccaaag

SEQ ID NO: 127904 - DNA, 17 bp, synthetic construct
  source 1..17: mol_type = other DNA
gtcaccagctccaaagc

SEQ ID NO: 127905 - DNA, 17 bp, synthetic construct
  source 1..17: mol_type = other DNA
tcaccagctccaaagcc

SEQ ID NO: 127906 - DNA, 17 bp, synthetic construct
  source 1..17: mol_type = other DNA
caccagctccaaagcca

SEQ ID NO: 127907 - DNA, 17 bp, synthetic construct
  source 1..17: mol_type = other DNA
accagctccaaagccac

SEQ ID NO: 127908 - DNA, 17 bp, synthetic construct
  source 1..17: mol_type = other DNA
ccagctccaaagccact

SEQ ID NO: 127909 - DNA, 17 bp, synthetic construct
  source 1..17: mol_type = other DNA
cagctccaaagccactc

SEQ ID NO: 127910 - DNA, 17 bp, synthetic construct
  source 1..17: mol_type = other DNA
agctccaaagccactcc

SEQ ID NO: 127911 - DNA, 17 bp, synthetic construct
  source 1..17: mol_type = other DNA
gctccaaagccactccc

SEQ ID NO: 127912 - DNA, 17 bp, synthetic construct
  source 1..17: mol_type = other DNA
ctccaaagccactccct

SEQ ID NO: 127913 - DNA, 17 bp, synthetic construct
  source 1..17: mol_type = other DNA
tccaaagccactccctc

SEQ ID NO: 127914 - DNA, 17 bp, synthetic construct
  source 1..17: mol_type = other DNA
ccaaagccactccctcc

SEQ ID NO: 127915 - DNA, 17 bp, synthetic construct
  source 1..17: mol_type = other DNA
caaagccactccctcct

SEQ ID NO: 127916 - DNA, 17 bp, synthetic construct
  source 1..17: mol_type = other DNA
aaagccactccctcctc

SEQ ID NO: 127917 - DNA, 17 bp, synthetic construct
  source 1..17: mol_type = other DNA
aagccactccctcctcc

SEQ ID NO: 127918 - DNA, 17 bp, synthetic construct
  source 1..17: mol_type = other DNA
agccactccctcctcca

SEQ ID NO: 127919 - DNA, 17 bp, synthetic construct
  source 1..17: mol_type = other DNA
gccactccctcctccag

SEQ ID NO: 127920 - DNA, 17 bp, synthetic construct
  source 1..17: mol_type = other DNA
ccactccctcctccagt

SEQ ID NO: 127921 - DNA, 17 bp, synthetic construct
  source 1..17: mol_type = other DNA
cactccctcctccagtc

SEQ ID NO: 127922 - DNA, 17 bp, synthetic construct
  source 1..17: mol_type = other DNA
actccctcctccagtcc

SEQ ID NO: 127923 - DNA, 17 bp, synthetic construct
  source 1..17: mol_type = other DNA
ctccctcctccagtcca

SEQ ID NO: 127924 - DNA, 17 bp, synthetic construct
  source 1..17: mol_type = other DNA
tccctcctccagtccag

SEQ ID NO: 127925 - DNA, 17 bp, synthetic construct
  source 1..17: mol_type = other DNA
ccctcctccagtccagg

SEQ ID NO: 127926 - DNA, 17 bp, synthetic construct
  source 1..17: mol_type = other DNA
cctcctccagtccaggg

SEQ ID NO: 127927 - DNA, 17 bp, synthetic construct
  source 1..17: mol_type = other DNA
ctcctccagtccaggga

SEQ ID NO: 127928 - DNA, 17 bp, synthetic construct
  source 1..17: mol_type = other DNA
tcctccagtccagggac

SEQ ID NO: 127929 - DNA, 17 bp, synthetic construct
  source 1..17: mol_type = other DNA
cctccagtccagggact

SEQ ID NO: 127930 - DNA, 17 bp, synthetic construct
  source 1..17: mol_type = other DNA
ctccagtccagggactg

SEQ ID NO: 127931 - DNA, 17 bp, synthetic construct
  source 1..17: mol_type = other DNA
tccagtccagggactgc

SEQ ID NO: 127932 - DNA, 17 bp, synthetic construct
  source 1..17: mol_type = other DNA
ccagtccagggactgca

SEQ ID NO: 127933 - DNA, 17 bp, synthetic construct
  source 1..17: mol_type = other DNA
cagtccagggactgcaa

SEQ ID NO: 127934 - DNA, 17 bp, synthetic construct
  source 1..17: mol_type = other DNA
agtccagggactgcaac

SEQ ID NO: 127935 - DNA, 17 bp, synthetic construct
  source 1..17: mol_type = other DNA
gtccagggactgcaacc

SEQ ID NO: 127936 - DNA, 17 bp, synthetic construct
  source 1..17: mol_type = other DNA
tccagggactgcaaccg

SEQ ID NO: 127937 - DNA, 17 bp, synthetic construct
  source 1..17: mol_type = other DNA
ccagggactgcaaccgc

SEQ ID NO: 127938 - DNA, 17 bp, synthetic construct
  source 1..17: mol_type = other DNA
cagggactgcaaccgcc

SEQ ID NO: 127939 - DNA, 17 bp, synthetic construct
  source 1..17: mol_type = other DNA
agggactgcaaccgccc

SEQ ID NO: 127940 - DNA, 17 bp, synthetic construct
  source 1..17: mol_type = other DNA
gggactgcaaccgccct

SEQ ID NO: 127941 - DNA, 17 bp, synthetic construct
  source 1..17: mol_type = other DNA
ggactgcaaccgccctt

SEQ ID NO: 127942 - DNA, 17 bp, synthetic construct
  source 1..17: mol_type = other DNA
gactgcaaccgcccttc

SEQ ID NO: 127943 - DNA, 17 bp, synthetic construct
  source 1..17: mol_type = other DNA
actgcaaccgcccttcc

SEQ ID NO: 127944 - DNA, 17 bp, synthetic construct
  source 1..17: mol_type = other DNA
ctgcaaccgcccttcca

SEQ ID NO: 127945 - DNA, 17 bp, synthetic construct
  source 1..17: mol_type = other DNA
tgcaaccgcccttccag

SEQ ID NO: 127946 - DNA, 17 bp, synthetic construct
  source 1..17: mol_type = other DNA
gcaaccgcccttccagc

SEQ ID NO: 127947 - DNA, 17 bp, synthetic construct
  source 1..17: mol_type = other DNA
caaccgcccttccagca

SEQ ID NO: 127948 - DNA, 17 bp, synthetic construct
  source 1..17: mol_type = other DNA
aaccgcccttccagcac

SEQ ID NO: 127949 - DNA, 17 bp, synthetic construct
  source 1..17: mol_type = other DNA
accgcccttccagcact

SEQ ID NO: 127950 - DNA, 17 bp, synthetic construct
  source 1..17: mol_type = other DNA
ccgcccttccagcactg

SEQ ID NO: 127951 - DNA, 17 bp, synthetic construct
  source 1..17: mol_type = other DNA
cgcccttccagcactga

SEQ ID NO: 127952 - DNA, 17 bp, synthetic construct
  source 1..17: mol_type = other DNA
gcccttccagcactgag

SEQ ID NO: 127953 - DNA, 17 bp, synthetic construct
  source 1..17: mol_type = other DNA
cccttccagcactgaga

SEQ ID NO: 127954 - DNA, 17 bp, synthetic construct
  source 1..17: mol_type = other DNA
ccttccagcactgagaa

SEQ ID NO: 127955 - DNA, 17 bp, synthetic construct
  source 1..17: mol_type = other DNA
cttccagcactgagaag

SEQ ID NO: 127956 - DNA, 17 bp, synthetic construct
  source 1..17: mol_type = other DNA
ttccagcactgagaagc

SEQ ID NO: 127957 - DNA, 17 bp, synthetic construct
  source 1..17: mol_type = other DNA
tccagcactgagaagca

SEQ ID NO: 127958 - DNA, 17 bp, synthetic construct
  source 1..17: mol_type = other DNA
ccagcactgagaagcac

SEQ ID NO: 127959 - DNA, 17 bp, synthetic construct
  source 1..17: mol_type = other DNA
cagcactgagaagcaca

SEQ ID NO: 127960 - DNA, 17 bp, synthetic construct
  source 1..17: mol_type = other DNA
agcactgagaagcacag

SEQ ID NO: 127961 - DNA, 17 bp, synthetic construct
  source 1..17: mol_type = other DNA
gcactgagaagcacagc

SEQ ID NO: 127962 - DNA, 17 bp, synthetic construct
  source 1..17: mol_type = other DNA
cactgagaagcacagcc

SEQ ID NO: 127963 - DNA, 17 bp, synthetic construct
  source 1..17: mol_type = other DNA
actgagaagcacagcca

SEQ ID NO: 127964 - DNA, 17 bp, synthetic construct
  source 1..17: mol_type = other DNA
ctgagaagcacagccac

SEQ ID NO: 127965 - DNA, 17 bp, synthetic construct
  source 1..17: mol_type = other DNA
tgagaagcacagccacc

SEQ ID NO: 127966 - DNA, 17 bp, synthetic construct
  source 1..17: mol_type = other DNA
gagaagcacagccacca

SEQ ID NO: 127967 - DNA, 17 bp, synthetic construct
  source 1..17: mol_type = other DNA
agaagcacagccaccac

SEQ ID NO: 127968 - DNA, 17 bp, synthetic construct
  source 1..17: mol_type = other DNA
gaagcacagccaccaca

SEQ ID NO: 127969 - DNA, 17 bp, synthetic construct
  source 1..17: mol_type = other DNA
aagcacagccaccacac

SEQ ID NO: 127970 - DNA, 17 bp, synthetic construct
  source 1..17: mol_type = other DNA
agcacagccaccacacc

SEQ ID NO: 127971 - DNA, 17 bp, synthetic construct
  source 1..17: mol_type = other DNA
gcacagccaccacaccc

SEQ ID NO: 127972 - DNA, 17 bp, synthetic construct
  source 1..17: mol_type = other DNA
cacagccaccacaccca

SEQ ID NO: 127973 - DNA, 17 bp, synthetic construct
  source 1..17: mol_type = other DNA
acagccaccacacccac

SEQ ID NO: 127974 - DNA, 17 bp, synthetic construct
  source 1..17: mol_type = other DNA
cagccaccacacccaca

SEQ ID NO: 127975 - DNA, 17 bp, synthetic construct
  source 1..17: mol_type = other DNA
agccaccacacccacag

SEQ ID NO: 127976 - DNA, 17 bp, synthetic construct
  source 1..17: mol_type = other DNA
gccaccacacccacagc

SEQ ID NO: 127977 - DNA, 17 bp, synthetic construct
  source 1..17: mol_type = other DNA
ccaccacacccacagct

SEQ ID NO: 127978 - DNA, 17 bp, synthetic construct
  source 1..17: mol_type = other DNA
caccacacccacagcta

SEQ ID NO: 127979 - DNA, 17 bp, synthetic construct
  source 1..17: mol_type = other DNA
accacacccacagctac

SEQ ID NO: 127980 - DNA, 17 bp, synthetic construct
  source 1..17: mol_type = other DNA
ccacacccacagctacc

SEQ ID NO: 127981 - DNA, 17 bp, synthetic construct
  source 1..17: mol_type = other DNA
cacacccacagctacca

SEQ ID NO: 127982 - DNA, 17 bp, synthetic construct
  source 1..17: mol_type = other DNA
acacccacagctaccag

SEQ ID NO: 127983 - DNA, 17 bp, synthetic construct
  source 1..17: mol_type = other DNA
cacccacagctaccagc

SEQ ID NO: 127984 - DNA, 17 bp, synthetic construct
  source 1..17: mol_type = other DNA
acccacagctaccagcg

SEQ ID NO: 127985 - DNA, 17 bp, synthetic construct
  source 1..17: mol_type = other DNA
cccacagctaccagcgt

SEQ ID NO: 127986 - DNA, 17 bp, synthetic construct
  source 1..17: mol_type = other DNA
ccacagctaccagcgtt

SEQ ID NO: 127987 - DNA, 17 bp, synthetic construct
  source 1..17: mol_type = other DNA
cacagctaccagcgtta

SEQ ID NO: 127988 - DNA, 17 bp, synthetic construct
  source 1..17: mol_type = other DNA
acagctaccagcgttac

SEQ ID NO: 127989 - DNA, 17 bp, synthetic construct
  source 1..17: mol_type = other DNA
cagctaccagcgttaca

SEQ ID NO: 127990 - DNA, 17 bp, synthetic construct
  source 1..17: mol_type = other DNA
agctaccagcgttacac

SEQ ID NO: 127991 - DNA, 17 bp, synthetic construct
  source 1..17: mol_type = other DNA
gctaccagcgttacacc

SEQ ID NO: 127992 - DNA, 17 bp, synthetic construct
  source 1..17: mol_type = other DNA
ctaccagcgttacaccc

SEQ ID NO: 127993 - DNA, 17 bp, synthetic construct
  source 1..17: mol_type = other DNA
taccagcgttacaccca

SEQ ID NO: 127994 - DNA, 17 bp, synthetic construct
  source 1..17: mol_type = other DNA
accagcgttacacccat

SEQ ID NO: 127995 - DNA, 17 bp, synthetic construct
  source 1..17: mol_type = other DNA
ccagcgttacacccatc

SEQ ID NO: 127996 - DNA, 17 bp, synthetic construct
  source 1..17: mol_type = other DNA
cagcgttacacccatcc

SEQ ID NO: 127997 - DNA, 17 bp, synthetic construct
  source 1..17: mol_type = other DNA
agcgttacacccatccc

SEQ ID NO: 127998 - DNA, 17 bp, synthetic construct
  source 1..17: mol_type = other DNA
gcgttacacccatcccc

SEQ ID NO: 127999 - DNA, 17 bp, synthetic construct
  source 1..17: mol_type = other DNA
cgttacacccatcccct

SEQ ID NO: 128000 - DNA, 17 bp, synthetic construct
  source 1..17: mol_type = other DNA
gttacacccatcccctc

SEQ ID NO: 128001 - DNA, 17 bp, synthetic construct
  source 1..17: mol_type = other DNA
ttacacccatcccctct

SEQ ID NO: 128002 - DNA, 17 bp, synthetic construct
  source 1..17: mol_type = other DNA
tacacccatcccctctt

SEQ ID NO: 128003 - DNA, 17 bp, synthetic construct
  source 1..17: mol_type = other DNA
acacccatcccctcttc

SEQ ID NO: 128004 - DNA, 17 bp, synthetic construct
  source 1..17: mol_type = other DNA
cacccatcccctcttcc

SEQ ID NO: 128005 - DNA, 17 bp, synthetic construct
  source 1..17: mol_type = other DNA
acccatcccctcttcct

SEQ ID NO: 128006 - DNA, 17 bp, synthetic construct
  source 1..17: mol_type = other DNA
cccatcccctcttcctc

SEQ ID NO: 128007 - DNA, 17 bp, synthetic construct
  source 1..17: mol_type = other DNA
ccatcccctcttcctcc

SEQ ID NO: 128008 - DNA, 17 bp, synthetic construct
  source 1..17: mol_type = other DNA
catcccctcttcctccc

SEQ ID NO: 128009 - DNA, 17 bp, synthetic construct
  source 1..17: mol_type = other DNA
atcccctcttcctccct

SEQ ID NO: 128010 - DNA, 17 bp, synthetic construct
  source 1..17: mol_type = other DNA
tcccctcttcctccctg

SEQ ID NO: 128011 - DNA, 17 bp, synthetic construct
  source 1..17: mol_type = other DNA
cccctcttcctccctgg

SEQ ID NO: 128012 - DNA, 17 bp, synthetic construct
  source 1..17: mol_type = other DNA
ccctcttcctccctggg

SEQ ID NO: 128013 - DNA, 17 bp, synthetic construct
  source 1..17: mol_type = other DNA
cctcttcctccctgggc

SEQ ID NO: 128014 - DNA, 17 bp, synthetic construct
  source 1..17: mol_type = other DNA
ctcttcctccctgggca

SEQ ID NO: 128015 - DNA, 17 bp, synthetic construct
  source 1..17: mol_type = other DNA
tcttcctccctgggcac

SEQ ID NO: 128016 - DNA, 17 bp, synthetic construct
  source 1..17: mol_type = other DNA
cttcctccctgggcacc

SEQ ID NO: 128017 - DNA, 17 bp, synthetic construct
  source 1..17: mol_type = other DNA
ttcctccctgggcacca

SEQ ID NO: 128018 - DNA, 17 bp, synthetic construct
  source 1..17: mol_type = other DNA
tcctccctgggcaccac

SEQ ID NO: 128019 - DNA, 17 bp, synthetic construct
  source 1..17: mol_type = other DNA
cctccctgggcaccacc

SEQ ID NO: 128020 - DNA, 17 bp, synthetic construct
  source 1..17: mol_type = other DNA
ctccctgggcaccacct

SEQ ID NO: 128021 - DNA, 17 bp, synthetic construct
  source 1..17: mol_type = other DNA
tccctgggcaccacctg

SEQ ID NO: 128022 - DNA, 17 bp, synthetic construct
  source 1..17: mol_type = other DNA
ccctgggcaccacctgg

SEQ ID NO: 128023 - DNA, 17 bp, synthetic construct
  source 1..17: mol_type = other DNA
cctgggcaccacctgga

SEQ ID NO: 128024 - DNA, 17 bp, synthetic construct
  source 1..17: mol_type = other DNA
ctgggcaccacctggac

SEQ ID NO: 128025 - DNA, 17 bp, synthetic construct
  source 1..17: mol_type = other DNA
tgggcaccacctggacc

SEQ ID NO: 128026 - DNA, 17 bp, synthetic construct
  source 1..17: mol_type = other DNA
gggcaccacctggaccc

SEQ ID NO: 128027 - DNA, 17 bp, synthetic construct
  source 1..17: mol_type = other DNA
ggcaccacctggacccg

SEQ ID NO: 128028 - DNA, 17 bp, synthetic construct
  source 1..17: mol_type = other DNA
gcaccacctggacccgc

SEQ ID NO: 128029 - DNA, 17 bp, synthetic construct
  source 1..17: mol_type = other DNA
caccacctggacccgcc

SEQ ID NO: 128030 - DNA, 17 bp, synthetic construct
  source 1..17: mol_type = other DNA
accacctggacccgcct

SEQ ID NO: 128031 - DNA, 17 bp, synthetic construct
  source 1..17: mol_type = other DNA
ccacctggacccgccta

SEQ ID NO: 128032 - DNA, 17 bp, synthetic construct
  source 1..17: mol_type = other DNA
cacctggacccgcctat

SEQ ID NO: 128033 - DNA, 17 bp, synthetic construct
  source 1..17: mol_type = other DNA
acctggacccgcctatc

SEQ ID NO: 128034 - DNA, 17 bp, synthetic construct
  source 1..17: mol_type = other DNA
cctggacccgcctatca

SEQ ID NO: 128035 - DNA, 17 bp, synthetic construct
  source 1..17: mol_type = other DNA
ctggacccgcctatcac

SEQ ID NO: 128036 - DNA, 17 bp, synthetic construct
  source 1..17: mol_type = other DNA
tggacccgcctatcaca

SEQ ID NO: 128037 - DNA, 17 bp, synthetic construct
  source 1..17: mol_type = other DNA
ggacccgcctatcacag

SEQ ID NO: 128038 - DNA, 17 bp, synthetic construct
  source 1..17: mol_type = other DNA
gacccgcctatcacaga

SEQ ID NO: 128039 - DNA, 17 bp, synthetic construct
  source 1..17: mol_type = other DNA
acccgcctatcacagac

SEQ ID NO: 128040 - DNA, 17 bp, synthetic construct
  source 1..17: mol_type = other DNA
cccgcctatcacagacc

SEQ ID NO: 128041 - DNA, 17 bp, synthetic construct
  source 1..17: mol_type = other DNA
ccgcctatcacagacca

SEQ ID NO: 128042 - DNA, 17 bp, synthetic construct
  source 1..17: mol_type = other DNA
cgcctatcacagaccac

SEQ ID NO: 128043 - DNA, 17 bp, synthetic construct
  source 1..17: mol_type = other DNA
gcctatcacagaccacc

SEQ ID NO: 128044 - DNA, 17 bp, synthetic construct
  source 1..17: mol_type = other DNA
cctatcacagaccacca

SEQ ID NO: 128045 - DNA, 17 bp, synthetic construct
  source 1..17: mol_type = other DNA
ctatcacagaccaccac

SEQ ID NO: 128046 - DNA, 17 bp, synthetic construct
  source 1..17: mol_type = other DNA
tatcacagaccaccaca

SEQ ID NO: 128047 - DNA, 17 bp, synthetic construct
  source 1..17: mol_type = other DNA
atcacagaccaccacac

SEQ ID NO: 128048 - DNA, 17 bp, synthetic construct
  source 1..17: mol_type = other DNA
tcacagaccaccacacc

SEQ ID NO: 128049 - DNA, 17 bp, synthetic construct
  source 1..17: mol_type = other DNA
cacagaccaccacaccc

SEQ ID NO: 128050 - DNA, 17 bp, synthetic construct
  source 1..17: mol_type = other DNA
acagaccaccacaccca

SEQ ID NO: 128051 - DNA, 17 bp, synthetic construct
  source 1..17: mol_type = other DNA
cagaccaccacacccac

SEQ ID NO: 128052 - DNA, 17 bp, synthetic construct
  source 1..17: mol_type = other DNA
agaccaccacacccacg

SEQ ID NO: 128053 - DNA, 17 bp, synthetic construct
  source 1..17: mol_type = other DNA
gaccaccacacccacgg

SEQ ID NO: 128054 - DNA, 17 bp, synthetic construct
  source 1..17: mol_type = other DNA
accaccacacccacggc

SEQ ID NO: 128055 - DNA, 17 bp, synthetic construct
  source 1..17: mol_type = other DNA
ccaccacacccacggcc

SEQ ID NO: 128056 - DNA, 17 bp, synthetic construct
  source 1..17: mol_type = other DNA
caccacacccacggcca

SEQ ID NO: 128057 - DNA, 17 bp, synthetic construct
  source 1..17: mol_type = other DNA
accacacccacggccac

SEQ ID NO: 128058 - DNA, 17 bp, synthetic construct
  source 1..17: mol_type = other DNA
ccacacccacggccacc

SEQ ID NO: 128059 - DNA, 17 bp, synthetic construct
  source 1..17: mol_type = other DNA
cacacccacggccacca

SEQ ID NO: 128060 - DNA, 17 bp, synthetic construct
  source 1..17: mol_type = other DNA
acacccacggccaccat

SEQ ID NO: 128061 - DNA, 17 bp, synthetic construct
  source 1..17: mol_type = other DNA
cacccacggccaccatg

SEQ ID NO: 128062 - DNA, 17 bp, synthetic construct
  source 1..17: mol_type = other DNA
acccacggccaccatgt

SEQ ID NO: 128063 - DNA, 17 bp, synthetic construct
  source 1..17: mol_type = other DNA
cccacggccaccatgtc

SEQ ID NO: 128064 - DNA, 17 bp, synthetic construct
  source 1..17: mol_type = other DNA
ccacggccaccatgtcc

SEQ ID NO: 128065 - DNA, 17 bp, synthetic construct
  source 1..17: mol_type = other DNA
cacggccaccatgtcca

SEQ ID NO: 128066 - DNA, 17 bp, synthetic construct
  source 1..17: mol_type = other DNA
acggccaccatgtccac

SEQ ID NO: 128067 - DNA, 17 bp, synthetic construct
  source 1..17: mol_type = other DNA
cggccaccatgtccaca

SEQ ID NO: 128068 - DNA, 17 bp, synthetic construct
  source 1..17: mol_type = other DNA
ggccaccatgtccacag

SEQ ID NO: 128069 - DNA, 17 bp, synthetic construct
  source 1..17: mol_type = other DNA
gccaccatgtccacagc

SEQ ID NO: 128070 - DNA, 17 bp, synthetic construct
  source 1..17: mol_type = other DNA
ccaccatgtccacagcc

SEQ ID NO: 128071 - DNA, 17 bp, synthetic construct
  source 1..17: mol_type = other DNA
caccatgtccacagcca

SEQ ID NO: 128072 - DNA, 17 bp, synthetic construct
  source 1..17: mol_type = other DNA
accatgtccacagccac

SEQ ID NO: 128073 - DNA, 17 bp, synthetic construct
  source 1..17: mol_type = other DNA
ccatgtccacagccaca

SEQ ID NO: 128074 - DNA, 17 bp, synthetic construct
  source 1..17: mol_type = other DNA
catgtccacagccacac

SEQ ID NO: 128075 - DNA, 17 bp, synthetic construct
  source 1..17: mol_type = other DNA
atgtccacagccacacc

SEQ ID NO: 128076 - DNA, 17 bp, synthetic construct
  source 1..17: mol_type = other DNA
tgtccacagccacaccc

SEQ ID NO: 128077 - DNA, 17 bp, synthetic construct
  source 1..17: mol_type = other DNA
gtccacagccacaccct

SEQ ID NO: 128078 - DNA, 17 bp, synthetic construct
  source 1..17: mol_type = other DNA
tccacagccacaccctc

SEQ ID NO: 128079 - DNA, 17 bp, synthetic construct
  source 1..17: mol_type = other DNA
ccacagccacaccctcc

SEQ ID NO: 128080 - DNA, 17 bp, synthetic construct
  source 1..17: mol_type = other DNA
cacagccacaccctcct

SEQ ID NO: 128081 - DNA, 17 bp, synthetic construct
  source 1..17: mol_type = other DNA
acagccacaccctcctc

SEQ ID NO: 128082 - DNA, 17 bp, synthetic construct
  source 1..17: mol_type = other DNA
cagccacaccctcctcc

SEQ ID NO: 128083 - DNA, 17 bp, synthetic construct
  source 1..17: mol_type = other DNA
agccacaccctcctcca

SEQ ID NO: 128084 - DNA, 17 bp, synthetic construct
  source 1..17: mol_type = other DNA
gccacaccctcctccac

SEQ ID NO: 128085 - DNA, 17 bp, synthetic construct
  source 1..17: mol_type = other DNA
ccacaccctcctccact

SEQ ID NO: 128086 - DNA, 17 bp, synthetic construct
  source 1..17: mol_type = other DNA
cacaccctcctccactc

SEQ ID NO: 128087 - DNA, 17 bp, synthetic construct
  source 1..17: mol_type = other DNA
acaccctcctccactcc

SEQ ID NO: 128088 - DNA, 17 bp, synthetic construct
  source 1..17: mol_type = other DNA
caccctcctccactcca

SEQ ID NO: 128089 - DNA, 17 bp, synthetic construct
  source 1..17: mol_type = other DNA
accctcctccactccag

SEQ ID NO: 128090 - DNA, 17 bp, synthetic construct
  source 1..17: mol_type = other DNA
ccctcctccactccaga

SEQ ID NO: 128091 - DNA, 17 bp, synthetic construct
  source 1..17: mol_type = other DNA
cctcctccactccagag

SEQ ID NO: 128092 - DNA, 17 bp, synthetic construct
  source 1..17: mol_type = other DNA
ctcctccactccagaga

SEQ ID NO: 128093 - DNA, 17 bp, synthetic construct
  source 1..17: mol_type = other DNA
tcctccactccagagac

SEQ ID NO: 128094 - DNA, 17 bp, synthetic construct
  source 1..17: mol_type = other DNA
cctccactccagagact

SEQ ID NO: 128095 - DNA, 17 bp, synthetic construct
  source 1..17: mol_type = other DNA
ctccactccagagactg

SEQ ID NO: 128096 - DNA, 17 bp, synthetic construct
  source 1..17: mol_type = other DNA
tccactccagagactgc

SEQ ID NO: 128097 - DNA, 17 bp, synthetic construct
  source 1..17: mol_type = other DNA
ccactccagagactgcc

SEQ ID NO: 128098 - DNA, 17 bp, synthetic construct
  source 1..17: mol_type = other DNA
cactccagagactgccc

SEQ ID NO: 128099 - DNA, 17 bp, synthetic construct
  source 1..17: mol_type = other DNA
actccagagactgccca

SEQ ID NO: 128100 - DNA, 17 bp, synthetic construct
  source 1..17: mol_type = other DNA
ctccagagactgcccac

SEQ ID NO: 128101 - DNA, 17 bp, synthetic construct
  source 1..17: mol_type = other DNA
tccagagactgcccaca

SEQ ID NO: 128102 - DNA, 17 bp, synthetic construct
  source 1..17: mol_type = other DNA
ccagagactgcccacac

SEQ ID NO: 128103 - DNA, 17 bp, synthetic construct
  source 1..17: mol_type = other DNA
cagagactgcccacacc

SEQ ID NO: 128104 - DNA, 17 bp, synthetic construct
  source 1..17: mol_type = other DNA
agagactgcccacacct

SEQ ID NO: 128105 - DNA, 17 bp, synthetic construct
  source 1..17: mol_type = other DNA
gagactgcccacacctc

SEQ ID NO: 128106 - DNA, 17 bp, synthetic construct
  source 1..17: mol_type = other DNA
agactgcccacacctcc

SEQ ID NO: 128107 - DNA, 17 bp, synthetic construct
  source 1..17: mol_type = other DNA
gactgcccacacctcca

SEQ ID NO: 128108 - DNA, 17 bp, synthetic construct
  source 1..17: mol_type = other DNA
actgcccacacctccac

SEQ ID NO: 128109 - DNA, 17 bp, synthetic construct
  source 1..17: mol_type = other DNA
ctgcccacacctccaca

SEQ ID NO: 128110 - DNA, 17 bp, synthetic construct
  source 1..17: mol_type = other DNA
tgcccacacctccacag

SEQ ID NO: 128111 - DNA, 17 bp, synthetic construct
  source 1..17: mol_type = other DNA
gcccacacctccacagt

SEQ ID NO: 128112 - DNA, 17 bp, synthetic construct
  source 1..17: mol_type = other DNA
cccacacctccacagtg

SEQ ID NO: 128113 - DNA, 17 bp, synthetic construct
  source 1..17: mol_type = other DNA
ccacacctccacagtgc

SEQ ID NO: 128114 - DNA, 17 bp, synthetic construct
  source 1..17: mol_type = other DNA
cacacctccacagtgct

SEQ ID NO: 128115 - DNA, 17 bp, synthetic construct
  source 1..17: mol_type = other DNA
acacctccacagtgctt

SEQ ID NO: 128116 - DNA, 17 bp, synthetic construct
  source 1..17: mol_type = other DNA
cacctccacagtgctta

SEQ ID NO: 128117 - DNA, 17 bp, synthetic construct
  source 1..17: mol_type = other DNA
acctccacagtgcttac

SEQ ID NO: 128118 - DNA, 17 bp, synthetic construct
  source 1..17: mol_type = other DNA
cctccacagtgcttacc

SEQ ID NO: 128119 - DNA, 17 bp, synthetic construct
  source 1..17: mol_type = other DNA
ctccacagtgcttaccg

SEQ ID NO: 128120 - DNA, 17 bp, synthetic construct
  source 1..17: mol_type = other DNA
tccacagtgcttaccgc

SEQ ID NO: 128121 - DNA, 17 bp, synthetic construct
  source 1..17: mol_type = other DNA
ccacagtgcttaccgcc

SEQ ID NO: 128122 - DNA, 17 bp, synthetic construct
  source 1..17: mol_type = other DNA
cacagtgcttaccgcca

SEQ ID NO: 128123 - DNA, 17 bp, synthetic construct
  source 1..17: mol_type = other DNA
acagtgcttaccgccac

SEQ ID NO: 128124 - DNA, 17 bp, synthetic construct
  source 1..17: mol_type = other DNA
cagtgcttaccgccacg

SEQ ID NO: 128125 - DNA, 17 bp, synthetic construct
  source 1..17: mol_type = other DNA
agtgcttaccgccacgg

SEQ ID NO: 128126 - DNA, 17 bp, synthetic construct
  source 1..17: mol_type = other DNA
gtgcttaccgccacggc

SEQ ID NO: 128127 - DNA, 17 bp, synthetic construct
  source 1..17: mol_type = other DNA
tgcttaccgccacggcc

SEQ ID NO: 128128 - DNA, 17 bp, synthetic construct
  source 1..17: mol_type = other DNA
gcttaccgccacggcca

SEQ ID NO: 128129 - DNA, 17 bp, synthetic construct
  source 1..17: mol_type = other DNA
cttaccgccacggccac

SEQ ID NO: 128130 - DNA, 17 bp, synthetic construct
  source 1..17: mol_type = other DNA
ttaccgccacggccacc

SEQ ID NO: 128131 - DNA, 17 bp, synthetic construct
  source 1..17: mol_type = other DNA
taccgccacggccacca

SEQ ID NO: 128132 - DNA, 17 bp, synthetic construct
  source 1..17: mol_type = other DNA
accgccacggccaccac

SEQ ID NO: 128133 - DNA, 17 bp, synthetic construct
  source 1..17: mol_type = other DNA
ccgccacggccaccaca

SEQ ID NO: 128134 - DNA, 17 bp, synthetic construct
  source 1..17: mol_type = other DNA
cgccacggccaccacaa

SEQ ID NO: 128135 - DNA, 17 bp, synthetic construct
  source 1..17: mol_type = other DNA
gccacggccaccacaac

SEQ ID NO: 128136 - DNA, 17 bp, synthetic construct
  source 1..17: mol_type = other DNA
ccacggccaccacaact

SEQ ID NO: 128137 - DNA, 17 bp, synthetic construct
  source 1..17: mol_type = other DNA
cacggccaccacaactg

SEQ ID NO: 128138 - DNA, 17 bp, synthetic construct
  source 1..17: mol_type = other DNA
acggccaccacaactgg

SEQ ID NO: 128139 - DNA, 17 bp, synthetic construct
  source 1..17: mol_type = other DNA
cggccaccacaactggg

SEQ ID NO: 128140 - DNA, 17 bp, synthetic construct
  source 1..17: mol_type = other DNA
ggccaccacaactgggg

SEQ ID NO: 128141 - DNA, 17 bp, synthetic construct
  source 1..17: mol_type = other DNA
gccaccacaactggggc

SEQ ID NO: 128142 - DNA, 17 bp, synthetic construct
  source 1..17: mol_type = other DNA
ccaccacaactggggcc

SEQ ID NO: 128143 - DNA, 17 bp, synthetic construct
  source 1..17: mol_type = other DNA
caccacaactggggcca

SEQ ID NO: 128144 - DNA, 17 bp, synthetic construct
  source 1..17: mol_type = other DNA
accacaactggggccac

SEQ ID NO: 128145 - DNA, 17 bp, synthetic construct
  source 1..17: mol_type = other DNA
ccacaactggggccacc

SEQ ID NO: 128146 - DNA, 17 bp, synthetic construct
  source 1..17: mol_type = other DNA
cacaactggggccaccg

SEQ ID NO: 128147 - DNA, 17 bp, synthetic construct
  source 1..17: mol_type = other DNA
acaactggggccaccgg

SEQ ID NO: 128148 - DNA, 17 bp, synthetic construct
  source 1..17: mol_type = other DNA
caactggggccaccggc

SEQ ID NO: 128149 - DNA, 17 bp, synthetic construct
  source 1..17: mol_type = other DNA
aactggggccaccggct

SEQ ID NO: 128150 - DNA, 17 bp, synthetic construct
  source 1..17: mol_type = other DNA
actggggccaccggctc

SEQ ID NO: 128151 - DNA, 17 bp, synthetic construct
  source 1..17: mol_type = other DNA
ctggggccaccggctct

SEQ ID NO: 128152 - DNA, 17 bp, synthetic construct
  source 1..17: mol_type = other DNA
tggggccaccggctctg

SEQ ID NO: 128153 - DNA, 17 bp, synthetic construct
  source 1..17: mol_type = other DNA
ggggccaccggctctgt

SEQ ID NO: 128154 - DNA, 17 bp, synthetic construct
  source 1..17: mol_type = other DNA
gggccaccggctctgtg

SEQ ID NO: 128155 - DNA, 17 bp, synthetic construct
  source 1..17: mol_type = other DNA
ggccaccggctctgtgg

SEQ ID NO: 128156 - DNA, 17 bp, synthetic construct
  source 1..17: mol_type = other DNA
gccaccggctctgtggc

SEQ ID NO: 128157 - DNA, 17 bp, synthetic construct
  source 1..17: mol_type = other DNA
ccaccggctctgtggcc

SEQ ID NO: 128158 - DNA, 17 bp, synthetic construct
  source 1..17: mol_type = other DNA
caccggctctgtggcca

SEQ ID NO: 128159 - DNA, 17 bp, synthetic construct
  source 1..17: mol_type = other DNA
accggctctgtggccac

SEQ ID NO: 128160 - DNA, 17 bp, synthetic construct
  source 1..17: mol_type = other DNA
ccggctctgtggccacc

SEQ ID NO: 128161 - DNA, 17 bp, synthetic construct
  source 1..17: mol_type = other DNA
cggctctgtggccaccc

SEQ ID NO: 128162 - DNA, 17 bp, synthetic construct
  source 1..17: mol_type = other DNA
ggctctgtggccacccc

SEQ ID NO: 128163 - DNA, 17 bp, synthetic construct
  source 1..17: mol_type = other DNA
gctctgtggccaccccc

SEQ ID NO: 128164 - DNA, 17 bp, synthetic construct
  source 1..17: mol_type = other DNA
ctctgtggccaccccct

SEQ ID NO: 128165 - DNA, 17 bp, synthetic construct
  source 1..17: mol_type = other DNA
tctgtggccaccccctc

SEQ ID NO: 128166 - DNA, 17 bp, synthetic construct
  source 1..17: mol_type = other DNA
ctgtggccaccccctcc

SEQ ID NO: 128167 - DNA, 17 bp, synthetic construct
  source 1..17: mol_type = other DNA
tgtggccaccccctcct

SEQ ID NO: 128168 - DNA, 17 bp, synthetic construct
  source 1..17: mol_type = other DNA
gtggccaccccctcctc

SEQ ID NO: 128169 - DNA, 17 bp, synthetic construct
  source 1..17: mol_type = other DNA
tggccaccccctcctcc

SEQ ID NO: 128170 - DNA, 17 bp, synthetic construct
  source 1..17: mol_type = other DNA
ggccaccccctcctcca

SEQ ID NO: 128171 - DNA, 17 bp, synthetic construct
  source 1..17: mol_type = other DNA
gccaccccctcctccac

SEQ ID NO: 128172 - DNA, 17 bp, synthetic construct
  source 1..17: mol_type = other DNA
ccaccccctcctccacc

SEQ ID NO: 128173 - DNA, 17 bp, synthetic construct
  source 1..17: mol_type = other DNA
caccccctcctccaccc

SEQ ID NO: 128174 - DNA, 17 bp, synthetic construct
  source 1..17: mol_type = other DNA
accccctcctccacccc

SEQ ID NO: 128175 - DNA, 17 bp, synthetic construct
  source 1..17: mol_type = other DNA
ccccctcctccacccca

SEQ ID NO: 128176 - DNA, 17 bp, synthetic construct
  source 1..17: mol_type = other DNA
cccctcctccaccccag

SEQ ID NO: 128177 - DNA, 17 bp, synthetic construct
  source 1..17: mol_type = other DNA
ccctcctccaccccagg

SEQ ID NO: 128178 - DNA, 17 bp, synthetic construct
  source 1..17: mol_type = other DNA
cctcctccaccccagga

SEQ ID NO: 128179 - DNA, 17 bp, synthetic construct
  source 1..17: mol_type = other DNA
ctcctccaccccaggaa

SEQ ID NO: 128180 - DNA, 17 bp, synthetic construct
  source 1..17: mol_type = other DNA
tcctccaccccaggaac

SEQ ID NO: 128181 - DNA, 17 bp, synthetic construct
  source 1..17: mol_type = other DNA
cctccaccccaggaaca

SEQ ID NO: 128182 - DNA, 17 bp, synthetic construct
  source 1..17: mol_type = other DNA
ctccaccccaggaacag

SEQ ID NO: 128183 - DNA, 17 bp, synthetic construct
  source 1..17: mol_type = other DNA
tccaccccaggaacagc

SEQ ID NO: 128184 - DNA, 17 bp, synthetic construct
  source 1..17: mol_type = other DNA
ccaccccaggaacagct

SEQ ID NO: 128185 - DNA, 17 bp, synthetic construct
  source 1..17: mol_type = other DNA
caccccaggaacagctc

SEQ ID NO: 128186 - DNA, 17 bp, synthetic construct
  source 1..17: mol_type = other DNA
accccaggaacagctca

SEQ ID NO: 128187 - DNA, 17 bp, synthetic construct
  source 1..17: mol_type = other DNA
ccccaggaacagctcac

SEQ ID NO: 128188 - DNA, 17 bp, synthetic construct
  source 1..17: mol_type = other DNA
cccaggaacagctcaca

SEQ ID NO: 128189 - DNA, 17 bp, synthetic construct
  source 1..17: mol_type = other DNA
ccaggaacagctcacac

SEQ ID NO: 128190 - DNA, 17 bp, synthetic construct
  source 1..17: mol_type = other DNA
caggaacagctcacact

SEQ ID NO: 128191 - DNA, 17 bp, synthetic construct
  source 1..17: mol_type = other DNA
aggaacagctcacacta

SEQ ID NO: 128192 - DNA, 17 bp, synthetic construct
  source 1..17: mol_type = other DNA
ggaacagctcacactac

SEQ ID NO: 128193 - DNA, 17 bp, synthetic construct
  source 1..17: mol_type = other DNA
gaacagctcacactacc

SEQ ID NO: 128194 - DNA, 17 bp, synthetic construct
  source 1..17: mol_type = other DNA
aacagctcacactacca

SEQ ID NO: 128195 - DNA, 17 bp, synthetic construct
  source 1..17: mol_type = other DNA
acagctcacactaccaa

SEQ ID NO: 128196 - DNA, 17 bp, synthetic construct
  source 1..17: mol_type = other DNA
cagctcacactaccaaa

SEQ ID NO: 128197 - DNA, 17 bp, synthetic construct
  source 1..17: mol_type = other DNA
agctcacactaccaaag

SEQ ID NO: 128198 - DNA, 17 bp, synthetic construct
  source 1..17: mol_type = other DNA
gctcacactaccaaagt

SEQ ID NO: 128199 - DNA, 17 bp, synthetic construct
  source 1..17: mol_type = other DNA
ctcacactaccaaagtg

SEQ ID NO: 128200 - DNA, 17 bp, synthetic construct
  source 1..17: mol_type = other DNA
tcacactaccaaagtgc

SEQ ID NO: 128201 - DNA, 17 bp, synthetic construct
  source 1..17: mol_type = other DNA
cacactaccaaagtgcc

SEQ ID NO: 128202 - DNA, 17 bp, synthetic construct
  source 1..17: mol_type = other DNA
acactaccaaagtgcca

SEQ ID NO: 128203 - DNA, 17 bp, synthetic construct
  source 1..17: mol_type = other DNA
cactaccaaagtgccaa

SEQ ID NO: 128204 - DNA, 17 bp, synthetic construct
  source 1..17: mol_type = other DNA
actaccaaagtgccaac

SEQ ID NO: 128205 - DNA, 17 bp, synthetic construct
  source 1..17: mol_type = other DNA
ctaccaaagtgccaact

SEQ ID NO: 128206 - DNA, 17 bp, synthetic construct
  source 1..17: mol_type = other DNA
taccaaagtgccaacta

SEQ ID NO: 128207 - DNA, 17 bp, synthetic construct
  source 1..17: mol_type = other DNA
accaaagtgccaactac

SEQ ID NO: 128208 - DNA, 17 bp, synthetic construct
  source 1..17: mol_type = other DNA
ccaaagtgccaactacc

SEQ ID NO: 128209 - DNA, 17 bp, synthetic construct
  source 1..17: mol_type = other DNA
caaagtgccaactacca

SEQ ID NO: 128210 - DNA, 17 bp, synthetic construct
  source 1..17: mol_type = other DNA
aaagtgccaactaccac

SEQ ID NO: 128211 - DNA, 17 bp, synthetic construct
  source 1..17: mol_type = other DNA
aagtgccaactaccaca

SEQ ID NO: 128212 - DNA, 17 bp, synthetic construct
  source 1..17: mol_type = other DNA
agtgccaactaccacaa

SEQ ID NO: 128213 - DNA, 17 bp, synthetic construct
  source 1..17: mol_type = other DNA
gtgccaactaccacaac

SEQ ID NO: 128214 - DNA, 17 bp, synthetic construct
  source 1..17: mol_type = other DNA
tgccaactaccacaacc

SEQ ID NO: 128215 - DNA, 17 bp, synthetic construct
  source 1..17: mol_type = other DNA
gccaactaccacaacca

SEQ ID NO: 128216 - DNA, 17 bp, synthetic construct
  source 1..17: mol_type = other DNA
ccaactaccacaaccac

SEQ ID NO: 128217 - DNA, 17 bp, synthetic construct
  source 1..17: mol_type = other DNA
caactaccacaaccacg

SEQ ID NO: 128218 - DNA, 17 bp, synthetic construct
  source 1..17: mol_type = other DNA
aactaccacaaccacgg

SEQ ID NO: 128219 - DNA, 17 bp, synthetic construct
  source 1..17: mol_type = other DNA
actaccacaaccacggg

SEQ ID NO: 128220 - DNA, 17 bp, synthetic construct
  source 1..17: mol_type = other DNA
ctaccacaaccacgggc

SEQ ID NO: 128221 - DNA, 17 bp, synthetic construct
  source 1..17: mol_type = other DNA
taccacaaccacgggct

SEQ ID NO: 128222 - DNA, 17 bp, synthetic construct
  source 1..17: mol_type = other DNA
accacaaccacgggctt

SEQ ID NO: 128223 - DNA, 17 bp, synthetic construct
  source 1..17: mol_type = other DNA
ccacaaccacgggcttc

SEQ ID NO: 128224 - DNA, 17 bp, synthetic construct
  source 1..17: mol_type = other DNA
cacaaccacgggcttca

SEQ ID NO: 128225 - DNA, 17 bp, synthetic construct
  source 1..17: mol_type = other DNA
acaaccacgggcttcac

SEQ ID NO: 128226 - DNA, 17 bp, synthetic construct
  source 1..17: mol_type = other DNA
caaccacgggcttcaca

SEQ ID NO: 128227 - DNA, 17 bp, synthetic construct
  source 1..17: mol_type = other DNA
aaccacgggcttcacag

SEQ ID NO: 128228 - DNA, 17 bp, synthetic construct
  source 1..17: mol_type = other DNA
accacgggcttcacagc

SEQ ID NO: 128229 - DNA, 17 bp, synthetic construct
  source 1..17: mol_type = other DNA
ccacgggcttcacagcc

SEQ ID NO: 128230 - DNA, 17 bp, synthetic construct
  source 1..17: mol_type = other DNA
cacgggcttcacagcca

SEQ ID NO: 128231 - DNA, 17 bp, synthetic construct
  source 1..17: mol_type = other DNA
acgggcttcacagccac

SEQ ID NO: 128232 - DNA, 17 bp, synthetic construct
  source 1..17: mol_type = other DNA
cgggcttcacagccacc

SEQ ID NO: 128233 - DNA, 17 bp, synthetic construct
  source 1..17: mol_type = other DNA
gggcttcacagccaccc

SEQ ID NO: 128234 - DNA, 17 bp, synthetic construct
  source 1..17: mol_type = other DNA
ggcttcacagccacccc

SEQ ID NO: 128235 - DNA, 17 bp, synthetic construct
  source 1..17: mol_type = other DNA
gcttcacagccaccccc

SEQ ID NO: 128236 - DNA, 17 bp, synthetic construct
  source 1..17: mol_type = other DNA
cttcacagccaccccct

SEQ ID NO: 128237 - DNA, 17 bp, synthetic construct
  source 1..17: mol_type = other DNA
ttcacagccaccccctc

SEQ ID NO: 128238 - DNA, 17 bp, synthetic construct
  source 1..17: mol_type = other DNA
tcacagccaccccctcc

SEQ ID NO: 128239 - DNA, 17 bp, synthetic construct
  source 1..17: mol_type = other DNA
cacagccaccccctcct

SEQ ID NO: 128240 - DNA, 17 bp, synthetic construct
  source 1..17: mol_type = other DNA
acagccaccccctcctc

SEQ ID NO: 128241 - DNA, 17 bp, synthetic construct
  source 1..17: mol_type = other DNA
cagccaccccctcctcc

SEQ ID NO: 128242 - DNA, 17 bp, synthetic construct
  source 1..17: mol_type = other DNA
agccaccccctcctcca

SEQ ID NO: 128243 - DNA, 17 bp, synthetic construct
  source 1..17: mol_type = other DNA
gccaccccctcctccag

SEQ ID NO: 128244 - DNA, 17 bp, synthetic construct
  source 1..17: mol_type = other DNA
ccaccccctcctccagc

SEQ ID NO: 128245 - DNA, 17 bp, synthetic construct
  source 1..17: mol_type = other DNA
caccccctcctccagcc

SEQ ID NO: 128246 - DNA, 17 bp, synthetic construct
  source 1..17: mol_type = other DNA
accccctcctccagccc

SEQ ID NO: 128247 - DNA, 17 bp, synthetic construct
  source 1..17: mol_type = other DNA
ccccctcctccagccca

SEQ ID NO: 128248 - DNA, 17 bp, synthetic construct
  source 1..17: mol_type = other DNA
cccctcctccagcccag

SEQ ID NO: 128249 - DNA, 17 bp, synthetic construct
  source 1..17: mol_type = other DNA
ccctcctccagcccagg

SEQ ID NO: 128250 - DNA, 17 bp, synthetic construct
  source 1..17: mol_type = other DNA
cctcctccagcccaggg

SEQ ID NO: 128251 - DNA, 17 bp, synthetic construct
  source 1..17: mol_type = other DNA
ctcctccagcccaggga

SEQ ID NO: 128252 - DNA, 17 bp, synthetic construct
  source 1..17: mol_type = other DNA
tcctccagcccagggac

SEQ ID NO: 128253 - DNA, 17 bp, synthetic construct
  source 1..17: mol_type = other DNA
cctccagcccagggacg

SEQ ID NO: 128254 - DNA, 17 bp, synthetic construct
  source 1..17: mol_type = other DNA
ctccagcccagggacgg

SEQ ID NO: 128255 - DNA, 17 bp, synthetic construct
  source 1..17: mol_type = other DNA
tccagcccagggacggc

SEQ ID NO: 128256 - DNA, 17 bp, synthetic construct
  source 1..17: mol_type = other DNA
ccagcccagggacggca

SEQ ID NO: 128257 - DNA, 17 bp, synthetic construct
  source 1..17: mol_type = other DNA
cagcccagggacggcac

SEQ ID NO: 128258 - DNA, 17 bp, synthetic construct
  source 1..17: mol_type = other DNA
agcccagggacggcact

SEQ ID NO: 128259 - DNA, 17 bp, synthetic construct
  source 1..17: mol_type = other DNA
gcccagggacggcactc

SEQ ID NO: 128260 - DNA, 17 bp, synthetic construct
  source 1..17: mol_type = other DNA
cccagggacggcactca

SEQ ID NO: 128261 - DNA, 17 bp, synthetic construct
  source 1..17: mol_type = other DNA
ccagggacggcactcac

SEQ ID NO: 128262 - DNA, 17 bp, synthetic construct
  source 1..17: mol_type = other DNA
cagggacggcactcacg

SEQ ID NO: 128263 - DNA, 17 bp, synthetic construct
  source 1..17: mol_type = other DNA
agggacggcactcacgc

SEQ ID NO: 128264 - DNA, 17 bp, synthetic construct
  source 1..17: mol_type = other DNA
gggacggcactcacgcc

SEQ ID NO: 128265 - DNA, 17 bp, synthetic construct
  source 1..17: mol_type = other DNA
ggacggcactcacgcct

SEQ ID NO: 128266 - DNA, 17 bp, synthetic construct
  source 1..17: mol_type = other DNA
gacggcactcacgcctc

SEQ ID NO: 128267 - DNA, 17 bp, synthetic construct
  source 1..17: mol_type = other DNA
acggcactcacgcctcc

SEQ ID NO: 128268 - DNA, 17 bp, synthetic construct
  source 1..17: mol_type = other DNA
cggcactcacgcctcca

SEQ ID NO: 128269 - DNA, 17 bp, synthetic construct
  source 1..17: mol_type = other DNA
ggcactcacgcctccag

SEQ ID NO: 128270 - DNA, 17 bp, synthetic construct
  source 1..17: mol_type = other DNA
gcactcacgcctccagt

SEQ ID NO: 128271 - DNA, 17 bp, synthetic construct
  source 1..17: mol_type = other DNA
cactcacgcctccagtg

SEQ ID NO: 128272 - DNA, 17 bp, synthetic construct
  source 1..17: mol_type = other DNA
actcacgcctccagtgt

SEQ ID NO: 128273 - DNA, 17 bp, synthetic construct
  source 1..17: mol_type = other DNA
ctcacgcctccagtgtg

SEQ ID NO: 128274 - DNA, 17 bp, synthetic construct
  source 1..17: mol_type = other DNA
tcacgcctccagtgtgg

SEQ ID NO: 128275 - DNA, 17 bp, synthetic construct
  source 1..17: mol_type = other DNA
cacgcctccagtgtgga

SEQ ID NO: 128276 - DNA, 17 bp, synthetic construct
  source 1..17: mol_type = other DNA
acgcctccagtgtggat

SEQ ID NO: 128277 - DNA, 17 bp, synthetic construct
  source 1..17: mol_type = other DNA
cgcctccagtgtggatc

SEQ ID NO: 128278 - DNA, 17 bp, synthetic construct
  source 1..17: mol_type = other DNA
gcctccagtgtggatca

SEQ ID NO: 128279 - DNA, 17 bp, synthetic construct
  source 1..17: mol_type = other DNA
cctccagtgtggatcag

SEQ ID NO: 128280 - DNA, 17 bp, synthetic construct
  source 1..17: mol_type = other DNA
ctccagtgtggatcagc

SEQ ID NO: 128281 - DNA, 17 bp, synthetic construct
  source 1..17: mol_type = other DNA
tccagtgtggatcagca

SEQ ID NO: 128282 - DNA, 17 bp, synthetic construct
  source 1..17: mol_type = other DNA
ccagtgtggatcagcac

SEQ ID NO: 128283 - DNA, 17 bp, synthetic construct
  source 1..17: mol_type = other DNA
cagtgtggatcagcaca

SEQ ID NO: 128284 - DNA, 17 bp, synthetic construct
  source 1..17: mol_type = other DNA
agtgtggatcagcacaa

SEQ ID NO: 128285 - DNA, 17 bp, synthetic construct
  source 1..17: mol_type = other DNA
gtgtggatcagcacaac

SEQ ID NO: 128286 - DNA, 17 bp, synthetic construct
  source 1..17: mol_type = other DNA
tgtggatcagcacaacc

SEQ ID NO: 128287 - DNA, 17 bp, synthetic construct
  source 1..17: mol_type = other DNA
gtggatcagcacaacca

SEQ ID NO: 128288 - DNA, 17 bp, synthetic construct
  source 1..17: mol_type = other DNA
tggatcagcacaaccac

SEQ ID NO: 128289 - DNA, 17 bp, synthetic construct
  source 1..17: mol_type = other DNA
ggatcagcacaaccacc

SEQ ID NO: 128290 - DNA, 17 bp, synthetic construct
  source 1..17: mol_type = other DNA
gatcagcacaaccacca

SEQ ID NO: 128291 - DNA, 17 bp, synthetic construct
  source 1..17: mol_type = other DNA
atcagcacaaccaccac

SEQ ID NO: 128292 - DNA, 17 bp, synthetic construct
  source 1..17: mol_type = other DNA
tcagcacaaccaccaca

SEQ ID NO: 128293 - DNA, 17 bp, synthetic construct
  source 1..17: mol_type = other DNA
cagcacaaccaccacac

SEQ ID NO: 128294 - DNA, 17 bp, synthetic construct
  source 1..17: mol_type = other DNA
agcacaaccaccacacc

SEQ ID NO: 128295 - DNA, 17 bp, synthetic construct
  source 1..17: mol_type = other DNA
gcacaaccaccacaccc

SEQ ID NO: 128296 - DNA, 17 bp, synthetic construct
  source 1..17: mol_type = other DNA
cacaaccaccacaccca

SEQ ID NO: 128297 - DNA, 17 bp, synthetic construct
  source 1..17: mol_type = other DNA
acaaccaccacacccac

SEQ ID NO: 128298 - DNA, 17 bp, synthetic construct
  source 1..17: mol_type = other DNA
caaccaccacacccaca

SEQ ID NO: 128299 - DNA, 17 bp, synthetic construct
  source 1..17: mol_type = other DNA
aaccaccacacccacaa

SEQ ID NO: 128300 - DNA, 17 bp, synthetic construct
  source 1..17: mol_type = other DNA
accaccacacccacaac

SEQ ID NO: 128301 - DNA, 17 bp, synthetic construct
  source 1..17: mol_type = other DNA
ccaccacacccacaacc

SEQ ID NO: 128302 - DNA, 17 bp, synthetic construct
  source 1..17: mol_type = other DNA
caccacacccacaacca

SEQ ID NO: 128303 - DNA, 17 bp, synthetic construct
  source 1..17: mol_type = other DNA
accacacccacaaccag

SEQ ID NO: 128304 - DNA, 17 bp, synthetic construct
  source 1..17: mol_type = other DNA
ccacacccacaaccaga

SEQ ID NO: 128305 - DNA, 17 bp, synthetic construct
  source 1..17: mol_type = other DNA
cacacccacaaccagag

SEQ ID NO: 128306 - DNA, 17 bp, synthetic construct
  source 1..17: mol_type = other DNA
acacccacaaccagagg

SEQ ID NO: 128307 - DNA, 17 bp, synthetic construct
  source 1..17: mol_type = other DNA
cacccacaaccagaggc

SEQ ID NO: 128308 - DNA, 17 bp, synthetic construct
  source 1..17: mol_type = other DNA
acccacaaccagaggct

SEQ ID NO: 128309 - DNA, 17 bp, synthetic construct
  source 1..17: mol_type = other DNA
cccacaaccagaggctc

SEQ ID NO: 128310 - DNA, 17 bp, synthetic construct
  source 1..17: mol_type = other DNA
ccacaaccagaggctcc

SEQ ID NO: 128311 - DNA, 17 bp, synthetic construct
  source 1..17: mol_type = other DNA
cacaaccagaggctcca

SEQ ID NO: 128312 - DNA, 17 bp, synthetic construct
  source 1..17: mol_type = other DNA
acaaccagaggctccac

SEQ ID NO: 128313 - DNA, 17 bp, synthetic construct
  source 1..17: mol_type = other DNA
caaccagaggctccacg

SEQ ID NO: 128314 - DNA, 17 bp, synthetic construct
  source 1..17: mol_type = other DNA
aaccagaggctccacgg

SEQ ID NO: 128315 - DNA, 17 bp, synthetic construct
  source 1..17: mol_type = other DNA
accagaggctccacggt

SEQ ID NO: 128316 - DNA, 17 bp, synthetic construct
  source 1..17: mol_type = other DNA
ccagaggctccacggtg

SEQ ID NO: 128317 - DNA, 17 bp, synthetic construct
  source 1..17: mol_type = other DNA
cagaggctccacggtga

SEQ ID NO: 128318 - DNA, 17 bp, synthetic construct
  source 1..17: mol_type = other DNA
agaggctccacggtgac

SEQ ID NO: 128319 - DNA, 17 bp, synthetic construct
  source 1..17: mol_type = other DNA
gaggctccacggtgacc

SEQ ID NO: 128320 - DNA, 17 bp, synthetic construct
  source 1..17: mol_type = other DNA
aggctccacggtgaccc

SEQ ID NO: 128321 - DNA, 17 bp, synthetic construct
  source 1..17: mol_type = other DNA
ggctccacggtgacccc

SEQ ID NO: 128322 - DNA, 17 bp, synthetic construct
  source 1..17: mol_type = other DNA
gctccacggtgaccccc

SEQ ID NO: 128323 - DNA, 17 bp, synthetic construct
  source 1..17: mol_type = other DNA
ctccacggtgaccccct

SEQ ID NO: 128324 - DNA, 17 bp, synthetic construct
  source 1..17: mol_type = other DNA
tccacggtgaccccctc

SEQ ID NO: 128325 - DNA, 17 bp, synthetic construct
  source 1..17: mol_type = other DNA
ccacggtgaccccctcc

SEQ ID NO: 128326 - DNA, 17 bp, synthetic construct
  source 1..17: mol_type = other DNA
cacggtgaccccctcct

SEQ ID NO: 128327 - DNA, 17 bp, synthetic construct
  source 1..17: mol_type = other DNA
acggtgaccccctcctc

SEQ ID NO: 128328 - DNA, 17 bp, synthetic construct
  source 1..17: mol_type = other DNA
cggtgaccccctcctcc

SEQ ID NO: 128329 - DNA, 17 bp, synthetic construct
  source 1..17: mol_type = other DNA
ggtgaccccctcctcca

SEQ ID NO: 128330 - DNA, 17 bp, synthetic construct
  source 1..17: mol_type = other DNA
gtgaccccctcctccat

SEQ ID NO: 128331 - DNA, 17 bp, synthetic construct
  source 1..17: mol_type = other DNA
tgaccccctcctccatc

SEQ ID NO: 128332 - DNA, 17 bp, synthetic construct
  source 1..17: mol_type = other DNA
gaccccctcctccatcc

SEQ ID NO: 128333 - DNA, 17 bp, synthetic construct
  source 1..17: mol_type = other DNA
accccctcctccatccc

SEQ ID NO: 128334 - DNA, 17 bp, synthetic construct
  source 1..17: mol_type = other DNA
ccccctcctccatcccg

SEQ ID NO: 128335 - DNA, 17 bp, synthetic construct
  source 1..17: mol_type = other DNA
cccctcctccatcccgg

SEQ ID NO: 128336 - DNA, 17 bp, synthetic construct
  source 1..17: mol_type = other DNA
ccctcctccatcccggg

SEQ ID NO: 128337 - DNA, 17 bp, synthetic construct
  source 1..17: mol_type = other DNA
cctcctccatcccgggg

SEQ ID NO: 128338 - DNA, 17 bp, synthetic construct
  source 1..17: mol_type = other DNA
ctcctccatcccgggga

SEQ ID NO: 128339 - DNA, 17 bp, synthetic construct
  source 1..17: mol_type = other DNA
tcctccatcccggggac

SEQ ID NO: 128340 - DNA, 17 bp, synthetic construct
  source 1..17: mol_type = other DNA
cctccatcccggggacc

SEQ ID NO: 128341 - DNA, 17 bp, synthetic construct
  source 1..17: mol_type = other DNA
ctccatcccggggacca

SEQ ID NO: 128342 - DNA, 17 bp, synthetic construct
  source 1..17: mol_type = other DNA
tccatcccggggaccac

SEQ ID NO: 128343 - DNA, 17 bp, synthetic construct
  source 1..17: mol_type = other DNA
ccatcccggggaccacc

SEQ ID NO: 128344 - DNA, 17 bp, synthetic construct
  source 1..17: mol_type = other DNA
catcccggggaccaccc

SEQ ID NO: 128345 - DNA, 17 bp, synthetic construct
  source 1..17: mol_type = other DNA
atcccggggaccaccca

SEQ ID NO: 128346 - DNA, 17 bp, synthetic construct
  source 1..17: mol_type = other DNA
tcccggggaccacccac

SEQ ID NO: 128347 - DNA, 17 bp, synthetic construct
  source 1..17: mol_type = other DNA
cccggggaccacccaca

SEQ ID NO: 128348 - DNA, 17 bp, synthetic construct
  source 1..17: mol_type = other DNA
ccggggaccacccacac

SEQ ID NO: 128349 - DNA, 17 bp, synthetic construct
  source 1..17: mol_type = other DNA
cggggaccacccacacc

SEQ ID NO: 128350 - DNA, 17 bp, synthetic construct
  source 1..17: mol_type = other DNA
ggggaccacccacaccg

SEQ ID NO: 128351 - DNA, 17 bp, synthetic construct
  source 1..17: mol_type = other DNA
gggaccacccacaccgc

SEQ ID NO: 128352 - DNA, 17 bp, synthetic construct
  source 1..17: mol_type = other DNA
ggaccacccacaccgcc

SEQ ID NO: 128353 - DNA, 17 bp, synthetic construct
  source 1..17: mol_type = other DNA
gaccacccacaccgcca

SEQ ID NO: 128354 - DNA, 17 bp, synthetic construct
  source 1..17: mol_type = other DNA
accacccacaccgccac

SEQ ID NO: 128355 - DNA, 17 bp, synthetic construct
  source 1..17: mol_type = other DNA
ccacccacaccgccaca

SEQ ID NO: 128356 - DNA, 17 bp, synthetic construct
  source 1..17: mol_type = other DNA
cacccacaccgccacag

SEQ ID NO: 128357 - DNA, 17 bp, synthetic construct
  source 1..17: mol_type = other DNA
acccacaccgccacagt

SEQ ID NO: 128358 - DNA, 17 bp, synthetic construct
  source 1..17: mol_type = other DNA
cccacaccgccacagtg

SEQ ID NO: 128359 - DNA, 17 bp, synthetic construct
  source 1..17: mol_type = other DNA
ccacaccgccacagtgc

SEQ ID NO: 128360 - DNA, 17 bp, synthetic construct
  source 1..17: mol_type = other DNA
cacaccgccacagtgct

SEQ ID NO: 128361 - DNA, 17 bp, synthetic construct
  source 1..17: mol_type = other DNA
acaccgccacagtgctg

SEQ ID NO: 128362 - DNA, 17 bp, synthetic construct
  source 1..17: mol_type = other DNA
caccgccacagtgctga

SEQ ID NO: 128363 - DNA, 17 bp, synthetic construct
  source 1..17: mol_type = other DNA
accgccacagtgctgac

SEQ ID NO: 128364 - DNA, 17 bp, synthetic construct
  source 1..17: mol_type = other DNA
ccgccacagtgctgacc

SEQ ID NO: 128365 - DNA, 17 bp, synthetic construct
  source 1..17: mol_type = other DNA
cgccacagtgctgacca

SEQ ID NO: 128366 - DNA, 17 bp, synthetic construct
  source 1..17: mol_type = other DNA
gccacagtgctgaccac

SEQ ID NO: 128367 - DNA, 17 bp, synthetic construct
  source 1..17: mol_type = other DNA
ccacagtgctgaccacc

SEQ ID NO: 128368 - DNA, 17 bp, synthetic construct
  source 1..17: mol_type = other DNA
cacagtgctgaccacca

SEQ ID NO: 128369 - DNA, 17 bp, synthetic construct
  source 1..17: mol_type = other DNA
acagtgctgaccaccac

SEQ ID NO: 128370 - DNA, 17 bp, synthetic construct
  source 1..17: mol_type = other DNA
cagtgctgaccaccacc

SEQ ID NO: 128371 - DNA, 17 bp, synthetic construct
  source 1..17: mol_type = other DNA
agtgctgaccaccacca

SEQ ID NO: 128372 - DNA, 17 bp, synthetic construct
  source 1..17: mol_type = other DNA
gtgctgaccaccaccac

SEQ ID NO: 128373 - DNA, 17 bp, synthetic construct
  source 1..17: mol_type = other DNA
tgctgaccaccaccacc

SEQ ID NO: 128374 - DNA, 17 bp, synthetic construct
  source 1..17: mol_type = other DNA
gctgaccaccaccacca

SEQ ID NO: 128375 - DNA, 17 bp, synthetic construct
  source 1..17: mol_type = other DNA
ctgaccaccaccaccac

SEQ ID NO: 128376 - DNA, 17 bp, synthetic construct
  source 1..17: mol_type = other DNA
tgaccaccaccaccaca

SEQ ID NO: 128377 - DNA, 17 bp, synthetic construct
  source 1..17: mol_type = other DNA
gaccaccaccaccacaa

SEQ ID NO: 128378 - DNA, 17 bp, synthetic construct
  source 1..17: mol_type = other DNA
accaccaccaccacaac

SEQ ID NO: 128379 - DNA, 17 bp, synthetic construct
  source 1..17: mol_type = other DNA
ccaccaccaccacaact

SEQ ID NO: 128380 - DNA, 17 bp, synthetic construct
  source 1..17: mol_type = other DNA
caccaccaccacaactg

SEQ ID NO: 128381 - DNA, 17 bp, synthetic construct
  source 1..17: mol_type = other DNA
accaccaccacaactgt

SEQ ID NO: 128382 - DNA, 17 bp, synthetic construct
  source 1..17: mol_type = other DNA
ccaccaccacaactgtg

SEQ ID NO: 128383 - DNA, 17 bp, synthetic construct
  source 1..17: mol_type = other DNA
caccaccacaactgtgg

SEQ ID NO: 128384 - DNA, 17 bp, synthetic construct
  source 1..17: mol_type = other DNA
accaccacaactgtggc

SEQ ID NO: 128385 - DNA, 17 bp, synthetic construct
  source 1..17: mol_type = other DNA
ccaccacaactgtggcc

SEQ ID NO: 128386 - DNA, 17 bp, synthetic construct
  source 1..17: mol_type = other DNA
caccacaactgtggcca

SEQ ID NO: 128387 - DNA, 17 bp, synthetic construct
  source 1..17: mol_type = other DNA
accacaactgtggccac

SEQ ID NO: 128388 - DNA, 17 bp, synthetic construct
  source 1..17: mol_type = other DNA
ccacaactgtggccact

SEQ ID NO: 128389 - DNA, 17 bp, synthetic construct
  source 1..17: mol_type = other DNA
cacaactgtggccactg

SEQ ID NO: 128390 - DNA, 17 bp, synthetic construct
  source 1..17: mol_type = other DNA
acaactgtggccactgg

SEQ ID NO: 128391 - DNA, 17 bp, synthetic construct
  source 1..17: mol_type = other DNA
caactgtggccactggt

SEQ ID NO: 128392 - DNA, 17 bp, synthetic construct
  source 1..17: mol_type = other DNA
aactgtggccactggtt

SEQ ID NO: 128393 - DNA, 17 bp, synthetic construct
  source 1..17: mol_type = other DNA
actgtggccactggttc

SEQ ID NO: 128394 - DNA, 17 bp, synthetic construct
  source 1..17: mol_type = other DNA
ctgtggccactggttct

SEQ ID NO: 128395 - DNA, 17 bp, synthetic construct
  source 1..17: mol_type = other DNA
tgtggccactggttcta

SEQ ID NO: 128396 - DNA, 17 bp, synthetic construct
  source 1..17: mol_type = other DNA
gtggccactggttctat

SEQ ID NO: 128397 - DNA, 17 bp, synthetic construct
  source 1..17: mol_type = other DNA
tggccactggttctatg

SEQ ID NO: 128398 - DNA, 17 bp, synthetic construct
  source 1..17: mol_type = other DNA
ggccactggttctatgg

SEQ ID NO: 128399 - DNA, 17 bp, synthetic construct
  source 1..17: mol_type = other DNA
gccactggttctatggc

SEQ ID NO: 128400 - DNA, 17 bp, synthetic construct
  source 1..17: mol_type = other DNA
ccactggttctatggca

SEQ ID NO: 128401 - DNA, 17 bp, synthetic construct
  source 1..17: mol_type = other DNA
cactggttctatggcaa

SEQ ID NO: 128402 - DNA, 17 bp, synthetic construct
  source 1..17: mol_type = other DNA
actggttctatggcaac

SEQ ID NO: 128403 - DNA, 17 bp, synthetic construct
  source 1..17: mol_type = other DNA
ctggttctatggcaaca

SEQ ID NO: 128404 - DNA, 17 bp, synthetic construct
  source 1..17: mol_type = other DNA
tggttctatggcaacac

SEQ ID NO: 128405 - DNA, 17 bp, synthetic construct
  source 1..17: mol_type = other DNA
ggttctatggcaacacc

SEQ ID NO: 128406 - DNA, 17 bp, synthetic construct
  source 1..17: mol_type = other DNA
gttctatggcaacaccc

SEQ ID NO: 128407 - DNA, 17 bp, synthetic construct
  source 1..17: mol_type = other DNA
ttctatggcaacaccct

SEQ ID NO: 128408 - DNA, 17 bp, synthetic construct
  source 1..17: mol_type = other DNA
tctatggcaacaccctc

SEQ ID NO: 128409 - DNA, 17 bp, synthetic construct
  source 1..17: mol_type = other DNA
ctatggcaacaccctcc

SEQ ID NO: 128410 - DNA, 17 bp, synthetic construct
  source 1..17: mol_type = other DNA
tatggcaacaccctcct

SEQ ID NO: 128411 - DNA, 17 bp, synthetic construct
  source 1..17: mol_type = other DNA
atggcaacaccctcctc

SEQ ID NO: 128412 - DNA, 17 bp, synthetic construct
  source 1..17: mol_type = other DNA
tggcaacaccctcctct

SEQ ID NO: 128413 - DNA, 17 bp, synthetic construct
  source 1..17: mol_type = other DNA
ggcaacaccctcctcta

SEQ ID NO: 128414 - DNA, 17 bp, synthetic construct
  source 1..17: mol_type = other DNA
gcaacaccctcctctag

SEQ ID NO: 128415 - DNA, 17 bp, synthetic construct
  source 1..17: mol_type = other DNA
caacaccctcctctagc

SEQ ID NO: 128416 - DNA, 17 bp, synthetic construct
  source 1..17: mol_type = other DNA
aacaccctcctctagca

SEQ ID NO: 128417 - DNA, 17 bp, synthetic construct
  source 1..17: mol_type = other DNA
acaccctcctctagcac

SEQ ID NO: 128418 - DNA, 17 bp, synthetic construct
  source 1..17: mol_type = other DNA
caccctcctctagcaca

SEQ ID NO: 128419 - DNA, 17 bp, synthetic construct
  source 1..17: mol_type = other DNA
accctcctctagcacac

SEQ ID NO: 128420 - DNA, 17 bp, synthetic construct
  source 1..17: mol_type = other DNA
ccctcctctagcacaca

SEQ ID NO: 128421 - DNA, 17 bp, synthetic construct
  source 1..17: mol_type = other DNA
cctcctctagcacacag

SEQ ID NO: 128422 - DNA, 17 bp, synthetic construct
  source 1..17: mol_type = other DNA
ctcctctagcacacaga

SEQ ID NO: 128423 - DNA, 17 bp, synthetic construct
  source 1..17: mol_type = other DNA
tcctctagcacacagac

SEQ ID NO: 128424 - DNA, 17 bp, synthetic construct
  source 1..17: mol_type = other DNA
cctctagcacacagacc

SEQ ID NO: 128425 - DNA, 17 bp, synthetic construct
  source 1..17: mol_type = other DNA
ctctagcacacagacca

SEQ ID NO: 128426 - DNA, 17 bp, synthetic construct
  source 1..17: mol_type = other DNA
tctagcacacagaccag

SEQ ID NO: 128427 - DNA, 17 bp, synthetic construct
  source 1..17: mol_type = other DNA
ctagcacacagaccagt

SEQ ID NO: 128428 - DNA, 17 bp, synthetic construct
  source 1..17: mol_type = other DNA
tagcacacagaccagtg

SEQ ID NO: 128429 - DNA, 17 bp, synthetic construct
  source 1..17: mol_type = other DNA
agcacacagaccagtgg

SEQ ID NO: 128430 - DNA, 17 bp, synthetic construct
  source 1..17: mol_type = other DNA
gcacacagaccagtggt

SEQ ID NO: 128431 - DNA, 17 bp, synthetic construct
  source 1..17: mol_type = other DNA
cacacagaccagtggta

SEQ ID NO: 128432 - DNA, 17 bp, synthetic construct
  source 1..17: mol_type = other DNA
acacagaccagtggtac

SEQ ID NO: 128433 - DNA, 17 bp, synthetic construct
  source 1..17: mol_type = other DNA
cacagaccagtggtact

SEQ ID NO: 128434 - DNA, 17 bp, synthetic construct
  source 1..17: mol_type = other DNA
acagaccagtggtactc

SEQ ID NO: 128435 - DNA, 17 bp, synthetic construct
  source 1..17: mol_type = other DNA
cagaccagtggtactcc

SEQ ID NO: 128436 - DNA, 17 bp, synthetic construct
  source 1..17: mol_type = other DNA
agaccagtggtactccc

SEQ ID NO: 128437 - DNA, 17 bp, synthetic construct
  source 1..17: mol_type = other DNA
gaccagtggtactcccc

SEQ ID NO: 128438 - DNA, 17 bp, synthetic construct
  source 1..17: mol_type = other DNA
accagtggtactccccc

SEQ ID NO: 128439 - DNA, 17 bp, synthetic construct
  source 1..17: mol_type = other DNA
ccagtggtactccccca

SEQ ID NO: 128440 - DNA, 17 bp, synthetic construct
  source 1..17: mol_type = other DNA
cagtggtactcccccat

SEQ ID NO: 128441 - DNA, 17 bp, synthetic construct
  source 1..17: mol_type = other DNA
agtggtactcccccatc

SEQ ID NO: 128442 - DNA, 17 bp, synthetic construct
  source 1..17: mol_type = other DNA
gtggtactcccccatca

SEQ ID NO: 128443 - DNA, 17 bp, synthetic construct
  source 1..17: mol_type = other DNA
tggtactcccccatcac

SEQ ID NO: 128444 - DNA, 17 bp, synthetic construct
  source 1..17: mol_type = other DNA
ggtactcccccatcact

SEQ ID NO: 128445 - DNA, 17 bp, synthetic construct
  source 1..17: mol_type = other DNA
gtactcccccatcactg

SEQ ID NO: 128446 - DNA, 17 bp, synthetic construct
  source 1..17: mol_type = other DNA
tactcccccatcactga

SEQ ID NO: 128447 - DNA, 17 bp, synthetic construct
  source 1..17: mol_type = other DNA
actcccccatcactgac

SEQ ID NO: 128448 - DNA, 17 bp, synthetic construct
  source 1..17: mol_type = other DNA
ctcccccatcactgacc

SEQ ID NO: 128449 - DNA, 17 bp, synthetic construct
  source 1..17: mol_type = other DNA
tcccccatcactgacca

SEQ ID NO: 128450 - DNA, 17 bp, synthetic construct
  source 1..17: mol_type = other DNA
cccccatcactgaccac

SEQ ID NO: 128451 - DNA, 17 bp, synthetic construct
  source 1..17: mol_type = other DNA
ccccatcactgaccacc

SEQ ID NO: 128452 - DNA, 17 bp, synthetic construct
  source 1..17: mol_type = other DNA
cccatcactgaccacca

SEQ ID NO: 128453 - DNA, 17 bp, synthetic construct
  source 1..17: mol_type = other DNA
ccatcactgaccaccac

SEQ ID NO: 128454 - DNA, 17 bp, synthetic construct
  source 1..17: mol_type = other DNA
catcactgaccaccacg

SEQ ID NO: 128455 - DNA, 17 bp, synthetic construct
  source 1..17: mol_type = other DNA
atcactgaccaccacgg

SEQ ID NO: 128456 - DNA, 17 bp, synthetic construct
  source 1..17: mol_type = other DNA
tcactgaccaccacggc

SEQ ID NO: 128457 - DNA, 17 bp, synthetic construct
  source 1..17: mol_type = other DNA
cactgaccaccacggcc

SEQ ID NO: 128458 - DNA, 17 bp, synthetic construct
  source 1..17: mol_type = other DNA
actgaccaccacggcca

SEQ ID NO: 128459 - DNA, 17 bp, synthetic construct
  source 1..17: mol_type = other DNA
ctgaccaccacggccac

SEQ ID NO: 128460 - DNA, 17 bp, synthetic construct
  source 1..17: mol_type = other DNA
tgaccaccacggccact

SEQ ID NO: 128461 - DNA, 17 bp, synthetic construct
  source 1..17: mol_type = other DNA
gaccaccacggccacta

SEQ ID NO: 128462 - DNA, 17 bp, synthetic construct
  source 1..17: mol_type = other DNA
accaccacggccactac

SEQ ID NO: 128463 - DNA, 17 bp, synthetic construct
  source 1..17: mol_type = other DNA
ccaccacggccactacg

SEQ ID NO: 128464 - DNA, 17 bp, synthetic construct
  source 1..17: mol_type = other DNA
caccacggccactacga

SEQ ID NO: 128465 - DNA, 17 bp, synthetic construct
  source 1..17: mol_type = other DNA
accacggccactacgat

SEQ ID NO: 128466 - DNA, 17 bp, synthetic construct
  source 1..17: mol_type = other DNA
ccacggccactacgatc

SEQ ID NO: 128467 - DNA, 17 bp, synthetic construct
  source 1..17: mol_type = other DNA
cacggccactacgatca

SEQ ID NO: 128468 - DNA, 17 bp, synthetic construct
  source 1..17: mol_type = other DNA
acggccactacgatcac

SEQ ID NO: 128469 - DNA, 17 bp, synthetic construct
  source 1..17: mol_type = other DNA
cggccactacgatcacg

SEQ ID NO: 128470 - DNA, 17 bp, synthetic construct
  source 1..17: mol_type = other DNA
ggccactacgatcacgg

SEQ ID NO: 128471 - DNA, 17 bp, synthetic construct
  source 1..17: mol_type = other DNA
gccactacgatcacggc

SEQ ID NO: 128472 - DNA, 17 bp, synthetic construct
  source 1..17: mol_type = other DNA
ccactacgatcacggcc

SEQ ID NO: 128473 - DNA, 17 bp, synthetic construct
  source 1..17: mol_type = other DNA
cactacgatcacggcca

SEQ ID NO: 128474 - DNA, 17 bp, synthetic construct
  source 1..17: mol_type = other DNA
actacgatcacggccac

SEQ ID NO: 128475 - DNA, 17 bp, synthetic construct
  source 1..17: mol_type = other DNA
ctacgatcacggccacc

SEQ ID NO: 128476 - DNA, 17 bp, synthetic construct
  source 1..17: mol_type = other DNA
tacgatcacggccaccg

SEQ ID NO: 128477 - DNA, 17 bp, synthetic construct
  source 1..17: mol_type = other DNA
acgatcacggccaccgg

SEQ ID NO: 128478 - DNA, 17 bp, synthetic construct
  source 1..17: mol_type = other DNA
cgatcacggccaccggc

SEQ ID NO: 128479 - DNA, 17 bp, synthetic construct
  source 1..17: mol_type = other DNA
gatcacggccaccggct

SEQ ID NO: 128480 - DNA, 17 bp, synthetic construct
  source 1..17: mol_type = other DNA
atcacggccaccggctc

SEQ ID NO: 128481 - DNA, 17 bp, synthetic construct
  source 1..17: mol_type = other DNA
tcacggccaccggctcc

SEQ ID NO: 128482 - DNA, 17 bp, synthetic construct
  source 1..17: mol_type = other DNA
cacggccaccggctcca

SEQ ID NO: 128483 - DNA, 17 bp, synthetic construct
  source 1..17: mol_type = other DNA
acggccaccggctccac

SEQ ID NO: 128484 - DNA, 17 bp, synthetic construct
  source 1..17: mol_type = other DNA
cggccaccggctccacc

SEQ ID NO: 128485 - DNA, 17 bp, synthetic construct
  source 1..17: mol_type = other DNA
ggccaccggctccacca

SEQ ID NO: 128486 - DNA, 17 bp, synthetic construct
  source 1..17: mol_type = other DNA
gccaccggctccaccac

SEQ ID NO: 128487 - DNA, 17 bp, synthetic construct
  source 1..17: mol_type = other DNA
ccaccggctccaccacc

SEQ ID NO: 128488 - DNA, 17 bp, synthetic construct
  source 1..17: mol_type = other DNA
caccggctccaccacca

SEQ ID NO: 128489 - DNA, 17 bp, synthetic construct
  source 1..17: mol_type = other DNA
accggctccaccaccaa

SEQ ID NO: 128490 - DNA, 17 bp, synthetic construct
  source 1..17: mol_type = other DNA
ccggctccaccaccaac

SEQ ID NO: 128491 - DNA, 17 bp, synthetic construct
  source 1..17: mol_type = other DNA
cggctccaccaccaacc

SEQ ID NO: 128492 - DNA, 17 bp, synthetic construct
  source 1..17: mol_type = other DNA
ggctccaccaccaaccc

SEQ ID NO: 128493 - DNA, 17 bp, synthetic construct
  source 1..17: mol_type = other DNA
gctccaccaccaacccc

SEQ ID NO: 128494 - DNA, 17 bp, synthetic construct
  source 1..17: mol_type = other DNA
ctccaccaccaacccct

SEQ ID NO: 128495 - DNA, 17 bp, synthetic construct
  source 1..17: mol_type = other DNA
tccaccaccaacccctc

SEQ ID NO: 128496 - DNA, 17 bp, synthetic construct
  source 1..17: mol_type = other DNA
ccaccaccaacccctcc

SEQ ID NO: 128497 - DNA, 17 bp, synthetic construct
  source 1..17: mol_type = other DNA
caccaccaacccctcct

SEQ ID NO: 128498 - DNA, 17 bp, synthetic construct
  source 1..17: mol_type = other DNA
accaccaacccctcctc

SEQ ID NO: 128499 - DNA, 17 bp, synthetic construct
  source 1..17: mol_type = other DNA
ccaccaacccctcctca

SEQ ID NO: 128500 - DNA, 17 bp, synthetic construct
  source 1..17: mol_type = other DNA
caccaacccctcctcaa

SEQ ID NO: 128501 - DNA, 17 bp, synthetic construct
  source 1..17: mol_type = other DNA
accaacccctcctcaac

SEQ ID NO: 128502 - DNA, 17 bp, synthetic construct
  source 1..17: mol_type = other DNA
ccaacccctcctcaact

SEQ ID NO: 128503 - DNA, 17 bp, synthetic construct
  source 1..17: mol_type = other DNA
caacccctcctcaactc

SEQ ID NO: 128504 - DNA, 17 bp, synthetic construct
  source 1..17: mol_type = other DNA
aacccctcctcaactcc

SEQ ID NO: 128505 - DNA, 17 bp, synthetic construct
  source 1..17: mol_type = other DNA
acccctcctcaactcct

SEQ ID NO: 128506 - DNA, 17 bp, synthetic construct
  source 1..17: mol_type = other DNA
cccctcctcaactcctg

SEQ ID NO: 128507 - DNA, 17 bp, synthetic construct
  source 1..17: mol_type = other DNA
ccctcctcaactcctgg

SEQ ID NO: 128508 - DNA, 17 bp, synthetic construct
  source 1..17: mol_type = other DNA
cctcctcaactcctggg

SEQ ID NO: 128509 - DNA, 17 bp, synthetic construct
  source 1..17: mol_type = other DNA
ctcctcaactcctggga

SEQ ID NO: 128510 - DNA, 17 bp, synthetic construct
  source 1..17: mol_type = other DNA
tcctcaactcctgggac

SEQ ID NO: 128511 - DNA, 17 bp, synthetic construct
  source 1..17: mol_type = other DNA
cctcaactcctgggaca

SEQ ID NO: 128512 - DNA, 17 bp, synthetic construct
  source 1..17: mol_type = other DNA
ctcaactcctgggacaa

SEQ ID NO: 128513 - DNA, 17 bp, synthetic construct
  source 1..17: mol_type = other DNA
tcaactcctgggacaac

SEQ ID NO: 128514 - DNA, 17 bp, synthetic construct
  source 1..17: mol_type = other DNA
caactcctgggacaact

SEQ ID NO: 128515 - DNA, 17 bp, synthetic construct
  source 1..17: mol_type = other DNA
aactcctgggacaactc

SEQ ID NO: 128516 - DNA, 17 bp, synthetic construct
  source 1..17: mol_type = other DNA
actcctgggacaactcc

SEQ ID NO: 128517 - DNA, 17 bp, synthetic construct
  source 1..17: mol_type = other DNA
ctcctgggacaactccc

SEQ ID NO: 128518 - DNA, 17 bp, synthetic construct
  source 1..17: mol_type = other DNA
tcctgggacaactccca

SEQ ID NO: 128519 - DNA, 17 bp, synthetic construct
  source 1..17: mol_type = other DNA
cctgggacaactcccat

SEQ ID NO: 128520 - DNA, 17 bp, synthetic construct
  source 1..17: mol_type = other DNA
ctgggacaactcccatc

SEQ ID NO: 128521 - DNA, 17 bp, synthetic construct
  source 1..17: mol_type = other DNA
tgggacaactcccatcc

SEQ ID NO: 128522 - DNA, 17 bp, synthetic construct
  source 1..17: mol_type = other DNA
gggacaactcccatccc

SEQ ID NO: 128523 - DNA, 17 bp, synthetic construct
  source 1..17: mol_type = other DNA
ggacaactcccatcccc

SEQ ID NO: 128524 - DNA, 17 bp, synthetic construct
  source 1..17: mol_type = other DNA
gacaactcccatccccc

SEQ ID NO: 128525 - DNA, 17 bp, synthetic construct
  source 1..17: mol_type = other DNA
acaactcccatcccccc

SEQ ID NO: 128526 - DNA, 17 bp, synthetic construct
  source 1..17: mol_type = other DNA
caactcccatcccccca

SEQ ID NO: 128527 - DNA, 17 bp, synthetic construct
  source 1..17: mol_type = other DNA
aactcccatccccccag

SEQ ID NO: 128528 - DNA, 17 bp, synthetic construct
  source 1..17: mol_type = other DNA
actcccatccccccagt

SEQ ID NO: 128529 - DNA, 17 bp, synthetic construct
  source 1..17: mol_type = other DNA
ctcccatccccccagtg

SEQ ID NO: 128530 - DNA, 17 bp, synthetic construct
  source 1..17: mol_type = other DNA
tcccatccccccagtgc

SEQ ID NO: 128531 - DNA, 17 bp, synthetic construct
  source 1..17: mol_type = other DNA
cccatccccccagtgct

SEQ ID NO: 128532 - DNA, 17 bp, synthetic construct
  source 1..17: mol_type = other DNA
ccatccccccagtgctg

SEQ ID NO: 128533 - DNA, 17 bp, synthetic construct
  source 1..17: mol_type = other DNA
catccccccagtgctga

SEQ ID NO: 128534 - DNA, 17 bp, synthetic construct
  source 1..17: mol_type = other DNA
atccccccagtgctgac

SEQ ID NO: 128535 - DNA, 17 bp, synthetic construct
  source 1..17: mol_type = other DNA
tccccccagtgctgacc

SEQ ID NO: 128536 - DNA, 17 bp, synthetic construct
  source 1..17: mol_type = other DNA
ccccccagtgctgacca

SEQ ID NO: 128537 - DNA, 17 bp, synthetic construct
  source 1..17: mol_type = other DNA
cccccagtgctgaccac

SEQ ID NO: 128538 - DNA, 17 bp, synthetic construct
  source 1..17: mol_type = other DNA
ccccagtgctgaccacc

SEQ ID NO: 128539 - DNA, 17 bp, synthetic construct
  source 1..17: mol_type = other DNA
cccagtgctgaccacca

SEQ ID NO: 128540 - DNA, 17 bp, synthetic construct
  source 1..17: mol_type = other DNA
ccagtgctgaccaccac

SEQ ID NO: 128541 - DNA, 17 bp, synthetic construct
  source 1..17: mol_type = other DNA
cagtgctgaccaccacc

SEQ ID NO: 128542 - DNA, 17 bp, synthetic construct
  source 1..17: mol_type = other DNA
agtgctgaccaccaccg

SEQ ID NO: 128543 - DNA, 17 bp, synthetic construct
  source 1..17: mol_type = other DNA
gtgctgaccaccaccgc

SEQ ID NO: 128544 - DNA, 17 bp, synthetic construct
  source 1..17: mol_type = other DNA
tgctgaccaccaccgcc

SEQ ID NO: 128545 - DNA, 17 bp, synthetic construct
  source 1..17: mol_type = other DNA
gctgaccaccaccgcca

SEQ ID NO: 128546 - DNA, 17 bp, synthetic construct
  source 1..17: mol_type = other DNA
ctgaccaccaccgccac

SEQ ID NO: 128547 - DNA, 17 bp, synthetic construct
  source 1..17: mol_type = other DNA
tgaccaccaccgccacc

SEQ ID NO: 128548 - DNA, 17 bp, synthetic construct
  source 1..17: mol_type = other DNA
gaccaccaccgccacca

SEQ ID NO: 128549 - DNA, 17 bp, synthetic construct
  source 1..17: mol_type = other DNA
accaccaccgccaccac

SEQ ID NO: 128550 - DNA, 17 bp, synthetic construct
  source 1..17: mol_type = other DNA
ccaccaccgccaccaca

SEQ ID NO: 128551 - DNA, 17 bp, synthetic construct
  source 1..17: mol_type = other DNA
caccaccgccaccacac

SEQ ID NO: 128552 - DNA, 17 bp, synthetic construct
  source 1..17: mol_type = other DNA
accaccgccaccacacc

SEQ ID NO: 128553 - DNA, 17 bp, synthetic construct
  source 1..17: mol_type = other DNA
ccaccgccaccacacct

SEQ ID NO: 128554 - DNA, 17 bp, synthetic construct
  source 1..17: mol_type = other DNA
caccgccaccacacctg

SEQ ID NO: 128555 - DNA, 17 bp, synthetic construct
  source 1..17: mol_type = other DNA
accgccaccacacctgc

SEQ ID NO: 128556 - DNA, 17 bp, synthetic construct
  source 1..17: mol_type = other DNA
ccgccaccacacctgca

SEQ ID NO: 128557 - DNA, 17 bp, synthetic construct
  source 1..17: mol_type = other DNA
cgccaccacacctgcag

SEQ ID NO: 128558 - DNA, 17 bp, synthetic construct
  source 1..17: mol_type = other DNA
gccaccacacctgcagc

SEQ ID NO: 128559 - DNA, 17 bp, synthetic construct
  source 1..17: mol_type = other DNA
ccaccacacctgcagcc

SEQ ID NO: 128560 - DNA, 17 bp, synthetic construct
  source 1..17: mol_type = other DNA
caccacacctgcagcca

SEQ ID NO: 128561 - DNA, 17 bp, synthetic construct
  source 1..17: mol_type = other DNA
accacacctgcagccac

SEQ ID NO: 128562 - DNA, 17 bp, synthetic construct
  source 1..17: mol_type = other DNA
ccacacctgcagccacc

SEQ ID NO: 128563 - DNA, 17 bp, synthetic construct
  source 1..17: mol_type = other DNA
cacacctgcagccacca

SEQ ID NO: 128564 - DNA, 17 bp, synthetic construct
  source 1..17: mol_type = other DNA
acacctgcagccaccag

SEQ ID NO: 128565 - DNA, 17 bp, synthetic construct
  source 1..17: mol_type = other DNA
cacctgcagccaccagc

SEQ ID NO: 128566 - DNA, 17 bp, synthetic construct
  source 1..17: mol_type = other DNA
acctgcagccaccagca

SEQ ID NO: 128567 - DNA, 17 bp, synthetic construct
  source 1..17: mol_type = other DNA
cctgcagccaccagcaa

SEQ ID NO: 128568 - DNA, 17 bp, synthetic construct
  source 1..17: mol_type = other DNA
ctgcagccaccagcaac

SEQ ID NO: 128569 - DNA, 17 bp, synthetic construct
  source 1..17: mol_type = other DNA
tgcagccaccagcaaca

SEQ ID NO: 128570 - DNA, 17 bp, synthetic construct
  source 1..17: mol_type = other DNA
gcagccaccagcaacac

SEQ ID NO: 128571 - DNA, 17 bp, synthetic construct
  source 1..17: mol_type = other DNA
cagccaccagcaacaca

SEQ ID NO: 128572 - DNA, 17 bp, synthetic construct
  source 1..17: mol_type = other DNA
agccaccagcaacacag

SEQ ID NO: 128573 - DNA, 17 bp, synthetic construct
  source 1..17: mol_type = other DNA
gccaccagcaacacagt

SEQ ID NO: 128574 - DNA, 17 bp, synthetic construct
  source 1..17: mol_type = other DNA
ccaccagcaacacagtg

SEQ ID NO: 128575 - DNA, 17 bp, synthetic construct
  source 1..17: mol_type = other DNA
caccagcaacacagtga

SEQ ID NO: 128576 - DNA, 17 bp, synthetic construct
  source 1..17: mol_type = other DNA
accagcaacacagtgac

SEQ ID NO: 128577 - DNA, 17 bp, synthetic construct
  source 1..17: mol_type = other DNA
ccagcaacacagtgact

SEQ ID NO: 128578 - DNA, 17 bp, synthetic construct
  source 1..17: mol_type = other DNA
cagcaacacagtgactc

SEQ ID NO: 128579 - DNA, 17 bp, synthetic construct
  source 1..17: mol_type = other DNA
agcaacacagtgactcc

SEQ ID NO: 128580 - DNA, 17 bp, synthetic construct
  source 1..17: mol_type = other DNA
gcaacacagtgactccc

SEQ ID NO: 128581 - DNA, 17 bp, synthetic construct
  source 1..17: mol_type = other DNA
caacacagtgactccct

SEQ ID NO: 128582 - DNA, 17 bp, synthetic construct
  source 1..17: mol_type = other DNA
aacacagtgactccctc

SEQ ID NO: 128583 - DNA, 17 bp, synthetic construct
  source 1..17: mol_type = other DNA
acacagtgactccctcc

SEQ ID NO: 128584 - DNA, 17 bp, synthetic construct
  source 1..17: mol_type = other DNA
cacagtgactccctcct

SEQ ID NO: 128585 - DNA, 17 bp, synthetic construct
  source 1..17: mol_type = other DNA
acagtgactccctcctc

SEQ ID NO: 128586 - DNA, 17 bp, synthetic construct
  source 1..17: mol_type = other DNA
cagtgactccctcctct

SEQ ID NO: 128587 - DNA, 17 bp, synthetic construct
  source 1..17: mol_type = other DNA
agtgactccctcctctg

SEQ ID NO: 128588 - DNA, 17 bp, synthetic construct
  source 1..17: mol_type = other DNA
gtgactccctcctctgc

SEQ ID NO: 128589 - DNA, 17 bp, synthetic construct
  source 1..17: mol_type = other DNA
tgactccctcctctgcc

SEQ ID NO: 128590 - DNA, 17 bp, synthetic construct
  source 1..17: mol_type = other DNA
gactccctcctctgccc

SEQ ID NO: 128591 - DNA, 17 bp, synthetic construct
  source 1..17: mol_type = other DNA
actccctcctctgccct

SEQ ID NO: 128592 - DNA, 17 bp, synthetic construct
  source 1..17: mol_type = other DNA
ctccctcctctgcccta

SEQ ID NO: 128593 - DNA, 17 bp, synthetic construct
  source 1..17: mol_type = other DNA
tccctcctctgccctag

SEQ ID NO: 128594 - DNA, 17 bp, synthetic construct
  source 1..17: mol_type = other DNA
ccctcctctgccctagg

SEQ ID NO: 128595 - DNA, 17 bp, synthetic construct
  source 1..17: mol_type = other DNA
cctcctctgccctaggg

SEQ ID NO: 128596 - DNA, 17 bp, synthetic construct
  source 1..17: mol_type = other DNA
ctcctctgccctaggga

SEQ ID NO: 128597 - DNA, 17 bp, synthetic construct
  source 1..17: mol_type = other DNA
tcctctgccctagggac

SEQ ID NO: 128598 - DNA, 17 bp, synthetic construct
  source 1..17: mol_type = other DNA
cctctgccctagggacc

SEQ ID NO: 128599 - DNA, 17 bp, synthetic construct
  source 1..17: mol_type = other DNA
ctctgccctagggacca

SEQ ID NO: 128600 - DNA, 17 bp, synthetic construct
  source 1..17: mol_type = other DNA
tctgccctagggaccac

SEQ ID NO: 128601 - DNA, 17 bp, synthetic construct
  source 1..17: mol_type = other DNA
ctgccctagggaccacc

SEQ ID NO: 128602 - DNA, 17 bp, synthetic construct
  source 1..17: mol_type = other DNA
tgccctagggaccaccc

SEQ ID NO: 128603 - DNA, 17 bp, synthetic construct
  source 1..17: mol_type = other DNA
gccctagggaccaccca

SEQ ID NO: 128604 - DNA, 17 bp, synthetic construct
  source 1..17: mol_type = other DNA
ccctagggaccacccac

SEQ ID NO: 128605 - DNA, 17 bp, synthetic construct
  source 1..17: mol_type = other DNA
cctagggaccacccaca

SEQ ID NO: 128606 - DNA, 17 bp, synthetic construct
  source 1..17: mol_type = other DNA
ctagggaccacccacac

SEQ ID NO: 128607 - DNA, 17 bp, synthetic construct
  source 1..17: mol_type = other DNA
tagggaccacccacaca

SEQ ID NO: 128608 - DNA, 17 bp, synthetic construct
  source 1..17: mol_type = other DNA
agggaccacccacacac

SEQ ID NO: 128609 - DNA, 17 bp, synthetic construct
  source 1..17: mol_type = other DNA
gggaccacccacacacc

SEQ ID NO: 128610 - DNA, 17 bp, synthetic construct
  source 1..17: mol_type = other DNA
ggaccacccacacaccc

SEQ ID NO: 128611 - DNA, 17 bp, synthetic construct
  source 1..17: mol_type = other DNA
gaccacccacacacccc

SEQ ID NO: 128612 - DNA, 17 bp, synthetic construct
  source 1..17: mol_type = other DNA
accacccacacaccccc

SEQ ID NO: 128613 - DNA, 17 bp, synthetic construct
  source 1..17: mol_type = other DNA
ccacccacacaccccca

SEQ ID NO: 128614 - DNA, 17 bp, synthetic construct
  source 1..17: mol_type = other DNA
cacccacacacccccag

SEQ ID NO: 128615 - DNA, 17 bp, synthetic construct
  source 1..17: mol_type = other DNA
acccacacacccccagt

SEQ ID NO: 128616 - DNA, 17 bp, synthetic construct
  source 1..17: mol_type = other DNA
cccacacacccccagtg

SEQ ID NO: 128617 - DNA, 17 bp, synthetic construct
  source 1..17: mol_type = other DNA
ccacacacccccagtgc

SEQ ID NO: 128618 - DNA, 17 bp, synthetic construct
  source 1..17: mol_type = other DNA
cacacacccccagtgcc

SEQ ID NO: 128619 - DNA, 17 bp, synthetic construct
  source 1..17: mol_type = other DNA
acacacccccagtgccg

SEQ ID NO: 128620 - DNA, 17 bp, synthetic construct
  source 1..17: mol_type = other DNA
cacacccccagtgccga

SEQ ID NO: 128621 - DNA, 17 bp, synthetic construct
  source 1..17: mol_type = other DNA
acacccccagtgccgaa

SEQ ID NO: 128622 - DNA, 17 bp, synthetic construct
  source 1..17: mol_type = other DNA
cacccccagtgccgaac

SEQ ID NO: 128623 - DNA, 17 bp, synthetic construct
  source 1..17: mol_type = other DNA
acccccagtgccgaaca

SEQ ID NO: 128624 - DNA, 17 bp, synthetic construct
  source 1..17: mol_type = other DNA
cccccagtgccgaacac

SEQ ID NO: 128625 - DNA, 17 bp, synthetic construct
  source 1..17: mol_type = other DNA
ccccagtgccgaacacc

SEQ ID NO: 128626 - DNA, 17 bp, synthetic construct
  source 1..17: mol_type = other DNA
cccagtgccgaacacca

SEQ ID NO: 128627 - DNA, 17 bp, synthetic construct
  source 1..17: mol_type = other DNA
ccagtgccgaacaccat

SEQ ID NO: 128628 - DNA, 17 bp, synthetic construct
  source 1..17: mol_type = other DNA
cagtgccgaacaccatg

SEQ ID NO: 128629 - DNA, 17 bp, synthetic construct
  source 1..17: mol_type = other DNA
agtgccgaacaccatgg

SEQ ID NO: 128630 - DNA, 17 bp, synthetic construct
  source 1..17: mol_type = other DNA
gtgccgaacaccatggc

SEQ ID NO: 128631 - DNA, 17 bp, synthetic construct
  source 1..17: mol_type = other DNA
tgccgaacaccatggcc

SEQ ID NO: 128632 - DNA, 17 bp, synthetic construct
  source 1..17: mol_type = other DNA
gccgaacaccatggcca

SEQ ID NO: 128633 - DNA, 17 bp, synthetic construct
  source 1..17: mol_type = other DNA
ccgaacaccatggccac

SEQ ID NO: 128634 - DNA, 17 bp, synthetic construct
  source 1..17: mol_type = other DNA
cgaacaccatggccacc

SEQ ID NO: 128635 - DNA, 17 bp, synthetic construct
  source 1..17: mol_type = other DNA
gaacaccatggccacca

SEQ ID NO: 128636 - DNA, 17 bp, synthetic construct
  source 1..17: mol_type = other DNA
aacaccatggccaccac

SEQ ID NO: 128637 - DNA, 17 bp, synthetic construct
  source 1..17: mol_type = other DNA
acaccatggccaccaca

SEQ ID NO: 128638 - DNA, 17 bp, synthetic construct
  source 1..17: mol_type = other DNA
caccatggccaccacac

SEQ ID NO: 128639 - DNA, 17 bp, synthetic construct
  source 1..17: mol_type = other DNA
accatggccaccacaca

SEQ ID NO: 128640 - DNA, 17 bp, synthetic construct
  source 1..17: mol_type = other DNA
ccatggccaccacacac

SEQ ID NO: 128641 - DNA, 17 bp, synthetic construct
  source 1..17: mol_type = other DNA
catggccaccacacacg

SEQ ID NO: 128642 - DNA, 17 bp, synthetic construct
  source 1..17: mol_type = other DNA
atggccaccacacacgg

SEQ ID NO: 128643 - DNA, 17 bp, synthetic construct
  source 1..17: mol_type = other DNA
tggccaccacacacggg

SEQ ID NO: 128644 - DNA, 17 bp, synthetic construct
  source 1..17: mol_type = other DNA
ggccaccacacacgggc

SEQ ID NO: 128645 - DNA, 17 bp, synthetic construct
  source 1..17: mol_type = other DNA
gccaccacacacgggcg

SEQ ID NO: 128646 - DNA, 17 bp, synthetic construct
  source 1..17: mol_type = other DNA
ccaccacacacgggcga

SEQ ID NO: 128647 - DNA, 17 bp, synthetic construct
  source 1..17: mol_type = other DNA
caccacacacgggcgat

SEQ ID NO: 128648 - DNA, 17 bp, synthetic construct
  source 1..17: mol_type = other DNA
accacacacgggcgatc

SEQ ID NO: 128649 - DNA, 17 bp, synthetic construct
  source 1..17: mol_type = other DNA
ccacacacgggcgatcc

SEQ ID NO: 128650 - DNA, 17 bp, synthetic construct
  source 1..17: mol_type = other DNA
cacacacgggcgatccc

SEQ ID NO: 128651 - DNA, 17 bp, synthetic construct
  source 1..17: mol_type = other DNA
acacacgggcgatccct

SEQ ID NO: 128652 - DNA, 17 bp, synthetic construct
  source 1..17: mol_type = other DNA
cacacgggcgatccctg

SEQ ID NO: 128653 - DNA, 17 bp, synthetic construct
  source 1..17: mol_type = other DNA
acacgggcgatccctgc

SEQ ID NO: 128654 - DNA, 17 bp, synthetic construct
  source 1..17: mol_type = other DNA
cacgggcgatccctgcc

SEQ ID NO: 128655 - DNA, 17 bp, synthetic construct
  source 1..17: mol_type = other DNA
acgggcgatccctgccc

SEQ ID NO: 128656 - DNA, 17 bp, synthetic construct
  source 1..17: mol_type = other DNA
cgggcgatccctgcccc

SEQ ID NO: 128657 - DNA, 17 bp, synthetic construct
  source 1..17: mol_type = other DNA
gggcgatccctgccccc

SEQ ID NO: 128658 - DNA, 17 bp, synthetic construct
  source 1..17: mol_type = other DNA
ggcgatccctgcccccc

SEQ ID NO: 128659 - DNA, 17 bp, synthetic construct
  source 1..17: mol_type = other DNA
gcgatccctgcccccca

SEQ ID NO: 128660 - DNA, 17 bp, synthetic construct
  source 1..17: mol_type = other DNA
cgatccctgccccccag

SEQ ID NO: 128661 - DNA, 17 bp, synthetic construct
  source 1..17: mol_type = other DNA
gatccctgccccccagc

SEQ ID NO: 128662 - DNA, 17 bp, synthetic construct
  source 1..17: mol_type = other DNA
atccctgccccccagca

SEQ ID NO: 128663 - DNA, 17 bp, synthetic construct
  source 1..17: mol_type = other DNA
tccctgccccccagcag

SEQ ID NO: 128664 - DNA, 17 bp, synthetic construct
  source 1..17: mol_type = other DNA
ccctgccccccagcagt

SEQ ID NO: 128665 - DNA, 17 bp, synthetic construct
  source 1..17: mol_type = other DNA
cctgccccccagcagtc

SEQ ID NO: 128666 - DNA, 17 bp, synthetic construct
  source 1..17: mol_type = other DNA
ctgccccccagcagtcc

SEQ ID NO: 128667 - DNA, 17 bp, synthetic construct
  source 1..17: mol_type = other DNA
tgccccccagcagtccc

SEQ ID NO: 128668 - DNA, 17 bp, synthetic construct
  source 1..17: mol_type = other DNA
gccccccagcagtcccc

SEQ ID NO: 128669 - DNA, 17 bp, synthetic construct
  source 1..17: mol_type = other DNA
ccccccagcagtcccca

SEQ ID NO: 128670 - DNA, 17 bp, synthetic construct
  source 1..17: mol_type = other DNA
cccccagcagtccccac

SEQ ID NO: 128671 - DNA, 17 bp, synthetic construct
  source 1..17: mol_type = other DNA
ccccagcagtccccaca

SEQ ID NO: 128672 - DNA, 17 bp, synthetic construct
  source 1..17: mol_type = other DNA
cccagcagtccccacac

SEQ ID NO: 128673 - DNA, 17 bp, synthetic construct
  source 1..17: mol_type = other DNA
ccagcagtccccacacg

SEQ ID NO: 128674 - DNA, 17 bp, synthetic construct
  source 1..17: mol_type = other DNA
cagcagtccccacacgg

SEQ ID NO: 128675 - DNA, 17 bp, synthetic construct
  source 1..17: mol_type = other DNA
agcagtccccacacggt

SEQ ID NO: 128676 - DNA, 17 bp, synthetic construct
  source 1..17: mol_type = other DNA
gcagtccccacacggtg

SEQ ID NO: 128677 - DNA, 17 bp, synthetic construct
  source 1..17: mol_type = other DNA
cagtccccacacggtgc

SEQ ID NO: 128678 - DNA, 17 bp, synthetic construct
  source 1..17: mol_type = other DNA
agtccccacacggtgcg

SEQ ID NO: 128679 - DNA, 17 bp, synthetic construct
  source 1..17: mol_type = other DNA
gtccccacacggtgcgc

SEQ ID NO: 128680 - DNA, 17 bp, synthetic construct
  source 1..17: mol_type = other DNA
tccccacacggtgcgca

SEQ ID NO: 128681 - DNA, 17 bp, synthetic construct
  source 1..17: mol_type = other DNA
ccccacacggtgcgcac

SEQ ID NO: 128682 - DNA, 17 bp, synthetic construct
  source 1..17: mol_type = other DNA
cccacacggtgcgcaca

SEQ ID NO: 128683 - DNA, 17 bp, synthetic construct
  source 1..17: mol_type = other DNA
ccacacggtgcgcacag

SEQ ID NO: 128684 - DNA, 17 bp, synthetic construct
  source 1..17: mol_type = other DNA
cacacggtgcgcacagc

SEQ ID NO: 128685 - DNA, 17 bp, synthetic construct
  source 1..17: mol_type = other DNA
acacggtgcgcacagcc

SEQ ID NO: 128686 - DNA, 17 bp, synthetic construct
  source 1..17: mol_type = other DNA
cacggtgcgcacagcct

SEQ ID NO: 128687 - DNA, 17 bp, synthetic construct
  source 1..17: mol_type = other DNA
acggtgcgcacagcctg

SEQ ID NO: 128688 - DNA, 17 bp, synthetic construct
  source 1..17: mol_type = other DNA
cggtgcgcacagcctgg

SEQ ID NO: 128689 - DNA, 17 bp, synthetic construct
  source 1..17: mol_type = other DNA
ggtgcgcacagcctgga

SEQ ID NO: 128690 - DNA, 17 bp, synthetic construct
  source 1..17: mol_type = other DNA
gtgcgcacagcctggac

SEQ ID NO: 128691 - DNA, 17 bp, synthetic construct
  source 1..17: mol_type = other DNA
tgcgcacagcctggact

SEQ ID NO: 128692 - DNA, 17 bp, synthetic construct
  source 1..17: mol_type = other DNA
gcgcacagcctggactt

SEQ ID NO: 128693 - DNA, 17 bp, synthetic construct
  source 1..17: mol_type = other DNA
cgcacagcctggacttc

SEQ ID NO: 128694 - DNA, 17 bp, synthetic construct
  source 1..17: mol_type = other DNA
gcacagcctggacttcg

SEQ ID NO: 128695 - DNA, 17 bp, synthetic construct
  source 1..17: mol_type = other DNA
cacagcctggacttcgg

SEQ ID NO: 128696 - DNA, 17 bp, synthetic construct
  source 1..17: mol_type = other DNA
acagcctggacttcggc

SEQ ID NO: 128697 - DNA, 17 bp, synthetic construct
  source 1..17: mol_type = other DNA
cagcctggacttcggcc

SEQ ID NO: 128698 - DNA, 17 bp, synthetic construct
  source 1..17: mol_type = other DNA
agcctggacttcggcca

SEQ ID NO: 128699 - DNA, 17 bp, synthetic construct
  source 1..17: mol_type = other DNA
gcctggacttcggccac

SEQ ID NO: 128700 - DNA, 17 bp, synthetic construct
  source 1..17: mol_type = other DNA
cctggacttcggccacc

SEQ ID NO: 128701 - DNA, 17 bp, synthetic construct
  source 1..17: mol_type = other DNA
ctggacttcggccacct

SEQ ID NO: 128702 - DNA, 17 bp, synthetic construct
  source 1..17: mol_type = other DNA
tggacttcggccacctc

SEQ ID NO: 128703 - DNA, 17 bp, synthetic construct
  source 1..17: mol_type = other DNA
ggacttcggccacctcg

SEQ ID NO: 128704 - DNA, 17 bp, synthetic construct
  source 1..17: mol_type = other DNA
gacttcggccacctcgg

SEQ ID NO: 128705 - DNA, 17 bp, synthetic construct
  source 1..17: mol_type = other DNA
acttcggccacctcggg

SEQ ID NO: 128706 - DNA, 17 bp, synthetic construct
  source 1..17: mol_type = other DNA
cttcggccacctcgggc

SEQ ID NO: 128707 - DNA, 17 bp, synthetic construct
  source 1..17: mol_type = other DNA
ttcggccacctcgggca

SEQ ID NO: 128708 - DNA, 17 bp, synthetic construct
  source 1..17: mol_type = other DNA
tcggccacctcgggcat

SEQ ID NO: 128709 - DNA, 17 bp, synthetic construct
  source 1..17: mol_type = other DNA
cggccacctcgggcatc

SEQ ID NO: 128710 - DNA, 17 bp, synthetic construct
  source 1..17: mol_type = other DNA
ggccacctcgggcatct

SEQ ID NO: 128711 - DNA, 17 bp, synthetic construct
  source 1..17: mol_type = other DNA
gccacctcgggcatctt

SEQ ID NO: 128712 - DNA, 17 bp, synthetic construct
  source 1..17: mol_type = other DNA
ccacctcgggcatcttg

SEQ ID NO: 128713 - DNA, 17 bp, synthetic construct
  source 1..17: mol_type = other DNA
cacctcgggcatcttgg

SEQ ID NO: 128714 - DNA, 17 bp, synthetic construct
  source 1..17: mol_type = other DNA
acctcgggcatcttggg

SEQ ID NO: 128715 - DNA, 17 bp, synthetic construct
  source 1..17: mol_type = other DNA
cctcgggcatcttgggc

SEQ ID NO: 128716 - DNA, 17 bp, synthetic construct
  source 1..17: mol_type = other DNA
ctcgggcatcttgggca

SEQ ID NO: 128717 - DNA, 17 bp, synthetic construct
  source 1..17: mol_type = other DNA
tcgggcatcttgggcac

SEQ ID NO: 128718 - DNA, 17 bp, synthetic construct
  source 1..17: mol_type = other DNA
cgggcatcttgggcacc

SEQ ID NO: 128719 - DNA, 17 bp, synthetic construct
  source 1..17: mol_type = other DNA
gggcatcttgggcacca

SEQ ID NO: 128720 - DNA, 17 bp, synthetic construct
  source 1..17: mol_type = other DNA
ggcatcttgggcaccac

SEQ ID NO: 128721 - DNA, 17 bp, synthetic construct
  source 1..17: mol_type = other DNA
gcatcttgggcaccacc

SEQ ID NO: 128722 - DNA, 17 bp, synthetic construct
  source 1..17: mol_type = other DNA
catcttgggcaccaccc

SEQ ID NO: 128723 - DNA, 17 bp, synthetic construct
  source 1..17: mol_type = other DNA
atcttgggcaccaccca

SEQ ID NO: 128724 - DNA, 17 bp, synthetic construct
  source 1..17: mol_type = other DNA
tcttgggcaccacccac

SEQ ID NO: 128725 - DNA, 17 bp, synthetic construct
  source 1..17: mol_type = other DNA
cttgggcaccacccaca

SEQ ID NO: 128726 - DNA, 17 bp, synthetic construct
  source 1..17: mol_type = other DNA
ttgggcaccacccacat

SEQ ID NO: 128727 - DNA, 17 bp, synthetic construct
  source 1..17: mol_type = other DNA
tgggcaccacccacatc

SEQ ID NO: 128728 - DNA, 17 bp, synthetic construct
  source 1..17: mol_type = other DNA
gggcaccacccacatca

SEQ ID NO: 128729 - DNA, 17 bp, synthetic construct
  source 1..17: mol_type = other DNA
ggcaccacccacatcac

SEQ ID NO: 128730 - DNA, 17 bp, synthetic construct
  source 1..17: mol_type = other DNA
gcaccacccacatcaca

SEQ ID NO: 128731 - DNA, 17 bp, synthetic construct
  source 1..17: mol_type = other DNA
caccacccacatcacag

SEQ ID NO: 128732 - DNA, 17 bp, synthetic construct
  source 1..17: mol_type = other DNA
accacccacatcacaga

SEQ ID NO: 128733 - DNA, 17 bp, synthetic construct
  source 1..17: mol_type = other DNA
ccacccacatcacagag

SEQ ID NO: 128734 - DNA, 17 bp, synthetic construct
  source 1..17: mol_type = other DNA
cacccacatcacagagc

SEQ ID NO: 128735 - DNA, 17 bp, synthetic construct
  source 1..17: mol_type = other DNA
acccacatcacagagcc

SEQ ID NO: 128736 - DNA, 17 bp, synthetic construct
  source 1..17: mol_type = other DNA
cccacatcacagagcct

SEQ ID NO: 128737 - DNA, 17 bp, synthetic construct
  source 1..17: mol_type = other DNA
ccacatcacagagcctt

SEQ ID NO: 128738 - DNA, 17 bp, synthetic construct
  source 1..17: mol_type = other DNA
cacatcacagagccttc

SEQ ID NO: 128739 - DNA, 17 bp, synthetic construct
  source 1..17: mol_type = other DNA
acatcacagagccttcc

SEQ ID NO: 128740 - DNA, 17 bp, synthetic construct
  source 1..17: mol_type = other DNA
catcacagagccttcca

SEQ ID NO: 128741 - DNA, 17 bp, synthetic construct
  source 1..17: mol_type = other DNA
atcacagagccttccac

SEQ ID NO: 128742 - DNA, 17 bp, synthetic construct
  source 1..17: mol_type = other DNA
tcacagagccttccacg

SEQ ID NO: 128743 - DNA, 17 bp, synthetic construct
  source 1..17: mol_type = other DNA
cacagagccttccacgg

SEQ ID NO: 128744 - DNA, 17 bp, synthetic construct
  source 1..17: mol_type = other DNA
acagagccttccacggt

SEQ ID NO: 128745 - DNA, 17 bp, synthetic construct
  source 1..17: mol_type = other DNA
cagagccttccacggtg

SEQ ID NO: 128746 - DNA, 17 bp, synthetic construct
  source 1..17: mol_type = other DNA
agagccttccacggtga

SEQ ID NO: 128747 - DNA, 17 bp, synthetic construct
  source 1..17: mol_type = other DNA
gagccttccacggtgac

SEQ ID NO: 128748 - DNA, 17 bp, synthetic construct
  source 1..17: mol_type = other DNA
agccttccacggtgact

SEQ ID NO: 128749 - DNA, 17 bp, synthetic construct
  source 1..17: mol_type = other DNA
gccttccacggtgactt

SEQ ID NO: 128750 - DNA, 17 bp, synthetic construct
  source 1..17: mol_type = other DNA
ccttccacggtgacttc

SEQ ID NO: 128751 - DNA, 17 bp, synthetic construct
  source 1..17: mol_type = other DNA
cttccacggtgacttcc

SEQ ID NO: 128752 - DNA, 17 bp, synthetic construct
  source 1..17: mol_type = other DNA
ttccacggtgacttccc

SEQ ID NO: 128753 - DNA, 17 bp, synthetic construct
  source 1..17: mol_type = other DNA
tccacggtgacttccca

SEQ ID NO: 128754 - DNA, 17 bp, synthetic construct
  source 1..17: mol_type = other DNA
ccacggtgacttcccac

SEQ ID NO: 128755 - DNA, 17 bp, synthetic construct
  source 1..17: mol_type = other DNA
cacggtgacttcccaca

SEQ ID NO: 128756 - DNA, 17 bp, synthetic construct
  source 1..17: mol_type = other DNA
acggtgacttcccacac

SEQ ID NO: 128757 - DNA, 17 bp, synthetic construct
  source 1..17: mol_type = other DNA
cggtgacttcccacacc

SEQ ID NO: 128758 - DNA, 17 bp, synthetic construct
  source 1..17: mol_type = other DNA
ggtgacttcccacaccc

SEQ ID NO: 128759 - DNA, 17 bp, synthetic construct
  source 1..17: mol_type = other DNA
gtgacttcccacaccct

SEQ ID NO: 128760 - DNA, 17 bp, synthetic construct
  source 1..17: mol_type = other DNA
tgacttcccacacccta

SEQ ID NO: 128761 - DNA, 17 bp, synthetic construct
  source 1..17: mol_type = other DNA
gacttcccacaccctag

SEQ ID NO: 128762 - DNA, 17 bp, synthetic construct
  source 1..17: mol_type = other DNA
acttcccacaccctagc

SEQ ID NO: 128763 - DNA, 17 bp, synthetic construct
  source 1..17: mol_type = other DNA
cttcccacaccctagca

SEQ ID NO: 128764 - DNA, 17 bp, synthetic construct
  source 1..17: mol_type = other DNA
ttcccacaccctagcag

SEQ ID NO: 128765 - DNA, 17 bp, synthetic construct
  source 1..17: mol_type = other DNA
tcccacaccctagcagc

SEQ ID NO: 128766 - DNA, 17 bp, synthetic construct
  source 1..17: mol_type = other DNA
cccacaccctagcagca

SEQ ID NO: 128767 - DNA, 17 bp, synthetic construct
  source 1..17: mol_type = other DNA
ccacaccctagcagcaa

SEQ ID NO: 128768 - DNA, 17 bp, synthetic construct
  source 1..17: mol_type = other DNA
cacaccctagcagcaac

SEQ ID NO: 128769 - DNA, 17 bp, synthetic construct
  source 1..17: mol_type = other DNA
acaccctagcagcaacc

SEQ ID NO: 128770 - DNA, 17 bp, synthetic construct
  source 1..17: mol_type = other DNA
caccctagcagcaacca

SEQ ID NO: 128771 - DNA, 17 bp, synthetic construct
  source 1..17: mol_type = other DNA
accctagcagcaaccac

SEQ ID NO: 128772 - DNA, 17 bp, synthetic construct
  source 1..17: mol_type = other DNA
ccctagcagcaaccacc

SEQ ID NO: 128773 - DNA, 17 bp, synthetic construct
  source 1..17: mol_type = other DNA
cctagcagcaaccaccg

SEQ ID NO: 128774 - DNA, 17 bp, synthetic construct
  source 1..17: mol_type = other DNA
ctagcagcaaccaccgg

SEQ ID NO: 128775 - DNA, 17 bp, synthetic construct
  source 1..17: mol_type = other DNA
tagcagcaaccaccggt

SEQ ID NO: 128776 - DNA, 17 bp, synthetic construct
  source 1..17: mol_type = other DNA
agcagcaaccaccggta

SEQ ID NO: 128777 - DNA, 17 bp, synthetic construct
  source 1..17: mol_type = other DNA
gcagcaaccaccggtac

SEQ ID NO: 128778 - DNA, 17 bp, synthetic construct
  source 1..17: mol_type = other DNA
cagcaaccaccggtacc

SEQ ID NO: 128779 - DNA, 17 bp, synthetic construct
  source 1..17: mol_type = other DNA
agcaaccaccggtacca

SEQ ID NO: 128780 - DNA, 17 bp, synthetic construct
  source 1..17: mol_type = other DNA
gcaaccaccggtaccac

SEQ ID NO: 128781 - DNA, 17 bp, synthetic construct
  source 1..17: mol_type = other DNA
caaccaccggtaccacc

SEQ ID NO: 128782 - DNA, 17 bp, synthetic construct
  source 1..17: mol_type = other DNA
aaccaccggtaccaccc

SEQ ID NO: 128783 - DNA, 17 bp, synthetic construct
  source 1..17: mol_type = other DNA
accaccggtaccaccca

SEQ ID NO: 128784 - DNA, 17 bp, synthetic construct
  source 1..17: mol_type = other DNA
ccaccggtaccacccag

SEQ ID NO: 128785 - DNA, 17 bp, synthetic construct
  source 1..17: mol_type = other DNA
caccggtaccacccagc

SEQ ID NO: 128786 - DNA, 17 bp, synthetic construct
  source 1..17: mol_type = other DNA
accggtaccacccagca

SEQ ID NO: 128787 - DNA, 17 bp, synthetic construct
  source 1..17: mol_type = other DNA
ccggtaccacccagcac

SEQ ID NO: 128788 - DNA, 17 bp, synthetic construct
  source 1..17: mol_type = other DNA
cggtaccacccagcact

SEQ ID NO: 128789 - DNA, 17 bp, synthetic construct
  source 1..17: mol_type = other DNA
ggtaccacccagcactc

SEQ ID NO: 128790 - DNA, 17 bp, synthetic construct
  source 1..17: mol_type = other DNA
gtaccacccagcactcg

SEQ ID NO: 128791 - DNA, 17 bp, synthetic construct
  source 1..17: mol_type = other DNA
taccacccagcactcga

SEQ ID NO: 128792 - DNA, 17 bp, synthetic construct
  source 1..17: mol_type = other DNA
accacccagcactcgac

SEQ ID NO: 128793 - DNA, 17 bp, synthetic construct
  source 1..17: mol_type = other DNA
ccacccagcactcgact

SEQ ID NO: 128794 - DNA, 17 bp, synthetic construct
  source 1..17: mol_type = other DNA
cacccagcactcgactc

SEQ ID NO: 128795 - DNA, 17 bp, synthetic construct
  source 1..17: mol_type = other DNA
acccagcactcgactcc

SEQ ID NO: 128796 - DNA, 17 bp, synthetic construct
  source 1..17: mol_type = other DNA
cccagcactcgactcca

SEQ ID NO: 128797 - DNA, 17 bp, synthetic construct
  source 1..17: mol_type = other DNA
ccagcactcgactccag

SEQ ID NO: 128798 - DNA, 17 bp, synthetic construct
  source 1..17: mol_type = other DNA
cagcactcgactccagc

SEQ ID NO: 128799 - DNA, 17 bp, synthetic construct
  source 1..17: mol_type = other DNA
agcactcgactccagcc

SEQ ID NO: 128800 - DNA, 17 bp, synthetic construct
  source 1..17: mol_type = other DNA
gcactcgactccagccc

SEQ ID NO: 128801 - DNA, 17 bp, synthetic construct
  source 1..17: mol_type = other DNA
cactcgactccagccct

SEQ ID NO: 128802 - DNA, 17 bp, synthetic construct
  source 1..17: mol_type = other DNA
actcgactccagccctt

SEQ ID NO: 128803 - DNA, 17 bp, synthetic construct
  source 1..17: mol_type = other DNA
ctcgactccagcccttt

SEQ ID NO: 128804 - DNA, 17 bp, synthetic construct
  source 1..17: mol_type = other DNA
tcgactccagccctttc

SEQ ID NO: 128805 - DNA, 17 bp, synthetic construct
  source 1..17: mol_type = other DNA
cgactccagccctttcc

SEQ ID NO: 128806 - DNA, 17 bp, synthetic construct
  source 1..17: mol_type = other DNA
gactccagccctttcca

SEQ ID NO: 128807 - DNA, 17 bp, synthetic construct
  source 1..17: mol_type = other DNA
actccagccctttccag

SEQ ID NO: 128808 - DNA, 17 bp, synthetic construct
  source 1..17: mol_type = other DNA
ctccagccctttccagc

SEQ ID NO: 128809 - DNA, 17 bp, synthetic construct
  source 1..17: mol_type = other DNA
tccagccctttccagcc

SEQ ID NO: 128810 - DNA, 17 bp, synthetic construct
  source 1..17: mol_type = other DNA
ccagccctttccagccc

SEQ ID NO: 128811 - DNA, 17 bp, synthetic construct
  source 1..17: mol_type = other DNA
cagccctttccagccct

SEQ ID NO: 128812 - DNA, 17 bp, synthetic construct
  source 1..17: mol_type = other DNA
agccctttccagccctc

SEQ ID NO: 128813 - DNA, 17 bp, synthetic construct
  source 1..17: mol_type = other DNA
gccctttccagccctca

SEQ ID NO: 128814 - DNA, 17 bp, synthetic construct
  source 1..17: mol_type = other DNA
ccctttccagccctcac

SEQ ID NO: 128815 - DNA, 17 bp, synthetic construct
  source 1..17: mol_type = other DNA
cctttccagccctcacc

SEQ ID NO: 128816 - DNA, 17 bp, synthetic construct
  source 1..17: mol_type = other DNA
ctttccagccctcaccc

SEQ ID NO: 128817 - DNA, 17 bp, synthetic construct
  source 1..17: mol_type = other DNA
tttccagccctcaccct

SEQ ID NO: 128818 - DNA, 17 bp, synthetic construct
  source 1..17: mol_type = other DNA
ttccagccctcacccta

SEQ ID NO: 128819 - DNA, 17 bp, synthetic construct
  source 1..17: mol_type = other DNA
tccagccctcaccctag

SEQ ID NO: 128820 - DNA, 17 bp, synthetic construct
  source 1..17: mol_type = other DNA
ccagccctcaccctagc

SEQ ID NO: 128821 - DNA, 17 bp, synthetic construct
  source 1..17: mol_type = other DNA
cagccctcaccctagca

SEQ ID NO: 128822 - DNA, 17 bp, synthetic construct
  source 1..17: mol_type = other DNA
agccctcaccctagcag

SEQ ID NO: 128823 - DNA, 17 bp, synthetic construct
  source 1..17: mol_type = other DNA
gccctcaccctagcagc

SEQ ID NO: 128824 - DNA, 17 bp, synthetic construct
  source 1..17: mol_type = other DNA
ccctcaccctagcagca

SEQ ID NO: 128825 - DNA, 17 bp, synthetic construct
  source 1..17: mol_type = other DNA
cctcaccctagcagcag

SEQ ID NO: 128826 - DNA, 17 bp, synthetic construct
  source 1..17: mol_type = other DNA
ctcaccctagcagcaga

SEQ ID NO: 128827 - DNA, 17 bp, synthetic construct
  source 1..17: mol_type = other DNA
tcaccctagcagcagaa

SEQ ID NO: 128828 - DNA, 17 bp, synthetic construct
  source 1..17: mol_type = other DNA
caccctagcagcagaac

SEQ ID NO: 128829 - DNA, 17 bp, synthetic construct
  source 1..17: mol_type = other DNA
accctagcagcagaacc

SEQ ID NO: 128830 - DNA, 17 bp, synthetic construct
  source 1..17: mol_type = other DNA
ccctagcagcagaacca

SEQ ID NO: 128831 - DNA, 17 bp, synthetic construct
  source 1..17: mol_type = other DNA
cctagcagcagaaccac

SEQ ID NO: 128832 - DNA, 17 bp, synthetic construct
  source 1..17: mol_type = other DNA
ctagcagcagaaccacc

SEQ ID NO: 128833 - DNA, 17 bp, synthetic construct
  source 1..17: mol_type = other DNA
tagcagcagaaccaccg

SEQ ID NO: 128834 - DNA, 17 bp, synthetic construct
  source 1..17: mol_type = other DNA
agcagcagaaccaccga

SEQ ID NO: 128835 - DNA, 17 bp, synthetic construct
  source 1..17: mol_type = other DNA
gcagcagaaccaccgag

SEQ ID NO: 128836 - DNA, 17 bp, synthetic construct
  source 1..17: mol_type = other DNA
cagcagaaccaccgagt

SEQ ID NO: 128837 - DNA, 17 bp, synthetic construct
  source 1..17: mol_type = other DNA
agcagaaccaccgagtc

SEQ ID NO: 128838 - DNA, 17 bp, synthetic construct
  source 1..17: mol_type = other DNA
gcagaaccaccgagtca

SEQ ID NO: 128839 - DNA, 17 bp, synthetic construct
  source 1..17: mol_type = other DNA
cagaaccaccgagtcac

SEQ ID NO: 128840 - DNA, 17 bp, synthetic construct
  source 1..17: mol_type = other DNA
agaaccaccgagtcacc

SEQ ID NO: 128841 - DNA, 17 bp, synthetic construct
  source 1..17: mol_type = other DNA
gaaccaccgagtcaccc

SEQ ID NO: 128842 - DNA, 17 bp, synthetic construct
  source 1..17: mol_type = other DNA
aaccaccgagtcacccc

SEQ ID NO: 128843 - DNA, 17 bp, synthetic construct
  source 1..17: mol_type = other DNA
accaccgagtcaccccc

SEQ ID NO: 128844 - DNA, 17 bp, synthetic construct
  source 1..17: mol_type = other DNA
ccaccgagtcaccccct

SEQ ID NO: 128845 - DNA, 17 bp, synthetic construct
  source 1..17: mol_type = other DNA
caccgagtcaccccctt

SEQ ID NO: 128846 - DNA, 17 bp, synthetic construct
  source 1..17: mol_type = other DNA
accgagtcacccccttc

SEQ ID NO: 128847 - DNA, 17 bp, synthetic construct
  source 1..17: mol_type = other DNA
ccgagtcacccccttct

SEQ ID NO: 128848 - DNA, 17 bp, synthetic construct
  source 1..17: mol_type = other DNA
cgagtcacccccttctc

SEQ ID NO: 128849 - DNA, 17 bp, synthetic construct
  source 1..17: mol_type = other DNA
gagtcacccccttctcc

SEQ ID NO: 128850 - DNA, 17 bp, synthetic construct
  source 1..17: mol_type = other DNA
agtcacccccttctcca

SEQ ID NO: 128851 - DNA, 17 bp, synthetic construct
  source 1..17: mol_type = other DNA
gtcacccccttctccag

SEQ ID NO: 128852 - DNA, 17 bp, synthetic construct
  source 1..17: mol_type = other DNA
tcacccccttctccagg

SEQ ID NO: 128853 - DNA, 17 bp, synthetic construct
  source 1..17: mol_type = other DNA
cacccccttctccaggg

SEQ ID NO: 128854 - DNA, 17 bp, synthetic construct
  source 1..17: mol_type = other DNA
acccccttctccaggga

SEQ ID NO: 128855 - DNA, 17 bp, synthetic construct
  source 1..17: mol_type = other DNA
cccccttctccagggac

SEQ ID NO: 128856 - DNA, 17 bp, synthetic construct
  source 1..17: mol_type = other DNA
ccccttctccagggacg

SEQ ID NO: 128857 - DNA, 17 bp, synthetic construct
  source 1..17: mol_type = other DNA
cccttctccagggacga

SEQ ID NO: 128858 - DNA, 17 bp, synthetic construct
  source 1..17: mol_type = other DNA
ccttctccagggacgac

SEQ ID NO: 128859 - DNA, 17 bp, synthetic construct
  source 1..17: mol_type = other DNA
cttctccagggacgacc

SEQ ID NO: 128860 - DNA, 17 bp, synthetic construct
  source 1..17: mol_type = other DNA
ttctccagggacgacca

SEQ ID NO: 128861 - DNA, 17 bp, synthetic construct
  source 1..17: mol_type = other DNA
tctccagggacgaccac

SEQ ID NO: 128862 - DNA, 17 bp, synthetic construct
  source 1..17: mol_type = other DNA
ctccagggacgaccacc

SEQ ID NO: 128863 - DNA, 17 bp, synthetic construct
  source 1..17: mol_type = other DNA
tccagggacgaccaccc

SEQ ID NO: 128864 - DNA, 17 bp, synthetic construct
  source 1..17: mol_type = other DNA
ccagggacgaccacccc

SEQ ID NO: 128865 - DNA, 17 bp, synthetic construct
  source 1..17: mol_type = other DNA
cagggacgaccaccccg

SEQ ID NO: 128866 - DNA, 17 bp, synthetic construct
  source 1..17: mol_type = other DNA
agggacgaccaccccgg

SEQ ID NO: 128867 - DNA, 17 bp, synthetic construct
  source 1..17: mol_type = other DNA
gggacgaccaccccggg

SEQ ID NO: 128868 - DNA, 17 bp, synthetic construct
  source 1..17: mol_type = other DNA
ggacgaccaccccgggc

SEQ ID NO: 128869 - DNA, 17 bp, synthetic construct
  source 1..17: mol_type = other DNA
gacgaccaccccgggcc

SEQ ID NO: 128870 - DNA, 17 bp, synthetic construct
  source 1..17: mol_type = other DNA
acgaccaccccgggcca

SEQ ID NO: 128871 - DNA, 17 bp, synthetic construct
  source 1..17: mol_type = other DNA
cgaccaccccgggccac

SEQ ID NO: 128872 - DNA, 17 bp, synthetic construct
  source 1..17: mol_type = other DNA
gaccaccccgggccaca

SEQ ID NO: 128873 - DNA, 17 bp, synthetic construct
  source 1..17: mol_type = other DNA
accaccccgggccacac

SEQ ID NO: 128874 - DNA, 17 bp, synthetic construct
  source 1..17: mol_type = other DNA
ccaccccgggccacacc

SEQ ID NO: 128875 - DNA, 17 bp, synthetic construct
  source 1..17: mol_type = other DNA
caccccgggccacacca

SEQ ID NO: 128876 - DNA, 17 bp, synthetic construct
  source 1..17: mol_type = other DNA
accccgggccacaccac

SEQ ID NO: 128877 - DNA, 17 bp, synthetic construct
  source 1..17: mol_type = other DNA
ccccgggccacaccacg

SEQ ID NO: 128878 - DNA, 17 bp, synthetic construct
  source 1..17: mol_type = other DNA
cccgggccacaccacgg

SEQ ID NO: 128879 - DNA, 17 bp, synthetic construct
  source 1..17: mol_type = other DNA
ccgggccacaccacggc

SEQ ID NO: 128880 - DNA, 17 bp, synthetic construct
  source 1..17: mol_type = other DNA
cgggccacaccacggcc

SEQ ID NO: 128881 - DNA, 17 bp, synthetic construct
  source 1..17: mol_type = other DNA
gggccacaccacggcca

SEQ ID NO: 128882 - DNA, 17 bp, synthetic construct
  source 1..17: mol_type = other DNA
ggccacaccacggccac

SEQ ID NO: 128883 - DNA, 17 bp, synthetic construct
  source 1..17: mol_type = other DNA
gccacaccacggccacc

SEQ ID NO: 128884 - DNA, 17 bp, synthetic construct
  source 1..17: mol_type = other DNA
ccacaccacggccacct

SEQ ID NO: 128885 - DNA, 17 bp, synthetic construct
  source 1..17: mol_type = other DNA
cacaccacggccacctc

SEQ ID NO: 128886 - DNA, 17 bp, synthetic construct
  source 1..17: mol_type = other DNA
acaccacggccacctcc

SEQ ID NO: 128887 - DNA, 17 bp, synthetic construct
  source 1..17: mol_type = other DNA
caccacggccacctcca

SEQ ID NO: 128888 - DNA, 17 bp, synthetic construct
  source 1..17: mol_type = other DNA
accacggccacctccag

SEQ ID NO: 128889 - DNA, 17 bp, synthetic construct
  source 1..17: mol_type = other DNA
ccacggccacctccagg

SEQ ID NO: 128890 - DNA, 17 bp, synthetic construct
  source 1..17: mol_type = other DNA
cacggccacctccagga

SEQ ID NO: 128891 - DNA, 17 bp, synthetic construct
  source 1..17: mol_type = other DNA
acggccacctccaggac

SEQ ID NO: 128892 - DNA, 17 bp, synthetic construct
  source 1..17: mol_type = other DNA
cggccacctccaggacc

SEQ ID NO: 128893 - DNA, 17 bp, synthetic construct
  source 1..17: mol_type = other DNA
ggccacctccaggacca

SEQ ID NO: 128894 - DNA, 17 bp, synthetic construct
  source 1..17: mol_type = other DNA
gccacctccaggaccac

SEQ ID NO: 128895 - DNA, 17 bp, synthetic construct
  source 1..17: mol_type = other DNA
ccacctccaggaccaca

SEQ ID NO: 128896 - DNA, 17 bp, synthetic construct
  source 1..17: mol_type = other DNA
cacctccaggaccacag

SEQ ID NO: 128897 - DNA, 17 bp, synthetic construct
  source 1..17: mol_type = other DNA
acctccaggaccacagc

SEQ ID NO: 128898 - DNA, 17 bp, synthetic construct
  source 1..17: mol_type = other DNA
cctccaggaccacagcc

SEQ ID NO: 128899 - DNA, 17 bp, synthetic construct
  source 1..17: mol_type = other DNA
ctccaggaccacagcca

SEQ ID NO: 128900 - DNA, 17 bp, synthetic construct
  source 1..17: mol_type = other DNA
tccaggaccacagccac

SEQ ID NO: 128901 - DNA, 17 bp, synthetic construct
  source 1..17: mol_type = other DNA
ccaggaccacagccacg

SEQ ID NO: 128902 - DNA, 17 bp, synthetic construct
  source 1..17: mol_type = other DNA
caggaccacagccacgg

SEQ ID NO: 128903 - DNA, 17 bp, synthetic construct
  source 1..17: mol_type = other DNA
aggaccacagccacggc

SEQ ID NO: 128904 - DNA, 17 bp, synthetic construct
  source 1..17: mol_type = other DNA
ggaccacagccacggcc

SEQ ID NO: 128905 - DNA, 17 bp, synthetic construct
  source 1..17: mol_type = other DNA
gaccacagccacggcca

SEQ ID NO: 128906 - DNA, 17 bp, synthetic construct
  source 1..17: mol_type = other DNA
accacagccacggccac

SEQ ID NO: 128907 - DNA, 17 bp, synthetic construct
  source 1..17: mol_type = other DNA
ccacagccacggccaca

SEQ ID NO: 128908 - DNA, 17 bp, synthetic construct
  source 1..17: mol_type = other DNA
cacagccacggccacac

SEQ ID NO: 128909 - DNA, 17 bp, synthetic construct
  source 1..17: mol_type = other DNA
acagccacggccacacc

SEQ ID NO: 128910 - DNA, 17 bp, synthetic construct
  source 1..17: mol_type = other DNA
cagccacggccacaccc

SEQ ID NO: 128911 - DNA, 17 bp, synthetic construct
  source 1..17: mol_type = other DNA
agccacggccacaccca

SEQ ID NO: 128912 - DNA, 17 bp, synthetic construct
  source 1..17: mol_type = other DNA
gccacggccacacccag

SEQ ID NO: 128913 - DNA, 17 bp, synthetic construct
  source 1..17: mol_type = other DNA
ccacggccacacccagc

SEQ ID NO: 128914 - DNA, 17 bp, synthetic construct
  source 1..17: mol_type = other DNA
cacggccacacccagca

SEQ ID NO: 128915 - DNA, 17 bp, synthetic construct
  source 1..17: mol_type = other DNA
acggccacacccagcaa

SEQ ID NO: 128916 - DNA, 17 bp, synthetic construct
  source 1..17: mol_type = other DNA
cggccacacccagcaag

SEQ ID NO: 128917 - DNA, 17 bp, synthetic construct
  source 1..17: mol_type = other DNA
ggccacacccagcaaga

SEQ ID NO: 128918 - DNA, 17 bp, synthetic construct
  source 1..17: mol_type = other DNA
gccacacccagcaagac

SEQ ID NO: 128919 - DNA, 17 bp, synthetic construct
  source 1..17: mol_type = other DNA
ccacacccagcaagacc

SEQ ID NO: 128920 - DNA, 17 bp, synthetic construct
  source 1..17: mol_type = other DNA
cacacccagcaagaccc

SEQ ID NO: 128921 - DNA, 17 bp, synthetic construct
  source 1..17: mol_type = other DNA
acacccagcaagacccg

SEQ ID NO: 128922 - DNA, 17 bp, synthetic construct
  source 1..17: mol_type = other DNA
cacccagcaagacccgc

SEQ ID NO: 128923 - DNA, 17 bp, synthetic construct
  source 1..17: mol_type = other DNA
acccagcaagacccgca

SEQ ID NO: 128924 - DNA, 17 bp, synthetic construct
  source 1..17: mol_type = other DNA
cccagcaagacccgcac

SEQ ID NO: 128925 - DNA, 17 bp, synthetic construct
  source 1..17: mol_type = other DNA
ccagcaagacccgcacc

SEQ ID NO: 128926 - DNA, 17 bp, synthetic construct
  source 1..17: mol_type = other DNA
cagcaagacccgcacct

SEQ ID NO: 128927 - DNA, 17 bp, synthetic construct
  source 1..17: mol_type = other DNA
agcaagacccgcacctc

SEQ ID NO: 128928 - DNA, 17 bp, synthetic construct
  source 1..17: mol_type = other DNA
gcaagacccgcacctcg

SEQ ID NO: 128929 - DNA, 17 bp, synthetic construct
  source 1..17: mol_type = other DNA
caagacccgcacctcga

SEQ ID NO: 128930 - DNA, 17 bp, synthetic construct
  source 1..17: mol_type = other DNA
aagacccgcacctcgac

SEQ ID NO: 128931 - DNA, 17 bp, synthetic construct
  source 1..17: mol_type = other DNA
agacccgcacctcgacc

SEQ ID NO: 128932 - DNA, 17 bp, synthetic construct
  source 1..17: mol_type = other DNA
gacccgcacctcgaccc

SEQ ID NO: 128933 - DNA, 17 bp, synthetic construct
  source 1..17: mol_type = other DNA
acccgcacctcgaccct

SEQ ID NO: 128934 - DNA, 17 bp, synthetic construct
  source 1..17: mol_type = other DNA
cccgcacctcgaccctg

SEQ ID NO: 128935 - DNA, 17 bp, synthetic construct
  source 1..17: mol_type = other DNA
ccgcacctcgaccctgc

SEQ ID NO: 128936 - DNA, 17 bp, synthetic construct
  source 1..17: mol_type = other DNA
cgcacctcgaccctgct

SEQ ID NO: 128937 - DNA, 17 bp, synthetic construct
  source 1..17: mol_type = other DNA
gcacctcgaccctgctg

SEQ ID NO: 128938 - DNA, 17 bp, synthetic construct
  source 1..17: mol_type = other DNA
cacctcgaccctgctgc

SEQ ID NO: 128939 - DNA, 17 bp, synthetic construct
  source 1..17: mol_type = other DNA
acctcgaccctgctgcc

SEQ ID NO: 128940 - DNA, 17 bp, synthetic construct
  source 1..17: mol_type = other DNA
cctcgaccctgctgccc

SEQ ID NO: 128941 - DNA, 17 bp, synthetic construct
  source 1..17: mol_type = other DNA
ctcgaccctgctgccca

SEQ ID NO: 128942 - DNA, 17 bp, synthetic construct
  source 1..17: mol_type = other DNA
tcgaccctgctgcccag

SEQ ID NO: 128943 - DNA, 17 bp, synthetic construct
  source 1..17: mol_type = other DNA
cgaccctgctgcccagc

SEQ ID NO: 128944 - DNA, 17 bp, synthetic construct
  source 1..17: mol_type = other DNA
gaccctgctgcccagca

SEQ ID NO: 128945 - DNA, 17 bp, synthetic construct
  source 1..17: mol_type = other DNA
accctgctgcccagcag

SEQ ID NO: 128946 - DNA, 17 bp, synthetic construct
  source 1..17: mol_type = other DNA
ccctgctgcccagcagc

SEQ ID NO: 128947 - DNA, 17 bp, synthetic construct
  source 1..17: mol_type = other DNA
cctgctgcccagcagcc

SEQ ID NO: 128948 - DNA, 17 bp, synthetic construct
  source 1..17: mol_type = other DNA
ctgctgcccagcagccc

SEQ ID NO: 128949 - DNA, 17 bp, synthetic construct
  source 1..17: mol_type = other DNA
tgctgcccagcagcccc

SEQ ID NO: 128950 - DNA, 17 bp, synthetic construct
  source 1..17: mol_type = other DNA
gctgcccagcagcccca

SEQ ID NO: 128951 - DNA, 17 bp, synthetic construct
  source 1..17: mol_type = other DNA
ctgcccagcagccccac

SEQ ID NO: 128952 - DNA, 17 bp, synthetic construct
  source 1..17: mol_type = other DNA
tgcccagcagccccaca

SEQ ID NO: 128953 - DNA, 17 bp, synthetic construct
  source 1..17: mol_type = other DNA
gcccagcagccccacat

SEQ ID NO: 128954 - DNA, 17 bp, synthetic construct
  source 1..17: mol_type = other DNA
cccagcagccccacatc

SEQ ID NO: 128955 - DNA, 17 bp, synthetic construct
  source 1..17: mol_type = other DNA
ccagcagccccacatcg

SEQ ID NO: 128956 - DNA, 17 bp, synthetic construct
  source 1..17: mol_type = other DNA
cagcagccccacatcgg

SEQ ID NO: 128957 - DNA, 17 bp, synthetic construct
  source 1..17: mol_type = other DNA
agcagccccacatcggc

SEQ ID NO: 128958 - DNA, 17 bp, synthetic construct
  source 1..17: mol_type = other DNA
gcagccccacatcggcc

SEQ ID NO: 128959 - DNA, 17 bp, synthetic construct
  source 1..17: mol_type = other DNA
cagccccacatcggccc

SEQ ID NO: 128960 - DNA, 17 bp, synthetic construct
  source 1..17: mol_type = other DNA
agccccacatcggcccc

SEQ ID NO: 128961 - DNA, 17 bp, synthetic construct
  source 1..17: mol_type = other DNA
gccccacatcggccccc

SEQ ID NO: 128962 - DNA, 17 bp, synthetic construct
  source 1..17: mol_type = other DNA
ccccacatcggccccca

SEQ ID NO: 128963 - DNA, 17 bp, synthetic construct
  source 1..17: mol_type = other DNA
cccacatcggcccccat

SEQ ID NO: 128964 - DNA, 17 bp, synthetic construct
  source 1..17: mol_type = other DNA
ccacatcggcccccata

SEQ ID NO: 128965 - DNA, 17 bp, synthetic construct
  source 1..17: mol_type = other DNA
cacatcggcccccataa

SEQ ID NO: 128966 - DNA, 17 bp, synthetic construct
  source 1..17: mol_type = other DNA
acatcggcccccataac

SEQ ID NO: 128967 - DNA, 17 bp, synthetic construct
  source 1..17: mol_type = other DNA
catcggcccccataacc

SEQ ID NO: 128968 - DNA, 17 bp, synthetic construct
  source 1..17: mol_type = other DNA
atcggcccccataacca

SEQ ID NO: 128969 - DNA, 17 bp, synthetic construct
  source 1..17: mol_type = other DNA
tcggcccccataaccac

SEQ ID NO: 128970 - DNA, 17 bp, synthetic construct
  source 1..17: mol_type = other DNA
cggcccccataaccacg

SEQ ID NO: 128971 - DNA, 17 bp, synthetic construct
  source 1..17: mol_type = other DNA
ggcccccataaccacgg

SEQ ID NO: 128972 - DNA, 17 bp, synthetic construct
  source 1..17: mol_type = other DNA
gcccccataaccacggt

SEQ ID NO: 128973 - DNA, 17 bp, synthetic construct
  source 1..17: mol_type = other DNA
cccccataaccacggtg

SEQ ID NO: 128974 - DNA, 17 bp, synthetic construct
  source 1..17: mol_type = other DNA
ccccataaccacggtgg

SEQ ID NO: 128975 - DNA, 17 bp, synthetic construct
  source 1..17: mol_type = other DNA
cccataaccacggtggt

SEQ ID NO: 128976 - DNA, 17 bp, synthetic construct
  source 1..17: mol_type = other DNA
ccataaccacggtggtg

SEQ ID NO: 128977 - DNA, 17 bp, synthetic construct
  source 1..17: mol_type = other DNA
cataaccacggtggtga

SEQ ID NO: 128978 - DNA, 17 bp, synthetic construct
  source 1..17: mol_type = other DNA
ataaccacggtggtgac

SEQ ID NO: 128979 - DNA, 17 bp, synthetic construct
  source 1..17: mol_type = other DNA
taaccacggtggtgacc

SEQ ID NO: 128980 - DNA, 17 bp, synthetic construct
  source 1..17: mol_type = other DNA
aaccacggtggtgacca

SEQ ID NO: 128981 - DNA, 17 bp, synthetic construct
  source 1..17: mol_type = other DNA
accacggtggtgaccat

SEQ ID NO: 128982 - DNA, 17 bp, synthetic construct
  source 1..17: mol_type = other DNA
ccacggtggtgaccatg

SEQ ID NO: 128983 - DNA, 17 bp, synthetic construct
  source 1..17: mol_type = other DNA
cacggtggtgaccatgg

SEQ ID NO: 128984 - DNA, 17 bp, synthetic construct
  source 1..17: mol_type = other DNA
acggtggtgaccatggg

SEQ ID NO: 128985 - DNA, 17 bp, synthetic construct
  source 1..17: mol_type = other DNA
cggtggtgaccatgggc

SEQ ID NO: 128986 - DNA, 17 bp, synthetic construct
  source 1..17: mol_type = other DNA
ggtggtgaccatgggct

SEQ ID NO: 128987 - DNA, 17 bp, synthetic construct
  source 1..17: mol_type = other DNA
gtggtgaccatgggctg

SEQ ID NO: 128988 - DNA, 17 bp, synthetic construct
  source 1..17: mol_type = other DNA
tggtgaccatgggctgt

SEQ ID NO: 128989 - DNA, 17 bp, synthetic construct
  source 1..17: mol_type = other DNA
ggtgaccatgggctgtg

SEQ ID NO: 128990 - DNA, 17 bp, synthetic construct
  source 1..17: mol_type = other DNA
gtgaccatgggctgtga

SEQ ID NO: 128991 - DNA, 17 bp, synthetic construct
  source 1..17: mol_type = other DNA
tgaccatgggctgtgag

SEQ ID NO: 128992 - DNA, 17 bp, synthetic construct
  source 1..17: mol_type = other DNA
gaccatgggctgtgagc

SEQ ID NO: 128993 - DNA, 17 bp, synthetic construct
  source 1..17: mol_type = other DNA
accatgggctgtgagcc

SEQ ID NO: 128994 - DNA, 17 bp, synthetic construct
  source 1..17: mol_type = other DNA
ccatgggctgtgagccc

SEQ ID NO: 128995 - DNA, 17 bp, synthetic construct
  source 1..17: mol_type = other DNA
catgggctgtgagcccc

SEQ ID NO: 128996 - DNA, 17 bp, synthetic construct
  source 1..17: mol_type = other DNA
atgggctgtgagcccca

SEQ ID NO: 128997 - DNA, 17 bp, synthetic construct
  source 1..17: mol_type = other DNA
tgggctgtgagccccag

SEQ ID NO: 128998 - DNA, 17 bp, synthetic construct
  source 1..17: mol_type = other DNA
gggctgtgagccccagt

SEQ ID NO: 128999 - DNA, 17 bp, synthetic construct
  source 1..17: mol_type = other DNA
ggctgtgagccccagtg

SEQ ID NO: 129000 - DNA, 17 bp, synthetic construct
  source 1..17: mol_type = other DNA
gctgtgagccccagtgt

SEQ ID NO: 129001 - DNA, 17 bp, synthetic construct
  source 1..17: mol_type = other DNA
ctgtgagccccagtgtg

SEQ ID NO: 129002 - DNA, 17 bp, synthetic construct
  source 1..17: mol_type = other DNA
tgtgagccccagtgtgc

SEQ ID NO: 129003 - DNA, 17 bp, synthetic construct
  source 1..17: mol_type = other DNA
gtgagccccagtgtgcc

SEQ ID NO: 129004 - DNA, 17 bp, synthetic construct
  source 1..17: mol_type = other DNA
tgagccccagtgtgcct

SEQ ID NO: 129005 - DNA, 17 bp, synthetic construct
  source 1..17: mol_type = other DNA
gagccccagtgtgcctg

SEQ ID NO: 129006 - DNA, 17 bp, synthetic construct
  source 1..17: mol_type = other DNA
agccccagtgtgcctgg

SEQ ID NO: 129007 - DNA, 17 bp, synthetic construct
  source 1..17: mol_type = other DNA
gccccagtgtgcctggt

SEQ ID NO: 129008 - DNA, 17 bp, synthetic construct
  source 1..17: mol_type = other DNA
ccccagtgtgcctggtc

SEQ ID NO: 129009 - DNA, 17 bp, synthetic construct
  source 1..17: mol_type = other DNA
cccagtgtgcctggtca

SEQ ID NO: 129010 - DNA, 17 bp, synthetic construct
  source 1..17: mol_type = other DNA
ccagtgtgcctggtcag

SEQ ID NO: 129011 - DNA, 17 bp, synthetic construct
  source 1..17: mol_type = other DNA
cagtgtgcctggtcaga

SEQ ID NO: 129012 - DNA, 17 bp, synthetic construct
  source 1..17: mol_type = other DNA
agtgtgcctggtcagag

SEQ ID NO: 129013 - DNA, 17 bp, synthetic construct
  source 1..17: mol_type = other DNA
gtgtgcctggtcagagt

SEQ ID NO: 129014 - DNA, 17 bp, synthetic construct
  source 1..17: mol_type = other DNA
tgtgcctggtcagagtg

SEQ ID NO: 129015 - DNA, 17 bp, synthetic construct
  source 1..17: mol_type = other DNA
gtgcctggtcagagtgg

SEQ ID NO: 129016 - DNA, 17 bp, synthetic construct
  source 1..17: mol_type = other DNA
tgcctggtcagagtggc

SEQ ID NO: 129017 - DNA, 17 bp, synthetic construct
  source 1..17: mol_type = other DNA
gcctggtcagagtggct

SEQ ID NO: 129018 - DNA, 17 bp, synthetic construct
  source 1..17: mol_type = other DNA
cctggtcagagtggctg

SEQ ID NO: 129019 - DNA, 17 bp, synthetic construct
  source 1..17: mol_type = other DNA
ctggtcagagtggctgg

SEQ ID NO: 129020 - DNA, 17 bp, synthetic construct
  source 1..17: mol_type = other DNA
tggtcagagtggctgga

SEQ ID NO: 129021 - DNA, 17 bp, synthetic construct
  source 1..17: mol_type = other DNA
ggtcagagtggctggac

SEQ ID NO: 129022 - DNA, 17 bp, synthetic construct
  source 1..17: mol_type = other DNA
gtcagagtggctggact

SEQ ID NO: 129023 - DNA, 17 bp, synthetic construct
  source 1..17: mol_type = other DNA
tcagagtggctggacta

SEQ ID NO: 129024 - DNA, 17 bp, synthetic construct
  source 1..17: mol_type = other DNA
cagagtggctggactac

SEQ ID NO: 129025 - DNA, 17 bp, synthetic construct
  source 1..17: mol_type = other DNA
agagtggctggactaca

SEQ ID NO: 129026 - DNA, 17 bp, synthetic construct
  source 1..17: mol_type = other DNA
gagtggctggactacag

SEQ ID NO: 129027 - DNA, 17 bp, synthetic construct
  source 1..17: mol_type = other DNA
agtggctggactacagc

SEQ ID NO: 129028 - DNA, 17 bp, synthetic construct
  source 1..17: mol_type = other DNA
gtggctggactacagct

SEQ ID NO: 129029 - DNA, 17 bp, synthetic construct
  source 1..17: mol_type = other DNA
tggctggactacagcta

SEQ ID NO: 129030 - DNA, 17 bp, synthetic construct
  source 1..17: mol_type = other DNA
ggctggactacagctac

SEQ ID NO: 129031 - DNA, 17 bp, synthetic construct
  source 1..17: mol_type = other DNA
gctggactacagctacc

SEQ ID NO: 129032 - DNA, 17 bp, synthetic construct
  source 1..17: mol_type = other DNA
ctggactacagctaccc

SEQ ID NO: 129033 - DNA, 17 bp, synthetic construct
  source 1..17: mol_type = other DNA
tggactacagctacccc

SEQ ID NO: 129034 - DNA, 17 bp, synthetic construct
  source 1..17: mol_type = other DNA
ggactacagctacccca

SEQ ID NO: 129035 - DNA, 17 bp, synthetic construct
  source 1..17: mol_type = other DNA
gactacagctaccccat

SEQ ID NO: 129036 - DNA, 17 bp, synthetic construct
  source 1..17: mol_type = other DNA
actacagctaccccatg

SEQ ID NO: 129037 - DNA, 17 bp, synthetic construct
  source 1..17: mol_type = other DNA
ctacagctaccccatgc

SEQ ID NO: 129038 - DNA, 17 bp, synthetic construct
  source 1..17: mol_type = other DNA
tacagctaccccatgcc

SEQ ID NO: 129039 - DNA, 17 bp, synthetic construct
  source 1..17: mol_type = other DNA
acagctaccccatgccg

SEQ ID NO: 129040 - DNA, 17 bp, synthetic construct
  source 1..17: mol_type = other DNA
cagctaccccatgccgg

SEQ ID NO: 129041 - DNA, 17 bp, synthetic construct
  source 1..17: mol_type = other DNA
agctaccccatgccggg

SEQ ID NO: 129042 - DNA, 17 bp, synthetic construct
  source 1..17: mol_type = other DNA
gctaccccatgccgggg

SEQ ID NO: 129043 - DNA, 17 bp, synthetic construct
  source 1..17: mol_type = other DNA
ctaccccatgccggggc

SEQ ID NO: 129044 - DNA, 17 bp, synthetic construct
  source 1..17: mol_type = other DNA
taccccatgccggggcc

SEQ ID NO: 129045 - DNA, 17 bp, synthetic construct
  source 1..17: mol_type = other DNA
accccatgccggggccc

SEQ ID NO: 129046 - DNA, 17 bp, synthetic construct
  source 1..17: mol_type = other DNA
ccccatgccggggccct

SEQ ID NO: 129047 - DNA, 17 bp, synthetic construct
  source 1..17: mol_type = other DNA
cccatgccggggccctc

SEQ ID NO: 129048 - DNA, 17 bp, synthetic construct
  source 1..17: mol_type = other DNA
ccatgccggggccctct

SEQ ID NO: 129049 - DNA, 17 bp, synthetic construct
  source 1..17: mol_type = other DNA
catgccggggccctctg

SEQ ID NO: 129050 - DNA, 17 bp, synthetic construct
  source 1..17: mol_type = other DNA
atgccggggccctctgg

SEQ ID NO: 129051 - DNA, 17 bp, synthetic construct
  source 1..17: mol_type = other DNA
tgccggggccctctggc

SEQ ID NO: 129052 - DNA, 17 bp, synthetic construct
  source 1..17: mol_type = other DNA
gccggggccctctggcg

SEQ ID NO: 129053 - DNA, 17 bp, synthetic construct
  source 1..17: mol_type = other DNA
ccggggccctctggcgg

SEQ ID NO: 129054 - DNA, 17 bp, synthetic construct
  source 1..17: mol_type = other DNA
cggggccctctggcggg

SEQ ID NO: 129055 - DNA, 17 bp, synthetic construct
  source 1..17: mol_type = other DNA
ggggccctctggcgggg

SEQ ID NO: 129056 - DNA, 17 bp, synthetic construct
  source 1..17: mol_type = other DNA
gggccctctggcgggga

SEQ ID NO: 129057 - DNA, 17 bp, synthetic construct
  source 1..17: mol_type = other DNA
ggccctctggcggggac

SEQ ID NO: 129058 - DNA, 17 bp, synthetic construct
  source 1..17: mol_type = other DNA
gccctctggcggggact

SEQ ID NO: 129059 - DNA, 17 bp, synthetic construct
  source 1..17: mol_type = other DNA
ccctctggcggggactt

SEQ ID NO: 129060 - DNA, 17 bp, synthetic construct
  source 1..17: mol_type = other DNA
cctctggcggggacttt

SEQ ID NO: 129061 - DNA, 17 bp, synthetic construct
  source 1..17: mol_type = other DNA
ctctggcggggactttg

SEQ ID NO: 129062 - DNA, 17 bp, synthetic construct
  source 1..17: mol_type = other DNA
tctggcggggactttga

SEQ ID NO: 129063 - DNA, 17 bp, synthetic construct
  source 1..17: mol_type = other DNA
ctggcggggactttgac

SEQ ID NO: 129064 - DNA, 17 bp, synthetic construct
  source 1..17: mol_type = other DNA
tggcggggactttgaca

SEQ ID NO: 129065 - DNA, 17 bp, synthetic construct
  source 1..17: mol_type = other DNA
ggcggggactttgacac

SEQ ID NO: 129066 - DNA, 17 bp, synthetic construct
  source 1..17: mol_type = other DNA
gcggggactttgacacc

SEQ ID NO: 129067 - DNA, 17 bp, synthetic construct
  source 1..17: mol_type = other DNA
cggggactttgacacct

SEQ ID NO: 129068 - DNA, 17 bp, synthetic construct
  source 1..17: mol_type = other DNA
ggggactttgacaccta

SEQ ID NO: 129069 - DNA, 17 bp, synthetic construct
  source 1..17: mol_type = other DNA
gggactttgacacctac

SEQ ID NO: 129070 - DNA, 17 bp, synthetic construct
  source 1..17: mol_type = other DNA
ggactttgacacctact

SEQ ID NO: 129071 - DNA, 17 bp, synthetic construct
  source 1..17: mol_type = other DNA
gactttgacacctactc

SEQ ID NO: 129072 - DNA, 17 bp, synthetic construct
  source 1..17: mol_type = other DNA
actttgacacctactcc

SEQ ID NO: 129073 - DNA, 17 bp, synthetic construct
  source 1..17: mol_type = other DNA
ctttgacacctactcca

SEQ ID NO: 129074 - DNA, 17 bp, synthetic construct
  source 1..17: mol_type = other DNA
tttgacacctactccaa

SEQ ID NO: 129075 - DNA, 17 bp, synthetic construct
  source 1..17: mol_type = other DNA
ttgacacctactccaac

SEQ ID NO: 129076 - DNA, 17 bp, synthetic construct
  source 1..17: mol_type = other DNA
tgacacctactccaaca

SEQ ID NO: 129077 - DNA, 17 bp, synthetic construct
  source 1..17: mol_type = other DNA
gacacctactccaacat

SEQ ID NO: 129078 - DNA, 17 bp, synthetic construct
  source 1..17: mol_type = other DNA
acacctactccaacatc

SEQ ID NO: 129079 - DNA, 17 bp, synthetic construct
  source 1..17: mol_type = other DNA
cacctactccaacatcc

SEQ ID NO: 129080 - DNA, 17 bp, synthetic construct
  source 1..17: mol_type = other DNA
acctactccaacatccg

SEQ ID NO: 129081 - DNA, 17 bp, synthetic construct
  source 1..17: mol_type = other DNA
cctactccaacatccgt

SEQ ID NO: 129082 - DNA, 17 bp, synthetic construct
  source 1..17: mol_type = other DNA
ctactccaacatccgtg

SEQ ID NO: 129083 - DNA, 17 bp, synthetic construct
  source 1..17: mol_type = other DNA
tactccaacatccgtgc

SEQ ID NO: 129084 - DNA, 17 bp, synthetic construct
  source 1..17: mol_type = other DNA
actccaacatccgtgcg

SEQ ID NO: 129085 - DNA, 17 bp, synthetic construct
  source 1..17: mol_type = other DNA
ctccaacatccgtgcgg

SEQ ID NO: 129086 - DNA, 17 bp, synthetic construct
  source 1..17: mol_type = other DNA
tccaacatccgtgcggc

SEQ ID NO: 129087 - DNA, 17 bp, synthetic construct
  source 1..17: mol_type = other DNA
ccaacatccgtgcggcc

SEQ ID NO: 129088 - DNA, 17 bp, synthetic construct
  source 1..17: mol_type = other DNA
caacatccgtgcggccg

SEQ ID NO: 129089 - DNA, 17 bp, synthetic construct
  source 1..17: mol_type = other DNA
aacatccgtgcggccgg

SEQ ID NO: 129090 - DNA, 17 bp, synthetic construct
  source 1..17: mol_type = other DNA
acatccgtgcggccgga

SEQ ID NO: 129091 - DNA, 17 bp, synthetic construct
  source 1..17: mol_type = other DNA
catccgtgcggccggag

SEQ ID NO: 129092 - DNA, 17 bp, synthetic construct
  source 1..17: mol_type = other DNA
atccgtgcggccggagg

SEQ ID NO: 129093 - DNA, 17 bp, synthetic construct
  source 1..17: mol_type = other DNA
tccgtgcggccggaggg

SEQ ID NO: 129094 - DNA, 17 bp, synthetic construct
  source 1..17: mol_type = other DNA
ccgtgcggccggagggg

SEQ ID NO: 129095 - DNA, 17 bp, synthetic construct
  source 1..17: mol_type = other DNA
cgtgcggccggaggggc

SEQ ID NO: 129096 - DNA, 17 bp, synthetic construct
  source 1..17: mol_type = other DNA
gtgcggccggaggggcc

SEQ ID NO: 129097 - DNA, 17 bp, synthetic construct
  source 1..17: mol_type = other DNA
tgcggccggaggggccg

SEQ ID NO: 129098 - DNA, 17 bp, synthetic construct
  source 1..17: mol_type = other DNA
gcggccggaggggccgt

SEQ ID NO: 129099 - DNA, 17 bp, synthetic construct
  source 1..17: mol_type = other DNA
cggccggaggggccgtc

SEQ ID NO: 129100 - DNA, 17 bp, synthetic construct
  source 1..17: mol_type = other DNA
ggccggaggggccgtct

SEQ ID NO: 129101 - DNA, 17 bp, synthetic construct
  source 1..17: mol_type = other DNA
gccggaggggccgtctg

SEQ ID NO: 129102 - DNA, 17 bp, synthetic construct
  source 1..17: mol_type = other DNA
ccggaggggccgtctgt

SEQ ID NO: 129103 - DNA, 17 bp, synthetic construct
  source 1..17: mol_type = other DNA
cggaggggccgtctgtg

SEQ ID NO: 129104 - DNA, 17 bp, synthetic construct
  source 1..17: mol_type = other DNA
ggaggggccgtctgtga

SEQ ID NO: 129105 - DNA, 17 bp, synthetic construct
  source 1..17: mol_type = other DNA
gaggggccgtctgtgag

SEQ ID NO: 129106 - DNA, 17 bp, synthetic construct
  source 1..17: mol_type = other DNA
aggggccgtctgtgagc

SEQ ID NO: 129107 - DNA, 17 bp, synthetic construct
  source 1..17: mol_type = other DNA
ggggccgtctgtgagca

SEQ ID NO: 129108 - DNA, 17 bp, synthetic construct
  source 1..17: mol_type = other DNA
gggccgtctgtgagcag

SEQ ID NO: 129109 - DNA, 17 bp, synthetic construct
  source 1..17: mol_type = other DNA
ggccgtctgtgagcagc

SEQ ID NO: 129110 - DNA, 17 bp, synthetic construct
  source 1..17: mol_type = other DNA
gccgtctgtgagcagcc

SEQ ID NO: 129111 - DNA, 17 bp, synthetic construct
  source 1..17: mol_type = other DNA
ccgtctgtgagcagccc

SEQ ID NO: 129112 - DNA, 17 bp, synthetic construct
  source 1..17: mol_type = other DNA
cgtctgtgagcagcccc

SEQ ID NO: 129113 - DNA, 17 bp, synthetic construct
  source 1..17: mol_type = other DNA
gtctgtgagcagcccct

SEQ ID NO: 129114 - DNA, 17 bp, synthetic construct
  source 1..17: mol_type = other DNA
tctgtgagcagcccctg

SEQ ID NO: 129115 - DNA, 17 bp, synthetic construct
  source 1..17: mol_type = other DNA
ctgtgagcagcccctgg

SEQ ID NO: 129116 - DNA, 17 bp, synthetic construct
  source 1..17: mol_type = other DNA
tgtgagcagcccctggg

SEQ ID NO: 129117 - DNA, 17 bp, synthetic construct
  source 1..17: mol_type = other DNA
gtgagcagcccctgggc

SEQ ID NO: 129118 - DNA, 17 bp, synthetic construct
  source 1..17: mol_type = other DNA
tgagcagcccctgggcc

SEQ ID NO: 129119 - DNA, 17 bp, synthetic construct
  source 1..17: mol_type = other DNA
gagcagcccctgggcct

SEQ ID NO: 129120 - DNA, 17 bp, synthetic construct
  source 1..17: mol_type = other DNA
agcagcccctgggcctc

SEQ ID NO: 129121 - DNA, 17 bp, synthetic construct
  source 1..17: mol_type = other DNA
gcagcccctgggcctcg

SEQ ID NO: 129122 - DNA, 17 bp, synthetic construct
  source 1..17: mol_type = other DNA
cagcccctgggcctcga

SEQ ID NO: 129123 - DNA, 17 bp, synthetic construct
  source 1..17: mol_type = other DNA
agcccctgggcctcgag

SEQ ID NO: 129124 - DNA, 17 bp, synthetic construct
  source 1..17: mol_type = other DNA
gcccctgggcctcgagt

SEQ ID NO: 129125 - DNA, 17 bp, synthetic construct
  source 1..17: mol_type = other DNA
cccctgggcctcgagtg

SEQ ID NO: 129126 - DNA, 17 bp, synthetic construct
  source 1..17: mol_type = other DNA
ccctgggcctcgagtgc

SEQ ID NO: 129127 - DNA, 17 bp, synthetic construct
  source 1..17: mol_type = other DNA
cctgggcctcgagtgcc

SEQ ID NO: 129128 - DNA, 17 bp, synthetic construct
  source 1..17: mol_type = other DNA
ctgggcctcgagtgccg

SEQ ID NO: 129129 - DNA, 17 bp, synthetic construct
  source 1..17: mol_type = other DNA
tgggcctcgagtgccgt

SEQ ID NO: 129130 - DNA, 17 bp, synthetic construct
  source 1..17: mol_type = other DNA
gggcctcgagtgccgtg

SEQ ID NO: 129131 - DNA, 17 bp, synthetic construct
  source 1..17: mol_type = other DNA
ggcctcgagtgccgtgc

SEQ ID NO: 129132 - DNA, 17 bp, synthetic construct
  source 1..17: mol_type = other DNA
gcctcgagtgccgtgcc

SEQ ID NO: 129133 - DNA, 17 bp, synthetic construct
  source 1..17: mol_type = other DNA
cctcgagtgccgtgccc

SEQ ID NO: 129134 - DNA, 17 bp, synthetic construct
  source 1..17: mol_type = other DNA
ctcgagtgccgtgccca

SEQ ID NO: 129135 - DNA, 17 bp, synthetic construct
  source 1..17: mol_type = other DNA
tcgagtgccgtgcccag

SEQ ID NO: 129136 - DNA, 17 bp, synthetic construct
  source 1..17: mol_type = other DNA
cgagtgccgtgcccagg

SEQ ID NO: 129137 - DNA, 17 bp, synthetic construct
  source 1..17: mol_type = other DNA
gagtgccgtgcccaggc

SEQ ID NO: 129138 - DNA, 17 bp, synthetic construct
  source 1..17: mol_type = other DNA
agtgccgtgcccaggcc

SEQ ID NO: 129139 - DNA, 17 bp, synthetic construct
  source 1..17: mol_type = other DNA
gtgccgtgcccaggccc

SEQ ID NO: 129140 - DNA, 17 bp, synthetic construct
  source 1..17: mol_type = other DNA
tgccgtgcccaggccca

SEQ ID NO: 129141 - DNA, 17 bp, synthetic construct
  source 1..17: mol_type = other DNA
gccgtgcccaggcccag

SEQ ID NO: 129142 - DNA, 17 bp, synthetic construct
  source 1..17: mol_type = other DNA
ccgtgcccaggcccagc

SEQ ID NO: 129143 - DNA, 17 bp, synthetic construct
  source 1..17: mol_type = other DNA
cgtgcccaggcccagcc

SEQ ID NO: 129144 - DNA, 17 bp, synthetic construct
  source 1..17: mol_type = other DNA
gtgcccaggcccagcct

SEQ ID NO: 129145 - DNA, 17 bp, synthetic construct
  source 1..17: mol_type = other DNA
tgcccaggcccagcctg

SEQ ID NO: 129146 - DNA, 17 bp, synthetic construct
  source 1..17: mol_type = other DNA
gcccaggcccagcctgg

SEQ ID NO: 129147 - DNA, 17 bp, synthetic construct
  source 1..17: mol_type = other DNA
cccaggcccagcctggt

SEQ ID NO: 129148 - DNA, 17 bp, synthetic construct
  source 1..17: mol_type = other DNA
ccaggcccagcctggtg

SEQ ID NO: 129149 - DNA, 17 bp, synthetic construct
  source 1..17: mol_type = other DNA
caggcccagcctggtgt

SEQ ID NO: 129150 - DNA, 17 bp, synthetic construct
  source 1..17: mol_type = other DNA
aggcccagcctggtgtc

SEQ ID NO: 129151 - DNA, 17 bp, synthetic construct
  source 1..17: mol_type = other DNA
ggcccagcctggtgtcc

SEQ ID NO: 129152 - DNA, 17 bp, synthetic construct
  source 1..17: mol_type = other DNA
gcccagcctggtgtccc

SEQ ID NO: 129153 - DNA, 17 bp, synthetic construct
  source 1..17: mol_type = other DNA
cccagcctggtgtcccc

SEQ ID NO: 129154 - DNA, 17 bp, synthetic construct
  source 1..17: mol_type = other DNA
ccagcctggtgtccccc

SEQ ID NO: 129155 - DNA, 17 bp, synthetic construct
  source 1..17: mol_type = other DNA
cagcctggtgtccccct

SEQ ID NO: 129156 - DNA, 17 bp, synthetic construct
  source 1..17: mol_type = other DNA
agcctggtgtccccctg

SEQ ID NO: 129157 - DNA, 17 bp, synthetic construct
  source 1..17: mol_type = other DNA
gcctggtgtccccctgc

SEQ ID NO: 129158 - DNA, 17 bp, synthetic construct
  source 1..17: mol_type = other DNA
cctggtgtccccctgcg

SEQ ID NO: 129159 - DNA, 17 bp, synthetic construct
  source 1..17: mol_type = other DNA
ctggtgtccccctgcgg

SEQ ID NO: 129160 - DNA, 17 bp, synthetic construct
  source 1..17: mol_type = other DNA
tggtgtccccctgcggg

SEQ ID NO: 129161 - DNA, 17 bp, synthetic construct
  source 1..17: mol_type = other DNA
ggtgtccccctgcggga

SEQ ID NO: 129162 - DNA, 17 bp, synthetic construct
  source 1..17: mol_type = other DNA
gtgtccccctgcgggag

SEQ ID NO: 129163 - DNA, 17 bp, synthetic construct
  source 1..17: mol_type = other DNA
tgtccccctgcgggagt

SEQ ID NO: 129164 - DNA, 17 bp, synthetic construct
  source 1..17: mol_type = other DNA
gtccccctgcgggagtt

SEQ ID NO: 129165 - DNA, 17 bp, synthetic construct
  source 1..17: mol_type = other DNA
tccccctgcgggagttg

SEQ ID NO: 129166 - DNA, 17 bp, synthetic construct
  source 1..17: mol_type = other DNA
ccccctgcgggagttgg

SEQ ID NO: 129167 - DNA, 17 bp, synthetic construct
  source 1..17: mol_type = other DNA
cccctgcgggagttggg

SEQ ID NO: 129168 - DNA, 17 bp, synthetic construct
  source 1..17: mol_type = other DNA
ccctgcgggagttgggc

SEQ ID NO: 129169 - DNA, 17 bp, synthetic construct
  source 1..17: mol_type = other DNA
cctgcgggagttgggcc

SEQ ID NO: 129170 - DNA, 17 bp, synthetic construct
  source 1..17: mol_type = other DNA
ctgcgggagttgggcca

SEQ ID NO: 129171 - DNA, 17 bp, synthetic construct
  source 1..17: mol_type = other DNA
tgcgggagttgggccag

SEQ ID NO: 129172 - DNA, 17 bp, synthetic construct
  source 1..17: mol_type = other DNA
gcgggagttgggccagg

SEQ ID NO: 129173 - DNA, 17 bp, synthetic construct
  source 1..17: mol_type = other DNA
cgggagttgggccaggt

SEQ ID NO: 129174 - DNA, 17 bp, synthetic construct
  source 1..17: mol_type = other DNA
gggagttgggccaggtc

SEQ ID NO: 129175 - DNA, 17 bp, synthetic construct
  source 1..17: mol_type = other DNA
ggagttgggccaggtcg

SEQ ID NO: 129176 - DNA, 17 bp, synthetic construct
  source 1..17: mol_type = other DNA
gagttgggccaggtcgt

SEQ ID NO: 129177 - DNA, 17 bp, synthetic construct
  source 1..17: mol_type = other DNA
agttgggccaggtcgtg

SEQ ID NO: 129178 - DNA, 17 bp, synthetic construct
  source 1..17: mol_type = other DNA
gttgggccaggtcgtgg

SEQ ID NO: 129179 - DNA, 17 bp, synthetic construct
  source 1..17: mol_type = other DNA
ttgggccaggtcgtgga

SEQ ID NO: 129180 - DNA, 17 bp, synthetic construct
  source 1..17: mol_type = other DNA
tgggccaggtcgtggaa

SEQ ID NO: 129181 - DNA, 17 bp, synthetic construct
  source 1..17: mol_type = other DNA
gggccaggtcgtggaat

SEQ ID NO: 129182 - DNA, 17 bp, synthetic construct
  source 1..17: mol_type = other DNA
ggccaggtcgtggaatg

SEQ ID NO: 129183 - DNA, 17 bp, synthetic construct
  source 1..17: mol_type = other DNA
gccaggtcgtggaatgc

SEQ ID NO: 129184 - DNA, 17 bp, synthetic construct
  source 1..17: mol_type = other DNA
ccaggtcgtggaatgca

SEQ ID NO: 129185 - DNA, 17 bp, synthetic construct
  source 1..17: mol_type = other DNA
caggtcgtggaatgcag

SEQ ID NO: 129186 - DNA, 17 bp, synthetic construct
  source 1..17: mol_type = other DNA
aggtcgtggaatgcagc

SEQ ID NO: 129187 - DNA, 17 bp, synthetic construct
  source 1..17: mol_type = other DNA
ggtcgtggaatgcagcc

SEQ ID NO: 129188 - DNA, 17 bp, synthetic construct
  source 1..17: mol_type = other DNA
gtcgtggaatgcagcct

SEQ ID NO: 129189 - DNA, 17 bp, synthetic construct
  source 1..17: mol_type = other DNA
tcgtggaatgcagcctg

SEQ ID NO: 129190 - DNA, 17 bp, synthetic construct
  source 1..17: mol_type = other DNA
cgtggaatgcagcctgg

SEQ ID NO: 129191 - DNA, 17 bp, synthetic construct
  source 1..17: mol_type = other DNA
gtggaatgcagcctgga

SEQ ID NO: 129192 - DNA, 17 bp, synthetic construct
  source 1..17: mol_type = other DNA
tggaatgcagcctggac

SEQ ID NO: 129193 - DNA, 17 bp, synthetic construct
  source 1..17: mol_type = other DNA
ggaatgcagcctggact

SEQ ID NO: 129194 - DNA, 17 bp, synthetic construct
  source 1..17: mol_type = other DNA
gaatgcagcctggactt

SEQ ID NO: 129195 - DNA, 17 bp, synthetic construct
  source 1..17: mol_type = other DNA
aatgcagcctggacttt

SEQ ID NO: 129196 - DNA, 17 bp, synthetic construct
  source 1..17: mol_type = other DNA
atgcagcctggactttg

SEQ ID NO: 129197 - DNA, 17 bp, synthetic construct
  source 1..17: mol_type = other DNA
tgcagcctggactttgg

SEQ ID NO: 129198 - DNA, 17 bp, synthetic construct
  source 1..17: mol_type = other DNA
gcagcctggactttggc

SEQ ID NO: 129199 - DNA, 17 bp, synthetic construct
  source 1..17: mol_type = other DNA
cagcctggactttggcc

SEQ ID NO: 129200 - DNA, 17 bp, synthetic construct
  source 1..17: mol_type = other DNA
agcctggactttggcct

SEQ ID NO: 129201 - DNA, 17 bp, synthetic construct
  source 1..17: mol_type = other DNA
gcctggactttggcctg

SEQ ID NO: 129202 - DNA, 17 bp, synthetic construct
  source 1..17: mol_type = other DNA
cctggactttggcctgg

SEQ ID NO: 129203 - DNA, 17 bp, synthetic construct
  source 1..17: mol_type = other DNA
ctggactttggcctggt

SEQ ID NO: 129204 - DNA, 17 bp, synthetic construct
  source 1..17: mol_type = other DNA
tggactttggcctggtc

SEQ ID NO: 129205 - DNA, 17 bp, synthetic construct
  source 1..17: mol_type = other DNA
ggactttggcctggtct

SEQ ID NO: 129206 - DNA, 17 bp, synthetic construct
  source 1..17: mol_type = other DNA
gactttggcctggtctg

SEQ ID NO: 129207 - DNA, 17 bp, synthetic construct
  source 1..17: mol_type = other DNA
actttggcctggtctgc

SEQ ID NO: 129208 - DNA, 17 bp, synthetic construct
  source 1..17: mol_type = other DNA
ctttggcctggtctgca

SEQ ID NO: 129209 - DNA, 17 bp, synthetic construct
  source 1..17: mol_type = other DNA
tttggcctggtctgcag

SEQ ID NO: 129210 - DNA, 17 bp, synthetic construct
  source 1..17: mol_type = other DNA
ttggcctggtctgcagg

SEQ ID NO: 129211 - DNA, 17 bp, synthetic construct
  source 1..17: mol_type = other DNA
tggcctggtctgcagga

SEQ ID NO: 129212 - DNA, 17 bp, synthetic construct
  source 1..17: mol_type = other DNA
ggcctggtctgcaggaa

SEQ ID NO: 129213 - DNA, 17 bp, synthetic construct
  source 1..17: mol_type = other DNA
gcctggtctgcaggaac

SEQ ID NO: 129214 - DNA, 17 bp, synthetic construct
  source 1..17: mol_type = other DNA
cctggtctgcaggaacc

SEQ ID NO: 129215 - DNA, 17 bp, synthetic construct
  source 1..17: mol_type = other DNA
ctggtctgcaggaaccg

SEQ ID NO: 129216 - DNA, 17 bp, synthetic construct
  source 1..17: mol_type = other DNA
tggtctgcaggaaccgt

SEQ ID NO: 129217 - DNA, 17 bp, synthetic construct
  source 1..17: mol_type = other DNA
ggtctgcaggaaccgtg

SEQ ID NO: 129218 - DNA, 17 bp, synthetic construct
  source 1..17: mol_type = other DNA
gtctgcaggaaccgtga

SEQ ID NO: 129219 - DNA, 17 bp, synthetic construct
  source 1..17: mol_type = other DNA
tctgcaggaaccgtgag

SEQ ID NO: 129220 - DNA, 17 bp, synthetic construct
  source 1..17: mol_type = other DNA
ctgcaggaaccgtgagc

SEQ ID NO: 129221 - DNA, 17 bp, synthetic construct
  source 1..17: mol_type = other DNA
tgcaggaaccgtgagca

SEQ ID NO: 129222 - DNA, 17 bp, synthetic construct
  source 1..17: mol_type = other DNA
gcaggaaccgtgagcag

SEQ ID NO: 129223 - DNA, 17 bp, synthetic construct
  source 1..17: mol_type = other DNA
caggaaccgtgagcagg

SEQ ID NO: 129224 - DNA, 17 bp, synthetic construct
  source 1..17: mol_type = other DNA
aggaaccgtgagcaggt

SEQ ID NO: 129225 - DNA, 17 bp, synthetic construct
  source 1..17: mol_type = other DNA
ggaaccgtgagcaggtg

SEQ ID NO: 129226 - DNA, 17 bp, synthetic construct
  source 1..17: mol_type = other DNA
gaaccgtgagcaggtgg

SEQ ID NO: 129227 - DNA, 17 bp, synthetic construct
  source 1..17: mol_type = other DNA
aaccgtgagcaggtggg

SEQ ID NO: 129228 - DNA, 17 bp, synthetic construct
  source 1..17: mol_type = other DNA
accgtgagcaggtgggg

SEQ ID NO: 129229 - DNA, 17 bp, synthetic construct
  source 1..17: mol_type = other DNA
ccgtgagcaggtgggga

SEQ ID NO: 129230 - DNA, 17 bp, synthetic construct
  source 1..17: mol_type = other DNA
cgtgagcaggtggggaa

SEQ ID NO: 129231 - DNA, 17 bp, synthetic construct
  source 1..17: mol_type = other DNA
gtgagcaggtggggaag

SEQ ID NO: 129232 - DNA, 17 bp, synthetic construct
  source 1..17: mol_type = other DNA
tgagcaggtggggaagt

SEQ ID NO: 129233 - DNA, 17 bp, synthetic construct
  source 1..17: mol_type = other DNA
gagcaggtggggaagtt

SEQ ID NO: 129234 - DNA, 17 bp, synthetic construct
  source 1..17: mol_type = other DNA
agcaggtggggaagttc

SEQ ID NO: 129235 - DNA, 17 bp, synthetic construct
  source 1..17: mol_type = other DNA
gcaggtggggaagttca

SEQ ID NO: 129236 - DNA, 17 bp, synthetic construct
  source 1..17: mol_type = other DNA
caggtggggaagttcaa

SEQ ID NO: 129237 - DNA, 17 bp, synthetic construct
  source 1..17: mol_type = other DNA
aggtggggaagttcaag

SEQ ID NO: 129238 - DNA, 17 bp, synthetic construct
  source 1..17: mol_type = other DNA
ggtggggaagttcaaga

SEQ ID NO: 129239 - DNA, 17 bp, synthetic construct
  source 1..17: mol_type = other DNA
gtggggaagttcaagat

SEQ ID NO: 129240 - DNA, 17 bp, synthetic construct
  source 1..17: mol_type = other DNA
tggggaagttcaagatg

SEQ ID NO: 129241 - DNA, 17 bp, synthetic construct
  source 1..17: mol_type = other DNA
ggggaagttcaagatgt

SEQ ID NO: 129242 - DNA, 17 bp, synthetic construct
  source 1..17: mol_type = other DNA
gggaagttcaagatgtg

SEQ ID NO: 129243 - DNA, 17 bp, synthetic construct
  source 1..17: mol_type = other DNA
ggaagttcaagatgtgc

SEQ ID NO: 129244 - DNA, 17 bp, synthetic construct
  source 1..17: mol_type = other DNA
gaagttcaagatgtgct

SEQ ID NO: 129245 - DNA, 17 bp, synthetic construct
  source 1..17: mol_type = other DNA
aagttcaagatgtgctt

SEQ ID NO: 129246 - DNA, 17 bp, synthetic construct
  source 1..17: mol_type = other DNA
agttcaagatgtgcttc

SEQ ID NO: 129247 - DNA, 17 bp, synthetic construct
  source 1..17: mol_type = other DNA
gttcaagatgtgcttca

SEQ ID NO: 129248 - DNA, 17 bp, synthetic construct
  source 1..17: mol_type = other DNA
ttcaagatgtgcttcaa

SEQ ID NO: 129249 - DNA, 17 bp, synthetic construct
  source 1..17: mol_type = other DNA
tcaagatgtgcttcaac

SEQ ID NO: 129250 - DNA, 17 bp, synthetic construct
  source 1..17: mol_type = other DNA
caagatgtgcttcaact

SEQ ID NO: 129251 - DNA, 17 bp, synthetic construct
  source 1..17: mol_type = other DNA
aagatgtgcttcaacta

SEQ ID NO: 129252 - DNA, 17 bp, synthetic construct
  source 1..17: mol_type = other DNA
agatgtgcttcaactat

SEQ ID NO: 129253 - DNA, 17 bp, synthetic construct
  source 1..17: mol_type = other DNA
gatgtgcttcaactatg

SEQ ID NO: 129254 - DNA, 17 bp, synthetic construct
  source 1..17: mol_type = other DNA
atgtgcttcaactatga

SEQ ID NO: 129255 - DNA, 17 bp, synthetic construct
  source 1..17: mol_type = other DNA
tgtgcttcaactatgaa

SEQ ID NO: 129256 - DNA, 17 bp, synthetic construct
  source 1..17: mol_type = other DNA
gtgcttcaactatgaaa

SEQ ID NO: 129257 - DNA, 17 bp, synthetic construct
  source 1..17: mol_type = other DNA
tgcttcaactatgaaat

SEQ ID NO: 129258 - DNA, 17 bp, synthetic construct
  source 1..17: mol_type = other DNA
gcttcaactatgaaatc

SEQ ID NO: 129259 - DNA, 17 bp, synthetic construct
  source 1..17: mol_type = other DNA
cttcaactatgaaatcc

SEQ ID NO: 129260 - DNA, 17 bp, synthetic construct
  source 1..17: mol_type = other DNA
ttcaactatgaaatccg

SEQ ID NO: 129261 - DNA, 17 bp, synthetic construct
  source 1..17: mol_type = other DNA
tcaactatgaaatccgt

SEQ ID NO: 129262 - DNA, 17 bp, synthetic construct
  source 1..17: mol_type = other DNA
caactatgaaatccgtg

SEQ ID NO: 129263 - DNA, 17 bp, synthetic construct
  source 1..17: mol_type = other DNA
aactatgaaatccgtgt

SEQ ID NO: 129264 - DNA, 17 bp, synthetic construct
  source 1..17: mol_type = other DNA
actatgaaatccgtgtg

SEQ ID NO: 129265 - DNA, 17 bp, synthetic construct
  source 1..17: mol_type = other DNA
ctatgaaatccgtgtgt

SEQ ID NO: 129266 - DNA, 17 bp, synthetic construct
  source 1..17: mol_type = other DNA
tatgaaatccgtgtgtt

SEQ ID NO: 129267 - DNA, 17 bp, synthetic construct
  source 1..17: mol_type = other DNA
atgaaatccgtgtgttc

SEQ ID NO: 129268 - DNA, 17 bp, synthetic construct
  source 1..17: mol_type = other DNA
tgaaatccgtgtgttct

SEQ ID NO: 129269 - DNA, 17 bp, synthetic construct
  source 1..17: mol_type = other DNA
gaaatccgtgtgttctg

SEQ ID NO: 129270 - DNA, 17 bp, synthetic construct
  source 1..17: mol_type = other DNA
aaatccgtgtgttctgc

SEQ ID NO: 129271 - DNA, 17 bp, synthetic construct
  source 1..17: mol_type = other DNA
aatccgtgtgttctgct

SEQ ID NO: 129272 - DNA, 17 bp, synthetic construct
  source 1..17: mol_type = other DNA
atccgtgtgttctgctg

SEQ ID NO: 129273 - DNA, 17 bp, synthetic construct
  source 1..17: mol_type = other DNA
tccgtgtgttctgctgc

SEQ ID NO: 129274 - DNA, 17 bp, synthetic construct
  source 1..17: mol_type = other DNA
ccgtgtgttctgctgca

SEQ ID NO: 129275 - DNA, 17 bp, synthetic construct
  source 1..17: mol_type = other DNA
cgtgtgttctgctgcaa

SEQ ID NO: 129276 - DNA, 17 bp, synthetic construct
  source 1..17: mol_type = other DNA
gtgtgttctgctgcaac

SEQ ID NO: 129277 - DNA, 17 bp, synthetic construct
  source 1..17: mol_type = other DNA
tgtgttctgctgcaact

SEQ ID NO: 129278 - DNA, 17 bp, synthetic construct
  source 1..17: mol_type = other DNA
gtgttctgctgcaacta

SEQ ID NO: 129279 - DNA, 17 bp, synthetic construct
  source 1..17: mol_type = other DNA
tgttctgctgcaactac

SEQ ID NO: 129280 - DNA, 17 bp, synthetic construct
  source 1..17: mol_type = other DNA
gttctgctgcaactacg

SEQ ID NO: 129281 - DNA, 17 bp, synthetic construct
  source 1..17: mol_type = other DNA
ttctgctgcaactacgg

SEQ ID NO: 129282 - DNA, 17 bp, synthetic construct
  source 1..17: mol_type = other DNA
tctgctgcaactacggc

SEQ ID NO: 129283 - DNA, 17 bp, synthetic construct
  source 1..17: mol_type = other DNA
ctgctgcaactacggcc

SEQ ID NO: 129284 - DNA, 17 bp, synthetic construct
  source 1..17: mol_type = other DNA
tgctgcaactacggcca

SEQ ID NO: 129285 - DNA, 17 bp, synthetic construct
  source 1..17: mol_type = other DNA
gctgcaactacggccac

SEQ ID NO: 129286 - DNA, 17 bp, synthetic construct
  source 1..17: mol_type = other DNA
ctgcaactacggccact

SEQ ID NO: 129287 - DNA, 17 bp, synthetic construct
  source 1..17: mol_type = other DNA
tgcaactacggccactg

SEQ ID NO: 129288 - DNA, 17 bp, synthetic construct
  source 1..17: mol_type = other DNA
gcaactacggccactgc

SEQ ID NO: 129289 - DNA, 17 bp, synthetic construct
  source 1..17: mol_type = other DNA
caactacggccactgcc

SEQ ID NO: 129290 - DNA, 17 bp, synthetic construct
  source 1..17: mol_type = other DNA
aactacggccactgccc

SEQ ID NO: 129291 - DNA, 17 bp, synthetic construct
  source 1..17: mol_type = other DNA
actacggccactgcccc

SEQ ID NO: 129292 - DNA, 17 bp, synthetic construct
  source 1..17: mol_type = other DNA
ctacggccactgcccca

SEQ ID NO: 129293 - DNA, 17 bp, synthetic construct
  source 1..17: mol_type = other DNA
tacggccactgccccag

SEQ ID NO: 129294 - DNA, 17 bp, synthetic construct
  source 1..17: mol_type = other DNA
acggccactgccccagc

SEQ ID NO: 129295 - DNA, 17 bp, synthetic construct
  source 1..17: mol_type = other DNA
cggccactgccccagca

SEQ ID NO: 129296 - DNA, 17 bp, synthetic construct
  source 1..17: mol_type = other DNA
ggccactgccccagcac

SEQ ID NO: 129297 - DNA, 17 bp, synthetic construct
  source 1..17: mol_type = other DNA
gccactgccccagcacc

SEQ ID NO: 129298 - DNA, 17 bp, synthetic construct
  source 1..17: mol_type = other DNA
ccactgccccagcaccc

SEQ ID NO: 129299 - DNA, 17 bp, synthetic construct
  source 1..17: mol_type = other DNA
cactgccccagcacccc

SEQ ID NO: 129300 - DNA, 17 bp, synthetic construct
  source 1..17: mol_type = other DNA
actgccccagcaccccg

SEQ ID NO: 129301 - DNA, 17 bp, synthetic construct
  source 1..17: mol_type = other DNA
ctgccccagcaccccgg

SEQ ID NO: 129302 - DNA, 17 bp, synthetic construct
  source 1..17: mol_type = other DNA
tgccccagcaccccggc

SEQ ID NO: 129303 - DNA, 17 bp, synthetic construct
  source 1..17: mol_type = other DNA
gccccagcaccccggcc

SEQ ID NO: 129304 - DNA, 17 bp, synthetic construct
  source 1..17: mol_type = other DNA
ccccagcaccccggcca

SEQ ID NO: 129305 - DNA, 17 bp, synthetic construct
  source 1..17: mol_type = other DNA
cccagcaccccggccac

SEQ ID NO: 129306 - DNA, 17 bp, synthetic construct
  source 1..17: mol_type = other DNA
ccagcaccccggccacc

SEQ ID NO: 129307 - DNA, 17 bp, synthetic construct
  source 1..17: mol_type = other DNA
cagcaccccggccacca

SEQ ID NO: 129308 - DNA, 17 bp, synthetic construct
  source 1..17: mol_type = other DNA
agcaccccggccaccag

SEQ ID NO: 129309 - DNA, 17 bp, synthetic construct
  source 1..17: mol_type = other DNA
gcaccccggccaccagc

SEQ ID NO: 129310 - DNA, 17 bp, synthetic construct
  source 1..17: mol_type = other DNA
caccccggccaccagct

SEQ ID NO: 129311 - DNA, 17 bp, synthetic construct
  source 1..17: mol_type = other DNA
accccggccaccagctc

SEQ ID NO: 129312 - DNA, 17 bp, synthetic construct
  source 1..17: mol_type = other DNA
ccccggccaccagctct

SEQ ID NO: 129313 - DNA, 17 bp, synthetic construct
  source 1..17: mol_type = other DNA
cccggccaccagctcta

SEQ ID NO: 129314 - DNA, 17 bp, synthetic construct
  source 1..17: mol_type = other DNA
ccggccaccagctctac

SEQ ID NO: 129315 - DNA, 17 bp, synthetic construct
  source 1..17: mol_type = other DNA
cggccaccagctctacg

SEQ ID NO: 129316 - DNA, 17 bp, synthetic construct
  source 1..17: mol_type = other DNA
ggccaccagctctacgg

SEQ ID NO: 129317 - DNA, 17 bp, synthetic construct
  source 1..17: mol_type = other DNA
gccaccagctctacggc

SEQ ID NO: 129318 - DNA, 17 bp, synthetic construct
  source 1..17: mol_type = other DNA
ccaccagctctacggcc

SEQ ID NO: 129319 - DNA, 17 bp, synthetic construct
  source 1..17: mol_type = other DNA
caccagctctacggcca

SEQ ID NO: 129320 - DNA, 17 bp, synthetic construct
  source 1..17: mol_type = other DNA
accagctctacggccat

SEQ ID NO: 129321 - DNA, 17 bp, synthetic construct
  source 1..17: mol_type = other DNA
ccagctctacggccatg

SEQ ID NO: 129322 - DNA, 17 bp, synthetic construct
  source 1..17: mol_type = other DNA
cagctctacggccatgc

SEQ ID NO: 129323 - DNA, 17 bp, synthetic construct
  source 1..17: mol_type = other DNA
agctctacggccatgcc

SEQ ID NO: 129324 - DNA, 17 bp, synthetic construct
  source 1..17: mol_type = other DNA
gctctacggccatgccc

SEQ ID NO: 129325 - DNA, 17 bp, synthetic construct
  source 1..17: mol_type = other DNA
ctctacggccatgccct

SEQ ID NO: 129326 - DNA, 17 bp, synthetic construct
  source 1..17: mol_type = other DNA
tctacggccatgccctc

SEQ ID NO: 129327 - DNA, 17 bp, synthetic construct
  source 1..17: mol_type = other DNA
ctacggccatgccctcc

SEQ ID NO: 129328 - DNA, 17 bp, synthetic construct
  source 1..17: mol_type = other DNA
tacggccatgccctcct

SEQ ID NO: 129329 - DNA, 17 bp, synthetic construct
  source 1..17: mol_type = other DNA
acggccatgccctcctc

SEQ ID NO: 129330 - DNA, 17 bp, synthetic construct
  source 1..17: mol_type = other DNA
cggccatgccctcctcc

SEQ ID NO: 129331 - DNA, 17 bp, synthetic construct
  source 1..17: mol_type = other DNA
ggccatgccctcctcca

SEQ ID NO: 129332 - DNA, 17 bp, synthetic construct
  source 1..17: mol_type = other DNA
gccatgccctcctccac

SEQ ID NO: 129333 - DNA, 17 bp, synthetic construct
  source 1..17: mol_type = other DNA
ccatgccctcctccact

SEQ ID NO: 129334 - DNA, 17 bp, synthetic construct
  source 1..17: mol_type = other DNA
catgccctcctccactc

SEQ ID NO: 129335 - DNA, 17 bp, synthetic construct
  source 1..17: mol_type = other DNA
atgccctcctccactcc

SEQ ID NO: 129336 - DNA, 17 bp, synthetic construct
  source 1..17: mol_type = other DNA
tgccctcctccactccg

SEQ ID NO: 129337 - DNA, 17 bp, synthetic construct
  source 1..17: mol_type = other DNA
gccctcctccactccgg

SEQ ID NO: 129338 - DNA, 17 bp, synthetic construct
  source 1..17: mol_type = other DNA
ccctcctccactccggg

SEQ ID NO: 129339 - DNA, 17 bp, synthetic construct
  source 1..17: mol_type = other DNA
cctcctccactccgggg

SEQ ID NO: 129340 - DNA, 17 bp, synthetic construct
  source 1..17: mol_type = other DNA
ctcctccactccgggga

SEQ ID NO: 129341 - DNA, 17 bp, synthetic construct
  source 1..17: mol_type = other DNA
tcctccactccggggac

SEQ ID NO: 129342 - DNA, 17 bp, synthetic construct
  source 1..17: mol_type = other DNA
cctccactccggggacg

SEQ ID NO: 129343 - DNA, 17 bp, synthetic construct
  source 1..17: mol_type = other DNA
ctccactccggggacga

SEQ ID NO: 129344 - DNA, 17 bp, synthetic construct
  source 1..17: mol_type = other DNA
tccactccggggacgac

SEQ ID NO: 129345 - DNA, 17 bp, synthetic construct
  source 1..17: mol_type = other DNA
ccactccggggacgacc

SEQ ID NO: 129346 - DNA, 17 bp, synthetic construct
  source 1..17: mol_type = other DNA
cactccggggacgacct

SEQ ID NO: 129347 - DNA, 17 bp, synthetic construct
  source 1..17: mol_type = other DNA
actccggggacgacctg

SEQ ID NO: 129348 - DNA, 17 bp, synthetic construct
  source 1..17: mol_type = other DNA
ctccggggacgacctgg

SEQ ID NO: 129349 - DNA, 17 bp, synthetic construct
  source 1..17: mol_type = other DNA
tccggggacgacctgga

SEQ ID NO: 129350 - DNA, 17 bp, synthetic construct
  source 1..17: mol_type = other DNA
ccggggacgacctggat

SEQ ID NO: 129351 - DNA, 17 bp, synthetic construct
  source 1..17: mol_type = other DNA
cggggacgacctggatc

SEQ ID NO: 129352 - DNA, 17 bp, synthetic construct
  source 1..17: mol_type = other DNA
ggggacgacctggatcc

SEQ ID NO: 129353 - DNA, 17 bp, synthetic construct
  source 1..17: mol_type = other DNA
gggacgacctggatcct

SEQ ID NO: 129354 - DNA, 17 bp, synthetic construct
  source 1..17: mol_type = other DNA
ggacgacctggatcctc

SEQ ID NO: 129355 - DNA, 17 bp, synthetic construct
  source 1..17: mol_type = other DNA
gacgacctggatcctca

SEQ ID NO: 129356 - DNA, 17 bp, synthetic construct
  source 1..17: mol_type = other DNA
acgacctggatcctcac

SEQ ID NO: 129357 - DNA, 17 bp, synthetic construct
  source 1..17: mol_type = other DNA
cgacctggatcctcaca

SEQ ID NO: 129358 - DNA, 17 bp, synthetic construct
  source 1..17: mol_type = other DNA
gacctggatcctcacag

SEQ ID NO: 129359 - DNA, 17 bp, synthetic construct
  source 1..17: mol_type = other DNA
acctggatcctcacaga

SEQ ID NO: 129360 - DNA, 17 bp, synthetic construct
  source 1..17: mol_type = other DNA
cctggatcctcacagag

SEQ ID NO: 129361 - DNA, 17 bp, synthetic construct
  source 1..17: mol_type = other DNA
ctggatcctcacagagc

SEQ ID NO: 129362 - DNA, 17 bp, synthetic construct
  source 1..17: mol_type = other DNA
tggatcctcacagagct

SEQ ID NO: 129363 - DNA, 17 bp, synthetic construct
  source 1..17: mol_type = other DNA
ggatcctcacagagctg

SEQ ID NO: 129364 - DNA, 17 bp, synthetic construct
  source 1..17: mol_type = other DNA
gatcctcacagagctga

SEQ ID NO: 129365 - DNA, 17 bp, synthetic construct
  source 1..17: mol_type = other DNA
atcctcacagagctgac

SEQ ID NO: 129366 - DNA, 17 bp, synthetic construct
  source 1..17: mol_type = other DNA
tcctcacagagctgacc

SEQ ID NO: 129367 - DNA, 17 bp, synthetic construct
  source 1..17: mol_type = other DNA
cctcacagagctgacca

SEQ ID NO: 129368 - DNA, 17 bp, synthetic construct
  source 1..17: mol_type = other DNA
ctcacagagctgaccac

SEQ ID NO: 129369 - DNA, 17 bp, synthetic construct
  source 1..17: mol_type = other DNA
tcacagagctgaccaca

SEQ ID NO: 129370 - DNA, 17 bp, synthetic construct
  source 1..17: mol_type = other DNA
cacagagctgaccacaa

SEQ ID NO: 129371 - DNA, 17 bp, synthetic construct
  source 1..17: mol_type = other DNA
acagagctgaccacaac

SEQ ID NO: 129372 - DNA, 17 bp, synthetic construct
  source 1..17: mol_type = other DNA
cagagctgaccacaaca

SEQ ID NO: 129373 - DNA, 17 bp, synthetic construct
  source 1..17: mol_type = other DNA
agagctgaccacaacag

SEQ ID NO: 129374 - DNA, 17 bp, synthetic construct
  source 1..17: mol_type = other DNA
gagctgaccacaacagc

SEQ ID NO: 129375 - DNA, 17 bp, synthetic construct
  source 1..17: mol_type = other DNA
agctgaccacaacagcc

SEQ ID NO: 129376 - DNA, 17 bp, synthetic construct
  source 1..17: mol_type = other DNA
gctgaccacaacagcca

SEQ ID NO: 129377 - DNA, 17 bp, synthetic construct
  source 1..17: mol_type = other DNA
ctgaccacaacagccac

SEQ ID NO: 129378 - DNA, 17 bp, synthetic construct
  source 1..17: mol_type = other DNA
tgaccacaacagccact

SEQ ID NO: 129379 - DNA, 17 bp, synthetic construct
  source 1..17: mol_type = other DNA
gaccacaacagccacta

SEQ ID NO: 129380 - DNA, 17 bp, synthetic construct
  source 1..17: mol_type = other DNA
accacaacagccactac

SEQ ID NO: 129381 - DNA, 17 bp, synthetic construct
  source 1..17: mol_type = other DNA
ccacaacagccactacg

SEQ ID NO: 129382 - DNA, 17 bp, synthetic construct
  source 1..17: mol_type = other DNA
cacaacagccactacga

SEQ ID NO: 129383 - DNA, 17 bp, synthetic construct
  source 1..17: mol_type = other DNA
acaacagccactacgac

SEQ ID NO: 129384 - DNA, 17 bp, synthetic construct
  source 1..17: mol_type = other DNA
caacagccactacgact

SEQ ID NO: 129385 - DNA, 17 bp, synthetic construct
  source 1..17: mol_type = other DNA
aacagccactacgactg

SEQ ID NO: 129386 - DNA, 17 bp, synthetic construct
  source 1..17: mol_type = other DNA
acagccactacgactga

SEQ ID NO: 129387 - DNA, 17 bp, synthetic construct
  source 1..17: mol_type = other DNA
cagccactacgactgag

SEQ ID NO: 129388 - DNA, 17 bp, synthetic construct
  source 1..17: mol_type = other DNA
agccactacgactgagt

SEQ ID NO: 129389 - DNA, 17 bp, synthetic construct
  source 1..17: mol_type = other DNA
gccactacgactgagtc

SEQ ID NO: 129390 - DNA, 17 bp, synthetic construct
  source 1..17: mol_type = other DNA
ccactacgactgagtcc

SEQ ID NO: 129391 - DNA, 17 bp, synthetic construct
  source 1..17: mol_type = other DNA
cactacgactgagtcca

SEQ ID NO: 129392 - DNA, 17 bp, synthetic construct
  source 1..17: mol_type = other DNA
actacgactgagtccac

SEQ ID NO: 129393 - DNA, 17 bp, synthetic construct
  source 1..17: mol_type = other DNA
ctacgactgagtccact

SEQ ID NO: 129394 - DNA, 17 bp, synthetic construct
  source 1..17: mol_type = other DNA
tacgactgagtccactg

SEQ ID NO: 129395 - DNA, 17 bp, synthetic construct
  source 1..17: mol_type = other DNA
acgactgagtccactgg

SEQ ID NO: 129396 - DNA, 17 bp, synthetic construct
  source 1..17: mol_type = other DNA
cgactgagtccactgga

SEQ ID NO: 129397 - DNA, 17 bp, synthetic construct
  source 1..17: mol_type = other DNA
gactgagtccactggat

SEQ ID NO: 129398 - DNA, 17 bp, synthetic construct
  source 1..17: mol_type = other DNA
actgagtccactggatc

SEQ ID NO: 129399 - DNA, 17 bp, synthetic construct
  source 1..17: mol_type = other DNA
ctgagtccactggatcc

SEQ ID NO: 129400 - DNA, 17 bp, synthetic construct
  source 1..17: mol_type = other DNA
tgagtccactggatcca

SEQ ID NO: 129401 - DNA, 17 bp, synthetic construct
  source 1..17: mol_type = other DNA
gagtccactggatccac

SEQ ID NO: 129402 - DNA, 17 bp, synthetic construct
  source 1..17: mol_type = other DNA
agtccactggatccacg

SEQ ID NO: 129403 - DNA, 17 bp, synthetic construct
  source 1..17: mol_type = other DNA
gtccactggatccacgg

SEQ ID NO: 129404 - DNA, 17 bp, synthetic construct
  source 1..17: mol_type = other DNA
tccactggatccacggc

SEQ ID NO: 129405 - DNA, 17 bp, synthetic construct
  source 1..17: mol_type = other DNA
ccactggatccacggcc

SEQ ID NO: 129406 - DNA, 17 bp, synthetic construct
  source 1..17: mol_type = other DNA
cactggatccacggcca

SEQ ID NO: 129407 - DNA, 17 bp, synthetic construct
  source 1..17: mol_type = other DNA
actggatccacggccac

SEQ ID NO: 129408 - DNA, 17 bp, synthetic construct
  source 1..17: mol_type = other DNA
ctggatccacggccacc

SEQ ID NO: 129409 - DNA, 17 bp, synthetic construct
  source 1..17: mol_type = other DNA
tggatccacggccaccc

SEQ ID NO: 129410 - DNA, 17 bp, synthetic construct
  source 1..17: mol_type = other DNA
ggatccacggccacccc

SEQ ID NO: 129411 - DNA, 17 bp, synthetic construct
  source 1..17: mol_type = other DNA
gatccacggccaccccg

SEQ ID NO: 129412 - DNA, 17 bp, synthetic construct
  source 1..17: mol_type = other DNA
atccacggccaccccgt

SEQ ID NO: 129413 - DNA, 17 bp, synthetic construct
  source 1..17: mol_type = other DNA
tccacggccaccccgtc

SEQ ID NO: 129414 - DNA, 17 bp, synthetic construct
  source 1..17: mol_type = other DNA
ccacggccaccccgtcc

SEQ ID NO: 129415 - DNA, 17 bp, synthetic construct
  source 1..17: mol_type = other DNA
cacggccaccccgtcct

SEQ ID NO: 129416 - DNA, 17 bp, synthetic construct
  source 1..17: mol_type = other DNA
acggccaccccgtcctc

SEQ ID NO: 129417 - DNA, 17 bp, synthetic construct
  source 1..17: mol_type = other DNA
cggccaccccgtcctcc

SEQ ID NO: 129418 - DNA, 17 bp, synthetic construct
  source 1..17: mol_type = other DNA
ggccaccccgtcctcca

SEQ ID NO: 129419 - DNA, 17 bp, synthetic construct
  source 1..17: mol_type = other DNA
gccaccccgtcctccac

SEQ ID NO: 129420 - DNA, 17 bp, synthetic construct
  source 1..17: mol_type = other DNA
ccaccccgtcctccacc

SEQ ID NO: 129421 - DNA, 17 bp, synthetic construct
  source 1..17: mol_type = other DNA
caccccgtcctccaccc

SEQ ID NO: 129422 - DNA, 17 bp, synthetic construct
  source 1..17: mol_type = other DNA
accccgtcctccacccc

SEQ ID NO: 129423 - DNA, 17 bp, synthetic construct
  source 1..17: mol_type = other DNA
ccccgtcctccacccca

SEQ ID NO: 129424 - DNA, 17 bp, synthetic construct
  source 1..17: mol_type = other DNA
cccgtcctccaccccag

SEQ ID NO: 129425 - DNA, 17 bp, synthetic construct
  source 1..17: mol_type = other DNA
ccgtcctccaccccagg

SEQ ID NO: 129426 - DNA, 17 bp, synthetic construct
  source 1..17: mol_type = other DNA
cgtcctccaccccaggg

SEQ ID NO: 129427 - DNA, 17 bp, synthetic construct
  source 1..17: mol_type = other DNA
gtcctccaccccaggga

SEQ ID NO: 129428 - DNA, 17 bp, synthetic construct
  source 1..17: mol_type = other DNA
tcctccaccccagggac

SEQ ID NO: 129429 - DNA, 17 bp, synthetic construct
  source 1..17: mol_type = other DNA
cctccaccccagggacc

SEQ ID NO: 129430 - DNA, 17 bp, synthetic construct
  source 1..17: mol_type = other DNA
ctccaccccagggacca

SEQ ID NO: 129431 - DNA, 17 bp, synthetic construct
  source 1..17: mol_type = other DNA
tccaccccagggaccac

SEQ ID NO: 129432 - DNA, 17 bp, synthetic construct
  source 1..17: mol_type = other DNA
ccaccccagggaccacc

SEQ ID NO: 129433 - DNA, 17 bp, synthetic construct
  source 1..17: mol_type = other DNA
caccccagggaccacct

SEQ ID NO: 129434 - DNA, 17 bp, synthetic construct
  source 1..17: mol_type = other DNA
accccagggaccacctg

SEQ ID NO: 129435 - DNA, 17 bp, synthetic construct
  source 1..17: mol_type = other DNA
ccccagggaccacctgg

SEQ ID NO: 129436 - DNA, 17 bp, synthetic construct
  source 1..17: mol_type = other DNA
cccagggaccacctgga

SEQ ID NO: 129437 - DNA, 17 bp, synthetic construct
  source 1..17: mol_type = other DNA
ccagggaccacctggat

SEQ ID NO: 129438 - DNA, 17 bp, synthetic construct
  source 1..17: mol_type = other DNA
cagggaccacctggatc

SEQ ID NO: 129439 - DNA, 17 bp, synthetic construct
  source 1..17: mol_type = other DNA
agggaccacctggatcc

SEQ ID NO: 129440 - DNA, 17 bp, synthetic construct
  source 1..17: mol_type = other DNA
gggaccacctggatcct

SEQ ID NO: 129441 - DNA, 17 bp, synthetic construct
  source 1..17: mol_type = other DNA
ggaccacctggatcctc

SEQ ID NO: 129442 - DNA, 17 bp, synthetic construct
  source 1..17: mol_type = other DNA
gaccacctggatcctca

SEQ ID NO: 129443 - DNA, 17 bp, synthetic construct
  source 1..17: mol_type = other DNA
accacctggatcctcac

SEQ ID NO: 129444 - DNA, 17 bp, synthetic construct
  source 1..17: mol_type = other DNA
ccacctggatcctcaca

SEQ ID NO: 129445 - DNA, 17 bp, synthetic construct
  source 1..17: mol_type = other DNA
cacctggatcctcacag

SEQ ID NO: 129446 - DNA, 17 bp, synthetic construct
  source 1..17: mol_type = other DNA
acctggatcctcacaga

SEQ ID NO: 129447 - DNA, 17 bp, synthetic construct
  source 1..17: mol_type = other DNA
cctggatcctcacagag

SEQ ID NO: 129448 - DNA, 17 bp, synthetic construct
  source 1..17: mol_type = other DNA
ctggatcctcacagagc

SEQ ID NO: 129449 - DNA, 17 bp, synthetic construct
  source 1..17: mol_type = other DNA
tggatcctcacagagcc

SEQ ID NO: 129450 - DNA, 17 bp, synthetic construct
  source 1..17: mol_type = other DNA
ggatcctcacagagccg

SEQ ID NO: 129451 - DNA, 17 bp, synthetic construct
  source 1..17: mol_type = other DNA
gatcctcacagagccga

SEQ ID NO: 129452 - DNA, 17 bp, synthetic construct
  source 1..17: mol_type = other DNA
atcctcacagagccgag

SEQ ID NO: 129453 - DNA, 17 bp, synthetic construct
  source 1..17: mol_type = other DNA
tcctcacagagccgagc

SEQ ID NO: 129454 - DNA, 17 bp, synthetic construct
  source 1..17: mol_type = other DNA
cctcacagagccgagca

SEQ ID NO: 129455 - DNA, 17 bp, synthetic construct
  source 1..17: mol_type = other DNA
ctcacagagccgagcac

SEQ ID NO: 129456 - DNA, 17 bp, synthetic construct
  source 1..17: mol_type = other DNA
tcacagagccgagcact

SEQ ID NO: 129457 - DNA, 17 bp, synthetic construct
  source 1..17: mol_type = other DNA
cacagagccgagcacta

SEQ ID NO: 129458 - DNA, 17 bp, synthetic construct
  source 1..17: mol_type = other DNA
acagagccgagcactac

SEQ ID NO: 129459 - DNA, 17 bp, synthetic construct
  source 1..17: mol_type = other DNA
cagagccgagcactaca

SEQ ID NO: 129460 - DNA, 17 bp, synthetic construct
  source 1..17: mol_type = other DNA
agagccgagcactacag

SEQ ID NO: 129461 - DNA, 17 bp, synthetic construct
  source 1..17: mol_type = other DNA
gagccgagcactacagc

SEQ ID NO: 129462 - DNA, 17 bp, synthetic construct
  source 1..17: mol_type = other DNA
agccgagcactacagcc

SEQ ID NO: 129463 - DNA, 17 bp, synthetic construct
  source 1..17: mol_type = other DNA
gccgagcactacagcca

SEQ ID NO: 129464 - DNA, 17 bp, synthetic construct
  source 1..17: mol_type = other DNA
ccgagcactacagccac

SEQ ID NO: 129465 - DNA, 17 bp, synthetic construct
  source 1..17: mol_type = other DNA
cgagcactacagccacc

SEQ ID NO: 129466 - DNA, 17 bp, synthetic construct
  source 1..17: mol_type = other DNA
gagcactacagccaccg

SEQ ID NO: 129467 - DNA, 17 bp, synthetic construct
  source 1..17: mol_type = other DNA
agcactacagccaccgt

SEQ ID NO: 129468 - DNA, 17 bp, synthetic construct
  source 1..17: mol_type = other DNA
gcactacagccaccgtg

SEQ ID NO: 129469 - DNA, 17 bp, synthetic construct
  source 1..17: mol_type = other DNA
cactacagccaccgtga

SEQ ID NO: 129470 - DNA, 17 bp, synthetic construct
  source 1..17: mol_type = other DNA
actacagccaccgtgac

SEQ ID NO: 129471 - DNA, 17 bp, synthetic construct
  source 1..17: mol_type = other DNA
ctacagccaccgtgacg

SEQ ID NO: 129472 - DNA, 17 bp, synthetic construct
  source 1..17: mol_type = other DNA
tacagccaccgtgacgg

SEQ ID NO: 129473 - DNA, 17 bp, synthetic construct
  source 1..17: mol_type = other DNA
acagccaccgtgacggt

SEQ ID NO: 129474 - DNA, 17 bp, synthetic construct
  source 1..17: mol_type = other DNA
cagccaccgtgacggtg

SEQ ID NO: 129475 - DNA, 17 bp, synthetic construct
  source 1..17: mol_type = other DNA
agccaccgtgacggtgc

SEQ ID NO: 129476 - DNA, 17 bp, synthetic construct
  source 1..17: mol_type = other DNA
gccaccgtgacggtgcc

SEQ ID NO: 129477 - DNA, 17 bp, synthetic construct
  source 1..17: mol_type = other DNA
ccaccgtgacggtgccc

SEQ ID NO: 129478 - DNA, 17 bp, synthetic construct
  source 1..17: mol_type = other DNA
caccgtgacggtgccca

SEQ ID NO: 129479 - DNA, 17 bp, synthetic construct
  source 1..17: mol_type = other DNA
accgtgacggtgcccac

SEQ ID NO: 129480 - DNA, 17 bp, synthetic construct
  source 1..17: mol_type = other DNA
ccgtgacggtgcccacc

SEQ ID NO: 129481 - DNA, 17 bp, synthetic construct
  source 1..17: mol_type = other DNA
cgtgacggtgcccaccg

SEQ ID NO: 129482 - DNA, 17 bp, synthetic construct
  source 1..17: mol_type = other DNA
gtgacggtgcccaccgg

SEQ ID NO: 129483 - DNA, 17 bp, synthetic construct
  source 1..17: mol_type = other DNA
tgacggtgcccaccgga

SEQ ID NO: 129484 - DNA, 17 bp, synthetic construct
  source 1..17: mol_type = other DNA
gacggtgcccaccggat

SEQ ID NO: 129485 - DNA, 17 bp, synthetic construct
  source 1..17: mol_type = other DNA
acggtgcccaccggatc

SEQ ID NO: 129486 - DNA, 17 bp, synthetic construct
  source 1..17: mol_type = other DNA
cggtgcccaccggatcc

SEQ ID NO: 129487 - DNA, 17 bp, synthetic construct
  source 1..17: mol_type = other DNA
ggtgcccaccggatcca

SEQ ID NO: 129488 - DNA, 17 bp, synthetic construct
  source 1..17: mol_type = other DNA
gtgcccaccggatccac

SEQ ID NO: 129489 - DNA, 17 bp, synthetic construct
  source 1..17: mol_type = other DNA
tgcccaccggatccacg

SEQ ID NO: 129490 - DNA, 17 bp, synthetic construct
  source 1..17: mol_type = other DNA
gcccaccggatccacgg

SEQ ID NO: 129491 - DNA, 17 bp, synthetic construct
  source 1..17: mol_type = other DNA
cccaccggatccacggc

SEQ ID NO: 129492 - DNA, 17 bp, synthetic construct
  source 1..17: mol_type = other DNA
ccaccggatccacggcc

SEQ ID NO: 129493 - DNA, 17 bp, synthetic construct
  source 1..17: mol_type = other DNA
caccggatccacggcca

SEQ ID NO: 129494 - DNA, 17 bp, synthetic construct
  source 1..17: mol_type = other DNA
accggatccacggccac

SEQ ID NO: 129495 - DNA, 17 bp, synthetic construct
  source 1..17: mol_type = other DNA
ccggatccacggccacc

SEQ ID NO: 129496 - DNA, 17 bp, synthetic construct
  source 1..17: mol_type = other DNA
cggatccacggccaccg

SEQ ID NO: 129497 - DNA, 17 bp, synthetic construct
  source 1..17: mol_type = other DNA
ggatccacggccaccgc

SEQ ID NO: 129498 - DNA, 17 bp, synthetic construct
  source 1..17: mol_type = other DNA
gatccacggccaccgcc

SEQ ID NO: 129499 - DNA, 17 bp, synthetic construct
  source 1..17: mol_type = other DNA
atccacggccaccgcct

SEQ ID NO: 129500 - DNA, 17 bp, synthetic construct
  source 1..17: mol_type = other DNA
tccacggccaccgcctc

SEQ ID NO: 129501 - DNA, 17 bp, synthetic construct
  source 1..17: mol_type = other DNA
ccacggccaccgcctcc

SEQ ID NO: 129502 - DNA, 17 bp, synthetic construct
  source 1..17: mol_type = other DNA
cacggccaccgcctcct

SEQ ID NO: 129503 - DNA, 17 bp, synthetic construct
  source 1..17: mol_type = other DNA
acggccaccgcctcctc

SEQ ID NO: 129504 - DNA, 17 bp, synthetic construct
  source 1..17: mol_type = other DNA
cggccaccgcctcctcc

SEQ ID NO: 129505 - DNA, 17 bp, synthetic construct
  source 1..17: mol_type = other DNA
ggccaccgcctcctcca

SEQ ID NO: 129506 - DNA, 17 bp, synthetic construct
  source 1..17: mol_type = other DNA
gccaccgcctcctccac

SEQ ID NO: 129507 - DNA, 17 bp, synthetic construct
  source 1..17: mol_type = other DNA
ccaccgcctcctccacc

SEQ ID NO: 129508 - DNA, 17 bp, synthetic construct
  source 1..17: mol_type = other DNA
caccgcctcctccaccc

SEQ ID NO: 129509 - DNA, 17 bp, synthetic construct
  source 1..17: mol_type = other DNA
accgcctcctccaccca

SEQ ID NO: 129510 - DNA, 17 bp, synthetic construct
  source 1..17: mol_type = other DNA
ccgcctcctccacccag

SEQ ID NO: 129511 - DNA, 17 bp, synthetic construct
  source 1..17: mol_type = other DNA
cgcctcctccacccagg

SEQ ID NO: 129512 - DNA, 17 bp, synthetic construct
  source 1..17: mol_type = other DNA
gcctcctccacccaggc

SEQ ID NO: 129513 - DNA, 17 bp, synthetic construct
  source 1..17: mol_type = other DNA
cctcctccacccaggca

SEQ ID NO: 129514 - DNA, 17 bp, synthetic construct
  source 1..17: mol_type = other DNA
ctcctccacccaggcaa

SEQ ID NO: 129515 - DNA, 17 bp, synthetic construct
  source 1..17: mol_type = other DNA
tcctccacccaggcaac

SEQ ID NO: 129516 - DNA, 17 bp, synthetic construct
  source 1..17: mol_type = other DNA
cctccacccaggcaact

SEQ ID NO: 129517 - DNA, 17 bp, synthetic construct
  source 1..17: mol_type = other DNA
ctccacccaggcaactg

SEQ ID NO: 129518 - DNA, 17 bp, synthetic construct
  source 1..17: mol_type = other DNA
tccacccaggcaactgc

SEQ ID NO: 129519 - DNA, 17 bp, synthetic construct
  source 1..17: mol_type = other DNA
ccacccaggcaactgct

SEQ ID NO: 129520 - DNA, 17 bp, synthetic construct
  source 1..17: mol_type = other DNA
cacccaggcaactgctg

SEQ ID NO: 129521 - DNA, 17 bp, synthetic construct
  source 1..17: mol_type = other DNA
acccaggcaactgctgg

SEQ ID NO: 129522 - DNA, 17 bp, synthetic construct
  source 1..17: mol_type = other DNA
cccaggcaactgctggc

SEQ ID NO: 129523 - DNA, 17 bp, synthetic construct
  source 1..17: mol_type = other DNA
ccaggcaactgctggca

SEQ ID NO: 129524 - DNA, 17 bp, synthetic construct
  source 1..17: mol_type = other DNA
caggcaactgctggcac

SEQ ID NO: 129525 - DNA, 17 bp, synthetic construct
  source 1..17: mol_type = other DNA
aggcaactgctggcacc

SEQ ID NO: 129526 - DNA, 17 bp, synthetic construct
  source 1..17: mol_type = other DNA
ggcaactgctggcaccc

SEQ ID NO: 129527 - DNA, 17 bp, synthetic construct
  source 1..17: mol_type = other DNA
gcaactgctggcacccc

SEQ ID NO: 129528 - DNA, 17 bp, synthetic construct
  source 1..17: mol_type = other DNA
caactgctggcacccca

SEQ ID NO: 129529 - DNA, 17 bp, synthetic construct
  source 1..17: mol_type = other DNA
aactgctggcaccccac

SEQ ID NO: 129530 - DNA, 17 bp, synthetic construct
  source 1..17: mol_type = other DNA
actgctggcaccccaca

SEQ ID NO: 129531 - DNA, 17 bp, synthetic construct
  source 1..17: mol_type = other DNA
ctgctggcaccccacat

SEQ ID NO: 129532 - DNA, 17 bp, synthetic construct
  source 1..17: mol_type = other DNA
tgctggcaccccacatg

SEQ ID NO: 129533 - DNA, 17 bp, synthetic construct
  source 1..17: mol_type = other DNA
gctggcaccccacatgt

SEQ ID NO: 129534 - DNA, 17 bp, synthetic construct
  source 1..17: mol_type = other DNA
ctggcaccccacatgtg

SEQ ID NO: 129535 - DNA, 17 bp, synthetic construct
  source 1..17: mol_type = other DNA
tggcaccccacatgtga

SEQ ID NO: 129536 - DNA, 17 bp, synthetic construct
  source 1..17: mol_type = other DNA
ggcaccccacatgtgag

SEQ ID NO: 129537 - DNA, 17 bp, synthetic construct
  source 1..17: mol_type = other DNA
gcaccccacatgtgagc

SEQ ID NO: 129538 - DNA, 17 bp, synthetic construct
  source 1..17: mol_type = other DNA
caccccacatgtgagca

SEQ ID NO: 129539 - DNA, 17 bp, synthetic construct
  source 1..17: mol_type = other DNA
accccacatgtgagcac

SEQ ID NO: 129540 - DNA, 17 bp, synthetic construct
  source 1..17: mol_type = other DNA
ccccacatgtgagcacc

SEQ ID NO: 129541 - DNA, 17 bp, synthetic construct
  source 1..17: mol_type = other DNA
cccacatgtgagcacca

SEQ ID NO: 129542 - DNA, 17 bp, synthetic construct
  source 1..17: mol_type = other DNA
ccacatgtgagcaccac

SEQ ID NO: 129543 - DNA, 17 bp, synthetic construct
  source 1..17: mol_type = other DNA
cacatgtgagcaccacg

SEQ ID NO: 129544 - DNA, 17 bp, synthetic construct
  source 1..17: mol_type = other DNA
acatgtgagcaccacgg

SEQ ID NO: 129545 - DNA, 17 bp, synthetic construct
  source 1..17: mol_type = other DNA
catgtgagcaccacggc

SEQ ID NO: 129546 - DNA, 17 bp, synthetic construct
  source 1..17: mol_type = other DNA
atgtgagcaccacggcc

SEQ ID NO: 129547 - DNA, 17 bp, synthetic construct
  source 1..17: mol_type = other DNA
tgtgagcaccacggcca

SEQ ID NO: 129548 - DNA, 17 bp, synthetic construct
  source 1..17: mol_type = other DNA
gtgagcaccacggccac

SEQ ID NO: 129549 - DNA, 17 bp, synthetic construct
  source 1..17: mol_type = other DNA
tgagcaccacggccacg

SEQ ID NO: 129550 - DNA, 17 bp, synthetic construct
  source 1..17: mol_type = other DNA
gagcaccacggccacga

SEQ ID NO: 129551 - DNA, 17 bp, synthetic construct
  source 1..17: mol_type = other DNA
agcaccacggccacgac

SEQ ID NO: 129552 - DNA, 17 bp, synthetic construct
  source 1..17: mol_type = other DNA
gcaccacggccacgaca

SEQ ID NO: 129553 - DNA, 17 bp, synthetic construct
  source 1..17: mol_type = other DNA
caccacggccacgacac

SEQ ID NO: 129554 - DNA, 17 bp, synthetic construct
  source 1..17: mol_type = other DNA
accacggccacgacacc

SEQ ID NO: 129555 - DNA, 17 bp, synthetic construct
  source 1..17: mol_type = other DNA
ccacggccacgacaccc

SEQ ID NO: 129556 - DNA, 17 bp, synthetic construct
  source 1..17: mol_type = other DNA
cacggccacgacaccca

SEQ ID NO: 129557 - DNA, 17 bp, synthetic construct
  source 1..17: mol_type = other DNA
acggccacgacacccac

SEQ ID NO: 129558 - DNA, 17 bp, synthetic construct
  source 1..17: mol_type = other DNA
cggccacgacacccaca

SEQ ID NO: 129559 - DNA, 17 bp, synthetic construct
  source 1..17: mol_type = other DNA
ggccacgacacccacag

SEQ ID NO: 129560 - DNA, 17 bp, synthetic construct
  source 1..17: mol_type = other DNA
gccacgacacccacagt

SEQ ID NO: 129561 - DNA, 17 bp, synthetic construct
  source 1..17: mol_type = other DNA
ccacgacacccacagtc

SEQ ID NO: 129562 - DNA, 17 bp, synthetic construct
  source 1..17: mol_type = other DNA
cacgacacccacagtca

SEQ ID NO: 129563 - DNA, 17 bp, synthetic construct
  source 1..17: mol_type = other DNA
acgacacccacagtcac

SEQ ID NO: 129564 - DNA, 17 bp, synthetic construct
  source 1..17: mol_type = other DNA
cgacacccacagtcacc

SEQ ID NO: 129565 - DNA, 17 bp, synthetic construct
  source 1..17: mol_type = other DNA
gacacccacagtcacca

SEQ ID NO: 129566 - DNA, 17 bp, synthetic construct
  source 1..17: mol_type = other DNA
acacccacagtcaccag

SEQ ID NO: 129567 - DNA, 17 bp, synthetic construct
  source 1..17: mol_type = other DNA
cacccacagtcaccagc

SEQ ID NO: 129568 - DNA, 17 bp, synthetic construct
  source 1..17: mol_type = other DNA
acccacagtcaccagct

SEQ ID NO: 129569 - DNA, 17 bp, synthetic construct
  source 1..17: mol_type = other DNA
cccacagtcaccagctc

SEQ ID NO: 129570 - DNA, 17 bp, synthetic construct
  source 1..17: mol_type = other DNA
ccacagtcaccagctcc

SEQ ID NO: 129571 - DNA, 17 bp, synthetic construct
  source 1..17: mol_type = other DNA
cacagtcaccagctcca

SEQ ID NO: 129572 - DNA, 17 bp, synthetic construct
  source 1..17: mol_type = other DNA
acagtcaccagctccaa

SEQ ID NO: 129573 - DNA, 17 bp, synthetic construct
  source 1..17: mol_type = other DNA
cagtcaccagctccaaa

SEQ ID NO: 129574 - DNA, 17 bp, synthetic construct
  source 1..17: mol_type = other DNA
agtcaccagctccaaag

SEQ ID NO: 129575 - DNA, 17 bp, synthetic construct
  source 1..17: mol_type = other DNA
gtcaccagctccaaagc

SEQ ID NO: 129576 - DNA, 17 bp, synthetic construct
  source 1..17: mol_type = other DNA
tcaccagctccaaagcc

SEQ ID NO: 129577 - DNA, 17 bp, synthetic construct
  source 1..17: mol_type = other DNA
caccagctccaaagcca

SEQ ID NO: 129578 - DNA, 17 bp, synthetic construct
  source 1..17: mol_type = other DNA
accagctccaaagccac

SEQ ID NO: 129579 - DNA, 17 bp, synthetic construct
  source 1..17: mol_type = other DNA
ccagctccaaagccact

SEQ ID NO: 129580 - DNA, 17 bp, synthetic construct
  source 1..17: mol_type = other DNA
cagctccaaagccactc

SEQ ID NO: 129581 - DNA, 17 bp, synthetic construct
  source 1..17: mol_type = other DNA
agctccaaagccactcc

SEQ ID NO: 129582 - DNA, 17 bp, synthetic construct
  source 1..17: mol_type = other DNA
gctccaaagccactccc

SEQ ID NO: 129583 - DNA, 17 bp, synthetic construct
  source 1..17: mol_type = other DNA
ctccaaagccactccct

SEQ ID NO: 129584 - DNA, 17 bp, synthetic construct
  source 1..17: mol_type = other DNA
tccaaagccactccctt

SEQ ID NO: 129585 - DNA, 17 bp, synthetic construct
  source 1..17: mol_type = other DNA
ccaaagccactcccttc

SEQ ID NO: 129586 - DNA, 17 bp, synthetic construct
  source 1..17: mol_type = other DNA
caaagccactcccttct

SEQ ID NO: 129587 - DNA, 17 bp, synthetic construct
  source 1..17: mol_type = other DNA
aaagccactcccttctc

SEQ ID NO: 129588 - DNA, 17 bp, synthetic construct
  source 1..17: mol_type = other DNA
aagccactcccttctcc

SEQ ID NO: 129589 - DNA, 17 bp, synthetic construct
  source 1..17: mol_type = other DNA
agccactcccttctcca

SEQ ID NO: 129590 - DNA, 17 bp, synthetic construct
  source 1..17: mol_type = other DNA
gccactcccttctccag

SEQ ID NO: 129591 - DNA, 17 bp, synthetic construct
  source 1..17: mol_type = other DNA
ccactcccttctccagt

SEQ ID NO: 129592 - DNA, 17 bp, synthetic construct
  source 1..17: mol_type = other DNA
cactcccttctccagtc

SEQ ID NO: 129593 - DNA, 17 bp, synthetic construct
  source 1..17: mol_type = other DNA
actcccttctccagtcc

SEQ ID NO: 129594 - DNA, 17 bp, synthetic construct
  source 1..17: mol_type = other DNA
ctcccttctccagtcca

SEQ ID NO: 129595 - DNA, 17 bp, synthetic construct
  source 1..17: mol_type = other DNA
tcccttctccagtccag

SEQ ID NO: 129596 - DNA, 17 bp, synthetic construct
  source 1..17: mol_type = other DNA
cccttctccagtccagg

SEQ ID NO: 129597 - DNA, 17 bp, synthetic construct
  source 1..17: mol_type = other DNA
ccttctccagtccaggg

SEQ ID NO: 129598 - DNA, 17 bp, synthetic construct
  source 1..17: mol_type = other DNA
cttctccagtccaggga

SEQ ID NO: 129599 - DNA, 17 bp, synthetic construct
  source 1..17: mol_type = other DNA
ttctccagtccagggac

SEQ ID NO: 129600 - DNA, 17 bp, synthetic construct
  source 1..17: mol_type = other DNA
tctccagtccagggact

SEQ ID NO: 129601 - DNA, 17 bp, synthetic construct
  source 1..17: mol_type = other DNA
ctccagtccagggactg

SEQ ID NO: 129602 - DNA, 17 bp, synthetic construct
  source 1..17: mol_type = other DNA
tccagtccagggactgc

SEQ ID NO: 129603 - DNA, 17 bp, synthetic construct
  source 1..17: mol_type = other DNA
ccagtccagggactgca

SEQ ID NO: 129604 - DNA, 17 bp, synthetic construct
  source 1..17: mol_type = other DNA
cagtccagggactgcaa

SEQ ID NO: 129605 - DNA, 17 bp, synthetic construct
  source 1..17: mol_type = other DNA
agtccagggactgcaac

SEQ ID NO: 129606 - DNA, 17 bp, synthetic construct
  source 1..17: mol_type = other DNA
gtccagggactgcaacc

SEQ ID NO: 129607 - DNA, 17 bp, synthetic construct
  source 1..17: mol_type = other DNA
tccagggactgcaaccg

SEQ ID NO: 129608 - DNA, 17 bp, synthetic construct
  source 1..17: mol_type = other DNA
ccagggactgcaaccgc

SEQ ID NO: 129609 - DNA, 17 bp, synthetic construct
  source 1..17: mol_type = other DNA
cagggactgcaaccgcc

SEQ ID NO: 129610 - DNA, 17 bp, synthetic construct
  source 1..17: mol_type = other DNA
agggactgcaaccgccc

SEQ ID NO: 129611 - DNA, 17 bp, synthetic construct
  source 1..17: mol_type = other DNA
gggactgcaaccgccct

SEQ ID NO: 129612 - DNA, 17 bp, synthetic construct
  source 1..17: mol_type = other DNA
ggactgcaaccgccctt

SEQ ID NO: 129613 - DNA, 17 bp, synthetic construct
  source 1..17: mol_type = other DNA
gactgcaaccgcccttc

SEQ ID NO: 129614 - DNA, 17 bp, synthetic construct
  source 1..17: mol_type = other DNA
actgcaaccgcccttcc

SEQ ID NO: 129615 - DNA, 17 bp, synthetic construct
  source 1..17: mol_type = other DNA
ctgcaaccgcccttcca

SEQ ID NO: 129616 - DNA, 17 bp, synthetic construct
  source 1..17: mol_type = other DNA
tgcaaccgcccttccag

SEQ ID NO: 129617 - DNA, 17 bp, synthetic construct
  source 1..17: mol_type = other DNA
gcaaccgcccttccagc

SEQ ID NO: 129618 - DNA, 17 bp, synthetic construct
  source 1..17: mol_type = other DNA
caaccgcccttccagca

SEQ ID NO: 129619 - DNA, 17 bp, synthetic construct
  source 1..17: mol_type = other DNA
aaccgcccttccagcac

SEQ ID NO: 129620 - DNA, 17 bp, synthetic construct
  source 1..17: mol_type = other DNA
accgcccttccagcact

SEQ ID NO: 129621 - DNA, 17 bp, synthetic construct
  source 1..17: mol_type = other DNA
ccgcccttccagcactg

SEQ ID NO: 129622 - DNA, 17 bp, synthetic construct
  source 1..17: mol_type = other DNA
cgcccttccagcactga

SEQ ID NO: 129623 - DNA, 17 bp, synthetic construct
  source 1..17: mol_type = other DNA
gcccttccagcactgag

SEQ ID NO: 129624 - DNA, 17 bp, synthetic construct
  source 1..17: mol_type = other DNA
cccttccagcactgaga

SEQ ID NO: 129625 - DNA, 17 bp, synthetic construct
  source 1..17: mol_type = other DNA
ccttccagcactgagaa

SEQ ID NO: 129626 - DNA, 17 bp, synthetic construct
  source 1..17: mol_type = other DNA
cttccagcactgagaag

SEQ ID NO: 129627 - DNA, 17 bp, synthetic construct
  source 1..17: mol_type = other DNA
ttccagcactgagaagc

SEQ ID NO: 129628 - DNA, 17 bp, synthetic construct
  source 1..17: mol_type = other DNA
tccagcactgagaagca

SEQ ID NO: 129629 - DNA, 17 bp, synthetic construct
  source 1..17: mol_type = other DNA
ccagcactgagaagcac

SEQ ID NO: 129630 - DNA, 17 bp, synthetic construct
  source 1..17: mol_type = other DNA
cagcactgagaagcaca

SEQ ID NO: 129631 - DNA, 17 bp, synthetic construct
  source 1..17: mol_type = other DNA
agcactgagaagcacag

SEQ ID NO: 129632 - DNA, 17 bp, synthetic construct
  source 1..17: mol_type = other DNA
gcactgagaagcacagc

SEQ ID NO: 129633 - DNA, 17 bp, synthetic construct
  source 1..17: mol_type = other DNA
cactgagaagcacagcc

SEQ ID NO: 129634 - DNA, 17 bp, synthetic construct
  source 1..17: mol_type = other DNA
actgagaagcacagcca

SEQ ID NO: 129635 - DNA, 17 bp, synthetic construct
  source 1..17: mol_type = other DNA
ctgagaagcacagccac

SEQ ID NO: 129636 - DNA, 17 bp, synthetic construct
  source 1..17: mol_type = other DNA
tgagaagcacagccacc

SEQ ID NO: 129637 - DNA, 17 bp, synthetic construct
  source 1..17: mol_type = other DNA
gagaagcacagccacca

SEQ ID NO: 129638 - DNA, 17 bp, synthetic construct
  source 1..17: mol_type = other DNA
agaagcacagccaccac

SEQ ID NO: 129639 - DNA, 17 bp, synthetic construct
  source 1..17: mol_type = other DNA
gaagcacagccaccaca

SEQ ID NO: 129640 - DNA, 17 bp, synthetic construct
  source 1..17: mol_type = other DNA
aagcacagccaccacac

SEQ ID NO: 129641 - DNA, 17 bp, synthetic construct
  source 1..17: mol_type = other DNA
agcacagccaccacacc

SEQ ID NO: 129642 - DNA, 17 bp, synthetic construct
  source 1..17: mol_type = other DNA
gcacagccaccacaccc

SEQ ID NO: 129643 - DNA, 17 bp, synthetic construct
  source 1..17: mol_type = other DNA
cacagccaccacaccca

SEQ ID NO: 129644 - DNA, 17 bp, synthetic construct
  source 1..17: mol_type = other DNA
acagccaccacacccac

SEQ ID NO: 129645 - DNA, 17 bp, synthetic construct
  source 1..17: mol_type = other DNA
cagccaccacacccaca

SEQ ID NO: 129646 - DNA, 17 bp, synthetic construct
  source 1..17: mol_type = other DNA
agccaccacacccacag

SEQ ID NO: 129647 - DNA, 17 bp, synthetic construct
  source 1..17: mol_type = other DNA
gccaccacacccacagc

SEQ ID NO: 129648 - DNA, 17 bp, synthetic construct
  source 1..17: mol_type = other DNA
ccaccacacccacagct

SEQ ID NO: 129649 - DNA, 17 bp, synthetic construct
  source 1..17: mol_type = other DNA
caccacacccacagcta

SEQ ID NO: 129650 - DNA, 17 bp, synthetic construct
  source 1..17: mol_type = other DNA
accacacccacagctac

SEQ ID NO: 129651 - DNA, 17 bp, synthetic construct
  source 1..17: mol_type = other DNA
ccacacccacagctacc

SEQ ID NO: 129652 - DNA, 17 bp, synthetic construct
  source 1..17: mol_type = other DNA
cacacccacagctacca

SEQ ID NO: 129653 - DNA, 17 bp, synthetic construct
  source 1..17: mol_type = other DNA
acacccacagctaccag

SEQ ID NO: 129654 - DNA, 17 bp, synthetic construct
  source 1..17: mol_type = other DNA
cacccacagctaccagc

SEQ ID NO: 129655 - DNA, 17 bp, synthetic construct
  source 1..17: mol_type = other DNA
acccacagctaccagct

SEQ ID NO: 129656 - DNA, 17 bp, synthetic construct
  source 1..17: mol_type = other DNA
cccacagctaccagctt

SEQ ID NO: 129657 - DNA, 17 bp, synthetic construct
  source 1..17: mol_type = other DNA
ccacagctaccagcttt

SEQ ID NO: 129658 - DNA, 17 bp, synthetic construct
  source 1..17: mol_type = other DNA
cacagctaccagcttta

SEQ ID NO: 129659 - DNA, 17 bp, synthetic construct
  source 1..17: mol_type = other DNA
acagctaccagctttac

SEQ ID NO: 129660 - DNA, 17 bp, synthetic construct
  source 1..17: mol_type = other DNA
cagctaccagctttaca

SEQ ID NO: 129661 - DNA, 17 bp, synthetic construct
  source 1..17: mol_type = other DNA
agctaccagctttacag

SEQ ID NO: 129662 - DNA, 17 bp, synthetic construct
  source 1..17: mol_type = other DNA
gctaccagctttacagc

SEQ ID NO: 129663 - DNA, 17 bp, synthetic construct
  source 1..17: mol_type = other DNA
ctaccagctttacagcc

SEQ ID NO: 129664 - DNA, 17 bp, synthetic construct
  source 1..17: mol_type = other DNA
taccagctttacagcca

SEQ ID NO: 129665 - DNA, 17 bp, synthetic construct
  source 1..17: mol_type = other DNA
accagctttacagccat

SEQ ID NO: 129666 - DNA, 17 bp, synthetic construct
  source 1..17: mol_type = other DNA
ccagctttacagccatc

SEQ ID NO: 129667 - DNA, 17 bp, synthetic construct
  source 1..17: mol_type = other DNA
cagctttacagccatcc

SEQ ID NO: 129668 - DNA, 17 bp, synthetic construct
  source 1..17: mol_type = other DNA
agctttacagccatccc

SEQ ID NO: 129669 - DNA, 17 bp, synthetic construct
  source 1..17: mol_type = other DNA
gctttacagccatcccc

SEQ ID NO: 129670 - DNA, 17 bp, synthetic construct
  source 1..17: mol_type = other DNA
ctttacagccatcccct

SEQ ID NO: 129671 - DNA, 17 bp, synthetic construct
  source 1..17: mol_type = other DNA
tttacagccatcccctc

SEQ ID NO: 129672 - DNA, 17 bp, synthetic construct
  source 1..17: mol_type = other DNA
ttacagccatcccctcc

SEQ ID NO: 129673 - DNA, 17 bp, synthetic construct
  source 1..17: mol_type = other DNA
tacagccatcccctcct

SEQ ID NO: 129674 - DNA, 17 bp, synthetic construct
  source 1..17: mol_type = other DNA
acagccatcccctcctc

SEQ ID NO: 129675 - DNA, 17 bp, synthetic construct
  source 1..17: mol_type = other DNA
cagccatcccctcctcc

SEQ ID NO: 129676 - DNA, 17 bp, synthetic construct
  source 1..17: mol_type = other DNA
agccatcccctcctcct

SEQ ID NO: 129677 - DNA, 17 bp, synthetic construct
  source 1..17: mol_type = other DNA
gccatcccctcctcctc

SEQ ID NO: 129678 - DNA, 17 bp, synthetic construct
  source 1..17: mol_type = other DNA
ccatcccctcctcctcc

SEQ ID NO: 129679 - DNA, 17 bp, synthetic construct
  source 1..17: mol_type = other DNA
catcccctcctcctccc

SEQ ID NO: 129680 - DNA, 17 bp, synthetic construct
  source 1..17: mol_type = other DNA
atcccctcctcctccct

SEQ ID NO: 129681 - DNA, 17 bp, synthetic construct
  source 1..17: mol_type = other DNA
tcccctcctcctccctg

SEQ ID NO: 129682 - DNA, 17 bp, synthetic construct
  source 1..17: mol_type = other DNA
cccctcctcctccctgg

SEQ ID NO: 129683 - DNA, 17 bp, synthetic construct
  source 1..17: mol_type = other DNA
ccctcctcctccctggg

SEQ ID NO: 129684 - DNA, 17 bp, synthetic construct
  source 1..17: mol_type = other DNA
cctcctcctccctgggc

SEQ ID NO: 129685 - DNA, 17 bp, synthetic construct
  source 1..17: mol_type = other DNA
ctcctcctccctgggca

SEQ ID NO: 129686 - DNA, 17 bp, synthetic construct
  source 1..17: mol_type = other DNA
tcctcctccctgggcac

SEQ ID NO: 129687 - DNA, 17 bp, synthetic construct
  source 1..17: mol_type = other DNA
cctcctccctgggcacc

SEQ ID NO: 129688 - DNA, 17 bp, synthetic construct
  source 1..17: mol_type = other DNA
ctcctccctgggcacca

SEQ ID NO: 129689 - DNA, 17 bp, synthetic construct
  source 1..17: mol_type = other DNA
tcctccctgggcaccac

SEQ ID NO: 129690 - DNA, 17 bp, synthetic construct
  source 1..17: mol_type = other DNA
cctccctgggcaccacc

SEQ ID NO: 129691 - DNA, 17 bp, synthetic construct
  source 1..17: mol_type = other DNA
ctccctgggcaccacct

SEQ ID NO: 129692 - DNA, 17 bp, synthetic construct
  source 1..17: mol_type = other DNA
tccctgggcaccacctg

SEQ ID NO: 129693 - DNA, 17 bp, synthetic construct
  source 1..17: mol_type = other DNA
ccctgggcaccacctgg

SEQ ID NO: 129694 - DNA, 17 bp, synthetic construct
  source 1..17: mol_type = other DNA
cctgggcaccacctgga

SEQ ID NO: 129695 - DNA, 17 bp, synthetic construct
  source 1..17: mol_type = other DNA
ctgggcaccacctggac

SEQ ID NO: 129696 - DNA, 17 bp, synthetic construct
  source 1..17: mol_type = other DNA
tgggcaccacctggacc

SEQ ID NO: 129697 - DNA, 17 bp, synthetic construct
  source 1..17: mol_type = other DNA
gggcaccacctggaccc

SEQ ID NO: 129698 - DNA, 17 bp, synthetic construct
  source 1..17: mol_type = other DNA
ggcaccacctggacccg

SEQ ID NO: 129699 - DNA, 17 bp, synthetic construct
  source 1..17: mol_type = other DNA
gcaccacctggacccgc

SEQ ID NO: 129700 - DNA, 17 bp, synthetic construct
  source 1..17: mol_type = other DNA
caccacctggacccgcc

SEQ ID NO: 129701 - DNA, 17 bp, synthetic construct
  source 1..17: mol_type = other DNA
accacctggacccgcct

SEQ ID NO: 129702 - DNA, 17 bp, synthetic construct
  source 1..17: mol_type = other DNA
ccacctggacccgccta

SEQ ID NO: 129703 - DNA, 17 bp, synthetic construct
  source 1..17: mol_type = other DNA
cacctggacccgcctat

SEQ ID NO: 129704 - DNA, 17 bp, synthetic construct
  source 1..17: mol_type = other DNA
acctggacccgcctatc

SEQ ID NO: 129705 - DNA, 17 bp, synthetic construct
  source 1..17: mol_type = other DNA
cctggacccgcctatca

SEQ ID NO: 129706 - DNA, 17 bp, synthetic construct
  source 1..17: mol_type = other DNA
ctggacccgcctatcac

SEQ ID NO: 129707 - DNA, 17 bp, synthetic construct
  source 1..17: mol_type = other DNA
tggacccgcctatcaca

SEQ ID NO: 129708 - DNA, 17 bp, synthetic construct
  source 1..17: mol_type = other DNA
ggacccgcctatcacag

SEQ ID NO: 129709 - DNA, 17 bp, synthetic construct
  source 1..17: mol_type = other DNA
gacccgcctatcacaga

SEQ ID NO: 129710 - DNA, 17 bp, synthetic construct
  source 1..17: mol_type = other DNA
acccgcctatcacagac

SEQ ID NO: 129711 - DNA, 17 bp, synthetic construct
  source 1..17: mol_type = other DNA
cccgcctatcacagacc

SEQ ID NO: 129712 - DNA, 17 bp, synthetic construct
  source 1..17: mol_type = other DNA
ccgcctatcacagacca

SEQ ID NO: 129713 - DNA, 17 bp, synthetic construct
  source 1..17: mol_type = other DNA
cgcctatcacagaccac

SEQ ID NO: 129714 - DNA, 17 bp, synthetic construct
  source 1..17: mol_type = other DNA
gcctatcacagaccacc

SEQ ID NO: 129715 - DNA, 17 bp, synthetic construct
  source 1..17: mol_type = other DNA
cctatcacagaccacca

SEQ ID NO: 129716 - DNA, 17 bp, synthetic construct
  source 1..17: mol_type = other DNA
ctatcacagaccaccac

SEQ ID NO: 129717 - DNA, 17 bp, synthetic construct
  source 1..17: mol_type = other DNA
tatcacagaccaccaca

SEQ ID NO: 129718 - DNA, 17 bp, synthetic construct
  source 1..17: mol_type = other DNA
atcacagaccaccacac

SEQ ID NO: 129719 - DNA, 17 bp, synthetic construct
  source 1..17: mol_type = other DNA
tcacagaccaccacacc

SEQ ID NO: 129720 - DNA, 17 bp, synthetic construct
  source 1..17: mol_type = other DNA
cacagaccaccacaccc

SEQ ID NO: 129721 - DNA, 17 bp, synthetic construct
  source 1..17: mol_type = other DNA
acagaccaccacaccca

SEQ ID NO: 129722 - DNA, 17 bp, synthetic construct
  source 1..17: mol_type = other DNA
cagaccaccacacccac

SEQ ID NO: 129723 - DNA, 17 bp, synthetic construct
  source 1..17: mol_type = other DNA
agaccaccacacccacg

SEQ ID NO: 129724 - DNA, 17 bp, synthetic construct
  source 1..17: mol_type = other DNA
gaccaccacacccacgg

SEQ ID NO: 129725 - DNA, 17 bp, synthetic construct
  source 1..17: mol_type = other DNA
accaccacacccacggc

SEQ ID NO: 129726 - DNA, 17 bp, synthetic construct
  source 1..17: mol_type = other DNA
ccaccacacccacggcc

SEQ ID NO: 129727 - DNA, 17 bp, synthetic construct
  source 1..17: mol_type = other DNA
caccacacccacggcca

SEQ ID NO: 129728 - DNA, 17 bp, synthetic construct
  source 1..17: mol_type = other DNA
accacacccacggccac

SEQ ID NO: 129729 - DNA, 17 bp, synthetic construct
  source 1..17: mol_type = other DNA
ccacacccacggccacc

SEQ ID NO: 129730 - DNA, 17 bp, synthetic construct
  source 1..17: mol_type = other DNA
cacacccacggccacca

SEQ ID NO: 129731 - DNA, 17 bp, synthetic construct
  source 1..17: mol_type = other DNA
acacccacggccaccat

SEQ ID NO: 129732 - DNA, 17 bp, synthetic construct
  source 1..17: mol_type = other DNA
cacccacggccaccatg

SEQ ID NO: 129733 - DNA, 17 bp, synthetic construct
  source 1..17: mol_type = other DNA
acccacggccaccatgt

SEQ ID NO: 129734 - DNA, 17 bp, synthetic construct
  source 1..17: mol_type = other DNA
cccacggccaccatgtc

SEQ ID NO: 129735 - DNA, 17 bp, synthetic construct
  source 1..17: mol_type = other DNA
ccacggccaccatgtcc

SEQ ID NO: 129736 - DNA, 17 bp, synthetic construct
  source 1..17: mol_type = other DNA
cacggccaccatgtcca

SEQ ID NO: 129737 - DNA, 17 bp, synthetic construct
  source 1..17: mol_type = other DNA
acggccaccatgtccac

SEQ ID NO: 129738 - DNA, 17 bp, synthetic construct
  source 1..17: mol_type = other DNA
cggccaccatgtccaca

SEQ ID NO: 129739 - DNA, 17 bp, synthetic construct
  source 1..17: mol_type = other DNA
ggccaccatgtccacag

SEQ ID NO: 129740 - DNA, 17 bp, synthetic construct
  source 1..17: mol_type = other DNA
gccaccatgtccacagc

SEQ ID NO: 129741 - DNA, 17 bp, synthetic construct
  source 1..17: mol_type = other DNA
ccaccatgtccacagcc

SEQ ID NO: 129742 - DNA, 17 bp, synthetic construct
  source 1..17: mol_type = other DNA
caccatgtccacagcca

SEQ ID NO: 129743 - DNA, 17 bp, synthetic construct
  source 1..17: mol_type = other DNA
accatgtccacagccac

SEQ ID NO: 129744 - DNA, 17 bp, synthetic construct
  source 1..17: mol_type = other DNA
ccatgtccacagccaca

SEQ ID NO: 129745 - DNA, 17 bp, synthetic construct
  source 1..17: mol_type = other DNA
catgtccacagccacac

SEQ ID NO: 129746 - DNA, 17 bp, synthetic construct
  source 1..17: mol_type = other DNA
atgtccacagccacacc

SEQ ID NO: 129747 - DNA, 17 bp, synthetic construct
  source 1..17: mol_type = other DNA
tgtccacagccacaccc

SEQ ID NO: 129748 - DNA, 17 bp, synthetic construct
  source 1..17: mol_type = other DNA
gtccacagccacaccct

SEQ ID NO: 129749 - DNA, 17 bp, synthetic construct
  source 1..17: mol_type = other DNA
tccacagccacaccctc

SEQ ID NO: 129750 - DNA, 17 bp, synthetic construct
  source 1..17: mol_type = other DNA
ccacagccacaccctcc

SEQ ID NO: 129751 - DNA, 17 bp, synthetic construct
  source 1..17: mol_type = other DNA
cacagccacaccctcct

SEQ ID NO: 129752 - DNA, 17 bp, synthetic construct
  source 1..17: mol_type = other DNA
acagccacaccctcctc

SEQ ID NO: 129753 - DNA, 17 bp, synthetic construct
  source 1..17: mol_type = other DNA
cagccacaccctcctcc

SEQ ID NO: 129754 - DNA, 17 bp, synthetic construct
  source 1..17: mol_type = other DNA
agccacaccctcctcca

SEQ ID NO: 129755 - DNA, 17 bp, synthetic construct
  source 1..17: mol_type = other DNA
gccacaccctcctccac

SEQ ID NO: 129756 - DNA, 17 bp, synthetic construct
  source 1..17: mol_type = other DNA
ccacaccctcctccact

SEQ ID NO: 129757 - DNA, 17 bp, synthetic construct
  source 1..17: mol_type = other DNA
cacaccctcctccactc

SEQ ID NO: 129758 - DNA, 17 bp, synthetic construct
  source 1..17: mol_type = other DNA
acaccctcctccactcc

SEQ ID NO: 129759 - DNA, 17 bp, synthetic construct
  source 1..17: mol_type = other DNA
caccctcctccactcca

SEQ ID NO: 129760 - DNA, 17 bp, synthetic construct
  source 1..17: mol_type = other DNA
accctcctccactccag

SEQ ID NO: 129761 - DNA, 17 bp, synthetic construct
  source 1..17: mol_type = other DNA
ccctcctccactccaga

SEQ ID NO: 129762 - DNA, 17 bp, synthetic construct
  source 1..17: mol_type = other DNA
cctcctccactccagag

SEQ ID NO: 129763 - DNA, 17 bp, synthetic construct
  source 1..17: mol_type = other DNA
ctcctccactccagaga

SEQ ID NO: 129764 - DNA, 17 bp, synthetic construct
  source 1..17: mol_type = other DNA
tcctccactccagagac

SEQ ID NO: 129765 - DNA, 17 bp, synthetic construct
  source 1..17: mol_type = other DNA
cctccactccagagact

SEQ ID NO: 129766 - DNA, 17 bp, synthetic construct
  source 1..17: mol_type = other DNA
ctccactccagagactg

SEQ ID NO: 129767 - DNA, 17 bp, synthetic construct
  source 1..17: mol_type = other DNA
tccactccagagactgt

SEQ ID NO: 129768 - DNA, 17 bp, synthetic construct
  source 1..17: mol_type = other DNA
ccactccagagactgtc

SEQ ID NO: 129769 - DNA, 17 bp, synthetic construct
  source 1..17: mol_type = other DNA
cactccagagactgtcc

SEQ ID NO: 129770 - DNA, 17 bp, synthetic construct
  source 1..17: mol_type = other DNA
actccagagactgtcca

SEQ ID NO: 129771 - DNA, 17 bp, synthetic construct
  source 1..17: mol_type = other DNA
ctccagagactgtccac

SEQ ID NO: 129772 - DNA, 17 bp, synthetic construct
  source 1..17: mol_type = other DNA
tccagagactgtccaca

SEQ ID NO: 129773 - DNA, 17 bp, synthetic construct
  source 1..17: mol_type = other DNA
ccagagactgtccacac

SEQ ID NO: 129774 - DNA, 17 bp, synthetic construct
  source 1..17: mol_type = other DNA
cagagactgtccacacc

SEQ ID NO: 129775 - DNA, 17 bp, synthetic construct
  source 1..17: mol_type = other DNA
agagactgtccacacct

SEQ ID NO: 129776 - DNA, 17 bp, synthetic construct
  source 1..17: mol_type = other DNA
gagactgtccacacctc

SEQ ID NO: 129777 - DNA, 17 bp, synthetic construct
  source 1..17: mol_type = other DNA
agactgtccacacctcc

SEQ ID NO: 129778 - DNA, 17 bp, synthetic construct
  source 1..17: mol_type = other DNA
gactgtccacacctcca

SEQ ID NO: 129779 - DNA, 17 bp, synthetic construct
  source 1..17: mol_type = other DNA
actgtccacacctccac

SEQ ID NO: 129780 - DNA, 17 bp, synthetic construct
  source 1..17: mol_type = other DNA
ctgtccacacctccaca

SEQ ID NO: 129781 - DNA, 17 bp, synthetic construct
  source 1..17: mol_type = other DNA
tgtccacacctccacag

SEQ ID NO: 129782 - DNA, 17 bp, synthetic construct
  source 1..17: mol_type = other DNA
gtccacacctccacagt

SEQ ID NO: 129783 - DNA, 17 bp, synthetic construct
  source 1..17: mol_type = other DNA
tccacacctccacagtg

SEQ ID NO: 129784 - DNA, 17 bp, synthetic construct
  source 1..17: mol_type = other DNA
ccacacctccacagtgc

SEQ ID NO: 129785 - DNA, 17 bp, synthetic construct
  source 1..17: mol_type = other DNA
cacacctccacagtgct

SEQ ID NO: 129786 - DNA, 17 bp, synthetic construct
  source 1..17: mol_type = other DNA
acacctccacagtgctt

SEQ ID NO: 129787 - DNA, 17 bp, synthetic construct
  source 1..17: mol_type = other DNA
cacctccacagtgctta

SEQ ID NO: 129788 - DNA, 17 bp, synthetic construct
  source 1..17: mol_type = other DNA
acctccacagtgcttac

SEQ ID NO: 129789 - DNA, 17 bp, synthetic construct
  source 1..17: mol_type = other DNA
cctccacagtgcttacc

SEQ ID NO: 129790 - DNA, 17 bp, synthetic construct
  source 1..17: mol_type = other DNA
ctccacagtgcttacca

SEQ ID NO: 129791 - DNA, 17 bp, synthetic construct
  source 1..17: mol_type = other DNA
tccacagtgcttaccac

SEQ ID NO: 129792 - DNA, 17 bp, synthetic construct
  source 1..17: mol_type = other DNA
ccacagtgcttaccacc

SEQ ID NO: 129793 - DNA, 17 bp, synthetic construct
  source 1..17: mol_type = other DNA
cacagtgcttaccacca

SEQ ID NO: 129794 - DNA, 17 bp, synthetic construct
  source 1..17: mol_type = other DNA
acagtgcttaccaccac

SEQ ID NO: 129795 - DNA, 17 bp, synthetic construct
  source 1..17: mol_type = other DNA
cagtgcttaccaccacg

SEQ ID NO: 129796 - DNA, 17 bp, synthetic construct
  source 1..17: mol_type = other DNA
agtgcttaccaccacgg

SEQ ID NO: 129797 - DNA, 17 bp, synthetic construct
  source 1..17: mol_type = other DNA
gtgcttaccaccacggc

SEQ ID NO: 129798 - DNA, 17 bp, synthetic construct
  source 1..17: mol_type = other DNA
tgcttaccaccacggcc

SEQ ID NO: 129799 - DNA, 17 bp, synthetic construct
  source 1..17: mol_type = other DNA
gcttaccaccacggcca

SEQ ID NO: 129800 - DNA, 17 bp, synthetic construct
  source 1..17: mol_type = other DNA
cttaccaccacggccac

SEQ ID NO: 129801 - DNA, 17 bp, synthetic construct
  source 1..17: mol_type = other DNA
ttaccaccacggccacc

SEQ ID NO: 129802 - DNA, 17 bp, synthetic construct
  source 1..17: mol_type = other DNA
taccaccacggccacca

SEQ ID NO: 129803 - DNA, 17 bp, synthetic construct
  source 1..17: mol_type = other DNA
accaccacggccaccac

SEQ ID NO: 129804 - DNA, 17 bp, synthetic construct
  source 1..17: mol_type = other DNA
ccaccacggccaccaca

SEQ ID NO: 129805 - DNA, 17 bp, synthetic construct
  source 1..17: mol_type = other DNA
caccacggccaccacaa

SEQ ID NO: 129806 - DNA, 17 bp, synthetic construct
  source 1..17: mol_type = other DNA
accacggccaccacaac

SEQ ID NO: 129807 - DNA, 17 bp, synthetic construct
  source 1..17: mol_type = other DNA
ccacggccaccacaacc

SEQ ID NO: 129808 - DNA, 17 bp, synthetic construct
  source 1..17: mol_type = other DNA
cacggccaccacaaccg

SEQ ID NO: 129809 - DNA, 17 bp, synthetic construct
  source 1..17: mol_type = other DNA
acggccaccacaaccgg

SEQ ID NO: 129810 - DNA, 17 bp, synthetic construct
  source 1..17: mol_type = other DNA
cggccaccacaaccggg

SEQ ID NO: 129811 - DNA, 17 bp, synthetic construct
  source 1..17: mol_type = other DNA
ggccaccacaaccgggg

SEQ ID NO: 129812 - DNA, 17 bp, synthetic construct
  source 1..17: mol_type = other DNA
gccaccacaaccggggc

SEQ ID NO: 129813 - DNA, 17 bp, synthetic construct
  source 1..17: mol_type = other DNA
ccaccacaaccggggcc

SEQ ID NO: 129814 - DNA, 17 bp, synthetic construct
  source 1..17: mol_type = other DNA
caccacaaccggggcca

SEQ ID NO: 129815 - DNA, 17 bp, synthetic construct
  source 1..17: mol_type = other DNA
accacaaccggggccac

SEQ ID NO: 129816 - DNA, 17 bp, synthetic construct
  source 1..17: mol_type = other DNA
ccacaaccggggccacc

SEQ ID NO: 129817 - DNA, 17 bp, synthetic construct
  source 1..17: mol_type = other DNA
cacaaccggggccaccg

SEQ ID NO: 129818 - DNA, 17 bp, synthetic construct
  source 1..17: mol_type = other DNA
acaaccggggccaccgg

SEQ ID NO: 129819 - DNA, 17 bp, synthetic construct
  source 1..17: mol_type = other DNA
caaccggggccaccggc

SEQ ID NO: 129820 - DNA, 17 bp, synthetic construct
  source 1..17: mol_type = other DNA
aaccggggccaccggct

SEQ ID NO: 129821 - DNA, 17 bp, synthetic construct
  source 1..17: mol_type = other DNA
accggggccaccggctc

SEQ ID NO: 129822 - DNA, 17 bp, synthetic construct
  source 1..17: mol_type = other DNA
ccggggccaccggctct

SEQ ID NO: 129823 - DNA, 17 bp, synthetic construct
  source 1..17: mol_type = other DNA
cggggccaccggctctg

SEQ ID NO: 129824 - DNA, 17 bp, synthetic construct
  source 1..17: mol_type = other DNA
ggggccaccggctctgt

SEQ ID NO: 129825 - DNA, 17 bp, synthetic construct
  source 1..17: mol_type = other DNA
gggccaccggctctgtg

SEQ ID NO: 129826 - DNA, 17 bp, synthetic construct
  source 1..17: mol_type = other DNA
ggccaccggctctgtgg

SEQ ID NO: 129827 - DNA, 17 bp, synthetic construct
  source 1..17: mol_type = other DNA
gccaccggctctgtggc

SEQ ID NO: 129828 - DNA, 17 bp, synthetic construct
  source 1..17: mol_type = other DNA
ccaccggctctgtggcc

SEQ ID NO: 129829 - DNA, 17 bp, synthetic construct
  source 1..17: mol_type = other DNA
caccggctctgtggcca

SEQ ID NO: 129830 - DNA, 17 bp, synthetic construct
  source 1..17: mol_type = other DNA
accggctctgtggccac

SEQ ID NO: 129831 - DNA, 17 bp, synthetic construct
  source 1..17: mol_type = other DNA
ccggctctgtggccacc

SEQ ID NO: 129832 - DNA, 17 bp, synthetic construct
  source 1..17: mol_type = other DNA
cggctctgtggccaccc

SEQ ID NO: 129833 - DNA, 17 bp, synthetic construct
  source 1..17: mol_type = other DNA
ggctctgtggccacccc

SEQ ID NO: 129834 - DNA, 17 bp, synthetic construct
  source 1..17: mol_type = other DNA
gctctgtggccaccccc

SEQ ID NO: 129835 - DNA, 17 bp, synthetic construct
  source 1..17: mol_type = other DNA
ctctgtggccaccccct

SEQ ID NO: 129836 - DNA, 17 bp, synthetic construct
  source 1..17: mol_type = other DNA
tctgtggccaccccctc

SEQ ID NO: 129837 - DNA, 17 bp, synthetic construct
  source 1..17: mol_type = other DNA
ctgtggccaccccctcc

SEQ ID NO: 129838 - DNA, 17 bp, synthetic construct
  source 1..17: mol_type = other DNA
tgtggccaccccctcct

SEQ ID NO: 129839 - DNA, 17 bp, synthetic construct
  source 1..17: mol_type = other DNA
gtggccaccccctcctc

SEQ ID NO: 129840 - DNA, 17 bp, synthetic construct
  source 1..17: mol_type = other DNA
tggccaccccctcctcc

SEQ ID NO: 129841 - DNA, 17 bp, synthetic construct
  source 1..17: mol_type = other DNA
ggccaccccctcctcca

SEQ ID NO: 129842 - DNA, 17 bp, synthetic construct
  source 1..17: mol_type = other DNA
gccaccccctcctccac

SEQ ID NO: 129843 - DNA, 17 bp, synthetic construct
  source 1..17: mol_type = other DNA
ccaccccctcctccacc

SEQ ID NO: 129844 - DNA, 17 bp, synthetic construct
  source 1..17: mol_type = other DNA
caccccctcctccaccc

SEQ ID NO: 129845 - DNA, 17 bp, synthetic construct
  source 1..17: mol_type = other DNA
accccctcctccacccc

SEQ ID NO: 129846 - DNA, 17 bp, synthetic construct
  source 1..17: mol_type = other DNA
ccccctcctccacccca

SEQ ID NO: 129847 - DNA, 17 bp, synthetic construct
  source 1..17: mol_type = other DNA
cccctcctccaccccag

SEQ ID NO: 129848 - DNA, 17 bp, synthetic construct
  source 1..17: mol_type = other DNA
ccctcctccaccccagg

SEQ ID NO: 129849 - DNA, 17 bp, synthetic construct
  source 1..17: mol_type = other DNA
cctcctccaccccagga

SEQ ID NO: 129850 - DNA, 17 bp, synthetic construct
  source 1..17: mol_type = other DNA
ctcctccaccccaggaa

SEQ ID NO: 129851 - DNA, 17 bp, synthetic construct
  source 1..17: mol_type = other DNA
tcctccaccccaggaac

SEQ ID NO: 129852 - DNA, 17 bp, synthetic construct
  source 1..17: mol_type = other DNA
cctccaccccaggaaca

SEQ ID NO: 129853 - DNA, 17 bp, synthetic construct
  source 1..17: mol_type = other DNA
ctccaccccaggaacag

SEQ ID NO: 129854 - DNA, 17 bp, synthetic construct
  source 1..17: mol_type = other DNA
tccaccccaggaacagc

SEQ ID NO: 129855 - DNA, 17 bp, synthetic construct
  source 1..17: mol_type = other DNA
ccaccccaggaacagct

SEQ ID NO: 129856 - DNA, 17 bp, synthetic construct
  source 1..17: mol_type = other DNA
caccccaggaacagctc

SEQ ID NO: 129857 - DNA, 17 bp, synthetic construct
  source 1..17: mol_type = other DNA
accccaggaacagctca

SEQ ID NO: 129858 - DNA, 17 bp, synthetic construct
  source 1..17: mol_type = other DNA
ccccaggaacagctcac

SEQ ID NO: 129859 - DNA, 17 bp, synthetic construct
  source 1..17: mol_type = other DNA
cccaggaacagctcaca

SEQ ID NO: 129860 - DNA, 17 bp, synthetic construct
  source 1..17: mol_type = other DNA
ccaggaacagctcacac

SEQ ID NO: 129861 - DNA, 17 bp, synthetic construct
  source 1..17: mol_type = other DNA
caggaacagctcacact

SEQ ID NO: 129862 - DNA, 17 bp, synthetic construct
  source 1..17: mol_type = other DNA
aggaacagctcacacta

SEQ ID NO: 129863 - DNA, 17 bp, synthetic construct
  source 1..17: mol_type = other DNA
ggaacagctcacactac

SEQ ID NO: 129864 - DNA, 17 bp, synthetic construct
  source 1..17: mol_type = other DNA
gaacagctcacactacc

SEQ ID NO: 129865 - DNA, 17 bp, synthetic construct
  source 1..17: mol_type = other DNA
aacagctcacactacca

SEQ ID NO: 129866 - DNA, 17 bp, synthetic construct
  source 1..17: mol_type = other DNA
acagctcacactaccaa

SEQ ID NO: 129867 - DNA, 17 bp, synthetic construct
  source 1..17: mol_type = other DNA
cagctcacactaccaaa

SEQ ID NO: 129868 - DNA, 17 bp, synthetic construct
  source 1..17: mol_type = other DNA
agctcacactaccaaag

SEQ ID NO: 129869 - DNA, 17 bp, synthetic construct
  source 1..17: mol_type = other DNA
gctcacactaccaaagt

SEQ ID NO: 129870 - DNA, 17 bp, synthetic construct
  source 1..17: mol_type = other DNA
ctcacactaccaaagtg

SEQ ID NO: 129871 - DNA, 17 bp, synthetic construct
  source 1..17: mol_type = other DNA
tcacactaccaaagtgc

SEQ ID NO: 129872 - DNA, 17 bp, synthetic construct
  source 1..17: mol_type = other DNA
cacactaccaaagtgct

SEQ ID NO: 129873 - DNA, 17 bp, synthetic construct
  source 1..17: mol_type = other DNA
acactaccaaagtgctg

SEQ ID NO: 129874 - DNA, 17 bp, synthetic construct
  source 1..17: mol_type = other DNA
cactaccaaagtgctga

SEQ ID NO: 129875 - DNA, 17 bp, synthetic construct
  source 1..17: mol_type = other DNA
actaccaaagtgctgac

SEQ ID NO: 129876 - DNA, 17 bp, synthetic construct
  source 1..17: mol_type = other DNA
ctaccaaagtgctgact

SEQ ID NO: 129877 - DNA, 17 bp, synthetic construct
  source 1..17: mol_type = other DNA
taccaaagtgctgacta

SEQ ID NO: 129878 - DNA, 17 bp, synthetic construct
  source 1..17: mol_type = other DNA
accaaagtgctgactac

SEQ ID NO: 129879 - DNA, 17 bp, synthetic construct
  source 1..17: mol_type = other DNA
ccaaagtgctgactacc

SEQ ID NO: 129880 - DNA, 17 bp, synthetic construct
  source 1..17: mol_type = other DNA
caaagtgctgactacca

SEQ ID NO: 129881 - DNA, 17 bp, synthetic construct
  source 1..17: mol_type = other DNA
aaagtgctgactaccac

SEQ ID NO: 129882 - DNA, 17 bp, synthetic construct
  source 1..17: mol_type = other DNA
aagtgctgactaccaca

SEQ ID NO: 129883 - DNA, 17 bp, synthetic construct
  source 1..17: mol_type = other DNA
agtgctgactaccacaa

SEQ ID NO: 129884 - DNA, 17 bp, synthetic construct
  source 1..17: mol_type = other DNA
gtgctgactaccacaac

SEQ ID NO: 129885 - DNA, 17 bp, synthetic construct
  source 1..17: mol_type = other DNA
tgctgactaccacaacc

SEQ ID NO: 129886 - DNA, 17 bp, synthetic construct
  source 1..17: mol_type = other DNA
gctgactaccacaacca

SEQ ID NO: 129887 - DNA, 17 bp, synthetic construct
  source 1..17: mol_type = other DNA
ctgactaccacaaccac

SEQ ID NO: 129888 - DNA, 17 bp, synthetic construct
  source 1..17: mol_type = other DNA
tgactaccacaaccacg

SEQ ID NO: 129889 - DNA, 17 bp, synthetic construct
  source 1..17: mol_type = other DNA
gactaccacaaccacgg

SEQ ID NO: 129890 - DNA, 17 bp, synthetic construct
  source 1..17: mol_type = other DNA
actaccacaaccacggg

SEQ ID NO: 129891 - DNA, 17 bp, synthetic construct
  source 1..17: mol_type = other DNA
ctaccacaaccacgggc

SEQ ID NO: 129892 - DNA, 17 bp, synthetic construct
  source 1..17: mol_type = other DNA
taccacaaccacgggct

SEQ ID NO: 129893 - DNA, 17 bp, synthetic construct
  source 1..17: mol_type = other DNA
accacaaccacgggctt

SEQ ID NO: 129894 - DNA, 17 bp, synthetic construct
  source 1..17: mol_type = other DNA
ccacaaccacgggcttc

SEQ ID NO: 129895 - DNA, 17 bp, synthetic construct
  source 1..17: mol_type = other DNA
cacaaccacgggcttca

SEQ ID NO: 129896 - DNA, 17 bp, synthetic construct
  source 1..17: mol_type = other DNA
acaaccacgggcttcac

SEQ ID NO: 129897 - DNA, 17 bp, synthetic construct
  source 1..17: mol_type = other DNA
caaccacgggcttcaca

SEQ ID NO: 129898 - DNA, 17 bp, synthetic construct
  source 1..17: mol_type = other DNA
aaccacgggcttcacag

SEQ ID NO: 129899 - DNA, 17 bp, synthetic construct
  source 1..17: mol_type = other DNA
accacgggcttcacagc

SEQ ID NO: 129900 - DNA, 17 bp, synthetic construct
  source 1..17: mol_type = other DNA
ccacgggcttcacagcc

SEQ ID NO: 129901 - DNA, 17 bp, synthetic construct
  source 1..17: mol_type = other DNA
cacgggcttcacagcca

SEQ ID NO: 129902 - DNA, 17 bp, synthetic construct
  source 1..17: mol_type = other DNA
acgggcttcacagccac

SEQ ID NO: 129903 - DNA, 17 bp, synthetic construct
  source 1..17: mol_type = other DNA
cgggcttcacagccacc

SEQ ID NO: 129904 - DNA, 17 bp, synthetic construct
  source 1..17: mol_type = other DNA
gggcttcacagccaccc

SEQ ID NO: 129905 - DNA, 17 bp, synthetic construct
  source 1..17: mol_type = other DNA
ggcttcacagccacccc

SEQ ID NO: 129906 - DNA, 17 bp, synthetic construct
  source 1..17: mol_type = other DNA
gcttcacagccaccccc

SEQ ID NO: 129907 - DNA, 17 bp, synthetic construct
  source 1..17: mol_type = other DNA
cttcacagccaccccct

SEQ ID NO: 129908 - DNA, 17 bp, synthetic construct
  source 1..17: mol_type = other DNA
ttcacagccaccccctc

SEQ ID NO: 129909 - DNA, 17 bp, synthetic construct
  source 1..17: mol_type = other DNA
tcacagccaccccctcc

SEQ ID NO: 129910 - DNA, 17 bp, synthetic construct
  source 1..17: mol_type = other DNA
cacagccaccccctcct

SEQ ID NO: 129911 - DNA, 17 bp, synthetic construct
  source 1..17: mol_type = other DNA
acagccaccccctcctc

SEQ ID NO: 129912 - DNA, 17 bp, synthetic construct
  source 1..17: mol_type = other DNA
cagccaccccctcctcc

SEQ ID NO: 129913 - DNA, 17 bp, synthetic construct
  source 1..17: mol_type = other DNA
agccaccccctcctcca

SEQ ID NO: 129914 - DNA, 17 bp, synthetic construct
  source 1..17: mol_type = other DNA
gccaccccctcctccag

SEQ ID NO: 129915 - DNA, 17 bp, synthetic construct
  source 1..17: mol_type = other DNA
ccaccccctcctccagc

SEQ ID NO: 129916 - DNA, 17 bp, synthetic construct
  source 1..17: mol_type = other DNA
caccccctcctccagcc

SEQ ID NO: 129917 - DNA, 17 bp, synthetic construct
  source 1..17: mol_type = other DNA
accccctcctccagccc

SEQ ID NO: 129918 - DNA, 17 bp, synthetic construct
  source 1..17: mol_type = other DNA
ccccctcctccagccca

SEQ ID NO: 129919 - DNA, 17 bp, synthetic construct
  source 1..17: mol_type = other DNA
cccctcctccagcccag

SEQ ID NO: 129920 - DNA, 17 bp, synthetic construct
  source 1..17: mol_type = other DNA
ccctcctccagcccagg

SEQ ID NO: 129921 - DNA, 17 bp, synthetic construct
  source 1..17: mol_type = other DNA
cctcctccagcccaggg

SEQ ID NO: 129922 - DNA, 17 bp, synthetic construct
  source 1..17: mol_type = other DNA
ctcctccagcccaggga

SEQ ID NO: 129923 - DNA, 17 bp, synthetic construct
  source 1..17: mol_type = other DNA
tcctccagcccagggac

SEQ ID NO: 129924 - DNA, 17 bp, synthetic construct
  source 1..17: mol_type = other DNA
cctccagcccagggacg

SEQ ID NO: 129925 - DNA, 17 bp, synthetic construct
  source 1..17: mol_type = other DNA
ctccagcccagggacgg

SEQ ID NO: 129926 - DNA, 17 bp, synthetic construct
  source 1..17: mol_type = other DNA
tccagcccagggacggc

SEQ ID NO: 129927 - DNA, 17 bp, synthetic construct
  source 1..17: mol_type = other DNA
ccagcccagggacggca

SEQ ID NO: 129928 - DNA, 17 bp, synthetic construct
  source 1..17: mol_type = other DNA
cagcccagggacggcac

SEQ ID NO: 129929 - DNA, 17 bp, synthetic construct
  source 1..17: mol_type = other DNA
agcccagggacggcacg

SEQ ID NO: 129930 - DNA, 17 bp, synthetic construct
  source 1..17: mol_type = other DNA
gcccagggacggcacgc

SEQ ID NO: 129931 - DNA, 17 bp, synthetic construct
  source 1..17: mol_type = other DNA
cccagggacggcacgca

SEQ ID NO: 129932 - DNA, 17 bp, synthetic construct
  source 1..17: mol_type = other DNA
ccagggacggcacgcac

SEQ ID NO: 129933 - DNA, 17 bp, synthetic construct
  source 1..17: mol_type = other DNA
cagggacggcacgcacg

SEQ ID NO: 129934 - DNA, 17 bp, synthetic construct
  source 1..17: mol_type = other DNA
agggacggcacgcacgc

SEQ ID NO: 129935 - DNA, 17 bp, synthetic construct
  source 1..17: mol_type = other DNA
gggacggcacgcacgct

SEQ ID NO: 129936 - DNA, 17 bp, synthetic construct
  source 1..17: mol_type = other DNA
ggacggcacgcacgctt

SEQ ID NO: 129937 - DNA, 17 bp, synthetic construct
  source 1..17: mol_type = other DNA
gacggcacgcacgcttc

SEQ ID NO: 129938 - DNA, 17 bp, synthetic construct
  source 1..17: mol_type = other DNA
acggcacgcacgcttcc

SEQ ID NO: 129939 - DNA, 17 bp, synthetic construct
  source 1..17: mol_type = other DNA
cggcacgcacgcttcca

SEQ ID NO: 129940 - DNA, 17 bp, synthetic construct
  source 1..17: mol_type = other DNA
ggcacgcacgcttccag

SEQ ID NO: 129941 - DNA, 17 bp, synthetic construct
  source 1..17: mol_type = other DNA
gcacgcacgcttccagt

SEQ ID NO: 129942 - DNA, 17 bp, synthetic construct
  source 1..17: mol_type = other DNA
cacgcacgcttccagtg

SEQ ID NO: 129943 - DNA, 17 bp, synthetic construct
  source 1..17: mol_type = other DNA
acgcacgcttccagtgt

SEQ ID NO: 129944 - DNA, 17 bp, synthetic construct
  source 1..17: mol_type = other DNA
cgcacgcttccagtgtg

SEQ ID NO: 129945 - DNA, 17 bp, synthetic construct
  source 1..17: mol_type = other DNA
gcacgcttccagtgtgg

SEQ ID NO: 129946 - DNA, 17 bp, synthetic construct
  source 1..17: mol_type = other DNA
cacgcttccagtgtgga

SEQ ID NO: 129947 - DNA, 17 bp, synthetic construct
  source 1..17: mol_type = other DNA
acgcttccagtgtggat

SEQ ID NO: 129948 - DNA, 17 bp, synthetic construct
  source 1..17: mol_type = other DNA
cgcttccagtgtggatc

SEQ ID NO: 129949 - DNA, 17 bp, synthetic construct
  source 1..17: mol_type = other DNA
gcttccagtgtggatca

SEQ ID NO: 129950 - DNA, 17 bp, synthetic construct
  source 1..17: mol_type = other DNA
cttccagtgtggatcag

SEQ ID NO: 129951 - DNA, 17 bp, synthetic construct
  source 1..17: mol_type = other DNA
ttccagtgtggatcagc

SEQ ID NO: 129952 - DNA, 17 bp, synthetic construct
  source 1..17: mol_type = other DNA
tccagtgtggatcagca

SEQ ID NO: 129953 - DNA, 17 bp, synthetic construct
  source 1..17: mol_type = other DNA
ccagtgtggatcagcac

SEQ ID NO: 129954 - DNA, 17 bp, synthetic construct
  source 1..17: mol_type = other DNA
cagtgtggatcagcaca

SEQ ID NO: 129955 - DNA, 17 bp, synthetic construct
  source 1..17: mol_type = other DNA
agtgtggatcagcacaa

SEQ ID NO: 129956 - DNA, 17 bp, synthetic construct
  source 1..17: mol_type = other DNA
gtgtggatcagcacaac

SEQ ID NO: 129957 - DNA, 17 bp, synthetic construct
  source 1..17: mol_type = other DNA
tgtggatcagcacaacc

SEQ ID NO: 129958 - DNA, 17 bp, synthetic construct
  source 1..17: mol_type = other DNA
gtggatcagcacaacca

SEQ ID NO: 129959 - DNA, 17 bp, synthetic construct
  source 1..17: mol_type = other DNA
tggatcagcacaaccac

SEQ ID NO: 129960 - DNA, 17 bp, synthetic construct
  source 1..17: mol_type = other DNA
ggatcagcacaaccacc

SEQ ID NO: 129961 - DNA, 17 bp, synthetic construct
  source 1..17: mol_type = other DNA
gatcagcacaaccacca

SEQ ID NO: 129962 - DNA, 17 bp, synthetic construct
  source 1..17: mol_type = other DNA
atcagcacaaccaccac

SEQ ID NO: 129963 - DNA, 17 bp, synthetic construct
  source 1..17: mol_type = other DNA
tcagcacaaccaccaca

SEQ ID NO: 129964 - DNA, 17 bp, synthetic construct
  source 1..17: mol_type = other DNA
cagcacaaccaccacac

SEQ ID NO: 129965 - DNA, 17 bp, synthetic construct
  source 1..17: mol_type = other DNA
agcacaaccaccacacc

SEQ ID NO: 129966 - DNA, 17 bp, synthetic construct
  source 1..17: mol_type = other DNA
gcacaaccaccacaccc

SEQ ID NO: 129967 - DNA, 17 bp, synthetic construct
  source 1..17: mol_type = other DNA
cacaaccaccacaccca

SEQ ID NO: 129968 - DNA, 17 bp, synthetic construct
  source 1..17: mol_type = other DNA
acaaccaccacacccac

SEQ ID NO: 129969 - DNA, 17 bp, synthetic construct
  source 1..17: mol_type = other DNA
caaccaccacacccaca

SEQ ID NO: 129970 - DNA, 17 bp, synthetic construct
  source 1..17: mol_type = other DNA
aaccaccacacccacaa

SEQ ID NO: 129971 - DNA, 17 bp, synthetic construct
  source 1..17: mol_type = other DNA
accaccacacccacaac

SEQ ID NO: 129972 - DNA, 17 bp, synthetic construct
  source 1..17: mol_type = other DNA
ccaccacacccacaacc

SEQ ID NO: 129973 - DNA, 17 bp, synthetic construct
  source 1..17: mol_type = other DNA
caccacacccacaacca

SEQ ID NO: 129974 - DNA, 17 bp, synthetic construct
  source 1..17: mol_type = other DNA
accacacccacaaccag

SEQ ID NO: 129975 - DNA, 17 bp, synthetic construct
  source 1..17: mol_type = other DNA
ccacacccacaaccaga

SEQ ID NO: 129976 - DNA, 17 bp, synthetic construct
  source 1..17: mol_type = other DNA
cacacccacaaccagag

SEQ ID NO: 129977 - DNA, 17 bp, synthetic construct
  source 1..17: mol_type = other DNA
acacccacaaccagagg

SEQ ID NO: 129978 - DNA, 17 bp, synthetic construct
  source 1..17: mol_type = other DNA
cacccacaaccagaggt

SEQ ID NO: 129979 - DNA, 17 bp, synthetic construct
  source 1..17: mol_type = other DNA
acccacaaccagaggtt

SEQ ID NO: 129980 - DNA, 17 bp, synthetic construct
  source 1..17: mol_type = other DNA
cccacaaccagaggttc

SEQ ID NO: 129981 - DNA, 17 bp, synthetic construct
  source 1..17: mol_type = other DNA
ccacaaccagaggttcc

SEQ ID NO: 129982 - DNA, 17 bp, synthetic construct
  source 1..17: mol_type = other DNA
cacaaccagaggttcca

SEQ ID NO: 129983 - DNA, 17 bp, synthetic construct
  source 1..17: mol_type = other DNA
acaaccagaggttccac

SEQ ID NO: 129984 - DNA, 17 bp, synthetic construct
  source 1..17: mol_type = other DNA
caaccagaggttccacg

SEQ ID NO: 129985 - DNA, 17 bp, synthetic construct
  source 1..17: mol_type = other DNA
aaccagaggttccacgg

SEQ ID NO: 129986 - DNA, 17 bp, synthetic construct
  source 1..17: mol_type = other DNA
accagaggttccacggt

SEQ ID NO: 129987 - DNA, 17 bp, synthetic construct
  source 1..17: mol_type = other DNA
ccagaggttccacggtg

SEQ ID NO: 129988 - DNA, 17 bp, synthetic construct
  source 1..17: mol_type = other DNA
cagaggttccacggtga

SEQ ID NO: 129989 - DNA, 17 bp, synthetic construct
  source 1..17: mol_type = other DNA
agaggttccacggtgac

SEQ ID NO: 129990 - DNA, 17 bp, synthetic construct
  source 1..17: mol_type = other DNA
gaggttccacggtgacc

SEQ ID NO: 129991 - DNA, 17 bp, synthetic construct
  source 1..17: mol_type = other DNA
aggttccacggtgaccc

SEQ ID NO: 129992 - DNA, 17 bp, synthetic construct
  source 1..17: mol_type = other DNA
ggttccacggtgacccc

SEQ ID NO: 129993 - DNA, 17 bp, synthetic construct
  source 1..17: mol_type = other DNA
gttccacggtgaccccc

SEQ ID NO: 129994 - DNA, 17 bp, synthetic construct
  source 1..17: mol_type = other DNA
ttccacggtgaccccct

SEQ ID NO: 129995 - DNA, 17 bp, synthetic construct
  source 1..17: mol_type = other DNA
tccacggtgaccccctc

SEQ ID NO: 129996 - DNA, 17 bp, synthetic construct
  source 1..17: mol_type = other DNA
ccacggtgaccccctcc

SEQ ID NO: 129997 - DNA, 17 bp, synthetic construct
  source 1..17: mol_type = other DNA
cacggtgaccccctcct

SEQ ID NO: 129998 - DNA, 17 bp, synthetic construct
  source 1..17: mol_type = other DNA
acggtgaccccctcctc

SEQ ID NO: 129999 - DNA, 17 bp, synthetic construct
  source 1..17: mol_type = other DNA
cggtgaccccctcctcc

SEQ ID NO: 130000 - DNA, 17 bp, synthetic construct
  source 1..17: mol_type = other DNA
ggtgaccccctcctcca

SEQ ID NO: 130001 - DNA, 17 bp, synthetic construct
  source 1..17: mol_type = other DNA
gtgaccccctcctccat

SEQ ID NO: 130002 - DNA, 17 bp, synthetic construct
  source 1..17: mol_type = other DNA
tgaccccctcctccatc

SEQ ID NO: 130003 - DNA, 17 bp, synthetic construct
  source 1..17: mol_type = other DNA
gaccccctcctccatcc

SEQ ID NO: 130004 - DNA, 17 bp, synthetic construct
  source 1..17: mol_type = other DNA
accccctcctccatccc

SEQ ID NO: 130005 - DNA, 17 bp, synthetic construct
  source 1..17: mol_type = other DNA
ccccctcctccatcccg

SEQ ID NO: 130006 - DNA, 17 bp, synthetic construct
  source 1..17: mol_type = other DNA
cccctcctccatcccgg

SEQ ID NO: 130007 - DNA, 17 bp, synthetic construct
  source 1..17: mol_type = other DNA
ccctcctccatcccggg

SEQ ID NO: 130008 - DNA, 17 bp, synthetic construct
  source 1..17: mol_type = other DNA
cctcctccatcccgggg

SEQ ID NO: 130009 - DNA, 17 bp, synthetic construct
  source 1..17: mol_type = other DNA
ctcctccatcccgggga

SEQ ID NO: 130010 - DNA, 17 bp, synthetic construct
  source 1..17: mol_type = other DNA
tcctccatcccggggac

SEQ ID NO: 130011 - DNA, 17 bp, synthetic construct
  source 1..17: mol_type = other DNA
cctccatcccggggacc

SEQ ID NO: 130012 - DNA, 17 bp, synthetic construct
  source 1..17: mol_type = other DNA
ctccatcccggggacca

SEQ ID NO: 130013 - DNA, 17 bp, synthetic construct
  source 1..17: mol_type = other DNA
tccatcccggggaccac

SEQ ID NO: 130014 - DNA, 17 bp, synthetic construct
  source 1..17: mol_type = other DNA
ccatcccggggaccacc

SEQ ID NO: 130015 - DNA, 17 bp, synthetic construct
  source 1..17: mol_type = other DNA
catcccggggaccaccc

SEQ ID NO: 130016 - DNA, 17 bp, synthetic construct
  source 1..17: mol_type = other DNA
atcccggggaccaccca

SEQ ID NO: 130017 - DNA, 17 bp, synthetic construct
  source 1..17: mol_type = other DNA
tcccggggaccacccac

SEQ ID NO: 130018 - DNA, 17 bp, synthetic construct
  source 1..17: mol_type = other DNA
cccggggaccacccaca

SEQ ID NO: 130019 - DNA, 17 bp, synthetic construct
  source 1..17: mol_type = other DNA
ccggggaccacccacac

SEQ ID NO: 130020 - DNA, 17 bp, synthetic construct
  source 1..17: mol_type = other DNA
cggggaccacccacacc

SEQ ID NO: 130021 - DNA, 17 bp, synthetic construct
  source 1..17: mol_type = other DNA
ggggaccacccacaccc

SEQ ID NO: 130022 - DNA, 17 bp, synthetic construct
  source 1..17: mol_type = other DNA
gggaccacccacacccc

SEQ ID NO: 130023 - DNA, 17 bp, synthetic construct
  source 1..17: mol_type = other DNA
ggaccacccacaccccc

SEQ ID NO: 130024 - DNA, 17 bp, synthetic construct
  source 1..17: mol_type = other DNA
gaccacccacaccccca

SEQ ID NO: 130025 - DNA, 17 bp, synthetic construct
  source 1..17: mol_type = other DNA
accacccacacccccac

SEQ ID NO: 130026 - DNA, 17 bp, synthetic construct
  source 1..17: mol_type = other DNA
ccacccacacccccaca

SEQ ID NO: 130027 - DNA, 17 bp, synthetic construct
  source 1..17: mol_type = other DNA
cacccacacccccacag

SEQ ID NO: 130028 - DNA, 17 bp, synthetic construct
  source 1..17: mol_type = other DNA
acccacacccccacagt

SEQ ID NO: 130029 - DNA, 17 bp, synthetic construct
  source 1..17: mol_type = other DNA
cccacacccccacagtg

SEQ ID NO: 130030 - DNA, 17 bp, synthetic construct
  source 1..17: mol_type = other DNA
ccacacccccacagtgc

SEQ ID NO: 130031 - DNA, 17 bp, synthetic construct
  source 1..17: mol_type = other DNA
cacacccccacagtgct

SEQ ID NO: 130032 - DNA, 17 bp, synthetic construct
  source 1..17: mol_type = other DNA
acacccccacagtgctg

SEQ ID NO: 130033 - DNA, 17 bp, synthetic construct
  source 1..17: mol_type = other DNA
cacccccacagtgctga

SEQ ID NO: 130034 - DNA, 17 bp, synthetic construct
  source 1..17: mol_type = other DNA
acccccacagtgctgac

SEQ ID NO: 130035 - DNA, 17 bp, synthetic construct
  source 1..17: mol_type = other DNA
cccccacagtgctgacc

SEQ ID NO: 130036 - DNA, 17 bp, synthetic construct
  source 1..17: mol_type = other DNA
ccccacagtgctgacca

SEQ ID NO: 130037 - DNA, 17 bp, synthetic construct
  source 1..17: mol_type = other DNA
cccacagtgctgaccac

SEQ ID NO: 130038 - DNA, 17 bp, synthetic construct
  source 1..17: mol_type = other DNA
ccacagtgctgaccacc

SEQ ID NO: 130039 - DNA, 17 bp, synthetic construct
  source 1..17: mol_type = other DNA
cacagtgctgaccacca

SEQ ID NO: 130040 - DNA, 17 bp, synthetic construct
  source 1..17: mol_type = other DNA
acagtgctgaccaccac

SEQ ID NO: 130041 - DNA, 17 bp, synthetic construct
  source 1..17: mol_type = other DNA
cagtgctgaccaccacc

SEQ ID NO: 130042 - DNA, 17 bp, synthetic construct
  source 1..17: mol_type = other DNA
agtgctgaccaccacca

SEQ ID NO: 130043 - DNA, 17 bp, synthetic construct
  source 1..17: mol_type = other DNA
gtgctgaccaccaccac

SEQ ID NO: 130044 - DNA, 17 bp, synthetic construct
  source 1..17: mol_type = other DNA
tgctgaccaccaccacc

SEQ ID NO: 130045 - DNA, 17 bp, synthetic construct
  source 1..17: mol_type = other DNA
gctgaccaccaccacca

SEQ ID NO: 130046 - DNA, 17 bp, synthetic construct
  source 1..17: mol_type = other DNA
ctgaccaccaccaccac

SEQ ID NO: 130047 - DNA, 17 bp, synthetic construct
  source 1..17: mol_type = other DNA
tgaccaccaccaccaca

SEQ ID NO: 130048 - DNA, 17 bp, synthetic construct
  source 1..17: mol_type = other DNA
gaccaccaccaccacaa

SEQ ID NO: 130049 - DNA, 17 bp, synthetic construct
  source 1..17: mol_type = other DNA
accaccaccaccacaac

SEQ ID NO: 130050 - DNA, 17 bp, synthetic construct
  source 1..17: mol_type = other DNA
ccaccaccaccacaact

SEQ ID NO: 130051 - DNA, 17 bp, synthetic construct
  source 1..17: mol_type = other DNA
caccaccaccacaactg

SEQ ID NO: 130052 - DNA, 17 bp, synthetic construct
  source 1..17: mol_type = other DNA
accaccaccacaactgt

SEQ ID NO: 130053 - DNA, 17 bp, synthetic construct
  source 1..17: mol_type = other DNA
ccaccaccacaactgtg

SEQ ID NO: 130054 - DNA, 17 bp, synthetic construct
  source 1..17: mol_type = other DNA
caccaccacaactgtgg

SEQ ID NO: 130055 - DNA, 17 bp, synthetic construct
  source 1..17: mol_type = other DNA
accaccacaactgtggc

SEQ ID NO: 130056 - DNA, 17 bp, synthetic construct
  source 1..17: mol_type = other DNA
ccaccacaactgtggcc

SEQ ID NO: 130057 - DNA, 17 bp, synthetic construct
  source 1..17: mol_type = other DNA
caccacaactgtggcca

SEQ ID NO: 130058 - DNA, 17 bp, synthetic construct
  source 1..17: mol_type = other DNA
accacaactgtggccac

SEQ ID NO: 130059 - DNA, 17 bp, synthetic construct
  source 1..17: mol_type = other DNA
ccacaactgtggccact

SEQ ID NO: 130060 - DNA, 17 bp, synthetic construct
  source 1..17: mol_type = other DNA
cacaactgtggccactg

SEQ ID NO: 130061 - DNA, 17 bp, synthetic construct
  source 1..17: mol_type = other DNA
acaactgtggccactgg

SEQ ID NO: 130062 - DNA, 17 bp, synthetic construct
  source 1..17: mol_type = other DNA
caactgtggccactggt

SEQ ID NO: 130063 - DNA, 17 bp, synthetic construct
  source 1..17: mol_type = other DNA
aactgtggccactggtt

SEQ ID NO: 130064 - DNA, 17 bp, synthetic construct
  source 1..17: mol_type = other DNA
actgtggccactggttc

SEQ ID NO: 130065 - DNA, 17 bp, synthetic construct
  source 1..17: mol_type = other DNA
ctgtggccactggttct

SEQ ID NO: 130066 - DNA, 17 bp, synthetic construct
  source 1..17: mol_type = other DNA
tgtggccactggttcta

SEQ ID NO: 130067 - DNA, 17 bp, synthetic construct
  source 1..17: mol_type = other DNA
gtggccactggttctat

SEQ ID NO: 130068 - DNA, 17 bp, synthetic construct
  source 1..17: mol_type = other DNA
tggccactggttctatg

SEQ ID NO: 130069 - DNA, 17 bp, synthetic construct
  source 1..17: mol_type = other DNA
ggccactggttctatgg

SEQ ID NO: 130070 - DNA, 17 bp, synthetic construct
  source 1..17: mol_type = other DNA
gccactggttctatggc

SEQ ID NO: 130071 - DNA, 17 bp, synthetic construct
  source 1..17: mol_type = other DNA
ccactggttctatggca

SEQ ID NO: 130072 - DNA, 17 bp, synthetic construct
  source 1..17: mol_type = other DNA
cactggttctatggcaa

SEQ ID NO: 130073 - DNA, 17 bp, synthetic construct
  source 1..17: mol_type = other DNA
actggttctatggcaac

SEQ ID NO: 130074 - DNA, 17 bp, synthetic construct
  source 1..17: mol_type = other DNA
ctggttctatggcaaca

SEQ ID NO: 130075 - DNA, 17 bp, synthetic construct
  source 1..17: mol_type = other DNA
tggttctatggcaacac

SEQ ID NO: 130076 - DNA, 17 bp, synthetic construct
  source 1..17: mol_type = other DNA
ggttctatggcaacacc

SEQ ID NO: 130077 - DNA, 17 bp, synthetic construct
  source 1..17: mol_type = other DNA
gttctatggcaacaccc

SEQ ID NO: 130078 - DNA, 17 bp, synthetic construct
  source 1..17: mol_type = other DNA
ttctatggcaacaccct

SEQ ID NO: 130079 - DNA, 17 bp, synthetic construct
  source 1..17: mol_type = other DNA
tctatggcaacaccctc

SEQ ID NO: 130080 - DNA, 17 bp, synthetic construct
  source 1..17: mol_type = other DNA
ctatggcaacaccctcc

SEQ ID NO: 130081 - DNA, 17 bp, synthetic construct
  source 1..17: mol_type = other DNA
tatggcaacaccctcct

SEQ ID NO: 130082 - DNA, 17 bp, synthetic construct
  source 1..17: mol_type = other DNA
atggcaacaccctcctc

SEQ ID NO: 130083 - DNA, 17 bp, synthetic construct
  source 1..17: mol_type = other DNA
tggcaacaccctcctct

SEQ ID NO: 130084 - DNA, 17 bp, synthetic construct
  source 1..17: mol_type = other DNA
ggcaacaccctcctcta

SEQ ID NO: 130085 - DNA, 17 bp, synthetic construct
  source 1..17: mol_type = other DNA
gcaacaccctcctctag

SEQ ID NO: 130086 - DNA, 17 bp, synthetic construct
  source 1..17: mol_type = other DNA
caacaccctcctctagc

SEQ ID NO: 130087 - DNA, 17 bp, synthetic construct
  source 1..17: mol_type = other DNA
aacaccctcctctagca

SEQ ID NO: 130088 - DNA, 17 bp, synthetic construct
  source 1..17: mol_type = other DNA
acaccctcctctagcac

SEQ ID NO: 130089 - DNA, 17 bp, synthetic construct
  source 1..17: mol_type = other DNA
caccctcctctagcaca

SEQ ID NO: 130090 - DNA, 17 bp, synthetic construct
  source 1..17: mol_type = other DNA
accctcctctagcacac

SEQ ID NO: 130091 - DNA, 17 bp, synthetic construct
  source 1..17: mol_type = other DNA
ccctcctctagcacaca

SEQ ID NO: 130092 - DNA, 17 bp, synthetic construct
  source 1..17: mol_type = other DNA
cctcctctagcacacag

SEQ ID NO: 130093 - DNA, 17 bp, synthetic construct
  source 1..17: mol_type = other DNA
ctcctctagcacacaga

SEQ ID NO: 130094 - DNA, 17 bp, synthetic construct
  source 1..17: mol_type = other DNA
tcctctagcacacagac

SEQ ID NO: 130095 - DNA, 17 bp, synthetic construct
  source 1..17: mol_type = other DNA
cctctagcacacagacc

SEQ ID NO: 130096 - DNA, 17 bp, synthetic construct
  source 1..17: mol_type = other DNA
ctctagcacacagacca

SEQ ID NO: 130097 - DNA, 17 bp, synthetic construct
  source 1..17: mol_type = other DNA
tctagcacacagaccag

SEQ ID NO: 130098 - DNA, 17 bp, synthetic construct
  source 1..17: mol_type = other DNA
ctagcacacagaccagt

SEQ ID NO: 130099 - DNA, 17 bp, synthetic construct
  source 1..17: mol_type = other DNA
tagcacacagaccagtg

SEQ ID NO: 130100 - DNA, 17 bp, synthetic construct
  source 1..17: mol_type = other DNA
agcacacagaccagtgg

SEQ ID NO: 130101 - DNA, 17 bp, synthetic construct
  source 1..17: mol_type = other DNA
gcacacagaccagtggt

SEQ ID NO: 130102 - DNA, 17 bp, synthetic construct
  source 1..17: mol_type = other DNA
cacacagaccagtggta

SEQ ID NO: 130103 - DNA, 17 bp, synthetic construct
  source 1..17: mol_type = other DNA
acacagaccagtggtac

SEQ ID NO: 130104 - DNA, 17 bp, synthetic construct
  source 1..17: mol_type = other DNA
cacagaccagtggtact

SEQ ID NO: 130105 - DNA, 17 bp, synthetic construct
  source 1..17: mol_type = other DNA
acagaccagtggtactc

SEQ ID NO: 130106 - DNA, 17 bp, synthetic construct
  source 1..17: mol_type = other DNA
cagaccagtggtactcc

SEQ ID NO: 130107 - DNA, 17 bp, synthetic construct
  source 1..17: mol_type = other DNA
agaccagtggtactccc

SEQ ID NO: 130108 - DNA, 17 bp, synthetic construct
  source 1..17: mol_type = other DNA
gaccagtggtactcccc

SEQ ID NO: 130109 - DNA, 17 bp, synthetic construct
  source 1..17: mol_type = other DNA
accagtggtactccccc

SEQ ID NO: 130110 - DNA, 17 bp, synthetic construct
  source 1..17: mol_type = other DNA
ccagtggtactccccca

SEQ ID NO: 130111 - DNA, 17 bp, synthetic construct
  source 1..17: mol_type = other DNA
cagtggtactcccccat

SEQ ID NO: 130112 - DNA, 17 bp, synthetic construct
  source 1..17: mol_type = other DNA
agtggtactcccccatc

SEQ ID NO: 130113 - DNA, 17 bp, synthetic construct
  source 1..17: mol_type = other DNA
gtggtactcccccatca

SEQ ID NO: 130114 - DNA, 17 bp, synthetic construct
  source 1..17: mol_type = other DNA
tggtactcccccatcac

SEQ ID NO: 130115 - DNA, 17 bp, synthetic construct
  source 1..17: mol_type = other DNA
ggtactcccccatcact

SEQ ID NO: 130116 - DNA, 17 bp, synthetic construct
  source 1..17: mol_type = other DNA
gtactcccccatcactg

SEQ ID NO: 130117 - DNA, 17 bp, synthetic construct
  source 1..17: mol_type = other DNA
tactcccccatcactga

SEQ ID NO: 130118 - DNA, 17 bp, synthetic construct
  source 1..17: mol_type = other DNA
actcccccatcactgac

SEQ ID NO: 130119 - DNA, 17 bp, synthetic construct
  source 1..17: mol_type = other DNA
ctcccccatcactgacc

SEQ ID NO: 130120 - DNA, 17 bp, synthetic construct
  source 1..17: mol_type = other DNA
tcccccatcactgacca

SEQ ID NO: 130121 - DNA, 17 bp, synthetic construct
  source 1..17: mol_type = other DNA
cccccatcactgaccac

SEQ ID NO: 130122 - DNA, 17 bp, synthetic construct
  source 1..17: mol_type = other DNA
ccccatcactgaccacc

SEQ ID NO: 130123 - DNA, 17 bp, synthetic construct
  source 1..17: mol_type = other DNA
cccatcactgaccacca

SEQ ID NO: 130124 - DNA, 17 bp, synthetic construct
  source 1..17: mol_type = other DNA
ccatcactgaccaccac

SEQ ID NO: 130125 - DNA, 17 bp, synthetic construct
  source 1..17: mol_type = other DNA
catcactgaccaccacg

SEQ ID NO: 130126 - DNA, 17 bp, synthetic construct
  source 1..17: mol_type = other DNA
atcactgaccaccacgg

SEQ ID NO: 130127 - DNA, 17 bp, synthetic construct
  source 1..17: mol_type = other DNA
tcactgaccaccacggc

SEQ ID NO: 130128 - DNA, 17 bp, synthetic construct
  source 1..17: mol_type = other DNA
cactgaccaccacggcc

SEQ ID NO: 130129 - DNA, 17 bp, synthetic construct
  source 1..17: mol_type = other DNA
actgaccaccacggcca

SEQ ID NO: 130130 - DNA, 17 bp, synthetic construct
  source 1..17: mol_type = other DNA
ctgaccaccacggccac

SEQ ID NO: 130131 - DNA, 17 bp, synthetic construct
  source 1..17: mol_type = other DNA
tgaccaccacggccact

SEQ ID NO: 130132 - DNA, 17 bp, synthetic construct
  source 1..17: mol_type = other DNA
gaccaccacggccacta

SEQ ID NO: 130133 - DNA, 17 bp, synthetic construct
  source 1..17: mol_type = other DNA
accaccacggccactac

SEQ ID NO: 130134 - DNA, 17 bp, synthetic construct
  source 1..17: mol_type = other DNA
ccaccacggccactacg

SEQ ID NO: 130135 - DNA, 17 bp, synthetic construct
  source 1..17: mol_type = other DNA
caccacggccactacga

SEQ ID NO: 130136 - DNA, 17 bp, synthetic construct
  source 1..17: mol_type = other DNA
accacggccactacgat

SEQ ID NO: 130137 - DNA, 17 bp, synthetic construct
  source 1..17: mol_type = other DNA
ccacggccactacgatc

SEQ ID NO: 130138 - DNA, 17 bp, synthetic construct
  source 1..17: mol_type = other DNA
cacggccactacgatca

SEQ ID NO: 130139 - DNA, 17 bp, synthetic construct
  source 1..17: mol_type = other DNA
acggccactacgatcac

SEQ ID NO: 130140 - DNA, 17 bp, synthetic construct
  source 1..17: mol_type = other DNA
cggccactacgatcacg

SEQ ID NO: 130141 - DNA, 17 bp, synthetic construct
  source 1..17: mol_type = other DNA
ggccactacgatcacgg

SEQ ID NO: 130142 - DNA, 17 bp, synthetic construct
  source 1..17: mol_type = other DNA
gccactacgatcacggc

SEQ ID NO: 130143 - DNA, 17 bp, synthetic construct
  source 1..17: mol_type = other DNA
ccactacgatcacggcc

SEQ ID NO: 130144 - DNA, 17 bp, synthetic construct
  source 1..17: mol_type = other DNA
cactacgatcacggcca

SEQ ID NO: 130145 - DNA, 17 bp, synthetic construct
  source 1..17: mol_type = other DNA
actacgatcacggccac

SEQ ID NO: 130146 - DNA, 17 bp, synthetic construct
  source 1..17: mol_type = other DNA
ctacgatcacggccacc

SEQ ID NO: 130147 - DNA, 17 bp, synthetic construct
  source 1..17: mol_type = other DNA
tacgatcacggccaccg

SEQ ID NO: 130148 - DNA, 17 bp, synthetic construct
  source 1..17: mol_type = other DNA
acgatcacggccaccgg

SEQ ID NO: 130149 - DNA, 17 bp, synthetic construct
  source 1..17: mol_type = other DNA
cgatcacggccaccggc

SEQ ID NO: 130150 - DNA, 17 bp, synthetic construct
  source 1..17: mol_type = other DNA
gatcacggccaccggct

SEQ ID NO: 130151 - DNA, 17 bp, synthetic construct
  source 1..17: mol_type = other DNA
atcacggccaccggctc

SEQ ID NO: 130152 - DNA, 17 bp, synthetic construct
  source 1..17: mol_type = other DNA
tcacggccaccggctcc

SEQ ID NO: 130153 - DNA, 17 bp, synthetic construct
  source 1..17: mol_type = other DNA
cacggccaccggctcca

SEQ ID NO: 130154 - DNA, 17 bp, synthetic construct
  source 1..17: mol_type = other DNA
acggccaccggctccac

SEQ ID NO: 130155 - DNA, 17 bp, synthetic construct
  source 1..17: mol_type = other DNA
cggccaccggctccacc

SEQ ID NO: 130156 - DNA, 17 bp, synthetic construct
  source 1..17: mol_type = other DNA
ggccaccggctccacca

SEQ ID NO: 130157 - DNA, 17 bp, synthetic construct
  source 1..17: mol_type = other DNA
gccaccggctccaccac

SEQ ID NO: 130158 - DNA, 17 bp, synthetic construct
  source 1..17: mol_type = other DNA
ccaccggctccaccacc

SEQ ID NO: 130159 - DNA, 17 bp, synthetic construct
  source 1..17: mol_type = other DNA
caccggctccaccacca

SEQ ID NO: 130160 - DNA, 17 bp, synthetic construct
  source 1..17: mol_type = other DNA
accggctccaccaccaa

SEQ ID NO: 130161 - DNA, 17 bp, synthetic construct
  source 1..17: mol_type = other DNA
ccggctccaccaccaac

SEQ ID NO: 130162 - DNA, 17 bp, synthetic construct
  source 1..17: mol_type = other DNA
cggctccaccaccaacc

SEQ ID NO: 130163 - DNA, 17 bp, synthetic construct
  source 1..17: mol_type = other DNA
ggctccaccaccaaccc

SEQ ID NO: 130164 - DNA, 17 bp, synthetic construct
  source 1..17: mol_type = other DNA
gctccaccaccaacccc

SEQ ID NO: 130165 - DNA, 17 bp, synthetic construct
  source 1..17: mol_type = other DNA
ctccaccaccaacccct

SEQ ID NO: 130166 - DNA, 17 bp, synthetic construct
  source 1..17: mol_type = other DNA
tccaccaccaacccctc

SEQ ID NO: 130167 - DNA, 17 bp, synthetic construct
  source 1..17: mol_type = other DNA
ccaccaccaacccctcc

SEQ ID NO: 130168 - DNA, 17 bp, synthetic construct
  source 1..17: mol_type = other DNA
caccaccaacccctcct

SEQ ID NO: 130169 - DNA, 17 bp, synthetic construct
  source 1..17: mol_type = other DNA
accaccaacccctcctc

SEQ ID NO: 130170 - DNA, 17 bp, synthetic construct
  source 1..17: mol_type = other DNA
ccaccaacccctcctca

SEQ ID NO: 130171 - DNA, 17 bp, synthetic construct
  source 1..17: mol_type = other DNA
caccaacccctcctcaa

SEQ ID NO: 130172 - DNA, 17 bp, synthetic construct
  source 1..17: mol_type = other DNA
accaacccctcctcaac

SEQ ID NO: 130173 - DNA, 17 bp, synthetic construct
  source 1..17: mol_type = other DNA
ccaacccctcctcaact

SEQ ID NO: 130174 - DNA, 17 bp, synthetic construct
  source 1..17: mol_type = other DNA
caacccctcctcaactc

SEQ ID NO: 130175 - DNA, 17 bp, synthetic construct
  source 1..17: mol_type = other DNA
aacccctcctcaactcc

SEQ ID NO: 130176 - DNA, 17 bp, synthetic construct
  source 1..17: mol_type = other DNA
acccctcctcaactcca

SEQ ID NO: 130177 - DNA, 17 bp, synthetic construct
  source 1..17: mol_type = other DNA
cccctcctcaactccag

SEQ ID NO: 130178 - DNA, 17 bp, synthetic construct
  source 1..17: mol_type = other DNA
ccctcctcaactccagg

SEQ ID NO: 130179 - DNA, 17 bp, synthetic construct
  source 1..17: mol_type = other DNA
cctcctcaactccaggg

SEQ ID NO: 130180 - DNA, 17 bp, synthetic construct
  source 1..17: mol_type = other DNA
ctcctcaactccaggga

SEQ ID NO: 130181 - DNA, 17 bp, synthetic construct
  source 1..17: mol_type = other DNA
tcctcaactccagggac

SEQ ID NO: 130182 - DNA, 17 bp, synthetic construct
  source 1..17: mol_type = other DNA
cctcaactccagggaca

SEQ ID NO: 130183 - DNA, 17 bp, synthetic construct
  source 1..17: mol_type = other DNA
ctcaactccagggacaa

SEQ ID NO: 130184 - DNA, 17 bp, synthetic construct
  source 1..17: mol_type = other DNA
tcaactccagggacaac

SEQ ID NO: 130185 - DNA, 17 bp, synthetic construct
  source 1..17: mol_type = other DNA
caactccagggacaaca

SEQ ID NO: 130186 - DNA, 17 bp, synthetic construct
  source 1..17: mol_type = other DNA
aactccagggacaacac

SEQ ID NO: 130187 - DNA, 17 bp, synthetic construct
  source 1..17: mol_type = other DNA
actccagggacaacacc

SEQ ID NO: 130188 - DNA, 17 bp, synthetic construct
  source 1..17: mol_type = other DNA
ctccagggacaacacct

SEQ ID NO: 130189 - DNA, 17 bp, synthetic construct
  source 1..17: mol_type = other DNA
tccagggacaacaccta

SEQ ID NO: 130190 - DNA, 17 bp, synthetic construct
  source 1..17: mol_type = other DNA
ccagggacaacacctat

SEQ ID NO: 130191 - DNA, 17 bp, synthetic construct
  source 1..17: mol_type = other DNA
cagggacaacacctatc

SEQ ID NO: 130192 - DNA, 17 bp, synthetic construct
  source 1..17: mol_type = other DNA
agggacaacacctatcc

SEQ ID NO: 130193 - DNA, 17 bp, synthetic construct
  source 1..17: mol_type = other DNA
gggacaacacctatccc

SEQ ID NO: 130194 - DNA, 17 bp, synthetic construct
  source 1..17: mol_type = other DNA
ggacaacacctatcccc

SEQ ID NO: 130195 - DNA, 17 bp, synthetic construct
  source 1..17: mol_type = other DNA
gacaacacctatccccc

SEQ ID NO: 130196 - DNA, 17 bp, synthetic construct
  source 1..17: mol_type = other DNA
acaacacctatcccccc

SEQ ID NO: 130197 - DNA, 17 bp, synthetic construct
  source 1..17: mol_type = other DNA
caacacctatcccccca

SEQ ID NO: 130198 - DNA, 17 bp, synthetic construct
  source 1..17: mol_type = other DNA
aacacctatccccccag

SEQ ID NO: 130199 - DNA, 17 bp, synthetic construct
  source 1..17: mol_type = other DNA
acacctatccccccagt

SEQ ID NO: 130200 - DNA, 17 bp, synthetic construct
  source 1..17: mol_type = other DNA
cacctatccccccagtg

SEQ ID NO: 130201 - DNA, 17 bp, synthetic construct
  source 1..17: mol_type = other DNA
acctatccccccagtgc

SEQ ID NO: 130202 - DNA, 17 bp, synthetic construct
  source 1..17: mol_type = other DNA
cctatccccccagtgct

SEQ ID NO: 130203 - DNA, 17 bp, synthetic construct
  source 1..17: mol_type = other DNA
ctatccccccagtgctg

SEQ ID NO: 130204 - DNA, 17 bp, synthetic construct
  source 1..17: mol_type = other DNA
tatccccccagtgctga

SEQ ID NO: 130205 - DNA, 17 bp, synthetic construct
  source 1..17: mol_type = other DNA
atccccccagtgctgac

SEQ ID NO: 130206 - DNA, 17 bp, synthetic construct
  source 1..17: mol_type = other DNA
tccccccagtgctgacc

SEQ ID NO: 130207 - DNA, 17 bp, synthetic construct
  source 1..17: mol_type = other DNA
ccccccagtgctgacca

SEQ ID NO: 130208 - DNA, 17 bp, synthetic construct
  source 1..17: mol_type = other DNA
cccccagtgctgaccac

SEQ ID NO: 130209 - DNA, 17 bp, synthetic construct
  source 1..17: mol_type = other DNA
ccccagtgctgaccacc

SEQ ID NO: 130210 - DNA, 17 bp, synthetic construct
  source 1..17: mol_type = other DNA
cccagtgctgaccacca

SEQ ID NO: 130211 - DNA, 17 bp, synthetic construct
  source 1..17: mol_type = other DNA
ccagtgctgaccaccac

SEQ ID NO: 130212 - DNA, 17 bp, synthetic construct
  source 1..17: mol_type = other DNA
cagtgctgaccaccacc

SEQ ID NO: 130213 - DNA, 17 bp, synthetic construct
  source 1..17: mol_type = other DNA
agtgctgaccaccaccg

SEQ ID NO: 130214 - DNA, 17 bp, synthetic construct
  source 1..17: mol_type = other DNA
gtgctgaccaccaccgc

SEQ ID NO: 130215 - DNA, 17 bp, synthetic construct
  source 1..17: mol_type = other DNA
tgctgaccaccaccgcc

SEQ ID NO: 130216 - DNA, 17 bp, synthetic construct
  source 1..17: mol_type = other DNA
gctgaccaccaccgcca

SEQ ID NO: 130217 - DNA, 17 bp, synthetic construct
  source 1..17: mol_type = other DNA
ctgaccaccaccgccac

SEQ ID NO: 130218 - DNA, 17 bp, synthetic construct
  source 1..17: mol_type = other DNA
tgaccaccaccgccacc

SEQ ID NO: 130219 - DNA, 17 bp, synthetic construct
  source 1..17: mol_type = other DNA
gaccaccaccgccacca

SEQ ID NO: 130220 - DNA, 17 bp, synthetic construct
  source 1..17: mol_type = other DNA
accaccaccgccaccac

SEQ ID NO: 130221 - DNA, 17 bp, synthetic construct
  source 1..17: mol_type = other DNA
ccaccaccgccaccaca

SEQ ID NO: 130222 - DNA, 17 bp, synthetic construct
  source 1..17: mol_type = other DNA
caccaccgccaccacac

SEQ ID NO: 130223 - DNA, 17 bp, synthetic construct
  source 1..17: mol_type = other DNA
accaccgccaccacacc

SEQ ID NO: 130224 - DNA, 17 bp, synthetic construct
  source 1..17: mol_type = other DNA
ccaccgccaccacacct

SEQ ID NO: 130225 - DNA, 17 bp, synthetic construct
  source 1..17: mol_type = other DNA
caccgccaccacacctg

SEQ ID NO: 130226 - DNA, 17 bp, synthetic construct
  source 1..17: mol_type = other DNA
accgccaccacacctgc

SEQ ID NO: 130227 - DNA, 17 bp, synthetic construct
  source 1..17: mol_type = other DNA
ccgccaccacacctgca

SEQ ID NO: 130228 - DNA, 17 bp, synthetic construct
  source 1..17: mol_type = other DNA
cgccaccacacctgcag

SEQ ID NO: 130229 - DNA, 17 bp, synthetic construct
  source 1..17: mol_type = other DNA
gccaccacacctgcagc

SEQ ID NO: 130230 - DNA, 17 bp, synthetic construct
  source 1..17: mol_type = other DNA
ccaccacacctgcagcc

SEQ ID NO: 130231 - DNA, 17 bp, synthetic construct
  source 1..17: mol_type = other DNA
caccacacctgcagcca

SEQ ID NO: 130232 - DNA, 17 bp, synthetic construct
  source 1..17: mol_type = other DNA
accacacctgcagccac

SEQ ID NO: 130233 - DNA, 17 bp, synthetic construct
  source 1..17: mol_type = other DNA
ccacacctgcagccacc

SEQ ID NO: 130234 - DNA, 17 bp, synthetic construct
  source 1..17: mol_type = other DNA
cacacctgcagccacca

SEQ ID NO: 130235 - DNA, 17 bp, synthetic construct
  source 1..17: mol_type = other DNA
acacctgcagccaccag

SEQ ID NO: 130236 - DNA, 17 bp, synthetic construct
  source 1..17: mol_type = other DNA
cacctgcagccaccagc

SEQ ID NO: 130237 - DNA, 17 bp, synthetic construct
  source 1..17: mol_type = other DNA
acctgcagccaccagca

SEQ ID NO: 130238 - DNA, 17 bp, synthetic construct
  source 1..17: mol_type = other DNA
cctgcagccaccagcag

SEQ ID NO: 130239 - DNA, 17 bp, synthetic construct
  source 1..17: mol_type = other DNA
ctgcagccaccagcagc

SEQ ID NO: 130240 - DNA, 17 bp, synthetic construct
  source 1..17: mol_type = other DNA
tgcagccaccagcagca

SEQ ID NO: 130241 - DNA, 17 bp, synthetic construct
  source 1..17: mol_type = other DNA
gcagccaccagcagcac

SEQ ID NO: 130242 - DNA, 17 bp, synthetic construct
  source 1..17: mol_type = other DNA
cagccaccagcagcaca

SEQ ID NO: 130243 - DNA, 17 bp, synthetic construct
  source 1..17: mol_type = other DNA
agccaccagcagcacag

SEQ ID NO: 130244 - DNA, 17 bp, synthetic construct
  source 1..17: mol_type = other DNA
gccaccagcagcacagt

SEQ ID NO: 130245 - DNA, 17 bp, synthetic construct
  source 1..17: mol_type = other DNA
ccaccagcagcacagtg

SEQ ID NO: 130246 - DNA, 17 bp, synthetic construct
  source 1..17: mol_type = other DNA
caccagcagcacagtga

SEQ ID NO: 130247 - DNA, 17 bp, synthetic construct
  source 1..17: mol_type = other DNA
accagcagcacagtgac

SEQ ID NO: 130248 - DNA, 17 bp, synthetic construct
  source 1..17: mol_type = other DNA
ccagcagcacagtgact

SEQ ID NO: 130249 - DNA, 17 bp, synthetic construct
  source 1..17: mol_type = other DNA
cagcagcacagtgactc

SEQ ID NO: 130250 - DNA, 17 bp, synthetic construct
  source 1..17: mol_type = other DNA
agcagcacagtgactcc

SEQ ID NO: 130251 - DNA, 17 bp, synthetic construct
  source 1..17: mol_type = other DNA
gcagcacagtgactccc

SEQ ID NO: 130252 - DNA, 17 bp, synthetic construct
  source 1..17: mol_type = other DNA
cagcacagtgactccct

SEQ ID NO: 130253 - DNA, 17 bp, synthetic construct
  source 1..17: mol_type = other DNA
agcacagtgactccctc

SEQ ID NO: 130254 - DNA, 17 bp, synthetic construct
  source 1..17: mol_type = other DNA
gcacagtgactccctcc

SEQ ID NO: 130255 - DNA, 17 bp, synthetic construct
  source 1..17: mol_type = other DNA
cacagtgactccctcct

SEQ ID NO: 130256 - DNA, 17 bp, synthetic construct
  source 1..17: mol_type = other DNA
acagtgactccctcctc

SEQ ID NO: 130257 - DNA, 17 bp, synthetic construct
  source 1..17: mol_type = other DNA
cagtgactccctcctct

SEQ ID NO: 130258 - DNA, 17 bp, synthetic construct
  source 1..17: mol_type = other DNA
agtgactccctcctctg

SEQ ID NO: 130259 - DNA, 17 bp, synthetic construct
  source 1..17: mol_type = other DNA
gtgactccctcctctgc

SEQ ID NO: 130260 - DNA, 17 bp, synthetic construct
  source 1..17: mol_type = other DNA
tgactccctcctctgcc

SEQ ID NO: 130261 - DNA, 17 bp, synthetic construct
  source 1..17: mol_type = other DNA
gactccctcctctgccc

SEQ ID NO: 130262 - DNA, 17 bp, synthetic construct
  source 1..17: mol_type = other DNA
actccctcctctgccct

SEQ ID NO: 130263 - DNA, 17 bp, synthetic construct
  source 1..17: mol_type = other DNA
ctccctcctctgcccta

SEQ ID NO: 130264 - DNA, 17 bp, synthetic construct
  source 1..17: mol_type = other DNA
tccctcctctgccctag

SEQ ID NO: 130265 - DNA, 17 bp, synthetic construct
  source 1..17: mol_type = other DNA
ccctcctctgccctagg

SEQ ID NO: 130266 - DNA, 17 bp, synthetic construct
  source 1..17: mol_type = other DNA
cctcctctgccctaggg

SEQ ID NO: 130267 - DNA, 17 bp, synthetic construct
  source 1..17: mol_type = other DNA
ctcctctgccctaggga

SEQ ID NO: 130268 - DNA, 17 bp, synthetic construct
  source 1..17: mol_type = other DNA
tcctctgccctagggac

SEQ ID NO: 130269 - DNA, 17 bp, synthetic construct
  source 1..17: mol_type = other DNA
cctctgccctagggacc

SEQ ID NO: 130270 - DNA, 17 bp, synthetic construct
  source 1..17: mol_type = other DNA
ctctgccctagggacca

SEQ ID NO: 130271 - DNA, 17 bp, synthetic construct
  source 1..17: mol_type = other DNA
tctgccctagggaccac

SEQ ID NO: 130272 - DNA, 17 bp, synthetic construct
  source 1..17: mol_type = other DNA
ctgccctagggaccacc

SEQ ID NO: 130273 - DNA, 17 bp, synthetic construct
  source 1..17: mol_type = other DNA
tgccctagggaccaccc

SEQ ID NO: 130274 - DNA, 17 bp, synthetic construct
  source 1..17: mol_type = other DNA
gccctagggaccaccca

SEQ ID NO: 130275 - DNA, 17 bp, synthetic construct
  source 1..17: mol_type = other DNA
ccctagggaccacccac

SEQ ID NO: 130276 - DNA, 17 bp, synthetic construct
  source 1..17: mol_type = other DNA
cctagggaccacccaca

SEQ ID NO: 130277 - DNA, 17 bp, synthetic construct
  source 1..17: mol_type = other DNA
ctagggaccacccacac

SEQ ID NO: 130278 - DNA, 17 bp, synthetic construct
  source 1..17: mol_type = other DNA
tagggaccacccacaca

SEQ ID NO: 130279 - DNA, 17 bp, synthetic construct
  source 1..17: mol_type = other DNA
agggaccacccacacac

SEQ ID NO: 130280 - DNA, 17 bp, synthetic construct
  source 1..17: mol_type = other DNA
gggaccacccacacacc

SEQ ID NO: 130281 - DNA, 17 bp, synthetic construct
  source 1..17: mol_type = other DNA
ggaccacccacacaccc

SEQ ID NO: 130282 - DNA, 17 bp, synthetic construct
  source 1..17: mol_type = other DNA
gaccacccacacacccc

SEQ ID NO: 130283 - DNA, 17 bp, synthetic construct
  source 1..17: mol_type = other DNA
accacccacacaccccc

SEQ ID NO: 130284 - DNA, 17 bp, synthetic construct
  source 1..17: mol_type = other DNA
ccacccacacaccccca

SEQ ID NO: 130285 - DNA, 17 bp, synthetic construct
  source 1..17: mol_type = other DNA
cacccacacacccccag

SEQ ID NO: 130286 - DNA, 17 bp, synthetic construct
  source 1..17: mol_type = other DNA
acccacacacccccagt

SEQ ID NO: 130287 - DNA, 17 bp, synthetic construct
  source 1..17: mol_type = other DNA
cccacacacccccagtg

SEQ ID NO: 130288 - DNA, 17 bp, synthetic construct
  source 1..17: mol_type = other DNA
ccacacacccccagtgc

SEQ ID NO: 130289 - DNA, 17 bp, synthetic construct
  source 1..17: mol_type = other DNA
cacacacccccagtgcc

SEQ ID NO: 130290 - DNA, 17 bp, synthetic construct
  source 1..17: mol_type = other DNA
acacacccccagtgccg

SEQ ID NO: 130291 - DNA, 17 bp, synthetic construct
  source 1..17: mol_type = other DNA
cacacccccagtgccga

SEQ ID NO: 130292 - DNA, 17 bp, synthetic construct
  source 1..17: mol_type = other DNA
acacccccagtgccgaa

SEQ ID NO: 130293 - DNA, 17 bp, synthetic construct
  source 1..17: mol_type = other DNA
cacccccagtgccgaac

SEQ ID NO: 130294 - DNA, 17 bp, synthetic construct
  source 1..17: mol_type = other DNA
acccccagtgccgaaca

SEQ ID NO: 130295 - DNA, 17 bp, synthetic construct
  source 1..17: mol_type = other DNA
cccccagtgccgaacac

SEQ ID NO: 130296 - DNA, 17 bp, synthetic construct
  source 1..17: mol_type = other DNA
ccccagtgccgaacacc

SEQ ID NO: 130297 - DNA, 17 bp, synthetic construct
  source 1..17: mol_type = other DNA
cccagtgccgaacacca

SEQ ID NO: 130298 - DNA, 17 bp, synthetic construct
  source 1..17: mol_type = other DNA
ccagtgccgaacaccac

SEQ ID NO: 130299 - DNA, 17 bp, synthetic construct
  source 1..17: mol_type = other DNA
cagtgccgaacaccacg

SEQ ID NO: 130300 - DNA, 17 bp, synthetic construct
  source 1..17: mol_type = other DNA
agtgccgaacaccacgg

SEQ ID NO: 130301 - DNA, 17 bp, synthetic construct
  source 1..17: mol_type = other DNA
gtgccgaacaccacggc

SEQ ID NO: 130302 - DNA, 17 bp, synthetic construct
  source 1..17: mol_type = other DNA
tgccgaacaccacggcc

SEQ ID NO: 130303 - DNA, 17 bp, synthetic construct
  source 1..17: mol_type = other DNA
gccgaacaccacggcca

SEQ ID NO: 130304 - DNA, 17 bp, synthetic construct
  source 1..17: mol_type = other DNA
ccgaacaccacggccac

SEQ ID NO: 130305 - DNA, 17 bp, synthetic construct
  source 1..17: mol_type = other DNA
cgaacaccacggccacc

SEQ ID NO: 130306 - DNA, 17 bp, synthetic construct
  source 1..17: mol_type = other DNA
gaacaccacggccacca

SEQ ID NO: 130307 - DNA, 17 bp, synthetic construct
  source 1..17: mol_type = other DNA
aacaccacggccaccac

SEQ ID NO: 130308 - DNA, 17 bp, synthetic construct
  source 1..17: mol_type = other DNA
acaccacggccaccaca

SEQ ID NO: 130309 - DNA, 17 bp, synthetic construct
  source 1..17: mol_type = other DNA
caccacggccaccacac

SEQ ID NO: 130310 - DNA, 17 bp, synthetic construct
  source 1..17: mol_type = other DNA
accacggccaccacaca

SEQ ID NO: 130311 - DNA, 17 bp, synthetic construct
  source 1..17: mol_type = other DNA
ccacggccaccacacac

SEQ ID NO: 130312 - DNA, 17 bp, synthetic construct
  source 1..17: mol_type = other DNA
cacggccaccacacacg

SEQ ID NO: 130313 - DNA, 17 bp, synthetic construct
  source 1..17: mol_type = other DNA
acggccaccacacacgg

SEQ ID NO: 130314 - DNA, 17 bp, synthetic construct
  source 1..17: mol_type = other DNA
cggccaccacacacggg

SEQ ID NO: 130315 - DNA, 17 bp, synthetic construct
  source 1..17: mol_type = other DNA
ggccaccacacacgggc

SEQ ID NO: 130316 - DNA, 17 bp, synthetic construct
  source 1..17: mol_type = other DNA
gccaccacacacgggcg

SEQ ID NO: 130317 - DNA, 17 bp, synthetic construct
  source 1..17: mol_type = other DNA
ccaccacacacgggcga

SEQ ID NO: 130318 - DNA, 17 bp, synthetic construct
  source 1..17: mol_type = other DNA
caccacacacgggcgat

SEQ ID NO: 130319 - DNA, 17 bp, synthetic construct
  source 1..17: mol_type = other DNA
accacacacgggcgatc

SEQ ID NO: 130320 - DNA, 17 bp, synthetic construct
  source 1..17: mol_type = other DNA
ccacacacgggcgatcc

SEQ ID NO: 130321 - DNA, 17 bp, synthetic construct
  source 1..17: mol_type = other DNA
cacacacgggcgatccc

SEQ ID NO: 130322 - DNA, 17 bp, synthetic construct
  source 1..17: mol_type = other DNA
acacacgggcgatccct

SEQ ID NO: 130323 - DNA, 17 bp, synthetic construct
  source 1..17: mol_type = other DNA
cacacgggcgatccctg

SEQ ID NO: 130324 - DNA, 17 bp, synthetic construct
  source 1..17: mol_type = other DNA
acacgggcgatccctgt

SEQ ID NO: 130325 - DNA, 17 bp, synthetic construct
  source 1..17: mol_type = other DNA
cacgggcgatccctgtc

SEQ ID NO: 130326 - DNA, 17 bp, synthetic construct
  source 1..17: mol_type = other DNA
acgggcgatccctgtcc

SEQ ID NO: 130327 - DNA, 17 bp, synthetic construct
  source 1..17: mol_type = other DNA
cgggcgatccctgtccc

SEQ ID NO: 130328 - DNA, 17 bp, synthetic construct
  source 1..17: mol_type = other DNA
gggcgatccctgtcccc

SEQ ID NO: 130329 - DNA, 17 bp, synthetic construct
  source 1..17: mol_type = other DNA
ggcgatccctgtccccc

SEQ ID NO: 130330 - DNA, 17 bp, synthetic construct
  source 1..17: mol_type = other DNA
gcgatccctgtccccca

SEQ ID NO: 130331 - DNA, 17 bp, synthetic construct
  source 1..17: mol_type = other DNA
cgatccctgtcccccag

SEQ ID NO: 130332 - DNA, 17 bp, synthetic construct
  source 1..17: mol_type = other DNA
gatccctgtcccccagc

SEQ ID NO: 130333 - DNA, 17 bp, synthetic construct
  source 1..17: mol_type = other DNA
atccctgtcccccagca

SEQ ID NO: 130334 - DNA, 17 bp, synthetic construct
  source 1..17: mol_type = other DNA
tccctgtcccccagcag

SEQ ID NO: 130335 - DNA, 17 bp, synthetic construct
  source 1..17: mol_type = other DNA
ccctgtcccccagcagt

SEQ ID NO: 130336 - DNA, 17 bp, synthetic construct
  source 1..17: mol_type = other DNA
cctgtcccccagcagtc

SEQ ID NO: 130337 - DNA, 17 bp, synthetic construct
  source 1..17: mol_type = other DNA
ctgtcccccagcagtcc

SEQ ID NO: 130338 - DNA, 17 bp, synthetic construct
  source 1..17: mol_type = other DNA
tgtcccccagcagtccc

SEQ ID NO: 130339 - DNA, 17 bp, synthetic construct
  source 1..17: mol_type = other DNA
gtcccccagcagtcccc

SEQ ID NO: 130340 - DNA, 17 bp, synthetic construct
  source 1..17: mol_type = other DNA
tcccccagcagtcccca

SEQ ID NO: 130341 - DNA, 17 bp, synthetic construct
  source 1..17: mol_type = other DNA
cccccagcagtccccac

SEQ ID NO: 130342 - DNA, 17 bp, synthetic construct
  source 1..17: mol_type = other DNA
ccccagcagtccccaca

SEQ ID NO: 130343 - DNA, 17 bp, synthetic construct
  source 1..17: mol_type = other DNA
cccagcagtccccacac

SEQ ID NO: 130344 - DNA, 17 bp, synthetic construct
  source 1..17: mol_type = other DNA
ccagcagtccccacacg

SEQ ID NO: 130345 - DNA, 17 bp, synthetic construct
  source 1..17: mol_type = other DNA
cagcagtccccacacgg

SEQ ID NO: 130346 - DNA, 17 bp, synthetic construct
  source 1..17: mol_type = other DNA
agcagtccccacacggt

SEQ ID NO: 130347 - DNA, 17 bp, synthetic construct
  source 1..17: mol_type = other DNA
gcagtccccacacggtg

SEQ ID NO: 130348 - DNA, 17 bp, synthetic construct
  source 1..17: mol_type = other DNA
cagtccccacacggtgc

SEQ ID NO: 130349 - DNA, 17 bp, synthetic construct
  source 1..17: mol_type = other DNA
agtccccacacggtgcg

SEQ ID NO: 130350 - DNA, 17 bp, synthetic construct
  source 1..17: mol_type = other DNA
gtccccacacggtgcgc

SEQ ID NO: 130351 - DNA, 17 bp, synthetic construct
  source 1..17: mol_type = other DNA
tccccacacggtgcgca

SEQ ID NO: 130352 - DNA, 17 bp, synthetic construct
  source 1..17: mol_type = other DNA
ccccacacggtgcgcac

SEQ ID NO: 130353 - DNA, 17 bp, synthetic construct
  source 1..17: mol_type = other DNA
cccacacggtgcgcaca

SEQ ID NO: 130354 - DNA, 17 bp, synthetic construct
  source 1..17: mol_type = other DNA
ccacacggtgcgcacag

SEQ ID NO: 130355 - DNA, 17 bp, synthetic construct
  source 1..17: mol_type = other DNA
cacacggtgcgcacagc

SEQ ID NO: 130356 - DNA, 17 bp, synthetic construct
  source 1..17: mol_type = other DNA
acacggtgcgcacagcc

SEQ ID NO: 130357 - DNA, 17 bp, synthetic construct
  source 1..17: mol_type = other DNA
cacggtgcgcacagcct

SEQ ID NO: 130358 - DNA, 17 bp, synthetic construct
  source 1..17: mol_type = other DNA
acggtgcgcacagcctg

SEQ ID NO: 130359 - DNA, 17 bp, synthetic construct
  source 1..17: mol_type = other DNA
cggtgcgcacagcctgg

SEQ ID NO: 130360 - DNA, 17 bp, synthetic construct
  source 1..17: mol_type = other DNA
ggtgcgcacagcctgga

SEQ ID NO: 130361 - DNA, 17 bp, synthetic construct
  source 1..17: mol_type = other DNA
gtgcgcacagcctggac

SEQ ID NO: 130362 - DNA, 17 bp, synthetic construct
  source 1..17: mol_type = other DNA
tgcgcacagcctggact

SEQ ID NO: 130363 - DNA, 17 bp, synthetic construct
  source 1..17: mol_type = other DNA
gcgcacagcctggactt

SEQ ID NO: 130364 - DNA, 17 bp, synthetic construct
  source 1..17: mol_type = other DNA
cgcacagcctggacttc

SEQ ID NO: 130365 - DNA, 17 bp, synthetic construct
  source 1..17: mol_type = other DNA
gcacagcctggacttcg

SEQ ID NO: 130366 - DNA, 17 bp, synthetic construct
  source 1..17: mol_type = other DNA
cacagcctggacttcgg

SEQ ID NO: 130367 - DNA, 17 bp, synthetic construct
  source 1..17: mol_type = other DNA
acagcctggacttcggc

SEQ ID NO: 130368 - DNA, 17 bp, synthetic construct
  source 1..17: mol_type = other DNA
cagcctggacttcggcc

SEQ ID NO: 130369 - DNA, 17 bp, synthetic construct
  source 1..17: mol_type = other DNA
agcctggacttcggcca

SEQ ID NO: 130370 - DNA, 17 bp, synthetic construct
  source 1..17: mol_type = other DNA
gcctggacttcggccac

SEQ ID NO: 130371 - DNA, 17 bp, synthetic construct
  source 1..17: mol_type = other DNA
cctggacttcggccacc

SEQ ID NO: 130372 - DNA, 17 bp, synthetic construct
  source 1..17: mol_type = other DNA
ctggacttcggccacct

SEQ ID NO: 130373 - DNA, 17 bp, synthetic construct
  source 1..17: mol_type = other DNA
tggacttcggccacctc

SEQ ID NO: 130374 - DNA, 17 bp, synthetic construct
  source 1..17: mol_type = other DNA
ggacttcggccacctca

SEQ ID NO: 130375 - DNA, 17 bp, synthetic construct
  source 1..17: mol_type = other DNA
gacttcggccacctcag

SEQ ID NO: 130376 - DNA, 17 bp, synthetic construct
  source 1..17: mol_type = other DNA
acttcggccacctcagg

SEQ ID NO: 130377 - DNA, 17 bp, synthetic construct
  source 1..17: mol_type = other DNA
cttcggccacctcaggc

SEQ ID NO: 130378 - DNA, 17 bp, synthetic construct
  source 1..17: mol_type = other DNA
ttcggccacctcaggca

SEQ ID NO: 130379 - DNA, 17 bp, synthetic construct
  source 1..17: mol_type = other DNA
tcggccacctcaggcac

SEQ ID NO: 130380 - DNA, 17 bp, synthetic construct
  source 1..17: mol_type = other DNA
cggccacctcaggcacc

SEQ ID NO: 130381 - DNA, 17 bp, synthetic construct
  source 1..17: mol_type = other DNA
ggccacctcaggcacct

SEQ ID NO: 130382 - DNA, 17 bp, synthetic construct
  source 1..17: mol_type = other DNA
gccacctcaggcacctt

SEQ ID NO: 130383 - DNA, 17 bp, synthetic construct
  source 1..17: mol_type = other DNA
ccacctcaggcaccttg

SEQ ID NO: 130384 - DNA, 17 bp, synthetic construct
  source 1..17: mol_type = other DNA
cacctcaggcaccttgg

SEQ ID NO: 130385 - DNA, 17 bp, synthetic construct
  source 1..17: mol_type = other DNA
acctcaggcaccttggg

SEQ ID NO: 130386 - DNA, 17 bp, synthetic construct
  source 1..17: mol_type = other DNA
cctcaggcaccttgggc

SEQ ID NO: 130387 - DNA, 17 bp, synthetic construct
  source 1..17: mol_type = other DNA
ctcaggcaccttgggca

SEQ ID NO: 130388 - DNA, 17 bp, synthetic construct
  source 1..17: mol_type = other DNA
tcaggcaccttgggcac

SEQ ID NO: 130389 - DNA, 17 bp, synthetic construct
  source 1..17: mol_type = other DNA
caggcaccttgggcacc

SEQ ID NO: 130390 - DNA, 17 bp, synthetic construct
  source 1..17: mol_type = other DNA
aggcaccttgggcacca

SEQ ID NO: 130391 - DNA, 17 bp, synthetic construct
  source 1..17: mol_type = other DNA
ggcaccttgggcaccac

SEQ ID NO: 130392 - DNA, 17 bp, synthetic construct
  source 1..17: mol_type = other DNA
gcaccttgggcaccacc

SEQ ID NO: 130393 - DNA, 17 bp, synthetic construct
  source 1..17: mol_type = other DNA
caccttgggcaccaccc

SEQ ID NO: 130394 - DNA, 17 bp, synthetic construct
  source 1..17: mol_type = other DNA
accttgggcaccaccca

SEQ ID NO: 130395 - DNA, 17 bp, synthetic construct
  source 1..17: mol_type = other DNA
ccttgggcaccacccac

SEQ ID NO: 130396 - DNA, 17 bp, synthetic construct
  source 1..17: mol_type = other DNA
cttgggcaccacccaca

SEQ ID NO: 130397 - DNA, 17 bp, synthetic construct
  source 1..17: mol_type = other DNA
ttgggcaccacccacat

SEQ ID NO: 130398 - DNA, 17 bp, synthetic construct
  source 1..17: mol_type = other DNA
tgggcaccacccacatc

SEQ ID NO: 130399 - DNA, 17 bp, synthetic construct
  source 1..17: mol_type = other DNA
gggcaccacccacatca

SEQ ID NO: 130400 - DNA, 17 bp, synthetic construct
  source 1..17: mol_type = other DNA
ggcaccacccacatcac

SEQ ID NO: 130401 - DNA, 17 bp, synthetic construct
  source 1..17: mol_type = other DNA
gcaccacccacatcaca

SEQ ID NO: 130402 - DNA, 17 bp, synthetic construct
  source 1..17: mol_type = other DNA
caccacccacatcacag

SEQ ID NO: 130403 - DNA, 17 bp, synthetic construct
  source 1..17: mol_type = other DNA
accacccacatcacaga

SEQ ID NO: 130404 - DNA, 17 bp, synthetic construct
  source 1..17: mol_type = other DNA
ccacccacatcacagag

SEQ ID NO: 130405 - DNA, 17 bp, synthetic construct
  source 1..17: mol_type = other DNA
cacccacatcacagagc

SEQ ID NO: 130406 - DNA, 17 bp, synthetic construct
  source 1..17: mol_type = other DNA
acccacatcacagagcc

SEQ ID NO: 130407 - DNA, 17 bp, synthetic construct
  source 1..17: mol_type = other DNA
cccacatcacagagcct

SEQ ID NO: 130408 - DNA, 17 bp, synthetic construct
  source 1..17: mol_type = other DNA
ccacatcacagagcctt

SEQ ID NO: 130409 - DNA, 17 bp, synthetic construct
  source 1..17: mol_type = other DNA
cacatcacagagccttc

SEQ ID NO: 130410 - DNA, 17 bp, synthetic construct
  source 1..17: mol_type = other DNA
acatcacagagccttcc

SEQ ID NO: 130411 - DNA, 17 bp, synthetic construct
  source 1..17: mol_type = other DNA
catcacagagccttcca

SEQ ID NO: 130412 - DNA, 17 bp, synthetic construct
  source 1..17: mol_type = other DNA
atcacagagccttccac

SEQ ID NO: 130413 - DNA, 17 bp, synthetic construct
  source 1..17: mol_type = other DNA
tcacagagccttccacg

SEQ ID NO: 130414 - DNA, 17 bp, synthetic construct
  source 1..17: mol_type = other DNA
cacagagccttccacgg

SEQ ID NO: 130415 - DNA, 17 bp, synthetic construct
  source 1..17: mol_type = other DNA
acagagccttccacggg

SEQ ID NO: 130416 - DNA, 17 bp, synthetic construct
  source 1..17: mol_type = other DNA
cagagccttccacgggg

SEQ ID NO: 130417 - DNA, 17 bp, synthetic construct
  source 1..17: mol_type = other DNA
agagccttccacgggga

SEQ ID NO: 130418 - DNA, 17 bp, synthetic construct
  source 1..17: mol_type = other DNA
gagccttccacggggac

SEQ ID NO: 130419 - DNA, 17 bp, synthetic construct
  source 1..17: mol_type = other DNA
agccttccacggggact

SEQ ID NO: 130420 - DNA, 17 bp, synthetic construct
  source 1..17: mol_type = other DNA
gccttccacggggactt

SEQ ID NO: 130421 - DNA, 17 bp, synthetic construct
  source 1..17: mol_type = other DNA
ccttccacggggacttc

SEQ ID NO: 130422 - DNA, 17 bp, synthetic construct
  source 1..17: mol_type = other DNA
cttccacggggacttcc

SEQ ID NO: 130423 - DNA, 17 bp, synthetic construct
  source 1..17: mol_type = other DNA
ttccacggggacttccc

SEQ ID NO: 130424 - DNA, 17 bp, synthetic construct
  source 1..17: mol_type = other DNA
tccacggggacttccca

SEQ ID NO: 130425 - DNA, 17 bp, synthetic construct
  source 1..17: mol_type = other DNA
ccacggggacttcccac

SEQ ID NO: 130426 - DNA, 17 bp, synthetic construct
  source 1..17: mol_type = other DNA
cacggggacttcccaca

SEQ ID NO: 130427 - DNA, 17 bp, synthetic construct
  source 1..17: mol_type = other DNA
acggggacttcccacac

SEQ ID NO: 130428 - DNA, 17 bp, synthetic construct
  source 1..17: mol_type = other DNA
cggggacttcccacacc

SEQ ID NO: 130429 - DNA, 17 bp, synthetic construct
  source 1..17: mol_type = other DNA
ggggacttcccacaccc

SEQ ID NO: 130430 - DNA, 17 bp, synthetic construct
  source 1..17: mol_type = other DNA
gggacttcccacacccc

SEQ ID NO: 130431 - DNA, 17 bp, synthetic construct
  source 1..17: mol_type = other DNA
ggacttcccacacccca

SEQ ID NO: 130432 - DNA, 17 bp, synthetic construct
  source 1..17: mol_type = other DNA
gacttcccacaccccag

SEQ ID NO: 130433 - DNA, 17 bp, synthetic construct
  source 1..17: mol_type = other DNA
acttcccacaccccagc

SEQ ID NO: 130434 - DNA, 17 bp, synthetic construct
  source 1..17: mol_type = other DNA
cttcccacaccccagca

SEQ ID NO: 130435 - DNA, 17 bp, synthetic construct
  source 1..17: mol_type = other DNA
ttcccacaccccagcag

SEQ ID NO: 130436 - DNA, 17 bp, synthetic construct
  source 1..17: mol_type = other DNA
tcccacaccccagcagc

SEQ ID NO: 130437 - DNA, 17 bp, synthetic construct
  source 1..17: mol_type = other DNA
cccacaccccagcagca

SEQ ID NO: 130438 - DNA, 17 bp, synthetic construct
  source 1..17: mol_type = other DNA
ccacaccccagcagcaa

SEQ ID NO: 130439 - DNA, 17 bp, synthetic construct
  source 1..17: mol_type = other DNA
cacaccccagcagcaac

SEQ ID NO: 130440 - DNA, 17 bp, synthetic construct
  source 1..17: mol_type = other DNA
acaccccagcagcaacc

SEQ ID NO: 130441 - DNA, 17 bp, synthetic construct
  source 1..17: mol_type = other DNA
caccccagcagcaacca

SEQ ID NO: 130442 - DNA, 17 bp, synthetic construct
  source 1..17: mol_type = other DNA
accccagcagcaaccac

SEQ ID NO: 130443 - DNA, 17 bp, synthetic construct
  source 1..17: mol_type = other DNA
ccccagcagcaaccacc

SEQ ID NO: 130444 - DNA, 17 bp, synthetic construct
  source 1..17: mol_type = other DNA
cccagcagcaaccaccg

SEQ ID NO: 130445 - DNA, 17 bp, synthetic construct
  source 1..17: mol_type = other DNA
ccagcagcaaccaccgg

SEQ ID NO: 130446 - DNA, 17 bp, synthetic construct
  source 1..17: mol_type = other DNA
cagcagcaaccaccggt

SEQ ID NO: 130447 - DNA, 17 bp, synthetic construct
  source 1..17: mol_type = other DNA
agcagcaaccaccggta

SEQ ID NO: 130448 - DNA, 17 bp, synthetic construct
  source 1..17: mol_type = other DNA
gcagcaaccaccggtac

SEQ ID NO: 130449 - DNA, 17 bp, synthetic construct
  source 1..17: mol_type = other DNA
cagcaaccaccggtacc

SEQ ID NO: 130450 - DNA, 17 bp, synthetic construct
  source 1..17: mol_type = other DNA
agcaaccaccggtacca

SEQ ID NO: 130451 - DNA, 17 bp, synthetic construct
  source 1..17: mol_type = other DNA
gcaaccaccggtaccac

SEQ ID NO: 130452 - DNA, 17 bp, synthetic construct
  source 1..17: mol_type = other DNA
caaccaccggtaccacc

SEQ ID NO: 130453 - DNA, 17 bp, synthetic construct
  source 1..17: mol_type = other DNA
aaccaccggtaccaccc

SEQ ID NO: 130454 - DNA, 17 bp, synthetic construct
  source 1..17: mol_type = other DNA
accaccggtaccaccca

SEQ ID NO: 130455 - DNA, 17 bp, synthetic construct
  source 1..17: mol_type = other DNA
ccaccggtaccacccag

SEQ ID NO: 130456 - DNA, 17 bp, synthetic construct
  source 1..17: mol_type = other DNA
caccggtaccacccagc

SEQ ID NO: 130457 - DNA, 17 bp, synthetic construct
  source 1..17: mol_type = other DNA
accggtaccacccagca

SEQ ID NO: 130458 - DNA, 17 bp, synthetic construct
  source 1..17: mol_type = other DNA
ccggtaccacccagcac

SEQ ID NO: 130459 - DNA, 17 bp, synthetic construct
  source 1..17: mol_type = other DNA
cggtaccacccagcact

SEQ ID NO: 130460 - DNA, 17 bp, synthetic construct
  source 1..17: mol_type = other DNA
ggtaccacccagcactc

SEQ ID NO: 130461 - DNA, 17 bp, synthetic construct
  source 1..17: mol_type = other DNA
gtaccacccagcactcg

SEQ ID NO: 130462 - DNA, 17 bp, synthetic construct
  source 1..17: mol_type = other DNA
taccacccagcactcga

SEQ ID NO: 130463 - DNA, 17 bp, synthetic construct
  source 1..17: mol_type = other DNA
accacccagcactcgac

SEQ ID NO: 130464 - DNA, 17 bp, synthetic construct
  source 1..17: mol_type = other DNA
ccacccagcactcgact

SEQ ID NO: 130465 - DNA, 17 bp, synthetic construct
  source 1..17: mol_type = other DNA
cacccagcactcgactc

SEQ ID NO: 130466 - DNA, 17 bp, synthetic construct
  source 1..17: mol_type = other DNA
acccagcactcgactcc

SEQ ID NO: 130467 - DNA, 17 bp, synthetic construct
  source 1..17: mol_type = other DNA
cccagcactcgactcca

SEQ ID NO: 130468 - DNA, 17 bp, synthetic construct
  source 1..17: mol_type = other DNA
ccagcactcgactccag

SEQ ID NO: 130469 - DNA, 17 bp, synthetic construct
  source 1..17: mol_type = other DNA
cagcactcgactccagc

SEQ ID NO: 130470 - DNA, 17 bp, synthetic construct
  source 1..17: mol_type = other DNA
agcactcgactccagcc

SEQ ID NO: 130471 - DNA, 17 bp, synthetic construct
  source 1..17: mol_type = other DNA
gcactcgactccagccc

SEQ ID NO: 130472 - DNA, 17 bp, synthetic construct
  source 1..17: mol_type = other DNA
cactcgactccagccct

SEQ ID NO: 130473 - DNA, 17 bp, synthetic construct
  source 1..17: mol_type = other DNA
actcgactccagccctg

SEQ ID NO: 130474 - DNA, 17 bp, synthetic construct
  source 1..17: mol_type = other DNA
ctcgactccagccctgt

SEQ ID NO: 130475 - DNA, 17 bp, synthetic construct
  source 1..17: mol_type = other DNA
tcgactccagccctgtc

SEQ ID NO: 130476 - DNA, 17 bp, synthetic construct
  source 1..17: mol_type = other DNA
cgactccagccctgtcc

SEQ ID NO: 130477 - DNA, 17 bp, synthetic construct
  source 1..17: mol_type = other DNA
gactccagccctgtcca

SEQ ID NO: 130478 - DNA, 17 bp, synthetic construct
  source 1..17: mol_type = other DNA
actccagccctgtccag

SEQ ID NO: 130479 - DNA, 17 bp, synthetic construct
  source 1..17: mol_type = other DNA
ctccagccctgtccagc

SEQ ID NO: 130480 - DNA, 17 bp, synthetic construct
  source 1..17: mol_type = other DNA
tccagccctgtccagcc

SEQ ID NO: 130481 - DNA, 17 bp, synthetic construct
  source 1..17: mol_type = other DNA
ccagccctgtccagccc

SEQ ID NO: 130482 - DNA, 17 bp, synthetic construct
  source 1..17: mol_type = other DNA
cagccctgtccagccct

SEQ ID NO: 130483 - DNA, 17 bp, synthetic construct
  source 1..17: mol_type = other DNA
agccctgtccagccctc

SEQ ID NO: 130484 - DNA, 17 bp, synthetic construct
  source 1..17: mol_type = other DNA
gccctgtccagccctca

SEQ ID NO: 130485 - DNA, 17 bp, synthetic construct
  source 1..17: mol_type = other DNA
ccctgtccagccctcac

SEQ ID NO: 130486 - DNA, 17 bp, synthetic construct
  source 1..17: mol_type = other DNA
cctgtccagccctcacc

SEQ ID NO: 130487 - DNA, 17 bp, synthetic construct
  source 1..17: mol_type = other DNA
ctgtccagccctcaccc

SEQ ID NO: 130488 - DNA, 17 bp, synthetic construct
  source 1..17: mol_type = other DNA
tgtccagccctcaccct

SEQ ID NO: 130489 - DNA, 17 bp, synthetic construct
  source 1..17: mol_type = other DNA
gtccagccctcacccta

SEQ ID NO: 130490 - DNA, 17 bp, synthetic construct
  source 1..17: mol_type = other DNA
tccagccctcaccctag

SEQ ID NO: 130491 - DNA, 17 bp, synthetic construct
  source 1..17: mol_type = other DNA
ccagccctcaccctagc

SEQ ID NO: 130492 - DNA, 17 bp, synthetic construct
  source 1..17: mol_type = other DNA
cagccctcaccctagca

SEQ ID NO: 130493 - DNA, 17 bp, synthetic construct
  source 1..17: mol_type = other DNA
agccctcaccctagcag

SEQ ID NO: 130494 - DNA, 17 bp, synthetic construct
  source 1..17: mol_type = other DNA
gccctcaccctagcagc

SEQ ID NO: 130495 - DNA, 17 bp, synthetic construct
  source 1..17: mol_type = other DNA
ccctcaccctagcagca

SEQ ID NO: 130496 - DNA, 17 bp, synthetic construct
  source 1..17: mol_type = other DNA
cctcaccctagcagcag

SEQ ID NO: 130497 - DNA, 17 bp, synthetic construct
  source 1..17: mol_type = other DNA
ctcaccctagcagcagg

SEQ ID NO: 130498 - DNA, 17 bp, synthetic construct
  source 1..17: mol_type = other DNA
tcaccctagcagcagga

SEQ ID NO: 130499 - DNA, 17 bp, synthetic construct
  source 1..17: mol_type = other DNA
caccctagcagcaggac

SEQ ID NO: 130500 - DNA, 17 bp, synthetic construct
  source 1..17: mol_type = other DNA
accctagcagcaggacc

SEQ ID NO: 130501 - DNA, 17 bp, synthetic construct
  source 1..17: mol_type = other DNA
ccctagcagcaggacca

SEQ ID NO: 130502 - DNA, 17 bp, synthetic construct
  source 1..17: mol_type = other DNA
cctagcagcaggaccac

SEQ ID NO: 130503 - DNA, 17 bp, synthetic construct
  source 1..17: mol_type = other DNA
ctagcagcaggaccacc

SEQ ID NO: 130504 - DNA, 17 bp, synthetic construct
  source 1..17: mol_type = other DNA
tagcagcaggaccaccg

SEQ ID NO: 130505 - DNA, 17 bp, synthetic construct
  source 1..17: mol_type = other DNA
agcagcaggaccaccga

SEQ ID NO: 130506 - DNA, 17 bp, synthetic construct
  source 1..17: mol_type = other DNA
gcagcaggaccaccgag

SEQ ID NO: 130507 - DNA, 17 bp, synthetic construct
  source 1..17: mol_type = other DNA
cagcaggaccaccgagt

SEQ ID NO: 130508 - DNA, 17 bp, synthetic construct
  source 1..17: mol_type = other DNA
agcaggaccaccgagtc

SEQ ID NO: 130509 - DNA, 17 bp, synthetic construct
  source 1..17: mol_type = other DNA
gcaggaccaccgagtca

SEQ ID NO: 130510 - DNA, 17 bp, synthetic construct
  source 1..17: mol_type = other DNA
caggaccaccgagtcac

SEQ ID NO: 130511 - DNA, 17 bp, synthetic construct
  source 1..17: mol_type = other DNA
aggaccaccgagtcacc

SEQ ID NO: 130512 - DNA, 17 bp, synthetic construct
  source 1..17: mol_type = other DNA
ggaccaccgagtcaccc

SEQ ID NO: 130513 - DNA, 17 bp, synthetic construct
  source 1..17: mol_type = other DNA
gaccaccgagtcacccc

SEQ ID NO: 130514 - DNA, 17 bp, synthetic construct
  source 1..17: mol_type = other DNA
accaccgagtcaccccc

SEQ ID NO: 130515 - DNA, 17 bp, synthetic construct
  source 1..17: mol_type = other DNA
ccaccgagtcaccccct

SEQ ID NO: 130516 - DNA, 17 bp, synthetic construct
  source 1..17: mol_type = other DNA
caccgagtcaccccctt

SEQ ID NO: 130517 - DNA, 17 bp, synthetic construct
  source 1..17: mol_type = other DNA
accgagtcacccccttc

SEQ ID NO: 130518 - DNA, 17 bp, synthetic construct
  source 1..17: mol_type = other DNA
ccgagtcacccccttct

SEQ ID NO: 130519 - DNA, 17 bp, synthetic construct
  source 1..17: mol_type = other DNA
cgagtcacccccttctc

SEQ ID NO: 130520 - DNA, 17 bp, synthetic construct
  source 1..17: mol_type = other DNA
gagtcacccccttctcc

SEQ ID NO: 130521 - DNA, 17 bp, synthetic construct
  source 1..17: mol_type = other DNA
agtcacccccttctcca

SEQ ID NO: 130522 - DNA, 17 bp, synthetic construct
  source 1..17: mol_type = other DNA
gtcacccccttctccag

SEQ ID NO: 130523 - DNA, 17 bp, synthetic construct
  source 1..17: mol_type = other DNA
tcacccccttctccagg

SEQ ID NO: 130524 - DNA, 17 bp, synthetic construct
  source 1..17: mol_type = other DNA
cacccccttctccaggg

SEQ ID NO: 130525 - DNA, 17 bp, synthetic construct
  source 1..17: mol_type = other DNA
acccccttctccaggga

SEQ ID NO: 130526 - DNA, 17 bp, synthetic construct
  source 1..17: mol_type = other DNA
cccccttctccagggac

SEQ ID NO: 130527 - DNA, 17 bp, synthetic construct
  source 1..17: mol_type = other DNA
ccccttctccagggacg

SEQ ID NO: 130528 - DNA, 17 bp, synthetic construct
  source 1..17: mol_type = other DNA
cccttctccagggacga

SEQ ID NO: 130529 - DNA, 17 bp, synthetic construct
  source 1..17: mol_type = other DNA
ccttctccagggacgac

SEQ ID NO: 130530 - DNA, 17 bp, synthetic construct
  source 1..17: mol_type = other DNA
cttctccagggacgacc

SEQ ID NO: 130531 - DNA, 17 bp, synthetic construct
  source 1..17: mol_type = other DNA
ttctccagggacgacca

SEQ ID NO: 130532 - DNA, 17 bp, synthetic construct
  source 1..17: mol_type = other DNA
tctccagggacgaccac

SEQ ID NO: 130533 - DNA, 17 bp, synthetic construct
  source 1..17: mol_type = other DNA
ctccagggacgaccacc

SEQ ID NO: 130534 - DNA, 17 bp, synthetic construct
  source 1..17: mol_type = other DNA
tccagggacgaccaccc

SEQ ID NO: 130535 - DNA, 17 bp, synthetic construct
  source 1..17: mol_type = other DNA
ccagggacgaccacccc

SEQ ID NO: 130536 - DNA, 17 bp, synthetic construct
  source 1..17: mol_type = other DNA
cagggacgaccaccccg

SEQ ID NO: 130537 - DNA, 17 bp, synthetic construct
  source 1..17: mol_type = other DNA
agggacgaccaccccgg

SEQ ID NO: 130538 - DNA, 17 bp, synthetic construct
  source 1..17: mol_type = other DNA
gggacgaccaccccggg

SEQ ID NO: 130539 - DNA, 17 bp, synthetic construct
  source 1..17: mol_type = other DNA
ggacgaccaccccgggc

SEQ ID NO: 130540 - DNA, 17 bp, synthetic construct
  source 1..17: mol_type = other DNA
gacgaccaccccgggcc

SEQ ID NO: 130541 - DNA, 17 bp, synthetic construct
  source 1..17: mol_type = other DNA
acgaccaccccgggcca

SEQ ID NO: 130542 - DNA, 17 bp, synthetic construct
  source 1..17: mol_type = other DNA
cgaccaccccgggccac

SEQ ID NO: 130543 - DNA, 17 bp, synthetic construct
  source 1..17: mol_type = other DNA
gaccaccccgggccaca

SEQ ID NO: 130544 - DNA, 17 bp, synthetic construct
  source 1..17: mol_type = other DNA
accaccccgggccacac

SEQ ID NO: 130545 - DNA, 17 bp, synthetic construct
  source 1..17: mol_type = other DNA
ccaccccgggccacacc

SEQ ID NO: 130546 - DNA, 17 bp, synthetic construct
  source 1..17: mol_type = other DNA
caccccgggccacacca

SEQ ID NO: 130547 - DNA, 17 bp, synthetic construct
  source 1..17: mol_type = other DNA
accccgggccacaccag

SEQ ID NO: 130548 - DNA, 17 bp, synthetic construct
  source 1..17: mol_type = other DNA
ccccgggccacaccagg

SEQ ID NO: 130549 - DNA, 17 bp, synthetic construct
  source 1..17: mol_type = other DNA
cccgggccacaccaggg

SEQ ID NO: 130550 - DNA, 17 bp, synthetic construct
  source 1..17: mol_type = other DNA
ccgggccacaccagggc

SEQ ID NO: 130551 - DNA, 17 bp, synthetic construct
  source 1..17: mol_type = other DNA
cgggccacaccagggcc

SEQ ID NO: 130552 - DNA, 17 bp, synthetic construct
  source 1..17: mol_type = other DNA
gggccacaccagggcca

SEQ ID NO: 130553 - DNA, 17 bp, synthetic construct
  source 1..17: mol_type = other DNA
ggccacaccagggccac

SEQ ID NO: 130554 - DNA, 17 bp, synthetic construct
  source 1..17: mol_type = other DNA
gccacaccagggccacc

SEQ ID NO: 130555 - DNA, 17 bp, synthetic construct
  source 1..17: mol_type = other DNA
ccacaccagggccacct

SEQ ID NO: 130556 - DNA, 17 bp, synthetic construct
  source 1..17: mol_type = other DNA
cacaccagggccacctc

SEQ ID NO: 130557 - DNA, 17 bp, synthetic construct
  source 1..17: mol_type = other DNA
acaccagggccacctcc

SEQ ID NO: 130558 - DNA, 17 bp, synthetic construct
  source 1..17: mol_type = other DNA
caccagggccacctcca

SEQ ID NO: 130559 - DNA, 17 bp, synthetic construct
  source 1..17: mol_type = other DNA
accagggccacctccag

SEQ ID NO: 130560 - DNA, 17 bp, synthetic construct
  source 1..17: mol_type = other DNA
ccagggccacctccagg

SEQ ID NO: 130561 - DNA, 17 bp, synthetic construct
  source 1..17: mol_type = other DNA
cagggccacctccagga

SEQ ID NO: 130562 - DNA, 17 bp, synthetic construct
  source 1..17: mol_type = other DNA
agggccacctccaggac

SEQ ID NO: 130563 - DNA, 17 bp, synthetic construct
  source 1..17: mol_type = other DNA
gggccacctccaggacc

SEQ ID NO: 130564 - DNA, 17 bp, synthetic construct
  source 1..17: mol_type = other DNA
ggccacctccaggacca

SEQ ID NO: 130565 - DNA, 17 bp, synthetic construct
  source 1..17: mol_type = other DNA
gccacctccaggaccac

SEQ ID NO: 130566 - DNA, 17 bp, synthetic construct
  source 1..17: mol_type = other DNA
ccacctccaggaccacg

SEQ ID NO: 130567 - DNA, 17 bp, synthetic construct
  source 1..17: mol_type = other DNA
cacctccaggaccacgg

SEQ ID NO: 130568 - DNA, 17 bp, synthetic construct
  source 1..17: mol_type = other DNA
acctccaggaccacggc

SEQ ID NO: 130569 - DNA, 17 bp, synthetic construct
  source 1..17: mol_type = other DNA
cctccaggaccacggcc

SEQ ID NO: 130570 - DNA, 17 bp, synthetic construct
  source 1..17: mol_type = other DNA
ctccaggaccacggcca

SEQ ID NO: 130571 - DNA, 17 bp, synthetic construct
  source 1..17: mol_type = other DNA
tccaggaccacggccac

SEQ ID NO: 130572 - DNA, 17 bp, synthetic construct
  source 1..17: mol_type = other DNA
ccaggaccacggccacg

SEQ ID NO: 130573 - DNA, 17 bp, synthetic construct
  source 1..17: mol_type = other DNA
caggaccacggccacgg

SEQ ID NO: 130574 - DNA, 17 bp, synthetic construct
  source 1..17: mol_type = other DNA
aggaccacggccacggc

SEQ ID NO: 130575 - DNA, 17 bp, synthetic construct
  source 1..17: mol_type = other DNA
ggaccacggccacggcc

SEQ ID NO: 130576 - DNA, 17 bp, synthetic construct
  source 1..17: mol_type = other DNA
gaccacggccacggcca

SEQ ID NO: 130577 - DNA, 17 bp, synthetic construct
  source 1..17: mol_type = other DNA
accacggccacggccac

SEQ ID NO: 130578 - DNA, 17 bp, synthetic construct
  source 1..17: mol_type = other DNA
ccacggccacggccaca

SEQ ID NO: 130579 - DNA, 17 bp, synthetic construct
  source 1..17: mol_type = other DNA
cacggccacggccacac

SEQ ID NO: 130580 - DNA, 17 bp, synthetic construct
  source 1..17: mol_type = other DNA
acggccacggccacacc

SEQ ID NO: 130581 - DNA, 17 bp, synthetic construct
  source 1..17: mol_type = other DNA
cggccacggccacaccc

SEQ ID NO: 130582 - DNA, 17 bp, synthetic construct
  source 1..17: mol_type = other DNA
ggccacggccacaccca

SEQ ID NO: 130583 - DNA, 17 bp, synthetic construct
  source 1..17: mol_type = other DNA
gccacggccacacccag

SEQ ID NO: 130584 - DNA, 17 bp, synthetic construct
  source 1..17: mol_type = other DNA
ccacggccacacccagc

SEQ ID NO: 130585 - DNA, 17 bp, synthetic construct
  source 1..17: mol_type = other DNA
cacggccacacccagca

SEQ ID NO: 130586 - DNA, 17 bp, synthetic construct
  source 1..17: mol_type = other DNA
acggccacacccagcaa

SEQ ID NO: 130587 - DNA, 17 bp, synthetic construct
  source 1..17: mol_type = other DNA
cggccacacccagcaag

SEQ ID NO: 130588 - DNA, 17 bp, synthetic construct
  source 1..17: mol_type = other DNA
ggccacacccagcaaga

SEQ ID NO: 130589 - DNA, 17 bp, synthetic construct
  source 1..17: mol_type = other DNA
gccacacccagcaagac

SEQ ID NO: 130590 - DNA, 17 bp, synthetic construct
  source 1..17: mol_type = other DNA
ccacacccagcaagacc

SEQ ID NO: 130591 - DNA, 17 bp, synthetic construct
  source 1..17: mol_type = other DNA
cacacccagcaagaccc

SEQ ID NO: 130592 - DNA, 17 bp, synthetic construct
  source 1..17: mol_type = other DNA
acacccagcaagacccg

SEQ ID NO: 130593 - DNA, 17 bp, synthetic construct
  source 1..17: mol_type = other DNA
cacccagcaagacccgc

SEQ ID NO: 130594 - DNA, 17 bp, synthetic construct
  source 1..17: mol_type = other DNA
acccagcaagacccgca

SEQ ID NO: 130595 - DNA, 17 bp, synthetic construct
  source 1..17: mol_type = other DNA
cccagcaagacccgcac

SEQ ID NO: 130596 - DNA, 17 bp, synthetic construct
  source 1..17: mol_type = other DNA
ccagcaagacccgcacc

SEQ ID NO: 130597 - DNA, 17 bp, synthetic construct
  source 1..17: mol_type = other DNA
cagcaagacccgcacct

SEQ ID NO: 130598 - DNA, 17 bp, synthetic construct
  source 1..17: mol_type = other DNA
agcaagacccgcacctc

SEQ ID NO: 130599 - DNA, 17 bp, synthetic construct
  source 1..17: mol_type = other DNA
gcaagacccgcacctcg

SEQ ID NO: 130600 - DNA, 17 bp, synthetic construct
  source 1..17: mol_type = other DNA
caagacccgcacctcga

SEQ ID NO: 130601 - DNA, 17 bp, synthetic construct
  source 1..17: mol_type = other DNA
aagacccgcacctcgac

SEQ ID NO: 130602 - DNA, 17 bp, synthetic construct
  source 1..17: mol_type = other DNA
agacccgcacctcgacc

SEQ ID NO: 130603 - DNA, 17 bp, synthetic construct
  source 1..17: mol_type = other DNA
gacccgcacctcgaccc

SEQ ID NO: 130604 - DNA, 17 bp, synthetic construct
  source 1..17: mol_type = other DNA
acccgcacctcgaccct

SEQ ID NO: 130605 - DNA, 17 bp, synthetic construct
  source 1..17: mol_type = other DNA
cccgcacctcgaccctg

SEQ ID NO: 130606 - DNA, 17 bp, synthetic construct
  source 1..17: mol_type = other DNA
ccgcacctcgaccctgc

SEQ ID NO: 130607 - DNA, 17 bp, synthetic construct
  source 1..17: mol_type = other DNA
cgcacctcgaccctgct

SEQ ID NO: 130608 - DNA, 17 bp, synthetic construct
  source 1..17: mol_type = other DNA
gcacctcgaccctgctg

SEQ ID NO: 130609 - DNA, 17 bp, synthetic construct
  source 1..17: mol_type = other DNA
cacctcgaccctgctgc

SEQ ID NO: 130610 - DNA, 17 bp, synthetic construct
  source 1..17: mol_type = other DNA
acctcgaccctgctgcc

SEQ ID NO: 130611 - DNA, 17 bp, synthetic construct
  source 1..17: mol_type = other DNA
cctcgaccctgctgccc

SEQ ID NO: 130612 - DNA, 17 bp, synthetic construct
  source 1..17: mol_type = other DNA
ctcgaccctgctgccca

SEQ ID NO: 130613 - DNA, 17 bp, synthetic construct
  source 1..17: mol_type = other DNA
tcgaccctgctgcccag

SEQ ID NO: 130614 - DNA, 17 bp, synthetic construct
  source 1..17: mol_type = other DNA
cgaccctgctgcccagc

SEQ ID NO: 130615 - DNA, 17 bp, synthetic construct
  source 1..17: mol_type = other DNA
gaccctgctgcccagca

SEQ ID NO: 130616 - DNA, 17 bp, synthetic construct
  source 1..17: mol_type = other DNA
accctgctgcccagcag

SEQ ID NO: 130617 - DNA, 17 bp, synthetic construct
  source 1..17: mol_type = other DNA
ccctgctgcccagcagc

SEQ ID NO: 130618 - DNA, 17 bp, synthetic construct
  source 1..17: mol_type = other DNA
cctgctgcccagcagcc

SEQ ID NO: 130619 - DNA, 17 bp, synthetic construct
  source 1..17: mol_type = other DNA
ctgctgcccagcagccc

SEQ ID NO: 130620 - DNA, 17 bp, synthetic construct
  source 1..17: mol_type = other DNA
tgctgcccagcagcccc

SEQ ID NO: 130621 - DNA, 17 bp, synthetic construct
  source 1..17: mol_type = other DNA
gctgcccagcagcccca

SEQ ID NO: 130622 - DNA, 17 bp, synthetic construct
  source 1..17: mol_type = other DNA
ctgcccagcagccccac

SEQ ID NO: 130623 - DNA, 17 bp, synthetic construct
  source 1..17: mol_type = other DNA
tgcccagcagccccaca

SEQ ID NO: 130624 - DNA, 17 bp, synthetic construct
  source 1..17: mol_type = other DNA
gcccagcagccccacat

SEQ ID NO: 130625 - DNA, 17 bp, synthetic construct
  source 1..17: mol_type = other DNA
cccagcagccccacatc

SEQ ID NO: 130626 - DNA, 17 bp, synthetic construct
  source 1..17: mol_type = other DNA
ccagcagccccacatcg

SEQ ID NO: 130627 - DNA, 17 bp, synthetic construct
  source 1..17: mol_type = other DNA
cagcagccccacatcgg

SEQ ID NO: 130628 - DNA, 17 bp, synthetic construct
  source 1..17: mol_type = other DNA
agcagccccacatcggc

SEQ ID NO: 130629 - DNA, 17 bp, synthetic construct
  source 1..17: mol_type = other DNA
gcagccccacatcggcc

SEQ ID NO: 130630 - DNA, 17 bp, synthetic construct
  source 1..17: mol_type = other DNA
cagccccacatcggccc

SEQ ID NO: 130631 - DNA, 17 bp, synthetic construct
  source 1..17: mol_type = other DNA
agccccacatcggcccc

SEQ ID NO: 130632 - DNA, 17 bp, synthetic construct
  source 1..17: mol_type = other DNA
gccccacatcggcccca

SEQ ID NO: 130633 - DNA, 17 bp, synthetic construct
  source 1..17: mol_type = other DNA
ccccacatcggccccaa

SEQ ID NO: 130634 - DNA, 17 bp, synthetic construct
  source 1..17: mol_type = other DNA
cccacatcggccccaat

SEQ ID NO: 130635 - DNA, 17 bp, synthetic construct
  source 1..17: mol_type = other DNA
ccacatcggccccaata

SEQ ID NO: 130636 - DNA, 17 bp, synthetic construct
  source 1..17: mol_type = other DNA
cacatcggccccaataa

SEQ ID NO: 130637 - DNA, 17 bp, synthetic construct
  source 1..17: mol_type = other DNA
acatcggccccaataac

SEQ ID NO: 130638 - DNA, 17 bp, synthetic construct
  source 1..17: mol_type = other DNA
catcggccccaataacc

SEQ ID NO: 130639 - DNA, 17 bp, synthetic construct
  source 1..17: mol_type = other DNA
atcggccccaataacca

SEQ ID NO: 130640 - DNA, 17 bp, synthetic construct
  source 1..17: mol_type = other DNA
tcggccccaataaccac

SEQ ID NO: 130641 - DNA, 17 bp, synthetic construct
  source 1..17: mol_type = other DNA
cggccccaataaccacg

SEQ ID NO: 130642 - DNA, 17 bp, synthetic construct
  source 1..17: mol_type = other DNA
ggccccaataaccacgg

SEQ ID NO: 130643 - DNA, 17 bp, synthetic construct
  source 1..17: mol_type = other DNA
gccccaataaccacggt

SEQ ID NO: 130644 - DNA, 17 bp, synthetic construct
  source 1..17: mol_type = other DNA
ccccaataaccacggtg

SEQ ID NO: 130645 - DNA, 17 bp, synthetic construct
  source 1..17: mol_type = other DNA
cccaataaccacggtgg

SEQ ID NO: 130646 - DNA, 17 bp, synthetic construct
  source 1..17: mol_type = other DNA
ccaataaccacggtggt

SEQ ID NO: 130647 - DNA, 17 bp, synthetic construct
  source 1..17: mol_type = other DNA
caataaccacggtggtg

SEQ ID NO: 130648 - DNA, 17 bp, synthetic construct
  source 1..17: mol_type = other DNA
aataaccacggtggtga

SEQ ID NO: 130649 - DNA, 17 bp, synthetic construct
  source 1..17: mol_type = other DNA
ataaccacggtggtgac

SEQ ID NO: 130650 - DNA, 17 bp, synthetic construct
  source 1..17: mol_type = other DNA
taaccacggtggtgacc

SEQ ID NO: 130651 - DNA, 17 bp, synthetic construct
  source 1..17: mol_type = other DNA
aaccacggtggtgacca

SEQ ID NO: 130652 - DNA, 17 bp, synthetic construct
  source 1..17: mol_type = other DNA
accacggtggtgaccat

SEQ ID NO: 130653 - DNA, 17 bp, synthetic construct
  source 1..17: mol_type = other DNA
ccacggtggtgaccatg

SEQ ID NO: 130654 - DNA, 17 bp, synthetic construct
  source 1..17: mol_type = other DNA
cacggtggtgaccatgg

SEQ ID NO: 130655 - DNA, 17 bp, synthetic construct
  source 1..17: mol_type = other DNA
acggtggtgaccatggg

SEQ ID NO: 130656 - DNA, 17 bp, synthetic construct
  source 1..17: mol_type = other DNA
cggtggtgaccatgggc

SEQ ID NO: 130657 - DNA, 17 bp, synthetic construct
  source 1..17: mol_type = other DNA
ggtggtgaccatgggct

SEQ ID NO: 130658 - DNA, 17 bp, synthetic construct
  source 1..17: mol_type = other DNA
gtggtgaccatgggctg

SEQ ID NO: 130659 - DNA, 17 bp, synthetic construct
  source 1..17: mol_type = other DNA
tggtgaccatgggctgt

SEQ ID NO: 130660 - DNA, 17 bp, synthetic construct
  source 1..17: mol_type = other DNA
ggtgaccatgggctgtg

SEQ ID NO: 130661 - DNA, 17 bp, synthetic construct
  source 1..17: mol_type = other DNA
gtgaccatgggctgtga

SEQ ID NO: 130662 - DNA, 17 bp, synthetic construct
  source 1..17: mol_type = other DNA
tgaccatgggctgtgag

SEQ ID NO: 130663 - DNA, 17 bp, synthetic construct
  source 1..17: mol_type = other DNA
gaccatgggctgtgagc

SEQ ID NO: 130664 - DNA, 17 bp, synthetic construct
  source 1..17: mol_type = other DNA
accatgggctgtgagcc

SEQ ID NO: 130665 - DNA, 17 bp, synthetic construct
  source 1..17: mol_type = other DNA
ccatgggctgtgagccc

SEQ ID NO: 130666 - DNA, 17 bp, synthetic construct
  source 1..17: mol_type = other DNA
catgggctgtgagcccc

SEQ ID NO: 130667 - DNA, 17 bp, synthetic construct
  source 1..17: mol_type = other DNA
atgggctgtgagcccca

SEQ ID NO: 130668 - DNA, 17 bp, synthetic construct
  source 1..17: mol_type = other DNA
tgggctgtgagccccag

SEQ ID NO: 130669 - DNA, 17 bp, synthetic construct
  source 1..17: mol_type = other DNA
gggctgtgagccccagt

SEQ ID NO: 130670 - DNA, 17 bp, synthetic construct
  source 1..17: mol_type = other DNA
ggctgtgagccccagtg

SEQ ID NO: 130671 - DNA, 17 bp, synthetic construct
  source 1..17: mol_type = other DNA
gctgtgagccccagtgt

SEQ ID NO: 130672 - DNA, 17 bp, synthetic construct
  source 1..17: mol_type = other DNA
ctgtgagccccagtgtg

SEQ ID NO: 130673 - DNA, 17 bp, synthetic construct
  source 1..17: mol_type = other DNA
tgtgagccccagtgtgc

SEQ ID NO: 130674 - DNA, 17 bp, synthetic construct
  source 1..17: mol_type = other DNA
gtgagccccagtgtgcc

SEQ ID NO: 130675 - DNA, 17 bp, synthetic construct
  source 1..17: mol_type = other DNA
tgagccccagtgtgcct

SEQ ID NO: 130676 - DNA, 17 bp, synthetic construct
  source 1..17: mol_type = other DNA
gagccccagtgtgcctg

SEQ ID NO: 130677 - DNA, 17 bp, synthetic construct
  source 1..17: mol_type = other DNA
agccccagtgtgcctgg

SEQ ID NO: 130678 - DNA, 17 bp, synthetic construct
  source 1..17: mol_type = other DNA
gccccagtgtgcctggt

SEQ ID NO: 130679 - DNA, 17 bp, synthetic construct
  source 1..17: mol_type = other DNA
ccccagtgtgcctggtc

SEQ ID NO: 130680 - DNA, 17 bp, synthetic construct
  source 1..17: mol_type = other DNA
cccagtgtgcctggtca

SEQ ID NO: 130681 - DNA, 17 bp, synthetic construct
  source 1..17: mol_type = other DNA
ccagtgtgcctggtcag

SEQ ID NO: 130682 - DNA, 17 bp, synthetic construct
  source 1..17: mol_type = other DNA
cagtgtgcctggtcaga

SEQ ID NO: 130683 - DNA, 17 bp, synthetic construct
  source 1..17: mol_type = other DNA
agtgtgcctggtcagag

SEQ ID NO: 130684 - DNA, 17 bp, synthetic construct
  source 1..17: mol_type = other DNA
gtgtgcctggtcagagt

SEQ ID NO: 130685 - DNA, 17 bp, synthetic construct
  source 1..17: mol_type = other DNA
tgtgcctggtcagagtg

SEQ ID NO: 130686 - DNA, 17 bp, synthetic construct
  source 1..17: mol_type = other DNA
gtgcctggtcagagtgg

SEQ ID NO: 130687 - DNA, 17 bp, synthetic construct
  source 1..17: mol_type = other DNA
tgcctggtcagagtggc

SEQ ID NO: 130688 - DNA, 17 bp, synthetic construct
  source 1..17: mol_type = other DNA
gcctggtcagagtggct

SEQ ID NO: 130689 - DNA, 17 bp, synthetic construct
  source 1..17: mol_type = other DNA
cctggtcagagtggctg

SEQ ID NO: 130690 - DNA, 17 bp, synthetic construct
  source 1..17: mol_type = other DNA
ctggtcagagtggctgg

SEQ ID NO: 130691 - DNA, 17 bp, synthetic construct
  source 1..17: mol_type = other DNA
tggtcagagtggctgga

SEQ ID NO: 130692 - DNA, 17 bp, synthetic construct
  source 1..17: mol_type = other DNA
ggtcagagtggctggac

SEQ ID NO: 130693 - DNA, 17 bp, synthetic construct
  source 1..17: mol_type = other DNA
gtcagagtggctggact

SEQ ID NO: 130694 - DNA, 17 bp, synthetic construct
  source 1..17: mol_type = other DNA
tcagagtggctggacta

SEQ ID NO: 130695 - DNA, 17 bp, synthetic construct
  source 1..17: mol_type = other DNA
cagagtggctggactac

SEQ ID NO: 130696 - DNA, 17 bp, synthetic construct
  source 1..17: mol_type = other DNA
agagtggctggactaca

SEQ ID NO: 130697 - DNA, 17 bp, synthetic construct
  source 1..17: mol_type = other DNA
gagtggctggactacag

SEQ ID NO: 130698 - DNA, 17 bp, synthetic construct
  source 1..17: mol_type = other DNA
agtggctggactacagc

SEQ ID NO: 130699 - DNA, 17 bp, synthetic construct
  source 1..17: mol_type = other DNA
gtggctggactacagct

SEQ ID NO: 130700 - DNA, 17 bp, synthetic construct
  source 1..17: mol_type = other DNA
tggctggactacagcta

SEQ ID NO: 130701 - DNA, 17 bp, synthetic construct
  source 1..17: mol_type = other DNA
ggctggactacagctac

SEQ ID NO: 130702 - DNA, 17 bp, synthetic construct
  source 1..17: mol_type = other DNA
gctggactacagctacc

SEQ ID NO: 130703 - DNA, 17 bp, synthetic construct
  source 1..17: mol_type = other DNA
ctggactacagctaccc

SEQ ID NO: 130704 - DNA, 17 bp, synthetic construct
  source 1..17: mol_type = other DNA
tggactacagctacccc

SEQ ID NO: 130705 - DNA, 17 bp, synthetic construct
  source 1..17: mol_type = other DNA
ggactacagctacccca

SEQ ID NO: 130706 - DNA, 17 bp, synthetic construct
  source 1..17: mol_type = other DNA
gactacagctaccccat

SEQ ID NO: 130707 - DNA, 17 bp, synthetic construct
  source 1..17: mol_type = other DNA
actacagctaccccatg

SEQ ID NO: 130708 - DNA, 17 bp, synthetic construct
  source 1..17: mol_type = other DNA
ctacagctaccccatgc

SEQ ID NO: 130709 - DNA, 17 bp, synthetic construct
  source 1..17: mol_type = other DNA
tacagctaccccatgcc

SEQ ID NO: 130710 - DNA, 17 bp, synthetic construct
  source 1..17: mol_type = other DNA
acagctaccccatgccg

SEQ ID NO: 130711 - DNA, 17 bp, synthetic construct
  source 1..17: mol_type = other DNA
cagctaccccatgccgg

SEQ ID NO: 130712 - DNA, 17 bp, synthetic construct
  source 1..17: mol_type = other DNA
agctaccccatgccggg

SEQ ID NO: 130713 - DNA, 17 bp, synthetic construct
  source 1..17: mol_type = other DNA
gctaccccatgccgggg

SEQ ID NO: 130714 - DNA, 17 bp, synthetic construct
  source 1..17: mol_type = other DNA
ctaccccatgccggggc

SEQ ID NO: 130715 - DNA, 17 bp, synthetic construct
  source 1..17: mol_type = other DNA
taccccatgccggggcc

SEQ ID NO: 130716 - DNA, 17 bp, synthetic construct
  source 1..17: mol_type = other DNA
accccatgccggggccc

SEQ ID NO: 130717 - DNA, 17 bp, synthetic construct
  source 1..17: mol_type = other DNA
ccccatgccggggccct

SEQ ID NO: 130718 - DNA, 17 bp, synthetic construct
  source 1..17: mol_type = other DNA
cccatgccggggccctc

SEQ ID NO: 130719 - DNA, 17 bp, synthetic construct
  source 1..17: mol_type = other DNA
ccatgccggggccctct

SEQ ID NO: 130720 - DNA, 17 bp, synthetic construct
  source 1..17: mol_type = other DNA
catgccggggccctctg

SEQ ID NO: 130721 - DNA, 17 bp, synthetic construct
  source 1..17: mol_type = other DNA
atgccggggccctctgg

SEQ ID NO: 130722 - DNA, 17 bp, synthetic construct
  source 1..17: mol_type = other DNA
tgccggggccctctggc

SEQ ID NO: 130723 - DNA, 17 bp, synthetic construct
  source 1..17: mol_type = other DNA
gccggggccctctggcg

SEQ ID NO: 130724 - DNA, 17 bp, synthetic construct
  source 1..17: mol_type = other DNA
ccggggccctctggcgg

SEQ ID NO: 130725 - DNA, 17 bp, synthetic construct
  source 1..17: mol_type = other DNA
cggggccctctggcggg

SEQ ID NO: 130726 - DNA, 17 bp, synthetic construct
  source 1..17: mol_type = other DNA
ggggccctctggcgggg

SEQ ID NO: 130727 - DNA, 17 bp, synthetic construct
  source 1..17: mol_type = other DNA
gggccctctggcgggga

SEQ ID NO: 130728 - DNA, 17 bp, synthetic construct
  source 1..17: mol_type = other DNA
ggccctctggcggggac

SEQ ID NO: 130729 - DNA, 17 bp, synthetic construct
  source 1..17: mol_type = other DNA
gccctctggcggggact

SEQ ID NO: 130730 - DNA, 17 bp, synthetic construct
  source 1..17: mol_type = other DNA
ccctctggcggggactt

SEQ ID NO: 130731 - DNA, 17 bp, synthetic construct
  source 1..17: mol_type = other DNA
cctctggcggggacttt

SEQ ID NO: 130732 - DNA, 17 bp, synthetic construct
  source 1..17: mol_type = other DNA
ctctggcggggactttg

SEQ ID NO: 130733 - DNA, 17 bp, synthetic construct
  source 1..17: mol_type = other DNA
tctggcggggactttga

SEQ ID NO: 130734 - DNA, 17 bp, synthetic construct
  source 1..17: mol_type = other DNA
ctggcggggactttgac

SEQ ID NO: 130735 - DNA, 17 bp, synthetic construct
  source 1..17: mol_type = other DNA
tggcggggactttgaca

SEQ ID NO: 130736 - DNA, 17 bp, synthetic construct
  source 1..17: mol_type = other DNA
ggcggggactttgacac

SEQ ID NO: 130737 - DNA, 17 bp, synthetic construct
  source 1..17: mol_type = other DNA
gcggggactttgacacc

SEQ ID NO: 130738 - DNA, 17 bp, synthetic construct
  source 1..17: mol_type = other DNA
cggggactttgacacct

SEQ ID NO: 130739 - DNA, 17 bp, synthetic construct
  source 1..17: mol_type = other DNA
ggggactttgacaccta

SEQ ID NO: 130740 - DNA, 17 bp, synthetic construct
  source 1..17: mol_type = other DNA
gggactttgacacctac

SEQ ID NO: 130741 - DNA, 17 bp, synthetic construct
  source 1..17: mol_type = other DNA
ggactttgacacctact

SEQ ID NO: 130742 - DNA, 17 bp, synthetic construct
  source 1..17: mol_type = other DNA
gactttgacacctactc

SEQ ID NO: 130743 - DNA, 17 bp, synthetic construct
  source 1..17: mol_type = other DNA
actttgacacctactcc

SEQ ID NO: 130744 - DNA, 17 bp, synthetic construct
  source 1..17: mol_type = other DNA
ctttgacacctactcca

SEQ ID NO: 130745 - DNA, 17 bp, synthetic construct
  source 1..17: mol_type = other DNA
tttgacacctactccaa

SEQ ID NO: 130746 - DNA, 17 bp, synthetic construct
  source 1..17: mol_type = other DNA
ttgacacctactccaac

SEQ ID NO: 130747 - DNA, 17 bp, synthetic construct
  source 1..17: mol_type = other DNA
tgacacctactccaaca

SEQ ID NO: 130748 - DNA, 17 bp, synthetic construct
  source 1..17: mol_type = other DNA
gacacctactccaacat

SEQ ID NO: 130749 - DNA, 17 bp, synthetic construct
  source 1..17: mol_type = other DNA
acacctactccaacatc

SEQ ID NO: 130750 - DNA, 17 bp, synthetic construct
  source 1..17: mol_type = other DNA
cacctactccaacatcc

SEQ ID NO: 130751 - DNA, 17 bp, synthetic construct
  source 1..17: mol_type = other DNA
acctactccaacatccg

SEQ ID NO: 130752 - DNA, 17 bp, synthetic construct
  source 1..17: mol_type = other DNA
cctactccaacatccgt

SEQ ID NO: 130753 - DNA, 17 bp, synthetic construct
  source 1..17: mol_type = other DNA
ctactccaacatccgtg

SEQ ID NO: 130754 - DNA, 17 bp, synthetic construct
  source 1..17: mol_type = other DNA
tactccaacatccgtgc

SEQ ID NO: 130755 - DNA, 17 bp, synthetic construct
  source 1..17: mol_type = other DNA
actccaacatccgtgcg

SEQ ID NO: 130756 - DNA, 17 bp, synthetic construct
  source 1..17: mol_type = other DNA
ctccaacatccgtgcgg

SEQ ID NO: 130757 - DNA, 17 bp, synthetic construct
  source 1..17: mol_type = other DNA
tccaacatccgtgcggc

SEQ ID NO: 130758 - DNA, 17 bp, synthetic construct
  source 1..17: mol_type = other DNA
ccaacatccgtgcggcc

SEQ ID NO: 130759 - DNA, 17 bp, synthetic construct
  source 1..17: mol_type = other DNA
caacatccgtgcggccg

SEQ ID NO: 130760 - DNA, 17 bp, synthetic construct
  source 1..17: mol_type = other DNA
aacatccgtgcggccgg

SEQ ID NO: 130761 - DNA, 17 bp, synthetic construct
  source 1..17: mol_type = other DNA
acatccgtgcggccgga

SEQ ID NO: 130762 - DNA, 17 bp, synthetic construct
  source 1..17: mol_type = other DNA
catccgtgcggccggag

SEQ ID NO: 130763 - DNA, 17 bp, synthetic construct
  source 1..17: mol_type = other DNA
atccgtgcggccggagg

SEQ ID NO: 130764 - DNA, 17 bp, synthetic construct
  source 1..17: mol_type = other DNA
tccgtgcggccggaggg

SEQ ID NO: 130765 - DNA, 17 bp, synthetic construct
  source 1..17: mol_type = other DNA
ccgtgcggccggagggg

SEQ ID NO: 130766 - DNA, 17 bp, synthetic construct
  source 1..17: mol_type = other DNA
cgtgcggccggaggggc

SEQ ID NO: 130767 - DNA, 17 bp, synthetic construct
  source 1..17: mol_type = other DNA
gtgcggccggaggggcc

SEQ ID NO: 130768 - DNA, 17 bp, synthetic construct
  source 1..17: mol_type = other DNA
tgcggccggaggggccg

SEQ ID NO: 130769 - DNA, 17 bp, synthetic construct
  source 1..17: mol_type = other DNA
gcggccggaggggccgt

SEQ ID NO: 130770 - DNA, 17 bp, synthetic construct
  source 1..17: mol_type = other DNA
cggccggaggggccgtc

SEQ ID NO: 130771 - DNA, 17 bp, synthetic construct
  source 1..17: mol_type = other DNA
ggccggaggggccgtct

SEQ ID NO: 130772 - DNA, 17 bp, synthetic construct
  source 1..17: mol_type = other DNA
gccggaggggccgtctg

SEQ ID NO: 130773 - DNA, 17 bp, synthetic construct
  source 1..17: mol_type = other DNA
ccggaggggccgtctgt

SEQ ID NO: 130774 - DNA, 17 bp, synthetic construct
  source 1..17: mol_type = other DNA
cggaggggccgtctgtg

SEQ ID NO: 130775 - DNA, 17 bp, synthetic construct
  source 1..17: mol_type = other DNA
ggaggggccgtctgtga

SEQ ID NO: 130776 - DNA, 17 bp, synthetic construct
  source 1..17: mol_type = other DNA
gaggggccgtctgtgag

SEQ ID NO: 130777 - DNA, 17 bp, synthetic construct
  source 1..17: mol_type = other DNA
aggggccgtctgtgagc

SEQ ID NO: 130778 - DNA, 17 bp, synthetic construct
  source 1..17: mol_type = other DNA
ggggccgtctgtgagca

SEQ ID NO: 130779 - DNA, 17 bp, synthetic construct
  source 1..17: mol_type = other DNA
gggccgtctgtgagcag

SEQ ID NO: 130780 - DNA, 17 bp, synthetic construct
  source 1..17: mol_type = other DNA
ggccgtctgtgagcagc

SEQ ID NO: 130781 - DNA, 17 bp, synthetic construct
  source 1..17: mol_type = other DNA
gccgtctgtgagcagcc

SEQ ID NO: 130782 - DNA, 17 bp, synthetic construct
  source 1..17: mol_type = other DNA
ccgtctgtgagcagccc

SEQ ID NO: 130783 - DNA, 17 bp, synthetic construct
  source 1..17: mol_type = other DNA
cgtctgtgagcagcccc

SEQ ID NO: 130784 - DNA, 17 bp, synthetic construct
  source 1..17: mol_type = other DNA
gtctgtgagcagcccct

SEQ ID NO: 130785 - DNA, 17 bp, synthetic construct
  source 1..17: mol_type = other DNA
tctgtgagcagcccctg

SEQ ID NO: 130786 - DNA, 17 bp, synthetic construct
  source 1..17: mol_type = other DNA
ctgtgagcagcccctgg

SEQ ID NO: 130787 - DNA, 17 bp, synthetic construct
  source 1..17: mol_type = other DNA
tgtgagcagcccctggg

SEQ ID NO: 130788 - DNA, 17 bp, synthetic construct
  source 1..17: mol_type = other DNA
gtgagcagcccctgggc

SEQ ID NO: 130789 - DNA, 17 bp, synthetic construct
  source 1..17: mol_type = other DNA
tgagcagcccctgggcc

SEQ ID NO: 130790 - DNA, 17 bp, synthetic construct
  source 1..17: mol_type = other DNA
gagcagcccctgggcct

SEQ ID NO: 130791 - DNA, 17 bp, synthetic construct
  source 1..17: mol_type = other DNA
agcagcccctgggcctc

SEQ ID NO: 130792 - DNA, 17 bp, synthetic construct
  source 1..17: mol_type = other DNA
gcagcccctgggcctcg

SEQ ID NO: 130793 - DNA, 17 bp, synthetic construct
  source 1..17: mol_type = other DNA
cagcccctgggcctcga

SEQ ID NO: 130794 - DNA, 17 bp, synthetic construct
  source 1..17: mol_type = other DNA
agcccctgggcctcgag

SEQ ID NO: 130795 - DNA, 17 bp, synthetic construct
  source 1..17: mol_type = other DNA
gcccctgggcctcgagt

SEQ ID NO: 130796 - DNA, 17 bp, synthetic construct
  source 1..17: mol_type = other DNA
cccctgggcctcgagtg

SEQ ID NO: 130797 - DNA, 17 bp, synthetic construct
  source 1..17: mol_type = other DNA
ccctgggcctcgagtgc

SEQ ID NO: 130798 - DNA, 17 bp, synthetic construct
  source 1..17: mol_type = other DNA
cctgggcctcgagtgcc

SEQ ID NO: 130799 - DNA, 17 bp, synthetic construct
  source 1..17: mol_type = other DNA
ctgggcctcgagtgccg

SEQ ID NO: 130800 - DNA, 17 bp, synthetic construct
  source 1..17: mol_type = other DNA
tgggcctcgagtgccgt

SEQ ID NO: 130801 - DNA, 17 bp, synthetic construct
  source 1..17: mol_type = other DNA
gggcctcgagtgccgtg

SEQ ID NO: 130802 - DNA, 17 bp, synthetic construct
  source 1..17: mol_type = other DNA
ggcctcgagtgccgtgc

SEQ ID NO: 130803 - DNA, 17 bp, synthetic construct
  source 1..17: mol_type = other DNA
gcctcgagtgccgtgcc

SEQ ID NO: 130804 - DNA, 17 bp, synthetic construct
  source 1..17: mol_type = other DNA
cctcgagtgccgtgccc

SEQ ID NO: 130805 - DNA, 17 bp, synthetic construct
  source 1..17: mol_type = other DNA
ctcgagtgccgtgccca

SEQ ID NO: 130806 - DNA, 17 bp, synthetic construct
  source 1..17: mol_type = other DNA
tcgagtgccgtgcccag

SEQ ID NO: 130807 - DNA, 17 bp, synthetic construct
  source 1..17: mol_type = other DNA
cgagtgccgtgcccagg

SEQ ID NO: 130808 - DNA, 17 bp, synthetic construct
  source 1..17: mol_type = other DNA
gagtgccgtgcccaggc

SEQ ID NO: 130809 - DNA, 17 bp, synthetic construct
  source 1..17: mol_type = other DNA
agtgccgtgcccaggcc

SEQ ID NO: 130810 - DNA, 17 bp, synthetic construct
  source 1..17: mol_type = other DNA
gtgccgtgcccaggccc

SEQ ID NO: 130811 - DNA, 17 bp, synthetic construct
  source 1..17: mol_type = other DNA
tgccgtgcccaggccca

SEQ ID NO: 130812 - DNA, 17 bp, synthetic construct
  source 1..17: mol_type = other DNA
gccgtgcccaggcccag

SEQ ID NO: 130813 - DNA, 17 bp, synthetic construct
  source 1..17: mol_type = other DNA
ccgtgcccaggcccagc

SEQ ID NO: 130814 - DNA, 17 bp, synthetic construct
  source 1..17: mol_type = other DNA
cgtgcccaggcccagcc

SEQ ID NO: 130815 - DNA, 17 bp, synthetic construct
  source 1..17: mol_type = other DNA
gtgcccaggcccagcct

SEQ ID NO: 130816 - DNA, 17 bp, synthetic construct
  source 1..17: mol_type = other DNA
tgcccaggcccagcctg

SEQ ID NO: 130817 - DNA, 17 bp, synthetic construct
  source 1..17: mol_type = other DNA
gcccaggcccagcctgg

SEQ ID NO: 130818 - DNA, 17 bp, synthetic construct
  source 1..17: mol_type = other DNA
cccaggcccagcctggt

SEQ ID NO: 130819 - DNA, 17 bp, synthetic construct
  source 1..17: mol_type = other DNA
ccaggcccagcctggtg

SEQ ID NO: 130820 - DNA, 17 bp, synthetic construct
  source 1..17: mol_type = other DNA
caggcccagcctggtgt

SEQ ID NO: 130821 - DNA, 17 bp, synthetic construct
  source 1..17: mol_type = other DNA
aggcccagcctggtgtc

SEQ ID NO: 130822 - DNA, 17 bp, synthetic construct
  source 1..17: mol_type = other DNA
ggcccagcctggtgtcc

SEQ ID NO: 130823 - DNA, 17 bp, synthetic construct
  source 1..17: mol_type = other DNA
gcccagcctggtgtccc

SEQ ID NO: 130824 - DNA, 17 bp, synthetic construct
  source 1..17: mol_type = other DNA
cccagcctggtgtcccc

SEQ ID NO: 130825 - DNA, 17 bp, synthetic construct
  source 1..17: mol_type = other DNA
ccagcctggtgtccccc

SEQ ID NO: 130826 - DNA, 17 bp, synthetic construct
  source 1..17: mol_type = other DNA
cagcctggtgtccccct

SEQ ID NO: 130827 - DNA, 17 bp, synthetic construct
  source 1..17: mol_type = other DNA
agcctggtgtccccctg

SEQ ID NO: 130828 - DNA, 17 bp, synthetic construct
  source 1..17: mol_type = other DNA
gcctggtgtccccctgc

SEQ ID NO: 130829 - DNA, 17 bp, synthetic construct
  source 1..17: mol_type = other DNA
cctggtgtccccctgcg

SEQ ID NO: 130830 - DNA, 17 bp, synthetic construct
  source 1..17: mol_type = other DNA
ctggtgtccccctgcgg

SEQ ID NO: 130831 - DNA, 17 bp, synthetic construct
  source 1..17: mol_type = other DNA
tggtgtccccctgcggg

SEQ ID NO: 130832 - DNA, 17 bp, synthetic construct
  source 1..17: mol_type = other DNA
ggtgtccccctgcggga

SEQ ID NO: 130833 - DNA, 17 bp, synthetic construct
  source 1..17: mol_type = other DNA
gtgtccccctgcgggag

SEQ ID NO: 130834 - DNA, 17 bp, synthetic construct
  source 1..17: mol_type = other DNA
tgtccccctgcgggagt

SEQ ID NO: 130835 - DNA, 17 bp, synthetic construct
  source 1..17: mol_type = other DNA
gtccccctgcgggagtt

SEQ ID NO: 130836 - DNA, 17 bp, synthetic construct
  source 1..17: mol_type = other DNA
tccccctgcgggagttg

SEQ ID NO: 130837 - DNA, 17 bp, synthetic construct
  source 1..17: mol_type = other DNA
ccccctgcgggagttgg

SEQ ID NO: 130838 - DNA, 17 bp, synthetic construct
  source 1..17: mol_type = other DNA
cccctgcgggagttggg

SEQ ID NO: 130839 - DNA, 17 bp, synthetic construct
  source 1..17: mol_type = other DNA
ccctgcgggagttgggc

SEQ ID NO: 130840 - DNA, 17 bp, synthetic construct
  source 1..17: mol_type = other DNA
cctgcgggagttgggcc

SEQ ID NO: 130841 - DNA, 17 bp, synthetic construct
  source 1..17: mol_type = other DNA
ctgcgggagttgggcca

SEQ ID NO: 130842 - DNA, 17 bp, synthetic construct
  source 1..17: mol_type = other DNA
tgcgggagttgggccag

SEQ ID NO: 130843 - DNA, 17 bp, synthetic construct
  source 1..17: mol_type = other DNA
gcgggagttgggccagg

SEQ ID NO: 130844 - DNA, 17 bp, synthetic construct
  source 1..17: mol_type = other DNA
cgggagttgggccaggt

SEQ ID NO: 130845 - DNA, 17 bp, synthetic construct
  source 1..17: mol_type = other DNA
gggagttgggccaggtc

SEQ ID NO: 130846 - DNA, 17 bp, synthetic construct
  source 1..17: mol_type = other DNA
ggagttgggccaggtcg

SEQ ID NO: 130847 - DNA, 17 bp, synthetic construct
  source 1..17: mol_type = other DNA
gagttgggccaggtcgt

SEQ ID NO: 130848 - DNA, 17 bp, synthetic construct
  source 1..17: mol_type = other DNA
agttgggccaggtcgtg

SEQ ID NO: 130849 - DNA, 17 bp, synthetic construct
  source 1..17: mol_type = other DNA
gttgggccaggtcgtgg

SEQ ID NO: 130850 - DNA, 17 bp, synthetic construct
  source 1..17: mol_type = other DNA
ttgggccaggtcgtgga

SEQ ID NO: 130851 - DNA, 17 bp, synthetic construct
  source 1..17: mol_type = other DNA
tgggccaggtcgtggaa

SEQ ID NO: 130852 - DNA, 17 bp, synthetic construct
  source 1..17: mol_type = other DNA
gggccaggtcgtggaat

SEQ ID NO: 130853 - DNA, 17 bp, synthetic construct
  source 1..17: mol_type = other DNA
ggccaggtcgtggaatg

SEQ ID NO: 130854 - DNA, 17 bp, synthetic construct
  source 1..17: mol_type = other DNA
gccaggtcgtggaatgc

SEQ ID NO: 130855 - DNA, 17 bp, synthetic construct
  source 1..17: mol_type = other DNA
ccaggtcgtggaatgca

SEQ ID NO: 130856 - DNA, 17 bp, synthetic construct
  source 1..17: mol_type = other DNA
caggtcgtggaatgcag

SEQ ID NO: 130857 - DNA, 17 bp, synthetic construct
  source 1..17: mol_type = other DNA
aggtcgtggaatgcagc

SEQ ID NO: 130858 - DNA, 17 bp, synthetic construct
  source 1..17: mol_type = other DNA
ggtcgtggaatgcagcc

SEQ ID NO: 130859 - DNA, 17 bp, synthetic construct
  source 1..17: mol_type = other DNA
gtcgtggaatgcagcct

SEQ ID NO: 130860 - DNA, 17 bp, synthetic construct
  source 1..17: mol_type = other DNA
tcgtggaatgcagcctg

SEQ ID NO: 130861 - DNA, 17 bp, synthetic construct
  source 1..17: mol_type = other DNA
cgtggaatgcagcctgg

SEQ ID NO: 130862 - DNA, 17 bp, synthetic construct
  source 1..17: mol_type = other DNA
gtggaatgcagcctgga

SEQ ID NO: 130863 - DNA, 17 bp, synthetic construct
  source 1..17: mol_type = other DNA
tggaatgcagcctggac

SEQ ID NO: 130864 - DNA, 17 bp, synthetic construct
  source 1..17: mol_type = other DNA
ggaatgcagcctggact

SEQ ID NO: 130865 - DNA, 17 bp, synthetic construct
  source 1..17: mol_type = other DNA
gaatgcagcctggactt

SEQ ID NO: 130866 - DNA, 17 bp, synthetic construct
  source 1..17: mol_type = other DNA
aatgcagcctggacttt

SEQ ID NO: 130867 - DNA, 17 bp, synthetic construct
  source 1..17: mol_type = other DNA
atgcagcctggactttg

SEQ ID NO: 130868 - DNA, 17 bp, synthetic construct
  source 1..17: mol_type = other DNA
tgcagcctggactttgg

SEQ ID NO: 130869 - DNA, 17 bp, synthetic construct
  source 1..17: mol_type = other DNA
gcagcctggactttggc

SEQ ID NO: 130870 - DNA, 17 bp, synthetic construct
  source 1..17: mol_type = other DNA
cagcctggactttggcc

SEQ ID NO: 130871 - DNA, 17 bp, synthetic construct
  source 1..17: mol_type = other DNA
agcctggactttggcct

SEQ ID NO: 130872 - DNA, 17 bp, synthetic construct
  source 1..17: mol_type = other DNA
gcctggactttggcctg

SEQ ID NO: 130873 - DNA, 17 bp, synthetic construct
  source 1..17: mol_type = other DNA
cctggactttggcctgg

SEQ ID NO: 130874 - DNA, 17 bp, synthetic construct
  source 1..17: mol_type = other DNA
ctggactttggcctggt

SEQ ID NO: 130875 - DNA, 17 bp, synthetic construct
  source 1..17: mol_type = other DNA
tggactttggcctggtc

SEQ ID NO: 130876 - DNA, 17 bp, synthetic construct
  source 1..17: mol_type = other DNA
ggactttggcctggtct

SEQ ID NO: 130877 - DNA, 17 bp, synthetic construct
  source 1..17: mol_type = other DNA
gactttggcctggtctg

SEQ ID NO: 130878 - DNA, 17 bp, synthetic construct
  source 1..17: mol_type = other DNA
actttggcctggtctgc

SEQ ID NO: 130879 - DNA, 17 bp, synthetic construct
  source 1..17: mol_type = other DNA
ctttggcctggtctgca

SEQ ID NO: 130880 - DNA, 17 bp, synthetic construct
  source 1..17: mol_type = other DNA
tttggcctggtctgcag

SEQ ID NO: 130881 - DNA, 17 bp, synthetic construct
  source 1..17: mol_type = other DNA
ttggcctggtctgcagg

SEQ ID NO: 130882 - DNA, 17 bp, synthetic construct
  source 1..17: mol_type = other DNA
tggcctggtctgcagga

SEQ ID NO: 130883 - DNA, 17 bp, synthetic construct
  source 1..17: mol_type = other DNA
ggcctggtctgcaggaa

SEQ ID NO: 130884 - DNA, 17 bp, synthetic construct
  source 1..17: mol_type = other DNA
gcctggtctgcaggaac

SEQ ID NO: 130885 - DNA, 17 bp, synthetic construct
  source 1..17: mol_type = other DNA
cctggtctgcaggaacc

SEQ ID NO: 130886 - DNA, 17 bp, synthetic construct
  source 1..17: mol_type = other DNA
ctggtctgcaggaaccg

SEQ ID NO: 130887 - DNA, 17 bp, synthetic construct
  source 1..17: mol_type = other DNA
tggtctgcaggaaccgt

SEQ ID NO: 130888 - DNA, 17 bp, synthetic construct
  source 1..17: mol_type = other DNA
ggtctgcaggaaccgtg

SEQ ID NO: 130889 - DNA, 17 bp, synthetic construct
  source 1..17: mol_type = other DNA
gtctgcaggaaccgtga

SEQ ID NO: 130890 - DNA, 17 bp, synthetic construct
  source 1..17: mol_type = other DNA
tctgcaggaaccgtgag

SEQ ID NO: 130891 - DNA, 17 bp, synthetic construct
  source 1..17: mol_type = other DNA
ctgcaggaaccgtgagc

SEQ ID NO: 130892 - DNA, 17 bp, synthetic construct
  source 1..17: mol_type = other DNA
tgcaggaaccgtgagca

SEQ ID NO: 130893 - DNA, 17 bp, synthetic construct
  source 1..17: mol_type = other DNA
gcaggaaccgtgagcag

SEQ ID NO: 130894 - DNA, 17 bp, synthetic construct
  source 1..17: mol_type = other DNA
caggaaccgtgagcagg

SEQ ID NO: 130895 - DNA, 17 bp, synthetic construct
  source 1..17: mol_type = other DNA
aggaaccgtgagcaggt

SEQ ID NO: 130896 - DNA, 17 bp, synthetic construct
  source 1..17: mol_type = other DNA
ggaaccgtgagcaggtg

SEQ ID NO: 130897 - DNA, 17 bp, synthetic construct
  source 1..17: mol_type = other DNA
gaaccgtgagcaggtgg

SEQ ID NO: 130898 - DNA, 17 bp, synthetic construct
  source 1..17: mol_type = other DNA
aaccgtgagcaggtggg

SEQ ID NO: 130899 - DNA, 17 bp, synthetic construct
  source 1..17: mol_type = other DNA
accgtgagcaggtgggg

SEQ ID NO: 130900 - DNA, 17 bp, synthetic construct
  source 1..17: mol_type = other DNA
ccgtgagcaggtgggga

SEQ ID NO: 130901 - DNA, 17 bp, synthetic construct
  source 1..17: mol_type = other DNA
cgtgagcaggtggggaa

SEQ ID NO: 130902 - DNA, 17 bp, synthetic construct
  source 1..17: mol_type = other DNA
gtgagcaggtggggaag

SEQ ID NO: 130903 - DNA, 17 bp, synthetic construct
  source 1..17: mol_type = other DNA
tgagcaggtggggaagt

SEQ ID NO: 130904 - DNA, 17 bp, synthetic construct
  source 1..17: mol_type = other DNA
gagcaggtggggaagtt

SEQ ID NO: 130905 - DNA, 17 bp, synthetic construct
  source 1..17: mol_type = other DNA
agcaggtggggaagttc

SEQ ID NO: 130906 - DNA, 17 bp, synthetic construct
  source 1..17: mol_type = other DNA
gcaggtggggaagttca

SEQ ID NO: 130907 - DNA, 17 bp, synthetic construct
  source 1..17: mol_type = other DNA
caggtggggaagttcaa

SEQ ID NO: 130908 - DNA, 17 bp, synthetic construct
  source 1..17: mol_type = other DNA
aggtggggaagttcaag

SEQ ID NO: 130909 - DNA, 17 bp, synthetic construct
  source 1..17: mol_type = other DNA
ggtggggaagttcaaga

SEQ ID NO: 130910 - DNA, 17 bp, synthetic construct
  source 1..17: mol_type = other DNA
gtggggaagttcaagat

SEQ ID NO: 130911 - DNA, 17 bp, synthetic construct
  source 1..17: mol_type = other DNA
tggggaagttcaagatg

SEQ ID NO: 130912 - DNA, 17 bp, synthetic construct
  source 1..17: mol_type = other DNA
ggggaagttcaagatgt

SEQ ID NO: 130913 - DNA, 17 bp, synthetic construct
  source 1..17: mol_type = other DNA
gggaagttcaagatgtg

SEQ ID NO: 130914 - DNA, 17 bp, synthetic construct
  source 1..17: mol_type = other DNA
ggaagttcaagatgtgc

SEQ ID NO: 130915 - DNA, 17 bp, synthetic construct
  source 1..17: mol_type = other DNA
gaagttcaagatgtgct

SEQ ID NO: 130916 - DNA, 17 bp, synthetic construct
  source 1..17: mol_type = other DNA
aagttcaagatgtgctt

SEQ ID NO: 130917 - DNA, 17 bp, synthetic construct
  source 1..17: mol_type = other DNA
agttcaagatgtgcttc

SEQ ID NO: 130918 - DNA, 17 bp, synthetic construct
  source 1..17: mol_type = other DNA
gttcaagatgtgcttca

SEQ ID NO: 130919 - DNA, 17 bp, synthetic construct
  source 1..17: mol_type = other DNA
ttcaagatgtgcttcaa

SEQ ID NO: 130920 - DNA, 17 bp, synthetic construct
  source 1..17: mol_type = other DNA
tcaagatgtgcttcaac

SEQ ID NO: 130921 - DNA, 17 bp, synthetic construct
  source 1..17: mol_type = other DNA
caagatgtgcttcaact

SEQ ID NO: 130922 - DNA, 17 bp, synthetic construct
  source 1..17: mol_type = other DNA
aagatgtgcttcaacta

SEQ ID NO: 130923 - DNA, 17 bp, synthetic construct
  source 1..17: mol_type = other DNA
agatgtgcttcaactat

SEQ ID NO: 130924 - DNA, 17 bp, synthetic construct
  source 1..17: mol_type = other DNA
gatgtgcttcaactatg

SEQ ID NO: 130925 - DNA, 17 bp, synthetic construct
  source 1..17: mol_type = other DNA
atgtgcttcaactatga

SEQ ID NO: 130926 - DNA, 17 bp, synthetic construct
  source 1..17: mol_type = other DNA
tgtgcttcaactatgaa

SEQ ID NO: 130927 - DNA, 17 bp, synthetic construct
  source 1..17: mol_type = other DNA
gtgcttcaactatgaaa

SEQ ID NO: 130928 - DNA, 17 bp, synthetic construct
  source 1..17: mol_type = other DNA
tgcttcaactatgaaat

SEQ ID NO: 130929 - DNA, 17 bp, synthetic construct
  source 1..17: mol_type = other DNA
gcttcaactatgaaatc

SEQ ID NO: 130930 - DNA, 17 bp, synthetic construct
  source 1..17: mol_type = other DNA
cttcaactatgaaatcc

SEQ ID NO: 130931 - DNA, 17 bp, synthetic construct
  source 1..17: mol_type = other DNA
ttcaactatgaaatccg

SEQ ID NO: 130932 - DNA, 17 bp, synthetic construct
  source 1..17: mol_type = other DNA
tcaactatgaaatccgt

SEQ ID NO: 130933 - DNA, 17 bp, synthetic construct
  source 1..17: mol_type = other DNA
caactatgaaatccgtg

SEQ ID NO: 130934 - DNA, 17 bp, synthetic construct
  source 1..17: mol_type = other DNA
aactatgaaatccgtgt

SEQ ID NO: 130935 - DNA, 17 bp, synthetic construct
  source 1..17: mol_type = other DNA
actatgaaatccgtgtg

SEQ ID NO: 130936 - DNA, 17 bp, synthetic construct
  source 1..17: mol_type = other DNA
ctatgaaatccgtgtgt

SEQ ID NO: 130937 - DNA, 17 bp, synthetic construct
  source 1..17: mol_type = other DNA
tatgaaatccgtgtgtt

SEQ ID NO: 130938 - DNA, 17 bp, synthetic construct
  source 1..17: mol_type = other DNA
atgaaatccgtgtgttc

SEQ ID NO: 130939 - DNA, 17 bp, synthetic construct
  source 1..17: mol_type = other DNA
tgaaatccgtgtgttct

SEQ ID NO: 130940 - DNA, 17 bp, synthetic construct
  source 1..17: mol_type = other DNA
gaaatccgtgtgttctg

SEQ ID NO: 130941 - DNA, 17 bp, synthetic construct
  source 1..17: mol_type = other DNA
aaatccgtgtgttctgc

SEQ ID NO: 130942 - DNA, 17 bp, synthetic construct
  source 1..17: mol_type = other DNA
aatccgtgtgttctgct

SEQ ID NO: 130943 - DNA, 17 bp, synthetic construct
  source 1..17: mol_type = other DNA
atccgtgtgttctgctg

SEQ ID NO: 130944 - DNA, 17 bp, synthetic construct
  source 1..17: mol_type = other DNA
tccgtgtgttctgctgc

SEQ ID NO: 130945 - DNA, 17 bp, synthetic construct
  source 1..17: mol_type = other DNA
ccgtgtgttctgctgca

SEQ ID NO: 130946 - DNA, 17 bp, synthetic construct
  source 1..17: mol_type = other DNA
cgtgtgttctgctgcaa

SEQ ID NO: 130947 - DNA, 17 bp, synthetic construct
  source 1..17: mol_type = other DNA
gtgtgttctgctgcaac

SEQ ID NO: 130948 - DNA, 17 bp, synthetic construct
  source 1..17: mol_type = other DNA
tgtgttctgctgcaact

SEQ ID NO: 130949 - DNA, 17 bp, synthetic construct
  source 1..17: mol_type = other DNA
gtgttctgctgcaacta

SEQ ID NO: 130950 - DNA, 17 bp, synthetic construct
  source 1..17: mol_type = other DNA
tgttctgctgcaactac

SEQ ID NO: 130951 - DNA, 17 bp, synthetic construct
  source 1..17: mol_type = other DNA
gttctgctgcaactacg

SEQ ID NO: 130952 - DNA, 17 bp, synthetic construct
  source 1..17: mol_type = other DNA
ttctgctgcaactacgg

SEQ ID NO: 130953 - DNA, 17 bp, synthetic construct
  source 1..17: mol_type = other DNA
tctgctgcaactacggc

SEQ ID NO: 130954 - DNA, 17 bp, synthetic construct
  source 1..17: mol_type = other DNA
ctgctgcaactacggcc

SEQ ID NO: 130955 - DNA, 17 bp, synthetic construct
  source 1..17: mol_type = other DNA
tgctgcaactacggcca

SEQ ID NO: 130956 - DNA, 17 bp, synthetic construct
  source 1..17: mol_type = other DNA
gctgcaactacggccac

SEQ ID NO: 130957 - DNA, 17 bp, synthetic construct
  source 1..17: mol_type = other DNA
ctgcaactacggccact

SEQ ID NO: 130958 - DNA, 17 bp, synthetic construct
  source 1..17: mol_type = other DNA
tgcaactacggccactg

SEQ ID NO: 130959 - DNA, 17 bp, synthetic construct
  source 1..17: mol_type = other DNA
gcaactacggccactgc

SEQ ID NO: 130960 - DNA, 17 bp, synthetic construct
  source 1..17: mol_type = other DNA
caactacggccactgcc

SEQ ID NO: 130961 - DNA, 17 bp, synthetic construct
  source 1..17: mol_type = other DNA
aactacggccactgccc

SEQ ID NO: 130962 - DNA, 17 bp, synthetic construct
  source 1..17: mol_type = other DNA
actacggccactgcccc

SEQ ID NO: 130963 - DNA, 17 bp, synthetic construct
  source 1..17: mol_type = other DNA
ctacggccactgcccca

SEQ ID NO: 130964 - DNA, 17 bp, synthetic construct
  source 1..17: mol_type = other DNA
tacggccactgccccag

SEQ ID NO: 130965 - DNA, 17 bp, synthetic construct
  source 1..17: mol_type = other DNA
acggccactgccccagc

SEQ ID NO: 130966 - DNA, 17 bp, synthetic construct
  source 1..17: mol_type = other DNA
cggccactgccccagca

SEQ ID NO: 130967 - DNA, 17 bp, synthetic construct
  source 1..17: mol_type = other DNA
ggccactgccccagcac

SEQ ID NO: 130968 - DNA, 17 bp, synthetic construct
  source 1..17: mol_type = other DNA
gccactgccccagcacc

SEQ ID NO: 130969 - DNA, 17 bp, synthetic construct
  source 1..17: mol_type = other DNA
ccactgccccagcaccc

SEQ ID NO: 130970 - DNA, 17 bp, synthetic construct
  source 1..17: mol_type = other DNA
cactgccccagcacccc

SEQ ID NO: 130971 - DNA, 17 bp, synthetic construct
  source 1..17: mol_type = other DNA
actgccccagcaccccg

SEQ ID NO: 130972 - DNA, 17 bp, synthetic construct
  source 1..17: mol_type = other DNA
ctgccccagcaccccgg

SEQ ID NO: 130973 - DNA, 17 bp, synthetic construct
  source 1..17: mol_type = other DNA
tgccccagcaccccggc

SEQ ID NO: 130974 - DNA, 17 bp, synthetic construct
  source 1..17: mol_type = other DNA
gccccagcaccccggcc

SEQ ID NO: 130975 - DNA, 17 bp, synthetic construct
  source 1..17: mol_type = other DNA
ccccagcaccccggcca

SEQ ID NO: 130976 - DNA, 17 bp, synthetic construct
  source 1..17: mol_type = other DNA
cccagcaccccggccac

SEQ ID NO: 130977 - DNA, 17 bp, synthetic construct
  source 1..17: mol_type = other DNA
ccagcaccccggccacc

SEQ ID NO: 130978 - DNA, 17 bp, synthetic construct
  source 1..17: mol_type = other DNA
cagcaccccggccacca

SEQ ID NO: 130979 - DNA, 17 bp, synthetic construct
  source 1..17: mol_type = other DNA
agcaccccggccaccag

SEQ ID NO: 130980 - DNA, 17 bp, synthetic construct
  source 1..17: mol_type = other DNA
gcaccccggccaccagc

SEQ ID NO: 130981 - DNA, 17 bp, synthetic construct
  source 1..17: mol_type = other DNA
caccccggccaccagct

SEQ ID NO: 130982 - DNA, 17 bp, synthetic construct
  source 1..17: mol_type = other DNA
accccggccaccagctc

SEQ ID NO: 130983 - DNA, 17 bp, synthetic construct
  source 1..17: mol_type = other DNA
ccccggccaccagctct

SEQ ID NO: 130984 - DNA, 17 bp, synthetic construct
  source 1..17: mol_type = other DNA
cccggccaccagctcta

SEQ ID NO: 130985 - DNA, 17 bp, synthetic construct
  source 1..17: mol_type = other DNA
ccggccaccagctctac

SEQ ID NO: 130986 - DNA, 17 bp, synthetic construct
  source 1..17: mol_type = other DNA
cggccaccagctctacg

SEQ ID NO: 130987 - DNA, 17 bp, synthetic construct
  source 1..17: mol_type = other DNA
ggccaccagctctacgg

SEQ ID NO: 130988 - DNA, 17 bp, synthetic construct
  source 1..17: mol_type = other DNA
gccaccagctctacggc

SEQ ID NO: 130989 - DNA, 17 bp, synthetic construct
  source 1..17: mol_type = other DNA
ccaccagctctacggcc

SEQ ID NO: 130990 - DNA, 17 bp, synthetic construct
  source 1..17: mol_type = other DNA
caccagctctacggcca

SEQ ID NO: 130991 - DNA, 17 bp, synthetic construct
  source 1..17: mol_type = other DNA
accagctctacggccac

SEQ ID NO: 130992 - DNA, 17 bp, synthetic construct
  source 1..17: mol_type = other DNA
ccagctctacggccacg

SEQ ID NO: 130993 - DNA, 17 bp, synthetic construct
  source 1..17: mol_type = other DNA
cagctctacggccacgc

SEQ ID NO: 130994 - DNA, 17 bp, synthetic construct
  source 1..17: mol_type = other DNA
agctctacggccacgcc

SEQ ID NO: 130995 - DNA, 17 bp, synthetic construct
  source 1..17: mol_type = other DNA
gctctacggccacgccc

SEQ ID NO: 130996 - DNA, 17 bp, synthetic construct
  source 1..17: mol_type = other DNA
ctctacggccacgccct

SEQ ID NO: 130997 - DNA, 17 bp, synthetic construct
  source 1..17: mol_type = other DNA
tctacggccacgccctc

SEQ ID NO: 130998 - DNA, 17 bp, synthetic construct
  source 1..17: mol_type = other DNA
ctacggccacgccctcc

SEQ ID NO: 130999 - DNA, 17 bp, synthetic construct
  source 1..17: mol_type = other DNA
tacggccacgccctcct

SEQ ID NO: 131000 - DNA, 17 bp, synthetic construct
  source 1..17: mol_type = other DNA
acggccacgccctcctc

SEQ ID NO: 131001 - DNA, 17 bp, synthetic construct
  source 1..17: mol_type = other DNA
cggccacgccctcctcc

SEQ ID NO: 131002 - DNA, 17 bp, synthetic construct
  source 1..17: mol_type = other DNA
ggccacgccctcctcca

SEQ ID NO: 131003 - DNA, 17 bp, synthetic construct
  source 1..17: mol_type = other DNA
gccacgccctcctccac

SEQ ID NO: 131004 - DNA, 17 bp, synthetic construct
  source 1..17: mol_type = other DNA
ccacgccctcctccact

SEQ ID NO: 131005 - DNA, 17 bp, synthetic construct
  source 1..17: mol_type = other DNA
cacgccctcctccactc

SEQ ID NO: 131006 - DNA, 17 bp, synthetic construct
  source 1..17: mol_type = other DNA
acgccctcctccactcc

SEQ ID NO: 131007 - DNA, 17 bp, synthetic construct
  source 1..17: mol_type = other DNA
cgccctcctccactcca

SEQ ID NO: 131008 - DNA, 17 bp, synthetic construct
  source 1..17: mol_type = other DNA
gccctcctccactccag

SEQ ID NO: 131009 - DNA, 17 bp, synthetic construct
  source 1..17: mol_type = other DNA
ccctcctccactccagg

SEQ ID NO: 131010 - DNA, 17 bp, synthetic construct
  source 1..17: mol_type = other DNA
cctcctccactccaggg

SEQ ID NO: 131011 - DNA, 17 bp, synthetic construct
  source 1..17: mol_type = other DNA
ctcctccactccaggga

SEQ ID NO: 131012 - DNA, 17 bp, synthetic construct
  source 1..17: mol_type = other DNA
tcctccactccagggac

SEQ ID NO: 131013 - DNA, 17 bp, synthetic construct
  source 1..17: mol_type = other DNA
cctccactccagggacg

SEQ ID NO: 131014 - DNA, 17 bp, synthetic construct
  source 1..17: mol_type = other DNA
ctccactccagggacga

SEQ ID NO: 131015 - DNA, 17 bp, synthetic construct
  source 1..17: mol_type = other DNA
tccactccagggacgac

SEQ ID NO: 131016 - DNA, 17 bp, synthetic construct
  source 1..17: mol_type = other DNA
ccactccagggacgacc

SEQ ID NO: 131017 - DNA, 17 bp, synthetic construct
  source 1..17: mol_type = other DNA
cactccagggacgacct

SEQ ID NO: 131018 - DNA, 17 bp, synthetic construct
  source 1..17: mol_type = other DNA
actccagggacgacctg

SEQ ID NO: 131019 - DNA, 17 bp, synthetic construct
  source 1..17: mol_type = other DNA
ctccagggacgacctgg

SEQ ID NO: 131020 - DNA, 17 bp, synthetic construct
  source 1..17: mol_type = other DNA
tccagggacgacctgga

SEQ ID NO: 131021 - DNA, 17 bp, synthetic construct
  source 1..17: mol_type = other DNA
ccagggacgacctggat

SEQ ID NO: 131022 - DNA, 17 bp, synthetic construct
  source 1..17: mol_type = other DNA
cagggacgacctggatc

SEQ ID NO: 131023 - DNA, 17 bp, synthetic construct
  source 1..17: mol_type = other DNA
agggacgacctggatcc

SEQ ID NO: 131024 - DNA, 17 bp, synthetic construct
  source 1..17: mol_type = other DNA
gggacgacctggatcct

SEQ ID NO: 131025 - DNA, 17 bp, synthetic construct
  source 1..17: mol_type = other DNA
ggacgacctggatcctc

SEQ ID NO: 131026 - DNA, 17 bp, synthetic construct
  source 1..17: mol_type = other DNA
gacgacctggatcctca

SEQ ID NO: 131027 - DNA, 17 bp, synthetic construct
  source 1..17: mol_type = other DNA
acgacctggatcctcac

SEQ ID NO: 131028 - DNA, 17 bp, synthetic construct
  source 1..17: mol_type = other DNA
cgacctggatcctcaca

SEQ ID NO: 131029 - DNA, 17 bp, synthetic construct
  source 1..17: mol_type = other DNA
gacctggatcctcacag

SEQ ID NO: 131030 - DNA, 17 bp, synthetic construct
  source 1..17: mol_type = other DNA
acctggatcctcacaga

SEQ ID NO: 131031 - DNA, 17 bp, synthetic construct
  source 1..17: mol_type = other DNA
cctggatcctcacagag

SEQ ID NO: 131032 - DNA, 17 bp, synthetic construct
  source 1..17: mol_type = other DNA
ctggatcctcacagagc

SEQ ID NO: 131033 - DNA, 17 bp, synthetic construct
  source 1..17: mol_type = other DNA
tggatcctcacagagca

SEQ ID NO: 131034 - DNA, 17 bp, synthetic construct
  source 1..17: mol_type = other DNA
ggatcctcacagagcag

SEQ ID NO: 131035 - DNA, 17 bp, synthetic construct
  source 1..17: mol_type = other DNA
gatcctcacagagcaga

SEQ ID NO: 131036 - DNA, 17 bp, synthetic construct
  source 1..17: mol_type = other DNA
atcctcacagagcagac

SEQ ID NO: 131037 - DNA, 17 bp, synthetic construct
  source 1..17: mol_type = other DNA
tcctcacagagcagacc

SEQ ID NO: 131038 - DNA, 17 bp, synthetic construct
  source 1..17: mol_type = other DNA
cctcacagagcagacca

SEQ ID NO: 131039 - DNA, 17 bp, synthetic construct
  source 1..17: mol_type = other DNA
ctcacagagcagaccac

SEQ ID NO: 131040 - DNA, 17 bp, synthetic construct
  source 1..17: mol_type = other DNA
tcacagagcagaccaca

SEQ ID NO: 131041 - DNA, 17 bp, synthetic construct
  source 1..17: mol_type = other DNA
cacagagcagaccacag

SEQ ID NO: 131042 - DNA, 17 bp, synthetic construct
  source 1..17: mol_type = other DNA
acagagcagaccacagc

SEQ ID NO: 131043 - DNA, 17 bp, synthetic construct
  source 1..17: mol_type = other DNA
cagagcagaccacagca

SEQ ID NO: 131044 - DNA, 17 bp, synthetic construct
  source 1..17: mol_type = other DNA
agagcagaccacagcag

SEQ ID NO: 131045 - DNA, 17 bp, synthetic construct
  source 1..17: mol_type = other DNA
gagcagaccacagcagc

SEQ ID NO: 131046 - DNA, 17 bp, synthetic construct
  source 1..17: mol_type = other DNA
agcagaccacagcagcc

SEQ ID NO: 131047 - DNA, 17 bp, synthetic construct
  source 1..17: mol_type = other DNA
gcagaccacagcagcca

SEQ ID NO: 131048 - DNA, 17 bp, synthetic construct
  source 1..17: mol_type = other DNA
cagaccacagcagccac

SEQ ID NO: 131049 - DNA, 17 bp, synthetic construct
  source 1..17: mol_type = other DNA
agaccacagcagccact

SEQ ID NO: 131050 - DNA, 17 bp, synthetic construct
  source 1..17: mol_type = other DNA
gaccacagcagccacta

SEQ ID NO: 131051 - DNA, 17 bp, synthetic construct
  source 1..17: mol_type = other DNA
accacagcagccactac

SEQ ID NO: 131052 - DNA, 17 bp, synthetic construct
  source 1..17: mol_type = other DNA
ccacagcagccactacg

SEQ ID NO: 131053 - DNA, 17 bp, synthetic construct
  source 1..17: mol_type = other DNA
cacagcagccactacga

SEQ ID NO: 131054 - DNA, 17 bp, synthetic construct
  source 1..17: mol_type = other DNA
acagcagccactacgac

SEQ ID NO: 131055 - DNA, 17 bp, synthetic construct
  source 1..17: mol_type = other DNA
cagcagccactacgacc

SEQ ID NO: 131056 - DNA, 17 bp, synthetic construct
  source 1..17: mol_type = other DNA
agcagccactacgaccg

SEQ ID NO: 131057 - DNA, 17 bp, synthetic construct
  source 1..17: mol_type = other DNA
gcagccactacgaccgc

SEQ ID NO: 131058 - DNA, 17 bp, synthetic construct
  source 1..17: mol_type = other DNA
cagccactacgaccgca

SEQ ID NO: 131059 - DNA, 17 bp, synthetic construct
  source 1..17: mol_type = other DNA
agccactacgaccgcaa

SEQ ID NO: 131060 - DNA, 17 bp, synthetic construct
  source 1..17: mol_type = other DNA
gccactacgaccgcaac

SEQ ID NO: 131061 - DNA, 17 bp, synthetic construct
  source 1..17: mol_type = other DNA
ccactacgaccgcaacc

SEQ ID NO: 131062 - DNA, 17 bp, synthetic construct
  source 1..17: mol_type = other DNA
cactacgaccgcaacca

SEQ ID NO: 131063 - DNA, 17 bp, synthetic construct
  source 1..17: mol_type = other DNA
actacgaccgcaaccac

SEQ ID NO: 131064 - DNA, 17 bp, synthetic construct
  source 1..17: mol_type = other DNA
ctacgaccgcaaccact

SEQ ID NO: 131065 - DNA, 17 bp, synthetic construct
  source 1..17: mol_type = other DNA
tacgaccgcaaccactg

SEQ ID NO: 131066 - DNA, 17 bp, synthetic construct
  source 1..17: mol_type = other DNA
acgaccgcaaccactgg

SEQ ID NO: 131067 - DNA, 17 bp, synthetic construct
  source 1..17: mol_type = other DNA
cgaccgcaaccactgga

SEQ ID NO: 131068 - DNA, 17 bp, synthetic construct
  source 1..17: mol_type = other DNA
gaccgcaaccactggat

SEQ ID NO: 131069 - DNA, 17 bp, synthetic construct
  source 1..17: mol_type = other DNA
accgcaaccactggatc

SEQ ID NO: 131070 - DNA, 17 bp, synthetic construct
  source 1..17: mol_type = other DNA
ccgcaaccactggatcc

SEQ ID NO: 131071 - DNA, 17 bp, synthetic construct
  source 1..17: mol_type = other DNA
cgcaaccactggatcca

SEQ ID NO: 131072 - DNA, 17 bp, synthetic construct
  source 1..17: mol_type = other DNA
gcaaccactggatccac

SEQ ID NO: 131073 - DNA, 17 bp, synthetic construct
  source 1..17: mol_type = other DNA
caaccactggatccacg

SEQ ID NO: 131074 - DNA, 17 bp, synthetic construct
  source 1..17: mol_type = other DNA
aaccactggatccacgg

SEQ ID NO: 131075 - DNA, 17 bp, synthetic construct
  source 1..17: mol_type = other DNA
accactggatccacggc

SEQ ID NO: 131076 - DNA, 17 bp, synthetic construct
  source 1..17: mol_type = other DNA
ccactggatccacggcc

SEQ ID NO: 131077 - DNA, 17 bp, synthetic construct
  source 1..17: mol_type = other DNA
cactggatccacggcca

SEQ ID NO: 131078 - DNA, 17 bp, synthetic construct
  source 1..17: mol_type = other DNA
actggatccacggccat

SEQ ID NO: 131079 - DNA, 17 bp, synthetic construct
  source 1..17: mol_type = other DNA
ctggatccacggccatc

SEQ ID NO: 131080 - DNA, 17 bp, synthetic construct
  source 1..17: mol_type = other DNA
tggatccacggccatcc

SEQ ID NO: 131081 - DNA, 17 bp, synthetic construct
  source 1..17: mol_type = other DNA
ggatccacggccatccc

SEQ ID NO: 131082 - DNA, 17 bp, synthetic construct
  source 1..17: mol_type = other DNA
gatccacggccatcccg

SEQ ID NO: 131083 - DNA, 17 bp, synthetic construct
  source 1..17: mol_type = other DNA
atccacggccatcccgt

SEQ ID NO: 131084 - DNA, 17 bp, synthetic construct
  source 1..17: mol_type = other DNA
tccacggccatcccgtc

SEQ ID NO: 131085 - DNA, 17 bp, synthetic construct
  source 1..17: mol_type = other DNA
ccacggccatcccgtcc

SEQ ID NO: 131086 - DNA, 17 bp, synthetic construct
  source 1..17: mol_type = other DNA
cacggccatcccgtcct

SEQ ID NO: 131087 - DNA, 17 bp, synthetic construct
  source 1..17: mol_type = other DNA
acggccatcccgtcctc

SEQ ID NO: 131088 - DNA, 17 bp, synthetic construct
  source 1..17: mol_type = other DNA
cggccatcccgtcctcc

SEQ ID NO: 131089 - DNA, 17 bp, synthetic construct
  source 1..17: mol_type = other DNA
ggccatcccgtcctcca

SEQ ID NO: 131090 - DNA, 17 bp, synthetic construct
  source 1..17: mol_type = other DNA
gccatcccgtcctccac

SEQ ID NO: 131091 - DNA, 17 bp, synthetic construct
  source 1..17: mol_type = other DNA
ccatcccgtcctccacc

SEQ ID NO: 131092 - DNA, 17 bp, synthetic construct
  source 1..17: mol_type = other DNA
catcccgtcctccaccc

SEQ ID NO: 131093 - DNA, 17 bp, synthetic construct
  source 1..17: mol_type = other DNA
atcccgtcctccacccc

SEQ ID NO: 131094 - DNA, 17 bp, synthetic construct
  source 1..17: mol_type = other DNA
tcccgtcctccaccccg

SEQ ID NO: 131095 - DNA, 17 bp, synthetic construct
  source 1..17: mol_type = other DNA
cccgtcctccaccccgg

SEQ ID NO: 131096 - DNA, 17 bp, synthetic construct
  source 1..17: mol_type = other DNA
ccgtcctccaccccggg

SEQ ID NO: 131097 - DNA, 17 bp, synthetic construct
  source 1..17: mol_type = other DNA
cgtcctccaccccggga

SEQ ID NO: 131098 - DNA, 17 bp, synthetic construct
  source 1..17: mol_type = other DNA
gtcctccaccccgggaa

SEQ ID NO: 131099 - DNA, 17 bp, synthetic construct
  source 1..17: mol_type = other DNA
tcctccaccccgggaac

SEQ ID NO: 131100 - DNA, 17 bp, synthetic construct
  source 1..17: mol_type = other DNA
cctccaccccgggaaca

SEQ ID NO: 131101 - DNA, 17 bp, synthetic construct
  source 1..17: mol_type = other DNA
ctccaccccgggaacag

SEQ ID NO: 131102 - DNA, 17 bp, synthetic construct
  source 1..17: mol_type = other DNA
tccaccccgggaacagc

SEQ ID NO: 131103 - DNA, 17 bp, synthetic construct
  source 1..17: mol_type = other DNA
ccaccccgggaacagct

SEQ ID NO: 131104 - DNA, 17 bp, synthetic construct
  source 1..17: mol_type = other DNA
caccccgggaacagctc

SEQ ID NO: 131105 - DNA, 17 bp, synthetic construct
  source 1..17: mol_type = other DNA
accccgggaacagctcc

SEQ ID NO: 131106 - DNA, 17 bp, synthetic construct
  source 1..17: mol_type = other DNA
ccccgggaacagctccc

SEQ ID NO: 131107 - DNA, 17 bp, synthetic construct
  source 1..17: mol_type = other DNA
cccgggaacagctcccc

SEQ ID NO: 131108 - DNA, 17 bp, synthetic construct
  source 1..17: mol_type = other DNA
ccgggaacagctccccc

SEQ ID NO: 131109 - DNA, 17 bp, synthetic construct
  source 1..17: mol_type = other DNA
cgggaacagctccccct

SEQ ID NO: 131110 - DNA, 17 bp, synthetic construct
  source 1..17: mol_type = other DNA
gggaacagctccccctc

SEQ ID NO: 131111 - DNA, 17 bp, synthetic construct
  source 1..17: mol_type = other DNA
ggaacagctccccctcc

SEQ ID NO: 131112 - DNA, 17 bp, synthetic construct
  source 1..17: mol_type = other DNA
gaacagctccccctccc

SEQ ID NO: 131113 - DNA, 17 bp, synthetic construct
  source 1..17: mol_type = other DNA
aacagctccccctccca

SEQ ID NO: 131114 - DNA, 17 bp, synthetic construct
  source 1..17: mol_type = other DNA
acagctccccctcccaa

SEQ ID NO: 131115 - DNA, 17 bp, synthetic construct
  source 1..17: mol_type = other DNA
cagctccccctcccaaa

SEQ ID NO: 131116 - DNA, 17 bp, synthetic construct
  source 1..17: mol_type = other DNA
agctccccctcccaaag

SEQ ID NO: 131117 - DNA, 17 bp, synthetic construct
  source 1..17: mol_type = other DNA
gctccccctcccaaagt

SEQ ID NO: 131118 - DNA, 17 bp, synthetic construct
  source 1..17: mol_type = other DNA
ctccccctcccaaagtg

SEQ ID NO: 131119 - DNA, 17 bp, synthetic construct
  source 1..17: mol_type = other DNA
tccccctcccaaagtgc

SEQ ID NO: 131120 - DNA, 17 bp, synthetic construct
  source 1..17: mol_type = other DNA
ccccctcccaaagtgct

SEQ ID NO: 131121 - DNA, 17 bp, synthetic construct
  source 1..17: mol_type = other DNA
cccctcccaaagtgctg

SEQ ID NO: 131122 - DNA, 17 bp, synthetic construct
  source 1..17: mol_type = other DNA
ccctcccaaagtgctga

SEQ ID NO: 131123 - DNA, 17 bp, synthetic construct
  source 1..17: mol_type = other DNA
cctcccaaagtgctgac

SEQ ID NO: 131124 - DNA, 17 bp, synthetic construct
  source 1..17: mol_type = other DNA
ctcccaaagtgctgacc

SEQ ID NO: 131125 - DNA, 17 bp, synthetic construct
  source 1..17: mol_type = other DNA
tcccaaagtgctgacca

SEQ ID NO: 131126 - DNA, 17 bp, synthetic construct
  source 1..17: mol_type = other DNA
cccaaagtgctgaccag

SEQ ID NO: 131127 - DNA, 17 bp, synthetic construct
  source 1..17: mol_type = other DNA
ccaaagtgctgaccagc

SEQ ID NO: 131128 - DNA, 17 bp, synthetic construct
  source 1..17: mol_type = other DNA
caaagtgctgaccagca

SEQ ID NO: 131129 - DNA, 17 bp, synthetic construct
  source 1..17: mol_type = other DNA
aaagtgctgaccagcac

SEQ ID NO: 131130 - DNA, 17 bp, synthetic construct
  source 1..17: mol_type = other DNA
aagtgctgaccagcacg

SEQ ID NO: 131131 - DNA, 17 bp, synthetic construct
  source 1..17: mol_type = other DNA
agtgctgaccagcacgg

SEQ ID NO: 131132 - DNA, 17 bp, synthetic construct
  source 1..17: mol_type = other DNA
gtgctgaccagcacggc

SEQ ID NO: 131133 - DNA, 17 bp, synthetic construct
  source 1..17: mol_type = other DNA
tgctgaccagcacggcc

SEQ ID NO: 131134 - DNA, 17 bp, synthetic construct
  source 1..17: mol_type = other DNA
gctgaccagcacggcca

SEQ ID NO: 131135 - DNA, 17 bp, synthetic construct
  source 1..17: mol_type = other DNA
ctgaccagcacggccac

SEQ ID NO: 131136 - DNA, 17 bp, synthetic construct
  source 1..17: mol_type = other DNA
tgaccagcacggccacc

SEQ ID NO: 131137 - DNA, 17 bp, synthetic construct
  source 1..17: mol_type = other DNA
gaccagcacggccacca

SEQ ID NO: 131138 - DNA, 17 bp, synthetic construct
  source 1..17: mol_type = other DNA
accagcacggccaccac

SEQ ID NO: 131139 - DNA, 17 bp, synthetic construct
  source 1..17: mol_type = other DNA
ccagcacggccaccaca

SEQ ID NO: 131140 - DNA, 17 bp, synthetic construct
  source 1..17: mol_type = other DNA
cagcacggccaccacac

SEQ ID NO: 131141 - DNA, 17 bp, synthetic construct
  source 1..17: mol_type = other DNA
agcacggccaccacacc

SEQ ID NO: 131142 - DNA, 17 bp, synthetic construct
  source 1..17: mol_type = other DNA
gcacggccaccacaccc

SEQ ID NO: 131143 - DNA, 17 bp, synthetic construct
  source 1..17: mol_type = other DNA
cacggccaccacaccca

SEQ ID NO: 131144 - DNA, 17 bp, synthetic construct
  source 1..17: mol_type = other DNA
acggccaccacacccac

SEQ ID NO: 131145 - DNA, 17 bp, synthetic construct
  source 1..17: mol_type = other DNA
cggccaccacacccaca

SEQ ID NO: 131146 - DNA, 17 bp, synthetic construct
  source 1..17: mol_type = other DNA
ggccaccacacccacag

SEQ ID NO: 131147 - DNA, 17 bp, synthetic construct
  source 1..17: mol_type = other DNA
gccaccacacccacagc

SEQ ID NO: 131148 - DNA, 17 bp, synthetic construct
  source 1..17: mol_type = other DNA
ccaccacacccacagcc

SEQ ID NO: 131149 - DNA, 17 bp, synthetic construct
  source 1..17: mol_type = other DNA
caccacacccacagcca

SEQ ID NO: 131150 - DNA, 17 bp, synthetic construct
  source 1..17: mol_type = other DNA
accacacccacagccac

SEQ ID NO: 131151 - DNA, 17 bp, synthetic construct
  source 1..17: mol_type = other DNA
ccacacccacagccacc

SEQ ID NO: 131152 - DNA, 17 bp, synthetic construct
  source 1..17: mol_type = other DNA
cacacccacagccacca

SEQ ID NO: 131153 - DNA, 17 bp, synthetic construct
  source 1..17: mol_type = other DNA
acacccacagccaccag

SEQ ID NO: 131154 - DNA, 17 bp, synthetic construct
  source 1..17: mol_type = other DNA
cacccacagccaccagt

SEQ ID NO: 131155 - DNA, 17 bp, synthetic construct
  source 1..17: mol_type = other DNA
acccacagccaccagtt

SEQ ID NO: 131156 - DNA, 17 bp, synthetic construct
  source 1..17: mol_type = other DNA
cccacagccaccagttc

SEQ ID NO: 131157 - DNA, 17 bp, synthetic construct
  source 1..17: mol_type = other DNA
ccacagccaccagttcc

SEQ ID NO: 131158 - DNA, 17 bp, synthetic construct
  source 1..17: mol_type = other DNA
cacagccaccagttcca

SEQ ID NO: 131159 - DNA, 17 bp, synthetic construct
  source 1..17: mol_type = other DNA
acagccaccagttccaa

SEQ ID NO: 131160 - DNA, 17 bp, synthetic construct
  source 1..17: mol_type = other DNA
cagccaccagttccaaa

SEQ ID NO: 131161 - DNA, 17 bp, synthetic construct
  source 1..17: mol_type = other DNA
agccaccagttccaaag

SEQ ID NO: 131162 - DNA, 17 bp, synthetic construct
  source 1..17: mol_type = other DNA
gccaccagttccaaagc

SEQ ID NO: 131163 - DNA, 17 bp, synthetic construct
  source 1..17: mol_type = other DNA
ccaccagttccaaagcc

SEQ ID NO: 131164 - DNA, 17 bp, synthetic construct
  source 1..17: mol_type = other DNA
caccagttccaaagcca

SEQ ID NO: 131165 - DNA, 17 bp, synthetic construct
  source 1..17: mol_type = other DNA
accagttccaaagccac

SEQ ID NO: 131166 - DNA, 17 bp, synthetic construct
  source 1..17: mol_type = other DNA
ccagttccaaagccact

SEQ ID NO: 131167 - DNA, 17 bp, synthetic construct
  source 1..17: mol_type = other DNA
cagttccaaagccactt

SEQ ID NO: 131168 - DNA, 17 bp, synthetic construct
  source 1..17: mol_type = other DNA
agttccaaagccacttc

SEQ ID NO: 131169 - DNA, 17 bp, synthetic construct
  source 1..17: mol_type = other DNA
gttccaaagccacttcc

SEQ ID NO: 131170 - DNA, 17 bp, synthetic construct
  source 1..17: mol_type = other DNA
ttccaaagccacttcct

SEQ ID NO: 131171 - DNA, 17 bp, synthetic construct
  source 1..17: mol_type = other DNA
tccaaagccacttcctc

SEQ ID NO: 131172 - DNA, 17 bp, synthetic construct
  source 1..17: mol_type = other DNA
ccaaagccacttcctcc

SEQ ID NO: 131173 - DNA, 17 bp, synthetic construct
  source 1..17: mol_type = other DNA
caaagccacttcctcct

SEQ ID NO: 131174 - DNA, 17 bp, synthetic construct
  source 1..17: mol_type = other DNA
aaagccacttcctcctc

SEQ ID NO: 131175 - DNA, 17 bp, synthetic construct
  source 1..17: mol_type = other DNA
aagccacttcctcctcc

SEQ ID NO: 131176 - DNA, 17 bp, synthetic construct
  source 1..17: mol_type = other DNA
agccacttcctcctcca

SEQ ID NO: 131177 - DNA, 17 bp, synthetic construct
  source 1..17: mol_type = other DNA
gccacttcctcctccag

SEQ ID NO: 131178 - DNA, 17 bp, synthetic construct
  source 1..17: mol_type = other DNA
ccacttcctcctccagt

SEQ ID NO: 131179 - DNA, 17 bp, synthetic construct
  source 1..17: mol_type = other DNA
cacttcctcctccagtc

SEQ ID NO: 131180 - DNA, 17 bp, synthetic construct
  source 1..17: mol_type = other DNA
acttcctcctccagtcc

SEQ ID NO: 131181 - DNA, 17 bp, synthetic construct
  source 1..17: mol_type = other DNA
cttcctcctccagtcca

SEQ ID NO: 131182 - DNA, 17 bp, synthetic construct
  source 1..17: mol_type = other DNA
ttcctcctccagtccaa

SEQ ID NO: 131183 - DNA, 17 bp, synthetic construct
  source 1..17: mol_type = other DNA
tcctcctccagtccaag

SEQ ID NO: 131184 - DNA, 17 bp, synthetic construct
  source 1..17: mol_type = other DNA
cctcctccagtccaagg

SEQ ID NO: 131185 - DNA, 17 bp, synthetic construct
  source 1..17: mol_type = other DNA
ctcctccagtccaagga

SEQ ID NO: 131186 - DNA, 17 bp, synthetic construct
  source 1..17: mol_type = other DNA
tcctccagtccaaggac

SEQ ID NO: 131187 - DNA, 17 bp, synthetic construct
  source 1..17: mol_type = other DNA
cctccagtccaaggact

SEQ ID NO: 131188 - DNA, 17 bp, synthetic construct
  source 1..17: mol_type = other DNA
ctccagtccaaggactg

SEQ ID NO: 131189 - DNA, 17 bp, synthetic construct
  source 1..17: mol_type = other DNA
tccagtccaaggactgc

SEQ ID NO: 131190 - DNA, 17 bp, synthetic construct
  source 1..17: mol_type = other DNA
ccagtccaaggactgca

SEQ ID NO: 131191 - DNA, 17 bp, synthetic construct
  source 1..17: mol_type = other DNA
cagtccaaggactgcaa

SEQ ID NO: 131192 - DNA, 17 bp, synthetic construct
  source 1..17: mol_type = other DNA
agtccaaggactgcaac

SEQ ID NO: 131193 - DNA, 17 bp, synthetic construct
  source 1..17: mol_type = other DNA
gtccaaggactgcaacc

SEQ ID NO: 131194 - DNA, 17 bp, synthetic construct
  source 1..17: mol_type = other DNA
tccaaggactgcaacca

SEQ ID NO: 131195 - DNA, 17 bp, synthetic construct
  source 1..17: mol_type = other DNA
ccaaggactgcaaccac

SEQ ID NO: 131196 - DNA, 17 bp, synthetic construct
  source 1..17: mol_type = other DNA
caaggactgcaaccacc

SEQ ID NO: 131197 - DNA, 17 bp, synthetic construct
  source 1..17: mol_type = other DNA
aaggactgcaaccaccc

SEQ ID NO: 131198 - DNA, 17 bp, synthetic construct
  source 1..17: mol_type = other DNA
aggactgcaaccaccct

SEQ ID NO: 131199 - DNA, 17 bp, synthetic construct
  source 1..17: mol_type = other DNA
ggactgcaaccaccctt

SEQ ID NO: 131200 - DNA, 17 bp, synthetic construct
  source 1..17: mol_type = other DNA
gactgcaaccacccttc

SEQ ID NO: 131201 - DNA, 17 bp, synthetic construct
  source 1..17: mol_type = other DNA
actgcaaccacccttcc

SEQ ID NO: 131202 - DNA, 17 bp, synthetic construct
  source 1..17: mol_type = other DNA
ctgcaaccacccttcca

SEQ ID NO: 131203 - DNA, 17 bp, synthetic construct
  source 1..17: mol_type = other DNA
tgcaaccacccttccag

SEQ ID NO: 131204 - DNA, 17 bp, synthetic construct
  source 1..17: mol_type = other DNA
gcaaccacccttccagt

SEQ ID NO: 131205 - DNA, 17 bp, synthetic construct
  source 1..17: mol_type = other DNA
caaccacccttccagtg

SEQ ID NO: 131206 - DNA, 17 bp, synthetic construct
  source 1..17: mol_type = other DNA
aaccacccttccagtgc

SEQ ID NO: 131207 - DNA, 17 bp, synthetic construct
  source 1..17: mol_type = other DNA
accacccttccagtgct

SEQ ID NO: 131208 - DNA, 17 bp, synthetic construct
  source 1..17: mol_type = other DNA
ccacccttccagtgctg

SEQ ID NO: 131209 - DNA, 17 bp, synthetic construct
  source 1..17: mol_type = other DNA
cacccttccagtgctga

SEQ ID NO: 131210 - DNA, 17 bp, synthetic construct
  source 1..17: mol_type = other DNA
acccttccagtgctgac

SEQ ID NO: 131211 - DNA, 17 bp, synthetic construct
  source 1..17: mol_type = other DNA
cccttccagtgctgaca

SEQ ID NO: 131212 - DNA, 17 bp, synthetic construct
  source 1..17: mol_type = other DNA
ccttccagtgctgacaa

SEQ ID NO: 131213 - DNA, 17 bp, synthetic construct
  source 1..17: mol_type = other DNA
cttccagtgctgacaag

SEQ ID NO: 131214 - DNA, 17 bp, synthetic construct
  source 1..17: mol_type = other DNA
ttccagtgctgacaagc

SEQ ID NO: 131215 - DNA, 17 bp, synthetic construct
  source 1..17: mol_type = other DNA
tccagtgctgacaagca

SEQ ID NO: 131216 - DNA, 17 bp, synthetic construct
  source 1..17: mol_type = other DNA
ccagtgctgacaagcac

SEQ ID NO: 131217 - DNA, 17 bp, synthetic construct
  source 1..17: mol_type = other DNA
cagtgctgacaagcaca

SEQ ID NO: 131218 - DNA, 17 bp, synthetic construct
  source 1..17: mol_type = other DNA
agtgctgacaagcacag

SEQ ID NO: 131219 - DNA, 17 bp, synthetic construct
  source 1..17: mol_type = other DNA
gtgctgacaagcacagc

SEQ ID NO: 131220 - DNA, 17 bp, synthetic construct
  source 1..17: mol_type = other DNA
tgctgacaagcacagcc

SEQ ID NO: 131221 - DNA, 17 bp, synthetic construct
  source 1..17: mol_type = other DNA
gctgacaagcacagcca

SEQ ID NO: 131222 - DNA, 17 bp, synthetic construct
  source 1..17: mol_type = other DNA
ctgacaagcacagccac

SEQ ID NO: 131223 - DNA, 17 bp, synthetic construct
  source 1..17: mol_type = other DNA
tgacaagcacagccacc

SEQ ID NO: 131224 - DNA, 17 bp, synthetic construct
  source 1..17: mol_type = other DNA
gacaagcacagccacca

SEQ ID NO: 131225 - DNA, 17 bp, synthetic construct
  source 1..17: mol_type = other DNA
acaagcacagccaccaa

SEQ ID NO: 131226 - DNA, 17 bp, synthetic construct
  source 1..17: mol_type = other DNA
caagcacagccaccaaa

SEQ ID NO: 131227 - DNA, 17 bp, synthetic construct
  source 1..17: mol_type = other DNA
aagcacagccaccaaat

SEQ ID NO: 131228 - DNA, 17 bp, synthetic construct
  source 1..17: mol_type = other DNA
agcacagccaccaaatc

SEQ ID NO: 131229 - DNA, 17 bp, synthetic construct
  source 1..17: mol_type = other DNA
gcacagccaccaaatcc

SEQ ID NO: 131230 - DNA, 17 bp, synthetic construct
  source 1..17: mol_type = other DNA
cacagccaccaaatcca

SEQ ID NO: 131231 - DNA, 17 bp, synthetic construct
  source 1..17: mol_type = other DNA
acagccaccaaatccac

SEQ ID NO: 131232 - DNA, 17 bp, synthetic construct
  source 1..17: mol_type = other DNA
cagccaccaaatccaca

SEQ ID NO: 131233 - DNA, 17 bp, synthetic construct
  source 1..17: mol_type = other DNA
agccaccaaatccacag

SEQ ID NO: 131234 - DNA, 17 bp, synthetic construct
  source 1..17: mol_type = other DNA
gccaccaaatccacagc

SEQ ID NO: 131235 - DNA, 17 bp, synthetic construct
  source 1..17: mol_type = other DNA
ccaccaaatccacagct

SEQ ID NO: 131236 - DNA, 17 bp, synthetic construct
  source 1..17: mol_type = other DNA
caccaaatccacagcta

SEQ ID NO: 131237 - DNA, 17 bp, synthetic construct
  source 1..17: mol_type = other DNA
accaaatccacagctac

SEQ ID NO: 131238 - DNA, 17 bp, synthetic construct
  source 1..17: mol_type = other DNA
ccaaatccacagctacc

SEQ ID NO: 131239 - DNA, 17 bp, synthetic construct
  source 1..17: mol_type = other DNA
caaatccacagctacca

SEQ ID NO: 131240 - DNA, 17 bp, synthetic construct
  source 1..17: mol_type = other DNA
aaatccacagctaccag

SEQ ID NO: 131241 - DNA, 17 bp, synthetic construct
  source 1..17: mol_type = other DNA
aatccacagctaccagc

SEQ ID NO: 131242 - DNA, 17 bp, synthetic construct
  source 1..17: mol_type = other DNA
atccacagctaccagct

SEQ ID NO: 131243 - DNA, 17 bp, synthetic construct
  source 1..17: mol_type = other DNA
tccacagctaccagctt

SEQ ID NO: 131244 - DNA, 17 bp, synthetic construct
  source 1..17: mol_type = other DNA
ccacagctaccagcttt

SEQ ID NO: 131245 - DNA, 17 bp, synthetic construct
  source 1..17: mol_type = other DNA
cacagctaccagcttta

SEQ ID NO: 131246 - DNA, 17 bp, synthetic construct
  source 1..17: mol_type = other DNA
acagctaccagctttac

SEQ ID NO: 131247 - DNA, 17 bp, synthetic construct
  source 1..17: mol_type = other DNA
cagctaccagctttaca

SEQ ID NO: 131248 - DNA, 17 bp, synthetic construct
  source 1..17: mol_type = other DNA
agctaccagctttacac

SEQ ID NO: 131249 - DNA, 17 bp, synthetic construct
  source 1..17: mol_type = other DNA
gctaccagctttacacc

SEQ ID NO: 131250 - DNA, 17 bp, synthetic construct
  source 1..17: mol_type = other DNA
ctaccagctttacaccc

SEQ ID NO: 131251 - DNA, 17 bp, synthetic construct
  source 1..17: mol_type = other DNA
taccagctttacaccca

SEQ ID NO: 131252 - DNA, 17 bp, synthetic construct
  source 1..17: mol_type = other DNA
accagctttacacccat

SEQ ID NO: 131253 - DNA, 17 bp, synthetic construct
  source 1..17: mol_type = other DNA
ccagctttacacccatc

SEQ ID NO: 131254 - DNA, 17 bp, synthetic construct
  source 1..17: mol_type = other DNA
cagctttacacccatcc

SEQ ID NO: 131255 - DNA, 17 bp, synthetic construct
  source 1..17: mol_type = other DNA
agctttacacccatccc

SEQ ID NO: 131256 - DNA, 17 bp, synthetic construct
  source 1..17: mol_type = other DNA
gctttacacccatcccc

SEQ ID NO: 131257 - DNA, 17 bp, synthetic construct
  source 1..17: mol_type = other DNA
ctttacacccatcccct

SEQ ID NO: 131258 - DNA, 17 bp, synthetic construct
  source 1..17: mol_type = other DNA
tttacacccatcccctc

SEQ ID NO: 131259 - DNA, 17 bp, synthetic construct
  source 1..17: mol_type = other DNA
ttacacccatcccctcc

SEQ ID NO: 131260 - DNA, 17 bp, synthetic construct
  source 1..17: mol_type = other DNA
tacacccatcccctcct

SEQ ID NO: 131261 - DNA, 17 bp, synthetic construct
  source 1..17: mol_type = other DNA
acacccatcccctcctt

SEQ ID NO: 131262 - DNA, 17 bp, synthetic construct
  source 1..17: mol_type = other DNA
cacccatcccctccttc

SEQ ID NO: 131263 - DNA, 17 bp, synthetic construct
  source 1..17: mol_type = other DNA
acccatcccctccttca

SEQ ID NO: 131264 - DNA, 17 bp, synthetic construct
  source 1..17: mol_type = other DNA
cccatcccctccttcac

SEQ ID NO: 131265 - DNA, 17 bp, synthetic construct
  source 1..17: mol_type = other DNA
ccatcccctccttcacc

SEQ ID NO: 131266 - DNA, 17 bp, synthetic construct
  source 1..17: mol_type = other DNA
catcccctccttcaccc

SEQ ID NO: 131267 - DNA, 17 bp, synthetic construct
  source 1..17: mol_type = other DNA
atcccctccttcaccct

SEQ ID NO: 131268 - DNA, 17 bp, synthetic construct
  source 1..17: mol_type = other DNA
tcccctccttcaccctt

SEQ ID NO: 131269 - DNA, 17 bp, synthetic construct
  source 1..17: mol_type = other DNA
cccctccttcacccttg

SEQ ID NO: 131270 - DNA, 17 bp, synthetic construct
  source 1..17: mol_type = other DNA
ccctccttcacccttgg

SEQ ID NO: 131271 - DNA, 17 bp, synthetic construct
  source 1..17: mol_type = other DNA
cctccttcacccttggg

SEQ ID NO: 131272 - DNA, 17 bp, synthetic construct
  source 1..17: mol_type = other DNA
ctccttcacccttggga

SEQ ID NO: 131273 - DNA, 17 bp, synthetic construct
  source 1..17: mol_type = other DNA
tccttcacccttgggac

SEQ ID NO: 131274 - DNA, 17 bp, synthetic construct
  source 1..17: mol_type = other DNA
ccttcacccttgggacc

SEQ ID NO: 131275 - DNA, 17 bp, synthetic construct
  source 1..17: mol_type = other DNA
cttcacccttgggacca

SEQ ID NO: 131276 - DNA, 17 bp, synthetic construct
  source 1..17: mol_type = other DNA
ttcacccttgggaccac

SEQ ID NO: 131277 - DNA, 17 bp, synthetic construct
  source 1..17: mol_type = other DNA
tcacccttgggaccacc

SEQ ID NO: 131278 - DNA, 17 bp, synthetic construct
  source 1..17: mol_type = other DNA
cacccttgggaccaccg

SEQ ID NO: 131279 - DNA, 17 bp, synthetic construct
  source 1..17: mol_type = other DNA
acccttgggaccaccgg

SEQ ID NO: 131280 - DNA, 17 bp, synthetic construct
  source 1..17: mol_type = other DNA
cccttgggaccaccggg

SEQ ID NO: 131281 - DNA, 17 bp, synthetic construct
  source 1..17: mol_type = other DNA
ccttgggaccaccggga

SEQ ID NO: 131282 - DNA, 17 bp, synthetic construct
  source 1..17: mol_type = other DNA
cttgggaccaccgggac

SEQ ID NO: 131283 - DNA, 17 bp, synthetic construct
  source 1..17: mol_type = other DNA
ttgggaccaccgggacc

SEQ ID NO: 131284 - DNA, 17 bp, synthetic construct
  source 1..17: mol_type = other DNA
tgggaccaccgggaccc

SEQ ID NO: 131285 - DNA, 17 bp, synthetic construct
  source 1..17: mol_type = other DNA
gggaccaccgggaccct

SEQ ID NO: 131286 - DNA, 17 bp, synthetic construct
  source 1..17: mol_type = other DNA
ggaccaccgggaccctc

SEQ ID NO: 131287 - DNA, 17 bp, synthetic construct
  source 1..17: mol_type = other DNA
gaccaccgggaccctcc

SEQ ID NO: 131288 - DNA, 17 bp, synthetic construct
  source 1..17: mol_type = other DNA
accaccgggaccctccc

SEQ ID NO: 131289 - DNA, 17 bp, synthetic construct
  source 1..17: mol_type = other DNA
ccaccgggaccctccca

SEQ ID NO: 131290 - DNA, 17 bp, synthetic construct
  source 1..17: mol_type = other DNA
caccgggaccctcccag

SEQ ID NO: 131291 - DNA, 17 bp, synthetic construct
  source 1..17: mol_type = other DNA
accgggaccctcccaga

SEQ ID NO: 131292 - DNA, 17 bp, synthetic construct
  source 1..17: mol_type = other DNA
ccgggaccctcccagaa

SEQ ID NO: 131293 - DNA, 17 bp, synthetic construct
  source 1..17: mol_type = other DNA
cgggaccctcccagaac

SEQ ID NO: 131294 - DNA, 17 bp, synthetic construct
  source 1..17: mol_type = other DNA
gggaccctcccagaaca

SEQ ID NO: 131295 - DNA, 17 bp, synthetic construct
  source 1..17: mol_type = other DNA
ggaccctcccagaacag

SEQ ID NO: 131296 - DNA, 17 bp, synthetic construct
  source 1..17: mol_type = other DNA
gaccctcccagaacaga

SEQ ID NO: 131297 - DNA, 17 bp, synthetic construct
  source 1..17: mol_type = other DNA
accctcccagaacagac

SEQ ID NO: 131298 - DNA, 17 bp, synthetic construct
  source 1..17: mol_type = other DNA
ccctcccagaacagacc

SEQ ID NO: 131299 - DNA, 17 bp, synthetic construct
  source 1..17: mol_type = other DNA
cctcccagaacagacca

SEQ ID NO: 131300 - DNA, 17 bp, synthetic construct
  source 1..17: mol_type = other DNA
ctcccagaacagaccac

SEQ ID NO: 131301 - DNA, 17 bp, synthetic construct
  source 1..17: mol_type = other DNA
tcccagaacagaccacc

SEQ ID NO: 131302 - DNA, 17 bp, synthetic construct
  source 1..17: mol_type = other DNA
cccagaacagaccacca

SEQ ID NO: 131303 - DNA, 17 bp, synthetic construct
  source 1..17: mol_type = other DNA
ccagaacagaccaccac

SEQ ID NO: 131304 - DNA, 17 bp, synthetic construct
  source 1..17: mol_type = other DNA
cagaacagaccaccaca

SEQ ID NO: 131305 - DNA, 17 bp, synthetic construct
  source 1..17: mol_type = other DNA
agaacagaccaccacac

SEQ ID NO: 131306 - DNA, 17 bp, synthetic construct
  source 1..17: mol_type = other DNA
gaacagaccaccacacc

SEQ ID NO: 131307 - DNA, 17 bp, synthetic construct
  source 1..17: mol_type = other DNA
aacagaccaccacaccc

SEQ ID NO: 131308 - DNA, 17 bp, synthetic construct
  source 1..17: mol_type = other DNA
acagaccaccacaccca

SEQ ID NO: 131309 - DNA, 17 bp, synthetic construct
  source 1..17: mol_type = other DNA
cagaccaccacacccat

SEQ ID NO: 131310 - DNA, 17 bp, synthetic construct
  source 1..17: mol_type = other DNA
agaccaccacacccatg

SEQ ID NO: 131311 - DNA, 17 bp, synthetic construct
  source 1..17: mol_type = other DNA
gaccaccacacccatgg

SEQ ID NO: 131312 - DNA, 17 bp, synthetic construct
  source 1..17: mol_type = other DNA
accaccacacccatggc

SEQ ID NO: 131313 - DNA, 17 bp, synthetic construct
  source 1..17: mol_type = other DNA
ccaccacacccatggcc

SEQ ID NO: 131314 - DNA, 17 bp, synthetic construct
  source 1..17: mol_type = other DNA
caccacacccatggcca

SEQ ID NO: 131315 - DNA, 17 bp, synthetic construct
  source 1..17: mol_type = other DNA
accacacccatggccac

SEQ ID NO: 131316 - DNA, 17 bp, synthetic construct
  source 1..17: mol_type = other DNA
ccacacccatggccacc

SEQ ID NO: 131317 - DNA, 17 bp, synthetic construct
  source 1..17: mol_type = other DNA
cacacccatggccacca

SEQ ID NO: 131318 - DNA, 17 bp, synthetic construct
  source 1..17: mol_type = other DNA
acacccatggccaccat

SEQ ID NO: 131319 - DNA, 17 bp, synthetic construct
  source 1..17: mol_type = other DNA
cacccatggccaccatg

SEQ ID NO: 131320 - DNA, 17 bp, synthetic construct
  source 1..17: mol_type = other DNA
acccatggccaccatgt

SEQ ID NO: 131321 - DNA, 17 bp, synthetic construct
  source 1..17: mol_type = other DNA
cccatggccaccatgtc

SEQ ID NO: 131322 - DNA, 17 bp, synthetic construct
  source 1..17: mol_type = other DNA
ccatggccaccatgtcc

SEQ ID NO: 131323 - DNA, 17 bp, synthetic construct
  source 1..17: mol_type = other DNA
catggccaccatgtcca

SEQ ID NO: 131324 - DNA, 17 bp, synthetic construct
  source 1..17: mol_type = other DNA
atggccaccatgtccac

SEQ ID NO: 131325 - DNA, 17 bp, synthetic construct
  source 1..17: mol_type = other DNA
tggccaccatgtccaca

SEQ ID NO: 131326 - DNA, 17 bp, synthetic construct
  source 1..17: mol_type = other DNA
ggccaccatgtccacaa

SEQ ID NO: 131327 - DNA, 17 bp, synthetic construct
  source 1..17: mol_type = other DNA
gccaccatgtccacaat

SEQ ID NO: 131328 - DNA, 17 bp, synthetic construct
  source 1..17: mol_type = other DNA
ccaccatgtccacaatc

SEQ ID NO: 131329 - DNA, 17 bp, synthetic construct
  source 1..17: mol_type = other DNA
caccatgtccacaatcc

SEQ ID NO: 131330 - DNA, 17 bp, synthetic construct
  source 1..17: mol_type = other DNA
accatgtccacaatcca

SEQ ID NO: 131331 - DNA, 17 bp, synthetic construct
  source 1..17: mol_type = other DNA
ccatgtccacaatccac

SEQ ID NO: 131332 - DNA, 17 bp, synthetic construct
  source 1..17: mol_type = other DNA
catgtccacaatccacc

SEQ ID NO: 131333 - DNA, 17 bp, synthetic construct
  source 1..17: mol_type = other DNA
atgtccacaatccaccc

SEQ ID NO: 131334 - DNA, 17 bp, synthetic construct
  source 1..17: mol_type = other DNA
tgtccacaatccacccc

SEQ ID NO: 131335 - DNA, 17 bp, synthetic construct
  source 1..17: mol_type = other DNA
gtccacaatccacccct

SEQ ID NO: 131336 - DNA, 17 bp, synthetic construct
  source 1..17: mol_type = other DNA
tccacaatccacccctc

SEQ ID NO: 131337 - DNA, 17 bp, synthetic construct
  source 1..17: mol_type = other DNA
ccacaatccacccctcc

SEQ ID NO: 131338 - DNA, 17 bp, synthetic construct
  source 1..17: mol_type = other DNA
cacaatccacccctcct

SEQ ID NO: 131339 - DNA, 17 bp, synthetic construct
  source 1..17: mol_type = other DNA
acaatccacccctcctc

SEQ ID NO: 131340 - DNA, 17 bp, synthetic construct
  source 1..17: mol_type = other DNA
caatccacccctcctcc

SEQ ID NO: 131341 - DNA, 17 bp, synthetic construct
  source 1..17: mol_type = other DNA
aatccacccctcctcca

SEQ ID NO: 131342 - DNA, 17 bp, synthetic construct
  source 1..17: mol_type = other DNA
atccacccctcctccac

SEQ ID NO: 131343 - DNA, 17 bp, synthetic construct
  source 1..17: mol_type = other DNA
tccacccctcctccact

SEQ ID NO: 131344 - DNA, 17 bp, synthetic construct
  source 1..17: mol_type = other DNA
ccacccctcctccactc

SEQ ID NO: 131345 - DNA, 17 bp, synthetic construct
  source 1..17: mol_type = other DNA
cacccctcctccactcc

SEQ ID NO: 131346 - DNA, 17 bp, synthetic construct
  source 1..17: mol_type = other DNA
acccctcctccactccg

SEQ ID NO: 131347 - DNA, 17 bp, synthetic construct
  source 1..17: mol_type = other DNA
cccctcctccactccgg

SEQ ID NO: 131348 - DNA, 17 bp, synthetic construct
  source 1..17: mol_type = other DNA
ccctcctccactccgga

SEQ ID NO: 131349 - DNA, 17 bp, synthetic construct
  source 1..17: mol_type = other DNA
cctcctccactccggag

SEQ ID NO: 131350 - DNA, 17 bp, synthetic construct
  source 1..17: mol_type = other DNA
ctcctccactccggaga

SEQ ID NO: 131351 - DNA, 17 bp, synthetic construct
  source 1..17: mol_type = other DNA
tcctccactccggagac

SEQ ID NO: 131352 - DNA, 17 bp, synthetic construct
  source 1..17: mol_type = other DNA
cctccactccggagacc

SEQ ID NO: 131353 - DNA, 17 bp, synthetic construct
  source 1..17: mol_type = other DNA
ctccactccggagacca

SEQ ID NO: 131354 - DNA, 17 bp, synthetic construct
  source 1..17: mol_type = other DNA
tccactccggagaccac

SEQ ID NO: 131355 - DNA, 17 bp, synthetic construct
  source 1..17: mol_type = other DNA
ccactccggagaccacc

SEQ ID NO: 131356 - DNA, 17 bp, synthetic construct
  source 1..17: mol_type = other DNA
cactccggagaccaccc

SEQ ID NO: 131357 - DNA, 17 bp, synthetic construct
  source 1..17: mol_type = other DNA
actccggagaccaccca

SEQ ID NO: 131358 - DNA, 17 bp, synthetic construct
  source 1..17: mol_type = other DNA
ctccggagaccacccac

SEQ ID NO: 131359 - DNA, 17 bp, synthetic construct
  source 1..17: mol_type = other DNA
tccggagaccacccaca

SEQ ID NO: 131360 - DNA, 17 bp, synthetic construct
  source 1..17: mol_type = other DNA
ccggagaccacccacac

SEQ ID NO: 131361 - DNA, 17 bp, synthetic construct
  source 1..17: mol_type = other DNA
cggagaccacccacacc

SEQ ID NO: 131362 - DNA, 17 bp, synthetic construct
  source 1..17: mol_type = other DNA
ggagaccacccacacct

SEQ ID NO: 131363 - DNA, 17 bp, synthetic construct
  source 1..17: mol_type = other DNA
gagaccacccacacctc

SEQ ID NO: 131364 - DNA, 17 bp, synthetic construct
  source 1..17: mol_type = other DNA
agaccacccacacctcc

SEQ ID NO: 131365 - DNA, 17 bp, synthetic construct
  source 1..17: mol_type = other DNA
gaccacccacacctcca

SEQ ID NO: 131366 - DNA, 17 bp, synthetic construct
  source 1..17: mol_type = other DNA
accacccacacctccac

SEQ ID NO: 131367 - DNA, 17 bp, synthetic construct
  source 1..17: mol_type = other DNA
ccacccacacctccaca

SEQ ID NO: 131368 - DNA, 17 bp, synthetic construct
  source 1..17: mol_type = other DNA
cacccacacctccacag

SEQ ID NO: 131369 - DNA, 17 bp, synthetic construct
  source 1..17: mol_type = other DNA
acccacacctccacagt

SEQ ID NO: 131370 - DNA, 17 bp, synthetic construct
  source 1..17: mol_type = other DNA
cccacacctccacagtg

SEQ ID NO: 131371 - DNA, 17 bp, synthetic construct
  source 1..17: mol_type = other DNA
ccacacctccacagtgc

SEQ ID NO: 131372 - DNA, 17 bp, synthetic construct
  source 1..17: mol_type = other DNA
cacacctccacagtgct

SEQ ID NO: 131373 - DNA, 17 bp, synthetic construct
  source 1..17: mol_type = other DNA
acacctccacagtgctg

SEQ ID NO: 131374 - DNA, 17 bp, synthetic construct
  source 1..17: mol_type = other DNA
cacctccacagtgctga

SEQ ID NO: 131375 - DNA, 17 bp, synthetic construct
  source 1..17: mol_type = other DNA
acctccacagtgctgac

SEQ ID NO: 131376 - DNA, 17 bp, synthetic construct
  source 1..17: mol_type = other DNA
cctccacagtgctgacc

SEQ ID NO: 131377 - DNA, 17 bp, synthetic construct
  source 1..17: mol_type = other DNA
ctccacagtgctgacca

SEQ ID NO: 131378 - DNA, 17 bp, synthetic construct
  source 1..17: mol_type = other DNA
tccacagtgctgaccac

SEQ ID NO: 131379 - DNA, 17 bp, synthetic construct
  source 1..17: mol_type = other DNA
ccacagtgctgaccacg

SEQ ID NO: 131380 - DNA, 17 bp, synthetic construct
  source 1..17: mol_type = other DNA
cacagtgctgaccacga

SEQ ID NO: 131381 - DNA, 17 bp, synthetic construct
  source 1..17: mol_type = other DNA
acagtgctgaccacgaa

SEQ ID NO: 131382 - DNA, 17 bp, synthetic construct
  source 1..17: mol_type = other DNA
cagtgctgaccacgaag

SEQ ID NO: 131383 - DNA, 17 bp, synthetic construct
  source 1..17: mol_type = other DNA
agtgctgaccacgaagg

SEQ ID NO: 131384 - DNA, 17 bp, synthetic construct
  source 1..17: mol_type = other DNA
gtgctgaccacgaaggc

SEQ ID NO: 131385 - DNA, 17 bp, synthetic construct
  source 1..17: mol_type = other DNA
tgctgaccacgaaggcc

SEQ ID NO: 131386 - DNA, 17 bp, synthetic construct
  source 1..17: mol_type = other DNA
gctgaccacgaaggcca

SEQ ID NO: 131387 - DNA, 17 bp, synthetic construct
  source 1..17: mol_type = other DNA
ctgaccacgaaggccac

SEQ ID NO: 131388 - DNA, 17 bp, synthetic construct
  source 1..17: mol_type = other DNA
tgaccacgaaggccacc

SEQ ID NO: 131389 - DNA, 17 bp, synthetic construct
  source 1..17: mol_type = other DNA
gaccacgaaggccacca

SEQ ID NO: 131390 - DNA, 17 bp, synthetic construct
  source 1..17: mol_type = other DNA
accacgaaggccaccac

SEQ ID NO: 131391 - DNA, 17 bp, synthetic construct
  source 1..17: mol_type = other DNA
ccacgaaggccaccacg

SEQ ID NO: 131392 - DNA, 17 bp, synthetic construct
  source 1..17: mol_type = other DNA
cacgaaggccaccacga

SEQ ID NO: 131393 - DNA, 17 bp, synthetic construct
  source 1..17: mol_type = other DNA
acgaaggccaccacgac

SEQ ID NO: 131394 - DNA, 17 bp, synthetic construct
  source 1..17: mol_type = other DNA
cgaaggccaccacgaca

SEQ ID NO: 131395 - DNA, 17 bp, synthetic construct
  source 1..17: mol_type = other DNA
gaaggccaccacgacaa

SEQ ID NO: 131396 - DNA, 17 bp, synthetic construct
  source 1..17: mol_type = other DNA
aaggccaccacgacaag

SEQ ID NO: 131397 - DNA, 17 bp, synthetic construct
  source 1..17: mol_type = other DNA
aggccaccacgacaagg

SEQ ID NO: 131398 - DNA, 17 bp, synthetic construct
  source 1..17: mol_type = other DNA
ggccaccacgacaaggg

SEQ ID NO: 131399 - DNA, 17 bp, synthetic construct
  source 1..17: mol_type = other DNA
gccaccacgacaagggc

SEQ ID NO: 131400 - DNA, 17 bp, synthetic construct
  source 1..17: mol_type = other DNA
ccaccacgacaagggcc

SEQ ID NO: 131401 - DNA, 17 bp, synthetic construct
  source 1..17: mol_type = other DNA
caccacgacaagggcca

SEQ ID NO: 131402 - DNA, 17 bp, synthetic construct
  source 1..17: mol_type = other DNA
accacgacaagggccac

SEQ ID NO: 131403 - DNA, 17 bp, synthetic construct
  source 1..17: mol_type = other DNA
ccacgacaagggccacc

SEQ ID NO: 131404 - DNA, 17 bp, synthetic construct
  source 1..17: mol_type = other DNA
cacgacaagggccacca

SEQ ID NO: 131405 - DNA, 17 bp, synthetic construct
  source 1..17: mol_type = other DNA
acgacaagggccaccag

SEQ ID NO: 131406 - DNA, 17 bp, synthetic construct
  source 1..17: mol_type = other DNA
cgacaagggccaccagt

SEQ ID NO: 131407 - DNA, 17 bp, synthetic construct
  source 1..17: mol_type = other DNA
gacaagggccaccagtt

SEQ ID NO: 131408 - DNA, 17 bp, synthetic construct
  source 1..17: mol_type = other DNA
acaagggccaccagttc

SEQ ID NO: 131409 - DNA, 17 bp, synthetic construct
  source 1..17: mol_type = other DNA
caagggccaccagttcc

SEQ ID NO: 131410 - DNA, 17 bp, synthetic construct
  source 1..17: mol_type = other DNA
aagggccaccagttcca

SEQ ID NO: 131411 - DNA, 17 bp, synthetic construct
  source 1..17: mol_type = other DNA
agggccaccagttccat

SEQ ID NO: 131412 - DNA, 17 bp, synthetic construct
  source 1..17: mol_type = other DNA
gggccaccagttccatg

SEQ ID NO: 131413 - DNA, 17 bp, synthetic construct
  source 1..17: mol_type = other DNA
ggccaccagttccatgt

SEQ ID NO: 131414 - DNA, 17 bp, synthetic construct
  source 1..17: mol_type = other DNA
gccaccagttccatgtc

SEQ ID NO: 131415 - DNA, 17 bp, synthetic construct
  source 1..17: mol_type = other DNA
ccaccagttccatgtcc

SEQ ID NO: 131416 - DNA, 17 bp, synthetic construct
  source 1..17: mol_type = other DNA
caccagttccatgtcca

SEQ ID NO: 131417 - DNA, 17 bp, synthetic construct
  source 1..17: mol_type = other DNA
accagttccatgtccac

SEQ ID NO: 131418 - DNA, 17 bp, synthetic construct
  source 1..17: mol_type = other DNA
ccagttccatgtccacc

SEQ ID NO: 131419 - DNA, 17 bp, synthetic construct
  source 1..17: mol_type = other DNA
cagttccatgtccaccc

SEQ ID NO: 131420 - DNA, 17 bp, synthetic construct
  source 1..17: mol_type = other DNA
agttccatgtccacccc

SEQ ID NO: 131421 - DNA, 17 bp, synthetic construct
  source 1..17: mol_type = other DNA
gttccatgtccaccccc

SEQ ID NO: 131422 - DNA, 17 bp, synthetic construct
  source 1..17: mol_type = other DNA
ttccatgtccaccccct

SEQ ID NO: 131423 - DNA, 17 bp, synthetic construct
  source 1..17: mol_type = other DNA
tccatgtccaccccctc

SEQ ID NO: 131424 - DNA, 17 bp, synthetic construct
  source 1..17: mol_type = other DNA
ccatgtccaccccctcc

SEQ ID NO: 131425 - DNA, 17 bp, synthetic construct
  source 1..17: mol_type = other DNA
catgtccaccccctcct

SEQ ID NO: 131426 - DNA, 17 bp, synthetic construct
  source 1..17: mol_type = other DNA
atgtccaccccctcctc

SEQ ID NO: 131427 - DNA, 17 bp, synthetic construct
  source 1..17: mol_type = other DNA
tgtccaccccctcctcc

SEQ ID NO: 131428 - DNA, 17 bp, synthetic construct
  source 1..17: mol_type = other DNA
gtccaccccctcctcca

SEQ ID NO: 131429 - DNA, 17 bp, synthetic construct
  source 1..17: mol_type = other DNA
tccaccccctcctccac

SEQ ID NO: 131430 - DNA, 17 bp, synthetic construct
  source 1..17: mol_type = other DNA
ccaccccctcctccact

SEQ ID NO: 131431 - DNA, 17 bp, synthetic construct
  source 1..17: mol_type = other DNA
caccccctcctccactc

SEQ ID NO: 131432 - DNA, 17 bp, synthetic construct
  source 1..17: mol_type = other DNA
accccctcctccactcc

SEQ ID NO: 131433 - DNA, 17 bp, synthetic construct
  source 1..17: mol_type = other DNA
ccccctcctccactccg

SEQ ID NO: 131434 - DNA, 17 bp, synthetic construct
  source 1..17: mol_type = other DNA
cccctcctccactccgg

SEQ ID NO: 131435 - DNA, 17 bp, synthetic construct
  source 1..17: mol_type = other DNA
ccctcctccactccggg

SEQ ID NO: 131436 - DNA, 17 bp, synthetic construct
  source 1..17: mol_type = other DNA
cctcctccactccgggg

SEQ ID NO: 131437 - DNA, 17 bp, synthetic construct
  source 1..17: mol_type = other DNA
ctcctccactccgggga

SEQ ID NO: 131438 - DNA, 17 bp, synthetic construct
  source 1..17: mol_type = other DNA
tcctccactccggggac

SEQ ID NO: 131439 - DNA, 17 bp, synthetic construct
  source 1..17: mol_type = other DNA
cctccactccggggacg

SEQ ID NO: 131440 - DNA, 17 bp, synthetic construct
  source 1..17: mol_type = other DNA
ctccactccggggacga

SEQ ID NO: 131441 - DNA, 17 bp, synthetic construct
  source 1..17: mol_type = other DNA
tccactccggggacgac

SEQ ID NO: 131442 - DNA, 17 bp, synthetic construct
  source 1..17: mol_type = other DNA
ccactccggggacgacc

SEQ ID NO: 131443 - DNA, 17 bp, synthetic construct
  source 1..17: mol_type = other DNA
cactccggggacgacct

SEQ ID NO: 131444 - DNA, 17 bp, synthetic construct
  source 1..17: mol_type = other DNA
actccggggacgacctg

SEQ ID NO: 131445 - DNA, 17 bp, synthetic construct
  source 1..17: mol_type = other DNA
ctccggggacgacctgg

SEQ ID NO: 131446 - DNA, 17 bp, synthetic construct
  source 1..17: mol_type = other DNA
tccggggacgacctgga

SEQ ID NO: 131447 - DNA, 17 bp, synthetic construct
  source 1..17: mol_type = other DNA
ccggggacgacctggat

SEQ ID NO: 131448 - DNA, 17 bp, synthetic construct
  source 1..17: mol_type = other DNA
cggggacgacctggatc

SEQ ID NO: 131449 - DNA, 17 bp, synthetic construct
  source 1..17: mol_type = other DNA
ggggacgacctggatcc

SEQ ID NO: 131450 - DNA, 17 bp, synthetic construct
  source 1..17: mol_type = other DNA
gggacgacctggatcct

SEQ ID NO: 131451 - DNA, 17 bp, synthetic construct
  source 1..17: mol_type = other DNA
ggacgacctggatcctc

SEQ ID NO: 131452 - DNA, 17 bp, synthetic construct
  source 1..17: mol_type = other DNA
gacgacctggatcctca

SEQ ID NO: 131453 - DNA, 17 bp, synthetic construct
  source 1..17: mol_type = other DNA
acgacctggatcctcac

SEQ ID NO: 131454 - DNA, 17 bp, synthetic construct
  source 1..17: mol_type = other DNA
cgacctggatcctcaca

SEQ ID NO: 131455 - DNA, 17 bp, synthetic construct
  source 1..17: mol_type = other DNA
gacctggatcctcacag

SEQ ID NO: 131456 - DNA, 17 bp, synthetic construct
  source 1..17: mol_type = other DNA
acctggatcctcacaga

SEQ ID NO: 131457 - DNA, 17 bp, synthetic construct
  source 1..17: mol_type = other DNA
cctggatcctcacagag

SEQ ID NO: 131458 - DNA, 17 bp, synthetic construct
  source 1..17: mol_type = other DNA
ctggatcctcacagagc

SEQ ID NO: 131459 - DNA, 17 bp, synthetic construct
  source 1..17: mol_type = other DNA
tggatcctcacagagct

SEQ ID NO: 131460 - DNA, 17 bp, synthetic construct
  source 1..17: mol_type = other DNA
ggatcctcacagagctg

SEQ ID NO: 131461 - DNA, 17 bp, synthetic construct
  source 1..17: mol_type = other DNA
gatcctcacagagctga

SEQ ID NO: 131462 - DNA, 17 bp, synthetic construct
  source 1..17: mol_type = other DNA
atcctcacagagctgac

SEQ ID NO: 131463 - DNA, 17 bp, synthetic construct
  source 1..17: mol_type = other DNA
tcctcacagagctgacc

SEQ ID NO: 131464 - DNA, 17 bp, synthetic construct
  source 1..17: mol_type = other DNA
cctcacagagctgacca

SEQ ID NO: 131465 - DNA, 17 bp, synthetic construct
  source 1..17: mol_type = other DNA
ctcacagagctgaccac

SEQ ID NO: 131466 - DNA, 17 bp, synthetic construct
  source 1..17: mol_type = other DNA
tcacagagctgaccaca

SEQ ID NO: 131467 - DNA, 17 bp, synthetic construct
  source 1..17: mol_type = other DNA
cacagagctgaccacag

SEQ ID NO: 131468 - DNA, 17 bp, synthetic construct
  source 1..17: mol_type = other DNA
acagagctgaccacagc

SEQ ID NO: 131469 - DNA, 17 bp, synthetic construct
  source 1..17: mol_type = other DNA
cagagctgaccacagca

SEQ ID NO: 131470 - DNA, 17 bp, synthetic construct
  source 1..17: mol_type = other DNA
agagctgaccacagcag

SEQ ID NO: 131471 - DNA, 17 bp, synthetic construct
  source 1..17: mol_type = other DNA
gagctgaccacagcagc

SEQ ID NO: 131472 - DNA, 17 bp, synthetic construct
  source 1..17: mol_type = other DNA
agctgaccacagcagcc

SEQ ID NO: 131473 - DNA, 17 bp, synthetic construct
  source 1..17: mol_type = other DNA
gctgaccacagcagcca

SEQ ID NO: 131474 - DNA, 17 bp, synthetic construct
  source 1..17: mol_type = other DNA
ctgaccacagcagccac

SEQ ID NO: 131475 - DNA, 17 bp, synthetic construct
  source 1..17: mol_type = other DNA
tgaccacagcagccact

SEQ ID NO: 131476 - DNA, 17 bp, synthetic construct
  source 1..17: mol_type = other DNA
gaccacagcagccacta

SEQ ID NO: 131477 - DNA, 17 bp, synthetic construct
  source 1..17: mol_type = other DNA
accacagcagccactac

SEQ ID NO: 131478 - DNA, 17 bp, synthetic construct
  source 1..17: mol_type = other DNA
ccacagcagccactaca

SEQ ID NO: 131479 - DNA, 17 bp, synthetic construct
  source 1..17: mol_type = other DNA
cacagcagccactacaa

SEQ ID NO: 131480 - DNA, 17 bp, synthetic construct
  source 1..17: mol_type = other DNA
acagcagccactacaac

SEQ ID NO: 131481 - DNA, 17 bp, synthetic construct
  source 1..17: mol_type = other DNA
cagcagccactacaact

SEQ ID NO: 131482 - DNA, 17 bp, synthetic construct
  source 1..17: mol_type = other DNA
agcagccactacaactg

SEQ ID NO: 131483 - DNA, 17 bp, synthetic construct
  source 1..17: mol_type = other DNA
gcagccactacaactgc

SEQ ID NO: 131484 - DNA, 17 bp, synthetic construct
  source 1..17: mol_type = other DNA
cagccactacaactgca

SEQ ID NO: 131485 - DNA, 17 bp, synthetic construct
  source 1..17: mol_type = other DNA
agccactacaactgcag

SEQ ID NO: 131486 - DNA, 17 bp, synthetic construct
  source 1..17: mol_type = other DNA
gccactacaactgcagc

SEQ ID NO: 131487 - DNA, 17 bp, synthetic construct
  source 1..17: mol_type = other DNA
ccactacaactgcagcc

SEQ ID NO: 131488 - DNA, 17 bp, synthetic construct
  source 1..17: mol_type = other DNA
cactacaactgcagcca

SEQ ID NO: 131489 - DNA, 17 bp, synthetic construct
  source 1..17: mol_type = other DNA
actacaactgcagccac

SEQ ID NO: 131490 - DNA, 17 bp, synthetic construct
  source 1..17: mol_type = other DNA
ctacaactgcagccact

SEQ ID NO: 131491 - DNA, 17 bp, synthetic construct
  source 1..17: mol_type = other DNA
tacaactgcagccactg

SEQ ID NO: 131492 - DNA, 17 bp, synthetic construct
  source 1..17: mol_type = other DNA
acaactgcagccactgg

SEQ ID NO: 131493 - DNA, 17 bp, synthetic construct
  source 1..17: mol_type = other DNA
caactgcagccactggc

SEQ ID NO: 131494 - DNA, 17 bp, synthetic construct
  source 1..17: mol_type = other DNA
aactgcagccactggcc

SEQ ID NO: 131495 - DNA, 17 bp, synthetic construct
  source 1..17: mol_type = other DNA
actgcagccactggccc

SEQ ID NO: 131496 - DNA, 17 bp, synthetic construct
  source 1..17: mol_type = other DNA
ctgcagccactggcccc

SEQ ID NO: 131497 - DNA, 17 bp, synthetic construct
  source 1..17: mol_type = other DNA
tgcagccactggcccca

SEQ ID NO: 131498 - DNA, 17 bp, synthetic construct
  source 1..17: mol_type = other DNA
gcagccactggccccac

SEQ ID NO: 131499 - DNA, 17 bp, synthetic construct
  source 1..17: mol_type = other DNA
cagccactggccccacg

SEQ ID NO: 131500 - DNA, 17 bp, synthetic construct
  source 1..17: mol_type = other DNA
agccactggccccacgg

SEQ ID NO: 131501 - DNA, 17 bp, synthetic construct
  source 1..17: mol_type = other DNA
gccactggccccacggc

SEQ ID NO: 131502 - DNA, 17 bp, synthetic construct
  source 1..17: mol_type = other DNA
ccactggccccacggcc

SEQ ID NO: 131503 - DNA, 17 bp, synthetic construct
  source 1..17: mol_type = other DNA
cactggccccacggcca

SEQ ID NO: 131504 - DNA, 17 bp, synthetic construct
  source 1..17: mol_type = other DNA
actggccccacggccac

SEQ ID NO: 131505 - DNA, 17 bp, synthetic construct
  source 1..17: mol_type = other DNA
ctggccccacggccacc

SEQ ID NO: 131506 - DNA, 17 bp, synthetic construct
  source 1..17: mol_type = other DNA
tggccccacggccaccc

SEQ ID NO: 131507 - DNA, 17 bp, synthetic construct
  source 1..17: mol_type = other DNA
ggccccacggccacccc

SEQ ID NO: 131508 - DNA, 17 bp, synthetic construct
  source 1..17: mol_type = other DNA
gccccacggccaccccg

SEQ ID NO: 131509 - DNA, 17 bp, synthetic construct
  source 1..17: mol_type = other DNA
ccccacggccaccccgt

SEQ ID NO: 131510 - DNA, 17 bp, synthetic construct
  source 1..17: mol_type = other DNA
cccacggccaccccgtc

SEQ ID NO: 131511 - DNA, 17 bp, synthetic construct
  source 1..17: mol_type = other DNA
ccacggccaccccgtcc

SEQ ID NO: 131512 - DNA, 17 bp, synthetic construct
  source 1..17: mol_type = other DNA
cacggccaccccgtcct

SEQ ID NO: 131513 - DNA, 17 bp, synthetic construct
  source 1..17: mol_type = other DNA
acggccaccccgtcctc

SEQ ID NO: 131514 - DNA, 17 bp, synthetic construct
  source 1..17: mol_type = other DNA
cggccaccccgtcctcc

SEQ ID NO: 131515 - DNA, 17 bp, synthetic construct
  source 1..17: mol_type = other DNA
ggccaccccgtcctcca

SEQ ID NO: 131516 - DNA, 17 bp, synthetic construct
  source 1..17: mol_type = other DNA
gccaccccgtcctccac

SEQ ID NO: 131517 - DNA, 17 bp, synthetic construct
  source 1..17: mol_type = other DNA
ccaccccgtcctccacc

SEQ ID NO: 131518 - DNA, 17 bp, synthetic construct
  source 1..17: mol_type = other DNA
caccccgtcctccaccc

SEQ ID NO: 131519 - DNA, 17 bp, synthetic construct
  source 1..17: mol_type = other DNA
accccgtcctccacccc

SEQ ID NO: 131520 - DNA, 17 bp, synthetic construct
  source 1..17: mol_type = other DNA
ccccgtcctccacccca

SEQ ID NO: 131521 - DNA, 17 bp, synthetic construct
  source 1..17: mol_type = other DNA
cccgtcctccaccccag

SEQ ID NO: 131522 - DNA, 17 bp, synthetic construct
  source 1..17: mol_type = other DNA
ccgtcctccaccccagg

SEQ ID NO: 131523 - DNA, 17 bp, synthetic construct
  source 1..17: mol_type = other DNA
cgtcctccaccccaggg

SEQ ID NO: 131524 - DNA, 17 bp, synthetic construct
  source 1..17: mol_type = other DNA
gtcctccaccccaggga

SEQ ID NO: 131525 - DNA, 17 bp, synthetic construct
  source 1..17: mol_type = other DNA
tcctccaccccagggac

SEQ ID NO: 131526 - DNA, 17 bp, synthetic construct
  source 1..17: mol_type = other DNA
cctccaccccagggacc

SEQ ID NO: 131527 - DNA, 17 bp, synthetic construct
  source 1..17: mol_type = other DNA
ctccaccccagggacca

SEQ ID NO: 131528 - DNA, 17 bp, synthetic construct
  source 1..17: mol_type = other DNA
tccaccccagggaccac

SEQ ID NO: 131529 - DNA, 17 bp, synthetic construct
  source 1..17: mol_type = other DNA
ccaccccagggaccacc

SEQ ID NO: 131530 - DNA, 17 bp, synthetic construct
  source 1..17: mol_type = other DNA
caccccagggaccacct

SEQ ID NO: 131531 - DNA, 17 bp, synthetic construct
  source 1..17: mol_type = other DNA
accccagggaccacctg

SEQ ID NO: 131532 - DNA, 17 bp, synthetic construct
  source 1..17: mol_type = other DNA
ccccagggaccacctgg

SEQ ID NO: 131533 - DNA, 17 bp, synthetic construct
  source 1..17: mol_type = other DNA
cccagggaccacctgga

SEQ ID NO: 131534 - DNA, 17 bp, synthetic construct
  source 1..17: mol_type = other DNA
ccagggaccacctggat

SEQ ID NO: 131535 - DNA, 17 bp, synthetic construct
  source 1..17: mol_type = other DNA
cagggaccacctggatc

SEQ ID NO: 131536 - DNA, 17 bp, synthetic construct
  source 1..17: mol_type = other DNA
agggaccacctggatcc

SEQ ID NO: 131537 - DNA, 17 bp, synthetic construct
  source 1..17: mol_type = other DNA
gggaccacctggatcct

SEQ ID NO: 131538 - DNA, 17 bp, synthetic construct
  source 1..17: mol_type = other DNA
ggaccacctggatcctc

SEQ ID NO: 131539 - DNA, 17 bp, synthetic construct
  source 1..17: mol_type = other DNA
gaccacctggatcctca

SEQ ID NO: 131540 - DNA, 17 bp, synthetic construct
  source 1..17: mol_type = other DNA
accacctggatcctcac

SEQ ID NO: 131541 - DNA, 17 bp, synthetic construct
  source 1..17: mol_type = other DNA
ccacctggatcctcaca

SEQ ID NO: 131542 - DNA, 17 bp, synthetic construct
  source 1..17: mol_type = other DNA
cacctggatcctcacag

SEQ ID NO: 131543 - DNA, 17 bp, synthetic construct
  source 1..17: mol_type = other DNA
acctggatcctcacaga

SEQ ID NO: 131544 - DNA, 17 bp, synthetic construct
  source 1..17: mol_type = other DNA
cctggatcctcacagag

SEQ ID NO: 131545 - DNA, 17 bp, synthetic construct
  source 1..17: mol_type = other DNA
ctggatcctcacagagc

SEQ ID NO: 131546 - DNA, 17 bp, synthetic construct
  source 1..17: mol_type = other DNA
tggatcctcacagagcc

SEQ ID NO: 131547 - DNA, 17 bp, synthetic construct
  source 1..17: mol_type = other DNA
ggatcctcacagagccc

SEQ ID NO: 131548 - DNA, 17 bp, synthetic construct
  source 1..17: mol_type = other DNA
gatcctcacagagccca

SEQ ID NO: 131549 - DNA, 17 bp, synthetic construct
  source 1..17: mol_type = other DNA
atcctcacagagcccag

SEQ ID NO: 131550 - DNA, 17 bp, synthetic construct
  source 1..17: mol_type = other DNA
tcctcacagagcccagc

SEQ ID NO: 131551 - DNA, 17 bp, synthetic construct
  source 1..17: mol_type = other DNA
cctcacagagcccagca

SEQ ID NO: 131552 - DNA, 17 bp, synthetic construct
  source 1..17: mol_type = other DNA
ctcacagagcccagcac

SEQ ID NO: 131553 - DNA, 17 bp, synthetic construct
  source 1..17: mol_type = other DNA
tcacagagcccagcact

SEQ ID NO: 131554 - DNA, 17 bp, synthetic construct
  source 1..17: mol_type = other DNA
cacagagcccagcacta

SEQ ID NO: 131555 - DNA, 17 bp, synthetic construct
  source 1..17: mol_type = other DNA
acagagcccagcactac

SEQ ID NO: 131556 - DNA, 17 bp, synthetic construct
  source 1..17: mol_type = other DNA
cagagcccagcactaca

SEQ ID NO: 131557 - DNA, 17 bp, synthetic construct
  source 1..17: mol_type = other DNA
agagcccagcactacag

SEQ ID NO: 131558 - DNA, 17 bp, synthetic construct
  source 1..17: mol_type = other DNA
gagcccagcactacagc

SEQ ID NO: 131559 - DNA, 17 bp, synthetic construct
  source 1..17: mol_type = other DNA
agcccagcactacagcc

SEQ ID NO: 131560 - DNA, 17 bp, synthetic construct
  source 1..17: mol_type = other DNA
gcccagcactacagcca

SEQ ID NO: 131561 - DNA, 17 bp, synthetic construct
  source 1..17: mol_type = other DNA
cccagcactacagccac

SEQ ID NO: 131562 - DNA, 17 bp, synthetic construct
  source 1..17: mol_type = other DNA
ccagcactacagccacc

SEQ ID NO: 131563 - DNA, 17 bp, synthetic construct
  source 1..17: mol_type = other DNA
cagcactacagccaccg

SEQ ID NO: 131564 - DNA, 17 bp, synthetic construct
  source 1..17: mol_type = other DNA
agcactacagccaccgt

SEQ ID NO: 131565 - DNA, 17 bp, synthetic construct
  source 1..17: mol_type = other DNA
gcactacagccaccgtg

SEQ ID NO: 131566 - DNA, 17 bp, synthetic construct
  source 1..17: mol_type = other DNA
cactacagccaccgtga

SEQ ID NO: 131567 - DNA, 17 bp, synthetic construct
  source 1..17: mol_type = other DNA
actacagccaccgtgac

SEQ ID NO: 131568 - DNA, 17 bp, synthetic construct
  source 1..17: mol_type = other DNA
ctacagccaccgtgacg

SEQ ID NO: 131569 - DNA, 17 bp, synthetic construct
  source 1..17: mol_type = other DNA
tacagccaccgtgacgg

SEQ ID NO: 131570 - DNA, 17 bp, synthetic construct
  source 1..17: mol_type = other DNA
acagccaccgtgacggt

SEQ ID NO: 131571 - DNA, 17 bp, synthetic construct
  source 1..17: mol_type = other DNA
cagccaccgtgacggtg

SEQ ID NO: 131572 - DNA, 17 bp, synthetic construct
  source 1..17: mol_type = other DNA
agccaccgtgacggtgc

SEQ ID NO: 131573 - DNA, 17 bp, synthetic construct
  source 1..17: mol_type = other DNA
gccaccgtgacggtgcc

SEQ ID NO: 131574 - DNA, 17 bp, synthetic construct
  source 1..17: mol_type = other DNA
ccaccgtgacggtgccc

SEQ ID NO: 131575 - DNA, 17 bp, synthetic construct
  source 1..17: mol_type = other DNA
caccgtgacggtgccca

SEQ ID NO: 131576 - DNA, 17 bp, synthetic construct
  source 1..17: mol_type = other DNA
accgtgacggtgcccac

SEQ ID NO: 131577 - DNA, 17 bp, synthetic construct
  source 1..17: mol_type = other DNA
ccgtgacggtgcccacc

SEQ ID NO: 131578 - DNA, 17 bp, synthetic construct
  source 1..17: mol_type = other DNA
cgtgacggtgcccaccg

SEQ ID NO: 131579 - DNA, 17 bp, synthetic construct
  source 1..17: mol_type = other DNA
gtgacggtgcccaccgg

SEQ ID NO: 131580 - DNA, 17 bp, synthetic construct
  source 1..17: mol_type = other DNA
tgacggtgcccaccgga

SEQ ID NO: 131581 - DNA, 17 bp, synthetic construct
  source 1..17: mol_type = other DNA
gacggtgcccaccggat

SEQ ID NO: 131582 - DNA, 17 bp, synthetic construct
  source 1..17: mol_type = other DNA
acggtgcccaccggatc

SEQ ID NO: 131583 - DNA, 17 bp, synthetic construct
  source 1..17: mol_type = other DNA
cggtgcccaccggatcc

SEQ ID NO: 131584 - DNA, 17 bp, synthetic construct
  source 1..17: mol_type = other DNA
ggtgcccaccggatcca

SEQ ID NO: 131585 - DNA, 17 bp, synthetic construct
  source 1..17: mol_type = other DNA
gtgcccaccggatccac

SEQ ID NO: 131586 - DNA, 17 bp, synthetic construct
  source 1..17: mol_type = other DNA
tgcccaccggatccacg

SEQ ID NO: 131587 - DNA, 17 bp, synthetic construct
  source 1..17: mol_type = other DNA
gcccaccggatccacgg

SEQ ID NO: 131588 - DNA, 17 bp, synthetic construct
  source 1..17: mol_type = other DNA
cccaccggatccacggc

SEQ ID NO: 131589 - DNA, 17 bp, synthetic construct
  source 1..17: mol_type = other DNA
ccaccggatccacggcc

SEQ ID NO: 131590 - DNA, 17 bp, synthetic construct
  source 1..17: mol_type = other DNA
caccggatccacggcca

SEQ ID NO: 131591 - DNA, 17 bp, synthetic construct
  source 1..17: mol_type = other DNA
accggatccacggccac

SEQ ID NO: 131592 - DNA, 17 bp, synthetic construct
  source 1..17: mol_type = other DNA
ccggatccacggccacc

SEQ ID NO: 131593 - DNA, 17 bp, synthetic construct
  source 1..17: mol_type = other DNA
cggatccacggccaccg

SEQ ID NO: 131594 - DNA, 17 bp, synthetic construct
  source 1..17: mol_type = other DNA
ggatccacggccaccgc

SEQ ID NO: 131595 - DNA, 17 bp, synthetic construct
  source 1..17: mol_type = other DNA
gatccacggccaccgcc

SEQ ID NO: 131596 - DNA, 17 bp, synthetic construct
  source 1..17: mol_type = other DNA
atccacggccaccgcct

SEQ ID NO: 131597 - DNA, 17 bp, synthetic construct
  source 1..17: mol_type = other DNA
tccacggccaccgcctc

SEQ ID NO: 131598 - DNA, 17 bp, synthetic construct
  source 1..17: mol_type = other DNA
ccacggccaccgcctcc

SEQ ID NO: 131599 - DNA, 17 bp, synthetic construct
  source 1..17: mol_type = other DNA
cacggccaccgcctcct

SEQ ID NO: 131600 - DNA, 17 bp, synthetic construct
  source 1..17: mol_type = other DNA
acggccaccgcctcctc

SEQ ID NO: 131601 - DNA, 17 bp, synthetic construct
  source 1..17: mol_type = other DNA
cggccaccgcctcctcc

SEQ ID NO: 131602 - DNA, 17 bp, synthetic construct
  source 1..17: mol_type = other DNA
ggccaccgcctcctcca

SEQ ID NO: 131603 - DNA, 17 bp, synthetic construct
  source 1..17: mol_type = other DNA
gccaccgcctcctccac

SEQ ID NO: 131604 - DNA, 17 bp, synthetic construct
  source 1..17: mol_type = other DNA
ccaccgcctcctccacc

SEQ ID NO: 131605 - DNA, 17 bp, synthetic construct
  source 1..17: mol_type = other DNA
caccgcctcctccaccc

SEQ ID NO: 131606 - DNA, 17 bp, synthetic construct
  source 1..17: mol_type = other DNA
accgcctcctccacccg

SEQ ID NO: 131607 - DNA, 17 bp, synthetic construct
  source 1..17: mol_type = other DNA
ccgcctcctccacccgg

SEQ ID NO: 131608 - DNA, 17 bp, synthetic construct
  source 1..17: mol_type = other DNA
cgcctcctccacccggg

SEQ ID NO: 131609 - DNA, 17 bp, synthetic construct
  source 1..17: mol_type = other DNA
gcctcctccacccgggc

SEQ ID NO: 131610 - DNA, 17 bp, synthetic construct
  source 1..17: mol_type = other DNA
cctcctccacccgggca

SEQ ID NO: 131611 - DNA, 17 bp, synthetic construct
  source 1..17: mol_type = other DNA
ctcctccacccgggcaa

SEQ ID NO: 131612 - DNA, 17 bp, synthetic construct
  source 1..17: mol_type = other DNA
tcctccacccgggcaac

SEQ ID NO: 131613 - DNA, 17 bp, synthetic construct
  source 1..17: mol_type = other DNA
cctccacccgggcaact

SEQ ID NO: 131614 - DNA, 17 bp, synthetic construct
  source 1..17: mol_type = other DNA
ctccacccgggcaactg

SEQ ID NO: 131615 - DNA, 17 bp, synthetic construct
  source 1..17: mol_type = other DNA
tccacccgggcaactgc

SEQ ID NO: 131616 - DNA, 17 bp, synthetic construct
  source 1..17: mol_type = other DNA
ccacccgggcaactgct

SEQ ID NO: 131617 - DNA, 17 bp, synthetic construct
  source 1..17: mol_type = other DNA
cacccgggcaactgctg

SEQ ID NO: 131618 - DNA, 17 bp, synthetic construct
  source 1..17: mol_type = other DNA
acccgggcaactgctgg

SEQ ID NO: 131619 - DNA, 17 bp, synthetic construct
  source 1..17: mol_type = other DNA
cccgggcaactgctggc

SEQ ID NO: 131620 - DNA, 17 bp, synthetic construct
  source 1..17: mol_type = other DNA
ccgggcaactgctggca

SEQ ID NO: 131621 - DNA, 17 bp, synthetic construct
  source 1..17: mol_type = other DNA
cgggcaactgctggcac

SEQ ID NO: 131622 - DNA, 17 bp, synthetic construct
  source 1..17: mol_type = other DNA
gggcaactgctggcacc

SEQ ID NO: 131623 - DNA, 17 bp, synthetic construct
  source 1..17: mol_type = other DNA
ggcaactgctggcaccc

SEQ ID NO: 131624 - DNA, 17 bp, synthetic construct
  source 1..17: mol_type = other DNA
gcaactgctggcaccct

SEQ ID NO: 131625 - DNA, 17 bp, synthetic construct
  source 1..17: mol_type = other DNA
caactgctggcaccctc

SEQ ID NO: 131626 - DNA, 17 bp, synthetic construct
  source 1..17: mol_type = other DNA
aactgctggcaccctca

SEQ ID NO: 131627 - DNA, 17 bp, synthetic construct
  source 1..17: mol_type = other DNA
actgctggcaccctcaa

SEQ ID NO: 131628 - DNA, 17 bp, synthetic construct
  source 1..17: mol_type = other DNA
ctgctggcaccctcaaa

SEQ ID NO: 131629 - DNA, 17 bp, synthetic construct
  source 1..17: mol_type = other DNA
tgctggcaccctcaaag

SEQ ID NO: 131630 - DNA, 17 bp, synthetic construct
  source 1..17: mol_type = other DNA
gctggcaccctcaaagt

SEQ ID NO: 131631 - DNA, 17 bp, synthetic construct
  source 1..17: mol_type = other DNA
ctggcaccctcaaagtg

SEQ ID NO: 131632 - DNA, 17 bp, synthetic construct
  source 1..17: mol_type = other DNA
tggcaccctcaaagtgc

SEQ ID NO: 131633 - DNA, 17 bp, synthetic construct
  source 1..17: mol_type = other DNA
ggcaccctcaaagtgct

SEQ ID NO: 131634 - DNA, 17 bp, synthetic construct
  source 1..17: mol_type = other DNA
gcaccctcaaagtgctg

SEQ ID NO: 131635 - DNA, 17 bp, synthetic construct
  source 1..17: mol_type = other DNA
caccctcaaagtgctga

SEQ ID NO: 131636 - DNA, 17 bp, synthetic construct
  source 1..17: mol_type = other DNA
accctcaaagtgctgac

SEQ ID NO: 131637 - DNA, 17 bp, synthetic construct
  source 1..17: mol_type = other DNA
ccctcaaagtgctgacc

SEQ ID NO: 131638 - DNA, 17 bp, synthetic construct
  source 1..17: mol_type = other DNA
cctcaaagtgctgacca

SEQ ID NO: 131639 - DNA, 17 bp, synthetic construct
  source 1..17: mol_type = other DNA
ctcaaagtgctgaccag

SEQ ID NO: 131640 - DNA, 17 bp, synthetic construct
  source 1..17: mol_type = other DNA
tcaaagtgctgaccagc

SEQ ID NO: 131641 - DNA, 17 bp, synthetic construct
  source 1..17: mol_type = other DNA
caaagtgctgaccagca

SEQ ID NO: 131642 - DNA, 17 bp, synthetic construct
  source 1..17: mol_type = other DNA
aaagtgctgaccagcac

SEQ ID NO: 131643 - DNA, 17 bp, synthetic construct
  source 1..17: mol_type = other DNA
aagtgctgaccagcacg

SEQ ID NO: 131644 - DNA, 17 bp, synthetic construct
  source 1..17: mol_type = other DNA
agtgctgaccagcacgg

SEQ ID NO: 131645 - DNA, 17 bp, synthetic construct
  source 1..17: mol_type = other DNA
gtgctgaccagcacggc

SEQ ID NO: 131646 - DNA, 17 bp, synthetic construct
  source 1..17: mol_type = other DNA
tgctgaccagcacggcc

SEQ ID NO: 131647 - DNA, 17 bp, synthetic construct
  source 1..17: mol_type = other DNA
gctgaccagcacggcca

SEQ ID NO: 131648 - DNA, 17 bp, synthetic construct
  source 1..17: mol_type = other DNA
ctgaccagcacggccac

SEQ ID NO: 131649 - DNA, 17 bp, synthetic construct
  source 1..17: mol_type = other DNA
tgaccagcacggccacc

SEQ ID NO: 131650 - DNA, 17 bp, synthetic construct
  source 1..17: mol_type = other DNA
gaccagcacggccacca

SEQ ID NO: 131651 - DNA, 17 bp, synthetic construct
  source 1..17: mol_type = other DNA
accagcacggccaccac

SEQ ID NO: 131652 - DNA, 17 bp, synthetic construct
  source 1..17: mol_type = other DNA
ccagcacggccaccaca

SEQ ID NO: 131653 - DNA, 17 bp, synthetic construct
  source 1..17: mol_type = other DNA
cagcacggccaccacac

SEQ ID NO: 131654 - DNA, 17 bp, synthetic construct
  source 1..17: mol_type = other DNA
agcacggccaccacacc

SEQ ID NO: 131655 - DNA, 17 bp, synthetic construct
  source 1..17: mol_type = other DNA
gcacggccaccacaccc

SEQ ID NO: 131656 - DNA, 17 bp, synthetic construct
  source 1..17: mol_type = other DNA
cacggccaccacaccca

SEQ ID NO: 131657 - DNA, 17 bp, synthetic construct
  source 1..17: mol_type = other DNA
acggccaccacacccac

SEQ ID NO: 131658 - DNA, 17 bp, synthetic construct
  source 1..17: mol_type = other DNA
cggccaccacacccaca

SEQ ID NO: 131659 - DNA, 17 bp, synthetic construct
  source 1..17: mol_type = other DNA
ggccaccacacccacag

SEQ ID NO: 131660 - DNA, 17 bp, synthetic construct
  source 1..17: mol_type = other DNA
gccaccacacccacagt

SEQ ID NO: 131661 - DNA, 17 bp, synthetic construct
  source 1..17: mol_type = other DNA
ccaccacacccacagtc

SEQ ID NO: 131662 - DNA, 17 bp, synthetic construct
  source 1..17: mol_type = other DNA
caccacacccacagtca

SEQ ID NO: 131663 - DNA, 17 bp, synthetic construct
  source 1..17: mol_type = other DNA
accacacccacagtcat

SEQ ID NO: 131664 - DNA, 17 bp, synthetic construct
  source 1..17: mol_type = other DNA
ccacacccacagtcatc

SEQ ID NO: 131665 - DNA, 17 bp, synthetic construct
  source 1..17: mol_type = other DNA
cacacccacagtcatca

SEQ ID NO: 131666 - DNA, 17 bp, synthetic construct
  source 1..17: mol_type = other DNA
acacccacagtcatcag

SEQ ID NO: 131667 - DNA, 17 bp, synthetic construct
  source 1..17: mol_type = other DNA
cacccacagtcatcagc

SEQ ID NO: 131668 - DNA, 17 bp, synthetic construct
  source 1..17: mol_type = other DNA
acccacagtcatcagct

SEQ ID NO: 131669 - DNA, 17 bp, synthetic construct
  source 1..17: mol_type = other DNA
cccacagtcatcagctc

SEQ ID NO: 131670 - DNA, 17 bp, synthetic construct
  source 1..17: mol_type = other DNA
ccacagtcatcagctcc

SEQ ID NO: 131671 - DNA, 17 bp, synthetic construct
  source 1..17: mol_type = other DNA
cacagtcatcagctcca

SEQ ID NO: 131672 - DNA, 17 bp, synthetic construct
  source 1..17: mol_type = other DNA
acagtcatcagctccag

SEQ ID NO: 131673 - DNA, 17 bp, synthetic construct
  source 1..17: mol_type = other DNA
cagtcatcagctccaga

SEQ ID NO: 131674 - DNA, 17 bp, synthetic construct
  source 1..17: mol_type = other DNA
agtcatcagctccagag

SEQ ID NO: 131675 - DNA, 17 bp, synthetic construct
  source 1..17: mol_type = other DNA
gtcatcagctccagagc

SEQ ID NO: 131676 - DNA, 17 bp, synthetic construct
  source 1..17: mol_type = other DNA
tcatcagctccagagcc

SEQ ID NO: 131677 - DNA, 17 bp, synthetic construct
  source 1..17: mol_type = other DNA
catcagctccagagcca

SEQ ID NO: 131678 - DNA, 17 bp, synthetic construct
  source 1..17: mol_type = other DNA
atcagctccagagccac

SEQ ID NO: 131679 - DNA, 17 bp, synthetic construct
  source 1..17: mol_type = other DNA
tcagctccagagccact

SEQ ID NO: 131680 - DNA, 17 bp, synthetic construct
  source 1..17: mol_type = other DNA
cagctccagagccactc

SEQ ID NO: 131681 - DNA, 17 bp, synthetic construct
  source 1..17: mol_type = other DNA
agctccagagccactcc

SEQ ID NO: 131682 - DNA, 17 bp, synthetic construct
  source 1..17: mol_type = other DNA
gctccagagccactccc

SEQ ID NO: 131683 - DNA, 17 bp, synthetic construct
  source 1..17: mol_type = other DNA
ctccagagccactccct

SEQ ID NO: 131684 - DNA, 17 bp, synthetic construct
  source 1..17: mol_type = other DNA
tccagagccactccctc

SEQ ID NO: 131685 - DNA, 17 bp, synthetic construct
  source 1..17: mol_type = other DNA
ccagagccactccctcc

SEQ ID NO: 131686 - DNA, 17 bp, synthetic construct
  source 1..17: mol_type = other DNA
cagagccactccctcct

SEQ ID NO: 131687 - DNA, 17 bp, synthetic construct
  source 1..17: mol_type = other DNA
agagccactccctcctc

SEQ ID NO: 131688 - DNA, 17 bp, synthetic construct
  source 1..17: mol_type = other DNA
gagccactccctcctcc

SEQ ID NO: 131689 - DNA, 17 bp, synthetic construct
  source 1..17: mol_type = other DNA
agccactccctcctcca

SEQ ID NO: 131690 - DNA, 17 bp, synthetic construct
  source 1..17: mol_type = other DNA
gccactccctcctccag

SEQ ID NO: 131691 - DNA, 17 bp, synthetic construct
  source 1..17: mol_type = other DNA
ccactccctcctccagt

SEQ ID NO: 131692 - DNA, 17 bp, synthetic construct
  source 1..17: mol_type = other DNA
cactccctcctccagtc

SEQ ID NO: 131693 - DNA, 17 bp, synthetic construct
  source 1..17: mol_type = other DNA
actccctcctccagtcc

SEQ ID NO: 131694 - DNA, 17 bp, synthetic construct
  source 1..17: mol_type = other DNA
ctccctcctccagtcca

SEQ ID NO: 131695 - DNA, 17 bp, synthetic construct
  source 1..17: mol_type = other DNA
tccctcctccagtccag

SEQ ID NO: 131696 - DNA, 17 bp, synthetic construct
  source 1..17: mol_type = other DNA
ccctcctccagtccagg

SEQ ID NO: 131697 - DNA, 17 bp, synthetic construct
  source 1..17: mol_type = other DNA
cctcctccagtccaggg

SEQ ID NO: 131698 - DNA, 17 bp, synthetic construct
  source 1..17: mol_type = other DNA
ctcctccagtccaggga

SEQ ID NO: 131699 - DNA, 17 bp, synthetic construct
  source 1..17: mol_type = other DNA
tcctccagtccagggac

SEQ ID NO: 131700 - DNA, 17 bp, synthetic construct
  source 1..17: mol_type = other DNA
cctccagtccagggact

SEQ ID NO: 131701 - DNA, 17 bp, synthetic construct
  source 1..17: mol_type = other DNA
ctccagtccagggactg

SEQ ID NO: 131702 - DNA, 17 bp, synthetic construct
  source 1..17: mol_type = other DNA
tccagtccagggactgc

SEQ ID NO: 131703 - DNA, 17 bp, synthetic construct
  source 1..17: mol_type = other DNA
ccagtccagggactgca

SEQ ID NO: 131704 - DNA, 17 bp, synthetic construct
  source 1..17: mol_type = other DNA
cagtccagggactgcaa

SEQ ID NO: 131705 - DNA, 17 bp, synthetic construct
  source 1..17: mol_type = other DNA
agtccagggactgcaac

SEQ ID NO: 131706 - DNA, 17 bp, synthetic construct
  source 1..17: mol_type = other DNA
gtccagggactgcaacc

SEQ ID NO: 131707 - DNA, 17 bp, synthetic construct
  source 1..17: mol_type = other DNA
tccagggactgcaaccg

SEQ ID NO: 131708 - DNA, 17 bp, synthetic construct
  source 1..17: mol_type = other DNA
ccagggactgcaaccgc

SEQ ID NO: 131709 - DNA, 17 bp, synthetic construct
  source 1..17: mol_type = other DNA
cagggactgcaaccgcc

SEQ ID NO: 131710 - DNA, 17 bp, synthetic construct
  source 1..17: mol_type = other DNA
agggactgcaaccgccc

SEQ ID NO: 131711 - DNA, 17 bp, synthetic construct
  source 1..17: mol_type = other DNA
gggactgcaaccgccct

SEQ ID NO: 131712 - DNA, 17 bp, synthetic construct
  source 1..17: mol_type = other DNA
ggactgcaaccgccctt

SEQ ID NO: 131713 - DNA, 17 bp, synthetic construct
  source 1..17: mol_type = other DNA
gactgcaaccgcccttc

SEQ ID NO: 131714 - DNA, 17 bp, synthetic construct
  source 1..17: mol_type = other DNA
actgcaaccgcccttcc

SEQ ID NO: 131715 - DNA, 17 bp, synthetic construct
  source 1..17: mol_type = other DNA
ctgcaaccgcccttcca

SEQ ID NO: 131716 - DNA, 17 bp, synthetic construct
  source 1..17: mol_type = other DNA
tgcaaccgcccttccag

SEQ ID NO: 131717 - DNA, 17 bp, synthetic construct
  source 1..17: mol_type = other DNA
gcaaccgcccttccagc

SEQ ID NO: 131718 - DNA, 17 bp, synthetic construct
  source 1..17: mol_type = other DNA
caaccgcccttccagca

SEQ ID NO: 131719 - DNA, 17 bp, synthetic construct
  source 1..17: mol_type = other DNA
aaccgcccttccagcac

SEQ ID NO: 131720 - DNA, 17 bp, synthetic construct
  source 1..17: mol_type = other DNA
accgcccttccagcact

SEQ ID NO: 131721 - DNA, 17 bp, synthetic construct
  source 1..17: mol_type = other DNA
ccgcccttccagcactg

SEQ ID NO: 131722 - DNA, 17 bp, synthetic construct
  source 1..17: mol_type = other DNA
cgcccttccagcactga

SEQ ID NO: 131723 - DNA, 17 bp, synthetic construct
  source 1..17: mol_type = other DNA
gcccttccagcactgag

SEQ ID NO: 131724 - DNA, 17 bp, synthetic construct
  source 1..17: mol_type = other DNA
cccttccagcactgaga

SEQ ID NO: 131725 - DNA, 17 bp, synthetic construct
  source 1..17: mol_type = other DNA
ccttccagcactgagaa

SEQ ID NO: 131726 - DNA, 17 bp, synthetic construct
  source 1..17: mol_type = other DNA
cttccagcactgagaag

SEQ ID NO: 131727 - DNA, 17 bp, synthetic construct
  source 1..17: mol_type = other DNA
ttccagcactgagaagc

SEQ ID NO: 131728 - DNA, 17 bp, synthetic construct
  source 1..17: mol_type = other DNA
tccagcactgagaagca

SEQ ID NO: 131729 - DNA, 17 bp, synthetic construct
  source 1..17: mol_type = other DNA
ccagcactgagaagcac

SEQ ID NO: 131730 - DNA, 17 bp, synthetic construct
  source 1..17: mol_type = other DNA
cagcactgagaagcaca

SEQ ID NO: 131731 - DNA, 17 bp, synthetic construct
  source 1..17: mol_type = other DNA
agcactgagaagcacag

SEQ ID NO: 131732 - DNA, 17 bp, synthetic construct
  source 1..17: mol_type = other DNA
gcactgagaagcacagc

SEQ ID NO: 131733 - DNA, 17 bp, synthetic construct
  source 1..17: mol_type = other DNA
cactgagaagcacagcc

SEQ ID NO: 131734 - DNA, 17 bp, synthetic construct
  source 1..17: mol_type = other DNA
actgagaagcacagcca

SEQ ID NO: 131735 - DNA, 17 bp, synthetic construct
  source 1..17: mol_type = other DNA
ctgagaagcacagccac

SEQ ID NO: 131736 - DNA, 17 bp, synthetic construct
  source 1..17: mol_type = other DNA
tgagaagcacagccacc

SEQ ID NO: 131737 - DNA, 17 bp, synthetic construct
  source 1..17: mol_type = other DNA
gagaagcacagccacca

SEQ ID NO: 131738 - DNA, 17 bp, synthetic construct
  source 1..17: mol_type = other DNA
agaagcacagccaccac

SEQ ID NO: 131739 - DNA, 17 bp, synthetic construct
  source 1..17: mol_type = other DNA
gaagcacagccaccaca

SEQ ID NO: 131740 - DNA, 17 bp, synthetic construct
  source 1..17: mol_type = other DNA
aagcacagccaccacac

SEQ ID NO: 131741 - DNA, 17 bp, synthetic construct
  source 1..17: mol_type = other DNA
agcacagccaccacacc

SEQ ID NO: 131742 - DNA, 17 bp, synthetic construct
  source 1..17: mol_type = other DNA
gcacagccaccacaccc

SEQ ID NO: 131743 - DNA, 17 bp, synthetic construct
  source 1..17: mol_type = other DNA
cacagccaccacaccca

SEQ ID NO: 131744 - DNA, 17 bp, synthetic construct
  source 1..17: mol_type = other DNA
acagccaccacacccac

SEQ ID NO: 131745 - DNA, 17 bp, synthetic construct
  source 1..17: mol_type = other DNA
cagccaccacacccaca

SEQ ID NO: 131746 - DNA, 17 bp, synthetic construct
  source 1..17: mol_type = other DNA
agccaccacacccacag

SEQ ID NO: 131747 - DNA, 17 bp, synthetic construct
  source 1..17: mol_type = other DNA
gccaccacacccacagc

SEQ ID NO: 131748 - DNA, 17 bp, synthetic construct
  source 1..17: mol_type = other DNA
ccaccacacccacagct

SEQ ID NO: 131749 - DNA, 17 bp, synthetic construct
  source 1..17: mol_type = other DNA
caccacacccacagcta

SEQ ID NO: 131750 - DNA, 17 bp, synthetic construct
  source 1..17: mol_type = other DNA
accacacccacagctac

SEQ ID NO: 131751 - DNA, 17 bp, synthetic construct
  source 1..17: mol_type = other DNA
ccacacccacagctacc

SEQ ID NO: 131752 - DNA, 17 bp, synthetic construct
  source 1..17: mol_type = other DNA
cacacccacagctacca

SEQ ID NO: 131753 - DNA, 17 bp, synthetic construct
  source 1..17: mol_type = other DNA
acacccacagctaccag

SEQ ID NO: 131754 - DNA, 17 bp, synthetic construct
  source 1..17: mol_type = other DNA
cacccacagctaccagc

SEQ ID NO: 131755 - DNA, 17 bp, synthetic construct
  source 1..17: mol_type = other DNA
acccacagctaccagcg

SEQ ID NO: 131756 - DNA, 17 bp, synthetic construct
  source 1..17: mol_type = other DNA
cccacagctaccagcgt

SEQ ID NO: 131757 - DNA, 17 bp, synthetic construct
  source 1..17: mol_type = other DNA
ccacagctaccagcgtt

SEQ ID NO: 131758 - DNA, 17 bp, synthetic construct
  source 1..17: mol_type = other DNA
cacagctaccagcgtta

SEQ ID NO: 131759 - DNA, 17 bp, synthetic construct
  source 1..17: mol_type = other DNA
acagctaccagcgttac

SEQ ID NO: 131760 - DNA, 17 bp, synthetic construct
  source 1..17: mol_type = other DNA
cagctaccagcgttaca

SEQ ID NO: 131761 - DNA, 17 bp, synthetic construct
  source 1..17: mol_type = other DNA
agctaccagcgttacag

SEQ ID NO: 131762 - DNA, 17 bp, synthetic construct
  source 1..17: mol_type = other DNA
gctaccagcgttacagc

SEQ ID NO: 131763 - DNA, 17 bp, synthetic construct
  source 1..17: mol_type = other DNA
ctaccagcgttacagcc

SEQ ID NO: 131764 - DNA, 17 bp, synthetic construct
  source 1..17: mol_type = other DNA
taccagcgttacagcca

SEQ ID NO: 131765 - DNA, 17 bp, synthetic construct
  source 1..17: mol_type = other DNA
accagcgttacagccat

SEQ ID NO: 131766 - DNA, 17 bp, synthetic construct
  source 1..17: mol_type = other DNA
ccagcgttacagccatc

SEQ ID NO: 131767 - DNA, 17 bp, synthetic construct
  source 1..17: mol_type = other DNA
cagcgttacagccatcc

SEQ ID NO: 131768 - DNA, 17 bp, synthetic construct
  source 1..17: mol_type = other DNA
agcgttacagccatccc

SEQ ID NO: 131769 - DNA, 17 bp, synthetic construct
  source 1..17: mol_type = other DNA
gcgttacagccatcccc

SEQ ID NO: 131770 - DNA, 17 bp, synthetic construct
  source 1..17: mol_type = other DNA
cgttacagccatcccct

SEQ ID NO: 131771 - DNA, 17 bp, synthetic construct
  source 1..17: mol_type = other DNA
gttacagccatcccctc

SEQ ID NO: 131772 - DNA, 17 bp, synthetic construct
  source 1..17: mol_type = other DNA
ttacagccatcccctct

SEQ ID NO: 131773 - DNA, 17 bp, synthetic construct
  source 1..17: mol_type = other DNA
tacagccatcccctctt

SEQ ID NO: 131774 - DNA, 17 bp, synthetic construct
  source 1..17: mol_type = other DNA
acagccatcccctcttc

SEQ ID NO: 131775 - DNA, 17 bp, synthetic construct
  source 1..17: mol_type = other DNA
cagccatcccctcttcc

SEQ ID NO: 131776 - DNA, 17 bp, synthetic construct
  source 1..17: mol_type = other DNA
agccatcccctcttcct

SEQ ID NO: 131777 - DNA, 17 bp, synthetic construct
  source 1..17: mol_type = other DNA
gccatcccctcttcctc

SEQ ID NO: 131778 - DNA, 17 bp, synthetic construct
  source 1..17: mol_type = other DNA
ccatcccctcttcctcc

SEQ ID NO: 131779 - DNA, 17 bp, synthetic construct
  source 1..17: mol_type = other DNA
catcccctcttcctccc

SEQ ID NO: 131780 - DNA, 17 bp, synthetic construct
  source 1..17: mol_type = other DNA
atcccctcttcctccct

SEQ ID NO: 131781 - DNA, 17 bp, synthetic construct
  source 1..17: mol_type = other DNA
tcccctcttcctccctg

SEQ ID NO: 131782 - DNA, 17 bp, synthetic construct
  source 1..17: mol_type = other DNA
cccctcttcctccctgg

SEQ ID NO: 131783 - DNA, 17 bp, synthetic construct
  source 1..17: mol_type = other DNA
ccctcttcctccctggg

SEQ ID NO: 131784 - DNA, 17 bp, synthetic construct
  source 1..17: mol_type = other DNA
cctcttcctccctgggc

SEQ ID NO: 131785 - DNA, 17 bp, synthetic construct
  source 1..17: mol_type = other DNA
ctcttcctccctgggca

SEQ ID NO: 131786 - DNA, 17 bp, synthetic construct
  source 1..17: mol_type = other DNA
tcttcctccctgggcac

SEQ ID NO: 131787 - DNA, 17 bp, synthetic construct
  source 1..17: mol_type = other DNA
cttcctccctgggcacc

SEQ ID NO: 131788 - DNA, 17 bp, synthetic construct
  source 1..17: mol_type = other DNA
ttcctccctgggcaccg

SEQ ID NO: 131789 - DNA, 17 bp, synthetic construct
  source 1..17: mol_type = other DNA
tcctccctgggcaccgc

SEQ ID NO: 131790 - DNA, 17 bp, synthetic construct
  source 1..17: mol_type = other DNA
cctccctgggcaccgcc

SEQ ID NO: 131791 - DNA, 17 bp, synthetic construct
  source 1..17: mol_type = other DNA
ctccctgggcaccgcct

SEQ ID NO: 131792 - DNA, 17 bp, synthetic construct
  source 1..17: mol_type = other DNA
tccctgggcaccgcctg

SEQ ID NO: 131793 - DNA, 17 bp, synthetic construct
  source 1..17: mol_type = other DNA
ccctgggcaccgcctgg

SEQ ID NO: 131794 - DNA, 17 bp, synthetic construct
  source 1..17: mol_type = other DNA
cctgggcaccgcctgga

SEQ ID NO: 131795 - DNA, 17 bp, synthetic construct
  source 1..17: mol_type = other DNA
ctgggcaccgcctggac

SEQ ID NO: 131796 - DNA, 17 bp, synthetic construct
  source 1..17: mol_type = other DNA
tgggcaccgcctggacc

SEQ ID NO: 131797 - DNA, 17 bp, synthetic construct
  source 1..17: mol_type = other DNA
gggcaccgcctggaccc

SEQ ID NO: 131798 - DNA, 17 bp, synthetic construct
  source 1..17: mol_type = other DNA
ggcaccgcctggacccg

SEQ ID NO: 131799 - DNA, 17 bp, synthetic construct
  source 1..17: mol_type = other DNA
gcaccgcctggacccgc

SEQ ID NO: 131800 - DNA, 17 bp, synthetic construct
  source 1..17: mol_type = other DNA
caccgcctggacccgcc

SEQ ID NO: 131801 - DNA, 17 bp, synthetic construct
  source 1..17: mol_type = other DNA
accgcctggacccgcct

SEQ ID NO: 131802 - DNA, 17 bp, synthetic construct
  source 1..17: mol_type = other DNA
ccgcctggacccgccta

SEQ ID NO: 131803 - DNA, 17 bp, synthetic construct
  source 1..17: mol_type = other DNA
cgcctggacccgcctat

SEQ ID NO: 131804 - DNA, 17 bp, synthetic construct
  source 1..17: mol_type = other DNA
gcctggacccgcctatc

SEQ ID NO: 131805 - DNA, 17 bp, synthetic construct
  source 1..17: mol_type = other DNA
cctggacccgcctatca

SEQ ID NO: 131806 - DNA, 17 bp, synthetic construct
  source 1..17: mol_type = other DNA
ctggacccgcctatcac

SEQ ID NO: 131807 - DNA, 17 bp, synthetic construct
  source 1..17: mol_type = other DNA
tggacccgcctatcaca

SEQ ID NO: 131808 - DNA, 17 bp, synthetic construct
  source 1..17: mol_type = other DNA
ggacccgcctatcacag

SEQ ID NO: 131809 - DNA, 17 bp, synthetic construct
  source 1..17: mol_type = other DNA
gacccgcctatcacaga

SEQ ID NO: 131810 - DNA, 17 bp, synthetic construct
  source 1..17: mol_type = other DNA
acccgcctatcacagac

SEQ ID NO: 131811 - DNA, 17 bp, synthetic construct
  source 1..17: mol_type = other DNA
cccgcctatcacagacc

SEQ ID NO: 131812 - DNA, 17 bp, synthetic construct
  source 1..17: mol_type = other DNA
ccgcctatcacagacca

SEQ ID NO: 131813 - DNA, 17 bp, synthetic construct
  source 1..17: mol_type = other DNA
cgcctatcacagaccac

SEQ ID NO: 131814 - DNA, 17 bp, synthetic construct
  source 1..17: mol_type = other DNA
gcctatcacagaccacc

SEQ ID NO: 131815 - DNA, 17 bp, synthetic construct
  source 1..17: mol_type = other DNA
cctatcacagaccacca

SEQ ID NO: 131816 - DNA, 17 bp, synthetic construct
  source 1..17: mol_type = other DNA
ctatcacagaccaccac

SEQ ID NO: 131817 - DNA, 17 bp, synthetic construct
  source 1..17: mol_type = other DNA
tatcacagaccaccaca

SEQ ID NO: 131818 - DNA, 17 bp, synthetic construct
  source 1..17: mol_type = other DNA
atcacagaccaccacac

SEQ ID NO: 131819 - DNA, 17 bp, synthetic construct
  source 1..17: mol_type = other DNA
tcacagaccaccacacc

SEQ ID NO: 131820 - DNA, 17 bp, synthetic construct
  source 1..17: mol_type = other DNA
cacagaccaccacaccc

SEQ ID NO: 131821 - DNA, 17 bp, synthetic construct
  source 1..17: mol_type = other DNA
acagaccaccacaccca

SEQ ID NO: 131822 - DNA, 17 bp, synthetic construct
  source 1..17: mol_type = other DNA
cagaccaccacacccac

SEQ ID NO: 131823 - DNA, 17 bp, synthetic construct
  source 1..17: mol_type = other DNA
agaccaccacacccacg

SEQ ID NO: 131824 - DNA, 17 bp, synthetic construct
  source 1..17: mol_type = other DNA
gaccaccacacccacgg

SEQ ID NO: 131825 - DNA, 17 bp, synthetic construct
  source 1..17: mol_type = other DNA
accaccacacccacggc

SEQ ID NO: 131826 - DNA, 17 bp, synthetic construct
  source 1..17: mol_type = other DNA
ccaccacacccacggcc

SEQ ID NO: 131827 - DNA, 17 bp, synthetic construct
  source 1..17: mol_type = other DNA
caccacacccacggcca

SEQ ID NO: 131828 - DNA, 17 bp, synthetic construct
  source 1..17: mol_type = other DNA
accacacccacggccac

SEQ ID NO: 131829 - DNA, 17 bp, synthetic construct
  source 1..17: mol_type = other DNA
ccacacccacggccacc

SEQ ID NO: 131830 - DNA, 17 bp, synthetic construct
  source 1..17: mol_type = other DNA
cacacccacggccacca

SEQ ID NO: 131831 - DNA, 17 bp, synthetic construct
  source 1..17: mol_type = other DNA
acacccacggccaccat

SEQ ID NO: 131832 - DNA, 17 bp, synthetic construct
  source 1..17: mol_type = other DNA
cacccacggccaccatg

SEQ ID NO: 131833 - DNA, 17 bp, synthetic construct
  source 1..17: mol_type = other DNA
acccacggccaccatgt

SEQ ID NO: 131834 - DNA, 17 bp, synthetic construct
  source 1..17: mol_type = other DNA
cccacggccaccatgtc

SEQ ID NO: 131835 - DNA, 17 bp, synthetic construct
  source 1..17: mol_type = other DNA
ccacggccaccatgtcc

SEQ ID NO: 131836 - DNA, 17 bp, synthetic construct
  source 1..17: mol_type = other DNA
cacggccaccatgtcca

SEQ ID NO: 131837 - DNA, 17 bp, synthetic construct
  source 1..17: mol_type = other DNA
acggccaccatgtccac

SEQ ID NO: 131838 - DNA, 17 bp, synthetic construct
  source 1..17: mol_type = other DNA
cggccaccatgtccaca

SEQ ID NO: 131839 - DNA, 17 bp, synthetic construct
  source 1..17: mol_type = other DNA
ggccaccatgtccacag

SEQ ID NO: 131840 - DNA, 17 bp, synthetic construct
  source 1..17: mol_type = other DNA
gccaccatgtccacagc

SEQ ID NO: 131841 - DNA, 17 bp, synthetic construct
  source 1..17: mol_type = other DNA
ccaccatgtccacagcc

SEQ ID NO: 131842 - DNA, 17 bp, synthetic construct
  source 1..17: mol_type = other DNA
caccatgtccacagcca

SEQ ID NO: 131843 - DNA, 17 bp, synthetic construct
  source 1..17: mol_type = other DNA
accatgtccacagccac

SEQ ID NO: 131844 - DNA, 17 bp, synthetic construct
  source 1..17: mol_type = other DNA
ccatgtccacagccaca

SEQ ID NO: 131845 - DNA, 17 bp, synthetic construct
  source 1..17: mol_type = other DNA
catgtccacagccacac

SEQ ID NO: 131846 - DNA, 17 bp, synthetic construct
  source 1..17: mol_type = other DNA
atgtccacagccacacc

SEQ ID NO: 131847 - DNA, 17 bp, synthetic construct
  source 1..17: mol_type = other DNA
tgtccacagccacaccc

SEQ ID NO: 131848 - DNA, 17 bp, synthetic construct
  source 1..17: mol_type = other DNA
gtccacagccacaccct

SEQ ID NO: 131849 - DNA, 17 bp, synthetic construct
  source 1..17: mol_type = other DNA
tccacagccacaccctc

SEQ ID NO: 131850 - DNA, 17 bp, synthetic construct
  source 1..17: mol_type = other DNA
ccacagccacaccctcc

SEQ ID NO: 131851 - DNA, 17 bp, synthetic construct
  source 1..17: mol_type = other DNA
cacagccacaccctcct

SEQ ID NO: 131852 - DNA, 17 bp, synthetic construct
  source 1..17: mol_type = other DNA
acagccacaccctcctc

SEQ ID NO: 131853 - DNA, 17 bp, synthetic construct
  source 1..17: mol_type = other DNA
cagccacaccctcctct

SEQ ID NO: 131854 - DNA, 17 bp, synthetic construct
  source 1..17: mol_type = other DNA
agccacaccctcctcta

SEQ ID NO: 131855 - DNA, 17 bp, synthetic construct
  source 1..17: mol_type = other DNA
gccacaccctcctctac

SEQ ID NO: 131856 - DNA, 17 bp, synthetic construct
  source 1..17: mol_type = other DNA
ccacaccctcctctact

SEQ ID NO: 131857 - DNA, 17 bp, synthetic construct
  source 1..17: mol_type = other DNA
cacaccctcctctactc

SEQ ID NO: 131858 - DNA, 17 bp, synthetic construct
  source 1..17: mol_type = other DNA
acaccctcctctactcc

SEQ ID NO: 131859 - DNA, 17 bp, synthetic construct
  source 1..17: mol_type = other DNA
caccctcctctactcca

SEQ ID NO: 131860 - DNA, 17 bp, synthetic construct
  source 1..17: mol_type = other DNA
accctcctctactccag

SEQ ID NO: 131861 - DNA, 17 bp, synthetic construct
  source 1..17: mol_type = other DNA
ccctcctctactccaga

SEQ ID NO: 131862 - DNA, 17 bp, synthetic construct
  source 1..17: mol_type = other DNA
cctcctctactccagag

SEQ ID NO: 131863 - DNA, 17 bp, synthetic construct
  source 1..17: mol_type = other DNA
ctcctctactccagaga

SEQ ID NO: 131864 - DNA, 17 bp, synthetic construct
  source 1..17: mol_type = other DNA
tcctctactccagagac

SEQ ID NO: 131865 - DNA, 17 bp, synthetic construct
  source 1..17: mol_type = other DNA
cctctactccagagact

SEQ ID NO: 131866 - DNA, 17 bp, synthetic construct
  source 1..17: mol_type = other DNA
ctctactccagagactg

SEQ ID NO: 131867 - DNA, 17 bp, synthetic construct
  source 1..17: mol_type = other DNA
tctactccagagactgt

SEQ ID NO: 131868 - DNA, 17 bp, synthetic construct
  source 1..17: mol_type = other DNA
ctactccagagactgtc

SEQ ID NO: 131869 - DNA, 17 bp, synthetic construct
  source 1..17: mol_type = other DNA
tactccagagactgtcc

SEQ ID NO: 131870 - DNA, 17 bp, synthetic construct
  source 1..17: mol_type = other DNA
actccagagactgtcca

SEQ ID NO: 131871 - DNA, 17 bp, synthetic construct
  source 1..17: mol_type = other DNA
ctccagagactgtccac

SEQ ID NO: 131872 - DNA, 17 bp, synthetic construct
  source 1..17: mol_type = other DNA
tccagagactgtccaca

SEQ ID NO: 131873 - DNA, 17 bp, synthetic construct
  source 1..17: mol_type = other DNA
ccagagactgtccacac

SEQ ID NO: 131874 - DNA, 17 bp, synthetic construct
  source 1..17: mol_type = other DNA
cagagactgtccacacc

SEQ ID NO: 131875 - DNA, 17 bp, synthetic construct
  source 1..17: mol_type = other DNA
agagactgtccacacct

SEQ ID NO: 131876 - DNA, 17 bp, synthetic construct
  source 1..17: mol_type = other DNA
gagactgtccacacctc

SEQ ID NO: 131877 - DNA, 17 bp, synthetic construct
  source 1..17: mol_type = other DNA
agactgtccacacctcc

SEQ ID NO: 131878 - DNA, 17 bp, synthetic construct
  source 1..17: mol_type = other DNA
gactgtccacacctcca

SEQ ID NO: 131879 - DNA, 17 bp, synthetic construct
  source 1..17: mol_type = other DNA
actgtccacacctccac

SEQ ID NO: 131880 - DNA, 17 bp, synthetic construct
  source 1..17: mol_type = other DNA
ctgtccacacctccaca

SEQ ID NO: 131881 - DNA, 17 bp, synthetic construct
  source 1..17: mol_type = other DNA
tgtccacacctccacag

SEQ ID NO: 131882 - DNA, 17 bp, synthetic construct
  source 1..17: mol_type = other DNA
gtccacacctccacagt

SEQ ID NO: 131883 - DNA, 17 bp, synthetic construct
  source 1..17: mol_type = other DNA
tccacacctccacagtg

SEQ ID NO: 131884 - DNA, 17 bp, synthetic construct
  source 1..17: mol_type = other DNA
ccacacctccacagtgc

SEQ ID NO: 131885 - DNA, 17 bp, synthetic construct
  source 1..17: mol_type = other DNA
cacacctccacagtgct

SEQ ID NO: 131886 - DNA, 17 bp, synthetic construct
  source 1..17: mol_type = other DNA
acacctccacagtgctt

SEQ ID NO: 131887 - DNA, 17 bp, synthetic construct
  source 1..17: mol_type = other DNA
cacctccacagtgctta

SEQ ID NO: 131888 - DNA, 17 bp, synthetic construct
  source 1..17: mol_type = other DNA
acctccacagtgcttac

SEQ ID NO: 131889 - DNA, 17 bp, synthetic construct
  source 1..17: mol_type = other DNA
cctccacagtgcttacc

SEQ ID NO: 131890 - DNA, 17 bp, synthetic construct
  source 1..17: mol_type = other DNA
ctccacagtgcttacca

SEQ ID NO: 131891 - DNA, 17 bp, synthetic construct
  source 1..17: mol_type = other DNA
tccacagtgcttaccac

SEQ ID NO: 131892 - DNA, 17 bp, synthetic construct
  source 1..17: mol_type = other DNA
ccacagtgcttaccacc

SEQ ID NO: 131893 - DNA, 17 bp, synthetic construct
  source 1..17: mol_type = other DNA
cacagtgcttaccacca

SEQ ID NO: 131894 - DNA, 17 bp, synthetic construct
  source 1..17: mol_type = other DNA
acagtgcttaccaccac

SEQ ID NO: 131895 - DNA, 17 bp, synthetic construct
  source 1..17: mol_type = other DNA
cagtgcttaccaccacg

SEQ ID NO: 131896 - DNA, 17 bp, synthetic construct
  source 1..17: mol_type = other DNA
agtgcttaccaccacga

SEQ ID NO: 131897 - DNA, 17 bp, synthetic construct
  source 1..17: mol_type = other DNA
gtgcttaccaccacgac

SEQ ID NO: 131898 - DNA, 17 bp, synthetic construct
  source 1..17: mol_type = other DNA
tgcttaccaccacgacc

SEQ ID NO: 131899 - DNA, 17 bp, synthetic construct
  source 1..17: mol_type = other DNA
gcttaccaccacgacca

SEQ ID NO: 131900 - DNA, 17 bp, synthetic construct
  source 1..17: mol_type = other DNA
cttaccaccacgaccac

SEQ ID NO: 131901 - DNA, 17 bp, synthetic construct
  source 1..17: mol_type = other DNA
ttaccaccacgaccacc

SEQ ID NO: 131902 - DNA, 17 bp, synthetic construct
  source 1..17: mol_type = other DNA
taccaccacgaccacca

SEQ ID NO: 131903 - DNA, 17 bp, synthetic construct
  source 1..17: mol_type = other DNA
accaccacgaccaccac

SEQ ID NO: 131904 - DNA, 17 bp, synthetic construct
  source 1..17: mol_type = other DNA
ccaccacgaccaccaca

SEQ ID NO: 131905 - DNA, 17 bp, synthetic construct
  source 1..17: mol_type = other DNA
caccacgaccaccacaa

SEQ ID NO: 131906 - DNA, 17 bp, synthetic construct
  source 1..17: mol_type = other DNA
accacgaccaccacaac

SEQ ID NO: 131907 - DNA, 17 bp, synthetic construct
  source 1..17: mol_type = other DNA
ccacgaccaccacaacc

SEQ ID NO: 131908 - DNA, 17 bp, synthetic construct
  source 1..17: mol_type = other DNA
cacgaccaccacaacca

SEQ ID NO: 131909 - DNA, 17 bp, synthetic construct
  source 1..17: mol_type = other DNA
acgaccaccacaaccag

SEQ ID NO: 131910 - DNA, 17 bp, synthetic construct
  source 1..17: mol_type = other DNA
cgaccaccacaaccagg

SEQ ID NO: 131911 - DNA, 17 bp, synthetic construct
  source 1..17: mol_type = other DNA
gaccaccacaaccaggg

SEQ ID NO: 131912 - DNA, 17 bp, synthetic construct
  source 1..17: mol_type = other DNA
accaccacaaccagggc

SEQ ID NO: 131913 - DNA, 17 bp, synthetic construct
  source 1..17: mol_type = other DNA
ccaccacaaccagggcc

SEQ ID NO: 131914 - DNA, 17 bp, synthetic construct
  source 1..17: mol_type = other DNA
caccacaaccagggcca

SEQ ID NO: 131915 - DNA, 17 bp, synthetic construct
  source 1..17: mol_type = other DNA
accacaaccagggccac

SEQ ID NO: 131916 - DNA, 17 bp, synthetic construct
  source 1..17: mol_type = other DNA
ccacaaccagggccacc

SEQ ID NO: 131917 - DNA, 17 bp, synthetic construct
  source 1..17: mol_type = other DNA
cacaaccagggccaccg

SEQ ID NO: 131918 - DNA, 17 bp, synthetic construct
  source 1..17: mol_type = other DNA
acaaccagggccaccgg

SEQ ID NO: 131919 - DNA, 17 bp, synthetic construct
  source 1..17: mol_type = other DNA
caaccagggccaccggc

SEQ ID NO: 131920 - DNA, 17 bp, synthetic construct
  source 1..17: mol_type = other DNA
aaccagggccaccggct

SEQ ID NO: 131921 - DNA, 17 bp, synthetic construct
  source 1..17: mol_type = other DNA
accagggccaccggctc

SEQ ID NO: 131922 - DNA, 17 bp, synthetic construct
  source 1..17: mol_type = other DNA
ccagggccaccggctct

SEQ ID NO: 131923 - DNA, 17 bp, synthetic construct
  source 1..17: mol_type = other DNA
cagggccaccggctctg

SEQ ID NO: 131924 - DNA, 17 bp, synthetic construct
  source 1..17: mol_type = other DNA
agggccaccggctctgt

SEQ ID NO: 131925 - DNA, 17 bp, synthetic construct
  source 1..17: mol_type = other DNA
gggccaccggctctgtg

SEQ ID NO: 131926 - DNA, 17 bp, synthetic construct
  source 1..17: mol_type = other DNA
ggccaccggctctgtgg

SEQ ID NO: 131927 - DNA, 17 bp, synthetic construct
  source 1..17: mol_type = other DNA
gccaccggctctgtggc

SEQ ID NO: 131928 - DNA, 17 bp, synthetic construct
  source 1..17: mol_type = other DNA
ccaccggctctgtggcc

SEQ ID NO: 131929 - DNA, 17 bp, synthetic construct
  source 1..17: mol_type = other DNA
caccggctctgtggcca

SEQ ID NO: 131930 - DNA, 17 bp, synthetic construct
  source 1..17: mol_type = other DNA
accggctctgtggccac

SEQ ID NO: 131931 - DNA, 17 bp, synthetic construct
  source 1..17: mol_type = other DNA
ccggctctgtggccacc

SEQ ID NO: 131932 - DNA, 17 bp, synthetic construct
  source 1..17: mol_type = other DNA
cggctctgtggccaccc

SEQ ID NO: 131933 - DNA, 17 bp, synthetic construct
  source 1..17: mol_type = other DNA
ggctctgtggccacccc

SEQ ID NO: 131934 - DNA, 17 bp, synthetic construct
  source 1..17: mol_type = other DNA
gctctgtggccaccccc

SEQ ID NO: 131935 - DNA, 17 bp, synthetic construct
  source 1..17: mol_type = other DNA
ctctgtggccaccccct

SEQ ID NO: 131936 - DNA, 17 bp, synthetic construct
  source 1..17: mol_type = other DNA
tctgtggccaccccctc

SEQ ID NO: 131937 - DNA, 17 bp, synthetic construct
  source 1..17: mol_type = other DNA
ctgtggccaccccctcc

SEQ ID NO: 131938 - DNA, 17 bp, synthetic construct
  source 1..17: mol_type = other DNA
tgtggccaccccctcct

SEQ ID NO: 131939 - DNA, 17 bp, synthetic construct
  source 1..17: mol_type = other DNA
gtggccaccccctcctc

SEQ ID NO: 131940 - DNA, 17 bp, synthetic construct
  source 1..17: mol_type = other DNA
tggccaccccctcctcc

SEQ ID NO: 131941 - DNA, 17 bp, synthetic construct
  source 1..17: mol_type = other DNA
ggccaccccctcctcca

SEQ ID NO: 131942 - DNA, 17 bp, synthetic construct
  source 1..17: mol_type = other DNA
gccaccccctcctccac

SEQ ID NO: 131943 - DNA, 17 bp, synthetic construct
  source 1..17: mol_type = other DNA
ccaccccctcctccacc

SEQ ID NO: 131944 - DNA, 17 bp, synthetic construct
  source 1..17: mol_type = other DNA
caccccctcctccaccc

SEQ ID NO: 131945 - DNA, 17 bp, synthetic construct
  source 1..17: mol_type = other DNA
accccctcctccacccc

SEQ ID NO: 131946 - DNA, 17 bp, synthetic construct
  source 1..17: mol_type = other DNA
ccccctcctccacccca

SEQ ID NO: 131947 - DNA, 17 bp, synthetic construct
  source 1..17: mol_type = other DNA
cccctcctccaccccag

SEQ ID NO: 131948 - DNA, 17 bp, synthetic construct
  source 1..17: mol_type = other DNA
ccctcctccaccccagg

SEQ ID NO: 131949 - DNA, 17 bp, synthetic construct
  source 1..17: mol_type = other DNA
cctcctccaccccagga

SEQ ID NO: 131950 - DNA, 17 bp, synthetic construct
  source 1..17: mol_type = other DNA
ctcctccaccccaggaa

SEQ ID NO: 131951 - DNA, 17 bp, synthetic construct
  source 1..17: mol_type = other DNA
tcctccaccccaggaac

SEQ ID NO: 131952 - DNA, 17 bp, synthetic construct
  source 1..17: mol_type = other DNA
cctccaccccaggaaca

SEQ ID NO: 131953 - DNA, 17 bp, synthetic construct
  source 1..17: mol_type = other DNA
ctccaccccaggaacag

SEQ ID NO: 131954 - DNA, 17 bp, synthetic construct
  source 1..17: mol_type = other DNA
tccaccccaggaacagc

SEQ ID NO: 131955 - DNA, 17 bp, synthetic construct
  source 1..17: mol_type = other DNA
ccaccccaggaacagct

SEQ ID NO: 131956 - DNA, 17 bp, synthetic construct
  source 1..17: mol_type = other DNA
caccccaggaacagctc

SEQ ID NO: 131957 - DNA, 17 bp, synthetic construct
  source 1..17: mol_type = other DNA
accccaggaacagctca

SEQ ID NO: 131958 - DNA, 17 bp, synthetic construct
  source 1..17: mol_type = other DNA
ccccaggaacagctcac

SEQ ID NO: 131959 - DNA, 17 bp, synthetic construct
  source 1..17: mol_type = other DNA
cccaggaacagctcaca

SEQ ID NO: 131960 - DNA, 17 bp, synthetic construct
  source 1..17: mol_type = other DNA
ccaggaacagctcacac

SEQ ID NO: 131961 - DNA, 17 bp, synthetic construct
  source 1..17: mol_type = other DNA
caggaacagctcacact

SEQ ID NO: 131962 - DNA, 17 bp, synthetic construct
  source 1..17: mol_type = other DNA
aggaacagctcacacta

SEQ ID NO: 131963 - DNA, 17 bp, synthetic construct
  source 1..17: mol_type = other DNA
ggaacagctcacactac

SEQ ID NO: 131964 - DNA, 17 bp, synthetic construct
  source 1..17: mol_type = other DNA
gaacagctcacactacc

SEQ ID NO: 131965 - DNA, 17 bp, synthetic construct
  source 1..17: mol_type = other DNA
aacagctcacactacca

SEQ ID NO: 131966 - DNA, 17 bp, synthetic construct
  source 1..17: mol_type = other DNA
acagctcacactaccaa

SEQ ID NO: 131967 - DNA, 17 bp, synthetic construct
  source 1..17: mol_type = other DNA
cagctcacactaccaaa

SEQ ID NO: 131968 - DNA, 17 bp, synthetic construct
  source 1..17: mol_type = other DNA
agctcacactaccaaag

SEQ ID NO: 131969 - DNA, 17 bp, synthetic construct
  source 1..17: mol_type = other DNA
gctcacactaccaaagt

SEQ ID NO: 131970 - DNA, 17 bp, synthetic construct
  source 1..17: mol_type = other DNA
ctcacactaccaaagtg

SEQ ID NO: 131971 - DNA, 17 bp, synthetic construct
  source 1..17: mol_type = other DNA
tcacactaccaaagtgc

SEQ ID NO: 131972 - DNA, 17 bp, synthetic construct
  source 1..17: mol_type = other DNA
cacactaccaaagtgcc

SEQ ID NO: 131973 - DNA, 17 bp, synthetic construct
  source 1..17: mol_type = other DNA
acactaccaaagtgccg

SEQ ID NO: 131974 - DNA, 17 bp, synthetic construct
  source 1..17: mol_type = other DNA
cactaccaaagtgccga

SEQ ID NO: 131975 - DNA, 17 bp, synthetic construct
  source 1..17: mol_type = other DNA
actaccaaagtgccgac

SEQ ID NO: 131976 - DNA, 17 bp, synthetic construct
  source 1..17: mol_type = other DNA
ctaccaaagtgccgact

SEQ ID NO: 131977 - DNA, 17 bp, synthetic construct
  source 1..17: mol_type = other DNA
taccaaagtgccgacta

SEQ ID NO: 131978 - DNA, 17 bp, synthetic construct
  source 1..17: mol_type = other DNA
accaaagtgccgactac

SEQ ID NO: 131979 - DNA, 17 bp, synthetic construct
  source 1..17: mol_type = other DNA
ccaaagtgccgactacc

SEQ ID NO: 131980 - DNA, 17 bp, synthetic construct
  source 1..17: mol_type = other DNA
caaagtgccgactacca

SEQ ID NO: 131981 - DNA, 17 bp, synthetic construct
  source 1..17: mol_type = other DNA
aaagtgccgactaccac

SEQ ID NO: 131982 - DNA, 17 bp, synthetic construct
  source 1..17: mol_type = other DNA
aagtgccgactaccaca

SEQ ID NO: 131983 - DNA, 17 bp, synthetic construct
  source 1..17: mol_type = other DNA
agtgccgactaccacaa

SEQ ID NO: 131984 - DNA, 17 bp, synthetic construct
  source 1..17: mol_type = other DNA
gtgccgactaccacaac

SEQ ID NO: 131985 - DNA, 17 bp, synthetic construct
  source 1..17: mol_type = other DNA
tgccgactaccacaacc

SEQ ID NO: 131986 - DNA, 17 bp, synthetic construct
  source 1..17: mol_type = other DNA
gccgactaccacaacca

SEQ ID NO: 131987 - DNA, 17 bp, synthetic construct
  source 1..17: mol_type = other DNA
ccgactaccacaaccac

SEQ ID NO: 131988 - DNA, 17 bp, synthetic construct
  source 1..17: mol_type = other DNA
cgactaccacaaccacg

SEQ ID NO: 131989 - DNA, 17 bp, synthetic construct
  source 1..17: mol_type = other DNA
gactaccacaaccacgg

SEQ ID NO: 131990 - DNA, 17 bp, synthetic construct
  source 1..17: mol_type = other DNA
actaccacaaccacggg

SEQ ID NO: 131991 - DNA, 17 bp, synthetic construct
  source 1..17: mol_type = other DNA
ctaccacaaccacgggc

SEQ ID NO: 131992 - DNA, 17 bp, synthetic construct
  source 1..17: mol_type = other DNA
taccacaaccacgggct

SEQ ID NO: 131993 - DNA, 17 bp, synthetic construct
  source 1..17: mol_type = other DNA
accacaaccacgggctt

SEQ ID NO: 131994 - DNA, 17 bp, synthetic construct
  source 1..17: mol_type = other DNA
ccacaaccacgggcttc

SEQ ID NO: 131995 - DNA, 17 bp, synthetic construct
  source 1..17: mol_type = other DNA
cacaaccacgggcttca

SEQ ID NO: 131996 - DNA, 17 bp, synthetic construct
  source 1..17: mol_type = other DNA
acaaccacgggcttcac

SEQ ID NO: 131997 - DNA, 17 bp, synthetic construct
  source 1..17: mol_type = other DNA
caaccacgggcttcaca

SEQ ID NO: 131998 - DNA, 17 bp, synthetic construct
  source 1..17: mol_type = other DNA
aaccacgggcttcacag

SEQ ID NO: 131999 - DNA, 17 bp, synthetic construct
  source 1..17: mol_type = other DNA
accacgggcttcacagc

SEQ ID NO: 132000 - DNA, 17 bp, synthetic construct
  source 1..17: mol_type = other DNA
ccacgggcttcacagcc

SEQ ID NO: 132001 - DNA, 17 bp, synthetic construct
  source 1..17: mol_type = other DNA
cacgggcttcacagcca

SEQ ID NO: 132002 - DNA, 17 bp, synthetic construct
  source 1..17: mol_type = other DNA
acgggcttcacagccac

SEQ ID NO: 132003 - DNA, 17 bp, synthetic construct
  source 1..17: mol_type = other DNA
cgggcttcacagccacc

SEQ ID NO: 132004 - DNA, 17 bp, synthetic construct
  source 1..17: mol_type = other DNA
gggcttcacagccaccc

SEQ ID NO: 132005 - DNA, 17 bp, synthetic construct
  source 1..17: mol_type = other DNA
ggcttcacagccacccc

SEQ ID NO: 132006 - DNA, 17 bp, synthetic construct
  source 1..17: mol_type = other DNA
gcttcacagccaccccc

SEQ ID NO: 132007 - DNA, 17 bp, synthetic construct
  source 1..17: mol_type = other DNA
cttcacagccaccccct

SEQ ID NO: 132008 - DNA, 17 bp, synthetic construct
  source 1..17: mol_type = other DNA
ttcacagccaccccctc

SEQ ID NO: 132009 - DNA, 17 bp, synthetic construct
  source 1..17: mol_type = other DNA
tcacagccaccccctcc

SEQ ID NO: 132010 - DNA, 17 bp, synthetic construct
  source 1..17: mol_type = other DNA
cacagccaccccctcct

SEQ ID NO: 132011 - DNA, 17 bp, synthetic construct
  source 1..17: mol_type = other DNA
acagccaccccctcctc

SEQ ID NO: 132012 - DNA, 17 bp, synthetic construct
  source 1..17: mol_type = other DNA
cagccaccccctcctcc

SEQ ID NO: 132013 - DNA, 17 bp, synthetic construct
  source 1..17: mol_type = other DNA
agccaccccctcctcca

SEQ ID NO: 132014 - DNA, 17 bp, synthetic construct
  source 1..17: mol_type = other DNA
gccaccccctcctccag

SEQ ID NO: 132015 - DNA, 17 bp, synthetic construct
  source 1..17: mol_type = other DNA
ccaccccctcctccagc

SEQ ID NO: 132016 - DNA, 17 bp, synthetic construct
  source 1..17: mol_type = other DNA
caccccctcctccagcc

SEQ ID NO: 132017 - DNA, 17 bp, synthetic construct
  source 1..17: mol_type = other DNA
accccctcctccagccc

SEQ ID NO: 132018 - DNA, 17 bp, synthetic construct
  source 1..17: mol_type = other DNA
ccccctcctccagccca

SEQ ID NO: 132019 - DNA, 17 bp, synthetic construct
  source 1..17: mol_type = other DNA
cccctcctccagcccag

SEQ ID NO: 132020 - DNA, 17 bp, synthetic construct
  source 1..17: mol_type = other DNA
ccctcctccagcccagg

SEQ ID NO: 132021 - DNA, 17 bp, synthetic construct
  source 1..17: mol_type = other DNA
cctcctccagcccaggg

SEQ ID NO: 132022 - DNA, 17 bp, synthetic construct
  source 1..17: mol_type = other DNA
ctcctccagcccaggga

SEQ ID NO: 132023 - DNA, 17 bp, synthetic construct
  source 1..17: mol_type = other DNA
tcctccagcccagggac

SEQ ID NO: 132024 - DNA, 17 bp, synthetic construct
  source 1..17: mol_type = other DNA
cctccagcccagggacg

SEQ ID NO: 132025 - DNA, 17 bp, synthetic construct
  source 1..17: mol_type = other DNA
ctccagcccagggacgg

SEQ ID NO: 132026 - DNA, 17 bp, synthetic construct
  source 1..17: mol_type = other DNA
tccagcccagggacggc

SEQ ID NO: 132027 - DNA, 17 bp, synthetic construct
  source 1..17: mol_type = other DNA
ccagcccagggacggca

SEQ ID NO: 132028 - DNA, 17 bp, synthetic construct
  source 1..17: mol_type = other DNA
cagcccagggacggcac

SEQ ID NO: 132029 - DNA, 17 bp, synthetic construct
  source 1..17: mol_type = other DNA
agcccagggacggcact

SEQ ID NO: 132030 - DNA, 17 bp, synthetic construct
  source 1..17: mol_type = other DNA
gcccagggacggcactc

SEQ ID NO: 132031 - DNA, 17 bp, synthetic construct
  source 1..17: mol_type = other DNA
cccagggacggcactca

SEQ ID NO: 132032 - DNA, 17 bp, synthetic construct
  source 1..17: mol_type = other DNA
ccagggacggcactcac

SEQ ID NO: 132033 - DNA, 17 bp, synthetic construct
  source 1..17: mol_type = other DNA
cagggacggcactcacg

SEQ ID NO: 132034 - DNA, 17 bp, synthetic construct
  source 1..17: mol_type = other DNA
agggacggcactcacgc

SEQ ID NO: 132035 - DNA, 17 bp, synthetic construct
  source 1..17: mol_type = other DNA
gggacggcactcacgcc

SEQ ID NO: 132036 - DNA, 17 bp, synthetic construct
  source 1..17: mol_type = other DNA
ggacggcactcacgcct

SEQ ID NO: 132037 - DNA, 17 bp, synthetic construct
  source 1..17: mol_type = other DNA
gacggcactcacgcctc

SEQ ID NO: 132038 - DNA, 17 bp, synthetic construct
  source 1..17: mol_type = other DNA
acggcactcacgcctcc

SEQ ID NO: 132039 - DNA, 17 bp, synthetic construct
  source 1..17: mol_type = other DNA
cggcactcacgcctcca

SEQ ID NO: 132040 - DNA, 17 bp, synthetic construct
  source 1..17: mol_type = other DNA
ggcactcacgcctccag

SEQ ID NO: 132041 - DNA, 17 bp, synthetic construct
  source 1..17: mol_type = other DNA
gcactcacgcctccagt

SEQ ID NO: 132042 - DNA, 17 bp, synthetic construct
  source 1..17: mol_type = other DNA
cactcacgcctccagtg

SEQ ID NO: 132043 - DNA, 17 bp, synthetic construct
  source 1..17: mol_type = other DNA
actcacgcctccagtgt

SEQ ID NO: 132044 - DNA, 17 bp, synthetic construct
  source 1..17: mol_type = other DNA
ctcacgcctccagtgtg

SEQ ID NO: 132045 - DNA, 17 bp, synthetic construct
  source 1..17: mol_type = other DNA
tcacgcctccagtgtgg

SEQ ID NO: 132046 - DNA, 17 bp, synthetic construct
  source 1..17: mol_type = other DNA
cacgcctccagtgtgga

SEQ ID NO: 132047 - DNA, 17 bp, synthetic construct
  source 1..17: mol_type = other DNA
acgcctccagtgtggat

SEQ ID NO: 132048 - DNA, 17 bp, synthetic construct
  source 1..17: mol_type = other DNA
cgcctccagtgtggatc

SEQ ID NO: 132049 - DNA, 17 bp, synthetic construct
  source 1..17: mol_type = other DNA
gcctccagtgtggatca

SEQ ID NO: 132050 - DNA, 17 bp, synthetic construct
  source 1..17: mol_type = other DNA
cctccagtgtggatcag

SEQ ID NO: 132051 - DNA, 17 bp, synthetic construct
  source 1..17: mol_type = other DNA
ctccagtgtggatcagc

SEQ ID NO: 132052 - DNA, 17 bp, synthetic construct
  source 1..17: mol_type = other DNA
tccagtgtggatcagca

SEQ ID NO: 132053 - DNA, 17 bp, synthetic construct
  source 1..17: mol_type = other DNA
ccagtgtggatcagcac

SEQ ID NO: 132054 - DNA, 17 bp, synthetic construct
  source 1..17: mol_type = other DNA
cagtgtggatcagcaca

SEQ ID NO: 132055 - DNA, 17 bp, synthetic construct
  source 1..17: mol_type = other DNA
agtgtggatcagcacaa

SEQ ID NO: 132056 - DNA, 17 bp, synthetic construct
  source 1..17: mol_type = other DNA
gtgtggatcagcacaac

SEQ ID NO: 132057 - DNA, 17 bp, synthetic construct
  source 1..17: mol_type = other DNA
tgtggatcagcacaacc

SEQ ID NO: 132058 - DNA, 17 bp, synthetic construct
  source 1..17: mol_type = other DNA
gtggatcagcacaacca

SEQ ID NO: 132059 - DNA, 17 bp, synthetic construct
  source 1..17: mol_type = other DNA
tggatcagcacaaccac

SEQ ID NO: 132060 - DNA, 17 bp, synthetic construct
  source 1..17: mol_type = other DNA
ggatcagcacaaccacc

SEQ ID NO: 132061 - DNA, 17 bp, synthetic construct
  source 1..17: mol_type = other DNA
gatcagcacaaccacca

SEQ ID NO: 132062 - DNA, 17 bp, synthetic construct
  source 1..17: mol_type = other DNA
atcagcacaaccaccac

SEQ ID NO: 132063 - DNA, 17 bp, synthetic construct
  source 1..17: mol_type = other DNA
tcagcacaaccaccaca

SEQ ID NO: 132064 - DNA, 17 bp, synthetic construct
  source 1..17: mol_type = other DNA
cagcacaaccaccacac

SEQ ID NO: 132065 - DNA, 17 bp, synthetic construct
  source 1..17: mol_type = other DNA
agcacaaccaccacacc

SEQ ID NO: 132066 - DNA, 17 bp, synthetic construct
  source 1..17: mol_type = other DNA
gcacaaccaccacaccc

SEQ ID NO: 132067 - DNA, 17 bp, synthetic construct
  source 1..17: mol_type = other DNA
cacaaccaccacaccca

SEQ ID NO: 132068 - DNA, 17 bp, synthetic construct
  source 1..17: mol_type = other DNA
acaaccaccacacccac

SEQ ID NO: 132069 - DNA, 17 bp, synthetic construct
  source 1..17: mol_type = other DNA
caaccaccacacccaca

SEQ ID NO: 132070 - DNA, 17 bp, synthetic construct
  source 1..17: mol_type = other DNA
aaccaccacacccacaa

SEQ ID NO: 132071 - DNA, 17 bp, synthetic construct
  source 1..17: mol_type = other DNA
accaccacacccacaac

SEQ ID NO: 132072 - DNA, 17 bp, synthetic construct
  source 1..17: mol_type = other DNA
ccaccacacccacaacc

SEQ ID NO: 132073 - DNA, 17 bp, synthetic construct
  source 1..17: mol_type = other DNA
caccacacccacaacca

SEQ ID NO: 132074 - DNA, 17 bp, synthetic construct
  source 1..17: mol_type = other DNA
accacacccacaaccag

SEQ ID NO: 132075 - DNA, 17 bp, synthetic construct
  source 1..17: mol_type = other DNA
ccacacccacaaccaga

SEQ ID NO: 132076 - DNA, 17 bp, synthetic construct
  source 1..17: mol_type = other DNA
cacacccacaaccagag

SEQ ID NO: 132077 - DNA, 17 bp, synthetic construct
  source 1..17: mol_type = other DNA
acacccacaaccagagg

SEQ ID NO: 132078 - DNA, 17 bp, synthetic construct
  source 1..17: mol_type = other DNA
cacccacaaccagaggc

SEQ ID NO: 132079 - DNA, 17 bp, synthetic construct
  source 1..17: mol_type = other DNA
acccacaaccagaggct

SEQ ID NO: 132080 - DNA, 17 bp, synthetic construct
  source 1..17: mol_type = other DNA
cccacaaccagaggctc

SEQ ID NO: 132081 - DNA, 17 bp, synthetic construct
  source 1..17: mol_type = other DNA
ccacaaccagaggctcc

SEQ ID NO: 132082 - DNA, 17 bp, synthetic construct
  source 1..17: mol_type = other DNA
cacaaccagaggctcca

SEQ ID NO: 132083 - DNA, 17 bp, synthetic construct
  source 1..17: mol_type = other DNA
acaaccagaggctccac

SEQ ID NO: 132084 - DNA, 17 bp, synthetic construct
  source 1..17: mol_type = other DNA
caaccagaggctccacg

SEQ ID NO: 132085 - DNA, 17 bp, synthetic construct
  source 1..17: mol_type = other DNA
aaccagaggctccacgg

SEQ ID NO: 132086 - DNA, 17 bp, synthetic construct
  source 1..17: mol_type = other DNA
accagaggctccacggt

SEQ ID NO: 132087 - DNA, 17 bp, synthetic construct
  source 1..17: mol_type = other DNA
ccagaggctccacggtg

SEQ ID NO: 132088 - DNA, 17 bp, synthetic construct
  source 1..17: mol_type = other DNA
cagaggctccacggtga

SEQ ID NO: 132089 - DNA, 17 bp, synthetic construct
  source 1..17: mol_type = other DNA
agaggctccacggtgac

SEQ ID NO: 132090 - DNA, 17 bp, synthetic construct
  source 1..17: mol_type = other DNA
gaggctccacggtgacc

SEQ ID NO: 132091 - DNA, 17 bp, synthetic construct
  source 1..17: mol_type = other DNA
aggctccacggtgaccc

SEQ ID NO: 132092 - DNA, 17 bp, synthetic construct
  source 1..17: mol_type = other DNA
ggctccacggtgacccc

SEQ ID NO: 132093 - DNA, 17 bp, synthetic construct
  source 1..17: mol_type = other DNA
gctccacggtgaccccc

SEQ ID NO: 132094 - DNA, 17 bp, synthetic construct
  source 1..17: mol_type = other DNA
ctccacggtgaccccct

SEQ ID NO: 132095 - DNA, 17 bp, synthetic construct
  source 1..17: mol_type = other DNA
tccacggtgaccccctc

SEQ ID NO: 132096 - DNA, 17 bp, synthetic construct
  source 1..17: mol_type = other DNA
ccacggtgaccccctcc

SEQ ID NO: 132097 - DNA, 17 bp, synthetic construct
  source 1..17: mol_type = other DNA
cacggtgaccccctcct

SEQ ID NO: 132098 - DNA, 17 bp, synthetic construct
  source 1..17: mol_type = other DNA
acggtgaccccctcctc

SEQ ID NO: 132099 - DNA, 17 bp, synthetic construct
  source 1..17: mol_type = other DNA
cggtgaccccctcctcc

SEQ ID NO: 132100 - DNA, 17 bp, synthetic construct
  source 1..17: mol_type = other DNA
ggtgaccccctcctcca

SEQ ID NO: 132101 - DNA, 17 bp, synthetic construct
  source 1..17: mol_type = other DNA
gtgaccccctcctccat

SEQ ID NO: 132102 - DNA, 17 bp, synthetic construct
  source 1..17: mol_type = other DNA
tgaccccctcctccatc

SEQ ID NO: 132103 - DNA, 17 bp, synthetic construct
  source 1..17: mol_type = other DNA
gaccccctcctccatcc

SEQ ID NO: 132104 - DNA, 17 bp, synthetic construct
  source 1..17: mol_type = other DNA
accccctcctccatccc

SEQ ID NO: 132105 - DNA, 17 bp, synthetic construct
  source 1..17: mol_type = other DNA
ccccctcctccatcccg

SEQ ID NO: 132106 - DNA, 17 bp, synthetic construct
  source 1..17: mol_type = other DNA
cccctcctccatcccgg

SEQ ID NO: 132107 - DNA, 17 bp, synthetic construct
  source 1..17: mol_type = other DNA
ccctcctccatcccggg

SEQ ID NO: 132108 - DNA, 17 bp, synthetic construct
  source 1..17: mol_type = other DNA
cctcctccatcccgggg

SEQ ID NO: 132109 - DNA, 17 bp, synthetic construct
  source 1..17: mol_type = other DNA
ctcctccatcccgggga

SEQ ID NO: 132110 - DNA, 17 bp, synthetic construct
  source 1..17: mol_type = other DNA
tcctccatcccggggac

SEQ ID NO: 132111 - DNA, 17 bp, synthetic construct
  source 1..17: mol_type = other DNA
cctccatcccggggacc

SEQ ID NO: 132112 - DNA, 17 bp, synthetic construct
  source 1..17: mol_type = other DNA
ctccatcccggggacca

SEQ ID NO: 132113 - DNA, 17 bp, synthetic construct
  source 1..17: mol_type = other DNA
tccatcccggggaccac

SEQ ID NO: 132114 - DNA, 17 bp, synthetic construct
  source 1..17: mol_type = other DNA
ccatcccggggaccacc

SEQ ID NO: 132115 - DNA, 17 bp, synthetic construct
  source 1..17: mol_type = other DNA
catcccggggaccaccc

SEQ ID NO: 132116 - DNA, 17 bp, synthetic construct
  source 1..17: mol_type = other DNA
atcccggggaccaccca

SEQ ID NO: 132117 - DNA, 17 bp, synthetic construct
  source 1..17: mol_type = other DNA
tcccggggaccacccac

SEQ ID NO: 132118 - DNA, 17 bp, synthetic construct
  source 1..17: mol_type = other DNA
cccggggaccacccaca

SEQ ID NO: 132119 - DNA, 17 bp, synthetic construct
  source 1..17: mol_type = other DNA
ccggggaccacccacac

SEQ ID NO: 132120 - DNA, 17 bp, synthetic construct
  source 1..17: mol_type = other DNA
cggggaccacccacacc

SEQ ID NO: 132121 - DNA, 17 bp, synthetic construct
  source 1..17: mol_type = other DNA
ggggaccacccacaccg

SEQ ID NO: 132122 - DNA, 17 bp, synthetic construct
  source 1..17: mol_type = other DNA
gggaccacccacaccgc

SEQ ID NO: 132123 - DNA, 17 bp, synthetic construct
  source 1..17: mol_type = other DNA
ggaccacccacaccgcc

SEQ ID NO: 132124 - DNA, 17 bp, synthetic construct
  source 1..17: mol_type = other DNA
gaccacccacaccgcca

SEQ ID NO: 132125 - DNA, 17 bp, synthetic construct
  source 1..17: mol_type = other DNA
accacccacaccgccac

SEQ ID NO: 132126 - DNA, 17 bp, synthetic construct
  source 1..17: mol_type = other DNA
ccacccacaccgccaca

SEQ ID NO: 132127 - DNA, 17 bp, synthetic construct
  source 1..17: mol_type = other DNA
cacccacaccgccacag

SEQ ID NO: 132128 - DNA, 17 bp, synthetic construct
  source 1..17: mol_type = other DNA
acccacaccgccacagt

SEQ ID NO: 132129 - DNA, 17 bp, synthetic construct
  source 1..17: mol_type = other DNA
cccacaccgccacagtg

SEQ ID NO: 132130 - DNA, 17 bp, synthetic construct
  source 1..17: mol_type = other DNA
ccacaccgccacagtgc

SEQ ID NO: 132131 - DNA, 17 bp, synthetic construct
  source 1..17: mol_type = other DNA
cacaccgccacagtgct

SEQ ID NO: 132132 - DNA, 17 bp, synthetic construct
  source 1..17: mol_type = other DNA
acaccgccacagtgctg

SEQ ID NO: 132133 - DNA, 17 bp, synthetic construct
  source 1..17: mol_type = other DNA
caccgccacagtgctga

SEQ ID NO: 132134 - DNA, 17 bp, synthetic construct
  source 1..17: mol_type = other DNA
accgccacagtgctgac

SEQ ID NO: 132135 - DNA, 17 bp, synthetic construct
  source 1..17: mol_type = other DNA
ccgccacagtgctgacc

SEQ ID NO: 132136 - DNA, 17 bp, synthetic construct
  source 1..17: mol_type = other DNA
cgccacagtgctgacca

SEQ ID NO: 132137 - DNA, 17 bp, synthetic construct
  source 1..17: mol_type = other DNA
gccacagtgctgaccac

SEQ ID NO: 132138 - DNA, 17 bp, synthetic construct
  source 1..17: mol_type = other DNA
ccacagtgctgaccacc

SEQ ID NO: 132139 - DNA, 17 bp, synthetic construct
  source 1..17: mol_type = other DNA
cacagtgctgaccacca

SEQ ID NO: 132140 - DNA, 17 bp, synthetic construct
  source 1..17: mol_type = other DNA
acagtgctgaccaccac

SEQ ID NO: 132141 - DNA, 17 bp, synthetic construct
  source 1..17: mol_type = other DNA
cagtgctgaccaccacc

SEQ ID NO: 132142 - DNA, 17 bp, synthetic construct
  source 1..17: mol_type = other DNA
agtgctgaccaccacca

SEQ ID NO: 132143 - DNA, 17 bp, synthetic construct
  source 1..17: mol_type = other DNA
gtgctgaccaccaccac

SEQ ID NO: 132144 - DNA, 17 bp, synthetic construct
  source 1..17: mol_type = other DNA
tgctgaccaccaccacc

SEQ ID NO: 132145 - DNA, 17 bp, synthetic construct
  source 1..17: mol_type = other DNA
gctgaccaccaccacca

SEQ ID NO: 132146 - DNA, 17 bp, synthetic construct
  source 1..17: mol_type = other DNA
ctgaccaccaccaccac

SEQ ID NO: 132147 - DNA, 17 bp, synthetic construct
  source 1..17: mol_type = other DNA
tgaccaccaccaccaca

SEQ ID NO: 132148 - DNA, 17 bp, synthetic construct
  source 1..17: mol_type = other DNA
gaccaccaccaccacaa

SEQ ID NO: 132149 - DNA, 17 bp, synthetic construct
  source 1..17: mol_type = other DNA
accaccaccaccacaac

SEQ ID NO: 132150 - DNA, 17 bp, synthetic construct
  source 1..17: mol_type = other DNA
ccaccaccaccacaact

SEQ ID NO: 132151 - DNA, 17 bp, synthetic construct
  source 1..17: mol_type = other DNA
caccaccaccacaactg

SEQ ID NO: 132152 - DNA, 17 bp, synthetic construct
  source 1..17: mol_type = other DNA
accaccaccacaactgt

SEQ ID NO: 132153 - DNA, 17 bp, synthetic construct
  source 1..17: mol_type = other DNA
ccaccaccacaactgtg

SEQ ID NO: 132154 - DNA, 17 bp, synthetic construct
  source 1..17: mol_type = other DNA
caccaccacaactgtgg

SEQ ID NO: 132155 - DNA, 17 bp, synthetic construct
  source 1..17: mol_type = other DNA
accaccacaactgtggc

SEQ ID NO: 132156 - DNA, 17 bp, synthetic construct
  source 1..17: mol_type = other DNA
ccaccacaactgtggcc

SEQ ID NO: 132157 - DNA, 17 bp, synthetic construct
  source 1..17: mol_type = other DNA
caccacaactgtggcca

SEQ ID NO: 132158 - DNA, 17 bp, synthetic construct
  source 1..17: mol_type = other DNA
accacaactgtggccac

SEQ ID NO: 132159 - DNA, 17 bp, synthetic construct
  source 1..17: mol_type = other DNA
ccacaactgtggccact

SEQ ID NO: 132160 - DNA, 17 bp, synthetic construct
  source 1..17: mol_type = other DNA
cacaactgtggccactg

SEQ ID NO: 132161 - DNA, 17 bp, synthetic construct
  source 1..17: mol_type = other DNA
acaactgtggccactgg

SEQ ID NO: 132162 - DNA, 17 bp, synthetic construct
  source 1..17: mol_type = other DNA
caactgtggccactggt

SEQ ID NO: 132163 - DNA, 17 bp, synthetic construct
  source 1..17: mol_type = other DNA
aactgtggccactggtt

SEQ ID NO: 132164 - DNA, 17 bp, synthetic construct
  source 1..17: mol_type = other DNA
actgtggccactggttc

SEQ ID NO: 132165 - DNA, 17 bp, synthetic construct
  source 1..17: mol_type = other DNA
ctgtggccactggttct

SEQ ID NO: 132166 - DNA, 17 bp, synthetic construct
  source 1..17: mol_type = other DNA
tgtggccactggttcta

SEQ ID NO: 132167 - DNA, 17 bp, synthetic construct
  source 1..17: mol_type = other DNA
gtggccactggttctat

SEQ ID NO: 132168 - DNA, 17 bp, synthetic construct
  source 1..17: mol_type = other DNA
tggccactggttctatg

SEQ ID NO: 132169 - DNA, 17 bp, synthetic construct
  source 1..17: mol_type = other DNA
ggccactggttctatgg

SEQ ID NO: 132170 - DNA, 17 bp, synthetic construct
  source 1..17: mol_type = other DNA
gccactggttctatggc

SEQ ID NO: 132171 - DNA, 17 bp, synthetic construct
  source 1..17: mol_type = other DNA
ccactggttctatggca

SEQ ID NO: 132172 - DNA, 17 bp, synthetic construct
  source 1..17: mol_type = other DNA
cactggttctatggcaa

SEQ ID NO: 132173 - DNA, 17 bp, synthetic construct
  source 1..17: mol_type = other DNA
actggttctatggcaac

SEQ ID NO: 132174 - DNA, 17 bp, synthetic construct
  source 1..17: mol_type = other DNA
ctggttctatggcaaca

SEQ ID NO: 132175 - DNA, 17 bp, synthetic construct
  source 1..17: mol_type = other DNA
tggttctatggcaacac

SEQ ID NO: 132176 - DNA, 17 bp, synthetic construct
  source 1..17: mol_type = other DNA
ggttctatggcaacacc

SEQ ID NO: 132177 - DNA, 17 bp, synthetic construct
  source 1..17: mol_type = other DNA
gttctatggcaacaccc

SEQ ID NO: 132178 - DNA, 17 bp, synthetic construct
  source 1..17: mol_type = other DNA
ttctatggcaacaccct

SEQ ID NO: 132179 - DNA, 17 bp, synthetic construct
  source 1..17: mol_type = other DNA
tctatggcaacaccctc

SEQ ID NO: 132180 - DNA, 17 bp, synthetic construct
  source 1..17: mol_type = other DNA
ctatggcaacaccctcc

SEQ ID NO: 132181 - DNA, 17 bp, synthetic construct
  source 1..17: mol_type = other DNA
tatggcaacaccctcct

SEQ ID NO: 132182 - DNA, 17 bp, synthetic construct
  source 1..17: mol_type = other DNA
atggcaacaccctcctc

SEQ ID NO: 132183 - DNA, 17 bp, synthetic construct
  source 1..17: mol_type = other DNA
tggcaacaccctcctct

SEQ ID NO: 132184 - DNA, 17 bp, synthetic construct
  source 1..17: mol_type = other DNA
ggcaacaccctcctcta

SEQ ID NO: 132185 - DNA, 17 bp, synthetic construct
  source 1..17: mol_type = other DNA
gcaacaccctcctctag

SEQ ID NO: 132186 - DNA, 17 bp, synthetic construct
  source 1..17: mol_type = other DNA
caacaccctcctctagc

SEQ ID NO: 132187 - DNA, 17 bp, synthetic construct
  source 1..17: mol_type = other DNA
aacaccctcctctagca

SEQ ID NO: 132188 - DNA, 17 bp, synthetic construct
  source 1..17: mol_type = other DNA
acaccctcctctagcac

SEQ ID NO: 132189 - DNA, 17 bp, synthetic construct
  source 1..17: mol_type = other DNA
caccctcctctagcaca

SEQ ID NO: 132190 - DNA, 17 bp, synthetic construct
  source 1..17: mol_type = other DNA
accctcctctagcacac

SEQ ID NO: 132191 - DNA, 17 bp, synthetic construct
  source 1..17: mol_type = other DNA
ccctcctctagcacaca

SEQ ID NO: 132192 - DNA, 17 bp, synthetic construct
  source 1..17: mol_type = other DNA
cctcctctagcacacag

SEQ ID NO: 132193 - DNA, 17 bp, synthetic construct
  source 1..17: mol_type = other DNA
ctcctctagcacacaga

SEQ ID NO: 132194 - DNA, 17 bp, synthetic construct
  source 1..17: mol_type = other DNA
tcctctagcacacagac

SEQ ID NO: 132195 - DNA, 17 bp, synthetic construct
  source 1..17: mol_type = other DNA
cctctagcacacagacc

SEQ ID NO: 132196 - DNA, 17 bp, synthetic construct
  source 1..17: mol_type = other DNA
ctctagcacacagacca

SEQ ID NO: 132197 - DNA, 17 bp, synthetic construct
  source 1..17: mol_type = other DNA
tctagcacacagaccag

SEQ ID NO: 132198 - DNA, 17 bp, synthetic construct
  source 1..17: mol_type = other DNA
ctagcacacagaccagt

SEQ ID NO: 132199 - DNA, 17 bp, synthetic construct
  source 1..17: mol_type = other DNA
tagcacacagaccagtg

SEQ ID NO: 132200 - DNA, 17 bp, synthetic construct
  source 1..17: mol_type = other DNA
agcacacagaccagtgg

SEQ ID NO: 132201 - DNA, 17 bp, synthetic construct
  source 1..17: mol_type = other DNA
gcacacagaccagtggt

SEQ ID NO: 132202 - DNA, 17 bp, synthetic construct
  source 1..17: mol_type = other DNA
cacacagaccagtggta

SEQ ID NO: 132203 - DNA, 17 bp, synthetic construct
  source 1..17: mol_type = other DNA
acacagaccagtggtac

SEQ ID NO: 132204 - DNA, 17 bp, synthetic construct
  source 1..17: mol_type = other DNA
cacagaccagtggtact

SEQ ID NO: 132205 - DNA, 17 bp, synthetic construct
  source 1..17: mol_type = other DNA
acagaccagtggtactc

SEQ ID NO: 132206 - DNA, 17 bp, synthetic construct
  source 1..17: mol_type = other DNA
cagaccagtggtactcc

SEQ ID NO: 132207 - DNA, 17 bp, synthetic construct
  source 1..17: mol_type = other DNA
agaccagtggtactccc

SEQ ID NO: 132208 - DNA, 17 bp, synthetic construct
  source 1..17: mol_type = other DNA
gaccagtggtactcccc

SEQ ID NO: 132209 - DNA, 17 bp, synthetic construct
  source 1..17: mol_type = other DNA
accagtggtactccccc

SEQ ID NO: 132210 - DNA, 17 bp, synthetic construct
  source 1..17: mol_type = other DNA
ccagtggtactccccca

SEQ ID NO: 132211 - DNA, 17 bp, synthetic construct
  source 1..17: mol_type = other DNA
cagtggtactcccccat

SEQ ID NO: 132212 - DNA, 17 bp, synthetic construct
  source 1..17: mol_type = other DNA
agtggtactcccccatc

SEQ ID NO: 132213 - DNA, 17 bp, synthetic construct
  source 1..17: mol_type = other DNA
gtggtactcccccatca

SEQ ID NO: 132214 - DNA, 17 bp, synthetic construct
  source 1..17: mol_type = other DNA
tggtactcccccatcac

SEQ ID NO: 132215 - DNA, 17 bp, synthetic construct
  source 1..17: mol_type = other DNA
ggtactcccccatcact

SEQ ID NO: 132216 - DNA, 17 bp, synthetic construct
  source 1..17: mol_type = other DNA
gtactcccccatcactg

SEQ ID NO: 132217 - DNA, 17 bp, synthetic construct
  source 1..17: mol_type = other DNA
tactcccccatcactga

SEQ ID NO: 132218 - DNA, 17 bp, synthetic construct
  source 1..17: mol_type = other DNA
actcccccatcactgac

SEQ ID NO: 132219 - DNA, 17 bp, synthetic construct
  source 1..17: mol_type = other DNA
ctcccccatcactgacc

SEQ ID NO: 132220 - DNA, 17 bp, synthetic construct
  source 1..17: mol_type = other DNA
tcccccatcactgacca

SEQ ID NO: 132221 - DNA, 17 bp, synthetic construct
  source 1..17: mol_type = other DNA
cccccatcactgaccac

SEQ ID NO: 132222 - DNA, 17 bp, synthetic construct
  source 1..17: mol_type = other DNA
ccccatcactgaccacc

SEQ ID NO: 132223 - DNA, 17 bp, synthetic construct
  source 1..17: mol_type = other DNA
cccatcactgaccacca

SEQ ID NO: 132224 - DNA, 17 bp, synthetic construct
  source 1..17: mol_type = other DNA
ccatcactgaccaccac

SEQ ID NO: 132225 - DNA, 17 bp, synthetic construct
  source 1..17: mol_type = other DNA
catcactgaccaccacg

SEQ ID NO: 132226 - DNA, 17 bp, synthetic construct
  source 1..17: mol_type = other DNA
atcactgaccaccacgg

SEQ ID NO: 132227 - DNA, 17 bp, synthetic construct
  source 1..17: mol_type = other DNA
tcactgaccaccacggc

SEQ ID NO: 132228 - DNA, 17 bp, synthetic construct
  source 1..17: mol_type = other DNA
cactgaccaccacggcc

SEQ ID NO: 132229 - DNA, 17 bp, synthetic construct
  source 1..17: mol_type = other DNA
actgaccaccacggcca

SEQ ID NO: 132230 - DNA, 17 bp, synthetic construct
  source 1..17: mol_type = other DNA
ctgaccaccacggccac

SEQ ID NO: 132231 - DNA, 17 bp, synthetic construct
  source 1..17: mol_type = other DNA
tgaccaccacggccact

SEQ ID NO: 132232 - DNA, 17 bp, synthetic construct
  source 1..17: mol_type = other DNA
gaccaccacggccacta

SEQ ID NO: 132233 - DNA, 17 bp, synthetic construct
  source 1..17: mol_type = other DNA
accaccacggccactac

SEQ ID NO: 132234 - DNA, 17 bp, synthetic construct
  source 1..17: mol_type = other DNA
ccaccacggccactacg

SEQ ID NO: 132235 - DNA, 17 bp, synthetic construct
  source 1..17: mol_type = other DNA
caccacggccactacga

SEQ ID NO: 132236 - DNA, 17 bp, synthetic construct
  source 1..17: mol_type = other DNA
accacggccactacgat

SEQ ID NO: 132237 - DNA, 17 bp, synthetic construct
  source 1..17: mol_type = other DNA
ccacggccactacgatc

SEQ ID NO: 132238 - DNA, 17 bp, synthetic construct
  source 1..17: mol_type = other DNA
cacggccactacgatca

SEQ ID NO: 132239 - DNA, 17 bp, synthetic construct
  source 1..17: mol_type = other DNA
acggccactacgatcac

SEQ ID NO: 132240 - DNA, 17 bp, synthetic construct
  source 1..17: mol_type = other DNA
cggccactacgatcaca

SEQ ID NO: 132241 - DNA, 17 bp, synthetic construct
  source 1..17: mol_type = other DNA
ggccactacgatcacag

SEQ ID NO: 132242 - DNA, 17 bp, synthetic construct
  source 1..17: mol_type = other DNA
gccactacgatcacagc

SEQ ID NO: 132243 - DNA, 17 bp, synthetic construct
  source 1..17: mol_type = other DNA
ccactacgatcacagcc

SEQ ID NO: 132244 - DNA, 17 bp, synthetic construct
  source 1..17: mol_type = other DNA
cactacgatcacagcca

SEQ ID NO: 132245 - DNA, 17 bp, synthetic construct
  source 1..17: mol_type = other DNA
actacgatcacagccac

SEQ ID NO: 132246 - DNA, 17 bp, synthetic construct
  source 1..17: mol_type = other DNA
ctacgatcacagccacc

SEQ ID NO: 132247 - DNA, 17 bp, synthetic construct
  source 1..17: mol_type = other DNA
tacgatcacagccaccg

SEQ ID NO: 132248 - DNA, 17 bp, synthetic construct
  source 1..17: mol_type = other DNA
acgatcacagccaccgg

SEQ ID NO: 132249 - DNA, 17 bp, synthetic construct
  source 1..17: mol_type = other DNA
cgatcacagccaccggc

SEQ ID NO: 132250 - DNA, 17 bp, synthetic construct
  source 1..17: mol_type = other DNA
gatcacagccaccggct

SEQ ID NO: 132251 - DNA, 17 bp, synthetic construct
  source 1..17: mol_type = other DNA
atcacagccaccggctc

SEQ ID NO: 132252 - DNA, 17 bp, synthetic construct
  source 1..17: mol_type = other DNA
tcacagccaccggctcc

SEQ ID NO: 132253 - DNA, 17 bp, synthetic construct
  source 1..17: mol_type = other DNA
cacagccaccggctcca

SEQ ID NO: 132254 - DNA, 17 bp, synthetic construct
  source 1..17: mol_type = other DNA
acagccaccggctccac

SEQ ID NO: 132255 - DNA, 17 bp, synthetic construct
  source 1..17: mol_type = other DNA
cagccaccggctccacc

SEQ ID NO: 132256 - DNA, 17 bp, synthetic construct
  source 1..17: mol_type = other DNA
agccaccggctccacca

SEQ ID NO: 132257 - DNA, 17 bp, synthetic construct
  source 1..17: mol_type = other DNA
gccaccggctccaccac

SEQ ID NO: 132258 - DNA, 17 bp, synthetic construct
  source 1..17: mol_type = other DNA
ccaccggctccaccacc

SEQ ID NO: 132259 - DNA, 17 bp, synthetic construct
  source 1..17: mol_type = other DNA
caccggctccaccacca

SEQ ID NO: 132260 - DNA, 17 bp, synthetic construct
  source 1..17: mol_type = other DNA
accggctccaccaccaa

SEQ ID NO: 132261 - DNA, 17 bp, synthetic construct
  source 1..17: mol_type = other DNA
ccggctccaccaccaac

SEQ ID NO: 132262 - DNA, 17 bp, synthetic construct
  source 1..17: mol_type = other DNA
cggctccaccaccaacc

SEQ ID NO: 132263 - DNA, 17 bp, synthetic construct
  source 1..17: mol_type = other DNA
ggctccaccaccaaccc

SEQ ID NO: 132264 - DNA, 17 bp, synthetic construct
  source 1..17: mol_type = other DNA
gctccaccaccaacccc

SEQ ID NO: 132265 - DNA, 17 bp, synthetic construct
  source 1..17: mol_type = other DNA
ctccaccaccaacccct

SEQ ID NO: 132266 - DNA, 17 bp, synthetic construct
  source 1..17: mol_type = other DNA
tccaccaccaacccctc

SEQ ID NO: 132267 - DNA, 17 bp, synthetic construct
  source 1..17: mol_type = other DNA
ccaccaccaacccctcc

SEQ ID NO: 132268 - DNA, 17 bp, synthetic construct
  source 1..17: mol_type = other DNA
caccaccaacccctcct

SEQ ID NO: 132269 - DNA, 17 bp, synthetic construct
  source 1..17: mol_type = other DNA
accaccaacccctcctc

SEQ ID NO: 132270 - DNA, 17 bp, synthetic construct
  source 1..17: mol_type = other DNA
ccaccaacccctcctca

SEQ ID NO: 132271 - DNA, 17 bp, synthetic construct
  source 1..17: mol_type = other DNA
caccaacccctcctcaa

SEQ ID NO: 132272 - DNA, 17 bp, synthetic construct
  source 1..17: mol_type = other DNA
accaacccctcctcaac

SEQ ID NO: 132273 - DNA, 17 bp, synthetic construct
  source 1..17: mol_type = other DNA
ccaacccctcctcaact

SEQ ID NO: 132274 - DNA, 17 bp, synthetic construct
  source 1..17: mol_type = other DNA
caacccctcctcaactc

SEQ ID NO: 132275 - DNA, 17 bp, synthetic construct
  source 1..17: mol_type = other DNA
aacccctcctcaactcc

SEQ ID NO: 132276 - DNA, 17 bp, synthetic construct
  source 1..17: mol_type = other DNA
acccctcctcaactcca

SEQ ID NO: 132277 - DNA, 17 bp, synthetic construct
  source 1..17: mol_type = other DNA
cccctcctcaactccag

SEQ ID NO: 132278 - DNA, 17 bp, synthetic construct
  source 1..17: mol_type = other DNA
ccctcctcaactccagg

SEQ ID NO: 132279 - DNA, 17 bp, synthetic construct
  source 1..17: mol_type = other DNA
cctcctcaactccaggg

SEQ ID NO: 132280 - DNA, 17 bp, synthetic construct
  source 1..17: mol_type = other DNA
ctcctcaactccaggga

SEQ ID NO: 132281 - DNA, 17 bp, synthetic construct
  source 1..17: mol_type = other DNA
tcctcaactccagggac

SEQ ID NO: 132282 - DNA, 17 bp, synthetic construct
  source 1..17: mol_type = other DNA
cctcaactccagggaca

SEQ ID NO: 132283 - DNA, 17 bp, synthetic construct
  source 1..17: mol_type = other DNA
ctcaactccagggacaa

SEQ ID NO: 132284 - DNA, 17 bp, synthetic construct
  source 1..17: mol_type = other DNA
tcaactccagggacaac

SEQ ID NO: 132285 - DNA, 17 bp, synthetic construct
  source 1..17: mol_type = other DNA
caactccagggacaact

SEQ ID NO: 132286 - DNA, 17 bp, synthetic construct
  source 1..17: mol_type = other DNA
aactccagggacaactc

SEQ ID NO: 132287 - DNA, 17 bp, synthetic construct
  source 1..17: mol_type = other DNA
actccagggacaactcc

SEQ ID NO: 132288 - DNA, 17 bp, synthetic construct
  source 1..17: mol_type = other DNA
ctccagggacaactccc

SEQ ID NO: 132289 - DNA, 17 bp, synthetic construct
  source 1..17: mol_type = other DNA
tccagggacaactccca

SEQ ID NO: 132290 - DNA, 17 bp, synthetic construct
  source 1..17: mol_type = other DNA
ccagggacaactcccat

SEQ ID NO: 132291 - DNA, 17 bp, synthetic construct
  source 1..17: mol_type = other DNA
cagggacaactcccatc

SEQ ID NO: 132292 - DNA, 17 bp, synthetic construct
  source 1..17: mol_type = other DNA
agggacaactcccatcc

SEQ ID NO: 132293 - DNA, 17 bp, synthetic construct
  source 1..17: mol_type = other DNA
gggacaactcccatccc

SEQ ID NO: 132294 - DNA, 17 bp, synthetic construct
  source 1..17: mol_type = other DNA
ggacaactcccatcccc

SEQ ID NO: 132295 - DNA, 17 bp, synthetic construct
  source 1..17: mol_type = other DNA
gacaactcccatccccc

SEQ ID NO: 132296 - DNA, 17 bp, synthetic construct
  source 1..17: mol_type = other DNA
acaactcccatcccccc

SEQ ID NO: 132297 - DNA, 17 bp, synthetic construct
  source 1..17: mol_type = other DNA
caactcccatcccccca

SEQ ID NO: 132298 - DNA, 17 bp, synthetic construct
  source 1..17: mol_type = other DNA
aactcccatccccccag

SEQ ID NO: 132299 - DNA, 17 bp, synthetic construct
  source 1..17: mol_type = other DNA
actcccatccccccagt

SEQ ID NO: 132300 - DNA, 17 bp, synthetic construct
  source 1..17: mol_type = other DNA
ctcccatccccccagtg

SEQ ID NO: 132301 - DNA, 17 bp, synthetic construct
  source 1..17: mol_type = other DNA
tcccatccccccagtgc

SEQ ID NO: 132302 - DNA, 17 bp, synthetic construct
  source 1..17: mol_type = other DNA
cccatccccccagtgct

SEQ ID NO: 132303 - DNA, 17 bp, synthetic construct
  source 1..17: mol_type = other DNA
ccatccccccagtgctg

SEQ ID NO: 132304 - DNA, 17 bp, synthetic construct
  source 1..17: mol_type = other DNA
catccccccagtgctga

SEQ ID NO: 132305 - DNA, 17 bp, synthetic construct
  source 1..17: mol_type = other DNA
atccccccagtgctgac

SEQ ID NO: 132306 - DNA, 17 bp, synthetic construct
  source 1..17: mol_type = other DNA
tccccccagtgctgacc

SEQ ID NO: 132307 - DNA, 17 bp, synthetic construct
  source 1..17: mol_type = other DNA
ccccccagtgctgacca

SEQ ID NO: 132308 - DNA, 17 bp, synthetic construct
  source 1..17: mol_type = other DNA
cccccagtgctgaccac

SEQ ID NO: 132309 - DNA, 17 bp, synthetic construct
  source 1..17: mol_type = other DNA
ccccagtgctgaccacc

SEQ ID NO: 132310 - DNA, 17 bp, synthetic construct
  source 1..17: mol_type = other DNA
cccagtgctgaccacca

SEQ ID NO: 132311 - DNA, 17 bp, synthetic construct
  source 1..17: mol_type = other DNA
ccagtgctgaccaccac

SEQ ID NO: 132312 - DNA, 17 bp, synthetic construct
  source 1..17: mol_type = other DNA
cagtgctgaccaccacc

SEQ ID NO: 132313 - DNA, 17 bp, synthetic construct
  source 1..17: mol_type = other DNA
agtgctgaccaccaccg

SEQ ID NO: 132314 - DNA, 17 bp, synthetic construct
  source 1..17: mol_type = other DNA
gtgctgaccaccaccgc

SEQ ID NO: 132315 - DNA, 17 bp, synthetic construct
  source 1..17: mol_type = other DNA
tgctgaccaccaccgcc

SEQ ID NO: 132316 - DNA, 17 bp, synthetic construct
  source 1..17: mol_type = other DNA
gctgaccaccaccgcca

SEQ ID NO: 132317 - DNA, 17 bp, synthetic construct
  source 1..17: mol_type = other DNA
ctgaccaccaccgccac

SEQ ID NO: 132318 - DNA, 17 bp, synthetic construct
  source 1..17: mol_type = other DNA
tgaccaccaccgccacc

SEQ ID NO: 132319 - DNA, 17 bp, synthetic construct
  source 1..17: mol_type = other DNA
gaccaccaccgccacca

SEQ ID NO: 132320 - DNA, 17 bp, synthetic construct
  source 1..17: mol_type = other DNA
accaccaccgccaccac

SEQ ID NO: 132321 - DNA, 17 bp, synthetic construct
  source 1..17: mol_type = other DNA
ccaccaccgccaccaca

SEQ ID NO: 132322 - DNA, 17 bp, synthetic construct
  source 1..17: mol_type = other DNA
caccaccgccaccacac

SEQ ID NO: 132323 - DNA, 17 bp, synthetic construct
  source 1..17: mol_type = other DNA
accaccgccaccacacc

SEQ ID NO: 132324 - DNA, 17 bp, synthetic construct
  source 1..17: mol_type = other DNA
ccaccgccaccacacct

SEQ ID NO: 132325 - DNA, 17 bp, synthetic construct
  source 1..17: mol_type = other DNA
caccgccaccacacctg

SEQ ID NO: 132326 - DNA, 17 bp, synthetic construct
  source 1..17: mol_type = other DNA
accgccaccacacctgc

SEQ ID NO: 132327 - DNA, 17 bp, synthetic construct
  source 1..17: mol_type = other DNA
ccgccaccacacctgca

SEQ ID NO: 132328 - DNA, 17 bp, synthetic construct
  source 1..17: mol_type = other DNA
cgccaccacacctgcag

SEQ ID NO: 132329 - DNA, 17 bp, synthetic construct
  source 1..17: mol_type = other DNA
gccaccacacctgcagc

SEQ ID NO: 132330 - DNA, 17 bp, synthetic construct
  source 1..17: mol_type = other DNA
ccaccacacctgcagcc

SEQ ID NO: 132331 - DNA, 17 bp, synthetic construct
  source 1..17: mol_type = other DNA
caccacacctgcagcca

SEQ ID NO: 132332 - DNA, 17 bp, synthetic construct
  source 1..17: mol_type = other DNA
accacacctgcagccac

SEQ ID NO: 132333 - DNA, 17 bp, synthetic construct
  source 1..17: mol_type = other DNA
ccacacctgcagccacc

SEQ ID NO: 132334 - DNA, 17 bp, synthetic construct
  source 1..17: mol_type = other DNA
cacacctgcagccacca

SEQ ID NO: 132335 - DNA, 17 bp, synthetic construct
  source 1..17: mol_type = other DNA
acacctgcagccaccag

SEQ ID NO: 132336 - DNA, 17 bp, synthetic construct
  source 1..17: mol_type = other DNA
cacctgcagccaccagc

SEQ ID NO: 132337 - DNA, 17 bp, synthetic construct
  source 1..17: mol_type = other DNA
acctgcagccaccagca

SEQ ID NO: 132338 - DNA, 17 bp, synthetic construct
  source 1..17: mol_type = other DNA
cctgcagccaccagcag

SEQ ID NO: 132339 - DNA, 17 bp, synthetic construct
  source 1..17: mol_type = other DNA
ctgcagccaccagcagc

SEQ ID NO: 132340 - DNA, 17 bp, synthetic construct
  source 1..17: mol_type = other DNA
tgcagccaccagcagca

SEQ ID NO: 132341 - DNA, 17 bp, synthetic construct
  source 1..17: mol_type = other DNA
gcagccaccagcagcac

SEQ ID NO: 132342 - DNA, 17 bp, synthetic construct
  source 1..17: mol_type = other DNA
cagccaccagcagcaca

SEQ ID NO: 132343 - DNA, 17 bp, synthetic construct
  source 1..17: mol_type = other DNA
agccaccagcagcacag

SEQ ID NO: 132344 - DNA, 17 bp, synthetic construct
  source 1..17: mol_type = other DNA
gccaccagcagcacagt

SEQ ID NO: 132345 - DNA, 17 bp, synthetic construct
  source 1..17: mol_type = other DNA
ccaccagcagcacagtg

SEQ ID NO: 132346 - DNA, 17 bp, synthetic construct
  source 1..17: mol_type = other DNA
caccagcagcacagtga

SEQ ID NO: 132347 - DNA, 17 bp, synthetic construct
  source 1..17: mol_type = other DNA
accagcagcacagtgac

SEQ ID NO: 132348 - DNA, 17 bp, synthetic construct
  source 1..17: mol_type = other DNA
ccagcagcacagtgact

SEQ ID NO: 132349 - DNA, 17 bp, synthetic construct
  source 1..17: mol_type = other DNA
cagcagcacagtgactc

SEQ ID NO: 132350 - DNA, 17 bp, synthetic construct
  source 1..17: mol_type = other DNA
agcagcacagtgactcc

SEQ ID NO: 132351 - DNA, 17 bp, synthetic construct
  source 1..17: mol_type = other DNA
gcagcacagtgactccc

SEQ ID NO: 132352 - DNA, 17 bp, synthetic construct
  source 1..17: mol_type = other DNA
cagcacagtgactccct

SEQ ID NO: 132353 - DNA, 17 bp, synthetic construct
  source 1..17: mol_type = other DNA
agcacagtgactccctc

SEQ ID NO: 132354 - DNA, 17 bp, synthetic construct
  source 1..17: mol_type = other DNA
gcacagtgactccctcc

SEQ ID NO: 132355 - DNA, 17 bp, synthetic construct
  source 1..17: mol_type = other DNA
cacagtgactccctcct

SEQ ID NO: 132356 - DNA, 17 bp, synthetic construct
  source 1..17: mol_type = other DNA
acagtgactccctcctc

SEQ ID NO: 132357 - DNA, 17 bp, synthetic construct
  source 1..17: mol_type = other DNA
cagtgactccctcctct

SEQ ID NO: 132358 - DNA, 17 bp, synthetic construct
  source 1..17: mol_type = other DNA
agtgactccctcctctg

SEQ ID NO: 132359 - DNA, 17 bp, synthetic construct
  source 1..17: mol_type = other DNA
gtgactccctcctctgc

SEQ ID NO: 132360 - DNA, 17 bp, synthetic construct
  source 1..17: mol_type = other DNA
tgactccctcctctgcc

SEQ ID NO: 132361 - DNA, 17 bp, synthetic construct
  source 1..17: mol_type = other DNA
gactccctcctctgccc

SEQ ID NO: 132362 - DNA, 17 bp, synthetic construct
  source 1..17: mol_type = other DNA
actccctcctctgccct

SEQ ID NO: 132363 - DNA, 17 bp, synthetic construct
  source 1..17: mol_type = other DNA
ctccctcctctgcccta

SEQ ID NO: 132364 - DNA, 17 bp, synthetic construct
  source 1..17: mol_type = other DNA
tccctcctctgccctag

SEQ ID NO: 132365 - DNA, 17 bp, synthetic construct
  source 1..17: mol_type = other DNA
ccctcctctgccctagg

SEQ ID NO: 132366 - DNA, 17 bp, synthetic construct
  source 1..17: mol_type = other DNA
cctcctctgccctaggg

SEQ ID NO: 132367 - DNA, 17 bp, synthetic construct
  source 1..17: mol_type = other DNA
ctcctctgccctaggga

SEQ ID NO: 132368 - DNA, 17 bp, synthetic construct
  source 1..17: mol_type = other DNA
tcctctgccctagggac

SEQ ID NO: 132369 - DNA, 17 bp, synthetic construct
  source 1..17: mol_type = other DNA
cctctgccctagggacc

SEQ ID NO: 132370 - DNA, 17 bp, synthetic construct
  source 1..17: mol_type = other DNA
ctctgccctagggacca

SEQ ID NO: 132371 - DNA, 17 bp, synthetic construct
  source 1..17: mol_type = other DNA
tctgccctagggaccac

SEQ ID NO: 132372 - DNA, 17 bp, synthetic construct
  source 1..17: mol_type = other DNA
ctgccctagggaccacc

SEQ ID NO: 132373 - DNA, 17 bp, synthetic construct
  source 1..17: mol_type = other DNA
tgccctagggaccaccc

SEQ ID NO: 132374 - DNA, 17 bp, synthetic construct
  source 1..17: mol_type = other DNA
gccctagggaccaccca

SEQ ID NO: 132375 - DNA, 17 bp, synthetic construct
  source 1..17: mol_type = other DNA
ccctagggaccacccac

SEQ ID NO: 132376 - DNA, 17 bp, synthetic construct
  source 1..17: mol_type = other DNA
cctagggaccacccaca

SEQ ID NO: 132377 - DNA, 17 bp, synthetic construct
  source 1..17: mol_type = other DNA
ctagggaccacccacac

SEQ ID NO: 132378 - DNA, 17 bp, synthetic construct
  source 1..17: mol_type = other DNA
tagggaccacccacaca

SEQ ID NO: 132379 - DNA, 17 bp, synthetic construct
  source 1..17: mol_type = other DNA
agggaccacccacacac

SEQ ID NO: 132380 - DNA, 17 bp, synthetic construct
  source 1..17: mol_type = other DNA
gggaccacccacacacc

SEQ ID NO: 132381 - DNA, 17 bp, synthetic construct
  source 1..17: mol_type = other DNA
ggaccacccacacaccc

SEQ ID NO: 132382 - DNA, 17 bp, synthetic construct
  source 1..17: mol_type = other DNA
gaccacccacacacccc

SEQ ID NO: 132383 - DNA, 17 bp, synthetic construct
  source 1..17: mol_type = other DNA
accacccacacaccccc

SEQ ID NO: 132384 - DNA, 17 bp, synthetic construct
  source 1..17: mol_type = other DNA
ccacccacacaccccca

SEQ ID NO: 132385 - DNA, 17 bp, synthetic construct
  source 1..17: mol_type = other DNA
cacccacacacccccag

SEQ ID NO: 132386 - DNA, 17 bp, synthetic construct
  source 1..17: mol_type = other DNA
acccacacacccccagt

SEQ ID NO: 132387 - DNA, 17 bp, synthetic construct
  source 1..17: mol_type = other DNA
cccacacacccccagtg

SEQ ID NO: 132388 - DNA, 17 bp, synthetic construct
  source 1..17: mol_type = other DNA
ccacacacccccagtgc

SEQ ID NO: 132389 - DNA, 17 bp, synthetic construct
  source 1..17: mol_type = other DNA
cacacacccccagtgcc

SEQ ID NO: 132390 - DNA, 17 bp, synthetic construct
  source 1..17: mol_type = other DNA
acacacccccagtgccg

SEQ ID NO: 132391 - DNA, 17 bp, synthetic construct
  source 1..17: mol_type = other DNA
cacacccccagtgccga

SEQ ID NO: 132392 - DNA, 17 bp, synthetic construct
  source 1..17: mol_type = other DNA
acacccccagtgccgaa

SEQ ID NO: 132393 - DNA, 17 bp, synthetic construct
  source 1..17: mol_type = other DNA
cacccccagtgccgaac

SEQ ID NO: 132394 - DNA, 17 bp, synthetic construct
  source 1..17: mol_type = other DNA
acccccagtgccgaaca

SEQ ID NO: 132395 - DNA, 17 bp, synthetic construct
  source 1..17: mol_type = other DNA
cccccagtgccgaacac

SEQ ID NO: 132396 - DNA, 17 bp, synthetic construct
  source 1..17: mol_type = other DNA
ccccagtgccgaacacc

SEQ ID NO: 132397 - DNA, 17 bp, synthetic construct
  source 1..17: mol_type = other DNA
cccagtgccgaacacca

SEQ ID NO: 132398 - DNA, 17 bp, synthetic construct
  source 1..17: mol_type = other DNA
ccagtgccgaacaccac

SEQ ID NO: 132399 - DNA, 17 bp, synthetic construct
  source 1..17: mol_type = other DNA
cagtgccgaacaccacg

SEQ ID NO: 132400 - DNA, 17 bp, synthetic construct
  source 1..17: mol_type = other DNA
agtgccgaacaccacgg

SEQ ID NO: 132401 - DNA, 17 bp, synthetic construct
  source 1..17: mol_type = other DNA
gtgccgaacaccacggc

SEQ ID NO: 132402 - DNA, 17 bp, synthetic construct
  source 1..17: mol_type = other DNA
tgccgaacaccacggcc

SEQ ID NO: 132403 - DNA, 17 bp, synthetic construct
  source 1..17: mol_type = other DNA
gccgaacaccacggcca

SEQ ID NO: 132404 - DNA, 17 bp, synthetic construct
  source 1..17: mol_type = other DNA
ccgaacaccacggccac

SEQ ID NO: 132405 - DNA, 17 bp, synthetic construct
  source 1..17: mol_type = other DNA
cgaacaccacggccacc

SEQ ID NO: 132406 - DNA, 17 bp, synthetic construct
  source 1..17: mol_type = other DNA
gaacaccacggccacca

SEQ ID NO: 132407 - DNA, 17 bp, synthetic construct
  source 1..17: mol_type = other DNA
aacaccacggccaccac

SEQ ID NO: 132408 - DNA, 17 bp, synthetic construct
  source 1..17: mol_type = other DNA
acaccacggccaccaca

SEQ ID NO: 132409 - DNA, 17 bp, synthetic construct
  source 1..17: mol_type = other DNA
caccacggccaccacac

SEQ ID NO: 132410 - DNA, 17 bp, synthetic construct
  source 1..17: mol_type = other DNA
accacggccaccacaca

SEQ ID NO: 132411 - DNA, 17 bp, synthetic construct
  source 1..17: mol_type = other DNA
ccacggccaccacacac

SEQ ID NO: 132412 - DNA, 17 bp, synthetic construct
  source 1..17: mol_type = other DNA
cacggccaccacacacg

SEQ ID NO: 132413 - DNA, 17 bp, synthetic construct
  source 1..17: mol_type = other DNA
acggccaccacacacgg

SEQ ID NO: 132414 - DNA, 17 bp, synthetic construct
  source 1..17: mol_type = other DNA
cggccaccacacacggg

SEQ ID NO: 132415 - DNA, 17 bp, synthetic construct
  source 1..17: mol_type = other DNA
ggccaccacacacgggc

SEQ ID NO: 132416 - DNA, 17 bp, synthetic construct
  source 1..17: mol_type = other DNA
gccaccacacacgggcg

SEQ ID NO: 132417 - DNA, 17 bp, synthetic construct
  source 1..17: mol_type = other DNA
ccaccacacacgggcgg

SEQ ID NO: 132418 - DNA, 17 bp, synthetic construct
  source 1..17: mol_type = other DNA
caccacacacgggcggt

SEQ ID NO: 132419 - DNA, 17 bp, synthetic construct
  source 1..17: mol_type = other DNA
accacacacgggcggtc

SEQ ID NO: 132420 - DNA, 17 bp, synthetic construct
  source 1..17: mol_type = other DNA
ccacacacgggcggtcc

SEQ ID NO: 132421 - DNA, 17 bp, synthetic construct
  source 1..17: mol_type = other DNA
cacacacgggcggtccc

SEQ ID NO: 132422 - DNA, 17 bp, synthetic construct
  source 1..17: mol_type = other DNA
acacacgggcggtccct

SEQ ID NO: 132423 - DNA, 17 bp, synthetic construct
  source 1..17: mol_type = other DNA
cacacgggcggtccctg

SEQ ID NO: 132424 - DNA, 17 bp, synthetic construct
  source 1..17: mol_type = other DNA
acacgggcggtccctgc

SEQ ID NO: 132425 - DNA, 17 bp, synthetic construct
  source 1..17: mol_type = other DNA
cacgggcggtccctgcc

SEQ ID NO: 132426 - DNA, 17 bp, synthetic construct
  source 1..17: mol_type = other DNA
acgggcggtccctgccc

SEQ ID NO: 132427 - DNA, 17 bp, synthetic construct
  source 1..17: mol_type = other DNA
cgggcggtccctgcccc

SEQ ID NO: 132428 - DNA, 17 bp, synthetic construct
  source 1..17: mol_type = other DNA
gggcggtccctgccccc

SEQ ID NO: 132429 - DNA, 17 bp, synthetic construct
  source 1..17: mol_type = other DNA
ggcggtccctgcccccc

SEQ ID NO: 132430 - DNA, 17 bp, synthetic construct
  source 1..17: mol_type = other DNA
gcggtccctgcccccca

SEQ ID NO: 132431 - DNA, 17 bp, synthetic construct
  source 1..17: mol_type = other DNA
cggtccctgccccccag

SEQ ID NO: 132432 - DNA, 17 bp, synthetic construct
  source 1..17: mol_type = other DNA
ggtccctgccccccagc

SEQ ID NO: 132433 - DNA, 17 bp, synthetic construct
  source 1..17: mol_type = other DNA
gtccctgccccccagca

SEQ ID NO: 132434 - DNA, 17 bp, synthetic construct
  source 1..17: mol_type = other DNA
tccctgccccccagcag

SEQ ID NO: 132435 - DNA, 17 bp, synthetic construct
  source 1..17: mol_type = other DNA
ccctgccccccagcagt

SEQ ID NO: 132436 - DNA, 17 bp, synthetic construct
  source 1..17: mol_type = other DNA
cctgccccccagcagtc

SEQ ID NO: 132437 - DNA, 17 bp, synthetic construct
  source 1..17: mol_type = other DNA
ctgccccccagcagtcc

SEQ ID NO: 132438 - DNA, 17 bp, synthetic construct
  source 1..17: mol_type = other DNA
tgccccccagcagtccc

SEQ ID NO: 132439 - DNA, 17 bp, synthetic construct
  source 1..17: mol_type = other DNA
gccccccagcagtcccc

SEQ ID NO: 132440 - DNA, 17 bp, synthetic construct
  source 1..17: mol_type = other DNA
ccccccagcagtcccca

SEQ ID NO: 132441 - DNA, 17 bp, synthetic construct
  source 1..17: mol_type = other DNA
cccccagcagtccccac

SEQ ID NO: 132442 - DNA, 17 bp, synthetic construct
  source 1..17: mol_type = other DNA
ccccagcagtccccaca

SEQ ID NO: 132443 - DNA, 17 bp, synthetic construct
  source 1..17: mol_type = other DNA
cccagcagtccccacac

SEQ ID NO: 132444 - DNA, 17 bp, synthetic construct
  source 1..17: mol_type = other DNA
ccagcagtccccacacg

SEQ ID NO: 132445 - DNA, 17 bp, synthetic construct
  source 1..17: mol_type = other DNA
cagcagtccccacacgg

SEQ ID NO: 132446 - DNA, 17 bp, synthetic construct
  source 1..17: mol_type = other DNA
agcagtccccacacggt

SEQ ID NO: 132447 - DNA, 17 bp, synthetic construct
  source 1..17: mol_type = other DNA
gcagtccccacacggtg

SEQ ID NO: 132448 - DNA, 17 bp, synthetic construct
  source 1..17: mol_type = other DNA
cagtccccacacggtgc

SEQ ID NO: 132449 - DNA, 17 bp, synthetic construct
  source 1..17: mol_type = other DNA
agtccccacacggtgcg

SEQ ID NO: 132450 - DNA, 17 bp, synthetic construct
  source 1..17: mol_type = other DNA
gtccccacacggtgcgc

SEQ ID NO: 132451 - DNA, 17 bp, synthetic construct
  source 1..17: mol_type = other DNA
tccccacacggtgcgca

SEQ ID NO: 132452 - DNA, 17 bp, synthetic construct
  source 1..17: mol_type = other DNA
ccccacacggtgcgcac

SEQ ID NO: 132453 - DNA, 17 bp, synthetic construct
  source 1..17: mol_type = other DNA
cccacacggtgcgcaca

SEQ ID NO: 132454 - DNA, 17 bp, synthetic construct
  source 1..17: mol_type = other DNA
ccacacggtgcgcacag

SEQ ID NO: 132455 - DNA, 17 bp, synthetic construct
  source 1..17: mol_type = other DNA
cacacggtgcgcacagc

SEQ ID NO: 132456 - DNA, 17 bp, synthetic construct
  source 1..17: mol_type = other DNA
acacggtgcgcacagcc

SEQ ID NO: 132457 - DNA, 17 bp, synthetic construct
  source 1..17: mol_type = other DNA
cacggtgcgcacagcct

SEQ ID NO: 132458 - DNA, 17 bp, synthetic construct
  source 1..17: mol_type = other DNA
acggtgcgcacagcctg

SEQ ID NO: 132459 - DNA, 17 bp, synthetic construct
  source 1..17: mol_type = other DNA
cggtgcgcacagcctgg

SEQ ID NO: 132460 - DNA, 17 bp, synthetic construct
  source 1..17: mol_type = other DNA
ggtgcgcacagcctgga

SEQ ID NO: 132461 - DNA, 17 bp, synthetic construct
  source 1..17: mol_type = other DNA
gtgcgcacagcctggac

SEQ ID NO: 132462 - DNA, 17 bp, synthetic construct
  source 1..17: mol_type = other DNA
tgcgcacagcctggact

SEQ ID NO: 132463 - DNA, 17 bp, synthetic construct
  source 1..17: mol_type = other DNA
gcgcacagcctggactt

SEQ ID NO: 132464 - DNA, 17 bp, synthetic construct
  source 1..17: mol_type = other DNA
cgcacagcctggacttc

SEQ ID NO: 132465 - DNA, 17 bp, synthetic construct
  source 1..17: mol_type = other DNA
gcacagcctggacttcg

SEQ ID NO: 132466 - DNA, 17 bp, synthetic construct
  source 1..17: mol_type = other DNA
cacagcctggacttcgg

SEQ ID NO: 132467 - DNA, 17 bp, synthetic construct
  source 1..17: mol_type = other DNA
acagcctggacttcggc

SEQ ID NO: 132468 - DNA, 17 bp, synthetic construct
  source 1..17: mol_type = other DNA
cagcctggacttcggcc

SEQ ID NO: 132469 - DNA, 17 bp, synthetic construct
  source 1..17: mol_type = other DNA
agcctggacttcggcca

SEQ ID NO: 132470 - DNA, 17 bp, synthetic construct
  source 1..17: mol_type = other DNA
gcctggacttcggccac

SEQ ID NO: 132471 - DNA, 17 bp, synthetic construct
  source 1..17: mol_type = other DNA
cctggacttcggccacc

SEQ ID NO: 132472 - DNA, 17 bp, synthetic construct
  source 1..17: mol_type = other DNA
ctggacttcggccacct

SEQ ID NO: 132473 - DNA, 17 bp, synthetic construct
  source 1..17: mol_type = other DNA
tggacttcggccacctc

SEQ ID NO: 132474 - DNA, 17 bp, synthetic construct
  source 1..17: mol_type = other DNA
ggacttcggccacctcg

SEQ ID NO: 132475 - DNA, 17 bp, synthetic construct
  source 1..17: mol_type = other DNA
gacttcggccacctcgg

SEQ ID NO: 132476 - DNA, 17 bp, synthetic construct
  source 1..17: mol_type = other DNA
acttcggccacctcggg

SEQ ID NO: 132477 - DNA, 17 bp, synthetic construct
  source 1..17: mol_type = other DNA
cttcggccacctcgggc

SEQ ID NO: 132478 - DNA, 17 bp, synthetic construct
  source 1..17: mol_type = other DNA
ttcggccacctcgggca

SEQ ID NO: 132479 - DNA, 17 bp, synthetic construct
  source 1..17: mol_type = other DNA
tcggccacctcgggcat

SEQ ID NO: 132480 - DNA, 17 bp, synthetic construct
  source 1..17: mol_type = other DNA
cggccacctcgggcatc

SEQ ID NO: 132481 - DNA, 17 bp, synthetic construct
  source 1..17: mol_type = other DNA
ggccacctcgggcatct

SEQ ID NO: 132482 - DNA, 17 bp, synthetic construct
  source 1..17: mol_type = other DNA
gccacctcgggcatctt

SEQ ID NO: 132483 - DNA, 17 bp, synthetic construct
  source 1..17: mol_type = other DNA
ccacctcgggcatcttg

SEQ ID NO: 132484 - DNA, 17 bp, synthetic construct
  source 1..17: mol_type = other DNA
cacctcgggcatcttgg

SEQ ID NO: 132485 - DNA, 17 bp, synthetic construct
  source 1..17: mol_type = other DNA
acctcgggcatcttggg

SEQ ID NO: 132486 - DNA, 17 bp, synthetic construct
  source 1..17: mol_type = other DNA
cctcgggcatcttgggc

SEQ ID NO: 132487 - DNA, 17 bp, synthetic construct
  source 1..17: mol_type = other DNA
ctcgggcatcttgggca

SEQ ID NO: 132488 - DNA, 17 bp, synthetic construct
  source 1..17: mol_type = other DNA
tcgggcatcttgggcac

SEQ ID NO: 132489 - DNA, 17 bp, synthetic construct
  source 1..17: mol_type = other DNA
cgggcatcttgggcacc

SEQ ID NO: 132490 - DNA, 17 bp, synthetic construct
  source 1..17: mol_type = other DNA
gggcatcttgggcacca

SEQ ID NO: 132491 - DNA, 17 bp, synthetic construct
  source 1..17: mol_type = other DNA
ggcatcttgggcaccac

SEQ ID NO: 132492 - DNA, 17 bp, synthetic construct
  source 1..17: mol_type = other DNA
gcatcttgggcaccacc

SEQ ID NO: 132493 - DNA, 17 bp, synthetic construct
  source 1..17: mol_type = other DNA
catcttgggcaccaccc

SEQ ID NO: 132494 - DNA, 17 bp, synthetic construct
  source 1..17: mol_type = other DNA
atcttgggcaccaccca

SEQ ID NO: 132495 - DNA, 17 bp, synthetic construct
  source 1..17: mol_type = other DNA
tcttgggcaccacccac

SEQ ID NO: 132496 - DNA, 17 bp, synthetic construct
  source 1..17: mol_type = other DNA
cttgggcaccacccaca

SEQ ID NO: 132497 - DNA, 17 bp, synthetic construct
  source 1..17: mol_type = other DNA
ttgggcaccacccacat

SEQ ID NO: 132498 - DNA, 17 bp, synthetic construct
  source 1..17: mol_type = other DNA
tgggcaccacccacatc

SEQ ID NO: 132499 - DNA, 17 bp, synthetic construct
  source 1..17: mol_type = other DNA
gggcaccacccacatca

SEQ ID NO: 132500 - DNA, 17 bp, synthetic construct
  source 1..17: mol_type = other DNA
ggcaccacccacatcac

SEQ ID NO: 132501 - DNA, 17 bp, synthetic construct
  source 1..17: mol_type = other DNA
gcaccacccacatcaca

SEQ ID NO: 132502 - DNA, 17 bp, synthetic construct
  source 1..17: mol_type = other DNA
caccacccacatcacag

SEQ ID NO: 132503 - DNA, 17 bp, synthetic construct
  source 1..17: mol_type = other DNA
accacccacatcacaga

SEQ ID NO: 132504 - DNA, 17 bp, synthetic construct
  source 1..17: mol_type = other DNA
ccacccacatcacagag

SEQ ID NO: 132505 - DNA, 17 bp, synthetic construct
  source 1..17: mol_type = other DNA
cacccacatcacagagc

SEQ ID NO: 132506 - DNA, 17 bp, synthetic construct
  source 1..17: mol_type = other DNA
acccacatcacagagcc

SEQ ID NO: 132507 - DNA, 17 bp, synthetic construct
  source 1..17: mol_type = other DNA
cccacatcacagagcct

SEQ ID NO: 132508 - DNA, 17 bp, synthetic construct
  source 1..17: mol_type = other DNA
ccacatcacagagcctt

SEQ ID NO: 132509 - DNA, 17 bp, synthetic construct
  source 1..17: mol_type = other DNA
cacatcacagagccttc

SEQ ID NO: 132510 - DNA, 17 bp, synthetic construct
  source 1..17: mol_type = other DNA
acatcacagagccttcc

SEQ ID NO: 132511 - DNA, 17 bp, synthetic construct
  source 1..17: mol_type = other DNA
catcacagagccttcca

SEQ ID NO: 132512 - DNA, 17 bp, synthetic construct
  source 1..17: mol_type = other DNA
atcacagagccttccac

SEQ ID NO: 132513 - DNA, 17 bp, synthetic construct
  source 1..17: mol_type = other DNA
tcacagagccttccacg

SEQ ID NO: 132514 - DNA, 17 bp, synthetic construct
  source 1..17: mol_type = other DNA
cacagagccttccacgg

SEQ ID NO: 132515 - DNA, 17 bp, synthetic construct
  source 1..17: mol_type = other DNA
acagagccttccacggt

SEQ ID NO: 132516 - DNA, 17 bp, synthetic construct
  source 1..17: mol_type = other DNA
cagagccttccacggtg

SEQ ID NO: 132517 - DNA, 17 bp, synthetic construct
  source 1..17: mol_type = other DNA
agagccttccacggtga

SEQ ID NO: 132518 - DNA, 17 bp, synthetic construct
  source 1..17: mol_type = other DNA
gagccttccacggtgac

SEQ ID NO: 132519 - DNA, 17 bp, synthetic construct
  source 1..17: mol_type = other DNA
agccttccacggtgact

SEQ ID NO: 132520 - DNA, 17 bp, synthetic construct
  source 1..17: mol_type = other DNA
gccttccacggtgactt

SEQ ID NO: 132521 - DNA, 17 bp, synthetic construct
  source 1..17: mol_type = other DNA
ccttccacggtgacttc

SEQ ID NO: 132522 - DNA, 17 bp, synthetic construct
  source 1..17: mol_type = other DNA
cttccacggtgacttcc

SEQ ID NO: 132523 - DNA, 17 bp, synthetic construct
  source 1..17: mol_type = other DNA
ttccacggtgacttccc

SEQ ID NO: 132524 - DNA, 17 bp, synthetic construct
  source 1..17: mol_type = other DNA
tccacggtgacttccca

SEQ ID NO: 132525 - DNA, 17 bp, synthetic construct
  source 1..17: mol_type = other DNA
ccacggtgacttcccac

SEQ ID NO: 132526 - DNA, 17 bp, synthetic construct
  source 1..17: mol_type = other DNA
cacggtgacttcccaca

SEQ ID NO: 132527 - DNA, 17 bp, synthetic construct
  source 1..17: mol_type = other DNA
acggtgacttcccacac

SEQ ID NO: 132528 - DNA, 17 bp, synthetic construct
  source 1..17: mol_type = other DNA
cggtgacttcccacacc

SEQ ID NO: 132529 - DNA, 17 bp, synthetic construct
  source 1..17: mol_type = other DNA
ggtgacttcccacaccc

SEQ ID NO: 132530 - DNA, 17 bp, synthetic construct
  source 1..17: mol_type = other DNA
gtgacttcccacacccc

SEQ ID NO: 132531 - DNA, 17 bp, synthetic construct
  source 1..17: mol_type = other DNA
tgacttcccacacccca

SEQ ID NO: 132532 - DNA, 17 bp, synthetic construct
  source 1..17: mol_type = other DNA
gacttcccacaccccag

SEQ ID NO: 132533 - DNA, 17 bp, synthetic construct
  source 1..17: mol_type = other DNA
acttcccacaccccagc

SEQ ID NO: 132534 - DNA, 17 bp, synthetic construct
  source 1..17: mol_type = other DNA
cttcccacaccccagca

SEQ ID NO: 132535 - DNA, 17 bp, synthetic construct
  source 1..17: mol_type = other DNA
ttcccacaccccagcag

SEQ ID NO: 132536 - DNA, 17 bp, synthetic construct
  source 1..17: mol_type = other DNA
tcccacaccccagcagc

SEQ ID NO: 132537 - DNA, 17 bp, synthetic construct
  source 1..17: mol_type = other DNA
cccacaccccagcagca

SEQ ID NO: 132538 - DNA, 17 bp, synthetic construct
  source 1..17: mol_type = other DNA
ccacaccccagcagcaa

SEQ ID NO: 132539 - DNA, 17 bp, synthetic construct
  source 1..17: mol_type = other DNA
cacaccccagcagcaac

SEQ ID NO: 132540 - DNA, 17 bp, synthetic construct
  source 1..17: mol_type = other DNA
acaccccagcagcaacc

SEQ ID NO: 132541 - DNA, 17 bp, synthetic construct
  source 1..17: mol_type = other DNA
caccccagcagcaacca

SEQ ID NO: 132542 - DNA, 17 bp, synthetic construct
  source 1..17: mol_type = other DNA
accccagcagcaaccac

SEQ ID NO: 132543 - DNA, 17 bp, synthetic construct
  source 1..17: mol_type = other DNA
ccccagcagcaaccacc

SEQ ID NO: 132544 - DNA, 17 bp, synthetic construct
  source 1..17: mol_type = other DNA
cccagcagcaaccacca

SEQ ID NO: 132545 - DNA, 17 bp, synthetic construct
  source 1..17: mol_type = other DNA
ccagcagcaaccaccag

SEQ ID NO: 132546 - DNA, 17 bp, synthetic construct
  source 1..17: mol_type = other DNA
cagcagcaaccaccagt

SEQ ID NO: 132547 - DNA, 17 bp, synthetic construct
  source 1..17: mol_type = other DNA
agcagcaaccaccagta

SEQ ID NO: 132548 - DNA, 17 bp, synthetic construct
  source 1..17: mol_type = other DNA
gcagcaaccaccagtac

SEQ ID NO: 132549 - DNA, 17 bp, synthetic construct
  source 1..17: mol_type = other DNA
cagcaaccaccagtacc

SEQ ID NO: 132550 - DNA, 17 bp, synthetic construct
  source 1..17: mol_type = other DNA
agcaaccaccagtacca

SEQ ID NO: 132551 - DNA, 17 bp, synthetic construct
  source 1..17: mol_type = other DNA
gcaaccaccagtaccac

SEQ ID NO: 132552 - DNA, 17 bp, synthetic construct
  source 1..17: mol_type = other DNA
caaccaccagtaccacc

SEQ ID NO: 132553 - DNA, 17 bp, synthetic construct
  source 1..17: mol_type = other DNA
aaccaccagtaccaccc

SEQ ID NO: 132554 - DNA, 17 bp, synthetic construct
  source 1..17: mol_type = other DNA
accaccagtaccaccca

SEQ ID NO: 132555 - DNA, 17 bp, synthetic construct
  source 1..17: mol_type = other DNA
ccaccagtaccacccag

SEQ ID NO: 132556 - DNA, 17 bp, synthetic construct
  source 1..17: mol_type = other DNA
caccagtaccacccagc

SEQ ID NO: 132557 - DNA, 17 bp, synthetic construct
  source 1..17: mol_type = other DNA
accagtaccacccagca

SEQ ID NO: 132558 - DNA, 17 bp, synthetic construct
  source 1..17: mol_type = other DNA
ccagtaccacccagcac

SEQ ID NO: 132559 - DNA, 17 bp, synthetic construct
  source 1..17: mol_type = other DNA
cagtaccacccagcact

SEQ ID NO: 132560 - DNA, 17 bp, synthetic construct
  source 1..17: mol_type = other DNA
agtaccacccagcactc

SEQ ID NO: 132561 - DNA, 17 bp, synthetic construct
  source 1..17: mol_type = other DNA
gtaccacccagcactcg

SEQ ID NO: 132562 - DNA, 17 bp, synthetic construct
  source 1..17: mol_type = other DNA
taccacccagcactcga

SEQ ID NO: 132563 - DNA, 17 bp, synthetic construct
  source 1..17: mol_type = other DNA
accacccagcactcgac

SEQ ID NO: 132564 - DNA, 17 bp, synthetic construct
  source 1..17: mol_type = other DNA
ccacccagcactcgact

SEQ ID NO: 132565 - DNA, 17 bp, synthetic construct
  source 1..17: mol_type = other DNA
cacccagcactcgactc

SEQ ID NO: 132566 - DNA, 17 bp, synthetic construct
  source 1..17: mol_type = other DNA
acccagcactcgactcc

SEQ ID NO: 132567 - DNA, 17 bp, synthetic construct
  source 1..17: mol_type = other DNA
cccagcactcgactcca

SEQ ID NO: 132568 - DNA, 17 bp, synthetic construct
  source 1..17: mol_type = other DNA
ccagcactcgactccag

SEQ ID NO: 132569 - DNA, 17 bp, synthetic construct
  source 1..17: mol_type = other DNA
cagcactcgactccagc

SEQ ID NO: 132570 - DNA, 17 bp, synthetic construct
  source 1..17: mol_type = other DNA
agcactcgactccagcc

SEQ ID NO: 132571 - DNA, 17 bp, synthetic construct
  source 1..17: mol_type = other DNA
gcactcgactccagccc

SEQ ID NO: 132572 - DNA, 17 bp, synthetic construct
  source 1..17: mol_type = other DNA
cactcgactccagccct

SEQ ID NO: 132573 - DNA, 17 bp, synthetic construct
  source 1..17: mol_type = other DNA
actcgactccagccctg

SEQ ID NO: 132574 - DNA, 17 bp, synthetic construct
  source 1..17: mol_type = other DNA
ctcgactccagccctgt

SEQ ID NO: 132575 - DNA, 17 bp, synthetic construct
  source 1..17: mol_type = other DNA
tcgactccagccctgtc

SEQ ID NO: 132576 - DNA, 17 bp, synthetic construct
  source 1..17: mol_type = other DNA
cgactccagccctgtcc

SEQ ID NO: 132577 - DNA, 17 bp, synthetic construct
  source 1..17: mol_type = other DNA
gactccagccctgtcca

SEQ ID NO: 132578 - DNA, 17 bp, synthetic construct
  source 1..17: mol_type = other DNA
actccagccctgtccag

SEQ ID NO: 132579 - DNA, 17 bp, synthetic construct
  source 1..17: mol_type = other DNA
ctccagccctgtccagc

SEQ ID NO: 132580 - DNA, 17 bp, synthetic construct
  source 1..17: mol_type = other DNA
tccagccctgtccagcc

SEQ ID NO: 132581 - DNA, 17 bp, synthetic construct
  source 1..17: mol_type = other DNA
ccagccctgtccagccc

SEQ ID NO: 132582 - DNA, 17 bp, synthetic construct
  source 1..17: mol_type = other DNA
cagccctgtccagccct

SEQ ID NO: 132583 - DNA, 17 bp, synthetic construct
  source 1..17: mol_type = other DNA
agccctgtccagccctc

SEQ ID NO: 132584 - DNA, 17 bp, synthetic construct
  source 1..17: mol_type = other DNA
gccctgtccagccctca

SEQ ID NO: 132585 - DNA, 17 bp, synthetic construct
  source 1..17: mol_type = other DNA
ccctgtccagccctcac

SEQ ID NO: 132586 - DNA, 17 bp, synthetic construct
  source 1..17: mol_type = other DNA
cctgtccagccctcacc

SEQ ID NO: 132587 - DNA, 17 bp, synthetic construct
  source 1..17: mol_type = other DNA
ctgtccagccctcaccc

SEQ ID NO: 132588 - DNA, 17 bp, synthetic construct
  source 1..17: mol_type = other DNA
tgtccagccctcaccct

SEQ ID NO: 132589 - DNA, 17 bp, synthetic construct
  source 1..17: mol_type = other DNA
gtccagccctcacccta

SEQ ID NO: 132590 - DNA, 17 bp, synthetic construct
  source 1..17: mol_type = other DNA
tccagccctcaccctag

SEQ ID NO: 132591 - DNA, 17 bp, synthetic construct
  source 1..17: mol_type = other DNA
ccagccctcaccctagc

SEQ ID NO: 132592 - DNA, 17 bp, synthetic construct
  source 1..17: mol_type = other DNA
cagccctcaccctagca

SEQ ID NO: 132593 - DNA, 17 bp, synthetic construct
  source 1..17: mol_type = other DNA
agccctcaccctagcag

SEQ ID NO: 132594 - DNA, 17 bp, synthetic construct
  source 1..17: mol_type = other DNA
gccctcaccctagcagc

SEQ ID NO: 132595 - DNA, 17 bp, synthetic construct
  source 1..17: mol_type = other DNA
ccctcaccctagcagca

SEQ ID NO: 132596 - DNA, 17 bp, synthetic construct
  source 1..17: mol_type = other DNA
cctcaccctagcagcag

SEQ ID NO: 132597 - DNA, 17 bp, synthetic construct
  source 1..17: mol_type = other DNA
ctcaccctagcagcagg

SEQ ID NO: 132598 - DNA, 17 bp, synthetic construct
  source 1..17: mol_type = other DNA
tcaccctagcagcagga

SEQ ID NO: 132599 - DNA, 17 bp, synthetic construct
  source 1..17: mol_type = other DNA
caccctagcagcaggac

SEQ ID NO: 132600 - DNA, 17 bp, synthetic construct
  source 1..17: mol_type = other DNA
accctagcagcaggacc

SEQ ID NO: 132601 - DNA, 17 bp, synthetic construct
  source 1..17: mol_type = other DNA
ccctagcagcaggacca

SEQ ID NO: 132602 - DNA, 17 bp, synthetic construct
  source 1..17: mol_type = other DNA
cctagcagcaggaccac

SEQ ID NO: 132603 - DNA, 17 bp, synthetic construct
  source 1..17: mol_type = other DNA
ctagcagcaggaccacc

SEQ ID NO: 132604 - DNA, 17 bp, synthetic construct
  source 1..17: mol_type = other DNA
tagcagcaggaccaccg

SEQ ID NO: 132605 - DNA, 17 bp, synthetic construct
  source 1..17: mol_type = other DNA
agcagcaggaccaccga

SEQ ID NO: 132606 - DNA, 17 bp, synthetic construct
  source 1..17: mol_type = other DNA
gcagcaggaccaccgag

SEQ ID NO: 132607 - DNA, 17 bp, synthetic construct
  source 1..17: mol_type = other DNA
cagcaggaccaccgagt

SEQ ID NO: 132608 - DNA, 17 bp, synthetic construct
  source 1..17: mol_type = other DNA
agcaggaccaccgagtc

SEQ ID NO: 132609 - DNA, 17 bp, synthetic construct
  source 1..17: mol_type = other DNA
gcaggaccaccgagtca

SEQ ID NO: 132610 - DNA, 17 bp, synthetic construct
  source 1..17: mol_type = other DNA
caggaccaccgagtcac

SEQ ID NO: 132611 - DNA, 17 bp, synthetic construct
  source 1..17: mol_type = other DNA
aggaccaccgagtcacc

SEQ ID NO: 132612 - DNA, 17 bp, synthetic construct
  source 1..17: mol_type = other DNA
ggaccaccgagtcaccc

SEQ ID NO: 132613 - DNA, 17 bp, synthetic construct
  source 1..17: mol_type = other DNA
gaccaccgagtcacccc

SEQ ID NO: 132614 - DNA, 17 bp, synthetic construct
  source 1..17: mol_type = other DNA
accaccgagtcaccccc

SEQ ID NO: 132615 - DNA, 17 bp, synthetic construct
  source 1..17: mol_type = other DNA
ccaccgagtcaccccct

SEQ ID NO: 132616 - DNA, 17 bp, synthetic construct
  source 1..17: mol_type = other DNA
caccgagtcaccccctt

SEQ ID NO: 132617 - DNA, 17 bp, synthetic construct
  source 1..17: mol_type = other DNA
accgagtcacccccttc

SEQ ID NO: 132618 - DNA, 17 bp, synthetic construct
  source 1..17: mol_type = other DNA
ccgagtcacccccttct

SEQ ID NO: 132619 - DNA, 17 bp, synthetic construct
  source 1..17: mol_type = other DNA
cgagtcacccccttctc

SEQ ID NO: 132620 - DNA, 17 bp, synthetic construct
  source 1..17: mol_type = other DNA
gagtcacccccttctcc

SEQ ID NO: 132621 - DNA, 17 bp, synthetic construct
  source 1..17: mol_type = other DNA
agtcacccccttctcca

SEQ ID NO: 132622 - DNA, 17 bp, synthetic construct
  source 1..17: mol_type = other DNA
gtcacccccttctccag

SEQ ID NO: 132623 - DNA, 17 bp, synthetic construct
  source 1..17: mol_type = other DNA
tcacccccttctccagg

SEQ ID NO: 132624 - DNA, 17 bp, synthetic construct
  source 1..17: mol_type = other DNA
cacccccttctccaggg

SEQ ID NO: 132625 - DNA, 17 bp, synthetic construct
  source 1..17: mol_type = other DNA
acccccttctccaggga

SEQ ID NO: 132626 - DNA, 17 bp, synthetic construct
  source 1..17: mol_type = other DNA
cccccttctccagggac

SEQ ID NO: 132627 - DNA, 17 bp, synthetic construct
  source 1..17: mol_type = other DNA
ccccttctccagggacg

SEQ ID NO: 132628 - DNA, 17 bp, synthetic construct
  source 1..17: mol_type = other DNA
cccttctccagggacga

SEQ ID NO: 132629 - DNA, 17 bp, synthetic construct
  source 1..17: mol_type = other DNA
ccttctccagggacgac

SEQ ID NO: 132630 - DNA, 17 bp, synthetic construct
  source 1..17: mol_type = other DNA
cttctccagggacgacc

SEQ ID NO: 132631 - DNA, 17 bp, synthetic construct
  source 1..17: mol_type = other DNA
ttctccagggacgacca

SEQ ID NO: 132632 - DNA, 17 bp, synthetic construct
  source 1..17: mol_type = other DNA
tctccagggacgaccac

SEQ ID NO: 132633 - DNA, 17 bp, synthetic construct
  source 1..17: mol_type = other DNA
ctccagggacgaccacc

SEQ ID NO: 132634 - DNA, 17 bp, synthetic construct
  source 1..17: mol_type = other DNA
tccagggacgaccaccc

SEQ ID NO: 132635 - DNA, 17 bp, synthetic construct
  source 1..17: mol_type = other DNA
ccagggacgaccacccc

SEQ ID NO: 132636 - DNA, 17 bp, synthetic construct
  source 1..17: mol_type = other DNA
cagggacgaccaccccg

SEQ ID NO: 132637 - DNA, 17 bp, synthetic construct
  source 1..17: mol_type = other DNA
agggacgaccaccccgg

SEQ ID NO: 132638 - DNA, 17 bp, synthetic construct
  source 1..17: mol_type = other DNA
gggacgaccaccccggg

SEQ ID NO: 132639 - DNA, 17 bp, synthetic construct
  source 1..17: mol_type = other DNA
ggacgaccaccccgggc

SEQ ID NO: 132640 - DNA, 17 bp, synthetic construct
  source 1..17: mol_type = other DNA
gacgaccaccccgggcc

SEQ ID NO: 132641 - DNA, 17 bp, synthetic construct
  source 1..17: mol_type = other DNA
acgaccaccccgggcca

SEQ ID NO: 132642 - DNA, 17 bp, synthetic construct
  source 1..17: mol_type = other DNA
cgaccaccccgggccac

SEQ ID NO: 132643 - DNA, 17 bp, synthetic construct
  source 1..17: mol_type = other DNA
gaccaccccgggccaca

SEQ ID NO: 132644 - DNA, 17 bp, synthetic construct
  source 1..17: mol_type = other DNA
accaccccgggccacac

SEQ ID NO: 132645 - DNA, 17 bp, synthetic construct
  source 1..17: mol_type = other DNA
ccaccccgggccacacc

SEQ ID NO: 132646 - DNA, 17 bp, synthetic construct
  source 1..17: mol_type = other DNA
caccccgggccacacca

SEQ ID NO: 132647 - DNA, 17 bp, synthetic construct
  source 1..17: mol_type = other DNA
accccgggccacaccag

SEQ ID NO: 132648 - DNA, 17 bp, synthetic construct
  source 1..17: mol_type = other DNA
ccccgggccacaccagg

SEQ ID NO: 132649 - DNA, 17 bp, synthetic construct
  source 1..17: mol_type = other DNA
cccgggccacaccaggg

SEQ ID NO: 132650 - DNA, 17 bp, synthetic construct
  source 1..17: mol_type = other DNA
ccgggccacaccagggg

SEQ ID NO: 132651 - DNA, 17 bp, synthetic construct
  source 1..17: mol_type = other DNA
cgggccacaccaggggc

SEQ ID NO: 132652 - DNA, 17 bp, synthetic construct
  source 1..17: mol_type = other DNA
gggccacaccaggggca

SEQ ID NO: 132653 - DNA, 17 bp, synthetic construct
  source 1..17: mol_type = other DNA
ggccacaccaggggcac

SEQ ID NO: 132654 - DNA, 17 bp, synthetic construct
  source 1..17: mol_type = other DNA
gccacaccaggggcacc

SEQ ID NO: 132655 - DNA, 17 bp, synthetic construct
  source 1..17: mol_type = other DNA
ccacaccaggggcacct

SEQ ID NO: 132656 - DNA, 17 bp, synthetic construct
  source 1..17: mol_type = other DNA
cacaccaggggcacctc

SEQ ID NO: 132657 - DNA, 17 bp, synthetic construct
  source 1..17: mol_type = other DNA
acaccaggggcacctcc

SEQ ID NO: 132658 - DNA, 17 bp, synthetic construct
  source 1..17: mol_type = other DNA
caccaggggcacctcca

SEQ ID NO: 132659 - DNA, 17 bp, synthetic construct
  source 1..17: mol_type = other DNA
accaggggcacctccag

SEQ ID NO: 132660 - DNA, 17 bp, synthetic construct
  source 1..17: mol_type = other DNA
ccaggggcacctccagg

SEQ ID NO: 132661 - DNA, 17 bp, synthetic construct
  source 1..17: mol_type = other DNA
caggggcacctccagga

SEQ ID NO: 132662 - DNA, 17 bp, synthetic construct
  source 1..17: mol_type = other DNA
aggggcacctccaggac

SEQ ID NO: 132663 - DNA, 17 bp, synthetic construct
  source 1..17: mol_type = other DNA
ggggcacctccaggacc

SEQ ID NO: 132664 - DNA, 17 bp, synthetic construct
  source 1..17: mol_type = other DNA
gggcacctccaggacca

SEQ ID NO: 132665 - DNA, 17 bp, synthetic construct
  source 1..17: mol_type = other DNA
ggcacctccaggaccac

SEQ ID NO: 132666 - DNA, 17 bp, synthetic construct
  source 1..17: mol_type = other DNA
gcacctccaggaccaca

SEQ ID NO: 132667 - DNA, 17 bp, synthetic construct
  source 1..17: mol_type = other DNA
cacctccaggaccacag

SEQ ID NO: 132668 - DNA, 17 bp, synthetic construct
  source 1..17: mol_type = other DNA
acctccaggaccacagc

SEQ ID NO: 132669 - DNA, 17 bp, synthetic construct
  source 1..17: mol_type = other DNA
cctccaggaccacagcc

SEQ ID NO: 132670 - DNA, 17 bp, synthetic construct
  source 1..17: mol_type = other DNA
ctccaggaccacagcca

SEQ ID NO: 132671 - DNA, 17 bp, synthetic construct
  source 1..17: mol_type = other DNA
tccaggaccacagccac

SEQ ID NO: 132672 - DNA, 17 bp, synthetic construct
  source 1..17: mol_type = other DNA
ccaggaccacagccaca

SEQ ID NO: 132673 - DNA, 17 bp, synthetic construct
  source 1..17: mol_type = other DNA
caggaccacagccacag

SEQ ID NO: 132674 - DNA, 17 bp, synthetic construct
  source 1..17: mol_type = other DNA
aggaccacagccacagc

SEQ ID NO: 132675 - DNA, 17 bp, synthetic construct
  source 1..17: mol_type = other DNA
ggaccacagccacagcc

SEQ ID NO: 132676 - DNA, 17 bp, synthetic construct
  source 1..17: mol_type = other DNA
gaccacagccacagcca

SEQ ID NO: 132677 - DNA, 17 bp, synthetic construct
  source 1..17: mol_type = other DNA
accacagccacagccac

SEQ ID NO: 132678 - DNA, 17 bp, synthetic construct
  source 1..17: mol_type = other DNA
ccacagccacagccaca

SEQ ID NO: 132679 - DNA, 17 bp, synthetic construct
  source 1..17: mol_type = other DNA
cacagccacagccacac

SEQ ID NO: 132680 - DNA, 17 bp, synthetic construct
  source 1..17: mol_type = other DNA
acagccacagccacacc

SEQ ID NO: 132681 - DNA, 17 bp, synthetic construct
  source 1..17: mol_type = other DNA
cagccacagccacaccc

SEQ ID NO: 132682 - DNA, 17 bp, synthetic construct
  source 1..17: mol_type = other DNA
agccacagccacaccca

SEQ ID NO: 132683 - DNA, 17 bp, synthetic construct
  source 1..17: mol_type = other DNA
gccacagccacacccag

SEQ ID NO: 132684 - DNA, 17 bp, synthetic construct
  source 1..17: mol_type = other DNA
ccacagccacacccagc

SEQ ID NO: 132685 - DNA, 17 bp, synthetic construct
  source 1..17: mol_type = other DNA
cacagccacacccagca

SEQ ID NO: 132686 - DNA, 17 bp, synthetic construct
  source 1..17: mol_type = other DNA
acagccacacccagcaa

SEQ ID NO: 132687 - DNA, 17 bp, synthetic construct
  source 1..17: mol_type = other DNA
cagccacacccagcaag

SEQ ID NO: 132688 - DNA, 17 bp, synthetic construct
  source 1..17: mol_type = other DNA
agccacacccagcaaga

SEQ ID NO: 132689 - DNA, 17 bp, synthetic construct
  source 1..17: mol_type = other DNA
gccacacccagcaagac

SEQ ID NO: 132690 - DNA, 17 bp, synthetic construct
  source 1..17: mol_type = other DNA
ccacacccagcaagacc

SEQ ID NO: 132691 - DNA, 17 bp, synthetic construct
  source 1..17: mol_type = other DNA
cacacccagcaagaccc

SEQ ID NO: 132692 - DNA, 17 bp, synthetic construct
  source 1..17: mol_type = other DNA
acacccagcaagacccg

SEQ ID NO: 132693 - DNA, 17 bp, synthetic construct
  source 1..17: mol_type = other DNA
cacccagcaagacccgc

SEQ ID NO: 132694 - DNA, 17 bp, synthetic construct
  source 1..17: mol_type = other DNA
acccagcaagacccgca

SEQ ID NO: 132695 - DNA, 17 bp, synthetic construct
  source 1..17: mol_type = other DNA
cccagcaagacccgcac

SEQ ID NO: 132696 - DNA, 17 bp, synthetic construct
  source 1..17: mol_type = other DNA
ccagcaagacccgcacc

SEQ ID NO: 132697 - DNA, 17 bp, synthetic construct
  source 1..17: mol_type = other DNA
cagcaagacccgcacct

SEQ ID NO: 132698 - DNA, 17 bp, synthetic construct
  source 1..17: mol_type = other DNA
agcaagacccgcacctc

SEQ ID NO: 132699 - DNA, 17 bp, synthetic construct
  source 1..17: mol_type = other DNA
gcaagacccgcacctcg

SEQ ID NO: 132700 - DNA, 17 bp, synthetic construct
  source 1..17: mol_type = other DNA
caagacccgcacctcga

SEQ ID NO: 132701 - DNA, 17 bp, synthetic construct
  source 1..17: mol_type = other DNA
aagacccgcacctcgac

SEQ ID NO: 132702 - DNA, 17 bp, synthetic construct
  source 1..17: mol_type = other DNA
agacccgcacctcgacc

SEQ ID NO: 132703 - DNA, 17 bp, synthetic construct
  source 1..17: mol_type = other DNA
gacccgcacctcgaccc

SEQ ID NO: 132704 - DNA, 17 bp, synthetic construct
  source 1..17: mol_type = other DNA
acccgcacctcgaccct

SEQ ID NO: 132705 - DNA, 17 bp, synthetic construct
  source 1..17: mol_type = other DNA
cccgcacctcgaccctg

SEQ ID NO: 132706 - DNA, 17 bp, synthetic construct
  source 1..17: mol_type = other DNA
ccgcacctcgaccctgc

SEQ ID NO: 132707 - DNA, 17 bp, synthetic construct
  source 1..17: mol_type = other DNA
cgcacctcgaccctgct

SEQ ID NO: 132708 - DNA, 17 bp, synthetic construct
  source 1..17: mol_type = other DNA
gcacctcgaccctgctg

SEQ ID NO: 132709 - DNA, 17 bp, synthetic construct
  source 1..17: mol_type = other DNA
cacctcgaccctgctgc

SEQ ID NO: 132710 - DNA, 17 bp, synthetic construct
  source 1..17: mol_type = other DNA
acctcgaccctgctgcc

SEQ ID NO: 132711 - DNA, 17 bp, synthetic construct
  source 1..17: mol_type = other DNA
cctcgaccctgctgccc

SEQ ID NO: 132712 - DNA, 17 bp, synthetic construct
  source 1..17: mol_type = other DNA
ctcgaccctgctgccca

SEQ ID NO: 132713 - DNA, 17 bp, synthetic construct
  source 1..17: mol_type = other DNA
tcgaccctgctgcccag

SEQ ID NO: 132714 - DNA, 17 bp, synthetic construct
  source 1..17: mol_type = other DNA
cgaccctgctgcccagc

SEQ ID NO: 132715 - DNA, 17 bp, synthetic construct
  source 1..17: mol_type = other DNA
gaccctgctgcccagca

SEQ ID NO: 132716 - DNA, 17 bp, synthetic construct
  source 1..17: mol_type = other DNA
accctgctgcccagcag

SEQ ID NO: 132717 - DNA, 17 bp, synthetic construct
  source 1..17: mol_type = other DNA
ccctgctgcccagcagc

SEQ ID NO: 132718 - DNA, 17 bp, synthetic construct
  source 1..17: mol_type = other DNA
cctgctgcccagcagcc

SEQ ID NO: 132719 - DNA, 17 bp, synthetic construct
  source 1..17: mol_type = other DNA
ctgctgcccagcagccc

SEQ ID NO: 132720 - DNA, 17 bp, synthetic construct
  source 1..17: mol_type = other DNA
tgctgcccagcagcccc

SEQ ID NO: 132721 - DNA, 17 bp, synthetic construct
  source 1..17: mol_type = other DNA
gctgcccagcagcccca

SEQ ID NO: 132722 - DNA, 17 bp, synthetic construct
  source 1..17: mol_type = other DNA
ctgcccagcagccccac

SEQ ID NO: 132723 - DNA, 17 bp, synthetic construct
  source 1..17: mol_type = other DNA
tgcccagcagccccaca

SEQ ID NO: 132724 - DNA, 17 bp, synthetic construct
  source 1..17: mol_type = other DNA
gcccagcagccccacat

SEQ ID NO: 132725 - DNA, 17 bp, synthetic construct
  source 1..17: mol_type = other DNA
cccagcagccccacatc

SEQ ID NO: 132726 - DNA, 17 bp, synthetic construct
  source 1..17: mol_type = other DNA
ccagcagccccacatcg

SEQ ID NO: 132727 - DNA, 17 bp, synthetic construct
  source 1..17: mol_type = other DNA
cagcagccccacatcgg

SEQ ID NO: 132728 - DNA, 17 bp, synthetic construct
  source 1..17: mol_type = other DNA
agcagccccacatcggc

SEQ ID NO: 132729 - DNA, 17 bp, synthetic construct
  source 1..17: mol_type = other DNA
gcagccccacatcggcc

SEQ ID NO: 132730 - DNA, 17 bp, synthetic construct
  source 1..17: mol_type = other DNA
cagccccacatcggccc

SEQ ID NO: 132731 - DNA, 17 bp, synthetic construct
  source 1..17: mol_type = other DNA
agccccacatcggcccc

SEQ ID NO: 132732 - DNA, 17 bp, synthetic construct
  source 1..17: mol_type = other DNA
gccccacatcggccccc

SEQ ID NO: 132733 - DNA, 17 bp, synthetic construct
  source 1..17: mol_type = other DNA
ccccacatcggccccca

SEQ ID NO: 132734 - DNA, 17 bp, synthetic construct
  source 1..17: mol_type = other DNA
cccacatcggcccccat

SEQ ID NO: 132735 - DNA, 17 bp, synthetic construct
  source 1..17: mol_type = other DNA
ccacatcggcccccata

SEQ ID NO: 132736 - DNA, 17 bp, synthetic construct
  source 1..17: mol_type = other DNA
cacatcggcccccataa

SEQ ID NO: 132737 - DNA, 17 bp, synthetic construct
  source 1..17: mol_type = other DNA
acatcggcccccataac

SEQ ID NO: 132738 - DNA, 17 bp, synthetic construct
  source 1..17: mol_type = other DNA
catcggcccccataacc

SEQ ID NO: 132739 - DNA, 17 bp, synthetic construct
  source 1..17: mol_type = other DNA
atcggcccccataacca

SEQ ID NO: 132740 - DNA, 17 bp, synthetic construct
  source 1..17: mol_type = other DNA
tcggcccccataaccac

SEQ ID NO: 132741 - DNA, 17 bp, synthetic construct
  source 1..17: mol_type = other DNA
cggcccccataaccacg

SEQ ID NO: 132742 - DNA, 17 bp, synthetic construct
  source 1..17: mol_type = other DNA
ggcccccataaccacgg

SEQ ID NO: 132743 - DNA, 17 bp, synthetic construct
  source 1..17: mol_type = other DNA
gcccccataaccacggt

SEQ ID NO: 132744 - DNA, 17 bp, synthetic construct
  source 1..17: mol_type = other DNA
cccccataaccacggtg

SEQ ID NO: 132745 - DNA, 17 bp, synthetic construct
  source 1..17: mol_type = other DNA
ccccataaccacggtgg

SEQ ID NO: 132746 - DNA, 17 bp, synthetic construct
  source 1..17: mol_type = other DNA
cccataaccacggtggt

SEQ ID NO: 132747 - DNA, 17 bp, synthetic construct
  source 1..17: mol_type = other DNA
ccataaccacggtggtg

SEQ ID NO: 132748 - DNA, 17 bp, synthetic construct
  source 1..17: mol_type = other DNA
cataaccacggtggtga

SEQ ID NO: 132749 - DNA, 17 bp, synthetic construct
  source 1..17: mol_type = other DNA
ataaccacggtggtgac

SEQ ID NO: 132750 - DNA, 17 bp, synthetic construct
  source 1..17: mol_type = other DNA
taaccacggtggtgacc

SEQ ID NO: 132751 - DNA, 17 bp, synthetic construct
  source 1..17: mol_type = other DNA
aaccacggtggtgacca

SEQ ID NO: 132752 - DNA, 17 bp, synthetic construct
  source 1..17: mol_type = other DNA
accacggtggtgaccac

SEQ ID NO: 132753 - DNA, 17 bp, synthetic construct
  source 1..17: mol_type = other DNA
ccacggtggtgaccacg

SEQ ID NO: 132754 - DNA, 17 bp, synthetic construct
  source 1..17: mol_type = other DNA
cacggtggtgaccacgg

SEQ ID NO: 132755 - DNA, 17 bp, synthetic construct
  source 1..17: mol_type = other DNA
acggtggtgaccacggg

SEQ ID NO: 132756 - DNA, 17 bp, synthetic construct
  source 1..17: mol_type = other DNA
cggtggtgaccacgggc

SEQ ID NO: 132757 - DNA, 17 bp, synthetic construct
  source 1..17: mol_type = other DNA
ggtggtgaccacgggct

SEQ ID NO: 132758 - DNA, 17 bp, synthetic construct
  source 1..17: mol_type = other DNA
gtggtgaccacgggctg

SEQ ID NO: 132759 - DNA, 17 bp, synthetic construct
  source 1..17: mol_type = other DNA
tggtgaccacgggctgt

SEQ ID NO: 132760 - DNA, 17 bp, synthetic construct
  source 1..17: mol_type = other DNA
ggtgaccacgggctgtg

SEQ ID NO: 132761 - DNA, 17 bp, synthetic construct
  source 1..17: mol_type = other DNA
gtgaccacgggctgtga

SEQ ID NO: 132762 - DNA, 17 bp, synthetic construct
  source 1..17: mol_type = other DNA
tgaccacgggctgtgag

SEQ ID NO: 132763 - DNA, 17 bp, synthetic construct
  source 1..17: mol_type = other DNA
gaccacgggctgtgagc

SEQ ID NO: 132764 - DNA, 17 bp, synthetic construct
  source 1..17: mol_type = other DNA
accacgggctgtgagcc

SEQ ID NO: 132765 - DNA, 17 bp, synthetic construct
  source 1..17: mol_type = other DNA
ccacgggctgtgagccc

SEQ ID NO: 132766 - DNA, 17 bp, synthetic construct
  source 1..17: mol_type = other DNA
cacgggctgtgagcccc

SEQ ID NO: 132767 - DNA, 17 bp, synthetic construct
  source 1..17: mol_type = other DNA
acgggctgtgagcccca

SEQ ID NO: 132768 - DNA, 17 bp, synthetic construct
  source 1..17: mol_type = other DNA
cgggctgtgagccccag

SEQ ID NO: 132769 - DNA, 17 bp, synthetic construct
  source 1..17: mol_type = other DNA
gggctgtgagccccagt

SEQ ID NO: 132770 - DNA, 17 bp, synthetic construct
  source 1..17: mol_type = other DNA
ggctgtgagccccagtg

SEQ ID NO: 132771 - DNA, 17 bp, synthetic construct
  source 1..17: mol_type = other DNA
gctgtgagccccagtgt

SEQ ID NO: 132772 - DNA, 17 bp, synthetic construct
  source 1..17: mol_type = other DNA
ctgtgagccccagtgtg

SEQ ID NO: 132773 - DNA, 17 bp, synthetic construct
  source 1..17: mol_type = other DNA
tgtgagccccagtgtgc

SEQ ID NO: 132774 - DNA, 17 bp, synthetic construct
  source 1..17: mol_type = other DNA
gtgagccccagtgtgcc

SEQ ID NO: 132775 - DNA, 17 bp, synthetic construct
  source 1..17: mol_type = other DNA
tgagccccagtgtgcct

SEQ ID NO: 132776 - DNA, 17 bp, synthetic construct
  source 1..17: mol_type = other DNA
gagccccagtgtgcctg

SEQ ID NO: 132777 - DNA, 17 bp, synthetic construct
  source 1..17: mol_type = other DNA
agccccagtgtgcctgg

SEQ ID NO: 132778 - DNA, 17 bp, synthetic construct
  source 1..17: mol_type = other DNA
gccccagtgtgcctggt

SEQ ID NO: 132779 - DNA, 17 bp, synthetic construct
  source 1..17: mol_type = other DNA
ccccagtgtgcctggtc

SEQ ID NO: 132780 - DNA, 17 bp, synthetic construct
  source 1..17: mol_type = other DNA
cccagtgtgcctggtca

SEQ ID NO: 132781 - DNA, 17 bp, synthetic construct
  source 1..17: mol_type = other DNA
ccagtgtgcctggtcag

SEQ ID NO: 132782 - DNA, 17 bp, synthetic construct
  source 1..17: mol_type = other DNA
cagtgtgcctggtcaga

SEQ ID NO: 132783 - DNA, 17 bp, synthetic construct
  source 1..17: mol_type = other DNA
agtgtgcctggtcagag

SEQ ID NO: 132784 - DNA, 17 bp, synthetic construct
  source 1..17: mol_type = other DNA
gtgtgcctggtcagagt

SEQ ID NO: 132785 - DNA, 17 bp, synthetic construct
  source 1..17: mol_type = other DNA
tgtgcctggtcagagtg

SEQ ID NO: 132786 - DNA, 17 bp, synthetic construct
  source 1..17: mol_type = other DNA
gtgcctggtcagagtgg

SEQ ID NO: 132787 - DNA, 17 bp, synthetic construct
  source 1..17: mol_type = other DNA
tgcctggtcagagtggc

SEQ ID NO: 132788 - DNA, 17 bp, synthetic construct
  source 1..17: mol_type = other DNA
gcctggtcagagtggct

SEQ ID NO: 132789 - DNA, 17 bp, synthetic construct
  source 1..17: mol_type = other DNA
cctggtcagagtggctg

SEQ ID NO: 132790 - DNA, 17 bp, synthetic construct
  source 1..17: mol_type = other DNA
ctggtcagagtggctgg

SEQ ID NO: 132791 - DNA, 17 bp, synthetic construct
  source 1..17: mol_type = other DNA
tggtcagagtggctgga

SEQ ID NO: 132792 - DNA, 17 bp, synthetic construct
  source 1..17: mol_type = other DNA
ggtcagagtggctggac

SEQ ID NO: 132793 - DNA, 17 bp, synthetic construct
  source 1..17: mol_type = other DNA
gtcagagtggctggact

SEQ ID NO: 132794 - DNA, 17 bp, synthetic construct
  source 1..17: mol_type = other DNA
tcagagtggctggacta

SEQ ID NO: 132795 - DNA, 17 bp, synthetic construct
  source 1..17: mol_type = other DNA
cagagtggctggactac

SEQ ID NO: 132796 - DNA, 17 bp, synthetic construct
  source 1..17: mol_type = other DNA
agagtggctggactaca

SEQ ID NO: 132797 - DNA, 17 bp, synthetic construct
  source 1..17: mol_type = other DNA
gagtggctggactacag

SEQ ID NO: 132798 - DNA, 17 bp, synthetic construct
  source 1..17: mol_type = other DNA
agtggctggactacagc

SEQ ID NO: 132799 - DNA, 17 bp, synthetic construct
  source 1..17: mol_type = other DNA
gtggctggactacagct

SEQ ID NO: 132800 - DNA, 17 bp, synthetic construct
  source 1..17: mol_type = other DNA
tggctggactacagcta

SEQ ID NO: 132801 - DNA, 17 bp, synthetic construct
  source 1..17: mol_type = other DNA
ggctggactacagctac

SEQ ID NO: 132802 - DNA, 17 bp, synthetic construct
  source 1..17: mol_type = other DNA
gctggactacagctacc

SEQ ID NO: 132803 - DNA, 17 bp, synthetic construct
  source 1..17: mol_type = other DNA
ctggactacagctaccc

SEQ ID NO: 132804 - DNA, 17 bp, synthetic construct
  source 1..17: mol_type = other DNA
tggactacagctacccc

SEQ ID NO: 132805 - DNA, 17 bp, synthetic construct
  source 1..17: mol_type = other DNA
ggactacagctacccca

SEQ ID NO: 132806 - DNA, 17 bp, synthetic construct
  source 1..17: mol_type = other DNA
gactacagctaccccat

SEQ ID NO: 132807 - DNA, 17 bp, synthetic construct
  source 1..17: mol_type = other DNA
actacagctaccccatg

SEQ ID NO: 132808 - DNA, 17 bp, synthetic construct
  source 1..17: mol_type = other DNA
ctacagctaccccatgc

SEQ ID NO: 132809 - DNA, 17 bp, synthetic construct
  source 1..17: mol_type = other DNA
tacagctaccccatgcc

SEQ ID NO: 132810 - DNA, 17 bp, synthetic construct
  source 1..17: mol_type = other DNA
acagctaccccatgccg

SEQ ID NO: 132811 - DNA, 17 bp, synthetic construct
  source 1..17: mol_type = other DNA
cagctaccccatgccgg

SEQ ID NO: 132812 - DNA, 17 bp, synthetic construct
  source 1..17: mol_type = other DNA
agctaccccatgccggg

SEQ ID NO: 132813 - DNA, 17 bp, synthetic construct
  source 1..17: mol_type = other DNA
gctaccccatgccgggg

SEQ ID NO: 132814 - DNA, 17 bp, synthetic construct
  source 1..17: mol_type = other DNA
ctaccccatgccggggc

SEQ ID NO: 132815 - DNA, 17 bp, synthetic construct
  source 1..17: mol_type = other DNA
taccccatgccggggcc

SEQ ID NO: 132816 - DNA, 17 bp, synthetic construct
  source 1..17: mol_type = other DNA
accccatgccggggccc

SEQ ID NO: 132817 - DNA, 17 bp, synthetic construct
  source 1..17: mol_type = other DNA
ccccatgccggggccct

SEQ ID NO: 132818 - DNA, 17 bp, synthetic construct
  source 1..17: mol_type = other DNA
cccatgccggggccctc

SEQ ID NO: 132819 - DNA, 17 bp, synthetic construct
  source 1..17: mol_type = other DNA
ccatgccggggccctct

SEQ ID NO: 132820 - DNA, 17 bp, synthetic construct
  source 1..17: mol_type = other DNA
catgccggggccctctg

SEQ ID NO: 132821 - DNA, 17 bp, synthetic construct
  source 1..17: mol_type = other DNA
atgccggggccctctgg

SEQ ID NO: 132822 - DNA, 17 bp, synthetic construct
  source 1..17: mol_type = other DNA
tgccggggccctctggc

SEQ ID NO: 132823 - DNA, 17 bp, synthetic construct
  source 1..17: mol_type = other DNA
gccggggccctctggcg

SEQ ID NO: 132824 - DNA, 17 bp, synthetic construct
  source 1..17: mol_type = other DNA
ccggggccctctggcgg

SEQ ID NO: 132825 - DNA, 17 bp, synthetic construct
  source 1..17: mol_type = other DNA
cggggccctctggcggg

SEQ ID NO: 132826 - DNA, 17 bp, synthetic construct
  source 1..17: mol_type = other DNA
ggggccctctggcgggg

SEQ ID NO: 132827 - DNA, 17 bp, synthetic construct
  source 1..17: mol_type = other DNA
gggccctctggcgggga

SEQ ID NO: 132828 - DNA, 17 bp, synthetic construct
  source 1..17: mol_type = other DNA
ggccctctggcggggac

SEQ ID NO: 132829 - DNA, 17 bp, synthetic construct
  source 1..17: mol_type = other DNA
gccctctggcggggact

SEQ ID NO: 132830 - DNA, 17 bp, synthetic construct
  source 1..17: mol_type = other DNA
ccctctggcggggactt

SEQ ID NO: 132831 - DNA, 17 bp, synthetic construct
  source 1..17: mol_type = other DNA
cctctggcggggacttt

SEQ ID NO: 132832 - DNA, 17 bp, synthetic construct
  source 1..17: mol_type = other DNA
ctctggcggggactttg

SEQ ID NO: 132833 - DNA, 17 bp, synthetic construct
  source 1..17: mol_type = other DNA
tctggcggggactttga

SEQ ID NO: 132834 - DNA, 17 bp, synthetic construct
  source 1..17: mol_type = other DNA
ctggcggggactttgac

SEQ ID NO: 132835 - DNA, 17 bp, synthetic construct
  source 1..17: mol_type = other DNA
tggcggggactttgaca

SEQ ID NO: 132836 - DNA, 17 bp, synthetic construct
  source 1..17: mol_type = other DNA
ggcggggactttgacac

SEQ ID NO: 132837 - DNA, 17 bp, synthetic construct
  source 1..17: mol_type = other DNA
gcggggactttgacacc

SEQ ID NO: 132838 - DNA, 17 bp, synthetic construct
  source 1..17: mol_type = other DNA
cggggactttgacacct

SEQ ID NO: 132839 - DNA, 17 bp, synthetic construct
  source 1..17: mol_type = other DNA
ggggactttgacaccta

SEQ ID NO: 132840 - DNA, 17 bp, synthetic construct
  source 1..17: mol_type = other DNA
gggactttgacacctac

SEQ ID NO: 132841 - DNA, 17 bp, synthetic construct
  source 1..17: mol_type = other DNA
ggactttgacacctact

SEQ ID NO: 132842 - DNA, 17 bp, synthetic construct
  source 1..17: mol_type = other DNA
gactttgacacctactc

SEQ ID NO: 132843 - DNA, 17 bp, synthetic construct
  source 1..17: mol_type = other DNA
actttgacacctactcc

SEQ ID NO: 132844 - DNA, 17 bp, synthetic construct
  source 1..17: mol_type = other DNA
ctttgacacctactcca

SEQ ID NO: 132845 - DNA, 17 bp, synthetic construct
  source 1..17: mol_type = other DNA
tttgacacctactccaa

SEQ ID NO: 132846 - DNA, 17 bp, synthetic construct
  source 1..17: mol_type = other DNA
ttgacacctactccaac

SEQ ID NO: 132847 - DNA, 17 bp, synthetic construct
  source 1..17: mol_type = other DNA
tgacacctactccaaca

SEQ ID NO: 132848 - DNA, 17 bp, synthetic construct
  source 1..17: mol_type = other DNA
gacacctactccaacat

SEQ ID NO: 132849 - DNA, 17 bp, synthetic construct
  source 1..17: mol_type = other DNA
acacctactccaacatc

SEQ ID NO: 132850 - DNA, 17 bp, synthetic construct
  source 1..17: mol_type = other DNA
cacctactccaacatcc

SEQ ID NO: 132851 - DNA, 17 bp, synthetic construct
  source 1..17: mol_type = other DNA
acctactccaacatccg

SEQ ID NO: 132852 - DNA, 17 bp, synthetic construct
  source 1..17: mol_type = other DNA
cctactccaacatccgt

SEQ ID NO: 132853 - DNA, 17 bp, synthetic construct
  source 1..17: mol_type = other DNA
ctactccaacatccgtg

SEQ ID NO: 132854 - DNA, 17 bp, synthetic construct
  source 1..17: mol_type = other DNA
tactccaacatccgtgc

SEQ ID NO: 132855 - DNA, 17 bp, synthetic construct
  source 1..17: mol_type = other DNA
actccaacatccgtgcg

SEQ ID NO: 132856 - DNA, 17 bp, synthetic construct
  source 1..17: mol_type = other DNA
ctccaacatccgtgcgg

SEQ ID NO: 132857 - DNA, 17 bp, synthetic construct
  source 1..17: mol_type = other DNA
tccaacatccgtgcggc

SEQ ID NO: 132858 - DNA, 17 bp, synthetic construct
  source 1..17: mol_type = other DNA
ccaacatccgtgcggcc

SEQ ID NO: 132859 - DNA, 17 bp, synthetic construct
  source 1..17: mol_type = other DNA
caacatccgtgcggccg

SEQ ID NO: 132860 - DNA, 17 bp, synthetic construct
  source 1..17: mol_type = other DNA
aacatccgtgcggccgg

SEQ ID NO: 132861 - DNA, 17 bp, synthetic construct
  source 1..17: mol_type = other DNA
acatccgtgcggccgga

SEQ ID NO: 132862 - DNA, 17 bp, synthetic construct
  source 1..17: mol_type = other DNA
catccgtgcggccggag

SEQ ID NO: 132863 - DNA, 17 bp, synthetic construct
  source 1..17: mol_type = other DNA
atccgtgcggccggagg

SEQ ID NO: 132864 - DNA, 17 bp, synthetic construct
  source 1..17: mol_type = other DNA
tccgtgcggccggaggg

SEQ ID NO: 132865 - DNA, 17 bp, synthetic construct
  source 1..17: mol_type = other DNA
ccgtgcggccggagggg

SEQ ID NO: 132866 - DNA, 17 bp, synthetic construct
  source 1..17: mol_type = other DNA
cgtgcggccggaggggc

SEQ ID NO: 132867 - DNA, 17 bp, synthetic construct
  source 1..17: mol_type = other DNA
gtgcggccggaggggca

SEQ ID NO: 132868 - DNA, 17 bp, synthetic construct
  source 1..17: mol_type = other DNA
tgcggccggaggggcag

SEQ ID NO: 132869 - DNA, 17 bp, synthetic construct
  source 1..17: mol_type = other DNA
gcggccggaggggcagt

SEQ ID NO: 132870 - DNA, 17 bp, synthetic construct
  source 1..17: mol_type = other DNA
cggccggaggggcagtc

SEQ ID NO: 132871 - DNA, 17 bp, synthetic construct
  source 1..17: mol_type = other DNA
ggccggaggggcagtct

SEQ ID NO: 132872 - DNA, 17 bp, synthetic construct
  source 1..17: mol_type = other DNA
gccggaggggcagtctg

SEQ ID NO: 132873 - DNA, 17 bp, synthetic construct
  source 1..17: mol_type = other DNA
ccggaggggcagtctgt

SEQ ID NO: 132874 - DNA, 17 bp, synthetic construct
  source 1..17: mol_type = other DNA
cggaggggcagtctgtg

SEQ ID NO: 132875 - DNA, 17 bp, synthetic construct
  source 1..17: mol_type = other DNA
ggaggggcagtctgtga

SEQ ID NO: 132876 - DNA, 17 bp, synthetic construct
  source 1..17: mol_type = other DNA
gaggggcagtctgtgag

SEQ ID NO: 132877 - DNA, 17 bp, synthetic construct
  source 1..17: mol_type = other DNA
aggggcagtctgtgagc

SEQ ID NO: 132878 - DNA, 17 bp, synthetic construct
  source 1..17: mol_type = other DNA
ggggcagtctgtgagca

SEQ ID NO: 132879 - DNA, 17 bp, synthetic construct
  source 1..17: mol_type = other DNA
gggcagtctgtgagcag

SEQ ID NO: 132880 - DNA, 17 bp, synthetic construct
  source 1..17: mol_type = other DNA
ggcagtctgtgagcagc

SEQ ID NO: 132881 - DNA, 17 bp, synthetic construct
  source 1..17: mol_type = other DNA
gcagtctgtgagcagcc

SEQ ID NO: 132882 - DNA, 17 bp, synthetic construct
  source 1..17: mol_type = other DNA
cagtctgtgagcagccc

SEQ ID NO: 132883 - DNA, 17 bp, synthetic construct
  source 1..17: mol_type = other DNA
agtctgtgagcagcccc

SEQ ID NO: 132884 - DNA, 17 bp, synthetic construct
  source 1..17: mol_type = other DNA
gtctgtgagcagcccct

SEQ ID NO: 132885 - DNA, 17 bp, synthetic construct
  source 1..17: mol_type = other DNA
tctgtgagcagcccctg

SEQ ID NO: 132886 - DNA, 17 bp, synthetic construct
  source 1..17: mol_type = other DNA
ctgtgagcagcccctgg

SEQ ID NO: 132887 - DNA, 17 bp, synthetic construct
  source 1..17: mol_type = other DNA
tgtgagcagcccctggg

SEQ ID NO: 132888 - DNA, 17 bp, synthetic construct
  source 1..17: mol_type = other DNA
gtgagcagcccctgggc

SEQ ID NO: 132889 - DNA, 17 bp, synthetic construct
  source 1..17: mol_type = other DNA
tgagcagcccctgggcc

SEQ ID NO: 132890 - DNA, 17 bp, synthetic construct
  source 1..17: mol_type = other DNA
gagcagcccctgggcct

SEQ ID NO: 132891 - DNA, 17 bp, synthetic construct
  source 1..17: mol_type = other DNA
agcagcccctgggcctc

SEQ ID NO: 132892 - DNA, 17 bp, synthetic construct
  source 1..17: mol_type = other DNA
gcagcccctgggcctcg

SEQ ID NO: 132893 - DNA, 17 bp, synthetic construct
  source 1..17: mol_type = other DNA
cagcccctgggcctcga

SEQ ID NO: 132894 - DNA, 17 bp, synthetic construct
  source 1..17: mol_type = other DNA
agcccctgggcctcgag

SEQ ID NO: 132895 - DNA, 17 bp, synthetic construct
  source 1..17: mol_type = other DNA
gcccctgggcctcgagt

SEQ ID NO: 132896 - DNA, 17 bp, synthetic construct
  source 1..17: mol_type = other DNA
cccctgggcctcgagtg

SEQ ID NO: 132897 - DNA, 17 bp, synthetic construct
  source 1..17: mol_type = other DNA
ccctgggcctcgagtgc

SEQ ID NO: 132898 - DNA, 17 bp, synthetic construct
  source 1..17: mol_type = other DNA
cctgggcctcgagtgcc

SEQ ID NO: 132899 - DNA, 17 bp, synthetic construct
  source 1..17: mol_type = other DNA
ctgggcctcgagtgccg

SEQ ID NO: 132900 - DNA, 17 bp, synthetic construct
  source 1..17: mol_type = other DNA
tgggcctcgagtgccgt

SEQ ID NO: 132901 - DNA, 17 bp, synthetic construct
  source 1..17: mol_type = other DNA
gggcctcgagtgccgtg

SEQ ID NO: 132902 - DNA, 17 bp, synthetic construct
  source 1..17: mol_type = other DNA
ggcctcgagtgccgtgc

SEQ ID NO: 132903 - DNA, 17 bp, synthetic construct
  source 1..17: mol_type = other DNA
gcctcgagtgccgtgcc

SEQ ID NO: 132904 - DNA, 17 bp, synthetic construct
  source 1..17: mol_type = other DNA
cctcgagtgccgtgccc

SEQ ID NO: 132905 - DNA, 17 bp, synthetic construct
  source 1..17: mol_type = other DNA
ctcgagtgccgtgccca

SEQ ID NO: 132906 - DNA, 17 bp, synthetic construct
  source 1..17: mol_type = other DNA
tcgagtgccgtgcccag

SEQ ID NO: 132907 - DNA, 17 bp, synthetic construct
  source 1..17: mol_type = other DNA
cgagtgccgtgcccagg

SEQ ID NO: 132908 - DNA, 17 bp, synthetic construct
  source 1..17: mol_type = other DNA
gagtgccgtgcccaggc

SEQ ID NO: 132909 - DNA, 17 bp, synthetic construct
  source 1..17: mol_type = other DNA
agtgccgtgcccaggcc

SEQ ID NO: 132910 - DNA, 17 bp, synthetic construct
  source 1..17: mol_type = other DNA
gtgccgtgcccaggccc

SEQ ID NO: 132911 - DNA, 17 bp, synthetic construct
  source 1..17: mol_type = other DNA
tgccgtgcccaggccca

SEQ ID NO: 132912 - DNA, 17 bp, synthetic construct
  source 1..17: mol_type = other DNA
gccgtgcccaggcccag

SEQ ID NO: 132913 - DNA, 17 bp, synthetic construct
  source 1..17: mol_type = other DNA
ccgtgcccaggcccagc

SEQ ID NO: 132914 - DNA, 17 bp, synthetic construct
  source 1..17: mol_type = other DNA
cgtgcccaggcccagcc

SEQ ID NO: 132915 - DNA, 17 bp, synthetic construct
  source 1..17: mol_type = other DNA
gtgcccaggcccagcct

SEQ ID NO: 132916 - DNA, 17 bp, synthetic construct
  source 1..17: mol_type = other DNA
tgcccaggcccagcctg

SEQ ID NO: 132917 - DNA, 17 bp, synthetic construct
  source 1..17: mol_type = other DNA
gcccaggcccagcctgg

SEQ ID NO: 132918 - DNA, 17 bp, synthetic construct
  source 1..17: mol_type = other DNA
cccaggcccagcctggt

SEQ ID NO: 132919 - DNA, 17 bp, synthetic construct
  source 1..17: mol_type = other DNA
ccaggcccagcctggtg

SEQ ID NO: 132920 - DNA, 17 bp, synthetic construct
  source 1..17: mol_type = other DNA
caggcccagcctggtgt

SEQ ID NO: 132921 - DNA, 17 bp, synthetic construct
  source 1..17: mol_type = other DNA
aggcccagcctggtgtc

SEQ ID NO: 132922 - DNA, 17 bp, synthetic construct
  source 1..17: mol_type = other DNA
ggcccagcctggtgtcc

SEQ ID NO: 132923 - DNA, 17 bp, synthetic construct
  source 1..17: mol_type = other DNA
gcccagcctggtgtccc

SEQ ID NO: 132924 - DNA, 17 bp, synthetic construct
  source 1..17: mol_type = other DNA
cccagcctggtgtcccc

SEQ ID NO: 132925 - DNA, 17 bp, synthetic construct
  source 1..17: mol_type = other DNA
ccagcctggtgtccccc

SEQ ID NO: 132926 - DNA, 17 bp, synthetic construct
  source 1..17: mol_type = other DNA
cagcctggtgtccccct

SEQ ID NO: 132927 - DNA, 17 bp, synthetic construct
  source 1..17: mol_type = other DNA
agcctggtgtccccctg

SEQ ID NO: 132928 - DNA, 17 bp, synthetic construct
  source 1..17: mol_type = other DNA
gcctggtgtccccctgc

SEQ ID NO: 132929 - DNA, 17 bp, synthetic construct
  source 1..17: mol_type = other DNA
cctggtgtccccctgcg

SEQ ID NO: 132930 - DNA, 17 bp, synthetic construct
  source 1..17: mol_type = other DNA
ctggtgtccccctgcgg

SEQ ID NO: 132931 - DNA, 17 bp, synthetic construct
  source 1..17: mol_type = other DNA
tggtgtccccctgcggg

SEQ ID NO: 132932 - DNA, 17 bp, synthetic construct
  source 1..17: mol_type = other DNA
ggtgtccccctgcggga

SEQ ID NO: 132933 - DNA, 17 bp, synthetic construct
  source 1..17: mol_type = other DNA
gtgtccccctgcgggag

SEQ ID NO: 132934 - DNA, 17 bp, synthetic construct
  source 1..17: mol_type = other DNA
tgtccccctgcgggagt

SEQ ID NO: 132935 - DNA, 17 bp, synthetic construct
  source 1..17: mol_type = other DNA
gtccccctgcgggagtt

SEQ ID NO: 132936 - DNA, 17 bp, synthetic construct
  source 1..17: mol_type = other DNA
tccccctgcgggagttg

SEQ ID NO: 132937 - DNA, 17 bp, synthetic construct
  source 1..17: mol_type = other DNA
ccccctgcgggagttgg

SEQ ID NO: 132938 - DNA, 17 bp, synthetic construct
  source 1..17: mol_type = other DNA
cccctgcgggagttggg

SEQ ID NO: 132939 - DNA, 17 bp, synthetic construct
  source 1..17: mol_type = other DNA
ccctgcgggagttgggc

SEQ ID NO: 132940 - DNA, 17 bp, synthetic construct
  source 1..17: mol_type = other DNA
cctgcgggagttgggcc

SEQ ID NO: 132941 - DNA, 17 bp, synthetic construct
  source 1..17: mol_type = other DNA
ctgcgggagttgggcca

SEQ ID NO: 132942 - DNA, 17 bp, synthetic construct
  source 1..17: mol_type = other DNA
tgcgggagttgggccag

SEQ ID NO: 132943 - DNA, 17 bp, synthetic construct
  source 1..17: mol_type = other DNA
gcgggagttgggccagg

SEQ ID NO: 132944 - DNA, 17 bp, synthetic construct
  source 1..17: mol_type = other DNA
cgggagttgggccaggt

SEQ ID NO: 132945 - DNA, 17 bp, synthetic construct
  source 1..17: mol_type = other DNA
gggagttgggccaggtc

SEQ ID NO: 132946 - DNA, 17 bp, synthetic construct
  source 1..17: mol_type = other DNA
ggagttgggccaggtcg

SEQ ID NO: 132947 - DNA, 17 bp, synthetic construct
  source 1..17: mol_type = other DNA
gagttgggccaggtcgt

SEQ ID NO: 132948 - DNA, 17 bp, synthetic construct
  source 1..17: mol_type = other DNA
agttgggccaggtcgtg

SEQ ID NO: 132949 - DNA, 17 bp, synthetic construct
  source 1..17: mol_type = other DNA
gttgggccaggtcgtgg

SEQ ID NO: 132950 - DNA, 17 bp, synthetic construct
  source 1..17: mol_type = other DNA
ttgggccaggtcgtgga

SEQ ID NO: 132951 - DNA, 17 bp, synthetic construct
  source 1..17: mol_type = other DNA
tgggccaggtcgtggaa

SEQ ID NO: 132952 - DNA, 17 bp, synthetic construct
  source 1..17: mol_type = other DNA
gggccaggtcgtggaat

SEQ ID NO: 132953 - DNA, 17 bp, synthetic construct
  source 1..17: mol_type = other DNA
ggccaggtcgtggaatg

SEQ ID NO: 132954 - DNA, 17 bp, synthetic construct
  source 1..17: mol_type = other DNA
gccaggtcgtggaatgc

SEQ ID NO: 132955 - DNA, 17 bp, synthetic construct
  source 1..17: mol_type = other DNA
ccaggtcgtggaatgca

SEQ ID NO: 132956 - DNA, 17 bp, synthetic construct
  source 1..17: mol_type = other DNA
caggtcgtggaatgcag

SEQ ID NO: 132957 - DNA, 17 bp, synthetic construct
  source 1..17: mol_type = other DNA
aggtcgtggaatgcagc

SEQ ID NO: 132958 - DNA, 17 bp, synthetic construct
  source 1..17: mol_type = other DNA
ggtcgtggaatgcagcc

SEQ ID NO: 132959 - DNA, 17 bp, synthetic construct
  source 1..17: mol_type = other DNA
gtcgtggaatgcagcct

SEQ ID NO: 132960 - DNA, 17 bp, synthetic construct
  source 1..17: mol_type = other DNA
tcgtggaatgcagcctg

SEQ ID NO: 132961 - DNA, 17 bp, synthetic construct
  source 1..17: mol_type = other DNA
cgtggaatgcagcctgg

SEQ ID NO: 132962 - DNA, 17 bp, synthetic construct
  source 1..17: mol_type = other DNA
gtggaatgcagcctgga

SEQ ID NO: 132963 - DNA, 17 bp, synthetic construct
  source 1..17: mol_type = other DNA
tggaatgcagcctggac

SEQ ID NO: 132964 - DNA, 17 bp, synthetic construct
  source 1..17: mol_type = other DNA
ggaatgcagcctggact

SEQ ID NO: 132965 - DNA, 17 bp, synthetic construct
  source 1..17: mol_type = other DNA
gaatgcagcctggactt

SEQ ID NO: 132966 - DNA, 17 bp, synthetic construct
  source 1..17: mol_type = other DNA
aatgcagcctggacttt

SEQ ID NO: 132967 - DNA, 17 bp, synthetic construct
  source 1..17: mol_type = other DNA
atgcagcctggactttg

SEQ ID NO: 132968 - DNA, 17 bp, synthetic construct
  source 1..17: mol_type = other DNA
tgcagcctggactttgg

SEQ ID NO: 132969 - DNA, 17 bp, synthetic construct
  source 1..17: mol_type = other DNA
gcagcctggactttggc

SEQ ID NO: 132970 - DNA, 17 bp, synthetic construct
  source 1..17: mol_type = other DNA
cagcctggactttggcc

SEQ ID NO: 132971 - DNA, 17 bp, synthetic construct
  source 1..17: mol_type = other DNA
agcctggactttggcct

SEQ ID NO: 132972 - DNA, 17 bp, synthetic construct
  source 1..17: mol_type = other DNA
gcctggactttggcctg

SEQ ID NO: 132973 - DNA, 17 bp, synthetic construct
  source 1..17: mol_type = other DNA
cctggactttggcctgg

SEQ ID NO: 132974 - DNA, 17 bp, synthetic construct
  source 1..17: mol_type = other DNA
ctggactttggcctggt

SEQ ID NO: 132975 - DNA, 17 bp, synthetic construct
  source 1..17: mol_type = other DNA
tggactttggcctggtc

SEQ ID NO: 132976 - DNA, 17 bp, synthetic construct
  source 1..17: mol_type = other DNA
ggactttggcctggtct

SEQ ID NO: 132977 - DNA, 17 bp, synthetic construct
  source 1..17: mol_type = other DNA
gactttggcctggtctg

SEQ ID NO: 132978 - DNA, 17 bp, synthetic construct
  source 1..17: mol_type = other DNA
actttggcctggtctgc

SEQ ID NO: 132979 - DNA, 17 bp, synthetic construct
  source 1..17: mol_type = other DNA
ctttggcctggtctgca

SEQ ID NO: 132980 - DNA, 17 bp, synthetic construct
  source 1..17: mol_type = other DNA
tttggcctggtctgcag

SEQ ID NO: 132981 - DNA, 17 bp, synthetic construct
  source 1..17: mol_type = other DNA
ttggcctggtctgcagg

SEQ ID NO: 132982 - DNA, 17 bp, synthetic construct
  source 1..17: mol_type = other DNA
tggcctggtctgcagga

SEQ ID NO: 132983 - DNA, 17 bp, synthetic construct
  source 1..17: mol_type = other DNA
ggcctggtctgcaggaa

SEQ ID NO: 132984 - DNA, 17 bp, synthetic construct
  source 1..17: mol_type = other DNA
gcctggtctgcaggaac

SEQ ID NO: 132985 - DNA, 17 bp, synthetic construct
  source 1..17: mol_type = other DNA
cctggtctgcaggaacc

SEQ ID NO: 132986 - DNA, 17 bp, synthetic construct
  source 1..17: mol_type = other DNA
ctggtctgcaggaaccg

SEQ ID NO: 132987 - DNA, 17 bp, synthetic construct
  source 1..17: mol_type = other DNA
tggtctgcaggaaccgt

SEQ ID NO: 132988 - DNA, 17 bp, synthetic construct
  source 1..17: mol_type = other DNA
ggtctgcaggaaccgtg

SEQ ID NO: 132989 - DNA, 17 bp, synthetic construct
  source 1..17: mol_type = other DNA
gtctgcaggaaccgtga

SEQ ID NO: 132990 - DNA, 17 bp, synthetic construct
  source 1..17: mol_type = other DNA
tctgcaggaaccgtgag

SEQ ID NO: 132991 - DNA, 17 bp, synthetic construct
  source 1..17: mol_type = other DNA
ctgcaggaaccgtgagc

SEQ ID NO: 132992 - DNA, 17 bp, synthetic construct
  source 1..17: mol_type = other DNA
tgcaggaaccgtgagca

SEQ ID NO: 132993 - DNA, 17 bp, synthetic construct
  source 1..17: mol_type = other DNA
gcaggaaccgtgagcag

SEQ ID NO: 132994 - DNA, 17 bp, synthetic construct
  source 1..17: mol_type = other DNA
caggaaccgtgagcagg

SEQ ID NO: 132995 - DNA, 17 bp, synthetic construct
  source 1..17: mol_type = other DNA
aggaaccgtgagcaggt

SEQ ID NO: 132996 - DNA, 17 bp, synthetic construct
  source 1..17: mol_type = other DNA
ggaaccgtgagcaggtg

SEQ ID NO: 132997 - DNA, 17 bp, synthetic construct
  source 1..17: mol_type = other DNA
gaaccgtgagcaggtgg

SEQ ID NO: 132998 - DNA, 17 bp, synthetic construct
  source 1..17: mol_type = other DNA
aaccgtgagcaggtggg

SEQ ID NO: 132999 - DNA, 17 bp, synthetic construct
  source 1..17: mol_type = other DNA
accgtgagcaggtgggg

SEQ ID NO: 133000 - DNA, 17 bp, synthetic construct
  source 1..17: mol_type = other DNA
ccgtgagcaggtgggga

SEQ ID NO: 133001 - DNA, 17 bp, synthetic construct
  source 1..17: mol_type = other DNA
cgtgagcaggtggggaa

SEQ ID NO: 133002 - DNA, 17 bp, synthetic construct
  source 1..17: mol_type = other DNA
gtgagcaggtggggaag

SEQ ID NO: 133003 - DNA, 17 bp, synthetic construct
  source 1..17: mol_type = other DNA
tgagcaggtggggaagt

SEQ ID NO: 133004 - DNA, 17 bp, synthetic construct
  source 1..17: mol_type = other DNA
gagcaggtggggaagtt

SEQ ID NO: 133005 - DNA, 17 bp, synthetic construct
  source 1..17: mol_type = other DNA
agcaggtggggaagttc

SEQ ID NO: 133006 - DNA, 17 bp, synthetic construct
  source 1..17: mol_type = other DNA
gcaggtggggaagttca

SEQ ID NO: 133007 - DNA, 17 bp, synthetic construct
  source 1..17: mol_type = other DNA
caggtggggaagttcaa

SEQ ID NO: 133008 - DNA, 17 bp, synthetic construct
  source 1..17: mol_type = other DNA
aggtggggaagttcaag

SEQ ID NO: 133009 - DNA, 17 bp, synthetic construct
  source 1..17: mol_type = other DNA
ggtggggaagttcaaga

SEQ ID NO: 133010 - DNA, 17 bp, synthetic construct
  source 1..17: mol_type = other DNA
gtggggaagttcaagat

SEQ ID NO: 133011 - DNA, 17 bp, synthetic construct
  source 1..17: mol_type = other DNA
tggggaagttcaagatg

SEQ ID NO: 133012 - DNA, 17 bp, synthetic construct
  source 1..17: mol_type = other DNA
ggggaagttcaagatgt

SEQ ID NO: 133013 - DNA, 17 bp, synthetic construct
  source 1..17: mol_type = other DNA
gggaagttcaagatgtg

SEQ ID NO: 133014 - DNA, 17 bp, synthetic construct
  source 1..17: mol_type = other DNA
ggaagttcaagatgtgc

SEQ ID NO: 133015 - DNA, 17 bp, synthetic construct
  source 1..17: mol_type = other DNA
gaagttcaagatgtgct

SEQ ID NO: 133016 - DNA, 17 bp, synthetic construct
  source 1..17: mol_type = other DNA
aagttcaagatgtgctt

SEQ ID NO: 133017 - DNA, 17 bp, synthetic construct
  source 1..17: mol_type = other DNA
agttcaagatgtgcttc

SEQ ID NO: 133018 - DNA, 17 bp, synthetic construct
  source 1..17: mol_type = other DNA
gttcaagatgtgcttca

SEQ ID NO: 133019 - DNA, 17 bp, synthetic construct
  source 1..17: mol_type = other DNA
ttcaagatgtgcttcaa

SEQ ID NO: 133020 - DNA, 17 bp, synthetic construct
  source 1..17: mol_type = other DNA
tcaagatgtgcttcaac

SEQ ID NO: 133021 - DNA, 17 bp, synthetic construct
  source 1..17: mol_type = other DNA
caagatgtgcttcaact

SEQ ID NO: 133022 - DNA, 17 bp, synthetic construct
  source 1..17: mol_type = other DNA
aagatgtgcttcaacta

SEQ ID NO: 133023 - DNA, 17 bp, synthetic construct
  source 1..17: mol_type = other DNA
agatgtgcttcaactat

SEQ ID NO: 133024 - DNA, 17 bp, synthetic construct
  source 1..17: mol_type = other DNA
gatgtgcttcaactatg

SEQ ID NO: 133025 - DNA, 17 bp, synthetic construct
  source 1..17: mol_type = other DNA
atgtgcttcaactatga

SEQ ID NO: 133026 - DNA, 17 bp, synthetic construct
  source 1..17: mol_type = other DNA
tgtgcttcaactatgaa

SEQ ID NO: 133027 - DNA, 17 bp, synthetic construct
  source 1..17: mol_type = other DNA
gtgcttcaactatgaaa

SEQ ID NO: 133028 - DNA, 17 bp, synthetic construct
  source 1..17: mol_type = other DNA
tgcttcaactatgaaat

SEQ ID NO: 133029 - DNA, 17 bp, synthetic construct
  source 1..17: mol_type = other DNA
gcttcaactatgaaatc

SEQ ID NO: 133030 - DNA, 17 bp, synthetic construct
  source 1..17: mol_type = other DNA
cttcaactatgaaatcc

SEQ ID NO: 133031 - DNA, 17 bp, synthetic construct
  source 1..17: mol_type = other DNA
ttcaactatgaaatccg

SEQ ID NO: 133032 - DNA, 17 bp, synthetic construct
  source 1..17: mol_type = other DNA
tcaactatgaaatccgt

SEQ ID NO: 133033 - DNA, 17 bp, synthetic construct
  source 1..17: mol_type = other DNA
caactatgaaatccgtg

SEQ ID NO: 133034 - DNA, 17 bp, synthetic construct
  source 1..17: mol_type = other DNA
aactatgaaatccgtgt

SEQ ID NO: 133035 - DNA, 17 bp, synthetic construct
  source 1..17: mol_type = other DNA
actatgaaatccgtgtg

SEQ ID NO: 133036 - DNA, 17 bp, synthetic construct
  source 1..17: mol_type = other DNA
ctatgaaatccgtgtgt

SEQ ID NO: 133037 - DNA, 17 bp, synthetic construct
  source 1..17: mol_type = other DNA
tatgaaatccgtgtgtt

SEQ ID NO: 133038 - DNA, 17 bp, synthetic construct
  source 1..17: mol_type = other DNA
atgaaatccgtgtgttc

SEQ ID NO: 133039 - DNA, 17 bp, synthetic construct
  source 1..17: mol_type = other DNA
tgaaatccgtgtgttct

SEQ ID NO: 133040 - DNA, 17 bp, synthetic construct
  source 1..17: mol_type = other DNA
gaaatccgtgtgttctg

SEQ ID NO: 133041 - DNA, 17 bp, synthetic construct
  source 1..17: mol_type = other DNA
aaatccgtgtgttctgc

SEQ ID NO: 133042 - DNA, 17 bp, synthetic construct
  source 1..17: mol_type = other DNA
aatccgtgtgttctgct

SEQ ID NO: 133043 - DNA, 17 bp, synthetic construct
  source 1..17: mol_type = other DNA
atccgtgtgttctgctg

SEQ ID NO: 133044 - DNA, 17 bp, synthetic construct
  source 1..17: mol_type = other DNA
tccgtgtgttctgctgc

SEQ ID NO: 133045 - DNA, 17 bp, synthetic construct
  source 1..17: mol_type = other DNA
ccgtgtgttctgctgca

SEQ ID NO: 133046 - DNA, 17 bp, synthetic construct
  source 1..17: mol_type = other DNA
cgtgtgttctgctgcaa

SEQ ID NO: 133047 - DNA, 17 bp, synthetic construct
  source 1..17: mol_type = other DNA
gtgtgttctgctgcaac

SEQ ID NO: 133048 - DNA, 17 bp, synthetic construct
  source 1..17: mol_type = other DNA
tgtgttctgctgcaact

SEQ ID NO: 133049 - DNA, 17 bp, synthetic construct
  source 1..17: mol_type = other DNA
gtgttctgctgcaacta

SEQ ID NO: 133050 - DNA, 17 bp, synthetic construct
  source 1..17: mol_type = other DNA
tgttctgctgcaactac

SEQ ID NO: 133051 - DNA, 17 bp, synthetic construct
  source 1..17: mol_type = other DNA
gttctgctgcaactacg

SEQ ID NO: 133052 - DNA, 17 bp, synthetic construct
  source 1..17: mol_type = other DNA
ttctgctgcaactacgg

SEQ ID NO: 133053 - DNA, 17 bp, synthetic construct
  source 1..17: mol_type = other DNA
tctgctgcaactacggc

SEQ ID NO: 133054 - DNA, 17 bp, synthetic construct
  source 1..17: mol_type = other DNA
ctgctgcaactacggcc

SEQ ID NO: 133055 - DNA, 17 bp, synthetic construct
  source 1..17: mol_type = other DNA
tgctgcaactacggcca

SEQ ID NO: 133056 - DNA, 17 bp, synthetic construct
  source 1..17: mol_type = other DNA
gctgcaactacggccac

SEQ ID NO: 133057 - DNA, 17 bp, synthetic construct
  source 1..17: mol_type = other DNA
ctgcaactacggccact

SEQ ID NO: 133058 - DNA, 17 bp, synthetic construct
  source 1..17: mol_type = other DNA
tgcaactacggccactg

SEQ ID NO: 133059 - DNA, 17 bp, synthetic construct
  source 1..17: mol_type = other DNA
gcaactacggccactgc

SEQ ID NO: 133060 - DNA, 17 bp, synthetic construct
  source 1..17: mol_type = other DNA
caactacggccactgcc

SEQ ID NO: 133061 - DNA, 17 bp, synthetic construct
  source 1..17: mol_type = other DNA
aactacggccactgccc

SEQ ID NO: 133062 - DNA, 17 bp, synthetic construct
  source 1..17: mol_type = other DNA
actacggccactgcccc

SEQ ID NO: 133063 - DNA, 17 bp, synthetic construct
  source 1..17: mol_type = other DNA
ctacggccactgcccca

SEQ ID NO: 133064 - DNA, 17 bp, synthetic construct
  source 1..17: mol_type = other DNA
tacggccactgccccag

SEQ ID NO: 133065 - DNA, 17 bp, synthetic construct
  source 1..17: mol_type = other DNA
acggccactgccccagc

SEQ ID NO: 133066 - DNA, 17 bp, synthetic construct
  source 1..17: mol_type = other DNA
cggccactgccccagca

SEQ ID NO: 133067 - DNA, 17 bp, synthetic construct
  source 1..17: mol_type = other DNA
ggccactgccccagcac

SEQ ID NO: 133068 - DNA, 17 bp, synthetic construct
  source 1..17: mol_type = other DNA
gccactgccccagcacc

SEQ ID NO: 133069 - DNA, 17 bp, synthetic construct
  source 1..17: mol_type = other DNA
ccactgccccagcaccc

SEQ ID NO: 133070 - DNA, 17 bp, synthetic construct
  source 1..17: mol_type = other DNA
cactgccccagcacccc

SEQ ID NO: 133071 - DNA, 17 bp, synthetic construct
  source 1..17: mol_type = other DNA
actgccccagcaccccg

SEQ ID NO: 133072 - DNA, 17 bp, synthetic construct
  source 1..17: mol_type = other DNA
ctgccccagcaccccgg

SEQ ID NO: 133073 - DNA, 17 bp, synthetic construct
  source 1..17: mol_type = other DNA
tgccccagcaccccggc

SEQ ID NO: 133074 - DNA, 17 bp, synthetic construct
  source 1..17: mol_type = other DNA
gccccagcaccccggcc

SEQ ID NO: 133075 - DNA, 17 bp, synthetic construct
  source 1..17: mol_type = other DNA
ccccagcaccccggcca

SEQ ID NO: 133076 - DNA, 17 bp, synthetic construct
  source 1..17: mol_type = other DNA
cccagcaccccggccac

SEQ ID NO: 133077 - DNA, 17 bp, synthetic construct
  source 1..17: mol_type = other DNA
ccagcaccccggccacc

SEQ ID NO: 133078 - DNA, 17 bp, synthetic construct
  source 1..17: mol_type = other DNA
cagcaccccggccacca

SEQ ID NO: 133079 - DNA, 17 bp, synthetic construct
  source 1..17: mol_type = other DNA
agcaccccggccaccag

SEQ ID NO: 133080 - DNA, 17 bp, synthetic construct
  source 1..17: mol_type = other DNA
gcaccccggccaccagc

SEQ ID NO: 133081 - DNA, 17 bp, synthetic construct
  source 1..17: mol_type = other DNA
caccccggccaccagct

SEQ ID NO: 133082 - DNA, 17 bp, synthetic construct
  source 1..17: mol_type = other DNA
accccggccaccagctc

SEQ ID NO: 133083 - DNA, 17 bp, synthetic construct
  source 1..17: mol_type = other DNA
ccccggccaccagctct

SEQ ID NO: 133084 - DNA, 17 bp, synthetic construct
  source 1..17: mol_type = other DNA
cccggccaccagctcta

SEQ ID NO: 133085 - DNA, 17 bp, synthetic construct
  source 1..17: mol_type = other DNA
ccggccaccagctctac

SEQ ID NO: 133086 - DNA, 17 bp, synthetic construct
  source 1..17: mol_type = other DNA
cggccaccagctctacg

SEQ ID NO: 133087 - DNA, 17 bp, synthetic construct
  source 1..17: mol_type = other DNA
ggccaccagctctacgg

SEQ ID NO: 133088 - DNA, 17 bp, synthetic construct
  source 1..17: mol_type = other DNA
gccaccagctctacggc

SEQ ID NO: 133089 - DNA, 17 bp, synthetic construct
  source 1..17: mol_type = other DNA
ccaccagctctacggcc

SEQ ID NO: 133090 - DNA, 17 bp, synthetic construct
  source 1..17: mol_type = other DNA
caccagctctacggcca

SEQ ID NO: 133091 - DNA, 17 bp, synthetic construct
  source 1..17: mol_type = other DNA
accagctctacggccac

SEQ ID NO: 133092 - DNA, 17 bp, synthetic construct
  source 1..17: mol_type = other DNA
ccagctctacggccacg

SEQ ID NO: 133093 - DNA, 17 bp, synthetic construct
  source 1..17: mol_type = other DNA
cagctctacggccacgc

SEQ ID NO: 133094 - DNA, 17 bp, synthetic construct
  source 1..17: mol_type = other DNA
agctctacggccacgcc

SEQ ID NO: 133095 - DNA, 17 bp, synthetic construct
  source 1..17: mol_type = other DNA
gctctacggccacgccc

SEQ ID NO: 133096 - DNA, 17 bp, synthetic construct
  source 1..17: mol_type = other DNA
ctctacggccacgccct

SEQ ID NO: 133097 - DNA, 17 bp, synthetic construct
  source 1..17: mol_type = other DNA
tctacggccacgccctc

SEQ ID NO: 133098 - DNA, 17 bp, synthetic construct
  source 1..17: mol_type = other DNA
ctacggccacgccctcc

SEQ ID NO: 133099 - DNA, 17 bp, synthetic construct
  source 1..17: mol_type = other DNA
tacggccacgccctcct

SEQ ID NO: 133100 - DNA, 17 bp, synthetic construct
  source 1..17: mol_type = other DNA
acggccacgccctcctc

SEQ ID NO: 133101 - DNA, 17 bp, synthetic construct
  source 1..17: mol_type = other DNA
cggccacgccctcctca

SEQ ID NO: 133102 - DNA, 17 bp, synthetic construct
  source 1..17: mol_type = other DNA
ggccacgccctcctcaa

SEQ ID NO: 133103 - DNA, 17 bp, synthetic construct
  source 1..17: mol_type = other DNA
gccacgccctcctcaac

SEQ ID NO: 133104 - DNA, 17 bp, synthetic construct
  source 1..17: mol_type = other DNA
ccacgccctcctcaact

SEQ ID NO: 133105 - DNA, 17 bp, synthetic construct
  source 1..17: mol_type = other DNA
cacgccctcctcaactc

SEQ ID NO: 133106 - DNA, 17 bp, synthetic construct
  source 1..17: mol_type = other DNA
acgccctcctcaactcc

SEQ ID NO: 133107 - DNA, 17 bp, synthetic construct
  source 1..17: mol_type = other DNA
cgccctcctcaactccg

SEQ ID NO: 133108 - DNA, 17 bp, synthetic construct
  source 1..17: mol_type = other DNA
gccctcctcaactccgg

SEQ ID NO: 133109 - DNA, 17 bp, synthetic construct
  source 1..17: mol_type = other DNA
ccctcctcaactccggg

SEQ ID NO: 133110 - DNA, 17 bp, synthetic construct
  source 1..17: mol_type = other DNA
cctcctcaactccgggg

SEQ ID NO: 133111 - DNA, 17 bp, synthetic construct
  source 1..17: mol_type = other DNA
ctcctcaactccgggga

SEQ ID NO: 133112 - DNA, 17 bp, synthetic construct
  source 1..17: mol_type = other DNA
tcctcaactccggggac

SEQ ID NO: 133113 - DNA, 17 bp, synthetic construct
  source 1..17: mol_type = other DNA
cctcaactccggggacg

SEQ ID NO: 133114 - DNA, 17 bp, synthetic construct
  source 1..17: mol_type = other DNA
ctcaactccggggacga

SEQ ID NO: 133115 - DNA, 17 bp, synthetic construct
  source 1..17: mol_type = other DNA
tcaactccggggacgac

SEQ ID NO: 133116 - DNA, 17 bp, synthetic construct
  source 1..17: mol_type = other DNA
caactccggggacgacc

SEQ ID NO: 133117 - DNA, 17 bp, synthetic construct
  source 1..17: mol_type = other DNA
aactccggggacgacct

SEQ ID NO: 133118 - DNA, 17 bp, synthetic construct
  source 1..17: mol_type = other DNA
actccggggacgacctg

SEQ ID NO: 133119 - DNA, 17 bp, synthetic construct
  source 1..17: mol_type = other DNA
ctccggggacgacctgg

SEQ ID NO: 133120 - DNA, 17 bp, synthetic construct
  source 1..17: mol_type = other DNA
tccggggacgacctgga

SEQ ID NO: 133121 - DNA, 17 bp, synthetic construct
  source 1..17: mol_type = other DNA
ccggggacgacctggat

SEQ ID NO: 133122 - DNA, 17 bp, synthetic construct
  source 1..17: mol_type = other DNA
cggggacgacctggatc

SEQ ID NO: 133123 - DNA, 17 bp, synthetic construct
  source 1..17: mol_type = other DNA
ggggacgacctggatcc

SEQ ID NO: 133124 - DNA, 17 bp, synthetic construct
  source 1..17: mol_type = other DNA
gggacgacctggatcct

SEQ ID NO: 133125 - DNA, 17 bp, synthetic construct
  source 1..17: mol_type = other DNA
ggacgacctggatcctc

SEQ ID NO: 133126 - DNA, 17 bp, synthetic construct
  source 1..17: mol_type = other DNA
gacgacctggatcctca

SEQ ID NO: 133127 - DNA, 17 bp, synthetic construct
  source 1..17: mol_type = other DNA
acgacctggatcctcac

SEQ ID NO: 133128 - DNA, 17 bp, synthetic construct
  source 1..17: mol_type = other DNA
cgacctggatcctcaca

SEQ ID NO: 133129 - DNA, 17 bp, synthetic construct
  source 1..17: mol_type = other DNA
gacctggatcctcacaa

SEQ ID NO: 133130 - DNA, 17 bp, synthetic construct
  source 1..17: mol_type = other DNA
acctggatcctcacaaa

SEQ ID NO: 133131 - DNA, 17 bp, synthetic construct
  source 1..17: mol_type = other DNA
cctggatcctcacaaag

SEQ ID NO: 133132 - DNA, 17 bp, synthetic construct
  source 1..17: mol_type = other DNA
ctggatcctcacaaagc

SEQ ID NO: 133133 - DNA, 17 bp, synthetic construct
  source 1..17: mol_type = other DNA
tggatcctcacaaagct

SEQ ID NO: 133134 - DNA, 17 bp, synthetic construct
  source 1..17: mol_type = other DNA
ggatcctcacaaagctg

SEQ ID NO: 133135 - DNA, 17 bp, synthetic construct
  source 1..17: mol_type = other DNA
gatcctcacaaagctga

SEQ ID NO: 133136 - DNA, 17 bp, synthetic construct
  source 1..17: mol_type = other DNA
atcctcacaaagctgac

SEQ ID NO: 133137 - DNA, 17 bp, synthetic construct
  source 1..17: mol_type = other DNA
tcctcacaaagctgacc

SEQ ID NO: 133138 - DNA, 17 bp, synthetic construct
  source 1..17: mol_type = other DNA
cctcacaaagctgacca

SEQ ID NO: 133139 - DNA, 17 bp, synthetic construct
  source 1..17: mol_type = other DNA
ctcacaaagctgaccac

SEQ ID NO: 133140 - DNA, 17 bp, synthetic construct
  source 1..17: mol_type = other DNA
tcacaaagctgaccaca

SEQ ID NO: 133141 - DNA, 17 bp, synthetic construct
  source 1..17: mol_type = other DNA
cacaaagctgaccacaa

SEQ ID NO: 133142 - DNA, 17 bp, synthetic construct
  source 1..17: mol_type = other DNA
acaaagctgaccacaac

SEQ ID NO: 133143 - DNA, 17 bp, synthetic construct
  source 1..17: mol_type = other DNA
caaagctgaccacaaca

SEQ ID NO: 133144 - DNA, 17 bp, synthetic construct
  source 1..17: mol_type = other DNA
aaagctgaccacaacag

SEQ ID NO: 133145 - DNA, 17 bp, synthetic construct
  source 1..17: mol_type = other DNA
aagctgaccacaacagc

SEQ ID NO: 133146 - DNA, 17 bp, synthetic construct
  source 1..17: mol_type = other DNA
agctgaccacaacagcc

SEQ ID NO: 133147 - DNA, 17 bp, synthetic construct
  source 1..17: mol_type = other DNA
gctgaccacaacagcca

SEQ ID NO: 133148 - DNA, 17 bp, synthetic construct
  source 1..17: mol_type = other DNA
ctgaccacaacagccac

SEQ ID NO: 133149 - DNA, 17 bp, synthetic construct
  source 1..17: mol_type = other DNA
tgaccacaacagccact

SEQ ID NO: 133150 - DNA, 17 bp, synthetic construct
  source 1..17: mol_type = other DNA
gaccacaacagccacta

SEQ ID NO: 133151 - DNA, 17 bp, synthetic construct
  source 1..17: mol_type = other DNA
accacaacagccactac

SEQ ID NO: 133152 - DNA, 17 bp, synthetic construct
  source 1..17: mol_type = other DNA
ccacaacagccactacg

SEQ ID NO: 133153 - DNA, 17 bp, synthetic construct
  source 1..17: mol_type = other DNA
cacaacagccactacga

SEQ ID NO: 133154 - DNA, 17 bp, synthetic construct
  source 1..17: mol_type = other DNA
acaacagccactacgac

SEQ ID NO: 133155 - DNA, 17 bp, synthetic construct
  source 1..17: mol_type = other DNA
caacagccactacgact

SEQ ID NO: 133156 - DNA, 17 bp, synthetic construct
  source 1..17: mol_type = other DNA
aacagccactacgactg

SEQ ID NO: 133157 - DNA, 17 bp, synthetic construct
  source 1..17: mol_type = other DNA
acagccactacgactga

SEQ ID NO: 133158 - DNA, 17 bp, synthetic construct
  source 1..17: mol_type = other DNA
cagccactacgactgag

SEQ ID NO: 133159 - DNA, 17 bp, synthetic construct
  source 1..17: mol_type = other DNA
agccactacgactgagt

SEQ ID NO: 133160 - DNA, 17 bp, synthetic construct
  source 1..17: mol_type = other DNA
gccactacgactgagtc

SEQ ID NO: 133161 - DNA, 17 bp, synthetic construct
  source 1..17: mol_type = other DNA
ccactacgactgagtcc

SEQ ID NO: 133162 - DNA, 17 bp, synthetic construct
  source 1..17: mol_type = other DNA
cactacgactgagtcca

SEQ ID NO: 133163 - DNA, 17 bp, synthetic construct
  source 1..17: mol_type = other DNA
actacgactgagtccac

SEQ ID NO: 133164 - DNA, 17 bp, synthetic construct
  source 1..17: mol_type = other DNA
ctacgactgagtccact

SEQ ID NO: 133165 - DNA, 17 bp, synthetic construct
  source 1..17: mol_type = other DNA
tacgactgagtccactg

SEQ ID NO: 133166 - DNA, 17 bp, synthetic construct
  source 1..17: mol_type = other DNA
acgactgagtccactgg

SEQ ID NO: 133167 - DNA, 17 bp, synthetic construct
  source 1..17: mol_type = other DNA
cgactgagtccactgga

SEQ ID NO: 133168 - DNA, 17 bp, synthetic construct
  source 1..17: mol_type = other DNA
gactgagtccactggat

SEQ ID NO: 133169 - DNA, 17 bp, synthetic construct
  source 1..17: mol_type = other DNA
actgagtccactggatc

SEQ ID NO: 133170 - DNA, 17 bp, synthetic construct
  source 1..17: mol_type = other DNA
ctgagtccactggatcc

SEQ ID NO: 133171 - DNA, 17 bp, synthetic construct
  source 1..17: mol_type = other DNA
tgagtccactggatcca

SEQ ID NO: 133172 - DNA, 17 bp, synthetic construct
  source 1..17: mol_type = other DNA
gagtccactggatccac

SEQ ID NO: 133173 - DNA, 17 bp, synthetic construct
  source 1..17: mol_type = other DNA
agtccactggatccacg

SEQ ID NO: 133174 - DNA, 17 bp, synthetic construct
  source 1..17: mol_type = other DNA
gtccactggatccacgg

SEQ ID NO: 133175 - DNA, 17 bp, synthetic construct
  source 1..17: mol_type = other DNA
tccactggatccacggc

SEQ ID NO: 133176 - DNA, 17 bp, synthetic construct
  source 1..17: mol_type = other DNA
ccactggatccacggcc

SEQ ID NO: 133177 - DNA, 17 bp, synthetic construct
  source 1..17: mol_type = other DNA
cactggatccacggcca

SEQ ID NO: 133178 - DNA, 17 bp, synthetic construct
  source 1..17: mol_type = other DNA
actggatccacggccac

SEQ ID NO: 133179 - DNA, 17 bp, synthetic construct
  source 1..17: mol_type = other DNA
ctggatccacggccacc

SEQ ID NO: 133180 - DNA, 17 bp, synthetic construct
  source 1..17: mol_type = other DNA
tggatccacggccaccc

SEQ ID NO: 133181 - DNA, 17 bp, synthetic construct
  source 1..17: mol_type = other DNA
ggatccacggccacccc

SEQ ID NO: 133182 - DNA, 17 bp, synthetic construct
  source 1..17: mol_type = other DNA
gatccacggccaccccg

SEQ ID NO: 133183 - DNA, 17 bp, synthetic construct
  source 1..17: mol_type = other DNA
atccacggccaccccgt

SEQ ID NO: 133184 - DNA, 17 bp, synthetic construct
  source 1..17: mol_type = other DNA
tccacggccaccccgtc

SEQ ID NO: 133185 - DNA, 17 bp, synthetic construct
  source 1..17: mol_type = other DNA
ccacggccaccccgtcc

SEQ ID NO: 133186 - DNA, 17 bp, synthetic construct
  source 1..17: mol_type = other DNA
cacggccaccccgtcct

SEQ ID NO: 133187 - DNA, 17 bp, synthetic construct
  source 1..17: mol_type = other DNA
acggccaccccgtcctc

SEQ ID NO: 133188 - DNA, 17 bp, synthetic construct
  source 1..17: mol_type = other DNA
cggccaccccgtcctcc

SEQ ID NO: 133189 - DNA, 17 bp, synthetic construct
  source 1..17: mol_type = other DNA
ggccaccccgtcctcca

SEQ ID NO: 133190 - DNA, 17 bp, synthetic construct
  source 1..17: mol_type = other DNA
gccaccccgtcctccac

SEQ ID NO: 133191 - DNA, 17 bp, synthetic construct
  source 1..17: mol_type = other DNA
ccaccccgtcctccacc

SEQ ID NO: 133192 - DNA, 17 bp, synthetic construct
  source 1..17: mol_type = other DNA
caccccgtcctccaccc

SEQ ID NO: 133193 - DNA, 17 bp, synthetic construct
  source 1..17: mol_type = other DNA
accccgtcctccacccc

SEQ ID NO: 133194 - DNA, 17 bp, synthetic construct
  source 1..17: mol_type = other DNA
ccccgtcctccacccca

SEQ ID NO: 133195 - DNA, 17 bp, synthetic construct
  source 1..17: mol_type = other DNA
cccgtcctccaccccag

SEQ ID NO: 133196 - DNA, 17 bp, synthetic construct
  source 1..17: mol_type = other DNA
ccgtcctccaccccagg

SEQ ID NO: 133197 - DNA, 17 bp, synthetic construct
  source 1..17: mol_type = other DNA
cgtcctccaccccaggg

SEQ ID NO: 133198 - DNA, 17 bp, synthetic construct
  source 1..17: mol_type = other DNA
gtcctccaccccaggga

SEQ ID NO: 133199 - DNA, 17 bp, synthetic construct
  source 1..17: mol_type = other DNA
tcctccaccccagggac

SEQ ID NO: 133200 - DNA, 17 bp, synthetic construct
  source 1..17: mol_type = other DNA
cctccaccccagggacc

SEQ ID NO: 133201 - DNA, 17 bp, synthetic construct
  source 1..17: mol_type = other DNA
ctccaccccagggacca

SEQ ID NO: 133202 - DNA, 17 bp, synthetic construct
  source 1..17: mol_type = other DNA
tccaccccagggaccac

SEQ ID NO: 133203 - DNA, 17 bp, synthetic construct
  source 1..17: mol_type = other DNA
ccaccccagggaccacc

SEQ ID NO: 133204 - DNA, 17 bp, synthetic construct
  source 1..17: mol_type = other DNA
caccccagggaccacct

SEQ ID NO: 133205 - DNA, 17 bp, synthetic construct
  source 1..17: mol_type = other DNA
accccagggaccacctg

SEQ ID NO: 133206 - DNA, 17 bp, synthetic construct
  source 1..17: mol_type = other DNA
ccccagggaccacctgg

SEQ ID NO: 133207 - DNA, 17 bp, synthetic construct
  source 1..17: mol_type = other DNA
cccagggaccacctgga

SEQ ID NO: 133208 - DNA, 17 bp, synthetic construct
  source 1..17: mol_type = other DNA
ccagggaccacctggat

SEQ ID NO: 133209 - DNA, 17 bp, synthetic construct
  source 1..17: mol_type = other DNA
cagggaccacctggatc

SEQ ID NO: 133210 - DNA, 17 bp, synthetic construct
  source 1..17: mol_type = other DNA
agggaccacctggatcc

SEQ ID NO: 133211 - DNA, 17 bp, synthetic construct
  source 1..17: mol_type = other DNA
gggaccacctggatcct

SEQ ID NO: 133212 - DNA, 17 bp, synthetic construct
  source 1..17: mol_type = other DNA
ggaccacctggatcctc

SEQ ID NO: 133213 - DNA, 17 bp, synthetic construct
  source 1..17: mol_type = other DNA
gaccacctggatcctca

SEQ ID NO: 133214 - DNA, 17 bp, synthetic construct
  source 1..17: mol_type = other DNA
accacctggatcctcac

SEQ ID NO: 133215 - DNA, 17 bp, synthetic construct
  source 1..17: mol_type = other DNA
ccacctggatcctcaca

SEQ ID NO: 133216 - DNA, 17 bp, synthetic construct
  source 1..17: mol_type = other DNA
cacctggatcctcacag

SEQ ID NO: 133217 - DNA, 17 bp, synthetic construct
  source 1..17: mol_type = other DNA
acctggatcctcacaga

SEQ ID NO: 133218 - DNA, 17 bp, synthetic construct
  source 1..17: mol_type = other DNA
cctggatcctcacagag

SEQ ID NO: 133219 - DNA, 17 bp, synthetic construct
  source 1..17: mol_type = other DNA
ctggatcctcacagagc

SEQ ID NO: 133220 - DNA, 17 bp, synthetic construct
  source 1..17: mol_type = other DNA
tggatcctcacagagcc

SEQ ID NO: 133221 - DNA, 17 bp, synthetic construct
  source 1..17: mol_type = other DNA
ggatcctcacagagccg

SEQ ID NO: 133222 - DNA, 17 bp, synthetic construct
  source 1..17: mol_type = other DNA
gatcctcacagagccga

SEQ ID NO: 133223 - DNA, 17 bp, synthetic construct
  source 1..17: mol_type = other DNA
atcctcacagagccgag

SEQ ID NO: 133224 - DNA, 17 bp, synthetic construct
  source 1..17: mol_type = other DNA
tcctcacagagccgagc

SEQ ID NO: 133225 - DNA, 17 bp, synthetic construct
  source 1..17: mol_type = other DNA
cctcacagagccgagca

SEQ ID NO: 133226 - DNA, 17 bp, synthetic construct
  source 1..17: mol_type = other DNA
ctcacagagccgagcac

SEQ ID NO: 133227 - DNA, 17 bp, synthetic construct
  source 1..17: mol_type = other DNA
tcacagagccgagcact

SEQ ID NO: 133228 - DNA, 17 bp, synthetic construct
  source 1..17: mol_type = other DNA
cacagagccgagcacta

SEQ ID NO: 133229 - DNA, 17 bp, synthetic construct
  source 1..17: mol_type = other DNA
acagagccgagcactac

SEQ ID NO: 133230 - DNA, 17 bp, synthetic construct
  source 1..17: mol_type = other DNA
cagagccgagcactaca

SEQ ID NO: 133231 - DNA, 17 bp, synthetic construct
  source 1..17: mol_type = other DNA
agagccgagcactacag

SEQ ID NO: 133232 - DNA, 17 bp, synthetic construct
  source 1..17: mol_type = other DNA
gagccgagcactacagc

SEQ ID NO: 133233 - DNA, 17 bp, synthetic construct
  source 1..17: mol_type = other DNA
agccgagcactacagcc

SEQ ID NO: 133234 - DNA, 17 bp, synthetic construct
  source 1..17: mol_type = other DNA
gccgagcactacagcca

SEQ ID NO: 133235 - DNA, 17 bp, synthetic construct
  source 1..17: mol_type = other DNA
ccgagcactacagccac

SEQ ID NO: 133236 - DNA, 17 bp, synthetic construct
  source 1..17: mol_type = other DNA
cgagcactacagccacc

SEQ ID NO: 133237 - DNA, 17 bp, synthetic construct
  source 1..17: mol_type = other DNA
gagcactacagccaccg

SEQ ID NO: 133238 - DNA, 17 bp, synthetic construct
  source 1..17: mol_type = other DNA
agcactacagccaccgt

SEQ ID NO: 133239 - DNA, 17 bp, synthetic construct
  source 1..17: mol_type = other DNA
gcactacagccaccgtg

SEQ ID NO: 133240 - DNA, 17 bp, synthetic construct
  source 1..17: mol_type = other DNA
cactacagccaccgtga

SEQ ID NO: 133241 - DNA, 17 bp, synthetic construct
  source 1..17: mol_type = other DNA
actacagccaccgtgac

SEQ ID NO: 133242 - DNA, 17 bp, synthetic construct
  source 1..17: mol_type = other DNA
ctacagccaccgtgacg

SEQ ID NO: 133243 - DNA, 17 bp, synthetic construct
  source 1..17: mol_type = other DNA
tacagccaccgtgacgg

SEQ ID NO: 133244 - DNA, 17 bp, synthetic construct
  source 1..17: mol_type = other DNA
acagccaccgtgacggt

SEQ ID NO: 133245 - DNA, 17 bp, synthetic construct
  source 1..17: mol_type = other DNA
cagccaccgtgacggtg

SEQ ID NO: 133246 - DNA, 17 bp, synthetic construct
  source 1..17: mol_type = other DNA
agccaccgtgacggtgc

SEQ ID NO: 133247 - DNA, 17 bp, synthetic construct
  source 1..17: mol_type = other DNA
gccaccgtgacggtgcc

SEQ ID NO: 133248 - DNA, 17 bp, synthetic construct
  source 1..17: mol_type = other DNA
ccaccgtgacggtgccc

SEQ ID NO: 133249 - DNA, 17 bp, synthetic construct
  source 1..17: mol_type = other DNA
caccgtgacggtgccca

SEQ ID NO: 133250 - DNA, 17 bp, synthetic construct
  source 1..17: mol_type = other DNA
accgtgacggtgcccac

SEQ ID NO: 133251 - DNA, 17 bp, synthetic construct
  source 1..17: mol_type = other DNA
ccgtgacggtgcccacc

SEQ ID NO: 133252 - DNA, 17 bp, synthetic construct
  source 1..17: mol_type = other DNA
cgtgacggtgcccaccg

SEQ ID NO: 133253 - DNA, 17 bp, synthetic construct
  source 1..17: mol_type = other DNA
gtgacggtgcccaccgg

SEQ ID NO: 133254 - DNA, 17 bp, synthetic construct
  source 1..17: mol_type = other DNA
tgacggtgcccaccgga

SEQ ID NO: 133255 - DNA, 17 bp, synthetic construct
  source 1..17: mol_type = other DNA
gacggtgcccaccggat

SEQ ID NO: 133256 - DNA, 17 bp, synthetic construct
  source 1..17: mol_type = other DNA
acggtgcccaccggatc

SEQ ID NO: 133257 - DNA, 17 bp, synthetic construct
  source 1..17: mol_type = other DNA
cggtgcccaccggatcc

SEQ ID NO: 133258 - DNA, 17 bp, synthetic construct
  source 1..17: mol_type = other DNA
ggtgcccaccggatcca

SEQ ID NO: 133259 - DNA, 17 bp, synthetic construct
  source 1..17: mol_type = other DNA
gtgcccaccggatccac

SEQ ID NO: 133260 - DNA, 17 bp, synthetic construct
  source 1..17: mol_type = other DNA
tgcccaccggatccacg

SEQ ID NO: 133261 - DNA, 17 bp, synthetic construct
  source 1..17: mol_type = other DNA
gcccaccggatccacgg

SEQ ID NO: 133262 - DNA, 17 bp, synthetic construct
  source 1..17: mol_type = other DNA
cccaccggatccacggc

SEQ ID NO: 133263 - DNA, 17 bp, synthetic construct
  source 1..17: mol_type = other DNA
ccaccggatccacggcc

SEQ ID NO: 133264 - DNA, 17 bp, synthetic construct
  source 1..17: mol_type = other DNA
caccggatccacggcca

SEQ ID NO: 133265 - DNA, 17 bp, synthetic construct
  source 1..17: mol_type = other DNA
accggatccacggccac

SEQ ID NO: 133266 - DNA, 17 bp, synthetic construct
  source 1..17: mol_type = other DNA
ccggatccacggccacc

SEQ ID NO: 133267 - DNA, 17 bp, synthetic construct
  source 1..17: mol_type = other DNA
cggatccacggccaccg

SEQ ID NO: 133268 - DNA, 17 bp, synthetic construct
  source 1..17: mol_type = other DNA
ggatccacggccaccgc

SEQ ID NO: 133269 - DNA, 17 bp, synthetic construct
  source 1..17: mol_type = other DNA
gatccacggccaccgcc

SEQ ID NO: 133270 - DNA, 17 bp, synthetic construct
  source 1..17: mol_type = other DNA
atccacggccaccgcct

SEQ ID NO: 133271 - DNA, 17 bp, synthetic construct
  source 1..17: mol_type = other DNA
tccacggccaccgcctc

SEQ ID NO: 133272 - DNA, 17 bp, synthetic construct
  source 1..17: mol_type = other DNA
ccacggccaccgcctcc

SEQ ID NO: 133273 - DNA, 17 bp, synthetic construct
  source 1..17: mol_type = other DNA
cacggccaccgcctcct

SEQ ID NO: 133274 - DNA, 17 bp, synthetic construct
  source 1..17: mol_type = other DNA
acggccaccgcctcctc

SEQ ID NO: 133275 - DNA, 17 bp, synthetic construct
  source 1..17: mol_type = other DNA
cggccaccgcctcctcc

SEQ ID NO: 133276 - DNA, 17 bp, synthetic construct
  source 1..17: mol_type = other DNA
ggccaccgcctcctcca

SEQ ID NO: 133277 - DNA, 17 bp, synthetic construct
  source 1..17: mol_type = other DNA
gccaccgcctcctccac

SEQ ID NO: 133278 - DNA, 17 bp, synthetic construct
  source 1..17: mol_type = other DNA
ccaccgcctcctccacc

SEQ ID NO: 133279 - DNA, 17 bp, synthetic construct
  source 1..17: mol_type = other DNA
caccgcctcctccaccc

SEQ ID NO: 133280 - DNA, 17 bp, synthetic construct
  source 1..17: mol_type = other DNA
accgcctcctccaccca

SEQ ID NO: 133281 - DNA, 17 bp, synthetic construct
  source 1..17: mol_type = other DNA
ccgcctcctccacccag

SEQ ID NO: 133282 - DNA, 17 bp, synthetic construct
  source 1..17: mol_type = other DNA
cgcctcctccacccagg

SEQ ID NO: 133283 - DNA, 17 bp, synthetic construct
  source 1..17: mol_type = other DNA
gcctcctccacccaggc

SEQ ID NO: 133284 - DNA, 17 bp, synthetic construct
  source 1..17: mol_type = other DNA
cctcctccacccaggca

SEQ ID NO: 133285 - DNA, 17 bp, synthetic construct
  source 1..17: mol_type = other DNA
ctcctccacccaggcaa

SEQ ID NO: 133286 - DNA, 17 bp, synthetic construct
  source 1..17: mol_type = other DNA
tcctccacccaggcaac

SEQ ID NO: 133287 - DNA, 17 bp, synthetic construct
  source 1..17: mol_type = other DNA
cctccacccaggcaact

SEQ ID NO: 133288 - DNA, 17 bp, synthetic construct
  source 1..17: mol_type = other DNA
ctccacccaggcaactg

SEQ ID NO: 133289 - DNA, 17 bp, synthetic construct
  source 1..17: mol_type = other DNA
tccacccaggcaactgc

SEQ ID NO: 133290 - DNA, 17 bp, synthetic construct
  source 1..17: mol_type = other DNA
ccacccaggcaactgct

SEQ ID NO: 133291 - DNA, 17 bp, synthetic construct
  source 1..17: mol_type = other DNA
cacccaggcaactgctg

SEQ ID NO: 133292 - DNA, 17 bp, synthetic construct
  source 1..17: mol_type = other DNA
acccaggcaactgctgg

SEQ ID NO: 133293 - DNA, 17 bp, synthetic construct
  source 1..17: mol_type = other DNA
cccaggcaactgctggc

SEQ ID NO: 133294 - DNA, 17 bp, synthetic construct
  source 1..17: mol_type = other DNA
ccaggcaactgctggca

SEQ ID NO: 133295 - DNA, 17 bp, synthetic construct
  source 1..17: mol_type = other DNA
caggcaactgctggcac

SEQ ID NO: 133296 - DNA, 17 bp, synthetic construct
  source 1..17: mol_type = other DNA
aggcaactgctggcacc

SEQ ID NO: 133297 - DNA, 17 bp, synthetic construct
  source 1..17: mol_type = other DNA
ggcaactgctggcaccc

SEQ ID NO: 133298 - DNA, 17 bp, synthetic construct
  source 1..17: mol_type = other DNA
gcaactgctggcacccc

SEQ ID NO: 133299 - DNA, 17 bp, synthetic construct
  source 1..17: mol_type = other DNA
caactgctggcacccca

SEQ ID NO: 133300 - DNA, 17 bp, synthetic construct
  source 1..17: mol_type = other DNA
aactgctggcaccccac

SEQ ID NO: 133301 - DNA, 17 bp, synthetic construct
  source 1..17: mol_type = other DNA
actgctggcaccccaca

SEQ ID NO: 133302 - DNA, 17 bp, synthetic construct
  source 1..17: mol_type = other DNA
ctgctggcaccccacat

SEQ ID NO: 133303 - DNA, 17 bp, synthetic construct
  source 1..17: mol_type = other DNA
tgctggcaccccacatg

SEQ ID NO: 133304 - DNA, 17 bp, synthetic construct
  source 1..17: mol_type = other DNA
gctggcaccccacatgt

SEQ ID NO: 133305 - DNA, 17 bp, synthetic construct
  source 1..17: mol_type = other DNA
ctggcaccccacatgtg

SEQ ID NO: 133306 - DNA, 17 bp, synthetic construct
  source 1..17: mol_type = other DNA
tggcaccccacatgtga

SEQ ID NO: 133307 - DNA, 17 bp, synthetic construct
  source 1..17: mol_type = other DNA
ggcaccccacatgtgag

SEQ ID NO: 133308 - DNA, 17 bp, synthetic construct
  source 1..17: mol_type = other DNA
gcaccccacatgtgagc

SEQ ID NO: 133309 - DNA, 17 bp, synthetic construct
  source 1..17: mol_type = other DNA
caccccacatgtgagca

SEQ ID NO: 133310 - DNA, 17 bp, synthetic construct
  source 1..17: mol_type = other DNA
accccacatgtgagcac

SEQ ID NO: 133311 - DNA, 17 bp, synthetic construct
  source 1..17: mol_type = other DNA
ccccacatgtgagcacc

SEQ ID NO: 133312 - DNA, 17 bp, synthetic construct
  source 1..17: mol_type = other DNA
cccacatgtgagcacca

SEQ ID NO: 133313 - DNA, 17 bp, synthetic construct
  source 1..17: mol_type = other DNA
ccacatgtgagcaccac

SEQ ID NO: 133314 - DNA, 17 bp, synthetic construct
  source 1..17: mol_type = other DNA
cacatgtgagcaccacg

SEQ ID NO: 133315 - DNA, 17 bp, synthetic construct
  source 1..17: mol_type = other DNA
acatgtgagcaccacgg

SEQ ID NO: 133316 - DNA, 17 bp, synthetic construct
  source 1..17: mol_type = other DNA
catgtgagcaccacggc

SEQ ID NO: 133317 - DNA, 17 bp, synthetic construct
  source 1..17: mol_type = other DNA
atgtgagcaccacggcc

SEQ ID NO: 133318 - DNA, 17 bp, synthetic construct
  source 1..17: mol_type = other DNA
tgtgagcaccacggcca

SEQ ID NO: 133319 - DNA, 17 bp, synthetic construct
  source 1..17: mol_type = other DNA
gtgagcaccacggccac

SEQ ID NO: 133320 - DNA, 17 bp, synthetic construct
  source 1..17: mol_type = other DNA
tgagcaccacggccacg

SEQ ID NO: 133321 - DNA, 17 bp, synthetic construct
  source 1..17: mol_type = other DNA
gagcaccacggccacga

SEQ ID NO: 133322 - DNA, 17 bp, synthetic construct
  source 1..17: mol_type = other DNA
agcaccacggccacgac

SEQ ID NO: 133323 - DNA, 17 bp, synthetic construct
  source 1..17: mol_type = other DNA
gcaccacggccacgaca

SEQ ID NO: 133324 - DNA, 17 bp, synthetic construct
  source 1..17: mol_type = other DNA
caccacggccacgacac

SEQ ID NO: 133325 - DNA, 17 bp, synthetic construct
  source 1..17: mol_type = other DNA
accacggccacgacacc

SEQ ID NO: 133326 - DNA, 17 bp, synthetic construct
  source 1..17: mol_type = other DNA
ccacggccacgacaccc

SEQ ID NO: 133327 - DNA, 17 bp, synthetic construct
  source 1..17: mol_type = other DNA
cacggccacgacaccca

SEQ ID NO: 133328 - DNA, 17 bp, synthetic construct
  source 1..17: mol_type = other DNA
acggccacgacacccac

SEQ ID NO: 133329 - DNA, 17 bp, synthetic construct
  source 1..17: mol_type = other DNA
cggccacgacacccaca

SEQ ID NO: 133330 - DNA, 17 bp, synthetic construct
  source 1..17: mol_type = other DNA
ggccacgacacccacag

SEQ ID NO: 133331 - DNA, 17 bp, synthetic construct
  source 1..17: mol_type = other DNA
gccacgacacccacagt

SEQ ID NO: 133332 - DNA, 17 bp, synthetic construct
  source 1..17: mol_type = other DNA
ccacgacacccacagtc

SEQ ID NO: 133333 - DNA, 17 bp, synthetic construct
  source 1..17: mol_type = other DNA
cacgacacccacagtca

SEQ ID NO: 133334 - DNA, 17 bp, synthetic construct
  source 1..17: mol_type = other DNA
acgacacccacagtcac

SEQ ID NO: 133335 - DNA, 17 bp, synthetic construct
  source 1..17: mol_type = other DNA
cgacacccacagtcacc

SEQ ID NO: 133336 - DNA, 17 bp, synthetic construct
  source 1..17: mol_type = other DNA
gacacccacagtcacca

SEQ ID NO: 133337 - DNA, 17 bp, synthetic construct
  source 1..17: mol_type = other DNA
acacccacagtcaccag

SEQ ID NO: 133338 - DNA, 17 bp, synthetic construct
  source 1..17: mol_type = other DNA
cacccacagtcaccagc

SEQ ID NO: 133339 - DNA, 17 bp, synthetic construct
  source 1..17: mol_type = other DNA
acccacagtcaccagct

SEQ ID NO: 133340 - DNA, 17 bp, synthetic construct
  source 1..17: mol_type = other DNA
cccacagtcaccagctc

SEQ ID NO: 133341 - DNA, 17 bp, synthetic construct
  source 1..17: mol_type = other DNA
ccacagtcaccagctcc

SEQ ID NO: 133342 - DNA, 17 bp, synthetic construct
  source 1..17: mol_type = other DNA
cacagtcaccagctcca

SEQ ID NO: 133343 - DNA, 17 bp, synthetic construct
  source 1..17: mol_type = other DNA
acagtcaccagctccaa

SEQ ID NO: 133344 - DNA, 17 bp, synthetic construct
  source 1..17: mol_type = other DNA
cagtcaccagctccaaa

SEQ ID NO: 133345 - DNA, 17 bp, synthetic construct
  source 1..17: mol_type = other DNA
agtcaccagctccaaag

SEQ ID NO: 133346 - DNA, 17 bp, synthetic construct
  source 1..17: mol_type = other DNA
gtcaccagctccaaagc

SEQ ID NO: 133347 - DNA, 17 bp, synthetic construct
  source 1..17: mol_type = other DNA
tcaccagctccaaagcc

SEQ ID NO: 133348 - DNA, 17 bp, synthetic construct
  source 1..17: mol_type = other DNA
caccagctccaaagcca

SEQ ID NO: 133349 - DNA, 17 bp, synthetic construct
  source 1..17: mol_type = other DNA
accagctccaaagccac

SEQ ID NO: 133350 - DNA, 17 bp, synthetic construct
  source 1..17: mol_type = other DNA
ccagctccaaagccact

SEQ ID NO: 133351 - DNA, 17 bp, synthetic construct
  source 1..17: mol_type = other DNA
cagctccaaagccactc

SEQ ID NO: 133352 - DNA, 17 bp, synthetic construct
  source 1..17: mol_type = other DNA
agctccaaagccactcc

SEQ ID NO: 133353 - DNA, 17 bp, synthetic construct
  source 1..17: mol_type = other DNA
gctccaaagccactccc

SEQ ID NO: 133354 - DNA, 17 bp, synthetic construct
  source 1..17: mol_type = other DNA
ctccaaagccactccct

SEQ ID NO: 133355 - DNA, 17 bp, synthetic construct
  source 1..17: mol_type = other DNA
tccaaagccactccctt

SEQ ID NO: 133356 - DNA, 17 bp, synthetic construct
  source 1..17: mol_type = other DNA
ccaaagccactcccttc

SEQ ID NO: 133357 - DNA, 17 bp, synthetic construct
  source 1..17: mol_type = other DNA
caaagccactcccttct

SEQ ID NO: 133358 - DNA, 17 bp, synthetic construct
  source 1..17: mol_type = other DNA
aaagccactcccttctc

SEQ ID NO: 133359 - DNA, 17 bp, synthetic construct
  source 1..17: mol_type = other DNA
aagccactcccttctcc

SEQ ID NO: 133360 - DNA, 17 bp, synthetic construct
  source 1..17: mol_type = other DNA
agccactcccttctcca

SEQ ID NO: 133361 - DNA, 17 bp, synthetic construct
  source 1..17: mol_type = other DNA
gccactcccttctccag

SEQ ID NO: 133362 - DNA, 17 bp, synthetic construct
  source 1..17: mol_type = other DNA
ccactcccttctccagt

SEQ ID NO: 133363 - DNA, 17 bp, synthetic construct
  source 1..17: mol_type = other DNA
cactcccttctccagtc

SEQ ID NO: 133364 - DNA, 17 bp, synthetic construct
  source 1..17: mol_type = other DNA
actcccttctccagtcc

SEQ ID NO: 133365 - DNA, 17 bp, synthetic construct
  source 1..17: mol_type = other DNA
ctcccttctccagtcca

SEQ ID NO: 133366 - DNA, 17 bp, synthetic construct
  source 1..17: mol_type = other DNA
tcccttctccagtccag

SEQ ID NO: 133367 - DNA, 17 bp, synthetic construct
  source 1..17: mol_type = other DNA
cccttctccagtccagg

SEQ ID NO: 133368 - DNA, 17 bp, synthetic construct
  source 1..17: mol_type = other DNA
ccttctccagtccaggg

SEQ ID NO: 133369 - DNA, 17 bp, synthetic construct
  source 1..17: mol_type = other DNA
cttctccagtccaggga

SEQ ID NO: 133370 - DNA, 17 bp, synthetic construct
  source 1..17: mol_type = other DNA
ttctccagtccagggac

SEQ ID NO: 133371 - DNA, 17 bp, synthetic construct
  source 1..17: mol_type = other DNA
tctccagtccagggact

SEQ ID NO: 133372 - DNA, 17 bp, synthetic construct
  source 1..17: mol_type = other DNA
ctccagtccagggactg

SEQ ID NO: 133373 - DNA, 17 bp, synthetic construct
  source 1..17: mol_type = other DNA
tccagtccagggactgc

SEQ ID NO: 133374 - DNA, 17 bp, synthetic construct
  source 1..17: mol_type = other DNA
ccagtccagggactgca

SEQ ID NO: 133375 - DNA, 17 bp, synthetic construct
  source 1..17: mol_type = other DNA
cagtccagggactgcaa

SEQ ID NO: 133376 - DNA, 17 bp, synthetic construct
  source 1..17: mol_type = other DNA
agtccagggactgcaac

SEQ ID NO: 133377 - DNA, 17 bp, synthetic construct
  source 1..17: mol_type = other DNA
gtccagggactgcaacc

SEQ ID NO: 133378 - DNA, 17 bp, synthetic construct
  source 1..17: mol_type = other DNA
tccagggactgcaaccg

SEQ ID NO: 133379 - DNA, 17 bp, synthetic construct
  source 1..17: mol_type = other DNA
ccagggactgcaaccgc

SEQ ID NO: 133380 - DNA, 17 bp, synthetic construct
  source 1..17: mol_type = other DNA
cagggactgcaaccgcc

SEQ ID NO: 133381 - DNA, 17 bp, synthetic construct
  source 1..17: mol_type = other DNA
agggactgcaaccgccc

SEQ ID NO: 133382 - DNA, 17 bp, synthetic construct
  source 1..17: mol_type = other DNA
gggactgcaaccgccct

SEQ ID NO: 133383 - DNA, 17 bp, synthetic construct
  source 1..17: mol_type = other DNA
ggactgcaaccgccctt

SEQ ID NO: 133384 - DNA, 17 bp, synthetic construct
  source 1..17: mol_type = other DNA
gactgcaaccgcccttc

SEQ ID NO: 133385 - DNA, 17 bp, synthetic construct
  source 1..17: mol_type = other DNA
actgcaaccgcccttcc

SEQ ID NO: 133386 - DNA, 17 bp, synthetic construct
  source 1..17: mol_type = other DNA
ctgcaaccgcccttcca

SEQ ID NO: 133387 - DNA, 17 bp, synthetic construct
  source 1..17: mol_type = other DNA
tgcaaccgcccttccag

SEQ ID NO: 133388 - DNA, 17 bp, synthetic construct
  source 1..17: mol_type = other DNA
gcaaccgcccttccagc

SEQ ID NO: 133389 - DNA, 17 bp, synthetic construct
  source 1..17: mol_type = other DNA
caaccgcccttccagca

SEQ ID NO: 133390 - DNA, 17 bp, synthetic construct
  source 1..17: mol_type = other DNA
aaccgcccttccagcac

SEQ ID NO: 133391 - DNA, 17 bp, synthetic construct
  source 1..17: mol_type = other DNA
accgcccttccagcact

SEQ ID NO: 133392 - DNA, 17 bp, synthetic construct
  source 1..17: mol_type = other DNA
ccgcccttccagcactg

SEQ ID NO: 133393 - DNA, 17 bp, synthetic construct
  source 1..17: mol_type = other DNA
cgcccttccagcactga

SEQ ID NO: 133394 - DNA, 17 bp, synthetic construct
  source 1..17: mol_type = other DNA
gcccttccagcactgag

SEQ ID NO: 133395 - DNA, 17 bp, synthetic construct
  source 1..17: mol_type = other DNA
cccttccagcactgaga

SEQ ID NO: 133396 - DNA, 17 bp, synthetic construct
  source 1..17: mol_type = other DNA
ccttccagcactgagaa

SEQ ID NO: 133397 - DNA, 17 bp, synthetic construct
  source 1..17: mol_type = other DNA
cttccagcactgagaag

SEQ ID NO: 133398 - DNA, 17 bp, synthetic construct
  source 1..17: mol_type = other DNA
ttccagcactgagaagc

SEQ ID NO: 133399 - DNA, 17 bp, synthetic construct
  source 1..17: mol_type = other DNA
tccagcactgagaagca

SEQ ID NO: 133400 - DNA, 17 bp, synthetic construct
  source 1..17: mol_type = other DNA
ccagcactgagaagcac

SEQ ID NO: 133401 - DNA, 17 bp, synthetic construct
  source 1..17: mol_type = other DNA
cagcactgagaagcaca

SEQ ID NO: 133402 - DNA, 17 bp, synthetic construct
  source 1..17: mol_type = other DNA
agcactgagaagcacag

SEQ ID NO: 133403 - DNA, 17 bp, synthetic construct
  source 1..17: mol_type = other DNA
gcactgagaagcacagc

SEQ ID NO: 133404 - DNA, 17 bp, synthetic construct
  source 1..17: mol_type = other DNA
cactgagaagcacagcc

SEQ ID NO: 133405 - DNA, 17 bp, synthetic construct
  source 1..17: mol_type = other DNA
actgagaagcacagcca

SEQ ID NO: 133406 - DNA, 17 bp, synthetic construct
  source 1..17: mol_type = other DNA
ctgagaagcacagccac

SEQ ID NO: 133407 - DNA, 17 bp, synthetic construct
  source 1..17: mol_type = other DNA
tgagaagcacagccacc

SEQ ID NO: 133408 - DNA, 17 bp, synthetic construct
  source 1..17: mol_type = other DNA
gagaagcacagccacca

SEQ ID NO: 133409 - DNA, 17 bp, synthetic construct
  source 1..17: mol_type = other DNA
agaagcacagccaccac

SEQ ID NO: 133410 - DNA, 17 bp, synthetic construct
  source 1..17: mol_type = other DNA
gaagcacagccaccaca

SEQ ID NO: 133411 - DNA, 17 bp, synthetic construct
  source 1..17: mol_type = other DNA
aagcacagccaccacac

SEQ ID NO: 133412 - DNA, 17 bp, synthetic construct
  source 1..17: mol_type = other DNA
agcacagccaccacacc

SEQ ID NO: 133413 - DNA, 17 bp, synthetic construct
  source 1..17: mol_type = other DNA
gcacagccaccacaccc

SEQ ID NO: 133414 - DNA, 17 bp, synthetic construct
  source 1..17: mol_type = other DNA
cacagccaccacaccca

SEQ ID NO: 133415 - DNA, 17 bp, synthetic construct
  source 1..17: mol_type = other DNA
acagccaccacacccac

SEQ ID NO: 133416 - DNA, 17 bp, synthetic construct
  source 1..17: mol_type = other DNA
cagccaccacacccaca

SEQ ID NO: 133417 - DNA, 17 bp, synthetic construct
  source 1..17: mol_type = other DNA
agccaccacacccacag

SEQ ID NO: 133418 - DNA, 17 bp, synthetic construct
  source 1..17: mol_type = other DNA
gccaccacacccacagc

SEQ ID NO: 133419 - DNA, 17 bp, synthetic construct
  source 1..17: mol_type = other DNA
ccaccacacccacagct

SEQ ID NO: 133420 - DNA, 17 bp, synthetic construct
  source 1..17: mol_type = other DNA
caccacacccacagcta

SEQ ID NO: 133421 - DNA, 17 bp, synthetic construct
  source 1..17: mol_type = other DNA
accacacccacagctac

SEQ ID NO: 133422 - DNA, 17 bp, synthetic construct
  source 1..17: mol_type = other DNA
ccacacccacagctacc

SEQ ID NO: 133423 - DNA, 17 bp, synthetic construct
  source 1..17: mol_type = other DNA
cacacccacagctacca

SEQ ID NO: 133424 - DNA, 17 bp, synthetic construct
  source 1..17: mol_type = other DNA
acacccacagctaccag

SEQ ID NO: 133425 - DNA, 17 bp, synthetic construct
  source 1..17: mol_type = other DNA
cacccacagctaccagc

SEQ ID NO: 133426 - DNA, 17 bp, synthetic construct
  source 1..17: mol_type = other DNA
acccacagctaccagct

SEQ ID NO: 133427 - DNA, 17 bp, synthetic construct
  source 1..17: mol_type = other DNA
cccacagctaccagctt

SEQ ID NO: 133428 - DNA, 17 bp, synthetic construct
  source 1..17: mol_type = other DNA
ccacagctaccagcttt

SEQ ID NO: 133429 - DNA, 17 bp, synthetic construct
  source 1..17: mol_type = other DNA
cacagctaccagcttta

SEQ ID NO: 133430 - DNA, 17 bp, synthetic construct
  source 1..17: mol_type = other DNA
acagctaccagctttac

SEQ ID NO: 133431 - DNA, 17 bp, synthetic construct
  source 1..17: mol_type = other DNA
cagctaccagctttaca

SEQ ID NO: 133432 - DNA, 17 bp, synthetic construct
  source 1..17: mol_type = other DNA
agctaccagctttacag

SEQ ID NO: 133433 - DNA, 17 bp, synthetic construct
  source 1..17: mol_type = other DNA
gctaccagctttacagc

SEQ ID NO: 133434 - DNA, 17 bp, synthetic construct
  source 1..17: mol_type = other DNA
ctaccagctttacagcc

SEQ ID NO: 133435 - DNA, 17 bp, synthetic construct
  source 1..17: mol_type = other DNA
taccagctttacagcca

SEQ ID NO: 133436 - DNA, 17 bp, synthetic construct
  source 1..17: mol_type = other DNA
accagctttacagccat

SEQ ID NO: 133437 - DNA, 17 bp, synthetic construct
  source 1..17: mol_type = other DNA
ccagctttacagccatc

SEQ ID NO: 133438 - DNA, 17 bp, synthetic construct
  source 1..17: mol_type = other DNA
cagctttacagccatcc

SEQ ID NO: 133439 - DNA, 17 bp, synthetic construct
  source 1..17: mol_type = other DNA
agctttacagccatccc

SEQ ID NO: 133440 - DNA, 17 bp, synthetic construct
  source 1..17: mol_type = other DNA
gctttacagccatcccc

SEQ ID NO: 133441 - DNA, 17 bp, synthetic construct
  source 1..17: mol_type = other DNA
ctttacagccatcccct

SEQ ID NO: 133442 - DNA, 17 bp, synthetic construct
  source 1..17: mol_type = other DNA
tttacagccatcccctc

SEQ ID NO: 133443 - DNA, 17 bp, synthetic construct
  source 1..17: mol_type = other DNA
ttacagccatcccctcc

SEQ ID NO: 133444 - DNA, 17 bp, synthetic construct
  source 1..17: mol_type = other DNA
tacagccatcccctcct

SEQ ID NO: 133445 - DNA, 17 bp, synthetic construct
  source 1..17: mol_type = other DNA
acagccatcccctcctc

SEQ ID NO: 133446 - DNA, 17 bp, synthetic construct
  source 1..17: mol_type = other DNA
cagccatcccctcctcc

SEQ ID NO: 133447 - DNA, 17 bp, synthetic construct
  source 1..17: mol_type = other DNA
agccatcccctcctcct

SEQ ID NO: 133448 - DNA, 17 bp, synthetic construct
  source 1..17: mol_type = other DNA
gccatcccctcctcctc

SEQ ID NO: 133449 - DNA, 17 bp, synthetic construct
  source 1..17: mol_type = other DNA
ccatcccctcctcctcc

SEQ ID NO: 133450 - DNA, 17 bp, synthetic construct
  source 1..17: mol_type = other DNA
catcccctcctcctccc

SEQ ID NO: 133451 - DNA, 17 bp, synthetic construct
  source 1..17: mol_type = other DNA
atcccctcctcctccct

SEQ ID NO: 133452 - DNA, 17 bp, synthetic construct
  source 1..17: mol_type = other DNA
tcccctcctcctccctg

SEQ ID NO: 133453 - DNA, 17 bp, synthetic construct
  source 1..17: mol_type = other DNA
cccctcctcctccctgg

SEQ ID NO: 133454 - DNA, 17 bp, synthetic construct
  source 1..17: mol_type = other DNA
ccctcctcctccctggg

SEQ ID NO: 133455 - DNA, 17 bp, synthetic construct
  source 1..17: mol_type = other DNA
cctcctcctccctgggc

SEQ ID NO: 133456 - DNA, 17 bp, synthetic construct
  source 1..17: mol_type = other DNA
ctcctcctccctgggca

SEQ ID NO: 133457 - DNA, 17 bp, synthetic construct
  source 1..17: mol_type = other DNA
tcctcctccctgggcac

SEQ ID NO: 133458 - DNA, 17 bp, synthetic construct
  source 1..17: mol_type = other DNA
cctcctccctgggcacc

SEQ ID NO: 133459 - DNA, 17 bp, synthetic construct
  source 1..17: mol_type = other DNA
ctcctccctgggcacca

SEQ ID NO: 133460 - DNA, 17 bp, synthetic construct
  source 1..17: mol_type = other DNA
tcctccctgggcaccac

SEQ ID NO: 133461 - DNA, 17 bp, synthetic construct
  source 1..17: mol_type = other DNA
cctccctgggcaccacc

SEQ ID NO: 133462 - DNA, 17 bp, synthetic construct
  source 1..17: mol_type = other DNA
ctccctgggcaccacct

SEQ ID NO: 133463 - DNA, 17 bp, synthetic construct
  source 1..17: mol_type = other DNA
tccctgggcaccacctg

SEQ ID NO: 133464 - DNA, 17 bp, synthetic construct
  source 1..17: mol_type = other DNA
ccctgggcaccacctgg

SEQ ID NO: 133465 - DNA, 17 bp, synthetic construct
  source 1..17: mol_type = other DNA
cctgggcaccacctgga

SEQ ID NO: 133466 - DNA, 17 bp, synthetic construct
  source 1..17: mol_type = other DNA
ctgggcaccacctggac

SEQ ID NO: 133467 - DNA, 17 bp, synthetic construct
  source 1..17: mol_type = other DNA
tgggcaccacctggacc

SEQ ID NO: 133468 - DNA, 17 bp, synthetic construct
  source 1..17: mol_type = other DNA
gggcaccacctggaccc

SEQ ID NO: 133469 - DNA, 17 bp, synthetic construct
  source 1..17: mol_type = other DNA
ggcaccacctggacccg

SEQ ID NO: 133470 - DNA, 17 bp, synthetic construct
  source 1..17: mol_type = other DNA
gcaccacctggacccgc

SEQ ID NO: 133471 - DNA, 17 bp, synthetic construct
  source 1..17: mol_type = other DNA
caccacctggacccgcc

SEQ ID NO: 133472 - DNA, 17 bp, synthetic construct
  source 1..17: mol_type = other DNA
accacctggacccgcct

SEQ ID NO: 133473 - DNA, 17 bp, synthetic construct
  source 1..17: mol_type = other DNA
ccacctggacccgccta

SEQ ID NO: 133474 - DNA, 17 bp, synthetic construct
  source 1..17: mol_type = other DNA
cacctggacccgcctat

SEQ ID NO: 133475 - DNA, 17 bp, synthetic construct
  source 1..17: mol_type = other DNA
acctggacccgcctatc

SEQ ID NO: 133476 - DNA, 17 bp, synthetic construct
  source 1..17: mol_type = other DNA
cctggacccgcctatca

SEQ ID NO: 133477 - DNA, 17 bp, synthetic construct
  source 1..17: mol_type = other DNA
ctggacccgcctatcac

SEQ ID NO: 133478 - DNA, 17 bp, synthetic construct
  source 1..17: mol_type = other DNA
tggacccgcctatcaca

SEQ ID NO: 133479 - DNA, 17 bp, synthetic construct
  source 1..17: mol_type = other DNA
ggacccgcctatcacag

SEQ ID NO: 133480 - DNA, 17 bp, synthetic construct
  source 1..17: mol_type = other DNA
gacccgcctatcacaga

SEQ ID NO: 133481 - DNA, 17 bp, synthetic construct
  source 1..17: mol_type = other DNA
acccgcctatcacagac

SEQ ID NO: 133482 - DNA, 17 bp, synthetic construct
  source 1..17: mol_type = other DNA
cccgcctatcacagacc

SEQ ID NO: 133483 - DNA, 17 bp, synthetic construct
  source 1..17: mol_type = other DNA
ccgcctatcacagacca

SEQ ID NO: 133484 - DNA, 17 bp, synthetic construct
  source 1..17: mol_type = other DNA
cgcctatcacagaccac

SEQ ID NO: 133485 - DNA, 17 bp, synthetic construct
  source 1..17: mol_type = other DNA
gcctatcacagaccacc

SEQ ID NO: 133486 - DNA, 17 bp, synthetic construct
  source 1..17: mol_type = other DNA
cctatcacagaccacca

SEQ ID NO: 133487 - DNA, 17 bp, synthetic construct
  source 1..17: mol_type = other DNA
ctatcacagaccaccac

SEQ ID NO: 133488 - DNA, 17 bp, synthetic construct
  source 1..17: mol_type = other DNA
tatcacagaccaccaca

SEQ ID NO: 133489 - DNA, 17 bp, synthetic construct
  source 1..17: mol_type = other DNA
atcacagaccaccacac

SEQ ID NO: 133490 - DNA, 17 bp, synthetic construct
  source 1..17: mol_type = other DNA
tcacagaccaccacacc

SEQ ID NO: 133491 - DNA, 17 bp, synthetic construct
  source 1..17: mol_type = other DNA
cacagaccaccacaccc

SEQ ID NO: 133492 - DNA, 17 bp, synthetic construct
  source 1..17: mol_type = other DNA
acagaccaccacaccca

SEQ ID NO: 133493 - DNA, 17 bp, synthetic construct
  source 1..17: mol_type = other DNA
cagaccaccacacccac

SEQ ID NO: 133494 - DNA, 17 bp, synthetic construct
  source 1..17: mol_type = other DNA
agaccaccacacccacg

SEQ ID NO: 133495 - DNA, 17 bp, synthetic construct
  source 1..17: mol_type = other DNA
gaccaccacacccacgg

SEQ ID NO: 133496 - DNA, 17 bp, synthetic construct
  source 1..17: mol_type = other DNA
accaccacacccacggc

SEQ ID NO: 133497 - DNA, 17 bp, synthetic construct
  source 1..17: mol_type = other DNA
ccaccacacccacggcc

SEQ ID NO: 133498 - DNA, 17 bp, synthetic construct
  source 1..17: mol_type = other DNA
caccacacccacggcca

SEQ ID NO: 133499 - DNA, 17 bp, synthetic construct
  source 1..17: mol_type = other DNA
accacacccacggccac

SEQ ID NO: 133500 - DNA, 17 bp, synthetic construct
  source 1..17: mol_type = other DNA
ccacacccacggccacc

SEQ ID NO: 133501 - DNA, 17 bp, synthetic construct
  source 1..17: mol_type = other DNA
cacacccacggccacca

SEQ ID NO: 133502 - DNA, 17 bp, synthetic construct
  source 1..17: mol_type = other DNA
acacccacggccaccat

SEQ ID NO: 133503 - DNA, 17 bp, synthetic construct
  source 1..17: mol_type = other DNA
cacccacggccaccatg

SEQ ID NO: 133504 - DNA, 17 bp, synthetic construct
  source 1..17: mol_type = other DNA
acccacggccaccatgt

SEQ ID NO: 133505 - DNA, 17 bp, synthetic construct
  source 1..17: mol_type = other DNA
cccacggccaccatgtc

SEQ ID NO: 133506 - DNA, 17 bp, synthetic construct
  source 1..17: mol_type = other DNA
ccacggccaccatgtcc

SEQ ID NO: 133507 - DNA, 17 bp, synthetic construct
  source 1..17: mol_type = other DNA
cacggccaccatgtcca

SEQ ID NO: 133508 - DNA, 17 bp, synthetic construct
  source 1..17: mol_type = other DNA
acggccaccatgtccac

SEQ ID NO: 133509 - DNA, 17 bp, synthetic construct
  source 1..17: mol_type = other DNA
cggccaccatgtccaca

SEQ ID NO: 133510 - DNA, 17 bp, synthetic construct
  source 1..17: mol_type = other DNA
ggccaccatgtccacag

SEQ ID NO: 133511 - DNA, 17 bp, synthetic construct
  source 1..17: mol_type = other DNA
gccaccatgtccacagc

SEQ ID NO: 133512 - DNA, 17 bp, synthetic construct
  source 1..17: mol_type = other DNA
ccaccatgtccacagcc

SEQ ID NO: 133513 - DNA, 17 bp, synthetic construct
  source 1..17: mol_type = other DNA
caccatgtccacagcca

SEQ ID NO: 133514 - DNA, 17 bp, synthetic construct
  source 1..17: mol_type = other DNA
accatgtccacagccac

SEQ ID NO: 133515 - DNA, 17 bp, synthetic construct
  source 1..17: mol_type = other DNA
ccatgtccacagccaca

SEQ ID NO: 133516 - DNA, 17 bp, synthetic construct
  source 1..17: mol_type = other DNA
catgtccacagccacac

SEQ ID NO: 133517 - DNA, 17 bp, synthetic construct
  source 1..17: mol_type = other DNA
atgtccacagccacacc

SEQ ID NO: 133518 - DNA, 17 bp, synthetic construct
  source 1..17: mol_type = other DNA
tgtccacagccacaccc

SEQ ID NO: 133519 - DNA, 17 bp, synthetic construct
  source 1..17: mol_type = other DNA
gtccacagccacaccct

SEQ ID NO: 133520 - DNA, 17 bp, synthetic construct
  source 1..17: mol_type = other DNA
tccacagccacaccctc

SEQ ID NO: 133521 - DNA, 17 bp, synthetic construct
  source 1..17: mol_type = other DNA
ccacagccacaccctcc

SEQ ID NO: 133522 - DNA, 17 bp, synthetic construct
  source 1..17: mol_type = other DNA
cacagccacaccctcct

SEQ ID NO: 133523 - DNA, 17 bp, synthetic construct
  source 1..17: mol_type = other DNA
acagccacaccctcctc

SEQ ID NO: 133524 - DNA, 17 bp, synthetic construct
  source 1..17: mol_type = other DNA
cagccacaccctcctcc

SEQ ID NO: 133525 - DNA, 17 bp, synthetic construct
  source 1..17: mol_type = other DNA
agccacaccctcctcca

SEQ ID NO: 133526 - DNA, 17 bp, synthetic construct
  source 1..17: mol_type = other DNA
gccacaccctcctccac

SEQ ID NO: 133527 - DNA, 17 bp, synthetic construct
  source 1..17: mol_type = other DNA
ccacaccctcctccact

SEQ ID NO: 133528 - DNA, 17 bp, synthetic construct
  source 1..17: mol_type = other DNA
cacaccctcctccactc

SEQ ID NO: 133529 - DNA, 17 bp, synthetic construct
  source 1..17: mol_type = other DNA
acaccctcctccactcc

SEQ ID NO: 133530 - DNA, 17 bp, synthetic construct
  source 1..17: mol_type = other DNA
caccctcctccactcca

SEQ ID NO: 133531 - DNA, 17 bp, synthetic construct
  source 1..17: mol_type = other DNA
accctcctccactccag

SEQ ID NO: 133532 - DNA, 17 bp, synthetic construct
  source 1..17: mol_type = other DNA
ccctcctccactccaga

SEQ ID NO: 133533 - DNA, 17 bp, synthetic construct
  source 1..17: mol_type = other DNA
cctcctccactccagag

SEQ ID NO: 133534 - DNA, 17 bp, synthetic construct
  source 1..17: mol_type = other DNA
ctcctccactccagaga

SEQ ID NO: 133535 - DNA, 17 bp, synthetic construct
  source 1..17: mol_type = other DNA
tcctccactccagagac

SEQ ID NO: 133536 - DNA, 17 bp, synthetic construct
  source 1..17: mol_type = other DNA
cctccactccagagact

SEQ ID NO: 133537 - DNA, 17 bp, synthetic construct
  source 1..17: mol_type = other DNA
ctccactccagagactg

SEQ ID NO: 133538 - DNA, 17 bp, synthetic construct
  source 1..17: mol_type = other DNA
tccactccagagactgc

SEQ ID NO: 133539 - DNA, 17 bp, synthetic construct
  source 1..17: mol_type = other DNA
ccactccagagactgcc

SEQ ID NO: 133540 - DNA, 17 bp, synthetic construct
  source 1..17: mol_type = other DNA
cactccagagactgccc

SEQ ID NO: 133541 - DNA, 17 bp, synthetic construct
  source 1..17: mol_type = other DNA
actccagagactgccca

SEQ ID NO: 133542 - DNA, 17 bp, synthetic construct
  source 1..17: mol_type = other DNA
ctccagagactgcccac

SEQ ID NO: 133543 - DNA, 17 bp, synthetic construct
  source 1..17: mol_type = other DNA
tccagagactgcccaca

SEQ ID NO: 133544 - DNA, 17 bp, synthetic construct
  source 1..17: mol_type = other DNA
ccagagactgcccacac

SEQ ID NO: 133545 - DNA, 17 bp, synthetic construct
  source 1..17: mol_type = other DNA
cagagactgcccacacc

SEQ ID NO: 133546 - DNA, 17 bp, synthetic construct
  source 1..17: mol_type = other DNA
agagactgcccacacct

SEQ ID NO: 133547 - DNA, 17 bp, synthetic construct
  source 1..17: mol_type = other DNA
gagactgcccacacctc

SEQ ID NO: 133548 - DNA, 17 bp, synthetic construct
  source 1..17: mol_type = other DNA
agactgcccacacctcc

SEQ ID NO: 133549 - DNA, 17 bp, synthetic construct
  source 1..17: mol_type = other DNA
gactgcccacacctcca

SEQ ID NO: 133550 - DNA, 17 bp, synthetic construct
  source 1..17: mol_type = other DNA
actgcccacacctccac

SEQ ID NO: 133551 - DNA, 17 bp, synthetic construct
  source 1..17: mol_type = other DNA
ctgcccacacctccaca

SEQ ID NO: 133552 - DNA, 17 bp, synthetic construct
  source 1..17: mol_type = other DNA
tgcccacacctccacag

SEQ ID NO: 133553 - DNA, 17 bp, synthetic construct
  source 1..17: mol_type = other DNA
gcccacacctccacagt

SEQ ID NO: 133554 - DNA, 17 bp, synthetic construct
  source 1..17: mol_type = other DNA
cccacacctccacagtg

SEQ ID NO: 133555 - DNA, 17 bp, synthetic construct
  source 1..17: mol_type = other DNA
ccacacctccacagtgc

SEQ ID NO: 133556 - DNA, 17 bp, synthetic construct
  source 1..17: mol_type = other DNA
cacacctccacagtgct

SEQ ID NO: 133557 - DNA, 17 bp, synthetic construct
  source 1..17: mol_type = other DNA
acacctccacagtgctt

SEQ ID NO: 133558 - DNA, 17 bp, synthetic construct
  source 1..17: mol_type = other DNA
cacctccacagtgctta

SEQ ID NO: 133559 - DNA, 17 bp, synthetic construct
  source 1..17: mol_type = other DNA
acctccacagtgcttac

SEQ ID NO: 133560 - DNA, 17 bp, synthetic construct
  source 1..17: mol_type = other DNA
cctccacagtgcttacc

SEQ ID NO: 133561 - DNA, 17 bp, synthetic construct
  source 1..17: mol_type = other DNA
ctccacagtgcttacca

SEQ ID NO: 133562 - DNA, 17 bp, synthetic construct
  source 1..17: mol_type = other DNA
tccacagtgcttaccac

SEQ ID NO: 133563 - DNA, 17 bp, synthetic construct
  source 1..17: mol_type = other DNA
ccacagtgcttaccacc

SEQ ID NO: 133564 - DNA, 17 bp, synthetic construct
  source 1..17: mol_type = other DNA
cacagtgcttaccacca

SEQ ID NO: 133565 - DNA, 17 bp, synthetic construct
  source 1..17: mol_type = other DNA
acagtgcttaccaccac

SEQ ID NO: 133566 - DNA, 17 bp, synthetic construct
  source 1..17: mol_type = other DNA
cagtgcttaccaccacg

SEQ ID NO: 133567 - DNA, 17 bp, synthetic construct
  source 1..17: mol_type = other DNA
agtgcttaccaccacgg

SEQ ID NO: 133568 - DNA, 17 bp, synthetic construct
  source 1..17: mol_type = other DNA
gtgcttaccaccacggc

SEQ ID NO: 133569 - DNA, 17 bp, synthetic construct
  source 1..17: mol_type = other DNA
tgcttaccaccacggcc

SEQ ID NO: 133570 - DNA, 17 bp, synthetic construct
  source 1..17: mol_type = other DNA
gcttaccaccacggcca

SEQ ID NO: 133571 - DNA, 17 bp, synthetic construct
  source 1..17: mol_type = other DNA
cttaccaccacggccac

SEQ ID NO: 133572 - DNA, 17 bp, synthetic construct
  source 1..17: mol_type = other DNA
ttaccaccacggccacc

SEQ ID NO: 133573 - DNA, 17 bp, synthetic construct
  source 1..17: mol_type = other DNA
taccaccacggccacca

SEQ ID NO: 133574 - DNA, 17 bp, synthetic construct
  source 1..17: mol_type = other DNA
accaccacggccaccac

SEQ ID NO: 133575 - DNA, 17 bp, synthetic construct
  source 1..17: mol_type = other DNA
ccaccacggccaccaca

SEQ ID NO: 133576 - DNA, 17 bp, synthetic construct
  source 1..17: mol_type = other DNA
caccacggccaccacaa

SEQ ID NO: 133577 - DNA, 17 bp, synthetic construct
  source 1..17: mol_type = other DNA
accacggccaccacaac

SEQ ID NO: 133578 - DNA, 17 bp, synthetic construct
  source 1..17: mol_type = other DNA
ccacggccaccacaacc

SEQ ID NO: 133579 - DNA, 17 bp, synthetic construct
  source 1..17: mol_type = other DNA
cacggccaccacaacca

SEQ ID NO: 133580 - DNA, 17 bp, synthetic construct
  source 1..17: mol_type = other DNA
acggccaccacaaccag

SEQ ID NO: 133581 - DNA, 17 bp, synthetic construct
  source 1..17: mol_type = other DNA
cggccaccacaaccagg

SEQ ID NO: 133582 - DNA, 17 bp, synthetic construct
  source 1..17: mol_type = other DNA
ggccaccacaaccaggg

SEQ ID NO: 133583 - DNA, 17 bp, synthetic construct
  source 1..17: mol_type = other DNA
gccaccacaaccagggc

SEQ ID NO: 133584 - DNA, 17 bp, synthetic construct
  source 1..17: mol_type = other DNA
ccaccacaaccagggcc

SEQ ID NO: 133585 - DNA, 17 bp, synthetic construct
  source 1..17: mol_type = other DNA
caccacaaccagggcca

SEQ ID NO: 133586 - DNA, 17 bp, synthetic construct
  source 1..17: mol_type = other DNA
accacaaccagggccac

SEQ ID NO: 133587 - DNA, 17 bp, synthetic construct
  source 1..17: mol_type = other DNA
ccacaaccagggccacc

SEQ ID NO: 133588 - DNA, 17 bp, synthetic construct
  source 1..17: mol_type = other DNA
cacaaccagggccaccg

SEQ ID NO: 133589 - DNA, 17 bp, synthetic construct
  source 1..17: mol_type = other DNA
acaaccagggccaccgg

SEQ ID NO: 133590 - DNA, 17 bp, synthetic construct
  source 1..17: mol_type = other DNA
caaccagggccaccggc

SEQ ID NO: 133591 - DNA, 17 bp, synthetic construct
  source 1..17: mol_type = other DNA
aaccagggccaccggct

SEQ ID NO: 133592 - DNA, 17 bp, synthetic construct
  source 1..17: mol_type = other DNA
accagggccaccggctc

SEQ ID NO: 133593 - DNA, 17 bp, synthetic construct
  source 1..17: mol_type = other DNA
ccagggccaccggctct

SEQ ID NO: 133594 - DNA, 17 bp, synthetic construct
  source 1..17: mol_type = other DNA
cagggccaccggctctg

SEQ ID NO: 133595 - DNA, 17 bp, synthetic construct
  source 1..17: mol_type = other DNA
agggccaccggctctgt

SEQ ID NO: 133596 - DNA, 17 bp, synthetic construct
  source 1..17: mol_type = other DNA
gggccaccggctctgtg

SEQ ID NO: 133597 - DNA, 17 bp, synthetic construct
  source 1..17: mol_type = other DNA
ggccaccggctctgtgg

SEQ ID NO: 133598 - DNA, 17 bp, synthetic construct
  source 1..17: mol_type = other DNA
gccaccggctctgtggc

SEQ ID NO: 133599 - DNA, 17 bp, synthetic construct
  source 1..17: mol_type = other DNA
ccaccggctctgtggcc

SEQ ID NO: 133600 - DNA, 17 bp, synthetic construct
  source 1..17: mol_type = other DNA
caccggctctgtggcca

SEQ ID NO: 133601 - DNA, 17 bp, synthetic construct
  source 1..17: mol_type = other DNA
accggctctgtggccac

SEQ ID NO: 133602 - DNA, 17 bp, synthetic construct
  source 1..17: mol_type = other DNA
ccggctctgtggccacc

SEQ ID NO: 133603 - DNA, 17 bp, synthetic construct
  source 1..17: mol_type = other DNA
cggctctgtggccaccc

SEQ ID NO: 133604 - DNA, 17 bp, synthetic construct
  source 1..17: mol_type = other DNA
ggctctgtggccacccc

SEQ ID NO: 133605 - DNA, 17 bp, synthetic construct
  source 1..17: mol_type = other DNA
gctctgtggccaccccc

SEQ ID NO: 133606 - DNA, 17 bp, synthetic construct
  source 1..17: mol_type = other DNA
ctctgtggccaccccct

SEQ ID NO: 133607 - DNA, 17 bp, synthetic construct
  source 1..17: mol_type = other DNA
tctgtggccaccccctc

SEQ ID NO: 133608 - DNA, 17 bp, synthetic construct
  source 1..17: mol_type = other DNA
ctgtggccaccccctct

SEQ ID NO: 133609 - DNA, 17 bp, synthetic construct
  source 1..17: mol_type = other DNA
tgtggccaccccctctt

SEQ ID NO: 133610 - DNA, 17 bp, synthetic construct
  source 1..17: mol_type = other DNA
gtggccaccccctcttc

SEQ ID NO: 133611 - DNA, 17 bp, synthetic construct
  source 1..17: mol_type = other DNA
tggccaccccctcttcc

SEQ ID NO: 133612 - DNA, 17 bp, synthetic construct
  source 1..17: mol_type = other DNA
ggccaccccctcttcca

SEQ ID NO: 133613 - DNA, 17 bp, synthetic construct
  source 1..17: mol_type = other DNA
gccaccccctcttccac

SEQ ID NO: 133614 - DNA, 17 bp, synthetic construct
  source 1..17: mol_type = other DNA
ccaccccctcttccacc

SEQ ID NO: 133615 - DNA, 17 bp, synthetic construct
  source 1..17: mol_type = other DNA
caccccctcttccaccc

SEQ ID NO: 133616 - DNA, 17 bp, synthetic construct
  source 1..17: mol_type = other DNA
accccctcttccacccc

SEQ ID NO: 133617 - DNA, 17 bp, synthetic construct
  source 1..17: mol_type = other DNA
ccccctcttccacccca

SEQ ID NO: 133618 - DNA, 17 bp, synthetic construct
  source 1..17: mol_type = other DNA
cccctcttccaccccag

SEQ ID NO: 133619 - DNA, 17 bp, synthetic construct
  source 1..17: mol_type = other DNA
ccctcttccaccccagg

SEQ ID NO: 133620 - DNA, 17 bp, synthetic construct
  source 1..17: mol_type = other DNA
cctcttccaccccagga

SEQ ID NO: 133621 - DNA, 17 bp, synthetic construct
  source 1..17: mol_type = other DNA
ctcttccaccccaggaa

SEQ ID NO: 133622 - DNA, 17 bp, synthetic construct
  source 1..17: mol_type = other DNA
tcttccaccccaggaac

SEQ ID NO: 133623 - DNA, 17 bp, synthetic construct
  source 1..17: mol_type = other DNA
cttccaccccaggaaca

SEQ ID NO: 133624 - DNA, 17 bp, synthetic construct
  source 1..17: mol_type = other DNA
ttccaccccaggaacag

SEQ ID NO: 133625 - DNA, 17 bp, synthetic construct
  source 1..17: mol_type = other DNA
tccaccccaggaacagc

SEQ ID NO: 133626 - DNA, 17 bp, synthetic construct
  source 1..17: mol_type = other DNA
ccaccccaggaacagct

SEQ ID NO: 133627 - DNA, 17 bp, synthetic construct
  source 1..17: mol_type = other DNA
caccccaggaacagctc

SEQ ID NO: 133628 - DNA, 17 bp, synthetic construct
  source 1..17: mol_type = other DNA
accccaggaacagctca

SEQ ID NO: 133629 - DNA, 17 bp, synthetic construct
  source 1..17: mol_type = other DNA
ccccaggaacagctcac

SEQ ID NO: 133630 - DNA, 17 bp, synthetic construct
  source 1..17: mol_type = other DNA
cccaggaacagctcaca

SEQ ID NO: 133631 - DNA, 17 bp, synthetic construct
  source 1..17: mol_type = other DNA
ccaggaacagctcacac

SEQ ID NO: 133632 - DNA, 17 bp, synthetic construct
  source 1..17: mol_type = other DNA
caggaacagctcacact

SEQ ID NO: 133633 - DNA, 17 bp, synthetic construct
  source 1..17: mol_type = other DNA
aggaacagctcacacta

SEQ ID NO: 133634 - DNA, 17 bp, synthetic construct
  source 1..17: mol_type = other DNA
ggaacagctcacactac

SEQ ID NO: 133635 - DNA, 17 bp, synthetic construct
  source 1..17: mol_type = other DNA
gaacagctcacactacc

SEQ ID NO: 133636 - DNA, 17 bp, synthetic construct
  source 1..17: mol_type = other DNA
aacagctcacactacca

SEQ ID NO: 133637 - DNA, 17 bp, synthetic construct
  source 1..17: mol_type = other DNA
acagctcacactaccaa

SEQ ID NO: 133638 - DNA, 17 bp, synthetic construct
  source 1..17: mol_type = other DNA
cagctcacactaccaaa

SEQ ID NO: 133639 - DNA, 17 bp, synthetic construct
  source 1..17: mol_type = other DNA
agctcacactaccaaag

SEQ ID NO: 133640 - DNA, 17 bp, synthetic construct
  source 1..17: mol_type = other DNA
gctcacactaccaaagt

SEQ ID NO: 133641 - DNA, 17 bp, synthetic construct
  source 1..17: mol_type = other DNA
ctcacactaccaaagtg

SEQ ID NO: 133642 - DNA, 17 bp, synthetic construct
  source 1..17: mol_type = other DNA
tcacactaccaaagtgc

SEQ ID NO: 133643 - DNA, 17 bp, synthetic construct
  source 1..17: mol_type = other DNA
cacactaccaaagtgcc

SEQ ID NO: 133644 - DNA, 17 bp, synthetic construct
  source 1..17: mol_type = other DNA
acactaccaaagtgccg

SEQ ID NO: 133645 - DNA, 17 bp, synthetic construct
  source 1..17: mol_type = other DNA
cactaccaaagtgccga

SEQ ID NO: 133646 - DNA, 17 bp, synthetic construct
  source 1..17: mol_type = other DNA
actaccaaagtgccgac

SEQ ID NO: 133647 - DNA, 17 bp, synthetic construct
  source 1..17: mol_type = other DNA
ctaccaaagtgccgact

SEQ ID NO: 133648 - DNA, 17 bp, synthetic construct
  source 1..17: mol_type = other DNA
taccaaagtgccgacta

SEQ ID NO: 133649 - DNA, 17 bp, synthetic construct
  source 1..17: mol_type = other DNA
accaaagtgccgactac

SEQ ID NO: 133650 - DNA, 17 bp, synthetic construct
  source 1..17: mol_type = other DNA
ccaaagtgccgactacc

SEQ ID NO: 133651 - DNA, 17 bp, synthetic construct
  source 1..17: mol_type = other DNA
caaagtgccgactacca

SEQ ID NO: 133652 - DNA, 17 bp, synthetic construct
  source 1..17: mol_type = other DNA
aaagtgccgactaccac

SEQ ID NO: 133653 - DNA, 17 bp, synthetic construct
  source 1..17: mol_type = other DNA
aagtgccgactaccaca

SEQ ID NO: 133654 - DNA, 17 bp, synthetic construct
  source 1..17: mol_type = other DNA
agtgccgactaccacaa

SEQ ID NO: 133655 - DNA, 17 bp, synthetic construct
  source 1..17: mol_type = other DNA
gtgccgactaccacaac

SEQ ID NO: 133656 - DNA, 17 bp, synthetic construct
  source 1..17: mol_type = other DNA
tgccgactaccacaacc

SEQ ID NO: 133657 - DNA, 17 bp, synthetic construct
  source 1..17: mol_type = other DNA
gccgactaccacaacca

SEQ ID NO: 133658 - DNA, 17 bp, synthetic construct
  source 1..17: mol_type = other DNA
ccgactaccacaaccac

SEQ ID NO: 133659 - DNA, 17 bp, synthetic construct
  source 1..17: mol_type = other DNA
cgactaccacaaccacg

SEQ ID NO: 133660 - DNA, 17 bp, synthetic construct
  source 1..17: mol_type = other DNA
gactaccacaaccacgg

SEQ ID NO: 133661 - DNA, 17 bp, synthetic construct
  source 1..17: mol_type = other DNA
actaccacaaccacggg

SEQ ID NO: 133662 - DNA, 17 bp, synthetic construct
  source 1..17: mol_type = other DNA
ctaccacaaccacgggc

SEQ ID NO: 133663 - DNA, 17 bp, synthetic construct
  source 1..17: mol_type = other DNA
taccacaaccacgggct

SEQ ID NO: 133664 - DNA, 17 bp, synthetic construct
  source 1..17: mol_type = other DNA
accacaaccacgggctt

SEQ ID NO: 133665 - DNA, 17 bp, synthetic construct
  source 1..17: mol_type = other DNA
ccacaaccacgggcttc

SEQ ID NO: 133666 - DNA, 17 bp, synthetic construct
  source 1..17: mol_type = other DNA
cacaaccacgggcttca

SEQ ID NO: 133667 - DNA, 17 bp, synthetic construct
  source 1..17: mol_type = other DNA
acaaccacgggcttcac

SEQ ID NO: 133668 - DNA, 17 bp, synthetic construct
  source 1..17: mol_type = other DNA
caaccacgggcttcaca

SEQ ID NO: 133669 - DNA, 17 bp, synthetic construct
  source 1..17: mol_type = other DNA
aaccacgggcttcacag

SEQ ID NO: 133670 - DNA, 17 bp, synthetic construct
  source 1..17: mol_type = other DNA
accacgggcttcacagt

SEQ ID NO: 133671 - DNA, 17 bp, synthetic construct
  source 1..17: mol_type = other DNA
ccacgggcttcacagtc

SEQ ID NO: 133672 - DNA, 17 bp, synthetic construct
  source 1..17: mol_type = other DNA
cacgggcttcacagtca

SEQ ID NO: 133673 - DNA, 17 bp, synthetic construct
  source 1..17: mol_type = other DNA
acgggcttcacagtcac

SEQ ID NO: 133674 - DNA, 17 bp, synthetic construct
  source 1..17: mol_type = other DNA
cgggcttcacagtcacc

SEQ ID NO: 133675 - DNA, 17 bp, synthetic construct
  source 1..17: mol_type = other DNA
gggcttcacagtcaccc

SEQ ID NO: 133676 - DNA, 17 bp, synthetic construct
  source 1..17: mol_type = other DNA
ggcttcacagtcacccc

SEQ ID NO: 133677 - DNA, 17 bp, synthetic construct
  source 1..17: mol_type = other DNA
gcttcacagtcaccccc

SEQ ID NO: 133678 - DNA, 17 bp, synthetic construct
  source 1..17: mol_type = other DNA
cttcacagtcaccccct

SEQ ID NO: 133679 - DNA, 17 bp, synthetic construct
  source 1..17: mol_type = other DNA
ttcacagtcaccccctc

SEQ ID NO: 133680 - DNA, 17 bp, synthetic construct
  source 1..17: mol_type = other DNA
tcacagtcaccccctcc

SEQ ID NO: 133681 - DNA, 17 bp, synthetic construct
  source 1..17: mol_type = other DNA
cacagtcaccccctcct

SEQ ID NO: 133682 - DNA, 17 bp, synthetic construct
  source 1..17: mol_type = other DNA
acagtcaccccctcctc

SEQ ID NO: 133683 - DNA, 17 bp, synthetic construct
  source 1..17: mol_type = other DNA
cagtcaccccctcctcc

SEQ ID NO: 133684 - DNA, 17 bp, synthetic construct
  source 1..17: mol_type = other DNA
agtcaccccctcctcca

SEQ ID NO: 133685 - DNA, 17 bp, synthetic construct
  source 1..17: mol_type = other DNA
gtcaccccctcctccag

SEQ ID NO: 133686 - DNA, 17 bp, synthetic construct
  source 1..17: mol_type = other DNA
tcaccccctcctccagc

SEQ ID NO: 133687 - DNA, 17 bp, synthetic construct
  source 1..17: mol_type = other DNA
caccccctcctccagcc

SEQ ID NO: 133688 - DNA, 17 bp, synthetic construct
  source 1..17: mol_type = other DNA
accccctcctccagccc

SEQ ID NO: 133689 - DNA, 17 bp, synthetic construct
  source 1..17: mol_type = other DNA
ccccctcctccagccca

SEQ ID NO: 133690 - DNA, 17 bp, synthetic construct
  source 1..17: mol_type = other DNA
cccctcctccagcccag

SEQ ID NO: 133691 - DNA, 17 bp, synthetic construct
  source 1..17: mol_type = other DNA
ccctcctccagcccagg

SEQ ID NO: 133692 - DNA, 17 bp, synthetic construct
  source 1..17: mol_type = other DNA
cctcctccagcccaggg

SEQ ID NO: 133693 - DNA, 17 bp, synthetic construct
  source 1..17: mol_type = other DNA
ctcctccagcccaggga

SEQ ID NO: 133694 - DNA, 17 bp, synthetic construct
  source 1..17: mol_type = other DNA
tcctccagcccagggac

SEQ ID NO: 133695 - DNA, 17 bp, synthetic construct
  source 1..17: mol_type = other DNA
cctccagcccagggacg

SEQ ID NO: 133696 - DNA, 17 bp, synthetic construct
  source 1..17: mol_type = other DNA
ctccagcccagggacgg

SEQ ID NO: 133697 - DNA, 17 bp, synthetic construct
  source 1..17: mol_type = other DNA
tccagcccagggacggc

SEQ ID NO: 133698 - DNA, 17 bp, synthetic construct
  source 1..17: mol_type = other DNA
ccagcccagggacggca

SEQ ID NO: 133699 - DNA, 17 bp, synthetic construct
  source 1..17: mol_type = other DNA
cagcccagggacggcac

SEQ ID NO: 133700 - DNA, 17 bp, synthetic construct
  source 1..17: mol_type = other DNA
agcccagggacggcacg

SEQ ID NO: 133701 - DNA, 17 bp, synthetic construct
  source 1..17: mol_type = other DNA
gcccagggacggcacgc

SEQ ID NO: 133702 - DNA, 17 bp, synthetic construct
  source 1..17: mol_type = other DNA
cccagggacggcacgca

SEQ ID NO: 133703 - DNA, 17 bp, synthetic construct
  source 1..17: mol_type = other DNA
ccagggacggcacgcac

SEQ ID NO: 133704 - DNA, 17 bp, synthetic construct
  source 1..17: mol_type = other DNA
cagggacggcacgcacg

SEQ ID NO: 133705 - DNA, 17 bp, synthetic construct
  source 1..17: mol_type = other DNA
agggacggcacgcacgc

SEQ ID NO: 133706 - DNA, 17 bp, synthetic construct
  source 1..17: mol_type = other DNA
gggacggcacgcacgcc

SEQ ID NO: 133707 - DNA, 17 bp, synthetic construct
  source 1..17: mol_type = other DNA
ggacggcacgcacgcct

SEQ ID NO: 133708 - DNA, 17 bp, synthetic construct
  source 1..17: mol_type = other DNA
gacggcacgcacgcctc

SEQ ID NO: 133709 - DNA, 17 bp, synthetic construct
  source 1..17: mol_type = other DNA
acggcacgcacgcctcc

SEQ ID NO: 133710 - DNA, 17 bp, synthetic construct
  source 1..17: mol_type = other DNA
cggcacgcacgcctcca

SEQ ID NO: 133711 - DNA, 17 bp, synthetic construct
  source 1..17: mol_type = other DNA
ggcacgcacgcctccag

SEQ ID NO: 133712 - DNA, 17 bp, synthetic construct
  source 1..17: mol_type = other DNA
gcacgcacgcctccagt

SEQ ID NO: 133713 - DNA, 17 bp, synthetic construct
  source 1..17: mol_type = other DNA
cacgcacgcctccagtg

SEQ ID NO: 133714 - DNA, 17 bp, synthetic construct
  source 1..17: mol_type = other DNA
acgcacgcctccagtgt

SEQ ID NO: 133715 - DNA, 17 bp, synthetic construct
  source 1..17: mol_type = other DNA
cgcacgcctccagtgtg

SEQ ID NO: 133716 - DNA, 17 bp, synthetic construct
  source 1..17: mol_type = other DNA
gcacgcctccagtgtgg

SEQ ID NO: 133717 - DNA, 17 bp, synthetic construct
  source 1..17: mol_type = other DNA
cacgcctccagtgtgga

SEQ ID NO: 133718 - DNA, 17 bp, synthetic construct
  source 1..17: mol_type = other DNA
acgcctccagtgtggat

SEQ ID NO: 133719 - DNA, 17 bp, synthetic construct
  source 1..17: mol_type = other DNA
cgcctccagtgtggatc

SEQ ID NO: 133720 - DNA, 17 bp, synthetic construct
  source 1..17: mol_type = other DNA
gcctccagtgtggatca

SEQ ID NO: 133721 - DNA, 17 bp, synthetic construct
  source 1..17: mol_type = other DNA
cctccagtgtggatcag

SEQ ID NO: 133722 - DNA, 17 bp, synthetic construct
  source 1..17: mol_type = other DNA
ctccagtgtggatcagc

SEQ ID NO: 133723 - DNA, 17 bp, synthetic construct
  source 1..17: mol_type = other DNA
tccagtgtggatcagca

SEQ ID NO: 133724 - DNA, 17 bp, synthetic construct
  source 1..17: mol_type = other DNA
ccagtgtggatcagcac

SEQ ID NO: 133725 - DNA, 17 bp, synthetic construct
  source 1..17: mol_type = other DNA
cagtgtggatcagcaca

SEQ ID NO: 133726 - DNA, 17 bp, synthetic construct
  source 1..17: mol_type = other DNA
agtgtggatcagcacaa

SEQ ID NO: 133727 - DNA, 17 bp, synthetic construct
  source 1..17: mol_type = other DNA
gtgtggatcagcacaac

SEQ ID NO: 133728 - DNA, 17 bp, synthetic construct
  source 1..17: mol_type = other DNA
tgtggatcagcacaacc

SEQ ID NO: 133729 - DNA, 17 bp, synthetic construct
  source 1..17: mol_type = other DNA
gtggatcagcacaacca

SEQ ID NO: 133730 - DNA, 17 bp, synthetic construct
  source 1..17: mol_type = other DNA
tggatcagcacaaccac

SEQ ID NO: 133731 - DNA, 17 bp, synthetic construct
  source 1..17: mol_type = other DNA
ggatcagcacaaccacc

SEQ ID NO: 133732 - DNA, 17 bp, synthetic construct
  source 1..17: mol_type = other DNA
gatcagcacaaccacca

SEQ ID NO: 133733 - DNA, 17 bp, synthetic construct
  source 1..17: mol_type = other DNA
atcagcacaaccaccac

SEQ ID NO: 133734 - DNA, 17 bp, synthetic construct
  source 1..17: mol_type = other DNA
tcagcacaaccaccaca

SEQ ID NO: 133735 - DNA, 17 bp, synthetic construct
  source 1..17: mol_type = other DNA
cagcacaaccaccacac

SEQ ID NO: 133736 - DNA, 17 bp, synthetic construct
  source 1..17: mol_type = other DNA
agcacaaccaccacacc

SEQ ID NO: 133737 - DNA, 17 bp, synthetic construct
  source 1..17: mol_type = other DNA
gcacaaccaccacaccc

SEQ ID NO: 133738 - DNA, 17 bp, synthetic construct
  source 1..17: mol_type = other DNA
cacaaccaccacaccca

SEQ ID NO: 133739 - DNA, 17 bp, synthetic construct
  source 1..17: mol_type = other DNA
acaaccaccacacccac

SEQ ID NO: 133740 - DNA, 17 bp, synthetic construct
  source 1..17: mol_type = other DNA
caaccaccacacccaca

SEQ ID NO: 133741 - DNA, 17 bp, synthetic construct
  source 1..17: mol_type = other DNA
aaccaccacacccacaa

SEQ ID NO: 133742 - DNA, 17 bp, synthetic construct
  source 1..17: mol_type = other DNA
accaccacacccacaac

SEQ ID NO: 133743 - DNA, 17 bp, synthetic construct
  source 1..17: mol_type = other DNA
ccaccacacccacaacc

SEQ ID NO: 133744 - DNA, 17 bp, synthetic construct
  source 1..17: mol_type = other DNA
caccacacccacaacca

SEQ ID NO: 133745 - DNA, 17 bp, synthetic construct
  source 1..17: mol_type = other DNA
accacacccacaaccag

SEQ ID NO: 133746 - DNA, 17 bp, synthetic construct
  source 1..17: mol_type = other DNA
ccacacccacaaccagt

SEQ ID NO: 133747 - DNA, 17 bp, synthetic construct
  source 1..17: mol_type = other DNA
cacacccacaaccagtg

SEQ ID NO: 133748 - DNA, 17 bp, synthetic construct
  source 1..17: mol_type = other DNA
acacccacaaccagtgg

SEQ ID NO: 133749 - DNA, 17 bp, synthetic construct
  source 1..17: mol_type = other DNA
cacccacaaccagtggc

SEQ ID NO: 133750 - DNA, 17 bp, synthetic construct
  source 1..17: mol_type = other DNA
acccacaaccagtggct

SEQ ID NO: 133751 - DNA, 17 bp, synthetic construct
  source 1..17: mol_type = other DNA
cccacaaccagtggctc

SEQ ID NO: 133752 - DNA, 17 bp, synthetic construct
  source 1..17: mol_type = other DNA
ccacaaccagtggctcc

SEQ ID NO: 133753 - DNA, 17 bp, synthetic construct
  source 1..17: mol_type = other DNA
cacaaccagtggctcca

SEQ ID NO: 133754 - DNA, 17 bp, synthetic construct
  source 1..17: mol_type = other DNA
acaaccagtggctccac

SEQ ID NO: 133755 - DNA, 17 bp, synthetic construct
  source 1..17: mol_type = other DNA
caaccagtggctccacg

SEQ ID NO: 133756 - DNA, 17 bp, synthetic construct
  source 1..17: mol_type = other DNA
aaccagtggctccacgg

SEQ ID NO: 133757 - DNA, 17 bp, synthetic construct
  source 1..17: mol_type = other DNA
accagtggctccacggt

SEQ ID NO: 133758 - DNA, 17 bp, synthetic construct
  source 1..17: mol_type = other DNA
ccagtggctccacggtg

SEQ ID NO: 133759 - DNA, 17 bp, synthetic construct
  source 1..17: mol_type = other DNA
cagtggctccacggtga

SEQ ID NO: 133760 - DNA, 17 bp, synthetic construct
  source 1..17: mol_type = other DNA
agtggctccacggtgac

SEQ ID NO: 133761 - DNA, 17 bp, synthetic construct
  source 1..17: mol_type = other DNA
gtggctccacggtgacc

SEQ ID NO: 133762 - DNA, 17 bp, synthetic construct
  source 1..17: mol_type = other DNA
tggctccacggtgaccc

SEQ ID NO: 133763 - DNA, 17 bp, synthetic construct
  source 1..17: mol_type = other DNA
ggctccacggtgacccc

SEQ ID NO: 133764 - DNA, 17 bp, synthetic construct
  source 1..17: mol_type = other DNA
gctccacggtgaccccc

SEQ ID NO: 133765 - DNA, 17 bp, synthetic construct
  source 1..17: mol_type = other DNA
ctccacggtgaccccct

SEQ ID NO: 133766 - DNA, 17 bp, synthetic construct
  source 1..17: mol_type = other DNA
tccacggtgaccccctc

SEQ ID NO: 133767 - DNA, 17 bp, synthetic construct
  source 1..17: mol_type = other DNA
ccacggtgaccccctcc

SEQ ID NO: 133768 - DNA, 17 bp, synthetic construct
  source 1..17: mol_type = other DNA
cacggtgaccccctcct

SEQ ID NO: 133769 - DNA, 17 bp, synthetic construct
  source 1..17: mol_type = other DNA
acggtgaccccctcctc

SEQ ID NO: 133770 - DNA, 17 bp, synthetic construct
  source 1..17: mol_type = other DNA
cggtgaccccctcctcc

SEQ ID NO: 133771 - DNA, 17 bp, synthetic construct
  source 1..17: mol_type = other DNA
ggtgaccccctcctccg

SEQ ID NO: 133772 - DNA, 17 bp, synthetic construct
  source 1..17: mol_type = other DNA
gtgaccccctcctccgt

SEQ ID NO: 133773 - DNA, 17 bp, synthetic construct
  source 1..17: mol_type = other DNA
tgaccccctcctccgtc

SEQ ID NO: 133774 - DNA, 17 bp, synthetic construct
  source 1..17: mol_type = other DNA
gaccccctcctccgtcc

SEQ ID NO: 133775 - DNA, 17 bp, synthetic construct
  source 1..17: mol_type = other DNA
accccctcctccgtccc

SEQ ID NO: 133776 - DNA, 17 bp, synthetic construct
  source 1..17: mol_type = other DNA
ccccctcctccgtcccg

SEQ ID NO: 133777 - DNA, 17 bp, synthetic construct
  source 1..17: mol_type = other DNA
cccctcctccgtcccgg

SEQ ID NO: 133778 - DNA, 17 bp, synthetic construct
  source 1..17: mol_type = other DNA
ccctcctccgtcccggg

SEQ ID NO: 133779 - DNA, 17 bp, synthetic construct
  source 1..17: mol_type = other DNA
cctcctccgtcccgggg

SEQ ID NO: 133780 - DNA, 17 bp, synthetic construct
  source 1..17: mol_type = other DNA
ctcctccgtcccgggga

SEQ ID NO: 133781 - DNA, 17 bp, synthetic construct
  source 1..17: mol_type = other DNA
tcctccgtcccggggac

SEQ ID NO: 133782 - DNA, 17 bp, synthetic construct
  source 1..17: mol_type = other DNA
cctccgtcccggggacc

SEQ ID NO: 133783 - DNA, 17 bp, synthetic construct
  source 1..17: mol_type = other DNA
ctccgtcccggggacca

SEQ ID NO: 133784 - DNA, 17 bp, synthetic construct
  source 1..17: mol_type = other DNA
tccgtcccggggaccac

SEQ ID NO: 133785 - DNA, 17 bp, synthetic construct
  source 1..17: mol_type = other DNA
ccgtcccggggaccacc

SEQ ID NO: 133786 - DNA, 17 bp, synthetic construct
  source 1..17: mol_type = other DNA
cgtcccggggaccaccc

SEQ ID NO: 133787 - DNA, 17 bp, synthetic construct
  source 1..17: mol_type = other DNA
gtcccggggaccaccca

SEQ ID NO: 133788 - DNA, 17 bp, synthetic construct
  source 1..17: mol_type = other DNA
tcccggggaccacccac

SEQ ID NO: 133789 - DNA, 17 bp, synthetic construct
  source 1..17: mol_type = other DNA
cccggggaccacccaca

SEQ ID NO: 133790 - DNA, 17 bp, synthetic construct
  source 1..17: mol_type = other DNA
ccggggaccacccacac

SEQ ID NO: 133791 - DNA, 17 bp, synthetic construct
  source 1..17: mol_type = other DNA
cggggaccacccacacc

SEQ ID NO: 133792 - DNA, 17 bp, synthetic construct
  source 1..17: mol_type = other DNA
ggggaccacccacaccc

SEQ ID NO: 133793 - DNA, 17 bp, synthetic construct
  source 1..17: mol_type = other DNA
gggaccacccacacccc

SEQ ID NO: 133794 - DNA, 17 bp, synthetic construct
  source 1..17: mol_type = other DNA
ggaccacccacaccccc

SEQ ID NO: 133795 - DNA, 17 bp, synthetic construct
  source 1..17: mol_type = other DNA
gaccacccacaccccca

SEQ ID NO: 133796 - DNA, 17 bp, synthetic construct
  source 1..17: mol_type = other DNA
accacccacacccccac

SEQ ID NO: 133797 - DNA, 17 bp, synthetic construct
  source 1..17: mol_type = other DNA
ccacccacacccccaca

SEQ ID NO: 133798 - DNA, 17 bp, synthetic construct
  source 1..17: mol_type = other DNA
cacccacacccccacag

SEQ ID NO: 133799 - DNA, 17 bp, synthetic construct
  source 1..17: mol_type = other DNA
acccacacccccacagt

SEQ ID NO: 133800 - DNA, 17 bp, synthetic construct
  source 1..17: mol_type = other DNA
cccacacccccacagtg

SEQ ID NO: 133801 - DNA, 17 bp, synthetic construct
  source 1..17: mol_type = other DNA
ccacacccccacagtgc

SEQ ID NO: 133802 - DNA, 17 bp, synthetic construct
  source 1..17: mol_type = other DNA
cacacccccacagtgct

SEQ ID NO: 133803 - DNA, 17 bp, synthetic construct
  source 1..17: mol_type = other DNA
acacccccacagtgctg

SEQ ID NO: 133804 - DNA, 17 bp, synthetic construct
  source 1..17: mol_type = other DNA
cacccccacagtgctga

SEQ ID NO: 133805 - DNA, 17 bp, synthetic construct
  source 1..17: mol_type = other DNA
acccccacagtgctgac

SEQ ID NO: 133806 - DNA, 17 bp, synthetic construct
  source 1..17: mol_type = other DNA
cccccacagtgctgacc

SEQ ID NO: 133807 - DNA, 17 bp, synthetic construct
  source 1..17: mol_type = other DNA
ccccacagtgctgacca

SEQ ID NO: 133808 - DNA, 17 bp, synthetic construct
  source 1..17: mol_type = other DNA
cccacagtgctgaccac

SEQ ID NO: 133809 - DNA, 17 bp, synthetic construct
  source 1..17: mol_type = other DNA
ccacagtgctgaccacc

SEQ ID NO: 133810 - DNA, 17 bp, synthetic construct
  source 1..17: mol_type = other DNA
cacagtgctgaccacca

SEQ ID NO: 133811 - DNA, 17 bp, synthetic construct
  source 1..17: mol_type = other DNA
acagtgctgaccaccac

SEQ ID NO: 133812 - DNA, 17 bp, synthetic construct
  source 1..17: mol_type = other DNA
cagtgctgaccaccacc

SEQ ID NO: 133813 - DNA, 17 bp, synthetic construct
  source 1..17: mol_type = other DNA
agtgctgaccaccacca

SEQ ID NO: 133814 - DNA, 17 bp, synthetic construct
  source 1..17: mol_type = other DNA
gtgctgaccaccaccac

SEQ ID NO: 133815 - DNA, 17 bp, synthetic construct
  source 1..17: mol_type = other DNA
tgctgaccaccaccacc

SEQ ID NO: 133816 - DNA, 17 bp, synthetic construct
  source 1..17: mol_type = other DNA
gctgaccaccaccacca

SEQ ID NO: 133817 - DNA, 17 bp, synthetic construct
  source 1..17: mol_type = other DNA
ctgaccaccaccaccac

SEQ ID NO: 133818 - DNA, 17 bp, synthetic construct
  source 1..17: mol_type = other DNA
tgaccaccaccaccaca

SEQ ID NO: 133819 - DNA, 17 bp, synthetic construct
  source 1..17: mol_type = other DNA
gaccaccaccaccacaa

SEQ ID NO: 133820 - DNA, 17 bp, synthetic construct
  source 1..17: mol_type = other DNA
accaccaccaccacaac

SEQ ID NO: 133821 - DNA, 17 bp, synthetic construct
  source 1..17: mol_type = other DNA
ccaccaccaccacaact

SEQ ID NO: 133822 - DNA, 17 bp, synthetic construct
  source 1..17: mol_type = other DNA
caccaccaccacaactg

SEQ ID NO: 133823 - DNA, 17 bp, synthetic construct
  source 1..17: mol_type = other DNA
accaccaccacaactgt

SEQ ID NO: 133824 - DNA, 17 bp, synthetic construct
  source 1..17: mol_type = other DNA
ccaccaccacaactgtg

SEQ ID NO: 133825 - DNA, 17 bp, synthetic construct
  source 1..17: mol_type = other DNA
caccaccacaactgtgg

SEQ ID NO: 133826 - DNA, 17 bp, synthetic construct
  source 1..17: mol_type = other DNA
accaccacaactgtggc

SEQ ID NO: 133827 - DNA, 17 bp, synthetic construct
  source 1..17: mol_type = other DNA
ccaccacaactgtggcc

SEQ ID NO: 133828 - DNA, 17 bp, synthetic construct
  source 1..17: mol_type = other DNA
caccacaactgtggcca

SEQ ID NO: 133829 - DNA, 17 bp, synthetic construct
  source 1..17: mol_type = other DNA
accacaactgtggccac

SEQ ID NO: 133830 - DNA, 17 bp, synthetic construct
  source 1..17: mol_type = other DNA
ccacaactgtggccact

SEQ ID NO: 133831 - DNA, 17 bp, synthetic construct
  source 1..17: mol_type = other DNA
cacaactgtggccactg

SEQ ID NO: 133832 - DNA, 17 bp, synthetic construct
  source 1..17: mol_type = other DNA
acaactgtggccactgg

SEQ ID NO: 133833 - DNA, 17 bp, synthetic construct
  source 1..17: mol_type = other DNA
caactgtggccactggt

SEQ ID NO: 133834 - DNA, 17 bp, synthetic construct
  source 1..17: mol_type = other DNA
aactgtggccactggtt

SEQ ID NO: 133835 - DNA, 17 bp, synthetic construct
  source 1..17: mol_type = other DNA
actgtggccactggttc

SEQ ID NO: 133836 - DNA, 17 bp, synthetic construct
  source 1..17: mol_type = other DNA
ctgtggccactggttct

SEQ ID NO: 133837 - DNA, 17 bp, synthetic construct
  source 1..17: mol_type = other DNA
tgtggccactggttcta

SEQ ID NO: 133838 - DNA, 17 bp, synthetic construct
  source 1..17: mol_type = other DNA
gtggccactggttctat

SEQ ID NO: 133839 - DNA, 17 bp, synthetic construct
  source 1..17: mol_type = other DNA
tggccactggttctatg

SEQ ID NO: 133840 - DNA, 17 bp, synthetic construct
  source 1..17: mol_type = other DNA
ggccactggttctatgg

SEQ ID NO: 133841 - DNA, 17 bp, synthetic construct
  source 1..17: mol_type = other DNA
gccactggttctatggc

SEQ ID NO: 133842 - DNA, 17 bp, synthetic construct
  source 1..17: mol_type = other DNA
ccactggttctatggca

SEQ ID NO: 133843 - DNA, 17 bp, synthetic construct
  source 1..17: mol_type = other DNA
cactggttctatggcaa

SEQ ID NO: 133844 - DNA, 17 bp, synthetic construct
  source 1..17: mol_type = other DNA
actggttctatggcaac

SEQ ID NO: 133845 - DNA, 17 bp, synthetic construct
  source 1..17: mol_type = other DNA
ctggttctatggcaaca

SEQ ID NO: 133846 - DNA, 17 bp, synthetic construct
  source 1..17: mol_type = other DNA
tggttctatggcaacac

SEQ ID NO: 133847 - DNA, 17 bp, synthetic construct
  source 1..17: mol_type = other DNA
ggttctatggcaacacc

SEQ ID NO: 133848 - DNA, 17 bp, synthetic construct
  source 1..17: mol_type = other DNA
gttctatggcaacaccc

SEQ ID NO: 133849 - DNA, 17 bp, synthetic construct
  source 1..17: mol_type = other DNA
ttctatggcaacaccct

SEQ ID NO: 133850 - DNA, 17 bp, synthetic construct
  source 1..17: mol_type = other DNA
tctatggcaacaccctc

SEQ ID NO: 133851 - DNA, 17 bp, synthetic construct
  source 1..17: mol_type = other DNA
ctatggcaacaccctcc

SEQ ID NO: 133852 - DNA, 17 bp, synthetic construct
  source 1..17: mol_type = other DNA
tatggcaacaccctcct

SEQ ID NO: 133853 - DNA, 17 bp, synthetic construct
  source 1..17: mol_type = other DNA
atggcaacaccctcctc

SEQ ID NO: 133854 - DNA, 17 bp, synthetic construct
  source 1..17: mol_type = other DNA
tggcaacaccctcctct

SEQ ID NO: 133855 - DNA, 17 bp, synthetic construct
  source 1..17: mol_type = other DNA
ggcaacaccctcctcta

SEQ ID NO: 133856 - DNA, 17 bp, synthetic construct
  source 1..17: mol_type = other DNA
gcaacaccctcctctag

SEQ ID NO: 133857 - DNA, 17 bp, synthetic construct
  source 1..17: mol_type = other DNA
caacaccctcctctagc

SEQ ID NO: 133858 - DNA, 17 bp, synthetic construct
  source 1..17: mol_type = other DNA
aacaccctcctctagca

SEQ ID NO: 133859 - DNA, 17 bp, synthetic construct
  source 1..17: mol_type = other DNA
acaccctcctctagcac

SEQ ID NO: 133860 - DNA, 17 bp, synthetic construct
  source 1..17: mol_type = other DNA
caccctcctctagcaca

SEQ ID NO: 133861 - DNA, 17 bp, synthetic construct
  source 1..17: mol_type = other DNA
accctcctctagcacac

SEQ ID NO: 133862 - DNA, 17 bp, synthetic construct
  source 1..17: mol_type = other DNA
ccctcctctagcacaca

SEQ ID NO: 133863 - DNA, 17 bp, synthetic construct
  source 1..17: mol_type = other DNA
cctcctctagcacacag

SEQ ID NO: 133864 - DNA, 17 bp, synthetic construct
  source 1..17: mol_type = other DNA
ctcctctagcacacaga

SEQ ID NO: 133865 - DNA, 17 bp, synthetic construct
  source 1..17: mol_type = other DNA
tcctctagcacacagac

SEQ ID NO: 133866 - DNA, 17 bp, synthetic construct
  source 1..17: mol_type = other DNA
cctctagcacacagacc

SEQ ID NO: 133867 - DNA, 17 bp, synthetic construct
  source 1..17: mol_type = other DNA
ctctagcacacagacca

SEQ ID NO: 133868 - DNA, 17 bp, synthetic construct
  source 1..17: mol_type = other DNA
tctagcacacagaccag

SEQ ID NO: 133869 - DNA, 17 bp, synthetic construct
  source 1..17: mol_type = other DNA
ctagcacacagaccagt

SEQ ID NO: 133870 - DNA, 17 bp, synthetic construct
  source 1..17: mol_type = other DNA
tagcacacagaccagtg

SEQ ID NO: 133871 - DNA, 17 bp, synthetic construct
  source 1..17: mol_type = other DNA
agcacacagaccagtgg

SEQ ID NO: 133872 - DNA, 17 bp, synthetic construct
  source 1..17: mol_type = other DNA
gcacacagaccagtggt

SEQ ID NO: 133873 - DNA, 17 bp, synthetic construct
  source 1..17: mol_type = other DNA
cacacagaccagtggta

SEQ ID NO: 133874 - DNA, 17 bp, synthetic construct
  source 1..17: mol_type = other DNA
acacagaccagtggtac

SEQ ID NO: 133875 - DNA, 17 bp, synthetic construct
  source 1..17: mol_type = other DNA
cacagaccagtggtact

SEQ ID NO: 133876 - DNA, 17 bp, synthetic construct
  source 1..17: mol_type = other DNA
acagaccagtggtactc

SEQ ID NO: 133877 - DNA, 17 bp, synthetic construct
  source 1..17: mol_type = other DNA
cagaccagtggtactcc

SEQ ID NO: 133878 - DNA, 17 bp, synthetic construct
  source 1..17: mol_type = other DNA
agaccagtggtactccc

SEQ ID NO: 133879 - DNA, 17 bp, synthetic construct
  source 1..17: mol_type = other DNA
gaccagtggtactcccc

SEQ ID NO: 133880 - DNA, 17 bp, synthetic construct
  source 1..17: mol_type = other DNA
accagtggtactccccc

SEQ ID NO: 133881 - DNA, 17 bp, synthetic construct
  source 1..17: mol_type = other DNA
ccagtggtactccccca

SEQ ID NO: 133882 - DNA, 17 bp, synthetic construct
  source 1..17: mol_type = other DNA
cagtggtactcccccat

SEQ ID NO: 133883 - DNA, 17 bp, synthetic construct
  source 1..17: mol_type = other DNA
agtggtactcccccatc

SEQ ID NO: 133884 - DNA, 17 bp, synthetic construct
  source 1..17: mol_type = other DNA
gtggtactcccccatca

SEQ ID NO: 133885 - DNA, 17 bp, synthetic construct
  source 1..17: mol_type = other DNA
tggtactcccccatcac

SEQ ID NO: 133886 - DNA, 17 bp, synthetic construct
  source 1..17: mol_type = other DNA
ggtactcccccatcact

SEQ ID NO: 133887 - DNA, 17 bp, synthetic construct
  source 1..17: mol_type = other DNA
gtactcccccatcactg

SEQ ID NO: 133888 - DNA, 17 bp, synthetic construct
  source 1..17: mol_type = other DNA
tactcccccatcactga

SEQ ID NO: 133889 - DNA, 17 bp, synthetic construct
  source 1..17: mol_type = other DNA
actcccccatcactgat

SEQ ID NO: 133890 - DNA, 17 bp, synthetic construct
  source 1..17: mol_type = other DNA
ctcccccatcactgatc

SEQ ID NO: 133891 - DNA, 17 bp, synthetic construct
  source 1..17: mol_type = other DNA
tcccccatcactgatca

SEQ ID NO: 133892 - DNA, 17 bp, synthetic construct
  source 1..17: mol_type = other DNA
cccccatcactgatcac

SEQ ID NO: 133893 - DNA, 17 bp, synthetic construct
  source 1..17: mol_type = other DNA
ccccatcactgatcacc

SEQ ID NO: 133894 - DNA, 17 bp, synthetic construct
  source 1..17: mol_type = other DNA
cccatcactgatcacca

SEQ ID NO: 133895 - DNA, 17 bp, synthetic construct
  source 1..17: mol_type = other DNA
ccatcactgatcaccac

SEQ ID NO: 133896 - DNA, 17 bp, synthetic construct
  source 1..17: mol_type = other DNA
catcactgatcaccacg

SEQ ID NO: 133897 - DNA, 17 bp, synthetic construct
  source 1..17: mol_type = other DNA
atcactgatcaccacgg

SEQ ID NO: 133898 - DNA, 17 bp, synthetic construct
  source 1..17: mol_type = other DNA
tcactgatcaccacggc

SEQ ID NO: 133899 - DNA, 17 bp, synthetic construct
  source 1..17: mol_type = other DNA
cactgatcaccacggcc

SEQ ID NO: 133900 - DNA, 17 bp, synthetic construct
  source 1..17: mol_type = other DNA
actgatcaccacggcca

SEQ ID NO: 133901 - DNA, 17 bp, synthetic construct
  source 1..17: mol_type = other DNA
ctgatcaccacggccac

SEQ ID NO: 133902 - DNA, 17 bp, synthetic construct
  source 1..17: mol_type = other DNA
tgatcaccacggccact

SEQ ID NO: 133903 - DNA, 17 bp, synthetic construct
  source 1..17: mol_type = other DNA
gatcaccacggccacta

SEQ ID NO: 133904 - DNA, 17 bp, synthetic construct
  source 1..17: mol_type = other DNA
atcaccacggccactac

SEQ ID NO: 133905 - DNA, 17 bp, synthetic construct
  source 1..17: mol_type = other DNA
tcaccacggccactacg

SEQ ID NO: 133906 - DNA, 17 bp, synthetic construct
  source 1..17: mol_type = other DNA
caccacggccactacga

SEQ ID NO: 133907 - DNA, 17 bp, synthetic construct
  source 1..17: mol_type = other DNA
accacggccactacgat

SEQ ID NO: 133908 - DNA, 17 bp, synthetic construct
  source 1..17: mol_type = other DNA
ccacggccactacgatc

SEQ ID NO: 133909 - DNA, 17 bp, synthetic construct
  source 1..17: mol_type = other DNA
cacggccactacgatca

SEQ ID NO: 133910 - DNA, 17 bp, synthetic construct
  source 1..17: mol_type = other DNA
acggccactacgatcac

SEQ ID NO: 133911 - DNA, 17 bp, synthetic construct
  source 1..17: mol_type = other DNA
cggccactacgatcacg

SEQ ID NO: 133912 - DNA, 17 bp, synthetic construct
  source 1..17: mol_type = other DNA
ggccactacgatcacgg

SEQ ID NO: 133913 - DNA, 17 bp, synthetic construct
  source 1..17: mol_type = other DNA
gccactacgatcacggc

SEQ ID NO: 133914 - DNA, 17 bp, synthetic construct
  source 1..17: mol_type = other DNA
ccactacgatcacggcc

SEQ ID NO: 133915 - DNA, 17 bp, synthetic construct
  source 1..17: mol_type = other DNA
cactacgatcacggcca

SEQ ID NO: 133916 - DNA, 17 bp, synthetic construct
  source 1..17: mol_type = other DNA
actacgatcacggccac

SEQ ID NO: 133917 - DNA, 17 bp, synthetic construct
  source 1..17: mol_type = other DNA
ctacgatcacggccacc

SEQ ID NO: 133918 - DNA, 17 bp, synthetic construct
  source 1..17: mol_type = other DNA
tacgatcacggccaccg

SEQ ID NO: 133919 - DNA, 17 bp, synthetic construct
  source 1..17: mol_type = other DNA
acgatcacggccaccgg

SEQ ID NO: 133920 - DNA, 17 bp, synthetic construct
  source 1..17: mol_type = other DNA
cgatcacggccaccggc

SEQ ID NO: 133921 - DNA, 17 bp, synthetic construct
  source 1..17: mol_type = other DNA
gatcacggccaccggct

SEQ ID NO: 133922 - DNA, 17 bp, synthetic construct
  source 1..17: mol_type = other DNA
atcacggccaccggctc

SEQ ID NO: 133923 - DNA, 17 bp, synthetic construct
  source 1..17: mol_type = other DNA
tcacggccaccggctcc

SEQ ID NO: 133924 - DNA, 17 bp, synthetic construct
  source 1..17: mol_type = other DNA
cacggccaccggctcca

SEQ ID NO: 133925 - DNA, 17 bp, synthetic construct
  source 1..17: mol_type = other DNA
acggccaccggctccac

SEQ ID NO: 133926 - DNA, 17 bp, synthetic construct
  source 1..17: mol_type = other DNA
cggccaccggctccacc

SEQ ID NO: 133927 - DNA, 17 bp, synthetic construct
  source 1..17: mol_type = other DNA
ggccaccggctccacca

SEQ ID NO: 133928 - DNA, 17 bp, synthetic construct
  source 1..17: mol_type = other DNA
gccaccggctccaccac

SEQ ID NO: 133929 - DNA, 17 bp, synthetic construct
  source 1..17: mol_type = other DNA
ccaccggctccaccacc

SEQ ID NO: 133930 - DNA, 17 bp, synthetic construct
  source 1..17: mol_type = other DNA
caccggctccaccacca

SEQ ID NO: 133931 - DNA, 17 bp, synthetic construct
  source 1..17: mol_type = other DNA
accggctccaccaccaa

SEQ ID NO: 133932 - DNA, 17 bp, synthetic construct
  source 1..17: mol_type = other DNA
ccggctccaccaccaac

SEQ ID NO: 133933 - DNA, 17 bp, synthetic construct
  source 1..17: mol_type = other DNA
cggctccaccaccaacc

SEQ ID NO: 133934 - DNA, 17 bp, synthetic construct
  source 1..17: mol_type = other DNA
ggctccaccaccaaccc

SEQ ID NO: 133935 - DNA, 17 bp, synthetic construct
  source 1..17: mol_type = other DNA
gctccaccaccaacccc

SEQ ID NO: 133936 - DNA, 17 bp, synthetic construct
  source 1..17: mol_type = other DNA
ctccaccaccaacccct

SEQ ID NO: 133937 - DNA, 17 bp, synthetic construct
  source 1..17: mol_type = other DNA
tccaccaccaacccctc

SEQ ID NO: 133938 - DNA, 17 bp, synthetic construct
  source 1..17: mol_type = other DNA
ccaccaccaacccctcc

SEQ ID NO: 133939 - DNA, 17 bp, synthetic construct
  source 1..17: mol_type = other DNA
caccaccaacccctcct

SEQ ID NO: 133940 - DNA, 17 bp, synthetic construct
  source 1..17: mol_type = other DNA
accaccaacccctcctc

SEQ ID NO: 133941 - DNA, 17 bp, synthetic construct
  source 1..17: mol_type = other DNA
ccaccaacccctcctca

SEQ ID NO: 133942 - DNA, 17 bp, synthetic construct
  source 1..17: mol_type = other DNA
caccaacccctcctcaa

SEQ ID NO: 133943 - DNA, 17 bp, synthetic construct
  source 1..17: mol_type = other DNA
accaacccctcctcaac

SEQ ID NO: 133944 - DNA, 17 bp, synthetic construct
  source 1..17: mol_type = other DNA
ccaacccctcctcaact

SEQ ID NO: 133945 - DNA, 17 bp, synthetic construct
  source 1..17: mol_type = other DNA
caacccctcctcaactc

SEQ ID NO: 133946 - DNA, 17 bp, synthetic construct
  source 1..17: mol_type = other DNA
aacccctcctcaactcc

SEQ ID NO: 133947 - DNA, 17 bp, synthetic construct
  source 1..17: mol_type = other DNA
acccctcctcaactcca

SEQ ID NO: 133948 - DNA, 17 bp, synthetic construct
  source 1..17: mol_type = other DNA
cccctcctcaactccag

SEQ ID NO: 133949 - DNA, 17 bp, synthetic construct
  source 1..17: mol_type = other DNA
ccctcctcaactccagg

SEQ ID NO: 133950 - DNA, 17 bp, synthetic construct
  source 1..17: mol_type = other DNA
cctcctcaactccaggg

SEQ ID NO: 133951 - DNA, 17 bp, synthetic construct
  source 1..17: mol_type = other DNA
ctcctcaactccaggga

SEQ ID NO: 133952 - DNA, 17 bp, synthetic construct
  source 1..17: mol_type = other DNA
tcctcaactccagggac

SEQ ID NO: 133953 - DNA, 17 bp, synthetic construct
  source 1..17: mol_type = other DNA
cctcaactccagggaca

SEQ ID NO: 133954 - DNA, 17 bp, synthetic construct
  source 1..17: mol_type = other DNA
ctcaactccagggacaa

SEQ ID NO: 133955 - DNA, 17 bp, synthetic construct
  source 1..17: mol_type = other DNA
tcaactccagggacaac

SEQ ID NO: 133956 - DNA, 17 bp, synthetic construct
  source 1..17: mol_type = other DNA
caactccagggacaaca

SEQ ID NO: 133957 - DNA, 17 bp, synthetic construct
  source 1..17: mol_type = other DNA
aactccagggacaacac

SEQ ID NO: 133958 - DNA, 17 bp, synthetic construct
  source 1..17: mol_type = other DNA
actccagggacaacacc

SEQ ID NO: 133959 - DNA, 17 bp, synthetic construct
  source 1..17: mol_type = other DNA
ctccagggacaacacct

SEQ ID NO: 133960 - DNA, 17 bp, synthetic construct
  source 1..17: mol_type = other DNA
tccagggacaacaccta

SEQ ID NO: 133961 - DNA, 17 bp, synthetic construct
  source 1..17: mol_type = other DNA
ccagggacaacacctat

SEQ ID NO: 133962 - DNA, 17 bp, synthetic construct
  source 1..17: mol_type = other DNA
cagggacaacacctatc

SEQ ID NO: 133963 - DNA, 17 bp, synthetic construct
  source 1..17: mol_type = other DNA
agggacaacacctatcc

SEQ ID NO: 133964 - DNA, 17 bp, synthetic construct
  source 1..17: mol_type = other DNA
gggacaacacctatccc

SEQ ID NO: 133965 - DNA, 17 bp, synthetic construct
  source 1..17: mol_type = other DNA
ggacaacacctatcccc

SEQ ID NO: 133966 - DNA, 17 bp, synthetic construct
  source 1..17: mol_type = other DNA
gacaacacctatccccc

SEQ ID NO: 133967 - DNA, 17 bp, synthetic construct
  source 1..17: mol_type = other DNA
acaacacctatcccccc

SEQ ID NO: 133968 - DNA, 17 bp, synthetic construct
  source 1..17: mol_type = other DNA
caacacctatcccccca

SEQ ID NO: 133969 - DNA, 17 bp, synthetic construct
  source 1..17: mol_type = other DNA
aacacctatccccccag

SEQ ID NO: 133970 - DNA, 17 bp, synthetic construct
  source 1..17: mol_type = other DNA
acacctatccccccagt

SEQ ID NO: 133971 - DNA, 17 bp, synthetic construct
  source 1..17: mol_type = other DNA
cacctatccccccagtg

SEQ ID NO: 133972 - DNA, 17 bp, synthetic construct
  source 1..17: mol_type = other DNA
acctatccccccagtgc

SEQ ID NO: 133973 - DNA, 17 bp, synthetic construct
  source 1..17: mol_type = other DNA
cctatccccccagtgct

SEQ ID NO: 133974 - DNA, 17 bp, synthetic construct
  source 1..17: mol_type = other DNA
ctatccccccagtgctg

SEQ ID NO: 133975 - DNA, 17 bp, synthetic construct
  source 1..17: mol_type = other DNA
tatccccccagtgctga

SEQ ID NO: 133976 - DNA, 17 bp, synthetic construct
  source 1..17: mol_type = other DNA
atccccccagtgctgac

SEQ ID NO: 133977 - DNA, 17 bp, synthetic construct
  source 1..17: mol_type = other DNA
tccccccagtgctgacc

SEQ ID NO: 133978 - DNA, 17 bp, synthetic construct
  source 1..17: mol_type = other DNA
ccccccagtgctgacca

SEQ ID NO: 133979 - DNA, 17 bp, synthetic construct
  source 1..17: mol_type = other DNA
cccccagtgctgaccac

SEQ ID NO: 133980 - DNA, 17 bp, synthetic construct
  source 1..17: mol_type = other DNA
ccccagtgctgaccacc

SEQ ID NO: 133981 - DNA, 17 bp, synthetic construct
  source 1..17: mol_type = other DNA
cccagtgctgaccacca

SEQ ID NO: 133982 - DNA, 17 bp, synthetic construct
  source 1..17: mol_type = other DNA
ccagtgctgaccaccac

SEQ ID NO: 133983 - DNA, 17 bp, synthetic construct
  source 1..17: mol_type = other DNA
cagtgctgaccaccacc

SEQ ID NO: 133984 - DNA, 17 bp, synthetic construct
  source 1..17: mol_type = other DNA
agtgctgaccaccaccg

SEQ ID NO: 133985 - DNA, 17 bp, synthetic construct
  source 1..17: mol_type = other DNA
gtgctgaccaccaccgc

SEQ ID NO: 133986 - DNA, 17 bp, synthetic construct
  source 1..17: mol_type = other DNA
tgctgaccaccaccgcc

SEQ ID NO: 133987 - DNA, 17 bp, synthetic construct
  source 1..17: mol_type = other DNA
gctgaccaccaccgcca

SEQ ID NO: 133988 - DNA, 17 bp, synthetic construct
  source 1..17: mol_type = other DNA
ctgaccaccaccgccac

SEQ ID NO: 133989 - DNA, 17 bp, synthetic construct
  source 1..17: mol_type = other DNA
tgaccaccaccgccacc

SEQ ID NO: 133990 - DNA, 17 bp, synthetic construct
  source 1..17: mol_type = other DNA
gaccaccaccgccacca

SEQ ID NO: 133991 - DNA, 17 bp, synthetic construct
  source 1..17: mol_type = other DNA
accaccaccgccaccac

SEQ ID NO: 133992 - DNA, 17 bp, synthetic construct
  source 1..17: mol_type = other DNA
ccaccaccgccaccaca

SEQ ID NO: 133993 - DNA, 17 bp, synthetic construct
  source 1..17: mol_type = other DNA
caccaccgccaccacac

SEQ ID NO: 133994 - DNA, 17 bp, synthetic construct
  source 1..17: mol_type = other DNA
accaccgccaccacacc

SEQ ID NO: 133995 - DNA, 17 bp, synthetic construct
  source 1..17: mol_type = other DNA
ccaccgccaccacacct

SEQ ID NO: 133996 - DNA, 17 bp, synthetic construct
  source 1..17: mol_type = other DNA
caccgccaccacacctg

SEQ ID NO: 133997 - DNA, 17 bp, synthetic construct
  source 1..17: mol_type = other DNA
accgccaccacacctgc

SEQ ID NO: 133998 - DNA, 17 bp, synthetic construct
  source 1..17: mol_type = other DNA
ccgccaccacacctgca

SEQ ID NO: 133999 - DNA, 17 bp, synthetic construct
  source 1..17: mol_type = other DNA
cgccaccacacctgcag

SEQ ID NO: 134000 - DNA, 17 bp, synthetic construct
  source 1..17: mol_type = other DNA
gccaccacacctgcagc

SEQ ID NO: 134001 - DNA, 17 bp, synthetic construct
  source 1..17: mol_type = other DNA
ccaccacacctgcagcc

SEQ ID NO: 134002 - DNA, 17 bp, synthetic construct
  source 1..17: mol_type = other DNA
caccacacctgcagcca

SEQ ID NO: 134003 - DNA, 17 bp, synthetic construct
  source 1..17: mol_type = other DNA
accacacctgcagccac

SEQ ID NO: 134004 - DNA, 17 bp, synthetic construct
  source 1..17: mol_type = other DNA
ccacacctgcagccacc

SEQ ID NO: 134005 - DNA, 17 bp, synthetic construct
  source 1..17: mol_type = other DNA
cacacctgcagccacca

SEQ ID NO: 134006 - DNA, 17 bp, synthetic construct
  source 1..17: mol_type = other DNA
acacctgcagccaccag

SEQ ID NO: 134007 - DNA, 17 bp, synthetic construct
  source 1..17: mol_type = other DNA
cacctgcagccaccagc

SEQ ID NO: 134008 - DNA, 17 bp, synthetic construct
  source 1..17: mol_type = other DNA
acctgcagccaccagca

SEQ ID NO: 134009 - DNA, 17 bp, synthetic construct
  source 1..17: mol_type = other DNA
cctgcagccaccagcag

SEQ ID NO: 134010 - DNA, 17 bp, synthetic construct
  source 1..17: mol_type = other DNA
ctgcagccaccagcagc

SEQ ID NO: 134011 - DNA, 17 bp, synthetic construct
  source 1..17: mol_type = other DNA
tgcagccaccagcagca

SEQ ID NO: 134012 - DNA, 17 bp, synthetic construct
  source 1..17: mol_type = other DNA
gcagccaccagcagcac

SEQ ID NO: 134013 - DNA, 17 bp, synthetic construct
  source 1..17: mol_type = other DNA
cagccaccagcagcaca

SEQ ID NO: 134014 - DNA, 17 bp, synthetic construct
  source 1..17: mol_type = other DNA
agccaccagcagcacag

SEQ ID NO: 134015 - DNA, 17 bp, synthetic construct
  source 1..17: mol_type = other DNA
gccaccagcagcacagt

SEQ ID NO: 134016 - DNA, 17 bp, synthetic construct
  source 1..17: mol_type = other DNA
ccaccagcagcacagtg

SEQ ID NO: 134017 - DNA, 17 bp, synthetic construct
  source 1..17: mol_type = other DNA
caccagcagcacagtga

SEQ ID NO: 134018 - DNA, 17 bp, synthetic construct
  source 1..17: mol_type = other DNA
accagcagcacagtgac

SEQ ID NO: 134019 - DNA, 17 bp, synthetic construct
  source 1..17: mol_type = other DNA
ccagcagcacagtgact

SEQ ID NO: 134020 - DNA, 17 bp, synthetic construct
  source 1..17: mol_type = other DNA
cagcagcacagtgactc

SEQ ID NO: 134021 - DNA, 17 bp, synthetic construct
  source 1..17: mol_type = other DNA
agcagcacagtgactcc

SEQ ID NO: 134022 - DNA, 17 bp, synthetic construct
  source 1..17: mol_type = other DNA
gcagcacagtgactccc

SEQ ID NO: 134023 - DNA, 17 bp, synthetic construct
  source 1..17: mol_type = other DNA
cagcacagtgactccct

SEQ ID NO: 134024 - DNA, 17 bp, synthetic construct
  source 1..17: mol_type = other DNA
agcacagtgactccctc

SEQ ID NO: 134025 - DNA, 17 bp, synthetic construct
  source 1..17: mol_type = other DNA
gcacagtgactccctcc

SEQ ID NO: 134026 - DNA, 17 bp, synthetic construct
  source 1..17: mol_type = other DNA
cacagtgactccctcct

SEQ ID NO: 134027 - DNA, 17 bp, synthetic construct
  source 1..17: mol_type = other DNA
acagtgactccctcctc

SEQ ID NO: 134028 - DNA, 17 bp, synthetic construct
  source 1..17: mol_type = other DNA
cagtgactccctcctct

SEQ ID NO: 134029 - DNA, 17 bp, synthetic construct
  source 1..17: mol_type = other DNA
agtgactccctcctctg

SEQ ID NO: 134030 - DNA, 17 bp, synthetic construct
  source 1..17: mol_type = other DNA
gtgactccctcctctgc

SEQ ID NO: 134031 - DNA, 17 bp, synthetic construct
  source 1..17: mol_type = other DNA
tgactccctcctctgcc

SEQ ID NO: 134032 - DNA, 17 bp, synthetic construct
  source 1..17: mol_type = other DNA
gactccctcctctgccc

SEQ ID NO: 134033 - DNA, 17 bp, synthetic construct
  source 1..17: mol_type = other DNA
actccctcctctgccct

SEQ ID NO: 134034 - DNA, 17 bp, synthetic construct
  source 1..17: mol_type = other DNA
ctccctcctctgcccta

SEQ ID NO: 134035 - DNA, 17 bp, synthetic construct
  source 1..17: mol_type = other DNA
tccctcctctgccctag

SEQ ID NO: 134036 - DNA, 17 bp, synthetic construct
  source 1..17: mol_type = other DNA
ccctcctctgccctagg

SEQ ID NO: 134037 - DNA, 17 bp, synthetic construct
  source 1..17: mol_type = other DNA
cctcctctgccctaggg

SEQ ID NO: 134038 - DNA, 17 bp, synthetic construct
  source 1..17: mol_type = other DNA
ctcctctgccctaggga

SEQ ID NO: 134039 - DNA, 17 bp, synthetic construct
  source 1..17: mol_type = other DNA
tcctctgccctagggac

SEQ ID NO: 134040 - DNA, 17 bp, synthetic construct
  source 1..17: mol_type = other DNA
cctctgccctagggacc

SEQ ID NO: 134041 - DNA, 17 bp, synthetic construct
  source 1..17: mol_type = other DNA
ctctgccctagggacca

SEQ ID NO: 134042 - DNA, 17 bp, synthetic construct
  source 1..17: mol_type = other DNA
tctgccctagggaccac

SEQ ID NO: 134043 - DNA, 17 bp, synthetic construct
  source 1..17: mol_type = other DNA
ctgccctagggaccacc

SEQ ID NO: 134044 - DNA, 17 bp, synthetic construct
  source 1..17: mol_type = other DNA
tgccctagggaccaccc

SEQ ID NO: 134045 - DNA, 17 bp, synthetic construct
  source 1..17: mol_type = other DNA
gccctagggaccaccca

SEQ ID NO: 134046 - DNA, 17 bp, synthetic construct
  source 1..17: mol_type = other DNA
ccctagggaccacccac

SEQ ID NO: 134047 - DNA, 17 bp, synthetic construct
  source 1..17: mol_type = other DNA
cctagggaccacccaca

SEQ ID NO: 134048 - DNA, 17 bp, synthetic construct
  source 1..17: mol_type = other DNA
ctagggaccacccacac

SEQ ID NO: 134049 - DNA, 17 bp, synthetic construct
  source 1..17: mol_type = other DNA
tagggaccacccacaca

SEQ ID NO: 134050 - DNA, 17 bp, synthetic construct
  source 1..17: mol_type = other DNA
agggaccacccacacac

SEQ ID NO: 134051 - DNA, 17 bp, synthetic construct
  source 1..17: mol_type = other DNA
gggaccacccacacacc

SEQ ID NO: 134052 - DNA, 17 bp, synthetic construct
  source 1..17: mol_type = other DNA
ggaccacccacacaccc

SEQ ID NO: 134053 - DNA, 17 bp, synthetic construct
  source 1..17: mol_type = other DNA
gaccacccacacacccc

SEQ ID NO: 134054 - DNA, 17 bp, synthetic construct
  source 1..17: mol_type = other DNA
accacccacacaccccc

SEQ ID NO: 134055 - DNA, 17 bp, synthetic construct
  source 1..17: mol_type = other DNA
ccacccacacaccccca

SEQ ID NO: 134056 - DNA, 17 bp, synthetic construct
  source 1..17: mol_type = other DNA
cacccacacacccccag

SEQ ID NO: 134057 - DNA, 17 bp, synthetic construct
  source 1..17: mol_type = other DNA
acccacacacccccagt

SEQ ID NO: 134058 - DNA, 17 bp, synthetic construct
  source 1..17: mol_type = other DNA
cccacacacccccagtg

SEQ ID NO: 134059 - DNA, 17 bp, synthetic construct
  source 1..17: mol_type = other DNA
ccacacacccccagtgc

SEQ ID NO: 134060 - DNA, 17 bp, synthetic construct
  source 1..17: mol_type = other DNA
cacacacccccagtgcc

SEQ ID NO: 134061 - DNA, 17 bp, synthetic construct
  source 1..17: mol_type = other DNA
acacacccccagtgccg

SEQ ID NO: 134062 - DNA, 17 bp, synthetic construct
  source 1..17: mol_type = other DNA
cacacccccagtgccga

SEQ ID NO: 134063 - DNA, 17 bp, synthetic construct
  source 1..17: mol_type = other DNA
acacccccagtgccgaa

SEQ ID NO: 134064 - DNA, 17 bp, synthetic construct
  source 1..17: mol_type = other DNA
cacccccagtgccgaac

SEQ ID NO: 134065 - DNA, 17 bp, synthetic construct
  source 1..17: mol_type = other DNA
acccccagtgccgaaca

SEQ ID NO: 134066 - DNA, 17 bp, synthetic construct
  source 1..17: mol_type = other DNA
cccccagtgccgaacac

SEQ ID NO: 134067 - DNA, 17 bp, synthetic construct
  source 1..17: mol_type = other DNA
ccccagtgccgaacacc

SEQ ID NO: 134068 - DNA, 17 bp, synthetic construct
  source 1..17: mol_type = other DNA
cccagtgccgaacacca

SEQ ID NO: 134069 - DNA, 17 bp, synthetic construct
  source 1..17: mol_type = other DNA
ccagtgccgaacaccac

SEQ ID NO: 134070 - DNA, 17 bp, synthetic construct
  source 1..17: mol_type = other DNA
cagtgccgaacaccacg

SEQ ID NO: 134071 - DNA, 17 bp, synthetic construct
  source 1..17: mol_type = other DNA
agtgccgaacaccacgg

SEQ ID NO: 134072 - DNA, 17 bp, synthetic construct
  source 1..17: mol_type = other DNA
gtgccgaacaccacggc

SEQ ID NO: 134073 - DNA, 17 bp, synthetic construct
  source 1..17: mol_type = other DNA
tgccgaacaccacggcc

SEQ ID NO: 134074 - DNA, 17 bp, synthetic construct
  source 1..17: mol_type = other DNA
gccgaacaccacggcca

SEQ ID NO: 134075 - DNA, 17 bp, synthetic construct
  source 1..17: mol_type = other DNA
ccgaacaccacggccac

SEQ ID NO: 134076 - DNA, 17 bp, synthetic construct
  source 1..17: mol_type = other DNA
cgaacaccacggccacc

SEQ ID NO: 134077 - DNA, 17 bp, synthetic construct
  source 1..17: mol_type = other DNA
gaacaccacggccacca

SEQ ID NO: 134078 - DNA, 17 bp, synthetic construct
  source 1..17: mol_type = other DNA
aacaccacggccaccac

SEQ ID NO: 134079 - DNA, 17 bp, synthetic construct
  source 1..17: mol_type = other DNA
acaccacggccaccaca

SEQ ID NO: 134080 - DNA, 17 bp, synthetic construct
  source 1..17: mol_type = other DNA
caccacggccaccacac

SEQ ID NO: 134081 - DNA, 17 bp, synthetic construct
  source 1..17: mol_type = other DNA
accacggccaccacaca

SEQ ID NO: 134082 - DNA, 17 bp, synthetic construct
  source 1..17: mol_type = other DNA
ccacggccaccacacac

SEQ ID NO: 134083 - DNA, 17 bp, synthetic construct
  source 1..17: mol_type = other DNA
cacggccaccacacacg

SEQ ID NO: 134084 - DNA, 17 bp, synthetic construct
  source 1..17: mol_type = other DNA
acggccaccacacacgg

SEQ ID NO: 134085 - DNA, 17 bp, synthetic construct
  source 1..17: mol_type = other DNA
cggccaccacacacggg

SEQ ID NO: 134086 - DNA, 17 bp, synthetic construct
  source 1..17: mol_type = other DNA
ggccaccacacacgggc

SEQ ID NO: 134087 - DNA, 17 bp, synthetic construct
  source 1..17: mol_type = other DNA
gccaccacacacgggcg

SEQ ID NO: 134088 - DNA, 17 bp, synthetic construct
  source 1..17: mol_type = other DNA
ccaccacacacgggcga

SEQ ID NO: 134089 - DNA, 17 bp, synthetic construct
  source 1..17: mol_type = other DNA
caccacacacgggcgat

SEQ ID NO: 134090 - DNA, 17 bp, synthetic construct
  source 1..17: mol_type = other DNA
accacacacgggcgatc

SEQ ID NO: 134091 - DNA, 17 bp, synthetic construct
  source 1..17: mol_type = other DNA
ccacacacgggcgatcc

SEQ ID NO: 134092 - DNA, 17 bp, synthetic construct
  source 1..17: mol_type = other DNA
cacacacgggcgatccc

SEQ ID NO: 134093 - DNA, 17 bp, synthetic construct
  source 1..17: mol_type = other DNA
acacacgggcgatccct

SEQ ID NO: 134094 - DNA, 17 bp, synthetic construct
  source 1..17: mol_type = other DNA
cacacgggcgatccctg

SEQ ID NO: 134095 - DNA, 17 bp, synthetic construct
  source 1..17: mol_type = other DNA
acacgggcgatccctgt

SEQ ID NO: 134096 - DNA, 17 bp, synthetic construct
  source 1..17: mol_type = other DNA
cacgggcgatccctgtc

SEQ ID NO: 134097 - DNA, 17 bp, synthetic construct
  source 1..17: mol_type = other DNA
acgggcgatccctgtcc

SEQ ID NO: 134098 - DNA, 17 bp, synthetic construct
  source 1..17: mol_type = other DNA
cgggcgatccctgtccc

SEQ ID NO: 134099 - DNA, 17 bp, synthetic construct
  source 1..17: mol_type = other DNA
gggcgatccctgtcccc

SEQ ID NO: 134100 - DNA, 17 bp, synthetic construct
  source 1..17: mol_type = other DNA
ggcgatccctgtccccc

SEQ ID NO: 134101 - DNA, 17 bp, synthetic construct
  source 1..17: mol_type = other DNA
gcgatccctgtccccca

SEQ ID NO: 134102 - DNA, 17 bp, synthetic construct
  source 1..17: mol_type = other DNA
cgatccctgtcccccag

SEQ ID NO: 134103 - DNA, 17 bp, synthetic construct
  source 1..17: mol_type = other DNA
gatccctgtcccccagc

SEQ ID NO: 134104 - DNA, 17 bp, synthetic construct
  source 1..17: mol_type = other DNA
atccctgtcccccagca

SEQ ID NO: 134105 - DNA, 17 bp, synthetic construct
  source 1..17: mol_type = other DNA
tccctgtcccccagcag

SEQ ID NO: 134106 - DNA, 17 bp, synthetic construct
  source 1..17: mol_type = other DNA
ccctgtcccccagcagt

SEQ ID NO: 134107 - DNA, 17 bp, synthetic construct
  source 1..17: mol_type = other DNA
cctgtcccccagcagtc

SEQ ID NO: 134108 - DNA, 17 bp, synthetic construct
  source 1..17: mol_type = other DNA
ctgtcccccagcagtcc

SEQ ID NO: 134109 - DNA, 17 bp, synthetic construct
  source 1..17: mol_type = other DNA
tgtcccccagcagtccc

SEQ ID NO: 134110 - DNA, 17 bp, synthetic construct
  source 1..17: mol_type = other DNA
gtcccccagcagtcccc

SEQ ID NO: 134111 - DNA, 17 bp, synthetic construct
  source 1..17: mol_type = other DNA
tcccccagcagtcccca

SEQ ID NO: 134112 - DNA, 17 bp, synthetic construct
  source 1..17: mol_type = other DNA
cccccagcagtccccac

SEQ ID NO: 134113 - DNA, 17 bp, synthetic construct
  source 1..17: mol_type = other DNA
ccccagcagtccccaca

SEQ ID NO: 134114 - DNA, 17 bp, synthetic construct
  source 1..17: mol_type = other DNA
cccagcagtccccacac

SEQ ID NO: 134115 - DNA, 17 bp, synthetic construct
  source 1..17: mol_type = other DNA
ccagcagtccccacacg

SEQ ID NO: 134116 - DNA, 17 bp, synthetic construct
  source 1..17: mol_type = other DNA
cagcagtccccacacgg

SEQ ID NO: 134117 - DNA, 17 bp, synthetic construct
  source 1..17: mol_type = other DNA
agcagtccccacacggt

SEQ ID NO: 134118 - DNA, 17 bp, synthetic construct
  source 1..17: mol_type = other DNA
gcagtccccacacggtg

SEQ ID NO: 134119 - DNA, 17 bp, synthetic construct
  source 1..17: mol_type = other DNA
cagtccccacacggtgc

SEQ ID NO: 134120 - DNA, 17 bp, synthetic construct
  source 1..17: mol_type = other DNA
agtccccacacggtgcg

SEQ ID NO: 134121 - DNA, 17 bp, synthetic construct
  source 1..17: mol_type = other DNA
gtccccacacggtgcgc

SEQ ID NO: 134122 - DNA, 17 bp, synthetic construct
  source 1..17: mol_type = other DNA
tccccacacggtgcgca

SEQ ID NO: 134123 - DNA, 17 bp, synthetic construct
  source 1..17: mol_type = other DNA
ccccacacggtgcgcac

SEQ ID NO: 134124 - DNA, 17 bp, synthetic construct
  source 1..17: mol_type = other DNA
cccacacggtgcgcaca

SEQ ID NO: 134125 - DNA, 17 bp, synthetic construct
  source 1..17: mol_type = other DNA
ccacacggtgcgcacag

SEQ ID NO: 134126 - DNA, 17 bp, synthetic construct
  source 1..17: mol_type = other DNA
cacacggtgcgcacagc

SEQ ID NO: 134127 - DNA, 17 bp, synthetic construct
  source 1..17: mol_type = other DNA
acacggtgcgcacagcc

SEQ ID NO: 134128 - DNA, 17 bp, synthetic construct
  source 1..17: mol_type = other DNA
cacggtgcgcacagcct

SEQ ID NO: 134129 - DNA, 17 bp, synthetic construct
  source 1..17: mol_type = other DNA
acggtgcgcacagcctg

SEQ ID NO: 134130 - DNA, 17 bp, synthetic construct
  source 1..17: mol_type = other DNA
cggtgcgcacagcctgg

SEQ ID NO: 134131 - DNA, 17 bp, synthetic construct
  source 1..17: mol_type = other DNA
ggtgcgcacagcctgga

SEQ ID NO: 134132 - DNA, 17 bp, synthetic construct
  source 1..17: mol_type = other DNA
gtgcgcacagcctggac

SEQ ID NO: 134133 - DNA, 17 bp, synthetic construct
  source 1..17: mol_type = other DNA
tgcgcacagcctggact

SEQ ID NO: 134134 - DNA, 17 bp, synthetic construct
  source 1..17: mol_type = other DNA
gcgcacagcctggactt

SEQ ID NO: 134135 - DNA, 17 bp, synthetic construct
  source 1..17: mol_type = other DNA
cgcacagcctggacttc

SEQ ID NO: 134136 - DNA, 17 bp, synthetic construct
  source 1..17: mol_type = other DNA
gcacagcctggacttcg

SEQ ID NO: 134137 - DNA, 17 bp, synthetic construct
  source 1..17: mol_type = other DNA
cacagcctggacttcgg

SEQ ID NO: 134138 - DNA, 17 bp, synthetic construct
  source 1..17: mol_type = other DNA
acagcctggacttcggc

SEQ ID NO: 134139 - DNA, 17 bp, synthetic construct
  source 1..17: mol_type = other DNA
cagcctggacttcggcc

SEQ ID NO: 134140 - DNA, 17 bp, synthetic construct
  source 1..17: mol_type = other DNA
agcctggacttcggcca

SEQ ID NO: 134141 - DNA, 17 bp, synthetic construct
  source 1..17: mol_type = other DNA
gcctggacttcggccac

SEQ ID NO: 134142 - DNA, 17 bp, synthetic construct
  source 1..17: mol_type = other DNA
cctggacttcggccacc

SEQ ID NO: 134143 - DNA, 17 bp, synthetic construct
  source 1..17: mol_type = other DNA
ctggacttcggccacct

SEQ ID NO: 134144 - DNA, 17 bp, synthetic construct
  source 1..17: mol_type = other DNA
tggacttcggccacctc

SEQ ID NO: 134145 - DNA, 17 bp, synthetic construct
  source 1..17: mol_type = other DNA
ggacttcggccacctca

SEQ ID NO: 134146 - DNA, 17 bp, synthetic construct
  source 1..17: mol_type = other DNA
gacttcggccacctcag

SEQ ID NO: 134147 - DNA, 17 bp, synthetic construct
  source 1..17: mol_type = other DNA
acttcggccacctcagg

SEQ ID NO: 134148 - DNA, 17 bp, synthetic construct
  source 1..17: mol_type = other DNA
cttcggccacctcaggc

SEQ ID NO: 134149 - DNA, 17 bp, synthetic construct
  source 1..17: mol_type = other DNA
ttcggccacctcaggca

SEQ ID NO: 134150 - DNA, 17 bp, synthetic construct
  source 1..17: mol_type = other DNA
tcggccacctcaggcac

SEQ ID NO: 134151 - DNA, 17 bp, synthetic construct
  source 1..17: mol_type = other DNA
cggccacctcaggcacc

SEQ ID NO: 134152 - DNA, 17 bp, synthetic construct
  source 1..17: mol_type = other DNA
ggccacctcaggcacct

SEQ ID NO: 134153 - DNA, 17 bp, synthetic construct
  source 1..17: mol_type = other DNA
gccacctcaggcacctt

SEQ ID NO: 134154 - DNA, 17 bp, synthetic construct
  source 1..17: mol_type = other DNA
ccacctcaggcaccttg

SEQ ID NO: 134155 - DNA, 17 bp, synthetic construct
  source 1..17: mol_type = other DNA
cacctcaggcaccttgg

SEQ ID NO: 134156 - DNA, 17 bp, synthetic construct
  source 1..17: mol_type = other DNA
acctcaggcaccttggg

SEQ ID NO: 134157 - DNA, 17 bp, synthetic construct
  source 1..17: mol_type = other DNA
cctcaggcaccttgggc

SEQ ID NO: 134158 - DNA, 17 bp, synthetic construct
  source 1..17: mol_type = other DNA
ctcaggcaccttgggca

SEQ ID NO: 134159 - DNA, 17 bp, synthetic construct
  source 1..17: mol_type = other DNA
tcaggcaccttgggcac

SEQ ID NO: 134160 - DNA, 17 bp, synthetic construct
  source 1..17: mol_type = other DNA
caggcaccttgggcacc

SEQ ID NO: 134161 - DNA, 17 bp, synthetic construct
  source 1..17: mol_type = other DNA
aggcaccttgggcacca

SEQ ID NO: 134162 - DNA, 17 bp, synthetic construct
  source 1..17: mol_type = other DNA
ggcaccttgggcaccac

SEQ ID NO: 134163 - DNA, 17 bp, synthetic construct
  source 1..17: mol_type = other DNA
gcaccttgggcaccacc

SEQ ID NO: 134164 - DNA, 17 bp, synthetic construct
  source 1..17: mol_type = other DNA
caccttgggcaccaccc

SEQ ID NO: 134165 - DNA, 17 bp, synthetic construct
  source 1..17: mol_type = other DNA
accttgggcaccaccca

SEQ ID NO: 134166 - DNA, 17 bp, synthetic construct
  source 1..17: mol_type = other DNA
ccttgggcaccacccac

SEQ ID NO: 134167 - DNA, 17 bp, synthetic construct
  source 1..17: mol_type = other DNA
cttgggcaccacccaca

SEQ ID NO: 134168 - DNA, 17 bp, synthetic construct
  source 1..17: mol_type = other DNA
ttgggcaccacccacat

SEQ ID NO: 134169 - DNA, 17 bp, synthetic construct
  source 1..17: mol_type = other DNA
tgggcaccacccacatc

SEQ ID NO: 134170 - DNA, 17 bp, synthetic construct
  source 1..17: mol_type = other DNA
gggcaccacccacatca

SEQ ID NO: 134171 - DNA, 17 bp, synthetic construct
  source 1..17: mol_type = other DNA
ggcaccacccacatcac

SEQ ID NO: 134172 - DNA, 17 bp, synthetic construct
  source 1..17: mol_type = other DNA
gcaccacccacatcaca

SEQ ID NO: 134173 - DNA, 17 bp, synthetic construct
  source 1..17: mol_type = other DNA
caccacccacatcacag

SEQ ID NO: 134174 - DNA, 17 bp, synthetic construct
  source 1..17: mol_type = other DNA
accacccacatcacaga

SEQ ID NO: 134175 - DNA, 17 bp, synthetic construct
  source 1..17: mol_type = other DNA
ccacccacatcacagag

SEQ ID NO: 134176 - DNA, 17 bp, synthetic construct
  source 1..17: mol_type = other DNA
cacccacatcacagagc

SEQ ID NO: 134177 - DNA, 17 bp, synthetic construct
  source 1..17: mol_type = other DNA
acccacatcacagagcc

SEQ ID NO: 134178 - DNA, 17 bp, synthetic construct
  source 1..17: mol_type = other DNA
cccacatcacagagcct

SEQ ID NO: 134179 - DNA, 17 bp, synthetic construct
  source 1..17: mol_type = other DNA
ccacatcacagagcctt

SEQ ID NO: 134180 - DNA, 17 bp, synthetic construct
  source 1..17: mol_type = other DNA
cacatcacagagccttc

SEQ ID NO: 134181 - DNA, 17 bp, synthetic construct
  source 1..17: mol_type = other DNA
acatcacagagccttcc

SEQ ID NO: 134182 - DNA, 17 bp, synthetic construct
  source 1..17: mol_type = other DNA
catcacagagccttcca

SEQ ID NO: 134183 - DNA, 17 bp, synthetic construct
  source 1..17: mol_type = other DNA
atcacagagccttccac

SEQ ID NO: 134184 - DNA, 17 bp, synthetic construct
  source 1..17: mol_type = other DNA
tcacagagccttccacg

SEQ ID NO: 134185 - DNA, 17 bp, synthetic construct
  source 1..17: mol_type = other DNA
cacagagccttccacgg

SEQ ID NO: 134186 - DNA, 17 bp, synthetic construct
  source 1..17: mol_type = other DNA
acagagccttccacggg

SEQ ID NO: 134187 - DNA, 17 bp, synthetic construct
  source 1..17: mol_type = other DNA
cagagccttccacgggg

SEQ ID NO: 134188 - DNA, 17 bp, synthetic construct
  source 1..17: mol_type = other DNA
agagccttccacgggga

SEQ ID NO: 134189 - DNA, 17 bp, synthetic construct
  source 1..17: mol_type = other DNA
gagccttccacggggac

SEQ ID NO: 134190 - DNA, 17 bp, synthetic construct
  source 1..17: mol_type = other DNA
agccttccacggggact

SEQ ID NO: 134191 - DNA, 17 bp, synthetic construct
  source 1..17: mol_type = other DNA
gccttccacggggactt

SEQ ID NO: 134192 - DNA, 17 bp, synthetic construct
  source 1..17: mol_type = other DNA
ccttccacggggacttc

SEQ ID NO: 134193 - DNA, 17 bp, synthetic construct
  source 1..17: mol_type = other DNA
cttccacggggacttcc

SEQ ID NO: 134194 - DNA, 17 bp, synthetic construct
  source 1..17: mol_type = other DNA
ttccacggggacttccc

SEQ ID NO: 134195 - DNA, 17 bp, synthetic construct
  source 1..17: mol_type = other DNA
tccacggggacttccca

SEQ ID NO: 134196 - DNA, 17 bp, synthetic construct
  source 1..17: mol_type = other DNA
ccacggggacttcccac

SEQ ID NO: 134197 - DNA, 17 bp, synthetic construct
  source 1..17: mol_type = other DNA
cacggggacttcccaca

SEQ ID NO: 134198 - DNA, 17 bp, synthetic construct
  source 1..17: mol_type = other DNA
acggggacttcccacac

SEQ ID NO: 134199 - DNA, 17 bp, synthetic construct
  source 1..17: mol_type = other DNA
cggggacttcccacacc

SEQ ID NO: 134200 - DNA, 17 bp, synthetic construct
  source 1..17: mol_type = other DNA
ggggacttcccacaccc

SEQ ID NO: 134201 - DNA, 17 bp, synthetic construct
  source 1..17: mol_type = other DNA
gggacttcccacacccc

SEQ ID NO: 134202 - DNA, 17 bp, synthetic construct
  source 1..17: mol_type = other DNA
ggacttcccacacccca

SEQ ID NO: 134203 - DNA, 17 bp, synthetic construct
  source 1..17: mol_type = other DNA
gacttcccacaccccag

SEQ ID NO: 134204 - DNA, 17 bp, synthetic construct
  source 1..17: mol_type = other DNA
acttcccacaccccagc

SEQ ID NO: 134205 - DNA, 17 bp, synthetic construct
  source 1..17: mol_type = other DNA
cttcccacaccccagca

SEQ ID NO: 134206 - DNA, 17 bp, synthetic construct
  source 1..17: mol_type = other DNA
ttcccacaccccagcag

SEQ ID NO: 134207 - DNA, 17 bp, synthetic construct
  source 1..17: mol_type = other DNA
tcccacaccccagcagc

SEQ ID NO: 134208 - DNA, 17 bp, synthetic construct
  source 1..17: mol_type = other DNA
cccacaccccagcagca

SEQ ID NO: 134209 - DNA, 17 bp, synthetic construct
  source 1..17: mol_type = other DNA
ccacaccccagcagcaa

SEQ ID NO: 134210 - DNA, 17 bp, synthetic construct
  source 1..17: mol_type = other DNA
cacaccccagcagcaac

SEQ ID NO: 134211 - DNA, 17 bp, synthetic construct
  source 1..17: mol_type = other DNA
acaccccagcagcaacc

SEQ ID NO: 134212 - DNA, 17 bp, synthetic construct
  source 1..17: mol_type = other DNA
caccccagcagcaacca

SEQ ID NO: 134213 - DNA, 17 bp, synthetic construct
  source 1..17: mol_type = other DNA
accccagcagcaaccac

SEQ ID NO: 134214 - DNA, 17 bp, synthetic construct
  source 1..17: mol_type = other DNA
ccccagcagcaaccacc

SEQ ID NO: 134215 - DNA, 17 bp, synthetic construct
  source 1..17: mol_type = other DNA
cccagcagcaaccaccg

SEQ ID NO: 134216 - DNA, 17 bp, synthetic construct
  source 1..17: mol_type = other DNA
ccagcagcaaccaccgg

SEQ ID NO: 134217 - DNA, 17 bp, synthetic construct
  source 1..17: mol_type = other DNA
cagcagcaaccaccggt

SEQ ID NO: 134218 - DNA, 17 bp, synthetic construct
  source 1..17: mol_type = other DNA
agcagcaaccaccggta

SEQ ID NO: 134219 - DNA, 17 bp, synthetic construct
  source 1..17: mol_type = other DNA
gcagcaaccaccggtac

SEQ ID NO: 134220 - DNA, 17 bp, synthetic construct
  source 1..17: mol_type = other DNA
cagcaaccaccggtacc

SEQ ID NO: 134221 - DNA, 17 bp, synthetic construct
  source 1..17: mol_type = other DNA
agcaaccaccggtacca

SEQ ID NO: 134222 - DNA, 17 bp, synthetic construct
  source 1..17: mol_type = other DNA
gcaaccaccggtaccac

SEQ ID NO: 134223 - DNA, 17 bp, synthetic construct
  source 1..17: mol_type = other DNA
caaccaccggtaccacc

SEQ ID NO: 134224 - DNA, 17 bp, synthetic construct
  source 1..17: mol_type = other DNA
aaccaccggtaccaccc

SEQ ID NO: 134225 - DNA, 17 bp, synthetic construct
  source 1..17: mol_type = other DNA
accaccggtaccaccca

SEQ ID NO: 134226 - DNA, 17 bp, synthetic construct
  source 1..17: mol_type = other DNA
ccaccggtaccacccag

SEQ ID NO: 134227 - DNA, 17 bp, synthetic construct
  source 1..17: mol_type = other DNA
caccggtaccacccagc

SEQ ID NO: 134228 - DNA, 17 bp, synthetic construct
  source 1..17: mol_type = other DNA
accggtaccacccagca

SEQ ID NO: 134229 - DNA, 17 bp, synthetic construct
  source 1..17: mol_type = other DNA
ccggtaccacccagcac

SEQ ID NO: 134230 - DNA, 17 bp, synthetic construct
  source 1..17: mol_type = other DNA
cggtaccacccagcact

SEQ ID NO: 134231 - DNA, 17 bp, synthetic construct
  source 1..17: mol_type = other DNA
ggtaccacccagcactc

SEQ ID NO: 134232 - DNA, 17 bp, synthetic construct
  source 1..17: mol_type = other DNA
gtaccacccagcactcg

SEQ ID NO: 134233 - DNA, 17 bp, synthetic construct
  source 1..17: mol_type = other DNA
taccacccagcactcga

SEQ ID NO: 134234 - DNA, 17 bp, synthetic construct
  source 1..17: mol_type = other DNA
accacccagcactcgac

SEQ ID NO: 134235 - DNA, 17 bp, synthetic construct
  source 1..17: mol_type = other DNA
ccacccagcactcgact

SEQ ID NO: 134236 - DNA, 17 bp, synthetic construct
  source 1..17: mol_type = other DNA
cacccagcactcgactc

SEQ ID NO: 134237 - DNA, 17 bp, synthetic construct
  source 1..17: mol_type = other DNA
acccagcactcgactcc

SEQ ID NO: 134238 - DNA, 17 bp, synthetic construct
  source 1..17: mol_type = other DNA
cccagcactcgactcca

SEQ ID NO: 134239 - DNA, 17 bp, synthetic construct
  source 1..17: mol_type = other DNA
ccagcactcgactccag

SEQ ID NO: 134240 - DNA, 17 bp, synthetic construct
  source 1..17: mol_type = other DNA
cagcactcgactccagc

SEQ ID NO: 134241 - DNA, 17 bp, synthetic construct
  source 1..17: mol_type = other DNA
agcactcgactccagcc

SEQ ID NO: 134242 - DNA, 17 bp, synthetic construct
  source 1..17: mol_type = other DNA
gcactcgactccagccc

SEQ ID NO: 134243 - DNA, 17 bp, synthetic construct
  source 1..17: mol_type = other DNA
cactcgactccagccct

SEQ ID NO: 134244 - DNA, 17 bp, synthetic construct
  source 1..17: mol_type = other DNA
actcgactccagccctg

SEQ ID NO: 134245 - DNA, 17 bp, synthetic construct
  source 1..17: mol_type = other DNA
ctcgactccagccctgt

SEQ ID NO: 134246 - DNA, 17 bp, synthetic construct
  source 1..17: mol_type = other DNA
tcgactccagccctgtc

SEQ ID NO: 134247 - DNA, 17 bp, synthetic construct
  source 1..17: mol_type = other DNA
cgactccagccctgtcc

SEQ ID NO: 134248 - DNA, 17 bp, synthetic construct
  source 1..17: mol_type = other DNA
gactccagccctgtcca

SEQ ID NO: 134249 - DNA, 17 bp, synthetic construct
  source 1..17: mol_type = other DNA
actccagccctgtccag

SEQ ID NO: 134250 - DNA, 17 bp, synthetic construct
  source 1..17: mol_type = other DNA
ctccagccctgtccagc

SEQ ID NO: 134251 - DNA, 17 bp, synthetic construct
  source 1..17: mol_type = other DNA
tccagccctgtccagcc

SEQ ID NO: 134252 - DNA, 17 bp, synthetic construct
  source 1..17: mol_type = other DNA
ccagccctgtccagccc

SEQ ID NO: 134253 - DNA, 17 bp, synthetic construct
  source 1..17: mol_type = other DNA
cagccctgtccagccct

SEQ ID NO: 134254 - DNA, 17 bp, synthetic construct
  source 1..17: mol_type = other DNA
agccctgtccagccctc

SEQ ID NO: 134255 - DNA, 17 bp, synthetic construct
  source 1..17: mol_type = other DNA
gccctgtccagccctca

SEQ ID NO: 134256 - DNA, 17 bp, synthetic construct
  source 1..17: mol_type = other DNA
ccctgtccagccctcac

SEQ ID NO: 134257 - DNA, 17 bp, synthetic construct
  source 1..17: mol_type = other DNA
cctgtccagccctcacc

SEQ ID NO: 134258 - DNA, 17 bp, synthetic construct
  source 1..17: mol_type = other DNA
ctgtccagccctcaccc

SEQ ID NO: 134259 - DNA, 17 bp, synthetic construct
  source 1..17: mol_type = other DNA
tgtccagccctcaccct

SEQ ID NO: 134260 - DNA, 17 bp, synthetic construct
  source 1..17: mol_type = other DNA
gtccagccctcacccta

SEQ ID NO: 134261 - DNA, 17 bp, synthetic construct
  source 1..17: mol_type = other DNA
tccagccctcaccctag

SEQ ID NO: 134262 - DNA, 17 bp, synthetic construct
  source 1..17: mol_type = other DNA
ccagccctcaccctagc

SEQ ID NO: 134263 - DNA, 17 bp, synthetic construct
  source 1..17: mol_type = other DNA
cagccctcaccctagca

SEQ ID NO: 134264 - DNA, 17 bp, synthetic construct
  source 1..17: mol_type = other DNA
agccctcaccctagcag

SEQ ID NO: 134265 - DNA, 17 bp, synthetic construct
  source 1..17: mol_type = other DNA
gccctcaccctagcagc

SEQ ID NO: 134266 - DNA, 17 bp, synthetic construct
  source 1..17: mol_type = other DNA
ccctcaccctagcagca

SEQ ID NO: 134267 - DNA, 17 bp, synthetic construct
  source 1..17: mol_type = other DNA
cctcaccctagcagcag

SEQ ID NO: 134268 - DNA, 17 bp, synthetic construct
  source 1..17: mol_type = other DNA
ctcaccctagcagcagg

SEQ ID NO: 134269 - DNA, 17 bp, synthetic construct
  source 1..17: mol_type = other DNA
tcaccctagcagcagga

SEQ ID NO: 134270 - DNA, 17 bp, synthetic construct
  source 1..17: mol_type = other DNA
caccctagcagcaggac

SEQ ID NO: 134271 - DNA, 17 bp, synthetic construct
  source 1..17: mol_type = other DNA
accctagcagcaggacc

SEQ ID NO: 134272 - DNA, 17 bp, synthetic construct
  source 1..17: mol_type = other DNA
ccctagcagcaggacca

SEQ ID NO: 134273 - DNA, 17 bp, synthetic construct
  source 1..17: mol_type = other DNA
cctagcagcaggaccac

SEQ ID NO: 134274 - DNA, 17 bp, synthetic construct
  source 1..17: mol_type = other DNA
ctagcagcaggaccacc

SEQ ID NO: 134275 - DNA, 17 bp, synthetic construct
  source 1..17: mol_type = other DNA
tagcagcaggaccaccg

SEQ ID NO: 134276 - DNA, 17 bp, synthetic construct
  source 1..17: mol_type = other DNA
agcagcaggaccaccga

SEQ ID NO: 134277 - DNA, 17 bp, synthetic construct
  source 1..17: mol_type = other DNA
gcagcaggaccaccgag

SEQ ID NO: 134278 - DNA, 17 bp, synthetic construct
  source 1..17: mol_type = other DNA
cagcaggaccaccgagt

SEQ ID NO: 134279 - DNA, 17 bp, synthetic construct
  source 1..17: mol_type = other DNA
agcaggaccaccgagtc

SEQ ID NO: 134280 - DNA, 17 bp, synthetic construct
  source 1..17: mol_type = other DNA
gcaggaccaccgagtca

SEQ ID NO: 134281 - DNA, 17 bp, synthetic construct
  source 1..17: mol_type = other DNA
caggaccaccgagtcac

SEQ ID NO: 134282 - DNA, 17 bp, synthetic construct
  source 1..17: mol_type = other DNA
aggaccaccgagtcacc

SEQ ID NO: 134283 - DNA, 17 bp, synthetic construct
  source 1..17: mol_type = other DNA
ggaccaccgagtcaccc

SEQ ID NO: 134284 - DNA, 17 bp, synthetic construct
  source 1..17: mol_type = other DNA
gaccaccgagtcacccc

SEQ ID NO: 134285 - DNA, 17 bp, synthetic construct
  source 1..17: mol_type = other DNA
accaccgagtcaccccc

SEQ ID NO: 134286 - DNA, 17 bp, synthetic construct
  source 1..17: mol_type = other DNA
ccaccgagtcaccccct

SEQ ID NO: 134287 - DNA, 17 bp, synthetic construct
  source 1..17: mol_type = other DNA
caccgagtcaccccctt

SEQ ID NO: 134288 - DNA, 17 bp, synthetic construct
  source 1..17: mol_type = other DNA
accgagtcacccccttc

SEQ ID NO: 134289 - DNA, 17 bp, synthetic construct
  source 1..17: mol_type = other DNA
ccgagtcacccccttcc

SEQ ID NO: 134290 - DNA, 17 bp, synthetic construct
  source 1..17: mol_type = other DNA
cgagtcacccccttccc

SEQ ID NO: 134291 - DNA, 17 bp, synthetic construct
  source 1..17: mol_type = other DNA
gagtcacccccttcccc

SEQ ID NO: 134292 - DNA, 17 bp, synthetic construct
  source 1..17: mol_type = other DNA
agtcacccccttcccca

SEQ ID NO: 134293 - DNA, 17 bp, synthetic construct
  source 1..17: mol_type = other DNA
gtcacccccttccccag

SEQ ID NO: 134294 - DNA, 17 bp, synthetic construct
  source 1..17: mol_type = other DNA
tcacccccttccccagg

SEQ ID NO: 134295 - DNA, 17 bp, synthetic construct
  source 1..17: mol_type = other DNA
cacccccttccccaggg

SEQ ID NO: 134296 - DNA, 17 bp, synthetic construct
  source 1..17: mol_type = other DNA
acccccttccccaggga

SEQ ID NO: 134297 - DNA, 17 bp, synthetic construct
  source 1..17: mol_type = other DNA
cccccttccccagggac

SEQ ID NO: 134298 - DNA, 17 bp, synthetic construct
  source 1..17: mol_type = other DNA
ccccttccccagggacg

SEQ ID NO: 134299 - DNA, 17 bp, synthetic construct
  source 1..17: mol_type = other DNA
cccttccccagggacga

SEQ ID NO: 134300 - DNA, 17 bp, synthetic construct
  source 1..17: mol_type = other DNA
ccttccccagggacgac

SEQ ID NO: 134301 - DNA, 17 bp, synthetic construct
  source 1..17: mol_type = other DNA
cttccccagggacgacc

SEQ ID NO: 134302 - DNA, 17 bp, synthetic construct
  source 1..17: mol_type = other DNA
ttccccagggacgacca

SEQ ID NO: 134303 - DNA, 17 bp, synthetic construct
  source 1..17: mol_type = other DNA
tccccagggacgaccac

SEQ ID NO: 134304 - DNA, 17 bp, synthetic construct
  source 1..17: mol_type = other DNA
ccccagggacgaccacc

SEQ ID NO: 134305 - DNA, 17 bp, synthetic construct
  source 1..17: mol_type = other DNA
cccagggacgaccaccc

SEQ ID NO: 134306 - DNA, 17 bp, synthetic construct
  source 1..17: mol_type = other DNA
ccagggacgaccacccc

SEQ ID NO: 134307 - DNA, 17 bp, synthetic construct
  source 1..17: mol_type = other DNA
cagggacgaccaccccg

SEQ ID NO: 134308 - DNA, 17 bp, synthetic construct
  source 1..17: mol_type = other DNA
agggacgaccaccccgg

SEQ ID NO: 134309 - DNA, 17 bp, synthetic construct
  source 1..17: mol_type = other DNA
gggacgaccaccccggg

SEQ ID NO: 134310 - DNA, 17 bp, synthetic construct
  source 1..17: mol_type = other DNA
ggacgaccaccccgggc

SEQ ID NO: 134311 - DNA, 17 bp, synthetic construct
  source 1..17: mol_type = other DNA
gacgaccaccccgggcc

SEQ ID NO: 134312 - DNA, 17 bp, synthetic construct
  source 1..17: mol_type = other DNA
acgaccaccccgggcca

SEQ ID NO: 134313 - DNA, 17 bp, synthetic construct
  source 1..17: mol_type = other DNA
cgaccaccccgggccac

SEQ ID NO: 134314 - DNA, 17 bp, synthetic construct
  source 1..17: mol_type = other DNA
gaccaccccgggccaca

SEQ ID NO: 134315 - DNA, 17 bp, synthetic construct
  source 1..17: mol_type = other DNA
accaccccgggccacac

SEQ ID NO: 134316 - DNA, 17 bp, synthetic construct
  source 1..17: mol_type = other DNA
ccaccccgggccacacc

SEQ ID NO: 134317 - DNA, 17 bp, synthetic construct
  source 1..17: mol_type = other DNA
caccccgggccacacca

SEQ ID NO: 134318 - DNA, 17 bp, synthetic construct
  source 1..17: mol_type = other DNA
accccgggccacaccac

SEQ ID NO: 134319 - DNA, 17 bp, synthetic construct
  source 1..17: mol_type = other DNA
ccccgggccacaccacg

SEQ ID NO: 134320 - DNA, 17 bp, synthetic construct
  source 1..17: mol_type = other DNA
cccgggccacaccacgg

SEQ ID NO: 134321 - DNA, 17 bp, synthetic construct
  source 1..17: mol_type = other DNA
ccgggccacaccacggc

SEQ ID NO: 134322 - DNA, 17 bp, synthetic construct
  source 1..17: mol_type = other DNA
cgggccacaccacggcc

SEQ ID NO: 134323 - DNA, 17 bp, synthetic construct
  source 1..17: mol_type = other DNA
gggccacaccacggcca

SEQ ID NO: 134324 - DNA, 17 bp, synthetic construct
  source 1..17: mol_type = other DNA
ggccacaccacggccac

SEQ ID NO: 134325 - DNA, 17 bp, synthetic construct
  source 1..17: mol_type = other DNA
gccacaccacggccacc

SEQ ID NO: 134326 - DNA, 17 bp, synthetic construct
  source 1..17: mol_type = other DNA
ccacaccacggccacct

SEQ ID NO: 134327 - DNA, 17 bp, synthetic construct
  source 1..17: mol_type = other DNA
cacaccacggccacctc

SEQ ID NO: 134328 - DNA, 17 bp, synthetic construct
  source 1..17: mol_type = other DNA
acaccacggccacctcc

SEQ ID NO: 134329 - DNA, 17 bp, synthetic construct
  source 1..17: mol_type = other DNA
caccacggccacctcca

SEQ ID NO: 134330 - DNA, 17 bp, synthetic construct
  source 1..17: mol_type = other DNA
accacggccacctccag

SEQ ID NO: 134331 - DNA, 17 bp, synthetic construct
  source 1..17: mol_type = other DNA
ccacggccacctccagg

SEQ ID NO: 134332 - DNA, 17 bp, synthetic construct
  source 1..17: mol_type = other DNA
cacggccacctccagga

SEQ ID NO: 134333 - DNA, 17 bp, synthetic construct
  source 1..17: mol_type = other DNA
acggccacctccaggac

SEQ ID NO: 134334 - DNA, 17 bp, synthetic construct
  source 1..17: mol_type = other DNA
cggccacctccaggacc

SEQ ID NO: 134335 - DNA, 17 bp, synthetic construct
  source 1..17: mol_type = other DNA
ggccacctccaggacca

SEQ ID NO: 134336 - DNA, 17 bp, synthetic construct
  source 1..17: mol_type = other DNA
gccacctccaggaccac

SEQ ID NO: 134337 - DNA, 17 bp, synthetic construct
  source 1..17: mol_type = other DNA
ccacctccaggaccacg

SEQ ID NO: 134338 - DNA, 17 bp, synthetic construct
  source 1..17: mol_type = other DNA
cacctccaggaccacgg

SEQ ID NO: 134339 - DNA, 17 bp, synthetic construct
  source 1..17: mol_type = other DNA
acctccaggaccacggc

SEQ ID NO: 134340 - DNA, 17 bp, synthetic construct
  source 1..17: mol_type = other DNA
cctccaggaccacggcc

SEQ ID NO: 134341 - DNA, 17 bp, synthetic construct
  source 1..17: mol_type = other DNA
ctccaggaccacggcca

SEQ ID NO: 134342 - DNA, 17 bp, synthetic construct
  source 1..17: mol_type = other DNA
tccaggaccacggccac

SEQ ID NO: 134343 - DNA, 17 bp, synthetic construct
  source 1..17: mol_type = other DNA
ccaggaccacggccacg

SEQ ID NO: 134344 - DNA, 17 bp, synthetic construct
  source 1..17: mol_type = other DNA
caggaccacggccacgg

SEQ ID NO: 134345 - DNA, 17 bp, synthetic construct
  source 1..17: mol_type = other DNA
aggaccacggccacggc

SEQ ID NO: 134346 - DNA, 17 bp, synthetic construct
  source 1..17: mol_type = other DNA
ggaccacggccacggcc

SEQ ID NO: 134347 - DNA, 17 bp, synthetic construct
  source 1..17: mol_type = other DNA
gaccacggccacggcca

SEQ ID NO: 134348 - DNA, 17 bp, synthetic construct
  source 1..17: mol_type = other DNA
accacggccacggccac

SEQ ID NO: 134349 - DNA, 17 bp, synthetic construct
  source 1..17: mol_type = other DNA
ccacggccacggccaca

SEQ ID NO: 134350 - DNA, 17 bp, synthetic construct
  source 1..17: mol_type = other DNA
cacggccacggccacac

SEQ ID NO: 134351 - DNA, 17 bp, synthetic construct
  source 1..17: mol_type = other DNA
acggccacggccacacc

SEQ ID NO: 134352 - DNA, 17 bp, synthetic construct
  source 1..17: mol_type = other DNA
cggccacggccacaccc

SEQ ID NO: 134353 - DNA, 17 bp, synthetic construct
  source 1..17: mol_type = other DNA
ggccacggccacaccca

SEQ ID NO: 134354 - DNA, 17 bp, synthetic construct
  source 1..17: mol_type = other DNA
gccacggccacacccag

SEQ ID NO: 134355 - DNA, 17 bp, synthetic construct
  source 1..17: mol_type = other DNA
ccacggccacacccagc

SEQ ID NO: 134356 - DNA, 17 bp, synthetic construct
  source 1..17: mol_type = other DNA
cacggccacacccagca

SEQ ID NO: 134357 - DNA, 17 bp, synthetic construct
  source 1..17: mol_type = other DNA
acggccacacccagcaa

SEQ ID NO: 134358 - DNA, 17 bp, synthetic construct
  source 1..17: mol_type = other DNA
cggccacacccagcaag

SEQ ID NO: 134359 - DNA, 17 bp, synthetic construct
  source 1..17: mol_type = other DNA
ggccacacccagcaaga

SEQ ID NO: 134360 - DNA, 17 bp, synthetic construct
  source 1..17: mol_type = other DNA
gccacacccagcaagac

SEQ ID NO: 134361 - DNA, 17 bp, synthetic construct
  source 1..17: mol_type = other DNA
ccacacccagcaagacc

SEQ ID NO: 134362 - DNA, 17 bp, synthetic construct
  source 1..17: mol_type = other DNA
cacacccagcaagaccc

SEQ ID NO: 134363 - DNA, 17 bp, synthetic construct
  source 1..17: mol_type = other DNA
acacccagcaagacccg

SEQ ID NO: 134364 - DNA, 17 bp, synthetic construct
  source 1..17: mol_type = other DNA
cacccagcaagacccgc

SEQ ID NO: 134365 - DNA, 17 bp, synthetic construct
  source 1..17: mol_type = other DNA
acccagcaagacccgca

SEQ ID NO: 134366 - DNA, 17 bp, synthetic construct
  source 1..17: mol_type = other DNA
cccagcaagacccgcac

SEQ ID NO: 134367 - DNA, 17 bp, synthetic construct
  source 1..17: mol_type = other DNA
ccagcaagacccgcacc

SEQ ID NO: 134368 - DNA, 17 bp, synthetic construct
  source 1..17: mol_type = other DNA
cagcaagacccgcacct

SEQ ID NO: 134369 - DNA, 17 bp, synthetic construct
  source 1..17: mol_type = other DNA
agcaagacccgcacctc

SEQ ID NO: 134370 - DNA, 17 bp, synthetic construct
  source 1..17: mol_type = other DNA
gcaagacccgcacctcg

SEQ ID NO: 134371 - DNA, 17 bp, synthetic construct
  source 1..17: mol_type = other DNA
caagacccgcacctcga

SEQ ID NO: 134372 - DNA, 17 bp, synthetic construct
  source 1..17: mol_type = other DNA
aagacccgcacctcgac

SEQ ID NO: 134373 - DNA, 17 bp, synthetic construct
  source 1..17: mol_type = other DNA
agacccgcacctcgacc

SEQ ID NO: 134374 - DNA, 17 bp, synthetic construct
  source 1..17: mol_type = other DNA
gacccgcacctcgaccc

SEQ ID NO: 134375 - DNA, 17 bp, synthetic construct
  source 1..17: mol_type = other DNA
acccgcacctcgaccct

SEQ ID NO: 134376 - DNA, 17 bp, synthetic construct
  source 1..17: mol_type = other DNA
cccgcacctcgaccctg

SEQ ID NO: 134377 - DNA, 17 bp, synthetic construct
  source 1..17: mol_type = other DNA
ccgcacctcgaccctgc

SEQ ID NO: 134378 - DNA, 17 bp, synthetic construct
  source 1..17: mol_type = other DNA
cgcacctcgaccctgct

SEQ ID NO: 134379 - DNA, 17 bp, synthetic construct
  source 1..17: mol_type = other DNA
gcacctcgaccctgctg

SEQ ID NO: 134380 - DNA, 17 bp, synthetic construct
  source 1..17: mol_type = other DNA
cacctcgaccctgctgc

SEQ ID NO: 134381 - DNA, 17 bp, synthetic construct
  source 1..17: mol_type = other DNA
acctcgaccctgctgcc

SEQ ID NO: 134382 - DNA, 17 bp, synthetic construct
  source 1..17: mol_type = other DNA
cctcgaccctgctgccc

SEQ ID NO: 134383 - DNA, 17 bp, synthetic construct
  source 1..17: mol_type = other DNA
ctcgaccctgctgccca

SEQ ID NO: 134384 - DNA, 17 bp, synthetic construct
  source 1..17: mol_type = other DNA
tcgaccctgctgcccag

SEQ ID NO: 134385 - DNA, 17 bp, synthetic construct
  source 1..17: mol_type = other DNA
cgaccctgctgcccagc

SEQ ID NO: 134386 - DNA, 17 bp, synthetic construct
  source 1..17: mol_type = other DNA
gaccctgctgcccagca

SEQ ID NO: 134387 - DNA, 17 bp, synthetic construct
  source 1..17: mol_type = other DNA
accctgctgcccagcag

SEQ ID NO: 134388 - DNA, 17 bp, synthetic construct
  source 1..17: mol_type = other DNA
ccctgctgcccagcagc

SEQ ID NO: 134389 - DNA, 17 bp, synthetic construct
  source 1..17: mol_type = other DNA
cctgctgcccagcagcc

SEQ ID NO: 134390 - DNA, 17 bp, synthetic construct
  source 1..17: mol_type = other DNA
ctgctgcccagcagccc

SEQ ID NO: 134391 - DNA, 17 bp, synthetic construct
  source 1..17: mol_type = other DNA
tgctgcccagcagcccc

SEQ ID NO: 134392 - DNA, 17 bp, synthetic construct
  source 1..17: mol_type = other DNA
gctgcccagcagcccca

SEQ ID NO: 134393 - DNA, 17 bp, synthetic construct
  source 1..17: mol_type = other DNA
ctgcccagcagccccac

SEQ ID NO: 134394 - DNA, 17 bp, synthetic construct
  source 1..17: mol_type = other DNA
tgcccagcagccccaca

SEQ ID NO: 134395 - DNA, 17 bp, synthetic construct
  source 1..17: mol_type = other DNA
gcccagcagccccacat

SEQ ID NO: 134396 - DNA, 17 bp, synthetic construct
  source 1..17: mol_type = other DNA
cccagcagccccacatc

SEQ ID NO: 134397 - DNA, 17 bp, synthetic construct
  source 1..17: mol_type = other DNA
ccagcagccccacatcg

SEQ ID NO: 134398 - DNA, 17 bp, synthetic construct
  source 1..17: mol_type = other DNA
cagcagccccacatcgg

SEQ ID NO: 134399 - DNA, 17 bp, synthetic construct
  source 1..17: mol_type = other DNA
agcagccccacatcggc

SEQ ID NO: 134400 - DNA, 17 bp, synthetic construct
  source 1..17: mol_type = other DNA
gcagccccacatcggcc

SEQ ID NO: 134401 - DNA, 17 bp, synthetic construct
  source 1..17: mol_type = other DNA
cagccccacatcggccc

SEQ ID NO: 134402 - DNA, 17 bp, synthetic construct
  source 1..17: mol_type = other DNA
agccccacatcggcccc

SEQ ID NO: 134403 - DNA, 17 bp, synthetic construct
  source 1..17: mol_type = other DNA
gccccacatcggccccc

SEQ ID NO: 134404 - DNA, 17 bp, synthetic construct
  source 1..17: mol_type = other DNA
ccccacatcggccccca

SEQ ID NO: 134405 - DNA, 17 bp, synthetic construct
  source 1..17: mol_type = other DNA
cccacatcggcccccat

SEQ ID NO: 134406 - DNA, 17 bp, synthetic construct
  source 1..17: mol_type = other DNA
ccacatcggcccccata

SEQ ID NO: 134407 - DNA, 17 bp, synthetic construct
  source 1..17: mol_type = other DNA
cacatcggcccccataa

SEQ ID NO: 134408 - DNA, 17 bp, synthetic construct
  source 1..17: mol_type = other DNA
acatcggcccccataac

SEQ ID NO: 134409 - DNA, 17 bp, synthetic construct
  source 1..17: mol_type = other DNA
catcggcccccataacc

SEQ ID NO: 134410 - DNA, 17 bp, synthetic construct
  source 1..17: mol_type = other DNA
atcggcccccataacca

SEQ ID NO: 134411 - DNA, 17 bp, synthetic construct
  source 1..17: mol_type = other DNA
tcggcccccataaccac

SEQ ID NO: 134412 - DNA, 17 bp, synthetic construct
  source 1..17: mol_type = other DNA
cggcccccataaccacg

SEQ ID NO: 134413 - DNA, 17 bp, synthetic construct
  source 1..17: mol_type = other DNA
ggcccccataaccacgg

SEQ ID NO: 134414 - DNA, 17 bp, synthetic construct
  source 1..17: mol_type = other DNA
gcccccataaccacggt

SEQ ID NO: 134415 - DNA, 17 bp, synthetic construct
  source 1..17: mol_type = other DNA
cccccataaccacggtg

SEQ ID NO: 134416 - DNA, 17 bp, synthetic construct
  source 1..17: mol_type = other DNA
ccccataaccacggtgg

SEQ ID NO: 134417 - DNA, 17 bp, synthetic construct
  source 1..17: mol_type = other DNA
cccataaccacggtggt

SEQ ID NO: 134418 - DNA, 17 bp, synthetic construct
  source 1..17: mol_type = other DNA
ccataaccacggtggtg

SEQ ID NO: 134419 - DNA, 17 bp, synthetic construct
  source 1..17: mol_type = other DNA
cataaccacggtggtga

SEQ ID NO: 134420 - DNA, 17 bp, synthetic construct
  source 1..17: mol_type = other DNA
ataaccacggtggtgac

SEQ ID NO: 134421 - DNA, 17 bp, synthetic construct
  source 1..17: mol_type = other DNA
taaccacggtggtgacc

SEQ ID NO: 134422 - DNA, 17 bp, synthetic construct
  source 1..17: mol_type = other DNA
aaccacggtggtgacca

SEQ ID NO: 134423 - DNA, 17 bp, synthetic construct
  source 1..17: mol_type = other DNA
accacggtggtgaccac

SEQ ID NO: 134424 - DNA, 17 bp, synthetic construct
  source 1..17: mol_type = other DNA
ccacggtggtgaccacg

SEQ ID NO: 134425 - DNA, 17 bp, synthetic construct
  source 1..17: mol_type = other DNA
cacggtggtgaccacgg

SEQ ID NO: 134426 - DNA, 17 bp, synthetic construct
  source 1..17: mol_type = other DNA
acggtggtgaccacggg

SEQ ID NO: 134427 - DNA, 17 bp, synthetic construct
  source 1..17: mol_type = other DNA
cggtggtgaccacgggc

SEQ ID NO: 134428 - DNA, 17 bp, synthetic construct
  source 1..17: mol_type = other DNA
ggtggtgaccacgggct

SEQ ID NO: 134429 - DNA, 17 bp, synthetic construct
  source 1..17: mol_type = other DNA
gtggtgaccacgggctg

SEQ ID NO: 134430 - DNA, 17 bp, synthetic construct
  source 1..17: mol_type = other DNA
tggtgaccacgggctgt

SEQ ID NO: 134431 - DNA, 17 bp, synthetic construct
  source 1..17: mol_type = other DNA
ggtgaccacgggctgtg

SEQ ID NO: 134432 - DNA, 17 bp, synthetic construct
  source 1..17: mol_type = other DNA
gtgaccacgggctgtga

SEQ ID NO: 134433 - DNA, 17 bp, synthetic construct
  source 1..17: mol_type = other DNA
tgaccacgggctgtgag

SEQ ID NO: 134434 - DNA, 17 bp, synthetic construct
  source 1..17: mol_type = other DNA
gaccacgggctgtgagc

SEQ ID NO: 134435 - DNA, 17 bp, synthetic construct
  source 1..17: mol_type = other DNA
accacgggctgtgagcc

SEQ ID NO: 134436 - DNA, 17 bp, synthetic construct
  source 1..17: mol_type = other DNA
ccacgggctgtgagccc

SEQ ID NO: 134437 - DNA, 17 bp, synthetic construct
  source 1..17: mol_type = other DNA
cacgggctgtgagcccc

SEQ ID NO: 134438 - DNA, 17 bp, synthetic construct
  source 1..17: mol_type = other DNA
acgggctgtgagcccca

SEQ ID NO: 134439 - DNA, 17 bp, synthetic construct
  source 1..17: mol_type = other DNA
cgggctgtgagccccag

SEQ ID NO: 134440 - DNA, 17 bp, synthetic construct
  source 1..17: mol_type = other DNA
gggctgtgagccccagt

SEQ ID NO: 134441 - DNA, 17 bp, synthetic construct
  source 1..17: mol_type = other DNA
ggctgtgagccccagtg

SEQ ID NO: 134442 - DNA, 17 bp, synthetic construct
  source 1..17: mol_type = other DNA
gctgtgagccccagtgt

SEQ ID NO: 134443 - DNA, 17 bp, synthetic construct
  source 1..17: mol_type = other DNA
ctgtgagccccagtgtg

SEQ ID NO: 134444 - DNA, 17 bp, synthetic construct
  source 1..17: mol_type = other DNA
tgtgagccccagtgtgc

SEQ ID NO: 134445 - DNA, 17 bp, synthetic construct
  source 1..17: mol_type = other DNA
gtgagccccagtgtgcc

SEQ ID NO: 134446 - DNA, 17 bp, synthetic construct
  source 1..17: mol_type = other DNA
tgagccccagtgtgcct

SEQ ID NO: 134447 - DNA, 17 bp, synthetic construct
  source 1..17: mol_type = other DNA
gagccccagtgtgcctg

SEQ ID NO: 134448 - DNA, 17 bp, synthetic construct
  source 1..17: mol_type = other DNA
agccccagtgtgcctgg

SEQ ID NO: 134449 - DNA, 17 bp, synthetic construct
  source 1..17: mol_type = other DNA
gccccagtgtgcctggt

SEQ ID NO: 134450 - DNA, 17 bp, synthetic construct
  source 1..17: mol_type = other DNA
ccccagtgtgcctggtc

SEQ ID NO: 134451 - DNA, 17 bp, synthetic construct
  source 1..17: mol_type = other DNA
cccagtgtgcctggtca

SEQ ID NO: 134452 - DNA, 17 bp, synthetic construct
  source 1..17: mol_type = other DNA
ccagtgtgcctggtcag

SEQ ID NO: 134453 - DNA, 17 bp, synthetic construct
  source 1..17: mol_type = other DNA
cagtgtgcctggtcaga

SEQ ID NO: 134454 - DNA, 17 bp, synthetic construct
  source 1..17: mol_type = other DNA
agtgtgcctggtcagag

SEQ ID NO: 134455 - DNA, 17 bp, synthetic construct
  source 1..17: mol_type = other DNA
gtgtgcctggtcagagt

SEQ ID NO: 134456 - DNA, 17 bp, synthetic construct
  source 1..17: mol_type = other DNA
tgtgcctggtcagagtg

SEQ ID NO: 134457 - DNA, 17 bp, synthetic construct
  source 1..17: mol_type = other DNA
gtgcctggtcagagtgg

SEQ ID NO: 134458 - DNA, 17 bp, synthetic construct
  source 1..17: mol_type = other DNA
tgcctggtcagagtggc

SEQ ID NO: 134459 - DNA, 17 bp, synthetic construct
  source 1..17: mol_type = other DNA
gcctggtcagagtggct

SEQ ID NO: 134460 - DNA, 17 bp, synthetic construct
  source 1..17: mol_type = other DNA
cctggtcagagtggctg

SEQ ID NO: 134461 - DNA, 17 bp, synthetic construct
  source 1..17: mol_type = other DNA
ctggtcagagtggctgg

SEQ ID NO: 134462 - DNA, 17 bp, synthetic construct
  source 1..17: mol_type = other DNA
tggtcagagtggctgga

SEQ ID NO: 134463 - DNA, 17 bp, synthetic construct
  source 1..17: mol_type = other DNA
ggtcagagtggctggac

SEQ ID NO: 134464 - DNA, 17 bp, synthetic construct
  source 1..17: mol_type = other DNA
gtcagagtggctggact

SEQ ID NO: 134465 - DNA, 17 bp, synthetic construct
  source 1..17: mol_type = other DNA
tcagagtggctggacta

SEQ ID NO: 134466 - DNA, 17 bp, synthetic construct
  source 1..17: mol_type = other DNA
cagagtggctggactac

SEQ ID NO: 134467 - DNA, 17 bp, synthetic construct
  source 1..17: mol_type = other DNA
agagtggctggactaca

SEQ ID NO: 134468 - DNA, 17 bp, synthetic construct
  source 1..17: mol_type = other DNA
gagtggctggactacag

SEQ ID NO: 134469 - DNA, 17 bp, synthetic construct
  source 1..17: mol_type = other DNA
agtggctggactacagc

SEQ ID NO: 134470 - DNA, 17 bp, synthetic construct
  source 1..17: mol_type = other DNA
gtggctggactacagct

SEQ ID NO: 134471 - DNA, 17 bp, synthetic construct
  source 1..17: mol_type = other DNA
tggctggactacagcta

SEQ ID NO: 134472 - DNA, 17 bp, synthetic construct
  source 1..17: mol_type = other DNA
ggctggactacagctac

SEQ ID NO: 134473 - DNA, 17 bp, synthetic construct
  source 1..17: mol_type = other DNA
gctggactacagctacc

SEQ ID NO: 134474 - DNA, 17 bp, synthetic construct
  source 1..17: mol_type = other DNA
ctggactacagctaccc

SEQ ID NO: 134475 - DNA, 17 bp, synthetic construct
  source 1..17: mol_type = other DNA
tggactacagctacccc

SEQ ID NO: 134476 - DNA, 17 bp, synthetic construct
  source 1..17: mol_type = other DNA
ggactacagctacccca

SEQ ID NO: 134477 - DNA, 17 bp, synthetic construct
  source 1..17: mol_type = other DNA
gactacagctaccccat

SEQ ID NO: 134478 - DNA, 17 bp, synthetic construct
  source 1..17: mol_type = other DNA
actacagctaccccatg

SEQ ID NO: 134479 - DNA, 17 bp, synthetic construct
  source 1..17: mol_type = other DNA
ctacagctaccccatgc

SEQ ID NO: 134480 - DNA, 17 bp, synthetic construct
  source 1..17: mol_type = other DNA
tacagctaccccatgcc

SEQ ID NO: 134481 - DNA, 17 bp, synthetic construct
  source 1..17: mol_type = other DNA
acagctaccccatgccg

SEQ ID NO: 134482 - DNA, 17 bp, synthetic construct
  source 1..17: mol_type = other DNA
cagctaccccatgccgg

SEQ ID NO: 134483 - DNA, 17 bp, synthetic construct
  source 1..17: mol_type = other DNA
agctaccccatgccggg

SEQ ID NO: 134484 - DNA, 17 bp, synthetic construct
  source 1..17: mol_type = other DNA
gctaccccatgccgggg

SEQ ID NO: 134485 - DNA, 17 bp, synthetic construct
  source 1..17: mol_type = other DNA
ctaccccatgccggggc

SEQ ID NO: 134486 - DNA, 17 bp, synthetic construct
  source 1..17: mol_type = other DNA
taccccatgccggggcc

SEQ ID NO: 134487 - DNA, 17 bp, synthetic construct
  source 1..17: mol_type = other DNA
accccatgccggggccc

SEQ ID NO: 134488 - DNA, 17 bp, synthetic construct
  source 1..17: mol_type = other DNA
ccccatgccggggccct

SEQ ID NO: 134489 - DNA, 17 bp, synthetic construct
  source 1..17: mol_type = other DNA
cccatgccggggccctc

SEQ ID NO: 134490 - DNA, 17 bp, synthetic construct
  source 1..17: mol_type = other DNA
ccatgccggggccctct

SEQ ID NO: 134491 - DNA, 17 bp, synthetic construct
  source 1..17: mol_type = other DNA
catgccggggccctctg

SEQ ID NO: 134492 - DNA, 17 bp, synthetic construct
  source 1..17: mol_type = other DNA
atgccggggccctctgg

SEQ ID NO: 134493 - DNA, 17 bp, synthetic construct
  source 1..17: mol_type = other DNA
tgccggggccctctggc

SEQ ID NO: 134494 - DNA, 17 bp, synthetic construct
  source 1..17: mol_type = other DNA
gccggggccctctggcg

SEQ ID NO: 134495 - DNA, 17 bp, synthetic construct
  source 1..17: mol_type = other DNA
ccggggccctctggcgg

SEQ ID NO: 134496 - DNA, 17 bp, synthetic construct
  source 1..17: mol_type = other DNA
cggggccctctggcggg

SEQ ID NO: 134497 - DNA, 17 bp, synthetic construct
  source 1..17: mol_type = other DNA
ggggccctctggcgggg

SEQ ID NO: 134498 - DNA, 17 bp, synthetic construct
  source 1..17: mol_type = other DNA
gggccctctggcgggga

SEQ ID NO: 134499 - DNA, 17 bp, synthetic construct
  source 1..17: mol_type = other DNA
ggccctctggcggggac

SEQ ID NO: 134500 - DNA, 17 bp, synthetic construct
  source 1..17: mol_type = other DNA
gccctctggcggggact

SEQ ID NO: 134501 - DNA, 17 bp, synthetic construct
  source 1..17: mol_type = other DNA
ccctctggcggggactt

SEQ ID NO: 134502 - DNA, 17 bp, synthetic construct
  source 1..17: mol_type = other DNA
cctctggcggggacttt

SEQ ID NO: 134503 - DNA, 17 bp, synthetic construct
  source 1..17: mol_type = other DNA
ctctggcggggactttg

SEQ ID NO: 134504 - DNA, 17 bp, synthetic construct
  source 1..17: mol_type = other DNA
tctggcggggactttga

SEQ ID NO: 134505 - DNA, 17 bp, synthetic construct
  source 1..17: mol_type = other DNA
ctggcggggactttgac

SEQ ID NO: 134506 - DNA, 17 bp, synthetic construct
  source 1..17: mol_type = other DNA
tggcggggactttgaca

SEQ ID NO: 134507 - DNA, 17 bp, synthetic construct
  source 1..17: mol_type = other DNA
ggcggggactttgacac

SEQ ID NO: 134508 - DNA, 17 bp, synthetic construct
  source 1..17: mol_type = other DNA
gcggggactttgacacc

SEQ ID NO: 134509 - DNA, 17 bp, synthetic construct
  source 1..17: mol_type = other DNA
cggggactttgacacct

SEQ ID NO: 134510 - DNA, 17 bp, synthetic construct
  source 1..17: mol_type = other DNA
ggggactttgacaccta

SEQ ID NO: 134511 - DNA, 17 bp, synthetic construct
  source 1..17: mol_type = other DNA
gggactttgacacctac

SEQ ID NO: 134512 - DNA, 17 bp, synthetic construct
  source 1..17: mol_type = other DNA
ggactttgacacctact

SEQ ID NO: 134513 - DNA, 17 bp, synthetic construct
  source 1..17: mol_type = other DNA
gactttgacacctactc

SEQ ID NO: 134514 - DNA, 17 bp, synthetic construct
  source 1..17: mol_type = other DNA
actttgacacctactcc

SEQ ID NO: 134515 - DNA, 17 bp, synthetic construct
  source 1..17: mol_type = other DNA
ctttgacacctactcca

SEQ ID NO: 134516 - DNA, 17 bp, synthetic construct
  source 1..17: mol_type = other DNA
tttgacacctactccaa

SEQ ID NO: 134517 - DNA, 17 bp, synthetic construct
  source 1..17: mol_type = other DNA
ttgacacctactccaac

SEQ ID NO: 134518 - DNA, 17 bp, synthetic construct
  source 1..17: mol_type = other DNA
tgacacctactccaaca

SEQ ID NO: 134519 - DNA, 17 bp, synthetic construct
  source 1..17: mol_type = other DNA
gacacctactccaacat

SEQ ID NO: 134520 - DNA, 17 bp, synthetic construct
  source 1..17: mol_type = other DNA
acacctactccaacatc

SEQ ID NO: 134521 - DNA, 17 bp, synthetic construct
  source 1..17: mol_type = other DNA
cacctactccaacatcc

SEQ ID NO: 134522 - DNA, 17 bp, synthetic construct
  source 1..17: mol_type = other DNA
acctactccaacatccg

SEQ ID NO: 134523 - DNA, 17 bp, synthetic construct
  source 1..17: mol_type = other DNA
cctactccaacatccgt

SEQ ID NO: 134524 - DNA, 17 bp, synthetic construct
  source 1..17: mol_type = other DNA
ctactccaacatccgtg

SEQ ID NO: 134525 - DNA, 17 bp, synthetic construct
  source 1..17: mol_type = other DNA
tactccaacatccgtgc

SEQ ID NO: 134526 - DNA, 17 bp, synthetic construct
  source 1..17: mol_type = other DNA
actccaacatccgtgcg

SEQ ID NO: 134527 - DNA, 17 bp, synthetic construct
  source 1..17: mol_type = other DNA
ctccaacatccgtgcgg

SEQ ID NO: 134528 - DNA, 17 bp, synthetic construct
  source 1..17: mol_type = other DNA
tccaacatccgtgcggc

SEQ ID NO: 134529 - DNA, 17 bp, synthetic construct
  source 1..17: mol_type = other DNA
ccaacatccgtgcggcc

SEQ ID NO: 134530 - DNA, 17 bp, synthetic construct
  source 1..17: mol_type = other DNA
caacatccgtgcggccg

SEQ ID NO: 134531 - DNA, 17 bp, synthetic construct
  source 1..17: mol_type = other DNA
aacatccgtgcggccgg

SEQ ID NO: 134532 - DNA, 17 bp, synthetic construct
  source 1..17: mol_type = other DNA
acatccgtgcggccgga

SEQ ID NO: 134533 - DNA, 17 bp, synthetic construct
  source 1..17: mol_type = other DNA
catccgtgcggccggag

SEQ ID NO: 134534 - DNA, 17 bp, synthetic construct
  source 1..17: mol_type = other DNA
atccgtgcggccggagg

SEQ ID NO: 134535 - DNA, 17 bp, synthetic construct
  source 1..17: mol_type = other DNA
tccgtgcggccggaggg

SEQ ID NO: 134536 - DNA, 17 bp, synthetic construct
  source 1..17: mol_type = other DNA
ccgtgcggccggagggg

SEQ ID NO: 134537 - DNA, 17 bp, synthetic construct
  source 1..17: mol_type = other DNA
cgtgcggccggaggggc

SEQ ID NO: 134538 - DNA, 17 bp, synthetic construct
  source 1..17: mol_type = other DNA
gtgcggccggaggggcc

SEQ ID NO: 134539 - DNA, 17 bp, synthetic construct
  source 1..17: mol_type = other DNA
tgcggccggaggggccg

SEQ ID NO: 134540 - DNA, 17 bp, synthetic construct
  source 1..17: mol_type = other DNA
gcggccggaggggccgt

SEQ ID NO: 134541 - DNA, 17 bp, synthetic construct
  source 1..17: mol_type = other DNA
cggccggaggggccgtc

SEQ ID NO: 134542 - DNA, 17 bp, synthetic construct
  source 1..17: mol_type = other DNA
ggccggaggggccgtct

SEQ ID NO: 134543 - DNA, 17 bp, synthetic construct
  source 1..17: mol_type = other DNA
gccggaggggccgtctg

SEQ ID NO: 134544 - DNA, 17 bp, synthetic construct
  source 1..17: mol_type = other DNA
ccggaggggccgtctgt

SEQ ID NO: 134545 - DNA, 17 bp, synthetic construct
  source 1..17: mol_type = other DNA
cggaggggccgtctgtg

SEQ ID NO: 134546 - DNA, 17 bp, synthetic construct
  source 1..17: mol_type = other DNA
ggaggggccgtctgtga

SEQ ID NO: 134547 - DNA, 17 bp, synthetic construct
  source 1..17: mol_type = other DNA
gaggggccgtctgtgag

SEQ ID NO: 134548 - DNA, 17 bp, synthetic construct
  source 1..17: mol_type = other DNA
aggggccgtctgtgagc

SEQ ID NO: 134549 - DNA, 17 bp, synthetic construct
  source 1..17: mol_type = other DNA
ggggccgtctgtgagca

SEQ ID NO: 134550 - DNA, 17 bp, synthetic construct
  source 1..17: mol_type = other DNA
gggccgtctgtgagcag

SEQ ID NO: 134551 - DNA, 17 bp, synthetic construct
  source 1..17: mol_type = other DNA
ggccgtctgtgagcagc

SEQ ID NO: 134552 - DNA, 17 bp, synthetic construct
  source 1..17: mol_type = other DNA
gccgtctgtgagcagcc

SEQ ID NO: 134553 - DNA, 17 bp, synthetic construct
  source 1..17: mol_type = other DNA
ccgtctgtgagcagccc

SEQ ID NO: 134554 - DNA, 17 bp, synthetic construct
  source 1..17: mol_type = other DNA
cgtctgtgagcagcccc

SEQ ID NO: 134555 - DNA, 17 bp, synthetic construct
  source 1..17: mol_type = other DNA
gtctgtgagcagcccct

SEQ ID NO: 134556 - DNA, 17 bp, synthetic construct
  source 1..17: mol_type = other DNA
tctgtgagcagcccctg

SEQ ID NO: 134557 - DNA, 17 bp, synthetic construct
  source 1..17: mol_type = other DNA
ctgtgagcagcccctgg

SEQ ID NO: 134558 - DNA, 17 bp, synthetic construct
  source 1..17: mol_type = other DNA
tgtgagcagcccctggg

SEQ ID NO: 134559 - DNA, 17 bp, synthetic construct
  source 1..17: mol_type = other DNA
gtgagcagcccctgggc

SEQ ID NO: 134560 - DNA, 17 bp, synthetic construct
  source 1..17: mol_type = other DNA
tgagcagcccctgggcc

SEQ ID NO: 134561 - DNA, 17 bp, synthetic construct
  source 1..17: mol_type = other DNA
gagcagcccctgggcct

SEQ ID NO: 134562 - DNA, 17 bp, synthetic construct
  source 1..17: mol_type = other DNA
agcagcccctgggcctc

SEQ ID NO: 134563 - DNA, 17 bp, synthetic construct
  source 1..17: mol_type = other DNA
gcagcccctgggcctcg

SEQ ID NO: 134564 - DNA, 17 bp, synthetic construct
  source 1..17: mol_type = other DNA
cagcccctgggcctcga

SEQ ID NO: 134565 - DNA, 17 bp, synthetic construct
  source 1..17: mol_type = other DNA
agcccctgggcctcgag

SEQ ID NO: 134566 - DNA, 17 bp, synthetic construct
  source 1..17: mol_type = other DNA
gcccctgggcctcgagt

SEQ ID NO: 134567 - DNA, 17 bp, synthetic construct
  source 1..17: mol_type = other DNA
cccctgggcctcgagtg

SEQ ID NO: 134568 - DNA, 17 bp, synthetic construct
  source 1..17: mol_type = other DNA
ccctgggcctcgagtgc

SEQ ID NO: 134569 - DNA, 17 bp, synthetic construct
  source 1..17: mol_type = other DNA
cctgggcctcgagtgcc

SEQ ID NO: 134570 - DNA, 17 bp, synthetic construct
  source 1..17: mol_type = other DNA
ctgggcctcgagtgccg

SEQ ID NO: 134571 - DNA, 17 bp, synthetic construct
  source 1..17: mol_type = other DNA
tgggcctcgagtgccgt

SEQ ID NO: 134572 - DNA, 17 bp, synthetic construct
  source 1..17: mol_type = other DNA
gggcctcgagtgccgtg

SEQ ID NO: 134573 - DNA, 17 bp, synthetic construct
  source 1..17: mol_type = other DNA
ggcctcgagtgccgtgc

SEQ ID NO: 134574 - DNA, 17 bp, synthetic construct
  source 1..17: mol_type = other DNA
gcctcgagtgccgtgcc

SEQ ID NO: 134575 - DNA, 17 bp, synthetic construct
  source 1..17: mol_type = other DNA
cctcgagtgccgtgccc

SEQ ID NO: 134576 - DNA, 17 bp, synthetic construct
  source 1..17: mol_type = other DNA
ctcgagtgccgtgccca

SEQ ID NO: 134577 - DNA, 17 bp, synthetic construct
  source 1..17: mol_type = other DNA
tcgagtgccgtgcccag

SEQ ID NO: 134578 - DNA, 17 bp, synthetic construct
  source 1..17: mol_type = other DNA
cgagtgccgtgcccagg

SEQ ID NO: 134579 - DNA, 17 bp, synthetic construct
  source 1..17: mol_type = other DNA
gagtgccgtgcccaggc

SEQ ID NO: 134580 - DNA, 17 bp, synthetic construct
  source 1..17: mol_type = other DNA
agtgccgtgcccaggcc

SEQ ID NO: 134581 - DNA, 17 bp, synthetic construct
  source 1..17: mol_type = other DNA
gtgccgtgcccaggccc

SEQ ID NO: 134582 - DNA, 17 bp, synthetic construct
  source 1..17: mol_type = other DNA
tgccgtgcccaggccca

SEQ ID NO: 134583 - DNA, 17 bp, synthetic construct
  source 1..17: mol_type = other DNA
gccgtgcccaggcccag

SEQ ID NO: 134584 - DNA, 17 bp, synthetic construct
  source 1..17: mol_type = other DNA
ccgtgcccaggcccagc

SEQ ID NO: 134585 - DNA, 17 bp, synthetic construct
  source 1..17: mol_type = other DNA
cgtgcccaggcccagcc

SEQ ID NO: 134586 - DNA, 17 bp, synthetic construct
  source 1..17: mol_type = other DNA
gtgcccaggcccagcct

SEQ ID NO: 134587 - DNA, 17 bp, synthetic construct
  source 1..17: mol_type = other DNA
tgcccaggcccagcctg

SEQ ID NO: 134588 - DNA, 17 bp, synthetic construct
  source 1..17: mol_type = other DNA
gcccaggcccagcctgg

SEQ ID NO: 134589 - DNA, 17 bp, synthetic construct
  source 1..17: mol_type = other DNA
cccaggcccagcctggt

SEQ ID NO: 134590 - DNA, 17 bp, synthetic construct
  source 1..17: mol_type = other DNA
ccaggcccagcctggtg

SEQ ID NO: 134591 - DNA, 17 bp, synthetic construct
  source 1..17: mol_type = other DNA
caggcccagcctggtgt

SEQ ID NO: 134592 - DNA, 17 bp, synthetic construct
  source 1..17: mol_type = other DNA
aggcccagcctggtgtc

SEQ ID NO: 134593 - DNA, 17 bp, synthetic construct
  source 1..17: mol_type = other DNA
ggcccagcctggtgtcc

SEQ ID NO: 134594 - DNA, 17 bp, synthetic construct
  source 1..17: mol_type = other DNA
gcccagcctggtgtccc

SEQ ID NO: 134595 - DNA, 17 bp, synthetic construct
  source 1..17: mol_type = other DNA
cccagcctggtgtcccc

SEQ ID NO: 134596 - DNA, 17 bp, synthetic construct
  source 1..17: mol_type = other DNA
ccagcctggtgtccccc

SEQ ID NO: 134597 - DNA, 17 bp, synthetic construct
  source 1..17: mol_type = other DNA
cagcctggtgtccccct

SEQ ID NO: 134598 - DNA, 17 bp, synthetic construct
  source 1..17: mol_type = other DNA
agcctggtgtccccctg

SEQ ID NO: 134599 - DNA, 17 bp, synthetic construct
  source 1..17: mol_type = other DNA
gcctggtgtccccctgg

SEQ ID NO: 134600 - DNA, 17 bp, synthetic construct
  source 1..17: mol_type = other DNA
cctggtgtccccctggg

SEQ ID NO: 134601 - DNA, 17 bp, synthetic construct
  source 1..17: mol_type = other DNA
ctggtgtccccctgggg

SEQ ID NO: 134602 - DNA, 17 bp, synthetic construct
  source 1..17: mol_type = other DNA
tggtgtccccctggggg

SEQ ID NO: 134603 - DNA, 17 bp, synthetic construct
  source 1..17: mol_type = other DNA
ggtgtccccctggggga

SEQ ID NO: 134604 - DNA, 17 bp, synthetic construct
  source 1..17: mol_type = other DNA
gtgtccccctgggggag

SEQ ID NO: 134605 - DNA, 17 bp, synthetic construct
  source 1..17: mol_type = other DNA
tgtccccctgggggagt

SEQ ID NO: 134606 - DNA, 17 bp, synthetic construct
  source 1..17: mol_type = other DNA
gtccccctgggggagtt

SEQ ID NO: 134607 - DNA, 17 bp, synthetic construct
  source 1..17: mol_type = other DNA
tccccctgggggagttg

SEQ ID NO: 134608 - DNA, 17 bp, synthetic construct
  source 1..17: mol_type = other DNA
ccccctgggggagttgg

SEQ ID NO: 134609 - DNA, 17 bp, synthetic construct
  source 1..17: mol_type = other DNA
cccctgggggagttggg

SEQ ID NO: 134610 - DNA, 17 bp, synthetic construct
  source 1..17: mol_type = other DNA
ccctgggggagttgggc

SEQ ID NO: 134611 - DNA, 17 bp, synthetic construct
  source 1..17: mol_type = other DNA
cctgggggagttgggcc

SEQ ID NO: 134612 - DNA, 17 bp, synthetic construct
  source 1..17: mol_type = other DNA
ctgggggagttgggcca

SEQ ID NO: 134613 - DNA, 17 bp, synthetic construct
  source 1..17: mol_type = other DNA
tgggggagttgggccag

SEQ ID NO: 134614 - DNA, 17 bp, synthetic construct
  source 1..17: mol_type = other DNA
gggggagttgggccagg

SEQ ID NO: 134615 - DNA, 17 bp, synthetic construct
  source 1..17: mol_type = other DNA
ggggagttgggccaggt

SEQ ID NO: 134616 - DNA, 17 bp, synthetic construct
  source 1..17: mol_type = other DNA
gggagttgggccaggtc

SEQ ID NO: 134617 - DNA, 17 bp, synthetic construct
  source 1..17: mol_type = other DNA
ggagttgggccaggtcg

SEQ ID NO: 134618 - DNA, 17 bp, synthetic construct
  source 1..17: mol_type = other DNA
gagttgggccaggtcgt

SEQ ID NO: 134619 - DNA, 17 bp, synthetic construct
  source 1..17: mol_type = other DNA
agttgggccaggtcgtg

SEQ ID NO: 134620 - DNA, 17 bp, synthetic construct
  source 1..17: mol_type = other DNA
gttgggccaggtcgtgg

SEQ ID NO: 134621 - DNA, 17 bp, synthetic construct
  source 1..17: mol_type = other DNA
ttgggccaggtcgtgga

SEQ ID NO: 134622 - DNA, 17 bp, synthetic construct
  source 1..17: mol_type = other DNA
tgggccaggtcgtggaa

SEQ ID NO: 134623 - DNA, 17 bp, synthetic construct
  source 1..17: mol_type = other DNA
gggccaggtcgtggaat

SEQ ID NO: 134624 - DNA, 17 bp, synthetic construct
  source 1..17: mol_type = other DNA
ggccaggtcgtggaatg

SEQ ID NO: 134625 - DNA, 17 bp, synthetic construct
  source 1..17: mol_type = other DNA
gccaggtcgtggaatgc

SEQ ID NO: 134626 - DNA, 17 bp, synthetic construct
  source 1..17: mol_type = other DNA
ccaggtcgtggaatgca

SEQ ID NO: 134627 - DNA, 17 bp, synthetic construct
  source 1..17: mol_type = other DNA
caggtcgtggaatgcag

SEQ ID NO: 134628 - DNA, 17 bp, synthetic construct
  source 1..17: mol_type = other DNA
aggtcgtggaatgcagc

SEQ ID NO: 134629 - DNA, 17 bp, synthetic construct
  source 1..17: mol_type = other DNA
ggtcgtggaatgcagcc

SEQ ID NO: 134630 - DNA, 17 bp, synthetic construct
  source 1..17: mol_type = other DNA
gtcgtggaatgcagcct

SEQ ID NO: 134631 - DNA, 17 bp, synthetic construct
  source 1..17: mol_type = other DNA
tcgtggaatgcagcctg

SEQ ID NO: 134632 - DNA, 17 bp, synthetic construct
  source 1..17: mol_type = other DNA
cgtggaatgcagcctgg

SEQ ID NO: 134633 - DNA, 17 bp, synthetic construct
  source 1..17: mol_type = other DNA
gtggaatgcagcctgga

SEQ ID NO: 134634 - DNA, 17 bp, synthetic construct
  source 1..17: mol_type = other DNA
tggaatgcagcctggac

SEQ ID NO: 134635 - DNA, 17 bp, synthetic construct
  source 1..17: mol_type = other DNA
ggaatgcagcctggact

SEQ ID NO: 134636 - DNA, 17 bp, synthetic construct
  source 1..17: mol_type = other DNA
gaatgcagcctggactt

SEQ ID NO: 134637 - DNA, 17 bp, synthetic construct
  source 1..17: mol_type = other DNA
aatgcagcctggacttt

SEQ ID NO: 134638 - DNA, 17 bp, synthetic construct
  source 1..17: mol_type = other DNA
atgcagcctggactttg

SEQ ID NO: 134639 - DNA, 17 bp, synthetic construct
  source 1..17: mol_type = other DNA
tgcagcctggactttgg

SEQ ID NO: 134640 - DNA, 17 bp, synthetic construct
  source 1..17: mol_type = other DNA
gcagcctggactttggc

SEQ ID NO: 134641 - DNA, 17 bp, synthetic construct
  source 1..17: mol_type = other DNA
cagcctggactttggcc

SEQ ID NO: 134642 - DNA, 17 bp, synthetic construct
  source 1..17: mol_type = other DNA
agcctggactttggcct

SEQ ID NO: 134643 - DNA, 17 bp, synthetic construct
  source 1..17: mol_type = other DNA
gcctggactttggcctg

SEQ ID NO: 134644 - DNA, 17 bp, synthetic construct
  source 1..17: mol_type = other DNA
cctggactttggcctgg

SEQ ID NO: 134645 - DNA, 17 bp, synthetic construct
  source 1..17: mol_type = other DNA
ctggactttggcctggt

SEQ ID NO: 134646 - DNA, 17 bp, synthetic construct
  source 1..17: mol_type = other DNA
tggactttggcctggtc

SEQ ID NO: 134647 - DNA, 17 bp, synthetic construct
  source 1..17: mol_type = other DNA
ggactttggcctggtct

SEQ ID NO: 134648 - DNA, 17 bp, synthetic construct
  source 1..17: mol_type = other DNA
gactttggcctggtctg

SEQ ID NO: 134649 - DNA, 17 bp, synthetic construct
  source 1..17: mol_type = other DNA
actttggcctggtctgc

SEQ ID NO: 134650 - DNA, 17 bp, synthetic construct
  source 1..17: mol_type = other DNA
ctttggcctggtctgca

SEQ ID NO: 134651 - DNA, 17 bp, synthetic construct
  source 1..17: mol_type = other DNA
tttggcctggtctgcag

SEQ ID NO: 134652 - DNA, 17 bp, synthetic construct
  source 1..17: mol_type = other DNA
ttggcctggtctgcagg

SEQ ID NO: 134653 - DNA, 17 bp, synthetic construct
  source 1..17: mol_type = other DNA
tggcctggtctgcagga

SEQ ID NO: 134654 - DNA, 17 bp, synthetic construct
  source 1..17: mol_type = other DNA
ggcctggtctgcaggaa

SEQ ID NO: 134655 - DNA, 17 bp, synthetic construct
  source 1..17: mol_type = other DNA
gcctggtctgcaggaac

SEQ ID NO: 134656 - DNA, 17 bp, synthetic construct
  source 1..17: mol_type = other DNA
cctggtctgcaggaacc

SEQ ID NO: 134657 - DNA, 17 bp, synthetic construct
  source 1..17: mol_type = other DNA
ctggtctgcaggaaccg

SEQ ID NO: 134658 - DNA, 17 bp, synthetic construct
  source 1..17: mol_type = other DNA
tggtctgcaggaaccgt

SEQ ID NO: 134659 - DNA, 17 bp, synthetic construct
  source 1..17: mol_type = other DNA
ggtctgcaggaaccgtg

SEQ ID NO: 134660 - DNA, 17 bp, synthetic construct
  source 1..17: mol_type = other DNA
gtctgcaggaaccgtga

SEQ ID NO: 134661 - DNA, 17 bp, synthetic construct
  source 1..17: mol_type = other DNA
tctgcaggaaccgtgag

SEQ ID NO: 134662 - DNA, 17 bp, synthetic construct
  source 1..17: mol_type = other DNA
ctgcaggaaccgtgagc

SEQ ID NO: 134663 - DNA, 17 bp, synthetic construct
  source 1..17: mol_type = other DNA
tgcaggaaccgtgagca

SEQ ID NO: 134664 - DNA, 17 bp, synthetic construct
  source 1..17: mol_type = other DNA
gcaggaaccgtgagcag

SEQ ID NO: 134665 - DNA, 17 bp, synthetic construct
  source 1..17: mol_type = other DNA
caggaaccgtgagcagg

SEQ ID NO: 134666 - DNA, 17 bp, synthetic construct
  source 1..17: mol_type = other DNA
aggaaccgtgagcaggt

SEQ ID NO: 134667 - DNA, 17 bp, synthetic construct
  source 1..17: mol_type = other DNA
ggaaccgtgagcaggtg

SEQ ID NO: 134668 - DNA, 17 bp, synthetic construct
  source 1..17: mol_type = other DNA
gaaccgtgagcaggtgg

SEQ ID NO: 134669 - DNA, 17 bp, synthetic construct
  source 1..17: mol_type = other DNA
aaccgtgagcaggtggg

SEQ ID NO: 134670 - DNA, 17 bp, synthetic construct
  source 1..17: mol_type = other DNA
accgtgagcaggtgggg

SEQ ID NO: 134671 - DNA, 17 bp, synthetic construct
  source 1..17: mol_type = other DNA
ccgtgagcaggtgggga

SEQ ID NO: 134672 - DNA, 17 bp, synthetic construct
  source 1..17: mol_type = other DNA
cgtgagcaggtggggaa

SEQ ID NO: 134673 - DNA, 17 bp, synthetic construct
  source 1..17: mol_type = other DNA
gtgagcaggtggggaag

SEQ ID NO: 134674 - DNA, 17 bp, synthetic construct
  source 1..17: mol_type = other DNA
tgagcaggtggggaagt

SEQ ID NO: 134675 - DNA, 17 bp, synthetic construct
  source 1..17: mol_type = other DNA
gagcaggtggggaagtt

SEQ ID NO: 134676 - DNA, 17 bp, synthetic construct
  source 1..17: mol_type = other DNA
agcaggtggggaagttc

SEQ ID NO: 134677 - DNA, 17 bp, synthetic construct
  source 1..17: mol_type = other DNA
gcaggtggggaagttca

SEQ ID NO: 134678 - DNA, 17 bp, synthetic construct
  source 1..17: mol_type = other DNA
caggtggggaagttcaa

SEQ ID NO: 134679 - DNA, 17 bp, synthetic construct
  source 1..17: mol_type = other DNA
aggtggggaagttcaag

SEQ ID NO: 134680 - DNA, 17 bp, synthetic construct
  source 1..17: mol_type = other DNA
ggtggggaagttcaaga

SEQ ID NO: 134681 - DNA, 17 bp, synthetic construct
  source 1..17: mol_type = other DNA
gtggggaagttcaagat

SEQ ID NO: 134682 - DNA, 17 bp, synthetic construct
  source 1..17: mol_type = other DNA
tggggaagttcaagatg

SEQ ID NO: 134683 - DNA, 17 bp, synthetic construct
  source 1..17: mol_type = other DNA
ggggaagttcaagatgt

SEQ ID NO: 134684 - DNA, 17 bp, synthetic construct
  source 1..17: mol_type = other DNA
gggaagttcaagatgtg

SEQ ID NO: 134685 - DNA, 17 bp, synthetic construct
  source 1..17: mol_type = other DNA
ggaagttcaagatgtgc

SEQ ID NO: 134686 - DNA, 17 bp, synthetic construct
  source 1..17: mol_type = other DNA
gaagttcaagatgtgct

SEQ ID NO: 134687 - DNA, 17 bp, synthetic construct
  source 1..17: mol_type = other DNA
aagttcaagatgtgctt

SEQ ID NO: 134688 - DNA, 17 bp, synthetic construct
  source 1..17: mol_type = other DNA
agttcaagatgtgcttc

SEQ ID NO: 134689 - DNA, 17 bp, synthetic construct
  source 1..17: mol_type = other DNA
gttcaagatgtgcttca

SEQ ID NO: 134690 - DNA, 17 bp, synthetic construct
  source 1..17: mol_type = other DNA
ttcaagatgtgcttcaa

SEQ ID NO: 134691 - DNA, 17 bp, synthetic construct
  source 1..17: mol_type = other DNA
tcaagatgtgcttcaac

SEQ ID NO: 134692 - DNA, 17 bp, synthetic construct
  source 1..17: mol_type = other DNA
caagatgtgcttcaact

SEQ ID NO: 134693 - DNA, 17 bp, synthetic construct
  source 1..17: mol_type = other DNA
aagatgtgcttcaacta

SEQ ID NO: 134694 - DNA, 17 bp, synthetic construct
  source 1..17: mol_type = other DNA
agatgtgcttcaactat

SEQ ID NO: 134695 - DNA, 17 bp, synthetic construct
  source 1..17: mol_type = other DNA
gatgtgcttcaactatg

SEQ ID NO: 134696 - DNA, 17 bp, synthetic construct
  source 1..17: mol_type = other DNA
atgtgcttcaactatga

SEQ ID NO: 134697 - DNA, 17 bp, synthetic construct
  source 1..17: mol_type = other DNA
tgtgcttcaactatgaa

SEQ ID NO: 134698 - DNA, 17 bp, synthetic construct
  source 1..17: mol_type = other DNA
gtgcttcaactatgaaa

SEQ ID NO: 134699 - DNA, 17 bp, synthetic construct
  source 1..17: mol_type = other DNA
tgcttcaactatgaaat

SEQ ID NO: 134700 - DNA, 17 bp, synthetic construct
  source 1..17: mol_type = other DNA
gcttcaactatgaaatc

SEQ ID NO: 134701 - DNA, 17 bp, synthetic construct
  source 1..17: mol_type = other DNA
cttcaactatgaaatcc

SEQ ID NO: 134702 - DNA, 17 bp, synthetic construct
  source 1..17: mol_type = other DNA
ttcaactatgaaatccg

SEQ ID NO: 134703 - DNA, 17 bp, synthetic construct
  source 1..17: mol_type = other DNA
tcaactatgaaatccgt

SEQ ID NO: 134704 - DNA, 17 bp, synthetic construct
  source 1..17: mol_type = other DNA
caactatgaaatccgtg

SEQ ID NO: 134705 - DNA, 17 bp, synthetic construct
  source 1..17: mol_type = other DNA
aactatgaaatccgtgt

SEQ ID NO: 134706 - DNA, 17 bp, synthetic construct
  source 1..17: mol_type = other DNA
actatgaaatccgtgtg

SEQ ID NO: 134707 - DNA, 17 bp, synthetic construct
  source 1..17: mol_type = other DNA
ctatgaaatccgtgtgt

SEQ ID NO: 134708 - DNA, 17 bp, synthetic construct
  source 1..17: mol_type = other DNA
tatgaaatccgtgtgtt

SEQ ID NO: 134709 - DNA, 17 bp, synthetic construct
  source 1..17: mol_type = other DNA
atgaaatccgtgtgttc

SEQ ID NO: 134710 - DNA, 17 bp, synthetic construct
  source 1..17: mol_type = other DNA
tgaaatccgtgtgttct

SEQ ID NO: 134711 - DNA, 17 bp, synthetic construct
  source 1..17: mol_type = other DNA
gaaatccgtgtgttctg

SEQ ID NO: 134712 - DNA, 17 bp, synthetic construct
  source 1..17: mol_type = other DNA
aaatccgtgtgttctgc

SEQ ID NO: 134713 - DNA, 17 bp, synthetic construct
  source 1..17: mol_type = other DNA
aatccgtgtgttctgct

SEQ ID NO: 134714 - DNA, 17 bp, synthetic construct
  source 1..17: mol_type = other DNA
atccgtgtgttctgctg

SEQ ID NO: 134715 - DNA, 17 bp, synthetic construct
  source 1..17: mol_type = other DNA
tccgtgtgttctgctgc

SEQ ID NO: 134716 - DNA, 17 bp, synthetic construct
  source 1..17: mol_type = other DNA
ccgtgtgttctgctgca

SEQ ID NO: 134717 - DNA, 17 bp, synthetic construct
  source 1..17: mol_type = other DNA
cgtgtgttctgctgcaa

SEQ ID NO: 134718 - DNA, 17 bp, synthetic construct
  source 1..17: mol_type = other DNA
gtgtgttctgctgcaac

SEQ ID NO: 134719 - DNA, 17 bp, synthetic construct
  source 1..17: mol_type = other DNA
tgtgttctgctgcaact

SEQ ID NO: 134720 - DNA, 17 bp, synthetic construct
  source 1..17: mol_type = other DNA
gtgttctgctgcaacta

SEQ ID NO: 134721 - DNA, 17 bp, synthetic construct
  source 1..17: mol_type = other DNA
tgttctgctgcaactac

SEQ ID NO: 134722 - DNA, 17 bp, synthetic construct
  source 1..17: mol_type = other DNA
gttctgctgcaactacg

SEQ ID NO: 134723 - DNA, 17 bp, synthetic construct
  source 1..17: mol_type = other DNA
ttctgctgcaactacgg

SEQ ID NO: 134724 - DNA, 17 bp, synthetic construct
  source 1..17: mol_type = other DNA
tctgctgcaactacggc

SEQ ID NO: 134725 - DNA, 17 bp, synthetic construct
  source 1..17: mol_type = other DNA
ctgctgcaactacggcc

SEQ ID NO: 134726 - DNA, 17 bp, synthetic construct
  source 1..17: mol_type = other DNA
tgctgcaactacggcca

SEQ ID NO: 134727 - DNA, 17 bp, synthetic construct
  source 1..17: mol_type = other DNA
gctgcaactacggccac

SEQ ID NO: 134728 - DNA, 17 bp, synthetic construct
  source 1..17: mol_type = other DNA
ctgcaactacggccact

SEQ ID NO: 134729 - DNA, 17 bp, synthetic construct
  source 1..17: mol_type = other DNA
tgcaactacggccactg

SEQ ID NO: 134730 - DNA, 17 bp, synthetic construct
  source 1..17: mol_type = other DNA
gcaactacggccactgc

SEQ ID NO: 134731 - DNA, 17 bp, synthetic construct
  source 1..17: mol_type = other DNA
caactacggccactgcc

SEQ ID NO: 134732 - DNA, 17 bp, synthetic construct
  source 1..17: mol_type = other DNA
aactacggccactgccc

SEQ ID NO: 134733 - DNA, 17 bp, synthetic construct
  source 1..17: mol_type = other DNA
actacggccactgcccc

SEQ ID NO: 134734 - DNA, 17 bp, synthetic construct
  source 1..17: mol_type = other DNA
ctacggccactgcccca

SEQ ID NO: 134735 - DNA, 17 bp, synthetic construct
  source 1..17: mol_type = other DNA
tacggccactgccccag

SEQ ID NO: 134736 - DNA, 17 bp, synthetic construct
  source 1..17: mol_type = other DNA
acggccactgccccagc

SEQ ID NO: 134737 - DNA, 17 bp, synthetic construct
  source 1..17: mol_type = other DNA
cggccactgccccagca

SEQ ID NO: 134738 - DNA, 17 bp, synthetic construct
  source 1..17: mol_type = other DNA
ggccactgccccagcac

SEQ ID NO: 134739 - DNA, 17 bp, synthetic construct
  source 1..17: mol_type = other DNA
gccactgccccagcacc

SEQ ID NO: 134740 - DNA, 17 bp, synthetic construct
  source 1..17: mol_type = other DNA
ccactgccccagcaccc

SEQ ID NO: 134741 - DNA, 17 bp, synthetic construct
  source 1..17: mol_type = other DNA
cactgccccagcacccc

SEQ ID NO: 134742 - DNA, 17 bp, synthetic construct
  source 1..17: mol_type = other DNA
actgccccagcaccccg

SEQ ID NO: 134743 - DNA, 17 bp, synthetic construct
  source 1..17: mol_type = other DNA
ctgccccagcaccccgg

SEQ ID NO: 134744 - DNA, 17 bp, synthetic construct
  source 1..17: mol_type = other DNA
tgccccagcaccccggc

SEQ ID NO: 134745 - DNA, 17 bp, synthetic construct
  source 1..17: mol_type = other DNA
gccccagcaccccggcc

SEQ ID NO: 134746 - DNA, 17 bp, synthetic construct
  source 1..17: mol_type = other DNA
ccccagcaccccggcca

SEQ ID NO: 134747 - DNA, 17 bp, synthetic construct
  source 1..17: mol_type = other DNA
cccagcaccccggccac

SEQ ID NO: 134748 - DNA, 17 bp, synthetic construct
  source 1..17: mol_type = other DNA
ccagcaccccggccacc

SEQ ID NO: 134749 - DNA, 17 bp, synthetic construct
  source 1..17: mol_type = other DNA
cagcaccccggccacca

SEQ ID NO: 134750 - DNA, 17 bp, synthetic construct
  source 1..17: mol_type = other DNA
agcaccccggccaccag

SEQ ID NO: 134751 - DNA, 17 bp, synthetic construct
  source 1..17: mol_type = other DNA
gcaccccggccaccagc

SEQ ID NO: 134752 - DNA, 17 bp, synthetic construct
  source 1..17: mol_type = other DNA
caccccggccaccagct

SEQ ID NO: 134753 - DNA, 17 bp, synthetic construct
  source 1..17: mol_type = other DNA
accccggccaccagctc

SEQ ID NO: 134754 - DNA, 17 bp, synthetic construct
  source 1..17: mol_type = other DNA
ccccggccaccagctct

SEQ ID NO: 134755 - DNA, 17 bp, synthetic construct
  source 1..17: mol_type = other DNA
cccggccaccagctcta

SEQ ID NO: 134756 - DNA, 17 bp, synthetic construct
  source 1..17: mol_type = other DNA
ccggccaccagctctac

SEQ ID NO: 134757 - DNA, 17 bp, synthetic construct
  source 1..17: mol_type = other DNA
cggccaccagctctacg

SEQ ID NO: 134758 - DNA, 17 bp, synthetic construct
  source 1..17: mol_type = other DNA
ggccaccagctctacgg

SEQ ID NO: 134759 - DNA, 17 bp, synthetic construct
  source 1..17: mol_type = other DNA
gccaccagctctacggc

SEQ ID NO: 134760 - DNA, 17 bp, synthetic construct
  source 1..17: mol_type = other DNA
ccaccagctctacggcc

SEQ ID NO: 134761 - DNA, 17 bp, synthetic construct
  source 1..17: mol_type = other DNA
caccagctctacggcca

SEQ ID NO: 134762 - DNA, 17 bp, synthetic construct
  source 1..17: mol_type = other DNA
accagctctacggccat

SEQ ID NO: 134763 - DNA, 17 bp, synthetic construct
  source 1..17: mol_type = other DNA
ccagctctacggccatg

SEQ ID NO: 134764 - DNA, 17 bp, synthetic construct
  source 1..17: mol_type = other DNA
cagctctacggccatgc

SEQ ID NO: 134765 - DNA, 17 bp, synthetic construct
  source 1..17: mol_type = other DNA
agctctacggccatgcc

SEQ ID NO: 134766 - DNA, 17 bp, synthetic construct
  source 1..17: mol_type = other DNA
gctctacggccatgccc

SEQ ID NO: 134767 - DNA, 17 bp, synthetic construct
  source 1..17: mol_type = other DNA
ctctacggccatgccct

SEQ ID NO: 134768 - DNA, 17 bp, synthetic construct
  source 1..17: mol_type = other DNA
tctacggccatgccctc

SEQ ID NO: 134769 - DNA, 17 bp, synthetic construct
  source 1..17: mol_type = other DNA
ctacggccatgccctcc

SEQ ID NO: 134770 - DNA, 17 bp, synthetic construct
  source 1..17: mol_type = other DNA
tacggccatgccctcct

SEQ ID NO: 134771 - DNA, 17 bp, synthetic construct
  source 1..17: mol_type = other DNA
acggccatgccctcctc

SEQ ID NO: 134772 - DNA, 17 bp, synthetic construct
  source 1..17: mol_type = other DNA
cggccatgccctcctcc

SEQ ID NO: 134773 - DNA, 17 bp, synthetic construct
  source 1..17: mol_type = other DNA
ggccatgccctcctcca

SEQ ID NO: 134774 - DNA, 17 bp, synthetic construct
  source 1..17: mol_type = other DNA
gccatgccctcctccac

SEQ ID NO: 134775 - DNA, 17 bp, synthetic construct
  source 1..17: mol_type = other DNA
ccatgccctcctccact

SEQ ID NO: 134776 - DNA, 17 bp, synthetic construct
  source 1..17: mol_type = other DNA
catgccctcctccactc

SEQ ID NO: 134777 - DNA, 17 bp, synthetic construct
  source 1..17: mol_type = other DNA
atgccctcctccactcc

SEQ ID NO: 134778 - DNA, 17 bp, synthetic construct
  source 1..17: mol_type = other DNA
tgccctcctccactccg

SEQ ID NO: 134779 - DNA, 17 bp, synthetic construct
  source 1..17: mol_type = other DNA
gccctcctccactccgg

SEQ ID NO: 134780 - DNA, 17 bp, synthetic construct
  source 1..17: mol_type = other DNA
ccctcctccactccggg

SEQ ID NO: 134781 - DNA, 17 bp, synthetic construct
  source 1..17: mol_type = other DNA
cctcctccactccgggg

SEQ ID NO: 134782 - DNA, 17 bp, synthetic construct
  source 1..17: mol_type = other DNA
ctcctccactccgggga

SEQ ID NO: 134783 - DNA, 17 bp, synthetic construct
  source 1..17: mol_type = other DNA
tcctccactccggggac

SEQ ID NO: 134784 - DNA, 17 bp, synthetic construct
  source 1..17: mol_type = other DNA
cctccactccggggacg

SEQ ID NO: 134785 - DNA, 17 bp, synthetic construct
  source 1..17: mol_type = other DNA
ctccactccggggacga

SEQ ID NO: 134786 - DNA, 17 bp, synthetic construct
  source 1..17: mol_type = other DNA
tccactccggggacgac

SEQ ID NO: 134787 - DNA, 17 bp, synthetic construct
  source 1..17: mol_type = other DNA
ccactccggggacgacc

SEQ ID NO: 134788 - DNA, 17 bp, synthetic construct
  source 1..17: mol_type = other DNA
cactccggggacgacct

SEQ ID NO: 134789 - DNA, 17 bp, synthetic construct
  source 1..17: mol_type = other DNA
actccggggacgacctg

SEQ ID NO: 134790 - DNA, 17 bp, synthetic construct
  source 1..17: mol_type = other DNA
ctccggggacgacctgg

SEQ ID NO: 134791 - DNA, 17 bp, synthetic construct
  source 1..17: mol_type = other DNA
tccggggacgacctgga

SEQ ID NO: 134792 - DNA, 17 bp, synthetic construct
  source 1..17: mol_type = other DNA
ccggggacgacctggat

SEQ ID NO: 134793 - DNA, 17 bp, synthetic construct
  source 1..17: mol_type = other DNA
cggggacgacctggatc

SEQ ID NO: 134794 - DNA, 17 bp, synthetic construct
  source 1..17: mol_type = other DNA
ggggacgacctggatcc

SEQ ID NO: 134795 - DNA, 17 bp, synthetic construct
  source 1..17: mol_type = other DNA
gggacgacctggatcct

SEQ ID NO: 134796 - DNA, 17 bp, synthetic construct
  source 1..17: mol_type = other DNA
ggacgacctggatcctc

SEQ ID NO: 134797 - DNA, 17 bp, synthetic construct
  source 1..17: mol_type = other DNA
gacgacctggatcctca

SEQ ID NO: 134798 - DNA, 17 bp, synthetic construct
  source 1..17: mol_type = other DNA
acgacctggatcctcac

SEQ ID NO: 134799 - DNA, 17 bp, synthetic construct
  source 1..17: mol_type = other DNA
cgacctggatcctcaca

SEQ ID NO: 134800 - DNA, 17 bp, synthetic construct
  source 1..17: mol_type = other DNA
gacctggatcctcacag

SEQ ID NO: 134801 - DNA, 17 bp, synthetic construct
  source 1..17: mol_type = other DNA
acctggatcctcacaga

SEQ ID NO: 134802 - DNA, 17 bp, synthetic construct
  source 1..17: mol_type = other DNA
cctggatcctcacagag

SEQ ID NO: 134803 - DNA, 17 bp, synthetic construct
  source 1..17: mol_type = other DNA
ctggatcctcacagagc

SEQ ID NO: 134804 - DNA, 17 bp, synthetic construct
  source 1..17: mol_type = other DNA
tggatcctcacagagct

SEQ ID NO: 134805 - DNA, 17 bp, synthetic construct
  source 1..17: mol_type = other DNA
ggatcctcacagagctg

SEQ ID NO: 134806 - DNA, 17 bp, synthetic construct
  source 1..17: mol_type = other DNA
gatcctcacagagctga

SEQ ID NO: 134807 - DNA, 17 bp, synthetic construct
  source 1..17: mol_type = other DNA
atcctcacagagctgac

SEQ ID NO: 134808 - DNA, 17 bp, synthetic construct
  source 1..17: mol_type = other DNA
tcctcacagagctgacc

SEQ ID NO: 134809 - DNA, 17 bp, synthetic construct
  source 1..17: mol_type = other DNA
cctcacagagctgacca

SEQ ID NO: 134810 - DNA, 17 bp, synthetic construct
  source 1..17: mol_type = other DNA
ctcacagagctgaccac

SEQ ID NO: 134811 - DNA, 17 bp, synthetic construct
  source 1..17: mol_type = other DNA
tcacagagctgaccaca

SEQ ID NO: 134812 - DNA, 17 bp, synthetic construct
  source 1..17: mol_type = other DNA
cacagagctgaccacaa

SEQ ID NO: 134813 - DNA, 17 bp, synthetic construct
  source 1..17: mol_type = other DNA
acagagctgaccacaac

SEQ ID NO: 134814 - DNA, 17 bp, synthetic construct
  source 1..17: mol_type = other DNA
cagagctgaccacaaca

SEQ ID NO: 134815 - DNA, 17 bp, synthetic construct
  source 1..17: mol_type = other DNA
agagctgaccacaacag

SEQ ID NO: 134816 - DNA, 17 bp, synthetic construct
  source 1..17: mol_type = other DNA
gagctgaccacaacagc

SEQ ID NO: 134817 - DNA, 17 bp, synthetic construct
  source 1..17: mol_type = other DNA
agctgaccacaacagcc

SEQ ID NO: 134818 - DNA, 17 bp, synthetic construct
  source 1..17: mol_type = other DNA
gctgaccacaacagcca

SEQ ID NO: 134819 - DNA, 17 bp, synthetic construct
  source 1..17: mol_type = other DNA
ctgaccacaacagccac

SEQ ID NO: 134820 - DNA, 17 bp, synthetic construct
  source 1..17: mol_type = other DNA
tgaccacaacagccact

SEQ ID NO: 134821 - DNA, 17 bp, synthetic construct
  source 1..17: mol_type = other DNA
gaccacaacagccacta

SEQ ID NO: 134822 - DNA, 17 bp, synthetic construct
  source 1..17: mol_type = other DNA
accacaacagccactac

SEQ ID NO: 134823 - DNA, 17 bp, synthetic construct
  source 1..17: mol_type = other DNA
ccacaacagccactacg

SEQ ID NO: 134824 - DNA, 17 bp, synthetic construct
  source 1..17: mol_type = other DNA
cacaacagccactacga

SEQ ID NO: 134825 - DNA, 17 bp, synthetic construct
  source 1..17: mol_type = other DNA
acaacagccactacgac

SEQ ID NO: 134826 - DNA, 17 bp, synthetic construct
  source 1..17: mol_type = other DNA
caacagccactacgact

SEQ ID NO: 134827 - DNA, 17 bp, synthetic construct
  source 1..17: mol_type = other DNA
aacagccactacgactg

SEQ ID NO: 134828 - DNA, 17 bp, synthetic construct
  source 1..17: mol_type = other DNA
acagccactacgactgc

SEQ ID NO: 134829 - DNA, 17 bp, synthetic construct
  source 1..17: mol_type = other DNA
cagccactacgactgca

SEQ ID NO: 134830 - DNA, 17 bp, synthetic construct
  source 1..17: mol_type = other DNA
agccactacgactgcat

SEQ ID NO: 134831 - DNA, 17 bp, synthetic construct
  source 1..17: mol_type = other DNA
gccactacgactgcatc

SEQ ID NO: 134832 - DNA, 17 bp, synthetic construct
  source 1..17: mol_type = other DNA
ccactacgactgcatcc

SEQ ID NO: 134833 - DNA, 17 bp, synthetic construct
  source 1..17: mol_type = other DNA
cactacgactgcatcca

SEQ ID NO: 134834 - DNA, 17 bp, synthetic construct
  source 1..17: mol_type = other DNA
actacgactgcatccac

SEQ ID NO: 134835 - DNA, 17 bp, synthetic construct
  source 1..17: mol_type = other DNA
ctacgactgcatccact

SEQ ID NO: 134836 - DNA, 17 bp, synthetic construct
  source 1..17: mol_type = other DNA
tacgactgcatccactg

SEQ ID NO: 134837 - DNA, 17 bp, synthetic construct
  source 1..17: mol_type = other DNA
acgactgcatccactgg

SEQ ID NO: 134838 - DNA, 17 bp, synthetic construct
  source 1..17: mol_type = other DNA
cgactgcatccactgga

SEQ ID NO: 134839 - DNA, 17 bp, synthetic construct
  source 1..17: mol_type = other DNA
gactgcatccactggat

SEQ ID NO: 134840 - DNA, 17 bp, synthetic construct
  source 1..17: mol_type = other DNA
actgcatccactggatc

SEQ ID NO: 134841 - DNA, 17 bp, synthetic construct
  source 1..17: mol_type = other DNA
ctgcatccactggatcc

SEQ ID NO: 134842 - DNA, 17 bp, synthetic construct
  source 1..17: mol_type = other DNA
tgcatccactggatcca

SEQ ID NO: 134843 - DNA, 17 bp, synthetic construct
  source 1..17: mol_type = other DNA
gcatccactggatccac

SEQ ID NO: 134844 - DNA, 17 bp, synthetic construct
  source 1..17: mol_type = other DNA
catccactggatccacg

SEQ ID NO: 134845 - DNA, 17 bp, synthetic construct
  source 1..17: mol_type = other DNA
atccactggatccacgg

SEQ ID NO: 134846 - DNA, 17 bp, synthetic construct
  source 1..17: mol_type = other DNA
tccactggatccacggc

SEQ ID NO: 134847 - DNA, 17 bp, synthetic construct
  source 1..17: mol_type = other DNA
ccactggatccacggcc

SEQ ID NO: 134848 - DNA, 17 bp, synthetic construct
  source 1..17: mol_type = other DNA
cactggatccacggcca

SEQ ID NO: 134849 - DNA, 17 bp, synthetic construct
  source 1..17: mol_type = other DNA
actggatccacggccac

SEQ ID NO: 134850 - DNA, 17 bp, synthetic construct
  source 1..17: mol_type = other DNA
ctggatccacggccacc

SEQ ID NO: 134851 - DNA, 17 bp, synthetic construct
  source 1..17: mol_type = other DNA
tggatccacggccaccc

SEQ ID NO: 134852 - DNA, 17 bp, synthetic construct
  source 1..17: mol_type = other DNA
ggatccacggccacccc

SEQ ID NO: 134853 - DNA, 17 bp, synthetic construct
  source 1..17: mol_type = other DNA
gatccacggccaccccg

SEQ ID NO: 134854 - DNA, 17 bp, synthetic construct
  source 1..17: mol_type = other DNA
atccacggccaccccgt

SEQ ID NO: 134855 - DNA, 17 bp, synthetic construct
  source 1..17: mol_type = other DNA
tccacggccaccccgtc

SEQ ID NO: 134856 - DNA, 17 bp, synthetic construct
  source 1..17: mol_type = other DNA
ccacggccaccccgtcc

SEQ ID NO: 134857 - DNA, 17 bp, synthetic construct
  source 1..17: mol_type = other DNA
cacggccaccccgtcct

SEQ ID NO: 134858 - DNA, 17 bp, synthetic construct
  source 1..17: mol_type = other DNA
acggccaccccgtcctc

SEQ ID NO: 134859 - DNA, 17 bp, synthetic construct
  source 1..17: mol_type = other DNA
cggccaccccgtcctcc

SEQ ID NO: 134860 - DNA, 17 bp, synthetic construct
  source 1..17: mol_type = other DNA
ggccaccccgtcctcca

SEQ ID NO: 134861 - DNA, 17 bp, synthetic construct
  source 1..17: mol_type = other DNA
gccaccccgtcctccac

SEQ ID NO: 134862 - DNA, 17 bp, synthetic construct
  source 1..17: mol_type = other DNA
ccaccccgtcctccacc

SEQ ID NO: 134863 - DNA, 17 bp, synthetic construct
  source 1..17: mol_type = other DNA
caccccgtcctccaccc

SEQ ID NO: 134864 - DNA, 17 bp, synthetic construct
  source 1..17: mol_type = other DNA
accccgtcctccacccc

SEQ ID NO: 134865 - DNA, 17 bp, synthetic construct
  source 1..17: mol_type = other DNA
ccccgtcctccaccccg

SEQ ID NO: 134866 - DNA, 17 bp, synthetic construct
  source 1..17: mol_type = other DNA
cccgtcctccaccccgg

SEQ ID NO: 134867 - DNA, 17 bp, synthetic construct
  source 1..17: mol_type = other DNA
ccgtcctccaccccggg

SEQ ID NO: 134868 - DNA, 17 bp, synthetic construct
  source 1..17: mol_type = other DNA
cgtcctccaccccggga

SEQ ID NO: 134869 - DNA, 17 bp, synthetic construct
  source 1..17: mol_type = other DNA
gtcctccaccccgggaa

SEQ ID NO: 134870 - DNA, 17 bp, synthetic construct
  source 1..17: mol_type = other DNA
tcctccaccccgggaac

SEQ ID NO: 134871 - DNA, 17 bp, synthetic construct
  source 1..17: mol_type = other DNA
cctccaccccgggaaca

SEQ ID NO: 134872 - DNA, 17 bp, synthetic construct
  source 1..17: mol_type = other DNA
ctccaccccgggaacag

SEQ ID NO: 134873 - DNA, 17 bp, synthetic construct
  source 1..17: mol_type = other DNA
tccaccccgggaacagc

SEQ ID NO: 134874 - DNA, 17 bp, synthetic construct
  source 1..17: mol_type = other DNA
ccaccccgggaacagct

SEQ ID NO: 134875 - DNA, 17 bp, synthetic construct
  source 1..17: mol_type = other DNA
caccccgggaacagctc

SEQ ID NO: 134876 - DNA, 17 bp, synthetic construct
  source 1..17: mol_type = other DNA
accccgggaacagctcc

SEQ ID NO: 134877 - DNA, 17 bp, synthetic construct
  source 1..17: mol_type = other DNA
ccccgggaacagctccc

SEQ ID NO: 134878 - DNA, 17 bp, synthetic construct
  source 1..17: mol_type = other DNA
cccgggaacagctcccc

SEQ ID NO: 134879 - DNA, 17 bp, synthetic construct
  source 1..17: mol_type = other DNA
ccgggaacagctccccc

SEQ ID NO: 134880 - DNA, 17 bp, synthetic construct
  source 1..17: mol_type = other DNA
cgggaacagctccccct

SEQ ID NO: 134881 - DNA, 17 bp, synthetic construct
  source 1..17: mol_type = other DNA
gggaacagctccccctc

SEQ ID NO: 134882 - DNA, 17 bp, synthetic construct
  source 1..17: mol_type = other DNA
ggaacagctccccctcc

SEQ ID NO: 134883 - DNA, 17 bp, synthetic construct
  source 1..17: mol_type = other DNA
gaacagctccccctccc

SEQ ID NO: 134884 - DNA, 17 bp, synthetic construct
  source 1..17: mol_type = other DNA
aacagctccccctccca

SEQ ID NO: 134885 - DNA, 17 bp, synthetic construct
  source 1..17: mol_type = other DNA
acagctccccctcccaa

SEQ ID NO: 134886 - DNA, 17 bp, synthetic construct
  source 1..17: mol_type = other DNA
cagctccccctcccaaa

SEQ ID NO: 134887 - DNA, 17 bp, synthetic construct
  source 1..17: mol_type = other DNA
agctccccctcccaaag

SEQ ID NO: 134888 - DNA, 17 bp, synthetic construct
  source 1..17: mol_type = other DNA
gctccccctcccaaagt

SEQ ID NO: 134889 - DNA, 17 bp, synthetic construct
  source 1..17: mol_type = other DNA
ctccccctcccaaagtg

SEQ ID NO: 134890 - DNA, 17 bp, synthetic construct
  source 1..17: mol_type = other DNA
tccccctcccaaagtgc

SEQ ID NO: 134891 - DNA, 17 bp, synthetic construct
  source 1..17: mol_type = other DNA
ccccctcccaaagtgct

SEQ ID NO: 134892 - DNA, 17 bp, synthetic construct
  source 1..17: mol_type = other DNA
cccctcccaaagtgctg

SEQ ID NO: 134893 - DNA, 17 bp, synthetic construct
  source 1..17: mol_type = other DNA
ccctcccaaagtgctga

SEQ ID NO: 134894 - DNA, 17 bp, synthetic construct
  source 1..17: mol_type = other DNA
cctcccaaagtgctgac

SEQ ID NO: 134895 - DNA, 17 bp, synthetic construct
  source 1..17: mol_type = other DNA
ctcccaaagtgctgacc

SEQ ID NO: 134896 - DNA, 17 bp, synthetic construct
  source 1..17: mol_type = other DNA
tcccaaagtgctgacca

SEQ ID NO: 134897 - DNA, 17 bp, synthetic construct
  source 1..17: mol_type = other DNA
cccaaagtgctgaccag

SEQ ID NO: 134898 - DNA, 17 bp, synthetic construct
  source 1..17: mol_type = other DNA
ccaaagtgctgaccagc

SEQ ID NO: 134899 - DNA, 17 bp, synthetic construct
  source 1..17: mol_type = other DNA
caaagtgctgaccagcc

SEQ ID NO: 134900 - DNA, 17 bp, synthetic construct
  source 1..17: mol_type = other DNA
aaagtgctgaccagccc

SEQ ID NO: 134901 - DNA, 17 bp, synthetic construct
  source 1..17: mol_type = other DNA
aagtgctgaccagcccg

SEQ ID NO: 134902 - DNA, 17 bp, synthetic construct
  source 1..17: mol_type = other DNA
agtgctgaccagcccgg

SEQ ID NO: 134903 - DNA, 17 bp, synthetic construct
  source 1..17: mol_type = other DNA
gtgctgaccagcccggc

SEQ ID NO: 134904 - DNA, 17 bp, synthetic construct
  source 1..17: mol_type = other DNA
tgctgaccagcccggcc

SEQ ID NO: 134905 - DNA, 17 bp, synthetic construct
  source 1..17: mol_type = other DNA
gctgaccagcccggcca

SEQ ID NO: 134906 - DNA, 17 bp, synthetic construct
  source 1..17: mol_type = other DNA
ctgaccagcccggccac

SEQ ID NO: 134907 - DNA, 17 bp, synthetic construct
  source 1..17: mol_type = other DNA
tgaccagcccggccacc

SEQ ID NO: 134908 - DNA, 17 bp, synthetic construct
  source 1..17: mol_type = other DNA
gaccagcccggccacca

SEQ ID NO: 134909 - DNA, 17 bp, synthetic construct
  source 1..17: mol_type = other DNA
accagcccggccaccac

SEQ ID NO: 134910 - DNA, 17 bp, synthetic construct
  source 1..17: mol_type = other DNA
ccagcccggccaccaca

SEQ ID NO: 134911 - DNA, 17 bp, synthetic construct
  source 1..17: mol_type = other DNA
cagcccggccaccacac

SEQ ID NO: 134912 - DNA, 17 bp, synthetic construct
  source 1..17: mol_type = other DNA
agcccggccaccacacc

SEQ ID NO: 134913 - DNA, 17 bp, synthetic construct
  source 1..17: mol_type = other DNA
gcccggccaccacaccc

SEQ ID NO: 134914 - DNA, 17 bp, synthetic construct
  source 1..17: mol_type = other DNA
cccggccaccacaccca

SEQ ID NO: 134915 - DNA, 17 bp, synthetic construct
  source 1..17: mol_type = other DNA
ccggccaccacacccac

SEQ ID NO: 134916 - DNA, 17 bp, synthetic construct
  source 1..17: mol_type = other DNA
cggccaccacacccaca

SEQ ID NO: 134917 - DNA, 17 bp, synthetic construct
  source 1..17: mol_type = other DNA
ggccaccacacccacag

SEQ ID NO: 134918 - DNA, 17 bp, synthetic construct
  source 1..17: mol_type = other DNA
gccaccacacccacagc

SEQ ID NO: 134919 - DNA, 17 bp, synthetic construct
  source 1..17: mol_type = other DNA
ccaccacacccacagcc

SEQ ID NO: 134920 - DNA, 17 bp, synthetic construct
  source 1..17: mol_type = other DNA
caccacacccacagcca

SEQ ID NO: 134921 - DNA, 17 bp, synthetic construct
  source 1..17: mol_type = other DNA
accacacccacagccac

SEQ ID NO: 134922 - DNA, 17 bp, synthetic construct
  source 1..17: mol_type = other DNA
ccacacccacagccacc

SEQ ID NO: 134923 - DNA, 17 bp, synthetic construct
  source 1..17: mol_type = other DNA
cacacccacagccacca

SEQ ID NO: 134924 - DNA, 17 bp, synthetic construct
  source 1..17: mol_type = other DNA
acacccacagccaccag

SEQ ID NO: 134925 - DNA, 17 bp, synthetic construct
  source 1..17: mol_type = other DNA
cacccacagccaccagt

SEQ ID NO: 134926 - DNA, 17 bp, synthetic construct
  source 1..17: mol_type = other DNA
acccacagccaccagtt

SEQ ID NO: 134927 - DNA, 17 bp, synthetic construct
  source 1..17: mol_type = other DNA
cccacagccaccagttc

SEQ ID NO: 134928 - DNA, 17 bp, synthetic construct
  source 1..17: mol_type = other DNA
ccacagccaccagttcc

SEQ ID NO: 134929 - DNA, 17 bp, synthetic construct
  source 1..17: mol_type = other DNA
cacagccaccagttcca

SEQ ID NO: 134930 - DNA, 17 bp, synthetic construct
  source 1..17: mol_type = other DNA
acagccaccagttccaa

SEQ ID NO: 134931 - DNA, 17 bp, synthetic construct
  source 1..17: mol_type = other DNA
cagccaccagttccaaa

SEQ ID NO: 134932 - DNA, 17 bp, synthetic construct
  source 1..17: mol_type = other DNA
agccaccagttccaaag

SEQ ID NO: 134933 - DNA, 17 bp, synthetic construct
  source 1..17: mol_type = other DNA
gccaccagttccaaagc

SEQ ID NO: 134934 - DNA, 17 bp, synthetic construct
  source 1..17: mol_type = other DNA
ccaccagttccaaagcc

SEQ ID NO: 134935 - DNA, 17 bp, synthetic construct
  source 1..17: mol_type = other DNA
caccagttccaaagcca

SEQ ID NO: 134936 - DNA, 17 bp, synthetic construct
  source 1..17: mol_type = other DNA
accagttccaaagccac

SEQ ID NO: 134937 - DNA, 17 bp, synthetic construct
  source 1..17: mol_type = other DNA
ccagttccaaagccact

SEQ ID NO: 134938 - DNA, 17 bp, synthetic construct
  source 1..17: mol_type = other DNA
cagttccaaagccactt

SEQ ID NO: 134939 - DNA, 17 bp, synthetic construct
  source 1..17: mol_type = other DNA
agttccaaagccacttc

SEQ ID NO: 134940 - DNA, 17 bp, synthetic construct
  source 1..17: mol_type = other DNA
gttccaaagccacttcc

SEQ ID NO: 134941 - DNA, 17 bp, synthetic construct
  source 1..17: mol_type = other DNA
ttccaaagccacttcct

SEQ ID NO: 134942 - DNA, 17 bp, synthetic construct
  source 1..17: mol_type = other DNA
tccaaagccacttcctc

SEQ ID NO: 134943 - DNA, 17 bp, synthetic construct
  source 1..17: mol_type = other DNA
ccaaagccacttcctcc

SEQ ID NO: 134944 - DNA, 17 bp, synthetic construct
  source 1..17: mol_type = other DNA
caaagccacttcctcct

SEQ ID NO: 134945 - DNA, 17 bp, synthetic construct
  source 1..17: mol_type = other DNA
aaagccacttcctcctc

SEQ ID NO: 134946 - DNA, 17 bp, synthetic construct
  source 1..17: mol_type = other DNA
aagccacttcctcctcc

SEQ ID NO: 134947 - DNA, 17 bp, synthetic construct
  source 1..17: mol_type = other DNA
agccacttcctcctcca

SEQ ID NO: 134948 - DNA, 17 bp, synthetic construct
  source 1..17: mol_type = other DNA
gccacttcctcctccag

SEQ ID NO: 134949 - DNA, 17 bp, synthetic construct
  source 1..17: mol_type = other DNA
ccacttcctcctccagt

SEQ ID NO: 134950 - DNA, 17 bp, synthetic construct
  source 1..17: mol_type = other DNA
cacttcctcctccagtc

SEQ ID NO: 134951 - DNA, 17 bp, synthetic construct
  source 1..17: mol_type = other DNA
acttcctcctccagtcc

SEQ ID NO: 134952 - DNA, 17 bp, synthetic construct
  source 1..17: mol_type = other DNA
cttcctcctccagtcca

SEQ ID NO: 134953 - DNA, 17 bp, synthetic construct
  source 1..17: mol_type = other DNA
ttcctcctccagtccaa

SEQ ID NO: 134954 - DNA, 17 bp, synthetic construct
  source 1..17: mol_type = other DNA
tcctcctccagtccaag

SEQ ID NO: 134955 - DNA, 17 bp, synthetic construct
  source 1..17: mol_type = other DNA
cctcctccagtccaagg

SEQ ID NO: 134956 - DNA, 17 bp, synthetic construct
  source 1..17: mol_type = other DNA
ctcctccagtccaagga

SEQ ID NO: 134957 - DNA, 17 bp, synthetic construct
  source 1..17: mol_type = other DNA
tcctccagtccaaggac

SEQ ID NO: 134958 - DNA, 17 bp, synthetic construct
  source 1..17: mol_type = other DNA
cctccagtccaaggact

SEQ ID NO: 134959 - DNA, 17 bp, synthetic construct
  source 1..17: mol_type = other DNA
ctccagtccaaggactg

SEQ ID NO: 134960 - DNA, 17 bp, synthetic construct
  source 1..17: mol_type = other DNA
tccagtccaaggactgc

SEQ ID NO: 134961 - DNA, 17 bp, synthetic construct
  source 1..17: mol_type = other DNA
ccagtccaaggactgca

SEQ ID NO: 134962 - DNA, 17 bp, synthetic construct
  source 1..17: mol_type = other DNA
cagtccaaggactgcaa

SEQ ID NO: 134963 - DNA, 17 bp, synthetic construct
  source 1..17: mol_type = other DNA
agtccaaggactgcaac

SEQ ID NO: 134964 - DNA, 17 bp, synthetic construct
  source 1..17: mol_type = other DNA
gtccaaggactgcaacc

SEQ ID NO: 134965 - DNA, 17 bp, synthetic construct
  source 1..17: mol_type = other DNA
tccaaggactgcaacca

SEQ ID NO: 134966 - DNA, 17 bp, synthetic construct
  source 1..17: mol_type = other DNA
ccaaggactgcaaccac

SEQ ID NO: 134967 - DNA, 17 bp, synthetic construct
  source 1..17: mol_type = other DNA
caaggactgcaaccacc

SEQ ID NO: 134968 - DNA, 17 bp, synthetic construct
  source 1..17: mol_type = other DNA
aaggactgcaaccaccc

SEQ ID NO: 134969 - DNA, 17 bp, synthetic construct
  source 1..17: mol_type = other DNA
aggactgcaaccaccct

SEQ ID NO: 134970 - DNA, 17 bp, synthetic construct
  source 1..17: mol_type = other DNA
ggactgcaaccaccctt

SEQ ID NO: 134971 - DNA, 17 bp, synthetic construct
  source 1..17: mol_type = other DNA
gactgcaaccacccttc

SEQ ID NO: 134972 - DNA, 17 bp, synthetic construct
  source 1..17: mol_type = other DNA
actgcaaccacccttcc

SEQ ID NO: 134973 - DNA, 17 bp, synthetic construct
  source 1..17: mol_type = other DNA
ctgcaaccacccttcca

SEQ ID NO: 134974 - DNA, 17 bp, synthetic construct
  source 1..17: mol_type = other DNA
tgcaaccacccttccag

SEQ ID NO: 134975 - DNA, 17 bp, synthetic construct
  source 1..17: mol_type = other DNA
gcaaccacccttccagt

SEQ ID NO: 134976 - DNA, 17 bp, synthetic construct
  source 1..17: mol_type = other DNA
caaccacccttccagtg

SEQ ID NO: 134977 - DNA, 17 bp, synthetic construct
  source 1..17: mol_type = other DNA
aaccacccttccagtgc

SEQ ID NO: 134978 - DNA, 17 bp, synthetic construct
  source 1..17: mol_type = other DNA
accacccttccagtgct

SEQ ID NO: 134979 - DNA, 17 bp, synthetic construct
  source 1..17: mol_type = other DNA
ccacccttccagtgctg

SEQ ID NO: 134980 - DNA, 17 bp, synthetic construct
  source 1..17: mol_type = other DNA
cacccttccagtgctga

SEQ ID NO: 134981 - DNA, 17 bp, synthetic construct
  source 1..17: mol_type = other DNA
acccttccagtgctgac

SEQ ID NO: 134982 - DNA, 17 bp, synthetic construct
  source 1..17: mol_type = other DNA
cccttccagtgctgaca

SEQ ID NO: 134983 - DNA, 17 bp, synthetic construct
  source 1..17: mol_type = other DNA
ccttccagtgctgacaa

SEQ ID NO: 134984 - DNA, 17 bp, synthetic construct
  source 1..17: mol_type = other DNA
cttccagtgctgacaag

SEQ ID NO: 134985 - DNA, 17 bp, synthetic construct
  source 1..17: mol_type = other DNA
ttccagtgctgacaagc

SEQ ID NO: 134986 - DNA, 17 bp, synthetic construct
  source 1..17: mol_type = other DNA
tccagtgctgacaagca

SEQ ID NO: 134987 - DNA, 17 bp, synthetic construct
  source 1..17: mol_type = other DNA
ccagtgctgacaagcac

SEQ ID NO: 134988 - DNA, 17 bp, synthetic construct
  source 1..17: mol_type = other DNA
cagtgctgacaagcaca

SEQ ID NO: 134989 - DNA, 17 bp, synthetic construct
  source 1..17: mol_type = other DNA
agtgctgacaagcacag

SEQ ID NO: 134990 - DNA, 17 bp, synthetic construct
  source 1..17: mol_type = other DNA
gtgctgacaagcacagc

SEQ ID NO: 134991 - DNA, 17 bp, synthetic construct
  source 1..17: mol_type = other DNA
tgctgacaagcacagcc

SEQ ID NO: 134992 - DNA, 17 bp, synthetic construct
  source 1..17: mol_type = other DNA
gctgacaagcacagcca

SEQ ID NO: 134993 - DNA, 17 bp, synthetic construct
  source 1..17: mol_type = other DNA
ctgacaagcacagccac

SEQ ID NO: 134994 - DNA, 17 bp, synthetic construct
  source 1..17: mol_type = other DNA
tgacaagcacagccacc

SEQ ID NO: 134995 - DNA, 17 bp, synthetic construct
  source 1..17: mol_type = other DNA
gacaagcacagccacca

SEQ ID NO: 134996 - DNA, 17 bp, synthetic construct
  source 1..17: mol_type = other DNA
acaagcacagccaccaa

SEQ ID NO: 134997 - DNA, 17 bp, synthetic construct
  source 1..17: mol_type = other DNA
caagcacagccaccaaa

SEQ ID NO: 134998 - DNA, 17 bp, synthetic construct
  source 1..17: mol_type = other DNA
aagcacagccaccaaat

SEQ ID NO: 134999 - DNA, 17 bp, synthetic construct
  source 1..17: mol_type = other DNA
agcacagccaccaaatc

SEQ ID NO: 135000 - DNA, 17 bp, synthetic construct
  source 1..17: mol_type = other DNA
gcacagccaccaaatcc

SEQ ID NO: 135001 - DNA, 17 bp, synthetic construct
  source 1..17: mol_type = other DNA
cacagccaccaaatcca

SEQ ID NO: 135002 - DNA, 17 bp, synthetic construct
  source 1..17: mol_type = other DNA
acagccaccaaatccac

SEQ ID NO: 135003 - DNA, 17 bp, synthetic construct
  source 1..17: mol_type = other DNA
cagccaccaaatccaca

SEQ ID NO: 135004 - DNA, 17 bp, synthetic construct
  source 1..17: mol_type = other DNA
agccaccaaatccacag

SEQ ID NO: 135005 - DNA, 17 bp, synthetic construct
  source 1..17: mol_type = other DNA
gccaccaaatccacagc

SEQ ID NO: 135006 - DNA, 17 bp, synthetic construct
  source 1..17: mol_type = other DNA
ccaccaaatccacagct

SEQ ID NO: 135007 - DNA, 17 bp, synthetic construct
  source 1..17: mol_type = other DNA
caccaaatccacagcta

SEQ ID NO: 135008 - DNA, 17 bp, synthetic construct
  source 1..17: mol_type = other DNA
accaaatccacagctac

SEQ ID NO: 135009 - DNA, 17 bp, synthetic construct
  source 1..17: mol_type = other DNA
ccaaatccacagctacc

SEQ ID NO: 135010 - DNA, 17 bp, synthetic construct
  source 1..17: mol_type = other DNA
caaatccacagctacca

SEQ ID NO: 135011 - DNA, 17 bp, synthetic construct
  source 1..17: mol_type = other DNA
aaatccacagctaccag

SEQ ID NO: 135012 - DNA, 17 bp, synthetic construct
  source 1..17: mol_type = other DNA
aatccacagctaccagc

SEQ ID NO: 135013 - DNA, 17 bp, synthetic construct
  source 1..17: mol_type = other DNA
atccacagctaccagcg

SEQ ID NO: 135014 - DNA, 17 bp, synthetic construct
  source 1..17: mol_type = other DNA
tccacagctaccagcgt

SEQ ID NO: 135015 - DNA, 17 bp, synthetic construct
  source 1..17: mol_type = other DNA
ccacagctaccagcgtt

SEQ ID NO: 135016 - DNA, 17 bp, synthetic construct
  source 1..17: mol_type = other DNA
cacagctaccagcgtta

SEQ ID NO: 135017 - DNA, 17 bp, synthetic construct
  source 1..17: mol_type = other DNA
acagctaccagcgttac

SEQ ID NO: 135018 - DNA, 17 bp, synthetic construct
  source 1..17: mol_type = other DNA
cagctaccagcgttaca

SEQ ID NO: 135019 - DNA, 17 bp, synthetic construct
  source 1..17: mol_type = other DNA
agctaccagcgttacac

SEQ ID NO: 135020 - DNA, 17 bp, synthetic construct
  source 1..17: mol_type = other DNA
gctaccagcgttacacc

SEQ ID NO: 135021 - DNA, 17 bp, synthetic construct
  source 1..17: mol_type = other DNA
ctaccagcgttacaccc

SEQ ID NO: 135022 - DNA, 17 bp, synthetic construct
  source 1..17: mol_type = other DNA
taccagcgttacaccca

SEQ ID NO: 135023 - DNA, 17 bp, synthetic construct
  source 1..17: mol_type = other DNA
accagcgttacacccat

SEQ ID NO: 135024 - DNA, 17 bp, synthetic construct
  source 1..17: mol_type = other DNA
ccagcgttacacccatc

SEQ ID NO: 135025 - DNA, 17 bp, synthetic construct
  source 1..17: mol_type = other DNA
cagcgttacacccatcc

SEQ ID NO: 135026 - DNA, 17 bp, synthetic construct
  source 1..17: mol_type = other DNA
agcgttacacccatccc

SEQ ID NO: 135027 - DNA, 17 bp, synthetic construct
  source 1..17: mol_type = other DNA
gcgttacacccatcccc

SEQ ID NO: 135028 - DNA, 17 bp, synthetic construct
  source 1..17: mol_type = other DNA
cgttacacccatcccct

SEQ ID NO: 135029 - DNA, 17 bp, synthetic construct
  source 1..17: mol_type = other DNA
gttacacccatcccctc

SEQ ID NO: 135030 - DNA, 17 bp, synthetic construct
  source 1..17: mol_type = other DNA
ttacacccatcccctcc

SEQ ID NO: 135031 - DNA, 17 bp, synthetic construct
  source 1..17: mol_type = other DNA
tacacccatcccctcct

SEQ ID NO: 135032 - DNA, 17 bp, synthetic construct
  source 1..17: mol_type = other DNA
acacccatcccctcctc

SEQ ID NO: 135033 - DNA, 17 bp, synthetic construct
  source 1..17: mol_type = other DNA
cacccatcccctcctcc

SEQ ID NO: 135034 - DNA, 17 bp, synthetic construct
  source 1..17: mol_type = other DNA
acccatcccctcctcca

SEQ ID NO: 135035 - DNA, 17 bp, synthetic construct
  source 1..17: mol_type = other DNA
cccatcccctcctccac

SEQ ID NO: 135036 - DNA, 17 bp, synthetic construct
  source 1..17: mol_type = other DNA
ccatcccctcctccacc

SEQ ID NO: 135037 - DNA, 17 bp, synthetic construct
  source 1..17: mol_type = other DNA
catcccctcctccaccc

SEQ ID NO: 135038 - DNA, 17 bp, synthetic construct
  source 1..17: mol_type = other DNA
atcccctcctccaccct

SEQ ID NO: 135039 - DNA, 17 bp, synthetic construct
  source 1..17: mol_type = other DNA
tcccctcctccaccctt

SEQ ID NO: 135040 - DNA, 17 bp, synthetic construct
  source 1..17: mol_type = other DNA
cccctcctccacccttg

SEQ ID NO: 135041 - DNA, 17 bp, synthetic construct
  source 1..17: mol_type = other DNA
ccctcctccacccttgg

SEQ ID NO: 135042 - DNA, 17 bp, synthetic construct
  source 1..17: mol_type = other DNA
cctcctccacccttggg

SEQ ID NO: 135043 - DNA, 17 bp, synthetic construct
  source 1..17: mol_type = other DNA
ctcctccacccttggga

SEQ ID NO: 135044 - DNA, 17 bp, synthetic construct
  source 1..17: mol_type = other DNA
tcctccacccttgggac

SEQ ID NO: 135045 - DNA, 17 bp, synthetic construct
  source 1..17: mol_type = other DNA
cctccacccttgggacc

SEQ ID NO: 135046 - DNA, 17 bp, synthetic construct
  source 1..17: mol_type = other DNA
ctccacccttgggacca

SEQ ID NO: 135047 - DNA, 17 bp, synthetic construct
  source 1..17: mol_type = other DNA
tccacccttgggaccac

SEQ ID NO: 135048 - DNA, 17 bp, synthetic construct
  source 1..17: mol_type = other DNA
ccacccttgggaccacc

SEQ ID NO: 135049 - DNA, 17 bp, synthetic construct
  source 1..17: mol_type = other DNA
cacccttgggaccaccg

SEQ ID NO: 135050 - DNA, 17 bp, synthetic construct
  source 1..17: mol_type = other DNA
acccttgggaccaccgg

SEQ ID NO: 135051 - DNA, 17 bp, synthetic construct
  source 1..17: mol_type = other DNA
cccttgggaccaccggg

SEQ ID NO: 135052 - DNA, 17 bp, synthetic construct
  source 1..17: mol_type = other DNA
ccttgggaccaccggga

SEQ ID NO: 135053 - DNA, 17 bp, synthetic construct
  source 1..17: mol_type = other DNA
cttgggaccaccgggac

SEQ ID NO: 135054 - DNA, 17 bp, synthetic construct
  source 1..17: mol_type = other DNA
ttgggaccaccgggacc

SEQ ID NO: 135055 - DNA, 17 bp, synthetic construct
  source 1..17: mol_type = other DNA
tgggaccaccgggaccc

SEQ ID NO: 135056 - DNA, 17 bp, synthetic construct
  source 1..17: mol_type = other DNA
gggaccaccgggaccct

SEQ ID NO: 135057 - DNA, 17 bp, synthetic construct
  source 1..17: mol_type = other DNA
ggaccaccgggaccctc

SEQ ID NO: 135058 - DNA, 17 bp, synthetic construct
  source 1..17: mol_type = other DNA
gaccaccgggaccctcc

SEQ ID NO: 135059 - DNA, 17 bp, synthetic construct
  source 1..17: mol_type = other DNA
accaccgggaccctccc

SEQ ID NO: 135060 - DNA, 17 bp, synthetic construct
  source 1..17: mol_type = other DNA
ccaccgggaccctccca

SEQ ID NO: 135061 - DNA, 17 bp, synthetic construct
  source 1..17: mol_type = other DNA
caccgggaccctcccag

SEQ ID NO: 135062 - DNA, 17 bp, synthetic construct
  source 1..17: mol_type = other DNA
accgggaccctcccaga

SEQ ID NO: 135063 - DNA, 17 bp, synthetic construct
  source 1..17: mol_type = other DNA
ccgggaccctcccagaa

SEQ ID NO: 135064 - DNA, 17 bp, synthetic construct
  source 1..17: mol_type = other DNA
cgggaccctcccagaac

SEQ ID NO: 135065 - DNA, 17 bp, synthetic construct
  source 1..17: mol_type = other DNA
gggaccctcccagaaca

SEQ ID NO: 135066 - DNA, 17 bp, synthetic construct
  source 1..17: mol_type = other DNA
ggaccctcccagaacag

SEQ ID NO: 135067 - DNA, 17 bp, synthetic construct
  source 1..17: mol_type = other DNA
gaccctcccagaacaga

SEQ ID NO: 135068 - DNA, 17 bp, synthetic construct
  source 1..17: mol_type = other DNA
accctcccagaacagac

SEQ ID NO: 135069 - DNA, 17 bp, synthetic construct
  source 1..17: mol_type = other DNA
ccctcccagaacagacc

SEQ ID NO: 135070 - DNA, 17 bp, synthetic construct
  source 1..17: mol_type = other DNA
cctcccagaacagacca

SEQ ID NO: 135071 - DNA, 17 bp, synthetic construct
  source 1..17: mol_type = other DNA
ctcccagaacagaccac

SEQ ID NO: 135072 - DNA, 17 bp, synthetic construct
  source 1..17: mol_type = other DNA
tcccagaacagaccacc

SEQ ID NO: 135073 - DNA, 17 bp, synthetic construct
  source 1..17: mol_type = other DNA
cccagaacagaccacca

SEQ ID NO: 135074 - DNA, 17 bp, synthetic construct
  source 1..17: mol_type = other DNA
ccagaacagaccaccac

SEQ ID NO: 135075 - DNA, 17 bp, synthetic construct
  source 1..17: mol_type = other DNA
cagaacagaccaccaca

SEQ ID NO: 135076 - DNA, 17 bp, synthetic construct
  source 1..17: mol_type = other DNA
agaacagaccaccacac

SEQ ID NO: 135077 - DNA, 17 bp, synthetic construct
  source 1..17: mol_type = other DNA
gaacagaccaccacacc

SEQ ID NO: 135078 - DNA, 17 bp, synthetic construct
  source 1..17: mol_type = other DNA
aacagaccaccacaccc

SEQ ID NO: 135079 - DNA, 17 bp, synthetic construct
  source 1..17: mol_type = other DNA
acagaccaccacacccg

SEQ ID NO: 135080 - DNA, 17 bp, synthetic construct
  source 1..17: mol_type = other DNA
cagaccaccacacccgt

SEQ ID NO: 135081 - DNA, 17 bp, synthetic construct
  source 1..17: mol_type = other DNA
agaccaccacacccgtg

SEQ ID NO: 135082 - DNA, 17 bp, synthetic construct
  source 1..17: mol_type = other DNA
gaccaccacacccgtgg

SEQ ID NO: 135083 - DNA, 17 bp, synthetic construct
  source 1..17: mol_type = other DNA
accaccacacccgtggc

SEQ ID NO: 135084 - DNA, 17 bp, synthetic construct
  source 1..17: mol_type = other DNA
ccaccacacccgtggcc

SEQ ID NO: 135085 - DNA, 17 bp, synthetic construct
  source 1..17: mol_type = other DNA
caccacacccgtggcca

SEQ ID NO: 135086 - DNA, 17 bp, synthetic construct
  source 1..17: mol_type = other DNA
accacacccgtggccac

SEQ ID NO: 135087 - DNA, 17 bp, synthetic construct
  source 1..17: mol_type = other DNA
ccacacccgtggccacc

SEQ ID NO: 135088 - DNA, 17 bp, synthetic construct
  source 1..17: mol_type = other DNA
cacacccgtggccacca

SEQ ID NO: 135089 - DNA, 17 bp, synthetic construct
  source 1..17: mol_type = other DNA
acacccgtggccaccat

SEQ ID NO: 135090 - DNA, 17 bp, synthetic construct
  source 1..17: mol_type = other DNA
cacccgtggccaccatg

SEQ ID NO: 135091 - DNA, 17 bp, synthetic construct
  source 1..17: mol_type = other DNA
acccgtggccaccatgt

SEQ ID NO: 135092 - DNA, 17 bp, synthetic construct
  source 1..17: mol_type = other DNA
cccgtggccaccatgtc

SEQ ID NO: 135093 - DNA, 17 bp, synthetic construct
  source 1..17: mol_type = other DNA
ccgtggccaccatgtcc

SEQ ID NO: 135094 - DNA, 17 bp, synthetic construct
  source 1..17: mol_type = other DNA
cgtggccaccatgtcca

SEQ ID NO: 135095 - DNA, 17 bp, synthetic construct
  source 1..17: mol_type = other DNA
gtggccaccatgtccac

SEQ ID NO: 135096 - DNA, 17 bp, synthetic construct
  source 1..17: mol_type = other DNA
tggccaccatgtccaca

SEQ ID NO: 135097 - DNA, 17 bp, synthetic construct
  source 1..17: mol_type = other DNA
ggccaccatgtccacaa

SEQ ID NO: 135098 - DNA, 17 bp, synthetic construct
  source 1..17: mol_type = other DNA
gccaccatgtccacaat

SEQ ID NO: 135099 - DNA, 17 bp, synthetic construct
  source 1..17: mol_type = other DNA
ccaccatgtccacaatc

SEQ ID NO: 135100 - DNA, 17 bp, synthetic construct
  source 1..17: mol_type = other DNA
caccatgtccacaatcc

SEQ ID NO: 135101 - DNA, 17 bp, synthetic construct
  source 1..17: mol_type = other DNA
accatgtccacaatcca

SEQ ID NO: 135102 - DNA, 17 bp, synthetic construct
  source 1..17: mol_type = other DNA
ccatgtccacaatccac

SEQ ID NO: 135103 - DNA, 17 bp, synthetic construct
  source 1..17: mol_type = other DNA
catgtccacaatccacc

SEQ ID NO: 135104 - DNA, 17 bp, synthetic construct
  source 1..17: mol_type = other DNA
atgtccacaatccaccc

SEQ ID NO: 135105 - DNA, 17 bp, synthetic construct
  source 1..17: mol_type = other DNA
tgtccacaatccacccc

SEQ ID NO: 135106 - DNA, 17 bp, synthetic construct
  source 1..17: mol_type = other DNA
gtccacaatccacccct

SEQ ID NO: 135107 - DNA, 17 bp, synthetic construct
  source 1..17: mol_type = other DNA
tccacaatccacccctc

SEQ ID NO: 135108 - DNA, 17 bp, synthetic construct
  source 1..17: mol_type = other DNA
ccacaatccacccctcc

SEQ ID NO: 135109 - DNA, 17 bp, synthetic construct
  source 1..17: mol_type = other DNA
cacaatccacccctcct

SEQ ID NO: 135110 - DNA, 17 bp, synthetic construct
  source 1..17: mol_type = other DNA
acaatccacccctcctc

SEQ ID NO: 135111 - DNA, 17 bp, synthetic construct
  source 1..17: mol_type = other DNA
caatccacccctcctcc

SEQ ID NO: 135112 - DNA, 17 bp, synthetic construct
  source 1..17: mol_type = other DNA
aatccacccctcctcca

SEQ ID NO: 135113 - DNA, 17 bp, synthetic construct
  source 1..17: mol_type = other DNA
atccacccctcctccac

SEQ ID NO: 135114 - DNA, 17 bp, synthetic construct
  source 1..17: mol_type = other DNA
tccacccctcctccact

SEQ ID NO: 135115 - DNA, 17 bp, synthetic construct
  source 1..17: mol_type = other DNA
ccacccctcctccactc

SEQ ID NO: 135116 - DNA, 17 bp, synthetic construct
  source 1..17: mol_type = other DNA
cacccctcctccactcc

SEQ ID NO: 135117 - DNA, 17 bp, synthetic construct
  source 1..17: mol_type = other DNA
acccctcctccactccg

SEQ ID NO: 135118 - DNA, 17 bp, synthetic construct
  source 1..17: mol_type = other DNA
cccctcctccactccgg

SEQ ID NO: 135119 - DNA, 17 bp, synthetic construct
  source 1..17: mol_type = other DNA
ccctcctccactccgga

SEQ ID NO: 135120 - DNA, 17 bp, synthetic construct
  source 1..17: mol_type = other DNA
cctcctccactccggag

SEQ ID NO: 135121 - DNA, 17 bp, synthetic construct
  source 1..17: mol_type = other DNA
ctcctccactccggaga

SEQ ID NO: 135122 - DNA, 17 bp, synthetic construct
  source 1..17: mol_type = other DNA
tcctccactccggagac

SEQ ID NO: 135123 - DNA, 17 bp, synthetic construct
  source 1..17: mol_type = other DNA
cctccactccggagacc

SEQ ID NO: 135124 - DNA, 17 bp, synthetic construct
  source 1..17: mol_type = other DNA
ctccactccggagacca

SEQ ID NO: 135125 - DNA, 17 bp, synthetic construct
  source 1..17: mol_type = other DNA
tccactccggagaccac

SEQ ID NO: 135126 - DNA, 17 bp, synthetic construct
  source 1..17: mol_type = other DNA
ccactccggagaccacc

SEQ ID NO: 135127 - DNA, 17 bp, synthetic construct
  source 1..17: mol_type = other DNA
cactccggagaccaccc

SEQ ID NO: 135128 - DNA, 17 bp, synthetic construct
  source 1..17: mol_type = other DNA
actccggagaccaccca

SEQ ID NO: 135129 - DNA, 17 bp, synthetic construct
  source 1..17: mol_type = other DNA
ctccggagaccacccac

SEQ ID NO: 135130 - DNA, 17 bp, synthetic construct
  source 1..17: mol_type = other DNA
tccggagaccacccaca

SEQ ID NO: 135131 - DNA, 17 bp, synthetic construct
  source 1..17: mol_type = other DNA
ccggagaccacccacac

SEQ ID NO: 135132 - DNA, 17 bp, synthetic construct
  source 1..17: mol_type = other DNA
cggagaccacccacacc

SEQ ID NO: 135133 - DNA, 17 bp, synthetic construct
  source 1..17: mol_type = other DNA
ggagaccacccacacct

SEQ ID NO: 135134 - DNA, 17 bp, synthetic construct
  source 1..17: mol_type = other DNA
gagaccacccacacctc

SEQ ID NO: 135135 - DNA, 17 bp, synthetic construct
  source 1..17: mol_type = other DNA
agaccacccacacctcc

SEQ ID NO: 135136 - DNA, 17 bp, synthetic construct
  source 1..17: mol_type = other DNA
gaccacccacacctcca

SEQ ID NO: 135137 - DNA, 17 bp, synthetic construct
  source 1..17: mol_type = other DNA
accacccacacctccac

SEQ ID NO: 135138 - DNA, 17 bp, synthetic construct
  source 1..17: mol_type = other DNA
ccacccacacctccaca

SEQ ID NO: 135139 - DNA, 17 bp, synthetic construct
  source 1..17: mol_type = other DNA
cacccacacctccacag

SEQ ID NO: 135140 - DNA, 17 bp, synthetic construct
  source 1..17: mol_type = other DNA
acccacacctccacagt

SEQ ID NO: 135141 - DNA, 17 bp, synthetic construct
  source 1..17: mol_type = other DNA
cccacacctccacagtg

SEQ ID NO: 135142 - DNA, 17 bp, synthetic construct
  source 1..17: mol_type = other DNA
ccacacctccacagtgc

SEQ ID NO: 135143 - DNA, 17 bp, synthetic construct
  source 1..17: mol_type = other DNA
cacacctccacagtgct

SEQ ID NO: 135144 - DNA, 17 bp, synthetic construct
  source 1..17: mol_type = other DNA
acacctccacagtgctg

SEQ ID NO: 135145 - DNA, 17 bp, synthetic construct
  source 1..17: mol_type = other DNA
cacctccacagtgctga

SEQ ID NO: 135146 - DNA, 17 bp, synthetic construct
  source 1..17: mol_type = other DNA
acctccacagtgctgac

SEQ ID NO: 135147 - DNA, 17 bp, synthetic construct
  source 1..17: mol_type = other DNA
cctccacagtgctgacc

SEQ ID NO: 135148 - DNA, 17 bp, synthetic construct
  source 1..17: mol_type = other DNA
ctccacagtgctgacca

SEQ ID NO: 135149 - DNA, 17 bp, synthetic construct
  source 1..17: mol_type = other DNA
tccacagtgctgaccac

SEQ ID NO: 135150 - DNA, 17 bp, synthetic construct
  source 1..17: mol_type = other DNA
ccacagtgctgaccacg

SEQ ID NO: 135151 - DNA, 17 bp, synthetic construct
  source 1..17: mol_type = other DNA
cacagtgctgaccacga

SEQ ID NO: 135152 - DNA, 17 bp, synthetic construct
  source 1..17: mol_type = other DNA
acagtgctgaccacgaa

SEQ ID NO: 135153 - DNA, 17 bp, synthetic construct
  source 1..17: mol_type = other DNA
cagtgctgaccacgaag

SEQ ID NO: 135154 - DNA, 17 bp, synthetic construct
  source 1..17: mol_type = other DNA
agtgctgaccacgaagg

SEQ ID NO: 135155 - DNA, 17 bp, synthetic construct
  source 1..17: mol_type = other DNA
gtgctgaccacgaaggc

SEQ ID NO: 135156 - DNA, 17 bp, synthetic construct
  source 1..17: mol_type = other DNA
tgctgaccacgaaggcc

SEQ ID NO: 135157 - DNA, 17 bp, synthetic construct
  source 1..17: mol_type = other DNA
gctgaccacgaaggcca

SEQ ID NO: 135158 - DNA, 17 bp, synthetic construct
  source 1..17: mol_type = other DNA
ctgaccacgaaggccac

SEQ ID NO: 135159 - DNA, 17 bp, synthetic construct
  source 1..17: mol_type = other DNA
tgaccacgaaggccacc

SEQ ID NO: 135160 - DNA, 17 bp, synthetic construct
  source 1..17: mol_type = other DNA
gaccacgaaggccacca

SEQ ID NO: 135161 - DNA, 17 bp, synthetic construct
  source 1..17: mol_type = other DNA
accacgaaggccaccac

SEQ ID NO: 135162 - DNA, 17 bp, synthetic construct
  source 1..17: mol_type = other DNA
ccacgaaggccaccacg

SEQ ID NO: 135163 - DNA, 17 bp, synthetic construct
  source 1..17: mol_type = other DNA
cacgaaggccaccacga

SEQ ID NO: 135164 - DNA, 17 bp, synthetic construct
  source 1..17: mol_type = other DNA
acgaaggccaccacgac

SEQ ID NO: 135165 - DNA, 17 bp, synthetic construct
  source 1..17: mol_type = other DNA
cgaaggccaccacgaca

SEQ ID NO: 135166 - DNA, 17 bp, synthetic construct
  source 1..17: mol_type = other DNA
gaaggccaccacgacaa

SEQ ID NO: 135167 - DNA, 17 bp, synthetic construct
  source 1..17: mol_type = other DNA
aaggccaccacgacaag

SEQ ID NO: 135168 - DNA, 17 bp, synthetic construct
  source 1..17: mol_type = other DNA
aggccaccacgacaagg

SEQ ID NO: 135169 - DNA, 17 bp, synthetic construct
  source 1..17: mol_type = other DNA
ggccaccacgacaaggg

SEQ ID NO: 135170 - DNA, 17 bp, synthetic construct
  source 1..17: mol_type = other DNA
gccaccacgacaagggc

SEQ ID NO: 135171 - DNA, 17 bp, synthetic construct
  source 1..17: mol_type = other DNA
ccaccacgacaagggcc

SEQ ID NO: 135172 - DNA, 17 bp, synthetic construct
  source 1..17: mol_type = other DNA
caccacgacaagggcca

SEQ ID NO: 135173 - DNA, 17 bp, synthetic construct
  source 1..17: mol_type = other DNA
accacgacaagggccac

SEQ ID NO: 135174 - DNA, 17 bp, synthetic construct
  source 1..17: mol_type = other DNA
ccacgacaagggccacc

SEQ ID NO: 135175 - DNA, 17 bp, synthetic construct
  source 1..17: mol_type = other DNA
cacgacaagggccacca

SEQ ID NO: 135176 - DNA, 17 bp, synthetic construct
  source 1..17: mol_type = other DNA
acgacaagggccaccag

SEQ ID NO: 135177 - DNA, 17 bp, synthetic construct
  source 1..17: mol_type = other DNA
cgacaagggccaccagt

SEQ ID NO: 135178 - DNA, 17 bp, synthetic construct
  source 1..17: mol_type = other DNA
gacaagggccaccagtt

SEQ ID NO: 135179 - DNA, 17 bp, synthetic construct
  source 1..17: mol_type = other DNA
acaagggccaccagttc

SEQ ID NO: 135180 - DNA, 17 bp, synthetic construct
  source 1..17: mol_type = other DNA
caagggccaccagttcc

SEQ ID NO: 135181 - DNA, 17 bp, synthetic construct
  source 1..17: mol_type = other DNA
aagggccaccagttcca

SEQ ID NO: 135182 - DNA, 17 bp, synthetic construct
  source 1..17: mol_type = other DNA
agggccaccagttccac

SEQ ID NO: 135183 - DNA, 17 bp, synthetic construct
  source 1..17: mol_type = other DNA
gggccaccagttccacg

SEQ ID NO: 135184 - DNA, 17 bp, synthetic construct
  source 1..17: mol_type = other DNA
ggccaccagttccacgt

SEQ ID NO: 135185 - DNA, 17 bp, synthetic construct
  source 1..17: mol_type = other DNA
gccaccagttccacgtc

SEQ ID NO: 135186 - DNA, 17 bp, synthetic construct
  source 1..17: mol_type = other DNA
ccaccagttccacgtcc

SEQ ID NO: 135187 - DNA, 17 bp, synthetic construct
  source 1..17: mol_type = other DNA
caccagttccacgtcca

SEQ ID NO: 135188 - DNA, 17 bp, synthetic construct
  source 1..17: mol_type = other DNA
accagttccacgtccac

SEQ ID NO: 135189 - DNA, 17 bp, synthetic construct
  source 1..17: mol_type = other DNA
ccagttccacgtccacc

SEQ ID NO: 135190 - DNA, 17 bp, synthetic construct
  source 1..17: mol_type = other DNA
cagttccacgtccaccc

SEQ ID NO: 135191 - DNA, 17 bp, synthetic construct
  source 1..17: mol_type = other DNA
agttccacgtccacccc

SEQ ID NO: 135192 - DNA, 17 bp, synthetic construct
  source 1..17: mol_type = other DNA
gttccacgtccaccccc

SEQ ID NO: 135193 - DNA, 17 bp, synthetic construct
  source 1..17: mol_type = other DNA
ttccacgtccaccccct

SEQ ID NO: 135194 - DNA, 17 bp, synthetic construct
  source 1..17: mol_type = other DNA
tccacgtccaccccctc

SEQ ID NO: 135195 - DNA, 17 bp, synthetic construct
  source 1..17: mol_type = other DNA
ccacgtccaccccctcc

SEQ ID NO: 135196 - DNA, 17 bp, synthetic construct
  source 1..17: mol_type = other DNA
cacgtccaccccctcct

SEQ ID NO: 135197 - DNA, 17 bp, synthetic construct
  source 1..17: mol_type = other DNA
acgtccaccccctcctc

SEQ ID NO: 135198 - DNA, 17 bp, synthetic construct
  source 1..17: mol_type = other DNA
cgtccaccccctcctcc

SEQ ID NO: 135199 - DNA, 17 bp, synthetic construct
  source 1..17: mol_type = other DNA
gtccaccccctcctcca

SEQ ID NO: 135200 - DNA, 17 bp, synthetic construct
  source 1..17: mol_type = other DNA
tccaccccctcctccac

SEQ ID NO: 135201 - DNA, 17 bp, synthetic construct
  source 1..17: mol_type = other DNA
ccaccccctcctccact

SEQ ID NO: 135202 - DNA, 17 bp, synthetic construct
  source 1..17: mol_type = other DNA
caccccctcctccactc

SEQ ID NO: 135203 - DNA, 17 bp, synthetic construct
  source 1..17: mol_type = other DNA
accccctcctccactcc

SEQ ID NO: 135204 - DNA, 17 bp, synthetic construct
  source 1..17: mol_type = other DNA
ccccctcctccactccg

SEQ ID NO: 135205 - DNA, 17 bp, synthetic construct
  source 1..17: mol_type = other DNA
cccctcctccactccgg

SEQ ID NO: 135206 - DNA, 17 bp, synthetic construct
  source 1..17: mol_type = other DNA
ccctcctccactccggg

SEQ ID NO: 135207 - DNA, 17 bp, synthetic construct
  source 1..17: mol_type = other DNA
cctcctccactccgggg

SEQ ID NO: 135208 - DNA, 17 bp, synthetic construct
  source 1..17: mol_type = other DNA
ctcctccactccgggga

SEQ ID NO: 135209 - DNA, 17 bp, synthetic construct
  source 1..17: mol_type = other DNA
tcctccactccggggac

SEQ ID NO: 135210 - DNA, 17 bp, synthetic construct
  source 1..17: mol_type = other DNA
cctccactccggggacg

SEQ ID NO: 135211 - DNA, 17 bp, synthetic construct
  source 1..17: mol_type = other DNA
ctccactccggggacga

SEQ ID NO: 135212 - DNA, 17 bp, synthetic construct
  source 1..17: mol_type = other DNA
tccactccggggacgac

SEQ ID NO: 135213 - DNA, 17 bp, synthetic construct
  source 1..17: mol_type = other DNA
ccactccggggacgacc

SEQ ID NO: 135214 - DNA, 17 bp, synthetic construct
  source 1..17: mol_type = other DNA
cactccggggacgacct

SEQ ID NO: 135215 - DNA, 17 bp, synthetic construct
  source 1..17: mol_type = other DNA
actccggggacgacctg

SEQ ID NO: 135216 - DNA, 17 bp, synthetic construct
  source 1..17: mol_type = other DNA
ctccggggacgacctgg

SEQ ID NO: 135217 - DNA, 17 bp, synthetic construct
  source 1..17: mol_type = other DNA
tccggggacgacctgga

SEQ ID NO: 135218 - DNA, 17 bp, synthetic construct
  source 1..17: mol_type = other DNA
ccggggacgacctggat

SEQ ID NO: 135219 - DNA, 17 bp, synthetic construct
  source 1..17: mol_type = other DNA
cggggacgacctggatc

SEQ ID NO: 135220 - DNA, 17 bp, synthetic construct
  source 1..17: mol_type = other DNA
ggggacgacctggatcc

SEQ ID NO: 135221 - DNA, 17 bp, synthetic construct
  source 1..17: mol_type = other DNA
gggacgacctggatcct

SEQ ID NO: 135222 - DNA, 17 bp, synthetic construct
  source 1..17: mol_type = other DNA
ggacgacctggatcctc

SEQ ID NO: 135223 - DNA, 17 bp, synthetic construct
  source 1..17: mol_type = other DNA
gacgacctggatcctca

SEQ ID NO: 135224 - DNA, 17 bp, synthetic construct
  source 1..17: mol_type = other DNA
acgacctggatcctcac

SEQ ID NO: 135225 - DNA, 17 bp, synthetic construct
  source 1..17: mol_type = other DNA
cgacctggatcctcaca

SEQ ID NO: 135226 - DNA, 17 bp, synthetic construct
  source 1..17: mol_type = other DNA
gacctggatcctcacag

SEQ ID NO: 135227 - DNA, 17 bp, synthetic construct
  source 1..17: mol_type = other DNA
acctggatcctcacaga

SEQ ID NO: 135228 - DNA, 17 bp, synthetic construct
  source 1..17: mol_type = other DNA
cctggatcctcacagag

SEQ ID NO: 135229 - DNA, 17 bp, synthetic construct
  source 1..17: mol_type = other DNA
ctggatcctcacagagc

SEQ ID NO: 135230 - DNA, 17 bp, synthetic construct
  source 1..17: mol_type = other DNA
tggatcctcacagagct

SEQ ID NO: 135231 - DNA, 17 bp, synthetic construct
  source 1..17: mol_type = other DNA
ggatcctcacagagctg

SEQ ID NO: 135232 - DNA, 17 bp, synthetic construct
  source 1..17: mol_type = other DNA
gatcctcacagagctga

SEQ ID NO: 135233 - DNA, 17 bp, synthetic construct
  source 1..17: mol_type = other DNA
atcctcacagagctgac

SEQ ID NO: 135234 - DNA, 17 bp, synthetic construct
  source 1..17: mol_type = other DNA
tcctcacagagctgacc

SEQ ID NO: 135235 - DNA, 17 bp, synthetic construct
  source 1..17: mol_type = other DNA
cctcacagagctgacca

SEQ ID NO: 135236 - DNA, 17 bp, synthetic construct
  source 1..17: mol_type = other DNA
ctcacagagctgaccac

SEQ ID NO: 135237 - DNA, 17 bp, synthetic construct
  source 1..17: mol_type = other DNA
tcacagagctgaccaca

SEQ ID NO: 135238 - DNA, 17 bp, synthetic construct
  source 1..17: mol_type = other DNA
cacagagctgaccacag

SEQ ID NO: 135239 - DNA, 17 bp, synthetic construct
  source 1..17: mol_type = other DNA
acagagctgaccacagc

SEQ ID NO: 135240 - DNA, 17 bp, synthetic construct
  source 1..17: mol_type = other DNA
cagagctgaccacagca

SEQ ID NO: 135241 - DNA, 17 bp, synthetic construct
  source 1..17: mol_type = other DNA
agagctgaccacagcag

SEQ ID NO: 135242 - DNA, 17 bp, synthetic construct
  source 1..17: mol_type = other DNA
gagctgaccacagcagc

SEQ ID NO: 135243 - DNA, 17 bp, synthetic construct
  source 1..17: mol_type = other DNA
agctgaccacagcagcc

SEQ ID NO: 135244 - DNA, 17 bp, synthetic construct
  source 1..17: mol_type = other DNA
gctgaccacagcagcca

SEQ ID NO: 135245 - DNA, 17 bp, synthetic construct
  source 1..17: mol_type = other DNA
ctgaccacagcagccac

SEQ ID NO: 135246 - DNA, 17 bp, synthetic construct
  source 1..17: mol_type = other DNA
tgaccacagcagccact

SEQ ID NO: 135247 - DNA, 17 bp, synthetic construct
  source 1..17: mol_type = other DNA
gaccacagcagccacta

SEQ ID NO: 135248 - DNA, 17 bp, synthetic construct
  source 1..17: mol_type = other DNA
accacagcagccactac

SEQ ID NO: 135249 - DNA, 17 bp, synthetic construct
  source 1..17: mol_type = other DNA
ccacagcagccactaca

SEQ ID NO: 135250 - DNA, 17 bp, synthetic construct
  source 1..17: mol_type = other DNA
cacagcagccactacaa

SEQ ID NO: 135251 - DNA, 17 bp, synthetic construct
  source 1..17: mol_type = other DNA
acagcagccactacaac

SEQ ID NO: 135252 - DNA, 17 bp, synthetic construct
  source 1..17: mol_type = other DNA
cagcagccactacaact

SEQ ID NO: 135253 - DNA, 17 bp, synthetic construct
  source 1..17: mol_type = other DNA
agcagccactacaactg

SEQ ID NO: 135254 - DNA, 17 bp, synthetic construct
  source 1..17: mol_type = other DNA
gcagccactacaactgc

SEQ ID NO: 135255 - DNA, 17 bp, synthetic construct
  source 1..17: mol_type = other DNA
cagccactacaactgca

SEQ ID NO: 135256 - DNA, 17 bp, synthetic construct
  source 1..17: mol_type = other DNA
agccactacaactgcag

SEQ ID NO: 135257 - DNA, 17 bp, synthetic construct
  source 1..17: mol_type = other DNA
gccactacaactgcagc

SEQ ID NO: 135258 - DNA, 17 bp, synthetic construct
  source 1..17: mol_type = other DNA
ccactacaactgcagcc

SEQ ID NO: 135259 - DNA, 17 bp, synthetic construct
  source 1..17: mol_type = other DNA
cactacaactgcagcca

SEQ ID NO: 135260 - DNA, 17 bp, synthetic construct
  source 1..17: mol_type = other DNA
actacaactgcagccac

SEQ ID NO: 135261 - DNA, 17 bp, synthetic construct
  source 1..17: mol_type = other DNA
ctacaactgcagccact

SEQ ID NO: 135262 - DNA, 17 bp, synthetic construct
  source 1..17: mol_type = other DNA
tacaactgcagccactg

SEQ ID NO: 135263 - DNA, 17 bp, synthetic construct
  source 1..17: mol_type = other DNA
acaactgcagccactgg

SEQ ID NO: 135264 - DNA, 17 bp, synthetic construct
  source 1..17: mol_type = other DNA
caactgcagccactggc

SEQ ID NO: 135265 - DNA, 17 bp, synthetic construct
  source 1..17: mol_type = other DNA
aactgcagccactggcc

SEQ ID NO: 135266 - DNA, 17 bp, synthetic construct
  source 1..17: mol_type = other DNA
actgcagccactggccc

SEQ ID NO: 135267 - DNA, 17 bp, synthetic construct
  source 1..17: mol_type = other DNA
ctgcagccactggcccc

SEQ ID NO: 135268 - DNA, 17 bp, synthetic construct
  source 1..17: mol_type = other DNA
tgcagccactggcccca

SEQ ID NO: 135269 - DNA, 17 bp, synthetic construct
  source 1..17: mol_type = other DNA
gcagccactggccccac

SEQ ID NO: 135270 - DNA, 17 bp, synthetic construct
  source 1..17: mol_type = other DNA
cagccactggccccacg

SEQ ID NO: 135271 - DNA, 17 bp, synthetic construct
  source 1..17: mol_type = other DNA
agccactggccccacgg

SEQ ID NO: 135272 - DNA, 17 bp, synthetic construct
  source 1..17: mol_type = other DNA
gccactggccccacggc

SEQ ID NO: 135273 - DNA, 17 bp, synthetic construct
  source 1..17: mol_type = other DNA
ccactggccccacggcc

SEQ ID NO: 135274 - DNA, 17 bp, synthetic construct
  source 1..17: mol_type = other DNA
cactggccccacggcca

SEQ ID NO: 135275 - DNA, 17 bp, synthetic construct
  source 1..17: mol_type = other DNA
actggccccacggccac

SEQ ID NO: 135276 - DNA, 17 bp, synthetic construct
  source 1..17: mol_type = other DNA
ctggccccacggccacc

SEQ ID NO: 135277 - DNA, 17 bp, synthetic construct
  source 1..17: mol_type = other DNA
tggccccacggccaccc

SEQ ID NO: 135278 - DNA, 17 bp, synthetic construct
  source 1..17: mol_type = other DNA
ggccccacggccacccc

SEQ ID NO: 135279 - DNA, 17 bp, synthetic construct
  source 1..17: mol_type = other DNA
gccccacggccaccccg

SEQ ID NO: 135280 - DNA, 17 bp, synthetic construct
  source 1..17: mol_type = other DNA
ccccacggccaccccgt

SEQ ID NO: 135281 - DNA, 17 bp, synthetic construct
  source 1..17: mol_type = other DNA
cccacggccaccccgtc

SEQ ID NO: 135282 - DNA, 17 bp, synthetic construct
  source 1..17: mol_type = other DNA
ccacggccaccccgtcc

SEQ ID NO: 135283 - DNA, 17 bp, synthetic construct
  source 1..17: mol_type = other DNA
cacggccaccccgtcct

SEQ ID NO: 135284 - DNA, 17 bp, synthetic construct
  source 1..17: mol_type = other DNA
acggccaccccgtcctc

SEQ ID NO: 135285 - DNA, 17 bp, synthetic construct
  source 1..17: mol_type = other DNA
cggccaccccgtcctcc

SEQ ID NO: 135286 - DNA, 17 bp, synthetic construct
  source 1..17: mol_type = other DNA
ggccaccccgtcctcca

SEQ ID NO: 135287 - DNA, 17 bp, synthetic construct
  source 1..17: mol_type = other DNA
gccaccccgtcctccac

SEQ ID NO: 135288 - DNA, 17 bp, synthetic construct
  source 1..17: mol_type = other DNA
ccaccccgtcctccacc

SEQ ID NO: 135289 - DNA, 17 bp, synthetic construct
  source 1..17: mol_type = other DNA
caccccgtcctccaccc

SEQ ID NO: 135290 - DNA, 17 bp, synthetic construct
  source 1..17: mol_type = other DNA
accccgtcctccacccc

SEQ ID NO: 135291 - DNA, 17 bp, synthetic construct
  source 1..17: mol_type = other DNA
ccccgtcctccacccca

SEQ ID NO: 135292 - DNA, 17 bp, synthetic construct
  source 1..17: mol_type = other DNA
cccgtcctccaccccag

SEQ ID NO: 135293 - DNA, 17 bp, synthetic construct
  source 1..17: mol_type = other DNA
ccgtcctccaccccagg

SEQ ID NO: 135294 - DNA, 17 bp, synthetic construct
  source 1..17: mol_type = other DNA
cgtcctccaccccaggg

SEQ ID NO: 135295 - DNA, 17 bp, synthetic construct
  source 1..17: mol_type = other DNA
gtcctccaccccaggga

SEQ ID NO: 135296 - DNA, 17 bp, synthetic construct
  source 1..17: mol_type = other DNA
tcctccaccccagggac

SEQ ID NO: 135297 - DNA, 17 bp, synthetic construct
  source 1..17: mol_type = other DNA
cctccaccccagggacc

SEQ ID NO: 135298 - DNA, 17 bp, synthetic construct
  source 1..17: mol_type = other DNA
ctccaccccagggacca

SEQ ID NO: 135299 - DNA, 17 bp, synthetic construct
  source 1..17: mol_type = other DNA
tccaccccagggaccac

SEQ ID NO: 135300 - DNA, 17 bp, synthetic construct
  source 1..17: mol_type = other DNA
ccaccccagggaccacc

SEQ ID NO: 135301 - DNA, 17 bp, synthetic construct
  source 1..17: mol_type = other DNA
caccccagggaccacct

SEQ ID NO: 135302 - DNA, 17 bp, synthetic construct
  source 1..17: mol_type = other DNA
accccagggaccacctg

SEQ ID NO: 135303 - DNA, 17 bp, synthetic construct
  source 1..17: mol_type = other DNA
ccccagggaccacctgg

SEQ ID NO: 135304 - DNA, 17 bp, synthetic construct
  source 1..17: mol_type = other DNA
cccagggaccacctgga

SEQ ID NO: 135305 - DNA, 17 bp, synthetic construct
  source 1..17: mol_type = other DNA
ccagggaccacctggat

SEQ ID NO: 135306 - DNA, 17 bp, synthetic construct
  source 1..17: mol_type = other DNA
cagggaccacctggatc

SEQ ID NO: 135307 - DNA, 17 bp, synthetic construct
  source 1..17: mol_type = other DNA
agggaccacctggatcc

SEQ ID NO: 135308 - DNA, 17 bp, synthetic construct
  source 1..17: mol_type = other DNA
gggaccacctggatcct

SEQ ID NO: 135309 - DNA, 17 bp, synthetic construct
  source 1..17: mol_type = other DNA
ggaccacctggatcctc

SEQ ID NO: 135310 - DNA, 17 bp, synthetic construct
  source 1..17: mol_type = other DNA
gaccacctggatcctca

SEQ ID NO: 135311 - DNA, 17 bp, synthetic construct
  source 1..17: mol_type = other DNA
accacctggatcctcac

SEQ ID NO: 135312 - DNA, 17 bp, synthetic construct
  source 1..17: mol_type = other DNA
ccacctggatcctcaca

SEQ ID NO: 135313 - DNA, 17 bp, synthetic construct
  source 1..17: mol_type = other DNA
cacctggatcctcacag

SEQ ID NO: 135314 - DNA, 17 bp, synthetic construct
  source 1..17: mol_type = other DNA
acctggatcctcacaga

SEQ ID NO: 135315 - DNA, 17 bp, synthetic construct
  source 1..17: mol_type = other DNA
cctggatcctcacagag

SEQ ID NO: 135316 - DNA, 17 bp, synthetic construct
  source 1..17: mol_type = other DNA
ctggatcctcacagagc

SEQ ID NO: 135317 - DNA, 17 bp, synthetic construct
  source 1..17: mol_type = other DNA
tggatcctcacagagct

SEQ ID NO: 135318 - DNA, 17 bp, synthetic construct
  source 1..17: mol_type = other DNA
ggatcctcacagagctg

SEQ ID NO: 135319 - DNA, 17 bp, synthetic construct
  source 1..17: mol_type = other DNA
gatcctcacagagctga

SEQ ID NO: 135320 - DNA, 17 bp, synthetic construct
  source 1..17: mol_type = other DNA
atcctcacagagctgac

SEQ ID NO: 135321 - DNA, 17 bp, synthetic construct
  source 1..17: mol_type = other DNA
tcctcacagagctgacc

SEQ ID NO: 135322 - DNA, 17 bp, synthetic construct
  source 1..17: mol_type = other DNA
cctcacagagctgacca

SEQ ID NO: 135323 - DNA, 17 bp, synthetic construct
  source 1..17: mol_type = other DNA
ctcacagagctgaccac

SEQ ID NO: 135324 - DNA, 17 bp, synthetic construct
  source 1..17: mol_type = other DNA
tcacagagctgaccaca

SEQ ID NO: 135325 - DNA, 17 bp, synthetic construct
  source 1..17: mol_type = other DNA
cacagagctgaccacaa

SEQ ID NO: 135326 - DNA, 17 bp, synthetic construct
  source 1..17: mol_type = other DNA
acagagctgaccacaac

SEQ ID NO: 135327 - DNA, 17 bp, synthetic construct
  source 1..17: mol_type = other DNA
cagagctgaccacaaca

SEQ ID NO: 135328 - DNA, 17 bp, synthetic construct
  source 1..17: mol_type = other DNA
agagctgaccacaacag

SEQ ID NO: 135329 - DNA, 17 bp, synthetic construct
  source 1..17: mol_type = other DNA
gagctgaccacaacagc

SEQ ID NO: 135330 - DNA, 17 bp, synthetic construct
  source 1..17: mol_type = other DNA
agctgaccacaacagcc

SEQ ID NO: 135331 - DNA, 17 bp, synthetic construct
  source 1..17: mol_type = other DNA
gctgaccacaacagcca

SEQ ID NO: 135332 - DNA, 17 bp, synthetic construct
  source 1..17: mol_type = other DNA
ctgaccacaacagccac

SEQ ID NO: 135333 - DNA, 17 bp, synthetic construct
  source 1..17: mol_type = other DNA
tgaccacaacagccact

SEQ ID NO: 135334 - DNA, 17 bp, synthetic construct
  source 1..17: mol_type = other DNA
gaccacaacagccacta

SEQ ID NO: 135335 - DNA, 17 bp, synthetic construct
  source 1..17: mol_type = other DNA
accacaacagccactac

SEQ ID NO: 135336 - DNA, 17 bp, synthetic construct
  source 1..17: mol_type = other DNA
ccacaacagccactacg

SEQ ID NO: 135337 - DNA, 17 bp, synthetic construct
  source 1..17: mol_type = other DNA
cacaacagccactacga

SEQ ID NO: 135338 - DNA, 17 bp, synthetic construct
  source 1..17: mol_type = other DNA
acaacagccactacgac

SEQ ID NO: 135339 - DNA, 17 bp, synthetic construct
  source 1..17: mol_type = other DNA
caacagccactacgact

SEQ ID NO: 135340 - DNA, 17 bp, synthetic construct
  source 1..17: mol_type = other DNA
aacagccactacgactg

SEQ ID NO: 135341 - DNA, 17 bp, synthetic construct
  source 1..17: mol_type = other DNA
acagccactacgactgc

SEQ ID NO: 135342 - DNA, 17 bp, synthetic construct
  source 1..17: mol_type = other DNA
cagccactacgactgcg

SEQ ID NO: 135343 - DNA, 17 bp, synthetic construct
  source 1..17: mol_type = other DNA
agccactacgactgcgt

SEQ ID NO: 135344 - DNA, 17 bp, synthetic construct
  source 1..17: mol_type = other DNA
gccactacgactgcgtc

SEQ ID NO: 135345 - DNA, 17 bp, synthetic construct
  source 1..17: mol_type = other DNA
ccactacgactgcgtcc

SEQ ID NO: 135346 - DNA, 17 bp, synthetic construct
  source 1..17: mol_type = other DNA
cactacgactgcgtcca

SEQ ID NO: 135347 - DNA, 17 bp, synthetic construct
  source 1..17: mol_type = other DNA
actacgactgcgtccac

SEQ ID NO: 135348 - DNA, 17 bp, synthetic construct
  source 1..17: mol_type = other DNA
ctacgactgcgtccact

SEQ ID NO: 135349 - DNA, 17 bp, synthetic construct
  source 1..17: mol_type = other DNA
tacgactgcgtccactg

SEQ ID NO: 135350 - DNA, 17 bp, synthetic construct
  source 1..17: mol_type = other DNA
acgactgcgtccactgg

SEQ ID NO: 135351 - DNA, 17 bp, synthetic construct
  source 1..17: mol_type = other DNA
cgactgcgtccactgga

SEQ ID NO: 135352 - DNA, 17 bp, synthetic construct
  source 1..17: mol_type = other DNA
gactgcgtccactggat

SEQ ID NO: 135353 - DNA, 17 bp, synthetic construct
  source 1..17: mol_type = other DNA
actgcgtccactggatc

SEQ ID NO: 135354 - DNA, 17 bp, synthetic construct
  source 1..17: mol_type = other DNA
ctgcgtccactggatcc

SEQ ID NO: 135355 - DNA, 17 bp, synthetic construct
  source 1..17: mol_type = other DNA
tgcgtccactggatcca

SEQ ID NO: 135356 - DNA, 17 bp, synthetic construct
  source 1..17: mol_type = other DNA
gcgtccactggatccac

SEQ ID NO: 135357 - DNA, 17 bp, synthetic construct
  source 1..17: mol_type = other DNA
cgtccactggatccacg

SEQ ID NO: 135358 - DNA, 17 bp, synthetic construct
  source 1..17: mol_type = other DNA
gtccactggatccacgg

SEQ ID NO: 135359 - DNA, 17 bp, synthetic construct
  source 1..17: mol_type = other DNA
tccactggatccacggc

SEQ ID NO: 135360 - DNA, 17 bp, synthetic construct
  source 1..17: mol_type = other DNA
ccactggatccacggcc

SEQ ID NO: 135361 - DNA, 17 bp, synthetic construct
  source 1..17: mol_type = other DNA
cactggatccacggcca

SEQ ID NO: 135362 - DNA, 17 bp, synthetic construct
  source 1..17: mol_type = other DNA
actggatccacggccac

SEQ ID NO: 135363 - DNA, 17 bp, synthetic construct
  source 1..17: mol_type = other DNA
ctggatccacggccacc

SEQ ID NO: 135364 - DNA, 17 bp, synthetic construct
  source 1..17: mol_type = other DNA
tggatccacggccaccc

SEQ ID NO: 135365 - DNA, 17 bp, synthetic construct
  source 1..17: mol_type = other DNA
ggatccacggccacccc

SEQ ID NO: 135366 - DNA, 17 bp, synthetic construct
  source 1..17: mol_type = other DNA
gatccacggccaccccg

SEQ ID NO: 135367 - DNA, 17 bp, synthetic construct
  source 1..17: mol_type = other DNA
atccacggccaccccgt

SEQ ID NO: 135368 - DNA, 17 bp, synthetic construct
  source 1..17: mol_type = other DNA
tccacggccaccccgtc

SEQ ID NO: 135369 - DNA, 17 bp, synthetic construct
  source 1..17: mol_type = other DNA
ccacggccaccccgtcc

SEQ ID NO: 135370 - DNA, 17 bp, synthetic construct
  source 1..17: mol_type = other DNA
cacggccaccccgtcct

SEQ ID NO: 135371 - DNA, 17 bp, synthetic construct
  source 1..17: mol_type = other DNA
acggccaccccgtcctc

SEQ ID NO: 135372 - DNA, 17 bp, synthetic construct
  source 1..17: mol_type = other DNA
cggccaccccgtcctcc

SEQ ID NO: 135373 - DNA, 17 bp, synthetic construct
  source 1..17: mol_type = other DNA
ggccaccccgtcctcca

SEQ ID NO: 135374 - DNA, 17 bp, synthetic construct
  source 1..17: mol_type = other DNA
gccaccccgtcctccac

SEQ ID NO: 135375 - DNA, 17 bp, synthetic construct
  source 1..17: mol_type = other DNA
ccaccccgtcctccacc

SEQ ID NO: 135376 - DNA, 17 bp, synthetic construct
  source 1..17: mol_type = other DNA
caccccgtcctccaccc

SEQ ID NO: 135377 - DNA, 17 bp, synthetic construct
  source 1..17: mol_type = other DNA
accccgtcctccacccc

SEQ ID NO: 135378 - DNA, 17 bp, synthetic construct
  source 1..17: mol_type = other DNA
ccccgtcctccacccca

SEQ ID NO: 135379 - DNA, 17 bp, synthetic construct
  source 1..17: mol_type = other DNA
cccgtcctccaccccag

SEQ ID NO: 135380 - DNA, 17 bp, synthetic construct
  source 1..17: mol_type = other DNA
ccgtcctccaccccagg

SEQ ID NO: 135381 - DNA, 17 bp, synthetic construct
  source 1..17: mol_type = other DNA
cgtcctccaccccaggg

SEQ ID NO: 135382 - DNA, 17 bp, synthetic construct
  source 1..17: mol_type = other DNA
gtcctccaccccaggga

SEQ ID NO: 135383 - DNA, 17 bp, synthetic construct
  source 1..17: mol_type = other DNA
tcctccaccccagggac

SEQ ID NO: 135384 - DNA, 17 bp, synthetic construct
  source 1..17: mol_type = other DNA
cctccaccccagggacc

SEQ ID NO: 135385 - DNA, 17 bp, synthetic construct
  source 1..17: mol_type = other DNA
ctccaccccagggacca

SEQ ID NO: 135386 - DNA, 17 bp, synthetic construct
  source 1..17: mol_type = other DNA
tccaccccagggaccac

SEQ ID NO: 135387 - DNA, 17 bp, synthetic construct
  source 1..17: mol_type = other DNA
ccaccccagggaccacc

SEQ ID NO: 135388 - DNA, 17 bp, synthetic construct
  source 1..17: mol_type = other DNA
caccccagggaccacct

SEQ ID NO: 135389 - DNA, 17 bp, synthetic construct
  source 1..17: mol_type = other DNA
accccagggaccacctg

SEQ ID NO: 135390 - DNA, 17 bp, synthetic construct
  source 1..17: mol_type = other DNA
ccccagggaccacctgg

SEQ ID NO: 135391 - DNA, 17 bp, synthetic construct
  source 1..17: mol_type = other DNA
cccagggaccacctgga

SEQ ID NO: 135392 - DNA, 17 bp, synthetic construct
  source 1..17: mol_type = other DNA
ccagggaccacctggat

SEQ ID NO: 135393 - DNA, 17 bp, synthetic construct
  source 1..17: mol_type = other DNA
cagggaccacctggatc

SEQ ID NO: 135394 - DNA, 17 bp, synthetic construct
  source 1..17: mol_type = other DNA
agggaccacctggatcc

SEQ ID NO: 135395 - DNA, 17 bp, synthetic construct
  source 1..17: mol_type = other DNA
gggaccacctggatcct

SEQ ID NO: 135396 - DNA, 17 bp, synthetic construct
  source 1..17: mol_type = other DNA
ggaccacctggatcctc

SEQ ID NO: 135397 - DNA, 17 bp, synthetic construct
  source 1..17: mol_type = other DNA
gaccacctggatcctca

SEQ ID NO: 135398 - DNA, 17 bp, synthetic construct
  source 1..17: mol_type = other DNA
accacctggatcctcac

SEQ ID NO: 135399 - DNA, 17 bp, synthetic construct
  source 1..17: mol_type = other DNA
ccacctggatcctcaca

SEQ ID NO: 135400 - DNA, 17 bp, synthetic construct
  source 1..17: mol_type = other DNA
cacctggatcctcacag

SEQ ID NO: 135401 - DNA, 17 bp, synthetic construct
  source 1..17: mol_type = other DNA
acctggatcctcacaga

SEQ ID NO: 135402 - DNA, 17 bp, synthetic construct
  source 1..17: mol_type = other DNA
cctggatcctcacagag

SEQ ID NO: 135403 - DNA, 17 bp, synthetic construct
  source 1..17: mol_type = other DNA
ctggatcctcacagagc

SEQ ID NO: 135404 - DNA, 17 bp, synthetic construct
  source 1..17: mol_type = other DNA
tggatcctcacagagcc

SEQ ID NO: 135405 - DNA, 17 bp, synthetic construct
  source 1..17: mol_type = other DNA
ggatcctcacagagccg

SEQ ID NO: 135406 - DNA, 17 bp, synthetic construct
  source 1..17: mol_type = other DNA
gatcctcacagagccga

SEQ ID NO: 135407 - DNA, 17 bp, synthetic construct
  source 1..17: mol_type = other DNA
atcctcacagagccgag

SEQ ID NO: 135408 - DNA, 17 bp, synthetic construct
  source 1..17: mol_type = other DNA
tcctcacagagccgagc

SEQ ID NO: 135409 - DNA, 17 bp, synthetic construct
  source 1..17: mol_type = other DNA
cctcacagagccgagca

SEQ ID NO: 135410 - DNA, 17 bp, synthetic construct
  source 1..17: mol_type = other DNA
ctcacagagccgagcac

SEQ ID NO: 135411 - DNA, 17 bp, synthetic construct
  source 1..17: mol_type = other DNA
tcacagagccgagcact

SEQ ID NO: 135412 - DNA, 17 bp, synthetic construct
  source 1..17: mol_type = other DNA
cacagagccgagcacta

SEQ ID NO: 135413 - DNA, 17 bp, synthetic construct
  source 1..17: mol_type = other DNA
acagagccgagcactac

SEQ ID NO: 135414 - DNA, 17 bp, synthetic construct
  source 1..17: mol_type = other DNA
cagagccgagcactaca

SEQ ID NO: 135415 - DNA, 17 bp, synthetic construct
  source 1..17: mol_type = other DNA
agagccgagcactacag

SEQ ID NO: 135416 - DNA, 17 bp, synthetic construct
  source 1..17: mol_type = other DNA
gagccgagcactacagc

SEQ ID NO: 135417 - DNA, 17 bp, synthetic construct
  source 1..17: mol_type = other DNA
agccgagcactacagcc

SEQ ID NO: 135418 - DNA, 17 bp, synthetic construct
  source 1..17: mol_type = other DNA
gccgagcactacagcca

SEQ ID NO: 135419 - DNA, 17 bp, synthetic construct
  source 1..17: mol_type = other DNA
ccgagcactacagccac

SEQ ID NO: 135420 - DNA, 17 bp, synthetic construct
  source 1..17: mol_type = other DNA
cgagcactacagccacc

SEQ ID NO: 135421 - DNA, 17 bp, synthetic construct
  source 1..17: mol_type = other DNA
gagcactacagccaccg

SEQ ID NO: 135422 - DNA, 17 bp, synthetic construct
  source 1..17: mol_type = other DNA
agcactacagccaccgt

SEQ ID NO: 135423 - DNA, 17 bp, synthetic construct
  source 1..17: mol_type = other DNA
gcactacagccaccgtg

SEQ ID NO: 135424 - DNA, 17 bp, synthetic construct
  source 1..17: mol_type = other DNA
cactacagccaccgtga

SEQ ID NO: 135425 - DNA, 17 bp, synthetic construct
  source 1..17: mol_type = other DNA
actacagccaccgtgac

SEQ ID NO: 135426 - DNA, 17 bp, synthetic construct
  source 1..17: mol_type = other DNA
ctacagccaccgtgacg

SEQ ID NO: 135427 - DNA, 17 bp, synthetic construct
  source 1..17: mol_type = other DNA
tacagccaccgtgacgg

SEQ ID NO: 135428 - DNA, 17 bp, synthetic construct
  source 1..17: mol_type = other DNA
acagccaccgtgacggt

SEQ ID NO: 135429 - DNA, 17 bp, synthetic construct
  source 1..17: mol_type = other DNA
cagccaccgtgacggtg

SEQ ID NO: 135430 - DNA, 17 bp, synthetic construct
  source 1..17: mol_type = other DNA
agccaccgtgacggtgc

SEQ ID NO: 135431 - DNA, 17 bp, synthetic construct
  source 1..17: mol_type = other DNA
gccaccgtgacggtgcc

SEQ ID NO: 135432 - DNA, 17 bp, synthetic construct
  source 1..17: mol_type = other DNA
ccaccgtgacggtgccc

SEQ ID NO: 135433 - DNA, 17 bp, synthetic construct
  source 1..17: mol_type = other DNA
caccgtgacggtgccca

SEQ ID NO: 135434 - DNA, 17 bp, synthetic construct
  source 1..17: mol_type = other DNA
accgtgacggtgcccac

SEQ ID NO: 135435 - DNA, 17 bp, synthetic construct
  source 1..17: mol_type = other DNA
ccgtgacggtgcccacc

SEQ ID NO: 135436 - DNA, 17 bp, synthetic construct
  source 1..17: mol_type = other DNA
cgtgacggtgcccaccg

SEQ ID NO: 135437 - DNA, 17 bp, synthetic construct
  source 1..17: mol_type = other DNA
gtgacggtgcccaccgg

SEQ ID NO: 135438 - DNA, 17 bp, synthetic construct
  source 1..17: mol_type = other DNA
tgacggtgcccaccgga

SEQ ID NO: 135439 - DNA, 17 bp, synthetic construct
  source 1..17: mol_type = other DNA
gacggtgcccaccggat

SEQ ID NO: 135440 - DNA, 17 bp, synthetic construct
  source 1..17: mol_type = other DNA
acggtgcccaccggatc

SEQ ID NO: 135441 - DNA, 17 bp, synthetic construct
  source 1..17: mol_type = other DNA
cggtgcccaccggatcc

SEQ ID NO: 135442 - DNA, 17 bp, synthetic construct
  source 1..17: mol_type = other DNA
ggtgcccaccggatcca

SEQ ID NO: 135443 - DNA, 17 bp, synthetic construct
  source 1..17: mol_type = other DNA
gtgcccaccggatccac

SEQ ID NO: 135444 - DNA, 17 bp, synthetic construct
  source 1..17: mol_type = other DNA
tgcccaccggatccacg

SEQ ID NO: 135445 - DNA, 17 bp, synthetic construct
  source 1..17: mol_type = other DNA
gcccaccggatccacgg

SEQ ID NO: 135446 - DNA, 17 bp, synthetic construct
  source 1..17: mol_type = other DNA
cccaccggatccacggc

SEQ ID NO: 135447 - DNA, 17 bp, synthetic construct
  source 1..17: mol_type = other DNA
ccaccggatccacggcc

SEQ ID NO: 135448 - DNA, 17 bp, synthetic construct
  source 1..17: mol_type = other DNA
caccggatccacggcca

SEQ ID NO: 135449 - DNA, 17 bp, synthetic construct
  source 1..17: mol_type = other DNA
accggatccacggccac

SEQ ID NO: 135450 - DNA, 17 bp, synthetic construct
  source 1..17: mol_type = other DNA
ccggatccacggccacc

SEQ ID NO: 135451 - DNA, 17 bp, synthetic construct
  source 1..17: mol_type = other DNA
cggatccacggccaccg

SEQ ID NO: 135452 - DNA, 17 bp, synthetic construct
  source 1..17: mol_type = other DNA
ggatccacggccaccgc

SEQ ID NO: 135453 - DNA, 17 bp, synthetic construct
  source 1..17: mol_type = other DNA
gatccacggccaccgcc

SEQ ID NO: 135454 - DNA, 17 bp, synthetic construct
  source 1..17: mol_type = other DNA
atccacggccaccgcct

SEQ ID NO: 135455 - DNA, 17 bp, synthetic construct
  source 1..17: mol_type = other DNA
tccacggccaccgcctc

SEQ ID NO: 135456 - DNA, 17 bp, synthetic construct
  source 1..17: mol_type = other DNA
ccacggccaccgcctcc

SEQ ID NO: 135457 - DNA, 17 bp, synthetic construct
  source 1..17: mol_type = other DNA
cacggccaccgcctcct

SEQ ID NO: 135458 - DNA, 17 bp, synthetic construct
  source 1..17: mol_type = other DNA
acggccaccgcctcctc

SEQ ID NO: 135459 - DNA, 17 bp, synthetic construct
  source 1..17: mol_type = other DNA
cggccaccgcctcctcc

SEQ ID NO: 135460 - DNA, 17 bp, synthetic construct
  source 1..17: mol_type = other DNA
ggccaccgcctcctcca

SEQ ID NO: 135461 - DNA, 17 bp, synthetic construct
  source 1..17: mol_type = other DNA
gccaccgcctcctccac

SEQ ID NO: 135462 - DNA, 17 bp, synthetic construct
  source 1..17: mol_type = other DNA
ccaccgcctcctccacc

SEQ ID NO: 135463 - DNA, 17 bp, synthetic construct
  source 1..17: mol_type = other DNA
caccgcctcctccaccc

SEQ ID NO: 135464 - DNA, 17 bp, synthetic construct
  source 1..17: mol_type = other DNA
accgcctcctccaccca

SEQ ID NO: 135465 - DNA, 17 bp, synthetic construct
  source 1..17: mol_type = other DNA
ccgcctcctccacccag

SEQ ID NO: 135466 - DNA, 17 bp, synthetic construct
  source 1..17: mol_type = other DNA
cgcctcctccacccagg

SEQ ID NO: 135467 - DNA, 17 bp, synthetic construct
  source 1..17: mol_type = other DNA
gcctcctccacccaggc

SEQ ID NO: 135468 - DNA, 17 bp, synthetic construct
  source 1..17: mol_type = other DNA
cctcctccacccaggca

SEQ ID NO: 135469 - DNA, 17 bp, synthetic construct
  source 1..17: mol_type = other DNA
ctcctccacccaggcaa

SEQ ID NO: 135470 - DNA, 17 bp, synthetic construct
  source 1..17: mol_type = other DNA
tcctccacccaggcaac

SEQ ID NO: 135471 - DNA, 17 bp, synthetic construct
  source 1..17: mol_type = other DNA
cctccacccaggcaact

SEQ ID NO: 135472 - DNA, 17 bp, synthetic construct
  source 1..17: mol_type = other DNA
ctccacccaggcaactg

SEQ ID NO: 135473 - DNA, 17 bp, synthetic construct
  source 1..17: mol_type = other DNA
tccacccaggcaactgc

SEQ ID NO: 135474 - DNA, 17 bp, synthetic construct
  source 1..17: mol_type = other DNA
ccacccaggcaactgct

SEQ ID NO: 135475 - DNA, 17 bp, synthetic construct
  source 1..17: mol_type = other DNA
cacccaggcaactgctg

SEQ ID NO: 135476 - DNA, 17 bp, synthetic construct
  source 1..17: mol_type = other DNA
acccaggcaactgctgg

SEQ ID NO: 135477 - DNA, 17 bp, synthetic construct
  source 1..17: mol_type = other DNA
cccaggcaactgctggc

SEQ ID NO: 135478 - DNA, 17 bp, synthetic construct
  source 1..17: mol_type = other DNA
ccaggcaactgctggca

SEQ ID NO: 135479 - DNA, 17 bp, synthetic construct
  source 1..17: mol_type = other DNA
caggcaactgctggcac

SEQ ID NO: 135480 - DNA, 17 bp, synthetic construct
  source 1..17: mol_type = other DNA
aggcaactgctggcacc

SEQ ID NO: 135481 - DNA, 17 bp, synthetic construct
  source 1..17: mol_type = other DNA
ggcaactgctggcaccc

SEQ ID NO: 135482 - DNA, 17 bp, synthetic construct
  source 1..17: mol_type = other DNA
gcaactgctggcacccc

SEQ ID NO: 135483 - DNA, 17 bp, synthetic construct
  source 1..17: mol_type = other DNA
caactgctggcacccca

SEQ ID NO: 135484 - DNA, 17 bp, synthetic construct
  source 1..17: mol_type = other DNA
aactgctggcaccccac

SEQ ID NO: 135485 - DNA, 17 bp, synthetic construct
  source 1..17: mol_type = other DNA
actgctggcaccccaca

SEQ ID NO: 135486 - DNA, 17 bp, synthetic construct
  source 1..17: mol_type = other DNA
ctgctggcaccccacat

SEQ ID NO: 135487 - DNA, 17 bp, synthetic construct
  source 1..17: mol_type = other DNA
tgctggcaccccacatg

SEQ ID NO: 135488 - DNA, 17 bp, synthetic construct
  source 1..17: mol_type = other DNA
gctggcaccccacatgt

SEQ ID NO: 135489 - DNA, 17 bp, synthetic construct
  source 1..17: mol_type = other DNA
ctggcaccccacatgtg

SEQ ID NO: 135490 - DNA, 17 bp, synthetic construct
  source 1..17: mol_type = other DNA
tggcaccccacatgtga

SEQ ID NO: 135491 - DNA, 17 bp, synthetic construct
  source 1..17: mol_type = other DNA
ggcaccccacatgtgag

SEQ ID NO: 135492 - DNA, 17 bp, synthetic construct
  source 1..17: mol_type = other DNA
gcaccccacatgtgagc

SEQ ID NO: 135493 - DNA, 17 bp, synthetic construct
  source 1..17: mol_type = other DNA
caccccacatgtgagca

SEQ ID NO: 135494 - DNA, 17 bp, synthetic construct
  source 1..17: mol_type = other DNA
accccacatgtgagcac

SEQ ID NO: 135495 - DNA, 17 bp, synthetic construct
  source 1..17: mol_type = other DNA
ccccacatgtgagcacc

SEQ ID NO: 135496 - DNA, 17 bp, synthetic construct
  source 1..17: mol_type = other DNA
cccacatgtgagcacca

SEQ ID NO: 135497 - DNA, 17 bp, synthetic construct
  source 1..17: mol_type = other DNA
ccacatgtgagcaccac

SEQ ID NO: 135498 - DNA, 17 bp, synthetic construct
  source 1..17: mol_type = other DNA
cacatgtgagcaccacg

SEQ ID NO: 135499 - DNA, 17 bp, synthetic construct
  source 1..17: mol_type = other DNA
acatgtgagcaccacgg

SEQ ID NO: 135500 - DNA, 17 bp, synthetic construct
  source 1..17: mol_type = other DNA
catgtgagcaccacggc

SEQ ID NO: 135501 - DNA, 17 bp, synthetic construct
  source 1..17: mol_type = other DNA
atgtgagcaccacggcc

SEQ ID NO: 135502 - DNA, 17 bp, synthetic construct
  source 1..17: mol_type = other DNA
tgtgagcaccacggcca

SEQ ID NO: 135503 - DNA, 17 bp, synthetic construct
  source 1..17: mol_type = other DNA
gtgagcaccacggccac

SEQ ID NO: 135504 - DNA, 17 bp, synthetic construct
  source 1..17: mol_type = other DNA
tgagcaccacggccacg

SEQ ID NO: 135505 - DNA, 17 bp, synthetic construct
  source 1..17: mol_type = other DNA
gagcaccacggccacga

SEQ ID NO: 135506 - DNA, 17 bp, synthetic construct
  source 1..17: mol_type = other DNA
agcaccacggccacgac

SEQ ID NO: 135507 - DNA, 17 bp, synthetic construct
  source 1..17: mol_type = other DNA
gcaccacggccacgaca

SEQ ID NO: 135508 - DNA, 17 bp, synthetic construct
  source 1..17: mol_type = other DNA
caccacggccacgacac

SEQ ID NO: 135509 - DNA, 17 bp, synthetic construct
  source 1..17: mol_type = other DNA
accacggccacgacacc

SEQ ID NO: 135510 - DNA, 17 bp, synthetic construct
  source 1..17: mol_type = other DNA
ccacggccacgacaccc

SEQ ID NO: 135511 - DNA, 17 bp, synthetic construct
  source 1..17: mol_type = other DNA
cacggccacgacaccca

SEQ ID NO: 135512 - DNA, 17 bp, synthetic construct
  source 1..17: mol_type = other DNA
acggccacgacacccac

SEQ ID NO: 135513 - DNA, 17 bp, synthetic construct
  source 1..17: mol_type = other DNA
cggccacgacacccaca

SEQ ID NO: 135514 - DNA, 17 bp, synthetic construct
  source 1..17: mol_type = other DNA
ggccacgacacccacag

SEQ ID NO: 135515 - DNA, 17 bp, synthetic construct
  source 1..17: mol_type = other DNA
gccacgacacccacagt

SEQ ID NO: 135516 - DNA, 17 bp, synthetic construct
  source 1..17: mol_type = other DNA
ccacgacacccacagtc

SEQ ID NO: 135517 - DNA, 17 bp, synthetic construct
  source 1..17: mol_type = other DNA
cacgacacccacagtca

SEQ ID NO: 135518 - DNA, 17 bp, synthetic construct
  source 1..17: mol_type = other DNA
acgacacccacagtcac

SEQ ID NO: 135519 - DNA, 17 bp, synthetic construct
  source 1..17: mol_type = other DNA
cgacacccacagtcacc

SEQ ID NO: 135520 - DNA, 17 bp, synthetic construct
  source 1..17: mol_type = other DNA
gacacccacagtcacca

SEQ ID NO: 135521 - DNA, 17 bp, synthetic construct
  source 1..17: mol_type = other DNA
acacccacagtcaccag

SEQ ID NO: 135522 - DNA, 17 bp, synthetic construct
  source 1..17: mol_type = other DNA
cacccacagtcaccagc

SEQ ID NO: 135523 - DNA, 17 bp, synthetic construct
  source 1..17: mol_type = other DNA
acccacagtcaccagct

SEQ ID NO: 135524 - DNA, 17 bp, synthetic construct
  source 1..17: mol_type = other DNA
cccacagtcaccagctc

SEQ ID NO: 135525 - DNA, 17 bp, synthetic construct
  source 1..17: mol_type = other DNA
ccacagtcaccagctcc

SEQ ID NO: 135526 - DNA, 17 bp, synthetic construct
  source 1..17: mol_type = other DNA
cacagtcaccagctcca

SEQ ID NO: 135527 - DNA, 17 bp, synthetic construct
  source 1..17: mol_type = other DNA
acagtcaccagctccaa

SEQ ID NO: 135528 - DNA, 17 bp, synthetic construct
  source 1..17: mol_type = other DNA
cagtcaccagctccaaa

SEQ ID NO: 135529 - DNA, 17 bp, synthetic construct
  source 1..17: mol_type = other DNA
agtcaccagctccaaag

SEQ ID NO: 135530 - DNA, 17 bp, synthetic construct
  source 1..17: mol_type = other DNA
gtcaccagctccaaagc

SEQ ID NO: 135531 - DNA, 17 bp, synthetic construct
  source 1..17: mol_type = other DNA
tcaccagctccaaagcc

SEQ ID NO: 135532 - DNA, 17 bp, synthetic construct
  source 1..17: mol_type = other DNA
caccagctccaaagcca

SEQ ID NO: 135533 - DNA, 17 bp, synthetic construct
  source 1..17: mol_type = other DNA
accagctccaaagccac

SEQ ID NO: 135534 - DNA, 17 bp, synthetic construct
  source 1..17: mol_type = other DNA
ccagctccaaagccact

SEQ ID NO: 135535 - DNA, 17 bp, synthetic construct
  source 1..17: mol_type = other DNA
cagctccaaagccactc

SEQ ID NO: 135536 - DNA, 17 bp, synthetic construct
  source 1..17: mol_type = other DNA
agctccaaagccactcc

SEQ ID NO: 135537 - DNA, 17 bp, synthetic construct
  source 1..17: mol_type = other DNA
gctccaaagccactccc

SEQ ID NO: 135538 - DNA, 17 bp, synthetic construct
  source 1..17: mol_type = other DNA
ctccaaagccactccct

SEQ ID NO: 135539 - DNA, 17 bp, synthetic construct
  source 1..17: mol_type = other DNA
tccaaagccactccctc

SEQ ID NO: 135540 - DNA, 17 bp, synthetic construct
  source 1..17: mol_type = other DNA
ccaaagccactccctcc

SEQ ID NO: 135541 - DNA, 17 bp, synthetic construct
  source 1..17: mol_type = other DNA
caaagccactccctcct

SEQ ID NO: 135542 - DNA, 17 bp, synthetic construct
  source 1..17: mol_type = other DNA
aaagccactccctcctc

SEQ ID NO: 135543 - DNA, 17 bp, synthetic construct
  source 1..17: mol_type = other DNA
aagccactccctcctcc

SEQ ID NO: 135544 - DNA, 17 bp, synthetic construct
  source 1..17: mol_type = other DNA
agccactccctcctcca

SEQ ID NO: 135545 - DNA, 17 bp, synthetic construct
  source 1..17: mol_type = other DNA
gccactccctcctccag

SEQ ID NO: 135546 - DNA, 17 bp, synthetic construct
  source 1..17: mol_type = other DNA
ccactccctcctccagt

SEQ ID NO: 135547 - DNA, 17 bp, synthetic construct
  source 1..17: mol_type = other DNA
cactccctcctccagtc

SEQ ID NO: 135548 - DNA, 17 bp, synthetic construct
  source 1..17: mol_type = other DNA
actccctcctccagtcc

SEQ ID NO: 135549 - DNA, 17 bp, synthetic construct
  source 1..17: mol_type = other DNA
ctccctcctccagtcca

SEQ ID NO: 135550 - DNA, 17 bp, synthetic construct
  source 1..17: mol_type = other DNA
tccctcctccagtccag

SEQ ID NO: 135551 - DNA, 17 bp, synthetic construct
  source 1..17: mol_type = other DNA
ccctcctccagtccagg

SEQ ID NO: 135552 - DNA, 17 bp, synthetic construct
  source 1..17: mol_type = other DNA
cctcctccagtccaggg

SEQ ID NO: 135553 - DNA, 17 bp, synthetic construct
  source 1..17: mol_type = other DNA
ctcctccagtccaggga

SEQ ID NO: 135554 - DNA, 17 bp, synthetic construct
  source 1..17: mol_type = other DNA
tcctccagtccagggac

SEQ ID NO: 135555 - DNA, 17 bp, synthetic construct
  source 1..17: mol_type = other DNA
cctccagtccagggact

SEQ ID NO: 135556 - DNA, 17 bp, synthetic construct
  source 1..17: mol_type = other DNA
ctccagtccagggactg

SEQ ID NO: 135557 - DNA, 17 bp, synthetic construct
  source 1..17: mol_type = other DNA
tccagtccagggactgc

SEQ ID NO: 135558 - DNA, 17 bp, synthetic construct
  source 1..17: mol_type = other DNA
ccagtccagggactgca

SEQ ID NO: 135559 - DNA, 17 bp, synthetic construct
  source 1..17: mol_type = other DNA
cagtccagggactgcaa

SEQ ID NO: 135560 - DNA, 17 bp, synthetic construct
  source 1..17: mol_type = other DNA
agtccagggactgcaac

SEQ ID NO: 135561 - DNA, 17 bp, synthetic construct
  source 1..17: mol_type = other DNA
gtccagggactgcaact

SEQ ID NO: 135562 - DNA, 17 bp, synthetic construct
  source 1..17: mol_type = other DNA
tccagggactgcaactg

SEQ ID NO: 135563 - DNA, 17 bp, synthetic construct
  source 1..17: mol_type = other DNA
ccagggactgcaactgc

SEQ ID NO: 135564 - DNA, 17 bp, synthetic construct
  source 1..17: mol_type = other DNA
cagggactgcaactgcc

SEQ ID NO: 135565 - DNA, 17 bp, synthetic construct
  source 1..17: mol_type = other DNA
agggactgcaactgccc

SEQ ID NO: 135566 - DNA, 17 bp, synthetic construct
  source 1..17: mol_type = other DNA
gggactgcaactgccct

SEQ ID NO: 135567 - DNA, 17 bp, synthetic construct
  source 1..17: mol_type = other DNA
ggactgcaactgccctt

SEQ ID NO: 135568 - DNA, 17 bp, synthetic construct
  source 1..17: mol_type = other DNA
gactgcaactgcccttc

SEQ ID NO: 135569 - DNA, 17 bp, synthetic construct
  source 1..17: mol_type = other DNA
actgcaactgcccttcc

SEQ ID NO: 135570 - DNA, 17 bp, synthetic construct
  source 1..17: mol_type = other DNA
ctgcaactgcccttcca

SEQ ID NO: 135571 - DNA, 17 bp, synthetic construct
  source 1..17: mol_type = other DNA
tgcaactgcccttccag

SEQ ID NO: 135572 - DNA, 17 bp, synthetic construct
  source 1..17: mol_type = other DNA
gcaactgcccttccagc

SEQ ID NO: 135573 - DNA, 17 bp, synthetic construct
  source 1..17: mol_type = other DNA
caactgcccttccagca

SEQ ID NO: 135574 - DNA, 17 bp, synthetic construct
  source 1..17: mol_type = other DNA
aactgcccttccagcac

SEQ ID NO: 135575 - DNA, 17 bp, synthetic construct
  source 1..17: mol_type = other DNA
actgcccttccagcact

SEQ ID NO: 135576 - DNA, 17 bp, synthetic construct
  source 1..17: mol_type = other DNA
ctgcccttccagcactg

SEQ ID NO: 135577 - DNA, 17 bp, synthetic construct
  source 1..17: mol_type = other DNA
tgcccttccagcactga

SEQ ID NO: 135578 - DNA, 17 bp, synthetic construct
  source 1..17: mol_type = other DNA
gcccttccagcactgag

SEQ ID NO: 135579 - DNA, 17 bp, synthetic construct
  source 1..17: mol_type = other DNA
cccttccagcactgaga

SEQ ID NO: 135580 - DNA, 17 bp, synthetic construct
  source 1..17: mol_type = other DNA
ccttccagcactgagaa

SEQ ID NO: 135581 - DNA, 17 bp, synthetic construct
  source 1..17: mol_type = other DNA
cttccagcactgagaag

SEQ ID NO: 135582 - DNA, 17 bp, synthetic construct
  source 1..17: mol_type = other DNA
ttccagcactgagaagc

SEQ ID NO: 135583 - DNA, 17 bp, synthetic construct
  source 1..17: mol_type = other DNA
tccagcactgagaagca

SEQ ID NO: 135584 - DNA, 17 bp, synthetic construct
  source 1..17: mol_type = other DNA
ccagcactgagaagcac

SEQ ID NO: 135585 - DNA, 17 bp, synthetic construct
  source 1..17: mol_type = other DNA
cagcactgagaagcaca

SEQ ID NO: 135586 - DNA, 17 bp, synthetic construct
  source 1..17: mol_type = other DNA
agcactgagaagcacag

SEQ ID NO: 135587 - DNA, 17 bp, synthetic construct
  source 1..17: mol_type = other DNA
gcactgagaagcacagc

SEQ ID NO: 135588 - DNA, 17 bp, synthetic construct
  source 1..17: mol_type = other DNA
cactgagaagcacagcc

SEQ ID NO: 135589 - DNA, 17 bp, synthetic construct
  source 1..17: mol_type = other DNA
actgagaagcacagcca

SEQ ID NO: 135590 - DNA, 17 bp, synthetic construct
  source 1..17: mol_type = other DNA
ctgagaagcacagccac

SEQ ID NO: 135591 - DNA, 17 bp, synthetic construct
  source 1..17: mol_type = other DNA
tgagaagcacagccacc

SEQ ID NO: 135592 - DNA, 17 bp, synthetic construct
  source 1..17: mol_type = other DNA
gagaagcacagccacca

SEQ ID NO: 135593 - DNA, 17 bp, synthetic construct
  source 1..17: mol_type = other DNA
agaagcacagccaccac

SEQ ID NO: 135594 - DNA, 17 bp, synthetic construct
  source 1..17: mol_type = other DNA
gaagcacagccaccaca

SEQ ID NO: 135595 - DNA, 17 bp, synthetic construct
  source 1..17: mol_type = other DNA
aagcacagccaccacac

SEQ ID NO: 135596 - DNA, 17 bp, synthetic construct
  source 1..17: mol_type = other DNA
agcacagccaccacacc

SEQ ID NO: 135597 - DNA, 17 bp, synthetic construct
  source 1..17: mol_type = other DNA
gcacagccaccacaccc

SEQ ID NO: 135598 - DNA, 17 bp, synthetic construct
  source 1..17: mol_type = other DNA
cacagccaccacaccca

SEQ ID NO: 135599 - DNA, 17 bp, synthetic construct
  source 1..17: mol_type = other DNA
acagccaccacacccac

SEQ ID NO: 135600 - DNA, 17 bp, synthetic construct
  source 1..17: mol_type = other DNA
cagccaccacacccaca

SEQ ID NO: 135601 - DNA, 17 bp, synthetic construct
  source 1..17: mol_type = other DNA
agccaccacacccacag

SEQ ID NO: 135602 - DNA, 17 bp, synthetic construct
  source 1..17: mol_type = other DNA
gccaccacacccacagc

SEQ ID NO: 135603 - DNA, 17 bp, synthetic construct
  source 1..17: mol_type = other DNA
ccaccacacccacagct

SEQ ID NO: 135604 - DNA, 17 bp, synthetic construct
  source 1..17: mol_type = other DNA
caccacacccacagcta

SEQ ID NO: 135605 - DNA, 17 bp, synthetic construct
  source 1..17: mol_type = other DNA
accacacccacagctac

SEQ ID NO: 135606 - DNA, 17 bp, synthetic construct
  source 1..17: mol_type = other DNA
ccacacccacagctacc

SEQ ID NO: 135607 - DNA, 17 bp, synthetic construct
  source 1..17: mol_type = other DNA
cacacccacagctacca

SEQ ID NO: 135608 - DNA, 17 bp, synthetic construct
  source 1..17: mol_type = other DNA
acacccacagctaccag

SEQ ID NO: 135609 - DNA, 17 bp, synthetic construct
  source 1..17: mol_type = other DNA
cacccacagctaccagc

SEQ ID NO: 135610 - DNA, 17 bp, synthetic construct
  source 1..17: mol_type = other DNA
acccacagctaccagct

SEQ ID NO: 135611 - DNA, 17 bp, synthetic construct
  source 1..17: mol_type = other DNA
cccacagctaccagctt

SEQ ID NO: 135612 - DNA, 17 bp, synthetic construct
  source 1..17: mol_type = other DNA
ccacagctaccagcttt

SEQ ID NO: 135613 - DNA, 17 bp, synthetic construct
  source 1..17: mol_type = other DNA
cacagctaccagcttta

SEQ ID NO: 135614 - DNA, 17 bp, synthetic construct
  source 1..17: mol_type = other DNA
acagctaccagctttac

SEQ ID NO: 135615 - DNA, 17 bp, synthetic construct
  source 1..17: mol_type = other DNA
cagctaccagctttaca

SEQ ID NO: 135616 - DNA, 17 bp, synthetic construct
  source 1..17: mol_type = other DNA
agctaccagctttacag

SEQ ID NO: 135617 - DNA, 17 bp, synthetic construct
  source 1..17: mol_type = other DNA
gctaccagctttacagc

SEQ ID NO: 135618 - DNA, 17 bp, synthetic construct
  source 1..17: mol_type = other DNA
ctaccagctttacagcc

SEQ ID NO: 135619 - DNA, 17 bp, synthetic construct
  source 1..17: mol_type = other DNA
taccagctttacagcca

SEQ ID NO: 135620 - DNA, 17 bp, synthetic construct
  source 1..17: mol_type = other DNA
accagctttacagccat

SEQ ID NO: 135621 - DNA, 17 bp, synthetic construct
  source 1..17: mol_type = other DNA
ccagctttacagccatc

SEQ ID NO: 135622 - DNA, 17 bp, synthetic construct
  source 1..17: mol_type = other DNA
cagctttacagccatcc

SEQ ID NO: 135623 - DNA, 17 bp, synthetic construct
  source 1..17: mol_type = other DNA
agctttacagccatccc

SEQ ID NO: 135624 - DNA, 17 bp, synthetic construct
  source 1..17: mol_type = other DNA
gctttacagccatcccc

SEQ ID NO: 135625 - DNA, 17 bp, synthetic construct
  source 1..17: mol_type = other DNA
ctttacagccatcccct

SEQ ID NO: 135626 - DNA, 17 bp, synthetic construct
  source 1..17: mol_type = other DNA
tttacagccatcccctc

SEQ ID NO: 135627 - DNA, 17 bp, synthetic construct
  source 1..17: mol_type = other DNA
ttacagccatcccctcc

SEQ ID NO: 135628 - DNA, 17 bp, synthetic construct
  source 1..17: mol_type = other DNA
tacagccatcccctcct

SEQ ID NO: 135629 - DNA, 17 bp, synthetic construct
  source 1..17: mol_type = other DNA
acagccatcccctcctc

SEQ ID NO: 135630 - DNA, 17 bp, synthetic construct
  source 1..17: mol_type = other DNA
cagccatcccctcctcc

SEQ ID NO: 135631 - DNA, 17 bp, synthetic construct
  source 1..17: mol_type = other DNA
agccatcccctcctcct

SEQ ID NO: 135632 - DNA, 17 bp, synthetic construct
  source 1..17: mol_type = other DNA
gccatcccctcctcctc

SEQ ID NO: 135633 - DNA, 17 bp, synthetic construct
  source 1..17: mol_type = other DNA
ccatcccctcctcctcc

SEQ ID NO: 135634 - DNA, 17 bp, synthetic construct
  source 1..17: mol_type = other DNA
catcccctcctcctccc

SEQ ID NO: 135635 - DNA, 17 bp, synthetic construct
  source 1..17: mol_type = other DNA
atcccctcctcctccct

SEQ ID NO: 135636 - DNA, 17 bp, synthetic construct
  source 1..17: mol_type = other DNA
tcccctcctcctccctg

SEQ ID NO: 135637 - DNA, 17 bp, synthetic construct
  source 1..17: mol_type = other DNA
cccctcctcctccctgg

SEQ ID NO: 135638 - DNA, 17 bp, synthetic construct
  source 1..17: mol_type = other DNA
ccctcctcctccctggg

SEQ ID NO: 135639 - DNA, 17 bp, synthetic construct
  source 1..17: mol_type = other DNA
cctcctcctccctgggc

SEQ ID NO: 135640 - DNA, 17 bp, synthetic construct
  source 1..17: mol_type = other DNA
ctcctcctccctgggca

SEQ ID NO: 135641 - DNA, 17 bp, synthetic construct
  source 1..17: mol_type = other DNA
tcctcctccctgggcac

SEQ ID NO: 135642 - DNA, 17 bp, synthetic construct
  source 1..17: mol_type = other DNA
cctcctccctgggcacc

SEQ ID NO: 135643 - DNA, 17 bp, synthetic construct
  source 1..17: mol_type = other DNA
ctcctccctgggcacca

SEQ ID NO: 135644 - DNA, 17 bp, synthetic construct
  source 1..17: mol_type = other DNA
tcctccctgggcaccac

SEQ ID NO: 135645 - DNA, 17 bp, synthetic construct
  source 1..17: mol_type = other DNA
cctccctgggcaccacc

SEQ ID NO: 135646 - DNA, 17 bp, synthetic construct
  source 1..17: mol_type = other DNA
ctccctgggcaccacct

SEQ ID NO: 135647 - DNA, 17 bp, synthetic construct
  source 1..17: mol_type = other DNA
tccctgggcaccacctg

SEQ ID NO: 135648 - DNA, 17 bp, synthetic construct
  source 1..17: mol_type = other DNA
ccctgggcaccacctgg

SEQ ID NO: 135649 - DNA, 17 bp, synthetic construct
  source 1..17: mol_type = other DNA
cctgggcaccacctgga

SEQ ID NO: 135650 - DNA, 17 bp, synthetic construct
  source 1..17: mol_type = other DNA
ctgggcaccacctggac

SEQ ID NO: 135651 - DNA, 17 bp, synthetic construct
  source 1..17: mol_type = other DNA
tgggcaccacctggacc

SEQ ID NO: 135652 - DNA, 17 bp, synthetic construct
  source 1..17: mol_type = other DNA
gggcaccacctggaccc

SEQ ID NO: 135653 - DNA, 17 bp, synthetic construct
  source 1..17: mol_type = other DNA
ggcaccacctggacccg

SEQ ID NO: 135654 - DNA, 17 bp, synthetic construct
  source 1..17: mol_type = other DNA
gcaccacctggacccgc

SEQ ID NO: 135655 - DNA, 17 bp, synthetic construct
  source 1..17: mol_type = other DNA
caccacctggacccgcc

SEQ ID NO: 135656 - DNA, 17 bp, synthetic construct
  source 1..17: mol_type = other DNA
accacctggacccgcct

SEQ ID NO: 135657 - DNA, 17 bp, synthetic construct
  source 1..17: mol_type = other DNA
ccacctggacccgccta

SEQ ID NO: 135658 - DNA, 17 bp, synthetic construct
  source 1..17: mol_type = other DNA
cacctggacccgcctat

SEQ ID NO: 135659 - DNA, 17 bp, synthetic construct
  source 1..17: mol_type = other DNA
acctggacccgcctatc

SEQ ID NO: 135660 - DNA, 17 bp, synthetic construct
  source 1..17: mol_type = other DNA
cctggacccgcctatca

SEQ ID NO: 135661 - DNA, 17 bp, synthetic construct
  source 1..17: mol_type = other DNA
ctggacccgcctatcac

SEQ ID NO: 135662 - DNA, 17 bp, synthetic construct
  source 1..17: mol_type = other DNA
tggacccgcctatcaca

SEQ ID NO: 135663 - DNA, 17 bp, synthetic construct
  source 1..17: mol_type = other DNA
ggacccgcctatcacag

SEQ ID NO: 135664 - DNA, 17 bp, synthetic construct
  source 1..17: mol_type = other DNA
gacccgcctatcacaga

SEQ ID NO: 135665 - DNA, 17 bp, synthetic construct
  source 1..17: mol_type = other DNA
acccgcctatcacagac

SEQ ID NO: 135666 - DNA, 17 bp, synthetic construct
  source 1..17: mol_type = other DNA
cccgcctatcacagacc

SEQ ID NO: 135667 - DNA, 17 bp, synthetic construct
  source 1..17: mol_type = other DNA
ccgcctatcacagacca

SEQ ID NO: 135668 - DNA, 17 bp, synthetic construct
  source 1..17: mol_type = other DNA
cgcctatcacagaccac

SEQ ID NO: 135669 - DNA, 17 bp, synthetic construct
  source 1..17: mol_type = other DNA
gcctatcacagaccacc

SEQ ID NO: 135670 - DNA, 17 bp, synthetic construct
  source 1..17: mol_type = other DNA
cctatcacagaccacca

SEQ ID NO: 135671 - DNA, 17 bp, synthetic construct
  source 1..17: mol_type = other DNA
ctatcacagaccaccac

SEQ ID NO: 135672 - DNA, 17 bp, synthetic construct
  source 1..17: mol_type = other DNA
tatcacagaccaccaca

SEQ ID NO: 135673 - DNA, 17 bp, synthetic construct
  source 1..17: mol_type = other DNA
atcacagaccaccacac

SEQ ID NO: 135674 - DNA, 17 bp, synthetic construct
  source 1..17: mol_type = other DNA
tcacagaccaccacacc

SEQ ID NO: 135675 - DNA, 17 bp, synthetic construct
  source 1..17: mol_type = other DNA
cacagaccaccacaccc

SEQ ID NO: 135676 - DNA, 17 bp, synthetic construct
  source 1..17: mol_type = other DNA
acagaccaccacaccca

SEQ ID NO: 135677 - DNA, 17 bp, synthetic construct
  source 1..17: mol_type = other DNA
cagaccaccacacccac

SEQ ID NO: 135678 - DNA, 17 bp, synthetic construct
  source 1..17: mol_type = other DNA
agaccaccacacccacg

SEQ ID NO: 135679 - DNA, 17 bp, synthetic construct
  source 1..17: mol_type = other DNA
gaccaccacacccacgg

SEQ ID NO: 135680 - DNA, 17 bp, synthetic construct
  source 1..17: mol_type = other DNA
accaccacacccacggc

SEQ ID NO: 135681 - DNA, 17 bp, synthetic construct
  source 1..17: mol_type = other DNA
ccaccacacccacggcc

SEQ ID NO: 135682 - DNA, 17 bp, synthetic construct
  source 1..17: mol_type = other DNA
caccacacccacggcca

SEQ ID NO: 135683 - DNA, 17 bp, synthetic construct
  source 1..17: mol_type = other DNA
accacacccacggccac

SEQ ID NO: 135684 - DNA, 17 bp, synthetic construct
  source 1..17: mol_type = other DNA
ccacacccacggccacc

SEQ ID NO: 135685 - DNA, 17 bp, synthetic construct
  source 1..17: mol_type = other DNA
cacacccacggccacca

SEQ ID NO: 135686 - DNA, 17 bp, synthetic construct
  source 1..17: mol_type = other DNA
acacccacggccaccat

SEQ ID NO: 135687 - DNA, 17 bp, synthetic construct
  source 1..17: mol_type = other DNA
cacccacggccaccatg

SEQ ID NO: 135688 - DNA, 17 bp, synthetic construct
  source 1..17: mol_type = other DNA
acccacggccaccatgt

SEQ ID NO: 135689 - DNA, 17 bp, synthetic construct
  source 1..17: mol_type = other DNA
cccacggccaccatgtc

SEQ ID NO: 135690 - DNA, 17 bp, synthetic construct
  source 1..17: mol_type = other DNA
ccacggccaccatgtcc

SEQ ID NO: 135691 - DNA, 17 bp, synthetic construct
  source 1..17: mol_type = other DNA
cacggccaccatgtcca

SEQ ID NO: 135692 - DNA, 17 bp, synthetic construct
  source 1..17: mol_type = other DNA
acggccaccatgtccac

SEQ ID NO: 135693 - DNA, 17 bp, synthetic construct
  source 1..17: mol_type = other DNA
cggccaccatgtccaca

SEQ ID NO: 135694 - DNA, 17 bp, synthetic construct
  source 1..17: mol_type = other DNA
ggccaccatgtccacag

SEQ ID NO: 135695 - DNA, 17 bp, synthetic construct
  source 1..17: mol_type = other DNA
gccaccatgtccacagc

SEQ ID NO: 135696 - DNA, 17 bp, synthetic construct
  source 1..17: mol_type = other DNA
ccaccatgtccacagcc

SEQ ID NO: 135697 - DNA, 17 bp, synthetic construct
  source 1..17: mol_type = other DNA
caccatgtccacagcca

SEQ ID NO: 135698 - DNA, 17 bp, synthetic construct
  source 1..17: mol_type = other DNA
accatgtccacagccac

SEQ ID NO: 135699 - DNA, 17 bp, synthetic construct
  source 1..17: mol_type = other DNA
ccatgtccacagccaca

SEQ ID NO: 135700 - DNA, 17 bp, synthetic construct
  source 1..17: mol_type = other DNA
catgtccacagccacac

SEQ ID NO: 135701 - DNA, 17 bp, synthetic construct
  source 1..17: mol_type = other DNA
atgtccacagccacacc

SEQ ID NO: 135702 - DNA, 17 bp, synthetic construct
  source 1..17: mol_type = other DNA
tgtccacagccacaccc

SEQ ID NO: 135703 - DNA, 17 bp, synthetic construct
  source 1..17: mol_type = other DNA
gtccacagccacaccct

SEQ ID NO: 135704 - DNA, 17 bp, synthetic construct
  source 1..17: mol_type = other DNA
tccacagccacaccctc

SEQ ID NO: 135705 - DNA, 17 bp, synthetic construct
  source 1..17: mol_type = other DNA
ccacagccacaccctcc

SEQ ID NO: 135706 - DNA, 17 bp, synthetic construct
  source 1..17: mol_type = other DNA
cacagccacaccctcct

SEQ ID NO: 135707 - DNA, 17 bp, synthetic construct
  source 1..17: mol_type = other DNA
acagccacaccctcctc

SEQ ID NO: 135708 - DNA, 17 bp, synthetic construct
  source 1..17: mol_type = other DNA
cagccacaccctcctcc

SEQ ID NO: 135709 - DNA, 17 bp, synthetic construct
  source 1..17: mol_type = other DNA
agccacaccctcctcca

SEQ ID NO: 135710 - DNA, 17 bp, synthetic construct
  source 1..17: mol_type = other DNA
gccacaccctcctccac

SEQ ID NO: 135711 - DNA, 17 bp, synthetic construct
  source 1..17: mol_type = other DNA
ccacaccctcctccact

SEQ ID NO: 135712 - DNA, 17 bp, synthetic construct
  source 1..17: mol_type = other DNA
cacaccctcctccactc

SEQ ID NO: 135713 - DNA, 17 bp, synthetic construct
  source 1..17: mol_type = other DNA
acaccctcctccactcc

SEQ ID NO: 135714 - DNA, 17 bp, synthetic construct
  source 1..17: mol_type = other DNA
caccctcctccactcca

SEQ ID NO: 135715 - DNA, 17 bp, synthetic construct
  source 1..17: mol_type = other DNA
accctcctccactccag

SEQ ID NO: 135716 - DNA, 17 bp, synthetic construct
  source 1..17: mol_type = other DNA
ccctcctccactccaga

SEQ ID NO: 135717 - DNA, 17 bp, synthetic construct
  source 1..17: mol_type = other DNA
cctcctccactccagag

SEQ ID NO: 135718 - DNA, 17 bp, synthetic construct
  source 1..17: mol_type = other DNA
ctcctccactccagaga

SEQ ID NO: 135719 - DNA, 17 bp, synthetic construct
  source 1..17: mol_type = other DNA
tcctccactccagagac

SEQ ID NO: 135720 - DNA, 17 bp, synthetic construct
  source 1..17: mol_type = other DNA
cctccactccagagact

SEQ ID NO: 135721 - DNA, 17 bp, synthetic construct
  source 1..17: mol_type = other DNA
ctccactccagagactg

SEQ ID NO: 135722 - DNA, 17 bp, synthetic construct
  source 1..17: mol_type = other DNA
tccactccagagactgt

SEQ ID NO: 135723 - DNA, 17 bp, synthetic construct
  source 1..17: mol_type = other DNA
ccactccagagactgtc

SEQ ID NO: 135724 - DNA, 17 bp, synthetic construct
  source 1..17: mol_type = other DNA
cactccagagactgtcc

SEQ ID NO: 135725 - DNA, 17 bp, synthetic construct
  source 1..17: mol_type = other DNA
actccagagactgtcca

SEQ ID NO: 135726 - DNA, 17 bp, synthetic construct
  source 1..17: mol_type = other DNA
ctccagagactgtccac

SEQ ID NO: 135727 - DNA, 17 bp, synthetic construct
  source 1..17: mol_type = other DNA
tccagagactgtccaca

SEQ ID NO: 135728 - DNA, 17 bp, synthetic construct
  source 1..17: mol_type = other DNA
ccagagactgtccacac

SEQ ID NO: 135729 - DNA, 17 bp, synthetic construct
  source 1..17: mol_type = other DNA
cagagactgtccacacc

SEQ ID NO: 135730 - DNA, 17 bp, synthetic construct
  source 1..17: mol_type = other DNA
agagactgtccacacct

SEQ ID NO: 135731 - DNA, 17 bp, synthetic construct
  source 1..17: mol_type = other DNA
gagactgtccacacctc

SEQ ID NO: 135732 - DNA, 17 bp, synthetic construct
  source 1..17: mol_type = other DNA
agactgtccacacctcc

SEQ ID NO: 135733 - DNA, 17 bp, synthetic construct
  source 1..17: mol_type = other DNA
gactgtccacacctcca

SEQ ID NO: 135734 - DNA, 17 bp, synthetic construct
  source 1..17: mol_type = other DNA
actgtccacacctccac

SEQ ID NO: 135735 - DNA, 17 bp, synthetic construct
  source 1..17: mol_type = other DNA
ctgtccacacctccaca

SEQ ID NO: 135736 - DNA, 17 bp, synthetic construct
  source 1..17: mol_type = other DNA
tgtccacacctccacag

SEQ ID NO: 135737 - DNA, 17 bp, synthetic construct
  source 1..17: mol_type = other DNA
gtccacacctccacagt

SEQ ID NO: 135738 - DNA, 17 bp, synthetic construct
  source 1..17: mol_type = other DNA
tccacacctccacagtg

SEQ ID NO: 135739 - DNA, 17 bp, synthetic construct
  source 1..17: mol_type = other DNA
ccacacctccacagtgc

SEQ ID NO: 135740 - DNA, 17 bp, synthetic construct
  source 1..17: mol_type = other DNA
cacacctccacagtgct

SEQ ID NO: 135741 - DNA, 17 bp, synthetic construct
  source 1..17: mol_type = other DNA
acacctccacagtgctt

SEQ ID NO: 135742 - DNA, 17 bp, synthetic construct
  source 1..17: mol_type = other DNA
cacctccacagtgctta

SEQ ID NO: 135743 - DNA, 17 bp, synthetic construct
  source 1..17: mol_type = other DNA
acctccacagtgcttac

SEQ ID NO: 135744 - DNA, 17 bp, synthetic construct
  source 1..17: mol_type = other DNA
cctccacagtgcttacc

SEQ ID NO: 135745 - DNA, 17 bp, synthetic construct
  source 1..17: mol_type = other DNA
ctccacagtgcttaccg

SEQ ID NO: 135746 - DNA, 17 bp, synthetic construct
  source 1..17: mol_type = other DNA
tccacagtgcttaccgc

SEQ ID NO: 135747 - DNA, 17 bp, synthetic construct
  source 1..17: mol_type = other DNA
ccacagtgcttaccgcc

SEQ ID NO: 135748 - DNA, 17 bp, synthetic construct
  source 1..17: mol_type = other DNA
cacagtgcttaccgcca

SEQ ID NO: 135749 - DNA, 17 bp, synthetic construct
  source 1..17: mol_type = other DNA
acagtgcttaccgccac

SEQ ID NO: 135750 - DNA, 17 bp, synthetic construct
  source 1..17: mol_type = other DNA
cagtgcttaccgccacg

SEQ ID NO: 135751 - DNA, 17 bp, synthetic construct
  source 1..17: mol_type = other DNA
agtgcttaccgccacgg

SEQ ID NO: 135752 - DNA, 17 bp, synthetic construct
  source 1..17: mol_type = other DNA
gtgcttaccgccacggc

SEQ ID NO: 135753 - DNA, 17 bp, synthetic construct
  source 1..17: mol_type = other DNA
tgcttaccgccacggcc

SEQ ID NO: 135754 - DNA, 17 bp, synthetic construct
  source 1..17: mol_type = other DNA
gcttaccgccacggcca

SEQ ID NO: 135755 - DNA, 17 bp, synthetic construct
  source 1..17: mol_type = other DNA
cttaccgccacggccac

SEQ ID NO: 135756 - DNA, 17 bp, synthetic construct
  source 1..17: mol_type = other DNA
ttaccgccacggccacc

SEQ ID NO: 135757 - DNA, 17 bp, synthetic construct
  source 1..17: mol_type = other DNA
taccgccacggccacca

SEQ ID NO: 135758 - DNA, 17 bp, synthetic construct
  source 1..17: mol_type = other DNA
accgccacggccaccac

SEQ ID NO: 135759 - DNA, 17 bp, synthetic construct
  source 1..17: mol_type = other DNA
ccgccacggccaccaca

SEQ ID NO: 135760 - DNA, 17 bp, synthetic construct
  source 1..17: mol_type = other DNA
cgccacggccaccacaa

SEQ ID NO: 135761 - DNA, 17 bp, synthetic construct
  source 1..17: mol_type = other DNA
gccacggccaccacaac

SEQ ID NO: 135762 - DNA, 17 bp, synthetic construct
  source 1..17: mol_type = other DNA
ccacggccaccacaacc

SEQ ID NO: 135763 - DNA, 17 bp, synthetic construct
  source 1..17: mol_type = other DNA
cacggccaccacaaccg

SEQ ID NO: 135764 - DNA, 17 bp, synthetic construct
  source 1..17: mol_type = other DNA
acggccaccacaaccgg

SEQ ID NO: 135765 - DNA, 17 bp, synthetic construct
  source 1..17: mol_type = other DNA
cggccaccacaaccggg

SEQ ID NO: 135766 - DNA, 17 bp, synthetic construct
  source 1..17: mol_type = other DNA
ggccaccacaaccgggg

SEQ ID NO: 135767 - DNA, 17 bp, synthetic construct
  source 1..17: mol_type = other DNA
gccaccacaaccggggc

SEQ ID NO: 135768 - DNA, 17 bp, synthetic construct
  source 1..17: mol_type = other DNA
ccaccacaaccggggcc

SEQ ID NO: 135769 - DNA, 17 bp, synthetic construct
  source 1..17: mol_type = other DNA
caccacaaccggggcca

SEQ ID NO: 135770 - DNA, 17 bp, synthetic construct
  source 1..17: mol_type = other DNA
accacaaccggggccac

SEQ ID NO: 135771 - DNA, 17 bp, synthetic construct
  source 1..17: mol_type = other DNA
ccacaaccggggccacc

SEQ ID NO: 135772 - DNA, 17 bp, synthetic construct
  source 1..17: mol_type = other DNA
cacaaccggggccaccg

SEQ ID NO: 135773 - DNA, 17 bp, synthetic construct
  source 1..17: mol_type = other DNA
acaaccggggccaccgg

SEQ ID NO: 135774 - DNA, 17 bp, synthetic construct
  source 1..17: mol_type = other DNA
caaccggggccaccggc

SEQ ID NO: 135775 - DNA, 17 bp, synthetic construct
  source 1..17: mol_type = other DNA
aaccggggccaccggct

SEQ ID NO: 135776 - DNA, 17 bp, synthetic construct
  source 1..17: mol_type = other DNA
accggggccaccggctc

SEQ ID NO: 135777 - DNA, 17 bp, synthetic construct
  source 1..17: mol_type = other DNA
ccggggccaccggctct

SEQ ID NO: 135778 - DNA, 17 bp, synthetic construct
  source 1..17: mol_type = other DNA
cggggccaccggctctg

SEQ ID NO: 135779 - DNA, 17 bp, synthetic construct
  source 1..17: mol_type = other DNA
ggggccaccggctctgt

SEQ ID NO: 135780 - DNA, 17 bp, synthetic construct
  source 1..17: mol_type = other DNA
gggccaccggctctgtg

SEQ ID NO: 135781 - DNA, 17 bp, synthetic construct
  source 1..17: mol_type = other DNA
ggccaccggctctgtgg

SEQ ID NO: 135782 - DNA, 17 bp, synthetic construct
  source 1..17: mol_type = other DNA
gccaccggctctgtggc

SEQ ID NO: 135783 - DNA, 17 bp, synthetic construct
  source 1..17: mol_type = other DNA
ccaccggctctgtggcc

SEQ ID NO: 135784 - DNA, 17 bp, synthetic construct
  source 1..17: mol_type = other DNA
caccggctctgtggcca

SEQ ID NO: 135785 - DNA, 17 bp, synthetic construct
  source 1..17: mol_type = other DNA
accggctctgtggccac

SEQ ID NO: 135786 - DNA, 17 bp, synthetic construct
  source 1..17: mol_type = other DNA
ccggctctgtggccacc

SEQ ID NO: 135787 - DNA, 17 bp, synthetic construct
  source 1..17: mol_type = other DNA
cggctctgtggccaccc

SEQ ID NO: 135788 - DNA, 17 bp, synthetic construct
  source 1..17: mol_type = other DNA
ggctctgtggccacccc

SEQ ID NO: 135789 - DNA, 17 bp, synthetic construct
  source 1..17: mol_type = other DNA
gctctgtggccaccccc

SEQ ID NO: 135790 - DNA, 17 bp, synthetic construct
  source 1..17: mol_type = other DNA
ctctgtggccaccccct

SEQ ID NO: 135791 - DNA, 17 bp, synthetic construct
  source 1..17: mol_type = other DNA
tctgtggccaccccctc

SEQ ID NO: 135792 - DNA, 17 bp, synthetic construct
  source 1..17: mol_type = other DNA
ctgtggccaccccctcc

SEQ ID NO: 135793 - DNA, 17 bp, synthetic construct
  source 1..17: mol_type = other DNA
tgtggccaccccctcct

SEQ ID NO: 135794 - DNA, 17 bp, synthetic construct
  source 1..17: mol_type = other DNA
gtggccaccccctcctc

SEQ ID NO: 135795 - DNA, 17 bp, synthetic construct
  source 1..17: mol_type = other DNA
tggccaccccctcctcc

SEQ ID NO: 135796 - DNA, 17 bp, synthetic construct
  source 1..17: mol_type = other DNA
ggccaccccctcctcca

SEQ ID NO: 135797 - DNA, 17 bp, synthetic construct
  source 1..17: mol_type = other DNA
gccaccccctcctccac

SEQ ID NO: 135798 - DNA, 17 bp, synthetic construct
  source 1..17: mol_type = other DNA
ccaccccctcctccacc

SEQ ID NO: 135799 - DNA, 17 bp, synthetic construct
  source 1..17: mol_type = other DNA
caccccctcctccaccc

SEQ ID NO: 135800 - DNA, 17 bp, synthetic construct
  source 1..17: mol_type = other DNA
accccctcctccacccc

SEQ ID NO: 135801 - DNA, 17 bp, synthetic construct
  source 1..17: mol_type = other DNA
ccccctcctccacccca

SEQ ID NO: 135802 - DNA, 17 bp, synthetic construct
  source 1..17: mol_type = other DNA
cccctcctccaccccag

SEQ ID NO: 135803 - DNA, 17 bp, synthetic construct
  source 1..17: mol_type = other DNA
ccctcctccaccccagg

SEQ ID NO: 135804 - DNA, 17 bp, synthetic construct
  source 1..17: mol_type = other DNA
cctcctccaccccagga

SEQ ID NO: 135805 - DNA, 17 bp, synthetic construct
  source 1..17: mol_type = other DNA
ctcctccaccccaggaa

SEQ ID NO: 135806 - DNA, 17 bp, synthetic construct
  source 1..17: mol_type = other DNA
tcctccaccccaggaac

SEQ ID NO: 135807 - DNA, 17 bp, synthetic construct
  source 1..17: mol_type = other DNA
cctccaccccaggaaca

SEQ ID NO: 135808 - DNA, 17 bp, synthetic construct
  source 1..17: mol_type = other DNA
ctccaccccaggaacag

SEQ ID NO: 135809 - DNA, 17 bp, synthetic construct
  source 1..17: mol_type = other DNA
tccaccccaggaacagc

SEQ ID NO: 135810 - DNA, 17 bp, synthetic construct
  source 1..17: mol_type = other DNA
ccaccccaggaacagct

SEQ ID NO: 135811 - DNA, 17 bp, synthetic construct
  source 1..17: mol_type = other DNA
caccccaggaacagctc

SEQ ID NO: 135812 - DNA, 17 bp, synthetic construct
  source 1..17: mol_type = other DNA
accccaggaacagctca

SEQ ID NO: 135813 - DNA, 17 bp, synthetic construct
  source 1..17: mol_type = other DNA
ccccaggaacagctcac

SEQ ID NO: 135814 - DNA, 17 bp, synthetic construct
  source 1..17: mol_type = other DNA
cccaggaacagctcaca

SEQ ID NO: 135815 - DNA, 17 bp, synthetic construct
  source 1..17: mol_type = other DNA
ccaggaacagctcacac

SEQ ID NO: 135816 - DNA, 17 bp, synthetic construct
  source 1..17: mol_type = other DNA
caggaacagctcacact

SEQ ID NO: 135817 - DNA, 17 bp, synthetic construct
  source 1..17: mol_type = other DNA
aggaacagctcacacta

SEQ ID NO: 135818 - DNA, 17 bp, synthetic construct
  source 1..17: mol_type = other DNA
ggaacagctcacactac

SEQ ID NO: 135819 - DNA, 17 bp, synthetic construct
  source 1..17: mol_type = other DNA
gaacagctcacactacc

SEQ ID NO: 135820 - DNA, 17 bp, synthetic construct
  source 1..17: mol_type = other DNA
aacagctcacactacca

SEQ ID NO: 135821 - DNA, 17 bp, synthetic construct
  source 1..17: mol_type = other DNA
acagctcacactaccaa

SEQ ID NO: 135822 - DNA, 17 bp, synthetic construct
  source 1..17: mol_type = other DNA
cagctcacactaccaaa

SEQ ID NO: 135823 - DNA, 17 bp, synthetic construct
  source 1..17: mol_type = other DNA
agctcacactaccaaag

SEQ ID NO: 135824 - DNA, 17 bp, synthetic construct
  source 1..17: mol_type = other DNA
gctcacactaccaaagt

SEQ ID NO: 135825 - DNA, 17 bp, synthetic construct
  source 1..17: mol_type = other DNA
ctcacactaccaaagtg

SEQ ID NO: 135826 - DNA, 17 bp, synthetic construct
  source 1..17: mol_type = other DNA
tcacactaccaaagtgc

SEQ ID NO: 135827 - DNA, 17 bp, synthetic construct
  source 1..17: mol_type = other DNA
cacactaccaaagtgcc

SEQ ID NO: 135828 - DNA, 17 bp, synthetic construct
  source 1..17: mol_type = other DNA
acactaccaaagtgccg

SEQ ID NO: 135829 - DNA, 17 bp, synthetic construct
  source 1..17: mol_type = other DNA
cactaccaaagtgccga

SEQ ID NO: 135830 - DNA, 17 bp, synthetic construct
  source 1..17: mol_type = other DNA
actaccaaagtgccgac

SEQ ID NO: 135831 - DNA, 17 bp, synthetic construct
  source 1..17: mol_type = other DNA
ctaccaaagtgccgact

SEQ ID NO: 135832 - DNA, 17 bp, synthetic construct
  source 1..17: mol_type = other DNA
taccaaagtgccgacta

SEQ ID NO: 135833 - DNA, 17 bp, synthetic construct
  source 1..17: mol_type = other DNA
accaaagtgccgactac

SEQ ID NO: 135834 - DNA, 17 bp, synthetic construct
  source 1..17: mol_type = other DNA
ccaaagtgccgactacc

SEQ ID NO: 135835 - DNA, 17 bp, synthetic construct
  source 1..17: mol_type = other DNA
caaagtgccgactacca

SEQ ID NO: 135836 - DNA, 17 bp, synthetic construct
  source 1..17: mol_type = other DNA
aaagtgccgactaccac

SEQ ID NO: 135837 - DNA, 17 bp, synthetic construct
  source 1..17: mol_type = other DNA
aagtgccgactaccaca

SEQ ID NO: 135838 - DNA, 17 bp, synthetic construct
  source 1..17: mol_type = other DNA
agtgccgactaccacaa

SEQ ID NO: 135839 - DNA, 17 bp, synthetic construct
  source 1..17: mol_type = other DNA
gtgccgactaccacaac

SEQ ID NO: 135840 - DNA, 17 bp, synthetic construct
  source 1..17: mol_type = other DNA
tgccgactaccacaacc

SEQ ID NO: 135841 - DNA, 17 bp, synthetic construct
  source 1..17: mol_type = other DNA
gccgactaccacaacca

SEQ ID NO: 135842 - DNA, 17 bp, synthetic construct
  source 1..17: mol_type = other DNA
ccgactaccacaaccac

SEQ ID NO: 135843 - DNA, 17 bp, synthetic construct
  source 1..17: mol_type = other DNA
cgactaccacaaccacg

SEQ ID NO: 135844 - DNA, 17 bp, synthetic construct
  source 1..17: mol_type = other DNA
gactaccacaaccacgg

SEQ ID NO: 135845 - DNA, 17 bp, synthetic construct
  source 1..17: mol_type = other DNA
actaccacaaccacggg

SEQ ID NO: 135846 - DNA, 17 bp, synthetic construct
  source 1..17: mol_type = other DNA
ctaccacaaccacgggc

SEQ ID NO: 135847 - DNA, 17 bp, synthetic construct
  source 1..17: mol_type = other DNA
taccacaaccacgggct

SEQ ID NO: 135848 - DNA, 17 bp, synthetic construct
  source 1..17: mol_type = other DNA
accacaaccacgggctt

SEQ ID NO: 135849 - DNA, 17 bp, synthetic construct
  source 1..17: mol_type = other DNA
ccacaaccacgggcttc

SEQ ID NO: 135850 - DNA, 17 bp, synthetic construct
  source 1..17: mol_type = other DNA
cacaaccacgggcttca

SEQ ID NO: 135851 - DNA, 17 bp, synthetic construct
  source 1..17: mol_type = other DNA
acaaccacgggcttcac

SEQ ID NO: 135852 - DNA, 17 bp, synthetic construct
  source 1..17: mol_type = other DNA
caaccacgggcttcaca

SEQ ID NO: 135853 - DNA, 17 bp, synthetic construct
  source 1..17: mol_type = other DNA
aaccacgggcttcacag

SEQ ID NO: 135854 - DNA, 17 bp, synthetic construct
  source 1..17: mol_type = other DNA
accacgggcttcacagc

SEQ ID NO: 135855 - DNA, 17 bp, synthetic construct
  source 1..17: mol_type = other DNA
ccacgggcttcacagcc

SEQ ID NO: 135856 - DNA, 17 bp, synthetic construct
  source 1..17: mol_type = other DNA
cacgggcttcacagcca

SEQ ID NO: 135857 - DNA, 17 bp, synthetic construct
  source 1..17: mol_type = other DNA
acgggcttcacagccac

SEQ ID NO: 135858 - DNA, 17 bp, synthetic construct
  source 1..17: mol_type = other DNA
cgggcttcacagccacc

SEQ ID NO: 135859 - DNA, 17 bp, synthetic construct
  source 1..17: mol_type = other DNA
gggcttcacagccaccc

SEQ ID NO: 135860 - DNA, 17 bp, synthetic construct
  source 1..17: mol_type = other DNA
ggcttcacagccacccc

SEQ ID NO: 135861 - DNA, 17 bp, synthetic construct
  source 1..17: mol_type = other DNA
gcttcacagccaccccc

SEQ ID NO: 135862 - DNA, 17 bp, synthetic construct
  source 1..17: mol_type = other DNA
cttcacagccaccccct

SEQ ID NO: 135863 - DNA, 17 bp, synthetic construct
  source 1..17: mol_type = other DNA
ttcacagccaccccctc

SEQ ID NO: 135864 - DNA, 17 bp, synthetic construct
  source 1..17: mol_type = other DNA
tcacagccaccccctcc

SEQ ID NO: 135865 - DNA, 17 bp, synthetic construct
  source 1..17: mol_type = other DNA
cacagccaccccctcct

SEQ ID NO: 135866 - DNA, 17 bp, synthetic construct
  source 1..17: mol_type = other DNA
acagccaccccctcctc

SEQ ID NO: 135867 - DNA, 17 bp, synthetic construct
  source 1..17: mol_type = other DNA
cagccaccccctcctcc

SEQ ID NO: 135868 - DNA, 17 bp, synthetic construct
  source 1..17: mol_type = other DNA
agccaccccctcctcca

SEQ ID NO: 135869 - DNA, 17 bp, synthetic construct
  source 1..17: mol_type = other DNA
gccaccccctcctccag

SEQ ID NO: 135870 - DNA, 17 bp, synthetic construct
  source 1..17: mol_type = other DNA
ccaccccctcctccagc

SEQ ID NO: 135871 - DNA, 17 bp, synthetic construct
  source 1..17: mol_type = other DNA
caccccctcctccagcc

SEQ ID NO: 135872 - DNA, 17 bp, synthetic construct
  source 1..17: mol_type = other DNA
accccctcctccagccc

SEQ ID NO: 135873 - DNA, 17 bp, synthetic construct
  source 1..17: mol_type = other DNA
ccccctcctccagccca

SEQ ID NO: 135874 - DNA, 17 bp, synthetic construct
  source 1..17: mol_type = other DNA
cccctcctccagcccag

SEQ ID NO: 135875 - DNA, 17 bp, synthetic construct
  source 1..17: mol_type = other DNA
ccctcctccagcccagg

SEQ ID NO: 135876 - DNA, 17 bp, synthetic construct
  source 1..17: mol_type = other DNA
cctcctccagcccaggg

SEQ ID NO: 135877 - DNA, 17 bp, synthetic construct
  source 1..17: mol_type = other DNA
ctcctccagcccaggga

SEQ ID NO: 135878 - DNA, 17 bp, synthetic construct
  source 1..17: mol_type = other DNA
tcctccagcccagggac

SEQ ID NO: 135879 - DNA, 17 bp, synthetic construct
  source 1..17: mol_type = other DNA
cctccagcccagggacg

SEQ ID NO: 135880 - DNA, 17 bp, synthetic construct
  source 1..17: mol_type = other DNA
ctccagcccagggacgg

SEQ ID NO: 135881 - DNA, 17 bp, synthetic construct
  source 1..17: mol_type = other DNA
tccagcccagggacggc

SEQ ID NO: 135882 - DNA, 17 bp, synthetic construct
  source 1..17: mol_type = other DNA
ccagcccagggacggca

SEQ ID NO: 135883 - DNA, 17 bp, synthetic construct
  source 1..17: mol_type = other DNA
cagcccagggacggcac

SEQ ID NO: 135884 - DNA, 17 bp, synthetic construct
  source 1..17: mol_type = other DNA
agcccagggacggcact

SEQ ID NO: 135885 - DNA, 17 bp, synthetic construct
  source 1..17: mol_type = other DNA
gcccagggacggcactc

SEQ ID NO: 135886 - DNA, 17 bp, synthetic construct
  source 1..17: mol_type = other DNA
cccagggacggcactca

SEQ ID NO: 135887 - DNA, 17 bp, synthetic construct
  source 1..17: mol_type = other DNA
ccagggacggcactcac

SEQ ID NO: 135888 - DNA, 17 bp, synthetic construct
  source 1..17: mol_type = other DNA
cagggacggcactcacg

SEQ ID NO: 135889 - DNA, 17 bp, synthetic construct
  source 1..17: mol_type = other DNA
agggacggcactcacgc

SEQ ID NO: 135890 - DNA, 17 bp, synthetic construct
  source 1..17: mol_type = other DNA
gggacggcactcacgcc

SEQ ID NO: 135891 - DNA, 17 bp, synthetic construct
  source 1..17: mol_type = other DNA
ggacggcactcacgcct

SEQ ID NO: 135892 - DNA, 17 bp, synthetic construct
  source 1..17: mol_type = other DNA
gacggcactcacgcctc

SEQ ID NO: 135893 - DNA, 17 bp, synthetic construct
  source 1..17: mol_type = other DNA
acggcactcacgcctcc

SEQ ID NO: 135894 - DNA, 17 bp, synthetic construct
  source 1..17: mol_type = other DNA
cggcactcacgcctcca

SEQ ID NO: 135895 - DNA, 17 bp, synthetic construct
  source 1..17: mol_type = other DNA
ggcactcacgcctccag

SEQ ID NO: 135896 - DNA, 17 bp, synthetic construct
  source 1..17: mol_type = other DNA
gcactcacgcctccagt

SEQ ID NO: 135897 - DNA, 17 bp, synthetic construct
  source 1..17: mol_type = other DNA
cactcacgcctccagtg

SEQ ID NO: 135898 - DNA, 17 bp, synthetic construct
  source 1..17: mol_type = other DNA
actcacgcctccagtgt

SEQ ID NO: 135899 - DNA, 17 bp, synthetic construct
  source 1..17: mol_type = other DNA
ctcacgcctccagtgtg

SEQ ID NO: 135900 - DNA, 17 bp, synthetic construct
  source 1..17: mol_type = other DNA
tcacgcctccagtgtgg

SEQ ID NO: 135901 - DNA, 17 bp, synthetic construct
  source 1..17: mol_type = other DNA
cacgcctccagtgtgga

SEQ ID NO: 135902 - DNA, 17 bp, synthetic construct
  source 1..17: mol_type = other DNA
acgcctccagtgtggat

SEQ ID NO: 135903 - DNA, 17 bp, synthetic construct
  source 1..17: mol_type = other DNA
cgcctccagtgtggatc

SEQ ID NO: 135904 - DNA, 17 bp, synthetic construct
  source 1..17: mol_type = other DNA
gcctccagtgtggatca

SEQ ID NO: 135905 - DNA, 17 bp, synthetic construct
  source 1..17: mol_type = other DNA
cctccagtgtggatcag

SEQ ID NO: 135906 - DNA, 17 bp, synthetic construct
  source 1..17: mol_type = other DNA
ctccagtgtggatcagc

SEQ ID NO: 135907 - DNA, 17 bp, synthetic construct
  source 1..17: mol_type = other DNA
tccagtgtggatcagca

SEQ ID NO: 135908 - DNA, 17 bp, synthetic construct
  source 1..17: mol_type = other DNA
ccagtgtggatcagcac

SEQ ID NO: 135909 - DNA, 17 bp, synthetic construct
  source 1..17: mol_type = other DNA
cagtgtggatcagcaca

SEQ ID NO: 135910 - DNA, 17 bp, synthetic construct
  source 1..17: mol_type = other DNA
agtgtggatcagcacaa

SEQ ID NO: 135911 - DNA, 17 bp, synthetic construct
  source 1..17: mol_type = other DNA
gtgtggatcagcacaac

SEQ ID NO: 135912 - DNA, 17 bp, synthetic construct
  source 1..17: mol_type = other DNA
tgtggatcagcacaacc

SEQ ID NO: 135913 - DNA, 17 bp, synthetic construct
  source 1..17: mol_type = other DNA
gtggatcagcacaacca

SEQ ID NO: 135914 - DNA, 17 bp, synthetic construct
  source 1..17: mol_type = other DNA
tggatcagcacaaccac

SEQ ID NO: 135915 - DNA, 17 bp, synthetic construct
  source 1..17: mol_type = other DNA
ggatcagcacaaccacc

SEQ ID NO: 135916 - DNA, 17 bp, synthetic construct
  source 1..17: mol_type = other DNA
gatcagcacaaccacca

SEQ ID NO: 135917 - DNA, 17 bp, synthetic construct
  source 1..17: mol_type = other DNA
atcagcacaaccaccac

SEQ ID NO: 135918 - DNA, 17 bp, synthetic construct
  source 1..17: mol_type = other DNA
tcagcacaaccaccaca

SEQ ID NO: 135919 - DNA, 17 bp, synthetic construct
  source 1..17: mol_type = other DNA
cagcacaaccaccacac

SEQ ID NO: 135920 - DNA, 17 bp, synthetic construct
  source 1..17: mol_type = other DNA
agcacaaccaccacacc

SEQ ID NO: 135921 - DNA, 17 bp, synthetic construct
  source 1..17: mol_type = other DNA
gcacaaccaccacaccc

SEQ ID NO: 135922 - DNA, 17 bp, synthetic construct
  source 1..17: mol_type = other DNA
cacaaccaccacaccca

SEQ ID NO: 135923 - DNA, 17 bp, synthetic construct
  source 1..17: mol_type = other DNA
acaaccaccacacccac

SEQ ID NO: 135924 - DNA, 17 bp, synthetic construct
  source 1..17: mol_type = other DNA
caaccaccacacccaca

SEQ ID NO: 135925 - DNA, 17 bp, synthetic construct
  source 1..17: mol_type = other DNA
aaccaccacacccacaa

SEQ ID NO: 135926 - DNA, 17 bp, synthetic construct
  source 1..17: mol_type = other DNA
accaccacacccacaac

SEQ ID NO: 135927 - DNA, 17 bp, synthetic construct
  source 1..17: mol_type = other DNA
ccaccacacccacaacc

SEQ ID NO: 135928 - DNA, 17 bp, synthetic construct
  source 1..17: mol_type = other DNA
caccacacccacaacca

SEQ ID NO: 135929 - DNA, 17 bp, synthetic construct
  source 1..17: mol_type = other DNA
accacacccacaaccac

SEQ ID NO: 135930 - DNA, 17 bp, synthetic construct
  source 1..17: mol_type = other DNA
ccacacccacaaccacc

SEQ ID NO: 135931 - DNA, 17 bp, synthetic construct
  source 1..17: mol_type = other DNA
cacacccacaaccacca

SEQ ID NO: 135932 - DNA, 17 bp, synthetic construct
  source 1..17: mol_type = other DNA
acacccacaaccaccac

SEQ ID NO: 135933 - DNA, 17 bp, synthetic construct
  source 1..17: mol_type = other DNA
cacccacaaccaccaca

SEQ ID NO: 135934 - DNA, 17 bp, synthetic construct
  source 1..17: mol_type = other DNA
acccacaaccaccacac

SEQ ID NO: 135935 - DNA, 17 bp, synthetic construct
  source 1..17: mol_type = other DNA
cccacaaccaccacacc

SEQ ID NO: 135936 - DNA, 17 bp, synthetic construct
  source 1..17: mol_type = other DNA
ccacaaccaccacaccc

SEQ ID NO: 135937 - DNA, 17 bp, synthetic construct
  source 1..17: mol_type = other DNA
cacaaccaccacaccca

SEQ ID NO: 135938 - DNA, 17 bp, synthetic construct
  source 1..17: mol_type = other DNA
acaaccaccacacccac

SEQ ID NO: 135939 - DNA, 17 bp, synthetic construct
  source 1..17: mol_type = other DNA
caaccaccacacccaca

SEQ ID NO: 135940 - DNA, 17 bp, synthetic construct
  source 1..17: mol_type = other DNA
aaccaccacacccacaa

SEQ ID NO: 135941 - DNA, 17 bp, synthetic construct
  source 1..17: mol_type = other DNA
accaccacacccacaac

SEQ ID NO: 135942 - DNA, 17 bp, synthetic construct
  source 1..17: mol_type = other DNA
ccaccacacccacaacc

SEQ ID NO: 135943 - DNA, 17 bp, synthetic construct
  source 1..17: mol_type = other DNA
caccacacccacaacca

SEQ ID NO: 135944 - DNA, 17 bp, synthetic construct
  source 1..17: mol_type = other DNA
accacacccacaaccag

SEQ ID NO: 135945 - DNA, 17 bp, synthetic construct
  source 1..17: mol_type = other DNA
ccacacccacaaccagt

SEQ ID NO: 135946 - DNA, 17 bp, synthetic construct
  source 1..17: mol_type = other DNA
cacacccacaaccagtg

SEQ ID NO: 135947 - DNA, 17 bp, synthetic construct
  source 1..17: mol_type = other DNA
acacccacaaccagtgg

SEQ ID NO: 135948 - DNA, 17 bp, synthetic construct
  source 1..17: mol_type = other DNA
cacccacaaccagtggc

SEQ ID NO: 135949 - DNA, 17 bp, synthetic construct
  source 1..17: mol_type = other DNA
acccacaaccagtggct

SEQ ID NO: 135950 - DNA, 17 bp, synthetic construct
  source 1..17: mol_type = other DNA
cccacaaccagtggctc

SEQ ID NO: 135951 - DNA, 17 bp, synthetic construct
  source 1..17: mol_type = other DNA
ccacaaccagtggctcc

SEQ ID NO: 135952 - DNA, 17 bp, synthetic construct
  source 1..17: mol_type = other DNA
cacaaccagtggctcca

SEQ ID NO: 135953 - DNA, 17 bp, synthetic construct
  source 1..17: mol_type = other DNA
acaaccagtggctccac

SEQ ID NO: 135954 - DNA, 17 bp, synthetic construct
  source 1..17: mol_type = other DNA
caaccagtggctccacg

SEQ ID NO: 135955 - DNA, 17 bp, synthetic construct
  source 1..17: mol_type = other DNA
aaccagtggctccacgg

SEQ ID NO: 135956 - DNA, 17 bp, synthetic construct
  source 1..17: mol_type = other DNA
accagtggctccacggt

SEQ ID NO: 135957 - DNA, 17 bp, synthetic construct
  source 1..17: mol_type = other DNA
ccagtggctccacggtg

SEQ ID NO: 135958 - DNA, 17 bp, synthetic construct
  source 1..17: mol_type = other DNA
cagtggctccacggtga

SEQ ID NO: 135959 - DNA, 17 bp, synthetic construct
  source 1..17: mol_type = other DNA
agtggctccacggtgac

SEQ ID NO: 135960 - DNA, 17 bp, synthetic construct
  source 1..17: mol_type = other DNA
gtggctccacggtgacc

SEQ ID NO: 135961 - DNA, 17 bp, synthetic construct
  source 1..17: mol_type = other DNA
tggctccacggtgaccc

SEQ ID NO: 135962 - DNA, 17 bp, synthetic construct
  source 1..17: mol_type = other DNA
ggctccacggtgacccc

SEQ ID NO: 135963 - DNA, 17 bp, synthetic construct
  source 1..17: mol_type = other DNA
gctccacggtgaccccc

SEQ ID NO: 135964 - DNA, 17 bp, synthetic construct
  source 1..17: mol_type = other DNA
ctccacggtgaccccct

SEQ ID NO: 135965 - DNA, 17 bp, synthetic construct
  source 1..17: mol_type = other DNA
tccacggtgaccccctc

SEQ ID NO: 135966 - DNA, 17 bp, synthetic construct
  source 1..17: mol_type = other DNA
ccacggtgaccccctcc

SEQ ID NO: 135967 - DNA, 17 bp, synthetic construct
  source 1..17: mol_type = other DNA
cacggtgaccccctcct

SEQ ID NO: 135968 - DNA, 17 bp, synthetic construct
  source 1..17: mol_type = other DNA
acggtgaccccctcctc

SEQ ID NO: 135969 - DNA, 17 bp, synthetic construct
  source 1..17: mol_type = other DNA
cggtgaccccctcctcc

SEQ ID NO: 135970 - DNA, 17 bp, synthetic construct
  source 1..17: mol_type = other DNA
ggtgaccccctcctcca

SEQ ID NO: 135971 - DNA, 17 bp, synthetic construct
  source 1..17: mol_type = other DNA
gtgaccccctcctccat

SEQ ID NO: 135972 - DNA, 17 bp, synthetic construct
  source 1..17: mol_type = other DNA
tgaccccctcctccatc

SEQ ID NO: 135973 - DNA, 17 bp, synthetic construct
  source 1..17: mol_type = other DNA
gaccccctcctccatcc

SEQ ID NO: 135974 - DNA, 17 bp, synthetic construct
  source 1..17: mol_type = other DNA
accccctcctccatccc

SEQ ID NO: 135975 - DNA, 17 bp, synthetic construct
  source 1..17: mol_type = other DNA
ccccctcctccatcccg

SEQ ID NO: 135976 - DNA, 17 bp, synthetic construct
  source 1..17: mol_type = other DNA
cccctcctccatcccgg

SEQ ID NO: 135977 - DNA, 17 bp, synthetic construct
  source 1..17: mol_type = other DNA
ccctcctccatcccggg

SEQ ID NO: 135978 - DNA, 17 bp, synthetic construct
  source 1..17: mol_type = other DNA
cctcctccatcccgggg

SEQ ID NO: 135979 - DNA, 17 bp, synthetic construct
  source 1..17: mol_type = other DNA
ctcctccatcccgggga

SEQ ID NO: 135980 - DNA, 17 bp, synthetic construct
  source 1..17: mol_type = other DNA
tcctccatcccggggac

SEQ ID NO: 135981 - DNA, 17 bp, synthetic construct
  source 1..17: mol_type = other DNA
cctccatcccggggacc

SEQ ID NO: 135982 - DNA, 17 bp, synthetic construct
  source 1..17: mol_type = other DNA
ctccatcccggggacca

SEQ ID NO: 135983 - DNA, 17 bp, synthetic construct
  source 1..17: mol_type = other DNA
tccatcccggggaccac

SEQ ID NO: 135984 - DNA, 17 bp, synthetic construct
  source 1..17: mol_type = other DNA
ccatcccggggaccacc

SEQ ID NO: 135985 - DNA, 17 bp, synthetic construct
  source 1..17: mol_type = other DNA
catcccggggaccaccc

SEQ ID NO: 135986 - DNA, 17 bp, synthetic construct
  source 1..17: mol_type = other DNA
atcccggggaccaccca

SEQ ID NO: 135987 - DNA, 17 bp, synthetic construct
  source 1..17: mol_type = other DNA
tcccggggaccacccac

SEQ ID NO: 135988 - DNA, 17 bp, synthetic construct
  source 1..17: mol_type = other DNA
cccggggaccacccaca

SEQ ID NO: 135989 - DNA, 17 bp, synthetic construct
  source 1..17: mol_type = other DNA
ccggggaccacccacac

SEQ ID NO: 135990 - DNA, 17 bp, synthetic construct
  source 1..17: mol_type = other DNA
cggggaccacccacacc

SEQ ID NO: 135991 - DNA, 17 bp, synthetic construct
  source 1..17: mol_type = other DNA
ggggaccacccacaccg

SEQ ID NO: 135992 - DNA, 17 bp, synthetic construct
  source 1..17: mol_type = other DNA
gggaccacccacaccgc

SEQ ID NO: 135993 - DNA, 17 bp, synthetic construct
  source 1..17: mol_type = other DNA
ggaccacccacaccgcc

SEQ ID NO: 135994 - DNA, 17 bp, synthetic construct
  source 1..17: mol_type = other DNA
gaccacccacaccgcca

SEQ ID NO: 135995 - DNA, 17 bp, synthetic construct
  source 1..17: mol_type = other DNA
accacccacaccgccag

SEQ ID NO: 135996 - DNA, 17 bp, synthetic construct
  source 1..17: mol_type = other DNA
ccacccacaccgccaga

SEQ ID NO: 135997 - DNA, 17 bp, synthetic construct
  source 1..17: mol_type = other DNA
cacccacaccgccagag

SEQ ID NO: 135998 - DNA, 17 bp, synthetic construct
  source 1..17: mol_type = other DNA
acccacaccgccagagt

SEQ ID NO: 135999 - DNA, 17 bp, synthetic construct
  source 1..17: mol_type = other DNA
cccacaccgccagagtg

SEQ ID NO: 136000 - DNA, 17 bp, synthetic construct
  source 1..17: mol_type = other DNA
ccacaccgccagagtgc

SEQ ID NO: 136001 - DNA, 17 bp, synthetic construct
  source 1..17: mol_type = other DNA
cacaccgccagagtgct

SEQ ID NO: 136002 - DNA, 17 bp, synthetic construct
  source 1..17: mol_type = other DNA
acaccgccagagtgctg

SEQ ID NO: 136003 - DNA, 17 bp, synthetic construct
  source 1..17: mol_type = other DNA
caccgccagagtgctga

SEQ ID NO: 136004 - DNA, 17 bp, synthetic construct
  source 1..17: mol_type = other DNA
accgccagagtgctgac

SEQ ID NO: 136005 - DNA, 17 bp, synthetic construct
  source 1..17: mol_type = other DNA
ccgccagagtgctgacc

SEQ ID NO: 136006 - DNA, 17 bp, synthetic construct
  source 1..17: mol_type = other DNA
cgccagagtgctgacca

SEQ ID NO: 136007 - DNA, 17 bp, synthetic construct
  source 1..17: mol_type = other DNA
gccagagtgctgaccac

SEQ ID NO: 136008 - DNA, 17 bp, synthetic construct
  source 1..17: mol_type = other DNA
ccagagtgctgaccacc

SEQ ID NO: 136009 - DNA, 17 bp, synthetic construct
  source 1..17: mol_type = other DNA
cagagtgctgaccacca

SEQ ID NO: 136010 - DNA, 17 bp, synthetic construct
  source 1..17: mol_type = other DNA
agagtgctgaccaccac

SEQ ID NO: 136011 - DNA, 17 bp, synthetic construct
  source 1..17: mol_type = other DNA
gagtgctgaccaccacc

SEQ ID NO: 136012 - DNA, 17 bp, synthetic construct
  source 1..17: mol_type = other DNA
agtgctgaccaccacca

SEQ ID NO: 136013 - DNA, 17 bp, synthetic construct
  source 1..17: mol_type = other DNA
gtgctgaccaccaccac

SEQ ID NO: 136014 - DNA, 17 bp, synthetic construct
  source 1..17: mol_type = other DNA
tgctgaccaccaccacc

SEQ ID NO: 136015 - DNA, 17 bp, synthetic construct
  source 1..17: mol_type = other DNA
gctgaccaccaccacca

SEQ ID NO: 136016 - DNA, 17 bp, synthetic construct
  source 1..17: mol_type = other DNA
ctgaccaccaccaccac

SEQ ID NO: 136017 - DNA, 17 bp, synthetic construct
  source 1..17: mol_type = other DNA
tgaccaccaccaccaca

SEQ ID NO: 136018 - DNA, 17 bp, synthetic construct
  source 1..17: mol_type = other DNA
gaccaccaccaccacaa

SEQ ID NO: 136019 - DNA, 17 bp, synthetic construct
  source 1..17: mol_type = other DNA
accaccaccaccacaac

SEQ ID NO: 136020 - DNA, 17 bp, synthetic construct
  source 1..17: mol_type = other DNA
ccaccaccaccacaact

SEQ ID NO: 136021 - DNA, 17 bp, synthetic construct
  source 1..17: mol_type = other DNA
caccaccaccacaactg

SEQ ID NO: 136022 - DNA, 17 bp, synthetic construct
  source 1..17: mol_type = other DNA
accaccaccacaactgt

SEQ ID NO: 136023 - DNA, 17 bp, synthetic construct
  source 1..17: mol_type = other DNA
ccaccaccacaactgtg

SEQ ID NO: 136024 - DNA, 17 bp, synthetic construct
  source 1..17: mol_type = other DNA
caccaccacaactgtgg

SEQ ID NO: 136025 - DNA, 17 bp, synthetic construct
  source 1..17: mol_type = other DNA
accaccacaactgtggc

SEQ ID NO: 136026 - DNA, 17 bp, synthetic construct
  source 1..17: mol_type = other DNA
ccaccacaactgtggcc

SEQ ID NO: 136027 - DNA, 17 bp, synthetic construct
  source 1..17: mol_type = other DNA
caccacaactgtggcca

SEQ ID NO: 136028 - DNA, 17 bp, synthetic construct
  source 1..17: mol_type = other DNA
accacaactgtggccac

SEQ ID NO: 136029 - DNA, 17 bp, synthetic construct
  source 1..17: mol_type = other DNA
ccacaactgtggccact

SEQ ID NO: 136030 - DNA, 17 bp, synthetic construct
  source 1..17: mol_type = other DNA
cacaactgtggccactg

SEQ ID NO: 136031 - DNA, 17 bp, synthetic construct
  source 1..17: mol_type = other DNA
acaactgtggccactgg

SEQ ID NO: 136032 - DNA, 17 bp, synthetic construct
  source 1..17: mol_type = other DNA
caactgtggccactggt

SEQ ID NO: 136033 - DNA, 17 bp, synthetic construct
  source 1..17: mol_type = other DNA
aactgtggccactggtt

SEQ ID NO: 136034 - DNA, 17 bp, synthetic construct
  source 1..17: mol_type = other DNA
actgtggccactggttc

SEQ ID NO: 136035 - DNA, 17 bp, synthetic construct
  source 1..17: mol_type = other DNA
ctgtggccactggttct

SEQ ID NO: 136036 - DNA, 17 bp, synthetic construct
  source 1..17: mol_type = other DNA
tgtggccactggttcta

SEQ ID NO: 136037 - DNA, 17 bp, synthetic construct
  source 1..17: mol_type = other DNA
gtggccactggttctat

SEQ ID NO: 136038 - DNA, 17 bp, synthetic construct
  source 1..17: mol_type = other DNA
tggccactggttctatg

SEQ ID NO: 136039 - DNA, 17 bp, synthetic construct
  source 1..17: mol_type = other DNA
ggccactggttctatgg

SEQ ID NO: 136040 - DNA, 17 bp, synthetic construct
  source 1..17: mol_type = other DNA
gccactggttctatggc

SEQ ID NO: 136041 - DNA, 17 bp, synthetic construct
  source 1..17: mol_type = other DNA
ccactggttctatggca

SEQ ID NO: 136042 - DNA, 17 bp, synthetic construct
  source 1..17: mol_type = other DNA
cactggttctatggcaa

SEQ ID NO: 136043 - DNA, 17 bp, synthetic construct
  source 1..17: mol_type = other DNA
actggttctatggcaac

SEQ ID NO: 136044 - DNA, 17 bp, synthetic construct
  source 1..17: mol_type = other DNA
ctggttctatggcaaca

SEQ ID NO: 136045 - DNA, 17 bp, synthetic construct
  source 1..17: mol_type = other DNA
tggttctatggcaacac

SEQ ID NO: 136046 - DNA, 17 bp, synthetic construct
  source 1..17: mol_type = other DNA
ggttctatggcaacacc

SEQ ID NO: 136047 - DNA, 17 bp, synthetic construct
  source 1..17: mol_type = other DNA
gttctatggcaacaccc

SEQ ID NO: 136048 - DNA, 17 bp, synthetic construct
  source 1..17: mol_type = other DNA
ttctatggcaacaccct

SEQ ID NO: 136049 - DNA, 17 bp, synthetic construct
  source 1..17: mol_type = other DNA
tctatggcaacaccctc

SEQ ID NO: 136050 - DNA, 17 bp, synthetic construct
  source 1..17: mol_type = other DNA
ctatggcaacaccctcc

SEQ ID NO: 136051 - DNA, 17 bp, synthetic construct
  source 1..17: mol_type = other DNA
tatggcaacaccctcct

SEQ ID NO: 136052 - DNA, 17 bp, synthetic construct
  source 1..17: mol_type = other DNA
atggcaacaccctcctc

SEQ ID NO: 136053 - DNA, 17 bp, synthetic construct
  source 1..17: mol_type = other DNA
tggcaacaccctcctct

SEQ ID NO: 136054 - DNA, 17 bp, synthetic construct
  source 1..17: mol_type = other DNA
ggcaacaccctcctcta

SEQ ID NO: 136055 - DNA, 17 bp, synthetic construct
  source 1..17: mol_type = other DNA
gcaacaccctcctctag

SEQ ID NO: 136056 - DNA, 17 bp, synthetic construct
  source 1..17: mol_type = other DNA
caacaccctcctctagc

SEQ ID NO: 136057 - DNA, 17 bp, synthetic construct
  source 1..17: mol_type = other DNA
aacaccctcctctagca

SEQ ID NO: 136058 - DNA, 17 bp, synthetic construct
  source 1..17: mol_type = other DNA
acaccctcctctagcac

SEQ ID NO: 136059 - DNA, 17 bp, synthetic construct
  source 1..17: mol_type = other DNA
caccctcctctagcaca

SEQ ID NO: 136060 - DNA, 17 bp, synthetic construct
  source 1..17: mol_type = other DNA
accctcctctagcacac

SEQ ID NO: 136061 - DNA, 17 bp, synthetic construct
  source 1..17: mol_type = other DNA
ccctcctctagcacaca

SEQ ID NO: 136062 - DNA, 17 bp, synthetic construct
  source 1..17: mol_type = other DNA
cctcctctagcacacag

SEQ ID NO: 136063 - DNA, 17 bp, synthetic construct
  source 1..17: mol_type = other DNA
ctcctctagcacacaga

SEQ ID NO: 136064 - DNA, 17 bp, synthetic construct
  source 1..17: mol_type = other DNA
tcctctagcacacagac

SEQ ID NO: 136065 - DNA, 17 bp, synthetic construct
  source 1..17: mol_type = other DNA
cctctagcacacagacc

SEQ ID NO: 136066 - DNA, 17 bp, synthetic construct
  source 1..17: mol_type = other DNA
ctctagcacacagacca

SEQ ID NO: 136067 - DNA, 17 bp, synthetic construct
  source 1..17: mol_type = other DNA
tctagcacacagaccag

SEQ ID NO: 136068 - DNA, 17 bp, synthetic construct
  source 1..17: mol_type = other DNA
ctagcacacagaccagt

SEQ ID NO: 136069 - DNA, 17 bp, synthetic construct
  source 1..17: mol_type = other DNA
tagcacacagaccagtg

SEQ ID NO: 136070 - DNA, 17 bp, synthetic construct
  source 1..17: mol_type = other DNA
agcacacagaccagtgg

SEQ ID NO: 136071 - DNA, 17 bp, synthetic construct
  source 1..17: mol_type = other DNA
gcacacagaccagtggt

SEQ ID NO: 136072 - DNA, 17 bp, synthetic construct
  source 1..17: mol_type = other DNA
cacacagaccagtggta

SEQ ID NO: 136073 - DNA, 17 bp, synthetic construct
  source 1..17: mol_type = other DNA
acacagaccagtggtac

SEQ ID NO: 136074 - DNA, 17 bp, synthetic construct
  source 1..17: mol_type = other DNA
cacagaccagtggtact

SEQ ID NO: 136075 - DNA, 17 bp, synthetic construct
  source 1..17: mol_type = other DNA
acagaccagtggtactc

SEQ ID NO: 136076 - DNA, 17 bp, synthetic construct
  source 1..17: mol_type = other DNA
cagaccagtggtactcc

SEQ ID NO: 136077 - DNA, 17 bp, synthetic construct
  source 1..17: mol_type = other DNA
agaccagtggtactccc

SEQ ID NO: 136078 - DNA, 17 bp, synthetic construct
  source 1..17: mol_type = other DNA
gaccagtggtactcccc

SEQ ID NO: 136079 - DNA, 17 bp, synthetic construct
  source 1..17: mol_type = other DNA
accagtggtactccccc

SEQ ID NO: 136080 - DNA, 17 bp, synthetic construct
  source 1..17: mol_type = other DNA
ccagtggtactccccca

SEQ ID NO: 136081 - DNA, 17 bp, synthetic construct
  source 1..17: mol_type = other DNA
cagtggtactcccccat

SEQ ID NO: 136082 - DNA, 17 bp, synthetic construct
  source 1..17: mol_type = other DNA
agtggtactcccccatc

SEQ ID NO: 136083 - DNA, 17 bp, synthetic construct
  source 1..17: mol_type = other DNA
gtggtactcccccatca

SEQ ID NO: 136084 - DNA, 17 bp, synthetic construct
  source 1..17: mol_type = other DNA
tggtactcccccatcac

SEQ ID NO: 136085 - DNA, 17 bp, synthetic construct
  source 1..17: mol_type = other DNA
ggtactcccccatcact

SEQ ID NO: 136086 - DNA, 17 bp, synthetic construct
  source 1..17: mol_type = other DNA
gtactcccccatcactg

SEQ ID NO: 136087 - DNA, 17 bp, synthetic construct
  source 1..17: mol_type = other DNA
tactcccccatcactga

SEQ ID NO: 136088 - DNA, 17 bp, synthetic construct
  source 1..17: mol_type = other DNA
actcccccatcactgac

SEQ ID NO: 136089 - DNA, 17 bp, synthetic construct
  source 1..17: mol_type = other DNA
ctcccccatcactgacc

SEQ ID NO: 136090 - DNA, 17 bp, synthetic construct
  source 1..17: mol_type = other DNA
tcccccatcactgacca

SEQ ID NO: 136091 - DNA, 17 bp, synthetic construct
  source 1..17: mol_type = other DNA
cccccatcactgaccac

SEQ ID NO: 136092 - DNA, 17 bp, synthetic construct
  source 1..17: mol_type = other DNA
ccccatcactgaccacc

SEQ ID NO: 136093 - DNA, 17 bp, synthetic construct
  source 1..17: mol_type = other DNA
cccatcactgaccacca

SEQ ID NO: 136094 - DNA, 17 bp, synthetic construct
  source 1..17: mol_type = other DNA
ccatcactgaccaccac

SEQ ID NO: 136095 - DNA, 17 bp, synthetic construct
  source 1..17: mol_type = other DNA
catcactgaccaccacg

SEQ ID NO: 136096 - DNA, 17 bp, synthetic construct
  source 1..17: mol_type = other DNA
atcactgaccaccacgg

SEQ ID NO: 136097 - DNA, 17 bp, synthetic construct
  source 1..17: mol_type = other DNA
tcactgaccaccacggc

SEQ ID NO: 136098 - DNA, 17 bp, synthetic construct
  source 1..17: mol_type = other DNA
cactgaccaccacggcc

SEQ ID NO: 136099 - DNA, 17 bp, synthetic construct
  source 1..17: mol_type = other DNA
actgaccaccacggcca

SEQ ID NO: 136100 - DNA, 17 bp, synthetic construct
  source 1..17: mol_type = other DNA
ctgaccaccacggccac

SEQ ID NO: 136101 - DNA, 17 bp, synthetic construct
  source 1..17: mol_type = other DNA
tgaccaccacggccact

SEQ ID NO: 136102 - DNA, 17 bp, synthetic construct
  source 1..17: mol_type = other DNA
gaccaccacggccacta

SEQ ID NO: 136103 - DNA, 17 bp, synthetic construct
  source 1..17: mol_type = other DNA
accaccacggccactac

SEQ ID NO: 136104 - DNA, 17 bp, synthetic construct
  source 1..17: mol_type = other DNA
ccaccacggccactacg

SEQ ID NO: 136105 - DNA, 17 bp, synthetic construct
  source 1..17: mol_type = other DNA
caccacggccactacga

SEQ ID NO: 136106 - DNA, 17 bp, synthetic construct
  source 1..17: mol_type = other DNA
accacggccactacgat

SEQ ID NO: 136107 - DNA, 17 bp, synthetic construct
  source 1..17: mol_type = other DNA
ccacggccactacgatc

SEQ ID NO: 136108 - DNA, 17 bp, synthetic construct
  source 1..17: mol_type = other DNA
cacggccactacgatca

SEQ ID NO: 136109 - DNA, 17 bp, synthetic construct
  source 1..17: mol_type = other DNA
acggccactacgatcac

SEQ ID NO: 136110 - DNA, 17 bp, synthetic construct
  source 1..17: mol_type = other DNA
cggccactacgatcacg

SEQ ID NO: 136111 - DNA, 17 bp, synthetic construct
  source 1..17: mol_type = other DNA
ggccactacgatcacgg

SEQ ID NO: 136112 - DNA, 17 bp, synthetic construct
  source 1..17: mol_type = other DNA
gccactacgatcacggc

SEQ ID NO: 136113 - DNA, 17 bp, synthetic construct
  source 1..17: mol_type = other DNA
ccactacgatcacggcc

SEQ ID NO: 136114 - DNA, 17 bp, synthetic construct
  source 1..17: mol_type = other DNA
cactacgatcacggcca

SEQ ID NO: 136115 - DNA, 17 bp, synthetic construct
  source 1..17: mol_type = other DNA
actacgatcacggccac

SEQ ID NO: 136116 - DNA, 17 bp, synthetic construct
  source 1..17: mol_type = other DNA
ctacgatcacggccacc

SEQ ID NO: 136117 - DNA, 17 bp, synthetic construct
  source 1..17: mol_type = other DNA
tacgatcacggccaccg

SEQ ID NO: 136118 - DNA, 17 bp, synthetic construct
  source 1..17: mol_type = other DNA
acgatcacggccaccgg

SEQ ID NO: 136119 - DNA, 17 bp, synthetic construct
  source 1..17: mol_type = other DNA
cgatcacggccaccggc

SEQ ID NO: 136120 - DNA, 17 bp, synthetic construct
  source 1..17: mol_type = other DNA
gatcacggccaccggct

SEQ ID NO: 136121 - DNA, 17 bp, synthetic construct
  source 1..17: mol_type = other DNA
atcacggccaccggctc

SEQ ID NO: 136122 - DNA, 17 bp, synthetic construct
  source 1..17: mol_type = other DNA
tcacggccaccggctcc

SEQ ID NO: 136123 - DNA, 17 bp, synthetic construct
  source 1..17: mol_type = other DNA
cacggccaccggctcca

SEQ ID NO: 136124 - DNA, 17 bp, synthetic construct
  source 1..17: mol_type = other DNA
acggccaccggctccac

SEQ ID NO: 136125 - DNA, 17 bp, synthetic construct
  source 1..17: mol_type = other DNA
cggccaccggctccacc

SEQ ID NO: 136126 - DNA, 17 bp, synthetic construct
  source 1..17: mol_type = other DNA
ggccaccggctccacca

SEQ ID NO: 136127 - DNA, 17 bp, synthetic construct
  source 1..17: mol_type = other DNA
gccaccggctccaccac

SEQ ID NO: 136128 - DNA, 17 bp, synthetic construct
  source 1..17: mol_type = other DNA
ccaccggctccaccacc

SEQ ID NO: 136129 - DNA, 17 bp, synthetic construct
  source 1..17: mol_type = other DNA
caccggctccaccacca

SEQ ID NO: 136130 - DNA, 17 bp, synthetic construct
  source 1..17: mol_type = other DNA
accggctccaccaccaa

SEQ ID NO: 136131 - DNA, 17 bp, synthetic construct
  source 1..17: mol_type = other DNA
ccggctccaccaccaac

SEQ ID NO: 136132 - DNA, 17 bp, synthetic construct
  source 1..17: mol_type = other DNA
cggctccaccaccaacc

SEQ ID NO: 136133 - DNA, 17 bp, synthetic construct
  source 1..17: mol_type = other DNA
ggctccaccaccaaccc

SEQ ID NO: 136134 - DNA, 17 bp, synthetic construct
  source 1..17: mol_type = other DNA
gctccaccaccaacccc

SEQ ID NO: 136135 - DNA, 17 bp, synthetic construct
  source 1..17: mol_type = other DNA
ctccaccaccaacccct

SEQ ID NO: 136136 - DNA, 17 bp, synthetic construct
  source 1..17: mol_type = other DNA
tccaccaccaacccctc

SEQ ID NO: 136137 - DNA, 17 bp, synthetic construct
  source 1..17: mol_type = other DNA
ccaccaccaacccctcc

SEQ ID NO: 136138 - DNA, 17 bp, synthetic construct
  source 1..17: mol_type = other DNA
caccaccaacccctcct

SEQ ID NO: 136139 - DNA, 17 bp, synthetic construct
  source 1..17: mol_type = other DNA
accaccaacccctcctc

SEQ ID NO: 136140 - DNA, 17 bp, synthetic construct
  source 1..17: mol_type = other DNA
ccaccaacccctcctca

SEQ ID NO: 136141 - DNA, 17 bp, synthetic construct
  source 1..17: mol_type = other DNA
caccaacccctcctcaa

SEQ ID NO: 136142 - DNA, 17 bp, synthetic construct
  source 1..17: mol_type = other DNA
accaacccctcctcaac

SEQ ID NO: 136143 - DNA, 17 bp, synthetic construct
  source 1..17: mol_type = other DNA
ccaacccctcctcaact

SEQ ID NO: 136144 - DNA, 17 bp, synthetic construct
  source 1..17: mol_type = other DNA
caacccctcctcaactc

SEQ ID NO: 136145 - DNA, 17 bp, synthetic construct
  source 1..17: mol_type = other DNA
aacccctcctcaactcc

SEQ ID NO: 136146 - DNA, 17 bp, synthetic construct
  source 1..17: mol_type = other DNA
acccctcctcaactcca

SEQ ID NO: 136147 - DNA, 17 bp, synthetic construct
  source 1..17: mol_type = other DNA
cccctcctcaactccag

SEQ ID NO: 136148 - DNA, 17 bp, synthetic construct
  source 1..17: mol_type = other DNA
ccctcctcaactccagg

SEQ ID NO: 136149 - DNA, 17 bp, synthetic construct
  source 1..17: mol_type = other DNA
cctcctcaactccaggg

SEQ ID NO: 136150 - DNA, 17 bp, synthetic construct
  source 1..17: mol_type = other DNA
ctcctcaactccaggga

SEQ ID NO: 136151 - DNA, 17 bp, synthetic construct
  source 1..17: mol_type = other DNA
tcctcaactccagggac

SEQ ID NO: 136152 - DNA, 17 bp, synthetic construct
  source 1..17: mol_type = other DNA
cctcaactccagggaca

SEQ ID NO: 136153 - DNA, 17 bp, synthetic construct
  source 1..17: mol_type = other DNA
ctcaactccagggacaa

SEQ ID NO: 136154 - DNA, 17 bp, synthetic construct
  source 1..17: mol_type = other DNA
tcaactccagggacaac

SEQ ID NO: 136155 - DNA, 17 bp, synthetic construct
  source 1..17: mol_type = other DNA
caactccagggacaaca

SEQ ID NO: 136156 - DNA, 17 bp, synthetic construct
  source 1..17: mol_type = other DNA
aactccagggacaacac

SEQ ID NO: 136157 - DNA, 17 bp, synthetic construct
  source 1..17: mol_type = other DNA
actccagggacaacacc

SEQ ID NO: 136158 - DNA, 17 bp, synthetic construct
  source 1..17: mol_type = other DNA
ctccagggacaacaccc

SEQ ID NO: 136159 - DNA, 17 bp, synthetic construct
  source 1..17: mol_type = other DNA
tccagggacaacaccca

SEQ ID NO: 136160 - DNA, 17 bp, synthetic construct
  source 1..17: mol_type = other DNA
ccagggacaacacccat

SEQ ID NO: 136161 - DNA, 17 bp, synthetic construct
  source 1..17: mol_type = other DNA
cagggacaacacccatc

SEQ ID NO: 136162 - DNA, 17 bp, synthetic construct
  source 1..17: mol_type = other DNA
agggacaacacccatca

SEQ ID NO: 136163 - DNA, 17 bp, synthetic construct
  source 1..17: mol_type = other DNA
gggacaacacccatcac

SEQ ID NO: 136164 - DNA, 17 bp, synthetic construct
  source 1..17: mol_type = other DNA
ggacaacacccatcacc

SEQ ID NO: 136165 - DNA, 17 bp, synthetic construct
  source 1..17: mol_type = other DNA
gacaacacccatcaccc

SEQ ID NO: 136166 - DNA, 17 bp, synthetic construct
  source 1..17: mol_type = other DNA
acaacacccatcacccc

SEQ ID NO: 136167 - DNA, 17 bp, synthetic construct
  source 1..17: mol_type = other DNA
caacacccatcacccca

SEQ ID NO: 136168 - DNA, 17 bp, synthetic construct
  source 1..17: mol_type = other DNA
aacacccatcaccccag

SEQ ID NO: 136169 - DNA, 17 bp, synthetic construct
  source 1..17: mol_type = other DNA
acacccatcaccccagt

SEQ ID NO: 136170 - DNA, 17 bp, synthetic construct
  source 1..17: mol_type = other DNA
cacccatcaccccagtg

SEQ ID NO: 136171 - DNA, 17 bp, synthetic construct
  source 1..17: mol_type = other DNA
acccatcaccccagtgc

SEQ ID NO: 136172 - DNA, 17 bp, synthetic construct
  source 1..17: mol_type = other DNA
cccatcaccccagtgct

SEQ ID NO: 136173 - DNA, 17 bp, synthetic construct
  source 1..17: mol_type = other DNA
ccatcaccccagtgctg

SEQ ID NO: 136174 - DNA, 17 bp, synthetic construct
  source 1..17: mol_type = other DNA
catcaccccagtgctga

SEQ ID NO: 136175 - DNA, 17 bp, synthetic construct
  source 1..17: mol_type = other DNA
atcaccccagtgctgac

SEQ ID NO: 136176 - DNA, 17 bp, synthetic construct
  source 1..17: mol_type = other DNA
tcaccccagtgctgacc

SEQ ID NO: 136177 - DNA, 17 bp, synthetic construct
  source 1..17: mol_type = other DNA
caccccagtgctgacca

SEQ ID NO: 136178 - DNA, 17 bp, synthetic construct
  source 1..17: mol_type = other DNA
accccagtgctgaccag

SEQ ID NO: 136179 - DNA, 17 bp, synthetic construct
  source 1..17: mol_type = other DNA
ccccagtgctgaccagc

SEQ ID NO: 136180 - DNA, 17 bp, synthetic construct
  source 1..17: mol_type = other DNA
cccagtgctgaccagca

SEQ ID NO: 136181 - DNA, 17 bp, synthetic construct
  source 1..17: mol_type = other DNA
ccagtgctgaccagcac

SEQ ID NO: 136182 - DNA, 17 bp, synthetic construct
  source 1..17: mol_type = other DNA
cagtgctgaccagcacg

SEQ ID NO: 136183 - DNA, 17 bp, synthetic construct
  source 1..17: mol_type = other DNA
agtgctgaccagcacgg

SEQ ID NO: 136184 - DNA, 17 bp, synthetic construct
  source 1..17: mol_type = other DNA
gtgctgaccagcacggc

SEQ ID NO: 136185 - DNA, 17 bp, synthetic construct
  source 1..17: mol_type = other DNA
tgctgaccagcacggcc

SEQ ID NO: 136186 - DNA, 17 bp, synthetic construct
  source 1..17: mol_type = other DNA
gctgaccagcacggcca

SEQ ID NO: 136187 - DNA, 17 bp, synthetic construct
  source 1..17: mol_type = other DNA
ctgaccagcacggccac

SEQ ID NO: 136188 - DNA, 17 bp, synthetic construct
  source 1..17: mol_type = other DNA
tgaccagcacggccacc

SEQ ID NO: 136189 - DNA, 17 bp, synthetic construct
  source 1..17: mol_type = other DNA
gaccagcacggccacca

SEQ ID NO: 136190 - DNA, 17 bp, synthetic construct
  source 1..17: mol_type = other DNA
accagcacggccaccac

SEQ ID NO: 136191 - DNA, 17 bp, synthetic construct
  source 1..17: mol_type = other DNA
ccagcacggccaccaca

SEQ ID NO: 136192 - DNA, 17 bp, synthetic construct
  source 1..17: mol_type = other DNA
cagcacggccaccacac

SEQ ID NO: 136193 - DNA, 17 bp, synthetic construct
  source 1..17: mol_type = other DNA
agcacggccaccacacc

SEQ ID NO: 136194 - DNA, 17 bp, synthetic construct
  source 1..17: mol_type = other DNA
gcacggccaccacaccc

SEQ ID NO: 136195 - DNA, 17 bp, synthetic construct
  source 1..17: mol_type = other DNA
cacggccaccacacccg

SEQ ID NO: 136196 - DNA, 17 bp, synthetic construct
  source 1..17: mol_type = other DNA
acggccaccacacccgc

SEQ ID NO: 136197 - DNA, 17 bp, synthetic construct
  source 1..17: mol_type = other DNA
cggccaccacacccgca

SEQ ID NO: 136198 - DNA, 17 bp, synthetic construct
  source 1..17: mol_type = other DNA
ggccaccacacccgcag

SEQ ID NO: 136199 - DNA, 17 bp, synthetic construct
  source 1..17: mol_type = other DNA
gccaccacacccgcagc

SEQ ID NO: 136200 - DNA, 17 bp, synthetic construct
  source 1..17: mol_type = other DNA
ccaccacacccgcagcc

SEQ ID NO: 136201 - DNA, 17 bp, synthetic construct
  source 1..17: mol_type = other DNA
caccacacccgcagcca

SEQ ID NO: 136202 - DNA, 17 bp, synthetic construct
  source 1..17: mol_type = other DNA
accacacccgcagccac

SEQ ID NO: 136203 - DNA, 17 bp, synthetic construct
  source 1..17: mol_type = other DNA
ccacacccgcagccacc

SEQ ID NO: 136204 - DNA, 17 bp, synthetic construct
  source 1..17: mol_type = other DNA
cacacccgcagccacca

SEQ ID NO: 136205 - DNA, 17 bp, synthetic construct
  source 1..17: mol_type = other DNA
acacccgcagccaccag

SEQ ID NO: 136206 - DNA, 17 bp, synthetic construct
  source 1..17: mol_type = other DNA
cacccgcagccaccagc

SEQ ID NO: 136207 - DNA, 17 bp, synthetic construct
  source 1..17: mol_type = other DNA
acccgcagccaccagct

SEQ ID NO: 136208 - DNA, 17 bp, synthetic construct
  source 1..17: mol_type = other DNA
cccgcagccaccagctc

SEQ ID NO: 136209 - DNA, 17 bp, synthetic construct
  source 1..17: mol_type = other DNA
ccgcagccaccagctcc

SEQ ID NO: 136210 - DNA, 17 bp, synthetic construct
  source 1..17: mol_type = other DNA
cgcagccaccagctcca

SEQ ID NO: 136211 - DNA, 17 bp, synthetic construct
  source 1..17: mol_type = other DNA
gcagccaccagctccaa

SEQ ID NO: 136212 - DNA, 17 bp, synthetic construct
  source 1..17: mol_type = other DNA
cagccaccagctccaaa

SEQ ID NO: 136213 - DNA, 17 bp, synthetic construct
  source 1..17: mol_type = other DNA
agccaccagctccaaag

SEQ ID NO: 136214 - DNA, 17 bp, synthetic construct
  source 1..17: mol_type = other DNA
gccaccagctccaaagc

SEQ ID NO: 136215 - DNA, 17 bp, synthetic construct
  source 1..17: mol_type = other DNA
ccaccagctccaaagcc

SEQ ID NO: 136216 - DNA, 17 bp, synthetic construct
  source 1..17: mol_type = other DNA
caccagctccaaagcca

SEQ ID NO: 136217 - DNA, 17 bp, synthetic construct
  source 1..17: mol_type = other DNA
accagctccaaagccac

SEQ ID NO: 136218 - DNA, 17 bp, synthetic construct
  source 1..17: mol_type = other DNA
ccagctccaaagccact

SEQ ID NO: 136219 - DNA, 17 bp, synthetic construct
  source 1..17: mol_type = other DNA
cagctccaaagccactt

SEQ ID NO: 136220 - DNA, 17 bp, synthetic construct
  source 1..17: mol_type = other DNA
agctccaaagccacttc

SEQ ID NO: 136221 - DNA, 17 bp, synthetic construct
  source 1..17: mol_type = other DNA
gctccaaagccacttcc

SEQ ID NO: 136222 - DNA, 17 bp, synthetic construct
  source 1..17: mol_type = other DNA
ctccaaagccacttcct

SEQ ID NO: 136223 - DNA, 17 bp, synthetic construct
  source 1..17: mol_type = other DNA
tccaaagccacttcctc

SEQ ID NO: 136224 - DNA, 17 bp, synthetic construct
  source 1..17: mol_type = other DNA
ccaaagccacttcctcc

SEQ ID NO: 136225 - DNA, 17 bp, synthetic construct
  source 1..17: mol_type = other DNA
caaagccacttcctcct

SEQ ID NO: 136226 - DNA, 17 bp, synthetic construct
  source 1..17: mol_type = other DNA
aaagccacttcctcctc

SEQ ID NO: 136227 - DNA, 17 bp, synthetic construct
  source 1..17: mol_type = other DNA
aagccacttcctcctcc

SEQ ID NO: 136228 - DNA, 17 bp, synthetic construct
  source 1..17: mol_type = other DNA
agccacttcctcctcca

SEQ ID NO: 136229 - DNA, 17 bp, synthetic construct
  source 1..17: mol_type = other DNA
gccacttcctcctccag

SEQ ID NO: 136230 - DNA, 17 bp, synthetic construct
  source 1..17: mol_type = other DNA
ccacttcctcctccagt

SEQ ID NO: 136231 - DNA, 17 bp, synthetic construct
  source 1..17: mol_type = other DNA
cacttcctcctccagtc

SEQ ID NO: 136232 - DNA, 17 bp, synthetic construct
  source 1..17: mol_type = other DNA
acttcctcctccagtcc

SEQ ID NO: 136233 - DNA, 17 bp, synthetic construct
  source 1..17: mol_type = other DNA
cttcctcctccagtcca

SEQ ID NO: 136234 - DNA, 17 bp, synthetic construct
  source 1..17: mol_type = other DNA
ttcctcctccagtccaa

SEQ ID NO: 136235 - DNA, 17 bp, synthetic construct
  source 1..17: mol_type = other DNA
tcctcctccagtccaag

SEQ ID NO: 136236 - DNA, 17 bp, synthetic construct
  source 1..17: mol_type = other DNA
cctcctccagtccaagg

SEQ ID NO: 136237 - DNA, 17 bp, synthetic construct
  source 1..17: mol_type = other DNA
ctcctccagtccaagga

SEQ ID NO: 136238 - DNA, 17 bp, synthetic construct
  source 1..17: mol_type = other DNA
tcctccagtccaaggac

SEQ ID NO: 136239 - DNA, 17 bp, synthetic construct
  source 1..17: mol_type = other DNA
cctccagtccaaggact

SEQ ID NO: 136240 - DNA, 17 bp, synthetic construct
  source 1..17: mol_type = other DNA
ctccagtccaaggactg

SEQ ID NO: 136241 - DNA, 17 bp, synthetic construct
  source 1..17: mol_type = other DNA
tccagtccaaggactgc

SEQ ID NO: 136242 - DNA, 17 bp, synthetic construct
  source 1..17: mol_type = other DNA
ccagtccaaggactgca

SEQ ID NO: 136243 - DNA, 17 bp, synthetic construct
  source 1..17: mol_type = other DNA
cagtccaaggactgcaa

SEQ ID NO: 136244 - DNA, 17 bp, synthetic construct
  source 1..17: mol_type = other DNA
agtccaaggactgcaac

SEQ ID NO: 136245 - DNA, 17 bp, synthetic construct
  source 1..17: mol_type = other DNA
gtccaaggactgcaacc

SEQ ID NO: 136246 - DNA, 17 bp, synthetic construct
  source 1..17: mol_type = other DNA
tccaaggactgcaacca

SEQ ID NO: 136247 - DNA, 17 bp, synthetic construct
  source 1..17: mol_type = other DNA
ccaaggactgcaaccac

SEQ ID NO: 136248 - DNA, 17 bp, synthetic construct
  source 1..17: mol_type = other DNA
caaggactgcaaccacc

SEQ ID NO: 136249 - DNA, 17 bp, synthetic construct
  source 1..17: mol_type = other DNA
aaggactgcaaccaccc

SEQ ID NO: 136250 - DNA, 17 bp, synthetic construct
  source 1..17: mol_type = other DNA
aggactgcaaccaccct

SEQ ID NO: 136251 - DNA, 17 bp, synthetic construct
  source 1..17: mol_type = other DNA
ggactgcaaccaccctt

SEQ ID NO: 136252 - DNA, 17 bp, synthetic construct
  source 1..17: mol_type = other DNA
gactgcaaccacccttc

SEQ ID NO: 136253 - DNA, 17 bp, synthetic construct
  source 1..17: mol_type = other DNA
actgcaaccacccttcc

SEQ ID NO: 136254 - DNA, 17 bp, synthetic construct
  source 1..17: mol_type = other DNA
ctgcaaccacccttcca

SEQ ID NO: 136255 - DNA, 17 bp, synthetic construct
  source 1..17: mol_type = other DNA
tgcaaccacccttccag

SEQ ID NO: 136256 - DNA, 17 bp, synthetic construct
  source 1..17: mol_type = other DNA
gcaaccacccttccagt

SEQ ID NO: 136257 - DNA, 17 bp, synthetic construct
  source 1..17: mol_type = other DNA
caaccacccttccagtg

SEQ ID NO: 136258 - DNA, 17 bp, synthetic construct
  source 1..17: mol_type = other DNA
aaccacccttccagtgc

SEQ ID NO: 136259 - DNA, 17 bp, synthetic construct
  source 1..17: mol_type = other DNA
accacccttccagtgct

SEQ ID NO: 136260 - DNA, 17 bp, synthetic construct
  source 1..17: mol_type = other DNA
ccacccttccagtgctg

SEQ ID NO: 136261 - DNA, 17 bp, synthetic construct
  source 1..17: mol_type = other DNA
cacccttccagtgctga

SEQ ID NO: 136262 - DNA, 17 bp, synthetic construct
  source 1..17: mol_type = other DNA
acccttccagtgctgac

SEQ ID NO: 136263 - DNA, 17 bp, synthetic construct
  source 1..17: mol_type = other DNA
cccttccagtgctgaca

SEQ ID NO: 136264 - DNA, 17 bp, synthetic construct
  source 1..17: mol_type = other DNA
ccttccagtgctgacaa

SEQ ID NO: 136265 - DNA, 17 bp, synthetic construct
  source 1..17: mol_type = other DNA
cttccagtgctgacaag

SEQ ID NO: 136266 - DNA, 17 bp, synthetic construct
  source 1..17: mol_type = other DNA
ttccagtgctgacaagc

SEQ ID NO: 136267 - DNA, 17 bp, synthetic construct
  source 1..17: mol_type = other DNA
tccagtgctgacaagca

SEQ ID NO: 136268 - DNA, 17 bp, synthetic construct
  source 1..17: mol_type = other DNA
ccagtgctgacaagcac

SEQ ID NO: 136269 - DNA, 17 bp, synthetic construct
  source 1..17: mol_type = other DNA
cagtgctgacaagcaca

SEQ ID NO: 136270 - DNA, 17 bp, synthetic construct
  source 1..17: mol_type = other DNA
agtgctgacaagcacag

SEQ ID NO: 136271 - DNA, 17 bp, synthetic construct
  source 1..17: mol_type = other DNA
gtgctgacaagcacagc

SEQ ID NO: 136272 - DNA, 17 bp, synthetic construct
  source 1..17: mol_type = other DNA
tgctgacaagcacagcc

SEQ ID NO: 136273 - DNA, 17 bp, synthetic construct
  source 1..17: mol_type = other DNA
gctgacaagcacagcca

SEQ ID NO: 136274 - DNA, 17 bp, synthetic construct
  source 1..17: mol_type = other DNA
ctgacaagcacagccac

SEQ ID NO: 136275 - DNA, 17 bp, synthetic construct
  source 1..17: mol_type = other DNA
tgacaagcacagccaca

SEQ ID NO: 136276 - DNA, 17 bp, synthetic construct
  source 1..17: mol_type = other DNA
gacaagcacagccacaa

SEQ ID NO: 136277 - DNA, 17 bp, synthetic construct
  source 1..17: mol_type = other DNA
acaagcacagccacaaa

SEQ ID NO: 136278 - DNA, 17 bp, synthetic construct
  source 1..17: mol_type = other DNA
caagcacagccacaaaa

SEQ ID NO: 136279 - DNA, 17 bp, synthetic construct
  source 1..17: mol_type = other DNA
aagcacagccacaaaat

SEQ ID NO: 136280 - DNA, 17 bp, synthetic construct
  source 1..17: mol_type = other DNA
agcacagccacaaaatc

SEQ ID NO: 136281 - DNA, 17 bp, synthetic construct
  source 1..17: mol_type = other DNA
gcacagccacaaaatcc

SEQ ID NO: 136282 - DNA, 17 bp, synthetic construct
  source 1..17: mol_type = other DNA
cacagccacaaaatcca

SEQ ID NO: 136283 - DNA, 17 bp, synthetic construct
  source 1..17: mol_type = other DNA
acagccacaaaatccac

SEQ ID NO: 136284 - DNA, 17 bp, synthetic construct
  source 1..17: mol_type = other DNA
cagccacaaaatccaca

SEQ ID NO: 136285 - DNA, 17 bp, synthetic construct
  source 1..17: mol_type = other DNA
agccacaaaatccacag

SEQ ID NO: 136286 - DNA, 17 bp, synthetic construct
  source 1..17: mol_type = other DNA
gccacaaaatccacagc

SEQ ID NO: 136287 - DNA, 17 bp, synthetic construct
  source 1..17: mol_type = other DNA
ccacaaaatccacagct

SEQ ID NO: 136288 - DNA, 17 bp, synthetic construct
  source 1..17: mol_type = other DNA
cacaaaatccacagcta

SEQ ID NO: 136289 - DNA, 17 bp, synthetic construct
  source 1..17: mol_type = other DNA
acaaaatccacagctac

SEQ ID NO: 136290 - DNA, 17 bp, synthetic construct
  source 1..17: mol_type = other DNA
caaaatccacagctacc

SEQ ID NO: 136291 - DNA, 17 bp, synthetic construct
  source 1..17: mol_type = other DNA
aaaatccacagctacca

SEQ ID NO: 136292 - DNA, 17 bp, synthetic construct
  source 1..17: mol_type = other DNA
aaatccacagctaccag

SEQ ID NO: 136293 - DNA, 17 bp, synthetic construct
  source 1..17: mol_type = other DNA
aatccacagctaccagc

SEQ ID NO: 136294 - DNA, 17 bp, synthetic construct
  source 1..17: mol_type = other DNA
atccacagctaccagct

SEQ ID NO: 136295 - DNA, 17 bp, synthetic construct
  source 1..17: mol_type = other DNA
tccacagctaccagctt

SEQ ID NO: 136296 - DNA, 17 bp, synthetic construct
  source 1..17: mol_type = other DNA
ccacagctaccagcttt

SEQ ID NO: 136297 - DNA, 17 bp, synthetic construct
  source 1..17: mol_type = other DNA
cacagctaccagcttta

SEQ ID NO: 136298 - DNA, 17 bp, synthetic construct
  source 1..17: mol_type = other DNA
acagctaccagctttac

SEQ ID NO: 136299 - DNA, 17 bp, synthetic construct
  source 1..17: mol_type = other DNA
cagctaccagctttaca

SEQ ID NO: 136300 - DNA, 17 bp, synthetic construct
  source 1..17: mol_type = other DNA
agctaccagctttacac

SEQ ID NO: 136301 - DNA, 17 bp, synthetic construct
  source 1..17: mol_type = other DNA
gctaccagctttacacc

SEQ ID NO: 136302 - DNA, 17 bp, synthetic construct
  source 1..17: mol_type = other DNA
ctaccagctttacaccc

SEQ ID NO: 136303 - DNA, 17 bp, synthetic construct
  source 1..17: mol_type = other DNA
taccagctttacaccca

SEQ ID NO: 136304 - DNA, 17 bp, synthetic construct
  source 1..17: mol_type = other DNA
accagctttacacccat

SEQ ID NO: 136305 - DNA, 17 bp, synthetic construct
  source 1..17: mol_type = other DNA
ccagctttacacccatc

SEQ ID NO: 136306 - DNA, 17 bp, synthetic construct
  source 1..17: mol_type = other DNA
cagctttacacccatcc

SEQ ID NO: 136307 - DNA, 17 bp, synthetic construct
  source 1..17: mol_type = other DNA
agctttacacccatccc

SEQ ID NO: 136308 - DNA, 17 bp, synthetic construct
  source 1..17: mol_type = other DNA
gctttacacccatcccc

SEQ ID NO: 136309 - DNA, 17 bp, synthetic construct
  source 1..17: mol_type = other DNA
ctttacacccatcccct

SEQ ID NO: 136310 - DNA, 17 bp, synthetic construct
  source 1..17: mol_type = other DNA
tttacacccatcccctc

SEQ ID NO: 136311 - DNA, 17 bp, synthetic construct
  source 1..17: mol_type = other DNA
ttacacccatcccctcc

SEQ ID NO: 136312 - DNA, 17 bp, synthetic construct
  source 1..17: mol_type = other DNA
tacacccatcccctcct

SEQ ID NO: 136313 - DNA, 17 bp, synthetic construct
  source 1..17: mol_type = other DNA
acacccatcccctcctc

SEQ ID NO: 136314 - DNA, 17 bp, synthetic construct
  source 1..17: mol_type = other DNA
cacccatcccctcctcc

SEQ ID NO: 136315 - DNA, 17 bp, synthetic construct
  source 1..17: mol_type = other DNA
acccatcccctcctcca

SEQ ID NO: 136316 - DNA, 17 bp, synthetic construct
  source 1..17: mol_type = other DNA
cccatcccctcctccac

SEQ ID NO: 136317 - DNA, 17 bp, synthetic construct
  source 1..17: mol_type = other DNA
ccatcccctcctccacc

SEQ ID NO: 136318 - DNA, 17 bp, synthetic construct
  source 1..17: mol_type = other DNA
catcccctcctccaccc

SEQ ID NO: 136319 - DNA, 17 bp, synthetic construct
  source 1..17: mol_type = other DNA
atcccctcctccaccct

SEQ ID NO: 136320 - DNA, 17 bp, synthetic construct
  source 1..17: mol_type = other DNA
tcccctcctccaccctg

SEQ ID NO: 136321 - DNA, 17 bp, synthetic construct
  source 1..17: mol_type = other DNA
cccctcctccaccctgt

SEQ ID NO: 136322 - DNA, 17 bp, synthetic construct
  source 1..17: mol_type = other DNA
ccctcctccaccctgtg

SEQ ID NO: 136323 - DNA, 17 bp, synthetic construct
  source 1..17: mol_type = other DNA
cctcctccaccctgtgg

SEQ ID NO: 136324 - DNA, 17 bp, synthetic construct
  source 1..17: mol_type = other DNA
ctcctccaccctgtgga

SEQ ID NO: 136325 - DNA, 17 bp, synthetic construct
  source 1..17: mol_type = other DNA
tcctccaccctgtggac

SEQ ID NO: 136326 - DNA, 17 bp, synthetic construct
  source 1..17: mol_type = other DNA
cctccaccctgtggacc

SEQ ID NO: 136327 - DNA, 17 bp, synthetic construct
  source 1..17: mol_type = other DNA
ctccaccctgtggacca

SEQ ID NO: 136328 - DNA, 17 bp, synthetic construct
  source 1..17: mol_type = other DNA
tccaccctgtggaccac

SEQ ID NO: 136329 - DNA, 17 bp, synthetic construct
  source 1..17: mol_type = other DNA
ccaccctgtggaccacg

SEQ ID NO: 136330 - DNA, 17 bp, synthetic construct
  source 1..17: mol_type = other DNA
caccctgtggaccacgt

SEQ ID NO: 136331 - DNA, 17 bp, synthetic construct
  source 1..17: mol_type = other DNA
accctgtggaccacgtg

SEQ ID NO: 136332 - DNA, 17 bp, synthetic construct
  source 1..17: mol_type = other DNA
ccctgtggaccacgtgg

SEQ ID NO: 136333 - DNA, 17 bp, synthetic construct
  source 1..17: mol_type = other DNA
cctgtggaccacgtgga

SEQ ID NO: 136334 - DNA, 17 bp, synthetic construct
  source 1..17: mol_type = other DNA
ctgtggaccacgtggac

SEQ ID NO: 136335 - DNA, 17 bp, synthetic construct
  source 1..17: mol_type = other DNA
tgtggaccacgtggacc

SEQ ID NO: 136336 - DNA, 17 bp, synthetic construct
  source 1..17: mol_type = other DNA
gtggaccacgtggaccg

SEQ ID NO: 136337 - DNA, 17 bp, synthetic construct
  source 1..17: mol_type = other DNA
tggaccacgtggaccgt

SEQ ID NO: 136338 - DNA, 17 bp, synthetic construct
  source 1..17: mol_type = other DNA
ggaccacgtggaccgtc

SEQ ID NO: 136339 - DNA, 17 bp, synthetic construct
  source 1..17: mol_type = other DNA
gaccacgtggaccgtcc

SEQ ID NO: 136340 - DNA, 17 bp, synthetic construct
  source 1..17: mol_type = other DNA
accacgtggaccgtccc

SEQ ID NO: 136341 - DNA, 17 bp, synthetic construct
  source 1..17: mol_type = other DNA
ccacgtggaccgtccca

SEQ ID NO: 136342 - DNA, 17 bp, synthetic construct
  source 1..17: mol_type = other DNA
cacgtggaccgtcccag

SEQ ID NO: 136343 - DNA, 17 bp, synthetic construct
  source 1..17: mol_type = other DNA
acgtggaccgtcccagc

SEQ ID NO: 136344 - DNA, 17 bp, synthetic construct
  source 1..17: mol_type = other DNA
cgtggaccgtcccagca

SEQ ID NO: 136345 - DNA, 17 bp, synthetic construct
  source 1..17: mol_type = other DNA
gtggaccgtcccagcac

SEQ ID NO: 136346 - DNA, 17 bp, synthetic construct
  source 1..17: mol_type = other DNA
tggaccgtcccagcaca

SEQ ID NO: 136347 - DNA, 17 bp, synthetic construct
  source 1..17: mol_type = other DNA
ggaccgtcccagcacag

SEQ ID NO: 136348 - DNA, 17 bp, synthetic construct
  source 1..17: mol_type = other DNA
gaccgtcccagcacaga

SEQ ID NO: 136349 - DNA, 17 bp, synthetic construct
  source 1..17: mol_type = other DNA
accgtcccagcacagac

SEQ ID NO: 136350 - DNA, 17 bp, synthetic construct
  source 1..17: mol_type = other DNA
ccgtcccagcacagacc

SEQ ID NO: 136351 - DNA, 17 bp, synthetic construct
  source 1..17: mol_type = other DNA
cgtcccagcacagacca

SEQ ID NO: 136352 - DNA, 17 bp, synthetic construct
  source 1..17: mol_type = other DNA
gtcccagcacagaccac

SEQ ID NO: 136353 - DNA, 17 bp, synthetic construct
  source 1..17: mol_type = other DNA
tcccagcacagaccacc

SEQ ID NO: 136354 - DNA, 17 bp, synthetic construct
  source 1..17: mol_type = other DNA
cccagcacagaccacca

SEQ ID NO: 136355 - DNA, 17 bp, synthetic construct
  source 1..17: mol_type = other DNA
ccagcacagaccaccac

SEQ ID NO: 136356 - DNA, 17 bp, synthetic construct
  source 1..17: mol_type = other DNA
cagcacagaccaccaca

SEQ ID NO: 136357 - DNA, 17 bp, synthetic construct
  source 1..17: mol_type = other DNA
agcacagaccaccacac

SEQ ID NO: 136358 - DNA, 17 bp, synthetic construct
  source 1..17: mol_type = other DNA
gcacagaccaccacacc

SEQ ID NO: 136359 - DNA, 17 bp, synthetic construct
  source 1..17: mol_type = other DNA
cacagaccaccacaccc

SEQ ID NO: 136360 - DNA, 17 bp, synthetic construct
  source 1..17: mol_type = other DNA
acagaccaccacaccca

SEQ ID NO: 136361 - DNA, 17 bp, synthetic construct
  source 1..17: mol_type = other DNA
cagaccaccacacccat

SEQ ID NO: 136362 - DNA, 17 bp, synthetic construct
  source 1..17: mol_type = other DNA
agaccaccacacccatg

SEQ ID NO: 136363 - DNA, 17 bp, synthetic construct
  source 1..17: mol_type = other DNA
gaccaccacacccatgt

SEQ ID NO: 136364 - DNA, 17 bp, synthetic construct
  source 1..17: mol_type = other DNA
accaccacacccatgtc

SEQ ID NO: 136365 - DNA, 17 bp, synthetic construct
  source 1..17: mol_type = other DNA
ccaccacacccatgtcc

SEQ ID NO: 136366 - DNA, 17 bp, synthetic construct
  source 1..17: mol_type = other DNA
caccacacccatgtcca

SEQ ID NO: 136367 - DNA, 17 bp, synthetic construct
  source 1..17: mol_type = other DNA
accacacccatgtccac

SEQ ID NO: 136368 - DNA, 17 bp, synthetic construct
  source 1..17: mol_type = other DNA
ccacacccatgtccacc

SEQ ID NO: 136369 - DNA, 17 bp, synthetic construct
  source 1..17: mol_type = other DNA
cacacccatgtccacca

SEQ ID NO: 136370 - DNA, 17 bp, synthetic construct
  source 1..17: mol_type = other DNA
acacccatgtccaccat

SEQ ID NO: 136371 - DNA, 17 bp, synthetic construct
  source 1..17: mol_type = other DNA
cacccatgtccaccatg

SEQ ID NO: 136372 - DNA, 17 bp, synthetic construct
  source 1..17: mol_type = other DNA
acccatgtccaccatgt

SEQ ID NO: 136373 - DNA, 17 bp, synthetic construct
  source 1..17: mol_type = other DNA
cccatgtccaccatgtc

SEQ ID NO: 136374 - DNA, 17 bp, synthetic construct
  source 1..17: mol_type = other DNA
ccatgtccaccatgtcc

SEQ ID NO: 136375 - DNA, 17 bp, synthetic construct
  source 1..17: mol_type = other DNA
catgtccaccatgtcca

SEQ ID NO: 136376 - DNA, 17 bp, synthetic construct
  source 1..17: mol_type = other DNA
atgtccaccatgtccac

SEQ ID NO: 136377 - DNA, 17 bp, synthetic construct
  source 1..17: mol_type = other DNA
tgtccaccatgtccaca

SEQ ID NO: 136378 - DNA, 17 bp, synthetic construct
  source 1..17: mol_type = other DNA
gtccaccatgtccacaa

SEQ ID NO: 136379 - DNA, 17 bp, synthetic construct
  source 1..17: mol_type = other DNA
tccaccatgtccacaat

SEQ ID NO: 136380 - DNA, 17 bp, synthetic construct
  source 1..17: mol_type = other DNA
ccaccatgtccacaatc

SEQ ID NO: 136381 - DNA, 17 bp, synthetic construct
  source 1..17: mol_type = other DNA
caccatgtccacaatcc

SEQ ID NO: 136382 - DNA, 17 bp, synthetic construct
  source 1..17: mol_type = other DNA
accatgtccacaatcca

SEQ ID NO: 136383 - DNA, 17 bp, synthetic construct
  source 1..17: mol_type = other DNA
ccatgtccacaatccac

SEQ ID NO: 136384 - DNA, 17 bp, synthetic construct
  source 1..17: mol_type = other DNA
catgtccacaatccaca

SEQ ID NO: 136385 - DNA, 17 bp, synthetic construct
  source 1..17: mol_type = other DNA
atgtccacaatccacac

SEQ ID NO: 136386 - DNA, 17 bp, synthetic construct
  source 1..17: mol_type = other DNA
tgtccacaatccacacc

SEQ ID NO: 136387 - DNA, 17 bp, synthetic construct
  source 1..17: mol_type = other DNA
gtccacaatccacacct

SEQ ID NO: 136388 - DNA, 17 bp, synthetic construct
  source 1..17: mol_type = other DNA
tccacaatccacacctc

SEQ ID NO: 136389 - DNA, 17 bp, synthetic construct
  source 1..17: mol_type = other DNA
ccacaatccacacctcc

SEQ ID NO: 136390 - DNA, 17 bp, synthetic construct
  source 1..17: mol_type = other DNA
cacaatccacacctcct

SEQ ID NO: 136391 - DNA, 17 bp, synthetic construct
  source 1..17: mol_type = other DNA
acaatccacacctcctc

SEQ ID NO: 136392 - DNA, 17 bp, synthetic construct
  source 1..17: mol_type = other DNA
caatccacacctcctct

SEQ ID NO: 136393 - DNA, 17 bp, synthetic construct
  source 1..17: mol_type = other DNA
aatccacacctcctcta

SEQ ID NO: 136394 - DNA, 17 bp, synthetic construct
  source 1..17: mol_type = other DNA
atccacacctcctctac

SEQ ID NO: 136395 - DNA, 17 bp, synthetic construct
  source 1..17: mol_type = other DNA
tccacacctcctctact

SEQ ID NO: 136396 - DNA, 17 bp, synthetic construct
  source 1..17: mol_type = other DNA
ccacacctcctctactc

SEQ ID NO: 136397 - DNA, 17 bp, synthetic construct
  source 1..17: mol_type = other DNA
cacacctcctctactcc

SEQ ID NO: 136398 - DNA, 17 bp, synthetic construct
  source 1..17: mol_type = other DNA
acacctcctctactcca

SEQ ID NO: 136399 - DNA, 17 bp, synthetic construct
  source 1..17: mol_type = other DNA
cacctcctctactccag

SEQ ID NO: 136400 - DNA, 17 bp, synthetic construct
  source 1..17: mol_type = other DNA
acctcctctactccaga

SEQ ID NO: 136401 - DNA, 17 bp, synthetic construct
  source 1..17: mol_type = other DNA
cctcctctactccagag

SEQ ID NO: 136402 - DNA, 17 bp, synthetic construct
  source 1..17: mol_type = other DNA
ctcctctactccagaga

SEQ ID NO: 136403 - DNA, 17 bp, synthetic construct
  source 1..17: mol_type = other DNA
tcctctactccagagac

SEQ ID NO: 136404 - DNA, 17 bp, synthetic construct
  source 1..17: mol_type = other DNA
cctctactccagagacc

SEQ ID NO: 136405 - DNA, 17 bp, synthetic construct
  source 1..17: mol_type = other DNA
ctctactccagagacca

SEQ ID NO: 136406 - DNA, 17 bp, synthetic construct
  source 1..17: mol_type = other DNA
tctactccagagaccac

SEQ ID NO: 136407 - DNA, 17 bp, synthetic construct
  source 1..17: mol_type = other DNA
ctactccagagaccacc

SEQ ID NO: 136408 - DNA, 17 bp, synthetic construct
  source 1..17: mol_type = other DNA
tactccagagaccaccc

SEQ ID NO: 136409 - DNA, 17 bp, synthetic construct
  source 1..17: mol_type = other DNA
actccagagaccaccca

SEQ ID NO: 136410 - DNA, 17 bp, synthetic construct
  source 1..17: mol_type = other DNA
ctccagagaccacccac

SEQ ID NO: 136411 - DNA, 17 bp, synthetic construct
  source 1..17: mol_type = other DNA
tccagagaccacccaca

SEQ ID NO: 136412 - DNA, 17 bp, synthetic construct
  source 1..17: mol_type = other DNA
ccagagaccacccacac

SEQ ID NO: 136413 - DNA, 17 bp, synthetic construct
  source 1..17: mol_type = other DNA
cagagaccacccacacc

SEQ ID NO: 136414 - DNA, 17 bp, synthetic construct
  source 1..17: mol_type = other DNA
agagaccacccacacct

SEQ ID NO: 136415 - DNA, 17 bp, synthetic construct
  source 1..17: mol_type = other DNA
gagaccacccacacctc

SEQ ID NO: 136416 - DNA, 17 bp, synthetic construct
  source 1..17: mol_type = other DNA
agaccacccacacctcc

SEQ ID NO: 136417 - DNA, 17 bp, synthetic construct
  source 1..17: mol_type = other DNA
gaccacccacacctcca

SEQ ID NO: 136418 - DNA, 17 bp, synthetic construct
  source 1..17: mol_type = other DNA
accacccacacctccac

SEQ ID NO: 136419 - DNA, 17 bp, synthetic construct
  source 1..17: mol_type = other DNA
ccacccacacctccaca

SEQ ID NO: 136420 - DNA, 17 bp, synthetic construct
  source 1..17: mol_type = other DNA
cacccacacctccacag

SEQ ID NO: 136421 - DNA, 17 bp, synthetic construct
  source 1..17: mol_type = other DNA
acccacacctccacagt

SEQ ID NO: 136422 - DNA, 17 bp, synthetic construct
  source 1..17: mol_type = other DNA
cccacacctccacagtg

SEQ ID NO: 136423 - DNA, 17 bp, synthetic construct
  source 1..17: mol_type = other DNA
ccacacctccacagtgc

SEQ ID NO: 136424 - DNA, 17 bp, synthetic construct
  source 1..17: mol_type = other DNA
cacacctccacagtgct

SEQ ID NO: 136425 - DNA, 17 bp, synthetic construct
  source 1..17: mol_type = other DNA
acacctccacagtgctg

SEQ ID NO: 136426 - DNA, 17 bp, synthetic construct
  source 1..17: mol_type = other DNA
cacctccacagtgctga

SEQ ID NO: 136427 - DNA, 17 bp, synthetic construct
  source 1..17: mol_type = other DNA
acctccacagtgctgac

SEQ ID NO: 136428 - DNA, 17 bp, synthetic construct
  source 1..17: mol_type = other DNA
cctccacagtgctgacc

SEQ ID NO: 136429 - DNA, 17 bp, synthetic construct
  source 1..17: mol_type = other DNA
ctccacagtgctgacca

SEQ ID NO: 136430 - DNA, 17 bp, synthetic construct
  source 1..17: mol_type = other DNA
tccacagtgctgaccac

SEQ ID NO: 136431 - DNA, 17 bp, synthetic construct
  source 1..17: mol_type = other DNA
ccacagtgctgaccacc

SEQ ID NO: 136432 - DNA, 17 bp, synthetic construct
  source 1..17: mol_type = other DNA
cacagtgctgaccacca

SEQ ID NO: 136433 - DNA, 17 bp, synthetic construct
  source 1..17: mol_type = other DNA
acagtgctgaccaccac

SEQ ID NO: 136434 - DNA, 17 bp, synthetic construct
  source 1..17: mol_type = other DNA
cagtgctgaccaccaca

SEQ ID NO: 136435 - DNA, 17 bp, synthetic construct
  source 1..17: mol_type = other DNA
agtgctgaccaccacag

SEQ ID NO: 136436 - DNA, 17 bp, synthetic construct
  source 1..17: mol_type = other DNA
gtgctgaccaccacagc

SEQ ID NO: 136437 - DNA, 17 bp, synthetic construct
  source 1..17: mol_type = other DNA
tgctgaccaccacagcc

SEQ ID NO: 136438 - DNA, 17 bp, synthetic construct
  source 1..17: mol_type = other DNA
gctgaccaccacagcca

SEQ ID NO: 136439 - DNA, 17 bp, synthetic construct
  source 1..17: mol_type = other DNA
ctgaccaccacagccac

SEQ ID NO: 136440 - DNA, 17 bp, synthetic construct
  source 1..17: mol_type = other DNA
tgaccaccacagccacc

SEQ ID NO: 136441 - DNA, 17 bp, synthetic construct
  source 1..17: mol_type = other DNA
gaccaccacagccacca

SEQ ID NO: 136442 - DNA, 17 bp, synthetic construct
  source 1..17: mol_type = other DNA
accaccacagccaccat

SEQ ID NO: 136443 - DNA, 17 bp, synthetic construct
  source 1..17: mol_type = other DNA
ccaccacagccaccatg

SEQ ID NO: 136444 - DNA, 17 bp, synthetic construct
  source 1..17: mol_type = other DNA
caccacagccaccatga

SEQ ID NO: 136445 - DNA, 17 bp, synthetic construct
  source 1..17: mol_type = other DNA
accacagccaccatgac

SEQ ID NO: 136446 - DNA, 17 bp, synthetic construct
  source 1..17: mol_type = other DNA
ccacagccaccatgaca

SEQ ID NO: 136447 - DNA, 17 bp, synthetic construct
  source 1..17: mol_type = other DNA
cacagccaccatgacaa

SEQ ID NO: 136448 - DNA, 17 bp, synthetic construct
  source 1..17: mol_type = other DNA
acagccaccatgacaag

SEQ ID NO: 136449 - DNA, 17 bp, synthetic construct
  source 1..17: mol_type = other DNA
cagccaccatgacaagg

SEQ ID NO: 136450 - DNA, 17 bp, synthetic construct
  source 1..17: mol_type = other DNA
agccaccatgacaaggg

SEQ ID NO: 136451 - DNA, 17 bp, synthetic construct
  source 1..17: mol_type = other DNA
gccaccatgacaagggc

SEQ ID NO: 136452 - DNA, 17 bp, synthetic construct
  source 1..17: mol_type = other DNA
ccaccatgacaagggcc

SEQ ID NO: 136453 - DNA, 17 bp, synthetic construct
  source 1..17: mol_type = other DNA
caccatgacaagggcca

SEQ ID NO: 136454 - DNA, 17 bp, synthetic construct
  source 1..17: mol_type = other DNA
accatgacaagggccac

SEQ ID NO: 136455 - DNA, 17 bp, synthetic construct
  source 1..17: mol_type = other DNA
ccatgacaagggccacc

SEQ ID NO: 136456 - DNA, 17 bp, synthetic construct
  source 1..17: mol_type = other DNA
catgacaagggccacca

SEQ ID NO: 136457 - DNA, 17 bp, synthetic construct
  source 1..17: mol_type = other DNA
atgacaagggccaccaa

SEQ ID NO: 136458 - DNA, 17 bp, synthetic construct
  source 1..17: mol_type = other DNA
tgacaagggccaccaat

SEQ ID NO: 136459 - DNA, 17 bp, synthetic construct
  source 1..17: mol_type = other DNA
gacaagggccaccaatt

SEQ ID NO: 136460 - DNA, 17 bp, synthetic construct
  source 1..17: mol_type = other DNA
acaagggccaccaattc

SEQ ID NO: 136461 - DNA, 17 bp, synthetic construct
  source 1..17: mol_type = other DNA
caagggccaccaattcc

SEQ ID NO: 136462 - DNA, 17 bp, synthetic construct
  source 1..17: mol_type = other DNA
aagggccaccaattcca

SEQ ID NO: 136463 - DNA, 17 bp, synthetic construct
  source 1..17: mol_type = other DNA
agggccaccaattccac

SEQ ID NO: 136464 - DNA, 17 bp, synthetic construct
  source 1..17: mol_type = other DNA
gggccaccaattccacg

SEQ ID NO: 136465 - DNA, 17 bp, synthetic construct
  source 1..17: mol_type = other DNA
ggccaccaattccacgg

SEQ ID NO: 136466 - DNA, 17 bp, synthetic construct
  source 1..17: mol_type = other DNA
gccaccaattccacggc

SEQ ID NO: 136467 - DNA, 17 bp, synthetic construct
  source 1..17: mol_type = other DNA
ccaccaattccacggcc

SEQ ID NO: 136468 - DNA, 17 bp, synthetic construct
  source 1..17: mol_type = other DNA
caccaattccacggcca

SEQ ID NO: 136469 - DNA, 17 bp, synthetic construct
  source 1..17: mol_type = other DNA
accaattccacggccac

SEQ ID NO: 136470 - DNA, 17 bp, synthetic construct
  source 1..17: mol_type = other DNA
ccaattccacggccaca

SEQ ID NO: 136471 - DNA, 17 bp, synthetic construct
  source 1..17: mol_type = other DNA
caattccacggccacac

SEQ ID NO: 136472 - DNA, 17 bp, synthetic construct
  source 1..17: mol_type = other DNA
aattccacggccacacc

SEQ ID NO: 136473 - DNA, 17 bp, synthetic construct
  source 1..17: mol_type = other DNA
attccacggccacaccc

SEQ ID NO: 136474 - DNA, 17 bp, synthetic construct
  source 1..17: mol_type = other DNA
ttccacggccacaccct

SEQ ID NO: 136475 - DNA, 17 bp, synthetic construct
  source 1..17: mol_type = other DNA
tccacggccacaccctc

SEQ ID NO: 136476 - DNA, 17 bp, synthetic construct
  source 1..17: mol_type = other DNA
ccacggccacaccctcc

SEQ ID NO: 136477 - DNA, 17 bp, synthetic construct
  source 1..17: mol_type = other DNA
cacggccacaccctcct

SEQ ID NO: 136478 - DNA, 17 bp, synthetic construct
  source 1..17: mol_type = other DNA
acggccacaccctcctc

SEQ ID NO: 136479 - DNA, 17 bp, synthetic construct
  source 1..17: mol_type = other DNA
cggccacaccctcctcc

SEQ ID NO: 136480 - DNA, 17 bp, synthetic construct
  source 1..17: mol_type = other DNA
ggccacaccctcctcca

SEQ ID NO: 136481 - DNA, 17 bp, synthetic construct
  source 1..17: mol_type = other DNA
gccacaccctcctccac

SEQ ID NO: 136482 - DNA, 17 bp, synthetic construct
  source 1..17: mol_type = other DNA
ccacaccctcctccact

SEQ ID NO: 136483 - DNA, 17 bp, synthetic construct
  source 1..17: mol_type = other DNA
cacaccctcctccactc

SEQ ID NO: 136484 - DNA, 17 bp, synthetic construct
  source 1..17: mol_type = other DNA
acaccctcctccactct

SEQ ID NO: 136485 - DNA, 17 bp, synthetic construct
  source 1..17: mol_type = other DNA
caccctcctccactctg

SEQ ID NO: 136486 - DNA, 17 bp, synthetic construct
  source 1..17: mol_type = other DNA
accctcctccactctgg

SEQ ID NO: 136487 - DNA, 17 bp, synthetic construct
  source 1..17: mol_type = other DNA
ccctcctccactctggg

SEQ ID NO: 136488 - DNA, 17 bp, synthetic construct
  source 1..17: mol_type = other DNA
cctcctccactctgggg

SEQ ID NO: 136489 - DNA, 17 bp, synthetic construct
  source 1..17: mol_type = other DNA
ctcctccactctgggga

SEQ ID NO: 136490 - DNA, 17 bp, synthetic construct
  source 1..17: mol_type = other DNA
tcctccactctggggac

SEQ ID NO: 136491 - DNA, 17 bp, synthetic construct
  source 1..17: mol_type = other DNA
cctccactctggggacg

SEQ ID NO: 136492 - DNA, 17 bp, synthetic construct
  source 1..17: mol_type = other DNA
ctccactctggggacga

SEQ ID NO: 136493 - DNA, 17 bp, synthetic construct
  source 1..17: mol_type = other DNA
tccactctggggacgac

SEQ ID NO: 136494 - DNA, 17 bp, synthetic construct
  source 1..17: mol_type = other DNA
ccactctggggacgacc

SEQ ID NO: 136495 - DNA, 17 bp, synthetic construct
  source 1..17: mol_type = other DNA
cactctggggacgaccc

SEQ ID NO: 136496 - DNA, 17 bp, synthetic construct
  source 1..17: mol_type = other DNA
actctggggacgacccg

SEQ ID NO: 136497 - DNA, 17 bp, synthetic construct
  source 1..17: mol_type = other DNA
ctctggggacgacccgg

SEQ ID NO: 136498 - DNA, 17 bp, synthetic construct
  source 1..17: mol_type = other DNA
tctggggacgacccgga

SEQ ID NO: 136499 - DNA, 17 bp, synthetic construct
  source 1..17: mol_type = other DNA
ctggggacgacccggat

SEQ ID NO: 136500 - DNA, 17 bp, synthetic construct
  source 1..17: mol_type = other DNA
tggggacgacccggatc

SEQ ID NO: 136501 - DNA, 17 bp, synthetic construct
  source 1..17: mol_type = other DNA
ggggacgacccggatcc

SEQ ID NO: 136502 - DNA, 17 bp, synthetic construct
  source 1..17: mol_type = other DNA
gggacgacccggatcct

SEQ ID NO: 136503 - DNA, 17 bp, synthetic construct
  source 1..17: mol_type = other DNA
ggacgacccggatcctc

SEQ ID NO: 136504 - DNA, 17 bp, synthetic construct
  source 1..17: mol_type = other DNA
gacgacccggatcctca

SEQ ID NO: 136505 - DNA, 17 bp, synthetic construct
  source 1..17: mol_type = other DNA
acgacccggatcctcac

SEQ ID NO: 136506 - DNA, 17 bp, synthetic construct
  source 1..17: mol_type = other DNA
cgacccggatcctcact

SEQ ID NO: 136507 - DNA, 17 bp, synthetic construct
  source 1..17: mol_type = other DNA
gacccggatcctcactg

SEQ ID NO: 136508 - DNA, 17 bp, synthetic construct
  source 1..17: mol_type = other DNA
acccggatcctcactga

SEQ ID NO: 136509 - DNA, 17 bp, synthetic construct
  source 1..17: mol_type = other DNA
cccggatcctcactgag

SEQ ID NO: 136510 - DNA, 17 bp, synthetic construct
  source 1..17: mol_type = other DNA
ccggatcctcactgagc

SEQ ID NO: 136511 - DNA, 17 bp, synthetic construct
  source 1..17: mol_type = other DNA
cggatcctcactgagct

SEQ ID NO: 136512 - DNA, 17 bp, synthetic construct
  source 1..17: mol_type = other DNA
ggatcctcactgagctg

SEQ ID NO: 136513 - DNA, 17 bp, synthetic construct
  source 1..17: mol_type = other DNA
gatcctcactgagctga

SEQ ID NO: 136514 - DNA, 17 bp, synthetic construct
  source 1..17: mol_type = other DNA
atcctcactgagctgac

SEQ ID NO: 136515 - DNA, 17 bp, synthetic construct
  source 1..17: mol_type = other DNA
tcctcactgagctgacc

SEQ ID NO: 136516 - DNA, 17 bp, synthetic construct
  source 1..17: mol_type = other DNA
cctcactgagctgacca

SEQ ID NO: 136517 - DNA, 17 bp, synthetic construct
  source 1..17: mol_type = other DNA
ctcactgagctgaccac

SEQ ID NO: 136518 - DNA, 17 bp, synthetic construct
  source 1..17: mol_type = other DNA
tcactgagctgaccaca

SEQ ID NO: 136519 - DNA, 17 bp, synthetic construct
  source 1..17: mol_type = other DNA
cactgagctgaccacaa

SEQ ID NO: 136520 - DNA, 17 bp, synthetic construct
  source 1..17: mol_type = other DNA
actgagctgaccacaac

SEQ ID NO: 136521 - DNA, 17 bp, synthetic construct
  source 1..17: mol_type = other DNA
ctgagctgaccacaaca

SEQ ID NO: 136522 - DNA, 17 bp, synthetic construct
  source 1..17: mol_type = other DNA
tgagctgaccacaacag

SEQ ID NO: 136523 - DNA, 17 bp, synthetic construct
  source 1..17: mol_type = other DNA
gagctgaccacaacagc

SEQ ID NO: 136524 - DNA, 17 bp, synthetic construct
  source 1..17: mol_type = other DNA
agctgaccacaacagcc

SEQ ID NO: 136525 - DNA, 17 bp, synthetic construct
  source 1..17: mol_type = other DNA
gctgaccacaacagcca

SEQ ID NO: 136526 - DNA, 17 bp, synthetic construct
  source 1..17: mol_type = other DNA
ctgaccacaacagccac

SEQ ID NO: 136527 - DNA, 17 bp, synthetic construct
  source 1..17: mol_type = other DNA
tgaccacaacagccact

SEQ ID NO: 136528 - DNA, 17 bp, synthetic construct
  source 1..17: mol_type = other DNA
gaccacaacagccacta

SEQ ID NO: 136529 - DNA, 17 bp, synthetic construct
  source 1..17: mol_type = other DNA
accacaacagccactac

SEQ ID NO: 136530 - DNA, 17 bp, synthetic construct
  source 1..17: mol_type = other DNA
ccacaacagccactaca

SEQ ID NO: 136531 - DNA, 17 bp, synthetic construct
  source 1..17: mol_type = other DNA
cacaacagccactacaa

SEQ ID NO: 136532 - DNA, 17 bp, synthetic construct
  source 1..17: mol_type = other DNA
acaacagccactacaac

SEQ ID NO: 136533 - DNA, 17 bp, synthetic construct
  source 1..17: mol_type = other DNA
caacagccactacaact

SEQ ID NO: 136534 - DNA, 17 bp, synthetic construct
  source 1..17: mol_type = other DNA
aacagccactacaactg

SEQ ID NO: 136535 - DNA, 17 bp, synthetic construct
  source 1..17: mol_type = other DNA
acagccactacaactgc

SEQ ID NO: 136536 - DNA, 17 bp, synthetic construct
  source 1..17: mol_type = other DNA
cagccactacaactgca

SEQ ID NO: 136537 - DNA, 17 bp, synthetic construct
  source 1..17: mol_type = other DNA
agccactacaactgcag

SEQ ID NO: 136538 - DNA, 17 bp, synthetic construct
  source 1..17: mol_type = other DNA
gccactacaactgcagc

SEQ ID NO: 136539 - DNA, 17 bp, synthetic construct
  source 1..17: mol_type = other DNA
ccactacaactgcagcc

SEQ ID NO: 136540 - DNA, 17 bp, synthetic construct
  source 1..17: mol_type = other DNA
cactacaactgcagcca

SEQ ID NO: 136541 - DNA, 17 bp, synthetic construct
  source 1..17: mol_type = other DNA
actacaactgcagccac

SEQ ID NO: 136542 - DNA, 17 bp, synthetic construct
  source 1..17: mol_type = other DNA
ctacaactgcagccact

SEQ ID NO: 136543 - DNA, 17 bp, synthetic construct
  source 1..17: mol_type = other DNA
tacaactgcagccactg

SEQ ID NO: 136544 - DNA, 17 bp, synthetic construct
  source 1..17: mol_type = other DNA
acaactgcagccactgg

SEQ ID NO: 136545 - DNA, 17 bp, synthetic construct
  source 1..17: mol_type = other DNA
caactgcagccactgga

SEQ ID NO: 136546 - DNA, 17 bp, synthetic construct
  source 1..17: mol_type = other DNA
aactgcagccactggat

SEQ ID NO: 136547 - DNA, 17 bp, synthetic construct
  source 1..17: mol_type = other DNA
actgcagccactggatc

SEQ ID NO: 136548 - DNA, 17 bp, synthetic construct
  source 1..17: mol_type = other DNA
ctgcagccactggatcc

SEQ ID NO: 136549 - DNA, 17 bp, synthetic construct
  source 1..17: mol_type = other DNA
tgcagccactggatcca

SEQ ID NO: 136550 - DNA, 17 bp, synthetic construct
  source 1..17: mol_type = other DNA
gcagccactggatccac

SEQ ID NO: 136551 - DNA, 17 bp, synthetic construct
  source 1..17: mol_type = other DNA
cagccactggatccacg

SEQ ID NO: 136552 - DNA, 17 bp, synthetic construct
  source 1..17: mol_type = other DNA
agccactggatccacgg

SEQ ID NO: 136553 - DNA, 17 bp, synthetic construct
  source 1..17: mol_type = other DNA
gccactggatccacggc

SEQ ID NO: 136554 - DNA, 17 bp, synthetic construct
  source 1..17: mol_type = other DNA
ccactggatccacggcc

SEQ ID NO: 136555 - DNA, 17 bp, synthetic construct
  source 1..17: mol_type = other DNA
cactggatccacggcca

SEQ ID NO: 136556 - DNA, 17 bp, synthetic construct
  source 1..17: mol_type = other DNA
actggatccacggccac

SEQ ID NO: 136557 - DNA, 17 bp, synthetic construct
  source 1..17: mol_type = other DNA
ctggatccacggccacc

SEQ ID NO: 136558 - DNA, 17 bp, synthetic construct
  source 1..17: mol_type = other DNA
tggatccacggccaccc

SEQ ID NO: 136559 - DNA, 17 bp, synthetic construct
  source 1..17: mol_type = other DNA
ggatccacggccaccct

SEQ ID NO: 136560 - DNA, 17 bp, synthetic construct
  source 1..17: mol_type = other DNA
gatccacggccaccctg

SEQ ID NO: 136561 - DNA, 17 bp, synthetic construct
  source 1..17: mol_type = other DNA
atccacggccaccctgt

SEQ ID NO: 136562 - DNA, 17 bp, synthetic construct
  source 1..17: mol_type = other DNA
tccacggccaccctgtc

SEQ ID NO: 136563 - DNA, 17 bp, synthetic construct
  source 1..17: mol_type = other DNA
ccacggccaccctgtcc

SEQ ID NO: 136564 - DNA, 17 bp, synthetic construct
  source 1..17: mol_type = other DNA
cacggccaccctgtcct

SEQ ID NO: 136565 - DNA, 17 bp, synthetic construct
  source 1..17: mol_type = other DNA
acggccaccctgtcctc

SEQ ID NO: 136566 - DNA, 17 bp, synthetic construct
  source 1..17: mol_type = other DNA
cggccaccctgtcctcc

SEQ ID NO: 136567 - DNA, 17 bp, synthetic construct
  source 1..17: mol_type = other DNA
ggccaccctgtcctcca

SEQ ID NO: 136568 - DNA, 17 bp, synthetic construct
  source 1..17: mol_type = other DNA
gccaccctgtcctccac

SEQ ID NO: 136569 - DNA, 17 bp, synthetic construct
  source 1..17: mol_type = other DNA
ccaccctgtcctccacc

SEQ ID NO: 136570 - DNA, 17 bp, synthetic construct
  source 1..17: mol_type = other DNA
caccctgtcctccaccc

SEQ ID NO: 136571 - DNA, 17 bp, synthetic construct
  source 1..17: mol_type = other DNA
accctgtcctccacccc

SEQ ID NO: 136572 - DNA, 17 bp, synthetic construct
  source 1..17: mol_type = other DNA
ccctgtcctccacccca

SEQ ID NO: 136573 - DNA, 17 bp, synthetic construct
  source 1..17: mol_type = other DNA
cctgtcctccaccccag

SEQ ID NO: 136574 - DNA, 17 bp, synthetic construct
  source 1..17: mol_type = other DNA
ctgtcctccaccccagg

SEQ ID NO: 136575 - DNA, 17 bp, synthetic construct
  source 1..17: mol_type = other DNA
tgtcctccaccccaggg

SEQ ID NO: 136576 - DNA, 17 bp, synthetic construct
  source 1..17: mol_type = other DNA
gtcctccaccccaggga

SEQ ID NO: 136577 - DNA, 17 bp, synthetic construct
  source 1..17: mol_type = other DNA
tcctccaccccagggac

SEQ ID NO: 136578 - DNA, 17 bp, synthetic construct
  source 1..17: mol_type = other DNA
cctccaccccagggacc

SEQ ID NO: 136579 - DNA, 17 bp, synthetic construct
  source 1..17: mol_type = other DNA
ctccaccccagggacca

SEQ ID NO: 136580 - DNA, 17 bp, synthetic construct
  source 1..17: mol_type = other DNA
tccaccccagggaccac

SEQ ID NO: 136581 - DNA, 17 bp, synthetic construct
  source 1..17: mol_type = other DNA
ccaccccagggaccacc

SEQ ID NO: 136582 - DNA, 17 bp, synthetic construct
  source 1..17: mol_type = other DNA
caccccagggaccacct

SEQ ID NO: 136583 - DNA, 17 bp, synthetic construct
  source 1..17: mol_type = other DNA
accccagggaccacctg

SEQ ID NO: 136584 - DNA, 17 bp, synthetic construct
  source 1..17: mol_type = other DNA
ccccagggaccacctgg

SEQ ID NO: 136585 - DNA, 17 bp, synthetic construct
  source 1..17: mol_type = other DNA
cccagggaccacctgga

SEQ ID NO: 136586 - DNA, 17 bp, synthetic construct
  source 1..17: mol_type = other DNA
ccagggaccacctggat

SEQ ID NO: 136587 - DNA, 17 bp, synthetic construct
  source 1..17: mol_type = other DNA
cagggaccacctggatc

SEQ ID NO: 136588 - DNA, 17 bp, synthetic construct
  source 1..17: mol_type = other DNA
agggaccacctggatcc

SEQ ID NO: 136589 - DNA, 17 bp, synthetic construct
  source 1..17: mol_type = other DNA
gggaccacctggatcct

SEQ ID NO: 136590 - DNA, 17 bp, synthetic construct
  source 1..17: mol_type = other DNA
ggaccacctggatcctc

SEQ ID NO: 136591 - DNA, 17 bp, synthetic construct
  source 1..17: mol_type = other DNA
gaccacctggatcctca

SEQ ID NO: 136592 - DNA, 17 bp, synthetic construct
  source 1..17: mol_type = other DNA
accacctggatcctcac

SEQ ID NO: 136593 - DNA, 17 bp, synthetic construct
  source 1..17: mol_type = other DNA
ccacctggatcctcaca

SEQ ID NO: 136594 - DNA, 17 bp, synthetic construct
  source 1..17: mol_type = other DNA
cacctggatcctcacag

SEQ ID NO: 136595 - DNA, 17 bp, synthetic construct
  source 1..17: mol_type = other DNA
acctggatcctcacaga

SEQ ID NO: 136596 - DNA, 17 bp, synthetic construct
  source 1..17: mol_type = other DNA
cctggatcctcacagag

SEQ ID NO: 136597 - DNA, 17 bp, synthetic construct
  source 1..17: mol_type = other DNA
ctggatcctcacagagc

SEQ ID NO: 136598 - DNA, 17 bp, synthetic construct
  source 1..17: mol_type = other DNA
tggatcctcacagagcc

SEQ ID NO: 136599 - DNA, 17 bp, synthetic construct
  source 1..17: mol_type = other DNA
ggatcctcacagagccg

SEQ ID NO: 136600 - DNA, 17 bp, synthetic construct
  source 1..17: mol_type = other DNA
gatcctcacagagccga

SEQ ID NO: 136601 - DNA, 17 bp, synthetic construct
  source 1..17: mol_type = other DNA
atcctcacagagccgag

SEQ ID NO: 136602 - DNA, 17 bp, synthetic construct
  source 1..17: mol_type = other DNA
tcctcacagagccgagc

SEQ ID NO: 136603 - DNA, 17 bp, synthetic construct
  source 1..17: mol_type = other DNA
cctcacagagccgagca

SEQ ID NO: 136604 - DNA, 17 bp, synthetic construct
  source 1..17: mol_type = other DNA
ctcacagagccgagcac

SEQ ID NO: 136605 - DNA, 17 bp, synthetic construct
  source 1..17: mol_type = other DNA
tcacagagccgagcact

SEQ ID NO: 136606 - DNA, 17 bp, synthetic construct
  source 1..17: mol_type = other DNA
cacagagccgagcacta

SEQ ID NO: 136607 - DNA, 17 bp, synthetic construct
  source 1..17: mol_type = other DNA
acagagccgagcactat

SEQ ID NO: 136608 - DNA, 17 bp, synthetic construct
  source 1..17: mol_type = other DNA
cagagccgagcactata

SEQ ID NO: 136609 - DNA, 17 bp, synthetic construct
  source 1..17: mol_type = other DNA
agagccgagcactatag

SEQ ID NO: 136610 - DNA, 17 bp, synthetic construct
  source 1..17: mol_type = other DNA
gagccgagcactatagc

SEQ ID NO: 136611 - DNA, 17 bp, synthetic construct
  source 1..17: mol_type = other DNA
agccgagcactatagcc

SEQ ID NO: 136612 - DNA, 17 bp, synthetic construct
  source 1..17: mol_type = other DNA
gccgagcactatagcca

SEQ ID NO: 136613 - DNA, 17 bp, synthetic construct
  source 1..17: mol_type = other DNA
ccgagcactatagccac

SEQ ID NO: 136614 - DNA, 17 bp, synthetic construct
  source 1..17: mol_type = other DNA
cgagcactatagccacc

SEQ ID NO: 136615 - DNA, 17 bp, synthetic construct
  source 1..17: mol_type = other DNA
gagcactatagccaccg

SEQ ID NO: 136616 - DNA, 17 bp, synthetic construct
  source 1..17: mol_type = other DNA
agcactatagccaccgt

SEQ ID NO: 136617 - DNA, 17 bp, synthetic construct
  source 1..17: mol_type = other DNA
gcactatagccaccgtg

SEQ ID NO: 136618 - DNA, 17 bp, synthetic construct
  source 1..17: mol_type = other DNA
cactatagccaccgtga

SEQ ID NO: 136619 - DNA, 17 bp, synthetic construct
  source 1..17: mol_type = other DNA
actatagccaccgtgat

SEQ ID NO: 136620 - DNA, 17 bp, synthetic construct
  source 1..17: mol_type = other DNA
ctatagccaccgtgatg

SEQ ID NO: 136621 - DNA, 17 bp, synthetic construct
  source 1..17: mol_type = other DNA
tatagccaccgtgatgg

SEQ ID NO: 136622 - DNA, 17 bp, synthetic construct
  source 1..17: mol_type = other DNA
atagccaccgtgatggt

SEQ ID NO: 136623 - DNA, 17 bp, synthetic construct
  source 1..17: mol_type = other DNA
tagccaccgtgatggtg

SEQ ID NO: 136624 - DNA, 17 bp, synthetic construct
  source 1..17: mol_type = other DNA
agccaccgtgatggtgc

SEQ ID NO: 136625 - DNA, 17 bp, synthetic construct
  source 1..17: mol_type = other DNA
gccaccgtgatggtgcc

SEQ ID NO: 136626 - DNA, 17 bp, synthetic construct
  source 1..17: mol_type = other DNA
ccaccgtgatggtgccc

SEQ ID NO: 136627 - DNA, 17 bp, synthetic construct
  source 1..17: mol_type = other DNA
caccgtgatggtgccca

SEQ ID NO: 136628 - DNA, 17 bp, synthetic construct
  source 1..17: mol_type = other DNA
accgtgatggtgcccac

SEQ ID NO: 136629 - DNA, 17 bp, synthetic construct
  source 1..17: mol_type = other DNA
ccgtgatggtgcccacc

SEQ ID NO: 136630 - DNA, 17 bp, synthetic construct
  source 1..17: mol_type = other DNA
cgtgatggtgcccaccg

SEQ ID NO: 136631 - DNA, 17 bp, synthetic construct
  source 1..17: mol_type = other DNA
gtgatggtgcccaccgg

SEQ ID NO: 136632 - DNA, 17 bp, synthetic construct
  source 1..17: mol_type = other DNA
tgatggtgcccaccggt

SEQ ID NO: 136633 - DNA, 17 bp, synthetic construct
  source 1..17: mol_type = other DNA
gatggtgcccaccggtt

SEQ ID NO: 136634 - DNA, 17 bp, synthetic construct
  source 1..17: mol_type = other DNA
atggtgcccaccggttc

SEQ ID NO: 136635 - DNA, 17 bp, synthetic construct
  source 1..17: mol_type = other DNA
tggtgcccaccggttcc

SEQ ID NO: 136636 - DNA, 17 bp, synthetic construct
  source 1..17: mol_type = other DNA
ggtgcccaccggttcca

SEQ ID NO: 136637 - DNA, 17 bp, synthetic construct
  source 1..17: mol_type = other DNA
gtgcccaccggttccac

SEQ ID NO: 136638 - DNA, 17 bp, synthetic construct
  source 1..17: mol_type = other DNA
tgcccaccggttccacg

SEQ ID NO: 136639 - DNA, 17 bp, synthetic construct
  source 1..17: mol_type = other DNA
gcccaccggttccacgg

SEQ ID NO: 136640 - DNA, 17 bp, synthetic construct
  source 1..17: mol_type = other DNA
cccaccggttccacggc

SEQ ID NO: 136641 - DNA, 17 bp, synthetic construct
  source 1..17: mol_type = other DNA
ccaccggttccacggcc

SEQ ID NO: 136642 - DNA, 17 bp, synthetic construct
  source 1..17: mol_type = other DNA
caccggttccacggcca

SEQ ID NO: 136643 - DNA, 17 bp, synthetic construct
  source 1..17: mol_type = other DNA
accggttccacggccac

SEQ ID NO: 136644 - DNA, 17 bp, synthetic construct
  source 1..17: mol_type = other DNA
ccggttccacggccacc

SEQ ID NO: 136645 - DNA, 17 bp, synthetic construct
  source 1..17: mol_type = other DNA
cggttccacggccaccg

SEQ ID NO: 136646 - DNA, 17 bp, synthetic construct
  source 1..17: mol_type = other DNA
ggttccacggccaccgc

SEQ ID NO: 136647 - DNA, 17 bp, synthetic construct
  source 1..17: mol_type = other DNA
gttccacggccaccgcc

SEQ ID NO: 136648 - DNA, 17 bp, synthetic construct
  source 1..17: mol_type = other DNA
ttccacggccaccgcct

SEQ ID NO: 136649 - DNA, 17 bp, synthetic construct
  source 1..17: mol_type = other DNA
tccacggccaccgcctc

SEQ ID NO: 136650 - DNA, 17 bp, synthetic construct
  source 1..17: mol_type = other DNA
ccacggccaccgcctcc

SEQ ID NO: 136651 - DNA, 17 bp, synthetic construct
  source 1..17: mol_type = other DNA
cacggccaccgcctcct

SEQ ID NO: 136652 - DNA, 17 bp, synthetic construct
  source 1..17: mol_type = other DNA
acggccaccgcctcctc

SEQ ID NO: 136653 - DNA, 17 bp, synthetic construct
  source 1..17: mol_type = other DNA
cggccaccgcctcctcc

SEQ ID NO: 136654 - DNA, 17 bp, synthetic construct
  source 1..17: mol_type = other DNA
ggccaccgcctcctcca

SEQ ID NO: 136655 - DNA, 17 bp, synthetic construct
  source 1..17: mol_type = other DNA
gccaccgcctcctccac

SEQ ID NO: 136656 - DNA, 17 bp, synthetic construct
  source 1..17: mol_type = other DNA
ccaccgcctcctccact

SEQ ID NO: 136657 - DNA, 17 bp, synthetic construct
  source 1..17: mol_type = other DNA
caccgcctcctccactc

SEQ ID NO: 136658 - DNA, 17 bp, synthetic construct
  source 1..17: mol_type = other DNA
accgcctcctccactct

SEQ ID NO: 136659 - DNA, 17 bp, synthetic construct
  source 1..17: mol_type = other DNA
ccgcctcctccactctg

SEQ ID NO: 136660 - DNA, 17 bp, synthetic construct
  source 1..17: mol_type = other DNA
cgcctcctccactctgg

SEQ ID NO: 136661 - DNA, 17 bp, synthetic construct
  source 1..17: mol_type = other DNA
gcctcctccactctggg

SEQ ID NO: 136662 - DNA, 17 bp, synthetic construct
  source 1..17: mol_type = other DNA
cctcctccactctggga

SEQ ID NO: 136663 - DNA, 17 bp, synthetic construct
  source 1..17: mol_type = other DNA
ctcctccactctgggaa

SEQ ID NO: 136664 - DNA, 17 bp, synthetic construct
  source 1..17: mol_type = other DNA
tcctccactctgggaac

SEQ ID NO: 136665 - DNA, 17 bp, synthetic construct
  source 1..17: mol_type = other DNA
cctccactctgggaaca

SEQ ID NO: 136666 - DNA, 17 bp, synthetic construct
  source 1..17: mol_type = other DNA
ctccactctgggaacag

SEQ ID NO: 136667 - DNA, 17 bp, synthetic construct
  source 1..17: mol_type = other DNA
tccactctgggaacagc

SEQ ID NO: 136668 - DNA, 17 bp, synthetic construct
  source 1..17: mol_type = other DNA
ccactctgggaacagct

SEQ ID NO: 136669 - DNA, 17 bp, synthetic construct
  source 1..17: mol_type = other DNA
cactctgggaacagctc

SEQ ID NO: 136670 - DNA, 17 bp, synthetic construct
  source 1..17: mol_type = other DNA
actctgggaacagctca

SEQ ID NO: 136671 - DNA, 17 bp, synthetic construct
  source 1..17: mol_type = other DNA
ctctgggaacagctcac

SEQ ID NO: 136672 - DNA, 17 bp, synthetic construct
  source 1..17: mol_type = other DNA
tctgggaacagctcaca

SEQ ID NO: 136673 - DNA, 17 bp, synthetic construct
  source 1..17: mol_type = other DNA
ctgggaacagctcacac

SEQ ID NO: 136674 - DNA, 17 bp, synthetic construct
  source 1..17: mol_type = other DNA
tgggaacagctcacacc

SEQ ID NO: 136675 - DNA, 17 bp, synthetic construct
  source 1..17: mol_type = other DNA
gggaacagctcacaccc

SEQ ID NO: 136676 - DNA, 17 bp, synthetic construct
  source 1..17: mol_type = other DNA
ggaacagctcacacccc

SEQ ID NO: 136677 - DNA, 17 bp, synthetic construct
  source 1..17: mol_type = other DNA
gaacagctcacaccccc

SEQ ID NO: 136678 - DNA, 17 bp, synthetic construct
  source 1..17: mol_type = other DNA
aacagctcacaccccca

SEQ ID NO: 136679 - DNA, 17 bp, synthetic construct
  source 1..17: mol_type = other DNA
acagctcacacccccaa

SEQ ID NO: 136680 - DNA, 17 bp, synthetic construct
  source 1..17: mol_type = other DNA
cagctcacacccccaaa

SEQ ID NO: 136681 - DNA, 17 bp, synthetic construct
  source 1..17: mol_type = other DNA
agctcacacccccaaag

SEQ ID NO: 136682 - DNA, 17 bp, synthetic construct
  source 1..17: mol_type = other DNA
gctcacacccccaaagt

SEQ ID NO: 136683 - DNA, 17 bp, synthetic construct
  source 1..17: mol_type = other DNA
ctcacacccccaaagtg

SEQ ID NO: 136684 - DNA, 17 bp, synthetic construct
  source 1..17: mol_type = other DNA
tcacacccccaaagtgg

SEQ ID NO: 136685 - DNA, 17 bp, synthetic construct
  source 1..17: mol_type = other DNA
cacacccccaaagtggt

SEQ ID NO: 136686 - DNA, 17 bp, synthetic construct
  source 1..17: mol_type = other DNA
acacccccaaagtggtg

SEQ ID NO: 136687 - DNA, 17 bp, synthetic construct
  source 1..17: mol_type = other DNA
cacccccaaagtggtga

SEQ ID NO: 136688 - DNA, 17 bp, synthetic construct
  source 1..17: mol_type = other DNA
acccccaaagtggtgac

SEQ ID NO: 136689 - DNA, 17 bp, synthetic construct
  source 1..17: mol_type = other DNA
cccccaaagtggtgacc

SEQ ID NO: 136690 - DNA, 17 bp, synthetic construct
  source 1..17: mol_type = other DNA
ccccaaagtggtgacca

SEQ ID NO: 136691 - DNA, 17 bp, synthetic construct
  source 1..17: mol_type = other DNA
cccaaagtggtgaccac

SEQ ID NO: 136692 - DNA, 17 bp, synthetic construct
  source 1..17: mol_type = other DNA
ccaaagtggtgaccacc

SEQ ID NO: 136693 - DNA, 17 bp, synthetic construct
  source 1..17: mol_type = other DNA
caaagtggtgaccacca

SEQ ID NO: 136694 - DNA, 17 bp, synthetic construct
  source 1..17: mol_type = other DNA
aaagtggtgaccaccat

SEQ ID NO: 136695 - DNA, 17 bp, synthetic construct
  source 1..17: mol_type = other DNA
aagtggtgaccaccatg

SEQ ID NO: 136696 - DNA, 17 bp, synthetic construct
  source 1..17: mol_type = other DNA
agtggtgaccaccatgg

SEQ ID NO: 136697 - DNA, 17 bp, synthetic construct
  source 1..17: mol_type = other DNA
gtggtgaccaccatggc

SEQ ID NO: 136698 - DNA, 17 bp, synthetic construct
  source 1..17: mol_type = other DNA
tggtgaccaccatggcc

SEQ ID NO: 136699 - DNA, 17 bp, synthetic construct
  source 1..17: mol_type = other DNA
ggtgaccaccatggcca

SEQ ID NO: 136700 - DNA, 17 bp, synthetic construct
  source 1..17: mol_type = other DNA
gtgaccaccatggccac

SEQ ID NO: 136701 - DNA, 17 bp, synthetic construct
  source 1..17: mol_type = other DNA
tgaccaccatggccact

SEQ ID NO: 136702 - DNA, 17 bp, synthetic construct
  source 1..17: mol_type = other DNA
gaccaccatggccacta

SEQ ID NO: 136703 - DNA, 17 bp, synthetic construct
  source 1..17: mol_type = other DNA
accaccatggccactat

SEQ ID NO: 136704 - DNA, 17 bp, synthetic construct
  source 1..17: mol_type = other DNA
ccaccatggccactatg

SEQ ID NO: 136705 - DNA, 17 bp, synthetic construct
  source 1..17: mol_type = other DNA
caccatggccactatgc

SEQ ID NO: 136706 - DNA, 17 bp, synthetic construct
  source 1..17: mol_type = other DNA
accatggccactatgcc

SEQ ID NO: 136707 - DNA, 17 bp, synthetic construct
  source 1..17: mol_type = other DNA
ccatggccactatgccc

SEQ ID NO: 136708 - DNA, 17 bp, synthetic construct
  source 1..17: mol_type = other DNA
catggccactatgccca

SEQ ID NO: 136709 - DNA, 17 bp, synthetic construct
  source 1..17: mol_type = other DNA
atggccactatgcccac

SEQ ID NO: 136710 - DNA, 17 bp, synthetic construct
  source 1..17: mol_type = other DNA
tggccactatgcccaca

SEQ ID NO: 136711 - DNA, 17 bp, synthetic construct
  source 1..17: mol_type = other DNA
ggccactatgcccacag

SEQ ID NO: 136712 - DNA, 17 bp, synthetic construct
  source 1..17: mol_type = other DNA
gccactatgcccacagc

SEQ ID NO: 136713 - DNA, 17 bp, synthetic construct
  source 1..17: mol_type = other DNA
ccactatgcccacagcc

SEQ ID NO: 136714 - DNA, 17 bp, synthetic construct
  source 1..17: mol_type = other DNA
cactatgcccacagcca

SEQ ID NO: 136715 - DNA, 17 bp, synthetic construct
  source 1..17: mol_type = other DNA
actatgcccacagccac

SEQ ID NO: 136716 - DNA, 17 bp, synthetic construct
  source 1..17: mol_type = other DNA
ctatgcccacagccact

SEQ ID NO: 136717 - DNA, 17 bp, synthetic construct
  source 1..17: mol_type = other DNA
tatgcccacagccactg

SEQ ID NO: 136718 - DNA, 17 bp, synthetic construct
  source 1..17: mol_type = other DNA
atgcccacagccactgc

SEQ ID NO: 136719 - DNA, 17 bp, synthetic construct
  source 1..17: mol_type = other DNA
tgcccacagccactgcc

SEQ ID NO: 136720 - DNA, 17 bp, synthetic construct
  source 1..17: mol_type = other DNA
gcccacagccactgcct

SEQ ID NO: 136721 - DNA, 17 bp, synthetic construct
  source 1..17: mol_type = other DNA
cccacagccactgcctc

SEQ ID NO: 136722 - DNA, 17 bp, synthetic construct
  source 1..17: mol_type = other DNA
ccacagccactgcctcc

SEQ ID NO: 136723 - DNA, 17 bp, synthetic construct
  source 1..17: mol_type = other DNA
cacagccactgcctcca

SEQ ID NO: 136724 - DNA, 17 bp, synthetic construct
  source 1..17: mol_type = other DNA
acagccactgcctccac

SEQ ID NO: 136725 - DNA, 17 bp, synthetic construct
  source 1..17: mol_type = other DNA
cagccactgcctccacg

SEQ ID NO: 136726 - DNA, 17 bp, synthetic construct
  source 1..17: mol_type = other DNA
agccactgcctccacgg

SEQ ID NO: 136727 - DNA, 17 bp, synthetic construct
  source 1..17: mol_type = other DNA
gccactgcctccacggt

SEQ ID NO: 136728 - DNA, 17 bp, synthetic construct
  source 1..17: mol_type = other DNA
ccactgcctccacggtt

SEQ ID NO: 136729 - DNA, 17 bp, synthetic construct
  source 1..17: mol_type = other DNA
cactgcctccacggttc

SEQ ID NO: 136730 - DNA, 17 bp, synthetic construct
  source 1..17: mol_type = other DNA
actgcctccacggttcc

SEQ ID NO: 136731 - DNA, 17 bp, synthetic construct
  source 1..17: mol_type = other DNA
ctgcctccacggttccc

SEQ ID NO: 136732 - DNA, 17 bp, synthetic construct
  source 1..17: mol_type = other DNA
tgcctccacggttccca

SEQ ID NO: 136733 - DNA, 17 bp, synthetic construct
  source 1..17: mol_type = other DNA
gcctccacggttcccag

SEQ ID NO: 136734 - DNA, 17 bp, synthetic construct
  source 1..17: mol_type = other DNA
cctccacggttcccagc

SEQ ID NO: 136735 - DNA, 17 bp, synthetic construct
  source 1..17: mol_type = other DNA
ctccacggttcccagct

SEQ ID NO: 136736 - DNA, 17 bp, synthetic construct
  source 1..17: mol_type = other DNA
tccacggttcccagctc

SEQ ID NO: 136737 - DNA, 17 bp, synthetic construct
  source 1..17: mol_type = other DNA
ccacggttcccagctcg

SEQ ID NO: 136738 - DNA, 17 bp, synthetic construct
  source 1..17: mol_type = other DNA
cacggttcccagctcgt

SEQ ID NO: 136739 - DNA, 17 bp, synthetic construct
  source 1..17: mol_type = other DNA
acggttcccagctcgtc

SEQ ID NO: 136740 - DNA, 17 bp, synthetic construct
  source 1..17: mol_type = other DNA
cggttcccagctcgtcc

SEQ ID NO: 136741 - DNA, 17 bp, synthetic construct
  source 1..17: mol_type = other DNA
ggttcccagctcgtcca

SEQ ID NO: 136742 - DNA, 17 bp, synthetic construct
  source 1..17: mol_type = other DNA
gttcccagctcgtccac

SEQ ID NO: 136743 - DNA, 17 bp, synthetic construct
  source 1..17: mol_type = other DNA
ttcccagctcgtccacc

SEQ ID NO: 136744 - DNA, 17 bp, synthetic construct
  source 1..17: mol_type = other DNA
tcccagctcgtccaccg

SEQ ID NO: 136745 - DNA, 17 bp, synthetic construct
  source 1..17: mol_type = other DNA
cccagctcgtccaccgt

SEQ ID NO: 136746 - DNA, 17 bp, synthetic construct
  source 1..17: mol_type = other DNA
ccagctcgtccaccgtg

SEQ ID NO: 136747 - DNA, 17 bp, synthetic construct
  source 1..17: mol_type = other DNA
cagctcgtccaccgtgg

SEQ ID NO: 136748 - DNA, 17 bp, synthetic construct
  source 1..17: mol_type = other DNA
agctcgtccaccgtggg

SEQ ID NO: 136749 - DNA, 17 bp, synthetic construct
  source 1..17: mol_type = other DNA
gctcgtccaccgtgggg

SEQ ID NO: 136750 - DNA, 17 bp, synthetic construct
  source 1..17: mol_type = other DNA
ctcgtccaccgtgggga

SEQ ID NO: 136751 - DNA, 17 bp, synthetic construct
  source 1..17: mol_type = other DNA
tcgtccaccgtggggac

SEQ ID NO: 136752 - DNA, 17 bp, synthetic construct
  source 1..17: mol_type = other DNA
cgtccaccgtggggacc

SEQ ID NO: 136753 - DNA, 17 bp, synthetic construct
  source 1..17: mol_type = other DNA
gtccaccgtggggacca

SEQ ID NO: 136754 - DNA, 17 bp, synthetic construct
  source 1..17: mol_type = other DNA
tccaccgtggggaccac

SEQ ID NO: 136755 - DNA, 17 bp, synthetic construct
  source 1..17: mol_type = other DNA
ccaccgtggggaccacc

SEQ ID NO: 136756 - DNA, 17 bp, synthetic construct
  source 1..17: mol_type = other DNA
caccgtggggaccaccc

SEQ ID NO: 136757 - DNA, 17 bp, synthetic construct
  source 1..17: mol_type = other DNA
accgtggggaccacccg

SEQ ID NO: 136758 - DNA, 17 bp, synthetic construct
  source 1..17: mol_type = other DNA
ccgtggggaccacccgc

SEQ ID NO: 136759 - DNA, 17 bp, synthetic construct
  source 1..17: mol_type = other DNA
cgtggggaccacccgca

SEQ ID NO: 136760 - DNA, 17 bp, synthetic construct
  source 1..17: mol_type = other DNA
gtggggaccacccgcac

SEQ ID NO: 136761 - DNA, 17 bp, synthetic construct
  source 1..17: mol_type = other DNA
tggggaccacccgcacc

SEQ ID NO: 136762 - DNA, 17 bp, synthetic construct
  source 1..17: mol_type = other DNA
ggggaccacccgcaccc

SEQ ID NO: 136763 - DNA, 17 bp, synthetic construct
  source 1..17: mol_type = other DNA
gggaccacccgcacccc

SEQ ID NO: 136764 - DNA, 17 bp, synthetic construct
  source 1..17: mol_type = other DNA
ggaccacccgcacccct

SEQ ID NO: 136765 - DNA, 17 bp, synthetic construct
  source 1..17: mol_type = other DNA
gaccacccgcacccctg

SEQ ID NO: 136766 - DNA, 17 bp, synthetic construct
  source 1..17: mol_type = other DNA
accacccgcacccctgc

SEQ ID NO: 136767 - DNA, 17 bp, synthetic construct
  source 1..17: mol_type = other DNA
ccacccgcacccctgca

SEQ ID NO: 136768 - DNA, 17 bp, synthetic construct
  source 1..17: mol_type = other DNA
cacccgcacccctgcag

SEQ ID NO: 136769 - DNA, 17 bp, synthetic construct
  source 1..17: mol_type = other DNA
acccgcacccctgcagt

SEQ ID NO: 136770 - DNA, 17 bp, synthetic construct
  source 1..17: mol_type = other DNA
cccgcacccctgcagtg

SEQ ID NO: 136771 - DNA, 17 bp, synthetic construct
  source 1..17: mol_type = other DNA
ccgcacccctgcagtgc

SEQ ID NO: 136772 - DNA, 17 bp, synthetic construct
  source 1..17: mol_type = other DNA
cgcacccctgcagtgct

SEQ ID NO: 136773 - DNA, 17 bp, synthetic construct
  source 1..17: mol_type = other DNA
gcacccctgcagtgctc

SEQ ID NO: 136774 - DNA, 17 bp, synthetic construct
  source 1..17: mol_type = other DNA
cacccctgcagtgctcc

SEQ ID NO: 136775 - DNA, 17 bp, synthetic construct
  source 1..17: mol_type = other DNA
acccctgcagtgctccc

SEQ ID NO: 136776 - DNA, 17 bp, synthetic construct
  source 1..17: mol_type = other DNA
cccctgcagtgctcccc

SEQ ID NO: 136777 - DNA, 17 bp, synthetic construct
  source 1..17: mol_type = other DNA
ccctgcagtgctcccca

SEQ ID NO: 136778 - DNA, 17 bp, synthetic construct
  source 1..17: mol_type = other DNA
cctgcagtgctccccag

SEQ ID NO: 136779 - DNA, 17 bp, synthetic construct
  source 1..17: mol_type = other DNA
ctgcagtgctccccagc

SEQ ID NO: 136780 - DNA, 17 bp, synthetic construct
  source 1..17: mol_type = other DNA
tgcagtgctccccagca

SEQ ID NO: 136781 - DNA, 17 bp, synthetic construct
  source 1..17: mol_type = other DNA
gcagtgctccccagcag

SEQ ID NO: 136782 - DNA, 17 bp, synthetic construct
  source 1..17: mol_type = other DNA
cagtgctccccagcagc

SEQ ID NO: 136783 - DNA, 17 bp, synthetic construct
  source 1..17: mol_type = other DNA
agtgctccccagcagcc

SEQ ID NO: 136784 - DNA, 17 bp, synthetic construct
  source 1..17: mol_type = other DNA
gtgctccccagcagcct

SEQ ID NO: 136785 - DNA, 17 bp, synthetic construct
  source 1..17: mol_type = other DNA
tgctccccagcagcctg

SEQ ID NO: 136786 - DNA, 17 bp, synthetic construct
  source 1..17: mol_type = other DNA
gctccccagcagcctgc

SEQ ID NO: 136787 - DNA, 17 bp, synthetic construct
  source 1..17: mol_type = other DNA
ctccccagcagcctgcc

SEQ ID NO: 136788 - DNA, 17 bp, synthetic construct
  source 1..17: mol_type = other DNA
tccccagcagcctgcca

SEQ ID NO: 136789 - DNA, 17 bp, synthetic construct
  source 1..17: mol_type = other DNA
ccccagcagcctgccaa

SEQ ID NO: 136790 - DNA, 17 bp, synthetic construct
  source 1..17: mol_type = other DNA
cccagcagcctgccaac

SEQ ID NO: 136791 - DNA, 17 bp, synthetic construct
  source 1..17: mol_type = other DNA
ccagcagcctgccaacc

SEQ ID NO: 136792 - DNA, 17 bp, synthetic construct
  source 1..17: mol_type = other DNA
cagcagcctgccaacct

SEQ ID NO: 136793 - DNA, 17 bp, synthetic construct
  source 1..17: mol_type = other DNA
agcagcctgccaacctt

SEQ ID NO: 136794 - DNA, 17 bp, synthetic construct
  source 1..17: mol_type = other DNA
gcagcctgccaaccttc

SEQ ID NO: 136795 - DNA, 17 bp, synthetic construct
  source 1..17: mol_type = other DNA
cagcctgccaaccttca

SEQ ID NO: 136796 - DNA, 17 bp, synthetic construct
  source 1..17: mol_type = other DNA
agcctgccaaccttcag

SEQ ID NO: 136797 - DNA, 17 bp, synthetic construct
  source 1..17: mol_type = other DNA
gcctgccaaccttcagc

SEQ ID NO: 136798 - DNA, 17 bp, synthetic construct
  source 1..17: mol_type = other DNA
cctgccaaccttcagcg

SEQ ID NO: 136799 - DNA, 17 bp, synthetic construct
  source 1..17: mol_type = other DNA
ctgccaaccttcagcgt

SEQ ID NO: 136800 - DNA, 17 bp, synthetic construct
  source 1..17: mol_type = other DNA
tgccaaccttcagcgtg

SEQ ID NO: 136801 - DNA, 17 bp, synthetic construct
  source 1..17: mol_type = other DNA
gccaaccttcagcgtgt

SEQ ID NO: 136802 - DNA, 17 bp, synthetic construct
  source 1..17: mol_type = other DNA
ccaaccttcagcgtgtc

SEQ ID NO: 136803 - DNA, 17 bp, synthetic construct
  source 1..17: mol_type = other DNA
caaccttcagcgtgtcc

SEQ ID NO: 136804 - DNA, 17 bp, synthetic construct
  source 1..17: mol_type = other DNA
aaccttcagcgtgtcca

SEQ ID NO: 136805 - DNA, 17 bp, synthetic construct
  source 1..17: mol_type = other DNA
accttcagcgtgtccac

SEQ ID NO: 136806 - DNA, 17 bp, synthetic construct
  source 1..17: mol_type = other DNA
ccttcagcgtgtccact

SEQ ID NO: 136807 - DNA, 17 bp, synthetic construct
  source 1..17: mol_type = other DNA
cttcagcgtgtccactg

SEQ ID NO: 136808 - DNA, 17 bp, synthetic construct
  source 1..17: mol_type = other DNA
ttcagcgtgtccactgt

SEQ ID NO: 136809 - DNA, 17 bp, synthetic construct
  source 1..17: mol_type = other DNA
tcagcgtgtccactgtg

SEQ ID NO: 136810 - DNA, 17 bp, synthetic construct
  source 1..17: mol_type = other DNA
cagcgtgtccactgtgt

SEQ ID NO: 136811 - DNA, 17 bp, synthetic construct
  source 1..17: mol_type = other DNA
agcgtgtccactgtgtc

SEQ ID NO: 136812 - DNA, 17 bp, synthetic construct
  source 1..17: mol_type = other DNA
gcgtgtccactgtgtcc

SEQ ID NO: 136813 - DNA, 17 bp, synthetic construct
  source 1..17: mol_type = other DNA
cgtgtccactgtgtcct

SEQ ID NO: 136814 - DNA, 17 bp, synthetic construct
  source 1..17: mol_type = other DNA
gtgtccactgtgtcctc

SEQ ID NO: 136815 - DNA, 17 bp, synthetic construct
  source 1..17: mol_type = other DNA
tgtccactgtgtcctcc

SEQ ID NO: 136816 - DNA, 17 bp, synthetic construct
  source 1..17: mol_type = other DNA
gtccactgtgtcctcct

SEQ ID NO: 136817 - DNA, 17 bp, synthetic construct
  source 1..17: mol_type = other DNA
tccactgtgtcctcctc

SEQ ID NO: 136818 - DNA, 17 bp, synthetic construct
  source 1..17: mol_type = other DNA
ccactgtgtcctcctca

SEQ ID NO: 136819 - DNA, 17 bp, synthetic construct
  source 1..17: mol_type = other DNA
cactgtgtcctcctcag

SEQ ID NO: 136820 - DNA, 17 bp, synthetic construct
  source 1..17: mol_type = other DNA
actgtgtcctcctcagt

SEQ ID NO: 136821 - DNA, 17 bp, synthetic construct
  source 1..17: mol_type = other DNA
ctgtgtcctcctcagtc

SEQ ID NO: 136822 - DNA, 17 bp, synthetic construct
  source 1..17: mol_type = other DNA
tgtgtcctcctcagtcc

SEQ ID NO: 136823 - DNA, 17 bp, synthetic construct
  source 1..17: mol_type = other DNA
gtgtcctcctcagtcct

SEQ ID NO: 136824 - DNA, 17 bp, synthetic construct
  source 1..17: mol_type = other DNA
tgtcctcctcagtcctc

SEQ ID NO: 136825 - DNA, 17 bp, synthetic construct
  source 1..17: mol_type = other DNA
gtcctcctcagtcctca

SEQ ID NO: 136826 - DNA, 17 bp, synthetic construct
  source 1..17: mol_type = other DNA
tcctcctcagtcctcac

SEQ ID NO: 136827 - DNA, 17 bp, synthetic construct
  source 1..17: mol_type = other DNA
cctcctcagtcctcacc

SEQ ID NO: 136828 - DNA, 17 bp, synthetic construct
  source 1..17: mol_type = other DNA
ctcctcagtcctcacca

SEQ ID NO: 136829 - DNA, 17 bp, synthetic construct
  source 1..17: mol_type = other DNA
tcctcagtcctcaccac

SEQ ID NO: 136830 - DNA, 17 bp, synthetic construct
  source 1..17: mol_type = other DNA
cctcagtcctcaccacc

SEQ ID NO: 136831 - DNA, 17 bp, synthetic construct
  source 1..17: mol_type = other DNA
ctcagtcctcaccaccc

SEQ ID NO: 136832 - DNA, 17 bp, synthetic construct
  source 1..17: mol_type = other DNA
tcagtcctcaccaccct

SEQ ID NO: 136833 - DNA, 17 bp, synthetic construct
  source 1..17: mol_type = other DNA
cagtcctcaccaccctg

SEQ ID NO: 136834 - DNA, 17 bp, synthetic construct
  source 1..17: mol_type = other DNA
agtcctcaccaccctga

SEQ ID NO: 136835 - DNA, 17 bp, synthetic construct
  source 1..17: mol_type = other DNA
gtcctcaccaccctgag

SEQ ID NO: 136836 - DNA, 17 bp, synthetic construct
  source 1..17: mol_type = other DNA
tcctcaccaccctgaga

SEQ ID NO: 136837 - DNA, 17 bp, synthetic construct
  source 1..17: mol_type = other DNA
cctcaccaccctgagac

SEQ ID NO: 136838 - DNA, 17 bp, synthetic construct
  source 1..17: mol_type = other DNA
ctcaccaccctgagacc

SEQ ID NO: 136839 - DNA, 17 bp, synthetic construct
  source 1..17: mol_type = other DNA
tcaccaccctgagaccc

SEQ ID NO: 136840 - DNA, 17 bp, synthetic construct
  source 1..17: mol_type = other DNA
caccaccctgagaccca

SEQ ID NO: 136841 - DNA, 17 bp, synthetic construct
  source 1..17: mol_type = other DNA
accaccctgagacccac

SEQ ID NO: 136842 - DNA, 17 bp, synthetic construct
  source 1..17: mol_type = other DNA
ccaccctgagacccact

SEQ ID NO: 136843 - DNA, 17 bp, synthetic construct
  source 1..17: mol_type = other DNA
caccctgagacccactg

SEQ ID NO: 136844 - DNA, 17 bp, synthetic construct
  source 1..17: mol_type = other DNA
accctgagacccactgg

SEQ ID NO: 136845 - DNA, 17 bp, synthetic construct
  source 1..17: mol_type = other DNA
ccctgagacccactggc

SEQ ID NO: 136846 - DNA, 17 bp, synthetic construct
  source 1..17: mol_type = other DNA
cctgagacccactggct

SEQ ID NO: 136847 - DNA, 17 bp, synthetic construct
  source 1..17: mol_type = other DNA
ctgagacccactggctt

SEQ ID NO: 136848 - DNA, 17 bp, synthetic construct
  source 1..17: mol_type = other DNA
tgagacccactggcttc

SEQ ID NO: 136849 - DNA, 17 bp, synthetic construct
  source 1..17: mol_type = other DNA
gagacccactggcttcc

SEQ ID NO: 136850 - DNA, 17 bp, synthetic construct
  source 1..17: mol_type = other DNA
agacccactggcttccc

SEQ ID NO: 136851 - DNA, 17 bp, synthetic construct
  source 1..17: mol_type = other DNA
gacccactggcttcccc

SEQ ID NO: 136852 - DNA, 17 bp, synthetic construct
  source 1..17: mol_type = other DNA
acccactggcttcccca

SEQ ID NO: 136853 - DNA, 17 bp, synthetic construct
  source 1..17: mol_type = other DNA
cccactggcttccccag

SEQ ID NO: 136854 - DNA, 17 bp, synthetic construct
  source 1..17: mol_type = other DNA
ccactggcttccccagc

SEQ ID NO: 136855 - DNA, 17 bp, synthetic construct
  source 1..17: mol_type = other DNA
cactggcttccccagct

SEQ ID NO: 136856 - DNA, 17 bp, synthetic construct
  source 1..17: mol_type = other DNA
actggcttccccagctc

SEQ ID NO: 136857 - DNA, 17 bp, synthetic construct
  source 1..17: mol_type = other DNA
ctggcttccccagctcc

SEQ ID NO: 136858 - DNA, 17 bp, synthetic construct
  source 1..17: mol_type = other DNA
tggcttccccagctccc

SEQ ID NO: 136859 - DNA, 17 bp, synthetic construct
  source 1..17: mol_type = other DNA
ggcttccccagctccca

SEQ ID NO: 136860 - DNA, 17 bp, synthetic construct
  source 1..17: mol_type = other DNA
gcttccccagctcccac

SEQ ID NO: 136861 - DNA, 17 bp, synthetic construct
  source 1..17: mol_type = other DNA
cttccccagctcccact

SEQ ID NO: 136862 - DNA, 17 bp, synthetic construct
  source 1..17: mol_type = other DNA
ttccccagctcccactt

SEQ ID NO: 136863 - DNA, 17 bp, synthetic construct
  source 1..17: mol_type = other DNA
tccccagctcccacttc

SEQ ID NO: 136864 - DNA, 17 bp, synthetic construct
  source 1..17: mol_type = other DNA
ccccagctcccacttct

SEQ ID NO: 136865 - DNA, 17 bp, synthetic construct
  source 1..17: mol_type = other DNA
cccagctcccacttctc

SEQ ID NO: 136866 - DNA, 17 bp, synthetic construct
  source 1..17: mol_type = other DNA
ccagctcccacttctct

SEQ ID NO: 136867 - DNA, 17 bp, synthetic construct
  source 1..17: mol_type = other DNA
cagctcccacttctcta

SEQ ID NO: 136868 - DNA, 17 bp, synthetic construct
  source 1..17: mol_type = other DNA
agctcccacttctctac

SEQ ID NO: 136869 - DNA, 17 bp, synthetic construct
  source 1..17: mol_type = other DNA
gctcccacttctctact

SEQ ID NO: 136870 - DNA, 17 bp, synthetic construct
  source 1..17: mol_type = other DNA
ctcccacttctctactc

SEQ ID NO: 136871 - DNA, 17 bp, synthetic construct
  source 1..17: mol_type = other DNA
tcccacttctctactcc

SEQ ID NO: 136872 - DNA, 17 bp, synthetic construct
  source 1..17: mol_type = other DNA
cccacttctctactccc

SEQ ID NO: 136873 - DNA, 17 bp, synthetic construct
  source 1..17: mol_type = other DNA
ccacttctctactccct

SEQ ID NO: 136874 - DNA, 17 bp, synthetic construct
  source 1..17: mol_type = other DNA
cacttctctactccctg

SEQ ID NO: 136875 - DNA, 17 bp, synthetic construct
  source 1..17: mol_type = other DNA
acttctctactccctgc

SEQ ID NO: 136876 - DNA, 17 bp, synthetic construct
  source 1..17: mol_type = other DNA
cttctctactccctgct

SEQ ID NO: 136877 - DNA, 17 bp, synthetic construct
  source 1..17: mol_type = other DNA
ttctctactccctgctt

SEQ ID NO: 136878 - DNA, 17 bp, synthetic construct
  source 1..17: mol_type = other DNA
tctctactccctgcttc

SEQ ID NO: 136879 - DNA, 17 bp, synthetic construct
  source 1..17: mol_type = other DNA
ctctactccctgcttct

SEQ ID NO: 136880 - DNA, 17 bp, synthetic construct
  source 1..17: mol_type = other DNA
tctactccctgcttctg

SEQ ID NO: 136881 - DNA, 17 bp, synthetic construct
  source 1..17: mol_type = other DNA
ctactccctgcttctgc

SEQ ID NO: 136882 - DNA, 17 bp, synthetic construct
  source 1..17: mol_type = other DNA
tactccctgcttctgca

SEQ ID NO: 136883 - DNA, 17 bp, synthetic construct
  source 1..17: mol_type = other DNA
actccctgcttctgcag

SEQ ID NO: 136884 - DNA, 17 bp, synthetic construct
  source 1..17: mol_type = other DNA
ctccctgcttctgcagg

SEQ ID NO: 136885 - DNA, 17 bp, synthetic construct
  source 1..17: mol_type = other DNA
tccctgcttctgcaggg

SEQ ID NO: 136886 - DNA, 17 bp, synthetic construct
  source 1..17: mol_type = other DNA
ccctgcttctgcagggc

SEQ ID NO: 136887 - DNA, 17 bp, synthetic construct
  source 1..17: mol_type = other DNA
cctgcttctgcagggca

SEQ ID NO: 136888 - DNA, 17 bp, synthetic construct
  source 1..17: mol_type = other DNA
ctgcttctgcagggcat

SEQ ID NO: 136889 - DNA, 17 bp, synthetic construct
  source 1..17: mol_type = other DNA
tgcttctgcagggcatt

SEQ ID NO: 136890 - DNA, 17 bp, synthetic construct
  source 1..17: mol_type = other DNA
gcttctgcagggcattt

SEQ ID NO: 136891 - DNA, 17 bp, synthetic construct
  source 1..17: mol_type = other DNA
cttctgcagggcatttg

SEQ ID NO: 136892 - DNA, 17 bp, synthetic construct
  source 1..17: mol_type = other DNA
ttctgcagggcatttgg

SEQ ID NO: 136893 - DNA, 17 bp, synthetic construct
  source 1..17: mol_type = other DNA
tctgcagggcatttgga

SEQ ID NO: 136894 - DNA, 17 bp, synthetic construct
  source 1..17: mol_type = other DNA
ctgcagggcatttggac

SEQ ID NO: 136895 - DNA, 17 bp, synthetic construct
  source 1..17: mol_type = other DNA
tgcagggcatttggaca

SEQ ID NO: 136896 - DNA, 17 bp, synthetic construct
  source 1..17: mol_type = other DNA
gcagggcatttggacag

SEQ ID NO: 136897 - DNA, 17 bp, synthetic construct
  source 1..17: mol_type = other DNA
cagggcatttggacagt

SEQ ID NO: 136898 - DNA, 17 bp, synthetic construct
  source 1..17: mol_type = other DNA
agggcatttggacagtt

SEQ ID NO: 136899 - DNA, 17 bp, synthetic construct
  source 1..17: mol_type = other DNA
gggcatttggacagttt

SEQ ID NO: 136900 - DNA, 17 bp, synthetic construct
  source 1..17: mol_type = other DNA
ggcatttggacagtttt

SEQ ID NO: 136901 - DNA, 17 bp, synthetic construct
  source 1..17: mol_type = other DNA
gcatttggacagttttt

SEQ ID NO: 136902 - DNA, 17 bp, synthetic construct
  source 1..17: mol_type = other DNA
catttggacagtttttc

SEQ ID NO: 136903 - DNA, 17 bp, synthetic construct
  source 1..17: mol_type = other DNA
atttggacagtttttct

SEQ ID NO: 136904 - DNA, 17 bp, synthetic construct
  source 1..17: mol_type = other DNA
tttggacagtttttctc

SEQ ID NO: 136905 - DNA, 17 bp, synthetic construct
  source 1..17: mol_type = other DNA
ttggacagtttttctcg

SEQ ID NO: 136906 - DNA, 17 bp, synthetic construct
  source 1..17: mol_type = other DNA
tggacagtttttctcgc

SEQ ID NO: 136907 - DNA, 17 bp, synthetic construct
  source 1..17: mol_type = other DNA
ggacagtttttctcgcc

SEQ ID NO: 136908 - DNA, 17 bp, synthetic construct
  source 1..17: mol_type = other DNA
gacagtttttctcgccc

SEQ ID NO: 136909 - DNA, 17 bp, synthetic construct
  source 1..17: mol_type = other DNA
acagtttttctcgcccg

SEQ ID NO: 136910 - DNA, 17 bp, synthetic construct
  source 1..17: mol_type = other DNA
cagtttttctcgcccgg

SEQ ID NO: 136911 - DNA, 17 bp, synthetic construct
  source 1..17: mol_type = other DNA
agtttttctcgcccggt

SEQ ID NO: 136912 - DNA, 17 bp, synthetic construct
  source 1..17: mol_type = other DNA
gtttttctcgcccggtg

SEQ ID NO: 136913 - DNA, 17 bp, synthetic construct
  source 1..17: mol_type = other DNA
tttttctcgcccggtga

SEQ ID NO: 136914 - DNA, 17 bp, synthetic construct
  source 1..17: mol_type = other DNA
ttttctcgcccggtgag

SEQ ID NO: 136915 - DNA, 17 bp, synthetic construct
  source 1..17: mol_type = other DNA
tttctcgcccggtgagt

SEQ ID NO: 136916 - DNA, 17 bp, synthetic construct
  source 1..17: mol_type = other DNA
ttctcgcccggtgagtg

SEQ ID NO: 136917 - DNA, 17 bp, synthetic construct
  source 1..17: mol_type = other DNA
tctcgcccggtgagtgc

SEQ ID NO: 136918 - DNA, 17 bp, synthetic construct
  source 1..17: mol_type = other DNA
ctcgcccggtgagtgca

SEQ ID NO: 136919 - DNA, 17 bp, synthetic construct
  source 1..17: mol_type = other DNA
tcgcccggtgagtgcat

SEQ ID NO: 136920 - DNA, 17 bp, synthetic construct
  source 1..17: mol_type = other DNA
cgcccggtgagtgcatg

SEQ ID NO: 136921 - DNA, 17 bp, synthetic construct
  source 1..17: mol_type = other DNA
gcccggtgagtgcatgt

SEQ ID NO: 136922 - DNA, 17 bp, synthetic construct
  source 1..17: mol_type = other DNA
cccggtgagtgcatgtg

SEQ ID NO: 136923 - DNA, 17 bp, synthetic construct
  source 1..17: mol_type = other DNA
ccggtgagtgcatgtgg

SEQ ID NO: 136924 - DNA, 17 bp, synthetic construct
  source 1..17: mol_type = other DNA
cggtgagtgcatgtgga

SEQ ID NO: 136925 - DNA, 17 bp, synthetic construct
  source 1..17: mol_type = other DNA
ggtgagtgcatgtggat

SEQ ID NO: 136926 - DNA, 17 bp, synthetic construct
  source 1..17: mol_type = other DNA
gtgagtgcatgtggata

SEQ ID NO: 136927 - DNA, 17 bp, synthetic construct
  source 1..17: mol_type = other DNA
tgagtgcatgtggataa

SEQ ID NO: 136928 - DNA, 17 bp, synthetic construct
  source 1..17: mol_type = other DNA
gagtgcatgtggataac

SEQ ID NO: 136929 - DNA, 17 bp, synthetic construct
  source 1..17: mol_type = other DNA
agtgcatgtggataaca

SEQ ID NO: 136930 - DNA, 17 bp, synthetic construct
  source 1..17: mol_type = other DNA
gtgcatgtggataacac

SEQ ID NO: 136931 - DNA, 17 bp, synthetic construct
  source 1..17: mol_type = other DNA
tgcatgtggataacact

SEQ ID NO: 136932 - DNA, 17 bp, synthetic construct
  source 1..17: mol_type = other DNA
gcatgtggataacactg

SEQ ID NO: 136933 - DNA, 17 bp, synthetic construct
  source 1..17: mol_type = other DNA
catgtggataacactgc

SEQ ID NO: 136934 - DNA, 17 bp, synthetic construct
  source 1..17: mol_type = other DNA
atgtggataacactgct

SEQ ID NO: 136935 - DNA, 17 bp, synthetic construct
  source 1..17: mol_type = other DNA
tgtggataacactgctg

SEQ ID NO: 136936 - DNA, 17 bp, synthetic construct
  source 1..17: mol_type = other DNA
gtggataacactgctgt

SEQ ID NO: 136937 - DNA, 17 bp, synthetic construct
  source 1..17: mol_type = other DNA
tggataacactgctgta

SEQ ID NO: 136938 - DNA, 17 bp, synthetic construct
  source 1..17: mol_type = other DNA
ggataacactgctgtac

SEQ ID NO: 136939 - DNA, 17 bp, synthetic construct
  source 1..17: mol_type = other DNA
gataacactgctgtacc

SEQ ID NO: 136940 - DNA, 17 bp, synthetic construct
  source 1..17: mol_type = other DNA
ataacactgctgtaccc

SEQ ID NO: 136941 - DNA, 17 bp, synthetic construct
  source 1..17: mol_type = other DNA
taacactgctgtaccct

SEQ ID NO: 136942 - DNA, 17 bp, synthetic construct
  source 1..17: mol_type = other DNA
aacactgctgtaccctt

SEQ ID NO: 136943 - DNA, 17 bp, synthetic construct
  source 1..17: mol_type = other DNA
acactgctgtacccttt

SEQ ID NO: 136944 - DNA, 17 bp, synthetic construct
  source 1..17: mol_type = other DNA
cactgctgtaccctttc

SEQ ID NO: 136945 - DNA, 17 bp, synthetic construct
  source 1..17: mol_type = other DNA
actgctgtaccctttcc

SEQ ID NO: 136946 - DNA, 17 bp, synthetic construct
  source 1..17: mol_type = other DNA
ctgctgtaccctttccc

SEQ ID NO: 136947 - DNA, 17 bp, synthetic construct
  source 1..17: mol_type = other DNA
tgctgtaccctttcccc

SEQ ID NO: 136948 - DNA, 17 bp, synthetic construct
  source 1..17: mol_type = other DNA
gctgtaccctttcccca

SEQ ID NO: 136949 - DNA, 17 bp, synthetic construct
  source 1..17: mol_type = other DNA
ctgtaccctttccccac

SEQ ID NO: 136950 - DNA, 17 bp, synthetic construct
  source 1..17: mol_type = other DNA
tgtaccctttccccaca

SEQ ID NO: 136951 - DNA, 17 bp, synthetic construct
  source 1..17: mol_type = other DNA
gtaccctttccccacat

SEQ ID NO: 136952 - DNA, 17 bp, synthetic construct
  source 1..17: mol_type = other DNA
taccctttccccacatg

SEQ ID NO: 136953 - DNA, 17 bp, synthetic construct
  source 1..17: mol_type = other DNA
accctttccccacatgc

SEQ ID NO: 136954 - DNA, 17 bp, synthetic construct
  source 1..17: mol_type = other DNA
ccctttccccacatgct

SEQ ID NO: 136955 - DNA, 17 bp, synthetic construct
  source 1..17: mol_type = other DNA
cctttccccacatgcta

SEQ ID NO: 136956 - DNA, 17 bp, synthetic construct
  source 1..17: mol_type = other DNA
ctttccccacatgctat

SEQ ID NO: 136957 - DNA, 17 bp, synthetic construct
  source 1..17: mol_type = other DNA
tttccccacatgctatg

SEQ ID NO: 136958 - DNA, 17 bp, synthetic construct
  source 1..17: mol_type = other DNA
ttccccacatgctatgc

SEQ ID NO: 136959 - DNA, 17 bp, synthetic construct
  source 1..17: mol_type = other DNA
tccccacatgctatgcc

SEQ ID NO: 136960 - DNA, 17 bp, synthetic construct
  source 1..17: mol_type = other DNA
ccccacatgctatgcca

SEQ ID NO: 136961 - DNA, 17 bp, synthetic construct
  source 1..17: mol_type = other DNA
cccacatgctatgccaa

SEQ ID NO: 136962 - DNA, 17 bp, synthetic construct
  source 1..17: mol_type = other DNA
ccacatgctatgccaac

SEQ ID NO: 136963 - DNA, 17 bp, synthetic construct
  source 1..17: mol_type = other DNA
cacatgctatgccaacc

SEQ ID NO: 136964 - DNA, 17 bp, synthetic construct
  source 1..17: mol_type = other DNA
acatgctatgccaacct

SEQ ID NO: 136965 - DNA, 17 bp, synthetic construct
  source 1..17: mol_type = other DNA
catgctatgccaacctg

SEQ ID NO: 136966 - DNA, 17 bp, synthetic construct
  source 1..17: mol_type = other DNA
atgctatgccaacctgg

SEQ ID NO: 136967 - DNA, 17 bp, synthetic construct
  source 1..17: mol_type = other DNA
tgctatgccaacctggg

SEQ ID NO: 136968 - DNA, 17 bp, synthetic construct
  source 1..17: mol_type = other DNA
gctatgccaacctgggt

SEQ ID NO: 136969 - DNA, 17 bp, synthetic construct
  source 1..17: mol_type = other DNA
ctatgccaacctgggtc

SEQ ID NO: 136970 - DNA, 17 bp, synthetic construct
  source 1..17: mol_type = other DNA
tatgccaacctgggtct

SEQ ID NO: 136971 - DNA, 17 bp, synthetic construct
  source 1..17: mol_type = other DNA
atgccaacctgggtctg

SEQ ID NO: 136972 - DNA, 17 bp, synthetic construct
  source 1..17: mol_type = other DNA
tgccaacctgggtctgc

SEQ ID NO: 136973 - DNA, 17 bp, synthetic construct
  source 1..17: mol_type = other DNA
gccaacctgggtctgcc

SEQ ID NO: 136974 - DNA, 17 bp, synthetic construct
  source 1..17: mol_type = other DNA
ccaacctgggtctgcct

SEQ ID NO: 136975 - DNA, 17 bp, synthetic construct
  source 1..17: mol_type = other DNA
caacctgggtctgcctg

SEQ ID NO: 136976 - DNA, 17 bp, synthetic construct
  source 1..17: mol_type = other DNA
aacctgggtctgcctgt

SEQ ID NO: 136977 - DNA, 17 bp, synthetic construct
  source 1..17: mol_type = other DNA
acctgggtctgcctgtc

SEQ ID NO: 136978 - DNA, 17 bp, synthetic construct
  source 1..17: mol_type = other DNA
cctgggtctgcctgtcc

SEQ ID NO: 136979 - DNA, 17 bp, synthetic construct
  source 1..17: mol_type = other DNA
ctgggtctgcctgtcct

SEQ ID NO: 136980 - DNA, 17 bp, synthetic construct
  source 1..17: mol_type = other DNA
tgggtctgcctgtcctg

SEQ ID NO: 136981 - DNA, 17 bp, synthetic construct
  source 1..17: mol_type = other DNA
gggtctgcctgtcctgg

SEQ ID NO: 136982 - DNA, 17 bp, synthetic construct
  source 1..17: mol_type = other DNA
ggtctgcctgtcctggg

SEQ ID NO: 136983 - DNA, 17 bp, synthetic construct
  source 1..17: mol_type = other DNA
gtctgcctgtcctggga

SEQ ID NO: 136984 - DNA, 17 bp, synthetic construct
  source 1..17: mol_type = other DNA
tctgcctgtcctgggag

SEQ ID NO: 136985 - DNA, 17 bp, synthetic construct
  source 1..17: mol_type = other DNA
ctgcctgtcctgggagc

SEQ ID NO: 136986 - DNA, 17 bp, synthetic construct
  source 1..17: mol_type = other DNA
tgcctgtcctgggagcc

SEQ ID NO: 136987 - DNA, 17 bp, synthetic construct
  source 1..17: mol_type = other DNA
gcctgtcctgggagcca

SEQ ID NO: 136988 - DNA, 17 bp, synthetic construct
  source 1..17: mol_type = other DNA
cctgtcctgggagccag

SEQ ID NO: 136989 - DNA, 17 bp, synthetic construct
  source 1..17: mol_type = other DNA
ctgtcctgggagccagt

SEQ ID NO: 136990 - DNA, 17 bp, synthetic construct
  source 1..17: mol_type = other DNA
tgtcctgggagccagtg

SEQ ID NO: 136991 - DNA, 17 bp, synthetic construct
  source 1..17: mol_type = other DNA
gtcctgggagccagtgg

SEQ ID NO: 136992 - DNA, 17 bp, synthetic construct
  source 1..17: mol_type = other DNA
tcctgggagccagtggc

SEQ ID NO: 136993 - DNA, 17 bp, synthetic construct
  source 1..17: mol_type = other DNA
cctgggagccagtggct

SEQ ID NO: 136994 - DNA, 17 bp, synthetic construct
  source 1..17: mol_type = other DNA
ctgggagccagtggctt

SEQ ID NO: 136995 - DNA, 17 bp, synthetic construct
  source 1..17: mol_type = other DNA
tgggagccagtggcttt

SEQ ID NO: 136996 - DNA, 17 bp, synthetic construct
  source 1..17: mol_type = other DNA
gggagccagtggctttc

SEQ ID NO: 136997 - DNA, 17 bp, synthetic construct
  source 1..17: mol_type = other DNA
ggagccagtggctttct

SEQ ID NO: 136998 - DNA, 17 bp, synthetic construct
  source 1..17: mol_type = other DNA
gagccagtggctttctc

SEQ ID NO: 136999 - DNA, 17 bp, synthetic construct
  source 1..17: mol_type = other DNA
agccagtggctttctcc

SEQ ID NO: 137000 - DNA, 17 bp, synthetic construct
  source 1..17: mol_type = other DNA
gccagtggctttctccc

SEQ ID NO: 137001 - DNA, 17 bp, synthetic construct
  source 1..17: mol_type = other DNA
ccagtggctttctccct

SEQ ID NO: 137002 - DNA, 17 bp, synthetic construct
  source 1..17: mol_type = other DNA
cagtggctttctccctg

SEQ ID NO: 137003 - DNA, 17 bp, synthetic construct
  source 1..17: mol_type = other DNA
agtggctttctccctgc

SEQ ID NO: 137004 - DNA, 17 bp, synthetic construct
  source 1..17: mol_type = other DNA
gtggctttctccctgct

SEQ ID NO: 137005 - DNA, 17 bp, synthetic construct
  source 1..17: mol_type = other DNA
tggctttctccctgctg

SEQ ID NO: 137006 - DNA, 17 bp, synthetic construct
  source 1..17: mol_type = other DNA
ggctttctccctgctgg

SEQ ID NO: 137007 - DNA, 17 bp, synthetic construct
  source 1..17: mol_type = other DNA
gctttctccctgctggt

SEQ ID NO: 137008 - DNA, 17 bp, synthetic construct
  source 1..17: mol_type = other DNA
ctttctccctgctggtc

SEQ ID NO: 137009 - DNA, 17 bp, synthetic construct
  source 1..17: mol_type = other DNA
tttctccctgctggtca

SEQ ID NO: 137010 - DNA, 17 bp, synthetic construct
  source 1..17: mol_type = other DNA
ttctccctgctggtcat

SEQ ID NO: 137011 - DNA, 17 bp, synthetic construct
  source 1..17: mol_type = other DNA
tctccctgctggtcatg

SEQ ID NO: 137012 - DNA, 17 bp, synthetic construct
  source 1..17: mol_type = other DNA
ctccctgctggtcatgt

SEQ ID NO: 137013 - DNA, 17 bp, synthetic construct
  source 1..17: mol_type = other DNA
tccctgctggtcatgtt

SEQ ID NO: 137014 - DNA, 17 bp, synthetic construct
  source 1..17: mol_type = other DNA
ccctgctggtcatgttt

SEQ ID NO: 137015 - DNA, 17 bp, synthetic construct
  source 1..17: mol_type = other DNA
cctgctggtcatgtttg

SEQ ID NO: 137016 - DNA, 17 bp, synthetic construct
  source 1..17: mol_type = other DNA
ctgctggtcatgtttgt

SEQ ID NO: 137017 - DNA, 17 bp, synthetic construct
  source 1..17: mol_type = other DNA
tgctggtcatgtttgtt

SEQ ID NO: 137018 - DNA, 17 bp, synthetic construct
  source 1..17: mol_type = other DNA
gctggtcatgtttgttc

SEQ ID NO: 137019 - DNA, 17 bp, synthetic construct
  source 1..17: mol_type = other DNA
ctggtcatgtttgttcc

SEQ ID NO: 137020 - DNA, 17 bp, synthetic construct
  source 1..17: mol_type = other DNA
tggtcatgtttgttccc

SEQ ID NO: 137021 - DNA, 17 bp, synthetic construct
  source 1..17: mol_type = other DNA
ggtcatgtttgttcccc

SEQ ID NO: 137022 - DNA, 17 bp, synthetic construct
  source 1..17: mol_type = other DNA
gtcatgtttgttcccca

SEQ ID NO: 137023 - DNA, 17 bp, synthetic construct
  source 1..17: mol_type = other DNA
tcatgtttgttccccac

SEQ ID NO: 137024 - DNA, 17 bp, synthetic construct
  source 1..17: mol_type = other DNA
catgtttgttccccact

SEQ ID NO: 137025 - DNA, 17 bp, synthetic construct
  source 1..17: mol_type = other DNA
atgtttgttccccactg

SEQ ID NO: 137026 - DNA, 17 bp, synthetic construct
  source 1..17: mol_type = other DNA
tgtttgttccccactgg

SEQ ID NO: 137027 - DNA, 17 bp, synthetic construct
  source 1..17: mol_type = other DNA
gtttgttccccactggc

SEQ ID NO: 137028 - DNA, 17 bp, synthetic construct
  source 1..17: mol_type = other DNA
tttgttccccactggcc

SEQ ID NO: 137029 - DNA, 17 bp, synthetic construct
  source 1..17: mol_type = other DNA
ttgttccccactggcct

SEQ ID NO: 137030 - DNA, 17 bp, synthetic construct
  source 1..17: mol_type = other DNA
tgttccccactggcctc

SEQ ID NO: 137031 - DNA, 17 bp, synthetic construct
  source 1..17: mol_type = other DNA
gttccccactggcctca

SEQ ID NO: 137032 - DNA, 17 bp, synthetic construct
  source 1..17: mol_type = other DNA
ttccccactggcctcac

SEQ ID NO: 137033 - DNA, 17 bp, synthetic construct
  source 1..17: mol_type = other DNA
tccccactggcctcact

SEQ ID NO: 137034 - DNA, 17 bp, synthetic construct
  source 1..17: mol_type = other DNA
ccccactggcctcactt

SEQ ID NO: 137035 - DNA, 17 bp, synthetic construct
  source 1..17: mol_type = other DNA
cccactggcctcacttg

SEQ ID NO: 137036 - DNA, 17 bp, synthetic construct
  source 1..17: mol_type = other DNA
ccactggcctcacttgg

SEQ ID NO: 137037 - DNA, 17 bp, synthetic construct
  source 1..17: mol_type = other DNA
cactggcctcacttggc

SEQ ID NO: 137038 - DNA, 17 bp, synthetic construct
  source 1..17: mol_type = other DNA
actggcctcacttggcc

SEQ ID NO: 137039 - DNA, 17 bp, synthetic construct
  source 1..17: mol_type = other DNA
ctggcctcacttggccc

SEQ ID NO: 137040 - DNA, 17 bp, synthetic construct
  source 1..17: mol_type = other DNA
tggcctcacttggcccc

SEQ ID NO: 137041 - DNA, 17 bp, synthetic construct
  source 1..17: mol_type = other DNA
ggcctcacttggcccct

SEQ ID NO: 137042 - DNA, 17 bp, synthetic construct
  source 1..17: mol_type = other DNA
gcctcacttggcccctc

SEQ ID NO: 137043 - DNA, 17 bp, synthetic construct
  source 1..17: mol_type = other DNA
cctcacttggcccctcc

SEQ ID NO: 137044 - DNA, 17 bp, synthetic construct
  source 1..17: mol_type = other DNA
ctcacttggcccctccc

SEQ ID NO: 137045 - DNA, 17 bp, synthetic construct
  source 1..17: mol_type = other DNA
tcacttggcccctcccg

SEQ ID NO: 137046 - DNA, 17 bp, synthetic construct
  source 1..17: mol_type = other DNA
cacttggcccctcccgg

SEQ ID NO: 137047 - DNA, 17 bp, synthetic construct
  source 1..17: mol_type = other DNA
acttggcccctcccggc

SEQ ID NO: 137048 - DNA, 17 bp, synthetic construct
  source 1..17: mol_type = other DNA
cttggcccctcccggcc

SEQ ID NO: 137049 - DNA, 17 bp, synthetic construct
  source 1..17: mol_type = other DNA
ttggcccctcccggcca

SEQ ID NO: 137050 - DNA, 17 bp, synthetic construct
  source 1..17: mol_type = other DNA
tggcccctcccggccac

SEQ ID NO: 137051 - DNA, 17 bp, synthetic construct
  source 1..17: mol_type = other DNA
ggcccctcccggccaca

SEQ ID NO: 137052 - DNA, 17 bp, synthetic construct
  source 1..17: mol_type = other DNA
gcccctcccggccacac

SEQ ID NO: 137053 - DNA, 17 bp, synthetic construct
  source 1..17: mol_type = other DNA
cccctcccggccacact

SEQ ID NO: 137054 - DNA, 17 bp, synthetic construct
  source 1..17: mol_type = other DNA
ccctcccggccacactg

SEQ ID NO: 137055 - DNA, 17 bp, synthetic construct
  source 1..17: mol_type = other DNA
cctcccggccacactgg

SEQ ID NO: 137056 - DNA, 17 bp, synthetic construct
  source 1..17: mol_type = other DNA
ctcccggccacactggg

SEQ ID NO: 137057 - DNA, 17 bp, synthetic construct
  source 1..17: mol_type = other DNA
tcccggccacactgggt

SEQ ID NO: 137058 - DNA, 17 bp, synthetic construct
  source 1..17: mol_type = other DNA
cccggccacactgggtc

SEQ ID NO: 137059 - DNA, 17 bp, synthetic construct
  source 1..17: mol_type = other DNA
ccggccacactgggtcc

SEQ ID NO: 137060 - DNA, 17 bp, synthetic construct
  source 1..17: mol_type = other DNA
cggccacactgggtccc

SEQ ID NO: 137061 - DNA, 17 bp, synthetic construct
  source 1..17: mol_type = other DNA
ggccacactgggtcccc

SEQ ID NO: 137062 - DNA, 17 bp, synthetic construct
  source 1..17: mol_type = other DNA
gccacactgggtcccca

SEQ ID NO: 137063 - DNA, 17 bp, synthetic construct
  source 1..17: mol_type = other DNA
ccacactgggtccccac

SEQ ID NO: 137064 - DNA, 17 bp, synthetic construct
  source 1..17: mol_type = other DNA
cacactgggtccccact

SEQ ID NO: 137065 - DNA, 17 bp, synthetic construct
  source 1..17: mol_type = other DNA
acactgggtccccactg

SEQ ID NO: 137066 - DNA, 17 bp, synthetic construct
  source 1..17: mol_type = other DNA
cactgggtccccactgg

SEQ ID NO: 137067 - DNA, 17 bp, synthetic construct
  source 1..17: mol_type = other DNA
actgggtccccactggc

SEQ ID NO: 137068 - DNA, 17 bp, synthetic construct
  source 1..17: mol_type = other DNA
ctgggtccccactggcc

SEQ ID NO: 137069 - DNA, 17 bp, synthetic construct
  source 1..17: mol_type = other DNA
tgggtccccactggcca

SEQ ID NO: 137070 - DNA, 17 bp, synthetic construct
  source 1..17: mol_type = other DNA
gggtccccactggccac

SEQ ID NO: 137071 - DNA, 17 bp, synthetic construct
  source 1..17: mol_type = other DNA
ggtccccactggccaca

SEQ ID NO: 137072 - DNA, 17 bp, synthetic construct
  source 1..17: mol_type = other DNA
gtccccactggccacac

SEQ ID NO: 137073 - DNA, 17 bp, synthetic construct
  source 1..17: mol_type = other DNA
tccccactggccacact

SEQ ID NO: 137074 - DNA, 17 bp, synthetic construct
  source 1..17: mol_type = other DNA
ccccactggccacactg

SEQ ID NO: 137075 - DNA, 17 bp, synthetic construct
  source 1..17: mol_type = other DNA
cccactggccacactgg

SEQ ID NO: 137076 - DNA, 17 bp, synthetic construct
  source 1..17: mol_type = other DNA
ccactggccacactggg

SEQ ID NO: 137077 - DNA, 17 bp, synthetic construct
  source 1..17: mol_type = other DNA
cactggccacactgggt

SEQ ID NO: 137078 - DNA, 17 bp, synthetic construct
  source 1..17: mol_type = other DNA
actggccacactgggtc

SEQ ID NO: 137079 - DNA, 17 bp, synthetic construct
  source 1..17: mol_type = other DNA
ctggccacactgggtct

SEQ ID NO: 137080 - DNA, 17 bp, synthetic construct
  source 1..17: mol_type = other DNA
tggccacactgggtctc

SEQ ID NO: 137081 - DNA, 17 bp, synthetic construct
  source 1..17: mol_type = other DNA
ggccacactgggtctcc

SEQ ID NO: 137082 - DNA, 17 bp, synthetic construct
  source 1..17: mol_type = other DNA
gccacactgggtctcct

SEQ ID NO: 137083 - DNA, 17 bp, synthetic construct
  source 1..17: mol_type = other DNA
ccacactgggtctcctc

SEQ ID NO: 137084 - DNA, 17 bp, synthetic construct
  source 1..17: mol_type = other DNA
cacactgggtctcctct

SEQ ID NO: 137085 - DNA, 17 bp, synthetic construct
  source 1..17: mol_type = other DNA
acactgggtctcctctg

SEQ ID NO: 137086 - DNA, 17 bp, synthetic construct
  source 1..17: mol_type = other DNA
cactgggtctcctctgg

SEQ ID NO: 137087 - DNA, 17 bp, synthetic construct
  source 1..17: mol_type = other DNA
actgggtctcctctggc

SEQ ID NO: 137088 - DNA, 17 bp, synthetic construct
  source 1..17: mol_type = other DNA
ctgggtctcctctggcc

SEQ ID NO: 137089 - DNA, 17 bp, synthetic construct
  source 1..17: mol_type = other DNA
tgggtctcctctggcca

SEQ ID NO: 137090 - DNA, 17 bp, synthetic construct
  source 1..17: mol_type = other DNA
gggtctcctctggccac

SEQ ID NO: 137091 - DNA, 17 bp, synthetic construct
  source 1..17: mol_type = other DNA
ggtctcctctggccaca

SEQ ID NO: 137092 - DNA, 17 bp, synthetic construct
  source 1..17: mol_type = other DNA
gtctcctctggccacaa

SEQ ID NO: 137093 - DNA, 17 bp, synthetic construct
  source 1..17: mol_type = other DNA
tctcctctggccacaat

SEQ ID NO: 137094 - DNA, 17 bp, synthetic construct
  source 1..17: mol_type = other DNA
ctcctctggccacaatc

SEQ ID NO: 137095 - DNA, 17 bp, synthetic construct
  source 1..17: mol_type = other DNA
tcctctggccacaatcc

SEQ ID NO: 137096 - DNA, 17 bp, synthetic construct
  source 1..17: mol_type = other DNA
cctctggccacaatccg

SEQ ID NO: 137097 - DNA, 17 bp, synthetic construct
  source 1..17: mol_type = other DNA
ctctggccacaatccgt

SEQ ID NO: 137098 - DNA, 17 bp, synthetic construct
  source 1..17: mol_type = other DNA
tctggccacaatccgtc

SEQ ID NO: 137099 - DNA, 17 bp, synthetic construct
  source 1..17: mol_type = other DNA
ctggccacaatccgtcc

SEQ ID NO: 137100 - DNA, 17 bp, synthetic construct
  source 1..17: mol_type = other DNA
tggccacaatccgtccg

SEQ ID NO: 137101 - DNA, 17 bp, synthetic construct
  source 1..17: mol_type = other DNA
ggccacaatccgtccgc

SEQ ID NO: 137102 - DNA, 17 bp, synthetic construct
  source 1..17: mol_type = other DNA
gccacaatccgtccgca

SEQ ID NO: 137103 - DNA, 17 bp, synthetic construct
  source 1..17: mol_type = other DNA
ccacaatccgtccgcac

SEQ ID NO: 137104 - DNA, 17 bp, synthetic construct
  source 1..17: mol_type = other DNA
cacaatccgtccgcact

SEQ ID NO: 137105 - DNA, 17 bp, synthetic construct
  source 1..17: mol_type = other DNA
acaatccgtccgcactg

SEQ ID NO: 137106 - DNA, 17 bp, synthetic construct
  source 1..17: mol_type = other DNA
caatccgtccgcactgg

SEQ ID NO: 137107 - DNA, 17 bp, synthetic construct
  source 1..17: mol_type = other DNA
aatccgtccgcactggc

SEQ ID NO: 137108 - DNA, 17 bp, synthetic construct
  source 1..17: mol_type = other DNA
atccgtccgcactggcc

SEQ ID NO: 137109 - DNA, 17 bp, synthetic construct
  source 1..17: mol_type = other DNA
tccgtccgcactggcca

SEQ ID NO: 137110 - DNA, 17 bp, synthetic construct
  source 1..17: mol_type = other DNA
ccgtccgcactggccac

SEQ ID NO: 137111 - DNA, 17 bp, synthetic construct
  source 1..17: mol_type = other DNA
cgtccgcactggccaca

SEQ ID NO: 137112 - DNA, 17 bp, synthetic construct
  source 1..17: mol_type = other DNA
gtccgcactggccacaa

SEQ ID NO: 137113 - DNA, 17 bp, synthetic construct
  source 1..17: mol_type = other DNA
tccgcactggccacaat

SEQ ID NO: 137114 - DNA, 17 bp, synthetic construct
  source 1..17: mol_type = other DNA
ccgcactggccacaatc

SEQ ID NO: 137115 - DNA, 17 bp, synthetic construct
  source 1..17: mol_type = other DNA
cgcactggccacaatca

SEQ ID NO: 137116 - DNA, 17 bp, synthetic construct
  source 1..17: mol_type = other DNA
gcactggccacaatcag

SEQ ID NO: 137117 - DNA, 17 bp, synthetic construct
  source 1..17: mol_type = other DNA
cactggccacaatcagt

SEQ ID NO: 137118 - DNA, 17 bp, synthetic construct
  source 1..17: mol_type = other DNA
actggccacaatcagtc

SEQ ID NO: 137119 - DNA, 17 bp, synthetic construct
  source 1..17: mol_type = other DNA
ctggccacaatcagtcc

SEQ ID NO: 137120 - DNA, 17 bp, synthetic construct
  source 1..17: mol_type = other DNA
tggccacaatcagtccc

SEQ ID NO: 137121 - DNA, 17 bp, synthetic construct
  source 1..17: mol_type = other DNA
ggccacaatcagtcccc

SEQ ID NO: 137122 - DNA, 17 bp, synthetic construct
  source 1..17: mol_type = other DNA
gccacaatcagtcccca

SEQ ID NO: 137123 - DNA, 17 bp, synthetic construct
  source 1..17: mol_type = other DNA
ccacaatcagtccccac

SEQ ID NO: 137124 - DNA, 17 bp, synthetic construct
  source 1..17: mol_type = other DNA
cacaatcagtccccact

SEQ ID NO: 137125 - DNA, 17 bp, synthetic construct
  source 1..17: mol_type = other DNA
acaatcagtccccactg

SEQ ID NO: 137126 - DNA, 17 bp, synthetic construct
  source 1..17: mol_type = other DNA
caatcagtccccactgg

SEQ ID NO: 137127 - DNA, 17 bp, synthetic construct
  source 1..17: mol_type = other DNA
aatcagtccccactggc

SEQ ID NO: 137128 - DNA, 17 bp, synthetic construct
  source 1..17: mol_type = other DNA
atcagtccccactggcc

SEQ ID NO: 137129 - DNA, 17 bp, synthetic construct
  source 1..17: mol_type = other DNA
tcagtccccactggcca

SEQ ID NO: 137130 - DNA, 17 bp, synthetic construct
  source 1..17: mol_type = other DNA
cagtccccactggccac

SEQ ID NO: 137131 - DNA, 17 bp, synthetic construct
  source 1..17: mol_type = other DNA
agtccccactggccaca

SEQ ID NO: 137132 - DNA, 17 bp, synthetic construct
  source 1..17: mol_type = other DNA
gtccccactggccacac

SEQ ID NO: 137133 - DNA, 17 bp, synthetic construct
  source 1..17: mol_type = other DNA
tccccactggccacact

SEQ ID NO: 137134 - DNA, 17 bp, synthetic construct
  source 1..17: mol_type = other DNA
ccccactggccacactt

SEQ ID NO: 137135 - DNA, 17 bp, synthetic construct
  source 1..17: mol_type = other DNA
cccactggccacacttg

SEQ ID NO: 137136 - DNA, 17 bp, synthetic construct
  source 1..17: mol_type = other DNA
ccactggccacacttgg

SEQ ID NO: 137137 - DNA, 17 bp, synthetic construct
  source 1..17: mol_type = other DNA
cactggccacacttggt

SEQ ID NO: 137138 - DNA, 17 bp, synthetic construct
  source 1..17: mol_type = other DNA
actggccacacttggtc

SEQ ID NO: 137139 - DNA, 17 bp, synthetic construct
  source 1..17: mol_type = other DNA
ctggccacacttggtcc

SEQ ID NO: 137140 - DNA, 17 bp, synthetic construct
  source 1..17: mol_type = other DNA
tggccacacttggtccc

SEQ ID NO: 137141 - DNA, 17 bp, synthetic construct
  source 1..17: mol_type = other DNA
ggccacacttggtcccc

SEQ ID NO: 137142 - DNA, 17 bp, synthetic construct
  source 1..17: mol_type = other DNA
gccacacttggtcccca

SEQ ID NO: 137143 - DNA, 17 bp, synthetic construct
  source 1..17: mol_type = other DNA
ccacacttggtccccac

SEQ ID NO: 137144 - DNA, 17 bp, synthetic construct
  source 1..17: mol_type = other DNA
cacacttggtccccact

SEQ ID NO: 137145 - DNA, 17 bp, synthetic construct
  source 1..17: mol_type = other DNA
acacttggtccccactg

SEQ ID NO: 137146 - DNA, 17 bp, synthetic construct
  source 1..17: mol_type = other DNA
cacttggtccccactgg

SEQ ID NO: 137147 - DNA, 17 bp, synthetic construct
  source 1..17: mol_type = other DNA
acttggtccccactggc

SEQ ID NO: 137148 - DNA, 17 bp, synthetic construct
  source 1..17: mol_type = other DNA
cttggtccccactggcc

SEQ ID NO: 137149 - DNA, 17 bp, synthetic construct
  source 1..17: mol_type = other DNA
ttggtccccactggcca

SEQ ID NO: 137150 - DNA, 17 bp, synthetic construct
  source 1..17: mol_type = other DNA
tggtccccactggccac

SEQ ID NO: 137151 - DNA, 17 bp, synthetic construct
  source 1..17: mol_type = other DNA
ggtccccactggccaca

SEQ ID NO: 137152 - DNA, 17 bp, synthetic construct
  source 1..17: mol_type = other DNA
gtccccactggccacaa

SEQ ID NO: 137153 - DNA, 17 bp, synthetic construct
  source 1..17: mol_type = other DNA
tccccactggccacaat

SEQ ID NO: 137154 - DNA, 17 bp, synthetic construct
  source 1..17: mol_type = other DNA
ccccactggccacaatg

SEQ ID NO: 137155 - DNA, 17 bp, synthetic construct
  source 1..17: mol_type = other DNA
cccactggccacaatgc

SEQ ID NO: 137156 - DNA, 17 bp, synthetic construct
  source 1..17: mol_type = other DNA
ccactggccacaatgcg

SEQ ID NO: 137157 - DNA, 17 bp, synthetic construct
  source 1..17: mol_type = other DNA
cactggccacaatgcgt

SEQ ID NO: 137158 - DNA, 17 bp, synthetic construct
  source 1..17: mol_type = other DNA
actggccacaatgcgtc

SEQ ID NO: 137159 - DNA, 17 bp, synthetic construct
  source 1..17: mol_type = other DNA
ctggccacaatgcgtcc

SEQ ID NO: 137160 - DNA, 17 bp, synthetic construct
  source 1..17: mol_type = other DNA
tggccacaatgcgtccc

SEQ ID NO: 137161 - DNA, 17 bp, synthetic construct
  source 1..17: mol_type = other DNA
ggccacaatgcgtcccc

SEQ ID NO: 137162 - DNA, 17 bp, synthetic construct
  source 1..17: mol_type = other DNA
gccacaatgcgtccccc

SEQ ID NO: 137163 - DNA, 17 bp, synthetic construct
  source 1..17: mol_type = other DNA
ccacaatgcgtccccct

SEQ ID NO: 137164 - DNA, 17 bp, synthetic construct
  source 1..17: mol_type = other DNA
cacaatgcgtccccctt

SEQ ID NO: 137165 - DNA, 17 bp, synthetic construct
  source 1..17: mol_type = other DNA
acaatgcgtcccccttg

SEQ ID NO: 137166 - DNA, 17 bp, synthetic construct
  source 1..17: mol_type = other DNA
caatgcgtcccccttgg

SEQ ID NO: 137167 - DNA, 17 bp, synthetic construct
  source 1..17: mol_type = other DNA
aatgcgtcccccttggc

SEQ ID NO: 137168 - DNA, 17 bp, synthetic construct
  source 1..17: mol_type = other DNA
atgcgtcccccttggcc

SEQ ID NO: 137169 - DNA, 17 bp, synthetic construct
  source 1..17: mol_type = other DNA
tgcgtcccccttggcca

SEQ ID NO: 137170 - DNA, 17 bp, synthetic construct
  source 1..17: mol_type = other DNA
gcgtcccccttggccac

SEQ ID NO: 137171 - DNA, 17 bp, synthetic construct
  source 1..17: mol_type = other DNA
cgtcccccttggccaca

SEQ ID NO: 137172 - DNA, 17 bp, synthetic construct
  source 1..17: mol_type = other DNA
gtcccccttggccacat

SEQ ID NO: 137173 - DNA, 17 bp, synthetic construct
  source 1..17: mol_type = other DNA
tcccccttggccacatt

SEQ ID NO: 137174 - DNA, 17 bp, synthetic construct
  source 1..17: mol_type = other DNA
cccccttggccacattc

SEQ ID NO: 137175 - DNA, 17 bp, synthetic construct
  source 1..17: mol_type = other DNA
ccccttggccacattcg

SEQ ID NO: 137176 - DNA, 17 bp, synthetic construct
  source 1..17: mol_type = other DNA
cccttggccacattcgg

SEQ ID NO: 137177 - DNA, 17 bp, synthetic construct
  source 1..17: mol_type = other DNA
ccttggccacattcggt

SEQ ID NO: 137178 - DNA, 17 bp, synthetic construct
  source 1..17: mol_type = other DNA
cttggccacattcggtc

SEQ ID NO: 137179 - DNA, 17 bp, synthetic construct
  source 1..17: mol_type = other DNA
ttggccacattcggtct

SEQ ID NO: 137180 - DNA, 17 bp, synthetic construct
  source 1..17: mol_type = other DNA
tggccacattcggtctc

SEQ ID NO: 137181 - DNA, 17 bp, synthetic construct
  source 1..17: mol_type = other DNA
ggccacattcggtctcc

SEQ ID NO: 137182 - DNA, 17 bp, synthetic construct
  source 1..17: mol_type = other DNA
gccacattcggtctccc

SEQ ID NO: 137183 - DNA, 17 bp, synthetic construct
  source 1..17: mol_type = other DNA
ccacattcggtctcccc

SEQ ID NO: 137184 - DNA, 17 bp, synthetic construct
  source 1..17: mol_type = other DNA
cacattcggtctcccct

SEQ ID NO: 137185 - DNA, 17 bp, synthetic construct
  source 1..17: mol_type = other DNA
acattcggtctcccctg

SEQ ID NO: 137186 - DNA, 17 bp, synthetic construct
  source 1..17: mol_type = other DNA
cattcggtctcccctgg

SEQ ID NO: 137187 - DNA, 17 bp, synthetic construct
  source 1..17: mol_type = other DNA
attcggtctcccctgga

SEQ ID NO: 137188 - DNA, 17 bp, synthetic construct
  source 1..17: mol_type = other DNA
ttcggtctcccctggac

SEQ ID NO: 137189 - DNA, 17 bp, synthetic construct
  source 1..17: mol_type = other DNA
tcggtctcccctggaca

SEQ ID NO: 137190 - DNA, 17 bp, synthetic construct
  source 1..17: mol_type = other DNA
cggtctcccctggacac

SEQ ID NO: 137191 - DNA, 17 bp, synthetic construct
  source 1..17: mol_type = other DNA
ggtctcccctggacaca

SEQ ID NO: 137192 - DNA, 17 bp, synthetic construct
  source 1..17: mol_type = other DNA
gtctcccctggacacaa

SEQ ID NO: 137193 - DNA, 17 bp, synthetic construct
  source 1..17: mol_type = other DNA
tctcccctggacacaat

SEQ ID NO: 137194 - DNA, 17 bp, synthetic construct
  source 1..17: mol_type = other DNA
ctcccctggacacaatc

SEQ ID NO: 137195 - DNA, 17 bp, synthetic construct
  source 1..17: mol_type = other DNA
tcccctggacacaatcc

SEQ ID NO: 137196 - DNA, 17 bp, synthetic construct
  source 1..17: mol_type = other DNA
cccctggacacaatcca

SEQ ID NO: 137197 - DNA, 17 bp, synthetic construct
  source 1..17: mol_type = other DNA
ccctggacacaatccat

SEQ ID NO: 137198 - DNA, 17 bp, synthetic construct
  source 1..17: mol_type = other DNA
cctggacacaatccatc

SEQ ID NO: 137199 - DNA, 17 bp, synthetic construct
  source 1..17: mol_type = other DNA
ctggacacaatccatcc

SEQ ID NO: 137200 - DNA, 17 bp, synthetic construct
  source 1..17: mol_type = other DNA
tggacacaatccatccc

SEQ ID NO: 137201 - DNA, 17 bp, synthetic construct
  source 1..17: mol_type = other DNA
ggacacaatccatcccc

SEQ ID NO: 137202 - DNA, 17 bp, synthetic construct
  source 1..17: mol_type = other DNA
gacacaatccatcccca

SEQ ID NO: 137203 - DNA, 17 bp, synthetic construct
  source 1..17: mol_type = other DNA
acacaatccatccccac

SEQ ID NO: 137204 - DNA, 17 bp, synthetic construct
  source 1..17: mol_type = other DNA
cacaatccatccccact

SEQ ID NO: 137205 - DNA, 17 bp, synthetic construct
  source 1..17: mol_type = other DNA
acaatccatccccactg

SEQ ID NO: 137206 - DNA, 17 bp, synthetic construct
  source 1..17: mol_type = other DNA
caatccatccccactgg

SEQ ID NO: 137207 - DNA, 17 bp, synthetic construct
  source 1..17: mol_type = other DNA
aatccatccccactggc

SEQ ID NO: 137208 - DNA, 17 bp, synthetic construct
  source 1..17: mol_type = other DNA
atccatccccactggcc

SEQ ID NO: 137209 - DNA, 17 bp, synthetic construct
  source 1..17: mol_type = other DNA
tccatccccactggcca

SEQ ID NO: 137210 - DNA, 17 bp, synthetic construct
  source 1..17: mol_type = other DNA
ccatccccactggccac

SEQ ID NO: 137211 - DNA, 17 bp, synthetic construct
  source 1..17: mol_type = other DNA
catccccactggccaca

SEQ ID NO: 137212 - DNA, 17 bp, synthetic construct
  source 1..17: mol_type = other DNA
atccccactggccacac

SEQ ID NO: 137213 - DNA, 17 bp, synthetic construct
  source 1..17: mol_type = other DNA
tccccactggccacact

SEQ ID NO: 137214 - DNA, 17 bp, synthetic construct
  source 1..17: mol_type = other DNA
ccccactggccacactg

SEQ ID NO: 137215 - DNA, 17 bp, synthetic construct
  source 1..17: mol_type = other DNA
cccactggccacactgg

SEQ ID NO: 137216 - DNA, 17 bp, synthetic construct
  source 1..17: mol_type = other DNA
ccactggccacactggg

SEQ ID NO: 137217 - DNA, 17 bp, synthetic construct
  source 1..17: mol_type = other DNA
cactggccacactgggt

SEQ ID NO: 137218 - DNA, 17 bp, synthetic construct
  source 1..17: mol_type = other DNA
actggccacactgggtc

SEQ ID NO: 137219 - DNA, 17 bp, synthetic construct
  source 1..17: mol_type = other DNA
ctggccacactgggtct

SEQ ID NO: 137220 - DNA, 17 bp, synthetic construct
  source 1..17: mol_type = other DNA
tggccacactgggtctc

SEQ ID NO: 137221 - DNA, 17 bp, synthetic construct
  source 1..17: mol_type = other DNA
ggccacactgggtctcc

SEQ ID NO: 137222 - DNA, 17 bp, synthetic construct
  source 1..17: mol_type = other DNA
gccacactgggtctcct

SEQ ID NO: 137223 - DNA, 17 bp, synthetic construct
  source 1..17: mol_type = other DNA
ccacactgggtctcctc

SEQ ID NO: 137224 - DNA, 17 bp, synthetic construct
  source 1..17: mol_type = other DNA
cacactgggtctcctct

SEQ ID NO: 137225 - DNA, 17 bp, synthetic construct
  source 1..17: mol_type = other DNA
acactgggtctcctctg

SEQ ID NO: 137226 - DNA, 17 bp, synthetic construct
  source 1..17: mol_type = other DNA
cactgggtctcctctgg

SEQ ID NO: 137227 - DNA, 17 bp, synthetic construct
  source 1..17: mol_type = other DNA
actgggtctcctctggc

SEQ ID NO: 137228 - DNA, 17 bp, synthetic construct
  source 1..17: mol_type = other DNA
ctgggtctcctctggcc

SEQ ID NO: 137229 - DNA, 17 bp, synthetic construct
  source 1..17: mol_type = other DNA
tgggtctcctctggcca

SEQ ID NO: 137230 - DNA, 17 bp, synthetic construct
  source 1..17: mol_type = other DNA
gggtctcctctggccac

SEQ ID NO: 137231 - DNA, 17 bp, synthetic construct
  source 1..17: mol_type = other DNA
ggtctcctctggccaca

SEQ ID NO: 137232 - DNA, 17 bp, synthetic construct
  source 1..17: mol_type = other DNA
gtctcctctggccacaa

SEQ ID NO: 137233 - DNA, 17 bp, synthetic construct
  source 1..17: mol_type = other DNA
tctcctctggccacaat

SEQ ID NO: 137234 - DNA, 17 bp, synthetic construct
  source 1..17: mol_type = other DNA
ctcctctggccacaatc

SEQ ID NO: 137235 - DNA, 17 bp, synthetic construct
  source 1..17: mol_type = other DNA
tcctctggccacaatcc

SEQ ID NO: 137236 - DNA, 17 bp, synthetic construct
  source 1..17: mol_type = other DNA
cctctggccacaatccg

SEQ ID NO: 137237 - DNA, 17 bp, synthetic construct
  source 1..17: mol_type = other DNA
ctctggccacaatccgt

SEQ ID NO: 137238 - DNA, 17 bp, synthetic construct
  source 1..17: mol_type = other DNA
tctggccacaatccgtc

SEQ ID NO: 137239 - DNA, 17 bp, synthetic construct
  source 1..17: mol_type = other DNA
ctggccacaatccgtcc

SEQ ID NO: 137240 - DNA, 17 bp, synthetic construct
  source 1..17: mol_type = other DNA
tggccacaatccgtccg

SEQ ID NO: 137241 - DNA, 17 bp, synthetic construct
  source 1..17: mol_type = other DNA
ggccacaatccgtccgc

SEQ ID NO: 137242 - DNA, 17 bp, synthetic construct
  source 1..17: mol_type = other DNA
gccacaatccgtccgca

SEQ ID NO: 137243 - DNA, 17 bp, synthetic construct
  source 1..17: mol_type = other DNA
ccacaatccgtccgcac

SEQ ID NO: 137244 - DNA, 17 bp, synthetic construct
  source 1..17: mol_type = other DNA
cacaatccgtccgcact

SEQ ID NO: 137245 - DNA, 17 bp, synthetic construct
  source 1..17: mol_type = other DNA
acaatccgtccgcactg

SEQ ID NO: 137246 - DNA, 17 bp, synthetic construct
  source 1..17: mol_type = other DNA
caatccgtccgcactgg

SEQ ID NO: 137247 - DNA, 17 bp, synthetic construct
  source 1..17: mol_type = other DNA
aatccgtccgcactggc

SEQ ID NO: 137248 - DNA, 17 bp, synthetic construct
  source 1..17: mol_type = other DNA
atccgtccgcactggcc

SEQ ID NO: 137249 - DNA, 17 bp, synthetic construct
  source 1..17: mol_type = other DNA
tccgtccgcactggcca

SEQ ID NO: 137250 - DNA, 17 bp, synthetic construct
  source 1..17: mol_type = other DNA
ccgtccgcactggccac

SEQ ID NO: 137251 - DNA, 17 bp, synthetic construct
  source 1..17: mol_type = other DNA
cgtccgcactggccaca

SEQ ID NO: 137252 - DNA, 17 bp, synthetic construct
  source 1..17: mol_type = other DNA
gtccgcactggccacaa

SEQ ID NO: 137253 - DNA, 17 bp, synthetic construct
  source 1..17: mol_type = other DNA
tccgcactggccacaat

SEQ ID NO: 137254 - DNA, 17 bp, synthetic construct
  source 1..17: mol_type = other DNA
ccgcactggccacaatc

SEQ ID NO: 137255 - DNA, 17 bp, synthetic construct
  source 1..17: mol_type = other DNA
cgcactggccacaatca

SEQ ID NO: 137256 - DNA, 17 bp, synthetic construct
  source 1..17: mol_type = other DNA
gcactggccacaatcag

SEQ ID NO: 137257 - DNA, 17 bp, synthetic construct
  source 1..17: mol_type = other DNA
cactggccacaatcagt

SEQ ID NO: 137258 - DNA, 17 bp, synthetic construct
  source 1..17: mol_type = other DNA
actggccacaatcagtc

SEQ ID NO: 137259 - DNA, 17 bp, synthetic construct
  source 1..17: mol_type = other DNA
ctggccacaatcagtcc

SEQ ID NO: 137260 - DNA, 17 bp, synthetic construct
  source 1..17: mol_type = other DNA
tggccacaatcagtccc

SEQ ID NO: 137261 - DNA, 17 bp, synthetic construct
  source 1..17: mol_type = other DNA
ggccacaatcagtcccc

SEQ ID NO: 137262 - DNA, 17 bp, synthetic construct
  source 1..17: mol_type = other DNA
gccacaatcagtcccca

SEQ ID NO: 137263 - DNA, 17 bp, synthetic construct
  source 1..17: mol_type = other DNA
ccacaatcagtccccac

SEQ ID NO: 137264 - DNA, 17 bp, synthetic construct
  source 1..17: mol_type = other DNA
cacaatcagtccccact

SEQ ID NO: 137265 - DNA, 17 bp, synthetic construct
  source 1..17: mol_type = other DNA
acaatcagtccccactg

SEQ ID NO: 137266 - DNA, 17 bp, synthetic construct
  source 1..17: mol_type = other DNA
caatcagtccccactgg

SEQ ID NO: 137267 - DNA, 17 bp, synthetic construct
  source 1..17: mol_type = other DNA
aatcagtccccactggc

SEQ ID NO: 137268 - DNA, 17 bp, synthetic construct
  source 1..17: mol_type = other DNA
atcagtccccactggcc

SEQ ID NO: 137269 - DNA, 17 bp, synthetic construct
  source 1..17: mol_type = other DNA
tcagtccccactggcca

SEQ ID NO: 137270 - DNA, 17 bp, synthetic construct
  source 1..17: mol_type = other DNA
cagtccccactggccac

SEQ ID NO: 137271 - DNA, 17 bp, synthetic construct
  source 1..17: mol_type = other DNA
agtccccactggccaca

SEQ ID NO: 137272 - DNA, 17 bp, synthetic construct
  source 1..17: mol_type = other DNA
gtccccactggccacac

SEQ ID NO: 137273 - DNA, 17 bp, synthetic construct
  source 1..17: mol_type = other DNA
tccccactggccacact

SEQ ID NO: 137274 - DNA, 17 bp, synthetic construct
  source 1..17: mol_type = other DNA
ccccactggccacactc

SEQ ID NO: 137275 - DNA, 17 bp, synthetic construct
  source 1..17: mol_type = other DNA
cccactggccacactcg

SEQ ID NO: 137276 - DNA, 17 bp, synthetic construct
  source 1..17: mol_type = other DNA
ccactggccacactcgg

SEQ ID NO: 137277 - DNA, 17 bp, synthetic construct
  source 1..17: mol_type = other DNA
cactggccacactcggt

SEQ ID NO: 137278 - DNA, 17 bp, synthetic construct
  source 1..17: mol_type = other DNA
actggccacactcggtc

SEQ ID NO: 137279 - DNA, 17 bp, synthetic construct
  source 1..17: mol_type = other DNA
ctggccacactcggtcc

SEQ ID NO: 137280 - DNA, 17 bp, synthetic construct
  source 1..17: mol_type = other DNA
tggccacactcggtccc

SEQ ID NO: 137281 - DNA, 17 bp, synthetic construct
  source 1..17: mol_type = other DNA
ggccacactcggtcccc

SEQ ID NO: 137282 - DNA, 17 bp, synthetic construct
  source 1..17: mol_type = other DNA
gccacactcggtcccca

SEQ ID NO: 137283 - DNA, 17 bp, synthetic construct
  source 1..17: mol_type = other DNA
ccacactcggtccccac

SEQ ID NO: 137284 - DNA, 17 bp, synthetic construct
  source 1..17: mol_type = other DNA
cacactcggtccccact

SEQ ID NO: 137285 - DNA, 17 bp, synthetic construct
  source 1..17: mol_type = other DNA
acactcggtccccactg

SEQ ID NO: 137286 - DNA, 17 bp, synthetic construct
  source 1..17: mol_type = other DNA
cactcggtccccactgg

SEQ ID NO: 137287 - DNA, 17 bp, synthetic construct
  source 1..17: mol_type = other DNA
actcggtccccactggc

SEQ ID NO: 137288 - DNA, 17 bp, synthetic construct
  source 1..17: mol_type = other DNA
ctcggtccccactggcc

SEQ ID NO: 137289 - DNA, 17 bp, synthetic construct
  source 1..17: mol_type = other DNA
tcggtccccactggcca

SEQ ID NO: 137290 - DNA, 17 bp, synthetic construct
  source 1..17: mol_type = other DNA
cggtccccactggccac

SEQ ID NO: 137291 - DNA, 17 bp, synthetic construct
  source 1..17: mol_type = other DNA
ggtccccactggccaca

SEQ ID NO: 137292 - DNA, 17 bp, synthetic construct
  source 1..17: mol_type = other DNA
gtccccactggccacaa

SEQ ID NO: 137293 - DNA, 17 bp, synthetic construct
  source 1..17: mol_type = other DNA
tccccactggccacaat

SEQ ID NO: 137294 - DNA, 17 bp, synthetic construct
  source 1..17: mol_type = other DNA
ccccactggccacaatc

SEQ ID NO: 137295 - DNA, 17 bp, synthetic construct
  source 1..17: mol_type = other DNA
cccactggccacaatcc

SEQ ID NO: 137296 - DNA, 17 bp, synthetic construct
  source 1..17: mol_type = other DNA
ccactggccacaatcca

SEQ ID NO: 137297 - DNA, 17 bp, synthetic construct
  source 1..17: mol_type = other DNA
cactggccacaatccat

SEQ ID NO: 137298 - DNA, 17 bp, synthetic construct
  source 1..17: mol_type = other DNA
actggccacaatccatc

SEQ ID NO: 137299 - DNA, 17 bp, synthetic construct
  source 1..17: mol_type = other DNA
ctggccacaatccatcc

SEQ ID NO: 137300 - DNA, 17 bp, synthetic construct
  source 1..17: mol_type = other DNA
tggccacaatccatccc

SEQ ID NO: 137301 - DNA, 17 bp, synthetic construct
  source 1..17: mol_type = other DNA
ggccacaatccatcccc

SEQ ID NO: 137302 - DNA, 17 bp, synthetic construct
  source 1..17: mol_type = other DNA
gccacaatccatcccca

SEQ ID NO: 137303 - DNA, 17 bp, synthetic construct
  source 1..17: mol_type = other DNA
ccacaatccatccccac

SEQ ID NO: 137304 - DNA, 17 bp, synthetic construct
  source 1..17: mol_type = other DNA
cacaatccatccccact

SEQ ID NO: 137305 - DNA, 17 bp, synthetic construct
  source 1..17: mol_type = other DNA
acaatccatccccactg

SEQ ID NO: 137306 - DNA, 17 bp, synthetic construct
  source 1..17: mol_type = other DNA
caatccatccccactgg

SEQ ID NO: 137307 - DNA, 17 bp, synthetic construct
  source 1..17: mol_type = other DNA
aatccatccccactggc

SEQ ID NO: 137308 - DNA, 17 bp, synthetic construct
  source 1..17: mol_type = other DNA
atccatccccactggcc

SEQ ID NO: 137309 - DNA, 17 bp, synthetic construct
  source 1..17: mol_type = other DNA
tccatccccactggcca

SEQ ID NO: 137310 - DNA, 17 bp, synthetic construct
  source 1..17: mol_type = other DNA
ccatccccactggccac

SEQ ID NO: 137311 - DNA, 17 bp, synthetic construct
  source 1..17: mol_type = other DNA
catccccactggccaca

SEQ ID NO: 137312 - DNA, 17 bp, synthetic construct
  source 1..17: mol_type = other DNA
atccccactggccacac

SEQ ID NO: 137313 - DNA, 17 bp, synthetic construct
  source 1..17: mol_type = other DNA
tccccactggccacact

SEQ ID NO: 137314 - DNA, 17 bp, synthetic construct
  source 1..17: mol_type = other DNA
ccccactggccacactc

SEQ ID NO: 137315 - DNA, 17 bp, synthetic construct
  source 1..17: mol_type = other DNA
cccactggccacactcg

SEQ ID NO: 137316 - DNA, 17 bp, synthetic construct
  source 1..17: mol_type = other DNA
ccactggccacactcgg

SEQ ID NO: 137317 - DNA, 17 bp, synthetic construct
  source 1..17: mol_type = other DNA
cactggccacactcggt

SEQ ID NO: 137318 - DNA, 17 bp, synthetic construct
  source 1..17: mol_type = other DNA
actggccacactcggtc

SEQ ID NO: 137319 - DNA, 17 bp, synthetic construct
  source 1..17: mol_type = other DNA
ctggccacactcggtcc

SEQ ID NO: 137320 - DNA, 17 bp, synthetic construct
  source 1..17: mol_type = other DNA
tggccacactcggtccc

SEQ ID NO: 137321 - DNA, 17 bp, synthetic construct
  source 1..17: mol_type = other DNA
ggccacactcggtcccc

SEQ ID NO: 137322 - DNA, 17 bp, synthetic construct
  source 1..17: mol_type = other DNA
gccacactcggtcccca

SEQ ID NO: 137323 - DNA, 17 bp, synthetic construct
  source 1..17: mol_type = other DNA
ccacactcggtccccac

SEQ ID NO: 137324 - DNA, 17 bp, synthetic construct
  source 1..17: mol_type = other DNA
cacactcggtccccact

SEQ ID NO: 137325 - DNA, 17 bp, synthetic construct
  source 1..17: mol_type = other DNA
acactcggtccccactg

SEQ ID NO: 137326 - DNA, 17 bp, synthetic construct
  source 1..17: mol_type = other DNA
cactcggtccccactgg

SEQ ID NO: 137327 - DNA, 17 bp, synthetic construct
  source 1..17: mol_type = other DNA
actcggtccccactggt

SEQ ID NO: 137328 - DNA, 17 bp, synthetic construct
  source 1..17: mol_type = other DNA
ctcggtccccactggtc

SEQ ID NO: 137329 - DNA, 17 bp, synthetic construct
  source 1..17: mol_type = other DNA
tcggtccccactggtca

SEQ ID NO: 137330 - DNA, 17 bp, synthetic construct
  source 1..17: mol_type = other DNA
cggtccccactggtcac

SEQ ID NO: 137331 - DNA, 17 bp, synthetic construct
  source 1..17: mol_type = other DNA
ggtccccactggtcaca

SEQ ID NO: 137332 - DNA, 17 bp, synthetic construct
  source 1..17: mol_type = other DNA
gtccccactggtcacaa

SEQ ID NO: 137333 - DNA, 17 bp, synthetic construct
  source 1..17: mol_type = other DNA
tccccactggtcacaat

SEQ ID NO: 137334 - DNA, 17 bp, synthetic construct
  source 1..17: mol_type = other DNA
ccccactggtcacaatc

SEQ ID NO: 137335 - DNA, 17 bp, synthetic construct
  source 1..17: mol_type = other DNA
cccactggtcacaatcc

SEQ ID NO: 137336 - DNA, 17 bp, synthetic construct
  source 1..17: mol_type = other DNA
ccactggtcacaatccg

SEQ ID NO: 137337 - DNA, 17 bp, synthetic construct
  source 1..17: mol_type = other DNA
cactggtcacaatccgt

SEQ ID NO: 137338 - DNA, 17 bp, synthetic construct
  source 1..17: mol_type = other DNA
actggtcacaatccgtc

SEQ ID NO: 137339 - DNA, 17 bp, synthetic construct
  source 1..17: mol_type = other DNA
ctggtcacaatccgtcc

SEQ ID NO: 137340 - DNA, 17 bp, synthetic construct
  source 1..17: mol_type = other DNA
tggtcacaatccgtccc

SEQ ID NO: 137341 - DNA, 17 bp, synthetic construct
  source 1..17: mol_type = other DNA
ggtcacaatccgtcccc

SEQ ID NO: 137342 - DNA, 17 bp, synthetic construct
  source 1..17: mol_type = other DNA
gtcacaatccgtcccca

SEQ ID NO: 137343 - DNA, 17 bp, synthetic construct
  source 1..17: mol_type = other DNA
tcacaatccgtccccag

SEQ ID NO: 137344 - DNA, 17 bp, synthetic construct
  source 1..17: mol_type = other DNA
cacaatccgtccccagt

SEQ ID NO: 137345 - DNA, 17 bp, synthetic construct
  source 1..17: mol_type = other DNA
acaatccgtccccagtg

SEQ ID NO: 137346 - DNA, 17 bp, synthetic construct
  source 1..17: mol_type = other DNA
caatccgtccccagtgg

SEQ ID NO: 137347 - DNA, 17 bp, synthetic construct
  source 1..17: mol_type = other DNA
aatccgtccccagtggc

SEQ ID NO: 137348 - DNA, 17 bp, synthetic construct
  source 1..17: mol_type = other DNA
atccgtccccagtggcc

SEQ ID NO: 137349 - DNA, 17 bp, synthetic construct
  source 1..17: mol_type = other DNA
tccgtccccagtggcca

SEQ ID NO: 137350 - DNA, 17 bp, synthetic construct
  source 1..17: mol_type = other DNA
ccgtccccagtggccac

SEQ ID NO: 137351 - DNA, 17 bp, synthetic construct
  source 1..17: mol_type = other DNA
cgtccccagtggccaca

SEQ ID NO: 137352 - DNA, 17 bp, synthetic construct
  source 1..17: mol_type = other DNA
gtccccagtggccacac

SEQ ID NO: 137353 - DNA, 17 bp, synthetic construct
  source 1..17: mol_type = other DNA
tccccagtggccacact

SEQ ID NO: 137354 - DNA, 17 bp, synthetic construct
  source 1..17: mol_type = other DNA
ccccagtggccacactt

SEQ ID NO: 137355 - DNA, 17 bp, synthetic construct
  source 1..17: mol_type = other DNA
cccagtggccacacttg

SEQ ID NO: 137356 - DNA, 17 bp, synthetic construct
  source 1..17: mol_type = other DNA
ccagtggccacacttgg

SEQ ID NO: 137357 - DNA, 17 bp, synthetic construct
  source 1..17: mol_type = other DNA
cagtggccacacttggt

SEQ ID NO: 137358 - DNA, 17 bp, synthetic construct
  source 1..17: mol_type = other DNA
agtggccacacttggtc

SEQ ID NO: 137359 - DNA, 17 bp, synthetic construct
  source 1..17: mol_type = other DNA
gtggccacacttggtcc

SEQ ID NO: 137360 - DNA, 17 bp, synthetic construct
  source 1..17: mol_type = other DNA
tggccacacttggtccc

SEQ ID NO: 137361 - DNA, 17 bp, synthetic construct
  source 1..17: mol_type = other DNA
ggccacacttggtcccc

SEQ ID NO: 137362 - DNA, 17 bp, synthetic construct
  source 1..17: mol_type = other DNA
gccacacttggtcccca

SEQ ID NO: 137363 - DNA, 17 bp, synthetic construct
  source 1..17: mol_type = other DNA
ccacacttggtccccac

SEQ ID NO: 137364 - DNA, 17 bp, synthetic construct
  source 1..17: mol_type = other DNA
cacacttggtccccact

SEQ ID NO: 137365 - DNA, 17 bp, synthetic construct
  source 1..17: mol_type = other DNA
acacttggtccccactg

SEQ ID NO: 137366 - DNA, 17 bp, synthetic construct
  source 1..17: mol_type = other DNA
cacttggtccccactgg

SEQ ID NO: 137367 - DNA, 17 bp, synthetic construct
  source 1..17: mol_type = other DNA
acttggtccccactggc

SEQ ID NO: 137368 - DNA, 17 bp, synthetic construct
  source 1..17: mol_type = other DNA
cttggtccccactggcc

SEQ ID NO: 137369 - DNA, 17 bp, synthetic construct
  source 1..17: mol_type = other DNA
ttggtccccactggcca

SEQ ID NO: 137370 - DNA, 17 bp, synthetic construct
  source 1..17: mol_type = other DNA
tggtccccactggccac

SEQ ID NO: 137371 - DNA, 17 bp, synthetic construct
  source 1..17: mol_type = other DNA
ggtccccactggccaca

SEQ ID NO: 137372 - DNA, 17 bp, synthetic construct
  source 1..17: mol_type = other DNA
gtccccactggccacac

SEQ ID NO: 137373 - DNA, 17 bp, synthetic construct
  source 1..17: mol_type = other DNA
tccccactggccacact

SEQ ID NO: 137374 - DNA, 17 bp, synthetic construct
  source 1..17: mol_type = other DNA
ccccactggccacactc

SEQ ID NO: 137375 - DNA, 17 bp, synthetic construct
  source 1..17: mol_type = other DNA
cccactggccacactca

SEQ ID NO: 137376 - DNA, 17 bp, synthetic construct
  source 1..17: mol_type = other DNA
ccactggccacactcag

SEQ ID NO: 137377 - DNA, 17 bp, synthetic construct
  source 1..17: mol_type = other DNA
cactggccacactcagc

SEQ ID NO: 137378 - DNA, 17 bp, synthetic construct
  source 1..17: mol_type = other DNA
actggccacactcagcc

SEQ ID NO: 137379 - DNA, 17 bp, synthetic construct
  source 1..17: mol_type = other DNA
ctggccacactcagcct

SEQ ID NO: 137380 - DNA, 17 bp, synthetic construct
  source 1..17: mol_type = other DNA
tggccacactcagcctc

SEQ ID NO: 137381 - DNA, 17 bp, synthetic construct
  source 1..17: mol_type = other DNA
ggccacactcagcctct

SEQ ID NO: 137382 - DNA, 17 bp, synthetic construct
  source 1..17: mol_type = other DNA
gccacactcagcctctg

SEQ ID NO: 137383 - DNA, 17 bp, synthetic construct
  source 1..17: mol_type = other DNA
ccacactcagcctctgc

SEQ ID NO: 137384 - DNA, 17 bp, synthetic construct
  source 1..17: mol_type = other DNA
cacactcagcctctgcc

SEQ ID NO: 137385 - DNA, 17 bp, synthetic construct
  source 1..17: mol_type = other DNA
acactcagcctctgccc

SEQ ID NO: 137386 - DNA, 17 bp, synthetic construct
  source 1..17: mol_type = other DNA
cactcagcctctgccct

SEQ ID NO: 137387 - DNA, 17 bp, synthetic construct
  source 1..17: mol_type = other DNA
actcagcctctgccctc

SEQ ID NO: 137388 - DNA, 17 bp, synthetic construct
  source 1..17: mol_type = other DNA
ctcagcctctgccctct

SEQ ID NO: 137389 - DNA, 17 bp, synthetic construct
  source 1..17: mol_type = other DNA
tcagcctctgccctctc

SEQ ID NO: 137390 - DNA, 17 bp, synthetic construct
  source 1..17: mol_type = other DNA
cagcctctgccctctcc

SEQ ID NO: 137391 - DNA, 17 bp, synthetic construct
  source 1..17: mol_type = other DNA
agcctctgccctctcca

SEQ ID NO: 137392 - DNA, 17 bp, synthetic construct
  source 1..17: mol_type = other DNA
gcctctgccctctccac

SEQ ID NO: 137393 - DNA, 17 bp, synthetic construct
  source 1..17: mol_type = other DNA
cctctgccctctccact

SEQ ID NO: 137394 - DNA, 17 bp, synthetic construct
  source 1..17: mol_type = other DNA
ctctgccctctccactc

SEQ ID NO: 137395 - DNA, 17 bp, synthetic construct
  source 1..17: mol_type = other DNA
tctgccctctccactcc

SEQ ID NO: 137396 - DNA, 17 bp, synthetic construct
  source 1..17: mol_type = other DNA
ctgccctctccactccc

SEQ ID NO: 137397 - DNA, 17 bp, synthetic construct
  source 1..17: mol_type = other DNA
tgccctctccactccct

SEQ ID NO: 137398 - DNA, 17 bp, synthetic construct
  source 1..17: mol_type = other DNA
gccctctccactccctt

SEQ ID NO: 137399 - DNA, 17 bp, synthetic construct
  source 1..17: mol_type = other DNA
ccctctccactcccttc

SEQ ID NO: 137400 - DNA, 17 bp, synthetic construct
  source 1..17: mol_type = other DNA
cctctccactcccttcc

SEQ ID NO: 137401 - DNA, 17 bp, synthetic construct
  source 1..17: mol_type = other DNA
ctctccactcccttccc

SEQ ID NO: 137402 - DNA, 17 bp, synthetic construct
  source 1..17: mol_type = other DNA
tctccactcccttccct

SEQ ID NO: 137403 - DNA, 17 bp, synthetic construct
  source 1..17: mol_type = other DNA
ctccactcccttccctg

SEQ ID NO: 137404 - DNA, 17 bp, synthetic construct
  source 1..17: mol_type = other DNA
tccactcccttccctgg

SEQ ID NO: 137405 - DNA, 17 bp, synthetic construct
  source 1..17: mol_type = other DNA
ccactcccttccctgga

SEQ ID NO: 137406 - DNA, 17 bp, synthetic construct
  source 1..17: mol_type = other DNA
cactcccttccctggaa

SEQ ID NO: 137407 - DNA, 17 bp, synthetic construct
  source 1..17: mol_type = other DNA
actcccttccctggaac

SEQ ID NO: 137408 - DNA, 17 bp, synthetic construct
  source 1..17: mol_type = other DNA
ctcccttccctggaacc

SEQ ID NO: 137409 - DNA, 17 bp, synthetic construct
  source 1..17: mol_type = other DNA
tcccttccctggaaccg

SEQ ID NO: 137410 - DNA, 17 bp, synthetic construct
  source 1..17: mol_type = other DNA
cccttccctggaaccgc

SEQ ID NO: 137411 - DNA, 17 bp, synthetic construct
  source 1..17: mol_type = other DNA
ccttccctggaaccgct

SEQ ID NO: 137412 - DNA, 17 bp, synthetic construct
  source 1..17: mol_type = other DNA
cttccctggaaccgctg

SEQ ID NO: 137413 - DNA, 17 bp, synthetic construct
  source 1..17: mol_type = other DNA
ttccctggaaccgctgc

SEQ ID NO: 137414 - DNA, 17 bp, synthetic construct
  source 1..17: mol_type = other DNA
tccctggaaccgctgct

SEQ ID NO: 137415 - DNA, 17 bp, synthetic construct
  source 1..17: mol_type = other DNA
ccctggaaccgctgctc

SEQ ID NO: 137416 - DNA, 17 bp, synthetic construct
  source 1..17: mol_type = other DNA
cctggaaccgctgctcc

SEQ ID NO: 137417 - DNA, 17 bp, synthetic construct
  source 1..17: mol_type = other DNA
ctggaaccgctgctccc

SEQ ID NO: 137418 - DNA, 17 bp, synthetic construct
  source 1..17: mol_type = other DNA
tggaaccgctgctccct

SEQ ID NO: 137419 - DNA, 17 bp, synthetic construct
  source 1..17: mol_type = other DNA
ggaaccgctgctccctc

SEQ ID NO: 137420 - DNA, 17 bp, synthetic construct
  source 1..17: mol_type = other DNA
gaaccgctgctccctcc

SEQ ID NO: 137421 - DNA, 17 bp, synthetic construct
  source 1..17: mol_type = other DNA
aaccgctgctccctcct

SEQ ID NO: 137422 - DNA, 17 bp, synthetic construct
  source 1..17: mol_type = other DNA
accgctgctccctcctg

SEQ ID NO: 137423 - DNA, 17 bp, synthetic construct
  source 1..17: mol_type = other DNA
ccgctgctccctcctgc

SEQ ID NO: 137424 - DNA, 17 bp, synthetic construct
  source 1..17: mol_type = other DNA
cgctgctccctcctgcg

SEQ ID NO: 137425 - DNA, 17 bp, synthetic construct
  source 1..17: mol_type = other DNA
gctgctccctcctgcgc

SEQ ID NO: 137426 - DNA, 17 bp, synthetic construct
  source 1..17: mol_type = other DNA
ctgctccctcctgcgct

SEQ ID NO: 137427 - DNA, 17 bp, synthetic construct
  source 1..17: mol_type = other DNA
tgctccctcctgcgctg

SEQ ID NO: 137428 - DNA, 17 bp, synthetic construct
  source 1..17: mol_type = other DNA
gctccctcctgcgctga

SEQ ID NO: 137429 - DNA, 17 bp, synthetic construct
  source 1..17: mol_type = other DNA
ctccctcctgcgctgac

SEQ ID NO: 137430 - DNA, 17 bp, synthetic construct
  source 1..17: mol_type = other DNA
tccctcctgcgctgacc

SEQ ID NO: 137431 - DNA, 17 bp, synthetic construct
  source 1..17: mol_type = other DNA
ccctcctgcgctgacct

SEQ ID NO: 137432 - DNA, 17 bp, synthetic construct
  source 1..17: mol_type = other DNA
cctcctgcgctgacctc

SEQ ID NO: 137433 - DNA, 17 bp, synthetic construct
  source 1..17: mol_type = other DNA
ctcctgcgctgacctct

SEQ ID NO: 137434 - DNA, 17 bp, synthetic construct
  source 1..17: mol_type = other DNA
tcctgcgctgacctctg

SEQ ID NO: 137435 - DNA, 17 bp, synthetic construct
  source 1..17: mol_type = other DNA
cctgcgctgacctctgc

SEQ ID NO: 137436 - DNA, 17 bp, synthetic construct
  source 1..17: mol_type = other DNA
ctgcgctgacctctgcc

SEQ ID NO: 137437 - DNA, 17 bp, synthetic construct
  source 1..17: mol_type = other DNA
tgcgctgacctctgcct

SEQ ID NO: 137438 - DNA, 17 bp, synthetic construct
  source 1..17: mol_type = other DNA
gcgctgacctctgcctt

SEQ ID NO: 137439 - DNA, 17 bp, synthetic construct
  source 1..17: mol_type = other DNA
cgctgacctctgccttt

SEQ ID NO: 137440 - DNA, 17 bp, synthetic construct
  source 1..17: mol_type = other DNA
gctgacctctgcctttg

SEQ ID NO: 137441 - DNA, 17 bp, synthetic construct
  source 1..17: mol_type = other DNA
ctgacctctgcctttgc

SEQ ID NO: 137442 - DNA, 17 bp, synthetic construct
  source 1..17: mol_type = other DNA
tgacctctgcctttgct

SEQ ID NO: 137443 - DNA, 17 bp, synthetic construct
  source 1..17: mol_type = other DNA
gacctctgcctttgctc

SEQ ID NO: 137444 - DNA, 17 bp, synthetic construct
  source 1..17: mol_type = other DNA
acctctgcctttgctct

SEQ ID NO: 137445 - DNA, 17 bp, synthetic construct
  source 1..17: mol_type = other DNA
cctctgcctttgctctc

SEQ ID NO: 137446 - DNA, 17 bp, synthetic construct
  source 1..17: mol_type = other DNA
ctctgcctttgctctcc

SEQ ID NO: 137447 - DNA, 17 bp, synthetic construct
  source 1..17: mol_type = other DNA
tctgcctttgctctccc

SEQ ID NO: 137448 - DNA, 17 bp, synthetic construct
  source 1..17: mol_type = other DNA
ctgcctttgctctccca

SEQ ID NO: 137449 - DNA, 17 bp, synthetic construct
  source 1..17: mol_type = other DNA
tgcctttgctctcccag

SEQ ID NO: 137450 - DNA, 17 bp, synthetic construct
  source 1..17: mol_type = other DNA
gcctttgctctcccaga

SEQ ID NO: 137451 - DNA, 17 bp, synthetic construct
  source 1..17: mol_type = other DNA
cctttgctctcccagaa

SEQ ID NO: 137452 - DNA, 17 bp, synthetic construct
  source 1..17: mol_type = other DNA
ctttgctctcccagaac

SEQ ID NO: 137453 - DNA, 17 bp, synthetic construct
  source 1..17: mol_type = other DNA
tttgctctcccagaact

SEQ ID NO: 137454 - DNA, 17 bp, synthetic construct
  source 1..17: mol_type = other DNA
ttgctctcccagaactc

SEQ ID NO: 137455 - DNA, 17 bp, synthetic construct
  source 1..17: mol_type = other DNA
tgctctcccagaactct

SEQ ID NO: 137456 - DNA, 17 bp, synthetic construct
  source 1..17: mol_type = other DNA
gctctcccagaactctg

SEQ ID NO: 137457 - DNA, 17 bp, synthetic construct
  source 1..17: mol_type = other DNA
ctctcccagaactctgg

SEQ ID NO: 137458 - DNA, 17 bp, synthetic construct
  source 1..17: mol_type = other DNA
tctcccagaactctggc

SEQ ID NO: 137459 - DNA, 17 bp, synthetic construct
  source 1..17: mol_type = other DNA
ctcccagaactctggct

SEQ ID NO: 137460 - DNA, 17 bp, synthetic construct
  source 1..17: mol_type = other DNA
tcccagaactctggctt

SEQ ID NO: 137461 - DNA, 17 bp, synthetic construct
  source 1..17: mol_type = other DNA
cccagaactctggctta

SEQ ID NO: 137462 - DNA, 17 bp, synthetic construct
  source 1..17: mol_type = other DNA
ccagaactctggcttac

SEQ ID NO: 137463 - DNA, 17 bp, synthetic construct
  source 1..17: mol_type = other DNA
cagaactctggcttacc

SEQ ID NO: 137464 - DNA, 17 bp, synthetic construct
  source 1..17: mol_type = other DNA
agaactctggcttaccc

SEQ ID NO: 137465 - DNA, 17 bp, synthetic construct
  source 1..17: mol_type = other DNA
gaactctggcttaccca

SEQ ID NO: 137466 - DNA, 17 bp, synthetic construct
  source 1..17: mol_type = other DNA
aactctggcttacccat

SEQ ID NO: 137467 - DNA, 17 bp, synthetic construct
  source 1..17: mol_type = other DNA
actctggcttacccatc

SEQ ID NO: 137468 - DNA, 17 bp, synthetic construct
  source 1..17: mol_type = other DNA
ctctggcttacccatct

SEQ ID NO: 137469 - DNA, 17 bp, synthetic construct
  source 1..17: mol_type = other DNA
tctggcttacccatctc

SEQ ID NO: 137470 - DNA, 17 bp, synthetic construct
  source 1..17: mol_type = other DNA
ctggcttacccatctct

SEQ ID NO: 137471 - DNA, 17 bp, synthetic construct
  source 1..17: mol_type = other DNA
tggcttacccatctctg

SEQ ID NO: 137472 - DNA, 17 bp, synthetic construct
  source 1..17: mol_type = other DNA
ggcttacccatctctgg

SEQ ID NO: 137473 - DNA, 17 bp, synthetic construct
  source 1..17: mol_type = other DNA
gcttacccatctctggg

SEQ ID NO: 137474 - DNA, 17 bp, synthetic construct
  source 1..17: mol_type = other DNA
cttacccatctctggga

SEQ ID NO: 137475 - DNA, 17 bp, synthetic construct
  source 1..17: mol_type = other DNA
ttacccatctctgggag

SEQ ID NO: 137476 - DNA, 17 bp, synthetic construct
  source 1..17: mol_type = other DNA
tacccatctctgggagt

SEQ ID NO: 137477 - DNA, 17 bp, synthetic construct
  source 1..17: mol_type = other DNA
acccatctctgggagtg

SEQ ID NO: 137478 - DNA, 17 bp, synthetic construct
  source 1..17: mol_type = other DNA
cccatctctgggagtgg

SEQ ID NO: 137479 - DNA, 17 bp, synthetic construct
  source 1..17: mol_type = other DNA
ccatctctgggagtggc

SEQ ID NO: 137480 - DNA, 17 bp, synthetic construct
  source 1..17: mol_type = other DNA
catctctgggagtggct

SEQ ID NO: 137481 - DNA, 17 bp, synthetic construct
  source 1..17: mol_type = other DNA
atctctgggagtggctt

SEQ ID NO: 137482 - DNA, 17 bp, synthetic construct
  source 1..17: mol_type = other DNA
tctctgggagtggctta

SEQ ID NO: 137483 - DNA, 17 bp, synthetic construct
  source 1..17: mol_type = other DNA
ctctgggagtggcttat

SEQ ID NO: 137484 - DNA, 17 bp, synthetic construct
  source 1..17: mol_type = other DNA
tctgggagtggcttatc

SEQ ID NO: 137485 - DNA, 17 bp, synthetic construct
  source 1..17: mol_type = other DNA
ctgggagtggcttatct

SEQ ID NO: 137486 - DNA, 17 bp, synthetic construct
  source 1..17: mol_type = other DNA
tgggagtggcttatctt

SEQ ID NO: 137487 - DNA, 17 bp, synthetic construct
  source 1..17: mol_type = other DNA
gggagtggcttatcttt

SEQ ID NO: 137488 - DNA, 17 bp, synthetic construct
  source 1..17: mol_type = other DNA
ggagtggcttatctttc

SEQ ID NO: 137489 - DNA, 17 bp, synthetic construct
  source 1..17: mol_type = other DNA
gagtggcttatctttct

SEQ ID NO: 137490 - DNA, 17 bp, synthetic construct
  source 1..17: mol_type = other DNA
agtggcttatctttcta

SEQ ID NO: 137491 - DNA, 17 bp, synthetic construct
  source 1..17: mol_type = other DNA
gtggcttatctttctat

SEQ ID NO: 137492 - DNA, 17 bp, synthetic construct
  source 1..17: mol_type = other DNA
tggcttatctttctatg

SEQ ID NO: 137493 - DNA, 17 bp, synthetic construct
  source 1..17: mol_type = other DNA
ggcttatctttctatgg

SEQ ID NO: 137494 - DNA, 17 bp, synthetic construct
  source 1..17: mol_type = other DNA
gcttatctttctatggt

SEQ ID NO: 137495 - DNA, 17 bp, synthetic construct
  source 1..17: mol_type = other DNA
cttatctttctatggtg

SEQ ID NO: 137496 - DNA, 17 bp, synthetic construct
  source 1..17: mol_type = other DNA
ttatctttctatggtgt

SEQ ID NO: 137497 - DNA, 17 bp, synthetic construct
  source 1..17: mol_type = other DNA
tatctttctatggtgtt

SEQ ID NO: 137498 - DNA, 17 bp, synthetic construct
  source 1..17: mol_type = other DNA
atctttctatggtgttg

SEQ ID NO: 137499 - DNA, 17 bp, synthetic construct
  source 1..17: mol_type = other DNA
tctttctatggtgttgt

SEQ ID NO: 137500 - DNA, 17 bp, synthetic construct
  source 1..17: mol_type = other DNA
ctttctatggtgttgtt

SEQ ID NO: 137501 - DNA, 17 bp, synthetic construct
  source 1..17: mol_type = other DNA
tttctatggtgttgttc

SEQ ID NO: 137502 - DNA, 17 bp, synthetic construct
  source 1..17: mol_type = other DNA
ttctatggtgttgttct

SEQ ID NO: 137503 - DNA, 17 bp, synthetic construct
  source 1..17: mol_type = other DNA
tctatggtgttgttctt

SEQ ID NO: 137504 - DNA, 17 bp, synthetic construct
  source 1..17: mol_type = other DNA
ctatggtgttgttcttc

SEQ ID NO: 137505 - DNA, 17 bp, synthetic construct
  source 1..17: mol_type = other DNA
tatggtgttgttcttca

SEQ ID NO: 137506 - DNA, 17 bp, synthetic construct
  source 1..17: mol_type = other DNA
atggtgttgttcttcac

SEQ ID NO: 137507 - DNA, 17 bp, synthetic construct
  source 1..17: mol_type = other DNA
tggtgttgttcttcaca

SEQ ID NO: 137508 - DNA, 17 bp, synthetic construct
  source 1..17: mol_type = other DNA
ggtgttgttcttcacag

SEQ ID NO: 137509 - DNA, 17 bp, synthetic construct
  source 1..17: mol_type = other DNA
gtgttgttcttcacagg

SEQ ID NO: 137510 - DNA, 17 bp, synthetic construct
  source 1..17: mol_type = other DNA
tgttgttcttcacaggg

SEQ ID NO: 137511 - DNA, 17 bp, synthetic construct
  source 1..17: mol_type = other DNA
gttgttcttcacagggg

SEQ ID NO: 137512 - DNA, 17 bp, synthetic construct
  source 1..17: mol_type = other DNA
ttgttcttcacagggga

SEQ ID NO: 137513 - DNA, 17 bp, synthetic construct
  source 1..17: mol_type = other DNA
tgttcttcacaggggaa

SEQ ID NO: 137514 - DNA, 17 bp, synthetic construct
  source 1..17: mol_type = other DNA
gttcttcacaggggaag

SEQ ID NO: 137515 - DNA, 17 bp, synthetic construct
  source 1..17: mol_type = other DNA
ttcttcacaggggaagt

SEQ ID NO: 137516 - DNA, 17 bp, synthetic construct
  source 1..17: mol_type = other DNA
tcttcacaggggaagtc

SEQ ID NO: 137517 - DNA, 17 bp, synthetic construct
  source 1..17: mol_type = other DNA
cttcacaggggaagtca

SEQ ID NO: 137518 - DNA, 17 bp, synthetic construct
  source 1..17: mol_type = other DNA
ttcacaggggaagtcat

SEQ ID NO: 137519 - DNA, 17 bp, synthetic construct
  source 1..17: mol_type = other DNA
tcacaggggaagtcatc

SEQ ID NO: 137520 - DNA, 17 bp, synthetic construct
  source 1..17: mol_type = other DNA
cacaggggaagtcatct

SEQ ID NO: 137521 - DNA, 17 bp, synthetic construct
  source 1..17: mol_type = other DNA
acaggggaagtcatcta

SEQ ID NO: 137522 - DNA, 17 bp, synthetic construct
  source 1..17: mol_type = other DNA
caggggaagtcatctac

SEQ ID NO: 137523 - DNA, 17 bp, synthetic construct
  source 1..17: mol_type = other DNA
aggggaagtcatctaca

SEQ ID NO: 137524 - DNA, 17 bp, synthetic construct
  source 1..17: mol_type = other DNA
ggggaagtcatctacaa

SEQ ID NO: 137525 - DNA, 17 bp, synthetic construct
  source 1..17: mol_type = other DNA
gggaagtcatctacaat

SEQ ID NO: 137526 - DNA, 17 bp, synthetic construct
  source 1..17: mol_type = other DNA
ggaagtcatctacaata

SEQ ID NO: 137527 - DNA, 17 bp, synthetic construct
  source 1..17: mol_type = other DNA
gaagtcatctacaataa

SEQ ID NO: 137528 - DNA, 17 bp, synthetic construct
  source 1..17: mol_type = other DNA
aagtcatctacaataag

SEQ ID NO: 137529 - DNA, 17 bp, synthetic construct
  source 1..17: mol_type = other DNA
agtcatctacaataaga

SEQ ID NO: 137530 - DNA, 17 bp, synthetic construct
  source 1..17: mol_type = other DNA
gtcatctacaataagac

SEQ ID NO: 137531 - DNA, 17 bp, synthetic construct
  source 1..17: mol_type = other DNA
tcatctacaataagacc

SEQ ID NO: 137532 - DNA, 17 bp, synthetic construct
  source 1..17: mol_type = other DNA
catctacaataagaccg

SEQ ID NO: 137533 - DNA, 17 bp, synthetic construct
  source 1..17: mol_type = other DNA
atctacaataagaccga

SEQ ID NO: 137534 - DNA, 17 bp, synthetic construct
  source 1..17: mol_type = other DNA
tctacaataagaccgac

SEQ ID NO: 137535 - DNA, 17 bp, synthetic construct
  source 1..17: mol_type = other DNA
ctacaataagaccgacc

SEQ ID NO: 137536 - DNA, 17 bp, synthetic construct
  source 1..17: mol_type = other DNA
tacaataagaccgaccg

SEQ ID NO: 137537 - DNA, 17 bp, synthetic construct
  source 1..17: mol_type = other DNA
acaataagaccgaccga

SEQ ID NO: 137538 - DNA, 17 bp, synthetic construct
  source 1..17: mol_type = other DNA
caataagaccgaccgag

SEQ ID NO: 137539 - DNA, 17 bp, synthetic construct
  source 1..17: mol_type = other DNA
aataagaccgaccgagc

SEQ ID NO: 137540 - DNA, 17 bp, synthetic construct
  source 1..17: mol_type = other DNA
ataagaccgaccgagcc

SEQ ID NO: 137541 - DNA, 17 bp, synthetic construct
  source 1..17: mol_type = other DNA
taagaccgaccgagccg

SEQ ID NO: 137542 - DNA, 17 bp, synthetic construct
  source 1..17: mol_type = other DNA
aagaccgaccgagccgg

SEQ ID NO: 137543 - DNA, 17 bp, synthetic construct
  source 1..17: mol_type = other DNA
agaccgaccgagccggc

SEQ ID NO: 137544 - DNA, 17 bp, synthetic construct
  source 1..17: mol_type = other DNA
gaccgaccgagccggct

SEQ ID NO: 137545 - DNA, 17 bp, synthetic construct
  source 1..17: mol_type = other DNA
accgaccgagccggctg

SEQ ID NO: 137546 - DNA, 17 bp, synthetic construct
  source 1..17: mol_type = other DNA
ccgaccgagccggctgc

SEQ ID NO: 137547 - DNA, 17 bp, synthetic construct
  source 1..17: mol_type = other DNA
cgaccgagccggctgcc

SEQ ID NO: 137548 - DNA, 17 bp, synthetic construct
  source 1..17: mol_type = other DNA
gaccgagccggctgcca

SEQ ID NO: 137549 - DNA, 17 bp, synthetic construct
  source 1..17: mol_type = other DNA
accgagccggctgccat

SEQ ID NO: 137550 - DNA, 17 bp, synthetic construct
  source 1..17: mol_type = other DNA
ccgagccggctgccatt

SEQ ID NO: 137551 - DNA, 17 bp, synthetic construct
  source 1..17: mol_type = other DNA
cgagccggctgccattt

SEQ ID NO: 137552 - DNA, 17 bp, synthetic construct
  source 1..17: mol_type = other DNA
gagccggctgccatttc

SEQ ID NO: 137553 - DNA, 17 bp, synthetic construct
  source 1..17: mol_type = other DNA
agccggctgccatttct

SEQ ID NO: 137554 - DNA, 17 bp, synthetic construct
  source 1..17: mol_type = other DNA
gccggctgccatttcta

SEQ ID NO: 137555 - DNA, 17 bp, synthetic construct
  source 1..17: mol_type = other DNA
ccggctgccatttctac

SEQ ID NO: 137556 - DNA, 17 bp, synthetic construct
  source 1..17: mol_type = other DNA
cggctgccatttctacg

SEQ ID NO: 137557 - DNA, 17 bp, synthetic construct
  source 1..17: mol_type = other DNA
ggctgccatttctacgc

SEQ ID NO: 137558 - DNA, 17 bp, synthetic construct
  source 1..17: mol_type = other DNA
gctgccatttctacgca

SEQ ID NO: 137559 - DNA, 17 bp, synthetic construct
  source 1..17: mol_type = other DNA
ctgccatttctacgcag

SEQ ID NO: 137560 - DNA, 17 bp, synthetic construct
  source 1..17: mol_type = other DNA
tgccatttctacgcagt

SEQ ID NO: 137561 - DNA, 17 bp, synthetic construct
  source 1..17: mol_type = other DNA
gccatttctacgcagtg

SEQ ID NO: 137562 - DNA, 17 bp, synthetic construct
  source 1..17: mol_type = other DNA
ccatttctacgcagtgt

SEQ ID NO: 137563 - DNA, 17 bp, synthetic construct
  source 1..17: mol_type = other DNA
catttctacgcagtgtg

SEQ ID NO: 137564 - DNA, 17 bp, synthetic construct
  source 1..17: mol_type = other DNA
atttctacgcagtgtgc

SEQ ID NO: 137565 - DNA, 17 bp, synthetic construct
  source 1..17: mol_type = other DNA
tttctacgcagtgtgca

SEQ ID NO: 137566 - DNA, 17 bp, synthetic construct
  source 1..17: mol_type = other DNA
ttctacgcagtgtgcaa

SEQ ID NO: 137567 - DNA, 17 bp, synthetic construct
  source 1..17: mol_type = other DNA
tctacgcagtgtgcaat

SEQ ID NO: 137568 - DNA, 17 bp, synthetic construct
  source 1..17: mol_type = other DNA
ctacgcagtgtgcaatc

SEQ ID NO: 137569 - DNA, 17 bp, synthetic construct
  source 1..17: mol_type = other DNA
tacgcagtgtgcaatca

SEQ ID NO: 137570 - DNA, 17 bp, synthetic construct
  source 1..17: mol_type = other DNA
acgcagtgtgcaatcag

SEQ ID NO: 137571 - DNA, 17 bp, synthetic construct
  source 1..17: mol_type = other DNA
cgcagtgtgcaatcagc

SEQ ID NO: 137572 - DNA, 17 bp, synthetic construct
  source 1..17: mol_type = other DNA
gcagtgtgcaatcagca

SEQ ID NO: 137573 - DNA, 17 bp, synthetic construct
  source 1..17: mol_type = other DNA
cagtgtgcaatcagcac

SEQ ID NO: 137574 - DNA, 17 bp, synthetic construct
  source 1..17: mol_type = other DNA
agtgtgcaatcagcact

SEQ ID NO: 137575 - DNA, 17 bp, synthetic construct
  source 1..17: mol_type = other DNA
gtgtgcaatcagcactg

SEQ ID NO: 137576 - DNA, 17 bp, synthetic construct
  source 1..17: mol_type = other DNA
tgtgcaatcagcactgt

SEQ ID NO: 137577 - DNA, 17 bp, synthetic construct
  source 1..17: mol_type = other DNA
gtgcaatcagcactgtg

SEQ ID NO: 137578 - DNA, 17 bp, synthetic construct
  source 1..17: mol_type = other DNA
tgcaatcagcactgtga

SEQ ID NO: 137579 - DNA, 17 bp, synthetic construct
  source 1..17: mol_type = other DNA
gcaatcagcactgtgac

SEQ ID NO: 137580 - DNA, 17 bp, synthetic construct
  source 1..17: mol_type = other DNA
caatcagcactgtgaca

SEQ ID NO: 137581 - DNA, 17 bp, synthetic construct
  source 1..17: mol_type = other DNA
aatcagcactgtgacat

SEQ ID NO: 137582 - DNA, 17 bp, synthetic construct
  source 1..17: mol_type = other DNA
atcagcactgtgacatt

SEQ ID NO: 137583 - DNA, 17 bp, synthetic construct
  source 1..17: mol_type = other DNA
tcagcactgtgacattg

SEQ ID NO: 137584 - DNA, 17 bp, synthetic construct
  source 1..17: mol_type = other DNA
cagcactgtgacattga

SEQ ID NO: 137585 - DNA, 17 bp, synthetic construct
  source 1..17: mol_type = other DNA
agcactgtgacattgac

SEQ ID NO: 137586 - DNA, 17 bp, synthetic construct
  source 1..17: mol_type = other DNA
gcactgtgacattgacc

SEQ ID NO: 137587 - DNA, 17 bp, synthetic construct
  source 1..17: mol_type = other DNA
cactgtgacattgaccg

SEQ ID NO: 137588 - DNA, 17 bp, synthetic construct
  source 1..17: mol_type = other DNA
actgtgacattgaccgc

SEQ ID NO: 137589 - DNA, 17 bp, synthetic construct
  source 1..17: mol_type = other DNA
ctgtgacattgaccgct

SEQ ID NO: 137590 - DNA, 17 bp, synthetic construct
  source 1..17: mol_type = other DNA
tgtgacattgaccgctt

SEQ ID NO: 137591 - DNA, 17 bp, synthetic construct
  source 1..17: mol_type = other DNA
gtgacattgaccgcttc

SEQ ID NO: 137592 - DNA, 17 bp, synthetic construct
  source 1..17: mol_type = other DNA
tgacattgaccgcttcc

SEQ ID NO: 137593 - DNA, 17 bp, synthetic construct
  source 1..17: mol_type = other DNA
gacattgaccgcttcca

SEQ ID NO: 137594 - DNA, 17 bp, synthetic construct
  source 1..17: mol_type = other DNA
acattgaccgcttccag

SEQ ID NO: 137595 - DNA, 17 bp, synthetic construct
  source 1..17: mol_type = other DNA
cattgaccgcttccagg

SEQ ID NO: 137596 - DNA, 17 bp, synthetic construct
  source 1..17: mol_type = other DNA
attgaccgcttccaggg

SEQ ID NO: 137597 - DNA, 17 bp, synthetic construct
  source 1..17: mol_type = other DNA
ttgaccgcttccagggc

SEQ ID NO: 137598 - DNA, 17 bp, synthetic construct
  source 1..17: mol_type = other DNA
tgaccgcttccagggcg

SEQ ID NO: 137599 - DNA, 17 bp, synthetic construct
  source 1..17: mol_type = other DNA
gaccgcttccagggcgc

SEQ ID NO: 137600 - DNA, 17 bp, synthetic construct
  source 1..17: mol_type = other DNA
accgcttccagggcgcc

SEQ ID NO: 137601 - DNA, 17 bp, synthetic construct
  source 1..17: mol_type = other DNA
ccgcttccagggcgcct

SEQ ID NO: 137602 - DNA, 17 bp, synthetic construct
  source 1..17: mol_type = other DNA
cgcttccagggcgcctg

SEQ ID NO: 137603 - DNA, 17 bp, synthetic construct
  source 1..17: mol_type = other DNA
gcttccagggcgcctgt

SEQ ID NO: 137604 - DNA, 17 bp, synthetic construct
  source 1..17: mol_type = other DNA
cttccagggcgcctgtc

SEQ ID NO: 137605 - DNA, 17 bp, synthetic construct
  source 1..17: mol_type = other DNA
ttccagggcgcctgtcc

SEQ ID NO: 137606 - DNA, 17 bp, synthetic construct
  source 1..17: mol_type = other DNA
tccagggcgcctgtccc

SEQ ID NO: 137607 - DNA, 17 bp, synthetic construct
  source 1..17: mol_type = other DNA
ccagggcgcctgtccca

SEQ ID NO: 137608 - DNA, 17 bp, synthetic construct
  source 1..17: mol_type = other DNA
cagggcgcctgtcccac

SEQ ID NO: 137609 - DNA, 17 bp, synthetic construct
  source 1..17: mol_type = other DNA
agggcgcctgtcccacc

SEQ ID NO: 137610 - DNA, 17 bp, synthetic construct
  source 1..17: mol_type = other DNA
gggcgcctgtcccacct

SEQ ID NO: 137611 - DNA, 17 bp, synthetic construct
  source 1..17: mol_type = other DNA
ggcgcctgtcccacctc

SEQ ID NO: 137612 - DNA, 17 bp, synthetic construct
  source 1..17: mol_type = other DNA
gcgcctgtcccacctcc

SEQ ID NO: 137613 - DNA, 17 bp, synthetic construct
  source 1..17: mol_type = other DNA
cgcctgtcccacctccc

SEQ ID NO: 137614 - DNA, 17 bp, synthetic construct
  source 1..17: mol_type = other DNA
gcctgtcccacctcccc

SEQ ID NO: 137615 - DNA, 17 bp, synthetic construct
  source 1..17: mol_type = other DNA
cctgtcccacctcccca

SEQ ID NO: 137616 - DNA, 17 bp, synthetic construct
  source 1..17: mol_type = other DNA
ctgtcccacctccccac

SEQ ID NO: 137617 - DNA, 17 bp, synthetic construct
  source 1..17: mol_type = other DNA
tgtcccacctccccacc

SEQ ID NO: 137618 - DNA, 17 bp, synthetic construct
  source 1..17: mol_type = other DNA
gtcccacctccccaccg

SEQ ID NO: 137619 - DNA, 17 bp, synthetic construct
  source 1..17: mol_type = other DNA
tcccacctccccaccgc

SEQ ID NO: 137620 - DNA, 17 bp, synthetic construct
  source 1..17: mol_type = other DNA
cccacctccccaccgcc

SEQ ID NO: 137621 - DNA, 17 bp, synthetic construct
  source 1..17: mol_type = other DNA
ccacctccccaccgcca

SEQ ID NO: 137622 - DNA, 17 bp, synthetic construct
  source 1..17: mol_type = other DNA
cacctccccaccgccag

SEQ ID NO: 137623 - DNA, 17 bp, synthetic construct
  source 1..17: mol_type = other DNA
acctccccaccgccagt

SEQ ID NO: 137624 - DNA, 17 bp, synthetic construct
  source 1..17: mol_type = other DNA
cctccccaccgccagtg

SEQ ID NO: 137625 - DNA, 17 bp, synthetic construct
  source 1..17: mol_type = other DNA
ctccccaccgccagtgt

SEQ ID NO: 137626 - DNA, 17 bp, synthetic construct
  source 1..17: mol_type = other DNA
tccccaccgccagtgtc

SEQ ID NO: 137627 - DNA, 17 bp, synthetic construct
  source 1..17: mol_type = other DNA
ccccaccgccagtgtcc

SEQ ID NO: 137628 - DNA, 17 bp, synthetic construct
  source 1..17: mol_type = other DNA
cccaccgccagtgtcct

SEQ ID NO: 137629 - DNA, 17 bp, synthetic construct
  source 1..17: mol_type = other DNA
ccaccgccagtgtcctc

SEQ ID NO: 137630 - DNA, 17 bp, synthetic construct
  source 1..17: mol_type = other DNA
caccgccagtgtcctcc

SEQ ID NO: 137631 - DNA, 17 bp, synthetic construct
  source 1..17: mol_type = other DNA
accgccagtgtcctccg

SEQ ID NO: 137632 - DNA, 17 bp, synthetic construct
  source 1..17: mol_type = other DNA
ccgccagtgtcctccgc

SEQ ID NO: 137633 - DNA, 17 bp, synthetic construct
  source 1..17: mol_type = other DNA
cgccagtgtcctccgcc

SEQ ID NO: 137634 - DNA, 17 bp, synthetic construct
  source 1..17: mol_type = other DNA
gccagtgtcctccgccc

SEQ ID NO: 137635 - DNA, 17 bp, synthetic construct
  source 1..17: mol_type = other DNA
ccagtgtcctccgcccc

SEQ ID NO: 137636 - DNA, 17 bp, synthetic construct
  source 1..17: mol_type = other DNA
cagtgtcctccgccccg

SEQ ID NO: 137637 - DNA, 17 bp, synthetic construct
  source 1..17: mol_type = other DNA
agtgtcctccgccccgc

SEQ ID NO: 137638 - DNA, 17 bp, synthetic construct
  source 1..17: mol_type = other DNA
gtgtcctccgccccgct

SEQ ID NO: 137639 - DNA, 17 bp, synthetic construct
  source 1..17: mol_type = other DNA
tgtcctccgccccgctg

SEQ ID NO: 137640 - DNA, 17 bp, synthetic construct
  source 1..17: mol_type = other DNA
gtcctccgccccgctgt

SEQ ID NO: 137641 - DNA, 17 bp, synthetic construct
  source 1..17: mol_type = other DNA
tcctccgccccgctgtc

SEQ ID NO: 137642 - DNA, 17 bp, synthetic construct
  source 1..17: mol_type = other DNA
cctccgccccgctgtcc

SEQ ID NO: 137643 - DNA, 17 bp, synthetic construct
  source 1..17: mol_type = other DNA
ctccgccccgctgtcct

SEQ ID NO: 137644 - DNA, 17 bp, synthetic construct
  source 1..17: mol_type = other DNA
tccgccccgctgtcctc

SEQ ID NO: 137645 - DNA, 17 bp, synthetic construct
  source 1..17: mol_type = other DNA
ccgccccgctgtcctcg

SEQ ID NO: 137646 - DNA, 17 bp, synthetic construct
  source 1..17: mol_type = other DNA
cgccccgctgtcctcgc

SEQ ID NO: 137647 - DNA, 17 bp, synthetic construct
  source 1..17: mol_type = other DNA
gccccgctgtcctcgcc

SEQ ID NO: 137648 - DNA, 17 bp, synthetic construct
  source 1..17: mol_type = other DNA
ccccgctgtcctcgccc

SEQ ID NO: 137649 - DNA, 17 bp, synthetic construct
  source 1..17: mol_type = other DNA
cccgctgtcctcgccct

SEQ ID NO: 137650 - DNA, 17 bp, synthetic construct
  source 1..17: mol_type = other DNA
ccgctgtcctcgccctc

SEQ ID NO: 137651 - DNA, 17 bp, synthetic construct
  source 1..17: mol_type = other DNA
cgctgtcctcgccctcc

SEQ ID NO: 137652 - DNA, 17 bp, synthetic construct
  source 1..17: mol_type = other DNA
gctgtcctcgccctccc

SEQ ID NO: 137653 - DNA, 17 bp, synthetic construct
  source 1..17: mol_type = other DNA
ctgtcctcgccctcccc

SEQ ID NO: 137654 - DNA, 17 bp, synthetic construct
  source 1..17: mol_type = other DNA
tgtcctcgccctcccct

SEQ ID NO: 137655 - DNA, 17 bp, synthetic construct
  source 1..17: mol_type = other DNA
gtcctcgccctcccctg

SEQ ID NO: 137656 - DNA, 17 bp, synthetic construct
  source 1..17: mol_type = other DNA
tcctcgccctcccctgc

SEQ ID NO: 137657 - DNA, 17 bp, synthetic construct
  source 1..17: mol_type = other DNA
cctcgccctcccctgcc

SEQ ID NO: 137658 - DNA, 17 bp, synthetic construct
  source 1..17: mol_type = other DNA
ctcgccctcccctgccc

SEQ ID NO: 137659 - DNA, 17 bp, synthetic construct
  source 1..17: mol_type = other DNA
tcgccctcccctgcccc

SEQ ID NO: 137660 - DNA, 17 bp, synthetic construct
  source 1..17: mol_type = other DNA
cgccctcccctgcccct

SEQ ID NO: 137661 - DNA, 17 bp, synthetic construct
  source 1..17: mol_type = other DNA
gccctcccctgcccctg

SEQ ID NO: 137662 - DNA, 17 bp, synthetic construct
  source 1..17: mol_type = other DNA
ccctcccctgcccctgg

SEQ ID NO: 137663 - DNA, 17 bp, synthetic construct
  source 1..17: mol_type = other DNA
cctcccctgcccctggc

SEQ ID NO: 137664 - DNA, 17 bp, synthetic construct
  source 1..17: mol_type = other DNA
ctcccctgcccctggct

SEQ ID NO: 137665 - DNA, 17 bp, synthetic construct
  source 1..17: mol_type = other DNA
tcccctgcccctggctg

SEQ ID NO: 137666 - DNA, 17 bp, synthetic construct
  source 1..17: mol_type = other DNA
cccctgcccctggctgt

SEQ ID NO: 137667 - DNA, 17 bp, synthetic construct
  source 1..17: mol_type = other DNA
ccctgcccctggctgtg

SEQ ID NO: 137668 - DNA, 17 bp, synthetic construct
  source 1..17: mol_type = other DNA
cctgcccctggctgtga

SEQ ID NO: 137669 - DNA, 17 bp, synthetic construct
  source 1..17: mol_type = other DNA
ctgcccctggctgtgac

SEQ ID NO: 137670 - DNA, 17 bp, synthetic construct
  source 1..17: mol_type = other DNA
tgcccctggctgtgaca

SEQ ID NO: 137671 - DNA, 17 bp, synthetic construct
  source 1..17: mol_type = other DNA
gcccctggctgtgacaa

SEQ ID NO: 137672 - DNA, 17 bp, synthetic construct
  source 1..17: mol_type = other DNA
cccctggctgtgacaat

SEQ ID NO: 137673 - DNA, 17 bp, synthetic construct
  source 1..17: mol_type = other DNA
ccctggctgtgacaatg

SEQ ID NO: 137674 - DNA, 17 bp, synthetic construct
  source 1..17: mol_type = other DNA
cctggctgtgacaatgc

SEQ ID NO: 137675 - DNA, 17 bp, synthetic construct
  source 1..17: mol_type = other DNA
ctggctgtgacaatgcc

SEQ ID NO: 137676 - DNA, 17 bp, synthetic construct
  source 1..17: mol_type = other DNA
tggctgtgacaatgcca

SEQ ID NO: 137677 - DNA, 17 bp, synthetic construct
  source 1..17: mol_type = other DNA
ggctgtgacaatgccat

SEQ ID NO: 137678 - DNA, 17 bp, synthetic construct
  source 1..17: mol_type = other DNA
gctgtgacaatgccatc

SEQ ID NO: 137679 - DNA, 17 bp, synthetic construct
  source 1..17: mol_type = other DNA
ctgtgacaatgccatcc

SEQ ID NO: 137680 - DNA, 17 bp, synthetic construct
  source 1..17: mol_type = other DNA
tgtgacaatgccatccc

SEQ ID NO: 137681 - DNA, 17 bp, synthetic construct
  source 1..17: mol_type = other DNA
gtgacaatgccatccct

SEQ ID NO: 137682 - DNA, 17 bp, synthetic construct
  source 1..17: mol_type = other DNA
tgacaatgccatccctc

SEQ ID NO: 137683 - DNA, 17 bp, synthetic construct
  source 1..17: mol_type = other DNA
gacaatgccatccctct

SEQ ID NO: 137684 - DNA, 17 bp, synthetic construct
  source 1..17: mol_type = other DNA
acaatgccatccctctc

SEQ ID NO: 137685 - DNA, 17 bp, synthetic construct
  source 1..17: mol_type = other DNA
caatgccatccctctcc

SEQ ID NO: 137686 - DNA, 17 bp, synthetic construct
  source 1..17: mol_type = other DNA
aatgccatccctctccg

SEQ ID NO: 137687 - DNA, 17 bp, synthetic construct
  source 1..17: mol_type = other DNA
atgccatccctctccgg

SEQ ID NO: 137688 - DNA, 17 bp, synthetic construct
  source 1..17: mol_type = other DNA
tgccatccctctccggc

SEQ ID NO: 137689 - DNA, 17 bp, synthetic construct
  source 1..17: mol_type = other DNA
gccatccctctccggca

SEQ ID NO: 137690 - DNA, 17 bp, synthetic construct
  source 1..17: mol_type = other DNA
ccatccctctccggcag

SEQ ID NO: 137691 - DNA, 17 bp, synthetic construct
  source 1..17: mol_type = other DNA
catccctctccggcagg

SEQ ID NO: 137692 - DNA, 17 bp, synthetic construct
  source 1..17: mol_type = other DNA
atccctctccggcaggt

SEQ ID NO: 137693 - DNA, 17 bp, synthetic construct
  source 1..17: mol_type = other DNA
tccctctccggcaggtg

SEQ ID NO: 137694 - DNA, 17 bp, synthetic construct
  source 1..17: mol_type = other DNA
ccctctccggcaggtgg

SEQ ID NO: 137695 - DNA, 17 bp, synthetic construct
  source 1..17: mol_type = other DNA
cctctccggcaggtggg

SEQ ID NO: 137696 - DNA, 17 bp, synthetic construct
  source 1..17: mol_type = other DNA
ctctccggcaggtgggc

SEQ ID NO: 137697 - DNA, 17 bp, synthetic construct
  source 1..17: mol_type = other DNA
tctccggcaggtgggcc

SEQ ID NO: 137698 - DNA, 17 bp, synthetic construct
  source 1..17: mol_type = other DNA
ctccggcaggtgggccc

SEQ ID NO: 137699 - DNA, 17 bp, synthetic construct
  source 1..17: mol_type = other DNA
tccggcaggtgggcccc

SEQ ID NO: 137700 - DNA, 17 bp, synthetic construct
  source 1..17: mol_type = other DNA
ccggcaggtgggccccg

SEQ ID NO: 137701 - DNA, 17 bp, synthetic construct
  source 1..17: mol_type = other DNA
cggcaggtgggccccgc

SEQ ID NO: 137702 - DNA, 17 bp, synthetic construct
  source 1..17: mol_type = other DNA
ggcaggtgggccccgcc

SEQ ID NO: 137703 - DNA, 17 bp, synthetic construct
  source 1..17: mol_type = other DNA
gcaggtgggccccgcct

SEQ ID NO: 137704 - DNA, 17 bp, synthetic construct
  source 1..17: mol_type = other DNA
caggtgggccccgcctg

SEQ ID NO: 137705 - DNA, 17 bp, synthetic construct
  source 1..17: mol_type = other DNA
aggtgggccccgcctgc

SEQ ID NO: 137706 - DNA, 17 bp, synthetic construct
  source 1..17: mol_type = other DNA
ggtgggccccgcctgcc

SEQ ID NO: 137707 - DNA, 17 bp, synthetic construct
  source 1..17: mol_type = other DNA
gtgggccccgcctgccc

SEQ ID NO: 137708 - DNA, 17 bp, synthetic construct
  source 1..17: mol_type = other DNA
tgggccccgcctgccct

SEQ ID NO: 137709 - DNA, 17 bp, synthetic construct
  source 1..17: mol_type = other DNA
gggccccgcctgccctc

SEQ ID NO: 137710 - DNA, 17 bp, synthetic construct
  source 1..17: mol_type = other DNA
ggccccgcctgccctcc

SEQ ID NO: 137711 - DNA, 17 bp, synthetic construct
  source 1..17: mol_type = other DNA
gccccgcctgccctcca

SEQ ID NO: 137712 - DNA, 17 bp, synthetic construct
  source 1..17: mol_type = other DNA
ccccgcctgccctccac

SEQ ID NO: 137713 - DNA, 17 bp, synthetic construct
  source 1..17: mol_type = other DNA
cccgcctgccctccacc

SEQ ID NO: 137714 - DNA, 17 bp, synthetic construct
  source 1..17: mol_type = other DNA
ccgcctgccctccacct

SEQ ID NO: 137715 - DNA, 17 bp, synthetic construct
  source 1..17: mol_type = other DNA
cgcctgccctccacctc

SEQ ID NO: 137716 - DNA, 17 bp, synthetic construct
  source 1..17: mol_type = other DNA
gcctgccctccacctcc

SEQ ID NO: 137717 - DNA, 17 bp, synthetic construct
  source 1..17: mol_type = other DNA
cctgccctccacctccc

SEQ ID NO: 137718 - DNA, 17 bp, synthetic construct
  source 1..17: mol_type = other DNA
ctgccctccacctcccg

SEQ ID NO: 137719 - DNA, 17 bp, synthetic construct
  source 1..17: mol_type = other DNA
tgccctccacctcccgt

SEQ ID NO: 137720 - DNA, 17 bp, synthetic construct
  source 1..17: mol_type = other DNA
gccctccacctcccgtg

SEQ ID NO: 137721 - DNA, 17 bp, synthetic construct
  source 1..17: mol_type = other DNA
ccctccacctcccgtgc

SEQ ID NO: 137722 - DNA, 17 bp, synthetic construct
  source 1..17: mol_type = other DNA
cctccacctcccgtgct

SEQ ID NO: 137723 - DNA, 17 bp, synthetic construct
  source 1..17: mol_type = other DNA
ctccacctcccgtgctg

SEQ ID NO: 137724 - DNA, 17 bp, synthetic construct
  source 1..17: mol_type = other DNA
tccacctcccgtgctgc

SEQ ID NO: 137725 - DNA, 17 bp, synthetic construct
  source 1..17: mol_type = other DNA
ccacctcccgtgctgcg

SEQ ID NO: 137726 - DNA, 17 bp, synthetic construct
  source 1..17: mol_type = other DNA
cacctcccgtgctgcgt

SEQ ID NO: 137727 - DNA, 17 bp, synthetic construct
  source 1..17: mol_type = other DNA
acctcccgtgctgcgtg

SEQ ID NO: 137728 - DNA, 17 bp, synthetic construct
  source 1..17: mol_type = other DNA
cctcccgtgctgcgtgc

SEQ ID NO: 137729 - DNA, 17 bp, synthetic construct
  source 1..17: mol_type = other DNA
ctcccgtgctgcgtgca

SEQ ID NO: 137730 - DNA, 17 bp, synthetic construct
  source 1..17: mol_type = other DNA
tcccgtgctgcgtgcac

SEQ ID NO: 137731 - DNA, 17 bp, synthetic construct
  source 1..17: mol_type = other DNA
cccgtgctgcgtgcaca

SEQ ID NO: 137732 - DNA, 17 bp, synthetic construct
  source 1..17: mol_type = other DNA
ccgtgctgcgtgcacac

SEQ ID NO: 137733 - DNA, 17 bp, synthetic construct
  source 1..17: mol_type = other DNA
cgtgctgcgtgcacacg

SEQ ID NO: 137734 - DNA, 17 bp, synthetic construct
  source 1..17: mol_type = other DNA
gtgctgcgtgcacacgg

SEQ ID NO: 137735 - DNA, 17 bp, synthetic construct
  source 1..17: mol_type = other DNA
tgctgcgtgcacacggt

SEQ ID NO: 137736 - DNA, 17 bp, synthetic construct
  source 1..17: mol_type = other DNA
gctgcgtgcacacggtc

SEQ ID NO: 137737 - DNA, 17 bp, synthetic construct
  source 1..17: mol_type = other DNA
ctgcgtgcacacggtct

SEQ ID NO: 137738 - DNA, 17 bp, synthetic construct
  source 1..17: mol_type = other DNA
tgcgtgcacacggtctg

SEQ ID NO: 137739 - DNA, 17 bp, synthetic construct
  source 1..17: mol_type = other DNA
gcgtgcacacggtctgg

SEQ ID NO: 137740 - DNA, 17 bp, synthetic construct
  source 1..17: mol_type = other DNA
cgtgcacacggtctggg

SEQ ID NO: 137741 - DNA, 17 bp, synthetic construct
  source 1..17: mol_type = other DNA
gtgcacacggtctgggt

SEQ ID NO: 137742 - DNA, 17 bp, synthetic construct
  source 1..17: mol_type = other DNA
tgcacacggtctgggtt

SEQ ID NO: 137743 - DNA, 17 bp, synthetic construct
  source 1..17: mol_type = other DNA
gcacacggtctgggttg

SEQ ID NO: 137744 - DNA, 17 bp, synthetic construct
  source 1..17: mol_type = other DNA
cacacggtctgggttgg

SEQ ID NO: 137745 - DNA, 17 bp, synthetic construct
  source 1..17: mol_type = other DNA
acacggtctgggttggc

SEQ ID NO: 137746 - DNA, 17 bp, synthetic construct
  source 1..17: mol_type = other DNA
cacggtctgggttggct

SEQ ID NO: 137747 - DNA, 17 bp, synthetic construct
  source 1..17: mol_type = other DNA
acggtctgggttggctg

SEQ ID NO: 137748 - DNA, 17 bp, synthetic construct
  source 1..17: mol_type = other DNA
cggtctgggttggctgg

SEQ ID NO: 137749 - DNA, 17 bp, synthetic construct
  source 1..17: mol_type = other DNA
ggtctgggttggctgga

SEQ ID NO: 137750 - DNA, 17 bp, synthetic construct
  source 1..17: mol_type = other DNA
gtctgggttggctggag

SEQ ID NO: 137751 - DNA, 17 bp, synthetic construct
  source 1..17: mol_type = other DNA
tctgggttggctggagg

SEQ ID NO: 137752 - DNA, 17 bp, synthetic construct
  source 1..17: mol_type = other DNA
ctgggttggctggaggc

SEQ ID NO: 137753 - DNA, 17 bp, synthetic construct
  source 1..17: mol_type = other DNA
tgggttggctggaggca

SEQ ID NO: 137754 - DNA, 17 bp, synthetic construct
  source 1..17: mol_type = other DNA
gggttggctggaggcac

SEQ ID NO: 137755 - DNA, 17 bp, synthetic construct
  source 1..17: mol_type = other DNA
ggttggctggaggcaca

SEQ ID NO: 137756 - DNA, 17 bp, synthetic construct
  source 1..17: mol_type = other DNA
gttggctggaggcacag

SEQ ID NO: 137757 - DNA, 17 bp, synthetic construct
  source 1..17: mol_type = other DNA
ttggctggaggcacagc

SEQ ID NO: 137758 - DNA, 17 bp, synthetic construct
  source 1..17: mol_type = other DNA
tggctggaggcacagcc

SEQ ID NO: 137759 - DNA, 17 bp, synthetic construct
  source 1..17: mol_type = other DNA
ggctggaggcacagcca

SEQ ID NO: 137760 - DNA, 17 bp, synthetic construct
  source 1..17: mol_type = other DNA
gctggaggcacagccac

SEQ ID NO: 137761 - DNA, 17 bp, synthetic construct
  source 1..17: mol_type = other DNA
ctggaggcacagccaca

SEQ ID NO: 137762 - DNA, 17 bp, synthetic construct
  source 1..17: mol_type = other DNA
tggaggcacagccacag

SEQ ID NO: 137763 - DNA, 17 bp, synthetic construct
  source 1..17: mol_type = other DNA
ggaggcacagccacagt

SEQ ID NO: 137764 - DNA, 17 bp, synthetic construct
  source 1..17: mol_type = other DNA
gaggcacagccacagtc

SEQ ID NO: 137765 - DNA, 17 bp, synthetic construct
  source 1..17: mol_type = other DNA
aggcacagccacagtcc

SEQ ID NO: 137766 - DNA, 17 bp, synthetic construct
  source 1..17: mol_type = other DNA
ggcacagccacagtcca

SEQ ID NO: 137767 - DNA, 17 bp, synthetic construct
  source 1..17: mol_type = other DNA
gcacagccacagtccag

SEQ ID NO: 137768 - DNA, 17 bp, synthetic construct
  source 1..17: mol_type = other DNA
cacagccacagtccagc

SEQ ID NO: 137769 - DNA, 17 bp, synthetic construct
  source 1..17: mol_type = other DNA
acagccacagtccagct

SEQ ID NO: 137770 - DNA, 17 bp, synthetic construct
  source 1..17: mol_type = other DNA
cagccacagtccagctc

SEQ ID NO: 137771 - DNA, 17 bp, synthetic construct
  source 1..17: mol_type = other DNA
agccacagtccagctcc

SEQ ID NO: 137772 - DNA, 17 bp, synthetic construct
  source 1..17: mol_type = other DNA
gccacagtccagctccc

SEQ ID NO: 137773 - DNA, 17 bp, synthetic construct
  source 1..17: mol_type = other DNA
ccacagtccagctcccg

SEQ ID NO: 137774 - DNA, 17 bp, synthetic construct
  source 1..17: mol_type = other DNA
cacagtccagctcccga

SEQ ID NO: 137775 - DNA, 17 bp, synthetic construct
  source 1..17: mol_type = other DNA
acagtccagctcccgag

SEQ ID NO: 137776 - DNA, 17 bp, synthetic construct
  source 1..17: mol_type = other DNA
cagtccagctcccgagg

SEQ ID NO: 137777 - DNA, 17 bp, synthetic construct
  source 1..17: mol_type = other DNA
agtccagctcccgaggc

SEQ ID NO: 137778 - DNA, 17 bp, synthetic construct
  source 1..17: mol_type = other DNA
gtccagctcccgaggcc

SEQ ID NO: 137779 - DNA, 17 bp, synthetic construct
  source 1..17: mol_type = other DNA
tccagctcccgaggccc

SEQ ID NO: 137780 - DNA, 17 bp, synthetic construct
  source 1..17: mol_type = other DNA
ccagctcccgaggcccg

SEQ ID NO: 137781 - DNA, 17 bp, synthetic construct
  source 1..17: mol_type = other DNA
cagctcccgaggcccgt

SEQ ID NO: 137782 - DNA, 17 bp, synthetic construct
  source 1..17: mol_type = other DNA
agctcccgaggcccgtc

SEQ ID NO: 137783 - DNA, 17 bp, synthetic construct
  source 1..17: mol_type = other DNA
gctcccgaggcccgtct

SEQ ID NO: 137784 - DNA, 17 bp, synthetic construct
  source 1..17: mol_type = other DNA
ctcccgaggcccgtctc

SEQ ID NO: 137785 - DNA, 17 bp, synthetic construct
  source 1..17: mol_type = other DNA
tcccgaggcccgtctca

SEQ ID NO: 137786 - DNA, 17 bp, synthetic construct
  source 1..17: mol_type = other DNA
cccgaggcccgtctcag

SEQ ID NO: 137787 - DNA, 17 bp, synthetic construct
  source 1..17: mol_type = other DNA
ccgaggcccgtctcagt

SEQ ID NO: 137788 - DNA, 17 bp, synthetic construct
  source 1..17: mol_type = other DNA
cgaggcccgtctcagtg

SEQ ID NO: 137789 - DNA, 17 bp, synthetic construct
  source 1..17: mol_type = other DNA
gaggcccgtctcagtga

SEQ ID NO: 137790 - DNA, 17 bp, synthetic construct
  source 1..17: mol_type = other DNA
aggcccgtctcagtgac

SEQ ID NO: 137791 - DNA, 17 bp, synthetic construct
  source 1..17: mol_type = other DNA
ggcccgtctcagtgacc

SEQ ID NO: 137792 - DNA, 17 bp, synthetic construct
  source 1..17: mol_type = other DNA
gcccgtctcagtgaccc

SEQ ID NO: 137793 - DNA, 17 bp, synthetic construct
  source 1..17: mol_type = other DNA
cccgtctcagtgacccc

SEQ ID NO: 137794 - DNA, 17 bp, synthetic construct
  source 1..17: mol_type = other DNA
ccgtctcagtgaccccg

SEQ ID NO: 137795 - DNA, 17 bp, synthetic construct
  source 1..17: mol_type = other DNA
cgtctcagtgaccccgc

SEQ ID NO: 137796 - DNA, 17 bp, synthetic construct
  source 1..17: mol_type = other DNA
gtctcagtgaccccgcc

SEQ ID NO: 137797 - DNA, 17 bp, synthetic construct
  source 1..17: mol_type = other DNA
tctcagtgaccccgccg

SEQ ID NO: 137798 - DNA, 17 bp, synthetic construct
  source 1..17: mol_type = other DNA
ctcagtgaccccgccgc

SEQ ID NO: 137799 - DNA, 17 bp, synthetic construct
  source 1..17: mol_type = other DNA
tcagtgaccccgccgcc

SEQ ID NO: 137800 - DNA, 17 bp, synthetic construct
  source 1..17: mol_type = other DNA
cagtgaccccgccgcca

SEQ ID NO: 137801 - DNA, 17 bp, synthetic construct
  source 1..17: mol_type = other DNA
agtgaccccgccgccag

SEQ ID NO: 137802 - DNA, 17 bp, synthetic construct
  source 1..17: mol_type = other DNA
gtgaccccgccgccagt

SEQ ID NO: 137803 - DNA, 17 bp, synthetic construct
  source 1..17: mol_type = other DNA
tgaccccgccgccagta

SEQ ID NO: 137804 - DNA, 17 bp, synthetic construct
  source 1..17: mol_type = other DNA
gaccccgccgccagtat

SEQ ID NO: 137805 - DNA, 17 bp, synthetic construct
  source 1..17: mol_type = other DNA
accccgccgccagtatc

SEQ ID NO: 137806 - DNA, 17 bp, synthetic construct
  source 1..17: mol_type = other DNA
ccccgccgccagtatct

SEQ ID NO: 137807 - DNA, 17 bp, synthetic construct
  source 1..17: mol_type = other DNA
cccgccgccagtatctc

SEQ ID NO: 137808 - DNA, 17 bp, synthetic construct
  source 1..17: mol_type = other DNA
ccgccgccagtatctcc

SEQ ID NO: 137809 - DNA, 17 bp, synthetic construct
  source 1..17: mol_type = other DNA
cgccgccagtatctcca

SEQ ID NO: 137810 - DNA, 17 bp, synthetic construct
  source 1..17: mol_type = other DNA
gccgccagtatctccag

SEQ ID NO: 137811 - DNA, 17 bp, synthetic construct
  source 1..17: mol_type = other DNA
ccgccagtatctccagt

SEQ ID NO: 137812 - DNA, 17 bp, synthetic construct
  source 1..17: mol_type = other DNA
cgccagtatctccagtt

SEQ ID NO: 137813 - DNA, 17 bp, synthetic construct
  source 1..17: mol_type = other DNA
gccagtatctccagttg

SEQ ID NO: 137814 - DNA, 17 bp, synthetic construct
  source 1..17: mol_type = other DNA
ccagtatctccagttgg

SEQ ID NO: 137815 - DNA, 17 bp, synthetic construct
  source 1..17: mol_type = other DNA
cagtatctccagttgga

SEQ ID NO: 137816 - DNA, 17 bp, synthetic construct
  source 1..17: mol_type = other DNA
agtatctccagttggag

SEQ ID NO: 137817 - DNA, 17 bp, synthetic construct
  source 1..17: mol_type = other DNA
gtatctccagttggagg

SEQ ID NO: 137818 - DNA, 17 bp, synthetic construct
  source 1..17: mol_type = other DNA
tatctccagttggagga

SEQ ID NO: 137819 - DNA, 17 bp, synthetic construct
  source 1..17: mol_type = other DNA
atctccagttggaggag

SEQ ID NO: 137820 - DNA, 17 bp, synthetic construct
  source 1..17: mol_type = other DNA
tctccagttggaggagg

SEQ ID NO: 137821 - DNA, 17 bp, synthetic construct
  source 1..17: mol_type = other DNA
ctccagttggaggaggc

SEQ ID NO: 137822 - DNA, 17 bp, synthetic construct
  source 1..17: mol_type = other DNA
tccagttggaggaggca

SEQ ID NO: 137823 - DNA, 17 bp, synthetic construct
  source 1..17: mol_type = other DNA
ccagttggaggaggcac

SEQ ID NO: 137824 - DNA, 17 bp, synthetic construct
  source 1..17: mol_type = other DNA
cagttggaggaggcaca

SEQ ID NO: 137825 - DNA, 17 bp, synthetic construct
  source 1..17: mol_type = other DNA
agttggaggaggcacac

SEQ ID NO: 137826 - DNA, 17 bp, synthetic construct
  source 1..17: mol_type = other DNA
gttggaggaggcacaca

SEQ ID NO: 137827 - DNA, 17 bp, synthetic construct
  source 1..17: mol_type = other DNA
ttggaggaggcacacag

SEQ ID NO: 137828 - DNA, 17 bp, synthetic construct
  source 1..17: mol_type = other DNA
tggaggaggcacacagg

SEQ ID NO: 137829 - DNA, 17 bp, synthetic construct
  source 1..17: mol_type = other DNA
ggaggaggcacacaggg

SEQ ID NO: 137830 - DNA, 17 bp, synthetic construct
  source 1..17: mol_type = other DNA
gaggaggcacacagggc

SEQ ID NO: 137831 - DNA, 17 bp, synthetic construct
  source 1..17: mol_type = other DNA
aggaggcacacagggcc

SEQ ID NO: 137832 - DNA, 17 bp, synthetic construct
  source 1..17: mol_type = other DNA
ggaggcacacagggcct

SEQ ID NO: 137833 - DNA, 17 bp, synthetic construct
  source 1..17: mol_type = other DNA
gaggcacacagggccta

SEQ ID NO: 137834 - DNA, 17 bp, synthetic construct
  source 1..17: mol_type = other DNA
aggcacacagggcctag

SEQ ID NO: 137835 - DNA, 17 bp, synthetic construct
  source 1..17: mol_type = other DNA
ggcacacagggcctagg

SEQ ID NO: 137836 - DNA, 17 bp, synthetic construct
  source 1..17: mol_type = other DNA
gcacacagggcctaggg

SEQ ID NO: 137837 - DNA, 17 bp, synthetic construct
  source 1..17: mol_type = other DNA
cacacagggcctagggg

SEQ ID NO: 137838 - DNA, 17 bp, synthetic construct
  source 1..17: mol_type = other DNA
acacagggcctaggggc

SEQ ID NO: 137839 - DNA, 17 bp, synthetic construct
  source 1..17: mol_type = other DNA
cacagggcctaggggcc

SEQ ID NO: 137840 - DNA, 17 bp, synthetic construct
  source 1..17: mol_type = other DNA
acagggcctaggggcca

SEQ ID NO: 137841 - DNA, 17 bp, synthetic construct
  source 1..17: mol_type = other DNA
cagggcctaggggccag

SEQ ID NO: 137842 - DNA, 17 bp, synthetic construct
  source 1..17: mol_type = other DNA
agggcctaggggccagg

SEQ ID NO: 137843 - DNA, 17 bp, synthetic construct
  source 1..17: mol_type = other DNA
gggcctaggggccaggc

SEQ ID NO: 137844 - DNA, 17 bp, synthetic construct
  source 1..17: mol_type = other DNA
ggcctaggggccaggct

SEQ ID NO: 137845 - DNA, 17 bp, synthetic construct
  source 1..17: mol_type = other DNA
gcctaggggccaggcta

SEQ ID NO: 137846 - DNA, 17 bp, synthetic construct
  source 1..17: mol_type = other DNA
cctaggggccaggctag

SEQ ID NO: 137847 - DNA, 17 bp, synthetic construct
  source 1..17: mol_type = other DNA
ctaggggccaggctagc

SEQ ID NO: 137848 - DNA, 17 bp, synthetic construct
  source 1..17: mol_type = other DNA
taggggccaggctagca

SEQ ID NO: 137849 - DNA, 17 bp, synthetic construct
  source 1..17: mol_type = other DNA
aggggccaggctagcat

SEQ ID NO: 137850 - DNA, 17 bp, synthetic construct
  source 1..17: mol_type = other DNA
ggggccaggctagcatg

SEQ ID NO: 137851 - DNA, 17 bp, synthetic construct
  source 1..17: mol_type = other DNA
gggccaggctagcatgg

SEQ ID NO: 137852 - DNA, 17 bp, synthetic construct
  source 1..17: mol_type = other DNA
ggccaggctagcatggg

SEQ ID NO: 137853 - DNA, 17 bp, synthetic construct
  source 1..17: mol_type = other DNA
gccaggctagcatgggg

SEQ ID NO: 137854 - DNA, 17 bp, synthetic construct
  source 1..17: mol_type = other DNA
ccaggctagcatggggg

SEQ ID NO: 137855 - DNA, 17 bp, synthetic construct
  source 1..17: mol_type = other DNA
caggctagcatgggggc

SEQ ID NO: 137856 - DNA, 17 bp, synthetic construct
  source 1..17: mol_type = other DNA
aggctagcatgggggcc

SEQ ID NO: 137857 - DNA, 17 bp, synthetic construct
  source 1..17: mol_type = other DNA
ggctagcatgggggccg

SEQ ID NO: 137858 - DNA, 17 bp, synthetic construct
  source 1..17: mol_type = other DNA
gctagcatgggggccgc

SEQ ID NO: 137859 - DNA, 17 bp, synthetic construct
  source 1..17: mol_type = other DNA
ctagcatgggggccgcc

SEQ ID NO: 137860 - DNA, 17 bp, synthetic construct
  source 1..17: mol_type = other DNA
tagcatgggggccgccc

SEQ ID NO: 137861 - DNA, 17 bp, synthetic construct
  source 1..17: mol_type = other DNA
agcatgggggccgccct

SEQ ID NO: 137862 - DNA, 17 bp, synthetic construct
  source 1..17: mol_type = other DNA
gcatgggggccgccctc

SEQ ID NO: 137863 - DNA, 17 bp, synthetic construct
  source 1..17: mol_type = other DNA
catgggggccgccctcc

SEQ ID NO: 137864 - DNA, 17 bp, synthetic construct
  source 1..17: mol_type = other DNA
atgggggccgccctcct

SEQ ID NO: 137865 - DNA, 17 bp, synthetic construct
  source 1..17: mol_type = other DNA
tgggggccgccctcctc

SEQ ID NO: 137866 - DNA, 17 bp, synthetic construct
  source 1..17: mol_type = other DNA
gggggccgccctcctca

SEQ ID NO: 137867 - DNA, 17 bp, synthetic construct
  source 1..17: mol_type = other DNA
ggggccgccctcctcag

SEQ ID NO: 137868 - DNA, 17 bp, synthetic construct
  source 1..17: mol_type = other DNA
gggccgccctcctcagg

SEQ ID NO: 137869 - DNA, 17 bp, synthetic construct
  source 1..17: mol_type = other DNA
ggccgccctcctcaggc

SEQ ID NO: 137870 - DNA, 17 bp, synthetic construct
  source 1..17: mol_type = other DNA
gccgccctcctcaggca

SEQ ID NO: 137871 - DNA, 17 bp, synthetic construct
  source 1..17: mol_type = other DNA
ccgccctcctcaggcag

SEQ ID NO: 137872 - DNA, 17 bp, synthetic construct
  source 1..17: mol_type = other DNA
cgccctcctcaggcagg

SEQ ID NO: 137873 - DNA, 17 bp, synthetic construct
  source 1..17: mol_type = other DNA
gccctcctcaggcaggc

SEQ ID NO: 137874 - DNA, 17 bp, synthetic construct
  source 1..17: mol_type = other DNA
ccctcctcaggcaggct

SEQ ID NO: 137875 - DNA, 17 bp, synthetic construct
  source 1..17: mol_type = other DNA
cctcctcaggcaggctc

SEQ ID NO: 137876 - DNA, 17 bp, synthetic construct
  source 1..17: mol_type = other DNA
ctcctcaggcaggctct

SEQ ID NO: 137877 - DNA, 17 bp, synthetic construct
  source 1..17: mol_type = other DNA
tcctcaggcaggctctt

SEQ ID NO: 137878 - DNA, 17 bp, synthetic construct
  source 1..17: mol_type = other DNA
cctcaggcaggctcttg

SEQ ID NO: 137879 - DNA, 17 bp, synthetic construct
  source 1..17: mol_type = other DNA
ctcaggcaggctcttgt

SEQ ID NO: 137880 - DNA, 17 bp, synthetic construct
  source 1..17: mol_type = other DNA
tcaggcaggctcttgtg

SEQ ID NO: 137881 - DNA, 17 bp, synthetic construct
  source 1..17: mol_type = other DNA
caggcaggctcttgtgg

SEQ ID NO: 137882 - DNA, 17 bp, synthetic construct
  source 1..17: mol_type = other DNA
aggcaggctcttgtggc

SEQ ID NO: 137883 - DNA, 17 bp, synthetic construct
  source 1..17: mol_type = other DNA
ggcaggctcttgtggcc

SEQ ID NO: 137884 - DNA, 17 bp, synthetic construct
  source 1..17: mol_type = other DNA
gcaggctcttgtggcca

SEQ ID NO: 137885 - DNA, 17 bp, synthetic construct
  source 1..17: mol_type = other DNA
caggctcttgtggccac

SEQ ID NO: 137886 - DNA, 17 bp, synthetic construct
  source 1..17: mol_type = other DNA
aggctcttgtggccacc

SEQ ID NO: 137887 - DNA, 17 bp, synthetic construct
  source 1..17: mol_type = other DNA
ggctcttgtggccaccc

SEQ ID NO: 137888 - DNA, 17 bp, synthetic construct
  source 1..17: mol_type = other DNA
gctcttgtggccacccg

SEQ ID NO: 137889 - DNA, 17 bp, synthetic construct
  source 1..17: mol_type = other DNA
ctcttgtggccacccgg

SEQ ID NO: 137890 - DNA, 17 bp, synthetic construct
  source 1..17: mol_type = other DNA
tcttgtggccacccggg

SEQ ID NO: 137891 - DNA, 17 bp, synthetic construct
  source 1..17: mol_type = other DNA
cttgtggccacccgggg

SEQ ID NO: 137892 - DNA, 17 bp, synthetic construct
  source 1..17: mol_type = other DNA
ttgtggccacccggggc

SEQ ID NO: 137893 - DNA, 17 bp, synthetic construct
  source 1..17: mol_type = other DNA
tgtggccacccggggct

SEQ ID NO: 137894 - DNA, 17 bp, synthetic construct
  source 1..17: mol_type = other DNA
gtggccacccggggctt

SEQ ID NO: 137895 - DNA, 17 bp, synthetic construct
  source 1..17: mol_type = other DNA
tggccacccggggcttt

SEQ ID NO: 137896 - DNA, 17 bp, synthetic construct
  source 1..17: mol_type = other DNA
ggccacccggggctttg

SEQ ID NO: 137897 - DNA, 17 bp, synthetic construct
  source 1..17: mol_type = other DNA
gccacccggggctttgg

SEQ ID NO: 137898 - DNA, 17 bp, synthetic construct
  source 1..17: mol_type = other DNA
ccacccggggctttggg

SEQ ID NO: 137899 - DNA, 17 bp, synthetic construct
  source 1..17: mol_type = other DNA
cacccggggctttgggc

SEQ ID NO: 137900 - DNA, 17 bp, synthetic construct
  source 1..17: mol_type = other DNA
acccggggctttgggcc

SEQ ID NO: 137901 - DNA, 17 bp, synthetic construct
  source 1..17: mol_type = other DNA
cccggggctttgggcca

SEQ ID NO: 137902 - DNA, 17 bp, synthetic construct
  source 1..17: mol_type = other DNA
ccggggctttgggccat

SEQ ID NO: 137903 - DNA, 17 bp, synthetic construct
  source 1..17: mol_type = other DNA
cggggctttgggccatg

SEQ ID NO: 137904 - DNA, 17 bp, synthetic construct
  source 1..17: mol_type = other DNA
ggggctttgggccatga

SEQ ID NO: 137905 - DNA, 17 bp, synthetic construct
  source 1..17: mol_type = other DNA
gggctttgggccatgag

SEQ ID NO: 137906 - DNA, 17 bp, synthetic construct
  source 1..17: mol_type = other DNA
ggctttgggccatgagg

SEQ ID NO: 137907 - DNA, 17 bp, synthetic construct
  source 1..17: mol_type = other DNA
gctttgggccatgaggg

SEQ ID NO: 137908 - DNA, 17 bp, synthetic construct
  source 1..17: mol_type = other DNA
ctttgggccatgagggg

SEQ ID NO: 137909 - DNA, 17 bp, synthetic construct
  source 1..17: mol_type = other DNA
tttgggccatgaggggt

SEQ ID NO: 137910 - DNA, 17 bp, synthetic construct
  source 1..17: mol_type = other DNA
ttgggccatgaggggtg

SEQ ID NO: 137911 - DNA, 17 bp, synthetic construct
  source 1..17: mol_type = other DNA
tgggccatgaggggtgg

SEQ ID NO: 137912 - DNA, 17 bp, synthetic construct
  source 1..17: mol_type = other DNA
gggccatgaggggtggg

SEQ ID NO: 137913 - DNA, 17 bp, synthetic construct
  source 1..17: mol_type = other DNA
ggccatgaggggtggga

SEQ ID NO: 137914 - DNA, 17 bp, synthetic construct
  source 1..17: mol_type = other DNA
gccatgaggggtgggat

SEQ ID NO: 137915 - DNA, 17 bp, synthetic construct
  source 1..17: mol_type = other DNA
ccatgaggggtgggatg

SEQ ID NO: 137916 - DNA, 17 bp, synthetic construct
  source 1..17: mol_type = other DNA
catgaggggtgggatga

SEQ ID NO: 137917 - DNA, 17 bp, synthetic construct
  source 1..17: mol_type = other DNA
atgaggggtgggatgag

SEQ ID NO: 137918 - DNA, 17 bp, synthetic construct
  source 1..17: mol_type = other DNA
tgaggggtgggatgagc

SEQ ID NO: 137919 - DNA, 17 bp, synthetic construct
  source 1..17: mol_type = other DNA
gaggggtgggatgagcc

SEQ ID NO: 137920 - DNA, 17 bp, synthetic construct
  source 1..17: mol_type = other DNA
aggggtgggatgagccg

SEQ ID NO: 137921 - DNA, 17 bp, synthetic construct
  source 1..17: mol_type = other DNA
ggggtgggatgagccgt

SEQ ID NO: 137922 - DNA, 17 bp, synthetic construct
  source 1..17: mol_type = other DNA
gggtgggatgagccgtg

SEQ ID NO: 137923 - DNA, 17 bp, synthetic construct
  source 1..17: mol_type = other DNA
ggtgggatgagccgtgg

SEQ ID NO: 137924 - DNA, 17 bp, synthetic construct
  source 1..17: mol_type = other DNA
gtgggatgagccgtgga

SEQ ID NO: 137925 - DNA, 17 bp, synthetic construct
  source 1..17: mol_type = other DNA
tgggatgagccgtggat

SEQ ID NO: 137926 - DNA, 17 bp, synthetic construct
  source 1..17: mol_type = other DNA
gggatgagccgtggatg

SEQ ID NO: 137927 - DNA, 17 bp, synthetic construct
  source 1..17: mol_type = other DNA
ggatgagccgtggatgg

SEQ ID NO: 137928 - DNA, 17 bp, synthetic construct
  source 1..17: mol_type = other DNA
gatgagccgtggatggg

SEQ ID NO: 137929 - DNA, 17 bp, synthetic construct
  source 1..17: mol_type = other DNA
atgagccgtggatgggt

SEQ ID NO: 137930 - DNA, 17 bp, synthetic construct
  source 1..17: mol_type = other DNA
tgagccgtggatgggtc

SEQ ID NO: 137931 - DNA, 17 bp, synthetic construct
  source 1..17: mol_type = other DNA
gagccgtggatgggtcc

SEQ ID NO: 137932 - DNA, 17 bp, synthetic construct
  source 1..17: mol_type = other DNA
agccgtggatgggtccc

SEQ ID NO: 137933 - DNA, 17 bp, synthetic construct
  source 1..17: mol_type = other DNA
gccgtggatgggtcccg

SEQ ID NO: 137934 - DNA, 17 bp, synthetic construct
  source 1..17: mol_type = other DNA
ccgtggatgggtcccgt

SEQ ID NO: 137935 - DNA, 17 bp, synthetic construct
  source 1..17: mol_type = other DNA
cgtggatgggtcccgtg

SEQ ID NO: 137936 - DNA, 17 bp, synthetic construct
  source 1..17: mol_type = other DNA
gtggatgggtcccgtga

SEQ ID NO: 137937 - DNA, 17 bp, synthetic construct
  source 1..17: mol_type = other DNA
tggatgggtcccgtgag

SEQ ID NO: 137938 - DNA, 17 bp, synthetic construct
  source 1..17: mol_type = other DNA
ggatgggtcccgtgagc

SEQ ID NO: 137939 - DNA, 17 bp, synthetic construct
  source 1..17: mol_type = other DNA
gatgggtcccgtgagct

SEQ ID NO: 137940 - DNA, 17 bp, synthetic construct
  source 1..17: mol_type = other DNA
atgggtcccgtgagctg

SEQ ID NO: 137941 - DNA, 17 bp, synthetic construct
  source 1..17: mol_type = other DNA
tgggtcccgtgagctgg

SEQ ID NO: 137942 - DNA, 17 bp, synthetic construct
  source 1..17: mol_type = other DNA
gggtcccgtgagctggt

SEQ ID NO: 137943 - DNA, 17 bp, synthetic construct
  source 1..17: mol_type = other DNA
ggtcccgtgagctggtc

SEQ ID NO: 137944 - DNA, 17 bp, synthetic construct
  source 1..17: mol_type = other DNA
gtcccgtgagctggtcc

SEQ ID NO: 137945 - DNA, 17 bp, synthetic construct
  source 1..17: mol_type = other DNA
tcccgtgagctggtcca

SEQ ID NO: 137946 - DNA, 17 bp, synthetic construct
  source 1..17: mol_type = other DNA
cccgtgagctggtccag

SEQ ID NO: 137947 - DNA, 17 bp, synthetic construct
  source 1..17: mol_type = other DNA
ccgtgagctggtccagg

SEQ ID NO: 137948 - DNA, 17 bp, synthetic construct
  source 1..17: mol_type = other DNA
cgtgagctggtccaggt

SEQ ID NO: 137949 - DNA, 17 bp, synthetic construct
  source 1..17: mol_type = other DNA
gtgagctggtccaggtg

SEQ ID NO: 137950 - DNA, 17 bp, synthetic construct
  source 1..17: mol_type = other DNA
tgagctggtccaggtga

SEQ ID NO: 137951 - DNA, 17 bp, synthetic construct
  source 1..17: mol_type = other DNA
gagctggtccaggtgag

SEQ ID NO: 137952 - DNA, 17 bp, synthetic construct
  source 1..17: mol_type = other DNA
agctggtccaggtgagg

SEQ ID NO: 137953 - DNA, 17 bp, synthetic construct
  source 1..17: mol_type = other DNA
gctggtccaggtgagga

SEQ ID NO: 137954 - DNA, 17 bp, synthetic construct
  source 1..17: mol_type = other DNA
ctggtccaggtgaggac

SEQ ID NO: 137955 - DNA, 17 bp, synthetic construct
  source 1..17: mol_type = other DNA
tggtccaggtgaggacg

SEQ ID NO: 137956 - DNA, 17 bp, synthetic construct
  source 1..17: mol_type = other DNA
ggtccaggtgaggacgt

SEQ ID NO: 137957 - DNA, 17 bp, synthetic construct
  source 1..17: mol_type = other DNA
gtccaggtgaggacgtg

SEQ ID NO: 137958 - DNA, 17 bp, synthetic construct
  source 1..17: mol_type = other DNA
tccaggtgaggacgtgc

SEQ ID NO: 137959 - DNA, 17 bp, synthetic construct
  source 1..17: mol_type = other DNA
ccaggtgaggacgtgca

SEQ ID NO: 137960 - DNA, 17 bp, synthetic construct
  source 1..17: mol_type = other DNA
caggtgaggacgtgcat

SEQ ID NO: 137961 - DNA, 17 bp, synthetic construct
  source 1..17: mol_type = other DNA
aggtgaggacgtgcatg

SEQ ID NO: 137962 - DNA, 17 bp, synthetic construct
  source 1..17: mol_type = other DNA
ggtgaggacgtgcatgt

SEQ ID NO: 137963 - DNA, 17 bp, synthetic construct
  source 1..17: mol_type = other DNA
gtgaggacgtgcatgtt

SEQ ID NO: 137964 - DNA, 17 bp, synthetic construct
  source 1..17: mol_type = other DNA
tgaggacgtgcatgttc

SEQ ID NO: 137965 - DNA, 17 bp, synthetic construct
  source 1..17: mol_type = other DNA
gaggacgtgcatgttcc

SEQ ID NO: 137966 - DNA, 17 bp, synthetic construct
  source 1..17: mol_type = other DNA
aggacgtgcatgttccc

SEQ ID NO: 137967 - DNA, 17 bp, synthetic construct
  source 1..17: mol_type = other DNA
ggacgtgcatgttccct

SEQ ID NO: 137968 - DNA, 17 bp, synthetic construct
  source 1..17: mol_type = other DNA
gacgtgcatgttccctg

SEQ ID NO: 137969 - DNA, 17 bp, synthetic construct
  source 1..17: mol_type = other DNA
acgtgcatgttccctgc

SEQ ID NO: 137970 - DNA, 17 bp, synthetic construct
  source 1..17: mol_type = other DNA
cgtgcatgttccctgcc

SEQ ID NO: 137971 - DNA, 17 bp, synthetic construct
  source 1..17: mol_type = other DNA
gtgcatgttccctgccc

SEQ ID NO: 137972 - DNA, 17 bp, synthetic construct
  source 1..17: mol_type = other DNA
tgcatgttccctgcccc

SEQ ID NO: 137973 - DNA, 17 bp, synthetic construct
  source 1..17: mol_type = other DNA
gcatgttccctgcccca

SEQ ID NO: 137974 - DNA, 17 bp, synthetic construct
  source 1..17: mol_type = other DNA
catgttccctgccccag

SEQ ID NO: 137975 - DNA, 17 bp, synthetic construct
  source 1..17: mol_type = other DNA
atgttccctgccccagg

SEQ ID NO: 137976 - DNA, 17 bp, synthetic construct
  source 1..17: mol_type = other DNA
tgttccctgccccaggt

SEQ ID NO: 137977 - DNA, 17 bp, synthetic construct
  source 1..17: mol_type = other DNA
gttccctgccccaggtg

SEQ ID NO: 137978 - DNA, 17 bp, synthetic construct
  source 1..17: mol_type = other DNA
ttccctgccccaggtga

SEQ ID NO: 137979 - DNA, 17 bp, synthetic construct
  source 1..17: mol_type = other DNA
tccctgccccaggtgaa

SEQ ID NO: 137980 - DNA, 17 bp, synthetic construct
  source 1..17: mol_type = other DNA
ccctgccccaggtgaat

SEQ ID NO: 137981 - DNA, 17 bp, synthetic construct
  source 1..17: mol_type = other DNA
cctgccccaggtgaatg

SEQ ID NO: 137982 - DNA, 17 bp, synthetic construct
  source 1..17: mol_type = other DNA
ctgccccaggtgaatga

SEQ ID NO: 137983 - DNA, 17 bp, synthetic construct
  source 1..17: mol_type = other DNA
tgccccaggtgaatgag

SEQ ID NO: 137984 - DNA, 17 bp, synthetic construct
  source 1..17: mol_type = other DNA
gccccaggtgaatgaga

SEQ ID NO: 137985 - DNA, 17 bp, synthetic construct
  source 1..17: mol_type = other DNA
ccccaggtgaatgagac

SEQ ID NO: 137986 - DNA, 17 bp, synthetic construct
  source 1..17: mol_type = other DNA
cccaggtgaatgagacc

SEQ ID NO: 137987 - DNA, 17 bp, synthetic construct
  source 1..17: mol_type = other DNA
ccaggtgaatgagacct

SEQ ID NO: 137988 - DNA, 17 bp, synthetic construct
  source 1..17: mol_type = other DNA
caggtgaatgagacctg

SEQ ID NO: 137989 - DNA, 17 bp, synthetic construct
  source 1..17: mol_type = other DNA
aggtgaatgagacctgg

SEQ ID NO: 137990 - DNA, 17 bp, synthetic construct
  source 1..17: mol_type = other DNA
ggtgaatgagacctgga

SEQ ID NO: 137991 - DNA, 17 bp, synthetic construct
  source 1..17: mol_type = other DNA
gtgaatgagacctggac

SEQ ID NO: 137992 - DNA, 17 bp, synthetic construct
  source 1..17: mol_type = other DNA
tgaatgagacctggacc

SEQ ID NO: 137993 - DNA, 17 bp, synthetic construct
  source 1..17: mol_type = other DNA
gaatgagacctggaccc

SEQ ID NO: 137994 - DNA, 17 bp, synthetic construct
  source 1..17: mol_type = other DNA
aatgagacctggaccct

SEQ ID NO: 137995 - DNA, 17 bp, synthetic construct
  source 1..17: mol_type = other DNA
atgagacctggaccctg

SEQ ID NO: 137996 - DNA, 17 bp, synthetic construct
  source 1..17: mol_type = other DNA
tgagacctggaccctgg

SEQ ID NO: 137997 - DNA, 17 bp, synthetic construct
  source 1..17: mol_type = other DNA
gagacctggaccctgga

SEQ ID NO: 137998 - DNA, 17 bp, synthetic construct
  source 1..17: mol_type = other DNA
agacctggaccctggag

SEQ ID NO: 137999 - DNA, 17 bp, synthetic construct
  source 1..17: mol_type = other DNA
gacctggaccctggaga

SEQ ID NO: 138000 - DNA, 17 bp, synthetic construct
  source 1..17: mol_type = other DNA
acctggaccctggagaa

SEQ ID NO: 138001 - DNA, 17 bp, synthetic construct
  source 1..17: mol_type = other DNA
cctggaccctggagaac

SEQ ID NO: 138002 - DNA, 17 bp, synthetic construct
  source 1..17: mol_type = other DNA
ctggaccctggagaact

SEQ ID NO: 138003 - DNA, 17 bp, synthetic construct
  source 1..17: mol_type = other DNA
tggaccctggagaactg

SEQ ID NO: 138004 - DNA, 17 bp, synthetic construct
  source 1..17: mol_type = other DNA
ggaccctggagaactgc

SEQ ID NO: 138005 - DNA, 17 bp, synthetic construct
  source 1..17: mol_type = other DNA
gaccctggagaactgca

SEQ ID NO: 138006 - DNA, 17 bp, synthetic construct
  source 1..17: mol_type = other DNA
accctggagaactgcac

SEQ ID NO: 138007 - DNA, 17 bp, synthetic construct
  source 1..17: mol_type = other DNA
ccctggagaactgcacg

SEQ ID NO: 138008 - DNA, 17 bp, synthetic construct
  source 1..17: mol_type = other DNA
cctggagaactgcacgg

SEQ ID NO: 138009 - DNA, 17 bp, synthetic construct
  source 1..17: mol_type = other DNA
ctggagaactgcacggt

SEQ ID NO: 138010 - DNA, 17 bp, synthetic construct
  source 1..17: mol_type = other DNA
tggagaactgcacggtg

SEQ ID NO: 138011 - DNA, 17 bp, synthetic construct
  source 1..17: mol_type = other DNA
ggagaactgcacggtgg

SEQ ID NO: 138012 - DNA, 17 bp, synthetic construct
  source 1..17: mol_type = other DNA
gagaactgcacggtggc

SEQ ID NO: 138013 - DNA, 17 bp, synthetic construct
  source 1..17: mol_type = other DNA
agaactgcacggtggcc

SEQ ID NO: 138014 - DNA, 17 bp, synthetic construct
  source 1..17: mol_type = other DNA
gaactgcacggtggcca

SEQ ID NO: 138015 - DNA, 17 bp, synthetic construct
  source 1..17: mol_type = other DNA
aactgcacggtggccag

SEQ ID NO: 138016 - DNA, 17 bp, synthetic construct
  source 1..17: mol_type = other DNA
actgcacggtggccagg

SEQ ID NO: 138017 - DNA, 17 bp, synthetic construct
  source 1..17: mol_type = other DNA
ctgcacggtggccaggt

SEQ ID NO: 138018 - DNA, 17 bp, synthetic construct
  source 1..17: mol_type = other DNA
tgcacggtggccaggtg

SEQ ID NO: 138019 - DNA, 17 bp, synthetic construct
  source 1..17: mol_type = other DNA
gcacggtggccaggtgc

SEQ ID NO: 138020 - DNA, 17 bp, synthetic construct
  source 1..17: mol_type = other DNA
cacggtggccaggtgcg

SEQ ID NO: 138021 - DNA, 17 bp, synthetic construct
  source 1..17: mol_type = other DNA
acggtggccaggtgcgt

SEQ ID NO: 138022 - DNA, 17 bp, synthetic construct
  source 1..17: mol_type = other DNA
cggtggccaggtgcgtg

SEQ ID NO: 138023 - DNA, 17 bp, synthetic construct
  source 1..17: mol_type = other DNA
ggtggccaggtgcgtgg

SEQ ID NO: 138024 - DNA, 17 bp, synthetic construct
  source 1..17: mol_type = other DNA
gtggccaggtgcgtggg

SEQ ID NO: 138025 - DNA, 17 bp, synthetic construct
  source 1..17: mol_type = other DNA
tggccaggtgcgtgggt

SEQ ID NO: 138026 - DNA, 17 bp, synthetic construct
  source 1..17: mol_type = other DNA
ggccaggtgcgtgggtg

SEQ ID NO: 138027 - DNA, 17 bp, synthetic construct
  source 1..17: mol_type = other DNA
gccaggtgcgtgggtga

SEQ ID NO: 138028 - DNA, 17 bp, synthetic construct
  source 1..17: mol_type = other DNA
ccaggtgcgtgggtgac

SEQ ID NO: 138029 - DNA, 17 bp, synthetic construct
  source 1..17: mol_type = other DNA
caggtgcgtgggtgaca

SEQ ID NO: 138030 - DNA, 17 bp, synthetic construct
  source 1..17: mol_type = other DNA
aggtgcgtgggtgacaa

SEQ ID NO: 138031 - DNA, 17 bp, synthetic construct
  source 1..17: mol_type = other DNA
ggtgcgtgggtgacaac

SEQ ID NO: 138032 - DNA, 17 bp, synthetic construct
  source 1..17: mol_type = other DNA
gtgcgtgggtgacaacc

SEQ ID NO: 138033 - DNA, 17 bp, synthetic construct
  source 1..17: mol_type = other DNA
tgcgtgggtgacaaccg

SEQ ID NO: 138034 - DNA, 17 bp, synthetic construct
  source 1..17: mol_type = other DNA
gcgtgggtgacaaccgt

SEQ ID NO: 138035 - DNA, 17 bp, synthetic construct
  source 1..17: mol_type = other DNA
cgtgggtgacaaccgtg

SEQ ID NO: 138036 - DNA, 17 bp, synthetic construct
  source 1..17: mol_type = other DNA
gtgggtgacaaccgtgt

SEQ ID NO: 138037 - DNA, 17 bp, synthetic construct
  source 1..17: mol_type = other DNA
tgggtgacaaccgtgtc

SEQ ID NO: 138038 - DNA, 17 bp, synthetic construct
  source 1..17: mol_type = other DNA
gggtgacaaccgtgtcg

SEQ ID NO: 138039 - DNA, 17 bp, synthetic construct
  source 1..17: mol_type = other DNA
ggtgacaaccgtgtcgt

SEQ ID NO: 138040 - DNA, 17 bp, synthetic construct
  source 1..17: mol_type = other DNA
gtgacaaccgtgtcgtc

SEQ ID NO: 138041 - DNA, 17 bp, synthetic construct
  source 1..17: mol_type = other DNA
tgacaaccgtgtcgtcc

SEQ ID NO: 138042 - DNA, 17 bp, synthetic construct
  source 1..17: mol_type = other DNA
gacaaccgtgtcgtcct

SEQ ID NO: 138043 - DNA, 17 bp, synthetic construct
  source 1..17: mol_type = other DNA
acaaccgtgtcgtcctg

SEQ ID NO: 138044 - DNA, 17 bp, synthetic construct
  source 1..17: mol_type = other DNA
caaccgtgtcgtcctgc

SEQ ID NO: 138045 - DNA, 17 bp, synthetic construct
  source 1..17: mol_type = other DNA
aaccgtgtcgtcctgct

SEQ ID NO: 138046 - DNA, 17 bp, synthetic construct
  source 1..17: mol_type = other DNA
accgtgtcgtcctgctg

SEQ ID NO: 138047 - DNA, 17 bp, synthetic construct
  source 1..17: mol_type = other DNA
ccgtgtcgtcctgctgg

SEQ ID NO: 138048 - DNA, 17 bp, synthetic construct
  source 1..17: mol_type = other DNA
cgtgtcgtcctgctgga

SEQ ID NO: 138049 - DNA, 17 bp, synthetic construct
  source 1..17: mol_type = other DNA
gtgtcgtcctgctggac

SEQ ID NO: 138050 - DNA, 17 bp, synthetic construct
  source 1..17: mol_type = other DNA
tgtcgtcctgctggacc

SEQ ID NO: 138051 - DNA, 17 bp, synthetic construct
  source 1..17: mol_type = other DNA
gtcgtcctgctggaccc

SEQ ID NO: 138052 - DNA, 17 bp, synthetic construct
  source 1..17: mol_type = other DNA
tcgtcctgctggaccca

SEQ ID NO: 138053 - DNA, 17 bp, synthetic construct
  source 1..17: mol_type = other DNA
cgtcctgctggacccaa

SEQ ID NO: 138054 - DNA, 17 bp, synthetic construct
  source 1..17: mol_type = other DNA
gtcctgctggacccaaa

SEQ ID NO: 138055 - DNA, 17 bp, synthetic construct
  source 1..17: mol_type = other DNA
tcctgctggacccaaag

SEQ ID NO: 138056 - DNA, 17 bp, synthetic construct
  source 1..17: mol_type = other DNA
cctgctggacccaaagc

SEQ ID NO: 138057 - DNA, 17 bp, synthetic construct
  source 1..17: mol_type = other DNA
ctgctggacccaaagcc

SEQ ID NO: 138058 - DNA, 17 bp, synthetic construct
  source 1..17: mol_type = other DNA
tgctggacccaaagcct

SEQ ID NO: 138059 - DNA, 17 bp, synthetic construct
  source 1..17: mol_type = other DNA
gctggacccaaagcctg

SEQ ID NO: 138060 - DNA, 17 bp, synthetic construct
  source 1..17: mol_type = other DNA
ctggacccaaagcctgt

SEQ ID NO: 138061 - DNA, 17 bp, synthetic construct
  source 1..17: mol_type = other DNA
tggacccaaagcctgtg

SEQ ID NO: 138062 - DNA, 17 bp, synthetic construct
  source 1..17: mol_type = other DNA
ggacccaaagcctgtgg

SEQ ID NO: 138063 - DNA, 17 bp, synthetic construct
  source 1..17: mol_type = other DNA
gacccaaagcctgtggc

SEQ ID NO: 138064 - DNA, 17 bp, synthetic construct
  source 1..17: mol_type = other DNA
acccaaagcctgtggcc

SEQ ID NO: 138065 - DNA, 17 bp, synthetic construct
  source 1..17: mol_type = other DNA
cccaaagcctgtggcca

SEQ ID NO: 138066 - DNA, 17 bp, synthetic construct
  source 1..17: mol_type = other DNA
ccaaagcctgtggccaa

SEQ ID NO: 138067 - DNA, 17 bp, synthetic construct
  source 1..17: mol_type = other DNA
caaagcctgtggccaac

SEQ ID NO: 138068 - DNA, 17 bp, synthetic construct
  source 1..17: mol_type = other DNA
aaagcctgtggccaacg

SEQ ID NO: 138069 - DNA, 17 bp, synthetic construct
  source 1..17: mol_type = other DNA
aagcctgtggccaacgt

SEQ ID NO: 138070 - DNA, 17 bp, synthetic construct
  source 1..17: mol_type = other DNA
agcctgtggccaacgtc

SEQ ID NO: 138071 - DNA, 17 bp, synthetic construct
  source 1..17: mol_type = other DNA
gcctgtggccaacgtca

SEQ ID NO: 138072 - DNA, 17 bp, synthetic construct
  source 1..17: mol_type = other DNA
cctgtggccaacgtcac

SEQ ID NO: 138073 - DNA, 17 bp, synthetic construct
  source 1..17: mol_type = other DNA
ctgtggccaacgtcacc

SEQ ID NO: 138074 - DNA, 17 bp, synthetic construct
  source 1..17: mol_type = other DNA
tgtggccaacgtcacct

SEQ ID NO: 138075 - DNA, 17 bp, synthetic construct
  source 1..17: mol_type = other DNA
gtggccaacgtcacctg

SEQ ID NO: 138076 - DNA, 17 bp, synthetic construct
  source 1..17: mol_type = other DNA
tggccaacgtcacctgc

SEQ ID NO: 138077 - DNA, 17 bp, synthetic construct
  source 1..17: mol_type = other DNA
ggccaacgtcacctgcg

SEQ ID NO: 138078 - DNA, 17 bp, synthetic construct
  source 1..17: mol_type = other DNA
gccaacgtcacctgcgt

SEQ ID NO: 138079 - DNA, 17 bp, synthetic construct
  source 1..17: mol_type = other DNA
ccaacgtcacctgcgtg

SEQ ID NO: 138080 - DNA, 17 bp, synthetic construct
  source 1..17: mol_type = other DNA
caacgtcacctgcgtga

SEQ ID NO: 138081 - DNA, 17 bp, synthetic construct
  source 1..17: mol_type = other DNA
aacgtcacctgcgtgaa

SEQ ID NO: 138082 - DNA, 17 bp, synthetic construct
  source 1..17: mol_type = other DNA
acgtcacctgcgtgaac

SEQ ID NO: 138083 - DNA, 17 bp, synthetic construct
  source 1..17: mol_type = other DNA
cgtcacctgcgtgaaca

SEQ ID NO: 138084 - DNA, 17 bp, synthetic construct
  source 1..17: mol_type = other DNA
gtcacctgcgtgaacaa

SEQ ID NO: 138085 - DNA, 17 bp, synthetic construct
  source 1..17: mol_type = other DNA
tcacctgcgtgaacaag

SEQ ID NO: 138086 - DNA, 17 bp, synthetic construct
  source 1..17: mol_type = other DNA
cacctgcgtgaacaagc

SEQ ID NO: 138087 - DNA, 17 bp, synthetic construct
  source 1..17: mol_type = other DNA
acctgcgtgaacaagca

SEQ ID NO: 138088 - DNA, 17 bp, synthetic construct
  source 1..17: mol_type = other DNA
cctgcgtgaacaagcac

SEQ ID NO: 138089 - DNA, 17 bp, synthetic construct
  source 1..17: mol_type = other DNA
ctgcgtgaacaagcacc

SEQ ID NO: 138090 - DNA, 17 bp, synthetic construct
  source 1..17: mol_type = other DNA
tgcgtgaacaagcacct

SEQ ID NO: 138091 - DNA, 17 bp, synthetic construct
  source 1..17: mol_type = other DNA
gcgtgaacaagcacctg

SEQ ID NO: 138092 - DNA, 17 bp, synthetic construct
  source 1..17: mol_type = other DNA
cgtgaacaagcacctgc

SEQ ID NO: 138093 - DNA, 17 bp, synthetic construct
  source 1..17: mol_type = other DNA
gtgaacaagcacctgcc

SEQ ID NO: 138094 - DNA, 17 bp, synthetic construct
  source 1..17: mol_type = other DNA
tgaacaagcacctgccc

SEQ ID NO: 138095 - DNA, 17 bp, synthetic construct
  source 1..17: mol_type = other DNA
gaacaagcacctgccca

SEQ ID NO: 138096 - DNA, 17 bp, synthetic construct
  source 1..17: mol_type = other DNA
aacaagcacctgcccat

SEQ ID NO: 138097 - DNA, 17 bp, synthetic construct
  source 1..17: mol_type = other DNA
acaagcacctgcccatc

SEQ ID NO: 138098 - DNA, 17 bp, synthetic construct
  source 1..17: mol_type = other DNA
caagcacctgcccatca

SEQ ID NO: 138099 - DNA, 17 bp, synthetic construct
  source 1..17: mol_type = other DNA
aagcacctgcccatcaa

SEQ ID NO: 138100 - DNA, 17 bp, synthetic construct
  source 1..17: mol_type = other DNA
agcacctgcccatcaaa

SEQ ID NO: 138101 - DNA, 17 bp, synthetic construct
  source 1..17: mol_type = other DNA
gcacctgcccatcaaag

SEQ ID NO: 138102 - DNA, 17 bp, synthetic construct
  source 1..17: mol_type = other DNA
cacctgcccatcaaagt

SEQ ID NO: 138103 - DNA, 17 bp, synthetic construct
  source 1..17: mol_type = other DNA
acctgcccatcaaagtg

SEQ ID NO: 138104 - DNA, 17 bp, synthetic construct
  source 1..17: mol_type = other DNA
cctgcccatcaaagtgt

SEQ ID NO: 138105 - DNA, 17 bp, synthetic construct
  source 1..17: mol_type = other DNA
ctgcccatcaaagtgtc

SEQ ID NO: 138106 - DNA, 17 bp, synthetic construct
  source 1..17: mol_type = other DNA
tgcccatcaaagtgtcg

SEQ ID NO: 138107 - DNA, 17 bp, synthetic construct
  source 1..17: mol_type = other DNA
gcccatcaaagtgtcgg

SEQ ID NO: 138108 - DNA, 17 bp, synthetic construct
  source 1..17: mol_type = other DNA
cccatcaaagtgtcgga

SEQ ID NO: 138109 - DNA, 17 bp, synthetic construct
  source 1..17: mol_type = other DNA
ccatcaaagtgtcggac

SEQ ID NO: 138110 - DNA, 17 bp, synthetic construct
  source 1..17: mol_type = other DNA
catcaaagtgtcggacc

SEQ ID NO: 138111 - DNA, 17 bp, synthetic construct
  source 1..17: mol_type = other DNA
atcaaagtgtcggaccc

SEQ ID NO: 138112 - DNA, 17 bp, synthetic construct
  source 1..17: mol_type = other DNA
tcaaagtgtcggacccg

SEQ ID NO: 138113 - DNA, 17 bp, synthetic construct
  source 1..17: mol_type = other DNA
caaagtgtcggacccga

SEQ ID NO: 138114 - DNA, 17 bp, synthetic construct
  source 1..17: mol_type = other DNA
aaagtgtcggacccgag

SEQ ID NO: 138115 - DNA, 17 bp, synthetic construct
  source 1..17: mol_type = other DNA
aagtgtcggacccgagc

SEQ ID NO: 138116 - DNA, 17 bp, synthetic construct
  source 1..17: mol_type = other DNA
agtgtcggacccgagcc

SEQ ID NO: 138117 - DNA, 17 bp, synthetic construct
  source 1..17: mol_type = other DNA
gtgtcggacccgagcca

SEQ ID NO: 138118 - DNA, 17 bp, synthetic construct
  source 1..17: mol_type = other DNA
tgtcggacccgagccag

SEQ ID NO: 138119 - DNA, 17 bp, synthetic construct
  source 1..17: mol_type = other DNA
gtcggacccgagccagc

SEQ ID NO: 138120 - DNA, 17 bp, synthetic construct
  source 1..17: mol_type = other DNA
tcggacccgagccagcc

SEQ ID NO: 138121 - DNA, 17 bp, synthetic construct
  source 1..17: mol_type = other DNA
cggacccgagccagccc

SEQ ID NO: 138122 - DNA, 17 bp, synthetic construct
  source 1..17: mol_type = other DNA
ggacccgagccagccct

SEQ ID NO: 138123 - DNA, 17 bp, synthetic construct
  source 1..17: mol_type = other DNA
gacccgagccagccctg

SEQ ID NO: 138124 - DNA, 17 bp, synthetic construct
  source 1..17: mol_type = other DNA
acccgagccagccctgt

SEQ ID NO: 138125 - DNA, 17 bp, synthetic construct
  source 1..17: mol_type = other DNA
cccgagccagccctgtg

SEQ ID NO: 138126 - DNA, 17 bp, synthetic construct
  source 1..17: mol_type = other DNA
ccgagccagccctgtga

SEQ ID NO: 138127 - DNA, 17 bp, synthetic construct
  source 1..17: mol_type = other DNA
cgagccagccctgtgac

SEQ ID NO: 138128 - DNA, 17 bp, synthetic construct
  source 1..17: mol_type = other DNA
gagccagccctgtgact

SEQ ID NO: 138129 - DNA, 17 bp, synthetic construct
  source 1..17: mol_type = other DNA
agccagccctgtgactt

SEQ ID NO: 138130 - DNA, 17 bp, synthetic construct
  source 1..17: mol_type = other DNA
gccagccctgtgacttc

SEQ ID NO: 138131 - DNA, 17 bp, synthetic construct
  source 1..17: mol_type = other DNA
ccagccctgtgacttcc

SEQ ID NO: 138132 - DNA, 17 bp, synthetic construct
  source 1..17: mol_type = other DNA
cagccctgtgacttcca

SEQ ID NO: 138133 - DNA, 17 bp, synthetic construct
  source 1..17: mol_type = other DNA
agccctgtgacttccac

SEQ ID NO: 138134 - DNA, 17 bp, synthetic construct
  source 1..17: mol_type = other DNA
gccctgtgacttccact

SEQ ID NO: 138135 - DNA, 17 bp, synthetic construct
  source 1..17: mol_type = other DNA
ccctgtgacttccacta

SEQ ID NO: 138136 - DNA, 17 bp, synthetic construct
  source 1..17: mol_type = other DNA
cctgtgacttccactat

SEQ ID NO: 138137 - DNA, 17 bp, synthetic construct
  source 1..17: mol_type = other DNA
ctgtgacttccactatg

SEQ ID NO: 138138 - DNA, 17 bp, synthetic construct
  source 1..17: mol_type = other DNA
tgtgacttccactatga

SEQ ID NO: 138139 - DNA, 17 bp, synthetic construct
  source 1..17: mol_type = other DNA
gtgacttccactatgag

SEQ ID NO: 138140 - DNA, 17 bp, synthetic construct
  source 1..17: mol_type = other DNA
tgacttccactatgagt

SEQ ID NO: 138141 - DNA, 17 bp, synthetic construct
  source 1..17: mol_type = other DNA
gacttccactatgagtg

SEQ ID NO: 138142 - DNA, 17 bp, synthetic construct
  source 1..17: mol_type = other DNA
acttccactatgagtgc

SEQ ID NO: 138143 - DNA, 17 bp, synthetic construct
  source 1..17: mol_type = other DNA
cttccactatgagtgcg

SEQ ID NO: 138144 - DNA, 17 bp, synthetic construct
  source 1..17: mol_type = other DNA
ttccactatgagtgcga

SEQ ID NO: 138145 - DNA, 17 bp, synthetic construct
  source 1..17: mol_type = other DNA
tccactatgagtgcgag

SEQ ID NO: 138146 - DNA, 17 bp, synthetic construct
  source 1..17: mol_type = other DNA
ccactatgagtgcgagt

SEQ ID NO: 138147 - DNA, 17 bp, synthetic construct
  source 1..17: mol_type = other DNA
cactatgagtgcgagtg

SEQ ID NO: 138148 - DNA, 17 bp, synthetic construct
  source 1..17: mol_type = other DNA
actatgagtgcgagtgt

SEQ ID NO: 138149 - DNA, 17 bp, synthetic construct
  source 1..17: mol_type = other DNA
ctatgagtgcgagtgtg

SEQ ID NO: 138150 - DNA, 17 bp, synthetic construct
  source 1..17: mol_type = other DNA
tatgagtgcgagtgtga

SEQ ID NO: 138151 - DNA, 17 bp, synthetic construct
  source 1..17: mol_type = other DNA
atgagtgcgagtgtgag

SEQ ID NO: 138152 - DNA, 17 bp, synthetic construct
  source 1..17: mol_type = other DNA
tgagtgcgagtgtgagt

SEQ ID NO: 138153 - DNA, 17 bp, synthetic construct
  source 1..17: mol_type = other DNA
gagtgcgagtgtgagtg

SEQ ID NO: 138154 - DNA, 17 bp, synthetic construct
  source 1..17: mol_type = other DNA
agtgcgagtgtgagtgc

SEQ ID NO: 138155 - DNA, 17 bp, synthetic construct
  source 1..17: mol_type = other DNA
gtgcgagtgtgagtgcg

SEQ ID NO: 138156 - DNA, 17 bp, synthetic construct
  source 1..17: mol_type = other DNA
tgcgagtgtgagtgcgt

SEQ ID NO: 138157 - DNA, 17 bp, synthetic construct
  source 1..17: mol_type = other DNA
gcgagtgtgagtgcgtc

SEQ ID NO: 138158 - DNA, 17 bp, synthetic construct
  source 1..17: mol_type = other DNA
cgagtgtgagtgcgtcg

SEQ ID NO: 138159 - DNA, 17 bp, synthetic construct
  source 1..17: mol_type = other DNA
gagtgtgagtgcgtcgg

SEQ ID NO: 138160 - DNA, 17 bp, synthetic construct
  source 1..17: mol_type = other DNA
agtgtgagtgcgtcggt

SEQ ID NO: 138161 - DNA, 17 bp, synthetic construct
  source 1..17: mol_type = other DNA
gtgtgagtgcgtcggtg

SEQ ID NO: 138162 - DNA, 17 bp, synthetic construct
  source 1..17: mol_type = other DNA
tgtgagtgcgtcggtgg

SEQ ID NO: 138163 - DNA, 17 bp, synthetic construct
  source 1..17: mol_type = other DNA
gtgagtgcgtcggtggc

SEQ ID NO: 138164 - DNA, 17 bp, synthetic construct
  source 1..17: mol_type = other DNA
tgagtgcgtcggtggcc

SEQ ID NO: 138165 - DNA, 17 bp, synthetic construct
  source 1..17: mol_type = other DNA
gagtgcgtcggtggccg

SEQ ID NO: 138166 - DNA, 17 bp, synthetic construct
  source 1..17: mol_type = other DNA
agtgcgtcggtggccgc

SEQ ID NO: 138167 - DNA, 17 bp, synthetic construct
  source 1..17: mol_type = other DNA
gtgcgtcggtggccgcg

SEQ ID NO: 138168 - DNA, 17 bp, synthetic construct
  source 1..17: mol_type = other DNA
tgcgtcggtggccgcgg

SEQ ID NO: 138169 - DNA, 17 bp, synthetic construct
  source 1..17: mol_type = other DNA
gcgtcggtggccgcggg

SEQ ID NO: 138170 - DNA, 17 bp, synthetic construct
  source 1..17: mol_type = other DNA
cgtcggtggccgcggga

SEQ ID NO: 138171 - DNA, 17 bp, synthetic construct
  source 1..17: mol_type = other DNA
gtcggtggccgcgggat

SEQ ID NO: 138172 - DNA, 17 bp, synthetic construct
  source 1..17: mol_type = other DNA
tcggtggccgcgggatt

SEQ ID NO: 138173 - DNA, 17 bp, synthetic construct
  source 1..17: mol_type = other DNA
cggtggccgcgggatta

SEQ ID NO: 138174 - DNA, 17 bp, synthetic construct
  source 1..17: mol_type = other DNA
ggtggccgcgggattac

SEQ ID NO: 138175 - DNA, 17 bp, synthetic construct
  source 1..17: mol_type = other DNA
gtggccgcgggattacc

SEQ ID NO: 138176 - DNA, 17 bp, synthetic construct
  source 1..17: mol_type = other DNA
tggccgcgggattaccc

SEQ ID NO: 138177 - DNA, 17 bp, synthetic construct
  source 1..17: mol_type = other DNA
ggccgcgggattacccc

SEQ ID NO: 138178 - DNA, 17 bp, synthetic construct
  source 1..17: mol_type = other DNA
gccgcgggattaccccg

SEQ ID NO: 138179 - DNA, 17 bp, synthetic construct
  source 1..17: mol_type = other DNA
ccgcgggattaccccgg

SEQ ID NO: 138180 - DNA, 17 bp, synthetic construct
  source 1..17: mol_type = other DNA
cgcgggattaccccggg

SEQ ID NO: 138181 - DNA, 17 bp, synthetic construct
  source 1..17: mol_type = other DNA
gcgggattaccccgggg

SEQ ID NO: 138182 - DNA, 17 bp, synthetic construct
  source 1..17: mol_type = other DNA
cgggattaccccggggg

SEQ ID NO: 138183 - DNA, 17 bp, synthetic construct
  source 1..17: mol_type = other DNA
gggattaccccgggggc

SEQ ID NO: 138184 - DNA, 17 bp, synthetic construct
  source 1..17: mol_type = other DNA
ggattaccccgggggca

SEQ ID NO: 138185 - DNA, 17 bp, synthetic construct
  source 1..17: mol_type = other DNA
gattaccccgggggcag

SEQ ID NO: 138186 - DNA, 17 bp, synthetic construct
  source 1..17: mol_type = other DNA
attaccccgggggcagg

SEQ ID NO: 138187 - DNA, 17 bp, synthetic construct
  source 1..17: mol_type = other DNA
ttaccccgggggcaggt

SEQ ID NO: 138188 - DNA, 17 bp, synthetic construct
  source 1..17: mol_type = other DNA
taccccgggggcaggtg

SEQ ID NO: 138189 - DNA, 17 bp, synthetic construct
  source 1..17: mol_type = other DNA
accccgggggcaggtgg

SEQ ID NO: 138190 - DNA, 17 bp, synthetic construct
  source 1..17: mol_type = other DNA
ccccgggggcaggtgga

SEQ ID NO: 138191 - DNA, 17 bp, synthetic construct
  source 1..17: mol_type = other DNA
cccgggggcaggtggag

SEQ ID NO: 138192 - DNA, 17 bp, synthetic construct
  source 1..17: mol_type = other DNA
ccgggggcaggtggagc

SEQ ID NO: 138193 - DNA, 17 bp, synthetic construct
  source 1..17: mol_type = other DNA
cgggggcaggtggagca

SEQ ID NO: 138194 - DNA, 17 bp, synthetic construct
  source 1..17: mol_type = other DNA
gggggcaggtggagcag

SEQ ID NO: 138195 - DNA, 17 bp, synthetic construct
  source 1..17: mol_type = other DNA
ggggcaggtggagcaga

SEQ ID NO: 138196 - DNA, 17 bp, synthetic construct
  source 1..17: mol_type = other DNA
gggcaggtggagcagag

SEQ ID NO: 138197 - DNA, 17 bp, synthetic construct
  source 1..17: mol_type = other DNA
ggcaggtggagcagagt

SEQ ID NO: 138198 - DNA, 17 bp, synthetic construct
  source 1..17: mol_type = other DNA
gcaggtggagcagagtg

SEQ ID NO: 138199 - DNA, 17 bp, synthetic construct
  source 1..17: mol_type = other DNA
caggtggagcagagtgc

SEQ ID NO: 138200 - DNA, 17 bp, synthetic construct
  source 1..17: mol_type = other DNA
aggtggagcagagtgca

SEQ ID NO: 138201 - DNA, 17 bp, synthetic construct
  source 1..17: mol_type = other DNA
ggtggagcagagtgcac

SEQ ID NO: 138202 - DNA, 17 bp, synthetic construct
  source 1..17: mol_type = other DNA
gtggagcagagtgcacc

SEQ ID NO: 138203 - DNA, 17 bp, synthetic construct
  source 1..17: mol_type = other DNA
tggagcagagtgcaccg

SEQ ID NO: 138204 - DNA, 17 bp, synthetic construct
  source 1..17: mol_type = other DNA
ggagcagagtgcaccgt

SEQ ID NO: 138205 - DNA, 17 bp, synthetic construct
  source 1..17: mol_type = other DNA
gagcagagtgcaccgtc

SEQ ID NO: 138206 - DNA, 17 bp, synthetic construct
  source 1..17: mol_type = other DNA
agcagagtgcaccgtcg

SEQ ID NO: 138207 - DNA, 17 bp, synthetic construct
  source 1..17: mol_type = other DNA
gcagagtgcaccgtcgg

SEQ ID NO: 138208 - DNA, 17 bp, synthetic construct
  source 1..17: mol_type = other DNA
cagagtgcaccgtcggc

SEQ ID NO: 138209 - DNA, 17 bp, synthetic construct
  source 1..17: mol_type = other DNA
agagtgcaccgtcggct

SEQ ID NO: 138210 - DNA, 17 bp, synthetic construct
  source 1..17: mol_type = other DNA
gagtgcaccgtcggcta

SEQ ID NO: 138211 - DNA, 17 bp, synthetic construct
  source 1..17: mol_type = other DNA
agtgcaccgtcggctag

SEQ ID NO: 138212 - DNA, 17 bp, synthetic construct
  source 1..17: mol_type = other DNA
gtgcaccgtcggctagg

SEQ ID NO: 138213 - DNA, 17 bp, synthetic construct
  source 1..17: mol_type = other DNA
tgcaccgtcggctaggc

SEQ ID NO: 138214 - DNA, 17 bp, synthetic construct
  source 1..17: mol_type = other DNA
gcaccgtcggctaggct

SEQ ID NO: 138215 - DNA, 17 bp, synthetic construct
  source 1..17: mol_type = other DNA
caccgtcggctaggctg

SEQ ID NO: 138216 - DNA, 17 bp, synthetic construct
  source 1..17: mol_type = other DNA
accgtcggctaggctgg

SEQ ID NO: 138217 - DNA, 17 bp, synthetic construct
  source 1..17: mol_type = other DNA
ccgtcggctaggctggc

SEQ ID NO: 138218 - DNA, 17 bp, synthetic construct
  source 1..17: mol_type = other DNA
cgtcggctaggctggca

SEQ ID NO: 138219 - DNA, 17 bp, synthetic construct
  source 1..17: mol_type = other DNA
gtcggctaggctggcag

SEQ ID NO: 138220 - DNA, 17 bp, synthetic construct
  source 1..17: mol_type = other DNA
tcggctaggctggcaga

SEQ ID NO: 138221 - DNA, 17 bp, synthetic construct
  source 1..17: mol_type = other DNA
cggctaggctggcagaa

SEQ ID NO: 138222 - DNA, 17 bp, synthetic construct
  source 1..17: mol_type = other DNA
ggctaggctggcagaat

SEQ ID NO: 138223 - DNA, 17 bp, synthetic construct
  source 1..17: mol_type = other DNA
gctaggctggcagaatg

SEQ ID NO: 138224 - DNA, 17 bp, synthetic construct
  source 1..17: mol_type = other DNA
ctaggctggcagaatgg

SEQ ID NO: 138225 - DNA, 17 bp, synthetic construct
  source 1..17: mol_type = other DNA
taggctggcagaatggg

SEQ ID NO: 138226 - DNA, 17 bp, synthetic construct
  source 1..17: mol_type = other DNA
aggctggcagaatgggg

SEQ ID NO: 138227 - DNA, 17 bp, synthetic construct
  source 1..17: mol_type = other DNA
ggctggcagaatggggc

SEQ ID NO: 138228 - DNA, 17 bp, synthetic construct
  source 1..17: mol_type = other DNA
gctggcagaatggggca

SEQ ID NO: 138229 - DNA, 17 bp, synthetic construct
  source 1..17: mol_type = other DNA
ctggcagaatggggcat

SEQ ID NO: 138230 - DNA, 17 bp, synthetic construct
  source 1..17: mol_type = other DNA
tggcagaatggggcatg

SEQ ID NO: 138231 - DNA, 17 bp, synthetic construct
  source 1..17: mol_type = other DNA
ggcagaatggggcatgg

SEQ ID NO: 138232 - DNA, 17 bp, synthetic construct
  source 1..17: mol_type = other DNA
gcagaatggggcatggt

SEQ ID NO: 138233 - DNA, 17 bp, synthetic construct
  source 1..17: mol_type = other DNA
cagaatggggcatggtg

SEQ ID NO: 138234 - DNA, 17 bp, synthetic construct
  source 1..17: mol_type = other DNA
agaatggggcatggtgg

SEQ ID NO: 138235 - DNA, 17 bp, synthetic construct
  source 1..17: mol_type = other DNA
gaatggggcatggtggg

SEQ ID NO: 138236 - DNA, 17 bp, synthetic construct
  source 1..17: mol_type = other DNA
aatggggcatggtgggg

SEQ ID NO: 138237 - DNA, 17 bp, synthetic construct
  source 1..17: mol_type = other DNA
atggggcatggtggggc

SEQ ID NO: 138238 - DNA, 17 bp, synthetic construct
  source 1..17: mol_type = other DNA
tggggcatggtggggca

SEQ ID NO: 138239 - DNA, 17 bp, synthetic construct
  source 1..17: mol_type = other DNA
ggggcatggtggggcac

SEQ ID NO: 138240 - DNA, 17 bp, synthetic construct
  source 1..17: mol_type = other DNA
gggcatggtggggcaca

SEQ ID NO: 138241 - DNA, 17 bp, synthetic construct
  source 1..17: mol_type = other DNA
ggcatggtggggcacag

SEQ ID NO: 138242 - DNA, 17 bp, synthetic construct
  source 1..17: mol_type = other DNA
gcatggtggggcacagt

SEQ ID NO: 138243 - DNA, 17 bp, synthetic construct
  source 1..17: mol_type = other DNA
catggtggggcacagtg

SEQ ID NO: 138244 - DNA, 17 bp, synthetic construct
  source 1..17: mol_type = other DNA
atggtggggcacagtgg

SEQ ID NO: 138245 - DNA, 17 bp, synthetic construct
  source 1..17: mol_type = other DNA
tggtggggcacagtggg

SEQ ID NO: 138246 - DNA, 17 bp, synthetic construct
  source 1..17: mol_type = other DNA
ggtggggcacagtgggg

SEQ ID NO: 138247 - DNA, 17 bp, synthetic construct
  source 1..17: mol_type = other DNA
gtggggcacagtggggt

SEQ ID NO: 138248 - DNA, 17 bp, synthetic construct
  source 1..17: mol_type = other DNA
tggggcacagtggggtg

SEQ ID NO: 138249 - DNA, 17 bp, synthetic construct
  source 1..17: mol_type = other DNA
ggggcacagtggggtgc

SEQ ID NO: 138250 - DNA, 17 bp, synthetic construct
  source 1..17: mol_type = other DNA
gggcacagtggggtgca

SEQ ID NO: 138251 - DNA, 17 bp, synthetic construct
  source 1..17: mol_type = other DNA
ggcacagtggggtgcag

SEQ ID NO: 138252 - DNA, 17 bp, synthetic construct
  source 1..17: mol_type = other DNA
gcacagtggggtgcagt

SEQ ID NO: 138253 - DNA, 17 bp, synthetic construct
  source 1..17: mol_type = other DNA
cacagtggggtgcagtg

SEQ ID NO: 138254 - DNA, 17 bp, synthetic construct
  source 1..17: mol_type = other DNA
acagtggggtgcagtgg

SEQ ID NO: 138255 - DNA, 17 bp, synthetic construct
  source 1..17: mol_type = other DNA
cagtggggtgcagtggg

SEQ ID NO: 138256 - DNA, 17 bp, synthetic construct
  source 1..17: mol_type = other DNA
agtggggtgcagtgggg

SEQ ID NO: 138257 - DNA, 17 bp, synthetic construct
  source 1..17: mol_type = other DNA
gtggggtgcagtgggga

SEQ ID NO: 138258 - DNA, 17 bp, synthetic construct
  source 1..17: mol_type = other DNA
tggggtgcagtggggaa

SEQ ID NO: 138259 - DNA, 17 bp, synthetic construct
  source 1..17: mol_type = other DNA
ggggtgcagtggggaat

SEQ ID NO: 138260 - DNA, 17 bp, synthetic construct
  source 1..17: mol_type = other DNA
gggtgcagtggggaatg

SEQ ID NO: 138261 - DNA, 17 bp, synthetic construct
  source 1..17: mol_type = other DNA
ggtgcagtggggaatgg

SEQ ID NO: 138262 - DNA, 17 bp, synthetic construct
  source 1..17: mol_type = other DNA
gtgcagtggggaatggt

SEQ ID NO: 138263 - DNA, 17 bp, synthetic construct
  source 1..17: mol_type = other DNA
tgcagtggggaatggtg

SEQ ID NO: 138264 - DNA, 17 bp, synthetic construct
  source 1..17: mol_type = other DNA
gcagtggggaatggtgg

SEQ ID NO: 138265 - DNA, 17 bp, synthetic construct
  source 1..17: mol_type = other DNA
cagtggggaatggtggg

SEQ ID NO: 138266 - DNA, 17 bp, synthetic construct
  source 1..17: mol_type = other DNA
agtggggaatggtgggg

SEQ ID NO: 138267 - DNA, 17 bp, synthetic construct
  source 1..17: mol_type = other DNA
gtggggaatggtggggc

SEQ ID NO: 138268 - DNA, 17 bp, synthetic construct
  source 1..17: mol_type = other DNA
tggggaatggtggggca

SEQ ID NO: 138269 - DNA, 17 bp, synthetic construct
  source 1..17: mol_type = other DNA
ggggaatggtggggcat

SEQ ID NO: 138270 - DNA, 17 bp, synthetic construct
  source 1..17: mol_type = other DNA
gggaatggtggggcatg

SEQ ID NO: 138271 - DNA, 17 bp, synthetic construct
  source 1..17: mol_type = other DNA
ggaatggtggggcatgg

SEQ ID NO: 138272 - DNA, 17 bp, synthetic construct
  source 1..17: mol_type = other DNA
gaatggtggggcatggt

SEQ ID NO: 138273 - DNA, 17 bp, synthetic construct
  source 1..17: mol_type = other DNA
aatggtggggcatggtg

SEQ ID NO: 138274 - DNA, 17 bp, synthetic construct
  source 1..17: mol_type = other DNA
atggtggggcatggtgg

SEQ ID NO: 138275 - DNA, 17 bp, synthetic construct
  source 1..17: mol_type = other DNA
tggtggggcatggtggg

SEQ ID NO: 138276 - DNA, 17 bp, synthetic construct
  source 1..17: mol_type = other DNA
ggtggggcatggtgggg

SEQ ID NO: 138277 - DNA, 17 bp, synthetic construct
  source 1..17: mol_type = other DNA
gtggggcatggtggggc

SEQ ID NO: 138278 - DNA, 17 bp, synthetic construct
  source 1..17: mol_type = other DNA
tggggcatggtggggca

SEQ ID NO: 138279 - DNA, 17 bp, synthetic construct
  source 1..17: mol_type = other DNA
ggggcatggtggggcat

SEQ ID NO: 138280 - DNA, 17 bp, synthetic construct
  source 1..17: mol_type = other DNA
gggcatggtggggcatg

SEQ ID NO: 138281 - DNA, 17 bp, synthetic construct
  source 1..17: mol_type = other DNA
ggcatggtggggcatgg

SEQ ID NO: 138282 - DNA, 17 bp, synthetic construct
  source 1..17: mol_type = other DNA
gcatggtggggcatggt

SEQ ID NO: 138283 - DNA, 17 bp, synthetic construct
  source 1..17: mol_type = other DNA
catggtggggcatggtg

SEQ ID NO: 138284 - DNA, 17 bp, synthetic construct
  source 1..17: mol_type = other DNA
atggtggggcatggtgg

SEQ ID NO: 138285 - DNA, 17 bp, synthetic construct
  source 1..17: mol_type = other DNA
tggtggggcatggtggg

SEQ ID NO: 138286 - DNA, 17 bp, synthetic construct
  source 1..17: mol_type = other DNA
ggtggggcatggtgggg

SEQ ID NO: 138287 - DNA, 17 bp, synthetic construct
  source 1..17: mol_type = other DNA
gtggggcatggtggggt

SEQ ID NO: 138288 - DNA, 17 bp, synthetic construct
  source 1..17: mol_type = other DNA
tggggcatggtggggtg

SEQ ID NO: 138289 - DNA, 17 bp, synthetic construct
  source 1..17: mol_type = other DNA
ggggcatggtggggtgc

SEQ ID NO: 138290 - DNA, 17 bp, synthetic construct
  source 1..17: mol_type = other DNA
gggcatggtggggtgca

SEQ ID NO: 138291 - DNA, 17 bp, synthetic construct
  source 1..17: mol_type = other DNA
ggcatggtggggtgcag

SEQ ID NO: 138292 - DNA, 17 bp, synthetic construct
  source 1..17: mol_type = other DNA
gcatggtggggtgcagt

SEQ ID NO: 138293 - DNA, 17 bp, synthetic construct
  source 1..17: mol_type = other DNA
catggtggggtgcagtg

SEQ ID NO: 138294 - DNA, 17 bp, synthetic construct
  source 1..17: mol_type = other DNA
atggtggggtgcagtgg

SEQ ID NO: 138295 - DNA, 17 bp, synthetic construct
  source 1..17: mol_type = other DNA
tggtggggtgcagtggg

SEQ ID NO: 138296 - DNA, 17 bp, synthetic construct
  source 1..17: mol_type = other DNA
ggtggggtgcagtgggg

SEQ ID NO: 138297 - DNA, 17 bp, synthetic construct
  source 1..17: mol_type = other DNA
gtggggtgcagtggggc

SEQ ID NO: 138298 - DNA, 17 bp, synthetic construct
  source 1..17: mol_type = other DNA
tggggtgcagtggggca

SEQ ID NO: 138299 - DNA, 17 bp, synthetic construct
  source 1..17: mol_type = other DNA
ggggtgcagtggggcat

SEQ ID NO: 138300 - DNA, 17 bp, synthetic construct
  source 1..17: mol_type = other DNA
gggtgcagtggggcatg

SEQ ID NO: 138301 - DNA, 17 bp, synthetic construct
  source 1..17: mol_type = other DNA
ggtgcagtggggcatgg

SEQ ID NO: 138302 - DNA, 17 bp, synthetic construct
  source 1..17: mol_type = other DNA
gtgcagtggggcatggt

SEQ ID NO: 138303 - DNA, 17 bp, synthetic construct
  source 1..17: mol_type = other DNA
tgcagtggggcatggtg

SEQ ID NO: 138304 - DNA, 17 bp, synthetic construct
  source 1..17: mol_type = other DNA
gcagtggggcatggtgg

SEQ ID NO: 138305 - DNA, 17 bp, synthetic construct
  source 1..17: mol_type = other DNA
cagtggggcatggtggg

SEQ ID NO: 138306 - DNA, 17 bp, synthetic construct
  source 1..17: mol_type = other DNA
agtggggcatggtgggg

SEQ ID NO: 138307 - DNA, 17 bp, synthetic construct
  source 1..17: mol_type = other DNA
gtggggcatggtggggc

SEQ ID NO: 138308 - DNA, 17 bp, synthetic construct
  source 1..17: mol_type = other DNA
tggggcatggtggggca

SEQ ID NO: 138309 - DNA, 17 bp, synthetic construct
  source 1..17: mol_type = other DNA
ggggcatggtggggcat

SEQ ID NO: 138310 - DNA, 17 bp, synthetic construct
  source 1..17: mol_type = other DNA
gggcatggtggggcatg

SEQ ID NO: 138311 - DNA, 17 bp, synthetic construct
  source 1..17: mol_type = other DNA
ggcatggtggggcatgg

SEQ ID NO: 138312 - DNA, 17 bp, synthetic construct
  source 1..17: mol_type = other DNA
gcatggtggggcatggt

SEQ ID NO: 138313 - DNA, 17 bp, synthetic construct
  source 1..17: mol_type = other DNA
catggtggggcatggtg

SEQ ID NO: 138314 - DNA, 17 bp, synthetic construct
  source 1..17: mol_type = other DNA
atggtggggcatggtgg

SEQ ID NO: 138315 - DNA, 17 bp, synthetic construct
  source 1..17: mol_type = other DNA
tggtggggcatggtggg

SEQ ID NO: 138316 - DNA, 17 bp, synthetic construct
  source 1..17: mol_type = other DNA
ggtggggcatggtgggg

SEQ ID NO: 138317 - DNA, 17 bp, synthetic construct
  source 1..17: mol_type = other DNA
gtggggcatggtggggt

SEQ ID NO: 138318 - DNA, 17 bp, synthetic construct
  source 1..17: mol_type = other DNA
tggggcatggtggggtg

SEQ ID NO: 138319 - DNA, 17 bp, synthetic construct
  source 1..17: mol_type = other DNA
ggggcatggtggggtgt

SEQ ID NO: 138320 - DNA, 17 bp, synthetic construct
  source 1..17: mol_type = other DNA
gggcatggtggggtgtg

SEQ ID NO: 138321 - DNA, 17 bp, synthetic construct
  source 1..17: mol_type = other DNA
ggcatggtggggtgtgg

SEQ ID NO: 138322 - DNA, 17 bp, synthetic construct
  source 1..17: mol_type = other DNA
gcatggtggggtgtggt

SEQ ID NO: 138323 - DNA, 17 bp, synthetic construct
  source 1..17: mol_type = other DNA
catggtggggtgtggtg

SEQ ID NO: 138324 - DNA, 17 bp, synthetic construct
  source 1..17: mol_type = other DNA
atggtggggtgtggtgg

SEQ ID NO: 138325 - DNA, 17 bp, synthetic construct
  source 1..17: mol_type = other DNA
tggtggggtgtggtggt

SEQ ID NO: 138326 - DNA, 17 bp, synthetic construct
  source 1..17: mol_type = other DNA
ggtggggtgtggtggtg

SEQ ID NO: 138327 - DNA, 17 bp, synthetic construct
  source 1..17: mol_type = other DNA
gtggggtgtggtggtgg

SEQ ID NO: 138328 - DNA, 17 bp, synthetic construct
  source 1..17: mol_type = other DNA
tggggtgtggtggtggt

SEQ ID NO: 138329 - DNA, 17 bp, synthetic construct
  source 1..17: mol_type = other DNA
ggggtgtggtggtggtg

SEQ ID NO: 138330 - DNA, 17 bp, synthetic construct
  source 1..17: mol_type = other DNA
gggtgtggtggtggtgt

SEQ ID NO: 138331 - DNA, 17 bp, synthetic construct
  source 1..17: mol_type = other DNA
ggtgtggtggtggtgtt

SEQ ID NO: 138332 - DNA, 17 bp, synthetic construct
  source 1..17: mol_type = other DNA
gtgtggtggtggtgttt

SEQ ID NO: 138333 - DNA, 17 bp, synthetic construct
  source 1..17: mol_type = other DNA
tgtggtggtggtgtttg

SEQ ID NO: 138334 - DNA, 17 bp, synthetic construct
  source 1..17: mol_type = other DNA
gtggtggtggtgtttgg

SEQ ID NO: 138335 - DNA, 17 bp, synthetic construct
  source 1..17: mol_type = other DNA
tggtggtggtgtttggg

SEQ ID NO: 138336 - DNA, 17 bp, synthetic construct
  source 1..17: mol_type = other DNA
ggtggtggtgtttggga

SEQ ID NO: 138337 - DNA, 17 bp, synthetic construct
  source 1..17: mol_type = other DNA
gtggtggtgtttgggag

SEQ ID NO: 138338 - DNA, 17 bp, synthetic construct
  source 1..17: mol_type = other DNA
tggtggtgtttgggaga

SEQ ID NO: 138339 - DNA, 17 bp, synthetic construct
  source 1..17: mol_type = other DNA
ggtggtgtttgggagat

SEQ ID NO: 138340 - DNA, 17 bp, synthetic construct
  source 1..17: mol_type = other DNA
gtggtgtttgggagatc

SEQ ID NO: 138341 - DNA, 17 bp, synthetic construct
  source 1..17: mol_type = other DNA
tggtgtttgggagatcg

SEQ ID NO: 138342 - DNA, 17 bp, synthetic construct
  source 1..17: mol_type = other DNA
ggtgtttgggagatcgc

SEQ ID NO: 138343 - DNA, 17 bp, synthetic construct
  source 1..17: mol_type = other DNA
gtgtttgggagatcgct

SEQ ID NO: 138344 - DNA, 17 bp, synthetic construct
  source 1..17: mol_type = other DNA
tgtttgggagatcgctg

SEQ ID NO: 138345 - DNA, 17 bp, synthetic construct
  source 1..17: mol_type = other DNA
gtttgggagatcgctgg

SEQ ID NO: 138346 - DNA, 17 bp, synthetic construct
  source 1..17: mol_type = other DNA
tttgggagatcgctggc

SEQ ID NO: 138347 - DNA, 17 bp, synthetic construct
  source 1..17: mol_type = other DNA
ttgggagatcgctggca

SEQ ID NO: 138348 - DNA, 17 bp, synthetic construct
  source 1..17: mol_type = other DNA
tgggagatcgctggcat

SEQ ID NO: 138349 - DNA, 17 bp, synthetic construct
  source 1..17: mol_type = other DNA
gggagatcgctggcatc

SEQ ID NO: 138350 - DNA, 17 bp, synthetic construct
  source 1..17: mol_type = other DNA
ggagatcgctggcatcc

SEQ ID NO: 138351 - DNA, 17 bp, synthetic construct
  source 1..17: mol_type = other DNA
gagatcgctggcatccc

SEQ ID NO: 138352 - DNA, 17 bp, synthetic construct
  source 1..17: mol_type = other DNA
agatcgctggcatccct

SEQ ID NO: 138353 - DNA, 17 bp, synthetic construct
  source 1..17: mol_type = other DNA
gatcgctggcatccctt

SEQ ID NO: 138354 - DNA, 17 bp, synthetic construct
  source 1..17: mol_type = other DNA
atcgctggcatcccttc

SEQ ID NO: 138355 - DNA, 17 bp, synthetic construct
  source 1..17: mol_type = other DNA
tcgctggcatcccttca

SEQ ID NO: 138356 - DNA, 17 bp, synthetic construct
  source 1..17: mol_type = other DNA
cgctggcatcccttcag

SEQ ID NO: 138357 - DNA, 17 bp, synthetic construct
  source 1..17: mol_type = other DNA
gctggcatcccttcagg

SEQ ID NO: 138358 - DNA, 17 bp, synthetic construct
  source 1..17: mol_type = other DNA
ctggcatcccttcagga

SEQ ID NO: 138359 - DNA, 17 bp, synthetic construct
  source 1..17: mol_type = other DNA
tggcatcccttcaggaa

SEQ ID NO: 138360 - DNA, 17 bp, synthetic construct
  source 1..17: mol_type = other DNA
ggcatcccttcaggaaa

SEQ ID NO: 138361 - DNA, 17 bp, synthetic construct
  source 1..17: mol_type = other DNA
gcatcccttcaggaaac

SEQ ID NO: 138362 - DNA, 17 bp, synthetic construct
  source 1..17: mol_type = other DNA
catcccttcaggaaacc

SEQ ID NO: 138363 - DNA, 17 bp, synthetic construct
  source 1..17: mol_type = other DNA
atcccttcaggaaacca

SEQ ID NO: 138364 - DNA, 17 bp, synthetic construct
  source 1..17: mol_type = other DNA
tcccttcaggaaaccat

SEQ ID NO: 138365 - DNA, 17 bp, synthetic construct
  source 1..17: mol_type = other DNA
cccttcaggaaaccatc

SEQ ID NO: 138366 - DNA, 17 bp, synthetic construct
  source 1..17: mol_type = other DNA
ccttcaggaaaccatca

SEQ ID NO: 138367 - DNA, 17 bp, synthetic construct
  source 1..17: mol_type = other DNA
cttcaggaaaccatcat

SEQ ID NO: 138368 - DNA, 17 bp, synthetic construct
  source 1..17: mol_type = other DNA
ttcaggaaaccatcatg

SEQ ID NO: 138369 - DNA, 17 bp, synthetic construct
  source 1..17: mol_type = other DNA
tcaggaaaccatcatgc

SEQ ID NO: 138370 - DNA, 17 bp, synthetic construct
  source 1..17: mol_type = other DNA
caggaaaccatcatgca

SEQ ID NO: 138371 - DNA, 17 bp, synthetic construct
  source 1..17: mol_type = other DNA
aggaaaccatcatgcac

SEQ ID NO: 138372 - DNA, 17 bp, synthetic construct
  source 1..17: mol_type = other DNA
ggaaaccatcatgcacc

SEQ ID NO: 138373 - DNA, 17 bp, synthetic construct
  source 1..17: mol_type = other DNA
gaaaccatcatgcacca

SEQ ID NO: 138374 - DNA, 17 bp, synthetic construct
  source 1..17: mol_type = other DNA
aaaccatcatgcaccat

SEQ ID NO: 138375 - DNA, 17 bp, synthetic construct
  source 1..17: mol_type = other DNA
aaccatcatgcaccatg

SEQ ID NO: 138376 - DNA, 17 bp, synthetic construct
  source 1..17: mol_type = other DNA
accatcatgcaccatgc

SEQ ID NO: 138377 - DNA, 17 bp, synthetic construct
  source 1..17: mol_type = other DNA
ccatcatgcaccatgct

SEQ ID NO: 138378 - DNA, 17 bp, synthetic construct
  source 1..17: mol_type = other DNA
catcatgcaccatgctg

SEQ ID NO: 138379 - DNA, 17 bp, synthetic construct
  source 1..17: mol_type = other DNA
atcatgcaccatgctgt

SEQ ID NO: 138380 - DNA, 17 bp, synthetic construct
  source 1..17: mol_type = other DNA
tcatgcaccatgctgtc

SEQ ID NO: 138381 - DNA, 17 bp, synthetic construct
  source 1..17: mol_type = other DNA
catgcaccatgctgtct

SEQ ID NO: 138382 - DNA, 17 bp, synthetic construct
  source 1..17: mol_type = other DNA
atgcaccatgctgtctt

SEQ ID NO: 138383 - DNA, 17 bp, synthetic construct
  source 1..17: mol_type = other DNA
tgcaccatgctgtcttg

SEQ ID NO: 138384 - DNA, 17 bp, synthetic construct
  source 1..17: mol_type = other DNA
gcaccatgctgtcttgg

SEQ ID NO: 138385 - DNA, 17 bp, synthetic construct
  source 1..17: mol_type = other DNA
caccatgctgtcttggg

SEQ ID NO: 138386 - DNA, 17 bp, synthetic construct
  source 1..17: mol_type = other DNA
accatgctgtcttgggc

SEQ ID NO: 138387 - DNA, 17 bp, synthetic construct
  source 1..17: mol_type = other DNA
ccatgctgtcttgggcc

SEQ ID NO: 138388 - DNA, 17 bp, synthetic construct
  source 1..17: mol_type = other DNA
catgctgtcttgggcct

SEQ ID NO: 138389 - DNA, 17 bp, synthetic construct
  source 1..17: mol_type = other DNA
atgctgtcttgggcctc

SEQ ID NO: 138390 - DNA, 17 bp, synthetic construct
  source 1..17: mol_type = other DNA
tgctgtcttgggcctca

SEQ ID NO: 138391 - DNA, 17 bp, synthetic construct
  source 1..17: mol_type = other DNA
gctgtcttgggcctcag

SEQ ID NO: 138392 - DNA, 17 bp, synthetic construct
  source 1..17: mol_type = other DNA
ctgtcttgggcctcagt

SEQ ID NO: 138393 - DNA, 17 bp, synthetic construct
  source 1..17: mol_type = other DNA
tgtcttgggcctcagtg

SEQ ID NO: 138394 - DNA, 17 bp, synthetic construct
  source 1..17: mol_type = other DNA
gtcttgggcctcagtgg

SEQ ID NO: 138395 - DNA, 17 bp, synthetic construct
  source 1..17: mol_type = other DNA
tcttgggcctcagtggt

SEQ ID NO: 138396 - DNA, 17 bp, synthetic construct
  source 1..17: mol_type = other DNA
cttgggcctcagtggtg

SEQ ID NO: 138397 - DNA, 17 bp, synthetic construct
  source 1..17: mol_type = other DNA
ttgggcctcagtggtgc

SEQ ID NO: 138398 - DNA, 17 bp, synthetic construct
  source 1..17: mol_type = other DNA
tgggcctcagtggtgca

SEQ ID NO: 138399 - DNA, 17 bp, synthetic construct
  source 1..17: mol_type = other DNA
gggcctcagtggtgcac

SEQ ID NO: 138400 - DNA, 17 bp, synthetic construct
  source 1..17: mol_type = other DNA
ggcctcagtggtgcacg

SEQ ID NO: 138401 - DNA, 17 bp, synthetic construct
  source 1..17: mol_type = other DNA
gcctcagtggtgcacgt

SEQ ID NO: 138402 - DNA, 17 bp, synthetic construct
  source 1..17: mol_type = other DNA
cctcagtggtgcacgtc

SEQ ID NO: 138403 - DNA, 17 bp, synthetic construct
  source 1..17: mol_type = other DNA
ctcagtggtgcacgtcg

SEQ ID NO: 138404 - DNA, 17 bp, synthetic construct
  source 1..17: mol_type = other DNA
tcagtggtgcacgtcgt

SEQ ID NO: 138405 - DNA, 17 bp, synthetic construct
  source 1..17: mol_type = other DNA
cagtggtgcacgtcgtg

SEQ ID NO: 138406 - DNA, 17 bp, synthetic construct
  source 1..17: mol_type = other DNA
agtggtgcacgtcgtga

SEQ ID NO: 138407 - DNA, 17 bp, synthetic construct
  source 1..17: mol_type = other DNA
gtggtgcacgtcgtgag

SEQ ID NO: 138408 - DNA, 17 bp, synthetic construct
  source 1..17: mol_type = other DNA
tggtgcacgtcgtgaga

SEQ ID NO: 138409 - DNA, 17 bp, synthetic construct
  source 1..17: mol_type = other DNA
ggtgcacgtcgtgagag

SEQ ID NO: 138410 - DNA, 17 bp, synthetic construct
  source 1..17: mol_type = other DNA
gtgcacgtcgtgagagc

SEQ ID NO: 138411 - DNA, 17 bp, synthetic construct
  source 1..17: mol_type = other DNA
tgcacgtcgtgagagct

SEQ ID NO: 138412 - DNA, 17 bp, synthetic construct
  source 1..17: mol_type = other DNA
gcacgtcgtgagagctg

SEQ ID NO: 138413 - DNA, 17 bp, synthetic construct
  source 1..17: mol_type = other DNA
cacgtcgtgagagctgt

SEQ ID NO: 138414 - DNA, 17 bp, synthetic construct
  source 1..17: mol_type = other DNA
acgtcgtgagagctgtt

SEQ ID NO: 138415 - DNA, 17 bp, synthetic construct
  source 1..17: mol_type = other DNA
cgtcgtgagagctgtta

SEQ ID NO: 138416 - DNA, 17 bp, synthetic construct
  source 1..17: mol_type = other DNA
gtcgtgagagctgttag

SEQ ID NO: 138417 - DNA, 17 bp, synthetic construct
  source 1..17: mol_type = other DNA
tcgtgagagctgttagt

SEQ ID NO: 138418 - DNA, 17 bp, synthetic construct
  source 1..17: mol_type = other DNA
cgtgagagctgttagta

SEQ ID NO: 138419 - DNA, 17 bp, synthetic construct
  source 1..17: mol_type = other DNA
gtgagagctgttagtat

SEQ ID NO: 138420 - DNA, 17 bp, synthetic construct
  source 1..17: mol_type = other DNA
tgagagctgttagtatg

SEQ ID NO: 138421 - DNA, 17 bp, synthetic construct
  source 1..17: mol_type = other DNA
gagagctgttagtatgc

SEQ ID NO: 138422 - DNA, 17 bp, synthetic construct
  source 1..17: mol_type = other DNA
agagctgttagtatgca

SEQ ID NO: 138423 - DNA, 17 bp, synthetic construct
  source 1..17: mol_type = other DNA
gagctgttagtatgcag

SEQ ID NO: 138424 - DNA, 17 bp, synthetic construct
  source 1..17: mol_type = other DNA
agctgttagtatgcagg

SEQ ID NO: 138425 - DNA, 17 bp, synthetic construct
  source 1..17: mol_type = other DNA
gctgttagtatgcaggc

SEQ ID NO: 138426 - DNA, 17 bp, synthetic construct
  source 1..17: mol_type = other DNA
ctgttagtatgcaggct

SEQ ID NO: 138427 - DNA, 17 bp, synthetic construct
  source 1..17: mol_type = other DNA
tgttagtatgcaggctc

SEQ ID NO: 138428 - DNA, 17 bp, synthetic construct
  source 1..17: mol_type = other DNA
gttagtatgcaggctcc

SEQ ID NO: 138429 - DNA, 17 bp, synthetic construct
  source 1..17: mol_type = other DNA
ttagtatgcaggctccg

SEQ ID NO: 138430 - DNA, 17 bp, synthetic construct
  source 1..17: mol_type = other DNA
tagtatgcaggctccgt

SEQ ID NO: 138431 - DNA, 17 bp, synthetic construct
  source 1..17: mol_type = other DNA
agtatgcaggctccgtg

SEQ ID NO: 138432 - DNA, 17 bp, synthetic construct
  source 1..17: mol_type = other DNA
gtatgcaggctccgtgt

SEQ ID NO: 138433 - DNA, 17 bp, synthetic construct
  source 1..17: mol_type = other DNA
tatgcaggctccgtgtc

SEQ ID NO: 138434 - DNA, 17 bp, synthetic construct
  source 1..17: mol_type = other DNA
atgcaggctccgtgtcc

SEQ ID NO: 138435 - DNA, 17 bp, synthetic construct
  source 1..17: mol_type = other DNA
tgcaggctccgtgtcca

SEQ ID NO: 138436 - DNA, 17 bp, synthetic construct
  source 1..17: mol_type = other DNA
gcaggctccgtgtccac

SEQ ID NO: 138437 - DNA, 17 bp, synthetic construct
  source 1..17: mol_type = other DNA
caggctccgtgtccaca

SEQ ID NO: 138438 - DNA, 17 bp, synthetic construct
  source 1..17: mol_type = other DNA
aggctccgtgtccacag

SEQ ID NO: 138439 - DNA, 17 bp, synthetic construct
  source 1..17: mol_type = other DNA
ggctccgtgtccacagg

SEQ ID NO: 138440 - DNA, 17 bp, synthetic construct
  source 1..17: mol_type = other DNA
gctccgtgtccacaggg

SEQ ID NO: 138441 - DNA, 17 bp, synthetic construct
  source 1..17: mol_type = other DNA
ctccgtgtccacagggc

SEQ ID NO: 138442 - DNA, 17 bp, synthetic construct
  source 1..17: mol_type = other DNA
tccgtgtccacagggct

SEQ ID NO: 138443 - DNA, 17 bp, synthetic construct
  source 1..17: mol_type = other DNA
ccgtgtccacagggctg

SEQ ID NO: 138444 - DNA, 17 bp, synthetic construct
  source 1..17: mol_type = other DNA
cgtgtccacagggctga

SEQ ID NO: 138445 - DNA, 17 bp, synthetic construct
  source 1..17: mol_type = other DNA
gtgtccacagggctgaa

SEQ ID NO: 138446 - DNA, 17 bp, synthetic construct
  source 1..17: mol_type = other DNA
tgtccacagggctgaaa

SEQ ID NO: 138447 - DNA, 17 bp, synthetic construct
  source 1..17: mol_type = other DNA
gtccacagggctgaaaa

SEQ ID NO: 138448 - DNA, 17 bp, synthetic construct
  source 1..17: mol_type = other DNA
tccacagggctgaaaat

SEQ ID NO: 138449 - DNA, 17 bp, synthetic construct
  source 1..17: mol_type = other DNA
ccacagggctgaaaatg

SEQ ID NO: 138450 - DNA, 17 bp, synthetic construct
  source 1..17: mol_type = other DNA
cacagggctgaaaatgc

SEQ ID NO: 138451 - DNA, 17 bp, synthetic construct
  source 1..17: mol_type = other DNA
acagggctgaaaatgct

SEQ ID NO: 138452 - DNA, 17 bp, synthetic construct
  source 1..17: mol_type = other DNA
cagggctgaaaatgctg

SEQ ID NO: 138453 - DNA, 17 bp, synthetic construct
  source 1..17: mol_type = other DNA
agggctgaaaatgctga

SEQ ID NO: 138454 - DNA, 17 bp, synthetic construct
  source 1..17: mol_type = other DNA
gggctgaaaatgctgac

SEQ ID NO: 138455 - DNA, 17 bp, synthetic construct
  source 1..17: mol_type = other DNA
ggctgaaaatgctgaca

SEQ ID NO: 138456 - DNA, 17 bp, synthetic construct
  source 1..17: mol_type = other DNA
gctgaaaatgctgacac

SEQ ID NO: 138457 - DNA, 17 bp, synthetic construct
  source 1..17: mol_type = other DNA
ctgaaaatgctgacaca

SEQ ID NO: 138458 - DNA, 17 bp, synthetic construct
  source 1..17: mol_type = other DNA
tgaaaatgctgacacag

SEQ ID NO: 138459 - DNA, 17 bp, synthetic construct
  source 1..17: mol_type = other DNA
gaaaatgctgacacagc

SEQ ID NO: 138460 - DNA, 17 bp, synthetic construct
  source 1..17: mol_type = other DNA
aaaatgctgacacagcc

SEQ ID NO: 138461 - DNA, 17 bp, synthetic construct
  source 1..17: mol_type = other DNA
aaatgctgacacagccc

SEQ ID NO: 138462 - DNA, 17 bp, synthetic construct
  source 1..17: mol_type = other DNA
aatgctgacacagccca

SEQ ID NO: 138463 - DNA, 17 bp, synthetic construct
  source 1..17: mol_type = other DNA
atgctgacacagcccaa

SEQ ID NO: 138464 - DNA, 17 bp, synthetic construct
  source 1..17: mol_type = other DNA
tgctgacacagcccaag

SEQ ID NO: 138465 - DNA, 17 bp, synthetic construct
  source 1..17: mol_type = other DNA
gctgacacagcccaagg

SEQ ID NO: 138466 - DNA, 17 bp, synthetic construct
  source 1..17: mol_type = other DNA
ctgacacagcccaaggg

SEQ ID NO: 138467 - DNA, 17 bp, synthetic construct
  source 1..17: mol_type = other DNA
tgacacagcccaaggga

SEQ ID NO: 138468 - DNA, 17 bp, synthetic construct
  source 1..17: mol_type = other DNA
gacacagcccaagggag

SEQ ID NO: 138469 - DNA, 17 bp, synthetic construct
  source 1..17: mol_type = other DNA
acacagcccaagggaga

SEQ ID NO: 138470 - DNA, 17 bp, synthetic construct
  source 1..17: mol_type = other DNA
cacagcccaagggagag

SEQ ID NO: 138471 - DNA, 17 bp, synthetic construct
  source 1..17: mol_type = other DNA
acagcccaagggagagg

SEQ ID NO: 138472 - DNA, 17 bp, synthetic construct
  source 1..17: mol_type = other DNA
cagcccaagggagaggc

SEQ ID NO: 138473 - DNA, 17 bp, synthetic construct
  source 1..17: mol_type = other DNA
agcccaagggagaggca

SEQ ID NO: 138474 - DNA, 17 bp, synthetic construct
  source 1..17: mol_type = other DNA
gcccaagggagaggcag

SEQ ID NO: 138475 - DNA, 17 bp, synthetic construct
  source 1..17: mol_type = other DNA
cccaagggagaggcagc

SEQ ID NO: 138476 - DNA, 17 bp, synthetic construct
  source 1..17: mol_type = other DNA
ccaagggagaggcagca

SEQ ID NO: 138477 - DNA, 17 bp, synthetic construct
  source 1..17: mol_type = other DNA
caagggagaggcagcag

SEQ ID NO: 138478 - DNA, 17 bp, synthetic construct
  source 1..17: mol_type = other DNA
aagggagaggcagcaga

SEQ ID NO: 138479 - DNA, 17 bp, synthetic construct
  source 1..17: mol_type = other DNA
agggagaggcagcagag

SEQ ID NO: 138480 - DNA, 17 bp, synthetic construct
  source 1..17: mol_type = other DNA
gggagaggcagcagagg

SEQ ID NO: 138481 - DNA, 17 bp, synthetic construct
  source 1..17: mol_type = other DNA
ggagaggcagcagaggc

SEQ ID NO: 138482 - DNA, 17 bp, synthetic construct
  source 1..17: mol_type = other DNA
gagaggcagcagaggct

SEQ ID NO: 138483 - DNA, 17 bp, synthetic construct
  source 1..17: mol_type = other DNA
agaggcagcagaggctg

SEQ ID NO: 138484 - DNA, 17 bp, synthetic construct
  source 1..17: mol_type = other DNA
gaggcagcagaggctgg

SEQ ID NO: 138485 - DNA, 17 bp, synthetic construct
  source 1..17: mol_type = other DNA
aggcagcagaggctggt

SEQ ID NO: 138486 - DNA, 17 bp, synthetic construct
  source 1..17: mol_type = other DNA
ggcagcagaggctggtt

SEQ ID NO: 138487 - DNA, 17 bp, synthetic construct
  source 1..17: mol_type = other DNA
gcagcagaggctggttt

SEQ ID NO: 138488 - DNA, 17 bp, synthetic construct
  source 1..17: mol_type = other DNA
cagcagaggctggtttg

SEQ ID NO: 138489 - DNA, 17 bp, synthetic construct
  source 1..17: mol_type = other DNA
agcagaggctggtttgc

SEQ ID NO: 138490 - DNA, 17 bp, synthetic construct
  source 1..17: mol_type = other DNA
gcagaggctggtttgct

SEQ ID NO: 138491 - DNA, 17 bp, synthetic construct
  source 1..17: mol_type = other DNA
cagaggctggtttgctg

SEQ ID NO: 138492 - DNA, 17 bp, synthetic construct
  source 1..17: mol_type = other DNA
agaggctggtttgctga

SEQ ID NO: 138493 - DNA, 17 bp, synthetic construct
  source 1..17: mol_type = other DNA
gaggctggtttgctgag

SEQ ID NO: 138494 - DNA, 17 bp, synthetic construct
  source 1..17: mol_type = other DNA
aggctggtttgctgagc

SEQ ID NO: 138495 - DNA, 17 bp, synthetic construct
  source 1..17: mol_type = other DNA
ggctggtttgctgagct

SEQ ID NO: 138496 - DNA, 17 bp, synthetic construct
  source 1..17: mol_type = other DNA
gctggtttgctgagctt

SEQ ID NO: 138497 - DNA, 17 bp, synthetic construct
  source 1..17: mol_type = other DNA
ctggtttgctgagcttc

SEQ ID NO: 138498 - DNA, 17 bp, synthetic construct
  source 1..17: mol_type = other DNA
tggtttgctgagcttct

SEQ ID NO: 138499 - DNA, 17 bp, synthetic construct
  source 1..17: mol_type = other DNA
ggtttgctgagcttctc

SEQ ID NO: 138500 - DNA, 17 bp, synthetic construct
  source 1..17: mol_type = other DNA
gtttgctgagcttctct

SEQ ID NO: 138501 - DNA, 17 bp, synthetic construct
  source 1..17: mol_type = other DNA
tttgctgagcttctctg

SEQ ID NO: 138502 - DNA, 17 bp, synthetic construct
  source 1..17: mol_type = other DNA
ttgctgagcttctctgc

SEQ ID NO: 138503 - DNA, 17 bp, synthetic construct
  source 1..17: mol_type = other DNA
tgctgagcttctctgca

SEQ ID NO: 138504 - DNA, 17 bp, synthetic construct
  source 1..17: mol_type = other DNA
gctgagcttctctgcac

SEQ ID NO: 138505 - DNA, 17 bp, synthetic construct
  source 1..17: mol_type = other DNA
ctgagcttctctgcaca

SEQ ID NO: 138506 - DNA, 17 bp, synthetic construct
  source 1..17: mol_type = other DNA
tgagcttctctgcacat

SEQ ID NO: 138507 - DNA, 17 bp, synthetic construct
  source 1..17: mol_type = other DNA
gagcttctctgcacatc

SEQ ID NO: 138508 - DNA, 17 bp, synthetic construct
  source 1..17: mol_type = other DNA
agcttctctgcacatca

SEQ ID NO: 138509 - DNA, 17 bp, synthetic construct
  source 1..17: mol_type = other DNA
gcttctctgcacatcag

SEQ ID NO: 138510 - DNA, 17 bp, synthetic construct
  source 1..17: mol_type = other DNA
cttctctgcacatcagc

SEQ ID NO: 138511 - DNA, 17 bp, synthetic construct
  source 1..17: mol_type = other DNA
ttctctgcacatcagcc

SEQ ID NO: 138512 - DNA, 17 bp, synthetic construct
  source 1..17: mol_type = other DNA
tctctgcacatcagcct

SEQ ID NO: 138513 - DNA, 17 bp, synthetic construct
  source 1..17: mol_type = other DNA
ctctgcacatcagcctg

SEQ ID NO: 138514 - DNA, 17 bp, synthetic construct
  source 1..17: mol_type = other DNA
tctgcacatcagcctgt

SEQ ID NO: 138515 - DNA, 17 bp, synthetic construct
  source 1..17: mol_type = other DNA
ctgcacatcagcctgtg

SEQ ID NO: 138516 - DNA, 17 bp, synthetic construct
  source 1..17: mol_type = other DNA
tgcacatcagcctgtgt

SEQ ID NO: 138517 - DNA, 17 bp, synthetic construct
  source 1..17: mol_type = other DNA
gcacatcagcctgtgtg

SEQ ID NO: 138518 - DNA, 17 bp, synthetic construct
  source 1..17: mol_type = other DNA
cacatcagcctgtgtgg

SEQ ID NO: 138519 - DNA, 17 bp, synthetic construct
  source 1..17: mol_type = other DNA
acatcagcctgtgtggt

SEQ ID NO: 138520 - DNA, 17 bp, synthetic construct
  source 1..17: mol_type = other DNA
catcagcctgtgtggtt

SEQ ID NO: 138521 - DNA, 17 bp, synthetic construct
  source 1..17: mol_type = other DNA
atcagcctgtgtggttt

SEQ ID NO: 138522 - DNA, 17 bp, synthetic construct
  source 1..17: mol_type = other DNA
tcagcctgtgtggtttg

SEQ ID NO: 138523 - DNA, 17 bp, synthetic construct
  source 1..17: mol_type = other DNA
cagcctgtgtggtttga

SEQ ID NO: 138524 - DNA, 17 bp, synthetic construct
  source 1..17: mol_type = other DNA
agcctgtgtggtttgaa

SEQ ID NO: 138525 - DNA, 17 bp, synthetic construct
  source 1..17: mol_type = other DNA
gcctgtgtggtttgaaa

SEQ ID NO: 138526 - DNA, 17 bp, synthetic construct
  source 1..17: mol_type = other DNA
cctgtgtggtttgaaag

SEQ ID NO: 138527 - DNA, 17 bp, synthetic construct
  source 1..17: mol_type = other DNA
ctgtgtggtttgaaagg

SEQ ID NO: 138528 - DNA, 17 bp, synthetic construct
  source 1..17: mol_type = other DNA
tgtgtggtttgaaaggg

SEQ ID NO: 138529 - DNA, 17 bp, synthetic construct
  source 1..17: mol_type = other DNA
gtgtggtttgaaaggga

SEQ ID NO: 138530 - DNA, 17 bp, synthetic construct
  source 1..17: mol_type = other DNA
tgtggtttgaaagggac

SEQ ID NO: 138531 - DNA, 17 bp, synthetic construct
  source 1..17: mol_type = other DNA
gtggtttgaaagggacc

SEQ ID NO: 138532 - DNA, 17 bp, synthetic construct
  source 1..17: mol_type = other DNA
tggtttgaaagggaccc

SEQ ID NO: 138533 - DNA, 17 bp, synthetic construct
  source 1..17: mol_type = other DNA
ggtttgaaagggaccct

SEQ ID NO: 138534 - DNA, 17 bp, synthetic construct
  source 1..17: mol_type = other DNA
gtttgaaagggaccctg

SEQ ID NO: 138535 - DNA, 17 bp, synthetic construct
  source 1..17: mol_type = other DNA
tttgaaagggaccctgc

SEQ ID NO: 138536 - DNA, 17 bp, synthetic construct
  source 1..17: mol_type = other DNA
ttgaaagggaccctgcc

SEQ ID NO: 138537 - DNA, 17 bp, synthetic construct
  source 1..17: mol_type = other DNA
tgaaagggaccctgccc

SEQ ID NO: 138538 - DNA, 17 bp, synthetic construct
  source 1..17: mol_type = other DNA
gaaagggaccctgccca

SEQ ID NO: 138539 - DNA, 17 bp, synthetic construct
  source 1..17: mol_type = other DNA
aaagggaccctgcccag

SEQ ID NO: 138540 - DNA, 17 bp, synthetic construct
  source 1..17: mol_type = other DNA
aagggaccctgcccagg

SEQ ID NO: 138541 - DNA, 17 bp, synthetic construct
  source 1..17: mol_type = other DNA
agggaccctgcccaggg

SEQ ID NO: 138542 - DNA, 17 bp, synthetic construct
  source 1..17: mol_type = other DNA
gggaccctgcccagggg

SEQ ID NO: 138543 - DNA, 17 bp, synthetic construct
  source 1..17: mol_type = other DNA
ggaccctgcccaggggc

SEQ ID NO: 138544 - DNA, 17 bp, synthetic construct
  source 1..17: mol_type = other DNA
gaccctgcccaggggct

SEQ ID NO: 138545 - DNA, 17 bp, synthetic construct
  source 1..17: mol_type = other DNA
accctgcccaggggctt

SEQ ID NO: 138546 - DNA, 17 bp, synthetic construct
  source 1..17: mol_type = other DNA
ccctgcccaggggcttc

SEQ ID NO: 138547 - DNA, 17 bp, synthetic construct
  source 1..17: mol_type = other DNA
cctgcccaggggcttct

SEQ ID NO: 138548 - DNA, 17 bp, synthetic construct
  source 1..17: mol_type = other DNA
ctgcccaggggcttctg

SEQ ID NO: 138549 - DNA, 17 bp, synthetic construct
  source 1..17: mol_type = other DNA
tgcccaggggcttctgg

SEQ ID NO: 138550 - DNA, 17 bp, synthetic construct
  source 1..17: mol_type = other DNA
gcccaggggcttctggg

SEQ ID NO: 138551 - DNA, 17 bp, synthetic construct
  source 1..17: mol_type = other DNA
cccaggggcttctgggg

SEQ ID NO: 138552 - DNA, 17 bp, synthetic construct
  source 1..17: mol_type = other DNA
ccaggggcttctggggc

SEQ ID NO: 138553 - DNA, 17 bp, synthetic construct
  source 1..17: mol_type = other DNA
caggggcttctggggcc

SEQ ID NO: 138554 - DNA, 17 bp, synthetic construct
  source 1..17: mol_type = other DNA
aggggcttctggggcca

SEQ ID NO: 138555 - DNA, 17 bp, synthetic construct
  source 1..17: mol_type = other DNA
ggggcttctggggccag

SEQ ID NO: 138556 - DNA, 17 bp, synthetic construct
  source 1..17: mol_type = other DNA
gggcttctggggccagg

SEQ ID NO: 138557 - DNA, 17 bp, synthetic construct
  source 1..17: mol_type = other DNA
ggcttctggggccagga

SEQ ID NO: 138558 - DNA, 17 bp, synthetic construct
  source 1..17: mol_type = other DNA
gcttctggggccaggag

SEQ ID NO: 138559 - DNA, 17 bp, synthetic construct
  source 1..17: mol_type = other DNA
cttctggggccaggaga

SEQ ID NO: 138560 - DNA, 17 bp, synthetic construct
  source 1..17: mol_type = other DNA
ttctggggccaggagaa

SEQ ID NO: 138561 - DNA, 17 bp, synthetic construct
  source 1..17: mol_type = other DNA
tctggggccaggagaag

SEQ ID NO: 138562 - DNA, 17 bp, synthetic construct
  source 1..17: mol_type = other DNA
ctggggccaggagaagc

SEQ ID NO: 138563 - DNA, 17 bp, synthetic construct
  source 1..17: mol_type = other DNA
tggggccaggagaagct

SEQ ID NO: 138564 - DNA, 17 bp, synthetic construct
  source 1..17: mol_type = other DNA
ggggccaggagaagctc

SEQ ID NO: 138565 - DNA, 17 bp, synthetic construct
  source 1..17: mol_type = other DNA
gggccaggagaagctca

SEQ ID NO: 138566 - DNA, 17 bp, synthetic construct
  source 1..17: mol_type = other DNA
ggccaggagaagctcag

SEQ ID NO: 138567 - DNA, 17 bp, synthetic construct
  source 1..17: mol_type = other DNA
gccaggagaagctcagg

SEQ ID NO: 138568 - DNA, 17 bp, synthetic construct
  source 1..17: mol_type = other DNA
ccaggagaagctcagga

SEQ ID NO: 138569 - DNA, 17 bp, synthetic construct
  source 1..17: mol_type = other DNA
caggagaagctcaggat

SEQ ID NO: 138570 - DNA, 17 bp, synthetic construct
  source 1..17: mol_type = other DNA
aggagaagctcaggatg

SEQ ID NO: 138571 - DNA, 17 bp, synthetic construct
  source 1..17: mol_type = other DNA
ggagaagctcaggatgg

SEQ ID NO: 138572 - DNA, 17 bp, synthetic construct
  source 1..17: mol_type = other DNA
gagaagctcaggatgga

SEQ ID NO: 138573 - DNA, 17 bp, synthetic construct
  source 1..17: mol_type = other DNA
agaagctcaggatggaa

SEQ ID NO: 138574 - DNA, 17 bp, synthetic construct
  source 1..17: mol_type = other DNA
gaagctcaggatggaag

SEQ ID NO: 138575 - DNA, 17 bp, synthetic construct
  source 1..17: mol_type = other DNA
aagctcaggatggaagc

SEQ ID NO: 138576 - DNA, 17 bp, synthetic construct
  source 1..17: mol_type = other DNA
agctcaggatggaagcg

SEQ ID NO: 138577 - DNA, 17 bp, synthetic construct
  source 1..17: mol_type = other DNA
gctcaggatggaagcgg

SEQ ID NO: 138578 - DNA, 17 bp, synthetic construct
  source 1..17: mol_type = other DNA
ctcaggatggaagcggg

SEQ ID NO: 138579 - DNA, 17 bp, synthetic construct
  source 1..17: mol_type = other DNA
tcaggatggaagcggga

SEQ ID NO: 138580 - DNA, 17 bp, synthetic construct
  source 1..17: mol_type = other DNA
caggatggaagcgggag

SEQ ID NO: 138581 - DNA, 17 bp, synthetic construct
  source 1..17: mol_type = other DNA
aggatggaagcgggagc

SEQ ID NO: 138582 - DNA, 17 bp, synthetic construct
  source 1..17: mol_type = other DNA
ggatggaagcgggagcc

SEQ ID NO: 138583 - DNA, 17 bp, synthetic construct
  source 1..17: mol_type = other DNA
gatggaagcgggagccc

SEQ ID NO: 138584 - DNA, 17 bp, synthetic construct
  source 1..17: mol_type = other DNA
atggaagcgggagccca

SEQ ID NO: 138585 - DNA, 17 bp, synthetic construct
  source 1..17: mol_type = other DNA
tggaagcgggagcccag

SEQ ID NO: 138586 - DNA, 17 bp, synthetic construct
  source 1..17: mol_type = other DNA
ggaagcgggagcccaga

SEQ ID NO: 138587 - DNA, 17 bp, synthetic construct
  source 1..17: mol_type = other DNA
gaagcgggagcccagag

SEQ ID NO: 138588 - DNA, 17 bp, synthetic construct
  source 1..17: mol_type = other DNA
aagcgggagcccagagg

SEQ ID NO: 138589 - DNA, 17 bp, synthetic construct
  source 1..17: mol_type = other DNA
agcgggagcccagagga

SEQ ID NO: 138590 - DNA, 17 bp, synthetic construct
  source 1..17: mol_type = other DNA
gcgggagcccagaggag

SEQ ID NO: 138591 - DNA, 17 bp, synthetic construct
  source 1..17: mol_type = other DNA
cgggagcccagaggagc

SEQ ID NO: 138592 - DNA, 17 bp, synthetic construct
  source 1..17: mol_type = other DNA
gggagcccagaggagct

SEQ ID NO: 138593 - DNA, 17 bp, synthetic construct
  source 1..17: mol_type = other DNA
ggagcccagaggagctt

SEQ ID NO: 138594 - DNA, 17 bp, synthetic construct
  source 1..17: mol_type = other DNA
gagcccagaggagcttt

SEQ ID NO: 138595 - DNA, 17 bp, synthetic construct
  source 1..17: mol_type = other DNA
agcccagaggagctttt

SEQ ID NO: 138596 - DNA, 17 bp, synthetic construct
  source 1..17: mol_type = other DNA
gcccagaggagcttttg

SEQ ID NO: 138597 - DNA, 17 bp, synthetic construct
  source 1..17: mol_type = other DNA
cccagaggagcttttgt

SEQ ID NO: 138598 - DNA, 17 bp, synthetic construct
  source 1..17: mol_type = other DNA
ccagaggagcttttgtc

SEQ ID NO: 138599 - DNA, 17 bp, synthetic construct
  source 1..17: mol_type = other DNA
cagaggagcttttgtct

SEQ ID NO: 138600 - DNA, 17 bp, synthetic construct
  source 1..17: mol_type = other DNA
agaggagcttttgtctc

SEQ ID NO: 138601 - DNA, 17 bp, synthetic construct
  source 1..17: mol_type = other DNA
gaggagcttttgtctcc

SEQ ID NO: 138602 - DNA, 17 bp, synthetic construct
  source 1..17: mol_type = other DNA
aggagcttttgtctcct

SEQ ID NO: 138603 - DNA, 17 bp, synthetic construct
  source 1..17: mol_type = other DNA
ggagcttttgtctcctg

SEQ ID NO: 138604 - DNA, 17 bp, synthetic construct
  source 1..17: mol_type = other DNA
gagcttttgtctcctgg

SEQ ID NO: 138605 - DNA, 17 bp, synthetic construct
  source 1..17: mol_type = other DNA
agcttttgtctcctggg

SEQ ID NO: 138606 - DNA, 17 bp, synthetic construct
  source 1..17: mol_type = other DNA
gcttttgtctcctgggt

SEQ ID NO: 138607 - DNA, 17 bp, synthetic construct
  source 1..17: mol_type = other DNA
cttttgtctcctgggtc

SEQ ID NO: 138608 - DNA, 17 bp, synthetic construct
  source 1..17: mol_type = other DNA
ttttgtctcctgggtcc

SEQ ID NO: 138609 - DNA, 17 bp, synthetic construct
  source 1..17: mol_type = other DNA
tttgtctcctgggtcct

SEQ ID NO: 138610 - DNA, 17 bp, synthetic construct
  source 1..17: mol_type = other DNA
ttgtctcctgggtccta

SEQ ID NO: 138611 - DNA, 17 bp, synthetic construct
  source 1..17: mol_type = other DNA
tgtctcctgggtcctaa

SEQ ID NO: 138612 - DNA, 17 bp, synthetic construct
  source 1..17: mol_type = other DNA
gtctcctgggtcctaac

SEQ ID NO: 138613 - DNA, 17 bp, synthetic construct
  source 1..17: mol_type = other DNA
tctcctgggtcctaaca

SEQ ID NO: 138614 - DNA, 17 bp, synthetic construct
  source 1..17: mol_type = other DNA
ctcctgggtcctaacag

SEQ ID NO: 138615 - DNA, 17 bp, synthetic construct
  source 1..17: mol_type = other DNA
tcctgggtcctaacagc

SEQ ID NO: 138616 - DNA, 17 bp, synthetic construct
  source 1..17: mol_type = other DNA
cctgggtcctaacagcg

SEQ ID NO: 138617 - DNA, 17 bp, synthetic construct
  source 1..17: mol_type = other DNA
ctgggtcctaacagcgg

SEQ ID NO: 138618 - DNA, 17 bp, synthetic construct
  source 1..17: mol_type = other DNA
tgggtcctaacagcggc

SEQ ID NO: 138619 - DNA, 17 bp, synthetic construct
  source 1..17: mol_type = other DNA
gggtcctaacagcggct

SEQ ID NO: 138620 - DNA, 17 bp, synthetic construct
  source 1..17: mol_type = other DNA
ggtcctaacagcggctt

SEQ ID NO: 138621 - DNA, 17 bp, synthetic construct
  source 1..17: mol_type = other DNA
gtcctaacagcggcttc

SEQ ID NO: 138622 - DNA, 17 bp, synthetic construct
  source 1..17: mol_type = other DNA
tcctaacagcggcttcc

SEQ ID NO: 138623 - DNA, 17 bp, synthetic construct
  source 1..17: mol_type = other DNA
cctaacagcggcttcca

SEQ ID NO: 138624 - DNA, 17 bp, synthetic construct
  source 1..17: mol_type = other DNA
ctaacagcggcttccat

SEQ ID NO: 138625 - DNA, 17 bp, synthetic construct
  source 1..17: mol_type = other DNA
taacagcggcttccatc

SEQ ID NO: 138626 - DNA, 17 bp, synthetic construct
  source 1..17: mol_type = other DNA
aacagcggcttccatca

SEQ ID NO: 138627 - DNA, 17 bp, synthetic construct
  source 1..17: mol_type = other DNA
acagcggcttccatcac

SEQ ID NO: 138628 - DNA, 17 bp, synthetic construct
  source 1..17: mol_type = other DNA
cagcggcttccatcacc

SEQ ID NO: 138629 - DNA, 17 bp, synthetic construct
  source 1..17: mol_type = other DNA
agcggcttccatcaccg

SEQ ID NO: 138630 - DNA, 17 bp, synthetic construct
  source 1..17: mol_type = other DNA
gcggcttccatcaccgt

SEQ ID NO: 138631 - DNA, 17 bp, synthetic construct
  source 1..17: mol_type = other DNA
cggcttccatcaccgtg

SEQ ID NO: 138632 - DNA, 17 bp, synthetic construct
  source 1..17: mol_type = other DNA
ggcttccatcaccgtgc

SEQ ID NO: 138633 - DNA, 17 bp, synthetic construct
  source 1..17: mol_type = other DNA
gcttccatcaccgtgcg

SEQ ID NO: 138634 - DNA, 17 bp, synthetic construct
  source 1..17: mol_type = other DNA
cttccatcaccgtgcgg

SEQ ID NO: 138635 - DNA, 17 bp, synthetic construct
  source 1..17: mol_type = other DNA
ttccatcaccgtgcggg

SEQ ID NO: 138636 - DNA, 17 bp, synthetic construct
  source 1..17: mol_type = other DNA
tccatcaccgtgcggga

SEQ ID NO: 138637 - DNA, 17 bp, synthetic construct
  source 1..17: mol_type = other DNA
ccatcaccgtgcgggac

SEQ ID NO: 138638 - DNA, 17 bp, synthetic construct
  source 1..17: mol_type = other DNA
catcaccgtgcgggacc

SEQ ID NO: 138639 - DNA, 17 bp, synthetic construct
  source 1..17: mol_type = other DNA
atcaccgtgcgggaccc

SEQ ID NO: 138640 - DNA, 17 bp, synthetic construct
  source 1..17: mol_type = other DNA
tcaccgtgcgggaccca

SEQ ID NO: 138641 - DNA, 17 bp, synthetic construct
  source 1..17: mol_type = other DNA
caccgtgcgggacccac

SEQ ID NO: 138642 - DNA, 17 bp, synthetic construct
  source 1..17: mol_type = other DNA
accgtgcgggacccacc

SEQ ID NO: 138643 - DNA, 17 bp, synthetic construct
  source 1..17: mol_type = other DNA
ccgtgcgggacccaccg

SEQ ID NO: 138644 - DNA, 17 bp, synthetic construct
  source 1..17: mol_type = other DNA
cgtgcgggacccaccgc

SEQ ID NO: 138645 - DNA, 17 bp, synthetic construct
  source 1..17: mol_type = other DNA
gtgcgggacccaccgct

SEQ ID NO: 138646 - DNA, 17 bp, synthetic construct
  source 1..17: mol_type = other DNA
tgcgggacccaccgcta

SEQ ID NO: 138647 - DNA, 17 bp, synthetic construct
  source 1..17: mol_type = other DNA
gcgggacccaccgctaa

SEQ ID NO: 138648 - DNA, 17 bp, synthetic construct
  source 1..17: mol_type = other DNA
cgggacccaccgctaag

SEQ ID NO: 138649 - DNA, 17 bp, synthetic construct
  source 1..17: mol_type = other DNA
gggacccaccgctaaga

SEQ ID NO: 138650 - DNA, 17 bp, synthetic construct
  source 1..17: mol_type = other DNA
ggacccaccgctaagag

SEQ ID NO: 138651 - DNA, 17 bp, synthetic construct
  source 1..17: mol_type = other DNA
gacccaccgctaagagg

SEQ ID NO: 138652 - DNA, 17 bp, synthetic construct
  source 1..17: mol_type = other DNA
acccaccgctaagaggt

SEQ ID NO: 138653 - DNA, 17 bp, synthetic construct
  source 1..17: mol_type = other DNA
cccaccgctaagaggtc

SEQ ID NO: 138654 - DNA, 17 bp, synthetic construct
  source 1..17: mol_type = other DNA
ccaccgctaagaggtca

SEQ ID NO: 138655 - DNA, 17 bp, synthetic construct
  source 1..17: mol_type = other DNA
caccgctaagaggtcac

SEQ ID NO: 138656 - DNA, 17 bp, synthetic construct
  source 1..17: mol_type = other DNA
accgctaagaggtcacg

SEQ ID NO: 138657 - DNA, 17 bp, synthetic construct
  source 1..17: mol_type = other DNA
ccgctaagaggtcacgg

SEQ ID NO: 138658 - DNA, 17 bp, synthetic construct
  source 1..17: mol_type = other DNA
cgctaagaggtcacggc

SEQ ID NO: 138659 - DNA, 17 bp, synthetic construct
  source 1..17: mol_type = other DNA
gctaagaggtcacggcg

SEQ ID NO: 138660 - DNA, 17 bp, synthetic construct
  source 1..17: mol_type = other DNA
ctaagaggtcacggcgt

SEQ ID NO: 138661 - DNA, 17 bp, synthetic construct
  source 1..17: mol_type = other DNA
taagaggtcacggcgtt

SEQ ID NO: 138662 - DNA, 17 bp, synthetic construct
  source 1..17: mol_type = other DNA
aagaggtcacggcgttc

SEQ ID NO: 138663 - DNA, 17 bp, synthetic construct
  source 1..17: mol_type = other DNA
agaggtcacggcgttct

SEQ ID NO: 138664 - DNA, 17 bp, synthetic construct
  source 1..17: mol_type = other DNA
gaggtcacggcgttctc

SEQ ID NO: 138665 - DNA, 17 bp, synthetic construct
  source 1..17: mol_type = other DNA
aggtcacggcgttctca

SEQ ID NO: 138666 - DNA, 17 bp, synthetic construct
  source 1..17: mol_type = other DNA
ggtcacggcgttctcac

SEQ ID NO: 138667 - DNA, 17 bp, synthetic construct
  source 1..17: mol_type = other DNA
gtcacggcgttctcact

SEQ ID NO: 138668 - DNA, 17 bp, synthetic construct
  source 1..17: mol_type = other DNA
tcacggcgttctcactc

SEQ ID NO: 138669 - DNA, 17 bp, synthetic construct
  source 1..17: mol_type = other DNA
cacggcgttctcactcc

SEQ ID NO: 138670 - DNA, 17 bp, synthetic construct
  source 1..17: mol_type = other DNA
acggcgttctcactcct

SEQ ID NO: 138671 - DNA, 17 bp, synthetic construct
  source 1..17: mol_type = other DNA
cggcgttctcactcctc

SEQ ID NO: 138672 - DNA, 17 bp, synthetic construct
  source 1..17: mol_type = other DNA
ggcgttctcactcctcc

SEQ ID NO: 138673 - DNA, 17 bp, synthetic construct
  source 1..17: mol_type = other DNA
gcgttctcactcctccc

SEQ ID NO: 138674 - DNA, 17 bp, synthetic construct
  source 1..17: mol_type = other DNA
cgttctcactcctcccc

SEQ ID NO: 138675 - DNA, 17 bp, synthetic construct
  source 1..17: mol_type = other DNA
gttctcactcctcccca

SEQ ID NO: 138676 - DNA, 17 bp, synthetic construct
  source 1..17: mol_type = other DNA
ttctcactcctccccat

SEQ ID NO: 138677 - DNA, 17 bp, synthetic construct
  source 1..17: mol_type = other DNA
tctcactcctccccatg

SEQ ID NO: 138678 - DNA, 17 bp, synthetic construct
  source 1..17: mol_type = other DNA
ctcactcctccccatgt

SEQ ID NO: 138679 - DNA, 17 bp, synthetic construct
  source 1..17: mol_type = other DNA
tcactcctccccatgtc

SEQ ID NO: 138680 - DNA, 17 bp, synthetic construct
  source 1..17: mol_type = other DNA
cactcctccccatgtcc

SEQ ID NO: 138681 - DNA, 17 bp, synthetic construct
  source 1..17: mol_type = other DNA
actcctccccatgtcct

SEQ ID NO: 138682 - DNA, 17 bp, synthetic construct
  source 1..17: mol_type = other DNA
ctcctccccatgtcctt

SEQ ID NO: 138683 - DNA, 17 bp, synthetic construct
  source 1..17: mol_type = other DNA
tcctccccatgtccttg

SEQ ID NO: 138684 - DNA, 17 bp, synthetic construct
  source 1..17: mol_type = other DNA
cctccccatgtccttgg

SEQ ID NO: 138685 - DNA, 17 bp, synthetic construct
  source 1..17: mol_type = other DNA
ctccccatgtccttggc

SEQ ID NO: 138686 - DNA, 17 bp, synthetic construct
  source 1..17: mol_type = other DNA
tccccatgtccttggcc

SEQ ID NO: 138687 - DNA, 17 bp, synthetic construct
  source 1..17: mol_type = other DNA
ccccatgtccttggccc

SEQ ID NO: 138688 - DNA, 17 bp, synthetic construct
  source 1..17: mol_type = other DNA
cccatgtccttggccca

SEQ ID NO: 138689 - DNA, 17 bp, synthetic construct
  source 1..17: mol_type = other DNA
ccatgtccttggcccag

SEQ ID NO: 138690 - DNA, 17 bp, synthetic construct
  source 1..17: mol_type = other DNA
catgtccttggcccagg

SEQ ID NO: 138691 - DNA, 17 bp, synthetic construct
  source 1..17: mol_type = other DNA
atgtccttggcccaggg

SEQ ID NO: 138692 - DNA, 17 bp, synthetic construct
  source 1..17: mol_type = other DNA
tgtccttggcccagggc

SEQ ID NO: 138693 - DNA, 17 bp, synthetic construct
  source 1..17: mol_type = other DNA
gtccttggcccagggct

SEQ ID NO: 138694 - DNA, 17 bp, synthetic construct
  source 1..17: mol_type = other DNA
tccttggcccagggctg

SEQ ID NO: 138695 - DNA, 17 bp, synthetic construct
  source 1..17: mol_type = other DNA
ccttggcccagggctgc

SEQ ID NO: 138696 - DNA, 17 bp, synthetic construct
  source 1..17: mol_type = other DNA
cttggcccagggctgct

SEQ ID NO: 138697 - DNA, 17 bp, synthetic construct
  source 1..17: mol_type = other DNA
ttggcccagggctgctg

SEQ ID NO: 138698 - DNA, 17 bp, synthetic construct
  source 1..17: mol_type = other DNA
tggcccagggctgctgt

SEQ ID NO: 138699 - DNA, 17 bp, synthetic construct
  source 1..17: mol_type = other DNA
ggcccagggctgctgtt

SEQ ID NO: 138700 - DNA, 17 bp, synthetic construct
  source 1..17: mol_type = other DNA
gcccagggctgctgttc

SEQ ID NO: 138701 - DNA, 17 bp, synthetic construct
  source 1..17: mol_type = other DNA
cccagggctgctgttcc

SEQ ID NO: 138702 - DNA, 17 bp, synthetic construct
  source 1..17: mol_type = other DNA
ccagggctgctgttcca

SEQ ID NO: 138703 - DNA, 17 bp, synthetic construct
  source 1..17: mol_type = other DNA
cagggctgctgttccaa

SEQ ID NO: 138704 - DNA, 17 bp, synthetic construct
  source 1..17: mol_type = other DNA
agggctgctgttccaaa

SEQ ID NO: 138705 - DNA, 17 bp, synthetic construct
  source 1..17: mol_type = other DNA
gggctgctgttccaaac

SEQ ID NO: 138706 - DNA, 17 bp, synthetic construct
  source 1..17: mol_type = other DNA
ggctgctgttccaaacc

SEQ ID NO: 138707 - DNA, 17 bp, synthetic construct
  source 1..17: mol_type = other DNA
gctgctgttccaaaccg

SEQ ID NO: 138708 - DNA, 17 bp, synthetic construct
  source 1..17: mol_type = other DNA
ctgctgttccaaaccgc

SEQ ID NO: 138709 - DNA, 17 bp, synthetic construct
  source 1..17: mol_type = other DNA
tgctgttccaaaccgcc

SEQ ID NO: 138710 - DNA, 17 bp, synthetic construct
  source 1..17: mol_type = other DNA
gctgttccaaaccgcca

SEQ ID NO: 138711 - DNA, 17 bp, synthetic construct
  source 1..17: mol_type = other DNA
ctgttccaaaccgccac

SEQ ID NO: 138712 - DNA, 17 bp, synthetic construct
  source 1..17: mol_type = other DNA
tgttccaaaccgccaca

SEQ ID NO: 138713 - DNA, 17 bp, synthetic construct
  source 1..17: mol_type = other DNA
gttccaaaccgccacaa

SEQ ID NO: 138714 - DNA, 17 bp, synthetic construct
  source 1..17: mol_type = other DNA
ttccaaaccgccacaag

SEQ ID NO: 138715 - DNA, 17 bp, synthetic construct
  source 1..17: mol_type = other DNA
tccaaaccgccacaagc

SEQ ID NO: 138716 - DNA, 17 bp, synthetic construct
  source 1..17: mol_type = other DNA
ccaaaccgccacaagct

SEQ ID NO: 138717 - DNA, 17 bp, synthetic construct
  source 1..17: mol_type = other DNA
caaaccgccacaagctg

SEQ ID NO: 138718 - DNA, 17 bp, synthetic construct
  source 1..17: mol_type = other DNA
aaaccgccacaagctgg

SEQ ID NO: 138719 - DNA, 17 bp, synthetic construct
  source 1..17: mol_type = other DNA
aaccgccacaagctggg

SEQ ID NO: 138720 - DNA, 17 bp, synthetic construct
  source 1..17: mol_type = other DNA
accgccacaagctgggg

SEQ ID NO: 138721 - DNA, 17 bp, synthetic construct
  source 1..17: mol_type = other DNA
ccgccacaagctgggga

SEQ ID NO: 138722 - DNA, 17 bp, synthetic construct
  source 1..17: mol_type = other DNA
cgccacaagctggggag

SEQ ID NO: 138723 - DNA, 17 bp, synthetic construct
  source 1..17: mol_type = other DNA
gccacaagctggggagc

SEQ ID NO: 138724 - DNA, 17 bp, synthetic construct
  source 1..17: mol_type = other DNA
ccacaagctggggagct

SEQ ID NO: 138725 - DNA, 17 bp, synthetic construct
  source 1..17: mol_type = other DNA
cacaagctggggagctt

SEQ ID NO: 138726 - DNA, 17 bp, synthetic construct
  source 1..17: mol_type = other DNA
acaagctggggagctta

SEQ ID NO: 138727 - DNA, 17 bp, synthetic construct
  source 1..17: mol_type = other DNA
caagctggggagcttat

SEQ ID NO: 138728 - DNA, 17 bp, synthetic construct
  source 1..17: mol_type = other DNA
aagctggggagcttata

SEQ ID NO: 138729 - DNA, 17 bp, synthetic construct
  source 1..17: mol_type = other DNA
agctggggagcttatac

SEQ ID NO: 138730 - DNA, 17 bp, synthetic construct
  source 1..17: mol_type = other DNA
gctggggagcttataca

SEQ ID NO: 138731 - DNA, 17 bp, synthetic construct
  source 1..17: mol_type = other DNA
ctggggagcttatacaa

SEQ ID NO: 138732 - DNA, 17 bp, synthetic construct
  source 1..17: mol_type = other DNA
tggggagcttatacaac

SEQ ID NO: 138733 - DNA, 17 bp, synthetic construct
  source 1..17: mol_type = other DNA
ggggagcttatacaaca

SEQ ID NO: 138734 - DNA, 17 bp, synthetic construct
  source 1..17: mol_type = other DNA
gggagcttatacaacag

SEQ ID NO: 138735 - DNA, 17 bp, synthetic construct
  source 1..17: mol_type = other DNA
ggagcttatacaacaga

SEQ ID NO: 138736 - DNA, 17 bp, synthetic construct
  source 1..17: mol_type = other DNA
gagcttatacaacagaa

SEQ ID NO: 138737 - DNA, 17 bp, synthetic construct
  source 1..17: mol_type = other DNA
agcttatacaacagaaa

SEQ ID NO: 138738 - DNA, 17 bp, synthetic construct
  source 1..17: mol_type = other DNA
gcttatacaacagaaac

SEQ ID NO: 138739 - DNA, 17 bp, synthetic construct
  source 1..17: mol_type = other DNA
cttatacaacagaaacc

SEQ ID NO: 138740 - DNA, 17 bp, synthetic construct
  source 1..17: mol_type = other DNA
ttatacaacagaaaccc

SEQ ID NO: 138741 - DNA, 17 bp, synthetic construct
  source 1..17: mol_type = other DNA
tatacaacagaaaccca

SEQ ID NO: 138742 - DNA, 17 bp, synthetic construct
  source 1..17: mol_type = other DNA
atacaacagaaacccac

SEQ ID NO: 138743 - DNA, 17 bp, synthetic construct
  source 1..17: mol_type = other DNA
tacaacagaaacccact

SEQ ID NO: 138744 - DNA, 17 bp, synthetic construct
  source 1..17: mol_type = other DNA
acaacagaaacccactc

SEQ ID NO: 138745 - DNA, 17 bp, synthetic construct
  source 1..17: mol_type = other DNA
caacagaaacccactct

SEQ ID NO: 138746 - DNA, 17 bp, synthetic construct
  source 1..17: mol_type = other DNA
aacagaaacccactctc

SEQ ID NO: 138747 - DNA, 17 bp, synthetic construct
  source 1..17: mol_type = other DNA
acagaaacccactctcc

SEQ ID NO: 138748 - DNA, 17 bp, synthetic construct
  source 1..17: mol_type = other DNA
cagaaacccactctccg

SEQ ID NO: 138749 - DNA, 17 bp, synthetic construct
  source 1..17: mol_type = other DNA
agaaacccactctccgt

SEQ ID NO: 138750 - DNA, 17 bp, synthetic construct
  source 1..17: mol_type = other DNA
gaaacccactctccgtc

SEQ ID NO: 138751 - DNA, 17 bp, synthetic construct
  source 1..17: mol_type = other DNA
aaacccactctccgtcc

SEQ ID NO: 138752 - DNA, 17 bp, synthetic construct
  source 1..17: mol_type = other DNA
aacccactctccgtcct

SEQ ID NO: 138753 - DNA, 17 bp, synthetic construct
  source 1..17: mol_type = other DNA
acccactctccgtcctg

SEQ ID NO: 138754 - DNA, 17 bp, synthetic construct
  source 1..17: mol_type = other DNA
cccactctccgtcctgg

SEQ ID NO: 138755 - DNA, 17 bp, synthetic construct
  source 1..17: mol_type = other DNA
ccactctccgtcctgga

SEQ ID NO: 138756 - DNA, 17 bp, synthetic construct
  source 1..17: mol_type = other DNA
cactctccgtcctggag

SEQ ID NO: 138757 - DNA, 17 bp, synthetic construct
  source 1..17: mol_type = other DNA
actctccgtcctggagc

SEQ ID NO: 138758 - DNA, 17 bp, synthetic construct
  source 1..17: mol_type = other DNA
ctctccgtcctggagct

SEQ ID NO: 138759 - DNA, 17 bp, synthetic construct
  source 1..17: mol_type = other DNA
tctccgtcctggagctg

SEQ ID NO: 138760 - DNA, 17 bp, synthetic construct
  source 1..17: mol_type = other DNA
ctccgtcctggagctgg

SEQ ID NO: 138761 - DNA, 17 bp, synthetic construct
  source 1..17: mol_type = other DNA
tccgtcctggagctgga

SEQ ID NO: 138762 - DNA, 17 bp, synthetic construct
  source 1..17: mol_type = other DNA
ccgtcctggagctggaa

SEQ ID NO: 138763 - DNA, 17 bp, synthetic construct
  source 1..17: mol_type = other DNA
cgtcctggagctggaag

SEQ ID NO: 138764 - DNA, 17 bp, synthetic construct
  source 1..17: mol_type = other DNA
gtcctggagctggaagt

SEQ ID NO: 138765 - DNA, 17 bp, synthetic construct
  source 1..17: mol_type = other DNA
tcctggagctggaagtc

SEQ ID NO: 138766 - DNA, 17 bp, synthetic construct
  source 1..17: mol_type = other DNA
cctggagctggaagtct

SEQ ID NO: 138767 - DNA, 17 bp, synthetic construct
  source 1..17: mol_type = other DNA
ctggagctggaagtctg

SEQ ID NO: 138768 - DNA, 17 bp, synthetic construct
  source 1..17: mol_type = other DNA
tggagctggaagtctga

SEQ ID NO: 138769 - DNA, 17 bp, synthetic construct
  source 1..17: mol_type = other DNA
ggagctggaagtctgag

SEQ ID NO: 138770 - DNA, 17 bp, synthetic construct
  source 1..17: mol_type = other DNA
gagctggaagtctgaga

SEQ ID NO: 138771 - DNA, 17 bp, synthetic construct
  source 1..17: mol_type = other DNA
agctggaagtctgagat

SEQ ID NO: 138772 - DNA, 17 bp, synthetic construct
  source 1..17: mol_type = other DNA
gctggaagtctgagatc

SEQ ID NO: 138773 - DNA, 17 bp, synthetic construct
  source 1..17: mol_type = other DNA
ctggaagtctgagatcc

SEQ ID NO: 138774 - DNA, 17 bp, synthetic construct
  source 1..17: mol_type = other DNA
tggaagtctgagatcca

SEQ ID NO: 138775 - DNA, 17 bp, synthetic construct
  source 1..17: mol_type = other DNA
ggaagtctgagatccag

SEQ ID NO: 138776 - DNA, 17 bp, synthetic construct
  source 1..17: mol_type = other DNA
gaagtctgagatccagg

SEQ ID NO: 138777 - DNA, 17 bp, synthetic construct
  source 1..17: mol_type = other DNA
aagtctgagatccaggc

SEQ ID NO: 138778 - DNA, 17 bp, synthetic construct
  source 1..17: mol_type = other DNA
agtctgagatccaggcg

SEQ ID NO: 138779 - DNA, 17 bp, synthetic construct
  source 1..17: mol_type = other DNA
gtctgagatccaggcgg

SEQ ID NO: 138780 - DNA, 17 bp, synthetic construct
  source 1..17: mol_type = other DNA
tctgagatccaggcggg

SEQ ID NO: 138781 - DNA, 17 bp, synthetic construct
  source 1..17: mol_type = other DNA
ctgagatccaggcgggc

SEQ ID NO: 138782 - DNA, 17 bp, synthetic construct
  source 1..17: mol_type = other DNA
tgagatccaggcgggca

SEQ ID NO: 138783 - DNA, 17 bp, synthetic construct
  source 1..17: mol_type = other DNA
gagatccaggcgggcag

SEQ ID NO: 138784 - DNA, 17 bp, synthetic construct
  source 1..17: mol_type = other DNA
agatccaggcgggcagg

SEQ ID NO: 138785 - DNA, 17 bp, synthetic construct
  source 1..17: mol_type = other DNA
gatccaggcgggcaggg

SEQ ID NO: 138786 - DNA, 17 bp, synthetic construct
  source 1..17: mol_type = other DNA
atccaggcgggcagggg

SEQ ID NO: 138787 - DNA, 17 bp, synthetic construct
  source 1..17: mol_type = other DNA
tccaggcgggcagggga

SEQ ID NO: 138788 - DNA, 17 bp, synthetic construct
  source 1..17: mol_type = other DNA
ccaggcgggcaggggat

SEQ ID NO: 138789 - DNA, 17 bp, synthetic construct
  source 1..17: mol_type = other DNA
caggcgggcaggggata

SEQ ID NO: 138790 - DNA, 17 bp, synthetic construct
  source 1..17: mol_type = other DNA
aggcgggcaggggatag

SEQ ID NO: 138791 - DNA, 17 bp, synthetic construct
  source 1..17: mol_type = other DNA
ggcgggcaggggataga

SEQ ID NO: 138792 - DNA, 17 bp, synthetic construct
  source 1..17: mol_type = other DNA
gcgggcaggggatagac

SEQ ID NO: 138793 - DNA, 17 bp, synthetic construct
  source 1..17: mol_type = other DNA
cgggcaggggatagact

SEQ ID NO: 138794 - DNA, 17 bp, synthetic construct
  source 1..17: mol_type = other DNA
gggcaggggatagactc

SEQ ID NO: 138795 - DNA, 17 bp, synthetic construct
  source 1..17: mol_type = other DNA
ggcaggggatagactcc

SEQ ID NO: 138796 - DNA, 17 bp, synthetic construct
  source 1..17: mol_type = other DNA
gcaggggatagactccc

SEQ ID NO: 138797 - DNA, 17 bp, synthetic construct
  source 1..17: mol_type = other DNA
caggggatagactccct

SEQ ID NO: 138798 - DNA, 17 bp, synthetic construct
  source 1..17: mol_type = other DNA
aggggatagactccctg

SEQ ID NO: 138799 - DNA, 17 bp, synthetic construct
  source 1..17: mol_type = other DNA
ggggatagactccctgc

SEQ ID NO: 138800 - DNA, 17 bp, synthetic construct
  source 1..17: mol_type = other DNA
gggatagactccctgct

SEQ ID NO: 138801 - DNA, 17 bp, synthetic construct
  source 1..17: mol_type = other DNA
ggatagactccctgctg

SEQ ID NO: 138802 - DNA, 17 bp, synthetic construct
  source 1..17: mol_type = other DNA
gatagactccctgctga

SEQ ID NO: 138803 - DNA, 17 bp, synthetic construct
  source 1..17: mol_type = other DNA
atagactccctgctgag

SEQ ID NO: 138804 - DNA, 17 bp, synthetic construct
  source 1..17: mol_type = other DNA
tagactccctgctgagg

SEQ ID NO: 138805 - DNA, 17 bp, synthetic construct
  source 1..17: mol_type = other DNA
agactccctgctgaggg

SEQ ID NO: 138806 - DNA, 17 bp, synthetic construct
  source 1..17: mol_type = other DNA
gactccctgctgagggt

SEQ ID NO: 138807 - DNA, 17 bp, synthetic construct
  source 1..17: mol_type = other DNA
actccctgctgagggtc

SEQ ID NO: 138808 - DNA, 17 bp, synthetic construct
  source 1..17: mol_type = other DNA
ctccctgctgagggtct

SEQ ID NO: 138809 - DNA, 17 bp, synthetic construct
  source 1..17: mol_type = other DNA
tccctgctgagggtctg

SEQ ID NO: 138810 - DNA, 17 bp, synthetic construct
  source 1..17: mol_type = other DNA
ccctgctgagggtctgg

SEQ ID NO: 138811 - DNA, 17 bp, synthetic construct
  source 1..17: mol_type = other DNA
cctgctgagggtctggg

SEQ ID NO: 138812 - DNA, 17 bp, synthetic construct
  source 1..17: mol_type = other DNA
ctgctgagggtctgggg

SEQ ID NO: 138813 - DNA, 17 bp, synthetic construct
  source 1..17: mol_type = other DNA
tgctgagggtctgggga

SEQ ID NO: 138814 - DNA, 17 bp, synthetic construct
  source 1..17: mol_type = other DNA
gctgagggtctggggag

SEQ ID NO: 138815 - DNA, 17 bp, synthetic construct
  source 1..17: mol_type = other DNA
ctgagggtctggggagg

SEQ ID NO: 138816 - DNA, 17 bp, synthetic construct
  source 1..17: mol_type = other DNA
tgagggtctggggaggt

SEQ ID NO: 138817 - DNA, 17 bp, synthetic construct
  source 1..17: mol_type = other DNA
gagggtctggggaggtc

SEQ ID NO: 138818 - DNA, 17 bp, synthetic construct
  source 1..17: mol_type = other DNA
agggtctggggaggtcc

SEQ ID NO: 138819 - DNA, 17 bp, synthetic construct
  source 1..17: mol_type = other DNA
gggtctggggaggtcct

SEQ ID NO: 138820 - DNA, 17 bp, synthetic construct
  source 1..17: mol_type = other DNA
ggtctggggaggtcctt

SEQ ID NO: 138821 - DNA, 17 bp, synthetic construct
  source 1..17: mol_type = other DNA
gtctggggaggtccttc

SEQ ID NO: 138822 - DNA, 17 bp, synthetic construct
  source 1..17: mol_type = other DNA
tctggggaggtccttcc

SEQ ID NO: 138823 - DNA, 17 bp, synthetic construct
  source 1..17: mol_type = other DNA
ctggggaggtccttcct

SEQ ID NO: 138824 - DNA, 17 bp, synthetic construct
  source 1..17: mol_type = other DNA
tggggaggtccttcctg

SEQ ID NO: 138825 - DNA, 17 bp, synthetic construct
  source 1..17: mol_type = other DNA
ggggaggtccttcctgc

SEQ ID NO: 138826 - DNA, 17 bp, synthetic construct
  source 1..17: mol_type = other DNA
gggaggtccttcctgcc

SEQ ID NO: 138827 - DNA, 17 bp, synthetic construct
  source 1..17: mol_type = other DNA
ggaggtccttcctgcct

SEQ ID NO: 138828 - DNA, 17 bp, synthetic construct
  source 1..17: mol_type = other DNA
gaggtccttcctgcctc

SEQ ID NO: 138829 - DNA, 17 bp, synthetic construct
  source 1..17: mol_type = other DNA
aggtccttcctgcctct

SEQ ID NO: 138830 - DNA, 17 bp, synthetic construct
  source 1..17: mol_type = other DNA
ggtccttcctgcctctc

SEQ ID NO: 138831 - DNA, 17 bp, synthetic construct
  source 1..17: mol_type = other DNA
gtccttcctgcctctcc

SEQ ID NO: 138832 - DNA, 17 bp, synthetic construct
  source 1..17: mol_type = other DNA
tccttcctgcctctccc

SEQ ID NO: 138833 - DNA, 17 bp, synthetic construct
  source 1..17: mol_type = other DNA
ccttcctgcctctccca

SEQ ID NO: 138834 - DNA, 17 bp, synthetic construct
  source 1..17: mol_type = other DNA
cttcctgcctctcccag

SEQ ID NO: 138835 - DNA, 17 bp, synthetic construct
  source 1..17: mol_type = other DNA
ttcctgcctctcccagc

SEQ ID NO: 138836 - DNA, 17 bp, synthetic construct
  source 1..17: mol_type = other DNA
tcctgcctctcccagct

SEQ ID NO: 138837 - DNA, 17 bp, synthetic construct
  source 1..17: mol_type = other DNA
cctgcctctcccagctt

SEQ ID NO: 138838 - DNA, 17 bp, synthetic construct
  source 1..17: mol_type = other DNA
ctgcctctcccagcttt

SEQ ID NO: 138839 - DNA, 17 bp, synthetic construct
  source 1..17: mol_type = other DNA
tgcctctcccagctttg

SEQ ID NO: 138840 - DNA, 17 bp, synthetic construct
  source 1..17: mol_type = other DNA
gcctctcccagctttgg

SEQ ID NO: 138841 - DNA, 17 bp, synthetic construct
  source 1..17: mol_type = other DNA
cctctcccagctttggg

SEQ ID NO: 138842 - DNA, 17 bp, synthetic construct
  source 1..17: mol_type = other DNA
ctctcccagctttgggg

SEQ ID NO: 138843 - DNA, 17 bp, synthetic construct
  source 1..17: mol_type = other DNA
tctcccagctttgggga

SEQ ID NO: 138844 - DNA, 17 bp, synthetic construct
  source 1..17: mol_type = other DNA
ctcccagctttggggac

SEQ ID NO: 138845 - DNA, 17 bp, synthetic construct
  source 1..17: mol_type = other DNA
tcccagctttggggact

SEQ ID NO: 138846 - DNA, 17 bp, synthetic construct
  source 1..17: mol_type = other DNA
cccagctttggggactc

SEQ ID NO: 138847 - DNA, 17 bp, synthetic construct
  source 1..17: mol_type = other DNA
ccagctttggggactcc

SEQ ID NO: 138848 - DNA, 17 bp, synthetic construct
  source 1..17: mol_type = other DNA
cagctttggggactcca

SEQ ID NO: 138849 - DNA, 17 bp, synthetic construct
  source 1..17: mol_type = other DNA
agctttggggactccag

SEQ ID NO: 138850 - DNA, 17 bp, synthetic construct
  source 1..17: mol_type = other DNA
gctttggggactccagg

SEQ ID NO: 138851 - DNA, 17 bp, synthetic construct
  source 1..17: mol_type = other DNA
ctttggggactccaggt

SEQ ID NO: 138852 - DNA, 17 bp, synthetic construct
  source 1..17: mol_type = other DNA
tttggggactccaggtg

SEQ ID NO: 138853 - DNA, 17 bp, synthetic construct
  source 1..17: mol_type = other DNA
ttggggactccaggtgt

SEQ ID NO: 138854 - DNA, 17 bp, synthetic construct
  source 1..17: mol_type = other DNA
tggggactccaggtgtc

SEQ ID NO: 138855 - DNA, 17 bp, synthetic construct
  source 1..17: mol_type = other DNA
ggggactccaggtgtcc

SEQ ID NO: 138856 - DNA, 17 bp, synthetic construct
  source 1..17: mol_type = other DNA
gggactccaggtgtcct

SEQ ID NO: 138857 - DNA, 17 bp, synthetic construct
  source 1..17: mol_type = other DNA
ggactccaggtgtcctt

SEQ ID NO: 138858 - DNA, 17 bp, synthetic construct
  source 1..17: mol_type = other DNA
gactccaggtgtccttt

SEQ ID NO: 138859 - DNA, 17 bp, synthetic construct
  source 1..17: mol_type = other DNA
actccaggtgtcctttg

SEQ ID NO: 138860 - DNA, 17 bp, synthetic construct
  source 1..17: mol_type = other DNA
ctccaggtgtcctttgg

SEQ ID NO: 138861 - DNA, 17 bp, synthetic construct
  source 1..17: mol_type = other DNA
tccaggtgtcctttggc

SEQ ID NO: 138862 - DNA, 17 bp, synthetic construct
  source 1..17: mol_type = other DNA
ccaggtgtcctttggct

SEQ ID NO: 138863 - DNA, 17 bp, synthetic construct
  source 1..17: mol_type = other DNA
caggtgtcctttggctg

SEQ ID NO: 138864 - DNA, 17 bp, synthetic construct
  source 1..17: mol_type = other DNA
aggtgtcctttggctgt

SEQ ID NO: 138865 - DNA, 17 bp, synthetic construct
  source 1..17: mol_type = other DNA
ggtgtcctttggctgtg

SEQ ID NO: 138866 - DNA, 17 bp, synthetic construct
  source 1..17: mol_type = other DNA
gtgtcctttggctgtgg

SEQ ID NO: 138867 - DNA, 17 bp, synthetic construct
  source 1..17: mol_type = other DNA
tgtcctttggctgtggc

SEQ ID NO: 138868 - DNA, 17 bp, synthetic construct
  source 1..17: mol_type = other DNA
gtcctttggctgtggct

SEQ ID NO: 138869 - DNA, 17 bp, synthetic construct
  source 1..17: mol_type = other DNA
tcctttggctgtggctg

SEQ ID NO: 138870 - DNA, 17 bp, synthetic construct
  source 1..17: mol_type = other DNA
cctttggctgtggctgc

SEQ ID NO: 138871 - DNA, 17 bp, synthetic construct
  source 1..17: mol_type = other DNA
ctttggctgtggctgca

SEQ ID NO: 138872 - DNA, 17 bp, synthetic construct
  source 1..17: mol_type = other DNA
tttggctgtggctgcat

SEQ ID NO: 138873 - DNA, 17 bp, synthetic construct
  source 1..17: mol_type = other DNA
ttggctgtggctgcatc

SEQ ID NO: 138874 - DNA, 17 bp, synthetic construct
  source 1..17: mol_type = other DNA
tggctgtggctgcatcc

SEQ ID NO: 138875 - DNA, 17 bp, synthetic construct
  source 1..17: mol_type = other DNA
ggctgtggctgcatccc

SEQ ID NO: 138876 - DNA, 17 bp, synthetic construct
  source 1..17: mol_type = other DNA
gctgtggctgcatccct

SEQ ID NO: 138877 - DNA, 17 bp, synthetic construct
  source 1..17: mol_type = other DNA
ctgtggctgcatccctc

SEQ ID NO: 138878 - DNA, 17 bp, synthetic construct
  source 1..17: mol_type = other DNA
tgtggctgcatccctcc

SEQ ID NO: 138879 - DNA, 17 bp, synthetic construct
  source 1..17: mol_type = other DNA
gtggctgcatccctccg

SEQ ID NO: 138880 - DNA, 17 bp, synthetic construct
  source 1..17: mol_type = other DNA
tggctgcatccctccga

SEQ ID NO: 138881 - DNA, 17 bp, synthetic construct
  source 1..17: mol_type = other DNA
ggctgcatccctccgat

SEQ ID NO: 138882 - DNA, 17 bp, synthetic construct
  source 1..17: mol_type = other DNA
gctgcatccctccgatc

SEQ ID NO: 138883 - DNA, 17 bp, synthetic construct
  source 1..17: mol_type = other DNA
ctgcatccctccgatct

SEQ ID NO: 138884 - DNA, 17 bp, synthetic construct
  source 1..17: mol_type = other DNA
tgcatccctccgatctc

SEQ ID NO: 138885 - DNA, 17 bp, synthetic construct
  source 1..17: mol_type = other DNA
gcatccctccgatctct

SEQ ID NO: 138886 - DNA, 17 bp, synthetic construct
  source 1..17: mol_type = other DNA
catccctccgatctctg

SEQ ID NO: 138887 - DNA, 17 bp, synthetic construct
  source 1..17: mol_type = other DNA
atccctccgatctctgc

SEQ ID NO: 138888 - DNA, 17 bp, synthetic construct
  source 1..17: mol_type = other DNA
tccctccgatctctgcc

SEQ ID NO: 138889 - DNA, 17 bp, synthetic construct
  source 1..17: mol_type = other DNA
ccctccgatctctgcct

SEQ ID NO: 138890 - DNA, 17 bp, synthetic construct
  source 1..17: mol_type = other DNA
cctccgatctctgcctc

SEQ ID NO: 138891 - DNA, 17 bp, synthetic construct
  source 1..17: mol_type = other DNA
ctccgatctctgcctct

SEQ ID NO: 138892 - DNA, 17 bp, synthetic construct
  source 1..17: mol_type = other DNA
tccgatctctgcctctg

SEQ ID NO: 138893 - DNA, 17 bp, synthetic construct
  source 1..17: mol_type = other DNA
ccgatctctgcctctgc

SEQ ID NO: 138894 - DNA, 17 bp, synthetic construct
  source 1..17: mol_type = other DNA
cgatctctgcctctgcc

SEQ ID NO: 138895 - DNA, 17 bp, synthetic construct
  source 1..17: mol_type = other DNA
gatctctgcctctgcct

SEQ ID NO: 138896 - DNA, 17 bp, synthetic construct
  source 1..17: mol_type = other DNA
atctctgcctctgcctc

SEQ ID NO: 138897 - DNA, 17 bp, synthetic construct
  source 1..17: mol_type = other DNA
tctctgcctctgcctct

SEQ ID NO: 138898 - DNA, 17 bp, synthetic construct
  source 1..17: mol_type = other DNA
ctctgcctctgcctctc

SEQ ID NO: 138899 - DNA, 17 bp, synthetic construct
  source 1..17: mol_type = other DNA
tctgcctctgcctctct

SEQ ID NO: 138900 - DNA, 17 bp, synthetic construct
  source 1..17: mol_type = other DNA
ctgcctctgcctctctg

SEQ ID NO: 138901 - DNA, 17 bp, synthetic construct
  source 1..17: mol_type = other DNA
tgcctctgcctctctgt

SEQ ID NO: 138902 - DNA, 17 bp, synthetic construct
  source 1..17: mol_type = other DNA
gcctctgcctctctgtg

SEQ ID NO: 138903 - DNA, 17 bp, synthetic construct
  source 1..17: mol_type = other DNA
cctctgcctctctgtgg

SEQ ID NO: 138904 - DNA, 17 bp, synthetic construct
  source 1..17: mol_type = other DNA
ctctgcctctctgtggc

SEQ ID NO: 138905 - DNA, 17 bp, synthetic construct
  source 1..17: mol_type = other DNA
tctgcctctctgtggcc

SEQ ID NO: 138906 - DNA, 17 bp, synthetic construct
  source 1..17: mol_type = other DNA
ctgcctctctgtggcct

SEQ ID NO: 138907 - DNA, 17 bp, synthetic construct
  source 1..17: mol_type = other DNA
tgcctctctgtggcctc

SEQ ID NO: 138908 - DNA, 17 bp, synthetic construct
  source 1..17: mol_type = other DNA
gcctctctgtggcctcc

SEQ ID NO: 138909 - DNA, 17 bp, synthetic construct
  source 1..17: mol_type = other DNA
cctctctgtggcctccc

SEQ ID NO: 138910 - DNA, 17 bp, synthetic construct
  source 1..17: mol_type = other DNA
ctctctgtggcctcccc

SEQ ID NO: 138911 - DNA, 17 bp, synthetic construct
  source 1..17: mol_type = other DNA
tctctgtggcctcccct

SEQ ID NO: 138912 - DNA, 17 bp, synthetic construct
  source 1..17: mol_type = other DNA
ctctgtggcctcccctc

SEQ ID NO: 138913 - DNA, 17 bp, synthetic construct
  source 1..17: mol_type = other DNA
tctgtggcctcccctct

SEQ ID NO: 138914 - DNA, 17 bp, synthetic construct
  source 1..17: mol_type = other DNA
ctgtggcctcccctctc

SEQ ID NO: 138915 - DNA, 17 bp, synthetic construct
  source 1..17: mol_type = other DNA
tgtggcctcccctctct

SEQ ID NO: 138916 - DNA, 17 bp, synthetic construct
  source 1..17: mol_type = other DNA
gtggcctcccctctctg

SEQ ID NO: 138917 - DNA, 17 bp, synthetic construct
  source 1..17: mol_type = other DNA
tggcctcccctctctgt

SEQ ID NO: 138918 - DNA, 17 bp, synthetic construct
  source 1..17: mol_type = other DNA
ggcctcccctctctgtg

SEQ ID NO: 138919 - DNA, 17 bp, synthetic construct
  source 1..17: mol_type = other DNA
gcctcccctctctgtgt

SEQ ID NO: 138920 - DNA, 17 bp, synthetic construct
  source 1..17: mol_type = other DNA
cctcccctctctgtgtc

SEQ ID NO: 138921 - DNA, 17 bp, synthetic construct
  source 1..17: mol_type = other DNA
ctcccctctctgtgtct

SEQ ID NO: 138922 - DNA, 17 bp, synthetic construct
  source 1..17: mol_type = other DNA
tcccctctctgtgtctg

SEQ ID NO: 138923 - DNA, 17 bp, synthetic construct
  source 1..17: mol_type = other DNA
cccctctctgtgtctgt

SEQ ID NO: 138924 - DNA, 17 bp, synthetic construct
  source 1..17: mol_type = other DNA
ccctctctgtgtctgtg

SEQ ID NO: 138925 - DNA, 17 bp, synthetic construct
  source 1..17: mol_type = other DNA
cctctctgtgtctgtgt

SEQ ID NO: 138926 - DNA, 17 bp, synthetic construct
  source 1..17: mol_type = other DNA
ctctctgtgtctgtgtc

SEQ ID NO: 138927 - DNA, 17 bp, synthetic construct
  source 1..17: mol_type = other DNA
tctctgtgtctgtgtct

SEQ ID NO: 138928 - DNA, 17 bp, synthetic construct
  source 1..17: mol_type = other DNA
ctctgtgtctgtgtctc

SEQ ID NO: 138929 - DNA, 17 bp, synthetic construct
  source 1..17: mol_type = other DNA
tctgtgtctgtgtctct

SEQ ID NO: 138930 - DNA, 17 bp, synthetic construct
  source 1..17: mol_type = other DNA
ctgtgtctgtgtctctt

SEQ ID NO: 138931 - DNA, 17 bp, synthetic construct
  source 1..17: mol_type = other DNA
tgtgtctgtgtctcttc

SEQ ID NO: 138932 - DNA, 17 bp, synthetic construct
  source 1..17: mol_type = other DNA
gtgtctgtgtctcttct

SEQ ID NO: 138933 - DNA, 17 bp, synthetic construct
  source 1..17: mol_type = other DNA
tgtctgtgtctcttctg

SEQ ID NO: 138934 - DNA, 17 bp, synthetic construct
  source 1..17: mol_type = other DNA
gtctgtgtctcttctgt

SEQ ID NO: 138935 - DNA, 17 bp, synthetic construct
  source 1..17: mol_type = other DNA
tctgtgtctcttctgtc

SEQ ID NO: 138936 - DNA, 17 bp, synthetic construct
  source 1..17: mol_type = other DNA
ctgtgtctcttctgtct

SEQ ID NO: 138937 - DNA, 17 bp, synthetic construct
  source 1..17: mol_type = other DNA
tgtgtctcttctgtctc

SEQ ID NO: 138938 - DNA, 17 bp, synthetic construct
  source 1..17: mol_type = other DNA
gtgtctcttctgtctcc

SEQ ID NO: 138939 - DNA, 17 bp, synthetic construct
  source 1..17: mol_type = other DNA
tgtctcttctgtctccc

SEQ ID NO: 138940 - DNA, 17 bp, synthetic construct
  source 1..17: mol_type = other DNA
gtctcttctgtctcccg

SEQ ID NO: 138941 - DNA, 17 bp, synthetic construct
  source 1..17: mol_type = other DNA
tctcttctgtctcccgt

SEQ ID NO: 138942 - DNA, 17 bp, synthetic construct
  source 1..17: mol_type = other DNA
ctcttctgtctcccgta

SEQ ID NO: 138943 - DNA, 17 bp, synthetic construct
  source 1..17: mol_type = other DNA
tcttctgtctcccgtaa

SEQ ID NO: 138944 - DNA, 17 bp, synthetic construct
  source 1..17: mol_type = other DNA
cttctgtctcccgtaag

SEQ ID NO: 138945 - DNA, 17 bp, synthetic construct
  source 1..17: mol_type = other DNA
ttctgtctcccgtaagg

SEQ ID NO: 138946 - DNA, 17 bp, synthetic construct
  source 1..17: mol_type = other DNA
tctgtctcccgtaagga

SEQ ID NO: 138947 - DNA, 17 bp, synthetic construct
  source 1..17: mol_type = other DNA
ctgtctcccgtaaggac

SEQ ID NO: 138948 - DNA, 17 bp, synthetic construct
  source 1..17: mol_type = other DNA
tgtctcccgtaaggaca

SEQ ID NO: 138949 - DNA, 17 bp, synthetic construct
  source 1..17: mol_type = other DNA
gtctcccgtaaggacac

SEQ ID NO: 138950 - DNA, 17 bp, synthetic construct
  source 1..17: mol_type = other DNA
tctcccgtaaggacact

SEQ ID NO: 138951 - DNA, 17 bp, synthetic construct
  source 1..17: mol_type = other DNA
ctcccgtaaggacactg

SEQ ID NO: 138952 - DNA, 17 bp, synthetic construct
  source 1..17: mol_type = other DNA
tcccgtaaggacactgg

SEQ ID NO: 138953 - DNA, 17 bp, synthetic construct
  source 1..17: mol_type = other DNA
cccgtaaggacactggt

SEQ ID NO: 138954 - DNA, 17 bp, synthetic construct
  source 1..17: mol_type = other DNA
ccgtaaggacactggtc

SEQ ID NO: 138955 - DNA, 17 bp, synthetic construct
  source 1..17: mol_type = other DNA
cgtaaggacactggtca

SEQ ID NO: 138956 - DNA, 17 bp, synthetic construct
  source 1..17: mol_type = other DNA
gtaaggacactggtcat

SEQ ID NO: 138957 - DNA, 17 bp, synthetic construct
  source 1..17: mol_type = other DNA
taaggacactggtcatt

SEQ ID NO: 138958 - DNA, 17 bp, synthetic construct
  source 1..17: mol_type = other DNA
aaggacactggtcattg

SEQ ID NO: 138959 - DNA, 17 bp, synthetic construct
  source 1..17: mol_type = other DNA
aggacactggtcattgg

SEQ ID NO: 138960 - DNA, 17 bp, synthetic construct
  source 1..17: mol_type = other DNA
ggacactggtcattgga

SEQ ID NO: 138961 - DNA, 17 bp, synthetic construct
  source 1..17: mol_type = other DNA
gacactggtcattggat

SEQ ID NO: 138962 - DNA, 17 bp, synthetic construct
  source 1..17: mol_type = other DNA
acactggtcattggatt

SEQ ID NO: 138963 - DNA, 17 bp, synthetic construct
  source 1..17: mol_type = other DNA
cactggtcattggattg

SEQ ID NO: 138964 - DNA, 17 bp, synthetic construct
  source 1..17: mol_type = other DNA
actggtcattggattga

SEQ ID NO: 138965 - DNA, 17 bp, synthetic construct
  source 1..17: mol_type = other DNA
ctggtcattggattgag

SEQ ID NO: 138966 - DNA, 17 bp, synthetic construct
  source 1..17: mol_type = other DNA
tggtcattggattgagg

SEQ ID NO: 138967 - DNA, 17 bp, synthetic construct
  source 1..17: mol_type = other DNA
ggtcattggattgaggg

SEQ ID NO: 138968 - DNA, 17 bp, synthetic construct
  source 1..17: mol_type = other DNA
gtcattggattgagggc

SEQ ID NO: 138969 - DNA, 17 bp, synthetic construct
  source 1..17: mol_type = other DNA
tcattggattgagggcc

SEQ ID NO: 138970 - DNA, 17 bp, synthetic construct
  source 1..17: mol_type = other DNA
cattggattgagggccc

SEQ ID NO: 138971 - DNA, 17 bp, synthetic construct
  source 1..17: mol_type = other DNA
attggattgagggccca

SEQ ID NO: 138972 - DNA, 17 bp, synthetic construct
  source 1..17: mol_type = other DNA
ttggattgagggcccac

SEQ ID NO: 138973 - DNA, 17 bp, synthetic construct
  source 1..17: mol_type = other DNA
tggattgagggcccacc

SEQ ID NO: 138974 - DNA, 17 bp, synthetic construct
  source 1..17: mol_type = other DNA
ggattgagggcccaccc

SEQ ID NO: 138975 - DNA, 17 bp, synthetic construct
  source 1..17: mol_type = other DNA
gattgagggcccaccca

SEQ ID NO: 138976 - DNA, 17 bp, synthetic construct
  source 1..17: mol_type = other DNA
attgagggcccacccag

SEQ ID NO: 138977 - DNA, 17 bp, synthetic construct
  source 1..17: mol_type = other DNA
ttgagggcccacccagc

SEQ ID NO: 138978 - DNA, 17 bp, synthetic construct
  source 1..17: mol_type = other DNA
tgagggcccacccagct

SEQ ID NO: 138979 - DNA, 17 bp, synthetic construct
  source 1..17: mol_type = other DNA
gagggcccacccagcta

SEQ ID NO: 138980 - DNA, 17 bp, synthetic construct
  source 1..17: mol_type = other DNA
agggcccacccagctag

SEQ ID NO: 138981 - DNA, 17 bp, synthetic construct
  source 1..17: mol_type = other DNA
gggcccacccagctagt

SEQ ID NO: 138982 - DNA, 17 bp, synthetic construct
  source 1..17: mol_type = other DNA
ggcccacccagctagtc

SEQ ID NO: 138983 - DNA, 17 bp, synthetic construct
  source 1..17: mol_type = other DNA
gcccacccagctagtcc

SEQ ID NO: 138984 - DNA, 17 bp, synthetic construct
  source 1..17: mol_type = other DNA
cccacccagctagtcca

SEQ ID NO: 138985 - DNA, 17 bp, synthetic construct
  source 1..17: mol_type = other DNA
ccacccagctagtccac

SEQ ID NO: 138986 - DNA, 17 bp, synthetic construct
  source 1..17: mol_type = other DNA
cacccagctagtccacg

SEQ ID NO: 138987 - DNA, 17 bp, synthetic construct
  source 1..17: mol_type = other DNA
acccagctagtccacga

SEQ ID NO: 138988 - DNA, 17 bp, synthetic construct
  source 1..17: mol_type = other DNA
cccagctagtccacgat

SEQ ID NO: 138989 - DNA, 17 bp, synthetic construct
  source 1..17: mol_type = other DNA
ccagctagtccacgatg

SEQ ID NO: 138990 - DNA, 17 bp, synthetic construct
  source 1..17: mol_type = other DNA
cagctagtccacgatga

SEQ ID NO: 138991 - DNA, 17 bp, synthetic construct
  source 1..17: mol_type = other DNA
agctagtccacgatgat

SEQ ID NO: 138992 - DNA, 17 bp, synthetic construct
  source 1..17: mol_type = other DNA
gctagtccacgatgatg

SEQ ID NO: 138993 - DNA, 17 bp, synthetic construct
  source 1..17: mol_type = other DNA
ctagtccacgatgatgt

SEQ ID NO: 138994 - DNA, 17 bp, synthetic construct
  source 1..17: mol_type = other DNA
tagtccacgatgatgtc

SEQ ID NO: 138995 - DNA, 17 bp, synthetic construct
  source 1..17: mol_type = other DNA
agtccacgatgatgtca

SEQ ID NO: 138996 - DNA, 17 bp, synthetic construct
  source 1..17: mol_type = other DNA
gtccacgatgatgtcat

SEQ ID NO: 138997 - DNA, 17 bp, synthetic construct
  source 1..17: mol_type = other DNA
tccacgatgatgtcatt

SEQ ID NO: 138998 - DNA, 17 bp, synthetic construct
  source 1..17: mol_type = other DNA
ccacgatgatgtcattt

SEQ ID NO: 138999 - DNA, 17 bp, synthetic construct
  source 1..17: mol_type = other DNA
cacgatgatgtcatttc

SEQ ID NO: 139000 - DNA, 17 bp, synthetic construct
  source 1..17: mol_type = other DNA
acgatgatgtcatttca

SEQ ID NO: 139001 - DNA, 17 bp, synthetic construct
  source 1..17: mol_type = other DNA
cgatgatgtcatttcaa

SEQ ID NO: 139002 - DNA, 17 bp, synthetic construct
  source 1..17: mol_type = other DNA
gatgatgtcatttcaag

SEQ ID NO: 139003 - DNA, 17 bp, synthetic construct
  source 1..17: mol_type = other DNA
atgatgtcatttcaaga

SEQ ID NO: 139004 - DNA, 17 bp, synthetic construct
  source 1..17: mol_type = other DNA
tgatgtcatttcaagat

SEQ ID NO: 139005 - DNA, 17 bp, synthetic construct
  source 1..17: mol_type = other DNA
gatgtcatttcaagatg

SEQ ID NO: 139006 - DNA, 17 bp, synthetic construct
  source 1..17: mol_type = other DNA
atgtcatttcaagatgc

SEQ ID NO: 139007 - DNA, 17 bp, synthetic construct
  source 1..17: mol_type = other DNA
tgtcatttcaagatgct

SEQ ID NO: 139008 - DNA, 17 bp, synthetic construct
  source 1..17: mol_type = other DNA
gtcatttcaagatgctt

SEQ ID NO: 139009 - DNA, 17 bp, synthetic construct
  source 1..17: mol_type = other DNA
tcatttcaagatgcttc

SEQ ID NO: 139010 - DNA, 17 bp, synthetic construct
  source 1..17: mol_type = other DNA
catttcaagatgcttcc

SEQ ID NO: 139011 - DNA, 17 bp, synthetic construct
  source 1..17: mol_type = other DNA
atttcaagatgcttccc

SEQ ID NO: 139012 - DNA, 17 bp, synthetic construct
  source 1..17: mol_type = other DNA
tttcaagatgcttccct

SEQ ID NO: 139013 - DNA, 17 bp, synthetic construct
  source 1..17: mol_type = other DNA
ttcaagatgcttccctt

SEQ ID NO: 139014 - DNA, 17 bp, synthetic construct
  source 1..17: mol_type = other DNA
tcaagatgcttccctta

SEQ ID NO: 139015 - DNA, 17 bp, synthetic construct
  source 1..17: mol_type = other DNA
caagatgcttcccttaa

SEQ ID NO: 139016 - DNA, 17 bp, synthetic construct
  source 1..17: mol_type = other DNA
aagatgcttcccttaat

SEQ ID NO: 139017 - DNA, 17 bp, synthetic construct
  source 1..17: mol_type = other DNA
agatgcttcccttaatc

SEQ ID NO: 139018 - DNA, 17 bp, synthetic construct
  source 1..17: mol_type = other DNA
gatgcttcccttaatcc

SEQ ID NO: 139019 - DNA, 17 bp, synthetic construct
  source 1..17: mol_type = other DNA
atgcttcccttaatccc

SEQ ID NO: 139020 - DNA, 17 bp, synthetic construct
  source 1..17: mol_type = other DNA
tgcttcccttaatccca

SEQ ID NO: 139021 - DNA, 17 bp, synthetic construct
  source 1..17: mol_type = other DNA
gcttcccttaatcccat

SEQ ID NO: 139022 - DNA, 17 bp, synthetic construct
  source 1..17: mol_type = other DNA
cttcccttaatcccatc

SEQ ID NO: 139023 - DNA, 17 bp, synthetic construct
  source 1..17: mol_type = other DNA
ttcccttaatcccatct

SEQ ID NO: 139024 - DNA, 17 bp, synthetic construct
  source 1..17: mol_type = other DNA
tcccttaatcccatctg

SEQ ID NO: 139025 - DNA, 17 bp, synthetic construct
  source 1..17: mol_type = other DNA
cccttaatcccatctgc

SEQ ID NO: 139026 - DNA, 17 bp, synthetic construct
  source 1..17: mol_type = other DNA
ccttaatcccatctgca

SEQ ID NO: 139027 - DNA, 17 bp, synthetic construct
  source 1..17: mol_type = other DNA
cttaatcccatctgcaa

SEQ ID NO: 139028 - DNA, 17 bp, synthetic construct
  source 1..17: mol_type = other DNA
ttaatcccatctgcaaa

SEQ ID NO: 139029 - DNA, 17 bp, synthetic construct
  source 1..17: mol_type = other DNA
taatcccatctgcaaag

SEQ ID NO: 139030 - DNA, 17 bp, synthetic construct
  source 1..17: mol_type = other DNA
aatcccatctgcaaaga

SEQ ID NO: 139031 - DNA, 17 bp, synthetic construct
  source 1..17: mol_type = other DNA
atcccatctgcaaagac

SEQ ID NO: 139032 - DNA, 17 bp, synthetic construct
  source 1..17: mol_type = other DNA
tcccatctgcaaagaca

SEQ ID NO: 139033 - DNA, 17 bp, synthetic construct
  source 1..17: mol_type = other DNA
cccatctgcaaagacac

SEQ ID NO: 139034 - DNA, 17 bp, synthetic construct
  source 1..17: mol_type = other DNA
ccatctgcaaagacact

SEQ ID NO: 139035 - DNA, 17 bp, synthetic construct
  source 1..17: mol_type = other DNA
catctgcaaagacactt

SEQ ID NO: 139036 - DNA, 17 bp, synthetic construct
  source 1..17: mol_type = other DNA
atctgcaaagacacttt

SEQ ID NO: 139037 - DNA, 17 bp, synthetic construct
  source 1..17: mol_type = other DNA
tctgcaaagacactttc

SEQ ID NO: 139038 - DNA, 17 bp, synthetic construct
  source 1..17: mol_type = other DNA
ctgcaaagacactttct

SEQ ID NO: 139039 - DNA, 17 bp, synthetic construct
  source 1..17: mol_type = other DNA
tgcaaagacactttctc

SEQ ID NO: 139040 - DNA, 17 bp, synthetic construct
  source 1..17: mol_type = other DNA
gcaaagacactttctcc

SEQ ID NO: 139041 - DNA, 17 bp, synthetic construct
  source 1..17: mol_type = other DNA
caaagacactttctccc

SEQ ID NO: 139042 - DNA, 17 bp, synthetic construct
  source 1..17: mol_type = other DNA
aaagacactttctcccg

SEQ ID NO: 139043 - DNA, 17 bp, synthetic construct
  source 1..17: mol_type = other DNA
aagacactttctcccgg

SEQ ID NO: 139044 - DNA, 17 bp, synthetic construct
  source 1..17: mol_type = other DNA
agacactttctcccggc

SEQ ID NO: 139045 - DNA, 17 bp, synthetic construct
  source 1..17: mol_type = other DNA
gacactttctcccggca

SEQ ID NO: 139046 - DNA, 17 bp, synthetic construct
  source 1..17: mol_type = other DNA
acactttctcccggcaa

SEQ ID NO: 139047 - DNA, 17 bp, synthetic construct
  source 1..17: mol_type = other DNA
cactttctcccggcaaa

SEQ ID NO: 139048 - DNA, 17 bp, synthetic construct
  source 1..17: mol_type = other DNA
actttctcccggcaaag

SEQ ID NO: 139049 - DNA, 17 bp, synthetic construct
  source 1..17: mol_type = other DNA
ctttctcccggcaaagc

SEQ ID NO: 139050 - DNA, 17 bp, synthetic construct
  source 1..17: mol_type = other DNA
tttctcccggcaaagcc

SEQ ID NO: 139051 - DNA, 17 bp, synthetic construct
  source 1..17: mol_type = other DNA
ttctcccggcaaagcca

SEQ ID NO: 139052 - DNA, 17 bp, synthetic construct
  source 1..17: mol_type = other DNA
tctcccggcaaagccac

SEQ ID NO: 139053 - DNA, 17 bp, synthetic construct
  source 1..17: mol_type = other DNA
ctcccggcaaagccaca

SEQ ID NO: 139054 - DNA, 17 bp, synthetic construct
  source 1..17: mol_type = other DNA
tcccggcaaagccacat

SEQ ID NO: 139055 - DNA, 17 bp, synthetic construct
  source 1..17: mol_type = other DNA
cccggcaaagccacatg

SEQ ID NO: 139056 - DNA, 17 bp, synthetic construct
  source 1..17: mol_type = other DNA
ccggcaaagccacatgc

SEQ ID NO: 139057 - DNA, 17 bp, synthetic construct
  source 1..17: mol_type = other DNA
cggcaaagccacatgcg

SEQ ID NO: 139058 - DNA, 17 bp, synthetic construct
  source 1..17: mol_type = other DNA
ggcaaagccacatgcgg

SEQ ID NO: 139059 - DNA, 17 bp, synthetic construct
  source 1..17: mol_type = other DNA
gcaaagccacatgcgga

SEQ ID NO: 139060 - DNA, 17 bp, synthetic construct
  source 1..17: mol_type = other DNA
caaagccacatgcggag

SEQ ID NO: 139061 - DNA, 17 bp, synthetic construct
  source 1..17: mol_type = other DNA
aaagccacatgcggagg

SEQ ID NO: 139062 - DNA, 17 bp, synthetic construct
  source 1..17: mol_type = other DNA
aagccacatgcggaggt

SEQ ID NO: 139063 - DNA, 17 bp, synthetic construct
  source 1..17: mol_type = other DNA
agccacatgcggaggtt

SEQ ID NO: 139064 - DNA, 17 bp, synthetic construct
  source 1..17: mol_type = other DNA
gccacatgcggaggttc

SEQ ID NO: 139065 - DNA, 17 bp, synthetic construct
  source 1..17: mol_type = other DNA
ccacatgcggaggttct

SEQ ID NO: 139066 - DNA, 17 bp, synthetic construct
  source 1..17: mol_type = other DNA
cacatgcggaggttctg

SEQ ID NO: 139067 - DNA, 17 bp, synthetic construct
  source 1..17: mol_type = other DNA
acatgcggaggttctgg

SEQ ID NO: 139068 - DNA, 17 bp, synthetic construct
  source 1..17: mol_type = other DNA
catgcggaggttctggg

SEQ ID NO: 139069 - DNA, 17 bp, synthetic construct
  source 1..17: mol_type = other DNA
atgcggaggttctggga

SEQ ID NO: 139070 - DNA, 17 bp, synthetic construct
  source 1..17: mol_type = other DNA
tgcggaggttctgggat

SEQ ID NO: 139071 - DNA, 17 bp, synthetic construct
  source 1..17: mol_type = other DNA
gcggaggttctgggata

SEQ ID NO: 139072 - DNA, 17 bp, synthetic construct
  source 1..17: mol_type = other DNA
cggaggttctgggatag

SEQ ID NO: 139073 - DNA, 17 bp, synthetic construct
  source 1..17: mol_type = other DNA
ggaggttctgggatagc

SEQ ID NO: 139074 - DNA, 17 bp, synthetic construct
  source 1..17: mol_type = other DNA
gaggttctgggatagcc

SEQ ID NO: 139075 - DNA, 17 bp, synthetic construct
  source 1..17: mol_type = other DNA
aggttctgggatagcca

SEQ ID NO: 139076 - DNA, 17 bp, synthetic construct
  source 1..17: mol_type = other DNA
ggttctgggatagccat

SEQ ID NO: 139077 - DNA, 17 bp, synthetic construct
  source 1..17: mol_type = other DNA
gttctgggatagccata

SEQ ID NO: 139078 - DNA, 17 bp, synthetic construct
  source 1..17: mol_type = other DNA
ttctgggatagccatag

SEQ ID NO: 139079 - DNA, 17 bp, synthetic construct
  source 1..17: mol_type = other DNA
tctgggatagccataga

SEQ ID NO: 139080 - DNA, 17 bp, synthetic construct
  source 1..17: mol_type = other DNA
ctgggatagccatagat

SEQ ID NO: 139081 - DNA, 17 bp, synthetic construct
  source 1..17: mol_type = other DNA
tgggatagccatagatt

SEQ ID NO: 139082 - DNA, 17 bp, synthetic construct
  source 1..17: mol_type = other DNA
gggatagccatagattt

SEQ ID NO: 139083 - DNA, 17 bp, synthetic construct
  source 1..17: mol_type = other DNA
ggatagccatagatttt

SEQ ID NO: 139084 - DNA, 17 bp, synthetic construct
  source 1..17: mol_type = other DNA
gatagccatagattttg

SEQ ID NO: 139085 - DNA, 17 bp, synthetic construct
  source 1..17: mol_type = other DNA
atagccatagattttgg

SEQ ID NO: 139086 - DNA, 17 bp, synthetic construct
  source 1..17: mol_type = other DNA
tagccatagattttggg

SEQ ID NO: 139087 - DNA, 17 bp, synthetic construct
  source 1..17: mol_type = other DNA
agccatagattttgggg

SEQ ID NO: 139088 - DNA, 17 bp, synthetic construct
  source 1..17: mol_type = other DNA
gccatagattttggggg

SEQ ID NO: 139089 - DNA, 17 bp, synthetic construct
  source 1..17: mol_type = other DNA
ccatagattttggggga

SEQ ID NO: 139090 - DNA, 17 bp, synthetic construct
  source 1..17: mol_type = other DNA
catagattttgggggac

SEQ ID NO: 139091 - DNA, 17 bp, synthetic construct
  source 1..17: mol_type = other DNA
atagattttgggggacc

SEQ ID NO: 139092 - DNA, 17 bp, synthetic construct
  source 1..17: mol_type = other DNA
tagattttgggggaccc

SEQ ID NO: 139093 - DNA, 17 bp, synthetic construct
  source 1..17: mol_type = other DNA
agattttgggggacccc

SEQ ID NO: 139094 - DNA, 17 bp, synthetic construct
  source 1..17: mol_type = other DNA
gattttgggggacccca

SEQ ID NO: 139095 - DNA, 17 bp, synthetic construct
  source 1..17: mol_type = other DNA
attttgggggaccccat

SEQ ID NO: 139096 - DNA, 17 bp, synthetic construct
  source 1..17: mol_type = other DNA
ttttgggggaccccatt

SEQ ID NO: 139097 - DNA, 17 bp, synthetic construct
  source 1..17: mol_type = other DNA
tttgggggaccccattc

SEQ ID NO: 139098 - DNA, 17 bp, synthetic construct
  source 1..17: mol_type = other DNA
ttgggggaccccattct

SEQ ID NO: 139099 - DNA, 17 bp, synthetic construct
  source 1..17: mol_type = other DNA
tgggggaccccattcta

SEQ ID NO: 139100 - DNA, 17 bp, synthetic construct
  source 1..17: mol_type = other DNA
gggggaccccattctac

SEQ ID NO: 139101 - DNA, 17 bp, synthetic construct
  source 1..17: mol_type = other DNA
ggggaccccattctaca

SEQ ID NO: 139102 - DNA, 17 bp, synthetic construct
  source 1..17: mol_type = other DNA
gggaccccattctacac

SEQ ID NO: 139103 - DNA, 17 bp, synthetic construct
  source 1..17: mol_type = other DNA
ggaccccattctacaca

SEQ ID NO: 139104 - DNA, 17 bp, synthetic construct
  source 1..17: mol_type = other DNA
gaccccattctacacac

SEQ ID NO: 139105 - DNA, 17 bp, synthetic construct
  source 1..17: mol_type = other DNA
accccattctacacact

SEQ ID NO: 139106 - DNA, 17 bp, synthetic construct
  source 1..17: mol_type = other DNA
ccccattctacacactg

SEQ ID NO: 139107 - DNA, 17 bp, synthetic construct
  source 1..17: mol_type = other DNA
cccattctacacactgg

SEQ ID NO: 139108 - DNA, 17 bp, synthetic construct
  source 1..17: mol_type = other DNA
ccattctacacactgga

SEQ ID NO: 139109 - DNA, 17 bp, synthetic construct
  source 1..17: mol_type = other DNA
cattctacacactggac

SEQ ID NO: 139110 - DNA, 17 bp, synthetic construct
  source 1..17: mol_type = other DNA
attctacacactggacc

SEQ ID NO: 139111 - DNA, 17 bp, synthetic construct
  source 1..17: mol_type = other DNA
ttctacacactggaccc

SEQ ID NO: 139112 - DNA, 17 bp, synthetic construct
  source 1..17: mol_type = other DNA
tctacacactggaccca

SEQ ID NO: 139113 - DNA, 17 bp, synthetic construct
  source 1..17: mol_type = other DNA
ctacacactggacccat

SEQ ID NO: 139114 - DNA, 17 bp, synthetic construct
  source 1..17: mol_type = other DNA
tacacactggacccatt

SEQ ID NO: 139115 - DNA, 17 bp, synthetic construct
  source 1..17: mol_type = other DNA
acacactggacccattt

SEQ ID NO: 139116 - DNA, 17 bp, synthetic construct
  source 1..17: mol_type = other DNA
cacactggacccatttt

SEQ ID NO: 139117 - DNA, 17 bp, synthetic construct
  source 1..17: mol_type = other DNA
acactggacccattttt

SEQ ID NO: 139118 - DNA, 17 bp, synthetic construct
  source 1..17: mol_type = other DNA
cactggacccattttta

SEQ ID NO: 139119 - DNA, 17 bp, synthetic construct
  source 1..17: mol_type = other DNA
actggacccatttttat

SEQ ID NO: 139120 - DNA, 17 bp, synthetic construct
  source 1..17: mol_type = other DNA
ctggacccatttttata

SEQ ID NO: 139121 - DNA, 17 bp, synthetic construct
  source 1..17: mol_type = other DNA
tggacccatttttatag

SEQ ID NO: 139122 - DNA, 17 bp, synthetic construct
  source 1..17: mol_type = other DNA
ggacccatttttataga

SEQ ID NO: 139123 - DNA, 17 bp, synthetic construct
  source 1..17: mol_type = other DNA
gacccatttttatagac

SEQ ID NO: 139124 - DNA, 17 bp, synthetic construct
  source 1..17: mol_type = other DNA
acccatttttatagacg

SEQ ID NO: 139125 - DNA, 17 bp, synthetic construct
  source 1..17: mol_type = other DNA
cccatttttatagacga

SEQ ID NO: 139126 - DNA, 17 bp, synthetic construct
  source 1..17: mol_type = other DNA
ccatttttatagacgag

SEQ ID NO: 139127 - DNA, 17 bp, synthetic construct
  source 1..17: mol_type = other DNA
catttttatagacgagg

SEQ ID NO: 139128 - DNA, 17 bp, synthetic construct
  source 1..17: mol_type = other DNA
atttttatagacgaggc

SEQ ID NO: 139129 - DNA, 17 bp, synthetic construct
  source 1..17: mol_type = other DNA
tttttatagacgaggca

SEQ ID NO: 139130 - DNA, 17 bp, synthetic construct
  source 1..17: mol_type = other DNA
ttttatagacgaggcag

SEQ ID NO: 139131 - DNA, 17 bp, synthetic construct
  source 1..17: mol_type = other DNA
tttatagacgaggcagc

SEQ ID NO: 139132 - DNA, 17 bp, synthetic construct
  source 1..17: mol_type = other DNA
ttatagacgaggcagct

SEQ ID NO: 139133 - DNA, 17 bp, synthetic construct
  source 1..17: mol_type = other DNA
tatagacgaggcagctg

SEQ ID NO: 139134 - DNA, 17 bp, synthetic construct
  source 1..17: mol_type = other DNA
atagacgaggcagctga

SEQ ID NO: 139135 - DNA, 17 bp, synthetic construct
  source 1..17: mol_type = other DNA
tagacgaggcagctgag

SEQ ID NO: 139136 - DNA, 17 bp, synthetic construct
  source 1..17: mol_type = other DNA
agacgaggcagctgagg

SEQ ID NO: 139137 - DNA, 17 bp, synthetic construct
  source 1..17: mol_type = other DNA
gacgaggcagctgaggc

SEQ ID NO: 139138 - DNA, 17 bp, synthetic construct
  source 1..17: mol_type = other DNA
acgaggcagctgaggcc

SEQ ID NO: 139139 - DNA, 17 bp, synthetic construct
  source 1..17: mol_type = other DNA
cgaggcagctgaggccc

SEQ ID NO: 139140 - DNA, 17 bp, synthetic construct
  source 1..17: mol_type = other DNA
gaggcagctgaggcccc

SEQ ID NO: 139141 - DNA, 17 bp, synthetic construct
  source 1..17: mol_type = other DNA
aggcagctgaggcccca

SEQ ID NO: 139142 - DNA, 17 bp, synthetic construct
  source 1..17: mol_type = other DNA
ggcagctgaggccccag

SEQ ID NO: 139143 - DNA, 17 bp, synthetic construct
  source 1..17: mol_type = other DNA
gcagctgaggccccagg

SEQ ID NO: 139144 - DNA, 17 bp, synthetic construct
  source 1..17: mol_type = other DNA
cagctgaggccccaggg

SEQ ID NO: 139145 - DNA, 17 bp, synthetic construct
  source 1..17: mol_type = other DNA
agctgaggccccagggg

SEQ ID NO: 139146 - DNA, 17 bp, synthetic construct
  source 1..17: mol_type = other DNA
gctgaggccccaggggc

SEQ ID NO: 139147 - DNA, 17 bp, synthetic construct
  source 1..17: mol_type = other DNA
ctgaggccccaggggct

SEQ ID NO: 139148 - DNA, 17 bp, synthetic construct
  source 1..17: mol_type = other DNA
tgaggccccaggggctt

SEQ ID NO: 139149 - DNA, 17 bp, synthetic construct
  source 1..17: mol_type = other DNA
gaggccccaggggcttc

SEQ ID NO: 139150 - DNA, 17 bp, synthetic construct
  source 1..17: mol_type = other DNA
aggccccaggggcttca

SEQ ID NO: 139151 - DNA, 17 bp, synthetic construct
  source 1..17: mol_type = other DNA
ggccccaggggcttcag

SEQ ID NO: 139152 - DNA, 17 bp, synthetic construct
  source 1..17: mol_type = other DNA
gccccaggggcttcagt

SEQ ID NO: 139153 - DNA, 17 bp, synthetic construct
  source 1..17: mol_type = other DNA
ccccaggggcttcagtg

SEQ ID NO: 139154 - DNA, 17 bp, synthetic construct
  source 1..17: mol_type = other DNA
cccaggggcttcagtgg

SEQ ID NO: 139155 - DNA, 17 bp, synthetic construct
  source 1..17: mol_type = other DNA
ccaggggcttcagtggc

SEQ ID NO: 139156 - DNA, 17 bp, synthetic construct
  source 1..17: mol_type = other DNA
caggggcttcagtggct

SEQ ID NO: 139157 - DNA, 17 bp, synthetic construct
  source 1..17: mol_type = other DNA
aggggcttcagtggctc

SEQ ID NO: 139158 - DNA, 17 bp, synthetic construct
  source 1..17: mol_type = other DNA
ggggcttcagtggctcc

SEQ ID NO: 139159 - DNA, 17 bp, synthetic construct
  source 1..17: mol_type = other DNA
gggcttcagtggctccc

SEQ ID NO: 139160 - DNA, 17 bp, synthetic construct
  source 1..17: mol_type = other DNA
ggcttcagtggctcccc

SEQ ID NO: 139161 - DNA, 17 bp, synthetic construct
  source 1..17: mol_type = other DNA
gcttcagtggctcccca

SEQ ID NO: 139162 - DNA, 17 bp, synthetic construct
  source 1..17: mol_type = other DNA
cttcagtggctccccaa

SEQ ID NO: 139163 - DNA, 17 bp, synthetic construct
  source 1..17: mol_type = other DNA
ttcagtggctccccaag

SEQ ID NO: 139164 - DNA, 17 bp, synthetic construct
  source 1..17: mol_type = other DNA
tcagtggctccccaagg

SEQ ID NO: 139165 - DNA, 17 bp, synthetic construct
  source 1..17: mol_type = other DNA
cagtggctccccaaggc

SEQ ID NO: 139166 - DNA, 17 bp, synthetic construct
  source 1..17: mol_type = other DNA
agtggctccccaaggcg

SEQ ID NO: 139167 - DNA, 17 bp, synthetic construct
  source 1..17: mol_type = other DNA
gtggctccccaaggcgg

SEQ ID NO: 139168 - DNA, 17 bp, synthetic construct
  source 1..17: mol_type = other DNA
tggctccccaaggcggc

SEQ ID NO: 139169 - DNA, 17 bp, synthetic construct
  source 1..17: mol_type = other DNA
ggctccccaaggcggca

SEQ ID NO: 139170 - DNA, 17 bp, synthetic construct
  source 1..17: mol_type = other DNA
gctccccaaggcggcag

SEQ ID NO: 139171 - DNA, 17 bp, synthetic construct
  source 1..17: mol_type = other DNA
ctccccaaggcggcagt

SEQ ID NO: 139172 - DNA, 17 bp, synthetic construct
  source 1..17: mol_type = other DNA
tccccaaggcggcagtc

SEQ ID NO: 139173 - DNA, 17 bp, synthetic construct
  source 1..17: mol_type = other DNA
ccccaaggcggcagtca

SEQ ID NO: 139174 - DNA, 17 bp, synthetic construct
  source 1..17: mol_type = other DNA
cccaaggcggcagtcac

SEQ ID NO: 139175 - DNA, 17 bp, synthetic construct
  source 1..17: mol_type = other DNA
ccaaggcggcagtcaca

SEQ ID NO: 139176 - DNA, 17 bp, synthetic construct
  source 1..17: mol_type = other DNA
caaggcggcagtcacag

SEQ ID NO: 139177 - DNA, 17 bp, synthetic construct
  source 1..17: mol_type = other DNA
aaggcggcagtcacagt

SEQ ID NO: 139178 - DNA, 17 bp, synthetic construct
  source 1..17: mol_type = other DNA
aggcggcagtcacagtg

SEQ ID NO: 139179 - DNA, 17 bp, synthetic construct
  source 1..17: mol_type = other DNA
ggcggcagtcacagtgg

SEQ ID NO: 139180 - DNA, 17 bp, synthetic construct
  source 1..17: mol_type = other DNA
gcggcagtcacagtggt

SEQ ID NO: 139181 - DNA, 17 bp, synthetic construct
  source 1..17: mol_type = other DNA
cggcagtcacagtggtg

SEQ ID NO: 139182 - DNA, 17 bp, synthetic construct
  source 1..17: mol_type = other DNA
ggcagtcacagtggtga

SEQ ID NO: 139183 - DNA, 17 bp, synthetic construct
  source 1..17: mol_type = other DNA
gcagtcacagtggtgac

SEQ ID NO: 139184 - DNA, 17 bp, synthetic construct
  source 1..17: mol_type = other DNA
cagtcacagtggtgacg

SEQ ID NO: 139185 - DNA, 17 bp, synthetic construct
  source 1..17: mol_type = other DNA
agtcacagtggtgacgc

SEQ ID NO: 139186 - DNA, 17 bp, synthetic construct
  source 1..17: mol_type = other DNA
gtcacagtggtgacgct

SEQ ID NO: 139187 - DNA, 17 bp, synthetic construct
  source 1..17: mol_type = other DNA
tcacagtggtgacgctg

SEQ ID NO: 139188 - DNA, 17 bp, synthetic construct
  source 1..17: mol_type = other DNA
cacagtggtgacgctgg

SEQ ID NO: 139189 - DNA, 17 bp, synthetic construct
  source 1..17: mol_type = other DNA
acagtggtgacgctggc

SEQ ID NO: 139190 - DNA, 17 bp, synthetic construct
  source 1..17: mol_type = other DNA
cagtggtgacgctggct

SEQ ID NO: 139191 - DNA, 17 bp, synthetic construct
  source 1..17: mol_type = other DNA
agtggtgacgctggctg

SEQ ID NO: 139192 - DNA, 17 bp, synthetic construct
  source 1..17: mol_type = other DNA
gtggtgacgctggctgc

SEQ ID NO: 139193 - DNA, 17 bp, synthetic construct
  source 1..17: mol_type = other DNA
tggtgacgctggctgcc

SEQ ID NO: 139194 - DNA, 17 bp, synthetic construct
  source 1..17: mol_type = other DNA
ggtgacgctggctgcca

SEQ ID NO: 139195 - DNA, 17 bp, synthetic construct
  source 1..17: mol_type = other DNA
gtgacgctggctgccat

SEQ ID NO: 139196 - DNA, 17 bp, synthetic construct
  source 1..17: mol_type = other DNA
tgacgctggctgccatg

SEQ ID NO: 139197 - DNA, 17 bp, synthetic construct
  source 1..17: mol_type = other DNA
gacgctggctgccatga

SEQ ID NO: 139198 - DNA, 17 bp, synthetic construct
  source 1..17: mol_type = other DNA
acgctggctgccatgac

SEQ ID NO: 139199 - DNA, 17 bp, synthetic construct
  source 1..17: mol_type = other DNA
cgctggctgccatgacg

SEQ ID NO: 139200 - DNA, 17 bp, synthetic construct
  source 1..17: mol_type = other DNA
gctggctgccatgacgc

SEQ ID NO: 139201 - DNA, 17 bp, synthetic construct
  source 1..17: mol_type = other DNA
ctggctgccatgacgcc

SEQ ID NO: 139202 - DNA, 17 bp, synthetic construct
  source 1..17: mol_type = other DNA
tggctgccatgacgcct

SEQ ID NO: 139203 - DNA, 17 bp, synthetic construct
  source 1..17: mol_type = other DNA
ggctgccatgacgcctg

SEQ ID NO: 139204 - DNA, 17 bp, synthetic construct
  source 1..17: mol_type = other DNA
gctgccatgacgcctgg

SEQ ID NO: 139205 - DNA, 17 bp, synthetic construct
  source 1..17: mol_type = other DNA
ctgccatgacgcctggg

SEQ ID NO: 139206 - DNA, 17 bp, synthetic construct
  source 1..17: mol_type = other DNA
tgccatgacgcctgggg

SEQ ID NO: 139207 - DNA, 17 bp, synthetic construct
  source 1..17: mol_type = other DNA
gccatgacgcctgggga

SEQ ID NO: 139208 - DNA, 17 bp, synthetic construct
  source 1..17: mol_type = other DNA
ccatgacgcctggggag

SEQ ID NO: 139209 - DNA, 17 bp, synthetic construct
  source 1..17: mol_type = other DNA
catgacgcctggggagc

SEQ ID NO: 139210 - DNA, 17 bp, synthetic construct
  source 1..17: mol_type = other DNA
atgacgcctggggagcg

SEQ ID NO: 139211 - DNA, 17 bp, synthetic construct
  source 1..17: mol_type = other DNA
tgacgcctggggagcga

SEQ ID NO: 139212 - DNA, 17 bp, synthetic construct
  source 1..17: mol_type = other DNA
gacgcctggggagcgag

SEQ ID NO: 139213 - DNA, 17 bp, synthetic construct
  source 1..17: mol_type = other DNA
acgcctggggagcgagg

SEQ ID NO: 139214 - DNA, 17 bp, synthetic construct
  source 1..17: mol_type = other DNA
cgcctggggagcgaggg

SEQ ID NO: 139215 - DNA, 17 bp, synthetic construct
  source 1..17: mol_type = other DNA
gcctggggagcgagggc

SEQ ID NO: 139216 - DNA, 17 bp, synthetic construct
  source 1..17: mol_type = other DNA
cctggggagcgagggca

SEQ ID NO: 139217 - DNA, 17 bp, synthetic construct
  source 1..17: mol_type = other DNA
ctggggagcgagggcac

SEQ ID NO: 139218 - DNA, 17 bp, synthetic construct
  source 1..17: mol_type = other DNA
tggggagcgagggcacc

SEQ ID NO: 139219 - DNA, 17 bp, synthetic construct
  source 1..17: mol_type = other DNA
ggggagcgagggcacca

SEQ ID NO: 139220 - DNA, 17 bp, synthetic construct
  source 1..17: mol_type = other DNA
gggagcgagggcaccac

SEQ ID NO: 139221 - DNA, 17 bp, synthetic construct
  source 1..17: mol_type = other DNA
ggagcgagggcaccacc

SEQ ID NO: 139222 - DNA, 17 bp, synthetic construct
  source 1..17: mol_type = other DNA
gagcgagggcaccacca

SEQ ID NO: 139223 - DNA, 17 bp, synthetic construct
  source 1..17: mol_type = other DNA
agcgagggcaccaccac

SEQ ID NO: 139224 - DNA, 17 bp, synthetic construct
  source 1..17: mol_type = other DNA
gcgagggcaccaccacg

SEQ ID NO: 139225 - DNA, 17 bp, synthetic construct
  source 1..17: mol_type = other DNA
cgagggcaccaccacgg

SEQ ID NO: 139226 - DNA, 17 bp, synthetic construct
  source 1..17: mol_type = other DNA
gagggcaccaccacgga

SEQ ID NO: 139227 - DNA, 17 bp, synthetic construct
  source 1..17: mol_type = other DNA
agggcaccaccacggag

SEQ ID NO: 139228 - DNA, 17 bp, synthetic construct
  source 1..17: mol_type = other DNA
gggcaccaccacggagc

SEQ ID NO: 139229 - DNA, 17 bp, synthetic construct
  source 1..17: mol_type = other DNA
ggcaccaccacggagcc

SEQ ID NO: 139230 - DNA, 17 bp, synthetic construct
  source 1..17: mol_type = other DNA
gcaccaccacggagcct

SEQ ID NO: 139231 - DNA, 17 bp, synthetic construct
  source 1..17: mol_type = other DNA
caccaccacggagcctg

SEQ ID NO: 139232 - DNA, 17 bp, synthetic construct
  source 1..17: mol_type = other DNA
accaccacggagcctgc

SEQ ID NO: 139233 - DNA, 17 bp, synthetic construct
  source 1..17: mol_type = other DNA
ccaccacggagcctgcc

SEQ ID NO: 139234 - DNA, 17 bp, synthetic construct
  source 1..17: mol_type = other DNA
caccacggagcctgcca

SEQ ID NO: 139235 - DNA, 17 bp, synthetic construct
  source 1..17: mol_type = other DNA
accacggagcctgccag

SEQ ID NO: 139236 - DNA, 17 bp, synthetic construct
  source 1..17: mol_type = other DNA
ccacggagcctgccagc

SEQ ID NO: 139237 - DNA, 17 bp, synthetic construct
  source 1..17: mol_type = other DNA
cacggagcctgccagcc

SEQ ID NO: 139238 - DNA, 17 bp, synthetic construct
  source 1..17: mol_type = other DNA
acggagcctgccagccc

SEQ ID NO: 139239 - DNA, 17 bp, synthetic construct
  source 1..17: mol_type = other DNA
cggagcctgccagcccg

SEQ ID NO: 139240 - DNA, 17 bp, synthetic construct
  source 1..17: mol_type = other DNA
ggagcctgccagcccgt

SEQ ID NO: 139241 - DNA, 17 bp, synthetic construct
  source 1..17: mol_type = other DNA
gagcctgccagcccgtc

SEQ ID NO: 139242 - DNA, 17 bp, synthetic construct
  source 1..17: mol_type = other DNA
agcctgccagcccgtcc

SEQ ID NO: 139243 - DNA, 17 bp, synthetic construct
  source 1..17: mol_type = other DNA
gcctgccagcccgtcca

SEQ ID NO: 139244 - DNA, 17 bp, synthetic construct
  source 1..17: mol_type = other DNA
cctgccagcccgtccat

SEQ ID NO: 139245 - DNA, 17 bp, synthetic construct
  source 1..17: mol_type = other DNA
ctgccagcccgtccatc

SEQ ID NO: 139246 - DNA, 17 bp, synthetic construct
  source 1..17: mol_type = other DNA
tgccagcccgtccatct

SEQ ID NO: 139247 - DNA, 17 bp, synthetic construct
  source 1..17: mol_type = other DNA
gccagcccgtccatctc

SEQ ID NO: 139248 - DNA, 17 bp, synthetic construct
  source 1..17: mol_type = other DNA
ccagcccgtccatctct

SEQ ID NO: 139249 - DNA, 17 bp, synthetic construct
  source 1..17: mol_type = other DNA
cagcccgtccatctctg

SEQ ID NO: 139250 - DNA, 17 bp, synthetic construct
  source 1..17: mol_type = other DNA
agcccgtccatctctgt

SEQ ID NO: 139251 - DNA, 17 bp, synthetic construct
  source 1..17: mol_type = other DNA
gcccgtccatctctgtc

SEQ ID NO: 139252 - DNA, 17 bp, synthetic construct
  source 1..17: mol_type = other DNA
cccgtccatctctgtcc

SEQ ID NO: 139253 - DNA, 17 bp, synthetic construct
  source 1..17: mol_type = other DNA
ccgtccatctctgtccc

SEQ ID NO: 139254 - DNA, 17 bp, synthetic construct
  source 1..17: mol_type = other DNA
cgtccatctctgtcccg

SEQ ID NO: 139255 - DNA, 17 bp, synthetic construct
  source 1..17: mol_type = other DNA
gtccatctctgtcccgc

SEQ ID NO: 139256 - DNA, 17 bp, synthetic construct
  source 1..17: mol_type = other DNA
tccatctctgtcccgca

SEQ ID NO: 139257 - DNA, 17 bp, synthetic construct
  source 1..17: mol_type = other DNA
ccatctctgtcccgcag

SEQ ID NO: 139258 - DNA, 17 bp, synthetic construct
  source 1..17: mol_type = other DNA
catctctgtcccgcagg

SEQ ID NO: 139259 - DNA, 17 bp, synthetic construct
  source 1..17: mol_type = other DNA
atctctgtcccgcaggc

SEQ ID NO: 139260 - DNA, 17 bp, synthetic construct
  source 1..17: mol_type = other DNA
tctctgtcccgcaggca

SEQ ID NO: 139261 - DNA, 17 bp, synthetic construct
  source 1..17: mol_type = other DNA
ctctgtcccgcaggcat

SEQ ID NO: 139262 - DNA, 17 bp, synthetic construct
  source 1..17: mol_type = other DNA
tctgtcccgcaggcatc

SEQ ID NO: 139263 - DNA, 17 bp, synthetic construct
  source 1..17: mol_type = other DNA
ctgtcccgcaggcatct

SEQ ID NO: 139264 - DNA, 17 bp, synthetic construct
  source 1..17: mol_type = other DNA
tgtcccgcaggcatctg

SEQ ID NO: 139265 - DNA, 17 bp, synthetic construct
  source 1..17: mol_type = other DNA
gtcccgcaggcatctgc

SEQ ID NO: 139266 - DNA, 17 bp, synthetic construct
  source 1..17: mol_type = other DNA
tcccgcaggcatctgca

SEQ ID NO: 139267 - DNA, 17 bp, synthetic construct
  source 1..17: mol_type = other DNA
cccgcaggcatctgcag

SEQ ID NO: 139268 - DNA, 17 bp, synthetic construct
  source 1..17: mol_type = other DNA
ccgcaggcatctgcagc

SEQ ID NO: 139269 - DNA, 17 bp, synthetic construct
  source 1..17: mol_type = other DNA
cgcaggcatctgcagca

SEQ ID NO: 139270 - DNA, 17 bp, synthetic construct
  source 1..17: mol_type = other DNA
gcaggcatctgcagcat

SEQ ID NO: 139271 - DNA, 17 bp, synthetic construct
  source 1..17: mol_type = other DNA
caggcatctgcagcatg

SEQ ID NO: 139272 - DNA, 17 bp, synthetic construct
  source 1..17: mol_type = other DNA
aggcatctgcagcatgt

SEQ ID NO: 139273 - DNA, 17 bp, synthetic construct
  source 1..17: mol_type = other DNA
ggcatctgcagcatgtg

SEQ ID NO: 139274 - DNA, 17 bp, synthetic construct
  source 1..17: mol_type = other DNA
gcatctgcagcatgtgg

SEQ ID NO: 139275 - DNA, 17 bp, synthetic construct
  source 1..17: mol_type = other DNA
catctgcagcatgtggg

SEQ ID NO: 139276 - DNA, 17 bp, synthetic construct
  source 1..17: mol_type = other DNA
atctgcagcatgtgggg

SEQ ID NO: 139277 - DNA, 17 bp, synthetic construct
  source 1..17: mol_type = other DNA
tctgcagcatgtggggc

SEQ ID NO: 139278 - DNA, 17 bp, synthetic construct
  source 1..17: mol_type = other DNA
ctgcagcatgtggggcg

SEQ ID NO: 139279 - DNA, 17 bp, synthetic construct
  source 1..17: mol_type = other DNA
tgcagcatgtggggcgg

SEQ ID NO: 139280 - DNA, 17 bp, synthetic construct
  source 1..17: mol_type = other DNA
gcagcatgtggggcggc

SEQ ID NO: 139281 - DNA, 17 bp, synthetic construct
  source 1..17: mol_type = other DNA
cagcatgtggggcggct

SEQ ID NO: 139282 - DNA, 17 bp, synthetic construct
  source 1..17: mol_type = other DNA
agcatgtggggcggctc

SEQ ID NO: 139283 - DNA, 17 bp, synthetic construct
  source 1..17: mol_type = other DNA
gcatgtggggcggctcc

SEQ ID NO: 139284 - DNA, 17 bp, synthetic construct
  source 1..17: mol_type = other DNA
catgtggggcggctccc

SEQ ID NO: 139285 - DNA, 17 bp, synthetic construct
  source 1..17: mol_type = other DNA
atgtggggcggctccca

SEQ ID NO: 139286 - DNA, 17 bp, synthetic construct
  source 1..17: mol_type = other DNA
tgtggggcggctcccac

SEQ ID NO: 139287 - DNA, 17 bp, synthetic construct
  source 1..17: mol_type = other DNA
gtggggcggctcccact

SEQ ID NO: 139288 - DNA, 17 bp, synthetic construct
  source 1..17: mol_type = other DNA
tggggcggctcccacta

SEQ ID NO: 139289 - DNA, 17 bp, synthetic construct
  source 1..17: mol_type = other DNA
ggggcggctcccactat

SEQ ID NO: 139290 - DNA, 17 bp, synthetic construct
  source 1..17: mol_type = other DNA
gggcggctcccactatt

SEQ ID NO: 139291 - DNA, 17 bp, synthetic construct
  source 1..17: mol_type = other DNA
ggcggctcccactattc

SEQ ID NO: 139292 - DNA, 17 bp, synthetic construct
  source 1..17: mol_type = other DNA
gcggctcccactattcc

SEQ ID NO: 139293 - DNA, 17 bp, synthetic construct
  source 1..17: mol_type = other DNA
cggctcccactattcca

SEQ ID NO: 139294 - DNA, 17 bp, synthetic construct
  source 1..17: mol_type = other DNA
ggctcccactattccac

SEQ ID NO: 139295 - DNA, 17 bp, synthetic construct
  source 1..17: mol_type = other DNA
gctcccactattccacc

SEQ ID NO: 139296 - DNA, 17 bp, synthetic construct
  source 1..17: mol_type = other DNA
ctcccactattccacct

SEQ ID NO: 139297 - DNA, 17 bp, synthetic construct
  source 1..17: mol_type = other DNA
tcccactattccacctt

SEQ ID NO: 139298 - DNA, 17 bp, synthetic construct
  source 1..17: mol_type = other DNA
cccactattccaccttt

SEQ ID NO: 139299 - DNA, 17 bp, synthetic construct
  source 1..17: mol_type = other DNA
ccactattccacctttg

SEQ ID NO: 139300 - DNA, 17 bp, synthetic construct
  source 1..17: mol_type = other DNA
cactattccacctttga

SEQ ID NO: 139301 - DNA, 17 bp, synthetic construct
  source 1..17: mol_type = other DNA
actattccacctttgac

SEQ ID NO: 139302 - DNA, 17 bp, synthetic construct
  source 1..17: mol_type = other DNA
ctattccacctttgacg

SEQ ID NO: 139303 - DNA, 17 bp, synthetic construct
  source 1..17: mol_type = other DNA
tattccacctttgacgg

SEQ ID NO: 139304 - DNA, 17 bp, synthetic construct
  source 1..17: mol_type = other DNA
attccacctttgacggc

SEQ ID NO: 139305 - DNA, 17 bp, synthetic construct
  source 1..17: mol_type = other DNA
ttccacctttgacggca

SEQ ID NO: 139306 - DNA, 17 bp, synthetic construct
  source 1..17: mol_type = other DNA
tccacctttgacggcac

SEQ ID NO: 139307 - DNA, 17 bp, synthetic construct
  source 1..17: mol_type = other DNA
ccacctttgacggcacc

SEQ ID NO: 139308 - DNA, 17 bp, synthetic construct
  source 1..17: mol_type = other DNA
cacctttgacggcacct

SEQ ID NO: 139309 - DNA, 17 bp, synthetic construct
  source 1..17: mol_type = other DNA
acctttgacggcacctc

SEQ ID NO: 139310 - DNA, 17 bp, synthetic construct
  source 1..17: mol_type = other DNA
cctttgacggcacctct

SEQ ID NO: 139311 - DNA, 17 bp, synthetic construct
  source 1..17: mol_type = other DNA
ctttgacggcacctctt

SEQ ID NO: 139312 - DNA, 17 bp, synthetic construct
  source 1..17: mol_type = other DNA
tttgacggcacctctta

SEQ ID NO: 139313 - DNA, 17 bp, synthetic construct
  source 1..17: mol_type = other DNA
ttgacggcacctcttac

SEQ ID NO: 139314 - DNA, 17 bp, synthetic construct
  source 1..17: mol_type = other DNA
tgacggcacctcttaca

SEQ ID NO: 139315 - DNA, 17 bp, synthetic construct
  source 1..17: mol_type = other DNA
gacggcacctcttacac

SEQ ID NO: 139316 - DNA, 17 bp, synthetic construct
  source 1..17: mol_type = other DNA
acggcacctcttacacc

SEQ ID NO: 139317 - DNA, 17 bp, synthetic construct
  source 1..17: mol_type = other DNA
cggcacctcttacacct

SEQ ID NO: 139318 - DNA, 17 bp, synthetic construct
  source 1..17: mol_type = other DNA
ggcacctcttacacctt

SEQ ID NO: 139319 - DNA, 17 bp, synthetic construct
  source 1..17: mol_type = other DNA
gcacctcttacaccttc

SEQ ID NO: 139320 - DNA, 17 bp, synthetic construct
  source 1..17: mol_type = other DNA
cacctcttacaccttcc

SEQ ID NO: 139321 - DNA, 17 bp, synthetic construct
  source 1..17: mol_type = other DNA
acctcttacaccttccg

SEQ ID NO: 139322 - DNA, 17 bp, synthetic construct
  source 1..17: mol_type = other DNA
cctcttacaccttccgg

SEQ ID NO: 139323 - DNA, 17 bp, synthetic construct
  source 1..17: mol_type = other DNA
ctcttacaccttccggg

SEQ ID NO: 139324 - DNA, 17 bp, synthetic construct
  source 1..17: mol_type = other DNA
tcttacaccttccgggg

SEQ ID NO: 139325 - DNA, 17 bp, synthetic construct
  source 1..17: mol_type = other DNA
cttacaccttccggggc

SEQ ID NO: 139326 - DNA, 17 bp, synthetic construct
  source 1..17: mol_type = other DNA
ttacaccttccggggca

SEQ ID NO: 139327 - DNA, 17 bp, synthetic construct
  source 1..17: mol_type = other DNA
tacaccttccggggcaa

SEQ ID NO: 139328 - DNA, 17 bp, synthetic construct
  source 1..17: mol_type = other DNA
acaccttccggggcaac

SEQ ID NO: 139329 - DNA, 17 bp, synthetic construct
  source 1..17: mol_type = other DNA
caccttccggggcaact

SEQ ID NO: 139330 - DNA, 17 bp, synthetic construct
  source 1..17: mol_type = other DNA
accttccggggcaactg

SEQ ID NO: 139331 - DNA, 17 bp, synthetic construct
  source 1..17: mol_type = other DNA
ccttccggggcaactgc

SEQ ID NO: 139332 - DNA, 17 bp, synthetic construct
  source 1..17: mol_type = other DNA
cttccggggcaactgca

SEQ ID NO: 139333 - DNA, 17 bp, synthetic construct
  source 1..17: mol_type = other DNA
ttccggggcaactgcac

SEQ ID NO: 139334 - DNA, 17 bp, synthetic construct
  source 1..17: mol_type = other DNA
tccggggcaactgcacc

SEQ ID NO: 139335 - DNA, 17 bp, synthetic construct
  source 1..17: mol_type = other DNA
ccggggcaactgcacct

SEQ ID NO: 139336 - DNA, 17 bp, synthetic construct
  source 1..17: mol_type = other DNA
cggggcaactgcaccta

SEQ ID NO: 139337 - DNA, 17 bp, synthetic construct
  source 1..17: mol_type = other DNA
ggggcaactgcacctat

SEQ ID NO: 139338 - DNA, 17 bp, synthetic construct
  source 1..17: mol_type = other DNA
gggcaactgcacctatg

SEQ ID NO: 139339 - DNA, 17 bp, synthetic construct
  source 1..17: mol_type = other DNA
ggcaactgcacctatgt

SEQ ID NO: 139340 - DNA, 17 bp, synthetic construct
  source 1..17: mol_type = other DNA
gcaactgcacctatgtc

SEQ ID NO: 139341 - DNA, 17 bp, synthetic construct
  source 1..17: mol_type = other DNA
caactgcacctatgtcc

SEQ ID NO: 139342 - DNA, 17 bp, synthetic construct
  source 1..17: mol_type = other DNA
aactgcacctatgtcct

SEQ ID NO: 139343 - DNA, 17 bp, synthetic construct
  source 1..17: mol_type = other DNA
actgcacctatgtcctc

SEQ ID NO: 139344 - DNA, 17 bp, synthetic construct
  source 1..17: mol_type = other DNA
ctgcacctatgtcctca

SEQ ID NO: 139345 - DNA, 17 bp, synthetic construct
  source 1..17: mol_type = other DNA
tgcacctatgtcctcat

SEQ ID NO: 139346 - DNA, 17 bp, synthetic construct
  source 1..17: mol_type = other DNA
gcacctatgtcctcatg

SEQ ID NO: 139347 - DNA, 17 bp, synthetic construct
  source 1..17: mol_type = other DNA
cacctatgtcctcatga

SEQ ID NO: 139348 - DNA, 17 bp, synthetic construct
  source 1..17: mol_type = other DNA
acctatgtcctcatgag

SEQ ID NO: 139349 - DNA, 17 bp, synthetic construct
  source 1..17: mol_type = other DNA
cctatgtcctcatgaga

SEQ ID NO: 139350 - DNA, 17 bp, synthetic construct
  source 1..17: mol_type = other DNA
ctatgtcctcatgagag

SEQ ID NO: 139351 - DNA, 17 bp, synthetic construct
  source 1..17: mol_type = other DNA
tatgtcctcatgagaga

SEQ ID NO: 139352 - DNA, 17 bp, synthetic construct
  source 1..17: mol_type = other DNA
atgtcctcatgagagag

SEQ ID NO: 139353 - DNA, 17 bp, synthetic construct
  source 1..17: mol_type = other DNA
tgtcctcatgagagaga

SEQ ID NO: 139354 - DNA, 17 bp, synthetic construct
  source 1..17: mol_type = other DNA
gtcctcatgagagagat

SEQ ID NO: 139355 - DNA, 17 bp, synthetic construct
  source 1..17: mol_type = other DNA
tcctcatgagagagatc

SEQ ID NO: 139356 - DNA, 17 bp, synthetic construct
  source 1..17: mol_type = other DNA
cctcatgagagagatcc

SEQ ID NO: 139357 - DNA, 17 bp, synthetic construct
  source 1..17: mol_type = other DNA
ctcatgagagagatcca

SEQ ID NO: 139358 - DNA, 17 bp, synthetic construct
  source 1..17: mol_type = other DNA
tcatgagagagatccat

SEQ ID NO: 139359 - DNA, 17 bp, synthetic construct
  source 1..17: mol_type = other DNA
catgagagagatccatg

SEQ ID NO: 139360 - DNA, 17 bp, synthetic construct
  source 1..17: mol_type = other DNA
atgagagagatccatgc

SEQ ID NO: 139361 - DNA, 17 bp, synthetic construct
  source 1..17: mol_type = other DNA
tgagagagatccatgca

SEQ ID NO: 139362 - DNA, 17 bp, synthetic construct
  source 1..17: mol_type = other DNA
gagagagatccatgcac

SEQ ID NO: 139363 - DNA, 17 bp, synthetic construct
  source 1..17: mol_type = other DNA
agagagatccatgcacg

SEQ ID NO: 139364 - DNA, 17 bp, synthetic construct
  source 1..17: mol_type = other DNA
gagagatccatgcacgc

SEQ ID NO: 139365 - DNA, 17 bp, synthetic construct
  source 1..17: mol_type = other DNA
agagatccatgcacgct

SEQ ID NO: 139366 - DNA, 17 bp, synthetic construct
  source 1..17: mol_type = other DNA
gagatccatgcacgctt

SEQ ID NO: 139367 - DNA, 17 bp, synthetic construct
  source 1..17: mol_type = other DNA
agatccatgcacgcttt

SEQ ID NO: 139368 - DNA, 17 bp, synthetic construct
  source 1..17: mol_type = other DNA
gatccatgcacgctttg

SEQ ID NO: 139369 - DNA, 17 bp, synthetic construct
  source 1..17: mol_type = other DNA
atccatgcacgctttgg

SEQ ID NO: 139370 - DNA, 17 bp, synthetic construct
  source 1..17: mol_type = other DNA
tccatgcacgctttggg

SEQ ID NO: 139371 - DNA, 17 bp, synthetic construct
  source 1..17: mol_type = other DNA
ccatgcacgctttggga

SEQ ID NO: 139372 - DNA, 17 bp, synthetic construct
  source 1..17: mol_type = other DNA
catgcacgctttgggaa

SEQ ID NO: 139373 - DNA, 17 bp, synthetic construct
  source 1..17: mol_type = other DNA
atgcacgctttgggaat

SEQ ID NO: 139374 - DNA, 17 bp, synthetic construct
  source 1..17: mol_type = other DNA
tgcacgctttgggaatc

SEQ ID NO: 139375 - DNA, 17 bp, synthetic construct
  source 1..17: mol_type = other DNA
gcacgctttgggaatct

SEQ ID NO: 139376 - DNA, 17 bp, synthetic construct
  source 1..17: mol_type = other DNA
cacgctttgggaatctc

SEQ ID NO: 139377 - DNA, 17 bp, synthetic construct
  source 1..17: mol_type = other DNA
acgctttgggaatctca

SEQ ID NO: 139378 - DNA, 17 bp, synthetic construct
  source 1..17: mol_type = other DNA
cgctttgggaatctcag

SEQ ID NO: 139379 - DNA, 17 bp, synthetic construct
  source 1..17: mol_type = other DNA
gctttgggaatctcagc

SEQ ID NO: 139380 - DNA, 17 bp, synthetic construct
  source 1..17: mol_type = other DNA
ctttgggaatctcagcc

SEQ ID NO: 139381 - DNA, 17 bp, synthetic construct
  source 1..17: mol_type = other DNA
tttgggaatctcagcct

SEQ ID NO: 139382 - DNA, 17 bp, synthetic construct
  source 1..17: mol_type = other DNA
ttgggaatctcagcctc

SEQ ID NO: 139383 - DNA, 17 bp, synthetic construct
  source 1..17: mol_type = other DNA
tgggaatctcagcctct

SEQ ID NO: 139384 - DNA, 17 bp, synthetic construct
  source 1..17: mol_type = other DNA
gggaatctcagcctcta

SEQ ID NO: 139385 - DNA, 17 bp, synthetic construct
  source 1..17: mol_type = other DNA
ggaatctcagcctctac

SEQ ID NO: 139386 - DNA, 17 bp, synthetic construct
  source 1..17: mol_type = other DNA
gaatctcagcctctacc

SEQ ID NO: 139387 - DNA, 17 bp, synthetic construct
  source 1..17: mol_type = other DNA
aatctcagcctctacct

SEQ ID NO: 139388 - DNA, 17 bp, synthetic construct
  source 1..17: mol_type = other DNA
atctcagcctctacctg

SEQ ID NO: 139389 - DNA, 17 bp, synthetic construct
  source 1..17: mol_type = other DNA
tctcagcctctacctgg

SEQ ID NO: 139390 - DNA, 17 bp, synthetic construct
  source 1..17: mol_type = other DNA
ctcagcctctacctgga

SEQ ID NO: 139391 - DNA, 17 bp, synthetic construct
  source 1..17: mol_type = other DNA
tcagcctctacctggac

SEQ ID NO: 139392 - DNA, 17 bp, synthetic construct
  source 1..17: mol_type = other DNA
cagcctctacctggaca

SEQ ID NO: 139393 - DNA, 17 bp, synthetic construct
  source 1..17: mol_type = other DNA
agcctctacctggacaa

SEQ ID NO: 139394 - DNA, 17 bp, synthetic construct
  source 1..17: mol_type = other DNA
gcctctacctggacaac

SEQ ID NO: 139395 - DNA, 17 bp, synthetic construct
  source 1..17: mol_type = other DNA
cctctacctggacaacc

SEQ ID NO: 139396 - DNA, 17 bp, synthetic construct
  source 1..17: mol_type = other DNA
ctctacctggacaacca

SEQ ID NO: 139397 - DNA, 17 bp, synthetic construct
  source 1..17: mol_type = other DNA
tctacctggacaaccac

SEQ ID NO: 139398 - DNA, 17 bp, synthetic construct
  source 1..17: mol_type = other DNA
ctacctggacaaccact

SEQ ID NO: 139399 - DNA, 17 bp, synthetic construct
  source 1..17: mol_type = other DNA
tacctggacaaccacta

SEQ ID NO: 139400 - DNA, 17 bp, synthetic construct
  source 1..17: mol_type = other DNA
acctggacaaccactac

SEQ ID NO: 139401 - DNA, 17 bp, synthetic construct
  source 1..17: mol_type = other DNA
cctggacaaccactact

SEQ ID NO: 139402 - DNA, 17 bp, synthetic construct
  source 1..17: mol_type = other DNA
ctggacaaccactactg

SEQ ID NO: 139403 - DNA, 17 bp, synthetic construct
  source 1..17: mol_type = other DNA
tggacaaccactactgc

SEQ ID NO: 139404 - DNA, 17 bp, synthetic construct
  source 1..17: mol_type = other DNA
ggacaaccactactgca

SEQ ID NO: 139405 - DNA, 17 bp, synthetic construct
  source 1..17: mol_type = other DNA
gacaaccactactgcac

SEQ ID NO: 139406 - DNA, 17 bp, synthetic construct
  source 1..17: mol_type = other DNA
acaaccactactgcacg

SEQ ID NO: 139407 - DNA, 17 bp, synthetic construct
  source 1..17: mol_type = other DNA
caaccactactgcacgg

SEQ ID NO: 139408 - DNA, 17 bp, synthetic construct
  source 1..17: mol_type = other DNA
aaccactactgcacggc

SEQ ID NO: 139409 - DNA, 17 bp, synthetic construct
  source 1..17: mol_type = other DNA
accactactgcacggcc

SEQ ID NO: 139410 - DNA, 17 bp, synthetic construct
  source 1..17: mol_type = other DNA
ccactactgcacggcct

SEQ ID NO: 139411 - DNA, 17 bp, synthetic construct
  source 1..17: mol_type = other DNA
cactactgcacggcctc

SEQ ID NO: 139412 - DNA, 17 bp, synthetic construct
  source 1..17: mol_type = other DNA
actactgcacggcctct

SEQ ID NO: 139413 - DNA, 17 bp, synthetic construct
  source 1..17: mol_type = other DNA
ctactgcacggcctctg

SEQ ID NO: 139414 - DNA, 17 bp, synthetic construct
  source 1..17: mol_type = other DNA
tactgcacggcctctgc

SEQ ID NO: 139415 - DNA, 17 bp, synthetic construct
  source 1..17: mol_type = other DNA
actgcacggcctctgcc

SEQ ID NO: 139416 - DNA, 17 bp, synthetic construct
  source 1..17: mol_type = other DNA
ctgcacggcctctgcca

SEQ ID NO: 139417 - DNA, 17 bp, synthetic construct
  source 1..17: mol_type = other DNA
tgcacggcctctgccac

SEQ ID NO: 139418 - DNA, 17 bp, synthetic construct
  source 1..17: mol_type = other DNA
gcacggcctctgccact

SEQ ID NO: 139419 - DNA, 17 bp, synthetic construct
  source 1..17: mol_type = other DNA
cacggcctctgccactg

SEQ ID NO: 139420 - DNA, 17 bp, synthetic construct
  source 1..17: mol_type = other DNA
acggcctctgccactgc

SEQ ID NO: 139421 - DNA, 17 bp, synthetic construct
  source 1..17: mol_type = other DNA
cggcctctgccactgcc

SEQ ID NO: 139422 - DNA, 17 bp, synthetic construct
  source 1..17: mol_type = other DNA
ggcctctgccactgccg

SEQ ID NO: 139423 - DNA, 17 bp, synthetic construct
  source 1..17: mol_type = other DNA
gcctctgccactgccgc

SEQ ID NO: 139424 - DNA, 17 bp, synthetic construct
  source 1..17: mol_type = other DNA
cctctgccactgccgct

SEQ ID NO: 139425 - DNA, 17 bp, synthetic construct
  source 1..17: mol_type = other DNA
ctctgccactgccgctg

SEQ ID NO: 139426 - DNA, 17 bp, synthetic construct
  source 1..17: mol_type = other DNA
tctgccactgccgctgc

SEQ ID NO: 139427 - DNA, 17 bp, synthetic construct
  source 1..17: mol_type = other DNA
ctgccactgccgctgcc

SEQ ID NO: 139428 - DNA, 17 bp, synthetic construct
  source 1..17: mol_type = other DNA
tgccactgccgctgccg

SEQ ID NO: 139429 - DNA, 17 bp, synthetic construct
  source 1..17: mol_type = other DNA
gccactgccgctgccgc

SEQ ID NO: 139430 - DNA, 17 bp, synthetic construct
  source 1..17: mol_type = other DNA
ccactgccgctgccgcc

SEQ ID NO: 139431 - DNA, 17 bp, synthetic construct
  source 1..17: mol_type = other DNA
cactgccgctgccgccc

SEQ ID NO: 139432 - DNA, 17 bp, synthetic construct
  source 1..17: mol_type = other DNA
actgccgctgccgcccg

SEQ ID NO: 139433 - DNA, 17 bp, synthetic construct
  source 1..17: mol_type = other DNA
ctgccgctgccgcccgc

SEQ ID NO: 139434 - DNA, 17 bp, synthetic construct
  source 1..17: mol_type = other DNA
tgccgctgccgcccgct

SEQ ID NO: 139435 - DNA, 17 bp, synthetic construct
  source 1..17: mol_type = other DNA
gccgctgccgcccgctg

SEQ ID NO: 139436 - DNA, 17 bp, synthetic construct
  source 1..17: mol_type = other DNA
ccgctgccgcccgctgc

SEQ ID NO: 139437 - DNA, 17 bp, synthetic construct
  source 1..17: mol_type = other DNA
cgctgccgcccgctgcc

SEQ ID NO: 139438 - DNA, 17 bp, synthetic construct
  source 1..17: mol_type = other DNA
gctgccgcccgctgccc

SEQ ID NO: 139439 - DNA, 17 bp, synthetic construct
  source 1..17: mol_type = other DNA
ctgccgcccgctgcccc

SEQ ID NO: 139440 - DNA, 17 bp, synthetic construct
  source 1..17: mol_type = other DNA
tgccgcccgctgccccc

SEQ ID NO: 139441 - DNA, 17 bp, synthetic construct
  source 1..17: mol_type = other DNA
gccgcccgctgcccccg

SEQ ID NO: 139442 - DNA, 17 bp, synthetic construct
  source 1..17: mol_type = other DNA
ccgcccgctgcccccgc

SEQ ID NO: 139443 - DNA, 17 bp, synthetic construct
  source 1..17: mol_type = other DNA
cgcccgctgcccccgcg

SEQ ID NO: 139444 - DNA, 17 bp, synthetic construct
  source 1..17: mol_type = other DNA
gcccgctgcccccgcgc

SEQ ID NO: 139445 - DNA, 17 bp, synthetic construct
  source 1..17: mol_type = other DNA
cccgctgcccccgcgcc

SEQ ID NO: 139446 - DNA, 17 bp, synthetic construct
  source 1..17: mol_type = other DNA
ccgctgcccccgcgccc

SEQ ID NO: 139447 - DNA, 17 bp, synthetic construct
  source 1..17: mol_type = other DNA
cgctgcccccgcgccct

SEQ ID NO: 139448 - DNA, 17 bp, synthetic construct
  source 1..17: mol_type = other DNA
gctgcccccgcgccctc

SEQ ID NO: 139449 - DNA, 17 bp, synthetic construct
  source 1..17: mol_type = other DNA
ctgcccccgcgccctca

SEQ ID NO: 139450 - DNA, 17 bp, synthetic construct
  source 1..17: mol_type = other DNA
tgcccccgcgccctcag

SEQ ID NO: 139451 - DNA, 17 bp, synthetic construct
  source 1..17: mol_type = other DNA
gcccccgcgccctcagc

SEQ ID NO: 139452 - DNA, 17 bp, synthetic construct
  source 1..17: mol_type = other DNA
cccccgcgccctcagca

SEQ ID NO: 139453 - DNA, 17 bp, synthetic construct
  source 1..17: mol_type = other DNA
ccccgcgccctcagcat

SEQ ID NO: 139454 - DNA, 17 bp, synthetic construct
  source 1..17: mol_type = other DNA
cccgcgccctcagcatc

SEQ ID NO: 139455 - DNA, 17 bp, synthetic construct
  source 1..17: mol_type = other DNA
ccgcgccctcagcatcc

SEQ ID NO: 139456 - DNA, 17 bp, synthetic construct
  source 1..17: mol_type = other DNA
cgcgccctcagcatcca

SEQ ID NO: 139457 - DNA, 17 bp, synthetic construct
  source 1..17: mol_type = other DNA
gcgccctcagcatccac

SEQ ID NO: 139458 - DNA, 17 bp, synthetic construct
  source 1..17: mol_type = other DNA
cgccctcagcatccact

SEQ ID NO: 139459 - DNA, 17 bp, synthetic construct
  source 1..17: mol_type = other DNA
gccctcagcatccacta

SEQ ID NO: 139460 - DNA, 17 bp, synthetic construct
  source 1..17: mol_type = other DNA
ccctcagcatccactac

SEQ ID NO: 139461 - DNA, 17 bp, synthetic construct
  source 1..17: mol_type = other DNA
cctcagcatccactaca

SEQ ID NO: 139462 - DNA, 17 bp, synthetic construct
  source 1..17: mol_type = other DNA
ctcagcatccactacaa

SEQ ID NO: 139463 - DNA, 17 bp, synthetic construct
  source 1..17: mol_type = other DNA
tcagcatccactacaag

SEQ ID NO: 139464 - DNA, 17 bp, synthetic construct
  source 1..17: mol_type = other DNA
cagcatccactacaagt

SEQ ID NO: 139465 - DNA, 17 bp, synthetic construct
  source 1..17: mol_type = other DNA
agcatccactacaagtc

SEQ ID NO: 139466 - DNA, 17 bp, synthetic construct
  source 1..17: mol_type = other DNA
gcatccactacaagtcc

SEQ ID NO: 139467 - DNA, 17 bp, synthetic construct
  source 1..17: mol_type = other DNA
catccactacaagtcca

SEQ ID NO: 139468 - DNA, 17 bp, synthetic construct
  source 1..17: mol_type = other DNA
atccactacaagtccat

SEQ ID NO: 139469 - DNA, 17 bp, synthetic construct
  source 1..17: mol_type = other DNA
tccactacaagtccatg

SEQ ID NO: 139470 - DNA, 17 bp, synthetic construct
  source 1..17: mol_type = other DNA
ccactacaagtccatgg

SEQ ID NO: 139471 - DNA, 17 bp, synthetic construct
  source 1..17: mol_type = other DNA
cactacaagtccatgga

SEQ ID NO: 139472 - DNA, 17 bp, synthetic construct
  source 1..17: mol_type = other DNA
actacaagtccatggat

SEQ ID NO: 139473 - DNA, 17 bp, synthetic construct
  source 1..17: mol_type = other DNA
ctacaagtccatggata

SEQ ID NO: 139474 - DNA, 17 bp, synthetic construct
  source 1..17: mol_type = other DNA
tacaagtccatggatat

SEQ ID NO: 139475 - DNA, 17 bp, synthetic construct
  source 1..17: mol_type = other DNA
acaagtccatggatatc

SEQ ID NO: 139476 - DNA, 17 bp, synthetic construct
  source 1..17: mol_type = other DNA
caagtccatggatatcg

SEQ ID NO: 139477 - DNA, 17 bp, synthetic construct
  source 1..17: mol_type = other DNA
aagtccatggatatcgt

SEQ ID NO: 139478 - DNA, 17 bp, synthetic construct
  source 1..17: mol_type = other DNA
agtccatggatatcgtc

SEQ ID NO: 139479 - DNA, 17 bp, synthetic construct
  source 1..17: mol_type = other DNA
gtccatggatatcgtcc

SEQ ID NO: 139480 - DNA, 17 bp, synthetic construct
  source 1..17: mol_type = other DNA
tccatggatatcgtcct

SEQ ID NO: 139481 - DNA, 17 bp, synthetic construct
  source 1..17: mol_type = other DNA
ccatggatatcgtcctc

SEQ ID NO: 139482 - DNA, 17 bp, synthetic construct
  source 1..17: mol_type = other DNA
catggatatcgtcctca

SEQ ID NO: 139483 - DNA, 17 bp, synthetic construct
  source 1..17: mol_type = other DNA
atggatatcgtcctcac

SEQ ID NO: 139484 - DNA, 17 bp, synthetic construct
  source 1..17: mol_type = other DNA
tggatatcgtcctcact

SEQ ID NO: 139485 - DNA, 17 bp, synthetic construct
  source 1..17: mol_type = other DNA
ggatatcgtcctcactg

SEQ ID NO: 139486 - DNA, 17 bp, synthetic construct
  source 1..17: mol_type = other DNA
gatatcgtcctcactgt

SEQ ID NO: 139487 - DNA, 17 bp, synthetic construct
  source 1..17: mol_type = other DNA
atatcgtcctcactgtc

SEQ ID NO: 139488 - DNA, 17 bp, synthetic construct
  source 1..17: mol_type = other DNA
tatcgtcctcactgtca

SEQ ID NO: 139489 - DNA, 17 bp, synthetic construct
  source 1..17: mol_type = other DNA
atcgtcctcactgtcac

SEQ ID NO: 139490 - DNA, 17 bp, synthetic construct
  source 1..17: mol_type = other DNA
tcgtcctcactgtcacc

SEQ ID NO: 139491 - DNA, 17 bp, synthetic construct
  source 1..17: mol_type = other DNA
cgtcctcactgtcacca

SEQ ID NO: 139492 - DNA, 17 bp, synthetic construct
  source 1..17: mol_type = other DNA
gtcctcactgtcaccat

SEQ ID NO: 139493 - DNA, 17 bp, synthetic construct
  source 1..17: mol_type = other DNA
tcctcactgtcaccatg

SEQ ID NO: 139494 - DNA, 17 bp, synthetic construct
  source 1..17: mol_type = other DNA
cctcactgtcaccatgg

SEQ ID NO: 139495 - DNA, 17 bp, synthetic construct
  source 1..17: mol_type = other DNA
ctcactgtcaccatggt

SEQ ID NO: 139496 - DNA, 17 bp, synthetic construct
  source 1..17: mol_type = other DNA
tcactgtcaccatggtg

SEQ ID NO: 139497 - DNA, 17 bp, synthetic construct
  source 1..17: mol_type = other DNA
cactgtcaccatggtgc

SEQ ID NO: 139498 - DNA, 17 bp, synthetic construct
  source 1..17: mol_type = other DNA
actgtcaccatggtgca

SEQ ID NO: 139499 - DNA, 17 bp, synthetic construct
  source 1..17: mol_type = other DNA
ctgtcaccatggtgcat

SEQ ID NO: 139500 - DNA, 17 bp, synthetic construct
  source 1..17: mol_type = other DNA
tgtcaccatggtgcatg

SEQ ID NO: 139501 - DNA, 17 bp, synthetic construct
  source 1..17: mol_type = other DNA
gtcaccatggtgcatgg

SEQ ID NO: 139502 - DNA, 17 bp, synthetic construct
  source 1..17: mol_type = other DNA
tcaccatggtgcatggg

SEQ ID NO: 139503 - DNA, 17 bp, synthetic construct
  source 1..17: mol_type = other DNA
caccatggtgcatggga

SEQ ID NO: 139504 - DNA, 17 bp, synthetic construct
  source 1..17: mol_type = other DNA
accatggtgcatgggaa

SEQ ID NO: 139505 - DNA, 17 bp, synthetic construct
  source 1..17: mol_type = other DNA
ccatggtgcatgggaag

SEQ ID NO: 139506 - DNA, 17 bp, synthetic construct
  source 1..17: mol_type = other DNA
catggtgcatgggaagg

SEQ ID NO: 139507 - DNA, 17 bp, synthetic construct
  source 1..17: mol_type = other DNA
atggtgcatgggaagga

SEQ ID NO: 139508 - DNA, 17 bp, synthetic construct
  source 1..17: mol_type = other DNA
tggtgcatgggaaggag

SEQ ID NO: 139509 - DNA, 17 bp, synthetic construct
  source 1..17: mol_type = other DNA
ggtgcatgggaaggagg

SEQ ID NO: 139510 - DNA, 17 bp, synthetic construct
  source 1..17: mol_type = other DNA
gtgcatgggaaggagga

SEQ ID NO: 139511 - DNA, 17 bp, synthetic construct
  source 1..17: mol_type = other DNA
tgcatgggaaggaggag

SEQ ID NO: 139512 - DNA, 17 bp, synthetic construct
  source 1..17: mol_type = other DNA
gcatgggaaggaggagg

SEQ ID NO: 139513 - DNA, 17 bp, synthetic construct
  source 1..17: mol_type = other DNA
catgggaaggaggaggg

SEQ ID NO: 139514 - DNA, 17 bp, synthetic construct
  source 1..17: mol_type = other DNA
atgggaaggaggagggc

SEQ ID NO: 139515 - DNA, 17 bp, synthetic construct
  source 1..17: mol_type = other DNA
tgggaaggaggagggcc

SEQ ID NO: 139516 - DNA, 17 bp, synthetic construct
  source 1..17: mol_type = other DNA
gggaaggaggagggcct

SEQ ID NO: 139517 - DNA, 17 bp, synthetic construct
  source 1..17: mol_type = other DNA
ggaaggaggagggcctg

SEQ ID NO: 139518 - DNA, 17 bp, synthetic construct
  source 1..17: mol_type = other DNA
gaaggaggagggcctgg

SEQ ID NO: 139519 - DNA, 17 bp, synthetic construct
  source 1..17: mol_type = other DNA
aaggaggagggcctggt

SEQ ID NO: 139520 - DNA, 17 bp, synthetic construct
  source 1..17: mol_type = other DNA
aggaggagggcctggtg

SEQ ID NO: 139521 - DNA, 17 bp, synthetic construct
  source 1..17: mol_type = other DNA
ggaggagggcctggtga

SEQ ID NO: 139522 - DNA, 17 bp, synthetic construct
  source 1..17: mol_type = other DNA
gaggagggcctggtgag

SEQ ID NO: 139523 - DNA, 17 bp, synthetic construct
  source 1..17: mol_type = other DNA
aggagggcctggtgagt

SEQ ID NO: 139524 - DNA, 17 bp, synthetic construct
  source 1..17: mol_type = other DNA
ggagggcctggtgagtc

SEQ ID NO: 139525 - DNA, 17 bp, synthetic construct
  source 1..17: mol_type = other DNA
gagggcctggtgagtcc

SEQ ID NO: 139526 - DNA, 17 bp, synthetic construct
  source 1..17: mol_type = other DNA
agggcctggtgagtcca

SEQ ID NO: 139527 - DNA, 17 bp, synthetic construct
  source 1..17: mol_type = other DNA
gggcctggtgagtccag

SEQ ID NO: 139528 - DNA, 17 bp, synthetic construct
  source 1..17: mol_type = other DNA
ggcctggtgagtccagg

SEQ ID NO: 139529 - DNA, 17 bp, synthetic construct
  source 1..17: mol_type = other DNA
gcctggtgagtccaggc

SEQ ID NO: 139530 - DNA, 17 bp, synthetic construct
  source 1..17: mol_type = other DNA
cctggtgagtccaggct

SEQ ID NO: 139531 - DNA, 17 bp, synthetic construct
  source 1..17: mol_type = other DNA
ctggtgagtccaggctg

SEQ ID NO: 139532 - DNA, 17 bp, synthetic construct
  source 1..17: mol_type = other DNA
tggtgagtccaggctgc

SEQ ID NO: 139533 - DNA, 17 bp, synthetic construct
  source 1..17: mol_type = other DNA
ggtgagtccaggctgcg

SEQ ID NO: 139534 - DNA, 17 bp, synthetic construct
  source 1..17: mol_type = other DNA
gtgagtccaggctgcgg

SEQ ID NO: 139535 - DNA, 17 bp, synthetic construct
  source 1..17: mol_type = other DNA
tgagtccaggctgcggg

SEQ ID NO: 139536 - DNA, 17 bp, synthetic construct
  source 1..17: mol_type = other DNA
gagtccaggctgcgggt

SEQ ID NO: 139537 - DNA, 17 bp, synthetic construct
  source 1..17: mol_type = other DNA
agtccaggctgcgggtg

SEQ ID NO: 139538 - DNA, 17 bp, synthetic construct
  source 1..17: mol_type = other DNA
gtccaggctgcgggtgg

SEQ ID NO: 139539 - DNA, 17 bp, synthetic construct
  source 1..17: mol_type = other DNA
tccaggctgcgggtggc

SEQ ID NO: 139540 - DNA, 17 bp, synthetic construct
  source 1..17: mol_type = other DNA
ccaggctgcgggtggca

SEQ ID NO: 139541 - DNA, 17 bp, synthetic construct
  source 1..17: mol_type = other DNA
caggctgcgggtggcac

SEQ ID NO: 139542 - DNA, 17 bp, synthetic construct
  source 1..17: mol_type = other DNA
aggctgcgggtggcaca

SEQ ID NO: 139543 - DNA, 17 bp, synthetic construct
  source 1..17: mol_type = other DNA
ggctgcgggtggcacag

SEQ ID NO: 139544 - DNA, 17 bp, synthetic construct
  source 1..17: mol_type = other DNA
gctgcgggtggcacagt

SEQ ID NO: 139545 - DNA, 17 bp, synthetic construct
  source 1..17: mol_type = other DNA
ctgcgggtggcacagtg

SEQ ID NO: 139546 - DNA, 17 bp, synthetic construct
  source 1..17: mol_type = other DNA
tgcgggtggcacagtgt

SEQ ID NO: 139547 - DNA, 17 bp, synthetic construct
  source 1..17: mol_type = other DNA
gcgggtggcacagtgtt

SEQ ID NO: 139548 - DNA, 17 bp, synthetic construct
  source 1..17: mol_type = other DNA
cgggtggcacagtgttg

SEQ ID NO: 139549 - DNA, 17 bp, synthetic construct
  source 1..17: mol_type = other DNA
gggtggcacagtgttgg

SEQ ID NO: 139550 - DNA, 17 bp, synthetic construct
  source 1..17: mol_type = other DNA
ggtggcacagtgttggc

SEQ ID NO: 139551 - DNA, 17 bp, synthetic construct
  source 1..17: mol_type = other DNA
gtggcacagtgttggcc

SEQ ID NO: 139552 - DNA, 17 bp, synthetic construct
  source 1..17: mol_type = other DNA
tggcacagtgttggccc

SEQ ID NO: 139553 - DNA, 17 bp, synthetic construct
  source 1..17: mol_type = other DNA
ggcacagtgttggccca

SEQ ID NO: 139554 - DNA, 17 bp, synthetic construct
  source 1..17: mol_type = other DNA
gcacagtgttggcccag

SEQ ID NO: 139555 - DNA, 17 bp, synthetic construct
  source 1..17: mol_type = other DNA
cacagtgttggcccagt

SEQ ID NO: 139556 - DNA, 17 bp, synthetic construct
  source 1..17: mol_type = other DNA
acagtgttggcccagtc

SEQ ID NO: 139557 - DNA, 17 bp, synthetic construct
  source 1..17: mol_type = other DNA
cagtgttggcccagtcc

SEQ ID NO: 139558 - DNA, 17 bp, synthetic construct
  source 1..17: mol_type = other DNA
agtgttggcccagtccc

SEQ ID NO: 139559 - DNA, 17 bp, synthetic construct
  source 1..17: mol_type = other DNA
gtgttggcccagtccca

SEQ ID NO: 139560 - DNA, 17 bp, synthetic construct
  source 1..17: mol_type = other DNA
tgttggcccagtcccaa

SEQ ID NO: 139561 - DNA, 17 bp, synthetic construct
  source 1..17: mol_type = other DNA
gttggcccagtcccaac

SEQ ID NO: 139562 - DNA, 17 bp, synthetic construct
  source 1..17: mol_type = other DNA
ttggcccagtcccaacc

SEQ ID NO: 139563 - DNA, 17 bp, synthetic construct
  source 1..17: mol_type = other DNA
tggcccagtcccaaccg

SEQ ID NO: 139564 - DNA, 17 bp, synthetic construct
  source 1..17: mol_type = other DNA
ggcccagtcccaaccgc

SEQ ID NO: 139565 - DNA, 17 bp, synthetic construct
  source 1..17: mol_type = other DNA
gcccagtcccaaccgca

SEQ ID NO: 139566 - DNA, 17 bp, synthetic construct
  source 1..17: mol_type = other DNA
cccagtcccaaccgcac

SEQ ID NO: 139567 - DNA, 17 bp, synthetic construct
  source 1..17: mol_type = other DNA
ccagtcccaaccgcacc

SEQ ID NO: 139568 - DNA, 17 bp, synthetic construct
  source 1..17: mol_type = other DNA
cagtcccaaccgcacct

SEQ ID NO: 139569 - DNA, 17 bp, synthetic construct
  source 1..17: mol_type = other DNA
agtcccaaccgcacctg

SEQ ID NO: 139570 - DNA, 17 bp, synthetic construct
  source 1..17: mol_type = other DNA
gtcccaaccgcacctgg

SEQ ID NO: 139571 - DNA, 17 bp, synthetic construct
  source 1..17: mol_type = other DNA
tcccaaccgcacctggg

SEQ ID NO: 139572 - DNA, 17 bp, synthetic construct
  source 1..17: mol_type = other DNA
cccaaccgcacctgggc

SEQ ID NO: 139573 - DNA, 17 bp, synthetic construct
  source 1..17: mol_type = other DNA
ccaaccgcacctgggca

SEQ ID NO: 139574 - DNA, 17 bp, synthetic construct
  source 1..17: mol_type = other DNA
caaccgcacctgggcag

SEQ ID NO: 139575 - DNA, 17 bp, synthetic construct
  source 1..17: mol_type = other DNA
aaccgcacctgggcagg

SEQ ID NO: 139576 - DNA, 17 bp, synthetic construct
  source 1..17: mol_type = other DNA
accgcacctgggcaggc

SEQ ID NO: 139577 - DNA, 17 bp, synthetic construct
  source 1..17: mol_type = other DNA
ccgcacctgggcaggcc

SEQ ID NO: 139578 - DNA, 17 bp, synthetic construct
  source 1..17: mol_type = other DNA
cgcacctgggcaggccg

SEQ ID NO: 139579 - DNA, 17 bp, synthetic construct
  source 1..17: mol_type = other DNA
gcacctgggcaggccga

SEQ ID NO: 139580 - DNA, 17 bp, synthetic construct
  source 1..17: mol_type = other DNA
cacctgggcaggccgac

SEQ ID NO: 139581 - DNA, 17 bp, synthetic construct
  source 1..17: mol_type = other DNA
acctgggcaggccgact

SEQ ID NO: 139582 - DNA, 17 bp, synthetic construct
  source 1..17: mol_type = other DNA
cctgggcaggccgactg

SEQ ID NO: 139583 - DNA, 17 bp, synthetic construct
  source 1..17: mol_type = other DNA
ctgggcaggccgactgc

SEQ ID NO: 139584 - DNA, 17 bp, synthetic construct
  source 1..17: mol_type = other DNA
tgggcaggccgactgca

SEQ ID NO: 139585 - DNA, 17 bp, synthetic construct
  source 1..17: mol_type = other DNA
gggcaggccgactgcag

SEQ ID NO: 139586 - DNA, 17 bp, synthetic construct
  source 1..17: mol_type = other DNA
ggcaggccgactgcagg

SEQ ID NO: 139587 - DNA, 17 bp, synthetic construct
  source 1..17: mol_type = other DNA
gcaggccgactgcaggc

SEQ ID NO: 139588 - DNA, 17 bp, synthetic construct
  source 1..17: mol_type = other DNA
caggccgactgcaggcc

SEQ ID NO: 139589 - DNA, 17 bp, synthetic construct
  source 1..17: mol_type = other DNA
aggccgactgcaggccg

SEQ ID NO: 139590 - DNA, 17 bp, synthetic construct
  source 1..17: mol_type = other DNA
ggccgactgcaggccgg

SEQ ID NO: 139591 - DNA, 17 bp, synthetic construct
  source 1..17: mol_type = other DNA
gccgactgcaggccggg

SEQ ID NO: 139592 - DNA, 17 bp, synthetic construct
  source 1..17: mol_type = other DNA
ccgactgcaggccgggg

SEQ ID NO: 139593 - DNA, 17 bp, synthetic construct
  source 1..17: mol_type = other DNA
cgactgcaggccggggt

SEQ ID NO: 139594 - DNA, 17 bp, synthetic construct
  source 1..17: mol_type = other DNA
gactgcaggccggggtg

SEQ ID NO: 139595 - DNA, 17 bp, synthetic construct
  source 1..17: mol_type = other DNA
actgcaggccggggtga

SEQ ID NO: 139596 - DNA, 17 bp, synthetic construct
  source 1..17: mol_type = other DNA
ctgcaggccggggtgac

SEQ ID NO: 139597 - DNA, 17 bp, synthetic construct
  source 1..17: mol_type = other DNA
tgcaggccggggtgacc

SEQ ID NO: 139598 - DNA, 17 bp, synthetic construct
  source 1..17: mol_type = other DNA
gcaggccggggtgaccc

SEQ ID NO: 139599 - DNA, 17 bp, synthetic construct
  source 1..17: mol_type = other DNA
caggccggggtgaccca

SEQ ID NO: 139600 - DNA, 17 bp, synthetic construct
  source 1..17: mol_type = other DNA
aggccggggtgacccag

SEQ ID NO: 139601 - DNA, 17 bp, synthetic construct
  source 1..17: mol_type = other DNA
ggccggggtgacccagg

SEQ ID NO: 139602 - DNA, 17 bp, synthetic construct
  source 1..17: mol_type = other DNA
gccggggtgacccaggt

SEQ ID NO: 139603 - DNA, 17 bp, synthetic construct
  source 1..17: mol_type = other DNA
ccggggtgacccaggtg

SEQ ID NO: 139604 - DNA, 17 bp, synthetic construct
  source 1..17: mol_type = other DNA
cggggtgacccaggtgc

SEQ ID NO: 139605 - DNA, 17 bp, synthetic construct
  source 1..17: mol_type = other DNA
ggggtgacccaggtgcc

SEQ ID NO: 139606 - DNA, 17 bp, synthetic construct
  source 1..17: mol_type = other DNA
gggtgacccaggtgccg

SEQ ID NO: 139607 - DNA, 17 bp, synthetic construct
  source 1..17: mol_type = other DNA
ggtgacccaggtgccgc

SEQ ID NO: 139608 - DNA, 17 bp, synthetic construct
  source 1..17: mol_type = other DNA
gtgacccaggtgccgca

SEQ ID NO: 139609 - DNA, 17 bp, synthetic construct
  source 1..17: mol_type = other DNA
tgacccaggtgccgcag

SEQ ID NO: 139610 - DNA, 17 bp, synthetic construct
  source 1..17: mol_type = other DNA
gacccaggtgccgcagc

SEQ ID NO: 139611 - DNA, 17 bp, synthetic construct
  source 1..17: mol_type = other DNA
acccaggtgccgcagcg

SEQ ID NO: 139612 - DNA, 17 bp, synthetic construct
  source 1..17: mol_type = other DNA
cccaggtgccgcagcga

SEQ ID NO: 139613 - DNA, 17 bp, synthetic construct
  source 1..17: mol_type = other DNA
ccaggtgccgcagcgat

SEQ ID NO: 139614 - DNA, 17 bp, synthetic construct
  source 1..17: mol_type = other DNA
caggtgccgcagcgatg

SEQ ID NO: 139615 - DNA, 17 bp, synthetic construct
  source 1..17: mol_type = other DNA
aggtgccgcagcgatgg

SEQ ID NO: 139616 - DNA, 17 bp, synthetic construct
  source 1..17: mol_type = other DNA
ggtgccgcagcgatggc

SEQ ID NO: 139617 - DNA, 17 bp, synthetic construct
  source 1..17: mol_type = other DNA
gtgccgcagcgatggcc

SEQ ID NO: 139618 - DNA, 17 bp, synthetic construct
  source 1..17: mol_type = other DNA
tgccgcagcgatggccc

SEQ ID NO: 139619 - DNA, 17 bp, synthetic construct
  source 1..17: mol_type = other DNA
gccgcagcgatggccca

SEQ ID NO: 139620 - DNA, 17 bp, synthetic construct
  source 1..17: mol_type = other DNA
ccgcagcgatggcccag

SEQ ID NO: 139621 - DNA, 17 bp, synthetic construct
  source 1..17: mol_type = other DNA
cgcagcgatggcccagt

SEQ ID NO: 139622 - DNA, 17 bp, synthetic construct
  source 1..17: mol_type = other DNA
gcagcgatggcccagtg

SEQ ID NO: 139623 - DNA, 17 bp, synthetic construct
  source 1..17: mol_type = other DNA
cagcgatggcccagtgc

SEQ ID NO: 139624 - DNA, 17 bp, synthetic construct
  source 1..17: mol_type = other DNA
agcgatggcccagtgcc

SEQ ID NO: 139625 - DNA, 17 bp, synthetic construct
  source 1..17: mol_type = other DNA
gcgatggcccagtgccc

SEQ ID NO: 139626 - DNA, 17 bp, synthetic construct
  source 1..17: mol_type = other DNA
cgatggcccagtgccca

SEQ ID NO: 139627 - DNA, 17 bp, synthetic construct
  source 1..17: mol_type = other DNA
gatggcccagtgcccaa

SEQ ID NO: 139628 - DNA, 17 bp, synthetic construct
  source 1..17: mol_type = other DNA
atggcccagtgcccaag

SEQ ID NO: 139629 - DNA, 17 bp, synthetic construct
  source 1..17: mol_type = other DNA
tggcccagtgcccaaga

SEQ ID NO: 139630 - DNA, 17 bp, synthetic construct
  source 1..17: mol_type = other DNA
ggcccagtgcccaagac

SEQ ID NO: 139631 - DNA, 17 bp, synthetic construct
  source 1..17: mol_type = other DNA
gcccagtgcccaagaca

SEQ ID NO: 139632 - DNA, 17 bp, synthetic construct
  source 1..17: mol_type = other DNA
cccagtgcccaagacag

SEQ ID NO: 139633 - DNA, 17 bp, synthetic construct
  source 1..17: mol_type = other DNA
ccagtgcccaagacagc

SEQ ID NO: 139634 - DNA, 17 bp, synthetic construct
  source 1..17: mol_type = other DNA
cagtgcccaagacagct

SEQ ID NO: 139635 - DNA, 17 bp, synthetic construct
  source 1..17: mol_type = other DNA
agtgcccaagacagctc

SEQ ID NO: 139636 - DNA, 17 bp, synthetic construct
  source 1..17: mol_type = other DNA
gtgcccaagacagctcc

SEQ ID NO: 139637 - DNA, 17 bp, synthetic construct
  source 1..17: mol_type = other DNA
tgcccaagacagctccc

SEQ ID NO: 139638 - DNA, 17 bp, synthetic construct
  source 1..17: mol_type = other DNA
gcccaagacagctccca

SEQ ID NO: 139639 - DNA, 17 bp, synthetic construct
  source 1..17: mol_type = other DNA
cccaagacagctcccag

SEQ ID NO: 139640 - DNA, 17 bp, synthetic construct
  source 1..17: mol_type = other DNA
ccaagacagctcccagg

SEQ ID NO: 139641 - DNA, 17 bp, synthetic construct
  source 1..17: mol_type = other DNA
caagacagctcccaggg

SEQ ID NO: 139642 - DNA, 17 bp, synthetic construct
  source 1..17: mol_type = other DNA
aagacagctcccagggg

SEQ ID NO: 139643 - DNA, 17 bp, synthetic construct
  source 1..17: mol_type = other DNA
agacagctcccaggggg

SEQ ID NO: 139644 - DNA, 17 bp, synthetic construct
  source 1..17: mol_type = other DNA
gacagctcccagggggc

SEQ ID NO: 139645 - DNA, 17 bp, synthetic construct
  source 1..17: mol_type = other DNA
acagctcccagggggca

SEQ ID NO: 139646 - DNA, 17 bp, synthetic construct
  source 1..17: mol_type = other DNA
cagctcccagggggcag

SEQ ID NO: 139647 - DNA, 17 bp, synthetic construct
  source 1..17: mol_type = other DNA
agctcccagggggcagg

SEQ ID NO: 139648 - DNA, 17 bp, synthetic construct
  source 1..17: mol_type = other DNA
gctcccagggggcaggg

SEQ ID NO: 139649 - DNA, 17 bp, synthetic construct
  source 1..17: mol_type = other DNA
ctcccagggggcaggga

SEQ ID NO: 139650 - DNA, 17 bp, synthetic construct
  source 1..17: mol_type = other DNA
tcccagggggcagggaa

SEQ ID NO: 139651 - DNA, 17 bp, synthetic construct
  source 1..17: mol_type = other DNA
cccagggggcagggaag

SEQ ID NO: 139652 - DNA, 17 bp, synthetic construct
  source 1..17: mol_type = other DNA
ccagggggcagggaagg

SEQ ID NO: 139653 - DNA, 17 bp, synthetic construct
  source 1..17: mol_type = other DNA
cagggggcagggaaggc

SEQ ID NO: 139654 - DNA, 17 bp, synthetic construct
  source 1..17: mol_type = other DNA
agggggcagggaaggcc

SEQ ID NO: 139655 - DNA, 17 bp, synthetic construct
  source 1..17: mol_type = other DNA
gggggcagggaaggcct

SEQ ID NO: 139656 - DNA, 17 bp, synthetic construct
  source 1..17: mol_type = other DNA
ggggcagggaaggcctg

SEQ ID NO: 139657 - DNA, 17 bp, synthetic construct
  source 1..17: mol_type = other DNA
gggcagggaaggcctgt

SEQ ID NO: 139658 - DNA, 17 bp, synthetic construct
  source 1..17: mol_type = other DNA
ggcagggaaggcctgtg

SEQ ID NO: 139659 - DNA, 17 bp, synthetic construct
  source 1..17: mol_type = other DNA
gcagggaaggcctgtgg

SEQ ID NO: 139660 - DNA, 17 bp, synthetic construct
  source 1..17: mol_type = other DNA
cagggaaggcctgtgga

SEQ ID NO: 139661 - DNA, 17 bp, synthetic construct
  source 1..17: mol_type = other DNA
agggaaggcctgtggag

SEQ ID NO: 139662 - DNA, 17 bp, synthetic construct
  source 1..17: mol_type = other DNA
gggaaggcctgtggagc

SEQ ID NO: 139663 - DNA, 17 bp, synthetic construct
  source 1..17: mol_type = other DNA
ggaaggcctgtggagcc

SEQ ID NO: 139664 - DNA, 17 bp, synthetic construct
  source 1..17: mol_type = other DNA
gaaggcctgtggagccg

SEQ ID NO: 139665 - DNA, 17 bp, synthetic construct
  source 1..17: mol_type = other DNA
aaggcctgtggagccgc

SEQ ID NO: 139666 - DNA, 17 bp, synthetic construct
  source 1..17: mol_type = other DNA
aggcctgtggagccgcc

SEQ ID NO: 139667 - DNA, 17 bp, synthetic construct
  source 1..17: mol_type = other DNA
ggcctgtggagccgcct

SEQ ID NO: 139668 - DNA, 17 bp, synthetic construct
  source 1..17: mol_type = other DNA
gcctgtggagccgccta

SEQ ID NO: 139669 - DNA, 17 bp, synthetic construct
  source 1..17: mol_type = other DNA
cctgtggagccgcctaa

SEQ ID NO: 139670 - DNA, 17 bp, synthetic construct
  source 1..17: mol_type = other DNA
ctgtggagccgcctaag

SEQ ID NO: 139671 - DNA, 17 bp, synthetic construct
  source 1..17: mol_type = other DNA
tgtggagccgcctaagg

SEQ ID NO: 139672 - DNA, 17 bp, synthetic construct
  source 1..17: mol_type = other DNA
gtggagccgcctaaggc

SEQ ID NO: 139673 - DNA, 17 bp, synthetic construct
  source 1..17: mol_type = other DNA
tggagccgcctaaggcc

SEQ ID NO: 139674 - DNA, 17 bp, synthetic construct
  source 1..17: mol_type = other DNA
ggagccgcctaaggccg

SEQ ID NO: 139675 - DNA, 17 bp, synthetic construct
  source 1..17: mol_type = other DNA
gagccgcctaaggccga

SEQ ID NO: 139676 - DNA, 17 bp, synthetic construct
  source 1..17: mol_type = other DNA
agccgcctaaggccgag

SEQ ID NO: 139677 - DNA, 17 bp, synthetic construct
  source 1..17: mol_type = other DNA
gccgcctaaggccgagc

SEQ ID NO: 139678 - DNA, 17 bp, synthetic construct
  source 1..17: mol_type = other DNA
ccgcctaaggccgagcg

SEQ ID NO: 139679 - DNA, 17 bp, synthetic construct
  source 1..17: mol_type = other DNA
cgcctaaggccgagcgc

SEQ ID NO: 139680 - DNA, 17 bp, synthetic construct
  source 1..17: mol_type = other DNA
gcctaaggccgagcgca

SEQ ID NO: 139681 - DNA, 17 bp, synthetic construct
  source 1..17: mol_type = other DNA
cctaaggccgagcgcac

SEQ ID NO: 139682 - DNA, 17 bp, synthetic construct
  source 1..17: mol_type = other DNA
ctaaggccgagcgcacc

SEQ ID NO: 139683 - DNA, 17 bp, synthetic construct
  source 1..17: mol_type = other DNA
taaggccgagcgcaccc

SEQ ID NO: 139684 - DNA, 17 bp, synthetic construct
  source 1..17: mol_type = other DNA
aaggccgagcgcaccct

SEQ ID NO: 139685 - DNA, 17 bp, synthetic construct
  source 1..17: mol_type = other DNA
aggccgagcgcaccctg

SEQ ID NO: 139686 - DNA, 17 bp, synthetic construct
  source 1..17: mol_type = other DNA
ggccgagcgcaccctgt

SEQ ID NO: 139687 - DNA, 17 bp, synthetic construct
  source 1..17: mol_type = other DNA
gccgagcgcaccctgtg

SEQ ID NO: 139688 - DNA, 17 bp, synthetic construct
  source 1..17: mol_type = other DNA
ccgagcgcaccctgtgg

SEQ ID NO: 139689 - DNA, 17 bp, synthetic construct
  source 1..17: mol_type = other DNA
cgagcgcaccctgtggc

SEQ ID NO: 139690 - DNA, 17 bp, synthetic construct
  source 1..17: mol_type = other DNA
gagcgcaccctgtggcc

SEQ ID NO: 139691 - DNA, 17 bp, synthetic construct
  source 1..17: mol_type = other DNA
agcgcaccctgtggcct

SEQ ID NO: 139692 - DNA, 17 bp, synthetic construct
  source 1..17: mol_type = other DNA
gcgcaccctgtggccta

SEQ ID NO: 139693 - DNA, 17 bp, synthetic construct
  source 1..17: mol_type = other DNA
cgcaccctgtggcctaa

SEQ ID NO: 139694 - DNA, 17 bp, synthetic construct
  source 1..17: mol_type = other DNA
gcaccctgtggcctaaa

SEQ ID NO: 139695 - DNA, 17 bp, synthetic construct
  source 1..17: mol_type = other DNA
caccctgtggcctaaat

SEQ ID NO: 139696 - DNA, 17 bp, synthetic construct
  source 1..17: mol_type = other DNA
accctgtggcctaaatg

SEQ ID NO: 139697 - DNA, 17 bp, synthetic construct
  source 1..17: mol_type = other DNA
ccctgtggcctaaatgc

SEQ ID NO: 139698 - DNA, 17 bp, synthetic construct
  source 1..17: mol_type = other DNA
cctgtggcctaaatgca

SEQ ID NO: 139699 - DNA, 17 bp, synthetic construct
  source 1..17: mol_type = other DNA
ctgtggcctaaatgcag

SEQ ID NO: 139700 - DNA, 17 bp, synthetic construct
  source 1..17: mol_type = other DNA
tgtggcctaaatgcagc

SEQ ID NO: 139701 - DNA, 17 bp, synthetic construct
  source 1..17: mol_type = other DNA
gtggcctaaatgcagcc

SEQ ID NO: 139702 - DNA, 17 bp, synthetic construct
  source 1..17: mol_type = other DNA
tggcctaaatgcagcca

SEQ ID NO: 139703 - DNA, 17 bp, synthetic construct
  source 1..17: mol_type = other DNA
ggcctaaatgcagccag

SEQ ID NO: 139704 - DNA, 17 bp, synthetic construct
  source 1..17: mol_type = other DNA
gcctaaatgcagccagc

SEQ ID NO: 139705 - DNA, 17 bp, synthetic construct
  source 1..17: mol_type = other DNA
cctaaatgcagccagct

SEQ ID NO: 139706 - DNA, 17 bp, synthetic construct
  source 1..17: mol_type = other DNA
ctaaatgcagccagctg

SEQ ID NO: 139707 - DNA, 17 bp, synthetic construct
  source 1..17: mol_type = other DNA
taaatgcagccagctgg

SEQ ID NO: 139708 - DNA, 17 bp, synthetic construct
  source 1..17: mol_type = other DNA
aaatgcagccagctgga

SEQ ID NO: 139709 - DNA, 17 bp, synthetic construct
  source 1..17: mol_type = other DNA
aatgcagccagctggag

SEQ ID NO: 139710 - DNA, 17 bp, synthetic construct
  source 1..17: mol_type = other DNA
atgcagccagctggaga

SEQ ID NO: 139711 - DNA, 17 bp, synthetic construct
  source 1..17: mol_type = other DNA
tgcagccagctggagac

SEQ ID NO: 139712 - DNA, 17 bp, synthetic construct
  source 1..17: mol_type = other DNA
gcagccagctggagact

SEQ ID NO: 139713 - DNA, 17 bp, synthetic construct
  source 1..17: mol_type = other DNA
cagccagctggagactc

SEQ ID NO: 139714 - DNA, 17 bp, synthetic construct
  source 1..17: mol_type = other DNA
agccagctggagactcc

SEQ ID NO: 139715 - DNA, 17 bp, synthetic construct
  source 1..17: mol_type = other DNA
gccagctggagactcca

SEQ ID NO: 139716 - DNA, 17 bp, synthetic construct
  source 1..17: mol_type = other DNA
ccagctggagactccag

SEQ ID NO: 139717 - DNA, 17 bp, synthetic construct
  source 1..17: mol_type = other DNA
cagctggagactccagg

SEQ ID NO: 139718 - DNA, 17 bp, synthetic construct
  source 1..17: mol_type = other DNA
agctggagactccaggc

SEQ ID NO: 139719 - DNA, 17 bp, synthetic construct
  source 1..17: mol_type = other DNA
gctggagactccaggcc

SEQ ID NO: 139720 - DNA, 17 bp, synthetic construct
  source 1..17: mol_type = other DNA
ctggagactccaggccc

SEQ ID NO: 139721 - DNA, 17 bp, synthetic construct
  source 1..17: mol_type = other DNA
tggagactccaggcccc

SEQ ID NO: 139722 - DNA, 17 bp, synthetic construct
  source 1..17: mol_type = other DNA
ggagactccaggccccc

SEQ ID NO: 139723 - DNA, 17 bp, synthetic construct
  source 1..17: mol_type = other DNA
gagactccaggccccca

SEQ ID NO: 139724 - DNA, 17 bp, synthetic construct
  source 1..17: mol_type = other DNA
agactccaggcccccag

SEQ ID NO: 139725 - DNA, 17 bp, synthetic construct
  source 1..17: mol_type = other DNA
gactccaggcccccagg

SEQ ID NO: 139726 - DNA, 17 bp, synthetic construct
  source 1..17: mol_type = other DNA
actccaggcccccaggg

SEQ ID NO: 139727 - DNA, 17 bp, synthetic construct
  source 1..17: mol_type = other DNA
ctccaggcccccaggga

SEQ ID NO: 139728 - DNA, 17 bp, synthetic construct
  source 1..17: mol_type = other DNA
tccaggcccccagggaa

SEQ ID NO: 139729 - DNA, 17 bp, synthetic construct
  source 1..17: mol_type = other DNA
ccaggcccccagggaag

SEQ ID NO: 139730 - DNA, 17 bp, synthetic construct
  source 1..17: mol_type = other DNA
caggcccccagggaaga

SEQ ID NO: 139731 - DNA, 17 bp, synthetic construct
  source 1..17: mol_type = other DNA
aggcccccagggaagat

SEQ ID NO: 139732 - DNA, 17 bp, synthetic construct
  source 1..17: mol_type = other DNA
ggcccccagggaagatc

SEQ ID NO: 139733 - DNA, 17 bp, synthetic construct
  source 1..17: mol_type = other DNA
gcccccagggaagatct

SEQ ID NO: 139734 - DNA, 17 bp, synthetic construct
  source 1..17: mol_type = other DNA
cccccagggaagatctg

SEQ ID NO: 139735 - DNA, 17 bp, synthetic construct
  source 1..17: mol_type = other DNA
ccccagggaagatctgg

SEQ ID NO: 139736 - DNA, 17 bp, synthetic construct
  source 1..17: mol_type = other DNA
cccagggaagatctggg

SEQ ID NO: 139737 - DNA, 17 bp, synthetic construct
  source 1..17: mol_type = other DNA
ccagggaagatctgggc

SEQ ID NO: 139738 - DNA, 17 bp, synthetic construct
  source 1..17: mol_type = other DNA
cagggaagatctgggct

SEQ ID NO: 139739 - DNA, 17 bp, synthetic construct
  source 1..17: mol_type = other DNA
agggaagatctgggctt

SEQ ID NO: 139740 - DNA, 17 bp, synthetic construct
  source 1..17: mol_type = other DNA
gggaagatctgggcttt

SEQ ID NO: 139741 - DNA, 17 bp, synthetic construct
  source 1..17: mol_type = other DNA
ggaagatctgggctttg

SEQ ID NO: 139742 - DNA, 17 bp, synthetic construct
  source 1..17: mol_type = other DNA
gaagatctgggctttgg

SEQ ID NO: 139743 - DNA, 17 bp, synthetic construct
  source 1..17: mol_type = other DNA
aagatctgggctttggg

SEQ ID NO: 139744 - DNA, 17 bp, synthetic construct
  source 1..17: mol_type = other DNA
agatctgggctttgggg

SEQ ID NO: 139745 - DNA, 17 bp, synthetic construct
  source 1..17: mol_type = other DNA
gatctgggctttggggt

SEQ ID NO: 139746 - DNA, 17 bp, synthetic construct
  source 1..17: mol_type = other DNA
atctgggctttggggtg

SEQ ID NO: 139747 - DNA, 17 bp, synthetic construct
  source 1..17: mol_type = other DNA
tctgggctttggggtgg

SEQ ID NO: 139748 - DNA, 17 bp, synthetic construct
  source 1..17: mol_type = other DNA
ctgggctttggggtggg

SEQ ID NO: 139749 - DNA, 17 bp, synthetic construct
  source 1..17: mol_type = other DNA
tgggctttggggtgggg

SEQ ID NO: 139750 - DNA, 17 bp, synthetic construct
  source 1..17: mol_type = other DNA
gggctttggggtggggg

SEQ ID NO: 139751 - DNA, 17 bp, synthetic construct
  source 1..17: mol_type = other DNA
ggctttggggtggggga

SEQ ID NO: 139752 - DNA, 17 bp, synthetic construct
  source 1..17: mol_type = other DNA
gctttggggtgggggat

SEQ ID NO: 139753 - DNA, 17 bp, synthetic construct
  source 1..17: mol_type = other DNA
ctttggggtgggggata

SEQ ID NO: 139754 - DNA, 17 bp, synthetic construct
  source 1..17: mol_type = other DNA
tttggggtgggggatac

SEQ ID NO: 139755 - DNA, 17 bp, synthetic construct
  source 1..17: mol_type = other DNA
ttggggtgggggataca

SEQ ID NO: 139756 - DNA, 17 bp, synthetic construct
  source 1..17: mol_type = other DNA
tggggtgggggatacac

SEQ ID NO: 139757 - DNA, 17 bp, synthetic construct
  source 1..17: mol_type = other DNA
ggggtgggggatacaca

SEQ ID NO: 139758 - DNA, 17 bp, synthetic construct
  source 1..17: mol_type = other DNA
gggtgggggatacacag

SEQ ID NO: 139759 - DNA, 17 bp, synthetic construct
  source 1..17: mol_type = other DNA
ggtgggggatacacagg

SEQ ID NO: 139760 - DNA, 17 bp, synthetic construct
  source 1..17: mol_type = other DNA
gtgggggatacacaggg

SEQ ID NO: 139761 - DNA, 17 bp, synthetic construct
  source 1..17: mol_type = other DNA
tgggggatacacagggg

SEQ ID NO: 139762 - DNA, 17 bp, synthetic construct
  source 1..17: mol_type = other DNA
gggggatacacaggggg

SEQ ID NO: 139763 - DNA, 17 bp, synthetic construct
  source 1..17: mol_type = other DNA
ggggatacacagggggg

SEQ ID NO: 139764 - DNA, 17 bp, synthetic construct
  source 1..17: mol_type = other DNA
gggatacacaggggggt

SEQ ID NO: 139765 - DNA, 17 bp, synthetic construct
  source 1..17: mol_type = other DNA
ggatacacaggggggtc

SEQ ID NO: 139766 - DNA, 17 bp, synthetic construct
  source 1..17: mol_type = other DNA
gatacacaggggggtct

SEQ ID NO: 139767 - DNA, 17 bp, synthetic construct
  source 1..17: mol_type = other DNA
atacacaggggggtctc

SEQ ID NO: 139768 - DNA, 17 bp, synthetic construct
  source 1..17: mol_type = other DNA
tacacaggggggtctct

SEQ ID NO: 139769 - DNA, 17 bp, synthetic construct
  source 1..17: mol_type = other DNA
acacaggggggtctctg

SEQ ID NO: 139770 - DNA, 17 bp, synthetic construct
  source 1..17: mol_type = other DNA
cacaggggggtctctgc

SEQ ID NO: 139771 - DNA, 17 bp, synthetic construct
  source 1..17: mol_type = other DNA
acaggggggtctctgca

SEQ ID NO: 139772 - DNA, 17 bp, synthetic construct
  source 1..17: mol_type = other DNA
caggggggtctctgcac

SEQ ID NO: 139773 - DNA, 17 bp, synthetic construct
  source 1..17: mol_type = other DNA
aggggggtctctgcaca

SEQ ID NO: 139774 - DNA, 17 bp, synthetic construct
  source 1..17: mol_type = other DNA
ggggggtctctgcacat

SEQ ID NO: 139775 - DNA, 17 bp, synthetic construct
  source 1..17: mol_type = other DNA
gggggtctctgcacatg

SEQ ID NO: 139776 - DNA, 17 bp, synthetic construct
  source 1..17: mol_type = other DNA
ggggtctctgcacatgg

SEQ ID NO: 139777 - DNA, 17 bp, synthetic construct
  source 1..17: mol_type = other DNA
gggtctctgcacatgga

SEQ ID NO: 139778 - DNA, 17 bp, synthetic construct
  source 1..17: mol_type = other DNA
ggtctctgcacatggag

SEQ ID NO: 139779 - DNA, 17 bp, synthetic construct
  source 1..17: mol_type = other DNA
gtctctgcacatggagg

SEQ ID NO: 139780 - DNA, 17 bp, synthetic construct
  source 1..17: mol_type = other DNA
tctctgcacatggaggc

SEQ ID NO: 139781 - DNA, 17 bp, synthetic construct
  source 1..17: mol_type = other DNA
ctctgcacatggaggca

SEQ ID NO: 139782 - DNA, 17 bp, synthetic construct
  source 1..17: mol_type = other DNA
tctgcacatggaggcag

SEQ ID NO: 139783 - DNA, 17 bp, synthetic construct
  source 1..17: mol_type = other DNA
ctgcacatggaggcaga

SEQ ID NO: 139784 - DNA, 17 bp, synthetic construct
  source 1..17: mol_type = other DNA
tgcacatggaggcagag

SEQ ID NO: 139785 - DNA, 17 bp, synthetic construct
  source 1..17: mol_type = other DNA
gcacatggaggcagagc

SEQ ID NO: 139786 - DNA, 17 bp, synthetic construct
  source 1..17: mol_type = other DNA
cacatggaggcagagcc

SEQ ID NO: 139787 - DNA, 17 bp, synthetic construct
  source 1..17: mol_type = other DNA
acatggaggcagagccc

SEQ ID NO: 139788 - DNA, 17 bp, synthetic construct
  source 1..17: mol_type = other DNA
catggaggcagagcccc

SEQ ID NO: 139789 - DNA, 17 bp, synthetic construct
  source 1..17: mol_type = other DNA
atggaggcagagcccca

SEQ ID NO: 139790 - DNA, 17 bp, synthetic construct
  source 1..17: mol_type = other DNA
tggaggcagagccccaa

SEQ ID NO: 139791 - DNA, 17 bp, synthetic construct
  source 1..17: mol_type = other DNA
ggaggcagagccccaaa

SEQ ID NO: 139792 - DNA, 17 bp, synthetic construct
  source 1..17: mol_type = other DNA
gaggcagagccccaaag

SEQ ID NO: 139793 - DNA, 17 bp, synthetic construct
  source 1..17: mol_type = other DNA
aggcagagccccaaaga

SEQ ID NO: 139794 - DNA, 17 bp, synthetic construct
  source 1..17: mol_type = other DNA
ggcagagccccaaagag

SEQ ID NO: 139795 - DNA, 17 bp, synthetic construct
  source 1..17: mol_type = other DNA
gcagagccccaaagaga

SEQ ID NO: 139796 - DNA, 17 bp, synthetic construct
  source 1..17: mol_type = other DNA
cagagccccaaagagaa

SEQ ID NO: 139797 - DNA, 17 bp, synthetic construct
  source 1..17: mol_type = other DNA
agagccccaaagagaag

SEQ ID NO: 139798 - DNA, 17 bp, synthetic construct
  source 1..17: mol_type = other DNA
gagccccaaagagaagc

SEQ ID NO: 139799 - DNA, 17 bp, synthetic construct
  source 1..17: mol_type = other DNA
agccccaaagagaagcc

SEQ ID NO: 139800 - DNA, 17 bp, synthetic construct
  source 1..17: mol_type = other DNA
gccccaaagagaagccc

SEQ ID NO: 139801 - DNA, 17 bp, synthetic construct
  source 1..17: mol_type = other DNA
ccccaaagagaagccct

SEQ ID NO: 139802 - DNA, 17 bp, synthetic construct
  source 1..17: mol_type = other DNA
cccaaagagaagccctg

SEQ ID NO: 139803 - DNA, 17 bp, synthetic construct
  source 1..17: mol_type = other DNA
ccaaagagaagccctgc

SEQ ID NO: 139804 - DNA, 17 bp, synthetic construct
  source 1..17: mol_type = other DNA
caaagagaagccctgct

SEQ ID NO: 139805 - DNA, 17 bp, synthetic construct
  source 1..17: mol_type = other DNA
aaagagaagccctgctc

SEQ ID NO: 139806 - DNA, 17 bp, synthetic construct
  source 1..17: mol_type = other DNA
aagagaagccctgctcc

SEQ ID NO: 139807 - DNA, 17 bp, synthetic construct
  source 1..17: mol_type = other DNA
agagaagccctgctccc

SEQ ID NO: 139808 - DNA, 17 bp, synthetic construct
  source 1..17: mol_type = other DNA
gagaagccctgctcccc

SEQ ID NO: 139809 - DNA, 17 bp, synthetic construct
  source 1..17: mol_type = other DNA
agaagccctgctccccg

SEQ ID NO: 139810 - DNA, 17 bp, synthetic construct
  source 1..17: mol_type = other DNA
gaagccctgctccccga

SEQ ID NO: 139811 - DNA, 17 bp, synthetic construct
  source 1..17: mol_type = other DNA
aagccctgctccccgag

SEQ ID NO: 139812 - DNA, 17 bp, synthetic construct
  source 1..17: mol_type = other DNA
agccctgctccccgagc

SEQ ID NO: 139813 - DNA, 17 bp, synthetic construct
  source 1..17: mol_type = other DNA
gccctgctccccgagcc

SEQ ID NO: 139814 - DNA, 17 bp, synthetic construct
  source 1..17: mol_type = other DNA
ccctgctccccgagccc

SEQ ID NO: 139815 - DNA, 17 bp, synthetic construct
  source 1..17: mol_type = other DNA
cctgctccccgagccca

SEQ ID NO: 139816 - DNA, 17 bp, synthetic construct
  source 1..17: mol_type = other DNA
ctgctccccgagcccac

SEQ ID NO: 139817 - DNA, 17 bp, synthetic construct
  source 1..17: mol_type = other DNA
tgctccccgagcccacc

SEQ ID NO: 139818 - DNA, 17 bp, synthetic construct
  source 1..17: mol_type = other DNA
gctccccgagcccacct

SEQ ID NO: 139819 - DNA, 17 bp, synthetic construct
  source 1..17: mol_type = other DNA
ctccccgagcccacctg

SEQ ID NO: 139820 - DNA, 17 bp, synthetic construct
  source 1..17: mol_type = other DNA
tccccgagcccacctgg

SEQ ID NO: 139821 - DNA, 17 bp, synthetic construct
  source 1..17: mol_type = other DNA
ccccgagcccacctggc

SEQ ID NO: 139822 - DNA, 17 bp, synthetic construct
  source 1..17: mol_type = other DNA
cccgagcccacctggca

SEQ ID NO: 139823 - DNA, 17 bp, synthetic construct
  source 1..17: mol_type = other DNA
ccgagcccacctggcac

SEQ ID NO: 139824 - DNA, 17 bp, synthetic construct
  source 1..17: mol_type = other DNA
cgagcccacctggcact

SEQ ID NO: 139825 - DNA, 17 bp, synthetic construct
  source 1..17: mol_type = other DNA
gagcccacctggcactg

SEQ ID NO: 139826 - DNA, 17 bp, synthetic construct
  source 1..17: mol_type = other DNA
agcccacctggcactgc

SEQ ID NO: 139827 - DNA, 17 bp, synthetic construct
  source 1..17: mol_type = other DNA
gcccacctggcactgcc

SEQ ID NO: 139828 - DNA, 17 bp, synthetic construct
  source 1..17: mol_type = other DNA
cccacctggcactgcct

SEQ ID NO: 139829 - DNA, 17 bp, synthetic construct
  source 1..17: mol_type = other DNA
ccacctggcactgcctc

SEQ ID NO: 139830 - DNA, 17 bp, synthetic construct
  source 1..17: mol_type = other DNA
cacctggcactgcctcc

SEQ ID NO: 139831 - DNA, 17 bp, synthetic construct
  source 1..17: mol_type = other DNA
acctggcactgcctccc

SEQ ID NO: 139832 - DNA, 17 bp, synthetic construct
  source 1..17: mol_type = other DNA
cctggcactgcctccca

SEQ ID NO: 139833 - DNA, 17 bp, synthetic construct
  source 1..17: mol_type = other DNA
ctggcactgcctcccag

SEQ ID NO: 139834 - DNA, 17 bp, synthetic construct
  source 1..17: mol_type = other DNA
tggcactgcctcccagc

SEQ ID NO: 139835 - DNA, 17 bp, synthetic construct
  source 1..17: mol_type = other DNA
ggcactgcctcccagct

SEQ ID NO: 139836 - DNA, 17 bp, synthetic construct
  source 1..17: mol_type = other DNA
gcactgcctcccagctc

SEQ ID NO: 139837 - DNA, 17 bp, synthetic construct
  source 1..17: mol_type = other DNA
cactgcctcccagctca

SEQ ID NO: 139838 - DNA, 17 bp, synthetic construct
  source 1..17: mol_type = other DNA
actgcctcccagctcag

SEQ ID NO: 139839 - DNA, 17 bp, synthetic construct
  source 1..17: mol_type = other DNA
ctgcctcccagctcagg

SEQ ID NO: 139840 - DNA, 17 bp, synthetic construct
  source 1..17: mol_type = other DNA
tgcctcccagctcaggg

SEQ ID NO: 139841 - DNA, 17 bp, synthetic construct
  source 1..17: mol_type = other DNA
gcctcccagctcagggt

SEQ ID NO: 139842 - DNA, 17 bp, synthetic construct
  source 1..17: mol_type = other DNA
cctcccagctcagggtt

SEQ ID NO: 139843 - DNA, 17 bp, synthetic construct
  source 1..17: mol_type = other DNA
ctcccagctcagggttc

SEQ ID NO: 139844 - DNA, 17 bp, synthetic construct
  source 1..17: mol_type = other DNA
tcccagctcagggttcc

SEQ ID NO: 139845 - DNA, 17 bp, synthetic construct
  source 1..17: mol_type = other DNA
cccagctcagggttccc

SEQ ID NO: 139846 - DNA, 17 bp, synthetic construct
  source 1..17: mol_type = other DNA
ccagctcagggttcccc

SEQ ID NO: 139847 - DNA, 17 bp, synthetic construct
  source 1..17: mol_type = other DNA
cagctcagggttcccct

SEQ ID NO: 139848 - DNA, 17 bp, synthetic construct
  source 1..17: mol_type = other DNA
agctcagggttcccctg

SEQ ID NO: 139849 - DNA, 17 bp, synthetic construct
  source 1..17: mol_type = other DNA
gctcagggttcccctgg

SEQ ID NO: 139850 - DNA, 17 bp, synthetic construct
  source 1..17: mol_type = other DNA
ctcagggttcccctgga

SEQ ID NO: 139851 - DNA, 17 bp, synthetic construct
  source 1..17: mol_type = other DNA
tcagggttcccctggat

SEQ ID NO: 139852 - DNA, 17 bp, synthetic construct
  source 1..17: mol_type = other DNA
cagggttcccctggatt

SEQ ID NO: 139853 - DNA, 17 bp, synthetic construct
  source 1..17: mol_type = other DNA
agggttcccctggattc

SEQ ID NO: 139854 - DNA, 17 bp, synthetic construct
  source 1..17: mol_type = other DNA
gggttcccctggattcc

SEQ ID NO: 139855 - DNA, 17 bp, synthetic construct
  source 1..17: mol_type = other DNA
ggttcccctggattccc

SEQ ID NO: 139856 - DNA, 17 bp, synthetic construct
  source 1..17: mol_type = other DNA
gttcccctggattcccc

SEQ ID NO: 139857 - DNA, 17 bp, synthetic construct
  source 1..17: mol_type = other DNA
ttcccctggattccccc

SEQ ID NO: 139858 - DNA, 17 bp, synthetic construct
  source 1..17: mol_type = other DNA
tcccctggattccccca

SEQ ID NO: 139859 - DNA, 17 bp, synthetic construct
  source 1..17: mol_type = other DNA
cccctggattcccccag

SEQ ID NO: 139860 - DNA, 17 bp, synthetic construct
  source 1..17: mol_type = other DNA
ccctggattcccccaga

SEQ ID NO: 139861 - DNA, 17 bp, synthetic construct
  source 1..17: mol_type = other DNA
cctggattcccccagat

SEQ ID NO: 139862 - DNA, 17 bp, synthetic construct
  source 1..17: mol_type = other DNA
ctggattcccccagatc

SEQ ID NO: 139863 - DNA, 17 bp, synthetic construct
  source 1..17: mol_type = other DNA
tggattcccccagatcc

SEQ ID NO: 139864 - DNA, 17 bp, synthetic construct
  source 1..17: mol_type = other DNA
ggattcccccagatcct

SEQ ID NO: 139865 - DNA, 17 bp, synthetic construct
  source 1..17: mol_type = other DNA
gattcccccagatcctg

SEQ ID NO: 139866 - DNA, 17 bp, synthetic construct
  source 1..17: mol_type = other DNA
attcccccagatcctgt

SEQ ID NO: 139867 - DNA, 17 bp, synthetic construct
  source 1..17: mol_type = other DNA
ttcccccagatcctgtt

SEQ ID NO: 139868 - DNA, 17 bp, synthetic construct
  source 1..17: mol_type = other DNA
tcccccagatcctgttt

SEQ ID NO: 139869 - DNA, 17 bp, synthetic construct
  source 1..17: mol_type = other DNA
cccccagatcctgtttg

SEQ ID NO: 139870 - DNA, 17 bp, synthetic construct
  source 1..17: mol_type = other DNA
ccccagatcctgtttga

SEQ ID NO: 139871 - DNA, 17 bp, synthetic construct
  source 1..17: mol_type = other DNA
cccagatcctgtttgac

SEQ ID NO: 139872 - DNA, 17 bp, synthetic construct
  source 1..17: mol_type = other DNA
ccagatcctgtttgacc

SEQ ID NO: 139873 - DNA, 17 bp, synthetic construct
  source 1..17: mol_type = other DNA
cagatcctgtttgacca

SEQ ID NO: 139874 - DNA, 17 bp, synthetic construct
  source 1..17: mol_type = other DNA
agatcctgtttgaccaa

SEQ ID NO: 139875 - DNA, 17 bp, synthetic construct
  source 1..17: mol_type = other DNA
gatcctgtttgaccaaa

SEQ ID NO: 139876 - DNA, 17 bp, synthetic construct
  source 1..17: mol_type = other DNA
atcctgtttgaccaaat

SEQ ID NO: 139877 - DNA, 17 bp, synthetic construct
  source 1..17: mol_type = other DNA
tcctgtttgaccaaatt

SEQ ID NO: 139878 - DNA, 17 bp, synthetic construct
  source 1..17: mol_type = other DNA
cctgtttgaccaaattc

SEQ ID NO: 139879 - DNA, 17 bp, synthetic construct
  source 1..17: mol_type = other DNA
ctgtttgaccaaattcc

SEQ ID NO: 139880 - DNA, 17 bp, synthetic construct
  source 1..17: mol_type = other DNA
tgtttgaccaaattccg

SEQ ID NO: 139881 - DNA, 17 bp, synthetic construct
  source 1..17: mol_type = other DNA
gtttgaccaaattccgg

SEQ ID NO: 139882 - DNA, 17 bp, synthetic construct
  source 1..17: mol_type = other DNA
tttgaccaaattccggt

SEQ ID NO: 139883 - DNA, 17 bp, synthetic construct
  source 1..17: mol_type = other DNA
ttgaccaaattccggtg

SEQ ID NO: 139884 - DNA, 17 bp, synthetic construct
  source 1..17: mol_type = other DNA
tgaccaaattccggtga

SEQ ID NO: 139885 - DNA, 17 bp, synthetic construct
  source 1..17: mol_type = other DNA
gaccaaattccggtgag

SEQ ID NO: 139886 - DNA, 17 bp, synthetic construct
  source 1..17: mol_type = other DNA
accaaattccggtgagc

SEQ ID NO: 139887 - DNA, 17 bp, synthetic construct
  source 1..17: mol_type = other DNA
ccaaattccggtgagca

SEQ ID NO: 139888 - DNA, 17 bp, synthetic construct
  source 1..17: mol_type = other DNA
caaattccggtgagcag

SEQ ID NO: 139889 - DNA, 17 bp, synthetic construct
  source 1..17: mol_type = other DNA
aaattccggtgagcagc

SEQ ID NO: 139890 - DNA, 17 bp, synthetic construct
  source 1..17: mol_type = other DNA
aattccggtgagcagcg

SEQ ID NO: 139891 - DNA, 17 bp, synthetic construct
  source 1..17: mol_type = other DNA
attccggtgagcagcgg

SEQ ID NO: 139892 - DNA, 17 bp, synthetic construct
  source 1..17: mol_type = other DNA
ttccggtgagcagcggt

SEQ ID NO: 139893 - DNA, 17 bp, synthetic construct
  source 1..17: mol_type = other DNA
tccggtgagcagcggtt

SEQ ID NO: 139894 - DNA, 17 bp, synthetic construct
  source 1..17: mol_type = other DNA
ccggtgagcagcggttt

SEQ ID NO: 139895 - DNA, 17 bp, synthetic construct
  source 1..17: mol_type = other DNA
cggtgagcagcggtttc

SEQ ID NO: 139896 - DNA, 17 bp, synthetic construct
  source 1..17: mol_type = other DNA
ggtgagcagcggtttca

SEQ ID NO: 139897 - DNA, 17 bp, synthetic construct
  source 1..17: mol_type = other DNA
gtgagcagcggtttcag

SEQ ID NO: 139898 - DNA, 17 bp, synthetic construct
  source 1..17: mol_type = other DNA
tgagcagcggtttcagc

SEQ ID NO: 139899 - DNA, 17 bp, synthetic construct
  source 1..17: mol_type = other DNA
gagcagcggtttcagca

SEQ ID NO: 139900 - DNA, 17 bp, synthetic construct
  source 1..17: mol_type = other DNA
agcagcggtttcagcaa

SEQ ID NO: 139901 - DNA, 17 bp, synthetic construct
  source 1..17: mol_type = other DNA
gcagcggtttcagcaag

SEQ ID NO: 139902 - DNA, 17 bp, synthetic construct
  source 1..17: mol_type = other DNA
cagcggtttcagcaaga

SEQ ID NO: 139903 - DNA, 17 bp, synthetic construct
  source 1..17: mol_type = other DNA
agcggtttcagcaagaa

SEQ ID NO: 139904 - DNA, 17 bp, synthetic construct
  source 1..17: mol_type = other DNA
gcggtttcagcaagaac

SEQ ID NO: 139905 - DNA, 17 bp, synthetic construct
  source 1..17: mol_type = other DNA
cggtttcagcaagaacg

SEQ ID NO: 139906 - DNA, 17 bp, synthetic construct
  source 1..17: mol_type = other DNA
ggtttcagcaagaacgg

SEQ ID NO: 139907 - DNA, 17 bp, synthetic construct
  source 1..17: mol_type = other DNA
gtttcagcaagaacggc

SEQ ID NO: 139908 - DNA, 17 bp, synthetic construct
  source 1..17: mol_type = other DNA
tttcagcaagaacggcg

SEQ ID NO: 139909 - DNA, 17 bp, synthetic construct
  source 1..17: mol_type = other DNA
ttcagcaagaacggcgt

SEQ ID NO: 139910 - DNA, 17 bp, synthetic construct
  source 1..17: mol_type = other DNA
tcagcaagaacggcgtg

SEQ ID NO: 139911 - DNA, 17 bp, synthetic construct
  source 1..17: mol_type = other DNA
cagcaagaacggcgtgc

SEQ ID NO: 139912 - DNA, 17 bp, synthetic construct
  source 1..17: mol_type = other DNA
agcaagaacggcgtgct

SEQ ID NO: 139913 - DNA, 17 bp, synthetic construct
  source 1..17: mol_type = other DNA
gcaagaacggcgtgctt

SEQ ID NO: 139914 - DNA, 17 bp, synthetic construct
  source 1..17: mol_type = other DNA
caagaacggcgtgcttg

SEQ ID NO: 139915 - DNA, 17 bp, synthetic construct
  source 1..17: mol_type = other DNA
aagaacggcgtgcttgt

SEQ ID NO: 139916 - DNA, 17 bp, synthetic construct
  source 1..17: mol_type = other DNA
agaacggcgtgcttgtg

SEQ ID NO: 139917 - DNA, 17 bp, synthetic construct
  source 1..17: mol_type = other DNA
gaacggcgtgcttgtgt

SEQ ID NO: 139918 - DNA, 17 bp, synthetic construct
  source 1..17: mol_type = other DNA
aacggcgtgcttgtgtc

SEQ ID NO: 139919 - DNA, 17 bp, synthetic construct
  source 1..17: mol_type = other DNA
acggcgtgcttgtgtct

SEQ ID NO: 139920 - DNA, 17 bp, synthetic construct
  source 1..17: mol_type = other DNA
cggcgtgcttgtgtctg

SEQ ID NO: 139921 - DNA, 17 bp, synthetic construct
  source 1..17: mol_type = other DNA
ggcgtgcttgtgtctgt

SEQ ID NO: 139922 - DNA, 17 bp, synthetic construct
  source 1..17: mol_type = other DNA
gcgtgcttgtgtctgtg

SEQ ID NO: 139923 - DNA, 17 bp, synthetic construct
  source 1..17: mol_type = other DNA
cgtgcttgtgtctgtgc

SEQ ID NO: 139924 - DNA, 17 bp, synthetic construct
  source 1..17: mol_type = other DNA
gtgcttgtgtctgtgct

SEQ ID NO: 139925 - DNA, 17 bp, synthetic construct
  source 1..17: mol_type = other DNA
tgcttgtgtctgtgctg

SEQ ID NO: 139926 - DNA, 17 bp, synthetic construct
  source 1..17: mol_type = other DNA
gcttgtgtctgtgctgg

SEQ ID NO: 139927 - DNA, 17 bp, synthetic construct
  source 1..17: mol_type = other DNA
cttgtgtctgtgctggg

SEQ ID NO: 139928 - DNA, 17 bp, synthetic construct
  source 1..17: mol_type = other DNA
ttgtgtctgtgctgggg

SEQ ID NO: 139929 - DNA, 17 bp, synthetic construct
  source 1..17: mol_type = other DNA
tgtgtctgtgctgggga

SEQ ID NO: 139930 - DNA, 17 bp, synthetic construct
  source 1..17: mol_type = other DNA
gtgtctgtgctggggac

SEQ ID NO: 139931 - DNA, 17 bp, synthetic construct
  source 1..17: mol_type = other DNA
tgtctgtgctggggacc

SEQ ID NO: 139932 - DNA, 17 bp, synthetic construct
  source 1..17: mol_type = other DNA
gtctgtgctggggacca

SEQ ID NO: 139933 - DNA, 17 bp, synthetic construct
  source 1..17: mol_type = other DNA
tctgtgctggggaccac

SEQ ID NO: 139934 - DNA, 17 bp, synthetic construct
  source 1..17: mol_type = other DNA
ctgtgctggggaccacc

SEQ ID NO: 139935 - DNA, 17 bp, synthetic construct
  source 1..17: mol_type = other DNA
tgtgctggggaccacca

SEQ ID NO: 139936 - DNA, 17 bp, synthetic construct
  source 1..17: mol_type = other DNA
gtgctggggaccaccac

SEQ ID NO: 139937 - DNA, 17 bp, synthetic construct
  source 1..17: mol_type = other DNA
tgctggggaccaccacc

SEQ ID NO: 139938 - DNA, 17 bp, synthetic construct
  source 1..17: mol_type = other DNA
gctggggaccaccacca

SEQ ID NO: 139939 - DNA, 17 bp, synthetic construct
  source 1..17: mol_type = other DNA
ctggggaccaccaccat

SEQ ID NO: 139940 - DNA, 17 bp, synthetic construct
  source 1..17: mol_type = other DNA
tggggaccaccaccatg

SEQ ID NO: 139941 - DNA, 17 bp, synthetic construct
  source 1..17: mol_type = other DNA
ggggaccaccaccatgc

SEQ ID NO: 139942 - DNA, 17 bp, synthetic construct
  source 1..17: mol_type = other DNA
gggaccaccaccatgcg

SEQ ID NO: 139943 - DNA, 17 bp, synthetic construct
  source 1..17: mol_type = other DNA
ggaccaccaccatgcgt

SEQ ID NO: 139944 - DNA, 17 bp, synthetic construct
  source 1..17: mol_type = other DNA
gaccaccaccatgcgtg

SEQ ID NO: 139945 - DNA, 17 bp, synthetic construct
  source 1..17: mol_type = other DNA
accaccaccatgcgtgt

SEQ ID NO: 139946 - DNA, 17 bp, synthetic construct
  source 1..17: mol_type = other DNA
ccaccaccatgcgtgtg

SEQ ID NO: 139947 - DNA, 17 bp, synthetic construct
  source 1..17: mol_type = other DNA
caccaccatgcgtgtgg

SEQ ID NO: 139948 - DNA, 17 bp, synthetic construct
  source 1..17: mol_type = other DNA
accaccatgcgtgtgga

SEQ ID NO: 139949 - DNA, 17 bp, synthetic construct
  source 1..17: mol_type = other DNA
ccaccatgcgtgtggac

SEQ ID NO: 139950 - DNA, 17 bp, synthetic construct
  source 1..17: mol_type = other DNA
caccatgcgtgtggaca

SEQ ID NO: 139951 - DNA, 17 bp, synthetic construct
  source 1..17: mol_type = other DNA
accatgcgtgtggacat

SEQ ID NO: 139952 - DNA, 17 bp, synthetic construct
  source 1..17: mol_type = other DNA
ccatgcgtgtggacatt

SEQ ID NO: 139953 - DNA, 17 bp, synthetic construct
  source 1..17: mol_type = other DNA
catgcgtgtggacattc

SEQ ID NO: 139954 - DNA, 17 bp, synthetic construct
  source 1..17: mol_type = other DNA
atgcgtgtggacattcc

SEQ ID NO: 139955 - DNA, 17 bp, synthetic construct
  source 1..17: mol_type = other DNA
tgcgtgtggacattcct

SEQ ID NO: 139956 - DNA, 17 bp, synthetic construct
  source 1..17: mol_type = other DNA
gcgtgtggacattcctg

SEQ ID NO: 139957 - DNA, 17 bp, synthetic construct
  source 1..17: mol_type = other DNA
cgtgtggacattcctgc

SEQ ID NO: 139958 - DNA, 17 bp, synthetic construct
  source 1..17: mol_type = other DNA
gtgtggacattcctgcc

SEQ ID NO: 139959 - DNA, 17 bp, synthetic construct
  source 1..17: mol_type = other DNA
tgtggacattcctgccc

SEQ ID NO: 139960 - DNA, 17 bp, synthetic construct
  source 1..17: mol_type = other DNA
gtggacattcctgccct

SEQ ID NO: 139961 - DNA, 17 bp, synthetic construct
  source 1..17: mol_type = other DNA
tggacattcctgccctg

SEQ ID NO: 139962 - DNA, 17 bp, synthetic construct
  source 1..17: mol_type = other DNA
ggacattcctgccctgg

SEQ ID NO: 139963 - DNA, 17 bp, synthetic construct
  source 1..17: mol_type = other DNA
gacattcctgccctggg

SEQ ID NO: 139964 - DNA, 17 bp, synthetic construct
  source 1..17: mol_type = other DNA
acattcctgccctgggc

SEQ ID NO: 139965 - DNA, 17 bp, synthetic construct
  source 1..17: mol_type = other DNA
cattcctgccctgggcg

SEQ ID NO: 139966 - DNA, 17 bp, synthetic construct
  source 1..17: mol_type = other DNA
attcctgccctgggcgt

SEQ ID NO: 139967 - DNA, 17 bp, synthetic construct
  source 1..17: mol_type = other DNA
ttcctgccctgggcgtg

SEQ ID NO: 139968 - DNA, 17 bp, synthetic construct
  source 1..17: mol_type = other DNA
tcctgccctgggcgtga

SEQ ID NO: 139969 - DNA, 17 bp, synthetic construct
  source 1..17: mol_type = other DNA
cctgccctgggcgtgag

SEQ ID NO: 139970 - DNA, 17 bp, synthetic construct
  source 1..17: mol_type = other DNA
ctgccctgggcgtgagc

SEQ ID NO: 139971 - DNA, 17 bp, synthetic construct
  source 1..17: mol_type = other DNA
tgccctgggcgtgagcg

SEQ ID NO: 139972 - DNA, 17 bp, synthetic construct
  source 1..17: mol_type = other DNA
gccctgggcgtgagcgt

SEQ ID NO: 139973 - DNA, 17 bp, synthetic construct
  source 1..17: mol_type = other DNA
ccctgggcgtgagcgtc

SEQ ID NO: 139974 - DNA, 17 bp, synthetic construct
  source 1..17: mol_type = other DNA
cctgggcgtgagcgtca

SEQ ID NO: 139975 - DNA, 17 bp, synthetic construct
  source 1..17: mol_type = other DNA
ctgggcgtgagcgtcac

SEQ ID NO: 139976 - DNA, 17 bp, synthetic construct
  source 1..17: mol_type = other DNA
tgggcgtgagcgtcacc

SEQ ID NO: 139977 - DNA, 17 bp, synthetic construct
  source 1..17: mol_type = other DNA
gggcgtgagcgtcacct

SEQ ID NO: 139978 - DNA, 17 bp, synthetic construct
  source 1..17: mol_type = other DNA
ggcgtgagcgtcacctt

SEQ ID NO: 139979 - DNA, 17 bp, synthetic construct
  source 1..17: mol_type = other DNA
gcgtgagcgtcaccttc

SEQ ID NO: 139980 - DNA, 17 bp, synthetic construct
  source 1..17: mol_type = other DNA
cgtgagcgtcaccttca

SEQ ID NO: 139981 - DNA, 17 bp, synthetic construct
  source 1..17: mol_type = other DNA
gtgagcgtcaccttcaa

SEQ ID NO: 139982 - DNA, 17 bp, synthetic construct
  source 1..17: mol_type = other DNA
tgagcgtcaccttcaat

SEQ ID NO: 139983 - DNA, 17 bp, synthetic construct
  source 1..17: mol_type = other DNA
gagcgtcaccttcaatg

SEQ ID NO: 139984 - DNA, 17 bp, synthetic construct
  source 1..17: mol_type = other DNA
agcgtcaccttcaatgg

SEQ ID NO: 139985 - DNA, 17 bp, synthetic construct
  source 1..17: mol_type = other DNA
gcgtcaccttcaatggc

SEQ ID NO: 139986 - DNA, 17 bp, synthetic construct
  source 1..17: mol_type = other DNA
cgtcaccttcaatggcc

SEQ ID NO: 139987 - DNA, 17 bp, synthetic construct
  source 1..17: mol_type = other DNA
gtcaccttcaatggcca

SEQ ID NO: 139988 - DNA, 17 bp, synthetic construct
  source 1..17: mol_type = other DNA
tcaccttcaatggccaa

SEQ ID NO: 139989 - DNA, 17 bp, synthetic construct
  source 1..17: mol_type = other DNA
caccttcaatggccaag

SEQ ID NO: 139990 - DNA, 17 bp, synthetic construct
  source 1..17: mol_type = other DNA
accttcaatggccaagt

SEQ ID NO: 139991 - DNA, 17 bp, synthetic construct
  source 1..17: mol_type = other DNA
ccttcaatggccaagtc

SEQ ID NO: 139992 - DNA, 17 bp, synthetic construct
  source 1..17: mol_type = other DNA
cttcaatggccaagtct

SEQ ID NO: 139993 - DNA, 17 bp, synthetic construct
  source 1..17: mol_type = other DNA
ttcaatggccaagtctt

SEQ ID NO: 139994 - DNA, 17 bp, synthetic construct
  source 1..17: mol_type = other DNA
tcaatggccaagtcttc

SEQ ID NO: 139995 - DNA, 17 bp, synthetic construct
  source 1..17: mol_type = other DNA
caatggccaagtcttcc

SEQ ID NO: 139996 - DNA, 17 bp, synthetic construct
  source 1..17: mol_type = other DNA
aatggccaagtcttcca

SEQ ID NO: 139997 - DNA, 17 bp, synthetic construct
  source 1..17: mol_type = other DNA
atggccaagtcttccag

SEQ ID NO: 139998 - DNA, 17 bp, synthetic construct
  source 1..17: mol_type = other DNA
tggccaagtcttccagg

SEQ ID NO: 139999 - DNA, 17 bp, synthetic construct
  source 1..17: mol_type = other DNA
ggccaagtcttccaggc

SEQ ID NO: 140000 - DNA, 17 bp, synthetic construct
  source 1..17: mol_type = other DNA
gccaagtcttccaggcc

SEQ ID NO: 140001 - DNA, 17 bp, synthetic construct
  source 1..17: mol_type = other DNA
ccaagtcttccaggccc

SEQ ID NO: 140002 - DNA, 17 bp, synthetic construct
  source 1..17: mol_type = other DNA
caagtcttccaggcccg

SEQ ID NO: 140003 - DNA, 17 bp, synthetic construct
  source 1..17: mol_type = other DNA
aagtcttccaggcccgg

SEQ ID NO: 140004 - DNA, 17 bp, synthetic construct
  source 1..17: mol_type = other DNA
agtcttccaggcccggc

SEQ ID NO: 140005 - DNA, 17 bp, synthetic construct
  source 1..17: mol_type = other DNA
gtcttccaggcccggct

SEQ ID NO: 140006 - DNA, 17 bp, synthetic construct
  source 1..17: mol_type = other DNA
tcttccaggcccggctg

SEQ ID NO: 140007 - DNA, 17 bp, synthetic construct
  source 1..17: mol_type = other DNA
cttccaggcccggctgc

SEQ ID NO: 140008 - DNA, 17 bp, synthetic construct
  source 1..17: mol_type = other DNA
ttccaggcccggctgcc

SEQ ID NO: 140009 - DNA, 17 bp, synthetic construct
  source 1..17: mol_type = other DNA
tccaggcccggctgccc

SEQ ID NO: 140010 - DNA, 17 bp, synthetic construct
  source 1..17: mol_type = other DNA
ccaggcccggctgccct

SEQ ID NO: 140011 - DNA, 17 bp, synthetic construct
  source 1..17: mol_type = other DNA
caggcccggctgcccta

SEQ ID NO: 140012 - DNA, 17 bp, synthetic construct
  source 1..17: mol_type = other DNA
aggcccggctgccctac

SEQ ID NO: 140013 - DNA, 17 bp, synthetic construct
  source 1..17: mol_type = other DNA
ggcccggctgccctaca

SEQ ID NO: 140014 - DNA, 17 bp, synthetic construct
  source 1..17: mol_type = other DNA
gcccggctgccctacag

SEQ ID NO: 140015 - DNA, 17 bp, synthetic construct
  source 1..17: mol_type = other DNA
cccggctgccctacagc

SEQ ID NO: 140016 - DNA, 17 bp, synthetic construct
  source 1..17: mol_type = other DNA
ccggctgccctacagcc

SEQ ID NO: 140017 - DNA, 17 bp, synthetic construct
  source 1..17: mol_type = other DNA
cggctgccctacagcct

SEQ ID NO: 140018 - DNA, 17 bp, synthetic construct
  source 1..17: mol_type = other DNA
ggctgccctacagcctc

SEQ ID NO: 140019 - DNA, 17 bp, synthetic construct
  source 1..17: mol_type = other DNA
gctgccctacagcctct

SEQ ID NO: 140020 - DNA, 17 bp, synthetic construct
  source 1..17: mol_type = other DNA
ctgccctacagcctctt

SEQ ID NO: 140021 - DNA, 17 bp, synthetic construct
  source 1..17: mol_type = other DNA
tgccctacagcctcttc

SEQ ID NO: 140022 - DNA, 17 bp, synthetic construct
  source 1..17: mol_type = other DNA
gccctacagcctcttcc

SEQ ID NO: 140023 - DNA, 17 bp, synthetic construct
  source 1..17: mol_type = other DNA
ccctacagcctcttcca

SEQ ID NO: 140024 - DNA, 17 bp, synthetic construct
  source 1..17: mol_type = other DNA
cctacagcctcttccac

SEQ ID NO: 140025 - DNA, 17 bp, synthetic construct
  source 1..17: mol_type = other DNA
ctacagcctcttccaca

SEQ ID NO: 140026 - DNA, 17 bp, synthetic construct
  source 1..17: mol_type = other DNA
tacagcctcttccacaa

SEQ ID NO: 140027 - DNA, 17 bp, synthetic construct
  source 1..17: mol_type = other DNA
acagcctcttccacaac

SEQ ID NO: 140028 - DNA, 17 bp, synthetic construct
  source 1..17: mol_type = other DNA
cagcctcttccacaaca

SEQ ID NO: 140029 - DNA, 17 bp, synthetic construct
  source 1..17: mol_type = other DNA
agcctcttccacaacaa

SEQ ID NO: 140030 - DNA, 17 bp, synthetic construct
  source 1..17: mol_type = other DNA
gcctcttccacaacaac

SEQ ID NO: 140031 - DNA, 17 bp, synthetic construct
  source 1..17: mol_type = other DNA
cctcttccacaacaaca

SEQ ID NO: 140032 - DNA, 17 bp, synthetic construct
  source 1..17: mol_type = other DNA
ctcttccacaacaacac

SEQ ID NO: 140033 - DNA, 17 bp, synthetic construct
  source 1..17: mol_type = other DNA
tcttccacaacaacacc

SEQ ID NO: 140034 - DNA, 17 bp, synthetic construct
  source 1..17: mol_type = other DNA
cttccacaacaacaccg

SEQ ID NO: 140035 - DNA, 17 bp, synthetic construct
  source 1..17: mol_type = other DNA
ttccacaacaacaccga

SEQ ID NO: 140036 - DNA, 17 bp, synthetic construct
  source 1..17: mol_type = other DNA
tccacaacaacaccgag

SEQ ID NO: 140037 - DNA, 17 bp, synthetic construct
  source 1..17: mol_type = other DNA
ccacaacaacaccgagg

SEQ ID NO: 140038 - DNA, 17 bp, synthetic construct
  source 1..17: mol_type = other DNA
cacaacaacaccgaggg

SEQ ID NO: 140039 - DNA, 17 bp, synthetic construct
  source 1..17: mol_type = other DNA
acaacaacaccgagggc

SEQ ID NO: 140040 - DNA, 17 bp, synthetic construct
  source 1..17: mol_type = other DNA
caacaacaccgagggcc

SEQ ID NO: 140041 - DNA, 17 bp, synthetic construct
  source 1..17: mol_type = other DNA
aacaacaccgagggcca

SEQ ID NO: 140042 - DNA, 17 bp, synthetic construct
  source 1..17: mol_type = other DNA
acaacaccgagggccag

SEQ ID NO: 140043 - DNA, 17 bp, synthetic construct
  source 1..17: mol_type = other DNA
caacaccgagggccagt

SEQ ID NO: 140044 - DNA, 17 bp, synthetic construct
  source 1..17: mol_type = other DNA
aacaccgagggccagtg

SEQ ID NO: 140045 - DNA, 17 bp, synthetic construct
  source 1..17: mol_type = other DNA
acaccgagggccagtgc

SEQ ID NO: 140046 - DNA, 17 bp, synthetic construct
  source 1..17: mol_type = other DNA
caccgagggccagtgcg

SEQ ID NO: 140047 - DNA, 17 bp, synthetic construct
  source 1..17: mol_type = other DNA
accgagggccagtgcgg

SEQ ID NO: 140048 - DNA, 17 bp, synthetic construct
  source 1..17: mol_type = other DNA
ccgagggccagtgcggt

SEQ ID NO: 140049 - DNA, 17 bp, synthetic construct
  source 1..17: mol_type = other DNA
cgagggccagtgcggtg

SEQ ID NO: 140050 - DNA, 17 bp, synthetic construct
  source 1..17: mol_type = other DNA
gagggccagtgcggtga

SEQ ID NO: 140051 - DNA, 17 bp, synthetic construct
  source 1..17: mol_type = other DNA
agggccagtgcggtgag

SEQ ID NO: 140052 - DNA, 17 bp, synthetic construct
  source 1..17: mol_type = other DNA
gggccagtgcggtgagt

SEQ ID NO: 140053 - DNA, 17 bp, synthetic construct
  source 1..17: mol_type = other DNA
ggccagtgcggtgagtg

SEQ ID NO: 140054 - DNA, 17 bp, synthetic construct
  source 1..17: mol_type = other DNA
gccagtgcggtgagtgg

SEQ ID NO: 140055 - DNA, 17 bp, synthetic construct
  source 1..17: mol_type = other DNA
ccagtgcggtgagtggg

SEQ ID NO: 140056 - DNA, 17 bp, synthetic construct
  source 1..17: mol_type = other DNA
cagtgcggtgagtgggc

SEQ ID NO: 140057 - DNA, 17 bp, synthetic construct
  source 1..17: mol_type = other DNA
agtgcggtgagtgggcg

SEQ ID NO: 140058 - DNA, 17 bp, synthetic construct
  source 1..17: mol_type = other DNA
gtgcggtgagtgggcgg

SEQ ID NO: 140059 - DNA, 17 bp, synthetic construct
  source 1..17: mol_type = other DNA
tgcggtgagtgggcggc

SEQ ID NO: 140060 - DNA, 17 bp, synthetic construct
  source 1..17: mol_type = other DNA
gcggtgagtgggcggcg

SEQ ID NO: 140061 - DNA, 17 bp, synthetic construct
  source 1..17: mol_type = other DNA
cggtgagtgggcggcgg

SEQ ID NO: 140062 - DNA, 17 bp, synthetic construct
  source 1..17: mol_type = other DNA
ggtgagtgggcggcggg

SEQ ID NO: 140063 - DNA, 17 bp, synthetic construct
  source 1..17: mol_type = other DNA
gtgagtgggcggcgggt

SEQ ID NO: 140064 - DNA, 17 bp, synthetic construct
  source 1..17: mol_type = other DNA
tgagtgggcggcgggtc

SEQ ID NO: 140065 - DNA, 17 bp, synthetic construct
  source 1..17: mol_type = other DNA
gagtgggcggcgggtcc

SEQ ID NO: 140066 - DNA, 17 bp, synthetic construct
  source 1..17: mol_type = other DNA
agtgggcggcgggtcct

SEQ ID NO: 140067 - DNA, 17 bp, synthetic construct
  source 1..17: mol_type = other DNA
gtgggcggcgggtcctg

SEQ ID NO: 140068 - DNA, 17 bp, synthetic construct
  source 1..17: mol_type = other DNA
tgggcggcgggtcctgc

SEQ ID NO: 140069 - DNA, 17 bp, synthetic construct
  source 1..17: mol_type = other DNA
gggcggcgggtcctgcc

SEQ ID NO: 140070 - DNA, 17 bp, synthetic construct
  source 1..17: mol_type = other DNA
ggcggcgggtcctgccc

SEQ ID NO: 140071 - DNA, 17 bp, synthetic construct
  source 1..17: mol_type = other DNA
gcggcgggtcctgcccc

SEQ ID NO: 140072 - DNA, 17 bp, synthetic construct
  source 1..17: mol_type = other DNA
cggcgggtcctgccccg

SEQ ID NO: 140073 - DNA, 17 bp, synthetic construct
  source 1..17: mol_type = other DNA
ggcgggtcctgccccgg

SEQ ID NO: 140074 - DNA, 17 bp, synthetic construct
  source 1..17: mol_type = other DNA
gcgggtcctgccccggc

SEQ ID NO: 140075 - DNA, 17 bp, synthetic construct
  source 1..17: mol_type = other DNA
cgggtcctgccccggcc

SEQ ID NO: 140076 - DNA, 17 bp, synthetic construct
  source 1..17: mol_type = other DNA
gggtcctgccccggcca

SEQ ID NO: 140077 - DNA, 17 bp, synthetic construct
  source 1..17: mol_type = other DNA
ggtcctgccccggccag

SEQ ID NO: 140078 - DNA, 17 bp, synthetic construct
  source 1..17: mol_type = other DNA
gtcctgccccggccagg

SEQ ID NO: 140079 - DNA, 17 bp, synthetic construct
  source 1..17: mol_type = other DNA
tcctgccccggccaggg

SEQ ID NO: 140080 - DNA, 17 bp, synthetic construct
  source 1..17: mol_type = other DNA
cctgccccggccagggc

SEQ ID NO: 140081 - DNA, 17 bp, synthetic construct
  source 1..17: mol_type = other DNA
ctgccccggccagggct

SEQ ID NO: 140082 - DNA, 17 bp, synthetic construct
  source 1..17: mol_type = other DNA
tgccccggccagggctg

SEQ ID NO: 140083 - DNA, 17 bp, synthetic construct
  source 1..17: mol_type = other DNA
gccccggccagggctgc

SEQ ID NO: 140084 - DNA, 17 bp, synthetic construct
  source 1..17: mol_type = other DNA
ccccggccagggctgct

SEQ ID NO: 140085 - DNA, 17 bp, synthetic construct
  source 1..17: mol_type = other DNA
cccggccagggctgctg

SEQ ID NO: 140086 - DNA, 17 bp, synthetic construct
  source 1..17: mol_type = other DNA
ccggccagggctgctgc

SEQ ID NO: 140087 - DNA, 17 bp, synthetic construct
  source 1..17: mol_type = other DNA
cggccagggctgctgct

SEQ ID NO: 140088 - DNA, 17 bp, synthetic construct
  source 1..17: mol_type = other DNA
ggccagggctgctgctg

SEQ ID NO: 140089 - DNA, 17 bp, synthetic construct
  source 1..17: mol_type = other DNA
gccagggctgctgctgg

SEQ ID NO: 140090 - DNA, 17 bp, synthetic construct
  source 1..17: mol_type = other DNA
ccagggctgctgctggg

SEQ ID NO: 140091 - DNA, 17 bp, synthetic construct
  source 1..17: mol_type = other DNA
cagggctgctgctgggc

SEQ ID NO: 140092 - DNA, 17 bp, synthetic construct
  source 1..17: mol_type = other DNA
agggctgctgctgggcc

SEQ ID NO: 140093 - DNA, 17 bp, synthetic construct
  source 1..17: mol_type = other DNA
gggctgctgctgggcct

SEQ ID NO: 140094 - DNA, 17 bp, synthetic construct
  source 1..17: mol_type = other DNA
ggctgctgctgggcctg

SEQ ID NO: 140095 - DNA, 17 bp, synthetic construct
  source 1..17: mol_type = other DNA
gctgctgctgggcctga

SEQ ID NO: 140096 - DNA, 17 bp, synthetic construct
  source 1..17: mol_type = other DNA
ctgctgctgggcctgac

SEQ ID NO: 140097 - DNA, 17 bp, synthetic construct
  source 1..17: mol_type = other DNA
tgctgctgggcctgaca

SEQ ID NO: 140098 - DNA, 17 bp, synthetic construct
  source 1..17: mol_type = other DNA
gctgctgggcctgacaa

SEQ ID NO: 140099 - DNA, 17 bp, synthetic construct
  source 1..17: mol_type = other DNA
ctgctgggcctgacaac

SEQ ID NO: 140100 - DNA, 17 bp, synthetic construct
  source 1..17: mol_type = other DNA
tgctgggcctgacaacc

SEQ ID NO: 140101 - DNA, 17 bp, synthetic construct
  source 1..17: mol_type = other DNA
gctgggcctgacaaccc

SEQ ID NO: 140102 - DNA, 17 bp, synthetic construct
  source 1..17: mol_type = other DNA
ctgggcctgacaaccca

SEQ ID NO: 140103 - DNA, 17 bp, synthetic construct
  source 1..17: mol_type = other DNA
tgggcctgacaacccag

SEQ ID NO: 140104 - DNA, 17 bp, synthetic construct
  source 1..17: mol_type = other DNA
gggcctgacaacccagt

SEQ ID NO: 140105 - DNA, 17 bp, synthetic construct
  source 1..17: mol_type = other DNA
ggcctgacaacccagtg

SEQ ID NO: 140106 - DNA, 17 bp, synthetic construct
  source 1..17: mol_type = other DNA
gcctgacaacccagtga

SEQ ID NO: 140107 - DNA, 17 bp, synthetic construct
  source 1..17: mol_type = other DNA
cctgacaacccagtgag

SEQ ID NO: 140108 - DNA, 17 bp, synthetic construct
  source 1..17: mol_type = other DNA
ctgacaacccagtgagc

SEQ ID NO: 140109 - DNA, 17 bp, synthetic construct
  source 1..17: mol_type = other DNA
tgacaacccagtgagca

SEQ ID NO: 140110 - DNA, 17 bp, synthetic construct
  source 1..17: mol_type = other DNA
gacaacccagtgagcat

SEQ ID NO: 140111 - DNA, 17 bp, synthetic construct
  source 1..17: mol_type = other DNA
acaacccagtgagcata

SEQ ID NO: 140112 - DNA, 17 bp, synthetic construct
  source 1..17: mol_type = other DNA
caacccagtgagcatag

SEQ ID NO: 140113 - DNA, 17 bp, synthetic construct
  source 1..17: mol_type = other DNA
aacccagtgagcatagg

SEQ ID NO: 140114 - DNA, 17 bp, synthetic construct
  source 1..17: mol_type = other DNA
acccagtgagcataggg

SEQ ID NO: 140115 - DNA, 17 bp, synthetic construct
  source 1..17: mol_type = other DNA
cccagtgagcatagggg

SEQ ID NO: 140116 - DNA, 17 bp, synthetic construct
  source 1..17: mol_type = other DNA
ccagtgagcatagggga

SEQ ID NO: 140117 - DNA, 17 bp, synthetic construct
  source 1..17: mol_type = other DNA
cagtgagcataggggaa

SEQ ID NO: 140118 - DNA, 17 bp, synthetic construct
  source 1..17: mol_type = other DNA
agtgagcataggggaag

SEQ ID NO: 140119 - DNA, 17 bp, synthetic construct
  source 1..17: mol_type = other DNA
gtgagcataggggaagc

SEQ ID NO: 140120 - DNA, 17 bp, synthetic construct
  source 1..17: mol_type = other DNA
tgagcataggggaagcc

SEQ ID NO: 140121 - DNA, 17 bp, synthetic construct
  source 1..17: mol_type = other DNA
gagcataggggaagcct

SEQ ID NO: 140122 - DNA, 17 bp, synthetic construct
  source 1..17: mol_type = other DNA
agcataggggaagcctg

SEQ ID NO: 140123 - DNA, 17 bp, synthetic construct
  source 1..17: mol_type = other DNA
gcataggggaagcctgg

SEQ ID NO: 140124 - DNA, 17 bp, synthetic construct
  source 1..17: mol_type = other DNA
cataggggaagcctggg

SEQ ID NO: 140125 - DNA, 17 bp, synthetic construct
  source 1..17: mol_type = other DNA
ataggggaagcctgggg

SEQ ID NO: 140126 - DNA, 17 bp, synthetic construct
  source 1..17: mol_type = other DNA
taggggaagcctgggga

SEQ ID NO: 140127 - DNA, 17 bp, synthetic construct
  source 1..17: mol_type = other DNA
aggggaagcctggggag

SEQ ID NO: 140128 - DNA, 17 bp, synthetic construct
  source 1..17: mol_type = other DNA
ggggaagcctggggagg

SEQ ID NO: 140129 - DNA, 17 bp, synthetic construct
  source 1..17: mol_type = other DNA
gggaagcctggggaggg

SEQ ID NO: 140130 - DNA, 17 bp, synthetic construct
  source 1..17: mol_type = other DNA
ggaagcctggggagggg

SEQ ID NO: 140131 - DNA, 17 bp, synthetic construct
  source 1..17: mol_type = other DNA
gaagcctggggagggga

SEQ ID NO: 140132 - DNA, 17 bp, synthetic construct
  source 1..17: mol_type = other DNA
aagcctggggaggggaa

SEQ ID NO: 140133 - DNA, 17 bp, synthetic construct
  source 1..17: mol_type = other DNA
agcctggggaggggaat

SEQ ID NO: 140134 - DNA, 17 bp, synthetic construct
  source 1..17: mol_type = other DNA
gcctggggaggggaatg

SEQ ID NO: 140135 - DNA, 17 bp, synthetic construct
  source 1..17: mol_type = other DNA
cctggggaggggaatga

SEQ ID NO: 140136 - DNA, 17 bp, synthetic construct
  source 1..17: mol_type = other DNA
ctggggaggggaatgag

SEQ ID NO: 140137 - DNA, 17 bp, synthetic construct
  source 1..17: mol_type = other DNA
tggggaggggaatgagt

SEQ ID NO: 140138 - DNA, 17 bp, synthetic construct
  source 1..17: mol_type = other DNA
ggggaggggaatgagtg

SEQ ID NO: 140139 - DNA, 17 bp, synthetic construct
  source 1..17: mol_type = other DNA
gggaggggaatgagtgg

SEQ ID NO: 140140 - DNA, 17 bp, synthetic construct
  source 1..17: mol_type = other DNA
ggaggggaatgagtggg

SEQ ID NO: 140141 - DNA, 17 bp, synthetic construct
  source 1..17: mol_type = other DNA
gaggggaatgagtgggg

SEQ ID NO: 140142 - DNA, 17 bp, synthetic construct
  source 1..17: mol_type = other DNA
aggggaatgagtggggg

SEQ ID NO: 140143 - DNA, 17 bp, synthetic construct
  source 1..17: mol_type = other DNA
ggggaatgagtggggga

SEQ ID NO: 140144 - DNA, 17 bp, synthetic construct
  source 1..17: mol_type = other DNA
gggaatgagtgggggag

SEQ ID NO: 140145 - DNA, 17 bp, synthetic construct
  source 1..17: mol_type = other DNA
ggaatgagtgggggagg

SEQ ID NO: 140146 - DNA, 17 bp, synthetic construct
  source 1..17: mol_type = other DNA
gaatgagtgggggaggg

SEQ ID NO: 140147 - DNA, 17 bp, synthetic construct
  source 1..17: mol_type = other DNA
aatgagtgggggagggg

SEQ ID NO: 140148 - DNA, 17 bp, synthetic construct
  source 1..17: mol_type = other DNA
atgagtgggggaggggg

SEQ ID NO: 140149 - DNA, 17 bp, synthetic construct
  source 1..17: mol_type = other DNA
tgagtgggggagggggg

SEQ ID NO: 140150 - DNA, 17 bp, synthetic construct
  source 1..17: mol_type = other DNA
gagtgggggaggggggt

SEQ ID NO: 140151 - DNA, 17 bp, synthetic construct
  source 1..17: mol_type = other DNA
agtgggggaggggggtg

SEQ ID NO: 140152 - DNA, 17 bp, synthetic construct
  source 1..17: mol_type = other DNA
gtgggggaggggggtgg

SEQ ID NO: 140153 - DNA, 17 bp, synthetic construct
  source 1..17: mol_type = other DNA
tgggggaggggggtggg

SEQ ID NO: 140154 - DNA, 17 bp, synthetic construct
  source 1..17: mol_type = other DNA
gggggaggggggtgggg

SEQ ID NO: 140155 - DNA, 17 bp, synthetic construct
  source 1..17: mol_type = other DNA
ggggaggggggtggggg

SEQ ID NO: 140156 - DNA, 17 bp, synthetic construct
  source 1..17: mol_type = other DNA
gggaggggggtgggggc

SEQ ID NO: 140157 - DNA, 17 bp, synthetic construct
  source 1..17: mol_type = other DNA
ggaggggggtgggggct

SEQ ID NO: 140158 - DNA, 17 bp, synthetic construct
  source 1..17: mol_type = other DNA
gaggggggtgggggctg

SEQ ID NO: 140159 - DNA, 17 bp, synthetic construct
  source 1..17: mol_type = other DNA
aggggggtgggggctgt

SEQ ID NO: 140160 - DNA, 17 bp, synthetic construct
  source 1..17: mol_type = other DNA
ggggggtgggggctgtg

SEQ ID NO: 140161 - DNA, 17 bp, synthetic construct
  source 1..17: mol_type = other DNA
gggggtgggggctgtga

SEQ ID NO: 140162 - DNA, 17 bp, synthetic construct
  source 1..17: mol_type = other DNA
ggggtgggggctgtgaa

SEQ ID NO: 140163 - DNA, 17 bp, synthetic construct
  source 1..17: mol_type = other DNA
gggtgggggctgtgaaa

SEQ ID NO: 140164 - DNA, 17 bp, synthetic construct
  source 1..17: mol_type = other DNA
ggtgggggctgtgaaag

SEQ ID NO: 140165 - DNA, 17 bp, synthetic construct
  source 1..17: mol_type = other DNA
gtgggggctgtgaaagg

SEQ ID NO: 140166 - DNA, 17 bp, synthetic construct
  source 1..17: mol_type = other DNA
tgggggctgtgaaaggc

SEQ ID NO: 140167 - DNA, 17 bp, synthetic construct
  source 1..17: mol_type = other DNA
gggggctgtgaaaggct

SEQ ID NO: 140168 - DNA, 17 bp, synthetic construct
  source 1..17: mol_type = other DNA
ggggctgtgaaaggctc

SEQ ID NO: 140169 - DNA, 17 bp, synthetic construct
  source 1..17: mol_type = other DNA
gggctgtgaaaggctcc

SEQ ID NO: 140170 - DNA, 17 bp, synthetic construct
  source 1..17: mol_type = other DNA
ggctgtgaaaggctccc

SEQ ID NO: 140171 - DNA, 17 bp, synthetic construct
  source 1..17: mol_type = other DNA
gctgtgaaaggctcccc

SEQ ID NO: 140172 - DNA, 17 bp, synthetic construct
  source 1..17: mol_type = other DNA
ctgtgaaaggctcccca

SEQ ID NO: 140173 - DNA, 17 bp, synthetic construct
  source 1..17: mol_type = other DNA
tgtgaaaggctccccag

SEQ ID NO: 140174 - DNA, 17 bp, synthetic construct
  source 1..17: mol_type = other DNA
gtgaaaggctccccaga

SEQ ID NO: 140175 - DNA, 17 bp, synthetic construct
  source 1..17: mol_type = other DNA
tgaaaggctccccagat

SEQ ID NO: 140176 - DNA, 17 bp, synthetic construct
  source 1..17: mol_type = other DNA
gaaaggctccccagatt

SEQ ID NO: 140177 - DNA, 17 bp, synthetic construct
  source 1..17: mol_type = other DNA
aaaggctccccagattc

SEQ ID NO: 140178 - DNA, 17 bp, synthetic construct
  source 1..17: mol_type = other DNA
aaggctccccagattcc

SEQ ID NO: 140179 - DNA, 17 bp, synthetic construct
  source 1..17: mol_type = other DNA
aggctccccagattcca

SEQ ID NO: 140180 - DNA, 17 bp, synthetic construct
  source 1..17: mol_type = other DNA
ggctccccagattccag

SEQ ID NO: 140181 - DNA, 17 bp, synthetic construct
  source 1..17: mol_type = other DNA
gctccccagattccagc

SEQ ID NO: 140182 - DNA, 17 bp, synthetic construct
  source 1..17: mol_type = other DNA
ctccccagattccagcc

SEQ ID NO: 140183 - DNA, 17 bp, synthetic construct
  source 1..17: mol_type = other DNA
tccccagattccagccc

SEQ ID NO: 140184 - DNA, 17 bp, synthetic construct
  source 1..17: mol_type = other DNA
ccccagattccagcccc

SEQ ID NO: 140185 - DNA, 17 bp, synthetic construct
  source 1..17: mol_type = other DNA
cccagattccagccccg

SEQ ID NO: 140186 - DNA, 17 bp, synthetic construct
  source 1..17: mol_type = other DNA
ccagattccagccccgc

SEQ ID NO: 140187 - DNA, 17 bp, synthetic construct
  source 1..17: mol_type = other DNA
cagattccagccccgcg

SEQ ID NO: 140188 - DNA, 17 bp, synthetic construct
  source 1..17: mol_type = other DNA
agattccagccccgcgg

SEQ ID NO: 140189 - DNA, 17 bp, synthetic construct
  source 1..17: mol_type = other DNA
gattccagccccgcggt

SEQ ID NO: 140190 - DNA, 17 bp, synthetic construct
  source 1..17: mol_type = other DNA
attccagccccgcggtg

SEQ ID NO: 140191 - DNA, 17 bp, synthetic construct
  source 1..17: mol_type = other DNA
ttccagccccgcggtga

SEQ ID NO: 140192 - DNA, 17 bp, synthetic construct
  source 1..17: mol_type = other DNA
tccagccccgcggtgac

SEQ ID NO: 140193 - DNA, 17 bp, synthetic construct
  source 1..17: mol_type = other DNA
ccagccccgcggtgacg

SEQ ID NO: 140194 - DNA, 17 bp, synthetic construct
  source 1..17: mol_type = other DNA
cagccccgcggtgacgc

SEQ ID NO: 140195 - DNA, 17 bp, synthetic construct
  source 1..17: mol_type = other DNA
agccccgcggtgacgcc

SEQ ID NO: 140196 - DNA, 17 bp, synthetic construct
  source 1..17: mol_type = other DNA
gccccgcggtgacgccc

SEQ ID NO: 140197 - DNA, 17 bp, synthetic construct
  source 1..17: mol_type = other DNA
ccccgcggtgacgcccc

SEQ ID NO: 140198 - DNA, 17 bp, synthetic construct
  source 1..17: mol_type = other DNA
cccgcggtgacgccccc

SEQ ID NO: 140199 - DNA, 17 bp, synthetic construct
  source 1..17: mol_type = other DNA
ccgcggtgacgccccca

SEQ ID NO: 140200 - DNA, 17 bp, synthetic construct
  source 1..17: mol_type = other DNA
cgcggtgacgcccccac

SEQ ID NO: 140201 - DNA, 17 bp, synthetic construct
  source 1..17: mol_type = other DNA
gcggtgacgcccccact

SEQ ID NO: 140202 - DNA, 17 bp, synthetic construct
  source 1..17: mol_type = other DNA
cggtgacgcccccactc

SEQ ID NO: 140203 - DNA, 17 bp, synthetic construct
  source 1..17: mol_type = other DNA
ggtgacgcccccactcc

SEQ ID NO: 140204 - DNA, 17 bp, synthetic construct
  source 1..17: mol_type = other DNA
gtgacgcccccactccc

SEQ ID NO: 140205 - DNA, 17 bp, synthetic construct
  source 1..17: mol_type = other DNA
tgacgcccccactccca

SEQ ID NO: 140206 - DNA, 17 bp, synthetic construct
  source 1..17: mol_type = other DNA
gacgcccccactcccag

SEQ ID NO: 140207 - DNA, 17 bp, synthetic construct
  source 1..17: mol_type = other DNA
acgcccccactcccagg

SEQ ID NO: 140208 - DNA, 17 bp, synthetic construct
  source 1..17: mol_type = other DNA
cgcccccactcccaggc

SEQ ID NO: 140209 - DNA, 17 bp, synthetic construct
  source 1..17: mol_type = other DNA
gcccccactcccaggca

SEQ ID NO: 140210 - DNA, 17 bp, synthetic construct
  source 1..17: mol_type = other DNA
cccccactcccaggcac

SEQ ID NO: 140211 - DNA, 17 bp, synthetic construct
  source 1..17: mol_type = other DNA
ccccactcccaggcacc

SEQ ID NO: 140212 - DNA, 17 bp, synthetic construct
  source 1..17: mol_type = other DNA
cccactcccaggcacct

SEQ ID NO: 140213 - DNA, 17 bp, synthetic construct
  source 1..17: mol_type = other DNA
ccactcccaggcacctg

SEQ ID NO: 140214 - DNA, 17 bp, synthetic construct
  source 1..17: mol_type = other DNA
cactcccaggcacctgc

SEQ ID NO: 140215 - DNA, 17 bp, synthetic construct
  source 1..17: mol_type = other DNA
actcccaggcacctgca

SEQ ID NO: 140216 - DNA, 17 bp, synthetic construct
  source 1..17: mol_type = other DNA
ctcccaggcacctgcac

SEQ ID NO: 140217 - DNA, 17 bp, synthetic construct
  source 1..17: mol_type = other DNA
tcccaggcacctgcacc

SEQ ID NO: 140218 - DNA, 17 bp, synthetic construct
  source 1..17: mol_type = other DNA
cccaggcacctgcacca

SEQ ID NO: 140219 - DNA, 17 bp, synthetic construct
  source 1..17: mol_type = other DNA
ccaggcacctgcaccaa

SEQ ID NO: 140220 - DNA, 17 bp, synthetic construct
  source 1..17: mol_type = other DNA
caggcacctgcaccaac

SEQ ID NO: 140221 - DNA, 17 bp, synthetic construct
  source 1..17: mol_type = other DNA
aggcacctgcaccaaca

SEQ ID NO: 140222 - DNA, 17 bp, synthetic construct
  source 1..17: mol_type = other DNA
ggcacctgcaccaacaa

SEQ ID NO: 140223 - DNA, 17 bp, synthetic construct
  source 1..17: mol_type = other DNA
gcacctgcaccaacaac

SEQ ID NO: 140224 - DNA, 17 bp, synthetic construct
  source 1..17: mol_type = other DNA
cacctgcaccaacaacc

SEQ ID NO: 140225 - DNA, 17 bp, synthetic construct
  source 1..17: mol_type = other DNA
acctgcaccaacaacca

SEQ ID NO: 140226 - DNA, 17 bp, synthetic construct
  source 1..17: mol_type = other DNA
cctgcaccaacaaccag

SEQ ID NO: 140227 - DNA, 17 bp, synthetic construct
  source 1..17: mol_type = other DNA
ctgcaccaacaaccaga

SEQ ID NO: 140228 - DNA, 17 bp, synthetic construct
  source 1..17: mol_type = other DNA
tgcaccaacaaccagag

SEQ ID NO: 140229 - DNA, 17 bp, synthetic construct
  source 1..17: mol_type = other DNA
gcaccaacaaccagagg

SEQ ID NO: 140230 - DNA, 17 bp, synthetic construct
  source 1..17: mol_type = other DNA
caccaacaaccagaggg

SEQ ID NO: 140231 - DNA, 17 bp, synthetic construct
  source 1..17: mol_type = other DNA
accaacaaccagaggga

SEQ ID NO: 140232 - DNA, 17 bp, synthetic construct
  source 1..17: mol_type = other DNA
ccaacaaccagagggac

SEQ ID NO: 140233 - DNA, 17 bp, synthetic construct
  source 1..17: mol_type = other DNA
caacaaccagagggacg

SEQ ID NO: 140234 - DNA, 17 bp, synthetic construct
  source 1..17: mol_type = other DNA
aacaaccagagggacga

SEQ ID NO: 140235 - DNA, 17 bp, synthetic construct
  source 1..17: mol_type = other DNA
acaaccagagggacgac

SEQ ID NO: 140236 - DNA, 17 bp, synthetic construct
  source 1..17: mol_type = other DNA
caaccagagggacgact

SEQ ID NO: 140237 - DNA, 17 bp, synthetic construct
  source 1..17: mol_type = other DNA
aaccagagggacgactg

SEQ ID NO: 140238 - DNA, 17 bp, synthetic construct
  source 1..17: mol_type = other DNA
accagagggacgactgt

SEQ ID NO: 140239 - DNA, 17 bp, synthetic construct
  source 1..17: mol_type = other DNA
ccagagggacgactgtc

SEQ ID NO: 140240 - DNA, 17 bp, synthetic construct
  source 1..17: mol_type = other DNA
cagagggacgactgtct

SEQ ID NO: 140241 - DNA, 17 bp, synthetic construct
  source 1..17: mol_type = other DNA
agagggacgactgtctc

SEQ ID NO: 140242 - DNA, 17 bp, synthetic construct
  source 1..17: mol_type = other DNA
gagggacgactgtctcc

SEQ ID NO: 140243 - DNA, 17 bp, synthetic construct
  source 1..17: mol_type = other DNA
agggacgactgtctcca

SEQ ID NO: 140244 - DNA, 17 bp, synthetic construct
  source 1..17: mol_type = other DNA
gggacgactgtctccag

SEQ ID NO: 140245 - DNA, 17 bp, synthetic construct
  source 1..17: mol_type = other DNA
ggacgactgtctccagc

SEQ ID NO: 140246 - DNA, 17 bp, synthetic construct
  source 1..17: mol_type = other DNA
gacgactgtctccagcg

SEQ ID NO: 140247 - DNA, 17 bp, synthetic construct
  source 1..17: mol_type = other DNA
acgactgtctccagcgg

SEQ ID NO: 140248 - DNA, 17 bp, synthetic construct
  source 1..17: mol_type = other DNA
cgactgtctccagcggg

SEQ ID NO: 140249 - DNA, 17 bp, synthetic construct
  source 1..17: mol_type = other DNA
gactgtctccagcggga

SEQ ID NO: 140250 - DNA, 17 bp, synthetic construct
  source 1..17: mol_type = other DNA
actgtctccagcgggac

SEQ ID NO: 140251 - DNA, 17 bp, synthetic construct
  source 1..17: mol_type = other DNA
ctgtctccagcgggacg

SEQ ID NO: 140252 - DNA, 17 bp, synthetic construct
  source 1..17: mol_type = other DNA
tgtctccagcgggacgg

SEQ ID NO: 140253 - DNA, 17 bp, synthetic construct
  source 1..17: mol_type = other DNA
gtctccagcgggacgga

SEQ ID NO: 140254 - DNA, 17 bp, synthetic construct
  source 1..17: mol_type = other DNA
tctccagcgggacggaa

SEQ ID NO: 140255 - DNA, 17 bp, synthetic construct
  source 1..17: mol_type = other DNA
ctccagcgggacggaac

SEQ ID NO: 140256 - DNA, 17 bp, synthetic construct
  source 1..17: mol_type = other DNA
tccagcgggacggaacc

SEQ ID NO: 140257 - DNA, 17 bp, synthetic construct
  source 1..17: mol_type = other DNA
ccagcgggacggaacca

SEQ ID NO: 140258 - DNA, 17 bp, synthetic construct
  source 1..17: mol_type = other DNA
cagcgggacggaaccac

SEQ ID NO: 140259 - DNA, 17 bp, synthetic construct
  source 1..17: mol_type = other DNA
agcgggacggaaccact

SEQ ID NO: 140260 - DNA, 17 bp, synthetic construct
  source 1..17: mol_type = other DNA
gcgggacggaaccactg

SEQ ID NO: 140261 - DNA, 17 bp, synthetic construct
  source 1..17: mol_type = other DNA
cgggacggaaccactgc

SEQ ID NO: 140262 - DNA, 17 bp, synthetic construct
  source 1..17: mol_type = other DNA
gggacggaaccactgcc

SEQ ID NO: 140263 - DNA, 17 bp, synthetic construct
  source 1..17: mol_type = other DNA
ggacggaaccactgccg

SEQ ID NO: 140264 - DNA, 17 bp, synthetic construct
  source 1..17: mol_type = other DNA
gacggaaccactgccgc

SEQ ID NO: 140265 - DNA, 17 bp, synthetic construct
  source 1..17: mol_type = other DNA
acggaaccactgccgcc

SEQ ID NO: 140266 - DNA, 17 bp, synthetic construct
  source 1..17: mol_type = other DNA
cggaaccactgccgcca

SEQ ID NO: 140267 - DNA, 17 bp, synthetic construct
  source 1..17: mol_type = other DNA
ggaaccactgccgccag

SEQ ID NO: 140268 - DNA, 17 bp, synthetic construct
  source 1..17: mol_type = other DNA
gaaccactgccgccagt

SEQ ID NO: 140269 - DNA, 17 bp, synthetic construct
  source 1..17: mol_type = other DNA
aaccactgccgccagtt

SEQ ID NO: 140270 - DNA, 17 bp, synthetic construct
  source 1..17: mol_type = other DNA
accactgccgccagttg

SEQ ID NO: 140271 - DNA, 17 bp, synthetic construct
  source 1..17: mol_type = other DNA
ccactgccgccagttgc

SEQ ID NO: 140272 - DNA, 17 bp, synthetic construct
  source 1..17: mol_type = other DNA
cactgccgccagttgca

SEQ ID NO: 140273 - DNA, 17 bp, synthetic construct
  source 1..17: mol_type = other DNA
actgccgccagttgcaa

SEQ ID NO: 140274 - DNA, 17 bp, synthetic construct
  source 1..17: mol_type = other DNA
ctgccgccagttgcaag

SEQ ID NO: 140275 - DNA, 17 bp, synthetic construct
  source 1..17: mol_type = other DNA
tgccgccagttgcaagg

SEQ ID NO: 140276 - DNA, 17 bp, synthetic construct
  source 1..17: mol_type = other DNA
gccgccagttgcaagga

SEQ ID NO: 140277 - DNA, 17 bp, synthetic construct
  source 1..17: mol_type = other DNA
ccgccagttgcaaggac

SEQ ID NO: 140278 - DNA, 17 bp, synthetic construct
  source 1..17: mol_type = other DNA
cgccagttgcaaggaca

SEQ ID NO: 140279 - DNA, 17 bp, synthetic construct
  source 1..17: mol_type = other DNA
gccagttgcaaggacat

SEQ ID NO: 140280 - DNA, 17 bp, synthetic construct
  source 1..17: mol_type = other DNA
ccagttgcaaggacatg

SEQ ID NO: 140281 - DNA, 17 bp, synthetic construct
  source 1..17: mol_type = other DNA
cagttgcaaggacatgg

SEQ ID NO: 140282 - DNA, 17 bp, synthetic construct
  source 1..17: mol_type = other DNA
agttgcaaggacatggc

SEQ ID NO: 140283 - DNA, 17 bp, synthetic construct
  source 1..17: mol_type = other DNA
gttgcaaggacatggcc

SEQ ID NO: 140284 - DNA, 17 bp, synthetic construct
  source 1..17: mol_type = other DNA
ttgcaaggacatggcca

SEQ ID NO: 140285 - DNA, 17 bp, synthetic construct
  source 1..17: mol_type = other DNA
tgcaaggacatggccaa

SEQ ID NO: 140286 - DNA, 17 bp, synthetic construct
  source 1..17: mol_type = other DNA
gcaaggacatggccaag

SEQ ID NO: 140287 - DNA, 17 bp, synthetic construct
  source 1..17: mol_type = other DNA
caaggacatggccaaga

SEQ ID NO: 140288 - DNA, 17 bp, synthetic construct
  source 1..17: mol_type = other DNA
aaggacatggccaagac

SEQ ID NO: 140289 - DNA, 17 bp, synthetic construct
  source 1..17: mol_type = other DNA
aggacatggccaagacg

SEQ ID NO: 140290 - DNA, 17 bp, synthetic construct
  source 1..17: mol_type = other DNA
ggacatggccaagacgt

SEQ ID NO: 140291 - DNA, 17 bp, synthetic construct
  source 1..17: mol_type = other DNA
gacatggccaagacgtg

SEQ ID NO: 140292 - DNA, 17 bp, synthetic construct
  source 1..17: mol_type = other DNA
acatggccaagacgtgg

SEQ ID NO: 140293 - DNA, 17 bp, synthetic construct
  source 1..17: mol_type = other DNA
catggccaagacgtggc

SEQ ID NO: 140294 - DNA, 17 bp, synthetic construct
  source 1..17: mol_type = other DNA
atggccaagacgtggct

SEQ ID NO: 140295 - DNA, 17 bp, synthetic construct
  source 1..17: mol_type = other DNA
tggccaagacgtggctg

SEQ ID NO: 140296 - DNA, 17 bp, synthetic construct
  source 1..17: mol_type = other DNA
ggccaagacgtggctgg

SEQ ID NO: 140297 - DNA, 17 bp, synthetic construct
  source 1..17: mol_type = other DNA
gccaagacgtggctggt

SEQ ID NO: 140298 - DNA, 17 bp, synthetic construct
  source 1..17: mol_type = other DNA
ccaagacgtggctggtc

SEQ ID NO: 140299 - DNA, 17 bp, synthetic construct
  source 1..17: mol_type = other DNA
caagacgtggctggtcc

SEQ ID NO: 140300 - DNA, 17 bp, synthetic construct
  source 1..17: mol_type = other DNA
aagacgtggctggtccc

SEQ ID NO: 140301 - DNA, 17 bp, synthetic construct
  source 1..17: mol_type = other DNA
agacgtggctggtcccc

SEQ ID NO: 140302 - DNA, 17 bp, synthetic construct
  source 1..17: mol_type = other DNA
gacgtggctggtccccg

SEQ ID NO: 140303 - DNA, 17 bp, synthetic construct
  source 1..17: mol_type = other DNA
acgtggctggtccccga

SEQ ID NO: 140304 - DNA, 17 bp, synthetic construct
  source 1..17: mol_type = other DNA
cgtggctggtccccgac

SEQ ID NO: 140305 - DNA, 17 bp, synthetic construct
  source 1..17: mol_type = other DNA
gtggctggtccccgaca

SEQ ID NO: 140306 - DNA, 17 bp, synthetic construct
  source 1..17: mol_type = other DNA
tggctggtccccgacag

SEQ ID NO: 140307 - DNA, 17 bp, synthetic construct
  source 1..17: mol_type = other DNA
ggctggtccccgacagc

SEQ ID NO: 140308 - DNA, 17 bp, synthetic construct
  source 1..17: mol_type = other DNA
gctggtccccgacagca

SEQ ID NO: 140309 - DNA, 17 bp, synthetic construct
  source 1..17: mol_type = other DNA
ctggtccccgacagcag

SEQ ID NO: 140310 - DNA, 17 bp, synthetic construct
  source 1..17: mol_type = other DNA
tggtccccgacagcaga

SEQ ID NO: 140311 - DNA, 17 bp, synthetic construct
  source 1..17: mol_type = other DNA
ggtccccgacagcagaa

SEQ ID NO: 140312 - DNA, 17 bp, synthetic construct
  source 1..17: mol_type = other DNA
gtccccgacagcagaaa

SEQ ID NO: 140313 - DNA, 17 bp, synthetic construct
  source 1..17: mol_type = other DNA
tccccgacagcagaaag

SEQ ID NO: 140314 - DNA, 17 bp, synthetic construct
  source 1..17: mol_type = other DNA
ccccgacagcagaaagg

SEQ ID NO: 140315 - DNA, 17 bp, synthetic construct
  source 1..17: mol_type = other DNA
cccgacagcagaaagga

SEQ ID NO: 140316 - DNA, 17 bp, synthetic construct
  source 1..17: mol_type = other DNA
ccgacagcagaaaggat

SEQ ID NO: 140317 - DNA, 17 bp, synthetic construct
  source 1..17: mol_type = other DNA
cgacagcagaaaggatg

SEQ ID NO: 140318 - DNA, 17 bp, synthetic construct
  source 1..17: mol_type = other DNA
gacagcagaaaggatgg

SEQ ID NO: 140319 - DNA, 17 bp, synthetic construct
  source 1..17: mol_type = other DNA
acagcagaaaggatggc

SEQ ID NO: 140320 - DNA, 17 bp, synthetic construct
  source 1..17: mol_type = other DNA
cagcagaaaggatggct

SEQ ID NO: 140321 - DNA, 17 bp, synthetic construct
  source 1..17: mol_type = other DNA
agcagaaaggatggctg

SEQ ID NO: 140322 - DNA, 17 bp, synthetic construct
  source 1..17: mol_type = other DNA
gcagaaaggatggctgc

SEQ ID NO: 140323 - DNA, 17 bp, synthetic construct
  source 1..17: mol_type = other DNA
cagaaaggatggctgct

SEQ ID NO: 140324 - DNA, 17 bp, synthetic construct
  source 1..17: mol_type = other DNA
agaaaggatggctgctg

SEQ ID NO: 140325 - DNA, 17 bp, synthetic construct
  source 1..17: mol_type = other DNA
gaaaggatggctgctgg

SEQ ID NO: 140326 - DNA, 17 bp, synthetic construct
  source 1..17: mol_type = other DNA
aaaggatggctgctggg

SEQ ID NO: 140327 - DNA, 17 bp, synthetic construct
  source 1..17: mol_type = other DNA
aaggatggctgctgggc

SEQ ID NO: 140328 - DNA, 17 bp, synthetic construct
  source 1..17: mol_type = other DNA
aggatggctgctgggcc

SEQ ID NO: 140329 - DNA, 17 bp, synthetic construct
  source 1..17: mol_type = other DNA
ggatggctgctgggccc

SEQ ID NO: 140330 - DNA, 17 bp, synthetic construct
  source 1..17: mol_type = other DNA
gatggctgctgggcccc

SEQ ID NO: 140331 - DNA, 17 bp, synthetic construct
  source 1..17: mol_type = other DNA
atggctgctgggccccg

SEQ ID NO: 140332 - DNA, 17 bp, synthetic construct
  source 1..17: mol_type = other DNA
tggctgctgggccccga

SEQ ID NO: 140333 - DNA, 17 bp, synthetic construct
  source 1..17: mol_type = other DNA
ggctgctgggccccgac

SEQ ID NO: 140334 - DNA, 17 bp, synthetic construct
  source 1..17: mol_type = other DNA
gctgctgggccccgact

SEQ ID NO: 140335 - DNA, 17 bp, synthetic construct
  source 1..17: mol_type = other DNA
ctgctgggccccgactg

SEQ ID NO: 140336 - DNA, 17 bp, synthetic construct
  source 1..17: mol_type = other DNA
tgctgggccccgactgg

SEQ ID NO: 140337 - DNA, 17 bp, synthetic construct
  source 1..17: mol_type = other DNA
gctgggccccgactggc

SEQ ID NO: 140338 - DNA, 17 bp, synthetic construct
  source 1..17: mol_type = other DNA
ctgggccccgactggca

SEQ ID NO: 140339 - DNA, 17 bp, synthetic construct
  source 1..17: mol_type = other DNA
tgggccccgactggcac

SEQ ID NO: 140340 - DNA, 17 bp, synthetic construct
  source 1..17: mol_type = other DNA
gggccccgactggcaca

SEQ ID NO: 140341 - DNA, 17 bp, synthetic construct
  source 1..17: mol_type = other DNA
ggccccgactggcacac

SEQ ID NO: 140342 - DNA, 17 bp, synthetic construct
  source 1..17: mol_type = other DNA
gccccgactggcacacc

SEQ ID NO: 140343 - DNA, 17 bp, synthetic construct
  source 1..17: mol_type = other DNA
ccccgactggcacaccc

SEQ ID NO: 140344 - DNA, 17 bp, synthetic construct
  source 1..17: mol_type = other DNA
cccgactggcacacccc

SEQ ID NO: 140345 - DNA, 17 bp, synthetic construct
  source 1..17: mol_type = other DNA
ccgactggcacaccccc

SEQ ID NO: 140346 - DNA, 17 bp, synthetic construct
  source 1..17: mol_type = other DNA
cgactggcacacccccc

SEQ ID NO: 140347 - DNA, 17 bp, synthetic construct
  source 1..17: mol_type = other DNA
gactggcacacccccca

SEQ ID NO: 140348 - DNA, 17 bp, synthetic construct
  source 1..17: mol_type = other DNA
actggcacaccccccac

SEQ ID NO: 140349 - DNA, 17 bp, synthetic construct
  source 1..17: mol_type = other DNA
ctggcacaccccccact

SEQ ID NO: 140350 - DNA, 17 bp, synthetic construct
  source 1..17: mol_type = other DNA
tggcacaccccccactg

SEQ ID NO: 140351 - DNA, 17 bp, synthetic construct
  source 1..17: mol_type = other DNA
ggcacaccccccactgc

SEQ ID NO: 140352 - DNA, 17 bp, synthetic construct
  source 1..17: mol_type = other DNA
gcacaccccccactgcc

SEQ ID NO: 140353 - DNA, 17 bp, synthetic construct
  source 1..17: mol_type = other DNA
cacaccccccactgcca

SEQ ID NO: 140354 - DNA, 17 bp, synthetic construct
  source 1..17: mol_type = other DNA
acaccccccactgccag

SEQ ID NO: 140355 - DNA, 17 bp, synthetic construct
  source 1..17: mol_type = other DNA
caccccccactgccagc

SEQ ID NO: 140356 - DNA, 17 bp, synthetic construct
  source 1..17: mol_type = other DNA
accccccactgccagcc

SEQ ID NO: 140357 - DNA, 17 bp, synthetic construct
  source 1..17: mol_type = other DNA
ccccccactgccagccc

SEQ ID NO: 140358 - DNA, 17 bp, synthetic construct
  source 1..17: mol_type = other DNA
cccccactgccagcccc

SEQ ID NO: 140359 - DNA, 17 bp, synthetic construct
  source 1..17: mol_type = other DNA
ccccactgccagccccg

SEQ ID NO: 140360 - DNA, 17 bp, synthetic construct
  source 1..17: mol_type = other DNA
cccactgccagccccgc

SEQ ID NO: 140361 - DNA, 17 bp, synthetic construct
  source 1..17: mol_type = other DNA
ccactgccagccccgca

SEQ ID NO: 140362 - DNA, 17 bp, synthetic construct
  source 1..17: mol_type = other DNA
cactgccagccccgcag

SEQ ID NO: 140363 - DNA, 17 bp, synthetic construct
  source 1..17: mol_type = other DNA
actgccagccccgcagc

SEQ ID NO: 140364 - DNA, 17 bp, synthetic construct
  source 1..17: mol_type = other DNA
ctgccagccccgcagcc

SEQ ID NO: 140365 - DNA, 17 bp, synthetic construct
  source 1..17: mol_type = other DNA
tgccagccccgcagccc

SEQ ID NO: 140366 - DNA, 17 bp, synthetic construct
  source 1..17: mol_type = other DNA
gccagccccgcagcccc

SEQ ID NO: 140367 - DNA, 17 bp, synthetic construct
  source 1..17: mol_type = other DNA
ccagccccgcagccccg

SEQ ID NO: 140368 - DNA, 17 bp, synthetic construct
  source 1..17: mol_type = other DNA
cagccccgcagccccgg

SEQ ID NO: 140369 - DNA, 17 bp, synthetic construct
  source 1..17: mol_type = other DNA
agccccgcagccccggt

SEQ ID NO: 140370 - DNA, 17 bp, synthetic construct
  source 1..17: mol_type = other DNA
gccccgcagccccggtg

SEQ ID NO: 140371 - DNA, 17 bp, synthetic construct
  source 1..17: mol_type = other DNA
ccccgcagccccggtgt

SEQ ID NO: 140372 - DNA, 17 bp, synthetic construct
  source 1..17: mol_type = other DNA
cccgcagccccggtgtc

SEQ ID NO: 140373 - DNA, 17 bp, synthetic construct
  source 1..17: mol_type = other DNA
ccgcagccccggtgtct

SEQ ID NO: 140374 - DNA, 17 bp, synthetic construct
  source 1..17: mol_type = other DNA
cgcagccccggtgtcta

SEQ ID NO: 140375 - DNA, 17 bp, synthetic construct
  source 1..17: mol_type = other DNA
gcagccccggtgtctag

SEQ ID NO: 140376 - DNA, 17 bp, synthetic construct
  source 1..17: mol_type = other DNA
cagccccggtgtctagc

SEQ ID NO: 140377 - DNA, 17 bp, synthetic construct
  source 1..17: mol_type = other DNA
agccccggtgtctagca

SEQ ID NO: 140378 - DNA, 17 bp, synthetic construct
  source 1..17: mol_type = other DNA
gccccggtgtctagcac

SEQ ID NO: 140379 - DNA, 17 bp, synthetic construct
  source 1..17: mol_type = other DNA
ccccggtgtctagcaca

SEQ ID NO: 140380 - DNA, 17 bp, synthetic construct
  source 1..17: mol_type = other DNA
cccggtgtctagcacac

SEQ ID NO: 140381 - DNA, 17 bp, synthetic construct
  source 1..17: mol_type = other DNA
ccggtgtctagcacacc

SEQ ID NO: 140382 - DNA, 17 bp, synthetic construct
  source 1..17: mol_type = other DNA
cggtgtctagcacaccc

SEQ ID NO: 140383 - DNA, 17 bp, synthetic construct
  source 1..17: mol_type = other DNA
ggtgtctagcacaccca

SEQ ID NO: 140384 - DNA, 17 bp, synthetic construct
  source 1..17: mol_type = other DNA
gtgtctagcacacccac

SEQ ID NO: 140385 - DNA, 17 bp, synthetic construct
  source 1..17: mol_type = other DNA
tgtctagcacacccacc

SEQ ID NO: 140386 - DNA, 17 bp, synthetic construct
  source 1..17: mol_type = other DNA
gtctagcacacccaccc

SEQ ID NO: 140387 - DNA, 17 bp, synthetic construct
  source 1..17: mol_type = other DNA
tctagcacacccacccc

SEQ ID NO: 140388 - DNA, 17 bp, synthetic construct
  source 1..17: mol_type = other DNA
ctagcacacccaccccc

SEQ ID NO: 140389 - DNA, 17 bp, synthetic construct
  source 1..17: mol_type = other DNA
tagcacacccaccccca

SEQ ID NO: 140390 - DNA, 17 bp, synthetic construct
  source 1..17: mol_type = other DNA
agcacacccacccccac

SEQ ID NO: 140391 - DNA, 17 bp, synthetic construct
  source 1..17: mol_type = other DNA
gcacacccacccccacc

SEQ ID NO: 140392 - DNA, 17 bp, synthetic construct
  source 1..17: mol_type = other DNA
cacacccacccccaccc

SEQ ID NO: 140393 - DNA, 17 bp, synthetic construct
  source 1..17: mol_type = other DNA
acacccacccccacccc

SEQ ID NO: 140394 - DNA, 17 bp, synthetic construct
  source 1..17: mol_type = other DNA
cacccacccccacccca

SEQ ID NO: 140395 - DNA, 17 bp, synthetic construct
  source 1..17: mol_type = other DNA
acccacccccaccccat

SEQ ID NO: 140396 - DNA, 17 bp, synthetic construct
  source 1..17: mol_type = other DNA
cccacccccaccccatg

SEQ ID NO: 140397 - DNA, 17 bp, synthetic construct
  source 1..17: mol_type = other DNA
ccacccccaccccatgc

SEQ ID NO: 140398 - DNA, 17 bp, synthetic construct
  source 1..17: mol_type = other DNA
cacccccaccccatgcc

SEQ ID NO: 140399 - DNA, 17 bp, synthetic construct
  source 1..17: mol_type = other DNA
acccccaccccatgccc

SEQ ID NO: 140400 - DNA, 17 bp, synthetic construct
  source 1..17: mol_type = other DNA
cccccaccccatgccca

SEQ ID NO: 140401 - DNA, 17 bp, synthetic construct
  source 1..17: mol_type = other DNA
ccccaccccatgcccac

SEQ ID NO: 140402 - DNA, 17 bp, synthetic construct
  source 1..17: mol_type = other DNA
cccaccccatgcccacc

SEQ ID NO: 140403 - DNA, 17 bp, synthetic construct
  source 1..17: mol_type = other DNA
ccaccccatgcccacca

SEQ ID NO: 140404 - DNA, 17 bp, synthetic construct
  source 1..17: mol_type = other DNA
caccccatgcccaccac

SEQ ID NO: 140405 - DNA, 17 bp, synthetic construct
  source 1..17: mol_type = other DNA
accccatgcccaccaca

SEQ ID NO: 140406 - DNA, 17 bp, synthetic construct
  source 1..17: mol_type = other DNA
ccccatgcccaccacag

SEQ ID NO: 140407 - DNA, 17 bp, synthetic construct
  source 1..17: mol_type = other DNA
cccatgcccaccacagc

SEQ ID NO: 140408 - DNA, 17 bp, synthetic construct
  source 1..17: mol_type = other DNA
ccatgcccaccacagcc

SEQ ID NO: 140409 - DNA, 17 bp, synthetic construct
  source 1..17: mol_type = other DNA
catgcccaccacagccg

SEQ ID NO: 140410 - DNA, 17 bp, synthetic construct
  source 1..17: mol_type = other DNA
atgcccaccacagccgc

SEQ ID NO: 140411 - DNA, 17 bp, synthetic construct
  source 1..17: mol_type = other DNA
tgcccaccacagccgct

SEQ ID NO: 140412 - DNA, 17 bp, synthetic construct
  source 1..17: mol_type = other DNA
gcccaccacagccgctc

SEQ ID NO: 140413 - DNA, 17 bp, synthetic construct
  source 1..17: mol_type = other DNA
cccaccacagccgctct

SEQ ID NO: 140414 - DNA, 17 bp, synthetic construct
  source 1..17: mol_type = other DNA
ccaccacagccgctctg

SEQ ID NO: 140415 - DNA, 17 bp, synthetic construct
  source 1..17: mol_type = other DNA
caccacagccgctctgt

SEQ ID NO: 140416 - DNA, 17 bp, synthetic construct
  source 1..17: mol_type = other DNA
accacagccgctctgtg

SEQ ID NO: 140417 - DNA, 17 bp, synthetic construct
  source 1..17: mol_type = other DNA
ccacagccgctctgtga

SEQ ID NO: 140418 - DNA, 17 bp, synthetic construct
  source 1..17: mol_type = other DNA
cacagccgctctgtgat

SEQ ID NO: 140419 - DNA, 17 bp, synthetic construct
  source 1..17: mol_type = other DNA
acagccgctctgtgatc

SEQ ID NO: 140420 - DNA, 17 bp, synthetic construct
  source 1..17: mol_type = other DNA
cagccgctctgtgatct

SEQ ID NO: 140421 - DNA, 17 bp, synthetic construct
  source 1..17: mol_type = other DNA
agccgctctgtgatctg

SEQ ID NO: 140422 - DNA, 17 bp, synthetic construct
  source 1..17: mol_type = other DNA
gccgctctgtgatctga

SEQ ID NO: 140423 - DNA, 17 bp, synthetic construct
  source 1..17: mol_type = other DNA
ccgctctgtgatctgat

SEQ ID NO: 140424 - DNA, 17 bp, synthetic construct
  source 1..17: mol_type = other DNA
cgctctgtgatctgatg

SEQ ID NO: 140425 - DNA, 17 bp, synthetic construct
  source 1..17: mol_type = other DNA
gctctgtgatctgatgc

SEQ ID NO: 140426 - DNA, 17 bp, synthetic construct
  source 1..17: mol_type = other DNA
ctctgtgatctgatgct

SEQ ID NO: 140427 - DNA, 17 bp, synthetic construct
  source 1..17: mol_type = other DNA
tctgtgatctgatgctg

SEQ ID NO: 140428 - DNA, 17 bp, synthetic construct
  source 1..17: mol_type = other DNA
ctgtgatctgatgctga

SEQ ID NO: 140429 - DNA, 17 bp, synthetic construct
  source 1..17: mol_type = other DNA
tgtgatctgatgctgag

SEQ ID NO: 140430 - DNA, 17 bp, synthetic construct
  source 1..17: mol_type = other DNA
gtgatctgatgctgagc

SEQ ID NO: 140431 - DNA, 17 bp, synthetic construct
  source 1..17: mol_type = other DNA
tgatctgatgctgagcc

SEQ ID NO: 140432 - DNA, 17 bp, synthetic construct
  source 1..17: mol_type = other DNA
gatctgatgctgagcca

SEQ ID NO: 140433 - DNA, 17 bp, synthetic construct
  source 1..17: mol_type = other DNA
atctgatgctgagccag

SEQ ID NO: 140434 - DNA, 17 bp, synthetic construct
  source 1..17: mol_type = other DNA
tctgatgctgagccagt

SEQ ID NO: 140435 - DNA, 17 bp, synthetic construct
  source 1..17: mol_type = other DNA
ctgatgctgagccagtg

SEQ ID NO: 140436 - DNA, 17 bp, synthetic construct
  source 1..17: mol_type = other DNA
tgatgctgagccagtga

SEQ ID NO: 140437 - DNA, 17 bp, synthetic construct
  source 1..17: mol_type = other DNA
gatgctgagccagtgag

SEQ ID NO: 140438 - DNA, 17 bp, synthetic construct
  source 1..17: mol_type = other DNA
atgctgagccagtgagt

SEQ ID NO: 140439 - DNA, 17 bp, synthetic construct
  source 1..17: mol_type = other DNA
tgctgagccagtgagtc

SEQ ID NO: 140440 - DNA, 17 bp, synthetic construct
  source 1..17: mol_type = other DNA
gctgagccagtgagtcc

SEQ ID NO: 140441 - DNA, 17 bp, synthetic construct
  source 1..17: mol_type = other DNA
ctgagccagtgagtcct

SEQ ID NO: 140442 - DNA, 17 bp, synthetic construct
  source 1..17: mol_type = other DNA
tgagccagtgagtcctc

SEQ ID NO: 140443 - DNA, 17 bp, synthetic construct
  source 1..17: mol_type = other DNA
gagccagtgagtcctcc

SEQ ID NO: 140444 - DNA, 17 bp, synthetic construct
  source 1..17: mol_type = other DNA
agccagtgagtcctccc

SEQ ID NO: 140445 - DNA, 17 bp, synthetic construct
  source 1..17: mol_type = other DNA
gccagtgagtcctcccc

SEQ ID NO: 140446 - DNA, 17 bp, synthetic construct
  source 1..17: mol_type = other DNA
ccagtgagtcctcccct

SEQ ID NO: 140447 - DNA, 17 bp, synthetic construct
  source 1..17: mol_type = other DNA
cagtgagtcctcccctc

SEQ ID NO: 140448 - DNA, 17 bp, synthetic construct
  source 1..17: mol_type = other DNA
agtgagtcctcccctcg

SEQ ID NO: 140449 - DNA, 17 bp, synthetic construct
  source 1..17: mol_type = other DNA
gtgagtcctcccctcgg

SEQ ID NO: 140450 - DNA, 17 bp, synthetic construct
  source 1..17: mol_type = other DNA
tgagtcctcccctcggg

SEQ ID NO: 140451 - DNA, 17 bp, synthetic construct
  source 1..17: mol_type = other DNA
gagtcctcccctcgggg

SEQ ID NO: 140452 - DNA, 17 bp, synthetic construct
  source 1..17: mol_type = other DNA
agtcctcccctcggggg

SEQ ID NO: 140453 - DNA, 17 bp, synthetic construct
  source 1..17: mol_type = other DNA
gtcctcccctcgggggt

SEQ ID NO: 140454 - DNA, 17 bp, synthetic construct
  source 1..17: mol_type = other DNA
tcctcccctcgggggtt

SEQ ID NO: 140455 - DNA, 17 bp, synthetic construct
  source 1..17: mol_type = other DNA
cctcccctcgggggttg

SEQ ID NO: 140456 - DNA, 17 bp, synthetic construct
  source 1..17: mol_type = other DNA
ctcccctcgggggttgc

SEQ ID NO: 140457 - DNA, 17 bp, synthetic construct
  source 1..17: mol_type = other DNA
tcccctcgggggttgca

SEQ ID NO: 140458 - DNA, 17 bp, synthetic construct
  source 1..17: mol_type = other DNA
cccctcgggggttgcag

SEQ ID NO: 140459 - DNA, 17 bp, synthetic construct
  source 1..17: mol_type = other DNA
ccctcgggggttgcagg

SEQ ID NO: 140460 - DNA, 17 bp, synthetic construct
  source 1..17: mol_type = other DNA
cctcgggggttgcaggc

SEQ ID NO: 140461 - DNA, 17 bp, synthetic construct
  source 1..17: mol_type = other DNA
ctcgggggttgcaggcc

SEQ ID NO: 140462 - DNA, 17 bp, synthetic construct
  source 1..17: mol_type = other DNA
tcgggggttgcaggccc

SEQ ID NO: 140463 - DNA, 17 bp, synthetic construct
  source 1..17: mol_type = other DNA
cgggggttgcaggccct

SEQ ID NO: 140464 - DNA, 17 bp, synthetic construct
  source 1..17: mol_type = other DNA
gggggttgcaggccctg

SEQ ID NO: 140465 - DNA, 17 bp, synthetic construct
  source 1..17: mol_type = other DNA
ggggttgcaggccctgg

SEQ ID NO: 140466 - DNA, 17 bp, synthetic construct
  source 1..17: mol_type = other DNA
gggttgcaggccctggg

SEQ ID NO: 140467 - DNA, 17 bp, synthetic construct
  source 1..17: mol_type = other DNA
ggttgcaggccctgggg

SEQ ID NO: 140468 - DNA, 17 bp, synthetic construct
  source 1..17: mol_type = other DNA
gttgcaggccctggggc

SEQ ID NO: 140469 - DNA, 17 bp, synthetic construct
  source 1..17: mol_type = other DNA
ttgcaggccctggggcg

SEQ ID NO: 140470 - DNA, 17 bp, synthetic construct
  source 1..17: mol_type = other DNA
tgcaggccctggggcgc

SEQ ID NO: 140471 - DNA, 17 bp, synthetic construct
  source 1..17: mol_type = other DNA
gcaggccctggggcgcc

SEQ ID NO: 140472 - DNA, 17 bp, synthetic construct
  source 1..17: mol_type = other DNA
caggccctggggcgccc

SEQ ID NO: 140473 - DNA, 17 bp, synthetic construct
  source 1..17: mol_type = other DNA
aggccctggggcgcccc

SEQ ID NO: 140474 - DNA, 17 bp, synthetic construct
  source 1..17: mol_type = other DNA
ggccctggggcgccccc

SEQ ID NO: 140475 - DNA, 17 bp, synthetic construct
  source 1..17: mol_type = other DNA
gccctggggcgcccccg

SEQ ID NO: 140476 - DNA, 17 bp, synthetic construct
  source 1..17: mol_type = other DNA
ccctggggcgcccccgc

SEQ ID NO: 140477 - DNA, 17 bp, synthetic construct
  source 1..17: mol_type = other DNA
cctggggcgcccccgcc

SEQ ID NO: 140478 - DNA, 17 bp, synthetic construct
  source 1..17: mol_type = other DNA
ctggggcgcccccgccc

SEQ ID NO: 140479 - DNA, 17 bp, synthetic construct
  source 1..17: mol_type = other DNA
tggggcgcccccgcccg

SEQ ID NO: 140480 - DNA, 17 bp, synthetic construct
  source 1..17: mol_type = other DNA
ggggcgcccccgcccgc

SEQ ID NO: 140481 - DNA, 17 bp, synthetic construct
  source 1..17: mol_type = other DNA
gggcgcccccgcccgcc

SEQ ID NO: 140482 - DNA, 17 bp, synthetic construct
  source 1..17: mol_type = other DNA
ggcgcccccgcccgccc

SEQ ID NO: 140483 - DNA, 17 bp, synthetic construct
  source 1..17: mol_type = other DNA
gcgcccccgcccgcccg

SEQ ID NO: 140484 - DNA, 17 bp, synthetic construct
  source 1..17: mol_type = other DNA
cgcccccgcccgcccgc

SEQ ID NO: 140485 - DNA, 17 bp, synthetic construct
  source 1..17: mol_type = other DNA
gcccccgcccgcccgca

SEQ ID NO: 140486 - DNA, 17 bp, synthetic construct
  source 1..17: mol_type = other DNA
cccccgcccgcccgcat

SEQ ID NO: 140487 - DNA, 17 bp, synthetic construct
  source 1..17: mol_type = other DNA
ccccgcccgcccgcatg

SEQ ID NO: 140488 - DNA, 17 bp, synthetic construct
  source 1..17: mol_type = other DNA
cccgcccgcccgcatgc

SEQ ID NO: 140489 - DNA, 17 bp, synthetic construct
  source 1..17: mol_type = other DNA
ccgcccgcccgcatgca

SEQ ID NO: 140490 - DNA, 17 bp, synthetic construct
  source 1..17: mol_type = other DNA
cgcccgcccgcatgcac

SEQ ID NO: 140491 - DNA, 17 bp, synthetic construct
  source 1..17: mol_type = other DNA
gcccgcccgcatgcacg

SEQ ID NO: 140492 - DNA, 17 bp, synthetic construct
  source 1..17: mol_type = other DNA
cccgcccgcatgcacgc

SEQ ID NO: 140493 - DNA, 17 bp, synthetic construct
  source 1..17: mol_type = other DNA
ccgcccgcatgcacgca

SEQ ID NO: 140494 - DNA, 17 bp, synthetic construct
  source 1..17: mol_type = other DNA
cgcccgcatgcacgcac

SEQ ID NO: 140495 - DNA, 17 bp, synthetic construct
  source 1..17: mol_type = other DNA
gcccgcatgcacgcacg

SEQ ID NO: 140496 - DNA, 17 bp, synthetic construct
  source 1..17: mol_type = other DNA
cccgcatgcacgcacgc

SEQ ID NO: 140497 - DNA, 17 bp, synthetic construct
  source 1..17: mol_type = other DNA
ccgcatgcacgcacgca

SEQ ID NO: 140498 - DNA, 17 bp, synthetic construct
  source 1..17: mol_type = other DNA
cgcatgcacgcacgcac

SEQ ID NO: 140499 - DNA, 17 bp, synthetic construct
  source 1..17: mol_type = other DNA
gcatgcacgcacgcacg

SEQ ID NO: 140500 - DNA, 17 bp, synthetic construct
  source 1..17: mol_type = other DNA
catgcacgcacgcacgc

SEQ ID NO: 140501 - DNA, 17 bp, synthetic construct
  source 1..17: mol_type = other DNA
atgcacgcacgcacgca

SEQ ID NO: 140502 - DNA, 17 bp, synthetic construct
  source 1..17: mol_type = other DNA
tgcacgcacgcacgcag

SEQ ID NO: 140503 - DNA, 17 bp, synthetic construct
  source 1..17: mol_type = other DNA
gcacgcacgcacgcagc

SEQ ID NO: 140504 - DNA, 17 bp, synthetic construct
  source 1..17: mol_type = other DNA
cacgcacgcacgcagct

SEQ ID NO: 140505 - DNA, 17 bp, synthetic construct
  source 1..17: mol_type = other DNA
acgcacgcacgcagctc

SEQ ID NO: 140506 - DNA, 17 bp, synthetic construct
  source 1..17: mol_type = other DNA
cgcacgcacgcagctcc

SEQ ID NO: 140507 - DNA, 17 bp, synthetic construct
  source 1..17: mol_type = other DNA
gcacgcacgcagctccc

SEQ ID NO: 140508 - DNA, 17 bp, synthetic construct
  source 1..17: mol_type = other DNA
cacgcacgcagctccct

SEQ ID NO: 140509 - DNA, 17 bp, synthetic construct
  source 1..17: mol_type = other DNA
acgcacgcagctccctg

SEQ ID NO: 140510 - DNA, 17 bp, synthetic construct
  source 1..17: mol_type = other DNA
cgcacgcagctccctgg

SEQ ID NO: 140511 - DNA, 17 bp, synthetic construct
  source 1..17: mol_type = other DNA
gcacgcagctccctggg

SEQ ID NO: 140512 - DNA, 17 bp, synthetic construct
  source 1..17: mol_type = other DNA
cacgcagctccctgggg

SEQ ID NO: 140513 - DNA, 17 bp, synthetic construct
  source 1..17: mol_type = other DNA
acgcagctccctggggc

SEQ ID NO: 140514 - DNA, 17 bp, synthetic construct
  source 1..17: mol_type = other DNA
cgcagctccctggggct

SEQ ID NO: 140515 - DNA, 17 bp, synthetic construct
  source 1..17: mol_type = other DNA
gcagctccctggggctg

SEQ ID NO: 140516 - DNA, 17 bp, synthetic construct
  source 1..17: mol_type = other DNA
cagctccctggggctgg

SEQ ID NO: 140517 - DNA, 17 bp, synthetic construct
  source 1..17: mol_type = other DNA
agctccctggggctggg

SEQ ID NO: 140518 - DNA, 17 bp, synthetic construct
  source 1..17: mol_type = other DNA
gctccctggggctgggg

SEQ ID NO: 140519 - DNA, 17 bp, synthetic construct
  source 1..17: mol_type = other DNA
ctccctggggctggggg

SEQ ID NO: 140520 - DNA, 17 bp, synthetic construct
  source 1..17: mol_type = other DNA
tccctggggctgggggc

SEQ ID NO: 140521 - DNA, 17 bp, synthetic construct
  source 1..17: mol_type = other DNA
ccctggggctgggggcc

SEQ ID NO: 140522 - DNA, 17 bp, synthetic construct
  source 1..17: mol_type = other DNA
cctggggctgggggccc

SEQ ID NO: 140523 - DNA, 17 bp, synthetic construct
  source 1..17: mol_type = other DNA
ctggggctgggggccct

SEQ ID NO: 140524 - DNA, 17 bp, synthetic construct
  source 1..17: mol_type = other DNA
tggggctgggggccctc

SEQ ID NO: 140525 - DNA, 17 bp, synthetic construct
  source 1..17: mol_type = other DNA
ggggctgggggccctcc

SEQ ID NO: 140526 - DNA, 17 bp, synthetic construct
  source 1..17: mol_type = other DNA
gggctgggggccctccg

SEQ ID NO: 140527 - DNA, 17 bp, synthetic construct
  source 1..17: mol_type = other DNA
ggctgggggccctccgt

SEQ ID NO: 140528 - DNA, 17 bp, synthetic construct
  source 1..17: mol_type = other DNA
gctgggggccctccgtc

SEQ ID NO: 140529 - DNA, 17 bp, synthetic construct
  source 1..17: mol_type = other DNA
ctgggggccctccgtcc

SEQ ID NO: 140530 - DNA, 17 bp, synthetic construct
  source 1..17: mol_type = other DNA
tgggggccctccgtcct

SEQ ID NO: 140531 - DNA, 17 bp, synthetic construct
  source 1..17: mol_type = other DNA
gggggccctccgtcctg

SEQ ID NO: 140532 - DNA, 17 bp, synthetic construct
  source 1..17: mol_type = other DNA
ggggccctccgtcctga

SEQ ID NO: 140533 - DNA, 17 bp, synthetic construct
  source 1..17: mol_type = other DNA
gggccctccgtcctgat

SEQ ID NO: 140534 - DNA, 17 bp, synthetic construct
  source 1..17: mol_type = other DNA
ggccctccgtcctgatc

SEQ ID NO: 140535 - DNA, 17 bp, synthetic construct
  source 1..17: mol_type = other DNA
gccctccgtcctgatcg

SEQ ID NO: 140536 - DNA, 17 bp, synthetic construct
  source 1..17: mol_type = other DNA
ccctccgtcctgatcgc

SEQ ID NO: 140537 - DNA, 17 bp, synthetic construct
  source 1..17: mol_type = other DNA
cctccgtcctgatcgct

SEQ ID NO: 140538 - DNA, 17 bp, synthetic construct
  source 1..17: mol_type = other DNA
ctccgtcctgatcgctt

SEQ ID NO: 140539 - DNA, 17 bp, synthetic construct
  source 1..17: mol_type = other DNA
tccgtcctgatcgcttt

SEQ ID NO: 140540 - DNA, 17 bp, synthetic construct
  source 1..17: mol_type = other DNA
ccgtcctgatcgctttg

SEQ ID NO: 140541 - DNA, 17 bp, synthetic construct
  source 1..17: mol_type = other DNA
cgtcctgatcgctttgc

SEQ ID NO: 140542 - DNA, 17 bp, synthetic construct
  source 1..17: mol_type = other DNA
gtcctgatcgctttgcc

SEQ ID NO: 140543 - DNA, 17 bp, synthetic construct
  source 1..17: mol_type = other DNA
tcctgatcgctttgccc

SEQ ID NO: 140544 - DNA, 17 bp, synthetic construct
  source 1..17: mol_type = other DNA
cctgatcgctttgcccc

SEQ ID NO: 140545 - DNA, 17 bp, synthetic construct
  source 1..17: mol_type = other DNA
ctgatcgctttgcccca

SEQ ID NO: 140546 - DNA, 17 bp, synthetic construct
  source 1..17: mol_type = other DNA
tgatcgctttgccccac

SEQ ID NO: 140547 - DNA, 17 bp, synthetic construct
  source 1..17: mol_type = other DNA
gatcgctttgccccaca

SEQ ID NO: 140548 - DNA, 17 bp, synthetic construct
  source 1..17: mol_type = other DNA
atcgctttgccccacag

SEQ ID NO: 140549 - DNA, 17 bp, synthetic construct
  source 1..17: mol_type = other DNA
tcgctttgccccacagg

SEQ ID NO: 140550 - DNA, 17 bp, synthetic construct
  source 1..17: mol_type = other DNA
cgctttgccccacaggg

SEQ ID NO: 140551 - DNA, 17 bp, synthetic construct
  source 1..17: mol_type = other DNA
gctttgccccacagggt

SEQ ID NO: 140552 - DNA, 17 bp, synthetic construct
  source 1..17: mol_type = other DNA
ctttgccccacagggtc

SEQ ID NO: 140553 - DNA, 17 bp, synthetic construct
  source 1..17: mol_type = other DNA
tttgccccacagggtct

SEQ ID NO: 140554 - DNA, 17 bp, synthetic construct
  source 1..17: mol_type = other DNA
ttgccccacagggtctt

SEQ ID NO: 140555 - DNA, 17 bp, synthetic construct
  source 1..17: mol_type = other DNA
tgccccacagggtcttt

SEQ ID NO: 140556 - DNA, 17 bp, synthetic construct
  source 1..17: mol_type = other DNA
gccccacagggtctttg

SEQ ID NO: 140557 - DNA, 17 bp, synthetic construct
  source 1..17: mol_type = other DNA
ccccacagggtctttgc

SEQ ID NO: 140558 - DNA, 17 bp, synthetic construct
  source 1..17: mol_type = other DNA
cccacagggtctttgct

SEQ ID NO: 140559 - DNA, 17 bp, synthetic construct
  source 1..17: mol_type = other DNA
ccacagggtctttgctg

SEQ ID NO: 140560 - DNA, 17 bp, synthetic construct
  source 1..17: mol_type = other DNA
cacagggtctttgctga

SEQ ID NO: 140561 - DNA, 17 bp, synthetic construct
  source 1..17: mol_type = other DNA
acagggtctttgctgag

SEQ ID NO: 140562 - DNA, 17 bp, synthetic construct
  source 1..17: mol_type = other DNA
cagggtctttgctgagt

SEQ ID NO: 140563 - DNA, 17 bp, synthetic construct
  source 1..17: mol_type = other DNA
agggtctttgctgagtg

SEQ ID NO: 140564 - DNA, 17 bp, synthetic construct
  source 1..17: mol_type = other DNA
gggtctttgctgagtgc

SEQ ID NO: 140565 - DNA, 17 bp, synthetic construct
  source 1..17: mol_type = other DNA
ggtctttgctgagtgcc

SEQ ID NO: 140566 - DNA, 17 bp, synthetic construct
  source 1..17: mol_type = other DNA
gtctttgctgagtgcca

SEQ ID NO: 140567 - DNA, 17 bp, synthetic construct
  source 1..17: mol_type = other DNA
tctttgctgagtgccac

SEQ ID NO: 140568 - DNA, 17 bp, synthetic construct
  source 1..17: mol_type = other DNA
ctttgctgagtgccaca

SEQ ID NO: 140569 - DNA, 17 bp, synthetic construct
  source 1..17: mol_type = other DNA
tttgctgagtgccacaa

SEQ ID NO: 140570 - DNA, 17 bp, synthetic construct
  source 1..17: mol_type = other DNA
ttgctgagtgccacaac

SEQ ID NO: 140571 - DNA, 17 bp, synthetic construct
  source 1..17: mol_type = other DNA
tgctgagtgccacaacc

SEQ ID NO: 140572 - DNA, 17 bp, synthetic construct
  source 1..17: mol_type = other DNA
gctgagtgccacaacct

SEQ ID NO: 140573 - DNA, 17 bp, synthetic construct
  source 1..17: mol_type = other DNA
ctgagtgccacaacctt

SEQ ID NO: 140574 - DNA, 17 bp, synthetic construct
  source 1..17: mol_type = other DNA
tgagtgccacaaccttg

SEQ ID NO: 140575 - DNA, 17 bp, synthetic construct
  source 1..17: mol_type = other DNA
gagtgccacaaccttgt

SEQ ID NO: 140576 - DNA, 17 bp, synthetic construct
  source 1..17: mol_type = other DNA
agtgccacaaccttgtg

SEQ ID NO: 140577 - DNA, 17 bp, synthetic construct
  source 1..17: mol_type = other DNA
gtgccacaaccttgtgc

SEQ ID NO: 140578 - DNA, 17 bp, synthetic construct
  source 1..17: mol_type = other DNA
tgccacaaccttgtgcc

SEQ ID NO: 140579 - DNA, 17 bp, synthetic construct
  source 1..17: mol_type = other DNA
gccacaaccttgtgccc

SEQ ID NO: 140580 - DNA, 17 bp, synthetic construct
  source 1..17: mol_type = other DNA
ccacaaccttgtgcccc

SEQ ID NO: 140581 - DNA, 17 bp, synthetic construct
  source 1..17: mol_type = other DNA
cacaaccttgtgccccc

SEQ ID NO: 140582 - DNA, 17 bp, synthetic construct
  source 1..17: mol_type = other DNA
acaaccttgtgcccccg

SEQ ID NO: 140583 - DNA, 17 bp, synthetic construct
  source 1..17: mol_type = other DNA
caaccttgtgcccccgg

SEQ ID NO: 140584 - DNA, 17 bp, synthetic construct
  source 1..17: mol_type = other DNA
aaccttgtgcccccggg

SEQ ID NO: 140585 - DNA, 17 bp, synthetic construct
  source 1..17: mol_type = other DNA
accttgtgcccccgggc

SEQ ID NO: 140586 - DNA, 17 bp, synthetic construct
  source 1..17: mol_type = other DNA
ccttgtgcccccgggcc

SEQ ID NO: 140587 - DNA, 17 bp, synthetic construct
  source 1..17: mol_type = other DNA
cttgtgcccccgggccc

SEQ ID NO: 140588 - DNA, 17 bp, synthetic construct
  source 1..17: mol_type = other DNA
ttgtgcccccgggccca

SEQ ID NO: 140589 - DNA, 17 bp, synthetic construct
  source 1..17: mol_type = other DNA
tgtgcccccgggcccat

SEQ ID NO: 140590 - DNA, 17 bp, synthetic construct
  source 1..17: mol_type = other DNA
gtgcccccgggcccatt

SEQ ID NO: 140591 - DNA, 17 bp, synthetic construct
  source 1..17: mol_type = other DNA
tgcccccgggcccattc

SEQ ID NO: 140592 - DNA, 17 bp, synthetic construct
  source 1..17: mol_type = other DNA
gcccccgggcccattct

SEQ ID NO: 140593 - DNA, 17 bp, synthetic construct
  source 1..17: mol_type = other DNA
cccccgggcccattctt

SEQ ID NO: 140594 - DNA, 17 bp, synthetic construct
  source 1..17: mol_type = other DNA
ccccgggcccattcttc

SEQ ID NO: 140595 - DNA, 17 bp, synthetic construct
  source 1..17: mol_type = other DNA
cccgggcccattcttca

SEQ ID NO: 140596 - DNA, 17 bp, synthetic construct
  source 1..17: mol_type = other DNA
ccgggcccattcttcaa

SEQ ID NO: 140597 - DNA, 17 bp, synthetic construct
  source 1..17: mol_type = other DNA
cgggcccattcttcaac

SEQ ID NO: 140598 - DNA, 17 bp, synthetic construct
  source 1..17: mol_type = other DNA
gggcccattcttcaacg

SEQ ID NO: 140599 - DNA, 17 bp, synthetic construct
  source 1..17: mol_type = other DNA
ggcccattcttcaacgc

SEQ ID NO: 140600 - DNA, 17 bp, synthetic construct
  source 1..17: mol_type = other DNA
gcccattcttcaacgcc

SEQ ID NO: 140601 - DNA, 17 bp, synthetic construct
  source 1..17: mol_type = other DNA
cccattcttcaacgcct

SEQ ID NO: 140602 - DNA, 17 bp, synthetic construct
  source 1..17: mol_type = other DNA
ccattcttcaacgcctg

SEQ ID NO: 140603 - DNA, 17 bp, synthetic construct
  source 1..17: mol_type = other DNA
cattcttcaacgcctgc

SEQ ID NO: 140604 - DNA, 17 bp, synthetic construct
  source 1..17: mol_type = other DNA
attcttcaacgcctgca

SEQ ID NO: 140605 - DNA, 17 bp, synthetic construct
  source 1..17: mol_type = other DNA
ttcttcaacgcctgcat

SEQ ID NO: 140606 - DNA, 17 bp, synthetic construct
  source 1..17: mol_type = other DNA
tcttcaacgcctgcatc

SEQ ID NO: 140607 - DNA, 17 bp, synthetic construct
  source 1..17: mol_type = other DNA
cttcaacgcctgcatca

SEQ ID NO: 140608 - DNA, 17 bp, synthetic construct
  source 1..17: mol_type = other DNA
ttcaacgcctgcatcag

SEQ ID NO: 140609 - DNA, 17 bp, synthetic construct
  source 1..17: mol_type = other DNA
tcaacgcctgcatcagc

SEQ ID NO: 140610 - DNA, 17 bp, synthetic construct
  source 1..17: mol_type = other DNA
caacgcctgcatcagcg

SEQ ID NO: 140611 - DNA, 17 bp, synthetic construct
  source 1..17: mol_type = other DNA
aacgcctgcatcagcga

SEQ ID NO: 140612 - DNA, 17 bp, synthetic construct
  source 1..17: mol_type = other DNA
acgcctgcatcagcgac

SEQ ID NO: 140613 - DNA, 17 bp, synthetic construct
  source 1..17: mol_type = other DNA
cgcctgcatcagcgacc

SEQ ID NO: 140614 - DNA, 17 bp, synthetic construct
  source 1..17: mol_type = other DNA
gcctgcatcagcgacca

SEQ ID NO: 140615 - DNA, 17 bp, synthetic construct
  source 1..17: mol_type = other DNA
cctgcatcagcgaccac

SEQ ID NO: 140616 - DNA, 17 bp, synthetic construct
  source 1..17: mol_type = other DNA
ctgcatcagcgaccact

SEQ ID NO: 140617 - DNA, 17 bp, synthetic construct
  source 1..17: mol_type = other DNA
tgcatcagcgaccactg

SEQ ID NO: 140618 - DNA, 17 bp, synthetic construct
  source 1..17: mol_type = other DNA
gcatcagcgaccactgc

SEQ ID NO: 140619 - DNA, 17 bp, synthetic construct
  source 1..17: mol_type = other DNA
catcagcgaccactgca

SEQ ID NO: 140620 - DNA, 17 bp, synthetic construct
  source 1..17: mol_type = other DNA
atcagcgaccactgcag

SEQ ID NO: 140621 - DNA, 17 bp, synthetic construct
  source 1..17: mol_type = other DNA
tcagcgaccactgcagg

SEQ ID NO: 140622 - DNA, 17 bp, synthetic construct
  source 1..17: mol_type = other DNA
cagcgaccactgcaggg

SEQ ID NO: 140623 - DNA, 17 bp, synthetic construct
  source 1..17: mol_type = other DNA
agcgaccactgcagggg

SEQ ID NO: 140624 - DNA, 17 bp, synthetic construct
  source 1..17: mol_type = other DNA
gcgaccactgcaggggc

SEQ ID NO: 140625 - DNA, 17 bp, synthetic construct
  source 1..17: mol_type = other DNA
cgaccactgcaggggcc

SEQ ID NO: 140626 - DNA, 17 bp, synthetic construct
  source 1..17: mol_type = other DNA
gaccactgcaggggccg

SEQ ID NO: 140627 - DNA, 17 bp, synthetic construct
  source 1..17: mol_type = other DNA
accactgcaggggccgc

SEQ ID NO: 140628 - DNA, 17 bp, synthetic construct
  source 1..17: mol_type = other DNA
ccactgcaggggccgcc

SEQ ID NO: 140629 - DNA, 17 bp, synthetic construct
  source 1..17: mol_type = other DNA
cactgcaggggccgcct

SEQ ID NO: 140630 - DNA, 17 bp, synthetic construct
  source 1..17: mol_type = other DNA
actgcaggggccgcctt

SEQ ID NO: 140631 - DNA, 17 bp, synthetic construct
  source 1..17: mol_type = other DNA
ctgcaggggccgccttg

SEQ ID NO: 140632 - DNA, 17 bp, synthetic construct
  source 1..17: mol_type = other DNA
tgcaggggccgccttga

SEQ ID NO: 140633 - DNA, 17 bp, synthetic construct
  source 1..17: mol_type = other DNA
gcaggggccgccttgag

SEQ ID NO: 140634 - DNA, 17 bp, synthetic construct
  source 1..17: mol_type = other DNA
caggggccgccttgagg

SEQ ID NO: 140635 - DNA, 17 bp, synthetic construct
  source 1..17: mol_type = other DNA
aggggccgccttgaggt

SEQ ID NO: 140636 - DNA, 17 bp, synthetic construct
  source 1..17: mol_type = other DNA
ggggccgccttgaggtg

SEQ ID NO: 140637 - DNA, 17 bp, synthetic construct
  source 1..17: mol_type = other DNA
gggccgccttgaggtgc

SEQ ID NO: 140638 - DNA, 17 bp, synthetic construct
  source 1..17: mol_type = other DNA
ggccgccttgaggtgcc

SEQ ID NO: 140639 - DNA, 17 bp, synthetic construct
  source 1..17: mol_type = other DNA
gccgccttgaggtgccc

SEQ ID NO: 140640 - DNA, 17 bp, synthetic construct
  source 1..17: mol_type = other DNA
ccgccttgaggtgccct

SEQ ID NO: 140641 - DNA, 17 bp, synthetic construct
  source 1..17: mol_type = other DNA
cgccttgaggtgccctg

SEQ ID NO: 140642 - DNA, 17 bp, synthetic construct
  source 1..17: mol_type = other DNA
gccttgaggtgccctgc

SEQ ID NO: 140643 - DNA, 17 bp, synthetic construct
  source 1..17: mol_type = other DNA
ccttgaggtgccctgcc

SEQ ID NO: 140644 - DNA, 17 bp, synthetic construct
  source 1..17: mol_type = other DNA
cttgaggtgccctgcca

SEQ ID NO: 140645 - DNA, 17 bp, synthetic construct
  source 1..17: mol_type = other DNA
ttgaggtgccctgccag

SEQ ID NO: 140646 - DNA, 17 bp, synthetic construct
  source 1..17: mol_type = other DNA
tgaggtgccctgccaga

SEQ ID NO: 140647 - DNA, 17 bp, synthetic construct
  source 1..17: mol_type = other DNA
gaggtgccctgccagag

SEQ ID NO: 140648 - DNA, 17 bp, synthetic construct
  source 1..17: mol_type = other DNA
aggtgccctgccagagc

SEQ ID NO: 140649 - DNA, 17 bp, synthetic construct
  source 1..17: mol_type = other DNA
ggtgccctgccagagcc

SEQ ID NO: 140650 - DNA, 17 bp, synthetic construct
  source 1..17: mol_type = other DNA
gtgccctgccagagcct

SEQ ID NO: 140651 - DNA, 17 bp, synthetic construct
  source 1..17: mol_type = other DNA
tgccctgccagagcctg

SEQ ID NO: 140652 - DNA, 17 bp, synthetic construct
  source 1..17: mol_type = other DNA
gccctgccagagcctgg

SEQ ID NO: 140653 - DNA, 17 bp, synthetic construct
  source 1..17: mol_type = other DNA
ccctgccagagcctgga

SEQ ID NO: 140654 - DNA, 17 bp, synthetic construct
  source 1..17: mol_type = other DNA
cctgccagagcctggag

SEQ ID NO: 140655 - DNA, 17 bp, synthetic construct
  source 1..17: mol_type = other DNA
ctgccagagcctggagg

SEQ ID NO: 140656 - DNA, 17 bp, synthetic construct
  source 1..17: mol_type = other DNA
tgccagagcctggaggc

SEQ ID NO: 140657 - DNA, 17 bp, synthetic construct
  source 1..17: mol_type = other DNA
gccagagcctggaggct

SEQ ID NO: 140658 - DNA, 17 bp, synthetic construct
  source 1..17: mol_type = other DNA
ccagagcctggaggctt

SEQ ID NO: 140659 - DNA, 17 bp, synthetic construct
  source 1..17: mol_type = other DNA
cagagcctggaggctta

SEQ ID NO: 140660 - DNA, 17 bp, synthetic construct
  source 1..17: mol_type = other DNA
agagcctggaggcttac

SEQ ID NO: 140661 - DNA, 17 bp, synthetic construct
  source 1..17: mol_type = other DNA
gagcctggaggcttacg

SEQ ID NO: 140662 - DNA, 17 bp, synthetic construct
  source 1..17: mol_type = other DNA
agcctggaggcttacgc

SEQ ID NO: 140663 - DNA, 17 bp, synthetic construct
  source 1..17: mol_type = other DNA
gcctggaggcttacgca

SEQ ID NO: 140664 - DNA, 17 bp, synthetic construct
  source 1..17: mol_type = other DNA
cctggaggcttacgcag

SEQ ID NO: 140665 - DNA, 17 bp, synthetic construct
  source 1..17: mol_type = other DNA
ctggaggcttacgcaga

SEQ ID NO: 140666 - DNA, 17 bp, synthetic construct
  source 1..17: mol_type = other DNA
tggaggcttacgcagag

SEQ ID NO: 140667 - DNA, 17 bp, synthetic construct
  source 1..17: mol_type = other DNA
ggaggcttacgcagagc

SEQ ID NO: 140668 - DNA, 17 bp, synthetic construct
  source 1..17: mol_type = other DNA
gaggcttacgcagagct

SEQ ID NO: 140669 - DNA, 17 bp, synthetic construct
  source 1..17: mol_type = other DNA
aggcttacgcagagctc

SEQ ID NO: 140670 - DNA, 17 bp, synthetic construct
  source 1..17: mol_type = other DNA
ggcttacgcagagctct

SEQ ID NO: 140671 - DNA, 17 bp, synthetic construct
  source 1..17: mol_type = other DNA
gcttacgcagagctctg

SEQ ID NO: 140672 - DNA, 17 bp, synthetic construct
  source 1..17: mol_type = other DNA
cttacgcagagctctgc

SEQ ID NO: 140673 - DNA, 17 bp, synthetic construct
  source 1..17: mol_type = other DNA
ttacgcagagctctgcc

SEQ ID NO: 140674 - DNA, 17 bp, synthetic construct
  source 1..17: mol_type = other DNA
tacgcagagctctgccg

SEQ ID NO: 140675 - DNA, 17 bp, synthetic construct
  source 1..17: mol_type = other DNA
acgcagagctctgccgc

SEQ ID NO: 140676 - DNA, 17 bp, synthetic construct
  source 1..17: mol_type = other DNA
cgcagagctctgccgcg

SEQ ID NO: 140677 - DNA, 17 bp, synthetic construct
  source 1..17: mol_type = other DNA
gcagagctctgccgcgc

SEQ ID NO: 140678 - DNA, 17 bp, synthetic construct
  source 1..17: mol_type = other DNA
cagagctctgccgcgcc

SEQ ID NO: 140679 - DNA, 17 bp, synthetic construct
  source 1..17: mol_type = other DNA
agagctctgccgcgccc

SEQ ID NO: 140680 - DNA, 17 bp, synthetic construct
  source 1..17: mol_type = other DNA
gagctctgccgcgcccg

SEQ ID NO: 140681 - DNA, 17 bp, synthetic construct
  source 1..17: mol_type = other DNA
agctctgccgcgcccgg

SEQ ID NO: 140682 - DNA, 17 bp, synthetic construct
  source 1..17: mol_type = other DNA
gctctgccgcgcccggg

SEQ ID NO: 140683 - DNA, 17 bp, synthetic construct
  source 1..17: mol_type = other DNA
ctctgccgcgcccgggg

SEQ ID NO: 140684 - DNA, 17 bp, synthetic construct
  source 1..17: mol_type = other DNA
tctgccgcgcccgggga

SEQ ID NO: 140685 - DNA, 17 bp, synthetic construct
  source 1..17: mol_type = other DNA
ctgccgcgcccggggag

SEQ ID NO: 140686 - DNA, 17 bp, synthetic construct
  source 1..17: mol_type = other DNA
tgccgcgcccggggagt

SEQ ID NO: 140687 - DNA, 17 bp, synthetic construct
  source 1..17: mol_type = other DNA
gccgcgcccggggagtg

SEQ ID NO: 140688 - DNA, 17 bp, synthetic construct
  source 1..17: mol_type = other DNA
ccgcgcccggggagtgt

SEQ ID NO: 140689 - DNA, 17 bp, synthetic construct
  source 1..17: mol_type = other DNA
cgcgcccggggagtgtg

SEQ ID NO: 140690 - DNA, 17 bp, synthetic construct
  source 1..17: mol_type = other DNA
gcgcccggggagtgtgc

SEQ ID NO: 140691 - DNA, 17 bp, synthetic construct
  source 1..17: mol_type = other DNA
cgcccggggagtgtgca

SEQ ID NO: 140692 - DNA, 17 bp, synthetic construct
  source 1..17: mol_type = other DNA
gcccggggagtgtgcag

SEQ ID NO: 140693 - DNA, 17 bp, synthetic construct
  source 1..17: mol_type = other DNA
cccggggagtgtgcagt

SEQ ID NO: 140694 - DNA, 17 bp, synthetic construct
  source 1..17: mol_type = other DNA
ccggggagtgtgcagtg

SEQ ID NO: 140695 - DNA, 17 bp, synthetic construct
  source 1..17: mol_type = other DNA
cggggagtgtgcagtga

SEQ ID NO: 140696 - DNA, 17 bp, synthetic construct
  source 1..17: mol_type = other DNA
ggggagtgtgcagtgac

SEQ ID NO: 140697 - DNA, 17 bp, synthetic construct
  source 1..17: mol_type = other DNA
gggagtgtgcagtgact

SEQ ID NO: 140698 - DNA, 17 bp, synthetic construct
  source 1..17: mol_type = other DNA
ggagtgtgcagtgactg

SEQ ID NO: 140699 - DNA, 17 bp, synthetic construct
  source 1..17: mol_type = other DNA
gagtgtgcagtgactgg

SEQ ID NO: 140700 - DNA, 17 bp, synthetic construct
  source 1..17: mol_type = other DNA
agtgtgcagtgactggc

SEQ ID NO: 140701 - DNA, 17 bp, synthetic construct
  source 1..17: mol_type = other DNA
gtgtgcagtgactggcg

SEQ ID NO: 140702 - DNA, 17 bp, synthetic construct
  source 1..17: mol_type = other DNA
tgtgcagtgactggcga

SEQ ID NO: 140703 - DNA, 17 bp, synthetic construct
  source 1..17: mol_type = other DNA
gtgcagtgactggcgag

SEQ ID NO: 140704 - DNA, 17 bp, synthetic construct
  source 1..17: mol_type = other DNA
tgcagtgactggcgagg

SEQ ID NO: 140705 - DNA, 17 bp, synthetic construct
  source 1..17: mol_type = other DNA
gcagtgactggcgaggt

SEQ ID NO: 140706 - DNA, 17 bp, synthetic construct
  source 1..17: mol_type = other DNA
cagtgactggcgaggtg

SEQ ID NO: 140707 - DNA, 17 bp, synthetic construct
  source 1..17: mol_type = other DNA
agtgactggcgaggtgc

SEQ ID NO: 140708 - DNA, 17 bp, synthetic construct
  source 1..17: mol_type = other DNA
gtgactggcgaggtgca

SEQ ID NO: 140709 - DNA, 17 bp, synthetic construct
  source 1..17: mol_type = other DNA
tgactggcgaggtgcaa

SEQ ID NO: 140710 - DNA, 17 bp, synthetic construct
  source 1..17: mol_type = other DNA
gactggcgaggtgcaac

SEQ ID NO: 140711 - DNA, 17 bp, synthetic construct
  source 1..17: mol_type = other DNA
actggcgaggtgcaacc

SEQ ID NO: 140712 - DNA, 17 bp, synthetic construct
  source 1..17: mol_type = other DNA
ctggcgaggtgcaaccg

SEQ ID NO: 140713 - DNA, 17 bp, synthetic construct
  source 1..17: mol_type = other DNA
tggcgaggtgcaaccgg

SEQ ID NO: 140714 - DNA, 17 bp, synthetic construct
  source 1..17: mol_type = other DNA
ggcgaggtgcaaccggt

SEQ ID NO: 140715 - DNA, 17 bp, synthetic construct
  source 1..17: mol_type = other DNA
gcgaggtgcaaccggtg

SEQ ID NO: 140716 - DNA, 17 bp, synthetic construct
  source 1..17: mol_type = other DNA
cgaggtgcaaccggtgg

SEQ ID NO: 140717 - DNA, 17 bp, synthetic construct
  source 1..17: mol_type = other DNA
gaggtgcaaccggtggc

SEQ ID NO: 140718 - DNA, 17 bp, synthetic construct
  source 1..17: mol_type = other DNA
aggtgcaaccggtggcc

SEQ ID NO: 140719 - DNA, 17 bp, synthetic construct
  source 1..17: mol_type = other DNA
ggtgcaaccggtggcct

SEQ ID NO: 140720 - DNA, 17 bp, synthetic construct
  source 1..17: mol_type = other DNA
gtgcaaccggtggcctg

SEQ ID NO: 140721 - DNA, 17 bp, synthetic construct
  source 1..17: mol_type = other DNA
tgcaaccggtggcctgt

SEQ ID NO: 140722 - DNA, 17 bp, synthetic construct
  source 1..17: mol_type = other DNA
gcaaccggtggcctgtg

SEQ ID NO: 140723 - DNA, 17 bp, synthetic construct
  source 1..17: mol_type = other DNA
caaccggtggcctgtgc

SEQ ID NO: 140724 - DNA, 17 bp, synthetic construct
  source 1..17: mol_type = other DNA
aaccggtggcctgtgcg

SEQ ID NO: 140725 - DNA, 17 bp, synthetic construct
  source 1..17: mol_type = other DNA
accggtggcctgtgcgg

SEQ ID NO: 140726 - DNA, 17 bp, synthetic construct
  source 1..17: mol_type = other DNA
ccggtggcctgtgcggt

SEQ ID NO: 140727 - DNA, 17 bp, synthetic construct
  source 1..17: mol_type = other DNA
cggtggcctgtgcggtg

SEQ ID NO: 140728 - DNA, 17 bp, synthetic construct
  source 1..17: mol_type = other DNA
ggtggcctgtgcggtga

SEQ ID NO: 140729 - DNA, 17 bp, synthetic construct
  source 1..17: mol_type = other DNA
gtggcctgtgcggtgag

SEQ ID NO: 140730 - DNA, 17 bp, synthetic construct
  source 1..17: mol_type = other DNA
tggcctgtgcggtgagt

SEQ ID NO: 140731 - DNA, 17 bp, synthetic construct
  source 1..17: mol_type = other DNA
ggcctgtgcggtgagtg

SEQ ID NO: 140732 - DNA, 17 bp, synthetic construct
  source 1..17: mol_type = other DNA
gcctgtgcggtgagtgg

SEQ ID NO: 140733 - DNA, 17 bp, synthetic construct
  source 1..17: mol_type = other DNA
cctgtgcggtgagtggg

SEQ ID NO: 140734 - DNA, 17 bp, synthetic construct
  source 1..17: mol_type = other DNA
ctgtgcggtgagtgggg

SEQ ID NO: 140735 - DNA, 17 bp, synthetic construct
  source 1..17: mol_type = other DNA
tgtgcggtgagtggggg

SEQ ID NO: 140736 - DNA, 17 bp, synthetic construct
  source 1..17: mol_type = other DNA
gtgcggtgagtgggggc

SEQ ID NO: 140737 - DNA, 17 bp, synthetic construct
  source 1..17: mol_type = other DNA
tgcggtgagtgggggcg

SEQ ID NO: 140738 - DNA, 17 bp, synthetic construct
  source 1..17: mol_type = other DNA
gcggtgagtgggggcgg

SEQ ID NO: 140739 - DNA, 17 bp, synthetic construct
  source 1..17: mol_type = other DNA
cggtgagtgggggcggc

SEQ ID NO: 140740 - DNA, 17 bp, synthetic construct
  source 1..17: mol_type = other DNA
ggtgagtgggggcggcc

SEQ ID NO: 140741 - DNA, 17 bp, synthetic construct
  source 1..17: mol_type = other DNA
gtgagtgggggcggccc

SEQ ID NO: 140742 - DNA, 17 bp, synthetic construct
  source 1..17: mol_type = other DNA
tgagtgggggcggcccc

SEQ ID NO: 140743 - DNA, 17 bp, synthetic construct
  source 1..17: mol_type = other DNA
gagtgggggcggccccg

SEQ ID NO: 140744 - DNA, 17 bp, synthetic construct
  source 1..17: mol_type = other DNA
agtgggggcggccccgg

SEQ ID NO: 140745 - DNA, 17 bp, synthetic construct
  source 1..17: mol_type = other DNA
gtgggggcggccccggg

SEQ ID NO: 140746 - DNA, 17 bp, synthetic construct
  source 1..17: mol_type = other DNA
tgggggcggccccgggc

SEQ ID NO: 140747 - DNA, 17 bp, synthetic construct
  source 1..17: mol_type = other DNA
gggggcggccccgggcc

SEQ ID NO: 140748 - DNA, 17 bp, synthetic construct
  source 1..17: mol_type = other DNA
ggggcggccccgggccc

SEQ ID NO: 140749 - DNA, 17 bp, synthetic construct
  source 1..17: mol_type = other DNA
gggcggccccgggcccc

SEQ ID NO: 140750 - DNA, 17 bp, synthetic construct
  source 1..17: mol_type = other DNA
ggcggccccgggccccc

SEQ ID NO: 140751 - DNA, 17 bp, synthetic construct
  source 1..17: mol_type = other DNA
gcggccccgggcccccc

SEQ ID NO: 140752 - DNA, 17 bp, synthetic construct
  source 1..17: mol_type = other DNA
cggccccgggcccccca

SEQ ID NO: 140753 - DNA, 17 bp, synthetic construct
  source 1..17: mol_type = other DNA
ggccccgggccccccag

SEQ ID NO: 140754 - DNA, 17 bp, synthetic construct
  source 1..17: mol_type = other DNA
gccccgggccccccaga

SEQ ID NO: 140755 - DNA, 17 bp, synthetic construct
  source 1..17: mol_type = other DNA
ccccgggccccccagac

SEQ ID NO: 140756 - DNA, 17 bp, synthetic construct
  source 1..17: mol_type = other DNA
cccgggccccccagacc

SEQ ID NO: 140757 - DNA, 17 bp, synthetic construct
  source 1..17: mol_type = other DNA
ccgggccccccagaccc

SEQ ID NO: 140758 - DNA, 17 bp, synthetic construct
  source 1..17: mol_type = other DNA
cgggccccccagacccc

SEQ ID NO: 140759 - DNA, 17 bp, synthetic construct
  source 1..17: mol_type = other DNA
gggccccccagacccct

SEQ ID NO: 140760 - DNA, 17 bp, synthetic construct
  source 1..17: mol_type = other DNA
ggccccccagacccctc

SEQ ID NO: 140761 - DNA, 17 bp, synthetic construct
  source 1..17: mol_type = other DNA
gccccccagacccctcg

SEQ ID NO: 140762 - DNA, 17 bp, synthetic construct
  source 1..17: mol_type = other DNA
ccccccagacccctcgg

SEQ ID NO: 140763 - DNA, 17 bp, synthetic construct
  source 1..17: mol_type = other DNA
cccccagacccctcggc

SEQ ID NO: 140764 - DNA, 17 bp, synthetic construct
  source 1..17: mol_type = other DNA
ccccagacccctcggcc

SEQ ID NO: 140765 - DNA, 17 bp, synthetic construct
  source 1..17: mol_type = other DNA
cccagacccctcggcct

SEQ ID NO: 140766 - DNA, 17 bp, synthetic construct
  source 1..17: mol_type = other DNA
ccagacccctcggcctc

SEQ ID NO: 140767 - DNA, 17 bp, synthetic construct
  source 1..17: mol_type = other DNA
cagacccctcggcctct

SEQ ID NO: 140768 - DNA, 17 bp, synthetic construct
  source 1..17: mol_type = other DNA
agacccctcggcctctc

SEQ ID NO: 140769 - DNA, 17 bp, synthetic construct
  source 1..17: mol_type = other DNA
gacccctcggcctctct

SEQ ID NO: 140770 - DNA, 17 bp, synthetic construct
  source 1..17: mol_type = other DNA
acccctcggcctctctg

SEQ ID NO: 140771 - DNA, 17 bp, synthetic construct
  source 1..17: mol_type = other DNA
cccctcggcctctctga

SEQ ID NO: 140772 - DNA, 17 bp, synthetic construct
  source 1..17: mol_type = other DNA
ccctcggcctctctgag

SEQ ID NO: 140773 - DNA, 17 bp, synthetic construct
  source 1..17: mol_type = other DNA
cctcggcctctctgagt

SEQ ID NO: 140774 - DNA, 17 bp, synthetic construct
  source 1..17: mol_type = other DNA
ctcggcctctctgagtg

SEQ ID NO: 140775 - DNA, 17 bp, synthetic construct
  source 1..17: mol_type = other DNA
tcggcctctctgagtgt

SEQ ID NO: 140776 - DNA, 17 bp, synthetic construct
  source 1..17: mol_type = other DNA
cggcctctctgagtgtc

SEQ ID NO: 140777 - DNA, 17 bp, synthetic construct
  source 1..17: mol_type = other DNA
ggcctctctgagtgtcc

SEQ ID NO: 140778 - DNA, 17 bp, synthetic construct
  source 1..17: mol_type = other DNA
gcctctctgagtgtcct

SEQ ID NO: 140779 - DNA, 17 bp, synthetic construct
  source 1..17: mol_type = other DNA
cctctctgagtgtcctg

SEQ ID NO: 140780 - DNA, 17 bp, synthetic construct
  source 1..17: mol_type = other DNA
ctctctgagtgtcctgt

SEQ ID NO: 140781 - DNA, 17 bp, synthetic construct
  source 1..17: mol_type = other DNA
tctctgagtgtcctgtg

SEQ ID NO: 140782 - DNA, 17 bp, synthetic construct
  source 1..17: mol_type = other DNA
ctctgagtgtcctgtgc

SEQ ID NO: 140783 - DNA, 17 bp, synthetic construct
  source 1..17: mol_type = other DNA
tctgagtgtcctgtgcg

SEQ ID NO: 140784 - DNA, 17 bp, synthetic construct
  source 1..17: mol_type = other DNA
ctgagtgtcctgtgcgg

SEQ ID NO: 140785 - DNA, 17 bp, synthetic construct
  source 1..17: mol_type = other DNA
tgagtgtcctgtgcggt

SEQ ID NO: 140786 - DNA, 17 bp, synthetic construct
  source 1..17: mol_type = other DNA
gagtgtcctgtgcggtg

SEQ ID NO: 140787 - DNA, 17 bp, synthetic construct
  source 1..17: mol_type = other DNA
agtgtcctgtgcggtga

SEQ ID NO: 140788 - DNA, 17 bp, synthetic construct
  source 1..17: mol_type = other DNA
gtgtcctgtgcggtgag

SEQ ID NO: 140789 - DNA, 17 bp, synthetic construct
  source 1..17: mol_type = other DNA
tgtcctgtgcggtgagt

SEQ ID NO: 140790 - DNA, 17 bp, synthetic construct
  source 1..17: mol_type = other DNA
gtcctgtgcggtgagtg

SEQ ID NO: 140791 - DNA, 17 bp, synthetic construct
  source 1..17: mol_type = other DNA
tcctgtgcggtgagtgg

SEQ ID NO: 140792 - DNA, 17 bp, synthetic construct
  source 1..17: mol_type = other DNA
cctgtgcggtgagtggg

SEQ ID NO: 140793 - DNA, 17 bp, synthetic construct
  source 1..17: mol_type = other DNA
ctgtgcggtgagtgggg

SEQ ID NO: 140794 - DNA, 17 bp, synthetic construct
  source 1..17: mol_type = other DNA
tgtgcggtgagtggggg

SEQ ID NO: 140795 - DNA, 17 bp, synthetic construct
  source 1..17: mol_type = other DNA
gtgcggtgagtgggggc

SEQ ID NO: 140796 - DNA, 17 bp, synthetic construct
  source 1..17: mol_type = other DNA
tgcggtgagtgggggcg

SEQ ID NO: 140797 - DNA, 17 bp, synthetic construct
  source 1..17: mol_type = other DNA
gcggtgagtgggggcgg

SEQ ID NO: 140798 - DNA, 17 bp, synthetic construct
  source 1..17: mol_type = other DNA
cggtgagtgggggcggc

SEQ ID NO: 140799 - DNA, 17 bp, synthetic construct
  source 1..17: mol_type = other DNA
ggtgagtgggggcggcc

SEQ ID NO: 140800 - DNA, 17 bp, synthetic construct
  source 1..17: mol_type = other DNA
gtgagtgggggcggccc

SEQ ID NO: 140801 - DNA, 17 bp, synthetic construct
  source 1..17: mol_type = other DNA
tgagtgggggcggcccc

SEQ ID NO: 140802 - DNA, 17 bp, synthetic construct
  source 1..17: mol_type = other DNA
gagtgggggcggccccg

SEQ ID NO: 140803 - DNA, 17 bp, synthetic construct
  source 1..17: mol_type = other DNA
agtgggggcggccccgg

SEQ ID NO: 140804 - DNA, 17 bp, synthetic construct
  source 1..17: mol_type = other DNA
gtgggggcggccccggg

SEQ ID NO: 140805 - DNA, 17 bp, synthetic construct
  source 1..17: mol_type = other DNA
tgggggcggccccgggc

SEQ ID NO: 140806 - DNA, 17 bp, synthetic construct
  source 1..17: mol_type = other DNA
gggggcggccccgggcc

SEQ ID NO: 140807 - DNA, 17 bp, synthetic construct
  source 1..17: mol_type = other DNA
ggggcggccccgggccc

SEQ ID NO: 140808 - DNA, 17 bp, synthetic construct
  source 1..17: mol_type = other DNA
gggcggccccgggcccc

SEQ ID NO: 140809 - DNA, 17 bp, synthetic construct
  source 1..17: mol_type = other DNA
ggcggccccgggccccc

SEQ ID NO: 140810 - DNA, 17 bp, synthetic construct
  source 1..17: mol_type = other DNA
gcggccccgggcccccc

SEQ ID NO: 140811 - DNA, 17 bp, synthetic construct
  source 1..17: mol_type = other DNA
cggccccgggcccccca

SEQ ID NO: 140812 - DNA, 17 bp, synthetic construct
  source 1..17: mol_type = other DNA
ggccccgggccccccag

SEQ ID NO: 140813 - DNA, 17 bp, synthetic construct
  source 1..17: mol_type = other DNA
gccccgggccccccaga

SEQ ID NO: 140814 - DNA, 17 bp, synthetic construct
  source 1..17: mol_type = other DNA
ccccgggccccccagac

SEQ ID NO: 140815 - DNA, 17 bp, synthetic construct
  source 1..17: mol_type = other DNA
cccgggccccccagacc

SEQ ID NO: 140816 - DNA, 17 bp, synthetic construct
  source 1..17: mol_type = other DNA
ccgggccccccagaccc

SEQ ID NO: 140817 - DNA, 17 bp, synthetic construct
  source 1..17: mol_type = other DNA
cgggccccccagacccc

SEQ ID NO: 140818 - DNA, 17 bp, synthetic construct
  source 1..17: mol_type = other DNA
gggccccccagacccct

SEQ ID NO: 140819 - DNA, 17 bp, synthetic construct
  source 1..17: mol_type = other DNA
ggccccccagacccctc

SEQ ID NO: 140820 - DNA, 17 bp, synthetic construct
  source 1..17: mol_type = other DNA
gccccccagacccctcg

SEQ ID NO: 140821 - DNA, 17 bp, synthetic construct
  source 1..17: mol_type = other DNA
ccccccagacccctcgg

SEQ ID NO: 140822 - DNA, 17 bp, synthetic construct
  source 1..17: mol_type = other DNA
cccccagacccctcggc

SEQ ID NO: 140823 - DNA, 17 bp, synthetic construct
  source 1..17: mol_type = other DNA
ccccagacccctcggcc

SEQ ID NO: 140824 - DNA, 17 bp, synthetic construct
  source 1..17: mol_type = other DNA
cccagacccctcggcct

SEQ ID NO: 140825 - DNA, 17 bp, synthetic construct
  source 1..17: mol_type = other DNA
ccagacccctcggcctc

SEQ ID NO: 140826 - DNA, 17 bp, synthetic construct
  source 1..17: mol_type = other DNA
cagacccctcggcctct

SEQ ID NO: 140827 - DNA, 17 bp, synthetic construct
  source 1..17: mol_type = other DNA
agacccctcggcctctc

SEQ ID NO: 140828 - DNA, 17 bp, synthetic construct
  source 1..17: mol_type = other DNA
gacccctcggcctctct

SEQ ID NO: 140829 - DNA, 17 bp, synthetic construct
  source 1..17: mol_type = other DNA
acccctcggcctctctg

SEQ ID NO: 140830 - DNA, 17 bp, synthetic construct
  source 1..17: mol_type = other DNA
cccctcggcctctctga

SEQ ID NO: 140831 - DNA, 17 bp, synthetic construct
  source 1..17: mol_type = other DNA
ccctcggcctctctgag

SEQ ID NO: 140832 - DNA, 17 bp, synthetic construct
  source 1..17: mol_type = other DNA
cctcggcctctctgagt

SEQ ID NO: 140833 - DNA, 17 bp, synthetic construct
  source 1..17: mol_type = other DNA
ctcggcctctctgagtg

SEQ ID NO: 140834 - DNA, 17 bp, synthetic construct
  source 1..17: mol_type = other DNA
tcggcctctctgagtgt

SEQ ID NO: 140835 - DNA, 17 bp, synthetic construct
  source 1..17: mol_type = other DNA
cggcctctctgagtgtc

SEQ ID NO: 140836 - DNA, 17 bp, synthetic construct
  source 1..17: mol_type = other DNA
ggcctctctgagtgtcc

SEQ ID NO: 140837 - DNA, 17 bp, synthetic construct
  source 1..17: mol_type = other DNA
gcctctctgagtgtcct

SEQ ID NO: 140838 - DNA, 17 bp, synthetic construct
  source 1..17: mol_type = other DNA
cctctctgagtgtcctg

SEQ ID NO: 140839 - DNA, 17 bp, synthetic construct
  source 1..17: mol_type = other DNA
ctctctgagtgtcctgt

SEQ ID NO: 140840 - DNA, 17 bp, synthetic construct
  source 1..17: mol_type = other DNA
tctctgagtgtcctgtg

SEQ ID NO: 140841 - DNA, 17 bp, synthetic construct
  source 1..17: mol_type = other DNA
ctctgagtgtcctgtgc

SEQ ID NO: 140842 - DNA, 17 bp, synthetic construct
  source 1..17: mol_type = other DNA
tctgagtgtcctgtgcg

SEQ ID NO: 140843 - DNA, 17 bp, synthetic construct
  source 1..17: mol_type = other DNA
ctgagtgtcctgtgcgg

SEQ ID NO: 140844 - DNA, 17 bp, synthetic construct
  source 1..17: mol_type = other DNA
tgagtgtcctgtgcggt

SEQ ID NO: 140845 - DNA, 17 bp, synthetic construct
  source 1..17: mol_type = other DNA
gagtgtcctgtgcggtg

SEQ ID NO: 140846 - DNA, 17 bp, synthetic construct
  source 1..17: mol_type = other DNA
agtgtcctgtgcggtga

SEQ ID NO: 140847 - DNA, 17 bp, synthetic construct
  source 1..17: mol_type = other DNA
gtgtcctgtgcggtgag

SEQ ID NO: 140848 - DNA, 17 bp, synthetic construct
  source 1..17: mol_type = other DNA
tgtcctgtgcggtgagt

SEQ ID NO: 140849 - DNA, 17 bp, synthetic construct
  source 1..17: mol_type = other DNA
gtcctgtgcggtgagtg

SEQ ID NO: 140850 - DNA, 17 bp, synthetic construct
  source 1..17: mol_type = other DNA
tcctgtgcggtgagtgg

SEQ ID NO: 140851 - DNA, 17 bp, synthetic construct
  source 1..17: mol_type = other DNA
cctgtgcggtgagtggg

SEQ ID NO: 140852 - DNA, 17 bp, synthetic construct
  source 1..17: mol_type = other DNA
ctgtgcggtgagtgggg

SEQ ID NO: 140853 - DNA, 17 bp, synthetic construct
  source 1..17: mol_type = other DNA
tgtgcggtgagtggggg

SEQ ID NO: 140854 - DNA, 17 bp, synthetic construct
  source 1..17: mol_type = other DNA
gtgcggtgagtgggggc

SEQ ID NO: 140855 - DNA, 17 bp, synthetic construct
  source 1..17: mol_type = other DNA
tgcggtgagtgggggcg

SEQ ID NO: 140856 - DNA, 17 bp, synthetic construct
  source 1..17: mol_type = other DNA
gcggtgagtgggggcgg

SEQ ID NO: 140857 - DNA, 17 bp, synthetic construct
  source 1..17: mol_type = other DNA
cggtgagtgggggcggc

SEQ ID NO: 140858 - DNA, 17 bp, synthetic construct
  source 1..17: mol_type = other DNA
ggtgagtgggggcggcc

SEQ ID NO: 140859 - DNA, 17 bp, synthetic construct
  source 1..17: mol_type = other DNA
gtgagtgggggcggccc

SEQ ID NO: 140860 - DNA, 17 bp, synthetic construct
  source 1..17: mol_type = other DNA
tgagtgggggcggcccc

SEQ ID NO: 140861 - DNA, 17 bp, synthetic construct
  source 1..17: mol_type = other DNA
gagtgggggcggccccg

SEQ ID NO: 140862 - DNA, 17 bp, synthetic construct
  source 1..17: mol_type = other DNA
agtgggggcggccccgg

SEQ ID NO: 140863 - DNA, 17 bp, synthetic construct
  source 1..17: mol_type = other DNA
gtgggggcggccccggg

SEQ ID NO: 140864 - DNA, 17 bp, synthetic construct
  source 1..17: mol_type = other DNA
tgggggcggccccgggc

SEQ ID NO: 140865 - DNA, 17 bp, synthetic construct
  source 1..17: mol_type = other DNA
gggggcggccccgggcc

SEQ ID NO: 140866 - DNA, 17 bp, synthetic construct
  source 1..17: mol_type = other DNA
ggggcggccccgggccc

SEQ ID NO: 140867 - DNA, 17 bp, synthetic construct
  source 1..17: mol_type = other DNA
gggcggccccgggcccc

SEQ ID NO: 140868 - DNA, 17 bp, synthetic construct
  source 1..17: mol_type = other DNA
ggcggccccgggccccc

SEQ ID NO: 140869 - DNA, 17 bp, synthetic construct
  source 1..17: mol_type = other DNA
gcggccccgggcccccc

SEQ ID NO: 140870 - DNA, 17 bp, synthetic construct
  source 1..17: mol_type = other DNA
cggccccgggcccccca

SEQ ID NO: 140871 - DNA, 17 bp, synthetic construct
  source 1..17: mol_type = other DNA
ggccccgggccccccag

SEQ ID NO: 140872 - DNA, 17 bp, synthetic construct
  source 1..17: mol_type = other DNA
gccccgggccccccaga

SEQ ID NO: 140873 - DNA, 17 bp, synthetic construct
  source 1..17: mol_type = other DNA
ccccgggccccccagac

SEQ ID NO: 140874 - DNA, 17 bp, synthetic construct
  source 1..17: mol_type = other DNA
cccgggccccccagacc

SEQ ID NO: 140875 - DNA, 17 bp, synthetic construct
  source 1..17: mol_type = other DNA
ccgggccccccagaccc

SEQ ID NO: 140876 - DNA, 17 bp, synthetic construct
  source 1..17: mol_type = other DNA
cgggccccccagacccc

SEQ ID NO: 140877 - DNA, 17 bp, synthetic construct
  source 1..17: mol_type = other DNA
gggccccccagacccct

SEQ ID NO: 140878 - DNA, 17 bp, synthetic construct
  source 1..17: mol_type = other DNA
ggccccccagacccctc

SEQ ID NO: 140879 - DNA, 17 bp, synthetic construct
  source 1..17: mol_type = other DNA
gccccccagacccctcg

SEQ ID NO: 140880 - DNA, 17 bp, synthetic construct
  source 1..17: mol_type = other DNA
ccccccagacccctcgg

SEQ ID NO: 140881 - DNA, 17 bp, synthetic construct
  source 1..17: mol_type = other DNA
cccccagacccctcggc

SEQ ID NO: 140882 - DNA, 17 bp, synthetic construct
  source 1..17: mol_type = other DNA
ccccagacccctcggcc

SEQ ID NO: 140883 - DNA, 17 bp, synthetic construct
  source 1..17: mol_type = other DNA
cccagacccctcggcct

SEQ ID NO: 140884 - DNA, 17 bp, synthetic construct
  source 1..17: mol_type = other DNA
ccagacccctcggcctc

SEQ ID NO: 140885 - DNA, 17 bp, synthetic construct
  source 1..17: mol_type = other DNA
cagacccctcggcctct

SEQ ID NO: 140886 - DNA, 17 bp, synthetic construct
  source 1..17: mol_type = other DNA
agacccctcggcctctc

SEQ ID NO: 140887 - DNA, 17 bp, synthetic construct
  source 1..17: mol_type = other DNA
gacccctcggcctctct

SEQ ID NO: 140888 - DNA, 17 bp, synthetic construct
  source 1..17: mol_type = other DNA
acccctcggcctctctg

SEQ ID NO: 140889 - DNA, 17 bp, synthetic construct
  source 1..17: mol_type = other DNA
cccctcggcctctctga

SEQ ID NO: 140890 - DNA, 17 bp, synthetic construct
  source 1..17: mol_type = other DNA
ccctcggcctctctgag

SEQ ID NO: 140891 - DNA, 17 bp, synthetic construct
  source 1..17: mol_type = other DNA
cctcggcctctctgagt

SEQ ID NO: 140892 - DNA, 17 bp, synthetic construct
  source 1..17: mol_type = other DNA
ctcggcctctctgagtg

SEQ ID NO: 140893 - DNA, 17 bp, synthetic construct
  source 1..17: mol_type = other DNA
tcggcctctctgagtgt

SEQ ID NO: 140894 - DNA, 17 bp, synthetic construct
  source 1..17: mol_type = other DNA
cggcctctctgagtgtc

SEQ ID NO: 140895 - DNA, 17 bp, synthetic construct
  source 1..17: mol_type = other DNA
ggcctctctgagtgtcc

SEQ ID NO: 140896 - DNA, 17 bp, synthetic construct
  source 1..17: mol_type = other DNA
gcctctctgagtgtcct

SEQ ID NO: 140897 - DNA, 17 bp, synthetic construct
  source 1..17: mol_type = other DNA
cctctctgagtgtcctg

SEQ ID NO: 140898 - DNA, 17 bp, synthetic construct
  source 1..17: mol_type = other DNA
ctctctgagtgtcctgt

SEQ ID NO: 140899 - DNA, 17 bp, synthetic construct
  source 1..17: mol_type = other DNA
tctctgagtgtcctgtg

SEQ ID NO: 140900 - DNA, 17 bp, synthetic construct
  source 1..17: mol_type = other DNA
ctctgagtgtcctgtgc

SEQ ID NO: 140901 - DNA, 17 bp, synthetic construct
  source 1..17: mol_type = other DNA
tctgagtgtcctgtgcg

SEQ ID NO: 140902 - DNA, 17 bp, synthetic construct
  source 1..17: mol_type = other DNA
ctgagtgtcctgtgcgg

SEQ ID NO: 140903 - DNA, 17 bp, synthetic construct
  source 1..17: mol_type = other DNA
tgagtgtcctgtgcggt

SEQ ID NO: 140904 - DNA, 17 bp, synthetic construct
  source 1..17: mol_type = other DNA
gagtgtcctgtgcggtg

SEQ ID NO: 140905 - DNA, 17 bp, synthetic construct
  source 1..17: mol_type = other DNA
agtgtcctgtgcggtga

SEQ ID NO: 140906 - DNA, 17 bp, synthetic construct
  source 1..17: mol_type = other DNA
gtgtcctgtgcggtgag

SEQ ID NO: 140907 - DNA, 17 bp, synthetic construct
  source 1..17: mol_type = other DNA
tgtcctgtgcggtgagt

SEQ ID NO: 140908 - DNA, 17 bp, synthetic construct
  source 1..17: mol_type = other DNA
gtcctgtgcggtgagtg

SEQ ID NO: 140909 - DNA, 17 bp, synthetic construct
  source 1..17: mol_type = other DNA
tcctgtgcggtgagtgg

SEQ ID NO: 140910 - DNA, 17 bp, synthetic construct
  source 1..17: mol_type = other DNA
cctgtgcggtgagtggg

SEQ ID NO: 140911 - DNA, 17 bp, synthetic construct
  source 1..17: mol_type = other DNA
ctgtgcggtgagtgggg

SEQ ID NO: 140912 - DNA, 17 bp, synthetic construct
  source 1..17: mol_type = other DNA
tgtgcggtgagtggggg

SEQ ID NO: 140913 - DNA, 17 bp, synthetic construct
  source 1..17: mol_type = other DNA
gtgcggtgagtgggggc

SEQ ID NO: 140914 - DNA, 17 bp, synthetic construct
  source 1..17: mol_type = other DNA
tgcggtgagtgggggcg

SEQ ID NO: 140915 - DNA, 17 bp, synthetic construct
  source 1..17: mol_type = other DNA
gcggtgagtgggggcgg

SEQ ID NO: 140916 - DNA, 17 bp, synthetic construct
  source 1..17: mol_type = other DNA
cggtgagtgggggcggc

SEQ ID NO: 140917 - DNA, 17 bp, synthetic construct
  source 1..17: mol_type = other DNA
ggtgagtgggggcggcc

SEQ ID NO: 140918 - DNA, 17 bp, synthetic construct
  source 1..17: mol_type = other DNA
gtgagtgggggcggccc

SEQ ID NO: 140919 - DNA, 17 bp, synthetic construct
  source 1..17: mol_type = other DNA
tgagtgggggcggcccc

SEQ ID NO: 140920 - DNA, 17 bp, synthetic construct
  source 1..17: mol_type = other DNA
gagtgggggcggccccg

SEQ ID NO: 140921 - DNA, 17 bp, synthetic construct
  source 1..17: mol_type = other DNA
agtgggggcggccccgg

SEQ ID NO: 140922 - DNA, 17 bp, synthetic construct
  source 1..17: mol_type = other DNA
gtgggggcggccccggg

SEQ ID NO: 140923 - DNA, 17 bp, synthetic construct
  source 1..17: mol_type = other DNA
tgggggcggccccgggc

SEQ ID NO: 140924 - DNA, 17 bp, synthetic construct
  source 1..17: mol_type = other DNA
gggggcggccccgggcc

SEQ ID NO: 140925 - DNA, 17 bp, synthetic construct
  source 1..17: mol_type = other DNA
ggggcggccccgggccc

SEQ ID NO: 140926 - DNA, 17 bp, synthetic construct
  source 1..17: mol_type = other DNA
gggcggccccgggcccc

SEQ ID NO: 140927 - DNA, 17 bp, synthetic construct
  source 1..17: mol_type = other DNA
ggcggccccgggccccc

SEQ ID NO: 140928 - DNA, 17 bp, synthetic construct
  source 1..17: mol_type = other DNA
gcggccccgggcccccc

SEQ ID NO: 140929 - DNA, 17 bp, synthetic construct
  source 1..17: mol_type = other DNA
cggccccgggcccccca

SEQ ID NO: 140930 - DNA, 17 bp, synthetic construct
  source 1..17: mol_type = other DNA
ggccccgggccccccag

SEQ ID NO: 140931 - DNA, 17 bp, synthetic construct
  source 1..17: mol_type = other DNA
gccccgggccccccaga

SEQ ID NO: 140932 - DNA, 17 bp, synthetic construct
  source 1..17: mol_type = other DNA
ccccgggccccccagac

SEQ ID NO: 140933 - DNA, 17 bp, synthetic construct
  source 1..17: mol_type = other DNA
cccgggccccccagacc

SEQ ID NO: 140934 - DNA, 17 bp, synthetic construct
  source 1..17: mol_type = other DNA
ccgggccccccagaccc

SEQ ID NO: 140935 - DNA, 17 bp, synthetic construct
  source 1..17: mol_type = other DNA
cgggccccccagacccc

SEQ ID NO: 140936 - DNA, 17 bp, synthetic construct
  source 1..17: mol_type = other DNA
gggccccccagacccct

SEQ ID NO: 140937 - DNA, 17 bp, synthetic construct
  source 1..17: mol_type = other DNA
ggccccccagacccctc

SEQ ID NO: 140938 - DNA, 17 bp, synthetic construct
  source 1..17: mol_type = other DNA
gccccccagacccctcg

SEQ ID NO: 140939 - DNA, 17 bp, synthetic construct
  source 1..17: mol_type = other DNA
ccccccagacccctcgg

SEQ ID NO: 140940 - DNA, 17 bp, synthetic construct
  source 1..17: mol_type = other DNA
cccccagacccctcggc

SEQ ID NO: 140941 - DNA, 17 bp, synthetic construct
  source 1..17: mol_type = other DNA
ccccagacccctcggcc

SEQ ID NO: 140942 - DNA, 17 bp, synthetic construct
  source 1..17: mol_type = other DNA
cccagacccctcggcct

SEQ ID NO: 140943 - DNA, 17 bp, synthetic construct
  source 1..17: mol_type = other DNA
ccagacccctcggcctc

SEQ ID NO: 140944 - DNA, 17 bp, synthetic construct
  source 1..17: mol_type = other DNA
cagacccctcggcctct

SEQ ID NO: 140945 - DNA, 17 bp, synthetic construct
  source 1..17: mol_type = other DNA
agacccctcggcctctc

SEQ ID NO: 140946 - DNA, 17 bp, synthetic construct
  source 1..17: mol_type = other DNA
gacccctcggcctctct

SEQ ID NO: 140947 - DNA, 17 bp, synthetic construct
  source 1..17: mol_type = other DNA
acccctcggcctctctg

SEQ ID NO: 140948 - DNA, 17 bp, synthetic construct
  source 1..17: mol_type = other DNA
cccctcggcctctctga

SEQ ID NO: 140949 - DNA, 17 bp, synthetic construct
  source 1..17: mol_type = other DNA
ccctcggcctctctgag

SEQ ID NO: 140950 - DNA, 17 bp, synthetic construct
  source 1..17: mol_type = other DNA
cctcggcctctctgagt

SEQ ID NO: 140951 - DNA, 17 bp, synthetic construct
  source 1..17: mol_type = other DNA
ctcggcctctctgagtg

SEQ ID NO: 140952 - DNA, 17 bp, synthetic construct
  source 1..17: mol_type = other DNA
tcggcctctctgagtgt

SEQ ID NO: 140953 - DNA, 17 bp, synthetic construct
  source 1..17: mol_type = other DNA
cggcctctctgagtgtc

SEQ ID NO: 140954 - DNA, 17 bp, synthetic construct
  source 1..17: mol_type = other DNA
ggcctctctgagtgtcc

SEQ ID NO: 140955 - DNA, 17 bp, synthetic construct
  source 1..17: mol_type = other DNA
gcctctctgagtgtcct

SEQ ID NO: 140956 - DNA, 17 bp, synthetic construct
  source 1..17: mol_type = other DNA
cctctctgagtgtcctg

SEQ ID NO: 140957 - DNA, 17 bp, synthetic construct
  source 1..17: mol_type = other DNA
ctctctgagtgtcctgt

SEQ ID NO: 140958 - DNA, 17 bp, synthetic construct
  source 1..17: mol_type = other DNA
tctctgagtgtcctgtg

SEQ ID NO: 140959 - DNA, 17 bp, synthetic construct
  source 1..17: mol_type = other DNA
ctctgagtgtcctgtgc

SEQ ID NO: 140960 - DNA, 17 bp, synthetic construct
  source 1..17: mol_type = other DNA
tctgagtgtcctgtgcg

SEQ ID NO: 140961 - DNA, 17 bp, synthetic construct
  source 1..17: mol_type = other DNA
ctgagtgtcctgtgcgg

SEQ ID NO: 140962 - DNA, 17 bp, synthetic construct
  source 1..17: mol_type = other DNA
tgagtgtcctgtgcggt

SEQ ID NO: 140963 - DNA, 17 bp, synthetic construct
  source 1..17: mol_type = other DNA
gagtgtcctgtgcggtg

SEQ ID NO: 140964 - DNA, 17 bp, synthetic construct
  source 1..17: mol_type = other DNA
agtgtcctgtgcggtga

SEQ ID NO: 140965 - DNA, 17 bp, synthetic construct
  source 1..17: mol_type = other DNA
gtgtcctgtgcggtgag

SEQ ID NO: 140966 - DNA, 17 bp, synthetic construct
  source 1..17: mol_type = other DNA
tgtcctgtgcggtgagt

SEQ ID NO: 140967 - DNA, 17 bp, synthetic construct
  source 1..17: mol_type = other DNA
gtcctgtgcggtgagtg

SEQ ID NO: 140968 - DNA, 17 bp, synthetic construct
  source 1..17: mol_type = other DNA
tcctgtgcggtgagtgg

SEQ ID NO: 140969 - DNA, 17 bp, synthetic construct
  source 1..17: mol_type = other DNA
cctgtgcggtgagtggg

SEQ ID NO: 140970 - DNA, 17 bp, synthetic construct
  source 1..17: mol_type = other DNA
ctgtgcggtgagtgggg

SEQ ID NO: 140971 - DNA, 17 bp, synthetic construct
  source 1..17: mol_type = other DNA
tgtgcggtgagtggggg

SEQ ID NO: 140972 - DNA, 17 bp, synthetic construct
  source 1..17: mol_type = other DNA
gtgcggtgagtgggggc

SEQ ID NO: 140973 - DNA, 17 bp, synthetic construct
  source 1..17: mol_type = other DNA
tgcggtgagtgggggcg

SEQ ID NO: 140974 - DNA, 17 bp, synthetic construct
  source 1..17: mol_type = other DNA
gcggtgagtgggggcgg

SEQ ID NO: 140975 - DNA, 17 bp, synthetic construct
  source 1..17: mol_type = other DNA
cggtgagtgggggcggc

SEQ ID NO: 140976 - DNA, 17 bp, synthetic construct
  source 1..17: mol_type = other DNA
ggtgagtgggggcggcc

SEQ ID NO: 140977 - DNA, 17 bp, synthetic construct
  source 1..17: mol_type = other DNA
gtgagtgggggcggccc

SEQ ID NO: 140978 - DNA, 17 bp, synthetic construct
  source 1..17: mol_type = other DNA
tgagtgggggcggcccc

SEQ ID NO: 140979 - DNA, 17 bp, synthetic construct
  source 1..17: mol_type = other DNA
gagtgggggcggccccg

SEQ ID NO: 140980 - DNA, 17 bp, synthetic construct
  source 1..17: mol_type = other DNA
agtgggggcggccccgg

SEQ ID NO: 140981 - DNA, 17 bp, synthetic construct
  source 1..17: mol_type = other DNA
gtgggggcggccccggg

SEQ ID NO: 140982 - DNA, 17 bp, synthetic construct
  source 1..17: mol_type = other DNA
tgggggcggccccgggc

SEQ ID NO: 140983 - DNA, 17 bp, synthetic construct
  source 1..17: mol_type = other DNA
gggggcggccccgggcc

SEQ ID NO: 140984 - DNA, 17 bp, synthetic construct
  source 1..17: mol_type = other DNA
ggggcggccccgggccc

SEQ ID NO: 140985 - DNA, 17 bp, synthetic construct
  source 1..17: mol_type = other DNA
gggcggccccgggcccc

SEQ ID NO: 140986 - DNA, 17 bp, synthetic construct
  source 1..17: mol_type = other DNA
ggcggccccgggccccc

SEQ ID NO: 140987 - DNA, 17 bp, synthetic construct
  source 1..17: mol_type = other DNA
gcggccccgggcccccc

SEQ ID NO: 140988 - DNA, 17 bp, synthetic construct
  source 1..17: mol_type = other DNA
cggccccgggcccccca

SEQ ID NO: 140989 - DNA, 17 bp, synthetic construct
  source 1..17: mol_type = other DNA
ggccccgggccccccag

SEQ ID NO: 140990 - DNA, 17 bp, synthetic construct
  source 1..17: mol_type = other DNA
gccccgggccccccaga

SEQ ID NO: 140991 - DNA, 17 bp, synthetic construct
  source 1..17: mol_type = other DNA
ccccgggccccccagac

SEQ ID NO: 140992 - DNA, 17 bp, synthetic construct
  source 1..17: mol_type = other DNA
cccgggccccccagacc

SEQ ID NO: 140993 - DNA, 17 bp, synthetic construct
  source 1..17: mol_type = other DNA
ccgggccccccagaccc

SEQ ID NO: 140994 - DNA, 17 bp, synthetic construct
  source 1..17: mol_type = other DNA
cgggccccccagacccc

SEQ ID NO: 140995 - DNA, 17 bp, synthetic construct
  source 1..17: mol_type = other DNA
gggccccccagacccct

SEQ ID NO: 140996 - DNA, 17 bp, synthetic construct
  source 1..17: mol_type = other DNA
ggccccccagacccctc

SEQ ID NO: 140997 - DNA, 17 bp, synthetic construct
  source 1..17: mol_type = other DNA
gccccccagacccctcg

SEQ ID NO: 140998 - DNA, 17 bp, synthetic construct
  source 1..17: mol_type = other DNA
ccccccagacccctcgg

SEQ ID NO: 140999 - DNA, 17 bp, synthetic construct
  source 1..17: mol_type = other DNA
cccccagacccctcggc

SEQ ID NO: 141000 - DNA, 17 bp, synthetic construct
  source 1..17: mol_type = other DNA
ccccagacccctcggcc

SEQ ID NO: 141001 - DNA, 17 bp, synthetic construct
  source 1..17: mol_type = other DNA
cccagacccctcggcct

SEQ ID NO: 141002 - DNA, 17 bp, synthetic construct
  source 1..17: mol_type = other DNA
ccagacccctcggcctc

SEQ ID NO: 141003 - DNA, 17 bp, synthetic construct
  source 1..17: mol_type = other DNA
cagacccctcggcctct

SEQ ID NO: 141004 - DNA, 17 bp, synthetic construct
  source 1..17: mol_type = other DNA
agacccctcggcctctc

SEQ ID NO: 141005 - DNA, 17 bp, synthetic construct
  source 1..17: mol_type = other DNA
gacccctcggcctctct

SEQ ID NO: 141006 - DNA, 17 bp, synthetic construct
  source 1..17: mol_type = other DNA
acccctcggcctctctg

SEQ ID NO: 141007 - DNA, 17 bp, synthetic construct
  source 1..17: mol_type = other DNA
cccctcggcctctctga

SEQ ID NO: 141008 - DNA, 17 bp, synthetic construct
  source 1..17: mol_type = other DNA
ccctcggcctctctgag

SEQ ID NO: 141009 - DNA, 17 bp, synthetic construct
  source 1..17: mol_type = other DNA
cctcggcctctctgagt

SEQ ID NO: 141010 - DNA, 17 bp, synthetic construct
  source 1..17: mol_type = other DNA
ctcggcctctctgagtg

SEQ ID NO: 141011 - DNA, 17 bp, synthetic construct
  source 1..17: mol_type = other DNA
tcggcctctctgagtgt

SEQ ID NO: 141012 - DNA, 17 bp, synthetic construct
  source 1..17: mol_type = other DNA
cggcctctctgagtgtc

SEQ ID NO: 141013 - DNA, 17 bp, synthetic construct
  source 1..17: mol_type = other DNA
ggcctctctgagtgtcc

SEQ ID NO: 141014 - DNA, 17 bp, synthetic construct
  source 1..17: mol_type = other DNA
gcctctctgagtgtcct

SEQ ID NO: 141015 - DNA, 17 bp, synthetic construct
  source 1..17: mol_type = other DNA
cctctctgagtgtcctg

SEQ ID NO: 141016 - DNA, 17 bp, synthetic construct
  source 1..17: mol_type = other DNA
ctctctgagtgtcctgt

SEQ ID NO: 141017 - DNA, 17 bp, synthetic construct
  source 1..17: mol_type = other DNA
tctctgagtgtcctgtg

SEQ ID NO: 141018 - DNA, 17 bp, synthetic construct
  source 1..17: mol_type = other DNA
ctctgagtgtcctgtgc

SEQ ID NO: 141019 - DNA, 17 bp, synthetic construct
  source 1..17: mol_type = other DNA
tctgagtgtcctgtgcg

SEQ ID NO: 141020 - DNA, 17 bp, synthetic construct
  source 1..17: mol_type = other DNA
ctgagtgtcctgtgcgg

SEQ ID NO: 141021 - DNA, 17 bp, synthetic construct
  source 1..17: mol_type = other DNA
tgagtgtcctgtgcggt

SEQ ID NO: 141022 - DNA, 17 bp, synthetic construct
  source 1..17: mol_type = other DNA
gagtgtcctgtgcggtg

SEQ ID NO: 141023 - DNA, 17 bp, synthetic construct
  source 1..17: mol_type = other DNA
agtgtcctgtgcggtga

SEQ ID NO: 141024 - DNA, 17 bp, synthetic construct
  source 1..17: mol_type = other DNA
gtgtcctgtgcggtgag

SEQ ID NO: 141025 - DNA, 17 bp, synthetic construct
  source 1..17: mol_type = other DNA
tgtcctgtgcggtgagt

SEQ ID NO: 141026 - DNA, 17 bp, synthetic construct
  source 1..17: mol_type = other DNA
gtcctgtgcggtgagtg

SEQ ID NO: 141027 - DNA, 17 bp, synthetic construct
  source 1..17: mol_type = other DNA
tcctgtgcggtgagtgg

SEQ ID NO: 141028 - DNA, 17 bp, synthetic construct
  source 1..17: mol_type = other DNA
cctgtgcggtgagtggg

SEQ ID NO: 141029 - DNA, 17 bp, synthetic construct
  source 1..17: mol_type = other DNA
ctgtgcggtgagtgggg

SEQ ID NO: 141030 - DNA, 17 bp, synthetic construct
  source 1..17: mol_type = other DNA
tgtgcggtgagtggggg

SEQ ID NO: 141031 - DNA, 17 bp, synthetic construct
  source 1..17: mol_type = other DNA
gtgcggtgagtgggggc

SEQ ID NO: 141032 - DNA, 17 bp, synthetic construct
  source 1..17: mol_type = other DNA
tgcggtgagtgggggcg

SEQ ID NO: 141033 - DNA, 17 bp, synthetic construct
  source 1..17: mol_type = other DNA
gcggtgagtgggggcgg

SEQ ID NO: 141034 - DNA, 17 bp, synthetic construct
  source 1..17: mol_type = other DNA
cggtgagtgggggcggc

SEQ ID NO: 141035 - DNA, 17 bp, synthetic construct
  source 1..17: mol_type = other DNA
ggtgagtgggggcggcc

SEQ ID NO: 141036 - DNA, 17 bp, synthetic construct
  source 1..17: mol_type = other DNA
gtgagtgggggcggccc

SEQ ID NO: 141037 - DNA, 17 bp, synthetic construct
  source 1..17: mol_type = other DNA
tgagtgggggcggcccc

SEQ ID NO: 141038 - DNA, 17 bp, synthetic construct
  source 1..17: mol_type = other DNA
gagtgggggcggccccg

SEQ ID NO: 141039 - DNA, 17 bp, synthetic construct
  source 1..17: mol_type = other DNA
agtgggggcggccccgg

SEQ ID NO: 141040 - DNA, 17 bp, synthetic construct
  source 1..17: mol_type = other DNA
gtgggggcggccccggg

SEQ ID NO: 141041 - DNA, 17 bp, synthetic construct
  source 1..17: mol_type = other DNA
tgggggcggccccgggc

SEQ ID NO: 141042 - DNA, 17 bp, synthetic construct
  source 1..17: mol_type = other DNA
gggggcggccccgggcc

SEQ ID NO: 141043 - DNA, 17 bp, synthetic construct
  source 1..17: mol_type = other DNA
ggggcggccccgggccc

SEQ ID NO: 141044 - DNA, 17 bp, synthetic construct
  source 1..17: mol_type = other DNA
gggcggccccgggcccc

SEQ ID NO: 141045 - DNA, 17 bp, synthetic construct
  source 1..17: mol_type = other DNA
ggcggccccgggccccc

SEQ ID NO: 141046 - DNA, 17 bp, synthetic construct
  source 1..17: mol_type = other DNA
gcggccccgggcccccc

SEQ ID NO: 141047 - DNA, 17 bp, synthetic construct
  source 1..17: mol_type = other DNA
cggccccgggcccccca

SEQ ID NO: 141048 - DNA, 17 bp, synthetic construct
  source 1..17: mol_type = other DNA
ggccccgggccccccag

SEQ ID NO: 141049 - DNA, 17 bp, synthetic construct
  source 1..17: mol_type = other DNA
gccccgggccccccaga

SEQ ID NO: 141050 - DNA, 17 bp, synthetic construct
  source 1..17: mol_type = other DNA
ccccgggccccccagac

SEQ ID NO: 141051 - DNA, 17 bp, synthetic construct
  source 1..17: mol_type = other DNA
cccgggccccccagacc

SEQ ID NO: 141052 - DNA, 17 bp, synthetic construct
  source 1..17: mol_type = other DNA
ccgggccccccagaccc

SEQ ID NO: 141053 - DNA, 17 bp, synthetic construct
  source 1..17: mol_type = other DNA
cgggccccccagacccc

SEQ ID NO: 141054 - DNA, 17 bp, synthetic construct
  source 1..17: mol_type = other DNA
gggccccccagacccct

SEQ ID NO: 141055 - DNA, 17 bp, synthetic construct
  source 1..17: mol_type = other DNA
ggccccccagacccctc

SEQ ID NO: 141056 - DNA, 17 bp, synthetic construct
  source 1..17: mol_type = other DNA
gccccccagacccctcg

SEQ ID NO: 141057 - DNA, 17 bp, synthetic construct
  source 1..17: mol_type = other DNA
ccccccagacccctcgg

SEQ ID NO: 141058 - DNA, 17 bp, synthetic construct
  source 1..17: mol_type = other DNA
cccccagacccctcggc

SEQ ID NO: 141059 - DNA, 17 bp, synthetic construct
  source 1..17: mol_type = other DNA
ccccagacccctcggcc

SEQ ID NO: 141060 - DNA, 17 bp, synthetic construct
  source 1..17: mol_type = other DNA
cccagacccctcggcct

SEQ ID NO: 141061 - DNA, 17 bp, synthetic construct
  source 1..17: mol_type = other DNA
ccagacccctcggcctc

SEQ ID NO: 141062 - DNA, 17 bp, synthetic construct
  source 1..17: mol_type = other DNA
cagacccctcggcctct

SEQ ID NO: 141063 - DNA, 17 bp, synthetic construct
  source 1..17: mol_type = other DNA
agacccctcggcctctc

SEQ ID NO: 141064 - DNA, 17 bp, synthetic construct
  source 1..17: mol_type = other DNA
gacccctcggcctctct

SEQ ID NO: 141065 - DNA, 17 bp, synthetic construct
  source 1..17: mol_type = other DNA
acccctcggcctctctg

SEQ ID NO: 141066 - DNA, 17 bp, synthetic construct
  source 1..17: mol_type = other DNA
cccctcggcctctctga

SEQ ID NO: 141067 - DNA, 17 bp, synthetic construct
  source 1..17: mol_type = other DNA
ccctcggcctctctgag

SEQ ID NO: 141068 - DNA, 17 bp, synthetic construct
  source 1..17: mol_type = other DNA
cctcggcctctctgagt

SEQ ID NO: 141069 - DNA, 17 bp, synthetic construct
  source 1..17: mol_type = other DNA
ctcggcctctctgagtg

SEQ ID NO: 141070 - DNA, 17 bp, synthetic construct
  source 1..17: mol_type = other DNA
tcggcctctctgagtgt

SEQ ID NO: 141071 - DNA, 17 bp, synthetic construct
  source 1..17: mol_type = other DNA
cggcctctctgagtgtc

SEQ ID NO: 141072 - DNA, 17 bp, synthetic construct
  source 1..17: mol_type = other DNA
ggcctctctgagtgtcc

SEQ ID NO: 141073 - DNA, 17 bp, synthetic construct
  source 1..17: mol_type = other DNA
gcctctctgagtgtcct

SEQ ID NO: 141074 - DNA, 17 bp, synthetic construct
  source 1..17: mol_type = other DNA
cctctctgagtgtcctg

SEQ ID NO: 141075 - DNA, 17 bp, synthetic construct
  source 1..17: mol_type = other DNA
ctctctgagtgtcctgt

SEQ ID NO: 141076 - DNA, 17 bp, synthetic construct
  source 1..17: mol_type = other DNA
tctctgagtgtcctgtg

SEQ ID NO: 141077 - DNA, 17 bp, synthetic construct
  source 1..17: mol_type = other DNA
ctctgagtgtcctgtgc

SEQ ID NO: 141078 - DNA, 17 bp, synthetic construct
  source 1..17: mol_type = other DNA
tctgagtgtcctgtgcg

SEQ ID NO: 141079 - DNA, 17 bp, synthetic construct
  source 1..17: mol_type = other DNA
ctgagtgtcctgtgcgg

SEQ ID NO: 141080 - DNA, 17 bp, synthetic construct
  source 1..17: mol_type = other DNA
tgagtgtcctgtgcggt

SEQ ID NO: 141081 - DNA, 17 bp, synthetic construct
  source 1..17: mol_type = other DNA
gagtgtcctgtgcggtg

SEQ ID NO: 141082 - DNA, 17 bp, synthetic construct
  source 1..17: mol_type = other DNA
agtgtcctgtgcggtga

SEQ ID NO: 141083 - DNA, 17 bp, synthetic construct
  source 1..17: mol_type = other DNA
gtgtcctgtgcggtgag

SEQ ID NO: 141084 - DNA, 17 bp, synthetic construct
  source 1..17: mol_type = other DNA
tgtcctgtgcggtgagt

SEQ ID NO: 141085 - DNA, 17 bp, synthetic construct
  source 1..17: mol_type = other DNA
gtcctgtgcggtgagtg

SEQ ID NO: 141086 - DNA, 17 bp, synthetic construct
  source 1..17: mol_type = other DNA
tcctgtgcggtgagtgg

SEQ ID NO: 141087 - DNA, 17 bp, synthetic construct
  source 1..17: mol_type = other DNA
cctgtgcggtgagtggg

SEQ ID NO: 141088 - DNA, 17 bp, synthetic construct
  source 1..17: mol_type = other DNA
ctgtgcggtgagtgggg

SEQ ID NO: 141089 - DNA, 17 bp, synthetic construct
  source 1..17: mol_type = other DNA
tgtgcggtgagtggggg

SEQ ID NO: 141090 - DNA, 17 bp, synthetic construct
  source 1..17: mol_type = other DNA
gtgcggtgagtgggggc

SEQ ID NO: 141091 - DNA, 17 bp, synthetic construct
  source 1..17: mol_type = other DNA
tgcggtgagtgggggcg

SEQ ID NO: 141092 - DNA, 17 bp, synthetic construct
  source 1..17: mol_type = other DNA
gcggtgagtgggggcgg

SEQ ID NO: 141093 - DNA, 17 bp, synthetic construct
  source 1..17: mol_type = other DNA
cggtgagtgggggcggc

SEQ ID NO: 141094 - DNA, 17 bp, synthetic construct
  source 1..17: mol_type = other DNA
ggtgagtgggggcggcc

SEQ ID NO: 141095 - DNA, 17 bp, synthetic construct
  source 1..17: mol_type = other DNA
gtgagtgggggcggccc

SEQ ID NO: 141096 - DNA, 17 bp, synthetic construct
  source 1..17: mol_type = other DNA
tgagtgggggcggcccc

SEQ ID NO: 141097 - DNA, 17 bp, synthetic construct
  source 1..17: mol_type = other DNA
gagtgggggcggccccg

SEQ ID NO: 141098 - DNA, 17 bp, synthetic construct
  source 1..17: mol_type = other DNA
agtgggggcggccccgg

SEQ ID NO: 141099 - DNA, 17 bp, synthetic construct
  source 1..17: mol_type = other DNA
gtgggggcggccccggg

SEQ ID NO: 141100 - DNA, 17 bp, synthetic construct
  source 1..17: mol_type = other DNA
tgggggcggccccgggc

SEQ ID NO: 141101 - DNA, 17 bp, synthetic construct
  source 1..17: mol_type = other DNA
gggggcggccccgggcc

SEQ ID NO: 141102 - DNA, 17 bp, synthetic construct
  source 1..17: mol_type = other DNA
ggggcggccccgggccc

SEQ ID NO: 141103 - DNA, 17 bp, synthetic construct
  source 1..17: mol_type = other DNA
gggcggccccgggcccc

SEQ ID NO: 141104 - DNA, 17 bp, synthetic construct
  source 1..17: mol_type = other DNA
ggcggccccgggccccc

SEQ ID NO: 141105 - DNA, 17 bp, synthetic construct
  source 1..17: mol_type = other DNA
gcggccccgggcccccc

SEQ ID NO: 141106 - DNA, 17 bp, synthetic construct
  source 1..17: mol_type = other DNA
cggccccgggcccccca

SEQ ID NO: 141107 - DNA, 17 bp, synthetic construct
  source 1..17: mol_type = other DNA
ggccccgggccccccag

SEQ ID NO: 141108 - DNA, 17 bp, synthetic construct
  source 1..17: mol_type = other DNA
gccccgggccccccaga

SEQ ID NO: 141109 - DNA, 17 bp, synthetic construct
  source 1..17: mol_type = other DNA
ccccgggccccccagac

SEQ ID NO: 141110 - DNA, 17 bp, synthetic construct
  source 1..17: mol_type = other DNA
cccgggccccccagacc

SEQ ID NO: 141111 - DNA, 17 bp, synthetic construct
  source 1..17: mol_type = other DNA
ccgggccccccagaccc

SEQ ID NO: 141112 - DNA, 17 bp, synthetic construct
  source 1..17: mol_type = other DNA
cgggccccccagacccc

SEQ ID NO: 141113 - DNA, 17 bp, synthetic construct
  source 1..17: mol_type = other DNA
gggccccccagacccct

SEQ ID NO: 141114 - DNA, 17 bp, synthetic construct
  source 1..17: mol_type = other DNA
ggccccccagacccctc

SEQ ID NO: 141115 - DNA, 17 bp, synthetic construct
  source 1..17: mol_type = other DNA
gccccccagacccctcg

SEQ ID NO: 141116 - DNA, 17 bp, synthetic construct
  source 1..17: mol_type = other DNA
ccccccagacccctcgg

SEQ ID NO: 141117 - DNA, 17 bp, synthetic construct
  source 1..17: mol_type = other DNA
cccccagacccctcggc

SEQ ID NO: 141118 - DNA, 17 bp, synthetic construct
  source 1..17: mol_type = other DNA
ccccagacccctcggcc

SEQ ID NO: 141119 - DNA, 17 bp, synthetic construct
  source 1..17: mol_type = other DNA
cccagacccctcggcct

SEQ ID NO: 141120 - DNA, 17 bp, synthetic construct
  source 1..17: mol_type = other DNA
ccagacccctcggcctc

SEQ ID NO: 141121 - DNA, 17 bp, synthetic construct
  source 1..17: mol_type = other DNA
cagacccctcggcctct

SEQ ID NO: 141122 - DNA, 17 bp, synthetic construct
  source 1..17: mol_type = other DNA
agacccctcggcctctc

SEQ ID NO: 141123 - DNA, 17 bp, synthetic construct
  source 1..17: mol_type = other DNA
gacccctcggcctctct

SEQ ID NO: 141124 - DNA, 17 bp, synthetic construct
  source 1..17: mol_type = other DNA
acccctcggcctctctg

SEQ ID NO: 141125 - DNA, 17 bp, synthetic construct
  source 1..17: mol_type = other DNA
cccctcggcctctctga

SEQ ID NO: 141126 - DNA, 17 bp, synthetic construct
  source 1..17: mol_type = other DNA
ccctcggcctctctgag

SEQ ID NO: 141127 - DNA, 17 bp, synthetic construct
  source 1..17: mol_type = other DNA
cctcggcctctctgagt

SEQ ID NO: 141128 - DNA, 17 bp, synthetic construct
  source 1..17: mol_type = other DNA
ctcggcctctctgagtg

SEQ ID NO: 141129 - DNA, 17 bp, synthetic construct
  source 1..17: mol_type = other DNA
tcggcctctctgagtgt

SEQ ID NO: 141130 - DNA, 17 bp, synthetic construct
  source 1..17: mol_type = other DNA
cggcctctctgagtgtc

SEQ ID NO: 141131 - DNA, 17 bp, synthetic construct
  source 1..17: mol_type = other DNA
ggcctctctgagtgtcc

SEQ ID NO: 141132 - DNA, 17 bp, synthetic construct
  source 1..17: mol_type = other DNA
gcctctctgagtgtcct

SEQ ID NO: 141133 - DNA, 17 bp, synthetic construct
  source 1..17: mol_type = other DNA
cctctctgagtgtcctg

SEQ ID NO: 141134 - DNA, 17 bp, synthetic construct
  source 1..17: mol_type = other DNA
ctctctgagtgtcctgt

SEQ ID NO: 141135 - DNA, 17 bp, synthetic construct
  source 1..17: mol_type = other DNA
tctctgagtgtcctgtg

SEQ ID NO: 141136 - DNA, 17 bp, synthetic construct
  source 1..17: mol_type = other DNA
ctctgagtgtcctgtgc

SEQ ID NO: 141137 - DNA, 17 bp, synthetic construct
  source 1..17: mol_type = other DNA
tctgagtgtcctgtgcg

SEQ ID NO: 141138 - DNA, 17 bp, synthetic construct
  source 1..17: mol_type = other DNA
ctgagtgtcctgtgcgg

SEQ ID NO: 141139 - DNA, 17 bp, synthetic construct
  source 1..17: mol_type = other DNA
tgagtgtcctgtgcggt

SEQ ID NO: 141140 - DNA, 17 bp, synthetic construct
  source 1..17: mol_type = other DNA
gagtgtcctgtgcggtg

SEQ ID NO: 141141 - DNA, 17 bp, synthetic construct
  source 1..17: mol_type = other DNA
agtgtcctgtgcggtga

SEQ ID NO: 141142 - DNA, 17 bp, synthetic construct
  source 1..17: mol_type = other DNA
gtgtcctgtgcggtgag

SEQ ID NO: 141143 - DNA, 17 bp, synthetic construct
  source 1..17: mol_type = other DNA
tgtcctgtgcggtgagt

SEQ ID NO: 141144 - DNA, 17 bp, synthetic construct
  source 1..17: mol_type = other DNA
gtcctgtgcggtgagtg

SEQ ID NO: 141145 - DNA, 17 bp, synthetic construct
  source 1..17: mol_type = other DNA
tcctgtgcggtgagtgg

SEQ ID NO: 141146 - DNA, 17 bp, synthetic construct
  source 1..17: mol_type = other DNA
cctgtgcggtgagtggg

SEQ ID NO: 141147 - DNA, 17 bp, synthetic construct
  source 1..17: mol_type = other DNA
ctgtgcggtgagtgggg

SEQ ID NO: 141148 - DNA, 17 bp, synthetic construct
  source 1..17: mol_type = other DNA
tgtgcggtgagtggggg

SEQ ID NO: 141149 - DNA, 17 bp, synthetic construct
  source 1..17: mol_type = other DNA
gtgcggtgagtgggggc

SEQ ID NO: 141150 - DNA, 17 bp, synthetic construct
  source 1..17: mol_type = other DNA
tgcggtgagtgggggcg

SEQ ID NO: 141151 - DNA, 17 bp, synthetic construct
  source 1..17: mol_type = other DNA
gcggtgagtgggggcgg

SEQ ID NO: 141152 - DNA, 17 bp, synthetic construct
  source 1..17: mol_type = other DNA
cggtgagtgggggcggc

SEQ ID NO: 141153 - DNA, 17 bp, synthetic construct
  source 1..17: mol_type = other DNA
ggtgagtgggggcggcc

SEQ ID NO: 141154 - DNA, 17 bp, synthetic construct
  source 1..17: mol_type = other DNA
gtgagtgggggcggccc

SEQ ID NO: 141155 - DNA, 17 bp, synthetic construct
  source 1..17: mol_type = other DNA
tgagtgggggcggcccc

SEQ ID NO: 141156 - DNA, 17 bp, synthetic construct
  source 1..17: mol_type = other DNA
gagtgggggcggccccg

SEQ ID NO: 141157 - DNA, 17 bp, synthetic construct
  source 1..17: mol_type = other DNA
agtgggggcggccccgg

SEQ ID NO: 141158 - DNA, 17 bp, synthetic construct
  source 1..17: mol_type = other DNA
gtgggggcggccccggg

SEQ ID NO: 141159 - DNA, 17 bp, synthetic construct
  source 1..17: mol_type = other DNA
tgggggcggccccgggc

SEQ ID NO: 141160 - DNA, 17 bp, synthetic construct
  source 1..17: mol_type = other DNA
gggggcggccccgggcc

SEQ ID NO: 141161 - DNA, 17 bp, synthetic construct
  source 1..17: mol_type = other DNA
ggggcggccccgggccc

SEQ ID NO: 141162 - DNA, 17 bp, synthetic construct
  source 1..17: mol_type = other DNA
gggcggccccgggcccc

SEQ ID NO: 141163 - DNA, 17 bp, synthetic construct
  source 1..17: mol_type = other DNA
ggcggccccgggccccc

SEQ ID NO: 141164 - DNA, 17 bp, synthetic construct
  source 1..17: mol_type = other DNA
gcggccccgggcccccc

SEQ ID NO: 141165 - DNA, 17 bp, synthetic construct
  source 1..17: mol_type = other DNA
cggccccgggcccccca

SEQ ID NO: 141166 - DNA, 17 bp, synthetic construct
  source 1..17: mol_type = other DNA
ggccccgggccccccag

SEQ ID NO: 141167 - DNA, 17 bp, synthetic construct
  source 1..17: mol_type = other DNA
gccccgggccccccaga

SEQ ID NO: 141168 - DNA, 17 bp, synthetic construct
  source 1..17: mol_type = other DNA
ccccgggccccccagac

SEQ ID NO: 141169 - DNA, 17 bp, synthetic construct
  source 1..17: mol_type = other DNA
cccgggccccccagacc

SEQ ID NO: 141170 - DNA, 17 bp, synthetic construct
  source 1..17: mol_type = other DNA
ccgggccccccagaccc

SEQ ID NO: 141171 - DNA, 17 bp, synthetic construct
  source 1..17: mol_type = other DNA
cgggccccccagacccc

SEQ ID NO: 141172 - DNA, 17 bp, synthetic construct
  source 1..17: mol_type = other DNA
gggccccccagacccct

SEQ ID NO: 141173 - DNA, 17 bp, synthetic construct
  source 1..17: mol_type = other DNA
ggccccccagacccctc

SEQ ID NO: 141174 - DNA, 17 bp, synthetic construct
  source 1..17: mol_type = other DNA
gccccccagacccctcg

SEQ ID NO: 141175 - DNA, 17 bp, synthetic construct
  source 1..17: mol_type = other DNA
ccccccagacccctcgg

SEQ ID NO: 141176 - DNA, 17 bp, synthetic construct
  source 1..17: mol_type = other DNA
cccccagacccctcggc

SEQ ID NO: 141177 - DNA, 17 bp, synthetic construct
  source 1..17: mol_type = other DNA
ccccagacccctcggcc

SEQ ID NO: 141178 - DNA, 17 bp, synthetic construct
  source 1..17: mol_type = other DNA
cccagacccctcggcct

SEQ ID NO: 141179 - DNA, 17 bp, synthetic construct
  source 1..17: mol_type = other DNA
ccagacccctcggcctc

SEQ ID NO: 141180 - DNA, 17 bp, synthetic construct
  source 1..17: mol_type = other DNA
cagacccctcggcctct

SEQ ID NO: 141181 - DNA, 17 bp, synthetic construct
  source 1..17: mol_type = other DNA
agacccctcggcctctc

SEQ ID NO: 141182 - DNA, 17 bp, synthetic construct
  source 1..17: mol_type = other DNA
gacccctcggcctctct

SEQ ID NO: 141183 - DNA, 17 bp, synthetic construct
  source 1..17: mol_type = other DNA
acccctcggcctctctg

SEQ ID NO: 141184 - DNA, 17 bp, synthetic construct
  source 1..17: mol_type = other DNA
cccctcggcctctctga

SEQ ID NO: 141185 - DNA, 17 bp, synthetic construct
  source 1..17: mol_type = other DNA
ccctcggcctctctgag

SEQ ID NO: 141186 - DNA, 17 bp, synthetic construct
  source 1..17: mol_type = other DNA
cctcggcctctctgagt

SEQ ID NO: 141187 - DNA, 17 bp, synthetic construct
  source 1..17: mol_type = other DNA
ctcggcctctctgagtg

SEQ ID NO: 141188 - DNA, 17 bp, synthetic construct
  source 1..17: mol_type = other DNA
tcggcctctctgagtgt

SEQ ID NO: 141189 - DNA, 17 bp, synthetic construct
  source 1..17: mol_type = other DNA
cggcctctctgagtgtc

SEQ ID NO: 141190 - DNA, 17 bp, synthetic construct
  source 1..17: mol_type = other DNA
ggcctctctgagtgtcc

SEQ ID NO: 141191 - DNA, 17 bp, synthetic construct
  source 1..17: mol_type = other DNA
gcctctctgagtgtcct

SEQ ID NO: 141192 - DNA, 17 bp, synthetic construct
  source 1..17: mol_type = other DNA
cctctctgagtgtcctg

SEQ ID NO: 141193 - DNA, 17 bp, synthetic construct
  source 1..17: mol_type = other DNA
ctctctgagtgtcctgt

SEQ ID NO: 141194 - DNA, 17 bp, synthetic construct
  source 1..17: mol_type = other DNA
tctctgagtgtcctgtg

SEQ ID NO: 141195 - DNA, 17 bp, synthetic construct
  source 1..17: mol_type = other DNA
ctctgagtgtcctgtgc

SEQ ID NO: 141196 - DNA, 17 bp, synthetic construct
  source 1..17: mol_type = other DNA
tctgagtgtcctgtgcg

SEQ ID NO: 141197 - DNA, 17 bp, synthetic construct
  source 1..17: mol_type = other DNA
ctgagtgtcctgtgcgg

SEQ ID NO: 141198 - DNA, 17 bp, synthetic construct
  source 1..17: mol_type = other DNA
tgagtgtcctgtgcggt

SEQ ID NO: 141199 - DNA, 17 bp, synthetic construct
  source 1..17: mol_type = other DNA
gagtgtcctgtgcggtg

SEQ ID NO: 141200 - DNA, 17 bp, synthetic construct
  source 1..17: mol_type = other DNA
agtgtcctgtgcggtga

SEQ ID NO: 141201 - DNA, 17 bp, synthetic construct
  source 1..17: mol_type = other DNA
gtgtcctgtgcggtgag

SEQ ID NO: 141202 - DNA, 17 bp, synthetic construct
  source 1..17: mol_type = other DNA
tgtcctgtgcggtgagt

SEQ ID NO: 141203 - DNA, 17 bp, synthetic construct
  source 1..17: mol_type = other DNA
gtcctgtgcggtgagtg

SEQ ID NO: 141204 - DNA, 17 bp, synthetic construct
  source 1..17: mol_type = other DNA
tcctgtgcggtgagtgg

SEQ ID NO: 141205 - DNA, 17 bp, synthetic construct
  source 1..17: mol_type = other DNA
cctgtgcggtgagtggg

SEQ ID NO: 141206 - DNA, 17 bp, synthetic construct
  source 1..17: mol_type = other DNA
ctgtgcggtgagtgggg

SEQ ID NO: 141207 - DNA, 17 bp, synthetic construct
  source 1..17: mol_type = other DNA
tgtgcggtgagtggggg

SEQ ID NO: 141208 - DNA, 17 bp, synthetic construct
  source 1..17: mol_type = other DNA
gtgcggtgagtgggggc

SEQ ID NO: 141209 - DNA, 17 bp, synthetic construct
  source 1..17: mol_type = other DNA
tgcggtgagtgggggcg

SEQ ID NO: 141210 - DNA, 17 bp, synthetic construct
  source 1..17: mol_type = other DNA
gcggtgagtgggggcgg

SEQ ID NO: 141211 - DNA, 17 bp, synthetic construct
  source 1..17: mol_type = other DNA
cggtgagtgggggcggc

SEQ ID NO: 141212 - DNA, 17 bp, synthetic construct
  source 1..17: mol_type = other DNA
ggtgagtgggggcggcc

SEQ ID NO: 141213 - DNA, 17 bp, synthetic construct
  source 1..17: mol_type = other DNA
gtgagtgggggcggccc

SEQ ID NO: 141214 - DNA, 17 bp, synthetic construct
  source 1..17: mol_type = other DNA
tgagtgggggcggcccc

SEQ ID NO: 141215 - DNA, 17 bp, synthetic construct
  source 1..17: mol_type = other DNA
gagtgggggcggccccg

SEQ ID NO: 141216 - DNA, 17 bp, synthetic construct
  source 1..17: mol_type = other DNA
agtgggggcggccccgg

SEQ ID NO: 141217 - DNA, 17 bp, synthetic construct
  source 1..17: mol_type = other DNA
gtgggggcggccccggg

SEQ ID NO: 141218 - DNA, 17 bp, synthetic construct
  source 1..17: mol_type = other DNA
tgggggcggccccgggc

SEQ ID NO: 141219 - DNA, 17 bp, synthetic construct
  source 1..17: mol_type = other DNA
gggggcggccccgggcc

SEQ ID NO: 141220 - DNA, 17 bp, synthetic construct
  source 1..17: mol_type = other DNA
ggggcggccccgggccc

SEQ ID NO: 141221 - DNA, 17 bp, synthetic construct
  source 1..17: mol_type = other DNA
gggcggccccgggcccc

SEQ ID NO: 141222 - DNA, 17 bp, synthetic construct
  source 1..17: mol_type = other DNA
ggcggccccgggccccc

SEQ ID NO: 141223 - DNA, 17 bp, synthetic construct
  source 1..17: mol_type = other DNA
gcggccccgggcccccc

SEQ ID NO: 141224 - DNA, 17 bp, synthetic construct
  source 1..17: mol_type = other DNA
cggccccgggcccccca

SEQ ID NO: 141225 - DNA, 17 bp, synthetic construct
  source 1..17: mol_type = other DNA
ggccccgggccccccag

SEQ ID NO: 141226 - DNA, 17 bp, synthetic construct
  source 1..17: mol_type = other DNA
gccccgggccccccaga

SEQ ID NO: 141227 - DNA, 17 bp, synthetic construct
  source 1..17: mol_type = other DNA
ccccgggccccccagac

SEQ ID NO: 141228 - DNA, 17 bp, synthetic construct
  source 1..17: mol_type = other DNA
cccgggccccccagact

SEQ ID NO: 141229 - DNA, 17 bp, synthetic construct
  source 1..17: mol_type = other DNA
ccgggccccccagactc

SEQ ID NO: 141230 - DNA, 17 bp, synthetic construct
  source 1..17: mol_type = other DNA
cgggccccccagactcc

SEQ ID NO: 141231 - DNA, 17 bp, synthetic construct
  source 1..17: mol_type = other DNA
gggccccccagactcct

SEQ ID NO: 141232 - DNA, 17 bp, synthetic construct
  source 1..17: mol_type = other DNA
ggccccccagactcctc

SEQ ID NO: 141233 - DNA, 17 bp, synthetic construct
  source 1..17: mol_type = other DNA
gccccccagactcctcg

SEQ ID NO: 141234 - DNA, 17 bp, synthetic construct
  source 1..17: mol_type = other DNA
ccccccagactcctcgg

SEQ ID NO: 141235 - DNA, 17 bp, synthetic construct
  source 1..17: mol_type = other DNA
cccccagactcctcggc

SEQ ID NO: 141236 - DNA, 17 bp, synthetic construct
  source 1..17: mol_type = other DNA
ccccagactcctcggcc

SEQ ID NO: 141237 - DNA, 17 bp, synthetic construct
  source 1..17: mol_type = other DNA
cccagactcctcggcct

SEQ ID NO: 141238 - DNA, 17 bp, synthetic construct
  source 1..17: mol_type = other DNA
ccagactcctcggcctc

SEQ ID NO: 141239 - DNA, 17 bp, synthetic construct
  source 1..17: mol_type = other DNA
cagactcctcggcctct

SEQ ID NO: 141240 - DNA, 17 bp, synthetic construct
  source 1..17: mol_type = other DNA
agactcctcggcctctc

SEQ ID NO: 141241 - DNA, 17 bp, synthetic construct
  source 1..17: mol_type = other DNA
gactcctcggcctctct

SEQ ID NO: 141242 - DNA, 17 bp, synthetic construct
  source 1..17: mol_type = other DNA
actcctcggcctctctg

SEQ ID NO: 141243 - DNA, 17 bp, synthetic construct
  source 1..17: mol_type = other DNA
ctcctcggcctctctga

SEQ ID NO: 141244 - DNA, 17 bp, synthetic construct
  source 1..17: mol_type = other DNA
tcctcggcctctctgag

SEQ ID NO: 141245 - DNA, 17 bp, synthetic construct
  source 1..17: mol_type = other DNA
cctcggcctctctgagt

SEQ ID NO: 141246 - DNA, 17 bp, synthetic construct
  source 1..17: mol_type = other DNA
ctcggcctctctgagtg

SEQ ID NO: 141247 - DNA, 17 bp, synthetic construct
  source 1..17: mol_type = other DNA
tcggcctctctgagtgt

SEQ ID NO: 141248 - DNA, 17 bp, synthetic construct
  source 1..17: mol_type = other DNA
cggcctctctgagtgtc

SEQ ID NO: 141249 - DNA, 17 bp, synthetic construct
  source 1..17: mol_type = other DNA
ggcctctctgagtgtcc

SEQ ID NO: 141250 - DNA, 17 bp, synthetic construct
  source 1..17: mol_type = other DNA
gcctctctgagtgtcct

SEQ ID NO: 141251 - DNA, 17 bp, synthetic construct
  source 1..17: mol_type = other DNA
cctctctgagtgtcctg

SEQ ID NO: 141252 - DNA, 17 bp, synthetic construct
  source 1..17: mol_type = other DNA
ctctctgagtgtcctgt

SEQ ID NO: 141253 - DNA, 17 bp, synthetic construct
  source 1..17: mol_type = other DNA
tctctgagtgtcctgtg

SEQ ID NO: 141254 - DNA, 17 bp, synthetic construct
  source 1..17: mol_type = other DNA
ctctgagtgtcctgtgc

SEQ ID NO: 141255 - DNA, 17 bp, synthetic construct
  source 1..17: mol_type = other DNA
tctgagtgtcctgtgcg

SEQ ID NO: 141256 - DNA, 17 bp, synthetic construct
  source 1..17: mol_type = other DNA
ctgagtgtcctgtgcgg

SEQ ID NO: 141257 - DNA, 17 bp, synthetic construct
  source 1..17: mol_type = other DNA
tgagtgtcctgtgcggt

SEQ ID NO: 141258 - DNA, 17 bp, synthetic construct
  source 1..17: mol_type = other DNA
gagtgtcctgtgcggtg

SEQ ID NO: 141259 - DNA, 17 bp, synthetic construct
  source 1..17: mol_type = other DNA
agtgtcctgtgcggtga

SEQ ID NO: 141260 - DNA, 17 bp, synthetic construct
  source 1..17: mol_type = other DNA
gtgtcctgtgcggtgat

SEQ ID NO: 141261 - DNA, 17 bp, synthetic construct
  source 1..17: mol_type = other DNA
tgtcctgtgcggtgatt

SEQ ID NO: 141262 - DNA, 17 bp, synthetic construct
  source 1..17: mol_type = other DNA
gtcctgtgcggtgattg

SEQ ID NO: 141263 - DNA, 17 bp, synthetic construct
  source 1..17: mol_type = other DNA
tcctgtgcggtgattgg

SEQ ID NO: 141264 - DNA, 17 bp, synthetic construct
  source 1..17: mol_type = other DNA
cctgtgcggtgattggg

SEQ ID NO: 141265 - DNA, 17 bp, synthetic construct
  source 1..17: mol_type = other DNA
ctgtgcggtgattgggg

SEQ ID NO: 141266 - DNA, 17 bp, synthetic construct
  source 1..17: mol_type = other DNA
tgtgcggtgattggggg

SEQ ID NO: 141267 - DNA, 17 bp, synthetic construct
  source 1..17: mol_type = other DNA
gtgcggtgattgggggc

SEQ ID NO: 141268 - DNA, 17 bp, synthetic construct
  source 1..17: mol_type = other DNA
tgcggtgattgggggcg

SEQ ID NO: 141269 - DNA, 17 bp, synthetic construct
  source 1..17: mol_type = other DNA
gcggtgattgggggcgg

SEQ ID NO: 141270 - DNA, 17 bp, synthetic construct
  source 1..17: mol_type = other DNA
cggtgattgggggcggc

SEQ ID NO: 141271 - DNA, 17 bp, synthetic construct
  source 1..17: mol_type = other DNA
ggtgattgggggcggcc

SEQ ID NO: 141272 - DNA, 17 bp, synthetic construct
  source 1..17: mol_type = other DNA
gtgattgggggcggccc

SEQ ID NO: 141273 - DNA, 17 bp, synthetic construct
  source 1..17: mol_type = other DNA
tgattgggggcggccct

SEQ ID NO: 141274 - DNA, 17 bp, synthetic construct
  source 1..17: mol_type = other DNA
gattgggggcggccctg

SEQ ID NO: 141275 - DNA, 17 bp, synthetic construct
  source 1..17: mol_type = other DNA
attgggggcggccctgg

SEQ ID NO: 141276 - DNA, 17 bp, synthetic construct
  source 1..17: mol_type = other DNA
ttgggggcggccctggg

SEQ ID NO: 141277 - DNA, 17 bp, synthetic construct
  source 1..17: mol_type = other DNA
tgggggcggccctgggc

SEQ ID NO: 141278 - DNA, 17 bp, synthetic construct
  source 1..17: mol_type = other DNA
gggggcggccctgggcc

SEQ ID NO: 141279 - DNA, 17 bp, synthetic construct
  source 1..17: mol_type = other DNA
ggggcggccctgggccc

SEQ ID NO: 141280 - DNA, 17 bp, synthetic construct
  source 1..17: mol_type = other DNA
gggcggccctgggcccc

SEQ ID NO: 141281 - DNA, 17 bp, synthetic construct
  source 1..17: mol_type = other DNA
ggcggccctgggccccc

SEQ ID NO: 141282 - DNA, 17 bp, synthetic construct
  source 1..17: mol_type = other DNA
gcggccctgggcccccc

SEQ ID NO: 141283 - DNA, 17 bp, synthetic construct
  source 1..17: mol_type = other DNA
cggccctgggccccccc

SEQ ID NO: 141284 - DNA, 17 bp, synthetic construct
  source 1..17: mol_type = other DNA
ggccctgggccccccca

SEQ ID NO: 141285 - DNA, 17 bp, synthetic construct
  source 1..17: mol_type = other DNA
gccctgggcccccccaa

SEQ ID NO: 141286 - DNA, 17 bp, synthetic construct
  source 1..17: mol_type = other DNA
ccctgggcccccccaac

SEQ ID NO: 141287 - DNA, 17 bp, synthetic construct
  source 1..17: mol_type = other DNA
cctgggcccccccaacc

SEQ ID NO: 141288 - DNA, 17 bp, synthetic construct
  source 1..17: mol_type = other DNA
ctgggcccccccaaccc

SEQ ID NO: 141289 - DNA, 17 bp, synthetic construct
  source 1..17: mol_type = other DNA
tgggcccccccaacccc

SEQ ID NO: 141290 - DNA, 17 bp, synthetic construct
  source 1..17: mol_type = other DNA
gggcccccccaacccct

SEQ ID NO: 141291 - DNA, 17 bp, synthetic construct
  source 1..17: mol_type = other DNA
ggcccccccaacccctt

SEQ ID NO: 141292 - DNA, 17 bp, synthetic construct
  source 1..17: mol_type = other DNA
gcccccccaaccccttg

SEQ ID NO: 141293 - DNA, 17 bp, synthetic construct
  source 1..17: mol_type = other DNA
cccccccaaccccttgg

SEQ ID NO: 141294 - DNA, 17 bp, synthetic construct
  source 1..17: mol_type = other DNA
ccccccaaccccttggc

SEQ ID NO: 141295 - DNA, 17 bp, synthetic construct
  source 1..17: mol_type = other DNA
cccccaaccccttggct

SEQ ID NO: 141296 - DNA, 17 bp, synthetic construct
  source 1..17: mol_type = other DNA
ccccaaccccttggctt

SEQ ID NO: 141297 - DNA, 17 bp, synthetic construct
  source 1..17: mol_type = other DNA
cccaaccccttggcttg

SEQ ID NO: 141298 - DNA, 17 bp, synthetic construct
  source 1..17: mol_type = other DNA
ccaaccccttggcttgt

SEQ ID NO: 141299 - DNA, 17 bp, synthetic construct
  source 1..17: mol_type = other DNA
caaccccttggcttgtc

SEQ ID NO: 141300 - DNA, 17 bp, synthetic construct
  source 1..17: mol_type = other DNA
aaccccttggcttgtct

SEQ ID NO: 141301 - DNA, 17 bp, synthetic construct
  source 1..17: mol_type = other DNA
accccttggcttgtctg

SEQ ID NO: 141302 - DNA, 17 bp, synthetic construct
  source 1..17: mol_type = other DNA
ccccttggcttgtctga

SEQ ID NO: 141303 - DNA, 17 bp, synthetic construct
  source 1..17: mol_type = other DNA
cccttggcttgtctgac

SEQ ID NO: 141304 - DNA, 17 bp, synthetic construct
  source 1..17: mol_type = other DNA
ccttggcttgtctgaca

SEQ ID NO: 141305 - DNA, 17 bp, synthetic construct
  source 1..17: mol_type = other DNA
cttggcttgtctgacac

SEQ ID NO: 141306 - DNA, 17 bp, synthetic construct
  source 1..17: mol_type = other DNA
ttggcttgtctgacacc

SEQ ID NO: 141307 - DNA, 17 bp, synthetic construct
  source 1..17: mol_type = other DNA
tggcttgtctgacacct

SEQ ID NO: 141308 - DNA, 17 bp, synthetic construct
  source 1..17: mol_type = other DNA
ggcttgtctgacacctc

SEQ ID NO: 141309 - DNA, 17 bp, synthetic construct
  source 1..17: mol_type = other DNA
gcttgtctgacacctct

SEQ ID NO: 141310 - DNA, 17 bp, synthetic construct
  source 1..17: mol_type = other DNA
cttgtctgacacctctc

SEQ ID NO: 141311 - DNA, 17 bp, synthetic construct
  source 1..17: mol_type = other DNA
ttgtctgacacctctct

SEQ ID NO: 141312 - DNA, 17 bp, synthetic construct
  source 1..17: mol_type = other DNA
tgtctgacacctctctg

SEQ ID NO: 141313 - DNA, 17 bp, synthetic construct
  source 1..17: mol_type = other DNA
gtctgacacctctctgt

SEQ ID NO: 141314 - DNA, 17 bp, synthetic construct
  source 1..17: mol_type = other DNA
tctgacacctctctgtg

SEQ ID NO: 141315 - DNA, 17 bp, synthetic construct
  source 1..17: mol_type = other DNA
ctgacacctctctgtgc

SEQ ID NO: 141316 - DNA, 17 bp, synthetic construct
  source 1..17: mol_type = other DNA
tgacacctctctgtgcc

SEQ ID NO: 141317 - DNA, 17 bp, synthetic construct
  source 1..17: mol_type = other DNA
gacacctctctgtgccc

SEQ ID NO: 141318 - DNA, 17 bp, synthetic construct
  source 1..17: mol_type = other DNA
acacctctctgtgccca

SEQ ID NO: 141319 - DNA, 17 bp, synthetic construct
  source 1..17: mol_type = other DNA
cacctctctgtgcccac

SEQ ID NO: 141320 - DNA, 17 bp, synthetic construct
  source 1..17: mol_type = other DNA
acctctctgtgcccaca

SEQ ID NO: 141321 - DNA, 17 bp, synthetic construct
  source 1..17: mol_type = other DNA
cctctctgtgcccacag

SEQ ID NO: 141322 - DNA, 17 bp, synthetic construct
  source 1..17: mol_type = other DNA
ctctctgtgcccacaga

SEQ ID NO: 141323 - DNA, 17 bp, synthetic construct
  source 1..17: mol_type = other DNA
tctctgtgcccacagac

SEQ ID NO: 141324 - DNA, 17 bp, synthetic construct
  source 1..17: mol_type = other DNA
ctctgtgcccacagacc

SEQ ID NO: 141325 - DNA, 17 bp, synthetic construct
  source 1..17: mol_type = other DNA
tctgtgcccacagacct

SEQ ID NO: 141326 - DNA, 17 bp, synthetic construct
  source 1..17: mol_type = other DNA
ctgtgcccacagacctc

SEQ ID NO: 141327 - DNA, 17 bp, synthetic construct
  source 1..17: mol_type = other DNA
tgtgcccacagacctca

SEQ ID NO: 141328 - DNA, 17 bp, synthetic construct
  source 1..17: mol_type = other DNA
gtgcccacagacctcac

SEQ ID NO: 141329 - DNA, 17 bp, synthetic construct
  source 1..17: mol_type = other DNA
tgcccacagacctcacc

SEQ ID NO: 141330 - DNA, 17 bp, synthetic construct
  source 1..17: mol_type = other DNA
gcccacagacctcacct

SEQ ID NO: 141331 - DNA, 17 bp, synthetic construct
  source 1..17: mol_type = other DNA
cccacagacctcacctg

SEQ ID NO: 141332 - DNA, 17 bp, synthetic construct
  source 1..17: mol_type = other DNA
ccacagacctcacctgc

SEQ ID NO: 141333 - DNA, 17 bp, synthetic construct
  source 1..17: mol_type = other DNA
cacagacctcacctgcc

SEQ ID NO: 141334 - DNA, 17 bp, synthetic construct
  source 1..17: mol_type = other DNA
acagacctcacctgccc

SEQ ID NO: 141335 - DNA, 17 bp, synthetic construct
  source 1..17: mol_type = other DNA
cagacctcacctgccca

SEQ ID NO: 141336 - DNA, 17 bp, synthetic construct
  source 1..17: mol_type = other DNA
agacctcacctgcccac

SEQ ID NO: 141337 - DNA, 17 bp, synthetic construct
  source 1..17: mol_type = other DNA
gacctcacctgcccacc

SEQ ID NO: 141338 - DNA, 17 bp, synthetic construct
  source 1..17: mol_type = other DNA
acctcacctgcccaccc

SEQ ID NO: 141339 - DNA, 17 bp, synthetic construct
  source 1..17: mol_type = other DNA
cctcacctgcccaccca

SEQ ID NO: 141340 - DNA, 17 bp, synthetic construct
  source 1..17: mol_type = other DNA
ctcacctgcccacccac

SEQ ID NO: 141341 - DNA, 17 bp, synthetic construct
  source 1..17: mol_type = other DNA
tcacctgcccacccacc

SEQ ID NO: 141342 - DNA, 17 bp, synthetic construct
  source 1..17: mol_type = other DNA
cacctgcccacccacca

SEQ ID NO: 141343 - DNA, 17 bp, synthetic construct
  source 1..17: mol_type = other DNA
acctgcccacccaccaa

SEQ ID NO: 141344 - DNA, 17 bp, synthetic construct
  source 1..17: mol_type = other DNA
cctgcccacccaccaaa

SEQ ID NO: 141345 - DNA, 17 bp, synthetic construct
  source 1..17: mol_type = other DNA
ctgcccacccaccaaag

SEQ ID NO: 141346 - DNA, 17 bp, synthetic construct
  source 1..17: mol_type = other DNA
tgcccacccaccaaagt

SEQ ID NO: 141347 - DNA, 17 bp, synthetic construct
  source 1..17: mol_type = other DNA
gcccacccaccaaagtg

SEQ ID NO: 141348 - DNA, 17 bp, synthetic construct
  source 1..17: mol_type = other DNA
cccacccaccaaagtgt

SEQ ID NO: 141349 - DNA, 17 bp, synthetic construct
  source 1..17: mol_type = other DNA
ccacccaccaaagtgta

SEQ ID NO: 141350 - DNA, 17 bp, synthetic construct
  source 1..17: mol_type = other DNA
cacccaccaaagtgtac

SEQ ID NO: 141351 - DNA, 17 bp, synthetic construct
  source 1..17: mol_type = other DNA
acccaccaaagtgtaca

SEQ ID NO: 141352 - DNA, 17 bp, synthetic construct
  source 1..17: mol_type = other DNA
cccaccaaagtgtacaa

SEQ ID NO: 141353 - DNA, 17 bp, synthetic construct
  source 1..17: mol_type = other DNA
ccaccaaagtgtacaag

SEQ ID NO: 141354 - DNA, 17 bp, synthetic construct
  source 1..17: mol_type = other DNA
caccaaagtgtacaagc

SEQ ID NO: 141355 - DNA, 17 bp, synthetic construct
  source 1..17: mol_type = other DNA
accaaagtgtacaagcc

SEQ ID NO: 141356 - DNA, 17 bp, synthetic construct
  source 1..17: mol_type = other DNA
ccaaagtgtacaagcca

SEQ ID NO: 141357 - DNA, 17 bp, synthetic construct
  source 1..17: mol_type = other DNA
caaagtgtacaagccat

SEQ ID NO: 141358 - DNA, 17 bp, synthetic construct
  source 1..17: mol_type = other DNA
aaagtgtacaagccatg

SEQ ID NO: 141359 - DNA, 17 bp, synthetic construct
  source 1..17: mol_type = other DNA
aagtgtacaagccatgc

SEQ ID NO: 141360 - DNA, 17 bp, synthetic construct
  source 1..17: mol_type = other DNA
agtgtacaagccatgcg

SEQ ID NO: 141361 - DNA, 17 bp, synthetic construct
  source 1..17: mol_type = other DNA
gtgtacaagccatgcgg

SEQ ID NO: 141362 - DNA, 17 bp, synthetic construct
  source 1..17: mol_type = other DNA
tgtacaagccatgcggc

SEQ ID NO: 141363 - DNA, 17 bp, synthetic construct
  source 1..17: mol_type = other DNA
gtacaagccatgcggcc

SEQ ID NO: 141364 - DNA, 17 bp, synthetic construct
  source 1..17: mol_type = other DNA
tacaagccatgcggccc

SEQ ID NO: 141365 - DNA, 17 bp, synthetic construct
  source 1..17: mol_type = other DNA
acaagccatgcggcccc

SEQ ID NO: 141366 - DNA, 17 bp, synthetic construct
  source 1..17: mol_type = other DNA
caagccatgcggcccca

SEQ ID NO: 141367 - DNA, 17 bp, synthetic construct
  source 1..17: mol_type = other DNA
aagccatgcggccccat

SEQ ID NO: 141368 - DNA, 17 bp, synthetic construct
  source 1..17: mol_type = other DNA
agccatgcggccccata

SEQ ID NO: 141369 - DNA, 17 bp, synthetic construct
  source 1..17: mol_type = other DNA
gccatgcggccccatac

SEQ ID NO: 141370 - DNA, 17 bp, synthetic construct
  source 1..17: mol_type = other DNA
ccatgcggccccataca

SEQ ID NO: 141371 - DNA, 17 bp, synthetic construct
  source 1..17: mol_type = other DNA
catgcggccccatacag

SEQ ID NO: 141372 - DNA, 17 bp, synthetic construct
  source 1..17: mol_type = other DNA
atgcggccccatacagc

SEQ ID NO: 141373 - DNA, 17 bp, synthetic construct
  source 1..17: mol_type = other DNA
tgcggccccatacagcc

SEQ ID NO: 141374 - DNA, 17 bp, synthetic construct
  source 1..17: mol_type = other DNA
gcggccccatacagcct

SEQ ID NO: 141375 - DNA, 17 bp, synthetic construct
  source 1..17: mol_type = other DNA
cggccccatacagcctg

SEQ ID NO: 141376 - DNA, 17 bp, synthetic construct
  source 1..17: mol_type = other DNA
ggccccatacagcctgc

SEQ ID NO: 141377 - DNA, 17 bp, synthetic construct
  source 1..17: mol_type = other DNA
gccccatacagcctgcc

SEQ ID NO: 141378 - DNA, 17 bp, synthetic construct
  source 1..17: mol_type = other DNA
ccccatacagcctgcca

SEQ ID NO: 141379 - DNA, 17 bp, synthetic construct
  source 1..17: mol_type = other DNA
cccatacagcctgccac

SEQ ID NO: 141380 - DNA, 17 bp, synthetic construct
  source 1..17: mol_type = other DNA
ccatacagcctgccacc

SEQ ID NO: 141381 - DNA, 17 bp, synthetic construct
  source 1..17: mol_type = other DNA
catacagcctgccacct

SEQ ID NO: 141382 - DNA, 17 bp, synthetic construct
  source 1..17: mol_type = other DNA
atacagcctgccacctg

SEQ ID NO: 141383 - DNA, 17 bp, synthetic construct
  source 1..17: mol_type = other DNA
tacagcctgccacctgc

SEQ ID NO: 141384 - DNA, 17 bp, synthetic construct
  source 1..17: mol_type = other DNA
acagcctgccacctgca

SEQ ID NO: 141385 - DNA, 17 bp, synthetic construct
  source 1..17: mol_type = other DNA
cagcctgccacctgcaa

SEQ ID NO: 141386 - DNA, 17 bp, synthetic construct
  source 1..17: mol_type = other DNA
agcctgccacctgcaac

SEQ ID NO: 141387 - DNA, 17 bp, synthetic construct
  source 1..17: mol_type = other DNA
gcctgccacctgcaact

SEQ ID NO: 141388 - DNA, 17 bp, synthetic construct
  source 1..17: mol_type = other DNA
cctgccacctgcaactc

SEQ ID NO: 141389 - DNA, 17 bp, synthetic construct
  source 1..17: mol_type = other DNA
ctgccacctgcaactct

SEQ ID NO: 141390 - DNA, 17 bp, synthetic construct
  source 1..17: mol_type = other DNA
tgccacctgcaactcta

SEQ ID NO: 141391 - DNA, 17 bp, synthetic construct
  source 1..17: mol_type = other DNA
gccacctgcaactctag

SEQ ID NO: 141392 - DNA, 17 bp, synthetic construct
  source 1..17: mol_type = other DNA
ccacctgcaactctagg

SEQ ID NO: 141393 - DNA, 17 bp, synthetic construct
  source 1..17: mol_type = other DNA
cacctgcaactctaggt

SEQ ID NO: 141394 - DNA, 17 bp, synthetic construct
  source 1..17: mol_type = other DNA
acctgcaactctaggta

SEQ ID NO: 141395 - DNA, 17 bp, synthetic construct
  source 1..17: mol_type = other DNA
cctgcaactctaggtaa

SEQ ID NO: 141396 - DNA, 17 bp, synthetic construct
  source 1..17: mol_type = other DNA
ctgcaactctaggtaag

SEQ ID NO: 141397 - DNA, 17 bp, synthetic construct
  source 1..17: mol_type = other DNA
tgcaactctaggtaagt

SEQ ID NO: 141398 - DNA, 17 bp, synthetic construct
  source 1..17: mol_type = other DNA
gcaactctaggtaagta

SEQ ID NO: 141399 - DNA, 17 bp, synthetic construct
  source 1..17: mol_type = other DNA
caactctaggtaagtac

SEQ ID NO: 141400 - DNA, 17 bp, synthetic construct
  source 1..17: mol_type = other DNA
aactctaggtaagtaca

SEQ ID NO: 141401 - DNA, 17 bp, synthetic construct
  source 1..17: mol_type = other DNA
actctaggtaagtacag

SEQ ID NO: 141402 - DNA, 17 bp, synthetic construct
  source 1..17: mol_type = other DNA
ctctaggtaagtacagg

SEQ ID NO: 141403 - DNA, 17 bp, synthetic construct
  source 1..17: mol_type = other DNA
tctaggtaagtacaggg

SEQ ID NO: 141404 - DNA, 17 bp, synthetic construct
  source 1..17: mol_type = other DNA
ctaggtaagtacaggga

SEQ ID NO: 141405 - DNA, 17 bp, synthetic construct
  source 1..17: mol_type = other DNA
taggtaagtacagggat

SEQ ID NO: 141406 - DNA, 17 bp, synthetic construct
  source 1..17: mol_type = other DNA
aggtaagtacagggatg

SEQ ID NO: 141407 - DNA, 17 bp, synthetic construct
  source 1..17: mol_type = other DNA
ggtaagtacagggatgg

SEQ ID NO: 141408 - DNA, 17 bp, synthetic construct
  source 1..17: mol_type = other DNA
gtaagtacagggatggc

SEQ ID NO: 141409 - DNA, 17 bp, synthetic construct
  source 1..17: mol_type = other DNA
taagtacagggatggct

SEQ ID NO: 141410 - DNA, 17 bp, synthetic construct
  source 1..17: mol_type = other DNA
aagtacagggatggctg

SEQ ID NO: 141411 - DNA, 17 bp, synthetic construct
  source 1..17: mol_type = other DNA
agtacagggatggctgg

SEQ ID NO: 141412 - DNA, 17 bp, synthetic construct
  source 1..17: mol_type = other DNA
gtacagggatggctggt

SEQ ID NO: 141413 - DNA, 17 bp, synthetic construct
  source 1..17: mol_type = other DNA
tacagggatggctggtg

SEQ ID NO: 141414 - DNA, 17 bp, synthetic construct
  source 1..17: mol_type = other DNA
acagggatggctggtgc

SEQ ID NO: 141415 - DNA, 17 bp, synthetic construct
  source 1..17: mol_type = other DNA
cagggatggctggtgcc

SEQ ID NO: 141416 - DNA, 17 bp, synthetic construct
  source 1..17: mol_type = other DNA
agggatggctggtgcct

SEQ ID NO: 141417 - DNA, 17 bp, synthetic construct
  source 1..17: mol_type = other DNA
gggatggctggtgcctt

SEQ ID NO: 141418 - DNA, 17 bp, synthetic construct
  source 1..17: mol_type = other DNA
ggatggctggtgccttc

SEQ ID NO: 141419 - DNA, 17 bp, synthetic construct
  source 1..17: mol_type = other DNA
gatggctggtgccttcc

SEQ ID NO: 141420 - DNA, 17 bp, synthetic construct
  source 1..17: mol_type = other DNA
atggctggtgccttccc

SEQ ID NO: 141421 - DNA, 17 bp, synthetic construct
  source 1..17: mol_type = other DNA
tggctggtgccttccct

SEQ ID NO: 141422 - DNA, 17 bp, synthetic construct
  source 1..17: mol_type = other DNA
ggctggtgccttccctg

SEQ ID NO: 141423 - DNA, 17 bp, synthetic construct
  source 1..17: mol_type = other DNA
gctggtgccttccctgc

SEQ ID NO: 141424 - DNA, 17 bp, synthetic construct
  source 1..17: mol_type = other DNA
ctggtgccttccctgcc

SEQ ID NO: 141425 - DNA, 17 bp, synthetic construct
  source 1..17: mol_type = other DNA
tggtgccttccctgcca

SEQ ID NO: 141426 - DNA, 17 bp, synthetic construct
  source 1..17: mol_type = other DNA
ggtgccttccctgccac

SEQ ID NO: 141427 - DNA, 17 bp, synthetic construct
  source 1..17: mol_type = other DNA
gtgccttccctgccacc

SEQ ID NO: 141428 - DNA, 17 bp, synthetic construct
  source 1..17: mol_type = other DNA
tgccttccctgccaccc

SEQ ID NO: 141429 - DNA, 17 bp, synthetic construct
  source 1..17: mol_type = other DNA
gccttccctgccaccca

SEQ ID NO: 141430 - DNA, 17 bp, synthetic construct
  source 1..17: mol_type = other DNA
ccttccctgccacccag

SEQ ID NO: 141431 - DNA, 17 bp, synthetic construct
  source 1..17: mol_type = other DNA
cttccctgccacccagg

SEQ ID NO: 141432 - DNA, 17 bp, synthetic construct
  source 1..17: mol_type = other DNA
ttccctgccacccaggc

SEQ ID NO: 141433 - DNA, 17 bp, synthetic construct
  source 1..17: mol_type = other DNA
tccctgccacccaggcc

SEQ ID NO: 141434 - DNA, 17 bp, synthetic construct
  source 1..17: mol_type = other DNA
ccctgccacccaggcct

SEQ ID NO: 141435 - DNA, 17 bp, synthetic construct
  source 1..17: mol_type = other DNA
cctgccacccaggcctg

SEQ ID NO: 141436 - DNA, 17 bp, synthetic construct
  source 1..17: mol_type = other DNA
ctgccacccaggcctgc

SEQ ID NO: 141437 - DNA, 17 bp, synthetic construct
  source 1..17: mol_type = other DNA
tgccacccaggcctgcc

SEQ ID NO: 141438 - DNA, 17 bp, synthetic construct
  source 1..17: mol_type = other DNA
gccacccaggcctgcct

SEQ ID NO: 141439 - DNA, 17 bp, synthetic construct
  source 1..17: mol_type = other DNA
ccacccaggcctgcctg

SEQ ID NO: 141440 - DNA, 17 bp, synthetic construct
  source 1..17: mol_type = other DNA
cacccaggcctgcctga

SEQ ID NO: 141441 - DNA, 17 bp, synthetic construct
  source 1..17: mol_type = other DNA
acccaggcctgcctgac

SEQ ID NO: 141442 - DNA, 17 bp, synthetic construct
  source 1..17: mol_type = other DNA
cccaggcctgcctgacc

SEQ ID NO: 141443 - DNA, 17 bp, synthetic construct
  source 1..17: mol_type = other DNA
ccaggcctgcctgaccg

SEQ ID NO: 141444 - DNA, 17 bp, synthetic construct
  source 1..17: mol_type = other DNA
caggcctgcctgaccgg

SEQ ID NO: 141445 - DNA, 17 bp, synthetic construct
  source 1..17: mol_type = other DNA
aggcctgcctgaccggt

SEQ ID NO: 141446 - DNA, 17 bp, synthetic construct
  source 1..17: mol_type = other DNA
ggcctgcctgaccggtc

SEQ ID NO: 141447 - DNA, 17 bp, synthetic construct
  source 1..17: mol_type = other DNA
gcctgcctgaccggtct

SEQ ID NO: 141448 - DNA, 17 bp, synthetic construct
  source 1..17: mol_type = other DNA
cctgcctgaccggtctg

SEQ ID NO: 141449 - DNA, 17 bp, synthetic construct
  source 1..17: mol_type = other DNA
ctgcctgaccggtctgg

SEQ ID NO: 141450 - DNA, 17 bp, synthetic construct
  source 1..17: mol_type = other DNA
tgcctgaccggtctggg

SEQ ID NO: 141451 - DNA, 17 bp, synthetic construct
  source 1..17: mol_type = other DNA
gcctgaccggtctgggg

SEQ ID NO: 141452 - DNA, 17 bp, synthetic construct
  source 1..17: mol_type = other DNA
cctgaccggtctggggg

SEQ ID NO: 141453 - DNA, 17 bp, synthetic construct
  source 1..17: mol_type = other DNA
ctgaccggtctggggga

SEQ ID NO: 141454 - DNA, 17 bp, synthetic construct
  source 1..17: mol_type = other DNA
tgaccggtctgggggag

SEQ ID NO: 141455 - DNA, 17 bp, synthetic construct
  source 1..17: mol_type = other DNA
gaccggtctgggggagc

SEQ ID NO: 141456 - DNA, 17 bp, synthetic construct
  source 1..17: mol_type = other DNA
accggtctgggggagca

SEQ ID NO: 141457 - DNA, 17 bp, synthetic construct
  source 1..17: mol_type = other DNA
ccggtctgggggagcag

SEQ ID NO: 141458 - DNA, 17 bp, synthetic construct
  source 1..17: mol_type = other DNA
cggtctgggggagcagg

SEQ ID NO: 141459 - DNA, 17 bp, synthetic construct
  source 1..17: mol_type = other DNA
ggtctgggggagcagga

SEQ ID NO: 141460 - DNA, 17 bp, synthetic construct
  source 1..17: mol_type = other DNA
gtctgggggagcaggag

SEQ ID NO: 141461 - DNA, 17 bp, synthetic construct
  source 1..17: mol_type = other DNA
tctgggggagcaggagg

SEQ ID NO: 141462 - DNA, 17 bp, synthetic construct
  source 1..17: mol_type = other DNA
ctgggggagcaggagga

SEQ ID NO: 141463 - DNA, 17 bp, synthetic construct
  source 1..17: mol_type = other DNA
tgggggagcaggaggag

SEQ ID NO: 141464 - DNA, 17 bp, synthetic construct
  source 1..17: mol_type = other DNA
gggggagcaggaggagg

SEQ ID NO: 141465 - DNA, 17 bp, synthetic construct
  source 1..17: mol_type = other DNA
ggggagcaggaggaggc

SEQ ID NO: 141466 - DNA, 17 bp, synthetic construct
  source 1..17: mol_type = other DNA
gggagcaggaggaggcc

SEQ ID NO: 141467 - DNA, 17 bp, synthetic construct
  source 1..17: mol_type = other DNA
ggagcaggaggaggcca

SEQ ID NO: 141468 - DNA, 17 bp, synthetic construct
  source 1..17: mol_type = other DNA
gagcaggaggaggccag

SEQ ID NO: 141469 - DNA, 17 bp, synthetic construct
  source 1..17: mol_type = other DNA
agcaggaggaggccaga

SEQ ID NO: 141470 - DNA, 17 bp, synthetic construct
  source 1..17: mol_type = other DNA
gcaggaggaggccagag

SEQ ID NO: 141471 - DNA, 17 bp, synthetic construct
  source 1..17: mol_type = other DNA
caggaggaggccagagg

SEQ ID NO: 141472 - DNA, 17 bp, synthetic construct
  source 1..17: mol_type = other DNA
aggaggaggccagaggg

SEQ ID NO: 141473 - DNA, 17 bp, synthetic construct
  source 1..17: mol_type = other DNA
ggaggaggccagagggt

SEQ ID NO: 141474 - DNA, 17 bp, synthetic construct
  source 1..17: mol_type = other DNA
gaggaggccagagggtg

SEQ ID NO: 141475 - DNA, 17 bp, synthetic construct
  source 1..17: mol_type = other DNA
aggaggccagagggtgt

SEQ ID NO: 141476 - DNA, 17 bp, synthetic construct
  source 1..17: mol_type = other DNA
ggaggccagagggtgtc

SEQ ID NO: 141477 - DNA, 17 bp, synthetic construct
  source 1..17: mol_type = other DNA
gaggccagagggtgtcc

SEQ ID NO: 141478 - DNA, 17 bp, synthetic construct
  source 1..17: mol_type = other DNA
aggccagagggtgtccc

SEQ ID NO: 141479 - DNA, 17 bp, synthetic construct
  source 1..17: mol_type = other DNA
ggccagagggtgtccca

SEQ ID NO: 141480 - DNA, 17 bp, synthetic construct
  source 1..17: mol_type = other DNA
gccagagggtgtcccac

SEQ ID NO: 141481 - DNA, 17 bp, synthetic construct
  source 1..17: mol_type = other DNA
ccagagggtgtcccact

SEQ ID NO: 141482 - DNA, 17 bp, synthetic construct
  source 1..17: mol_type = other DNA
cagagggtgtcccactg

SEQ ID NO: 141483 - DNA, 17 bp, synthetic construct
  source 1..17: mol_type = other DNA
agagggtgtcccactgt

SEQ ID NO: 141484 - DNA, 17 bp, synthetic construct
  source 1..17: mol_type = other DNA
gagggtgtcccactgtg

SEQ ID NO: 141485 - DNA, 17 bp, synthetic construct
  source 1..17: mol_type = other DNA
agggtgtcccactgtgg

SEQ ID NO: 141486 - DNA, 17 bp, synthetic construct
  source 1..17: mol_type = other DNA
gggtgtcccactgtggg

SEQ ID NO: 141487 - DNA, 17 bp, synthetic construct
  source 1..17: mol_type = other DNA
ggtgtcccactgtgggc

SEQ ID NO: 141488 - DNA, 17 bp, synthetic construct
  source 1..17: mol_type = other DNA
gtgtcccactgtgggcc

SEQ ID NO: 141489 - DNA, 17 bp, synthetic construct
  source 1..17: mol_type = other DNA
tgtcccactgtgggcca

SEQ ID NO: 141490 - DNA, 17 bp, synthetic construct
  source 1..17: mol_type = other DNA
gtcccactgtgggccac

SEQ ID NO: 141491 - DNA, 17 bp, synthetic construct
  source 1..17: mol_type = other DNA
tcccactgtgggccaca

SEQ ID NO: 141492 - DNA, 17 bp, synthetic construct
  source 1..17: mol_type = other DNA
cccactgtgggccacag

SEQ ID NO: 141493 - DNA, 17 bp, synthetic construct
  source 1..17: mol_type = other DNA
ccactgtgggccacaga

SEQ ID NO: 141494 - DNA, 17 bp, synthetic construct
  source 1..17: mol_type = other DNA
cactgtgggccacagat

SEQ ID NO: 141495 - DNA, 17 bp, synthetic construct
  source 1..17: mol_type = other DNA
actgtgggccacagatc

SEQ ID NO: 141496 - DNA, 17 bp, synthetic construct
  source 1..17: mol_type = other DNA
ctgtgggccacagatct

SEQ ID NO: 141497 - DNA, 17 bp, synthetic construct
  source 1..17: mol_type = other DNA
tgtgggccacagatctc

SEQ ID NO: 141498 - DNA, 17 bp, synthetic construct
  source 1..17: mol_type = other DNA
gtgggccacagatctct

SEQ ID NO: 141499 - DNA, 17 bp, synthetic construct
  source 1..17: mol_type = other DNA
tgggccacagatctctg

SEQ ID NO: 141500 - DNA, 17 bp, synthetic construct
  source 1..17: mol_type = other DNA
gggccacagatctctgg

SEQ ID NO: 141501 - DNA, 17 bp, synthetic construct
  source 1..17: mol_type = other DNA
ggccacagatctctggg

SEQ ID NO: 141502 - DNA, 17 bp, synthetic construct
  source 1..17: mol_type = other DNA
gccacagatctctgggg

SEQ ID NO: 141503 - DNA, 17 bp, synthetic construct
  source 1..17: mol_type = other DNA
ccacagatctctggggt

SEQ ID NO: 141504 - DNA, 17 bp, synthetic construct
  source 1..17: mol_type = other DNA
cacagatctctggggtg

SEQ ID NO: 141505 - DNA, 17 bp, synthetic construct
  source 1..17: mol_type = other DNA
acagatctctggggtgc

SEQ ID NO: 141506 - DNA, 17 bp, synthetic construct
  source 1..17: mol_type = other DNA
cagatctctggggtgcc

SEQ ID NO: 141507 - DNA, 17 bp, synthetic construct
  source 1..17: mol_type = other DNA
agatctctggggtgccc

SEQ ID NO: 141508 - DNA, 17 bp, synthetic construct
  source 1..17: mol_type = other DNA
gatctctggggtgcccg

SEQ ID NO: 141509 - DNA, 17 bp, synthetic construct
  source 1..17: mol_type = other DNA
atctctggggtgcccga

SEQ ID NO: 141510 - DNA, 17 bp, synthetic construct
  source 1..17: mol_type = other DNA
tctctggggtgcccgag

SEQ ID NO: 141511 - DNA, 17 bp, synthetic construct
  source 1..17: mol_type = other DNA
ctctggggtgcccgagc

SEQ ID NO: 141512 - DNA, 17 bp, synthetic construct
  source 1..17: mol_type = other DNA
tctggggtgcccgagcc

SEQ ID NO: 141513 - DNA, 17 bp, synthetic construct
  source 1..17: mol_type = other DNA
ctggggtgcccgagccc

SEQ ID NO: 141514 - DNA, 17 bp, synthetic construct
  source 1..17: mol_type = other DNA
tggggtgcccgagccca

SEQ ID NO: 141515 - DNA, 17 bp, synthetic construct
  source 1..17: mol_type = other DNA
ggggtgcccgagcccag

SEQ ID NO: 141516 - DNA, 17 bp, synthetic construct
  source 1..17: mol_type = other DNA
gggtgcccgagcccagg

SEQ ID NO: 141517 - DNA, 17 bp, synthetic construct
  source 1..17: mol_type = other DNA
ggtgcccgagcccagga

SEQ ID NO: 141518 - DNA, 17 bp, synthetic construct
  source 1..17: mol_type = other DNA
gtgcccgagcccaggac

SEQ ID NO: 141519 - DNA, 17 bp, synthetic construct
  source 1..17: mol_type = other DNA
tgcccgagcccaggact

SEQ ID NO: 141520 - DNA, 17 bp, synthetic construct
  source 1..17: mol_type = other DNA
gcccgagcccaggactc

SEQ ID NO: 141521 - DNA, 17 bp, synthetic construct
  source 1..17: mol_type = other DNA
cccgagcccaggactcc

SEQ ID NO: 141522 - DNA, 17 bp, synthetic construct
  source 1..17: mol_type = other DNA
ccgagcccaggactcct

SEQ ID NO: 141523 - DNA, 17 bp, synthetic construct
  source 1..17: mol_type = other DNA
cgagcccaggactcctt

SEQ ID NO: 141524 - DNA, 17 bp, synthetic construct
  source 1..17: mol_type = other DNA
gagcccaggactccttg

SEQ ID NO: 141525 - DNA, 17 bp, synthetic construct
  source 1..17: mol_type = other DNA
agcccaggactccttgg

SEQ ID NO: 141526 - DNA, 17 bp, synthetic construct
  source 1..17: mol_type = other DNA
gcccaggactccttgga

SEQ ID NO: 141527 - DNA, 17 bp, synthetic construct
  source 1..17: mol_type = other DNA
cccaggactccttggaa

SEQ ID NO: 141528 - DNA, 17 bp, synthetic construct
  source 1..17: mol_type = other DNA
ccaggactccttggaaa

SEQ ID NO: 141529 - DNA, 17 bp, synthetic construct
  source 1..17: mol_type = other DNA
caggactccttggaaaa

SEQ ID NO: 141530 - DNA, 17 bp, synthetic construct
  source 1..17: mol_type = other DNA
aggactccttggaaaac

SEQ ID NO: 141531 - DNA, 17 bp, synthetic construct
  source 1..17: mol_type = other DNA
ggactccttggaaaaca

SEQ ID NO: 141532 - DNA, 17 bp, synthetic construct
  source 1..17: mol_type = other DNA
gactccttggaaaacat

SEQ ID NO: 141533 - DNA, 17 bp, synthetic construct
  source 1..17: mol_type = other DNA
actccttggaaaacatc

SEQ ID NO: 141534 - DNA, 17 bp, synthetic construct
  source 1..17: mol_type = other DNA
ctccttggaaaacatcc

SEQ ID NO: 141535 - DNA, 17 bp, synthetic construct
  source 1..17: mol_type = other DNA
tccttggaaaacatccc

SEQ ID NO: 141536 - DNA, 17 bp, synthetic construct
  source 1..17: mol_type = other DNA
ccttggaaaacatcccc

SEQ ID NO: 141537 - DNA, 17 bp, synthetic construct
  source 1..17: mol_type = other DNA
cttggaaaacatcccct

SEQ ID NO: 141538 - DNA, 17 bp, synthetic construct
  source 1..17: mol_type = other DNA
ttggaaaacatcccctg

SEQ ID NO: 141539 - DNA, 17 bp, synthetic construct
  source 1..17: mol_type = other DNA
tggaaaacatcccctgc

SEQ ID NO: 141540 - DNA, 17 bp, synthetic construct
  source 1..17: mol_type = other DNA
ggaaaacatcccctgct

SEQ ID NO: 141541 - DNA, 17 bp, synthetic construct
  source 1..17: mol_type = other DNA
gaaaacatcccctgctg

SEQ ID NO: 141542 - DNA, 17 bp, synthetic construct
  source 1..17: mol_type = other DNA
aaaacatcccctgctgc

SEQ ID NO: 141543 - DNA, 17 bp, synthetic construct
  source 1..17: mol_type = other DNA
aaacatcccctgctgct

SEQ ID NO: 141544 - DNA, 17 bp, synthetic construct
  source 1..17: mol_type = other DNA
aacatcccctgctgctc

SEQ ID NO: 141545 - DNA, 17 bp, synthetic construct
  source 1..17: mol_type = other DNA
acatcccctgctgctcc

SEQ ID NO: 141546 - DNA, 17 bp, synthetic construct
  source 1..17: mol_type = other DNA
catcccctgctgctccc

SEQ ID NO: 141547 - DNA, 17 bp, synthetic construct
  source 1..17: mol_type = other DNA
atcccctgctgctccca

SEQ ID NO: 141548 - DNA, 17 bp, synthetic construct
  source 1..17: mol_type = other DNA
tcccctgctgctcccag

SEQ ID NO: 141549 - DNA, 17 bp, synthetic construct
  source 1..17: mol_type = other DNA
cccctgctgctcccaga

SEQ ID NO: 141550 - DNA, 17 bp, synthetic construct
  source 1..17: mol_type = other DNA
ccctgctgctcccagat

SEQ ID NO: 141551 - DNA, 17 bp, synthetic construct
  source 1..17: mol_type = other DNA
cctgctgctcccagatg

SEQ ID NO: 141552 - DNA, 17 bp, synthetic construct
  source 1..17: mol_type = other DNA
ctgctgctcccagatgc

SEQ ID NO: 141553 - DNA, 17 bp, synthetic construct
  source 1..17: mol_type = other DNA
tgctgctcccagatgcc

SEQ ID NO: 141554 - DNA, 17 bp, synthetic construct
  source 1..17: mol_type = other DNA
gctgctcccagatgcct

SEQ ID NO: 141555 - DNA, 17 bp, synthetic construct
  source 1..17: mol_type = other DNA
ctgctcccagatgcctt

SEQ ID NO: 141556 - DNA, 17 bp, synthetic construct
  source 1..17: mol_type = other DNA
tgctcccagatgcctta

SEQ ID NO: 141557 - DNA, 17 bp, synthetic construct
  source 1..17: mol_type = other DNA
gctcccagatgccttag

SEQ ID NO: 141558 - DNA, 17 bp, synthetic construct
  source 1..17: mol_type = other DNA
ctcccagatgccttaga

SEQ ID NO: 141559 - DNA, 17 bp, synthetic construct
  source 1..17: mol_type = other DNA
tcccagatgccttagag

SEQ ID NO: 141560 - DNA, 17 bp, synthetic construct
  source 1..17: mol_type = other DNA
cccagatgccttagaga

SEQ ID NO: 141561 - DNA, 17 bp, synthetic construct
  source 1..17: mol_type = other DNA
ccagatgccttagagac

SEQ ID NO: 141562 - DNA, 17 bp, synthetic construct
  source 1..17: mol_type = other DNA
cagatgccttagagaca

SEQ ID NO: 141563 - DNA, 17 bp, synthetic construct
  source 1..17: mol_type = other DNA
agatgccttagagacag

SEQ ID NO: 141564 - DNA, 17 bp, synthetic construct
  source 1..17: mol_type = other DNA
gatgccttagagacaga

SEQ ID NO: 141565 - DNA, 17 bp, synthetic construct
  source 1..17: mol_type = other DNA
atgccttagagacagag

SEQ ID NO: 141566 - DNA, 17 bp, synthetic construct
  source 1..17: mol_type = other DNA
tgccttagagacagagt

SEQ ID NO: 141567 - DNA, 17 bp, synthetic construct
  source 1..17: mol_type = other DNA
gccttagagacagagtc

SEQ ID NO: 141568 - DNA, 17 bp, synthetic construct
  source 1..17: mol_type = other DNA
ccttagagacagagtca

SEQ ID NO: 141569 - DNA, 17 bp, synthetic construct
  source 1..17: mol_type = other DNA
cttagagacagagtcag

SEQ ID NO: 141570 - DNA, 17 bp, synthetic construct
  source 1..17: mol_type = other DNA
ttagagacagagtcagg

SEQ ID NO: 141571 - DNA, 17 bp, synthetic construct
  source 1..17: mol_type = other DNA
tagagacagagtcaggc

SEQ ID NO: 141572 - DNA, 17 bp, synthetic construct
  source 1..17: mol_type = other DNA
agagacagagtcaggca

SEQ ID NO: 141573 - DNA, 17 bp, synthetic construct
  source 1..17: mol_type = other DNA
gagacagagtcaggcag

SEQ ID NO: 141574 - DNA, 17 bp, synthetic construct
  source 1..17: mol_type = other DNA
agacagagtcaggcagg

SEQ ID NO: 141575 - DNA, 17 bp, synthetic construct
  source 1..17: mol_type = other DNA
gacagagtcaggcaggg

SEQ ID NO: 141576 - DNA, 17 bp, synthetic construct
  source 1..17: mol_type = other DNA
acagagtcaggcagggg

SEQ ID NO: 141577 - DNA, 17 bp, synthetic construct
  source 1..17: mol_type = other DNA
cagagtcaggcaggggg

SEQ ID NO: 141578 - DNA, 17 bp, synthetic construct
  source 1..17: mol_type = other DNA
agagtcaggcagggggc

SEQ ID NO: 141579 - DNA, 17 bp, synthetic construct
  source 1..17: mol_type = other DNA
gagtcaggcagggggcg

SEQ ID NO: 141580 - DNA, 17 bp, synthetic construct
  source 1..17: mol_type = other DNA
agtcaggcagggggcgc

SEQ ID NO: 141581 - DNA, 17 bp, synthetic construct
  source 1..17: mol_type = other DNA
gtcaggcagggggcgca

SEQ ID NO: 141582 - DNA, 17 bp, synthetic construct
  source 1..17: mol_type = other DNA
tcaggcagggggcgcat

SEQ ID NO: 141583 - DNA, 17 bp, synthetic construct
  source 1..17: mol_type = other DNA
caggcagggggcgcatc

SEQ ID NO: 141584 - DNA, 17 bp, synthetic construct
  source 1..17: mol_type = other DNA
aggcagggggcgcatcc

SEQ ID NO: 141585 - DNA, 17 bp, synthetic construct
  source 1..17: mol_type = other DNA
ggcagggggcgcatccc

SEQ ID NO: 141586 - DNA, 17 bp, synthetic construct
  source 1..17: mol_type = other DNA
gcagggggcgcatccct

SEQ ID NO: 141587 - DNA, 17 bp, synthetic construct
  source 1..17: mol_type = other DNA
cagggggcgcatccctg

SEQ ID NO: 141588 - DNA, 17 bp, synthetic construct
  source 1..17: mol_type = other DNA
agggggcgcatccctgg

SEQ ID NO: 141589 - DNA, 17 bp, synthetic construct
  source 1..17: mol_type = other DNA
gggggcgcatccctggc

SEQ ID NO: 141590 - DNA, 17 bp, synthetic construct
  source 1..17: mol_type = other DNA
ggggcgcatccctggcc

SEQ ID NO: 141591 - DNA, 17 bp, synthetic construct
  source 1..17: mol_type = other DNA
gggcgcatccctggcca

SEQ ID NO: 141592 - DNA, 17 bp, synthetic construct
  source 1..17: mol_type = other DNA
ggcgcatccctggccac

SEQ ID NO: 141593 - DNA, 17 bp, synthetic construct
  source 1..17: mol_type = other DNA
gcgcatccctggccacg

SEQ ID NO: 141594 - DNA, 17 bp, synthetic construct
  source 1..17: mol_type = other DNA
cgcatccctggccacgc

SEQ ID NO: 141595 - DNA, 17 bp, synthetic construct
  source 1..17: mol_type = other DNA
gcatccctggccacgcc

SEQ ID NO: 141596 - DNA, 17 bp, synthetic construct
  source 1..17: mol_type = other DNA
catccctggccacgcct

SEQ ID NO: 141597 - DNA, 17 bp, synthetic construct
  source 1..17: mol_type = other DNA
atccctggccacgcctg

SEQ ID NO: 141598 - DNA, 17 bp, synthetic construct
  source 1..17: mol_type = other DNA
tccctggccacgcctgg

SEQ ID NO: 141599 - DNA, 17 bp, synthetic construct
  source 1..17: mol_type = other DNA
ccctggccacgcctggc

SEQ ID NO: 141600 - DNA, 17 bp, synthetic construct
  source 1..17: mol_type = other DNA
cctggccacgcctggcc

SEQ ID NO: 141601 - DNA, 17 bp, synthetic construct
  source 1..17: mol_type = other DNA
ctggccacgcctggccc

SEQ ID NO: 141602 - DNA, 17 bp, synthetic construct
  source 1..17: mol_type = other DNA
tggccacgcctggcccc

SEQ ID NO: 141603 - DNA, 17 bp, synthetic construct
  source 1..17: mol_type = other DNA
ggccacgcctggccccg

SEQ ID NO: 141604 - DNA, 17 bp, synthetic construct
  source 1..17: mol_type = other DNA
gccacgcctggccccgc

SEQ ID NO: 141605 - DNA, 17 bp, synthetic construct
  source 1..17: mol_type = other DNA
ccacgcctggccccgca

SEQ ID NO: 141606 - DNA, 17 bp, synthetic construct
  source 1..17: mol_type = other DNA
cacgcctggccccgcat

SEQ ID NO: 141607 - DNA, 17 bp, synthetic construct
  source 1..17: mol_type = other DNA
acgcctggccccgcatc

SEQ ID NO: 141608 - DNA, 17 bp, synthetic construct
  source 1..17: mol_type = other DNA
cgcctggccccgcatcc

SEQ ID NO: 141609 - DNA, 17 bp, synthetic construct
  source 1..17: mol_type = other DNA
gcctggccccgcatccc

SEQ ID NO: 141610 - DNA, 17 bp, synthetic construct
  source 1..17: mol_type = other DNA
cctggccccgcatcccc

SEQ ID NO: 141611 - DNA, 17 bp, synthetic construct
  source 1..17: mol_type = other DNA
ctggccccgcatcccca

SEQ ID NO: 141612 - DNA, 17 bp, synthetic construct
  source 1..17: mol_type = other DNA
tggccccgcatccccac

SEQ ID NO: 141613 - DNA, 17 bp, synthetic construct
  source 1..17: mol_type = other DNA
ggccccgcatccccacc

SEQ ID NO: 141614 - DNA, 17 bp, synthetic construct
  source 1..17: mol_type = other DNA
gccccgcatccccacct

SEQ ID NO: 141615 - DNA, 17 bp, synthetic construct
  source 1..17: mol_type = other DNA
ccccgcatccccacctg

SEQ ID NO: 141616 - DNA, 17 bp, synthetic construct
  source 1..17: mol_type = other DNA
cccgcatccccacctgg

SEQ ID NO: 141617 - DNA, 17 bp, synthetic construct
  source 1..17: mol_type = other DNA
ccgcatccccacctggc

SEQ ID NO: 141618 - DNA, 17 bp, synthetic construct
  source 1..17: mol_type = other DNA
cgcatccccacctggcc

SEQ ID NO: 141619 - DNA, 17 bp, synthetic construct
  source 1..17: mol_type = other DNA
gcatccccacctggccc

SEQ ID NO: 141620 - DNA, 17 bp, synthetic construct
  source 1..17: mol_type = other DNA
catccccacctggcccc

SEQ ID NO: 141621 - DNA, 17 bp, synthetic construct
  source 1..17: mol_type = other DNA
atccccacctggccccg

SEQ ID NO: 141622 - DNA, 17 bp, synthetic construct
  source 1..17: mol_type = other DNA
tccccacctggccccgc

SEQ ID NO: 141623 - DNA, 17 bp, synthetic construct
  source 1..17: mol_type = other DNA
ccccacctggccccgcc

SEQ ID NO: 141624 - DNA, 17 bp, synthetic construct
  source 1..17: mol_type = other DNA
cccacctggccccgcca

SEQ ID NO: 141625 - DNA, 17 bp, synthetic construct
  source 1..17: mol_type = other DNA
ccacctggccccgccac

SEQ ID NO: 141626 - DNA, 17 bp, synthetic construct
  source 1..17: mol_type = other DNA
cacctggccccgccacc

SEQ ID NO: 141627 - DNA, 17 bp, synthetic construct
  source 1..17: mol_type = other DNA
acctggccccgccaccg

SEQ ID NO: 141628 - DNA, 17 bp, synthetic construct
  source 1..17: mol_type = other DNA
cctggccccgccaccga

SEQ ID NO: 141629 - DNA, 17 bp, synthetic construct
  source 1..17: mol_type = other DNA
ctggccccgccaccgag

SEQ ID NO: 141630 - DNA, 17 bp, synthetic construct
  source 1..17: mol_type = other DNA
tggccccgccaccgagc

SEQ ID NO: 141631 - DNA, 17 bp, synthetic construct
  source 1..17: mol_type = other DNA
ggccccgccaccgagcc

SEQ ID NO: 141632 - DNA, 17 bp, synthetic construct
  source 1..17: mol_type = other DNA
gccccgccaccgagccc

SEQ ID NO: 141633 - DNA, 17 bp, synthetic construct
  source 1..17: mol_type = other DNA
ccccgccaccgagcccc

SEQ ID NO: 141634 - DNA, 17 bp, synthetic construct
  source 1..17: mol_type = other DNA
cccgccaccgagcccca

SEQ ID NO: 141635 - DNA, 17 bp, synthetic construct
  source 1..17: mol_type = other DNA
ccgccaccgagccccac

SEQ ID NO: 141636 - DNA, 17 bp, synthetic construct
  source 1..17: mol_type = other DNA
cgccaccgagccccacc

SEQ ID NO: 141637 - DNA, 17 bp, synthetic construct
  source 1..17: mol_type = other DNA
gccaccgagccccaccc

SEQ ID NO: 141638 - DNA, 17 bp, synthetic construct
  source 1..17: mol_type = other DNA
ccaccgagccccaccca

SEQ ID NO: 141639 - DNA, 17 bp, synthetic construct
  source 1..17: mol_type = other DNA
caccgagccccacccat

SEQ ID NO: 141640 - DNA, 17 bp, synthetic construct
  source 1..17: mol_type = other DNA
accgagccccacccatc

SEQ ID NO: 141641 - DNA, 17 bp, synthetic construct
  source 1..17: mol_type = other DNA
ccgagccccacccatcc

SEQ ID NO: 141642 - DNA, 17 bp, synthetic construct
  source 1..17: mol_type = other DNA
cgagccccacccatccc

SEQ ID NO: 141643 - DNA, 17 bp, synthetic construct
  source 1..17: mol_type = other DNA
gagccccacccatcccc

SEQ ID NO: 141644 - DNA, 17 bp, synthetic construct
  source 1..17: mol_type = other DNA
agccccacccatccccg

SEQ ID NO: 141645 - DNA, 17 bp, synthetic construct
  source 1..17: mol_type = other DNA
gccccacccatccccgc

SEQ ID NO: 141646 - DNA, 17 bp, synthetic construct
  source 1..17: mol_type = other DNA
ccccacccatccccgcc

SEQ ID NO: 141647 - DNA, 17 bp, synthetic construct
  source 1..17: mol_type = other DNA
cccacccatccccgccc

SEQ ID NO: 141648 - DNA, 17 bp, synthetic construct
  source 1..17: mol_type = other DNA
ccacccatccccgccca

SEQ ID NO: 141649 - DNA, 17 bp, synthetic construct
  source 1..17: mol_type = other DNA
cacccatccccgcccat

SEQ ID NO: 141650 - DNA, 17 bp, synthetic construct
  source 1..17: mol_type = other DNA
acccatccccgcccata

SEQ ID NO: 141651 - DNA, 17 bp, synthetic construct
  source 1..17: mol_type = other DNA
cccatccccgcccatac

SEQ ID NO: 141652 - DNA, 17 bp, synthetic construct
  source 1..17: mol_type = other DNA
ccatccccgcccatact

SEQ ID NO: 141653 - DNA, 17 bp, synthetic construct
  source 1..17: mol_type = other DNA
catccccgcccatactt

SEQ ID NO: 141654 - DNA, 17 bp, synthetic construct
  source 1..17: mol_type = other DNA
atccccgcccatactta

SEQ ID NO: 141655 - DNA, 17 bp, synthetic construct
  source 1..17: mol_type = other DNA
tccccgcccatacttag

SEQ ID NO: 141656 - DNA, 17 bp, synthetic construct
  source 1..17: mol_type = other DNA
ccccgcccatacttagc

SEQ ID NO: 141657 - DNA, 17 bp, synthetic construct
  source 1..17: mol_type = other DNA
cccgcccatacttagcc

SEQ ID NO: 141658 - DNA, 17 bp, synthetic construct
  source 1..17: mol_type = other DNA
ccgcccatacttagccc

SEQ ID NO: 141659 - DNA, 17 bp, synthetic construct
  source 1..17: mol_type = other DNA
cgcccatacttagcccc

SEQ ID NO: 141660 - DNA, 17 bp, synthetic construct
  source 1..17: mol_type = other DNA
gcccatacttagccccg

SEQ ID NO: 141661 - DNA, 17 bp, synthetic construct
  source 1..17: mol_type = other DNA
cccatacttagccccgc

SEQ ID NO: 141662 - DNA, 17 bp, synthetic construct
  source 1..17: mol_type = other DNA
ccatacttagccccgcc

SEQ ID NO: 141663 - DNA, 17 bp, synthetic construct
  source 1..17: mol_type = other DNA
catacttagccccgccc

SEQ ID NO: 141664 - DNA, 17 bp, synthetic construct
  source 1..17: mol_type = other DNA
atacttagccccgccca

SEQ ID NO: 141665 - DNA, 17 bp, synthetic construct
  source 1..17: mol_type = other DNA
tacttagccccgcccac

SEQ ID NO: 141666 - DNA, 17 bp, synthetic construct
  source 1..17: mol_type = other DNA
acttagccccgcccacc

SEQ ID NO: 141667 - DNA, 17 bp, synthetic construct
  source 1..17: mol_type = other DNA
cttagccccgcccaccc

SEQ ID NO: 141668 - DNA, 17 bp, synthetic construct
  source 1..17: mol_type = other DNA
ttagccccgcccacccc

SEQ ID NO: 141669 - DNA, 17 bp, synthetic construct
  source 1..17: mol_type = other DNA
tagccccgcccaccccc

SEQ ID NO: 141670 - DNA, 17 bp, synthetic construct
  source 1..17: mol_type = other DNA
agccccgcccaccccca

SEQ ID NO: 141671 - DNA, 17 bp, synthetic construct
  source 1..17: mol_type = other DNA
gccccgcccacccccac

SEQ ID NO: 141672 - DNA, 17 bp, synthetic construct
  source 1..17: mol_type = other DNA
ccccgcccacccccacc

SEQ ID NO: 141673 - DNA, 17 bp, synthetic construct
  source 1..17: mol_type = other DNA
cccgcccacccccaccc

SEQ ID NO: 141674 - DNA, 17 bp, synthetic construct
  source 1..17: mol_type = other DNA
ccgcccacccccacccc

SEQ ID NO: 141675 - DNA, 17 bp, synthetic construct
  source 1..17: mol_type = other DNA
cgcccacccccacccca

SEQ ID NO: 141676 - DNA, 17 bp, synthetic construct
  source 1..17: mol_type = other DNA
gcccacccccaccccag

SEQ ID NO: 141677 - DNA, 17 bp, synthetic construct
  source 1..17: mol_type = other DNA
cccacccccaccccagc

SEQ ID NO: 141678 - DNA, 17 bp, synthetic construct
  source 1..17: mol_type = other DNA
ccacccccaccccagcc

SEQ ID NO: 141679 - DNA, 17 bp, synthetic construct
  source 1..17: mol_type = other DNA
cacccccaccccagccc

SEQ ID NO: 141680 - DNA, 17 bp, synthetic construct
  source 1..17: mol_type = other DNA
acccccaccccagcccc

SEQ ID NO: 141681 - DNA, 17 bp, synthetic construct
  source 1..17: mol_type = other DNA
cccccaccccagcccca

SEQ ID NO: 141682 - DNA, 17 bp, synthetic construct
  source 1..17: mol_type = other DNA
ccccaccccagccccac

SEQ ID NO: 141683 - DNA, 17 bp, synthetic construct
  source 1..17: mol_type = other DNA
cccaccccagccccacc

SEQ ID NO: 141684 - DNA, 17 bp, synthetic construct
  source 1..17: mol_type = other DNA
ccaccccagccccaccc

SEQ ID NO: 141685 - DNA, 17 bp, synthetic construct
  source 1..17: mol_type = other DNA
caccccagccccacccg

SEQ ID NO: 141686 - DNA, 17 bp, synthetic construct
  source 1..17: mol_type = other DNA
accccagccccacccgt

SEQ ID NO: 141687 - DNA, 17 bp, synthetic construct
  source 1..17: mol_type = other DNA
ccccagccccacccgtc

SEQ ID NO: 141688 - DNA, 17 bp, synthetic construct
  source 1..17: mol_type = other DNA
cccagccccacccgtcc

SEQ ID NO: 141689 - DNA, 17 bp, synthetic construct
  source 1..17: mol_type = other DNA
ccagccccacccgtccc

SEQ ID NO: 141690 - DNA, 17 bp, synthetic construct
  source 1..17: mol_type = other DNA
cagccccacccgtcccc

SEQ ID NO: 141691 - DNA, 17 bp, synthetic construct
  source 1..17: mol_type = other DNA
agccccacccgtccccg

SEQ ID NO: 141692 - DNA, 17 bp, synthetic construct
  source 1..17: mol_type = other DNA
gccccacccgtccccgc

SEQ ID NO: 141693 - DNA, 17 bp, synthetic construct
  source 1..17: mol_type = other DNA
ccccacccgtccccgcc

SEQ ID NO: 141694 - DNA, 17 bp, synthetic construct
  source 1..17: mol_type = other DNA
cccacccgtccccgccc

SEQ ID NO: 141695 - DNA, 17 bp, synthetic construct
  source 1..17: mol_type = other DNA
ccacccgtccccgcccc

SEQ ID NO: 141696 - DNA, 17 bp, synthetic construct
  source 1..17: mol_type = other DNA
cacccgtccccgccccc

SEQ ID NO: 141697 - DNA, 17 bp, synthetic construct
  source 1..17: mol_type = other DNA
acccgtccccgccccca

SEQ ID NO: 141698 - DNA, 17 bp, synthetic construct
  source 1..17: mol_type = other DNA
cccgtccccgcccccag

SEQ ID NO: 141699 - DNA, 17 bp, synthetic construct
  source 1..17: mol_type = other DNA
ccgtccccgcccccagc

SEQ ID NO: 141700 - DNA, 17 bp, synthetic construct
  source 1..17: mol_type = other DNA
cgtccccgcccccagcc

SEQ ID NO: 141701 - DNA, 17 bp, synthetic construct
  source 1..17: mol_type = other DNA
gtccccgcccccagccc

SEQ ID NO: 141702 - DNA, 17 bp, synthetic construct
  source 1..17: mol_type = other DNA
tccccgcccccagcccc

SEQ ID NO: 141703 - DNA, 17 bp, synthetic construct
  source 1..17: mol_type = other DNA
ccccgcccccagccccg

SEQ ID NO: 141704 - DNA, 17 bp, synthetic construct
  source 1..17: mol_type = other DNA
cccgcccccagccccgc

SEQ ID NO: 141705 - DNA, 17 bp, synthetic construct
  source 1..17: mol_type = other DNA
ccgcccccagccccgcc

SEQ ID NO: 141706 - DNA, 17 bp, synthetic construct
  source 1..17: mol_type = other DNA
cgcccccagccccgccc

SEQ ID NO: 141707 - DNA, 17 bp, synthetic construct
  source 1..17: mol_type = other DNA
gcccccagccccgccca

SEQ ID NO: 141708 - DNA, 17 bp, synthetic construct
  source 1..17: mol_type = other DNA
cccccagccccgcccac

SEQ ID NO: 141709 - DNA, 17 bp, synthetic construct
  source 1..17: mol_type = other DNA
ccccagccccgcccacc

SEQ ID NO: 141710 - DNA, 17 bp, synthetic construct
  source 1..17: mol_type = other DNA
cccagccccgcccaccc

SEQ ID NO: 141711 - DNA, 17 bp, synthetic construct
  source 1..17: mol_type = other DNA
ccagccccgcccaccct

SEQ ID NO: 141712 - DNA, 17 bp, synthetic construct
  source 1..17: mol_type = other DNA
cagccccgcccaccctg

SEQ ID NO: 141713 - DNA, 17 bp, synthetic construct
  source 1..17: mol_type = other DNA
agccccgcccaccctga

SEQ ID NO: 141714 - DNA, 17 bp, synthetic construct
  source 1..17: mol_type = other DNA
gccccgcccaccctgag

SEQ ID NO: 141715 - DNA, 17 bp, synthetic construct
  source 1..17: mol_type = other DNA
ccccgcccaccctgagc

SEQ ID NO: 141716 - DNA, 17 bp, synthetic construct
  source 1..17: mol_type = other DNA
cccgcccaccctgagcc

SEQ ID NO: 141717 - DNA, 17 bp, synthetic construct
  source 1..17: mol_type = other DNA
ccgcccaccctgagccc

SEQ ID NO: 141718 - DNA, 17 bp, synthetic construct
  source 1..17: mol_type = other DNA
cgcccaccctgagcccc

SEQ ID NO: 141719 - DNA, 17 bp, synthetic construct
  source 1..17: mol_type = other DNA
gcccaccctgagccccg

SEQ ID NO: 141720 - DNA, 17 bp, synthetic construct
  source 1..17: mol_type = other DNA
cccaccctgagccccgc

SEQ ID NO: 141721 - DNA, 17 bp, synthetic construct
  source 1..17: mol_type = other DNA
ccaccctgagccccgca

SEQ ID NO: 141722 - DNA, 17 bp, synthetic construct
  source 1..17: mol_type = other DNA
caccctgagccccgcac

SEQ ID NO: 141723 - DNA, 17 bp, synthetic construct
  source 1..17: mol_type = other DNA
accctgagccccgcact

SEQ ID NO: 141724 - DNA, 17 bp, synthetic construct
  source 1..17: mol_type = other DNA
ccctgagccccgcactc

SEQ ID NO: 141725 - DNA, 17 bp, synthetic construct
  source 1..17: mol_type = other DNA
cctgagccccgcactcc

SEQ ID NO: 141726 - DNA, 17 bp, synthetic construct
  source 1..17: mol_type = other DNA
ctgagccccgcactcca

SEQ ID NO: 141727 - DNA, 17 bp, synthetic construct
  source 1..17: mol_type = other DNA
tgagccccgcactccac

SEQ ID NO: 141728 - DNA, 17 bp, synthetic construct
  source 1..17: mol_type = other DNA
gagccccgcactccacc

SEQ ID NO: 141729 - DNA, 17 bp, synthetic construct
  source 1..17: mol_type = other DNA
agccccgcactccaccc

SEQ ID NO: 141730 - DNA, 17 bp, synthetic construct
  source 1..17: mol_type = other DNA
gccccgcactccaccca

SEQ ID NO: 141731 - DNA, 17 bp, synthetic construct
  source 1..17: mol_type = other DNA
ccccgcactccacccat

SEQ ID NO: 141732 - DNA, 17 bp, synthetic construct
  source 1..17: mol_type = other DNA
cccgcactccacccatt

SEQ ID NO: 141733 - DNA, 17 bp, synthetic construct
  source 1..17: mol_type = other DNA
ccgcactccacccattc

SEQ ID NO: 141734 - DNA, 17 bp, synthetic construct
  source 1..17: mol_type = other DNA
cgcactccacccattca

SEQ ID NO: 141735 - DNA, 17 bp, synthetic construct
  source 1..17: mol_type = other DNA
gcactccacccattcat

SEQ ID NO: 141736 - DNA, 17 bp, synthetic construct
  source 1..17: mol_type = other DNA
cactccacccattcatc

SEQ ID NO: 141737 - DNA, 17 bp, synthetic construct
  source 1..17: mol_type = other DNA
actccacccattcatct

SEQ ID NO: 141738 - DNA, 17 bp, synthetic construct
  source 1..17: mol_type = other DNA
ctccacccattcatctc

SEQ ID NO: 141739 - DNA, 17 bp, synthetic construct
  source 1..17: mol_type = other DNA
tccacccattcatctcc

SEQ ID NO: 141740 - DNA, 17 bp, synthetic construct
  source 1..17: mol_type = other DNA
ccacccattcatctcct

SEQ ID NO: 141741 - DNA, 17 bp, synthetic construct
  source 1..17: mol_type = other DNA
cacccattcatctcctt

SEQ ID NO: 141742 - DNA, 17 bp, synthetic construct
  source 1..17: mol_type = other DNA
acccattcatctccttc

SEQ ID NO: 141743 - DNA, 17 bp, synthetic construct
  source 1..17: mol_type = other DNA
cccattcatctccttcc

SEQ ID NO: 141744 - DNA, 17 bp, synthetic construct
  source 1..17: mol_type = other DNA
ccattcatctccttccc

SEQ ID NO: 141745 - DNA, 17 bp, synthetic construct
  source 1..17: mol_type = other DNA
cattcatctccttccct

SEQ ID NO: 141746 - DNA, 17 bp, synthetic construct
  source 1..17: mol_type = other DNA
attcatctccttccctg

SEQ ID NO: 141747 - DNA, 17 bp, synthetic construct
  source 1..17: mol_type = other DNA
ttcatctccttccctgc

SEQ ID NO: 141748 - DNA, 17 bp, synthetic construct
  source 1..17: mol_type = other DNA
tcatctccttccctgct

SEQ ID NO: 141749 - DNA, 17 bp, synthetic construct
  source 1..17: mol_type = other DNA
catctccttccctgctc

SEQ ID NO: 141750 - DNA, 17 bp, synthetic construct
  source 1..17: mol_type = other DNA
atctccttccctgctcc

SEQ ID NO: 141751 - DNA, 17 bp, synthetic construct
  source 1..17: mol_type = other DNA
tctccttccctgctccc

SEQ ID NO: 141752 - DNA, 17 bp, synthetic construct
  source 1..17: mol_type = other DNA
ctccttccctgctcccc

SEQ ID NO: 141753 - DNA, 17 bp, synthetic construct
  source 1..17: mol_type = other DNA
tccttccctgctcccca

SEQ ID NO: 141754 - DNA, 17 bp, synthetic construct
  source 1..17: mol_type = other DNA
ccttccctgctccccac

SEQ ID NO: 141755 - DNA, 17 bp, synthetic construct
  source 1..17: mol_type = other DNA
cttccctgctccccact

SEQ ID NO: 141756 - DNA, 17 bp, synthetic construct
  source 1..17: mol_type = other DNA
ttccctgctccccactg

SEQ ID NO: 141757 - DNA, 17 bp, synthetic construct
  source 1..17: mol_type = other DNA
tccctgctccccactgc

SEQ ID NO: 141758 - DNA, 17 bp, synthetic construct
  source 1..17: mol_type = other DNA
ccctgctccccactgcc

SEQ ID NO: 141759 - DNA, 17 bp, synthetic construct
  source 1..17: mol_type = other DNA
cctgctccccactgccc

SEQ ID NO: 141760 - DNA, 17 bp, synthetic construct
  source 1..17: mol_type = other DNA
ctgctccccactgccca

SEQ ID NO: 141761 - DNA, 17 bp, synthetic construct
  source 1..17: mol_type = other DNA
tgctccccactgcccat

SEQ ID NO: 141762 - DNA, 17 bp, synthetic construct
  source 1..17: mol_type = other DNA
gctccccactgcccatc

SEQ ID NO: 141763 - DNA, 17 bp, synthetic construct
  source 1..17: mol_type = other DNA
ctccccactgcccatcc

SEQ ID NO: 141764 - DNA, 17 bp, synthetic construct
  source 1..17: mol_type = other DNA
tccccactgcccatcct

SEQ ID NO: 141765 - DNA, 17 bp, synthetic construct
  source 1..17: mol_type = other DNA
ccccactgcccatcctg

SEQ ID NO: 141766 - DNA, 17 bp, synthetic construct
  source 1..17: mol_type = other DNA
cccactgcccatcctgg

SEQ ID NO: 141767 - DNA, 17 bp, synthetic construct
  source 1..17: mol_type = other DNA
ccactgcccatcctggg

SEQ ID NO: 141768 - DNA, 17 bp, synthetic construct
  source 1..17: mol_type = other DNA
cactgcccatcctgggg

SEQ ID NO: 141769 - DNA, 17 bp, synthetic construct
  source 1..17: mol_type = other DNA
actgcccatcctgggga

SEQ ID NO: 141770 - DNA, 17 bp, synthetic construct
  source 1..17: mol_type = other DNA
ctgcccatcctggggac

SEQ ID NO: 141771 - DNA, 17 bp, synthetic construct
  source 1..17: mol_type = other DNA
tgcccatcctggggact

SEQ ID NO: 141772 - DNA, 17 bp, synthetic construct
  source 1..17: mol_type = other DNA
gcccatcctggggactc

SEQ ID NO: 141773 - DNA, 17 bp, synthetic construct
  source 1..17: mol_type = other DNA
cccatcctggggactca

SEQ ID NO: 141774 - DNA, 17 bp, synthetic construct
  source 1..17: mol_type = other DNA
ccatcctggggactcac

SEQ ID NO: 141775 - DNA, 17 bp, synthetic construct
  source 1..17: mol_type = other DNA
catcctggggactcacg

SEQ ID NO: 141776 - DNA, 17 bp, synthetic construct
  source 1..17: mol_type = other DNA
atcctggggactcacgt

SEQ ID NO: 141777 - DNA, 17 bp, synthetic construct
  source 1..17: mol_type = other DNA
tcctggggactcacgtg

SEQ ID NO: 141778 - DNA, 17 bp, synthetic construct
  source 1..17: mol_type = other DNA
cctggggactcacgtgg

SEQ ID NO: 141779 - DNA, 17 bp, synthetic construct
  source 1..17: mol_type = other DNA
ctggggactcacgtgga

SEQ ID NO: 141780 - DNA, 17 bp, synthetic construct
  source 1..17: mol_type = other DNA
tggggactcacgtggat

SEQ ID NO: 141781 - DNA, 17 bp, synthetic construct
  source 1..17: mol_type = other DNA
ggggactcacgtggatg

SEQ ID NO: 141782 - DNA, 17 bp, synthetic construct
  source 1..17: mol_type = other DNA
gggactcacgtggatga

SEQ ID NO: 141783 - DNA, 17 bp, synthetic construct
  source 1..17: mol_type = other DNA
ggactcacgtggatgac

SEQ ID NO: 141784 - DNA, 17 bp, synthetic construct
  source 1..17: mol_type = other DNA
gactcacgtggatgaca

SEQ ID NO: 141785 - DNA, 17 bp, synthetic construct
  source 1..17: mol_type = other DNA
actcacgtggatgacag

SEQ ID NO: 141786 - DNA, 17 bp, synthetic construct
  source 1..17: mol_type = other DNA
ctcacgtggatgacagt

SEQ ID NO: 141787 - DNA, 17 bp, synthetic construct
  source 1..17: mol_type = other DNA
tcacgtggatgacagtg

SEQ ID NO: 141788 - DNA, 17 bp, synthetic construct
  source 1..17: mol_type = other DNA
cacgtggatgacagtgg

SEQ ID NO: 141789 - DNA, 17 bp, synthetic construct
  source 1..17: mol_type = other DNA
acgtggatgacagtgga

SEQ ID NO: 141790 - DNA, 17 bp, synthetic construct
  source 1..17: mol_type = other DNA
cgtggatgacagtggag

SEQ ID NO: 141791 - DNA, 17 bp, synthetic construct
  source 1..17: mol_type = other DNA
gtggatgacagtggagg

SEQ ID NO: 141792 - DNA, 17 bp, synthetic construct
  source 1..17: mol_type = other DNA
tggatgacagtggaggc

SEQ ID NO: 141793 - DNA, 17 bp, synthetic construct
  source 1..17: mol_type = other DNA
ggatgacagtggaggcc

SEQ ID NO: 141794 - DNA, 17 bp, synthetic construct
  source 1..17: mol_type = other DNA
gatgacagtggaggcct

SEQ ID NO: 141795 - DNA, 17 bp, synthetic construct
  source 1..17: mol_type = other DNA
atgacagtggaggcctc

SEQ ID NO: 141796 - DNA, 17 bp, synthetic construct
  source 1..17: mol_type = other DNA
tgacagtggaggcctcc

SEQ ID NO: 141797 - DNA, 17 bp, synthetic construct
  source 1..17: mol_type = other DNA
gacagtggaggcctcct

SEQ ID NO: 141798 - DNA, 17 bp, synthetic construct
  source 1..17: mol_type = other DNA
acagtggaggcctcctg

SEQ ID NO: 141799 - DNA, 17 bp, synthetic construct
  source 1..17: mol_type = other DNA
cagtggaggcctcctgg

SEQ ID NO: 141800 - DNA, 17 bp, synthetic construct
  source 1..17: mol_type = other DNA
agtggaggcctcctgga

SEQ ID NO: 141801 - DNA, 17 bp, synthetic construct
  source 1..17: mol_type = other DNA
gtggaggcctcctggat

SEQ ID NO: 141802 - DNA, 17 bp, synthetic construct
  source 1..17: mol_type = other DNA
tggaggcctcctggatc

SEQ ID NO: 141803 - DNA, 17 bp, synthetic construct
  source 1..17: mol_type = other DNA
ggaggcctcctggatct

SEQ ID NO: 141804 - DNA, 17 bp, synthetic construct
  source 1..17: mol_type = other DNA
gaggcctcctggatctc

SEQ ID NO: 141805 - DNA, 17 bp, synthetic construct
  source 1..17: mol_type = other DNA
aggcctcctggatctct

SEQ ID NO: 141806 - DNA, 17 bp, synthetic construct
  source 1..17: mol_type = other DNA
ggcctcctggatctcta

SEQ ID NO: 141807 - DNA, 17 bp, synthetic construct
  source 1..17: mol_type = other DNA
gcctcctggatctctag

SEQ ID NO: 141808 - DNA, 17 bp, synthetic construct
  source 1..17: mol_type = other DNA
cctcctggatctctagg

SEQ ID NO: 141809 - DNA, 17 bp, synthetic construct
  source 1..17: mol_type = other DNA
ctcctggatctctaggt

SEQ ID NO: 141810 - DNA, 17 bp, synthetic construct
  source 1..17: mol_type = other DNA
tcctggatctctaggtc

SEQ ID NO: 141811 - DNA, 17 bp, synthetic construct
  source 1..17: mol_type = other DNA
cctggatctctaggtct

SEQ ID NO: 141812 - DNA, 17 bp, synthetic construct
  source 1..17: mol_type = other DNA
ctggatctctaggtctc

SEQ ID NO: 141813 - DNA, 17 bp, synthetic construct
  source 1..17: mol_type = other DNA
tggatctctaggtctca

SEQ ID NO: 141814 - DNA, 17 bp, synthetic construct
  source 1..17: mol_type = other DNA
ggatctctaggtctcag

SEQ ID NO: 141815 - DNA, 17 bp, synthetic construct
  source 1..17: mol_type = other DNA
gatctctaggtctcagg

SEQ ID NO: 141816 - DNA, 17 bp, synthetic construct
  source 1..17: mol_type = other DNA
atctctaggtctcaggg

SEQ ID NO: 141817 - DNA, 17 bp, synthetic construct
  source 1..17: mol_type = other DNA
tctctaggtctcagggc

SEQ ID NO: 141818 - DNA, 17 bp, synthetic construct
  source 1..17: mol_type = other DNA
ctctaggtctcagggcc

SEQ ID NO: 141819 - DNA, 17 bp, synthetic construct
  source 1..17: mol_type = other DNA
tctaggtctcagggcct

SEQ ID NO: 141820 - DNA, 17 bp, synthetic construct
  source 1..17: mol_type = other DNA
ctaggtctcagggcctc

SEQ ID NO: 141821 - DNA, 17 bp, synthetic construct
  source 1..17: mol_type = other DNA
taggtctcagggcctct

SEQ ID NO: 141822 - DNA, 17 bp, synthetic construct
  source 1..17: mol_type = other DNA
aggtctcagggcctctc

SEQ ID NO: 141823 - DNA, 17 bp, synthetic construct
  source 1..17: mol_type = other DNA
ggtctcagggcctctct

SEQ ID NO: 141824 - DNA, 17 bp, synthetic construct
  source 1..17: mol_type = other DNA
gtctcagggcctctctt

SEQ ID NO: 141825 - DNA, 17 bp, synthetic construct
  source 1..17: mol_type = other DNA
tctcagggcctctcttg

SEQ ID NO: 141826 - DNA, 17 bp, synthetic construct
  source 1..17: mol_type = other DNA
ctcagggcctctcttgt

SEQ ID NO: 141827 - DNA, 17 bp, synthetic construct
  source 1..17: mol_type = other DNA
tcagggcctctcttgtc

SEQ ID NO: 141828 - DNA, 17 bp, synthetic construct
  source 1..17: mol_type = other DNA
cagggcctctcttgtca

SEQ ID NO: 141829 - DNA, 17 bp, synthetic construct
  source 1..17: mol_type = other DNA
agggcctctcttgtcat

SEQ ID NO: 141830 - DNA, 17 bp, synthetic construct
  source 1..17: mol_type = other DNA
gggcctctcttgtcatc

SEQ ID NO: 141831 - DNA, 17 bp, synthetic construct
  source 1..17: mol_type = other DNA
ggcctctcttgtcatcc

SEQ ID NO: 141832 - DNA, 17 bp, synthetic construct
  source 1..17: mol_type = other DNA
gcctctcttgtcatcct

SEQ ID NO: 141833 - DNA, 17 bp, synthetic construct
  source 1..17: mol_type = other DNA
cctctcttgtcatcctg

SEQ ID NO: 141834 - DNA, 17 bp, synthetic construct
  source 1..17: mol_type = other DNA
ctctcttgtcatcctgc

SEQ ID NO: 141835 - DNA, 17 bp, synthetic construct
  source 1..17: mol_type = other DNA
tctcttgtcatcctgca

SEQ ID NO: 141836 - DNA, 17 bp, synthetic construct
  source 1..17: mol_type = other DNA
ctcttgtcatcctgcag

SEQ ID NO: 141837 - DNA, 17 bp, synthetic construct
  source 1..17: mol_type = other DNA
tcttgtcatcctgcagg

SEQ ID NO: 141838 - DNA, 17 bp, synthetic construct
  source 1..17: mol_type = other DNA
cttgtcatcctgcagga

SEQ ID NO: 141839 - DNA, 17 bp, synthetic construct
  source 1..17: mol_type = other DNA
ttgtcatcctgcaggaa

SEQ ID NO: 141840 - DNA, 17 bp, synthetic construct
  source 1..17: mol_type = other DNA
tgtcatcctgcaggaac

SEQ ID NO: 141841 - DNA, 17 bp, synthetic construct
  source 1..17: mol_type = other DNA
gtcatcctgcaggaacc

SEQ ID NO: 141842 - DNA, 17 bp, synthetic construct
  source 1..17: mol_type = other DNA
tcatcctgcaggaacca

SEQ ID NO: 141843 - DNA, 17 bp, synthetic construct
  source 1..17: mol_type = other DNA
catcctgcaggaaccag

SEQ ID NO: 141844 - DNA, 17 bp, synthetic construct
  source 1..17: mol_type = other DNA
atcctgcaggaaccaga

SEQ ID NO: 141845 - DNA, 17 bp, synthetic construct
  source 1..17: mol_type = other DNA
tcctgcaggaaccagag

SEQ ID NO: 141846 - DNA, 17 bp, synthetic construct
  source 1..17: mol_type = other DNA
cctgcaggaaccagagc

SEQ ID NO: 141847 - DNA, 17 bp, synthetic construct
  source 1..17: mol_type = other DNA
ctgcaggaaccagagcc

SEQ ID NO: 141848 - DNA, 17 bp, synthetic construct
  source 1..17: mol_type = other DNA
tgcaggaaccagagccc

SEQ ID NO: 141849 - DNA, 17 bp, synthetic construct
  source 1..17: mol_type = other DNA
gcaggaaccagagccca

SEQ ID NO: 141850 - DNA, 17 bp, synthetic construct
  source 1..17: mol_type = other DNA
caggaaccagagcccac

SEQ ID NO: 141851 - DNA, 17 bp, synthetic construct
  source 1..17: mol_type = other DNA
aggaaccagagcccaca

SEQ ID NO: 141852 - DNA, 17 bp, synthetic construct
  source 1..17: mol_type = other DNA
ggaaccagagcccacag

SEQ ID NO: 141853 - DNA, 17 bp, synthetic construct
  source 1..17: mol_type = other DNA
gaaccagagcccacagc

SEQ ID NO: 141854 - DNA, 17 bp, synthetic construct
  source 1..17: mol_type = other DNA
aaccagagcccacagct

SEQ ID NO: 141855 - DNA, 17 bp, synthetic construct
  source 1..17: mol_type = other DNA
accagagcccacagctg

SEQ ID NO: 141856 - DNA, 17 bp, synthetic construct
  source 1..17: mol_type = other DNA
ccagagcccacagctgg

SEQ ID NO: 141857 - DNA, 17 bp, synthetic construct
  source 1..17: mol_type = other DNA
cagagcccacagctgga

SEQ ID NO: 141858 - DNA, 17 bp, synthetic construct
  source 1..17: mol_type = other DNA
agagcccacagctggag

SEQ ID NO: 141859 - DNA, 17 bp, synthetic construct
  source 1..17: mol_type = other DNA
gagcccacagctggagg

SEQ ID NO: 141860 - DNA, 17 bp, synthetic construct
  source 1..17: mol_type = other DNA
agcccacagctggaggg

SEQ ID NO: 141861 - DNA, 17 bp, synthetic construct
  source 1..17: mol_type = other DNA
gcccacagctggagggg

SEQ ID NO: 141862 - DNA, 17 bp, synthetic construct
  source 1..17: mol_type = other DNA
cccacagctggagggga

SEQ ID NO: 141863 - DNA, 17 bp, synthetic construct
  source 1..17: mol_type = other DNA
ccacagctggaggggat

SEQ ID NO: 141864 - DNA, 17 bp, synthetic construct
  source 1..17: mol_type = other DNA
cacagctggaggggatg

SEQ ID NO: 141865 - DNA, 17 bp, synthetic construct
  source 1..17: mol_type = other DNA
acagctggaggggatgg

SEQ ID NO: 141866 - DNA, 17 bp, synthetic construct
  source 1..17: mol_type = other DNA
cagctggaggggatggc

SEQ ID NO: 141867 - DNA, 17 bp, synthetic construct
  source 1..17: mol_type = other DNA
agctggaggggatggcg

SEQ ID NO: 141868 - DNA, 17 bp, synthetic construct
  source 1..17: mol_type = other DNA
gctggaggggatggcgg

SEQ ID NO: 141869 - DNA, 17 bp, synthetic construct
  source 1..17: mol_type = other DNA
ctggaggggatggcgga

SEQ ID NO: 141870 - DNA, 17 bp, synthetic construct
  source 1..17: mol_type = other DNA
tggaggggatggcggag

SEQ ID NO: 141871 - DNA, 17 bp, synthetic construct
  source 1..17: mol_type = other DNA
ggaggggatggcggagg

SEQ ID NO: 141872 - DNA, 17 bp, synthetic construct
  source 1..17: mol_type = other DNA
gaggggatggcggaggg

SEQ ID NO: 141873 - DNA, 17 bp, synthetic construct
  source 1..17: mol_type = other DNA
aggggatggcggagggc

SEQ ID NO: 141874 - DNA, 17 bp, synthetic construct
  source 1..17: mol_type = other DNA
ggggatggcggagggct

SEQ ID NO: 141875 - DNA, 17 bp, synthetic construct
  source 1..17: mol_type = other DNA
gggatggcggagggctg

SEQ ID NO: 141876 - DNA, 17 bp, synthetic construct
  source 1..17: mol_type = other DNA
ggatggcggagggctgc

SEQ ID NO: 141877 - DNA, 17 bp, synthetic construct
  source 1..17: mol_type = other DNA
gatggcggagggctgct

SEQ ID NO: 141878 - DNA, 17 bp, synthetic construct
  source 1..17: mol_type = other DNA
atggcggagggctgctt

SEQ ID NO: 141879 - DNA, 17 bp, synthetic construct
  source 1..17: mol_type = other DNA
tggcggagggctgcttc

SEQ ID NO: 141880 - DNA, 17 bp, synthetic construct
  source 1..17: mol_type = other DNA
ggcggagggctgcttct

SEQ ID NO: 141881 - DNA, 17 bp, synthetic construct
  source 1..17: mol_type = other DNA
gcggagggctgcttctg

SEQ ID NO: 141882 - DNA, 17 bp, synthetic construct
  source 1..17: mol_type = other DNA
cggagggctgcttctgc

SEQ ID NO: 141883 - DNA, 17 bp, synthetic construct
  source 1..17: mol_type = other DNA
ggagggctgcttctgcc

SEQ ID NO: 141884 - DNA, 17 bp, synthetic construct
  source 1..17: mol_type = other DNA
gagggctgcttctgccc

SEQ ID NO: 141885 - DNA, 17 bp, synthetic construct
  source 1..17: mol_type = other DNA
agggctgcttctgccct

SEQ ID NO: 141886 - DNA, 17 bp, synthetic construct
  source 1..17: mol_type = other DNA
gggctgcttctgccctg

SEQ ID NO: 141887 - DNA, 17 bp, synthetic construct
  source 1..17: mol_type = other DNA
ggctgcttctgccctga

SEQ ID NO: 141888 - DNA, 17 bp, synthetic construct
  source 1..17: mol_type = other DNA
gctgcttctgccctgag

SEQ ID NO: 141889 - DNA, 17 bp, synthetic construct
  source 1..17: mol_type = other DNA
ctgcttctgccctgagg

SEQ ID NO: 141890 - DNA, 17 bp, synthetic construct
  source 1..17: mol_type = other DNA
tgcttctgccctgagga

SEQ ID NO: 141891 - DNA, 17 bp, synthetic construct
  source 1..17: mol_type = other DNA
gcttctgccctgaggac

SEQ ID NO: 141892 - DNA, 17 bp, synthetic construct
  source 1..17: mol_type = other DNA
cttctgccctgaggacc

SEQ ID NO: 141893 - DNA, 17 bp, synthetic construct
  source 1..17: mol_type = other DNA
ttctgccctgaggacca

SEQ ID NO: 141894 - DNA, 17 bp, synthetic construct
  source 1..17: mol_type = other DNA
tctgccctgaggaccag

SEQ ID NO: 141895 - DNA, 17 bp, synthetic construct
  source 1..17: mol_type = other DNA
ctgccctgaggaccaga

SEQ ID NO: 141896 - DNA, 17 bp, synthetic construct
  source 1..17: mol_type = other DNA
tgccctgaggaccagat

SEQ ID NO: 141897 - DNA, 17 bp, synthetic construct
  source 1..17: mol_type = other DNA
gccctgaggaccagatc

SEQ ID NO: 141898 - DNA, 17 bp, synthetic construct
  source 1..17: mol_type = other DNA
ccctgaggaccagatcc

SEQ ID NO: 141899 - DNA, 17 bp, synthetic construct
  source 1..17: mol_type = other DNA
cctgaggaccagatcct

SEQ ID NO: 141900 - DNA, 17 bp, synthetic construct
  source 1..17: mol_type = other DNA
ctgaggaccagatcctc

SEQ ID NO: 141901 - DNA, 17 bp, synthetic construct
  source 1..17: mol_type = other DNA
tgaggaccagatcctct

SEQ ID NO: 141902 - DNA, 17 bp, synthetic construct
  source 1..17: mol_type = other DNA
gaggaccagatcctctt

SEQ ID NO: 141903 - DNA, 17 bp, synthetic construct
  source 1..17: mol_type = other DNA
aggaccagatcctcttc

SEQ ID NO: 141904 - DNA, 17 bp, synthetic construct
  source 1..17: mol_type = other DNA
ggaccagatcctcttca

SEQ ID NO: 141905 - DNA, 17 bp, synthetic construct
  source 1..17: mol_type = other DNA
gaccagatcctcttcaa

SEQ ID NO: 141906 - DNA, 17 bp, synthetic construct
  source 1..17: mol_type = other DNA
accagatcctcttcaac

SEQ ID NO: 141907 - DNA, 17 bp, synthetic construct
  source 1..17: mol_type = other DNA
ccagatcctcttcaacg

SEQ ID NO: 141908 - DNA, 17 bp, synthetic construct
  source 1..17: mol_type = other DNA
cagatcctcttcaacgc

SEQ ID NO: 141909 - DNA, 17 bp, synthetic construct
  source 1..17: mol_type = other DNA
agatcctcttcaacgca

SEQ ID NO: 141910 - DNA, 17 bp, synthetic construct
  source 1..17: mol_type = other DNA
gatcctcttcaacgcac

SEQ ID NO: 141911 - DNA, 17 bp, synthetic construct
  source 1..17: mol_type = other DNA
atcctcttcaacgcaca

SEQ ID NO: 141912 - DNA, 17 bp, synthetic construct
  source 1..17: mol_type = other DNA
tcctcttcaacgcacac

SEQ ID NO: 141913 - DNA, 17 bp, synthetic construct
  source 1..17: mol_type = other DNA
cctcttcaacgcacaca

SEQ ID NO: 141914 - DNA, 17 bp, synthetic construct
  source 1..17: mol_type = other DNA
ctcttcaacgcacacat

SEQ ID NO: 141915 - DNA, 17 bp, synthetic construct
  source 1..17: mol_type = other DNA
tcttcaacgcacacatg

SEQ ID NO: 141916 - DNA, 17 bp, synthetic construct
  source 1..17: mol_type = other DNA
cttcaacgcacacatgg

SEQ ID NO: 141917 - DNA, 17 bp, synthetic construct
  source 1..17: mol_type = other DNA
ttcaacgcacacatggg

SEQ ID NO: 141918 - DNA, 17 bp, synthetic construct
  source 1..17: mol_type = other DNA
tcaacgcacacatgggc

SEQ ID NO: 141919 - DNA, 17 bp, synthetic construct
  source 1..17: mol_type = other DNA
caacgcacacatgggca

SEQ ID NO: 141920 - DNA, 17 bp, synthetic construct
  source 1..17: mol_type = other DNA
aacgcacacatgggcat

SEQ ID NO: 141921 - DNA, 17 bp, synthetic construct
  source 1..17: mol_type = other DNA
acgcacacatgggcatc

SEQ ID NO: 141922 - DNA, 17 bp, synthetic construct
  source 1..17: mol_type = other DNA
cgcacacatgggcatct

SEQ ID NO: 141923 - DNA, 17 bp, synthetic construct
  source 1..17: mol_type = other DNA
gcacacatgggcatctg

SEQ ID NO: 141924 - DNA, 17 bp, synthetic construct
  source 1..17: mol_type = other DNA
cacacatgggcatctgc

SEQ ID NO: 141925 - DNA, 17 bp, synthetic construct
  source 1..17: mol_type = other DNA
acacatgggcatctgcg

SEQ ID NO: 141926 - DNA, 17 bp, synthetic construct
  source 1..17: mol_type = other DNA
cacatgggcatctgcgt

SEQ ID NO: 141927 - DNA, 17 bp, synthetic construct
  source 1..17: mol_type = other DNA
acatgggcatctgcgtg

SEQ ID NO: 141928 - DNA, 17 bp, synthetic construct
  source 1..17: mol_type = other DNA
catgggcatctgcgtgc

SEQ ID NO: 141929 - DNA, 17 bp, synthetic construct
  source 1..17: mol_type = other DNA
atgggcatctgcgtgca

SEQ ID NO: 141930 - DNA, 17 bp, synthetic construct
  source 1..17: mol_type = other DNA
tgggcatctgcgtgcag

SEQ ID NO: 141931 - DNA, 17 bp, synthetic construct
  source 1..17: mol_type = other DNA
gggcatctgcgtgcagg

SEQ ID NO: 141932 - DNA, 17 bp, synthetic construct
  source 1..17: mol_type = other DNA
ggcatctgcgtgcaggc

SEQ ID NO: 141933 - DNA, 17 bp, synthetic construct
  source 1..17: mol_type = other DNA
gcatctgcgtgcaggcc

SEQ ID NO: 141934 - DNA, 17 bp, synthetic construct
  source 1..17: mol_type = other DNA
catctgcgtgcaggcct

SEQ ID NO: 141935 - DNA, 17 bp, synthetic construct
  source 1..17: mol_type = other DNA
atctgcgtgcaggcctg

SEQ ID NO: 141936 - DNA, 17 bp, synthetic construct
  source 1..17: mol_type = other DNA
tctgcgtgcaggcctgc

SEQ ID NO: 141937 - DNA, 17 bp, synthetic construct
  source 1..17: mol_type = other DNA
ctgcgtgcaggcctgcc

SEQ ID NO: 141938 - DNA, 17 bp, synthetic construct
  source 1..17: mol_type = other DNA
tgcgtgcaggcctgccg

SEQ ID NO: 141939 - DNA, 17 bp, synthetic construct
  source 1..17: mol_type = other DNA
gcgtgcaggcctgccgt

SEQ ID NO: 141940 - DNA, 17 bp, synthetic construct
  source 1..17: mol_type = other DNA
cgtgcaggcctgccgta

SEQ ID NO: 141941 - DNA, 17 bp, synthetic construct
  source 1..17: mol_type = other DNA
gtgcaggcctgccgtaa

SEQ ID NO: 141942 - DNA, 17 bp, synthetic construct
  source 1..17: mol_type = other DNA
tgcaggcctgccgtaag

SEQ ID NO: 141943 - DNA, 17 bp, synthetic construct
  source 1..17: mol_type = other DNA
gcaggcctgccgtaagc

SEQ ID NO: 141944 - DNA, 17 bp, synthetic construct
  source 1..17: mol_type = other DNA
caggcctgccgtaagct

SEQ ID NO: 141945 - DNA, 17 bp, synthetic construct
  source 1..17: mol_type = other DNA
aggcctgccgtaagctc

SEQ ID NO: 141946 - DNA, 17 bp, synthetic construct
  source 1..17: mol_type = other DNA
ggcctgccgtaagctcc

SEQ ID NO: 141947 - DNA, 17 bp, synthetic construct
  source 1..17: mol_type = other DNA
gcctgccgtaagctccg

SEQ ID NO: 141948 - DNA, 17 bp, synthetic construct
  source 1..17: mol_type = other DNA
cctgccgtaagctccgc

SEQ ID NO: 141949 - DNA, 17 bp, synthetic construct
  source 1..17: mol_type = other DNA
ctgccgtaagctccgcc

SEQ ID NO: 141950 - DNA, 17 bp, synthetic construct
  source 1..17: mol_type = other DNA
tgccgtaagctccgcca

SEQ ID NO: 141951 - DNA, 17 bp, synthetic construct
  source 1..17: mol_type = other DNA
gccgtaagctccgccac

SEQ ID NO: 141952 - DNA, 17 bp, synthetic construct
  source 1..17: mol_type = other DNA
ccgtaagctccgccacc

SEQ ID NO: 141953 - DNA, 17 bp, synthetic construct
  source 1..17: mol_type = other DNA
cgtaagctccgccacct

SEQ ID NO: 141954 - DNA, 17 bp, synthetic construct
  source 1..17: mol_type = other DNA
gtaagctccgccacctg

SEQ ID NO: 141955 - DNA, 17 bp, synthetic construct
  source 1..17: mol_type = other DNA
taagctccgccacctgt

SEQ ID NO: 141956 - DNA, 17 bp, synthetic construct
  source 1..17: mol_type = other DNA
aagctccgccacctgtg

SEQ ID NO: 141957 - DNA, 17 bp, synthetic construct
  source 1..17: mol_type = other DNA
agctccgccacctgtgg

SEQ ID NO: 141958 - DNA, 17 bp, synthetic construct
  source 1..17: mol_type = other DNA
gctccgccacctgtggc

SEQ ID NO: 141959 - DNA, 17 bp, synthetic construct
  source 1..17: mol_type = other DNA
ctccgccacctgtggcg

SEQ ID NO: 141960 - DNA, 17 bp, synthetic construct
  source 1..17: mol_type = other DNA
tccgccacctgtggcgg

SEQ ID NO: 141961 - DNA, 17 bp, synthetic construct
  source 1..17: mol_type = other DNA
ccgccacctgtggcggg

SEQ ID NO: 141962 - DNA, 17 bp, synthetic construct
  source 1..17: mol_type = other DNA
cgccacctgtggcggga

SEQ ID NO: 141963 - DNA, 17 bp, synthetic construct
  source 1..17: mol_type = other DNA
gccacctgtggcgggat

SEQ ID NO: 141964 - DNA, 17 bp, synthetic construct
  source 1..17: mol_type = other DNA
ccacctgtggcgggata

SEQ ID NO: 141965 - DNA, 17 bp, synthetic construct
  source 1..17: mol_type = other DNA
cacctgtggcgggatac

SEQ ID NO: 141966 - DNA, 17 bp, synthetic construct
  source 1..17: mol_type = other DNA
acctgtggcgggatacg

SEQ ID NO: 141967 - DNA, 17 bp, synthetic construct
  source 1..17: mol_type = other DNA
cctgtggcgggatacga

SEQ ID NO: 141968 - DNA, 17 bp, synthetic construct
  source 1..17: mol_type = other DNA
ctgtggcgggatacgac

SEQ ID NO: 141969 - DNA, 17 bp, synthetic construct
  source 1..17: mol_type = other DNA
tgtggcgggatacgacc

SEQ ID NO: 141970 - DNA, 17 bp, synthetic construct
  source 1..17: mol_type = other DNA
gtggcgggatacgaccc

SEQ ID NO: 141971 - DNA, 17 bp, synthetic construct
  source 1..17: mol_type = other DNA
tggcgggatacgaccct

SEQ ID NO: 141972 - DNA, 17 bp, synthetic construct
  source 1..17: mol_type = other DNA
ggcgggatacgaccctg

SEQ ID NO: 141973 - DNA, 17 bp, synthetic construct
  source 1..17: mol_type = other DNA
gcgggatacgaccctgg

SEQ ID NO: 141974 - DNA, 17 bp, synthetic construct
  source 1..17: mol_type = other DNA
cgggatacgaccctggg

SEQ ID NO: 141975 - DNA, 17 bp, synthetic construct
  source 1..17: mol_type = other DNA
gggatacgaccctgggc

SEQ ID NO: 141976 - DNA, 17 bp, synthetic construct
  source 1..17: mol_type = other DNA
ggatacgaccctgggcc

SEQ ID NO: 141977 - DNA, 17 bp, synthetic construct
  source 1..17: mol_type = other DNA
gatacgaccctgggccc

SEQ ID NO: 141978 - DNA, 17 bp, synthetic construct
  source 1..17: mol_type = other DNA
atacgaccctgggcccg

SEQ ID NO: 141979 - DNA, 17 bp, synthetic construct
  source 1..17: mol_type = other DNA
tacgaccctgggcccga

SEQ ID NO: 141980 - DNA, 17 bp, synthetic construct
  source 1..17: mol_type = other DNA
acgaccctgggcccgac

SEQ ID NO: 141981 - DNA, 17 bp, synthetic construct
  source 1..17: mol_type = other DNA
cgaccctgggcccgacc

SEQ ID NO: 141982 - DNA, 17 bp, synthetic construct
  source 1..17: mol_type = other DNA
gaccctgggcccgaccc

SEQ ID NO: 141983 - DNA, 17 bp, synthetic construct
  source 1..17: mol_type = other DNA
accctgggcccgaccca

SEQ ID NO: 141984 - DNA, 17 bp, synthetic construct
  source 1..17: mol_type = other DNA
ccctgggcccgacccaa

SEQ ID NO: 141985 - DNA, 17 bp, synthetic construct
  source 1..17: mol_type = other DNA
cctgggcccgacccaag

SEQ ID NO: 141986 - DNA, 17 bp, synthetic construct
  source 1..17: mol_type = other DNA
ctgggcccgacccaagc

SEQ ID NO: 141987 - DNA, 17 bp, synthetic construct
  source 1..17: mol_type = other DNA
tgggcccgacccaagca

SEQ ID NO: 141988 - DNA, 17 bp, synthetic construct
  source 1..17: mol_type = other DNA
gggcccgacccaagcac

SEQ ID NO: 141989 - DNA, 17 bp, synthetic construct
  source 1..17: mol_type = other DNA
ggcccgacccaagcaca

SEQ ID NO: 141990 - DNA, 17 bp, synthetic construct
  source 1..17: mol_type = other DNA
gcccgacccaagcacac

SEQ ID NO: 141991 - DNA, 17 bp, synthetic construct
  source 1..17: mol_type = other DNA
cccgacccaagcacaca

SEQ ID NO: 141992 - DNA, 17 bp, synthetic construct
  source 1..17: mol_type = other DNA
ccgacccaagcacacac

SEQ ID NO: 141993 - DNA, 17 bp, synthetic construct
  source 1..17: mol_type = other DNA
cgacccaagcacacaca

SEQ ID NO: 141994 - DNA, 17 bp, synthetic construct
  source 1..17: mol_type = other DNA
gacccaagcacacacag

SEQ ID NO: 141995 - DNA, 17 bp, synthetic construct
  source 1..17: mol_type = other DNA
acccaagcacacacagg

SEQ ID NO: 141996 - DNA, 17 bp, synthetic construct
  source 1..17: mol_type = other DNA
cccaagcacacacaggg

SEQ ID NO: 141997 - DNA, 17 bp, synthetic construct
  source 1..17: mol_type = other DNA
ccaagcacacacagggt

SEQ ID NO: 141998 - DNA, 17 bp, synthetic construct
  source 1..17: mol_type = other DNA
caagcacacacagggtg

SEQ ID NO: 141999 - DNA, 17 bp, synthetic construct
  source 1..17: mol_type = other DNA
aagcacacacagggtgg

SEQ ID NO: 142000 - DNA, 17 bp, synthetic construct
  source 1..17: mol_type = other DNA
agcacacacagggtggg

SEQ ID NO: 142001 - DNA, 17 bp, synthetic construct
  source 1..17: mol_type = other DNA
gcacacacagggtggga

SEQ ID NO: 142002 - DNA, 17 bp, synthetic construct
  source 1..17: mol_type = other DNA
cacacacagggtgggag

SEQ ID NO: 142003 - DNA, 17 bp, synthetic construct
  source 1..17: mol_type = other DNA
acacacagggtgggagg

SEQ ID NO: 142004 - DNA, 17 bp, synthetic construct
  source 1..17: mol_type = other DNA
cacacagggtgggagga

SEQ ID NO: 142005 - DNA, 17 bp, synthetic construct
  source 1..17: mol_type = other DNA
acacagggtgggaggag

SEQ ID NO: 142006 - DNA, 17 bp, synthetic construct
  source 1..17: mol_type = other DNA
cacagggtgggaggagc

SEQ ID NO: 142007 - DNA, 17 bp, synthetic construct
  source 1..17: mol_type = other DNA
acagggtgggaggagcc

SEQ ID NO: 142008 - DNA, 17 bp, synthetic construct
  source 1..17: mol_type = other DNA
cagggtgggaggagccg

SEQ ID NO: 142009 - DNA, 17 bp, synthetic construct
  source 1..17: mol_type = other DNA
agggtgggaggagccgc

SEQ ID NO: 142010 - DNA, 17 bp, synthetic construct
  source 1..17: mol_type = other DNA
gggtgggaggagccgcc

SEQ ID NO: 142011 - DNA, 17 bp, synthetic construct
  source 1..17: mol_type = other DNA
ggtgggaggagccgccc

SEQ ID NO: 142012 - DNA, 17 bp, synthetic construct
  source 1..17: mol_type = other DNA
gtgggaggagccgccca

SEQ ID NO: 142013 - DNA, 17 bp, synthetic construct
  source 1..17: mol_type = other DNA
tgggaggagccgcccag

SEQ ID NO: 142014 - DNA, 17 bp, synthetic construct
  source 1..17: mol_type = other DNA
gggaggagccgcccagg

SEQ ID NO: 142015 - DNA, 17 bp, synthetic construct
  source 1..17: mol_type = other DNA
ggaggagccgcccagga

SEQ ID NO: 142016 - DNA, 17 bp, synthetic construct
  source 1..17: mol_type = other DNA
gaggagccgcccaggac

SEQ ID NO: 142017 - DNA, 17 bp, synthetic construct
  source 1..17: mol_type = other DNA
aggagccgcccaggacc

SEQ ID NO: 142018 - DNA, 17 bp, synthetic construct
  source 1..17: mol_type = other DNA
ggagccgcccaggacca

SEQ ID NO: 142019 - DNA, 17 bp, synthetic construct
  source 1..17: mol_type = other DNA
gagccgcccaggaccat

SEQ ID NO: 142020 - DNA, 17 bp, synthetic construct
  source 1..17: mol_type = other DNA
agccgcccaggaccatg

SEQ ID NO: 142021 - DNA, 17 bp, synthetic construct
  source 1..17: mol_type = other DNA
gccgcccaggaccatga

SEQ ID NO: 142022 - DNA, 17 bp, synthetic construct
  source 1..17: mol_type = other DNA
ccgcccaggaccatgat

SEQ ID NO: 142023 - DNA, 17 bp, synthetic construct
  source 1..17: mol_type = other DNA
cgcccaggaccatgatg

SEQ ID NO: 142024 - DNA, 17 bp, synthetic construct
  source 1..17: mol_type = other DNA
gcccaggaccatgatgt

SEQ ID NO: 142025 - DNA, 17 bp, synthetic construct
  source 1..17: mol_type = other DNA
cccaggaccatgatgtg

SEQ ID NO: 142026 - DNA, 17 bp, synthetic construct
  source 1..17: mol_type = other DNA
ccaggaccatgatgtgc

SEQ ID NO: 142027 - DNA, 17 bp, synthetic construct
  source 1..17: mol_type = other DNA
caggaccatgatgtgct

SEQ ID NO: 142028 - DNA, 17 bp, synthetic construct
  source 1..17: mol_type = other DNA
aggaccatgatgtgctc

SEQ ID NO: 142029 - DNA, 17 bp, synthetic construct
  source 1..17: mol_type = other DNA
ggaccatgatgtgctct

SEQ ID NO: 142030 - DNA, 17 bp, synthetic construct
  source 1..17: mol_type = other DNA
gaccatgatgtgctctc

SEQ ID NO: 142031 - DNA, 17 bp, synthetic construct
  source 1..17: mol_type = other DNA
accatgatgtgctctcc

SEQ ID NO: 142032 - DNA, 17 bp, synthetic construct
  source 1..17: mol_type = other DNA
ccatgatgtgctctccc

SEQ ID NO: 142033 - DNA, 17 bp, synthetic construct
  source 1..17: mol_type = other DNA
catgatgtgctctcccc

SEQ ID NO: 142034 - DNA, 17 bp, synthetic construct
  source 1..17: mol_type = other DNA
atgatgtgctctcccct

SEQ ID NO: 142035 - DNA, 17 bp, synthetic construct
  source 1..17: mol_type = other DNA
tgatgtgctctcccctc

SEQ ID NO: 142036 - DNA, 17 bp, synthetic construct
  source 1..17: mol_type = other DNA
gatgtgctctcccctct

SEQ ID NO: 142037 - DNA, 17 bp, synthetic construct
  source 1..17: mol_type = other DNA
atgtgctctcccctctc

SEQ ID NO: 142038 - DNA, 17 bp, synthetic construct
  source 1..17: mol_type = other DNA
tgtgctctcccctctcc

SEQ ID NO: 142039 - DNA, 17 bp, synthetic construct
  source 1..17: mol_type = other DNA
gtgctctcccctctccc

SEQ ID NO: 142040 - DNA, 17 bp, synthetic construct
  source 1..17: mol_type = other DNA
tgctctcccctctcccc

SEQ ID NO: 142041 - DNA, 17 bp, synthetic construct
  source 1..17: mol_type = other DNA
gctctcccctctcccca

SEQ ID NO: 142042 - DNA, 17 bp, synthetic construct
  source 1..17: mol_type = other DNA
ctctcccctctccccag

SEQ ID NO: 142043 - DNA, 17 bp, synthetic construct
  source 1..17: mol_type = other DNA
tctcccctctccccagc

SEQ ID NO: 142044 - DNA, 17 bp, synthetic construct
  source 1..17: mol_type = other DNA
ctcccctctccccagct

SEQ ID NO: 142045 - DNA, 17 bp, synthetic construct
  source 1..17: mol_type = other DNA
tcccctctccccagctg

SEQ ID NO: 142046 - DNA, 17 bp, synthetic construct
  source 1..17: mol_type = other DNA
cccctctccccagctga

SEQ ID NO: 142047 - DNA, 17 bp, synthetic construct
  source 1..17: mol_type = other DNA
ccctctccccagctgac

SEQ ID NO: 142048 - DNA, 17 bp, synthetic construct
  source 1..17: mol_type = other DNA
cctctccccagctgacc

SEQ ID NO: 142049 - DNA, 17 bp, synthetic construct
  source 1..17: mol_type = other DNA
ctctccccagctgaccc

SEQ ID NO: 142050 - DNA, 17 bp, synthetic construct
  source 1..17: mol_type = other DNA
tctccccagctgacccc

SEQ ID NO: 142051 - DNA, 17 bp, synthetic construct
  source 1..17: mol_type = other DNA
ctccccagctgaccccc

SEQ ID NO: 142052 - DNA, 17 bp, synthetic construct
  source 1..17: mol_type = other DNA
tccccagctgacccccg

SEQ ID NO: 142053 - DNA, 17 bp, synthetic construct
  source 1..17: mol_type = other DNA
ccccagctgacccccgt

SEQ ID NO: 142054 - DNA, 17 bp, synthetic construct
  source 1..17: mol_type = other DNA
cccagctgacccccgtg

SEQ ID NO: 142055 - DNA, 17 bp, synthetic construct
  source 1..17: mol_type = other DNA
ccagctgacccccgtga

SEQ ID NO: 142056 - DNA, 17 bp, synthetic construct
  source 1..17: mol_type = other DNA
cagctgacccccgtgac

SEQ ID NO: 142057 - DNA, 17 bp, synthetic construct
  source 1..17: mol_type = other DNA
agctgacccccgtgacc

SEQ ID NO: 142058 - DNA, 17 bp, synthetic construct
  source 1..17: mol_type = other DNA
gctgacccccgtgacct

SEQ ID NO: 142059 - DNA, 17 bp, synthetic construct
  source 1..17: mol_type = other DNA
ctgacccccgtgacctg

SEQ ID NO: 142060 - DNA, 17 bp, synthetic construct
  source 1..17: mol_type = other DNA
tgacccccgtgacctgt

SEQ ID NO: 142061 - DNA, 17 bp, synthetic construct
  source 1..17: mol_type = other DNA
gacccccgtgacctgtt

SEQ ID NO: 142062 - DNA, 17 bp, synthetic construct
  source 1..17: mol_type = other DNA
acccccgtgacctgttc

SEQ ID NO: 142063 - DNA, 17 bp, synthetic construct
  source 1..17: mol_type = other DNA
cccccgtgacctgttct

SEQ ID NO: 142064 - DNA, 17 bp, synthetic construct
  source 1..17: mol_type = other DNA
ccccgtgacctgttctg

SEQ ID NO: 142065 - DNA, 17 bp, synthetic construct
  source 1..17: mol_type = other DNA
cccgtgacctgttctgc

SEQ ID NO: 142066 - DNA, 17 bp, synthetic construct
  source 1..17: mol_type = other DNA
ccgtgacctgttctgcc

SEQ ID NO: 142067 - DNA, 17 bp, synthetic construct
  source 1..17: mol_type = other DNA
cgtgacctgttctgccc

SEQ ID NO: 142068 - DNA, 17 bp, synthetic construct
  source 1..17: mol_type = other DNA
gtgacctgttctgcccc

SEQ ID NO: 142069 - DNA, 17 bp, synthetic construct
  source 1..17: mol_type = other DNA
tgacctgttctgcccca

SEQ ID NO: 142070 - DNA, 17 bp, synthetic construct
  source 1..17: mol_type = other DNA
gacctgttctgccccac

SEQ ID NO: 142071 - DNA, 17 bp, synthetic construct
  source 1..17: mol_type = other DNA
acctgttctgccccacc

SEQ ID NO: 142072 - DNA, 17 bp, synthetic construct
  source 1..17: mol_type = other DNA
cctgttctgccccacca

SEQ ID NO: 142073 - DNA, 17 bp, synthetic construct
  source 1..17: mol_type = other DNA
ctgttctgccccaccag

SEQ ID NO: 142074 - DNA, 17 bp, synthetic construct
  source 1..17: mol_type = other DNA
tgttctgccccaccaga

SEQ ID NO: 142075 - DNA, 17 bp, synthetic construct
  source 1..17: mol_type = other DNA
gttctgccccaccagag

SEQ ID NO: 142076 - DNA, 17 bp, synthetic construct
  source 1..17: mol_type = other DNA
ttctgccccaccagagc

SEQ ID NO: 142077 - DNA, 17 bp, synthetic construct
  source 1..17: mol_type = other DNA
tctgccccaccagagca

SEQ ID NO: 142078 - DNA, 17 bp, synthetic construct
  source 1..17: mol_type = other DNA
ctgccccaccagagcat

SEQ ID NO: 142079 - DNA, 17 bp, synthetic construct
  source 1..17: mol_type = other DNA
tgccccaccagagcatg

SEQ ID NO: 142080 - DNA, 17 bp, synthetic construct
  source 1..17: mol_type = other DNA
gccccaccagagcatgg

SEQ ID NO: 142081 - DNA, 17 bp, synthetic construct
  source 1..17: mol_type = other DNA
ccccaccagagcatggg

SEQ ID NO: 142082 - DNA, 17 bp, synthetic construct
  source 1..17: mol_type = other DNA
cccaccagagcatggga

SEQ ID NO: 142083 - DNA, 17 bp, synthetic construct
  source 1..17: mol_type = other DNA
ccaccagagcatgggat

SEQ ID NO: 142084 - DNA, 17 bp, synthetic construct
  source 1..17: mol_type = other DNA
caccagagcatgggatg

SEQ ID NO: 142085 - DNA, 17 bp, synthetic construct
  source 1..17: mol_type = other DNA
accagagcatgggatgg

SEQ ID NO: 142086 - DNA, 17 bp, synthetic construct
  source 1..17: mol_type = other DNA
ccagagcatgggatggc

SEQ ID NO: 142087 - DNA, 17 bp, synthetic construct
  source 1..17: mol_type = other DNA
cagagcatgggatggcc

SEQ ID NO: 142088 - DNA, 17 bp, synthetic construct
  source 1..17: mol_type = other DNA
agagcatgggatggccc

SEQ ID NO: 142089 - DNA, 17 bp, synthetic construct
  source 1..17: mol_type = other DNA
gagcatgggatggcccc

SEQ ID NO: 142090 - DNA, 17 bp, synthetic construct
  source 1..17: mol_type = other DNA
agcatgggatggcccca

SEQ ID NO: 142091 - DNA, 17 bp, synthetic construct
  source 1..17: mol_type = other DNA
gcatgggatggccccag

SEQ ID NO: 142092 - DNA, 17 bp, synthetic construct
  source 1..17: mol_type = other DNA
catgggatggccccaga

SEQ ID NO: 142093 - DNA, 17 bp, synthetic construct
  source 1..17: mol_type = other DNA
atgggatggccccagag

SEQ ID NO: 142094 - DNA, 17 bp, synthetic construct
  source 1..17: mol_type = other DNA
tgggatggccccagagt

SEQ ID NO: 142095 - DNA, 17 bp, synthetic construct
  source 1..17: mol_type = other DNA
gggatggccccagagtg

SEQ ID NO: 142096 - DNA, 17 bp, synthetic construct
  source 1..17: mol_type = other DNA
ggatggccccagagtgg

SEQ ID NO: 142097 - DNA, 17 bp, synthetic construct
  source 1..17: mol_type = other DNA
gatggccccagagtggc

SEQ ID NO: 142098 - DNA, 17 bp, synthetic construct
  source 1..17: mol_type = other DNA
atggccccagagtggcc

SEQ ID NO: 142099 - DNA, 17 bp, synthetic construct
  source 1..17: mol_type = other DNA
tggccccagagtggccc

SEQ ID NO: 142100 - DNA, 17 bp, synthetic construct
  source 1..17: mol_type = other DNA
ggccccagagtggccct

SEQ ID NO: 142101 - DNA, 17 bp, synthetic construct
  source 1..17: mol_type = other DNA
gccccagagtggccctg

SEQ ID NO: 142102 - DNA, 17 bp, synthetic construct
  source 1..17: mol_type = other DNA
ccccagagtggccctga

SEQ ID NO: 142103 - DNA, 17 bp, synthetic construct
  source 1..17: mol_type = other DNA
cccagagtggccctgaa

SEQ ID NO: 142104 - DNA, 17 bp, synthetic construct
  source 1..17: mol_type = other DNA
ccagagtggccctgaac

SEQ ID NO: 142105 - DNA, 17 bp, synthetic construct
  source 1..17: mol_type = other DNA
cagagtggccctgaacc

SEQ ID NO: 142106 - DNA, 17 bp, synthetic construct
  source 1..17: mol_type = other DNA
agagtggccctgaaccc

SEQ ID NO: 142107 - DNA, 17 bp, synthetic construct
  source 1..17: mol_type = other DNA
gagtggccctgaaccct

SEQ ID NO: 142108 - DNA, 17 bp, synthetic construct
  source 1..17: mol_type = other DNA
agtggccctgaaccctg

SEQ ID NO: 142109 - DNA, 17 bp, synthetic construct
  source 1..17: mol_type = other DNA
gtggccctgaaccctgc

SEQ ID NO: 142110 - DNA, 17 bp, synthetic construct
  source 1..17: mol_type = other DNA
tggccctgaaccctgca

SEQ ID NO: 142111 - DNA, 17 bp, synthetic construct
  source 1..17: mol_type = other DNA
ggccctgaaccctgcag

SEQ ID NO: 142112 - DNA, 17 bp, synthetic construct
  source 1..17: mol_type = other DNA
gccctgaaccctgcaga

SEQ ID NO: 142113 - DNA, 17 bp, synthetic construct
  source 1..17: mol_type = other DNA
ccctgaaccctgcagag

SEQ ID NO: 142114 - DNA, 17 bp, synthetic construct
  source 1..17: mol_type = other DNA
cctgaaccctgcagagc

SEQ ID NO: 142115 - DNA, 17 bp, synthetic construct
  source 1..17: mol_type = other DNA
ctgaaccctgcagagcc

SEQ ID NO: 142116 - DNA, 17 bp, synthetic construct
  source 1..17: mol_type = other DNA
tgaaccctgcagagccc

SEQ ID NO: 142117 - DNA, 17 bp, synthetic construct
  source 1..17: mol_type = other DNA
gaaccctgcagagcccc

SEQ ID NO: 142118 - DNA, 17 bp, synthetic construct
  source 1..17: mol_type = other DNA
aaccctgcagagccccc

SEQ ID NO: 142119 - DNA, 17 bp, synthetic construct
  source 1..17: mol_type = other DNA
accctgcagagccccca

SEQ ID NO: 142120 - DNA, 17 bp, synthetic construct
  source 1..17: mol_type = other DNA
ccctgcagagcccccac

SEQ ID NO: 142121 - DNA, 17 bp, synthetic construct
  source 1..17: mol_type = other DNA
cctgcagagcccccacg

SEQ ID NO: 142122 - DNA, 17 bp, synthetic construct
  source 1..17: mol_type = other DNA
ctgcagagcccccacgg

SEQ ID NO: 142123 - DNA, 17 bp, synthetic construct
  source 1..17: mol_type = other DNA
tgcagagcccccacggt

SEQ ID NO: 142124 - DNA, 17 bp, synthetic construct
  source 1..17: mol_type = other DNA
gcagagcccccacggtc

SEQ ID NO: 142125 - DNA, 17 bp, synthetic construct
  source 1..17: mol_type = other DNA
cagagcccccacggtcc

SEQ ID NO: 142126 - DNA, 17 bp, synthetic construct
  source 1..17: mol_type = other DNA
agagcccccacggtccc

SEQ ID NO: 142127 - DNA, 17 bp, synthetic construct
  source 1..17: mol_type = other DNA
gagcccccacggtcccc

SEQ ID NO: 142128 - DNA, 17 bp, synthetic construct
  source 1..17: mol_type = other DNA
agcccccacggtcccct

SEQ ID NO: 142129 - DNA, 17 bp, synthetic construct
  source 1..17: mol_type = other DNA
gcccccacggtcccctg

SEQ ID NO: 142130 - DNA, 17 bp, synthetic construct
  source 1..17: mol_type = other DNA
cccccacggtcccctga

SEQ ID NO: 142131 - DNA, 17 bp, synthetic construct
  source 1..17: mol_type = other DNA
ccccacggtcccctgaa

SEQ ID NO: 142132 - DNA, 17 bp, synthetic construct
  source 1..17: mol_type = other DNA
cccacggtcccctgaag

SEQ ID NO: 142133 - DNA, 17 bp, synthetic construct
  source 1..17: mol_type = other DNA
ccacggtcccctgaagc

SEQ ID NO: 142134 - DNA, 17 bp, synthetic construct
  source 1..17: mol_type = other DNA
cacggtcccctgaagcc

SEQ ID NO: 142135 - DNA, 17 bp, synthetic construct
  source 1..17: mol_type = other DNA
acggtcccctgaagccc

SEQ ID NO: 142136 - DNA, 17 bp, synthetic construct
  source 1..17: mol_type = other DNA
cggtcccctgaagcccc

SEQ ID NO: 142137 - DNA, 17 bp, synthetic construct
  source 1..17: mol_type = other DNA
ggtcccctgaagcccca

SEQ ID NO: 142138 - DNA, 17 bp, synthetic construct
  source 1..17: mol_type = other DNA
gtcccctgaagccccac

SEQ ID NO: 142139 - DNA, 17 bp, synthetic construct
  source 1..17: mol_type = other DNA
tcccctgaagccccaca

SEQ ID NO: 142140 - DNA, 17 bp, synthetic construct
  source 1..17: mol_type = other DNA
cccctgaagccccacag

SEQ ID NO: 142141 - DNA, 17 bp, synthetic construct
  source 1..17: mol_type = other DNA
ccctgaagccccacagg

SEQ ID NO: 142142 - DNA, 17 bp, synthetic construct
  source 1..17: mol_type = other DNA
cctgaagccccacaggg

SEQ ID NO: 142143 - DNA, 17 bp, synthetic construct
  source 1..17: mol_type = other DNA
ctgaagccccacaggga

SEQ ID NO: 142144 - DNA, 17 bp, synthetic construct
  source 1..17: mol_type = other DNA
tgaagccccacagggag

SEQ ID NO: 142145 - DNA, 17 bp, synthetic construct
  source 1..17: mol_type = other DNA
gaagccccacagggagg

SEQ ID NO: 142146 - DNA, 17 bp, synthetic construct
  source 1..17: mol_type = other DNA
aagccccacagggaggc

SEQ ID NO: 142147 - DNA, 17 bp, synthetic construct
  source 1..17: mol_type = other DNA
agccccacagggaggct

SEQ ID NO: 142148 - DNA, 17 bp, synthetic construct
  source 1..17: mol_type = other DNA
gccccacagggaggctc

SEQ ID NO: 142149 - DNA, 17 bp, synthetic construct
  source 1..17: mol_type = other DNA
ccccacagggaggctct

SEQ ID NO: 142150 - DNA, 17 bp, synthetic construct
  source 1..17: mol_type = other DNA
cccacagggaggctctg

SEQ ID NO: 142151 - DNA, 17 bp, synthetic construct
  source 1..17: mol_type = other DNA
ccacagggaggctctgt

SEQ ID NO: 142152 - DNA, 17 bp, synthetic construct
  source 1..17: mol_type = other DNA
cacagggaggctctgtc

SEQ ID NO: 142153 - DNA, 17 bp, synthetic construct
  source 1..17: mol_type = other DNA
acagggaggctctgtcc

SEQ ID NO: 142154 - DNA, 17 bp, synthetic construct
  source 1..17: mol_type = other DNA
cagggaggctctgtcct

SEQ ID NO: 142155 - DNA, 17 bp, synthetic construct
  source 1..17: mol_type = other DNA
agggaggctctgtcctt

SEQ ID NO: 142156 - DNA, 17 bp, synthetic construct
  source 1..17: mol_type = other DNA
gggaggctctgtccttg

SEQ ID NO: 142157 - DNA, 17 bp, synthetic construct
  source 1..17: mol_type = other DNA
ggaggctctgtccttga

SEQ ID NO: 142158 - DNA, 17 bp, synthetic construct
  source 1..17: mol_type = other DNA
gaggctctgtccttgag

SEQ ID NO: 142159 - DNA, 17 bp, synthetic construct
  source 1..17: mol_type = other DNA
aggctctgtccttgagt

SEQ ID NO: 142160 - DNA, 17 bp, synthetic construct
  source 1..17: mol_type = other DNA
ggctctgtccttgagtg

SEQ ID NO: 142161 - DNA, 17 bp, synthetic construct
  source 1..17: mol_type = other DNA
gctctgtccttgagtga

SEQ ID NO: 142162 - DNA, 17 bp, synthetic construct
  source 1..17: mol_type = other DNA
ctctgtccttgagtgat

SEQ ID NO: 142163 - DNA, 17 bp, synthetic construct
  source 1..17: mol_type = other DNA
tctgtccttgagtgatc

SEQ ID NO: 142164 - DNA, 17 bp, synthetic construct
  source 1..17: mol_type = other DNA
ctgtccttgagtgatcc

SEQ ID NO: 142165 - DNA, 17 bp, synthetic construct
  source 1..17: mol_type = other DNA
tgtccttgagtgatcct

SEQ ID NO: 142166 - DNA, 17 bp, synthetic construct
  source 1..17: mol_type = other DNA
gtccttgagtgatcctg

SEQ ID NO: 142167 - DNA, 17 bp, synthetic construct
  source 1..17: mol_type = other DNA
tccttgagtgatcctgt

SEQ ID NO: 142168 - DNA, 17 bp, synthetic construct
  source 1..17: mol_type = other DNA
ccttgagtgatcctgtg

SEQ ID NO: 142169 - DNA, 17 bp, synthetic construct
  source 1..17: mol_type = other DNA
cttgagtgatcctgtga

SEQ ID NO: 142170 - DNA, 17 bp, synthetic construct
  source 1..17: mol_type = other DNA
ttgagtgatcctgtgat

SEQ ID NO: 142171 - DNA, 17 bp, synthetic construct
  source 1..17: mol_type = other DNA
tgagtgatcctgtgatg

SEQ ID NO: 142172 - DNA, 17 bp, synthetic construct
  source 1..17: mol_type = other DNA
gagtgatcctgtgatgg

SEQ ID NO: 142173 - DNA, 17 bp, synthetic construct
  source 1..17: mol_type = other DNA
agtgatcctgtgatggt

SEQ ID NO: 142174 - DNA, 17 bp, synthetic construct
  source 1..17: mol_type = other DNA
gtgatcctgtgatggtc

SEQ ID NO: 142175 - DNA, 17 bp, synthetic construct
  source 1..17: mol_type = other DNA
tgatcctgtgatggtcc

SEQ ID NO: 142176 - DNA, 17 bp, synthetic construct
  source 1..17: mol_type = other DNA
gatcctgtgatggtccc

SEQ ID NO: 142177 - DNA, 17 bp, synthetic construct
  source 1..17: mol_type = other DNA
atcctgtgatggtccct

SEQ ID NO: 142178 - DNA, 17 bp, synthetic construct
  source 1..17: mol_type = other DNA
tcctgtgatggtccctc

SEQ ID NO: 142179 - DNA, 17 bp, synthetic construct
  source 1..17: mol_type = other DNA
cctgtgatggtccctcc

SEQ ID NO: 142180 - DNA, 17 bp, synthetic construct
  source 1..17: mol_type = other DNA
ctgtgatggtccctccc

SEQ ID NO: 142181 - DNA, 17 bp, synthetic construct
  source 1..17: mol_type = other DNA
tgtgatggtccctcccc

SEQ ID NO: 142182 - DNA, 17 bp, synthetic construct
  source 1..17: mol_type = other DNA
gtgatggtccctcccct

SEQ ID NO: 142183 - DNA, 17 bp, synthetic construct
  source 1..17: mol_type = other DNA
tgatggtccctcccctg

SEQ ID NO: 142184 - DNA, 17 bp, synthetic construct
  source 1..17: mol_type = other DNA
gatggtccctcccctga

SEQ ID NO: 142185 - DNA, 17 bp, synthetic construct
  source 1..17: mol_type = other DNA
atggtccctcccctgag

SEQ ID NO: 142186 - DNA, 17 bp, synthetic construct
  source 1..17: mol_type = other DNA
tggtccctcccctgagc

SEQ ID NO: 142187 - DNA, 17 bp, synthetic construct
  source 1..17: mol_type = other DNA
ggtccctcccctgagcc

SEQ ID NO: 142188 - DNA, 17 bp, synthetic construct
  source 1..17: mol_type = other DNA
gtccctcccctgagccc

SEQ ID NO: 142189 - DNA, 17 bp, synthetic construct
  source 1..17: mol_type = other DNA
tccctcccctgagccct

SEQ ID NO: 142190 - DNA, 17 bp, synthetic construct
  source 1..17: mol_type = other DNA
ccctcccctgagccctg

SEQ ID NO: 142191 - DNA, 17 bp, synthetic construct
  source 1..17: mol_type = other DNA
cctcccctgagccctgc

SEQ ID NO: 142192 - DNA, 17 bp, synthetic construct
  source 1..17: mol_type = other DNA
ctcccctgagccctgcc

SEQ ID NO: 142193 - DNA, 17 bp, synthetic construct
  source 1..17: mol_type = other DNA
tcccctgagccctgcct

SEQ ID NO: 142194 - DNA, 17 bp, synthetic construct
  source 1..17: mol_type = other DNA
cccctgagccctgcctc

SEQ ID NO: 142195 - DNA, 17 bp, synthetic construct
  source 1..17: mol_type = other DNA
ccctgagccctgcctcc

SEQ ID NO: 142196 - DNA, 17 bp, synthetic construct
  source 1..17: mol_type = other DNA
cctgagccctgcctccc

SEQ ID NO: 142197 - DNA, 17 bp, synthetic construct
  source 1..17: mol_type = other DNA
ctgagccctgcctccca

SEQ ID NO: 142198 - DNA, 17 bp, synthetic construct
  source 1..17: mol_type = other DNA
tgagccctgcctcccac

SEQ ID NO: 142199 - DNA, 17 bp, synthetic construct
  source 1..17: mol_type = other DNA
gagccctgcctcccacc

SEQ ID NO: 142200 - DNA, 17 bp, synthetic construct
  source 1..17: mol_type = other DNA
agccctgcctcccacca

SEQ ID NO: 142201 - DNA, 17 bp, synthetic construct
  source 1..17: mol_type = other DNA
gccctgcctcccaccac

SEQ ID NO: 142202 - DNA, 17 bp, synthetic construct
  source 1..17: mol_type = other DNA
ccctgcctcccaccacc

SEQ ID NO: 142203 - DNA, 17 bp, synthetic construct
  source 1..17: mol_type = other DNA
cctgcctcccaccacca

SEQ ID NO: 142204 - DNA, 17 bp, synthetic construct
  source 1..17: mol_type = other DNA
ctgcctcccaccaccat

SEQ ID NO: 142205 - DNA, 17 bp, synthetic construct
  source 1..17: mol_type = other DNA
tgcctcccaccaccatg

SEQ ID NO: 142206 - DNA, 17 bp, synthetic construct
  source 1..17: mol_type = other DNA
gcctcccaccaccatgg

SEQ ID NO: 142207 - DNA, 17 bp, synthetic construct
  source 1..17: mol_type = other DNA
cctcccaccaccatgga

SEQ ID NO: 142208 - DNA, 17 bp, synthetic construct
  source 1..17: mol_type = other DNA
ctcccaccaccatggac

SEQ ID NO: 142209 - DNA, 17 bp, synthetic construct
  source 1..17: mol_type = other DNA
tcccaccaccatggacg

SEQ ID NO: 142210 - DNA, 17 bp, synthetic construct
  source 1..17: mol_type = other DNA
cccaccaccatggacga

SEQ ID NO: 142211 - DNA, 17 bp, synthetic construct
  source 1..17: mol_type = other DNA
ccaccaccatggacgag

SEQ ID NO: 142212 - DNA, 17 bp, synthetic construct
  source 1..17: mol_type = other DNA
caccaccatggacgagg

SEQ ID NO: 142213 - DNA, 17 bp, synthetic construct
  source 1..17: mol_type = other DNA
accaccatggacgaggc

SEQ ID NO: 142214 - DNA, 17 bp, synthetic construct
  source 1..17: mol_type = other DNA
ccaccatggacgaggct

SEQ ID NO: 142215 - DNA, 17 bp, synthetic construct
  source 1..17: mol_type = other DNA
caccatggacgaggctt

SEQ ID NO: 142216 - DNA, 17 bp, synthetic construct
  source 1..17: mol_type = other DNA
accatggacgaggcttc

SEQ ID NO: 142217 - DNA, 17 bp, synthetic construct
  source 1..17: mol_type = other DNA
ccatggacgaggcttcc

SEQ ID NO: 142218 - DNA, 17 bp, synthetic construct
  source 1..17: mol_type = other DNA
catggacgaggcttcca

SEQ ID NO: 142219 - DNA, 17 bp, synthetic construct
  source 1..17: mol_type = other DNA
atggacgaggcttccat

SEQ ID NO: 142220 - DNA, 17 bp, synthetic construct
  source 1..17: mol_type = other DNA
tggacgaggcttccatg

SEQ ID NO: 142221 - DNA, 17 bp, synthetic construct
  source 1..17: mol_type = other DNA
ggacgaggcttccatgc

SEQ ID NO: 142222 - DNA, 17 bp, synthetic construct
  source 1..17: mol_type = other DNA
gacgaggcttccatgca

SEQ ID NO: 142223 - DNA, 17 bp, synthetic construct
  source 1..17: mol_type = other DNA
acgaggcttccatgcac

SEQ ID NO: 142224 - DNA, 17 bp, synthetic construct
  source 1..17: mol_type = other DNA
cgaggcttccatgcact

SEQ ID NO: 142225 - DNA, 17 bp, synthetic construct
  source 1..17: mol_type = other DNA
gaggcttccatgcactg

SEQ ID NO: 142226 - DNA, 17 bp, synthetic construct
  source 1..17: mol_type = other DNA
aggcttccatgcactga

SEQ ID NO: 142227 - DNA, 17 bp, synthetic construct
  source 1..17: mol_type = other DNA
ggcttccatgcactgac

SEQ ID NO: 142228 - DNA, 17 bp, synthetic construct
  source 1..17: mol_type = other DNA
gcttccatgcactgaca

SEQ ID NO: 142229 - DNA, 17 bp, synthetic construct
  source 1..17: mol_type = other DNA
cttccatgcactgacag

SEQ ID NO: 142230 - DNA, 17 bp, synthetic construct
  source 1..17: mol_type = other DNA
ttccatgcactgacagc

SEQ ID NO: 142231 - DNA, 17 bp, synthetic construct
  source 1..17: mol_type = other DNA
tccatgcactgacagct

SEQ ID NO: 142232 - DNA, 17 bp, synthetic construct
  source 1..17: mol_type = other DNA
ccatgcactgacagctg

SEQ ID NO: 142233 - DNA, 17 bp, synthetic construct
  source 1..17: mol_type = other DNA
catgcactgacagctgg

SEQ ID NO: 142234 - DNA, 17 bp, synthetic construct
  source 1..17: mol_type = other DNA
atgcactgacagctggg

SEQ ID NO: 142235 - DNA, 17 bp, synthetic construct
  source 1..17: mol_type = other DNA
tgcactgacagctgggc

SEQ ID NO: 142236 - DNA, 17 bp, synthetic construct
  source 1..17: mol_type = other DNA
gcactgacagctgggct

SEQ ID NO: 142237 - DNA, 17 bp, synthetic construct
  source 1..17: mol_type = other DNA
cactgacagctgggctc

SEQ ID NO: 142238 - DNA, 17 bp, synthetic construct
  source 1..17: mol_type = other DNA
actgacagctgggctca

SEQ ID NO: 142239 - DNA, 17 bp, synthetic construct
  source 1..17: mol_type = other DNA
ctgacagctgggctcac

SEQ ID NO: 142240 - DNA, 17 bp, synthetic construct
  source 1..17: mol_type = other DNA
tgacagctgggctcacg

SEQ ID NO: 142241 - DNA, 17 bp, synthetic construct
  source 1..17: mol_type = other DNA
gacagctgggctcacgg

SEQ ID NO: 142242 - DNA, 17 bp, synthetic construct
  source 1..17: mol_type = other DNA
acagctgggctcacggt

SEQ ID NO: 142243 - DNA, 17 bp, synthetic construct
  source 1..17: mol_type = other DNA
cagctgggctcacggtg

SEQ ID NO: 142244 - DNA, 17 bp, synthetic construct
  source 1..17: mol_type = other DNA
agctgggctcacggtgc

SEQ ID NO: 142245 - DNA, 17 bp, synthetic construct
  source 1..17: mol_type = other DNA
gctgggctcacggtgcc

SEQ ID NO: 142246 - DNA, 17 bp, synthetic construct
  source 1..17: mol_type = other DNA
ctgggctcacggtgccc

SEQ ID NO: 142247 - DNA, 17 bp, synthetic construct
  source 1..17: mol_type = other DNA
tgggctcacggtgccct

SEQ ID NO: 142248 - DNA, 17 bp, synthetic construct
  source 1..17: mol_type = other DNA
gggctcacggtgccctg

SEQ ID NO: 142249 - DNA, 17 bp, synthetic construct
  source 1..17: mol_type = other DNA
ggctcacggtgccctgg

SEQ ID NO: 142250 - DNA, 17 bp, synthetic construct
  source 1..17: mol_type = other DNA
gctcacggtgccctggc

SEQ ID NO: 142251 - DNA, 17 bp, synthetic construct
  source 1..17: mol_type = other DNA
ctcacggtgccctggcc

SEQ ID NO: 142252 - DNA, 17 bp, synthetic construct
  source 1..17: mol_type = other DNA
tcacggtgccctggcct

SEQ ID NO: 142253 - DNA, 17 bp, synthetic construct
  source 1..17: mol_type = other DNA
cacggtgccctggcctg

SEQ ID NO: 142254 - DNA, 17 bp, synthetic construct
  source 1..17: mol_type = other DNA
acggtgccctggcctga

SEQ ID NO: 142255 - DNA, 17 bp, synthetic construct
  source 1..17: mol_type = other DNA
cggtgccctggcctgag

SEQ ID NO: 142256 - DNA, 17 bp, synthetic construct
  source 1..17: mol_type = other DNA
ggtgccctggcctgagc

SEQ ID NO: 142257 - DNA, 17 bp, synthetic construct
  source 1..17: mol_type = other DNA
gtgccctggcctgagct

SEQ ID NO: 142258 - DNA, 17 bp, synthetic construct
  source 1..17: mol_type = other DNA
tgccctggcctgagctc

SEQ ID NO: 142259 - DNA, 17 bp, synthetic construct
  source 1..17: mol_type = other DNA
gccctggcctgagctcc

SEQ ID NO: 142260 - DNA, 17 bp, synthetic construct
  source 1..17: mol_type = other DNA
ccctggcctgagctcca

SEQ ID NO: 142261 - DNA, 17 bp, synthetic construct
  source 1..17: mol_type = other DNA
cctggcctgagctccag

SEQ ID NO: 142262 - DNA, 17 bp, synthetic construct
  source 1..17: mol_type = other DNA
ctggcctgagctccagc

SEQ ID NO: 142263 - DNA, 17 bp, synthetic construct
  source 1..17: mol_type = other DNA
tggcctgagctccagcc

SEQ ID NO: 142264 - DNA, 17 bp, synthetic construct
  source 1..17: mol_type = other DNA
ggcctgagctccagcca

SEQ ID NO: 142265 - DNA, 17 bp, synthetic construct
  source 1..17: mol_type = other DNA
gcctgagctccagccac

SEQ ID NO: 142266 - DNA, 17 bp, synthetic construct
  source 1..17: mol_type = other DNA
cctgagctccagccaca

SEQ ID NO: 142267 - DNA, 17 bp, synthetic construct
  source 1..17: mol_type = other DNA
ctgagctccagccacat

SEQ ID NO: 142268 - DNA, 17 bp, synthetic construct
  source 1..17: mol_type = other DNA
tgagctccagccacatc

SEQ ID NO: 142269 - DNA, 17 bp, synthetic construct
  source 1..17: mol_type = other DNA
gagctccagccacatct

SEQ ID NO: 142270 - DNA, 17 bp, synthetic construct
  source 1..17: mol_type = other DNA
agctccagccacatctg

SEQ ID NO: 142271 - DNA, 17 bp, synthetic construct
  source 1..17: mol_type = other DNA
gctccagccacatctga

SEQ ID NO: 142272 - DNA, 17 bp, synthetic construct
  source 1..17: mol_type = other DNA
ctccagccacatctgac

SEQ ID NO: 142273 - DNA, 17 bp, synthetic construct
  source 1..17: mol_type = other DNA
tccagccacatctgaca

SEQ ID NO: 142274 - DNA, 17 bp, synthetic construct
  source 1..17: mol_type = other DNA
ccagccacatctgacac

SEQ ID NO: 142275 - DNA, 17 bp, synthetic construct
  source 1..17: mol_type = other DNA
cagccacatctgacacc

SEQ ID NO: 142276 - DNA, 17 bp, synthetic construct
  source 1..17: mol_type = other DNA
agccacatctgacaccc

SEQ ID NO: 142277 - DNA, 17 bp, synthetic construct
  source 1..17: mol_type = other DNA
gccacatctgacacccc

SEQ ID NO: 142278 - DNA, 17 bp, synthetic construct
  source 1..17: mol_type = other DNA
ccacatctgacacccca

SEQ ID NO: 142279 - DNA, 17 bp, synthetic construct
  source 1..17: mol_type = other DNA
cacatctgacaccccaa

SEQ ID NO: 142280 - DNA, 17 bp, synthetic construct
  source 1..17: mol_type = other DNA
acatctgacaccccaaa

SEQ ID NO: 142281 - DNA, 17 bp, synthetic construct
  source 1..17: mol_type = other DNA
catctgacaccccaaaa

SEQ ID NO: 142282 - DNA, 17 bp, synthetic construct
  source 1..17: mol_type = other DNA
atctgacaccccaaaag

SEQ ID NO: 142283 - DNA, 17 bp, synthetic construct
  source 1..17: mol_type = other DNA
tctgacaccccaaaagt

SEQ ID NO: 142284 - DNA, 17 bp, synthetic construct
  source 1..17: mol_type = other DNA
ctgacaccccaaaagtt

SEQ ID NO: 142285 - DNA, 17 bp, synthetic construct
  source 1..17: mol_type = other DNA
tgacaccccaaaagttc

SEQ ID NO: 142286 - DNA, 17 bp, synthetic construct
  source 1..17: mol_type = other DNA
gacaccccaaaagttct

SEQ ID NO: 142287 - DNA, 17 bp, synthetic construct
  source 1..17: mol_type = other DNA
acaccccaaaagttctc

SEQ ID NO: 142288 - DNA, 17 bp, synthetic construct
  source 1..17: mol_type = other DNA
caccccaaaagttctcc

SEQ ID NO: 142289 - DNA, 17 bp, synthetic construct
  source 1..17: mol_type = other DNA
accccaaaagttctcca

SEQ ID NO: 142290 - DNA, 17 bp, synthetic construct
  source 1..17: mol_type = other DNA
ccccaaaagttctccag

SEQ ID NO: 142291 - DNA, 17 bp, synthetic construct
  source 1..17: mol_type = other DNA
cccaaaagttctccagg

SEQ ID NO: 142292 - DNA, 17 bp, synthetic construct
  source 1..17: mol_type = other DNA
ccaaaagttctccaggg

SEQ ID NO: 142293 - DNA, 17 bp, synthetic construct
  source 1..17: mol_type = other DNA
caaaagttctccagggc

SEQ ID NO: 142294 - DNA, 17 bp, synthetic construct
  source 1..17: mol_type = other DNA
aaaagttctccagggcc

SEQ ID NO: 142295 - DNA, 17 bp, synthetic construct
  source 1..17: mol_type = other DNA
aaagttctccagggcct

SEQ ID NO: 142296 - DNA, 17 bp, synthetic construct
  source 1..17: mol_type = other DNA
aagttctccagggcctt

SEQ ID NO: 142297 - DNA, 17 bp, synthetic construct
  source 1..17: mol_type = other DNA
agttctccagggccttc

SEQ ID NO: 142298 - DNA, 17 bp, synthetic construct
  source 1..17: mol_type = other DNA
gttctccagggccttcc

SEQ ID NO: 142299 - DNA, 17 bp, synthetic construct
  source 1..17: mol_type = other DNA
ttctccagggccttcca

SEQ ID NO: 142300 - DNA, 17 bp, synthetic construct
  source 1..17: mol_type = other DNA
tctccagggccttccat

SEQ ID NO: 142301 - DNA, 17 bp, synthetic construct
  source 1..17: mol_type = other DNA
ctccagggccttccatc

SEQ ID NO: 142302 - DNA, 17 bp, synthetic construct
  source 1..17: mol_type = other DNA
tccagggccttccatcc

SEQ ID NO: 142303 - DNA, 17 bp, synthetic construct
  source 1..17: mol_type = other DNA
ccagggccttccatccc

SEQ ID NO: 142304 - DNA, 17 bp, synthetic construct
  source 1..17: mol_type = other DNA
cagggccttccatcccg

SEQ ID NO: 142305 - DNA, 17 bp, synthetic construct
  source 1..17: mol_type = other DNA
agggccttccatcccgg

SEQ ID NO: 142306 - DNA, 17 bp, synthetic construct
  source 1..17: mol_type = other DNA
gggccttccatcccggg

SEQ ID NO: 142307 - DNA, 17 bp, synthetic construct
  source 1..17: mol_type = other DNA
ggccttccatcccgggg

SEQ ID NO: 142308 - DNA, 17 bp, synthetic construct
  source 1..17: mol_type = other DNA
gccttccatcccggggg

SEQ ID NO: 142309 - DNA, 17 bp, synthetic construct
  source 1..17: mol_type = other DNA
ccttccatcccgggggg

SEQ ID NO: 142310 - DNA, 17 bp, synthetic construct
  source 1..17: mol_type = other DNA
cttccatcccgggggga

SEQ ID NO: 142311 - DNA, 17 bp, synthetic construct
  source 1..17: mol_type = other DNA
ttccatcccggggggaa

SEQ ID NO: 142312 - DNA, 17 bp, synthetic construct
  source 1..17: mol_type = other DNA
tccatcccggggggaag

SEQ ID NO: 142313 - DNA, 17 bp, synthetic construct
  source 1..17: mol_type = other DNA
ccatcccggggggaagc

SEQ ID NO: 142314 - DNA, 17 bp, synthetic construct
  source 1..17: mol_type = other DNA
catcccggggggaagca

SEQ ID NO: 142315 - DNA, 17 bp, synthetic construct
  source 1..17: mol_type = other DNA
atcccggggggaagcag

SEQ ID NO: 142316 - DNA, 17 bp, synthetic construct
  source 1..17: mol_type = other DNA
tcccggggggaagcagg

SEQ ID NO: 142317 - DNA, 17 bp, synthetic construct
  source 1..17: mol_type = other DNA
cccggggggaagcaggc

SEQ ID NO: 142318 - DNA, 17 bp, synthetic construct
  source 1..17: mol_type = other DNA
ccggggggaagcaggct

SEQ ID NO: 142319 - DNA, 17 bp, synthetic construct
  source 1..17: mol_type = other DNA
cggggggaagcaggctc

SEQ ID NO: 142320 - DNA, 17 bp, synthetic construct
  source 1..17: mol_type = other DNA
ggggggaagcaggctcc

SEQ ID NO: 142321 - DNA, 17 bp, synthetic construct
  source 1..17: mol_type = other DNA
gggggaagcaggctcca

SEQ ID NO: 142322 - DNA, 17 bp, synthetic construct
  source 1..17: mol_type = other DNA
ggggaagcaggctccag

SEQ ID NO: 142323 - DNA, 17 bp, synthetic construct
  source 1..17: mol_type = other DNA
gggaagcaggctccagg

SEQ ID NO: 142324 - DNA, 17 bp, synthetic construct
  source 1..17: mol_type = other DNA
ggaagcaggctccaggc

SEQ ID NO: 142325 - DNA, 17 bp, synthetic construct
  source 1..17: mol_type = other DNA
gaagcaggctccaggcc

SEQ ID NO: 142326 - DNA, 17 bp, synthetic construct
  source 1..17: mol_type = other DNA
aagcaggctccaggcct

SEQ ID NO: 142327 - DNA, 17 bp, synthetic construct
  source 1..17: mol_type = other DNA
agcaggctccaggcctg

SEQ ID NO: 142328 - DNA, 17 bp, synthetic construct
  source 1..17: mol_type = other DNA
gcaggctccaggcctga

SEQ ID NO: 142329 - DNA, 17 bp, synthetic construct
  source 1..17: mol_type = other DNA
caggctccaggcctgag

SEQ ID NO: 142330 - DNA, 17 bp, synthetic construct
  source 1..17: mol_type = other DNA
aggctccaggcctgaga

SEQ ID NO: 142331 - DNA, 17 bp, synthetic construct
  source 1..17: mol_type = other DNA
ggctccaggcctgagag

SEQ ID NO: 142332 - DNA, 17 bp, synthetic construct
  source 1..17: mol_type = other DNA
gctccaggcctgagagc

SEQ ID NO: 142333 - DNA, 17 bp, synthetic construct
  source 1..17: mol_type = other DNA
ctccaggcctgagagca

SEQ ID NO: 142334 - DNA, 17 bp, synthetic construct
  source 1..17: mol_type = other DNA
tccaggcctgagagcac

SEQ ID NO: 142335 - DNA, 17 bp, synthetic construct
  source 1..17: mol_type = other DNA
ccaggcctgagagcacc

SEQ ID NO: 142336 - DNA, 17 bp, synthetic construct
  source 1..17: mol_type = other DNA
caggcctgagagcacct

SEQ ID NO: 142337 - DNA, 17 bp, synthetic construct
  source 1..17: mol_type = other DNA
aggcctgagagcacctc

SEQ ID NO: 142338 - DNA, 17 bp, synthetic construct
  source 1..17: mol_type = other DNA
ggcctgagagcacctcc

SEQ ID NO: 142339 - DNA, 17 bp, synthetic construct
  source 1..17: mol_type = other DNA
gcctgagagcacctccc

SEQ ID NO: 142340 - DNA, 17 bp, synthetic construct
  source 1..17: mol_type = other DNA
cctgagagcacctccca

SEQ ID NO: 142341 - DNA, 17 bp, synthetic construct
  source 1..17: mol_type = other DNA
ctgagagcacctcccat

SEQ ID NO: 142342 - DNA, 17 bp, synthetic construct
  source 1..17: mol_type = other DNA
tgagagcacctcccatg

SEQ ID NO: 142343 - DNA, 17 bp, synthetic construct
  source 1..17: mol_type = other DNA
gagagcacctcccatgg

SEQ ID NO: 142344 - DNA, 17 bp, synthetic construct
  source 1..17: mol_type = other DNA
agagcacctcccatggc

SEQ ID NO: 142345 - DNA, 17 bp, synthetic construct
  source 1..17: mol_type = other DNA
gagcacctcccatggcc

SEQ ID NO: 142346 - DNA, 17 bp, synthetic construct
  source 1..17: mol_type = other DNA
agcacctcccatggcca

SEQ ID NO: 142347 - DNA, 17 bp, synthetic construct
  source 1..17: mol_type = other DNA
gcacctcccatggccag

SEQ ID NO: 142348 - DNA, 17 bp, synthetic construct
  source 1..17: mol_type = other DNA
cacctcccatggccaga

SEQ ID NO: 142349 - DNA, 17 bp, synthetic construct
  source 1..17: mol_type = other DNA
acctcccatggccagag

SEQ ID NO: 142350 - DNA, 17 bp, synthetic construct
  source 1..17: mol_type = other DNA
cctcccatggccagagg

SEQ ID NO: 142351 - DNA, 17 bp, synthetic construct
  source 1..17: mol_type = other DNA
ctcccatggccagaggc

SEQ ID NO: 142352 - DNA, 17 bp, synthetic construct
  source 1..17: mol_type = other DNA
tcccatggccagaggcc

SEQ ID NO: 142353 - DNA, 17 bp, synthetic construct
  source 1..17: mol_type = other DNA
cccatggccagaggccc

SEQ ID NO: 142354 - DNA, 17 bp, synthetic construct
  source 1..17: mol_type = other DNA
ccatggccagaggcccc

SEQ ID NO: 142355 - DNA, 17 bp, synthetic construct
  source 1..17: mol_type = other DNA
catggccagaggcccct

SEQ ID NO: 142356 - DNA, 17 bp, synthetic construct
  source 1..17: mol_type = other DNA
atggccagaggcccctc

SEQ ID NO: 142357 - DNA, 17 bp, synthetic construct
  source 1..17: mol_type = other DNA
tggccagaggcccctcc

SEQ ID NO: 142358 - DNA, 17 bp, synthetic construct
  source 1..17: mol_type = other DNA
ggccagaggcccctccg

SEQ ID NO: 142359 - DNA, 17 bp, synthetic construct
  source 1..17: mol_type = other DNA
gccagaggcccctccgc

SEQ ID NO: 142360 - DNA, 17 bp, synthetic construct
  source 1..17: mol_type = other DNA
ccagaggcccctccgcc

SEQ ID NO: 142361 - DNA, 17 bp, synthetic construct
  source 1..17: mol_type = other DNA
cagaggcccctccgcct

SEQ ID NO: 142362 - DNA, 17 bp, synthetic construct
  source 1..17: mol_type = other DNA
agaggcccctccgcctg

SEQ ID NO: 142363 - DNA, 17 bp, synthetic construct
  source 1..17: mol_type = other DNA
gaggcccctccgcctgc

SEQ ID NO: 142364 - DNA, 17 bp, synthetic construct
  source 1..17: mol_type = other DNA
aggcccctccgcctgca

SEQ ID NO: 142365 - DNA, 17 bp, synthetic construct
  source 1..17: mol_type = other DNA
ggcccctccgcctgcaa

SEQ ID NO: 142366 - DNA, 17 bp, synthetic construct
  source 1..17: mol_type = other DNA
gcccctccgcctgcaaa

SEQ ID NO: 142367 - DNA, 17 bp, synthetic construct
  source 1..17: mol_type = other DNA
cccctccgcctgcaaac

SEQ ID NO: 142368 - DNA, 17 bp, synthetic construct
  source 1..17: mol_type = other DNA
ccctccgcctgcaaact

SEQ ID NO: 142369 - DNA, 17 bp, synthetic construct
  source 1..17: mol_type = other DNA
cctccgcctgcaaactc

SEQ ID NO: 142370 - DNA, 17 bp, synthetic construct
  source 1..17: mol_type = other DNA
ctccgcctgcaaactca

SEQ ID NO: 142371 - DNA, 17 bp, synthetic construct
  source 1..17: mol_type = other DNA
tccgcctgcaaactcag

SEQ ID NO: 142372 - DNA, 17 bp, synthetic construct
  source 1..17: mol_type = other DNA
ccgcctgcaaactcagc

SEQ ID NO: 142373 - DNA, 17 bp, synthetic construct
  source 1..17: mol_type = other DNA
cgcctgcaaactcagca

SEQ ID NO: 142374 - DNA, 17 bp, synthetic construct
  source 1..17: mol_type = other DNA
gcctgcaaactcagcac

SEQ ID NO: 142375 - DNA, 17 bp, synthetic construct
  source 1..17: mol_type = other DNA
cctgcaaactcagcacc

SEQ ID NO: 142376 - DNA, 17 bp, synthetic construct
  source 1..17: mol_type = other DNA
ctgcaaactcagcaccc

SEQ ID NO: 142377 - DNA, 17 bp, synthetic construct
  source 1..17: mol_type = other DNA
tgcaaactcagcaccct

SEQ ID NO: 142378 - DNA, 17 bp, synthetic construct
  source 1..17: mol_type = other DNA
gcaaactcagcaccctc

SEQ ID NO: 142379 - DNA, 17 bp, synthetic construct
  source 1..17: mol_type = other DNA
caaactcagcaccctcc

SEQ ID NO: 142380 - DNA, 17 bp, synthetic construct
  source 1..17: mol_type = other DNA
aaactcagcaccctccg

SEQ ID NO: 142381 - DNA, 17 bp, synthetic construct
  source 1..17: mol_type = other DNA
aactcagcaccctccgt

SEQ ID NO: 142382 - DNA, 17 bp, synthetic construct
  source 1..17: mol_type = other DNA
actcagcaccctccgtg

SEQ ID NO: 142383 - DNA, 17 bp, synthetic construct
  source 1..17: mol_type = other DNA
ctcagcaccctccgtga

SEQ ID NO: 142384 - DNA, 17 bp, synthetic construct
  source 1..17: mol_type = other DNA
tcagcaccctccgtgat

SEQ ID NO: 142385 - DNA, 17 bp, synthetic construct
  source 1..17: mol_type = other DNA
cagcaccctccgtgatg

SEQ ID NO: 142386 - DNA, 17 bp, synthetic construct
  source 1..17: mol_type = other DNA
agcaccctccgtgatgc

SEQ ID NO: 142387 - DNA, 17 bp, synthetic construct
  source 1..17: mol_type = other DNA
gcaccctccgtgatgcc

SEQ ID NO: 142388 - DNA, 17 bp, synthetic construct
  source 1..17: mol_type = other DNA
caccctccgtgatgcca

SEQ ID NO: 142389 - DNA, 17 bp, synthetic construct
  source 1..17: mol_type = other DNA
accctccgtgatgccat

SEQ ID NO: 142390 - DNA, 17 bp, synthetic construct
  source 1..17: mol_type = other DNA
ccctccgtgatgccatg

SEQ ID NO: 142391 - DNA, 17 bp, synthetic construct
  source 1..17: mol_type = other DNA
cctccgtgatgccatgc

SEQ ID NO: 142392 - DNA, 17 bp, synthetic construct
  source 1..17: mol_type = other DNA
ctccgtgatgccatgct

SEQ ID NO: 142393 - DNA, 17 bp, synthetic construct
  source 1..17: mol_type = other DNA
tccgtgatgccatgctg

SEQ ID NO: 142394 - DNA, 17 bp, synthetic construct
  source 1..17: mol_type = other DNA
ccgtgatgccatgctgt

SEQ ID NO: 142395 - DNA, 17 bp, synthetic construct
  source 1..17: mol_type = other DNA
cgtgatgccatgctgtt

SEQ ID NO: 142396 - DNA, 17 bp, synthetic construct
  source 1..17: mol_type = other DNA
gtgatgccatgctgttt

SEQ ID NO: 142397 - DNA, 17 bp, synthetic construct
  source 1..17: mol_type = other DNA
tgatgccatgctgtttt

SEQ ID NO: 142398 - DNA, 17 bp, synthetic construct
  source 1..17: mol_type = other DNA
gatgccatgctgttttc

SEQ ID NO: 142399 - DNA, 17 bp, synthetic construct
  source 1..17: mol_type = other DNA
atgccatgctgttttct

SEQ ID NO: 142400 - DNA, 17 bp, synthetic construct
  source 1..17: mol_type = other DNA
tgccatgctgttttctt

SEQ ID NO: 142401 - DNA, 17 bp, synthetic construct
  source 1..17: mol_type = other DNA
gccatgctgttttcttt

SEQ ID NO: 142402 - DNA, 17 bp, synthetic construct
  source 1..17: mol_type = other DNA
ccatgctgttttctttc

SEQ ID NO: 142403 - DNA, 17 bp, synthetic construct
  source 1..17: mol_type = other DNA
catgctgttttctttcc

SEQ ID NO: 142404 - DNA, 17 bp, synthetic construct
  source 1..17: mol_type = other DNA
atgctgttttctttcca

SEQ ID NO: 142405 - DNA, 17 bp, synthetic construct
  source 1..17: mol_type = other DNA
tgctgttttctttccag

SEQ ID NO: 142406 - DNA, 17 bp, synthetic construct
  source 1..17: mol_type = other DNA
gctgttttctttccagc

SEQ ID NO: 142407 - DNA, 17 bp, synthetic construct
  source 1..17: mol_type = other DNA
ctgttttctttccagcc

SEQ ID NO: 142408 - DNA, 17 bp, synthetic construct
  source 1..17: mol_type = other DNA
tgttttctttccagcct

SEQ ID NO: 142409 - DNA, 17 bp, synthetic construct
  source 1..17: mol_type = other DNA
gttttctttccagcctg

SEQ ID NO: 142410 - DNA, 17 bp, synthetic construct
  source 1..17: mol_type = other DNA
ttttctttccagcctgc

SEQ ID NO: 142411 - DNA, 17 bp, synthetic construct
  source 1..17: mol_type = other DNA
tttctttccagcctgcg

SEQ ID NO: 142412 - DNA, 17 bp, synthetic construct
  source 1..17: mol_type = other DNA
ttctttccagcctgcgt

SEQ ID NO: 142413 - DNA, 17 bp, synthetic construct
  source 1..17: mol_type = other DNA
tctttccagcctgcgtg

SEQ ID NO: 142414 - DNA, 17 bp, synthetic construct
  source 1..17: mol_type = other DNA
ctttccagcctgcgtgg

SEQ ID NO: 142415 - DNA, 17 bp, synthetic construct
  source 1..17: mol_type = other DNA
tttccagcctgcgtggg

SEQ ID NO: 142416 - DNA, 17 bp, synthetic construct
  source 1..17: mol_type = other DNA
ttccagcctgcgtggga

SEQ ID NO: 142417 - DNA, 17 bp, synthetic construct
  source 1..17: mol_type = other DNA
tccagcctgcgtgggac

SEQ ID NO: 142418 - DNA, 17 bp, synthetic construct
  source 1..17: mol_type = other DNA
ccagcctgcgtgggacc

SEQ ID NO: 142419 - DNA, 17 bp, synthetic construct
  source 1..17: mol_type = other DNA
cagcctgcgtgggaccc

SEQ ID NO: 142420 - DNA, 17 bp, synthetic construct
  source 1..17: mol_type = other DNA
agcctgcgtgggacccg

SEQ ID NO: 142421 - DNA, 17 bp, synthetic construct
  source 1..17: mol_type = other DNA
gcctgcgtgggacccga

SEQ ID NO: 142422 - DNA, 17 bp, synthetic construct
  source 1..17: mol_type = other DNA
cctgcgtgggacccgat

SEQ ID NO: 142423 - DNA, 17 bp, synthetic construct
  source 1..17: mol_type = other DNA
ctgcgtgggacccgatg

SEQ ID NO: 142424 - DNA, 17 bp, synthetic construct
  source 1..17: mol_type = other DNA
tgcgtgggacccgatgg

SEQ ID NO: 142425 - DNA, 17 bp, synthetic construct
  source 1..17: mol_type = other DNA
gcgtgggacccgatggg

SEQ ID NO: 142426 - DNA, 17 bp, synthetic construct
  source 1..17: mol_type = other DNA
cgtgggacccgatgggt

SEQ ID NO: 142427 - DNA, 17 bp, synthetic construct
  source 1..17: mol_type = other DNA
gtgggacccgatgggtt

SEQ ID NO: 142428 - DNA, 17 bp, synthetic construct
  source 1..17: mol_type = other DNA
tgggacccgatgggttt

SEQ ID NO: 142429 - DNA, 17 bp, synthetic construct
  source 1..17: mol_type = other DNA
gggacccgatgggtttc

SEQ ID NO: 142430 - DNA, 17 bp, synthetic construct
  source 1..17: mol_type = other DNA
ggacccgatgggtttcc

SEQ ID NO: 142431 - DNA, 17 bp, synthetic construct
  source 1..17: mol_type = other DNA
gacccgatgggtttcct

SEQ ID NO: 142432 - DNA, 17 bp, synthetic construct
  source 1..17: mol_type = other DNA
acccgatgggtttccta

SEQ ID NO: 142433 - DNA, 17 bp, synthetic construct
  source 1..17: mol_type = other DNA
cccgatgggtttcctaa

SEQ ID NO: 142434 - DNA, 17 bp, synthetic construct
  source 1..17: mol_type = other DNA
ccgatgggtttcctaaa

SEQ ID NO: 142435 - DNA, 17 bp, synthetic construct
  source 1..17: mol_type = other DNA
cgatgggtttcctaaat

SEQ ID NO: 142436 - DNA, 17 bp, synthetic construct
  source 1..17: mol_type = other DNA
gatgggtttcctaaatt

SEQ ID NO: 142437 - DNA, 17 bp, synthetic construct
  source 1..17: mol_type = other DNA
atgggtttcctaaattt

SEQ ID NO: 142438 - DNA, 17 bp, synthetic construct
  source 1..17: mol_type = other DNA
tgggtttcctaaatttg

SEQ ID NO: 142439 - DNA, 17 bp, synthetic construct
  source 1..17: mol_type = other DNA
gggtttcctaaatttgt

SEQ ID NO: 142440 - DNA, 17 bp, synthetic construct
  source 1..17: mol_type = other DNA
ggtttcctaaatttgtg

SEQ ID NO: 142441 - DNA, 17 bp, synthetic construct
  source 1..17: mol_type = other DNA
gtttcctaaatttgtga

SEQ ID NO: 142442 - DNA, 17 bp, synthetic construct
  source 1..17: mol_type = other DNA
tttcctaaatttgtgag

SEQ ID NO: 142443 - DNA, 17 bp, synthetic construct
  source 1..17: mol_type = other DNA
ttcctaaatttgtgagt

SEQ ID NO: 142444 - DNA, 17 bp, synthetic construct
  source 1..17: mol_type = other DNA
tcctaaatttgtgagtg

SEQ ID NO: 142445 - DNA, 17 bp, synthetic construct
  source 1..17: mol_type = other DNA
cctaaatttgtgagtgg

SEQ ID NO: 142446 - DNA, 17 bp, synthetic construct
  source 1..17: mol_type = other DNA
ctaaatttgtgagtggc

SEQ ID NO: 142447 - DNA, 17 bp, synthetic construct
  source 1..17: mol_type = other DNA
taaatttgtgagtggct

SEQ ID NO: 142448 - DNA, 17 bp, synthetic construct
  source 1..17: mol_type = other DNA
aaatttgtgagtggctc

SEQ ID NO: 142449 - DNA, 17 bp, synthetic construct
  source 1..17: mol_type = other DNA
aatttgtgagtggctcc

SEQ ID NO: 142450 - DNA, 17 bp, synthetic construct
  source 1..17: mol_type = other DNA
atttgtgagtggctcca

SEQ ID NO: 142451 - DNA, 17 bp, synthetic construct
  source 1..17: mol_type = other DNA
tttgtgagtggctccac

SEQ ID NO: 142452 - DNA, 17 bp, synthetic construct
  source 1..17: mol_type = other DNA
ttgtgagtggctccacc

SEQ ID NO: 142453 - DNA, 17 bp, synthetic construct
  source 1..17: mol_type = other DNA
tgtgagtggctccaccc

SEQ ID NO: 142454 - DNA, 17 bp, synthetic construct
  source 1..17: mol_type = other DNA
gtgagtggctccacccc

SEQ ID NO: 142455 - DNA, 17 bp, synthetic construct
  source 1..17: mol_type = other DNA
tgagtggctccaccccc

SEQ ID NO: 142456 - DNA, 17 bp, synthetic construct
  source 1..17: mol_type = other DNA
gagtggctccaccccca

SEQ ID NO: 142457 - DNA, 17 bp, synthetic construct
  source 1..17: mol_type = other DNA
agtggctccacccccac

SEQ ID NO: 142458 - DNA, 17 bp, synthetic construct
  source 1..17: mol_type = other DNA
gtggctccacccccacc

SEQ ID NO: 142459 - DNA, 17 bp, synthetic construct
  source 1..17: mol_type = other DNA
tggctccacccccacct

SEQ ID NO: 142460 - DNA, 17 bp, synthetic construct
  source 1..17: mol_type = other DNA
ggctccacccccacctg

SEQ ID NO: 142461 - DNA, 17 bp, synthetic construct
  source 1..17: mol_type = other DNA
gctccacccccacctgc

SEQ ID NO: 142462 - DNA, 17 bp, synthetic construct
  source 1..17: mol_type = other DNA
ctccacccccacctgcc

SEQ ID NO: 142463 - DNA, 17 bp, synthetic construct
  source 1..17: mol_type = other DNA
tccacccccacctgccc

SEQ ID NO: 142464 - DNA, 17 bp, synthetic construct
  source 1..17: mol_type = other DNA
ccacccccacctgccct

SEQ ID NO: 142465 - DNA, 17 bp, synthetic construct
  source 1..17: mol_type = other DNA
cacccccacctgcccta

SEQ ID NO: 142466 - DNA, 17 bp, synthetic construct
  source 1..17: mol_type = other DNA
acccccacctgccctac

SEQ ID NO: 142467 - DNA, 17 bp, synthetic construct
  source 1..17: mol_type = other DNA
cccccacctgccctacc

SEQ ID NO: 142468 - DNA, 17 bp, synthetic construct
  source 1..17: mol_type = other DNA
ccccacctgccctaccc

SEQ ID NO: 142469 - DNA, 17 bp, synthetic construct
  source 1..17: mol_type = other DNA
cccacctgccctacccc

SEQ ID NO: 142470 - DNA, 17 bp, synthetic construct
  source 1..17: mol_type = other DNA
ccacctgccctacccca

SEQ ID NO: 142471 - DNA, 17 bp, synthetic construct
  source 1..17: mol_type = other DNA
cacctgccctaccccac

SEQ ID NO: 142472 - DNA, 17 bp, synthetic construct
  source 1..17: mol_type = other DNA
acctgccctaccccacc

SEQ ID NO: 142473 - DNA, 17 bp, synthetic construct
  source 1..17: mol_type = other DNA
cctgccctaccccaccc

SEQ ID NO: 142474 - DNA, 17 bp, synthetic construct
  source 1..17: mol_type = other DNA
ctgccctaccccaccct

SEQ ID NO: 142475 - DNA, 17 bp, synthetic construct
  source 1..17: mol_type = other DNA
tgccctaccccaccctc

SEQ ID NO: 142476 - DNA, 17 bp, synthetic construct
  source 1..17: mol_type = other DNA
gccctaccccaccctct

SEQ ID NO: 142477 - DNA, 17 bp, synthetic construct
  source 1..17: mol_type = other DNA
ccctaccccaccctctc

SEQ ID NO: 142478 - DNA, 17 bp, synthetic construct
  source 1..17: mol_type = other DNA
cctaccccaccctctcg

SEQ ID NO: 142479 - DNA, 17 bp, synthetic construct
  source 1..17: mol_type = other DNA
ctaccccaccctctcgc

SEQ ID NO: 142480 - DNA, 17 bp, synthetic construct
  source 1..17: mol_type = other DNA
taccccaccctctcgcg

SEQ ID NO: 142481 - DNA, 17 bp, synthetic construct
  source 1..17: mol_type = other DNA
accccaccctctcgcga

SEQ ID NO: 142482 - DNA, 17 bp, synthetic construct
  source 1..17: mol_type = other DNA
ccccaccctctcgcgag

SEQ ID NO: 142483 - DNA, 17 bp, synthetic construct
  source 1..17: mol_type = other DNA
cccaccctctcgcgagc

SEQ ID NO: 142484 - DNA, 17 bp, synthetic construct
  source 1..17: mol_type = other DNA
ccaccctctcgcgagct

SEQ ID NO: 142485 - DNA, 17 bp, synthetic construct
  source 1..17: mol_type = other DNA
caccctctcgcgagctg

SEQ ID NO: 142486 - DNA, 17 bp, synthetic construct
  source 1..17: mol_type = other DNA
accctctcgcgagctga

SEQ ID NO: 142487 - DNA, 17 bp, synthetic construct
  source 1..17: mol_type = other DNA
ccctctcgcgagctgag

SEQ ID NO: 142488 - DNA, 17 bp, synthetic construct
  source 1..17: mol_type = other DNA
cctctcgcgagctgagg

SEQ ID NO: 142489 - DNA, 17 bp, synthetic construct
  source 1..17: mol_type = other DNA
ctctcgcgagctgaggg

SEQ ID NO: 142490 - DNA, 17 bp, synthetic construct
  source 1..17: mol_type = other DNA
tctcgcgagctgaggga

SEQ ID NO: 142491 - DNA, 17 bp, synthetic construct
  source 1..17: mol_type = other DNA
ctcgcgagctgagggag

SEQ ID NO: 142492 - DNA, 17 bp, synthetic construct
  source 1..17: mol_type = other DNA
tcgcgagctgagggagg

SEQ ID NO: 142493 - DNA, 17 bp, synthetic construct
  source 1..17: mol_type = other DNA
cgcgagctgagggaggg

SEQ ID NO: 142494 - DNA, 17 bp, synthetic construct
  source 1..17: mol_type = other DNA
gcgagctgagggaggga

SEQ ID NO: 142495 - DNA, 17 bp, synthetic construct
  source 1..17: mol_type = other DNA
cgagctgagggagggag

SEQ ID NO: 142496 - DNA, 17 bp, synthetic construct
  source 1..17: mol_type = other DNA
gagctgagggagggagg

SEQ ID NO: 142497 - DNA, 17 bp, synthetic construct
  source 1..17: mol_type = other DNA
agctgagggagggaggg

SEQ ID NO: 142498 - DNA, 17 bp, synthetic construct
  source 1..17: mol_type = other DNA
gctgagggagggaggga

SEQ ID NO: 142499 - DNA, 17 bp, synthetic construct
  source 1..17: mol_type = other DNA
ctgagggagggagggaa

SEQ ID NO: 142500 - DNA, 17 bp, synthetic construct
  source 1..17: mol_type = other DNA
tgagggagggagggaag

SEQ ID NO: 142501 - DNA, 17 bp, synthetic construct
  source 1..17: mol_type = other DNA
gagggagggagggaagg

SEQ ID NO: 142502 - DNA, 17 bp, synthetic construct
  source 1..17: mol_type = other DNA
agggagggagggaagga

SEQ ID NO: 142503 - DNA, 17 bp, synthetic construct
  source 1..17: mol_type = other DNA
gggagggagggaaggag

SEQ ID NO: 142504 - DNA, 17 bp, synthetic construct
  source 1..17: mol_type = other DNA
ggagggagggaaggagc

SEQ ID NO: 142505 - DNA, 17 bp, synthetic construct
  source 1..17: mol_type = other DNA
gagggagggaaggagca

SEQ ID NO: 142506 - DNA, 17 bp, synthetic construct
  source 1..17: mol_type = other DNA
agggagggaaggagcat

SEQ ID NO: 142507 - DNA, 17 bp, synthetic construct
  source 1..17: mol_type = other DNA
gggagggaaggagcatc

SEQ ID NO: 142508 - DNA, 17 bp, synthetic construct
  source 1..17: mol_type = other DNA
ggagggaaggagcatcc

SEQ ID NO: 142509 - DNA, 17 bp, synthetic construct
  source 1..17: mol_type = other DNA
gagggaaggagcatccc

SEQ ID NO: 142510 - DNA, 17 bp, synthetic construct
  source 1..17: mol_type = other DNA
agggaaggagcatcccc

SEQ ID NO: 142511 - DNA, 17 bp, synthetic construct
  source 1..17: mol_type = other DNA
gggaaggagcatcccca

SEQ ID NO: 142512 - DNA, 17 bp, synthetic construct
  source 1..17: mol_type = other DNA
ggaaggagcatccccat

SEQ ID NO: 142513 - DNA, 17 bp, synthetic construct
  source 1..17: mol_type = other DNA
gaaggagcatccccatc

SEQ ID NO: 142514 - DNA, 17 bp, synthetic construct
  source 1..17: mol_type = other DNA
aaggagcatccccatcc

SEQ ID NO: 142515 - DNA, 17 bp, synthetic construct
  source 1..17: mol_type = other DNA
aggagcatccccatccc

SEQ ID NO: 142516 - DNA, 17 bp, synthetic construct
  source 1..17: mol_type = other DNA
ggagcatccccatccca

SEQ ID NO: 142517 - DNA, 17 bp, synthetic construct
  source 1..17: mol_type = other DNA
gagcatccccatcccac

SEQ ID NO: 142518 - DNA, 17 bp, synthetic construct
  source 1..17: mol_type = other DNA
agcatccccatcccaca

SEQ ID NO: 142519 - DNA, 17 bp, synthetic construct
  source 1..17: mol_type = other DNA
gcatccccatcccacag

SEQ ID NO: 142520 - DNA, 17 bp, synthetic construct
  source 1..17: mol_type = other DNA
catccccatcccacagg

SEQ ID NO: 142521 - DNA, 17 bp, synthetic construct
  source 1..17: mol_type = other DNA
atccccatcccacaggg

SEQ ID NO: 142522 - DNA, 17 bp, synthetic construct
  source 1..17: mol_type = other DNA
tccccatcccacagggc

SEQ ID NO: 142523 - DNA, 17 bp, synthetic construct
  source 1..17: mol_type = other DNA
ccccatcccacagggca

SEQ ID NO: 142524 - DNA, 17 bp, synthetic construct
  source 1..17: mol_type = other DNA
cccatcccacagggcag

SEQ ID NO: 142525 - DNA, 17 bp, synthetic construct
  source 1..17: mol_type = other DNA
ccatcccacagggcagc

SEQ ID NO: 142526 - DNA, 17 bp, synthetic construct
  source 1..17: mol_type = other DNA
catcccacagggcagct

SEQ ID NO: 142527 - DNA, 17 bp, synthetic construct
  source 1..17: mol_type = other DNA
atcccacagggcagctg

SEQ ID NO: 142528 - DNA, 17 bp, synthetic construct
  source 1..17: mol_type = other DNA
tcccacagggcagctgt

SEQ ID NO: 142529 - DNA, 17 bp, synthetic construct
  source 1..17: mol_type = other DNA
cccacagggcagctgtg

SEQ ID NO: 142530 - DNA, 17 bp, synthetic construct
  source 1..17: mol_type = other DNA
ccacagggcagctgtgg

SEQ ID NO: 142531 - DNA, 17 bp, synthetic construct
  source 1..17: mol_type = other DNA
cacagggcagctgtggg

SEQ ID NO: 142532 - DNA, 17 bp, synthetic construct
  source 1..17: mol_type = other DNA
acagggcagctgtgggg

SEQ ID NO: 142533 - DNA, 17 bp, synthetic construct
  source 1..17: mol_type = other DNA
cagggcagctgtggggc

SEQ ID NO: 142534 - DNA, 17 bp, synthetic construct
  source 1..17: mol_type = other DNA
agggcagctgtggggcg

SEQ ID NO: 142535 - DNA, 17 bp, synthetic construct
  source 1..17: mol_type = other DNA
gggcagctgtggggcgc

SEQ ID NO: 142536 - DNA, 17 bp, synthetic construct
  source 1..17: mol_type = other DNA
ggcagctgtggggcgcc

SEQ ID NO: 142537 - DNA, 17 bp, synthetic construct
  source 1..17: mol_type = other DNA
gcagctgtggggcgccc

SEQ ID NO: 142538 - DNA, 17 bp, synthetic construct
  source 1..17: mol_type = other DNA
cagctgtggggcgcccg

SEQ ID NO: 142539 - DNA, 17 bp, synthetic construct
  source 1..17: mol_type = other DNA
agctgtggggcgcccga

SEQ ID NO: 142540 - DNA, 17 bp, synthetic construct
  source 1..17: mol_type = other DNA
gctgtggggcgcccgag

SEQ ID NO: 142541 - DNA, 17 bp, synthetic construct
  source 1..17: mol_type = other DNA
ctgtggggcgcccgagt

SEQ ID NO: 142542 - DNA, 17 bp, synthetic construct
  source 1..17: mol_type = other DNA
tgtggggcgcccgagtg

SEQ ID NO: 142543 - DNA, 17 bp, synthetic construct
  source 1..17: mol_type = other DNA
gtggggcgcccgagtgt

SEQ ID NO: 142544 - DNA, 17 bp, synthetic construct
  source 1..17: mol_type = other DNA
tggggcgcccgagtgtg

SEQ ID NO: 142545 - DNA, 17 bp, synthetic construct
  source 1..17: mol_type = other DNA
ggggcgcccgagtgtga

SEQ ID NO: 142546 - DNA, 17 bp, synthetic construct
  source 1..17: mol_type = other DNA
gggcgcccgagtgtgac

SEQ ID NO: 142547 - DNA, 17 bp, synthetic construct
  source 1..17: mol_type = other DNA
ggcgcccgagtgtgacg

SEQ ID NO: 142548 - DNA, 17 bp, synthetic construct
  source 1..17: mol_type = other DNA
gcgcccgagtgtgacgt

SEQ ID NO: 142549 - DNA, 17 bp, synthetic construct
  source 1..17: mol_type = other DNA
cgcccgagtgtgacgtg

SEQ ID NO: 142550 - DNA, 17 bp, synthetic construct
  source 1..17: mol_type = other DNA
gcccgagtgtgacgtgg

SEQ ID NO: 142551 - DNA, 17 bp, synthetic construct
  source 1..17: mol_type = other DNA
cccgagtgtgacgtgga

SEQ ID NO: 142552 - DNA, 17 bp, synthetic construct
  source 1..17: mol_type = other DNA
ccgagtgtgacgtggac

SEQ ID NO: 142553 - DNA, 17 bp, synthetic construct
  source 1..17: mol_type = other DNA
cgagtgtgacgtggacg

SEQ ID NO: 142554 - DNA, 17 bp, synthetic construct
  source 1..17: mol_type = other DNA
gagtgtgacgtggacgt

SEQ ID NO: 142555 - DNA, 17 bp, synthetic construct
  source 1..17: mol_type = other DNA
agtgtgacgtggacgtg

SEQ ID NO: 142556 - DNA, 17 bp, synthetic construct
  source 1..17: mol_type = other DNA
gtgtgacgtggacgtgc

SEQ ID NO: 142557 - DNA, 17 bp, synthetic construct
  source 1..17: mol_type = other DNA
tgtgacgtggacgtgcc

SEQ ID NO: 142558 - DNA, 17 bp, synthetic construct
  source 1..17: mol_type = other DNA
gtgacgtggacgtgcca

SEQ ID NO: 142559 - DNA, 17 bp, synthetic construct
  source 1..17: mol_type = other DNA
tgacgtggacgtgccag

SEQ ID NO: 142560 - DNA, 17 bp, synthetic construct
  source 1..17: mol_type = other DNA
gacgtggacgtgccagt

SEQ ID NO: 142561 - DNA, 17 bp, synthetic construct
  source 1..17: mol_type = other DNA
acgtggacgtgccagtg

SEQ ID NO: 142562 - DNA, 17 bp, synthetic construct
  source 1..17: mol_type = other DNA
cgtggacgtgccagtgg

SEQ ID NO: 142563 - DNA, 17 bp, synthetic construct
  source 1..17: mol_type = other DNA
gtggacgtgccagtggc

SEQ ID NO: 142564 - DNA, 17 bp, synthetic construct
  source 1..17: mol_type = other DNA
tggacgtgccagtggct

SEQ ID NO: 142565 - DNA, 17 bp, synthetic construct
  source 1..17: mol_type = other DNA
ggacgtgccagtggctg

SEQ ID NO: 142566 - DNA, 17 bp, synthetic construct
  source 1..17: mol_type = other DNA
gacgtgccagtggctgg

SEQ ID NO: 142567 - DNA, 17 bp, synthetic construct
  source 1..17: mol_type = other DNA
acgtgccagtggctggt

SEQ ID NO: 142568 - DNA, 17 bp, synthetic construct
  source 1..17: mol_type = other DNA
cgtgccagtggctggtg

SEQ ID NO: 142569 - DNA, 17 bp, synthetic construct
  source 1..17: mol_type = other DNA
gtgccagtggctggtgt

SEQ ID NO: 142570 - DNA, 17 bp, synthetic construct
  source 1..17: mol_type = other DNA
tgccagtggctggtgtg

SEQ ID NO: 142571 - DNA, 17 bp, synthetic construct
  source 1..17: mol_type = other DNA
gccagtggctggtgtgc

SEQ ID NO: 142572 - DNA, 17 bp, synthetic construct
  source 1..17: mol_type = other DNA
ccagtggctggtgtgcg

SEQ ID NO: 142573 - DNA, 17 bp, synthetic construct
  source 1..17: mol_type = other DNA
cagtggctggtgtgcgc

SEQ ID NO: 142574 - DNA, 17 bp, synthetic construct
  source 1..17: mol_type = other DNA
agtggctggtgtgcgct

SEQ ID NO: 142575 - DNA, 17 bp, synthetic construct
  source 1..17: mol_type = other DNA
gtggctggtgtgcgctt

SEQ ID NO: 142576 - DNA, 17 bp, synthetic construct
  source 1..17: mol_type = other DNA
tggctggtgtgcgcttc

SEQ ID NO: 142577 - DNA, 17 bp, synthetic construct
  source 1..17: mol_type = other DNA
ggctggtgtgcgcttcc

SEQ ID NO: 142578 - DNA, 17 bp, synthetic construct
  source 1..17: mol_type = other DNA
gctggtgtgcgcttcct

SEQ ID NO: 142579 - DNA, 17 bp, synthetic construct
  source 1..17: mol_type = other DNA
ctggtgtgcgcttcctg

SEQ ID NO: 142580 - DNA, 17 bp, synthetic construct
  source 1..17: mol_type = other DNA
tggtgtgcgcttcctgc

SEQ ID NO: 142581 - DNA, 17 bp, synthetic construct
  source 1..17: mol_type = other DNA
ggtgtgcgcttcctgcc

SEQ ID NO: 142582 - DNA, 17 bp, synthetic construct
  source 1..17: mol_type = other DNA
gtgtgcgcttcctgccc

SEQ ID NO: 142583 - DNA, 17 bp, synthetic construct
  source 1..17: mol_type = other DNA
tgtgcgcttcctgcccc

SEQ ID NO: 142584 - DNA, 17 bp, synthetic construct
  source 1..17: mol_type = other DNA
gtgcgcttcctgcccca

SEQ ID NO: 142585 - DNA, 17 bp, synthetic construct
  source 1..17: mol_type = other DNA
tgcgcttcctgccccat

SEQ ID NO: 142586 - DNA, 17 bp, synthetic construct
  source 1..17: mol_type = other DNA
gcgcttcctgccccatc

SEQ ID NO: 142587 - DNA, 17 bp, synthetic construct
  source 1..17: mol_type = other DNA
cgcttcctgccccatca

SEQ ID NO: 142588 - DNA, 17 bp, synthetic construct
  source 1..17: mol_type = other DNA
gcttcctgccccatcac

SEQ ID NO: 142589 - DNA, 17 bp, synthetic construct
  source 1..17: mol_type = other DNA
cttcctgccccatcact

SEQ ID NO: 142590 - DNA, 17 bp, synthetic construct
  source 1..17: mol_type = other DNA
ttcctgccccatcactc

SEQ ID NO: 142591 - DNA, 17 bp, synthetic construct
  source 1..17: mol_type = other DNA
tcctgccccatcactct

SEQ ID NO: 142592 - DNA, 17 bp, synthetic construct
  source 1..17: mol_type = other DNA
cctgccccatcactctg

SEQ ID NO: 142593 - DNA, 17 bp, synthetic construct
  source 1..17: mol_type = other DNA
ctgccccatcactctgg

SEQ ID NO: 142594 - DNA, 17 bp, synthetic construct
  source 1..17: mol_type = other DNA
tgccccatcactctggg

SEQ ID NO: 142595 - DNA, 17 bp, synthetic construct
  source 1..17: mol_type = other DNA
gccccatcactctgggc

SEQ ID NO: 142596 - DNA, 17 bp, synthetic construct
  source 1..17: mol_type = other DNA
ccccatcactctgggcc

SEQ ID NO: 142597 - DNA, 17 bp, synthetic construct
  source 1..17: mol_type = other DNA
cccatcactctgggcca

SEQ ID NO: 142598 - DNA, 17 bp, synthetic construct
  source 1..17: mol_type = other DNA
ccatcactctgggccac

SEQ ID NO: 142599 - DNA, 17 bp, synthetic construct
  source 1..17: mol_type = other DNA
catcactctgggccact

SEQ ID NO: 142600 - DNA, 17 bp, synthetic construct
  source 1..17: mol_type = other DNA
atcactctgggccactc

SEQ ID NO: 142601 - DNA, 17 bp, synthetic construct
  source 1..17: mol_type = other DNA
tcactctgggccactcg

SEQ ID NO: 142602 - DNA, 17 bp, synthetic construct
  source 1..17: mol_type = other DNA
cactctgggccactcgg

SEQ ID NO: 142603 - DNA, 17 bp, synthetic construct
  source 1..17: mol_type = other DNA
actctgggccactcggg

SEQ ID NO: 142604 - DNA, 17 bp, synthetic construct
  source 1..17: mol_type = other DNA
ctctgggccactcgggt

SEQ ID NO: 142605 - DNA, 17 bp, synthetic construct
  source 1..17: mol_type = other DNA
tctgggccactcgggta

SEQ ID NO: 142606 - DNA, 17 bp, synthetic construct
  source 1..17: mol_type = other DNA
ctgggccactcgggtac

SEQ ID NO: 142607 - DNA, 17 bp, synthetic construct
  source 1..17: mol_type = other DNA
tgggccactcgggtacc

SEQ ID NO: 142608 - DNA, 17 bp, synthetic construct
  source 1..17: mol_type = other DNA
gggccactcgggtacca

SEQ ID NO: 142609 - DNA, 17 bp, synthetic construct
  source 1..17: mol_type = other DNA
ggccactcgggtaccag

SEQ ID NO: 142610 - DNA, 17 bp, synthetic construct
  source 1..17: mol_type = other DNA
gccactcgggtaccagc

SEQ ID NO: 142611 - DNA, 17 bp, synthetic construct
  source 1..17: mol_type = other DNA
ccactcgggtaccagcc

SEQ ID NO: 142612 - DNA, 17 bp, synthetic construct
  source 1..17: mol_type = other DNA
cactcgggtaccagccc

SEQ ID NO: 142613 - DNA, 17 bp, synthetic construct
  source 1..17: mol_type = other DNA
actcgggtaccagcccg

SEQ ID NO: 142614 - DNA, 17 bp, synthetic construct
  source 1..17: mol_type = other DNA
ctcgggtaccagcccga

SEQ ID NO: 142615 - DNA, 17 bp, synthetic construct
  source 1..17: mol_type = other DNA
tcgggtaccagcccgag

SEQ ID NO: 142616 - DNA, 17 bp, synthetic construct
  source 1..17: mol_type = other DNA
cgggtaccagcccgagg

SEQ ID NO: 142617 - DNA, 17 bp, synthetic construct
  source 1..17: mol_type = other DNA
gggtaccagcccgaggg

SEQ ID NO: 142618 - DNA, 17 bp, synthetic construct
  source 1..17: mol_type = other DNA
ggtaccagcccgaggga

SEQ ID NO: 142619 - DNA, 17 bp, synthetic construct
  source 1..17: mol_type = other DNA
gtaccagcccgagggag

SEQ ID NO: 142620 - DNA, 17 bp, synthetic construct
  source 1..17: mol_type = other DNA
taccagcccgagggagg

SEQ ID NO: 142621 - DNA, 17 bp, synthetic construct
  source 1..17: mol_type = other DNA
accagcccgagggaggg

SEQ ID NO: 142622 - DNA, 17 bp, synthetic construct
  source 1..17: mol_type = other DNA
ccagcccgagggagggg

SEQ ID NO: 142623 - DNA, 17 bp, synthetic construct
  source 1..17: mol_type = other DNA
cagcccgagggaggggg

SEQ ID NO: 142624 - DNA, 17 bp, synthetic construct
  source 1..17: mol_type = other DNA
agcccgagggagggggt

SEQ ID NO: 142625 - DNA, 17 bp, synthetic construct
  source 1..17: mol_type = other DNA
gcccgagggagggggtg

SEQ ID NO: 142626 - DNA, 17 bp, synthetic construct
  source 1..17: mol_type = other DNA
cccgagggagggggtgg

SEQ ID NO: 142627 - DNA, 17 bp, synthetic construct
  source 1..17: mol_type = other DNA
ccgagggagggggtggc

SEQ ID NO: 142628 - DNA, 17 bp, synthetic construct
  source 1..17: mol_type = other DNA
cgagggagggggtggct

SEQ ID NO: 142629 - DNA, 17 bp, synthetic construct
  source 1..17: mol_type = other DNA
gagggagggggtggctg

SEQ ID NO: 142630 - DNA, 17 bp, synthetic construct
  source 1..17: mol_type = other DNA
agggagggggtggctgg

SEQ ID NO: 142631 - DNA, 17 bp, synthetic construct
  source 1..17: mol_type = other DNA
gggagggggtggctgga

SEQ ID NO: 142632 - DNA, 17 bp, synthetic construct
  source 1..17: mol_type = other DNA
ggagggggtggctggac

SEQ ID NO: 142633 - DNA, 17 bp, synthetic construct
  source 1..17: mol_type = other DNA
gagggggtggctggaca

SEQ ID NO: 142634 - DNA, 17 bp, synthetic construct
  source 1..17: mol_type = other DNA
agggggtggctggacag

SEQ ID NO: 142635 - DNA, 17 bp, synthetic construct
  source 1..17: mol_type = other DNA
gggggtggctggacaga

SEQ ID NO: 142636 - DNA, 17 bp, synthetic construct
  source 1..17: mol_type = other DNA
ggggtggctggacagat

SEQ ID NO: 142637 - DNA, 17 bp, synthetic construct
  source 1..17: mol_type = other DNA
gggtggctggacagatg

SEQ ID NO: 142638 - DNA, 17 bp, synthetic construct
  source 1..17: mol_type = other DNA
ggtggctggacagatgc

SEQ ID NO: 142639 - DNA, 17 bp, synthetic construct
  source 1..17: mol_type = other DNA
gtggctggacagatgcc

SEQ ID NO: 142640 - DNA, 17 bp, synthetic construct
  source 1..17: mol_type = other DNA
tggctggacagatgccc

SEQ ID NO: 142641 - DNA, 17 bp, synthetic construct
  source 1..17: mol_type = other DNA
ggctggacagatgccca

SEQ ID NO: 142642 - DNA, 17 bp, synthetic construct
  source 1..17: mol_type = other DNA
gctggacagatgcccag

SEQ ID NO: 142643 - DNA, 17 bp, synthetic construct
  source 1..17: mol_type = other DNA
ctggacagatgcccagg

SEQ ID NO: 142644 - DNA, 17 bp, synthetic construct
  source 1..17: mol_type = other DNA
tggacagatgcccaggg

SEQ ID NO: 142645 - DNA, 17 bp, synthetic construct
  source 1..17: mol_type = other DNA
ggacagatgcccagggt

SEQ ID NO: 142646 - DNA, 17 bp, synthetic construct
  source 1..17: mol_type = other DNA
gacagatgcccagggtt

SEQ ID NO: 142647 - DNA, 17 bp, synthetic construct
  source 1..17: mol_type = other DNA
acagatgcccagggttg

SEQ ID NO: 142648 - DNA, 17 bp, synthetic construct
  source 1..17: mol_type = other DNA
cagatgcccagggttga

SEQ ID NO: 142649 - DNA, 17 bp, synthetic construct
  source 1..17: mol_type = other DNA
agatgcccagggttgac

SEQ ID NO: 142650 - DNA, 17 bp, synthetic construct
  source 1..17: mol_type = other DNA
gatgcccagggttgacc

SEQ ID NO: 142651 - DNA, 17 bp, synthetic construct
  source 1..17: mol_type = other DNA
atgcccagggttgacct

SEQ ID NO: 142652 - DNA, 17 bp, synthetic construct
  source 1..17: mol_type = other DNA
tgcccagggttgacctg

SEQ ID NO: 142653 - DNA, 17 bp, synthetic construct
  source 1..17: mol_type = other DNA
gcccagggttgacctgt

SEQ ID NO: 142654 - DNA, 17 bp, synthetic construct
  source 1..17: mol_type = other DNA
cccagggttgacctgtg

SEQ ID NO: 142655 - DNA, 17 bp, synthetic construct
  source 1..17: mol_type = other DNA
ccagggttgacctgtgt

SEQ ID NO: 142656 - DNA, 17 bp, synthetic construct
  source 1..17: mol_type = other DNA
cagggttgacctgtgtc

SEQ ID NO: 142657 - DNA, 17 bp, synthetic construct
  source 1..17: mol_type = other DNA
agggttgacctgtgtct

SEQ ID NO: 142658 - DNA, 17 bp, synthetic construct
  source 1..17: mol_type = other DNA
gggttgacctgtgtctg

SEQ ID NO: 142659 - DNA, 17 bp, synthetic construct
  source 1..17: mol_type = other DNA
ggttgacctgtgtctgt

SEQ ID NO: 142660 - DNA, 17 bp, synthetic construct
  source 1..17: mol_type = other DNA
gttgacctgtgtctgtc

SEQ ID NO: 142661 - DNA, 17 bp, synthetic construct
  source 1..17: mol_type = other DNA
ttgacctgtgtctgtcc

SEQ ID NO: 142662 - DNA, 17 bp, synthetic construct
  source 1..17: mol_type = other DNA
tgacctgtgtctgtcca

SEQ ID NO: 142663 - DNA, 17 bp, synthetic construct
  source 1..17: mol_type = other DNA
gacctgtgtctgtccag

SEQ ID NO: 142664 - DNA, 17 bp, synthetic construct
  source 1..17: mol_type = other DNA
acctgtgtctgtccagg

SEQ ID NO: 142665 - DNA, 17 bp, synthetic construct
  source 1..17: mol_type = other DNA
cctgtgtctgtccagga

SEQ ID NO: 142666 - DNA, 17 bp, synthetic construct
  source 1..17: mol_type = other DNA
ctgtgtctgtccaggag

SEQ ID NO: 142667 - DNA, 17 bp, synthetic construct
  source 1..17: mol_type = other DNA
tgtgtctgtccaggagc

SEQ ID NO: 142668 - DNA, 17 bp, synthetic construct
  source 1..17: mol_type = other DNA
gtgtctgtccaggagcc

SEQ ID NO: 142669 - DNA, 17 bp, synthetic construct
  source 1..17: mol_type = other DNA
tgtctgtccaggagccc

SEQ ID NO: 142670 - DNA, 17 bp, synthetic construct
  source 1..17: mol_type = other DNA
gtctgtccaggagccct

SEQ ID NO: 142671 - DNA, 17 bp, synthetic construct
  source 1..17: mol_type = other DNA
tctgtccaggagccctc

SEQ ID NO: 142672 - DNA, 17 bp, synthetic construct
  source 1..17: mol_type = other DNA
ctgtccaggagccctca

SEQ ID NO: 142673 - DNA, 17 bp, synthetic construct
  source 1..17: mol_type = other DNA
tgtccaggagccctcag

SEQ ID NO: 142674 - DNA, 17 bp, synthetic construct
  source 1..17: mol_type = other DNA
gtccaggagccctcagg

SEQ ID NO: 142675 - DNA, 17 bp, synthetic construct
  source 1..17: mol_type = other DNA
tccaggagccctcaggg

SEQ ID NO: 142676 - DNA, 17 bp, synthetic construct
  source 1..17: mol_type = other DNA
ccaggagccctcaggga

SEQ ID NO: 142677 - DNA, 17 bp, synthetic construct
  source 1..17: mol_type = other DNA
caggagccctcagggac

SEQ ID NO: 142678 - DNA, 17 bp, synthetic construct
  source 1..17: mol_type = other DNA
aggagccctcagggacc

SEQ ID NO: 142679 - DNA, 17 bp, synthetic construct
  source 1..17: mol_type = other DNA
ggagccctcagggaccc

SEQ ID NO: 142680 - DNA, 17 bp, synthetic construct
  source 1..17: mol_type = other DNA
gagccctcagggacccc

SEQ ID NO: 142681 - DNA, 17 bp, synthetic construct
  source 1..17: mol_type = other DNA
agccctcagggaccccc

SEQ ID NO: 142682 - DNA, 17 bp, synthetic construct
  source 1..17: mol_type = other DNA
gccctcagggaccccct

SEQ ID NO: 142683 - DNA, 17 bp, synthetic construct
  source 1..17: mol_type = other DNA
ccctcagggaccccctt

SEQ ID NO: 142684 - DNA, 17 bp, synthetic construct
  source 1..17: mol_type = other DNA
cctcagggacccccttg

SEQ ID NO: 142685 - DNA, 17 bp, synthetic construct
  source 1..17: mol_type = other DNA
ctcagggacccccttga

SEQ ID NO: 142686 - DNA, 17 bp, synthetic construct
  source 1..17: mol_type = other DNA
tcagggacccccttgat

SEQ ID NO: 142687 - DNA, 17 bp, synthetic construct
  source 1..17: mol_type = other DNA
cagggacccccttgatc

SEQ ID NO: 142688 - DNA, 17 bp, synthetic construct
  source 1..17: mol_type = other DNA
agggacccccttgatcc

SEQ ID NO: 142689 - DNA, 17 bp, synthetic construct
  source 1..17: mol_type = other DNA
gggacccccttgatcca

SEQ ID NO: 142690 - DNA, 17 bp, synthetic construct
  source 1..17: mol_type = other DNA
ggacccccttgatccat

SEQ ID NO: 142691 - DNA, 17 bp, synthetic construct
  source 1..17: mol_type = other DNA
gacccccttgatccatt

SEQ ID NO: 142692 - DNA, 17 bp, synthetic construct
  source 1..17: mol_type = other DNA
acccccttgatccattc

SEQ ID NO: 142693 - DNA, 17 bp, synthetic construct
  source 1..17: mol_type = other DNA
cccccttgatccattcc

SEQ ID NO: 142694 - DNA, 17 bp, synthetic construct
  source 1..17: mol_type = other DNA
ccccttgatccattcca

SEQ ID NO: 142695 - DNA, 17 bp, synthetic construct
  source 1..17: mol_type = other DNA
cccttgatccattccag

SEQ ID NO: 142696 - DNA, 17 bp, synthetic construct
  source 1..17: mol_type = other DNA
ccttgatccattccagc

SEQ ID NO: 142697 - DNA, 17 bp, synthetic construct
  source 1..17: mol_type = other DNA
cttgatccattccagcc

SEQ ID NO: 142698 - DNA, 17 bp, synthetic construct
  source 1..17: mol_type = other DNA
ttgatccattccagccc

SEQ ID NO: 142699 - DNA, 17 bp, synthetic construct
  source 1..17: mol_type = other DNA
tgatccattccagcccg

SEQ ID NO: 142700 - DNA, 17 bp, synthetic construct
  source 1..17: mol_type = other DNA
gatccattccagcccgg

SEQ ID NO: 142701 - DNA, 17 bp, synthetic construct
  source 1..17: mol_type = other DNA
atccattccagcccggg

SEQ ID NO: 142702 - DNA, 17 bp, synthetic construct
  source 1..17: mol_type = other DNA
tccattccagcccgggg

SEQ ID NO: 142703 - DNA, 17 bp, synthetic construct
  source 1..17: mol_type = other DNA
ccattccagcccgggga

SEQ ID NO: 142704 - DNA, 17 bp, synthetic construct
  source 1..17: mol_type = other DNA
cattccagcccggggag

SEQ ID NO: 142705 - DNA, 17 bp, synthetic construct
  source 1..17: mol_type = other DNA
attccagcccggggagc

SEQ ID NO: 142706 - DNA, 17 bp, synthetic construct
  source 1..17: mol_type = other DNA
ttccagcccggggagcg

SEQ ID NO: 142707 - DNA, 17 bp, synthetic construct
  source 1..17: mol_type = other DNA
tccagcccggggagcgg

SEQ ID NO: 142708 - DNA, 17 bp, synthetic construct
  source 1..17: mol_type = other DNA
ccagcccggggagcggt

SEQ ID NO: 142709 - DNA, 17 bp, synthetic construct
  source 1..17: mol_type = other DNA
cagcccggggagcggtg

SEQ ID NO: 142710 - DNA, 17 bp, synthetic construct
  source 1..17: mol_type = other DNA
agcccggggagcggtgg

SEQ ID NO: 142711 - DNA, 17 bp, synthetic construct
  source 1..17: mol_type = other DNA
gcccggggagcggtggg

SEQ ID NO: 142712 - DNA, 17 bp, synthetic construct
  source 1..17: mol_type = other DNA
cccggggagcggtgggt

SEQ ID NO: 142713 - DNA, 17 bp, synthetic construct
  source 1..17: mol_type = other DNA
ccggggagcggtgggtc

SEQ ID NO: 142714 - DNA, 17 bp, synthetic construct
  source 1..17: mol_type = other DNA
cggggagcggtgggtca

SEQ ID NO: 142715 - DNA, 17 bp, synthetic construct
  source 1..17: mol_type = other DNA
ggggagcggtgggtcag

SEQ ID NO: 142716 - DNA, 17 bp, synthetic construct
  source 1..17: mol_type = other DNA
gggagcggtgggtcagc

SEQ ID NO: 142717 - DNA, 17 bp, synthetic construct
  source 1..17: mol_type = other DNA
ggagcggtgggtcagca

SEQ ID NO: 142718 - DNA, 17 bp, synthetic construct
  source 1..17: mol_type = other DNA
gagcggtgggtcagcaa

SEQ ID NO: 142719 - DNA, 17 bp, synthetic construct
  source 1..17: mol_type = other DNA
agcggtgggtcagcaac

SEQ ID NO: 142720 - DNA, 17 bp, synthetic construct
  source 1..17: mol_type = other DNA
gcggtgggtcagcaact

SEQ ID NO: 142721 - DNA, 17 bp, synthetic construct
  source 1..17: mol_type = other DNA
cggtgggtcagcaactg

SEQ ID NO: 142722 - DNA, 17 bp, synthetic construct
  source 1..17: mol_type = other DNA
ggtgggtcagcaactgc

SEQ ID NO: 142723 - DNA, 17 bp, synthetic construct
  source 1..17: mol_type = other DNA
gtgggtcagcaactgcc

SEQ ID NO: 142724 - DNA, 17 bp, synthetic construct
  source 1..17: mol_type = other DNA
tgggtcagcaactgcca

SEQ ID NO: 142725 - DNA, 17 bp, synthetic construct
  source 1..17: mol_type = other DNA
gggtcagcaactgccag

SEQ ID NO: 142726 - DNA, 17 bp, synthetic construct
  source 1..17: mol_type = other DNA
ggtcagcaactgccagt

SEQ ID NO: 142727 - DNA, 17 bp, synthetic construct
  source 1..17: mol_type = other DNA
gtcagcaactgccagtc

SEQ ID NO: 142728 - DNA, 17 bp, synthetic construct
  source 1..17: mol_type = other DNA
tcagcaactgccagtcc

SEQ ID NO: 142729 - DNA, 17 bp, synthetic construct
  source 1..17: mol_type = other DNA
cagcaactgccagtcct

SEQ ID NO: 142730 - DNA, 17 bp, synthetic construct
  source 1..17: mol_type = other DNA
agcaactgccagtcctg

SEQ ID NO: 142731 - DNA, 17 bp, synthetic construct
  source 1..17: mol_type = other DNA
gcaactgccagtcctgc

SEQ ID NO: 142732 - DNA, 17 bp, synthetic construct
  source 1..17: mol_type = other DNA
caactgccagtcctgcg

SEQ ID NO: 142733 - DNA, 17 bp, synthetic construct
  source 1..17: mol_type = other DNA
aactgccagtcctgcgt

SEQ ID NO: 142734 - DNA, 17 bp, synthetic construct
  source 1..17: mol_type = other DNA
actgccagtcctgcgtg

SEQ ID NO: 142735 - DNA, 17 bp, synthetic construct
  source 1..17: mol_type = other DNA
ctgccagtcctgcgtgt

SEQ ID NO: 142736 - DNA, 17 bp, synthetic construct
  source 1..17: mol_type = other DNA
tgccagtcctgcgtgtg

SEQ ID NO: 142737 - DNA, 17 bp, synthetic construct
  source 1..17: mol_type = other DNA
gccagtcctgcgtgtgt

SEQ ID NO: 142738 - DNA, 17 bp, synthetic construct
  source 1..17: mol_type = other DNA
ccagtcctgcgtgtgtg

SEQ ID NO: 142739 - DNA, 17 bp, synthetic construct
  source 1..17: mol_type = other DNA
cagtcctgcgtgtgtga

SEQ ID NO: 142740 - DNA, 17 bp, synthetic construct
  source 1..17: mol_type = other DNA
agtcctgcgtgtgtgac

SEQ ID NO: 142741 - DNA, 17 bp, synthetic construct
  source 1..17: mol_type = other DNA
gtcctgcgtgtgtgacg

SEQ ID NO: 142742 - DNA, 17 bp, synthetic construct
  source 1..17: mol_type = other DNA
tcctgcgtgtgtgacga

SEQ ID NO: 142743 - DNA, 17 bp, synthetic construct
  source 1..17: mol_type = other DNA
cctgcgtgtgtgacgag

SEQ ID NO: 142744 - DNA, 17 bp, synthetic construct
  source 1..17: mol_type = other DNA
ctgcgtgtgtgacgagg

SEQ ID NO: 142745 - DNA, 17 bp, synthetic construct
  source 1..17: mol_type = other DNA
tgcgtgtgtgacgaggg

SEQ ID NO: 142746 - DNA, 17 bp, synthetic construct
  source 1..17: mol_type = other DNA
gcgtgtgtgacgagggt

SEQ ID NO: 142747 - DNA, 17 bp, synthetic construct
  source 1..17: mol_type = other DNA
cgtgtgtgacgagggtt

SEQ ID NO: 142748 - DNA, 17 bp, synthetic construct
  source 1..17: mol_type = other DNA
gtgtgtgacgagggttc

SEQ ID NO: 142749 - DNA, 17 bp, synthetic construct
  source 1..17: mol_type = other DNA
tgtgtgacgagggttca

SEQ ID NO: 142750 - DNA, 17 bp, synthetic construct
  source 1..17: mol_type = other DNA
gtgtgacgagggttcag

SEQ ID NO: 142751 - DNA, 17 bp, synthetic construct
  source 1..17: mol_type = other DNA
tgtgacgagggttcagt

SEQ ID NO: 142752 - DNA, 17 bp, synthetic construct
  source 1..17: mol_type = other DNA
gtgacgagggttcagtg

SEQ ID NO: 142753 - DNA, 17 bp, synthetic construct
  source 1..17: mol_type = other DNA
tgacgagggttcagtgt

SEQ ID NO: 142754 - DNA, 17 bp, synthetic construct
  source 1..17: mol_type = other DNA
gacgagggttcagtgtc

SEQ ID NO: 142755 - DNA, 17 bp, synthetic construct
  source 1..17: mol_type = other DNA
acgagggttcagtgtcg

SEQ ID NO: 142756 - DNA, 17 bp, synthetic construct
  source 1..17: mol_type = other DNA
cgagggttcagtgtcgg

SEQ ID NO: 142757 - DNA, 17 bp, synthetic construct
  source 1..17: mol_type = other DNA
gagggttcagtgtcggt

SEQ ID NO: 142758 - DNA, 17 bp, synthetic construct
  source 1..17: mol_type = other DNA
agggttcagtgtcggtg

SEQ ID NO: 142759 - DNA, 17 bp, synthetic construct
  source 1..17: mol_type = other DNA
gggttcagtgtcggtgc

SEQ ID NO: 142760 - DNA, 17 bp, synthetic construct
  source 1..17: mol_type = other DNA
ggttcagtgtcggtgca

SEQ ID NO: 142761 - DNA, 17 bp, synthetic construct
  source 1..17: mol_type = other DNA
gttcagtgtcggtgcag

SEQ ID NO: 142762 - DNA, 17 bp, synthetic construct
  source 1..17: mol_type = other DNA
ttcagtgtcggtgcagt

SEQ ID NO: 142763 - DNA, 17 bp, synthetic construct
  source 1..17: mol_type = other DNA
tcagtgtcggtgcagtg

SEQ ID NO: 142764 - DNA, 17 bp, synthetic construct
  source 1..17: mol_type = other DNA
cagtgtcggtgcagtgc

SEQ ID NO: 142765 - DNA, 17 bp, synthetic construct
  source 1..17: mol_type = other DNA
agtgtcggtgcagtgca

SEQ ID NO: 142766 - DNA, 17 bp, synthetic construct
  source 1..17: mol_type = other DNA
gtgtcggtgcagtgcaa

SEQ ID NO: 142767 - DNA, 17 bp, synthetic construct
  source 1..17: mol_type = other DNA
tgtcggtgcagtgcaag

SEQ ID NO: 142768 - DNA, 17 bp, synthetic construct
  source 1..17: mol_type = other DNA
gtcggtgcagtgcaagc

SEQ ID NO: 142769 - DNA, 17 bp, synthetic construct
  source 1..17: mol_type = other DNA
tcggtgcagtgcaagcc

SEQ ID NO: 142770 - DNA, 17 bp, synthetic construct
  source 1..17: mol_type = other DNA
cggtgcagtgcaagccc

SEQ ID NO: 142771 - DNA, 17 bp, synthetic construct
  source 1..17: mol_type = other DNA
ggtgcagtgcaagcccc

SEQ ID NO: 142772 - DNA, 17 bp, synthetic construct
  source 1..17: mol_type = other DNA
gtgcagtgcaagcccct

SEQ ID NO: 142773 - DNA, 17 bp, synthetic construct
  source 1..17: mol_type = other DNA
tgcagtgcaagcccctg

SEQ ID NO: 142774 - DNA, 17 bp, synthetic construct
  source 1..17: mol_type = other DNA
gcagtgcaagcccctgc

SEQ ID NO: 142775 - DNA, 17 bp, synthetic construct
  source 1..17: mol_type = other DNA
cagtgcaagcccctgcc

SEQ ID NO: 142776 - DNA, 17 bp, synthetic construct
  source 1..17: mol_type = other DNA
agtgcaagcccctgccc

SEQ ID NO: 142777 - DNA, 17 bp, synthetic construct
  source 1..17: mol_type = other DNA
gtgcaagcccctgccct

SEQ ID NO: 142778 - DNA, 17 bp, synthetic construct
  source 1..17: mol_type = other DNA
tgcaagcccctgccctg

SEQ ID NO: 142779 - DNA, 17 bp, synthetic construct
  source 1..17: mol_type = other DNA
gcaagcccctgccctgt

SEQ ID NO: 142780 - DNA, 17 bp, synthetic construct
  source 1..17: mol_type = other DNA
caagcccctgccctgtg

SEQ ID NO: 142781 - DNA, 17 bp, synthetic construct
  source 1..17: mol_type = other DNA
aagcccctgccctgtga

SEQ ID NO: 142782 - DNA, 17 bp, synthetic construct
  source 1..17: mol_type = other DNA
agcccctgccctgtgac

SEQ ID NO: 142783 - DNA, 17 bp, synthetic construct
  source 1..17: mol_type = other DNA
gcccctgccctgtgacg

SEQ ID NO: 142784 - DNA, 17 bp, synthetic construct
  source 1..17: mol_type = other DNA
cccctgccctgtgacgc

SEQ ID NO: 142785 - DNA, 17 bp, synthetic construct
  source 1..17: mol_type = other DNA
ccctgccctgtgacgcc

SEQ ID NO: 142786 - DNA, 17 bp, synthetic construct
  source 1..17: mol_type = other DNA
cctgccctgtgacgccc

SEQ ID NO: 142787 - DNA, 17 bp, synthetic construct
  source 1..17: mol_type = other DNA
ctgccctgtgacgccca

SEQ ID NO: 142788 - DNA, 17 bp, synthetic construct
  source 1..17: mol_type = other DNA
tgccctgtgacgcccag

SEQ ID NO: 142789 - DNA, 17 bp, synthetic construct
  source 1..17: mol_type = other DNA
gccctgtgacgcccagg

SEQ ID NO: 142790 - DNA, 17 bp, synthetic construct
  source 1..17: mol_type = other DNA
ccctgtgacgcccaggg

SEQ ID NO: 142791 - DNA, 17 bp, synthetic construct
  source 1..17: mol_type = other DNA
cctgtgacgcccagggt

SEQ ID NO: 142792 - DNA, 17 bp, synthetic construct
  source 1..17: mol_type = other DNA
ctgtgacgcccagggtc

SEQ ID NO: 142793 - DNA, 17 bp, synthetic construct
  source 1..17: mol_type = other DNA
tgtgacgcccagggtca

SEQ ID NO: 142794 - DNA, 17 bp, synthetic construct
  source 1..17: mol_type = other DNA
gtgacgcccagggtcag

SEQ ID NO: 142795 - DNA, 17 bp, synthetic construct
  source 1..17: mol_type = other DNA
tgacgcccagggtcagc

SEQ ID NO: 142796 - DNA, 17 bp, synthetic construct
  source 1..17: mol_type = other DNA
gacgcccagggtcagcc

SEQ ID NO: 142797 - DNA, 17 bp, synthetic construct
  source 1..17: mol_type = other DNA
acgcccagggtcagccc

SEQ ID NO: 142798 - DNA, 17 bp, synthetic construct
  source 1..17: mol_type = other DNA
cgcccagggtcagcccc

SEQ ID NO: 142799 - DNA, 17 bp, synthetic construct
  source 1..17: mol_type = other DNA
gcccagggtcagccccc

SEQ ID NO: 142800 - DNA, 17 bp, synthetic construct
  source 1..17: mol_type = other DNA
cccagggtcagcccccg

SEQ ID NO: 142801 - DNA, 17 bp, synthetic construct
  source 1..17: mol_type = other DNA
ccagggtcagcccccgc

SEQ ID NO: 142802 - DNA, 17 bp, synthetic construct
  source 1..17: mol_type = other DNA
cagggtcagcccccgcc

SEQ ID NO: 142803 - DNA, 17 bp, synthetic construct
  source 1..17: mol_type = other DNA
agggtcagcccccgccg

SEQ ID NO: 142804 - DNA, 17 bp, synthetic construct
  source 1..17: mol_type = other DNA
gggtcagcccccgccgt

SEQ ID NO: 142805 - DNA, 17 bp, synthetic construct
  source 1..17: mol_type = other DNA
ggtcagcccccgccgtg

SEQ ID NO: 142806 - DNA, 17 bp, synthetic construct
  source 1..17: mol_type = other DNA
gtcagcccccgccgtgc

SEQ ID NO: 142807 - DNA, 17 bp, synthetic construct
  source 1..17: mol_type = other DNA
tcagcccccgccgtgca

SEQ ID NO: 142808 - DNA, 17 bp, synthetic construct
  source 1..17: mol_type = other DNA
cagcccccgccgtgcaa

SEQ ID NO: 142809 - DNA, 17 bp, synthetic construct
  source 1..17: mol_type = other DNA
agcccccgccgtgcaac

SEQ ID NO: 142810 - DNA, 17 bp, synthetic construct
  source 1..17: mol_type = other DNA
gcccccgccgtgcaacc

SEQ ID NO: 142811 - DNA, 17 bp, synthetic construct
  source 1..17: mol_type = other DNA
cccccgccgtgcaaccg

SEQ ID NO: 142812 - DNA, 17 bp, synthetic construct
  source 1..17: mol_type = other DNA
ccccgccgtgcaaccgt

SEQ ID NO: 142813 - DNA, 17 bp, synthetic construct
  source 1..17: mol_type = other DNA
cccgccgtgcaaccgtc

SEQ ID NO: 142814 - DNA, 17 bp, synthetic construct
  source 1..17: mol_type = other DNA
ccgccgtgcaaccgtcc

SEQ ID NO: 142815 - DNA, 17 bp, synthetic construct
  source 1..17: mol_type = other DNA
cgccgtgcaaccgtccc

SEQ ID NO: 142816 - DNA, 17 bp, synthetic construct
  source 1..17: mol_type = other DNA
gccgtgcaaccgtcccg

SEQ ID NO: 142817 - DNA, 17 bp, synthetic construct
  source 1..17: mol_type = other DNA
ccgtgcaaccgtcccgg

SEQ ID NO: 142818 - DNA, 17 bp, synthetic construct
  source 1..17: mol_type = other DNA
cgtgcaaccgtcccggc

SEQ ID NO: 142819 - DNA, 17 bp, synthetic construct
  source 1..17: mol_type = other DNA
gtgcaaccgtcccggct

SEQ ID NO: 142820 - DNA, 17 bp, synthetic construct
  source 1..17: mol_type = other DNA
tgcaaccgtcccggctt

SEQ ID NO: 142821 - DNA, 17 bp, synthetic construct
  source 1..17: mol_type = other DNA
gcaaccgtcccggcttc

SEQ ID NO: 142822 - DNA, 17 bp, synthetic construct
  source 1..17: mol_type = other DNA
caaccgtcccggcttcg

SEQ ID NO: 142823 - DNA, 17 bp, synthetic construct
  source 1..17: mol_type = other DNA
aaccgtcccggcttcgt

SEQ ID NO: 142824 - DNA, 17 bp, synthetic construct
  source 1..17: mol_type = other DNA
accgtcccggcttcgta

SEQ ID NO: 142825 - DNA, 17 bp, synthetic construct
  source 1..17: mol_type = other DNA
ccgtcccggcttcgtaa

SEQ ID NO: 142826 - DNA, 17 bp, synthetic construct
  source 1..17: mol_type = other DNA
cgtcccggcttcgtaac

SEQ ID NO: 142827 - DNA, 17 bp, synthetic construct
  source 1..17: mol_type = other DNA
gtcccggcttcgtaacc

SEQ ID NO: 142828 - DNA, 17 bp, synthetic construct
  source 1..17: mol_type = other DNA
tcccggcttcgtaaccg

SEQ ID NO: 142829 - DNA, 17 bp, synthetic construct
  source 1..17: mol_type = other DNA
cccggcttcgtaaccgt

SEQ ID NO: 142830 - DNA, 17 bp, synthetic construct
  source 1..17: mol_type = other DNA
ccggcttcgtaaccgtg

SEQ ID NO: 142831 - DNA, 17 bp, synthetic construct
  source 1..17: mol_type = other DNA
cggcttcgtaaccgtga

SEQ ID NO: 142832 - DNA, 17 bp, synthetic construct
  source 1..17: mol_type = other DNA
ggcttcgtaaccgtgac

SEQ ID NO: 142833 - DNA, 17 bp, synthetic construct
  source 1..17: mol_type = other DNA
gcttcgtaaccgtgacc

SEQ ID NO: 142834 - DNA, 17 bp, synthetic construct
  source 1..17: mol_type = other DNA
cttcgtaaccgtgacca

SEQ ID NO: 142835 - DNA, 17 bp, synthetic construct
  source 1..17: mol_type = other DNA
ttcgtaaccgtgaccag

SEQ ID NO: 142836 - DNA, 17 bp, synthetic construct
  source 1..17: mol_type = other DNA
tcgtaaccgtgaccagg

SEQ ID NO: 142837 - DNA, 17 bp, synthetic construct
  source 1..17: mol_type = other DNA
cgtaaccgtgaccaggc

SEQ ID NO: 142838 - DNA, 17 bp, synthetic construct
  source 1..17: mol_type = other DNA
gtaaccgtgaccaggcc

SEQ ID NO: 142839 - DNA, 17 bp, synthetic construct
  source 1..17: mol_type = other DNA
taaccgtgaccaggccc

SEQ ID NO: 142840 - DNA, 17 bp, synthetic construct
  source 1..17: mol_type = other DNA
aaccgtgaccaggcccc

SEQ ID NO: 142841 - DNA, 17 bp, synthetic construct
  source 1..17: mol_type = other DNA
accgtgaccaggccccg

SEQ ID NO: 142842 - DNA, 17 bp, synthetic construct
  source 1..17: mol_type = other DNA
ccgtgaccaggccccgg

SEQ ID NO: 142843 - DNA, 17 bp, synthetic construct
  source 1..17: mol_type = other DNA
cgtgaccaggccccggg

SEQ ID NO: 142844 - DNA, 17 bp, synthetic construct
  source 1..17: mol_type = other DNA
gtgaccaggccccgggc

SEQ ID NO: 142845 - DNA, 17 bp, synthetic construct
  source 1..17: mol_type = other DNA
tgaccaggccccgggcc

SEQ ID NO: 142846 - DNA, 17 bp, synthetic construct
  source 1..17: mol_type = other DNA
gaccaggccccgggccg

SEQ ID NO: 142847 - DNA, 17 bp, synthetic construct
  source 1..17: mol_type = other DNA
accaggccccgggccga

SEQ ID NO: 142848 - DNA, 17 bp, synthetic construct
  source 1..17: mol_type = other DNA
ccaggccccgggccgag

SEQ ID NO: 142849 - DNA, 17 bp, synthetic construct
  source 1..17: mol_type = other DNA
caggccccgggccgaga

SEQ ID NO: 142850 - DNA, 17 bp, synthetic construct
  source 1..17: mol_type = other DNA
aggccccgggccgagaa

SEQ ID NO: 142851 - DNA, 17 bp, synthetic construct
  source 1..17: mol_type = other DNA
ggccccgggccgagaac

SEQ ID NO: 142852 - DNA, 17 bp, synthetic construct
  source 1..17: mol_type = other DNA
gccccgggccgagaacc

SEQ ID NO: 142853 - DNA, 17 bp, synthetic construct
  source 1..17: mol_type = other DNA
ccccgggccgagaaccc

SEQ ID NO: 142854 - DNA, 17 bp, synthetic construct
  source 1..17: mol_type = other DNA
cccgggccgagaacccc

SEQ ID NO: 142855 - DNA, 17 bp, synthetic construct
  source 1..17: mol_type = other DNA
ccgggccgagaacccct

SEQ ID NO: 142856 - DNA, 17 bp, synthetic construct
  source 1..17: mol_type = other DNA
cgggccgagaacccctg

SEQ ID NO: 142857 - DNA, 17 bp, synthetic construct
  source 1..17: mol_type = other DNA
gggccgagaacccctgc

SEQ ID NO: 142858 - DNA, 17 bp, synthetic construct
  source 1..17: mol_type = other DNA
ggccgagaacccctgct

SEQ ID NO: 142859 - DNA, 17 bp, synthetic construct
  source 1..17: mol_type = other DNA
gccgagaacccctgctg

SEQ ID NO: 142860 - DNA, 17 bp, synthetic construct
  source 1..17: mol_type = other DNA
ccgagaacccctgctgc

SEQ ID NO: 142861 - DNA, 17 bp, synthetic construct
  source 1..17: mol_type = other DNA
cgagaacccctgctgcc

SEQ ID NO: 142862 - DNA, 17 bp, synthetic construct
  source 1..17: mol_type = other DNA
gagaacccctgctgccc

SEQ ID NO: 142863 - DNA, 17 bp, synthetic construct
  source 1..17: mol_type = other DNA
agaacccctgctgcccc

SEQ ID NO: 142864 - DNA, 17 bp, synthetic construct
  source 1..17: mol_type = other DNA
gaacccctgctgccccg

SEQ ID NO: 142865 - DNA, 17 bp, synthetic construct
  source 1..17: mol_type = other DNA
aacccctgctgccccga

SEQ ID NO: 142866 - DNA, 17 bp, synthetic construct
  source 1..17: mol_type = other DNA
acccctgctgccccgag

SEQ ID NO: 142867 - DNA, 17 bp, synthetic construct
  source 1..17: mol_type = other DNA
cccctgctgccccgaga

SEQ ID NO: 142868 - DNA, 17 bp, synthetic construct
  source 1..17: mol_type = other DNA
ccctgctgccccgagac

SEQ ID NO: 142869 - DNA, 17 bp, synthetic construct
  source 1..17: mol_type = other DNA
cctgctgccccgagacg

SEQ ID NO: 142870 - DNA, 17 bp, synthetic construct
  source 1..17: mol_type = other DNA
ctgctgccccgagacgg

SEQ ID NO: 142871 - DNA, 17 bp, synthetic construct
  source 1..17: mol_type = other DNA
tgctgccccgagacggt

SEQ ID NO: 142872 - DNA, 17 bp, synthetic construct
  source 1..17: mol_type = other DNA
gctgccccgagacggtg

SEQ ID NO: 142873 - DNA, 17 bp, synthetic construct
  source 1..17: mol_type = other DNA
ctgccccgagacggtgt

SEQ ID NO: 142874 - DNA, 17 bp, synthetic construct
  source 1..17: mol_type = other DNA
tgccccgagacggtgtg

SEQ ID NO: 142875 - DNA, 17 bp, synthetic construct
  source 1..17: mol_type = other DNA
gccccgagacggtgtgc

SEQ ID NO: 142876 - DNA, 17 bp, synthetic construct
  source 1..17: mol_type = other DNA
ccccgagacggtgtgcg

SEQ ID NO: 142877 - DNA, 17 bp, synthetic construct
  source 1..17: mol_type = other DNA
cccgagacggtgtgcgg

SEQ ID NO: 142878 - DNA, 17 bp, synthetic construct
  source 1..17: mol_type = other DNA
ccgagacggtgtgcggt

SEQ ID NO: 142879 - DNA, 17 bp, synthetic construct
  source 1..17: mol_type = other DNA
cgagacggtgtgcggta

SEQ ID NO: 142880 - DNA, 17 bp, synthetic construct
  source 1..17: mol_type = other DNA
gagacggtgtgcggtaa

SEQ ID NO: 142881 - DNA, 17 bp, synthetic construct
  source 1..17: mol_type = other DNA
agacggtgtgcggtaag

SEQ ID NO: 142882 - DNA, 17 bp, synthetic construct
  source 1..17: mol_type = other DNA
gacggtgtgcggtaaga

SEQ ID NO: 142883 - DNA, 17 bp, synthetic construct
  source 1..17: mol_type = other DNA
acggtgtgcggtaagac

SEQ ID NO: 142884 - DNA, 17 bp, synthetic construct
  source 1..17: mol_type = other DNA
cggtgtgcggtaagacg

SEQ ID NO: 142885 - DNA, 17 bp, synthetic construct
  source 1..17: mol_type = other DNA
ggtgtgcggtaagacgc

SEQ ID NO: 142886 - DNA, 17 bp, synthetic construct
  source 1..17: mol_type = other DNA
gtgtgcggtaagacgct

SEQ ID NO: 142887 - DNA, 17 bp, synthetic construct
  source 1..17: mol_type = other DNA
tgtgcggtaagacgctg

SEQ ID NO: 142888 - DNA, 17 bp, synthetic construct
  source 1..17: mol_type = other DNA
gtgcggtaagacgctgc

SEQ ID NO: 142889 - DNA, 17 bp, synthetic construct
  source 1..17: mol_type = other DNA
tgcggtaagacgctgca

SEQ ID NO: 142890 - DNA, 17 bp, synthetic construct
  source 1..17: mol_type = other DNA
gcggtaagacgctgcag

SEQ ID NO: 142891 - DNA, 17 bp, synthetic construct
  source 1..17: mol_type = other DNA
cggtaagacgctgcaga

SEQ ID NO: 142892 - DNA, 17 bp, synthetic construct
  source 1..17: mol_type = other DNA
ggtaagacgctgcagag

SEQ ID NO: 142893 - DNA, 17 bp, synthetic construct
  source 1..17: mol_type = other DNA
gtaagacgctgcagagc

SEQ ID NO: 142894 - DNA, 17 bp, synthetic construct
  source 1..17: mol_type = other DNA
taagacgctgcagagca

SEQ ID NO: 142895 - DNA, 17 bp, synthetic construct
  source 1..17: mol_type = other DNA
aagacgctgcagagcag

SEQ ID NO: 142896 - DNA, 17 bp, synthetic construct
  source 1..17: mol_type = other DNA
agacgctgcagagcaga

SEQ ID NO: 142897 - DNA, 17 bp, synthetic construct
  source 1..17: mol_type = other DNA
gacgctgcagagcagag

SEQ ID NO: 142898 - DNA, 17 bp, synthetic construct
  source 1..17: mol_type = other DNA
acgctgcagagcagagg

SEQ ID NO: 142899 - DNA, 17 bp, synthetic construct
  source 1..17: mol_type = other DNA
cgctgcagagcagaggt

SEQ ID NO: 142900 - DNA, 17 bp, synthetic construct
  source 1..17: mol_type = other DNA
gctgcagagcagaggtg

SEQ ID NO: 142901 - DNA, 17 bp, synthetic construct
  source 1..17: mol_type = other DNA
ctgcagagcagaggtgc

SEQ ID NO: 142902 - DNA, 17 bp, synthetic construct
  source 1..17: mol_type = other DNA
tgcagagcagaggtgcc

SEQ ID NO: 142903 - DNA, 17 bp, synthetic construct
  source 1..17: mol_type = other DNA
gcagagcagaggtgccc

SEQ ID NO: 142904 - DNA, 17 bp, synthetic construct
  source 1..17: mol_type = other DNA
cagagcagaggtgcccg

SEQ ID NO: 142905 - DNA, 17 bp, synthetic construct
  source 1..17: mol_type = other DNA
agagcagaggtgcccgg

SEQ ID NO: 142906 - DNA, 17 bp, synthetic construct
  source 1..17: mol_type = other DNA
gagcagaggtgcccggc

SEQ ID NO: 142907 - DNA, 17 bp, synthetic construct
  source 1..17: mol_type = other DNA
agcagaggtgcccggca

SEQ ID NO: 142908 - DNA, 17 bp, synthetic construct
  source 1..17: mol_type = other DNA
gcagaggtgcccggcat

SEQ ID NO: 142909 - DNA, 17 bp, synthetic construct
  source 1..17: mol_type = other DNA
cagaggtgcccggcata

SEQ ID NO: 142910 - DNA, 17 bp, synthetic construct
  source 1..17: mol_type = other DNA
agaggtgcccggcatag

SEQ ID NO: 142911 - DNA, 17 bp, synthetic construct
  source 1..17: mol_type = other DNA
gaggtgcccggcatagg

SEQ ID NO: 142912 - DNA, 17 bp, synthetic construct
  source 1..17: mol_type = other DNA
aggtgcccggcataggg

SEQ ID NO: 142913 - DNA, 17 bp, synthetic construct
  source 1..17: mol_type = other DNA
ggtgcccggcatagggt

SEQ ID NO: 142914 - DNA, 17 bp, synthetic construct
  source 1..17: mol_type = other DNA
gtgcccggcatagggtg

SEQ ID NO: 142915 - DNA, 17 bp, synthetic construct
  source 1..17: mol_type = other DNA
tgcccggcatagggtga

SEQ ID NO: 142916 - DNA, 17 bp, synthetic construct
  source 1..17: mol_type = other DNA
gcccggcatagggtgag

SEQ ID NO: 142917 - DNA, 17 bp, synthetic construct
  source 1..17: mol_type = other DNA
cccggcatagggtgagg

SEQ ID NO: 142918 - DNA, 17 bp, synthetic construct
  source 1..17: mol_type = other DNA
ccggcatagggtgaggg

SEQ ID NO: 142919 - DNA, 17 bp, synthetic construct
  source 1..17: mol_type = other DNA
cggcatagggtgagggg

SEQ ID NO: 142920 - DNA, 17 bp, synthetic construct
  source 1..17: mol_type = other DNA
ggcatagggtgaggggg

SEQ ID NO: 142921 - DNA, 17 bp, synthetic construct
  source 1..17: mol_type = other DNA
gcatagggtgagggggg

SEQ ID NO: 142922 - DNA, 17 bp, synthetic construct
  source 1..17: mol_type = other DNA
catagggtgagggggga

SEQ ID NO: 142923 - DNA, 17 bp, synthetic construct
  source 1..17: mol_type = other DNA
atagggtgaggggggac

SEQ ID NO: 142924 - DNA, 17 bp, synthetic construct
  source 1..17: mol_type = other DNA
tagggtgaggggggaca

SEQ ID NO: 142925 - DNA, 17 bp, synthetic construct
  source 1..17: mol_type = other DNA
agggtgaggggggacag

SEQ ID NO: 142926 - DNA, 17 bp, synthetic construct
  source 1..17: mol_type = other DNA
gggtgaggggggacaga

SEQ ID NO: 142927 - DNA, 17 bp, synthetic construct
  source 1..17: mol_type = other DNA
ggtgaggggggacagag

SEQ ID NO: 142928 - DNA, 17 bp, synthetic construct
  source 1..17: mol_type = other DNA
gtgaggggggacagagc

SEQ ID NO: 142929 - DNA, 17 bp, synthetic construct
  source 1..17: mol_type = other DNA
tgaggggggacagagcc

SEQ ID NO: 142930 - DNA, 17 bp, synthetic construct
  source 1..17: mol_type = other DNA
gaggggggacagagccg

SEQ ID NO: 142931 - DNA, 17 bp, synthetic construct
  source 1..17: mol_type = other DNA
aggggggacagagccgg

SEQ ID NO: 142932 - DNA, 17 bp, synthetic construct
  source 1..17: mol_type = other DNA
ggggggacagagccggt

SEQ ID NO: 142933 - DNA, 17 bp, synthetic construct
  source 1..17: mol_type = other DNA
gggggacagagccggtg

SEQ ID NO: 142934 - DNA, 17 bp, synthetic construct
  source 1..17: mol_type = other DNA
ggggacagagccggtgc

SEQ ID NO: 142935 - DNA, 17 bp, synthetic construct
  source 1..17: mol_type = other DNA
gggacagagccggtgcc

SEQ ID NO: 142936 - DNA, 17 bp, synthetic construct
  source 1..17: mol_type = other DNA
ggacagagccggtgccc

SEQ ID NO: 142937 - DNA, 17 bp, synthetic construct
  source 1..17: mol_type = other DNA
gacagagccggtgccca

SEQ ID NO: 142938 - DNA, 17 bp, synthetic construct
  source 1..17: mol_type = other DNA
acagagccggtgcccac

SEQ ID NO: 142939 - DNA, 17 bp, synthetic construct
  source 1..17: mol_type = other DNA
cagagccggtgcccacc

SEQ ID NO: 142940 - DNA, 17 bp, synthetic construct
  source 1..17: mol_type = other DNA
agagccggtgcccacca

SEQ ID NO: 142941 - DNA, 17 bp, synthetic construct
  source 1..17: mol_type = other DNA
gagccggtgcccaccag

SEQ ID NO: 142942 - DNA, 17 bp, synthetic construct
  source 1..17: mol_type = other DNA
agccggtgcccaccagg

SEQ ID NO: 142943 - DNA, 17 bp, synthetic construct
  source 1..17: mol_type = other DNA
gccggtgcccaccaggg

SEQ ID NO: 142944 - DNA, 17 bp, synthetic construct
  source 1..17: mol_type = other DNA
ccggtgcccaccagggg

SEQ ID NO: 142945 - DNA, 17 bp, synthetic construct
  source 1..17: mol_type = other DNA
cggtgcccaccaggggc

SEQ ID NO: 142946 - DNA, 17 bp, synthetic construct
  source 1..17: mol_type = other DNA
ggtgcccaccaggggcc

SEQ ID NO: 142947 - DNA, 17 bp, synthetic construct
  source 1..17: mol_type = other DNA
gtgcccaccaggggcct

SEQ ID NO: 142948 - DNA, 17 bp, synthetic construct
  source 1..17: mol_type = other DNA
tgcccaccaggggcctg

SEQ ID NO: 142949 - DNA, 17 bp, synthetic construct
  source 1..17: mol_type = other DNA
gcccaccaggggcctgt

SEQ ID NO: 142950 - DNA, 17 bp, synthetic construct
  source 1..17: mol_type = other DNA
cccaccaggggcctgtg

SEQ ID NO: 142951 - DNA, 17 bp, synthetic construct
  source 1..17: mol_type = other DNA
ccaccaggggcctgtgg

SEQ ID NO: 142952 - DNA, 17 bp, synthetic construct
  source 1..17: mol_type = other DNA
caccaggggcctgtggg

SEQ ID NO: 142953 - DNA, 17 bp, synthetic construct
  source 1..17: mol_type = other DNA
accaggggcctgtgggt

SEQ ID NO: 142954 - DNA, 17 bp, synthetic construct
  source 1..17: mol_type = other DNA
ccaggggcctgtgggtt

SEQ ID NO: 142955 - DNA, 17 bp, synthetic construct
  source 1..17: mol_type = other DNA
caggggcctgtgggttg

SEQ ID NO: 142956 - DNA, 17 bp, synthetic construct
  source 1..17: mol_type = other DNA
aggggcctgtgggttgg

SEQ ID NO: 142957 - DNA, 17 bp, synthetic construct
  source 1..17: mol_type = other DNA
ggggcctgtgggttggg

SEQ ID NO: 142958 - DNA, 17 bp, synthetic construct
  source 1..17: mol_type = other DNA
gggcctgtgggttgggc

SEQ ID NO: 142959 - DNA, 17 bp, synthetic construct
  source 1..17: mol_type = other DNA
ggcctgtgggttgggca

SEQ ID NO: 142960 - DNA, 17 bp, synthetic construct
  source 1..17: mol_type = other DNA
gcctgtgggttgggcac

SEQ ID NO: 142961 - DNA, 17 bp, synthetic construct
  source 1..17: mol_type = other DNA
cctgtgggttgggcaca

SEQ ID NO: 142962 - DNA, 17 bp, synthetic construct
  source 1..17: mol_type = other DNA
ctgtgggttgggcacag

SEQ ID NO: 142963 - DNA, 17 bp, synthetic construct
  source 1..17: mol_type = other DNA
tgtgggttgggcacagg

SEQ ID NO: 142964 - DNA, 17 bp, synthetic construct
  source 1..17: mol_type = other DNA
gtgggttgggcacagga

SEQ ID NO: 142965 - DNA, 17 bp, synthetic construct
  source 1..17: mol_type = other DNA
tgggttgggcacaggag

SEQ ID NO: 142966 - DNA, 17 bp, synthetic construct
  source 1..17: mol_type = other DNA
gggttgggcacaggaga

SEQ ID NO: 142967 - DNA, 17 bp, synthetic construct
  source 1..17: mol_type = other DNA
ggttgggcacaggagag

SEQ ID NO: 142968 - DNA, 17 bp, synthetic construct
  source 1..17: mol_type = other DNA
gttgggcacaggagagc

SEQ ID NO: 142969 - DNA, 17 bp, synthetic construct
  source 1..17: mol_type = other DNA
ttgggcacaggagagca

SEQ ID NO: 142970 - DNA, 17 bp, synthetic construct
  source 1..17: mol_type = other DNA
tgggcacaggagagcag

SEQ ID NO: 142971 - DNA, 17 bp, synthetic construct
  source 1..17: mol_type = other DNA
gggcacaggagagcaga

SEQ ID NO: 142972 - DNA, 17 bp, synthetic construct
  source 1..17: mol_type = other DNA
ggcacaggagagcagag

SEQ ID NO: 142973 - DNA, 17 bp, synthetic construct
  source 1..17: mol_type = other DNA
gcacaggagagcagagg

SEQ ID NO: 142974 - DNA, 17 bp, synthetic construct
  source 1..17: mol_type = other DNA
cacaggagagcagagga

SEQ ID NO: 142975 - DNA, 17 bp, synthetic construct
  source 1..17: mol_type = other DNA
acaggagagcagaggag

SEQ ID NO: 142976 - DNA, 17 bp, synthetic construct
  source 1..17: mol_type = other DNA
caggagagcagaggaga

SEQ ID NO: 142977 - DNA, 17 bp, synthetic construct
  source 1..17: mol_type = other DNA
aggagagcagaggagag

SEQ ID NO: 142978 - DNA, 17 bp, synthetic construct
  source 1..17: mol_type = other DNA
ggagagcagaggagagc

SEQ ID NO: 142979 - DNA, 17 bp, synthetic construct
  source 1..17: mol_type = other DNA
gagagcagaggagagcc

SEQ ID NO: 142980 - DNA, 17 bp, synthetic construct
  source 1..17: mol_type = other DNA
agagcagaggagagcca

SEQ ID NO: 142981 - DNA, 17 bp, synthetic construct
  source 1..17: mol_type = other DNA
gagcagaggagagccac

SEQ ID NO: 142982 - DNA, 17 bp, synthetic construct
  source 1..17: mol_type = other DNA
agcagaggagagccact

SEQ ID NO: 142983 - DNA, 17 bp, synthetic construct
  source 1..17: mol_type = other DNA
gcagaggagagccactg

SEQ ID NO: 142984 - DNA, 17 bp, synthetic construct
  source 1..17: mol_type = other DNA
cagaggagagccactgt

SEQ ID NO: 142985 - DNA, 17 bp, synthetic construct
  source 1..17: mol_type = other DNA
agaggagagccactgtg

SEQ ID NO: 142986 - DNA, 17 bp, synthetic construct
  source 1..17: mol_type = other DNA
gaggagagccactgtgt

SEQ ID NO: 142987 - DNA, 17 bp, synthetic construct
  source 1..17: mol_type = other DNA
aggagagccactgtgtc

SEQ ID NO: 142988 - DNA, 17 bp, synthetic construct
  source 1..17: mol_type = other DNA
ggagagccactgtgtcc

SEQ ID NO: 142989 - DNA, 17 bp, synthetic construct
  source 1..17: mol_type = other DNA
gagagccactgtgtcct

SEQ ID NO: 142990 - DNA, 17 bp, synthetic construct
  source 1..17: mol_type = other DNA
agagccactgtgtcctg

SEQ ID NO: 142991 - DNA, 17 bp, synthetic construct
  source 1..17: mol_type = other DNA
gagccactgtgtcctgg

SEQ ID NO: 142992 - DNA, 17 bp, synthetic construct
  source 1..17: mol_type = other DNA
agccactgtgtcctggc

SEQ ID NO: 142993 - DNA, 17 bp, synthetic construct
  source 1..17: mol_type = other DNA
gccactgtgtcctggcg

SEQ ID NO: 142994 - DNA, 17 bp, synthetic construct
  source 1..17: mol_type = other DNA
ccactgtgtcctggcgt

SEQ ID NO: 142995 - DNA, 17 bp, synthetic construct
  source 1..17: mol_type = other DNA
cactgtgtcctggcgtg

SEQ ID NO: 142996 - DNA, 17 bp, synthetic construct
  source 1..17: mol_type = other DNA
actgtgtcctggcgtga

SEQ ID NO: 142997 - DNA, 17 bp, synthetic construct
  source 1..17: mol_type = other DNA
ctgtgtcctggcgtgac

SEQ ID NO: 142998 - DNA, 17 bp, synthetic construct
  source 1..17: mol_type = other DNA
tgtgtcctggcgtgacc

SEQ ID NO: 142999 - DNA, 17 bp, synthetic construct
  source 1..17: mol_type = other DNA
gtgtcctggcgtgaccg

SEQ ID NO: 143000 - DNA, 17 bp, synthetic construct
  source 1..17: mol_type = other DNA
tgtcctggcgtgaccgc

SEQ ID NO: 143001 - DNA, 17 bp, synthetic construct
  source 1..17: mol_type = other DNA
gtcctggcgtgaccgcg

SEQ ID NO: 143002 - DNA, 17 bp, synthetic construct
  source 1..17: mol_type = other DNA
tcctggcgtgaccgcgg

SEQ ID NO: 143003 - DNA, 17 bp, synthetic construct
  source 1..17: mol_type = other DNA
cctggcgtgaccgcggc

SEQ ID NO: 143004 - DNA, 17 bp, synthetic construct
  source 1..17: mol_type = other DNA
ctggcgtgaccgcggca

SEQ ID NO: 143005 - DNA, 17 bp, synthetic construct
  source 1..17: mol_type = other DNA
tggcgtgaccgcggcag

SEQ ID NO: 143006 - DNA, 17 bp, synthetic construct
  source 1..17: mol_type = other DNA
ggcgtgaccgcggcagg

SEQ ID NO: 143007 - DNA, 17 bp, synthetic construct
  source 1..17: mol_type = other DNA
gcgtgaccgcggcagga

SEQ ID NO: 143008 - DNA, 17 bp, synthetic construct
  source 1..17: mol_type = other DNA
cgtgaccgcggcaggac

SEQ ID NO: 143009 - DNA, 17 bp, synthetic construct
  source 1..17: mol_type = other DNA
gtgaccgcggcaggacc

SEQ ID NO: 143010 - DNA, 17 bp, synthetic construct
  source 1..17: mol_type = other DNA
tgaccgcggcaggacca

SEQ ID NO: 143011 - DNA, 17 bp, synthetic construct
  source 1..17: mol_type = other DNA
gaccgcggcaggaccac

SEQ ID NO: 143012 - DNA, 17 bp, synthetic construct
  source 1..17: mol_type = other DNA
accgcggcaggaccact

SEQ ID NO: 143013 - DNA, 17 bp, synthetic construct
  source 1..17: mol_type = other DNA
ccgcggcaggaccactc

SEQ ID NO: 143014 - DNA, 17 bp, synthetic construct
  source 1..17: mol_type = other DNA
cgcggcaggaccactcg

SEQ ID NO: 143015 - DNA, 17 bp, synthetic construct
  source 1..17: mol_type = other DNA
gcggcaggaccactcgg

SEQ ID NO: 143016 - DNA, 17 bp, synthetic construct
  source 1..17: mol_type = other DNA
cggcaggaccactcggc

SEQ ID NO: 143017 - DNA, 17 bp, synthetic construct
  source 1..17: mol_type = other DNA
ggcaggaccactcggca

SEQ ID NO: 143018 - DNA, 17 bp, synthetic construct
  source 1..17: mol_type = other DNA
gcaggaccactcggcag

SEQ ID NO: 143019 - DNA, 17 bp, synthetic construct
  source 1..17: mol_type = other DNA
caggaccactcggcaga

SEQ ID NO: 143020 - DNA, 17 bp, synthetic construct
  source 1..17: mol_type = other DNA
aggaccactcggcagag

SEQ ID NO: 143021 - DNA, 17 bp, synthetic construct
  source 1..17: mol_type = other DNA
ggaccactcggcagaga

SEQ ID NO: 143022 - DNA, 17 bp, synthetic construct
  source 1..17: mol_type = other DNA
gaccactcggcagagat

SEQ ID NO: 143023 - DNA, 17 bp, synthetic construct
  source 1..17: mol_type = other DNA
accactcggcagagatg

SEQ ID NO: 143024 - DNA, 17 bp, synthetic construct
  source 1..17: mol_type = other DNA
ccactcggcagagatgg

SEQ ID NO: 143025 - DNA, 17 bp, synthetic construct
  source 1..17: mol_type = other DNA
cactcggcagagatggc

SEQ ID NO: 143026 - DNA, 17 bp, synthetic construct
  source 1..17: mol_type = other DNA
actcggcagagatggcc

SEQ ID NO: 143027 - DNA, 17 bp, synthetic construct
  source 1..17: mol_type = other DNA
ctcggcagagatggcct

SEQ ID NO: 143028 - DNA, 17 bp, synthetic construct
  source 1..17: mol_type = other DNA
tcggcagagatggcctc

SEQ ID NO: 143029 - DNA, 17 bp, synthetic construct
  source 1..17: mol_type = other DNA
cggcagagatggcctcc

SEQ ID NO: 143030 - DNA, 17 bp, synthetic construct
  source 1..17: mol_type = other DNA
ggcagagatggcctcca

SEQ ID NO: 143031 - DNA, 17 bp, synthetic construct
  source 1..17: mol_type = other DNA
gcagagatggcctccag

SEQ ID NO: 143032 - DNA, 17 bp, synthetic construct
  source 1..17: mol_type = other DNA
cagagatggcctccagg

SEQ ID NO: 143033 - DNA, 17 bp, synthetic construct
  source 1..17: mol_type = other DNA
agagatggcctccaggt

SEQ ID NO: 143034 - DNA, 17 bp, synthetic construct
  source 1..17: mol_type = other DNA
gagatggcctccaggtg

SEQ ID NO: 143035 - DNA, 17 bp, synthetic construct
  source 1..17: mol_type = other DNA
agatggcctccaggtgc

SEQ ID NO: 143036 - DNA, 17 bp, synthetic construct
  source 1..17: mol_type = other DNA
gatggcctccaggtgct

SEQ ID NO: 143037 - DNA, 17 bp, synthetic construct
  source 1..17: mol_type = other DNA
atggcctccaggtgctt

SEQ ID NO: 143038 - DNA, 17 bp, synthetic construct
  source 1..17: mol_type = other DNA
tggcctccaggtgcttc

SEQ ID NO: 143039 - DNA, 17 bp, synthetic construct
  source 1..17: mol_type = other DNA
ggcctccaggtgcttca

SEQ ID NO: 143040 - DNA, 17 bp, synthetic construct
  source 1..17: mol_type = other DNA
gcctccaggtgcttcat

SEQ ID NO: 143041 - DNA, 17 bp, synthetic construct
  source 1..17: mol_type = other DNA
cctccaggtgcttcatt

SEQ ID NO: 143042 - DNA, 17 bp, synthetic construct
  source 1..17: mol_type = other DNA
ctccaggtgcttcattc

SEQ ID NO: 143043 - DNA, 17 bp, synthetic construct
  source 1..17: mol_type = other DNA
tccaggtgcttcattct

SEQ ID NO: 143044 - DNA, 17 bp, synthetic construct
  source 1..17: mol_type = other DNA
ccaggtgcttcattctc

SEQ ID NO: 143045 - DNA, 17 bp, synthetic construct
  source 1..17: mol_type = other DNA
caggtgcttcattctcc

SEQ ID NO: 143046 - DNA, 17 bp, synthetic construct
  source 1..17: mol_type = other DNA
aggtgcttcattctcct

SEQ ID NO: 143047 - DNA, 17 bp, synthetic construct
  source 1..17: mol_type = other DNA
ggtgcttcattctcctc

SEQ ID NO: 143048 - DNA, 17 bp, synthetic construct
  source 1..17: mol_type = other DNA
gtgcttcattctcctcc

SEQ ID NO: 143049 - DNA, 17 bp, synthetic construct
  source 1..17: mol_type = other DNA
tgcttcattctcctcct

SEQ ID NO: 143050 - DNA, 17 bp, synthetic construct
  source 1..17: mol_type = other DNA
gcttcattctcctccta

SEQ ID NO: 143051 - DNA, 17 bp, synthetic construct
  source 1..17: mol_type = other DNA
cttcattctcctcctaa

SEQ ID NO: 143052 - DNA, 17 bp, synthetic construct
  source 1..17: mol_type = other DNA
ttcattctcctcctaac

SEQ ID NO: 143053 - DNA, 17 bp, synthetic construct
  source 1..17: mol_type = other DNA
tcattctcctcctaacg

SEQ ID NO: 143054 - DNA, 17 bp, synthetic construct
  source 1..17: mol_type = other DNA
cattctcctcctaacga

SEQ ID NO: 143055 - DNA, 17 bp, synthetic construct
  source 1..17: mol_type = other DNA
attctcctcctaacgat

SEQ ID NO: 143056 - DNA, 17 bp, synthetic construct
  source 1..17: mol_type = other DNA
ttctcctcctaacgatg

SEQ ID NO: 143057 - DNA, 17 bp, synthetic construct
  source 1..17: mol_type = other DNA
tctcctcctaacgatga

SEQ ID NO: 143058 - DNA, 17 bp, synthetic construct
  source 1..17: mol_type = other DNA
ctcctcctaacgatgag

SEQ ID NO: 143059 - DNA, 17 bp, synthetic construct
  source 1..17: mol_type = other DNA
tcctcctaacgatgagg

SEQ ID NO: 143060 - DNA, 17 bp, synthetic construct
  source 1..17: mol_type = other DNA
cctcctaacgatgaggc

SEQ ID NO: 143061 - DNA, 17 bp, synthetic construct
  source 1..17: mol_type = other DNA
ctcctaacgatgaggct

SEQ ID NO: 143062 - DNA, 17 bp, synthetic construct
  source 1..17: mol_type = other DNA
tcctaacgatgaggctg

SEQ ID NO: 143063 - DNA, 17 bp, synthetic construct
  source 1..17: mol_type = other DNA
cctaacgatgaggctgg

SEQ ID NO: 143064 - DNA, 17 bp, synthetic construct
  source 1..17: mol_type = other DNA
ctaacgatgaggctggt

SEQ ID NO: 143065 - DNA, 17 bp, synthetic construct
  source 1..17: mol_type = other DNA
taacgatgaggctggtg

SEQ ID NO: 143066 - DNA, 17 bp, synthetic construct
  source 1..17: mol_type = other DNA
aacgatgaggctggtga

SEQ ID NO: 143067 - DNA, 17 bp, synthetic construct
  source 1..17: mol_type = other DNA
acgatgaggctggtgac

SEQ ID NO: 143068 - DNA, 17 bp, synthetic construct
  source 1..17: mol_type = other DNA
cgatgaggctggtgacc

SEQ ID NO: 143069 - DNA, 17 bp, synthetic construct
  source 1..17: mol_type = other DNA
gatgaggctggtgacct

SEQ ID NO: 143070 - DNA, 17 bp, synthetic construct
  source 1..17: mol_type = other DNA
atgaggctggtgacctc

SEQ ID NO: 143071 - DNA, 17 bp, synthetic construct
  source 1..17: mol_type = other DNA
tgaggctggtgacctct

SEQ ID NO: 143072 - DNA, 17 bp, synthetic construct
  source 1..17: mol_type = other DNA
gaggctggtgacctctg

SEQ ID NO: 143073 - DNA, 17 bp, synthetic construct
  source 1..17: mol_type = other DNA
aggctggtgacctctgg

SEQ ID NO: 143074 - DNA, 17 bp, synthetic construct
  source 1..17: mol_type = other DNA
ggctggtgacctctggc

SEQ ID NO: 143075 - DNA, 17 bp, synthetic construct
  source 1..17: mol_type = other DNA
gctggtgacctctggcc

SEQ ID NO: 143076 - DNA, 17 bp, synthetic construct
  source 1..17: mol_type = other DNA
ctggtgacctctggcct

SEQ ID NO: 143077 - DNA, 17 bp, synthetic construct
  source 1..17: mol_type = other DNA
tggtgacctctggcctg

SEQ ID NO: 143078 - DNA, 17 bp, synthetic construct
  source 1..17: mol_type = other DNA
ggtgacctctggcctgc

SEQ ID NO: 143079 - DNA, 17 bp, synthetic construct
  source 1..17: mol_type = other DNA
gtgacctctggcctgcc

SEQ ID NO: 143080 - DNA, 17 bp, synthetic construct
  source 1..17: mol_type = other DNA
tgacctctggcctgccc

SEQ ID NO: 143081 - DNA, 17 bp, synthetic construct
  source 1..17: mol_type = other DNA
gacctctggcctgccca

SEQ ID NO: 143082 - DNA, 17 bp, synthetic construct
  source 1..17: mol_type = other DNA
acctctggcctgcccag

SEQ ID NO: 143083 - DNA, 17 bp, synthetic construct
  source 1..17: mol_type = other DNA
cctctggcctgcccagg

SEQ ID NO: 143084 - DNA, 17 bp, synthetic construct
  source 1..17: mol_type = other DNA
ctctggcctgcccagga

SEQ ID NO: 143085 - DNA, 17 bp, synthetic construct
  source 1..17: mol_type = other DNA
tctggcctgcccaggag

SEQ ID NO: 143086 - DNA, 17 bp, synthetic construct
  source 1..17: mol_type = other DNA
ctggcctgcccaggagt

SEQ ID NO: 143087 - DNA, 17 bp, synthetic construct
  source 1..17: mol_type = other DNA
tggcctgcccaggagtg

SEQ ID NO: 143088 - DNA, 17 bp, synthetic construct
  source 1..17: mol_type = other DNA
ggcctgcccaggagtgg

SEQ ID NO: 143089 - DNA, 17 bp, synthetic construct
  source 1..17: mol_type = other DNA
gcctgcccaggagtggc

SEQ ID NO: 143090 - DNA, 17 bp, synthetic construct
  source 1..17: mol_type = other DNA
cctgcccaggagtggcc

SEQ ID NO: 143091 - DNA, 17 bp, synthetic construct
  source 1..17: mol_type = other DNA
ctgcccaggagtggccc

SEQ ID NO: 143092 - DNA, 17 bp, synthetic construct
  source 1..17: mol_type = other DNA
tgcccaggagtggccca

SEQ ID NO: 143093 - DNA, 17 bp, synthetic construct
  source 1..17: mol_type = other DNA
gcccaggagtggcccag

SEQ ID NO: 143094 - DNA, 17 bp, synthetic construct
  source 1..17: mol_type = other DNA
cccaggagtggcccagg

SEQ ID NO: 143095 - DNA, 17 bp, synthetic construct
  source 1..17: mol_type = other DNA
ccaggagtggcccaggg

SEQ ID NO: 143096 - DNA, 17 bp, synthetic construct
  source 1..17: mol_type = other DNA
caggagtggcccaggga

SEQ ID NO: 143097 - DNA, 17 bp, synthetic construct
  source 1..17: mol_type = other DNA
aggagtggcccagggac

SEQ ID NO: 143098 - DNA, 17 bp, synthetic construct
  source 1..17: mol_type = other DNA
ggagtggcccagggacg

SEQ ID NO: 143099 - DNA, 17 bp, synthetic construct
  source 1..17: mol_type = other DNA
gagtggcccagggacgt

SEQ ID NO: 143100 - DNA, 17 bp, synthetic construct
  source 1..17: mol_type = other DNA
agtggcccagggacgtg

SEQ ID NO: 143101 - DNA, 17 bp, synthetic construct
  source 1..17: mol_type = other DNA
gtggcccagggacgtgg

SEQ ID NO: 143102 - DNA, 17 bp, synthetic construct
  source 1..17: mol_type = other DNA
tggcccagggacgtggg

SEQ ID NO: 143103 - DNA, 17 bp, synthetic construct
  source 1..17: mol_type = other DNA
ggcccagggacgtggga

SEQ ID NO: 143104 - DNA, 17 bp, synthetic construct
  source 1..17: mol_type = other DNA
gcccagggacgtgggaa

SEQ ID NO: 143105 - DNA, 17 bp, synthetic construct
  source 1..17: mol_type = other DNA
cccagggacgtgggaag

SEQ ID NO: 143106 - DNA, 17 bp, synthetic construct
  source 1..17: mol_type = other DNA
ccagggacgtgggaagc

SEQ ID NO: 143107 - DNA, 17 bp, synthetic construct
  source 1..17: mol_type = other DNA
cagggacgtgggaagca

SEQ ID NO: 143108 - DNA, 17 bp, synthetic construct
  source 1..17: mol_type = other DNA
agggacgtgggaagcag

SEQ ID NO: 143109 - DNA, 17 bp, synthetic construct
  source 1..17: mol_type = other DNA
gggacgtgggaagcagc

SEQ ID NO: 143110 - DNA, 17 bp, synthetic construct
  source 1..17: mol_type = other DNA
ggacgtgggaagcagcg

SEQ ID NO: 143111 - DNA, 17 bp, synthetic construct
  source 1..17: mol_type = other DNA
gacgtgggaagcagcgg

SEQ ID NO: 143112 - DNA, 17 bp, synthetic construct
  source 1..17: mol_type = other DNA
acgtgggaagcagcggg

SEQ ID NO: 143113 - DNA, 17 bp, synthetic construct
  source 1..17: mol_type = other DNA
cgtgggaagcagcgggg

SEQ ID NO: 143114 - DNA, 17 bp, synthetic construct
  source 1..17: mol_type = other DNA
gtgggaagcagcgggga

SEQ ID NO: 143115 - DNA, 17 bp, synthetic construct
  source 1..17: mol_type = other DNA
tgggaagcagcggggag

SEQ ID NO: 143116 - DNA, 17 bp, synthetic construct
  source 1..17: mol_type = other DNA
gggaagcagcggggagg

SEQ ID NO: 143117 - DNA, 17 bp, synthetic construct
  source 1..17: mol_type = other DNA
ggaagcagcggggaggt

SEQ ID NO: 143118 - DNA, 17 bp, synthetic construct
  source 1..17: mol_type = other DNA
gaagcagcggggaggtg

SEQ ID NO: 143119 - DNA, 17 bp, synthetic construct
  source 1..17: mol_type = other DNA
aagcagcggggaggtgg

SEQ ID NO: 143120 - DNA, 17 bp, synthetic construct
  source 1..17: mol_type = other DNA
agcagcggggaggtggc

SEQ ID NO: 143121 - DNA, 17 bp, synthetic construct
  source 1..17: mol_type = other DNA
gcagcggggaggtggcc

SEQ ID NO: 143122 - DNA, 17 bp, synthetic construct
  source 1..17: mol_type = other DNA
cagcggggaggtggcca

SEQ ID NO: 143123 - DNA, 17 bp, synthetic construct
  source 1..17: mol_type = other DNA
agcggggaggtggccaa

SEQ ID NO: 143124 - DNA, 17 bp, synthetic construct
  source 1..17: mol_type = other DNA
gcggggaggtggccaag

SEQ ID NO: 143125 - DNA, 17 bp, synthetic construct
  source 1..17: mol_type = other DNA
cggggaggtggccaagc

SEQ ID NO: 143126 - DNA, 17 bp, synthetic construct
  source 1..17: mol_type = other DNA
ggggaggtggccaagca

SEQ ID NO: 143127 - DNA, 17 bp, synthetic construct
  source 1..17: mol_type = other DNA
gggaggtggccaagcaa

SEQ ID NO: 143128 - DNA, 17 bp, synthetic construct
  source 1..17: mol_type = other DNA
ggaggtggccaagcaag

SEQ ID NO: 143129 - DNA, 17 bp, synthetic construct
  source 1..17: mol_type = other DNA
gaggtggccaagcaagg

SEQ ID NO: 143130 - DNA, 17 bp, synthetic construct
  source 1..17: mol_type = other DNA
aggtggccaagcaaggg

SEQ ID NO: 143131 - DNA, 17 bp, synthetic construct
  source 1..17: mol_type = other DNA
ggtggccaagcaagggg

SEQ ID NO: 143132 - DNA, 17 bp, synthetic construct
  source 1..17: mol_type = other DNA
gtggccaagcaaggggc

SEQ ID NO: 143133 - DNA, 17 bp, synthetic construct
  source 1..17: mol_type = other DNA
tggccaagcaaggggcc

SEQ ID NO: 143134 - DNA, 17 bp, synthetic construct
  source 1..17: mol_type = other DNA
ggccaagcaaggggcct

SEQ ID NO: 143135 - DNA, 17 bp, synthetic construct
  source 1..17: mol_type = other DNA
gccaagcaaggggcctg

SEQ ID NO: 143136 - DNA, 17 bp, synthetic construct
  source 1..17: mol_type = other DNA
ccaagcaaggggcctgg

SEQ ID NO: 143137 - DNA, 17 bp, synthetic construct
  source 1..17: mol_type = other DNA
caagcaaggggcctgga

SEQ ID NO: 143138 - DNA, 17 bp, synthetic construct
  source 1..17: mol_type = other DNA
aagcaaggggcctggag

SEQ ID NO: 143139 - DNA, 17 bp, synthetic construct
  source 1..17: mol_type = other DNA
agcaaggggcctggagg

SEQ ID NO: 143140 - DNA, 17 bp, synthetic construct
  source 1..17: mol_type = other DNA
gcaaggggcctggaggg

SEQ ID NO: 143141 - DNA, 17 bp, synthetic construct
  source 1..17: mol_type = other DNA
caaggggcctggaggga

SEQ ID NO: 143142 - DNA, 17 bp, synthetic construct
  source 1..17: mol_type = other DNA
aaggggcctggagggag

SEQ ID NO: 143143 - DNA, 17 bp, synthetic construct
  source 1..17: mol_type = other DNA
aggggcctggagggagc

SEQ ID NO: 143144 - DNA, 17 bp, synthetic construct
  source 1..17: mol_type = other DNA
ggggcctggagggagcc

SEQ ID NO: 143145 - DNA, 17 bp, synthetic construct
  source 1..17: mol_type = other DNA
gggcctggagggagccc

SEQ ID NO: 143146 - DNA, 17 bp, synthetic construct
  source 1..17: mol_type = other DNA
ggcctggagggagcccc

SEQ ID NO: 143147 - DNA, 17 bp, synthetic construct
  source 1..17: mol_type = other DNA
gcctggagggagccccc

SEQ ID NO: 143148 - DNA, 17 bp, synthetic construct
  source 1..17: mol_type = other DNA
cctggagggagccccca

SEQ ID NO: 143149 - DNA, 17 bp, synthetic construct
  source 1..17: mol_type = other DNA
ctggagggagcccccag

SEQ ID NO: 143150 - DNA, 17 bp, synthetic construct
  source 1..17: mol_type = other DNA
tggagggagcccccagg

SEQ ID NO: 143151 - DNA, 17 bp, synthetic construct
  source 1..17: mol_type = other DNA
ggagggagcccccaggg

SEQ ID NO: 143152 - DNA, 17 bp, synthetic construct
  source 1..17: mol_type = other DNA
gagggagcccccagggg

SEQ ID NO: 143153 - DNA, 17 bp, synthetic construct
  source 1..17: mol_type = other DNA
agggagcccccaggggc

SEQ ID NO: 143154 - DNA, 17 bp, synthetic construct
  source 1..17: mol_type = other DNA
gggagcccccaggggct

SEQ ID NO: 143155 - DNA, 17 bp, synthetic construct
  source 1..17: mol_type = other DNA
ggagcccccaggggctg

SEQ ID NO: 143156 - DNA, 17 bp, synthetic construct
  source 1..17: mol_type = other DNA
gagcccccaggggctgt

SEQ ID NO: 143157 - DNA, 17 bp, synthetic construct
  source 1..17: mol_type = other DNA
agcccccaggggctgtg

SEQ ID NO: 143158 - DNA, 17 bp, synthetic construct
  source 1..17: mol_type = other DNA
gcccccaggggctgtga

SEQ ID NO: 143159 - DNA, 17 bp, synthetic construct
  source 1..17: mol_type = other DNA
cccccaggggctgtgaa

SEQ ID NO: 143160 - DNA, 17 bp, synthetic construct
  source 1..17: mol_type = other DNA
ccccaggggctgtgaag

SEQ ID NO: 143161 - DNA, 17 bp, synthetic construct
  source 1..17: mol_type = other DNA
cccaggggctgtgaagc

SEQ ID NO: 143162 - DNA, 17 bp, synthetic construct
  source 1..17: mol_type = other DNA
ccaggggctgtgaagcg

SEQ ID NO: 143163 - DNA, 17 bp, synthetic construct
  source 1..17: mol_type = other DNA
caggggctgtgaagcgg

SEQ ID NO: 143164 - DNA, 17 bp, synthetic construct
  source 1..17: mol_type = other DNA
aggggctgtgaagcggt

SEQ ID NO: 143165 - DNA, 17 bp, synthetic construct
  source 1..17: mol_type = other DNA
ggggctgtgaagcggtc

SEQ ID NO: 143166 - DNA, 17 bp, synthetic construct
  source 1..17: mol_type = other DNA
gggctgtgaagcggtca

SEQ ID NO: 143167 - DNA, 17 bp, synthetic construct
  source 1..17: mol_type = other DNA
ggctgtgaagcggtcag

SEQ ID NO: 143168 - DNA, 17 bp, synthetic construct
  source 1..17: mol_type = other DNA
gctgtgaagcggtcagg

SEQ ID NO: 143169 - DNA, 17 bp, synthetic construct
  source 1..17: mol_type = other DNA
ctgtgaagcggtcaggt

SEQ ID NO: 143170 - DNA, 17 bp, synthetic construct
  source 1..17: mol_type = other DNA
tgtgaagcggtcaggtc

SEQ ID NO: 143171 - DNA, 17 bp, synthetic construct
  source 1..17: mol_type = other DNA
gtgaagcggtcaggtcc

SEQ ID NO: 143172 - DNA, 17 bp, synthetic construct
  source 1..17: mol_type = other DNA
tgaagcggtcaggtcct

SEQ ID NO: 143173 - DNA, 17 bp, synthetic construct
  source 1..17: mol_type = other DNA
gaagcggtcaggtcctc

SEQ ID NO: 143174 - DNA, 17 bp, synthetic construct
  source 1..17: mol_type = other DNA
aagcggtcaggtcctcg

SEQ ID NO: 143175 - DNA, 17 bp, synthetic construct
  source 1..17: mol_type = other DNA
agcggtcaggtcctcgg

SEQ ID NO: 143176 - DNA, 17 bp, synthetic construct
  source 1..17: mol_type = other DNA
gcggtcaggtcctcggg

SEQ ID NO: 143177 - DNA, 17 bp, synthetic construct
  source 1..17: mol_type = other DNA
cggtcaggtcctcgggg

SEQ ID NO: 143178 - DNA, 17 bp, synthetic construct
  source 1..17: mol_type = other DNA
ggtcaggtcctcgggga

SEQ ID NO: 143179 - DNA, 17 bp, synthetic construct
  source 1..17: mol_type = other DNA
gtcaggtcctcggggaa

SEQ ID NO: 143180 - DNA, 17 bp, synthetic construct
  source 1..17: mol_type = other DNA
tcaggtcctcggggaaa

SEQ ID NO: 143181 - DNA, 17 bp, synthetic construct
  source 1..17: mol_type = other DNA
caggtcctcggggaaaa

SEQ ID NO: 143182 - DNA, 17 bp, synthetic construct
  source 1..17: mol_type = other DNA
aggtcctcggggaaaag

SEQ ID NO: 143183 - DNA, 17 bp, synthetic construct
  source 1..17: mol_type = other DNA
ggtcctcggggaaaagc

SEQ ID NO: 143184 - DNA, 17 bp, synthetic construct
  source 1..17: mol_type = other DNA
gtcctcggggaaaagca

SEQ ID NO: 143185 - DNA, 17 bp, synthetic construct
  source 1..17: mol_type = other DNA
tcctcggggaaaagcac

SEQ ID NO: 143186 - DNA, 17 bp, synthetic construct
  source 1..17: mol_type = other DNA
cctcggggaaaagcacg

SEQ ID NO: 143187 - DNA, 17 bp, synthetic construct
  source 1..17: mol_type = other DNA
ctcggggaaaagcacgc

SEQ ID NO: 143188 - DNA, 17 bp, synthetic construct
  source 1..17: mol_type = other DNA
tcggggaaaagcacgcc

SEQ ID NO: 143189 - DNA, 17 bp, synthetic construct
  source 1..17: mol_type = other DNA
cggggaaaagcacgcct

SEQ ID NO: 143190 - DNA, 17 bp, synthetic construct
  source 1..17: mol_type = other DNA
ggggaaaagcacgcctg

SEQ ID NO: 143191 - DNA, 17 bp, synthetic construct
  source 1..17: mol_type = other DNA
gggaaaagcacgcctgc

SEQ ID NO: 143192 - DNA, 17 bp, synthetic construct
  source 1..17: mol_type = other DNA
ggaaaagcacgcctgcg

SEQ ID NO: 143193 - DNA, 17 bp, synthetic construct
  source 1..17: mol_type = other DNA
gaaaagcacgcctgcga

SEQ ID NO: 143194 - DNA, 17 bp, synthetic construct
  source 1..17: mol_type = other DNA
aaaagcacgcctgcgac

SEQ ID NO: 143195 - DNA, 17 bp, synthetic construct
  source 1..17: mol_type = other DNA
aaagcacgcctgcgact

SEQ ID NO: 143196 - DNA, 17 bp, synthetic construct
  source 1..17: mol_type = other DNA
aagcacgcctgcgactt

SEQ ID NO: 143197 - DNA, 17 bp, synthetic construct
  source 1..17: mol_type = other DNA
agcacgcctgcgactta

SEQ ID NO: 143198 - DNA, 17 bp, synthetic construct
  source 1..17: mol_type = other DNA
gcacgcctgcgacttac

SEQ ID NO: 143199 - DNA, 17 bp, synthetic construct
  source 1..17: mol_type = other DNA
cacgcctgcgacttact

SEQ ID NO: 143200 - DNA, 17 bp, synthetic construct
  source 1..17: mol_type = other DNA
acgcctgcgacttactc

SEQ ID NO: 143201 - DNA, 17 bp, synthetic construct
  source 1..17: mol_type = other DNA
cgcctgcgacttactct

SEQ ID NO: 143202 - DNA, 17 bp, synthetic construct
  source 1..17: mol_type = other DNA
gcctgcgacttactctg

SEQ ID NO: 143203 - DNA, 17 bp, synthetic construct
  source 1..17: mol_type = other DNA
cctgcgacttactctgg

SEQ ID NO: 143204 - DNA, 17 bp, synthetic construct
  source 1..17: mol_type = other DNA
ctgcgacttactctggg

SEQ ID NO: 143205 - DNA, 17 bp, synthetic construct
  source 1..17: mol_type = other DNA
tgcgacttactctggga

SEQ ID NO: 143206 - DNA, 17 bp, synthetic construct
  source 1..17: mol_type = other DNA
gcgacttactctgggaa

SEQ ID NO: 143207 - DNA, 17 bp, synthetic construct
  source 1..17: mol_type = other DNA
cgacttactctgggaac

SEQ ID NO: 143208 - DNA, 17 bp, synthetic construct
  source 1..17: mol_type = other DNA
gacttactctgggaaca

SEQ ID NO: 143209 - DNA, 17 bp, synthetic construct
  source 1..17: mol_type = other DNA
acttactctgggaacaa

SEQ ID NO: 143210 - DNA, 17 bp, synthetic construct
  source 1..17: mol_type = other DNA
cttactctgggaacaag

SEQ ID NO: 143211 - DNA, 17 bp, synthetic construct
  source 1..17: mol_type = other DNA
ttactctgggaacaagt

SEQ ID NO: 143212 - DNA, 17 bp, synthetic construct
  source 1..17: mol_type = other DNA
tactctgggaacaagtg

SEQ ID NO: 143213 - DNA, 17 bp, synthetic construct
  source 1..17: mol_type = other DNA
actctgggaacaagtgg

SEQ ID NO: 143214 - DNA, 17 bp, synthetic construct
  source 1..17: mol_type = other DNA
ctctgggaacaagtggt

SEQ ID NO: 143215 - DNA, 17 bp, synthetic construct
  source 1..17: mol_type = other DNA
tctgggaacaagtggtc

SEQ ID NO: 143216 - DNA, 17 bp, synthetic construct
  source 1..17: mol_type = other DNA
ctgggaacaagtggtcg

SEQ ID NO: 143217 - DNA, 17 bp, synthetic construct
  source 1..17: mol_type = other DNA
tgggaacaagtggtcgg

SEQ ID NO: 143218 - DNA, 17 bp, synthetic construct
  source 1..17: mol_type = other DNA
gggaacaagtggtcggg

SEQ ID NO: 143219 - DNA, 17 bp, synthetic construct
  source 1..17: mol_type = other DNA
ggaacaagtggtcggga

SEQ ID NO: 143220 - DNA, 17 bp, synthetic construct
  source 1..17: mol_type = other DNA
gaacaagtggtcgggag

SEQ ID NO: 143221 - DNA, 17 bp, synthetic construct
  source 1..17: mol_type = other DNA
aacaagtggtcgggagg

SEQ ID NO: 143222 - DNA, 17 bp, synthetic construct
  source 1..17: mol_type = other DNA
acaagtggtcgggagga

SEQ ID NO: 143223 - DNA, 17 bp, synthetic construct
  source 1..17: mol_type = other DNA
caagtggtcgggaggag

SEQ ID NO: 143224 - DNA, 17 bp, synthetic construct
  source 1..17: mol_type = other DNA
aagtggtcgggaggagg

SEQ ID NO: 143225 - DNA, 17 bp, synthetic construct
  source 1..17: mol_type = other DNA
agtggtcgggaggagga

SEQ ID NO: 143226 - DNA, 17 bp, synthetic construct
  source 1..17: mol_type = other DNA
gtggtcgggaggaggag

SEQ ID NO: 143227 - DNA, 17 bp, synthetic construct
  source 1..17: mol_type = other DNA
tggtcgggaggaggagt

SEQ ID NO: 143228 - DNA, 17 bp, synthetic construct
  source 1..17: mol_type = other DNA
ggtcgggaggaggagtg

SEQ ID NO: 143229 - DNA, 17 bp, synthetic construct
  source 1..17: mol_type = other DNA
gtcgggaggaggagtga

SEQ ID NO: 143230 - DNA, 17 bp, synthetic construct
  source 1..17: mol_type = other DNA
tcgggaggaggagtgag

SEQ ID NO: 143231 - DNA, 17 bp, synthetic construct
  source 1..17: mol_type = other DNA
cgggaggaggagtgagc

SEQ ID NO: 143232 - DNA, 17 bp, synthetic construct
  source 1..17: mol_type = other DNA
gggaggaggagtgagca

SEQ ID NO: 143233 - DNA, 17 bp, synthetic construct
  source 1..17: mol_type = other DNA
ggaggaggagtgagcag

SEQ ID NO: 143234 - DNA, 17 bp, synthetic construct
  source 1..17: mol_type = other DNA
gaggaggagtgagcagc

SEQ ID NO: 143235 - DNA, 17 bp, synthetic construct
  source 1..17: mol_type = other DNA
aggaggagtgagcagcg

SEQ ID NO: 143236 - DNA, 17 bp, synthetic construct
  source 1..17: mol_type = other DNA
ggaggagtgagcagcgc

SEQ ID NO: 143237 - DNA, 17 bp, synthetic construct
  source 1..17: mol_type = other DNA
gaggagtgagcagcgcc

SEQ ID NO: 143238 - DNA, 17 bp, synthetic construct
  source 1..17: mol_type = other DNA
aggagtgagcagcgccc

SEQ ID NO: 143239 - DNA, 17 bp, synthetic construct
  source 1..17: mol_type = other DNA
ggagtgagcagcgccca

SEQ ID NO: 143240 - DNA, 17 bp, synthetic construct
  source 1..17: mol_type = other DNA
gagtgagcagcgcccag

SEQ ID NO: 143241 - DNA, 17 bp, synthetic construct
  source 1..17: mol_type = other DNA
agtgagcagcgcccaga

SEQ ID NO: 143242 - DNA, 17 bp, synthetic construct
  source 1..17: mol_type = other DNA
gtgagcagcgcccagac

SEQ ID NO: 143243 - DNA, 17 bp, synthetic construct
  source 1..17: mol_type = other DNA
tgagcagcgcccagaca

SEQ ID NO: 143244 - DNA, 17 bp, synthetic construct
  source 1..17: mol_type = other DNA
gagcagcgcccagacag

SEQ ID NO: 143245 - DNA, 17 bp, synthetic construct
  source 1..17: mol_type = other DNA
agcagcgcccagacagt

SEQ ID NO: 143246 - DNA, 17 bp, synthetic construct
  source 1..17: mol_type = other DNA
gcagcgcccagacagtg

SEQ ID NO: 143247 - DNA, 17 bp, synthetic construct
  source 1..17: mol_type = other DNA
cagcgcccagacagtgg

SEQ ID NO: 143248 - DNA, 17 bp, synthetic construct
  source 1..17: mol_type = other DNA
agcgcccagacagtggc

SEQ ID NO: 143249 - DNA, 17 bp, synthetic construct
  source 1..17: mol_type = other DNA
gcgcccagacagtggcc

SEQ ID NO: 143250 - DNA, 17 bp, synthetic construct
  source 1..17: mol_type = other DNA
cgcccagacagtggcct

SEQ ID NO: 143251 - DNA, 17 bp, synthetic construct
  source 1..17: mol_type = other DNA
gcccagacagtggcctc

SEQ ID NO: 143252 - DNA, 17 bp, synthetic construct
  source 1..17: mol_type = other DNA
cccagacagtggcctcc

SEQ ID NO: 143253 - DNA, 17 bp, synthetic construct
  source 1..17: mol_type = other DNA
ccagacagtggcctcca

SEQ ID NO: 143254 - DNA, 17 bp, synthetic construct
  source 1..17: mol_type = other DNA
cagacagtggcctccat

SEQ ID NO: 143255 - DNA, 17 bp, synthetic construct
  source 1..17: mol_type = other DNA
agacagtggcctccatc

SEQ ID NO: 143256 - DNA, 17 bp, synthetic construct
  source 1..17: mol_type = other DNA
gacagtggcctccatcc

SEQ ID NO: 143257 - DNA, 17 bp, synthetic construct
  source 1..17: mol_type = other DNA
acagtggcctccatcct

SEQ ID NO: 143258 - DNA, 17 bp, synthetic construct
  source 1..17: mol_type = other DNA
cagtggcctccatcctc

SEQ ID NO: 143259 - DNA, 17 bp, synthetic construct
  source 1..17: mol_type = other DNA
agtggcctccatcctcc

SEQ ID NO: 143260 - DNA, 17 bp, synthetic construct
  source 1..17: mol_type = other DNA
gtggcctccatcctccc

SEQ ID NO: 143261 - DNA, 17 bp, synthetic construct
  source 1..17: mol_type = other DNA
tggcctccatcctcccg

SEQ ID NO: 143262 - DNA, 17 bp, synthetic construct
  source 1..17: mol_type = other DNA
ggcctccatcctcccgc

SEQ ID NO: 143263 - DNA, 17 bp, synthetic construct
  source 1..17: mol_type = other DNA
gcctccatcctcccgca

SEQ ID NO: 143264 - DNA, 17 bp, synthetic construct
  source 1..17: mol_type = other DNA
cctccatcctcccgcag

SEQ ID NO: 143265 - DNA, 17 bp, synthetic construct
  source 1..17: mol_type = other DNA
ctccatcctcccgcagt

SEQ ID NO: 143266 - DNA, 17 bp, synthetic construct
  source 1..17: mol_type = other DNA
tccatcctcccgcagtg

SEQ ID NO: 143267 - DNA, 17 bp, synthetic construct
  source 1..17: mol_type = other DNA
ccatcctcccgcagtgt

SEQ ID NO: 143268 - DNA, 17 bp, synthetic construct
  source 1..17: mol_type = other DNA
catcctcccgcagtgtg

SEQ ID NO: 143269 - DNA, 17 bp, synthetic construct
  source 1..17: mol_type = other DNA
atcctcccgcagtgtgc

SEQ ID NO: 143270 - DNA, 17 bp, synthetic construct
  source 1..17: mol_type = other DNA
tcctcccgcagtgtgca

SEQ ID NO: 143271 - DNA, 17 bp, synthetic construct
  source 1..17: mol_type = other DNA
cctcccgcagtgtgcaa

SEQ ID NO: 143272 - DNA, 17 bp, synthetic construct
  source 1..17: mol_type = other DNA
ctcccgcagtgtgcaac

SEQ ID NO: 143273 - DNA, 17 bp, synthetic construct
  source 1..17: mol_type = other DNA
tcccgcagtgtgcaaca

SEQ ID NO: 143274 - DNA, 17 bp, synthetic construct
  source 1..17: mol_type = other DNA
cccgcagtgtgcaacac

SEQ ID NO: 143275 - DNA, 17 bp, synthetic construct
  source 1..17: mol_type = other DNA
ccgcagtgtgcaacaca

SEQ ID NO: 143276 - DNA, 17 bp, synthetic construct
  source 1..17: mol_type = other DNA
cgcagtgtgcaacacaa

SEQ ID NO: 143277 - DNA, 17 bp, synthetic construct
  source 1..17: mol_type = other DNA
gcagtgtgcaacacaac

SEQ ID NO: 143278 - DNA, 17 bp, synthetic construct
  source 1..17: mol_type = other DNA
cagtgtgcaacacaacc

SEQ ID NO: 143279 - DNA, 17 bp, synthetic construct
  source 1..17: mol_type = other DNA
agtgtgcaacacaacca

SEQ ID NO: 143280 - DNA, 17 bp, synthetic construct
  source 1..17: mol_type = other DNA
gtgtgcaacacaaccac

SEQ ID NO: 143281 - DNA, 17 bp, synthetic construct
  source 1..17: mol_type = other DNA
tgtgcaacacaaccacc

SEQ ID NO: 143282 - DNA, 17 bp, synthetic construct
  source 1..17: mol_type = other DNA
gtgcaacacaaccacct

SEQ ID NO: 143283 - DNA, 17 bp, synthetic construct
  source 1..17: mol_type = other DNA
tgcaacacaaccacctg

SEQ ID NO: 143284 - DNA, 17 bp, synthetic construct
  source 1..17: mol_type = other DNA
gcaacacaaccacctgc

SEQ ID NO: 143285 - DNA, 17 bp, synthetic construct
  source 1..17: mol_type = other DNA
caacacaaccacctgcc

SEQ ID NO: 143286 - DNA, 17 bp, synthetic construct
  source 1..17: mol_type = other DNA
aacacaaccacctgccc

SEQ ID NO: 143287 - DNA, 17 bp, synthetic construct
  source 1..17: mol_type = other DNA
acacaaccacctgcccc

SEQ ID NO: 143288 - DNA, 17 bp, synthetic construct
  source 1..17: mol_type = other DNA
cacaaccacctgccccc

SEQ ID NO: 143289 - DNA, 17 bp, synthetic construct
  source 1..17: mol_type = other DNA
acaaccacctgccccca

SEQ ID NO: 143290 - DNA, 17 bp, synthetic construct
  source 1..17: mol_type = other DNA
caaccacctgcccccag

SEQ ID NO: 143291 - DNA, 17 bp, synthetic construct
  source 1..17: mol_type = other DNA
aaccacctgcccccaga

SEQ ID NO: 143292 - DNA, 17 bp, synthetic construct
  source 1..17: mol_type = other DNA
accacctgcccccagag

SEQ ID NO: 143293 - DNA, 17 bp, synthetic construct
  source 1..17: mol_type = other DNA
ccacctgcccccagagc

SEQ ID NO: 143294 - DNA, 17 bp, synthetic construct
  source 1..17: mol_type = other DNA
cacctgcccccagagcc

SEQ ID NO: 143295 - DNA, 17 bp, synthetic construct
  source 1..17: mol_type = other DNA
acctgcccccagagcct

SEQ ID NO: 143296 - DNA, 17 bp, synthetic construct
  source 1..17: mol_type = other DNA
cctgcccccagagcctg

SEQ ID NO: 143297 - DNA, 17 bp, synthetic construct
  source 1..17: mol_type = other DNA
ctgcccccagagcctgc

SEQ ID NO: 143298 - DNA, 17 bp, synthetic construct
  source 1..17: mol_type = other DNA
tgcccccagagcctgcc

SEQ ID NO: 143299 - DNA, 17 bp, synthetic construct
  source 1..17: mol_type = other DNA
gcccccagagcctgcct

SEQ ID NO: 143300 - DNA, 17 bp, synthetic construct
  source 1..17: mol_type = other DNA
cccccagagcctgcctg

SEQ ID NO: 143301 - DNA, 17 bp, synthetic construct
  source 1..17: mol_type = other DNA
ccccagagcctgcctgt

SEQ ID NO: 143302 - DNA, 17 bp, synthetic construct
  source 1..17: mol_type = other DNA
cccagagcctgcctgtg

SEQ ID NO: 143303 - DNA, 17 bp, synthetic construct
  source 1..17: mol_type = other DNA
ccagagcctgcctgtgt

SEQ ID NO: 143304 - DNA, 17 bp, synthetic construct
  source 1..17: mol_type = other DNA
cagagcctgcctgtgtg

SEQ ID NO: 143305 - DNA, 17 bp, synthetic construct
  source 1..17: mol_type = other DNA
agagcctgcctgtgtgc

SEQ ID NO: 143306 - DNA, 17 bp, synthetic construct
  source 1..17: mol_type = other DNA
gagcctgcctgtgtgcc

SEQ ID NO: 143307 - DNA, 17 bp, synthetic construct
  source 1..17: mol_type = other DNA
agcctgcctgtgtgccc

SEQ ID NO: 143308 - DNA, 17 bp, synthetic construct
  source 1..17: mol_type = other DNA
gcctgcctgtgtgcccg

SEQ ID NO: 143309 - DNA, 17 bp, synthetic construct
  source 1..17: mol_type = other DNA
cctgcctgtgtgcccgc

SEQ ID NO: 143310 - DNA, 17 bp, synthetic construct
  source 1..17: mol_type = other DNA
ctgcctgtgtgcccgcc

SEQ ID NO: 143311 - DNA, 17 bp, synthetic construct
  source 1..17: mol_type = other DNA
tgcctgtgtgcccgcca

SEQ ID NO: 143312 - DNA, 17 bp, synthetic construct
  source 1..17: mol_type = other DNA
gcctgtgtgcccgccag

SEQ ID NO: 143313 - DNA, 17 bp, synthetic construct
  source 1..17: mol_type = other DNA
cctgtgtgcccgccagg

SEQ ID NO: 143314 - DNA, 17 bp, synthetic construct
  source 1..17: mol_type = other DNA
ctgtgtgcccgccaggg

SEQ ID NO: 143315 - DNA, 17 bp, synthetic construct
  source 1..17: mol_type = other DNA
tgtgtgcccgccagggc

SEQ ID NO: 143316 - DNA, 17 bp, synthetic construct
  source 1..17: mol_type = other DNA
gtgtgcccgccagggca

SEQ ID NO: 143317 - DNA, 17 bp, synthetic construct
  source 1..17: mol_type = other DNA
tgtgcccgccagggcag

SEQ ID NO: 143318 - DNA, 17 bp, synthetic construct
  source 1..17: mol_type = other DNA
gtgcccgccagggcagg

SEQ ID NO: 143319 - DNA, 17 bp, synthetic construct
  source 1..17: mol_type = other DNA
tgcccgccagggcagga

SEQ ID NO: 143320 - DNA, 17 bp, synthetic construct
  source 1..17: mol_type = other DNA
gcccgccagggcaggag

SEQ ID NO: 143321 - DNA, 17 bp, synthetic construct
  source 1..17: mol_type = other DNA
cccgccagggcaggagt

SEQ ID NO: 143322 - DNA, 17 bp, synthetic construct
  source 1..17: mol_type = other DNA
ccgccagggcaggagtc

SEQ ID NO: 143323 - DNA, 17 bp, synthetic construct
  source 1..17: mol_type = other DNA
cgccagggcaggagtcc

SEQ ID NO: 143324 - DNA, 17 bp, synthetic construct
  source 1..17: mol_type = other DNA
gccagggcaggagtcca

SEQ ID NO: 143325 - DNA, 17 bp, synthetic construct
  source 1..17: mol_type = other DNA
ccagggcaggagtccat

SEQ ID NO: 143326 - DNA, 17 bp, synthetic construct
  source 1..17: mol_type = other DNA
cagggcaggagtccatc

SEQ ID NO: 143327 - DNA, 17 bp, synthetic construct
  source 1..17: mol_type = other DNA
agggcaggagtccatct

SEQ ID NO: 143328 - DNA, 17 bp, synthetic construct
  source 1..17: mol_type = other DNA
gggcaggagtccatctg

SEQ ID NO: 143329 - DNA, 17 bp, synthetic construct
  source 1..17: mol_type = other DNA
ggcaggagtccatctgc

SEQ ID NO: 143330 - DNA, 17 bp, synthetic construct
  source 1..17: mol_type = other DNA
gcaggagtccatctgca

SEQ ID NO: 143331 - DNA, 17 bp, synthetic construct
  source 1..17: mol_type = other DNA
caggagtccatctgcac

SEQ ID NO: 143332 - DNA, 17 bp, synthetic construct
  source 1..17: mol_type = other DNA
aggagtccatctgcacc

SEQ ID NO: 143333 - DNA, 17 bp, synthetic construct
  source 1..17: mol_type = other DNA
ggagtccatctgcaccc

SEQ ID NO: 143334 - DNA, 17 bp, synthetic construct
  source 1..17: mol_type = other DNA
gagtccatctgcaccca

SEQ ID NO: 143335 - DNA, 17 bp, synthetic construct
  source 1..17: mol_type = other DNA
agtccatctgcacccag

SEQ ID NO: 143336 - DNA, 17 bp, synthetic construct
  source 1..17: mol_type = other DNA
gtccatctgcacccagg

SEQ ID NO: 143337 - DNA, 17 bp, synthetic construct
  source 1..17: mol_type = other DNA
tccatctgcacccagga

SEQ ID NO: 143338 - DNA, 17 bp, synthetic construct
  source 1..17: mol_type = other DNA
ccatctgcacccaggag

SEQ ID NO: 143339 - DNA, 17 bp, synthetic construct
  source 1..17: mol_type = other DNA
catctgcacccaggagg

SEQ ID NO: 143340 - DNA, 17 bp, synthetic construct
  source 1..17: mol_type = other DNA
atctgcacccaggagga

SEQ ID NO: 143341 - DNA, 17 bp, synthetic construct
  source 1..17: mol_type = other DNA
tctgcacccaggaggag

SEQ ID NO: 143342 - DNA, 17 bp, synthetic construct
  source 1..17: mol_type = other DNA
ctgcacccaggaggagg

SEQ ID NO: 143343 - DNA, 17 bp, synthetic construct
  source 1..17: mol_type = other DNA
tgcacccaggaggaggg

SEQ ID NO: 143344 - DNA, 17 bp, synthetic construct
  source 1..17: mol_type = other DNA
gcacccaggaggagggc

SEQ ID NO: 143345 - DNA, 17 bp, synthetic construct
  source 1..17: mol_type = other DNA
cacccaggaggagggcg

SEQ ID NO: 143346 - DNA, 17 bp, synthetic construct
  source 1..17: mol_type = other DNA
acccaggaggagggcga

SEQ ID NO: 143347 - DNA, 17 bp, synthetic construct
  source 1..17: mol_type = other DNA
cccaggaggagggcgac

SEQ ID NO: 143348 - DNA, 17 bp, synthetic construct
  source 1..17: mol_type = other DNA
ccaggaggagggcgact

SEQ ID NO: 143349 - DNA, 17 bp, synthetic construct
  source 1..17: mol_type = other DNA
caggaggagggcgactg

SEQ ID NO: 143350 - DNA, 17 bp, synthetic construct
  source 1..17: mol_type = other DNA
aggaggagggcgactgc

SEQ ID NO: 143351 - DNA, 17 bp, synthetic construct
  source 1..17: mol_type = other DNA
ggaggagggcgactgct

SEQ ID NO: 143352 - DNA, 17 bp, synthetic construct
  source 1..17: mol_type = other DNA
gaggagggcgactgctg

SEQ ID NO: 143353 - DNA, 17 bp, synthetic construct
  source 1..17: mol_type = other DNA
aggagggcgactgctgt

SEQ ID NO: 143354 - DNA, 17 bp, synthetic construct
  source 1..17: mol_type = other DNA
ggagggcgactgctgtc

SEQ ID NO: 143355 - DNA, 17 bp, synthetic construct
  source 1..17: mol_type = other DNA
gagggcgactgctgtcc

SEQ ID NO: 143356 - DNA, 17 bp, synthetic construct
  source 1..17: mol_type = other DNA
agggcgactgctgtccc

SEQ ID NO: 143357 - DNA, 17 bp, synthetic construct
  source 1..17: mol_type = other DNA
gggcgactgctgtccca

SEQ ID NO: 143358 - DNA, 17 bp, synthetic construct
  source 1..17: mol_type = other DNA
ggcgactgctgtcccac

SEQ ID NO: 143359 - DNA, 17 bp, synthetic construct
  source 1..17: mol_type = other DNA
gcgactgctgtcccacc

SEQ ID NO: 143360 - DNA, 17 bp, synthetic construct
  source 1..17: mol_type = other DNA
cgactgctgtcccacct

SEQ ID NO: 143361 - DNA, 17 bp, synthetic construct
  source 1..17: mol_type = other DNA
gactgctgtcccacctt

SEQ ID NO: 143362 - DNA, 17 bp, synthetic construct
  source 1..17: mol_type = other DNA
actgctgtcccaccttc

SEQ ID NO: 143363 - DNA, 17 bp, synthetic construct
  source 1..17: mol_type = other DNA
ctgctgtcccaccttcc

SEQ ID NO: 143364 - DNA, 17 bp, synthetic construct
  source 1..17: mol_type = other DNA
tgctgtcccaccttccg

SEQ ID NO: 143365 - DNA, 17 bp, synthetic construct
  source 1..17: mol_type = other DNA
gctgtcccaccttccgc

SEQ ID NO: 143366 - DNA, 17 bp, synthetic construct
  source 1..17: mol_type = other DNA
ctgtcccaccttccgct

SEQ ID NO: 143367 - DNA, 17 bp, synthetic construct
  source 1..17: mol_type = other DNA
tgtcccaccttccgctg

SEQ ID NO: 143368 - DNA, 17 bp, synthetic construct
  source 1..17: mol_type = other DNA
gtcccaccttccgctgc

SEQ ID NO: 143369 - DNA, 17 bp, synthetic construct
  source 1..17: mol_type = other DNA
tcccaccttccgctgca

SEQ ID NO: 143370 - DNA, 17 bp, synthetic construct
  source 1..17: mol_type = other DNA
cccaccttccgctgcag

SEQ ID NO: 143371 - DNA, 17 bp, synthetic construct
  source 1..17: mol_type = other DNA
ccaccttccgctgcagt

SEQ ID NO: 143372 - DNA, 17 bp, synthetic construct
  source 1..17: mol_type = other DNA
caccttccgctgcagtg

SEQ ID NO: 143373 - DNA, 17 bp, synthetic construct
  source 1..17: mol_type = other DNA
accttccgctgcagtga

SEQ ID NO: 143374 - DNA, 17 bp, synthetic construct
  source 1..17: mol_type = other DNA
ccttccgctgcagtgag

SEQ ID NO: 143375 - DNA, 17 bp, synthetic construct
  source 1..17: mol_type = other DNA
cttccgctgcagtgagc

SEQ ID NO: 143376 - DNA, 17 bp, synthetic construct
  source 1..17: mol_type = other DNA
ttccgctgcagtgagcg

SEQ ID NO: 143377 - DNA, 17 bp, synthetic construct
  source 1..17: mol_type = other DNA
tccgctgcagtgagcgg

SEQ ID NO: 143378 - DNA, 17 bp, synthetic construct
  source 1..17: mol_type = other DNA
ccgctgcagtgagcggg

SEQ ID NO: 143379 - DNA, 17 bp, synthetic construct
  source 1..17: mol_type = other DNA
cgctgcagtgagcgggg

SEQ ID NO: 143380 - DNA, 17 bp, synthetic construct
  source 1..17: mol_type = other DNA
gctgcagtgagcggggc

SEQ ID NO: 143381 - DNA, 17 bp, synthetic construct
  source 1..17: mol_type = other DNA
ctgcagtgagcggggct

SEQ ID NO: 143382 - DNA, 17 bp, synthetic construct
  source 1..17: mol_type = other DNA
tgcagtgagcggggctg

SEQ ID NO: 143383 - DNA, 17 bp, synthetic construct
  source 1..17: mol_type = other DNA
gcagtgagcggggctgg

SEQ ID NO: 143384 - DNA, 17 bp, synthetic construct
  source 1..17: mol_type = other DNA
cagtgagcggggctggg

SEQ ID NO: 143385 - DNA, 17 bp, synthetic construct
  source 1..17: mol_type = other DNA
agtgagcggggctgggg

SEQ ID NO: 143386 - DNA, 17 bp, synthetic construct
  source 1..17: mol_type = other DNA
gtgagcggggctggggc

SEQ ID NO: 143387 - DNA, 17 bp, synthetic construct
  source 1..17: mol_type = other DNA
tgagcggggctggggcc

SEQ ID NO: 143388 - DNA, 17 bp, synthetic construct
  source 1..17: mol_type = other DNA
gagcggggctggggccg

SEQ ID NO: 143389 - DNA, 17 bp, synthetic construct
  source 1..17: mol_type = other DNA
agcggggctggggccgg

SEQ ID NO: 143390 - DNA, 17 bp, synthetic construct
  source 1..17: mol_type = other DNA
gcggggctggggccggg

SEQ ID NO: 143391 - DNA, 17 bp, synthetic construct
  source 1..17: mol_type = other DNA
cggggctggggccgggc

SEQ ID NO: 143392 - DNA, 17 bp, synthetic construct
  source 1..17: mol_type = other DNA
ggggctggggccgggct

SEQ ID NO: 143393 - DNA, 17 bp, synthetic construct
  source 1..17: mol_type = other DNA
gggctggggccgggctc

SEQ ID NO: 143394 - DNA, 17 bp, synthetic construct
  source 1..17: mol_type = other DNA
ggctggggccgggctcc

SEQ ID NO: 143395 - DNA, 17 bp, synthetic construct
  source 1..17: mol_type = other DNA
gctggggccgggctcct

SEQ ID NO: 143396 - DNA, 17 bp, synthetic construct
  source 1..17: mol_type = other DNA
ctggggccgggctcctg

SEQ ID NO: 143397 - DNA, 17 bp, synthetic construct
  source 1..17: mol_type = other DNA
tggggccgggctcctgg

SEQ ID NO: 143398 - DNA, 17 bp, synthetic construct
  source 1..17: mol_type = other DNA
ggggccgggctcctggg

SEQ ID NO: 143399 - DNA, 17 bp, synthetic construct
  source 1..17: mol_type = other DNA
gggccgggctcctgggt

SEQ ID NO: 143400 - DNA, 17 bp, synthetic construct
  source 1..17: mol_type = other DNA
ggccgggctcctgggtg

SEQ ID NO: 143401 - DNA, 17 bp, synthetic construct
  source 1..17: mol_type = other DNA
gccgggctcctgggtgg

SEQ ID NO: 143402 - DNA, 17 bp, synthetic construct
  source 1..17: mol_type = other DNA
ccgggctcctgggtggc

SEQ ID NO: 143403 - DNA, 17 bp, synthetic construct
  source 1..17: mol_type = other DNA
cgggctcctgggtggcc

SEQ ID NO: 143404 - DNA, 17 bp, synthetic construct
  source 1..17: mol_type = other DNA
gggctcctgggtggcct

SEQ ID NO: 143405 - DNA, 17 bp, synthetic construct
  source 1..17: mol_type = other DNA
ggctcctgggtggcctc

SEQ ID NO: 143406 - DNA, 17 bp, synthetic construct
  source 1..17: mol_type = other DNA
gctcctgggtggcctct

SEQ ID NO: 143407 - DNA, 17 bp, synthetic construct
  source 1..17: mol_type = other DNA
ctcctgggtggcctctt

SEQ ID NO: 143408 - DNA, 17 bp, synthetic construct
  source 1..17: mol_type = other DNA
tcctgggtggcctcttg

SEQ ID NO: 143409 - DNA, 17 bp, synthetic construct
  source 1..17: mol_type = other DNA
cctgggtggcctcttgc

SEQ ID NO: 143410 - DNA, 17 bp, synthetic construct
  source 1..17: mol_type = other DNA
ctgggtggcctcttgct

SEQ ID NO: 143411 - DNA, 17 bp, synthetic construct
  source 1..17: mol_type = other DNA
tgggtggcctcttgctg

SEQ ID NO: 143412 - DNA, 17 bp, synthetic construct
  source 1..17: mol_type = other DNA
gggtggcctcttgctgg

SEQ ID NO: 143413 - DNA, 17 bp, synthetic construct
  source 1..17: mol_type = other DNA
ggtggcctcttgctggg

SEQ ID NO: 143414 - DNA, 17 bp, synthetic construct
  source 1..17: mol_type = other DNA
gtggcctcttgctgggg

SEQ ID NO: 143415 - DNA, 17 bp, synthetic construct
  source 1..17: mol_type = other DNA
tggcctcttgctggggg

SEQ ID NO: 143416 - DNA, 17 bp, synthetic construct
  source 1..17: mol_type = other DNA
ggcctcttgctgggggt

SEQ ID NO: 143417 - DNA, 17 bp, synthetic construct
  source 1..17: mol_type = other DNA
gcctcttgctgggggtg

SEQ ID NO: 143418 - DNA, 17 bp, synthetic construct
  source 1..17: mol_type = other DNA
cctcttgctgggggtgg

SEQ ID NO: 143419 - DNA, 17 bp, synthetic construct
  source 1..17: mol_type = other DNA
ctcttgctgggggtggg

SEQ ID NO: 143420 - DNA, 17 bp, synthetic construct
  source 1..17: mol_type = other DNA
tcttgctgggggtgggg

SEQ ID NO: 143421 - DNA, 17 bp, synthetic construct
  source 1..17: mol_type = other DNA
cttgctgggggtggggg

SEQ ID NO: 143422 - DNA, 17 bp, synthetic construct
  source 1..17: mol_type = other DNA
ttgctgggggtggggga

SEQ ID NO: 143423 - DNA, 17 bp, synthetic construct
  source 1..17: mol_type = other DNA
tgctgggggtgggggag

SEQ ID NO: 143424 - DNA, 17 bp, synthetic construct
  source 1..17: mol_type = other DNA
gctgggggtgggggagt

SEQ ID NO: 143425 - DNA, 17 bp, synthetic construct
  source 1..17: mol_type = other DNA
ctgggggtgggggagtg

SEQ ID NO: 143426 - DNA, 17 bp, synthetic construct
  source 1..17: mol_type = other DNA
tgggggtgggggagtgc

SEQ ID NO: 143427 - DNA, 17 bp, synthetic construct
  source 1..17: mol_type = other DNA
gggggtgggggagtgca

SEQ ID NO: 143428 - DNA, 17 bp, synthetic construct
  source 1..17: mol_type = other DNA
ggggtgggggagtgcag

SEQ ID NO: 143429 - DNA, 17 bp, synthetic construct
  source 1..17: mol_type = other DNA
gggtgggggagtgcagg

SEQ ID NO: 143430 - DNA, 17 bp, synthetic construct
  source 1..17: mol_type = other DNA
ggtgggggagtgcagga

SEQ ID NO: 143431 - DNA, 17 bp, synthetic construct
  source 1..17: mol_type = other DNA
gtgggggagtgcaggat

SEQ ID NO: 143432 - DNA, 17 bp, synthetic construct
  source 1..17: mol_type = other DNA
tgggggagtgcaggatg

SEQ ID NO: 143433 - DNA, 17 bp, synthetic construct
  source 1..17: mol_type = other DNA
gggggagtgcaggatgg

SEQ ID NO: 143434 - DNA, 17 bp, synthetic construct
  source 1..17: mol_type = other DNA
ggggagtgcaggatggt

SEQ ID NO: 143435 - DNA, 17 bp, synthetic construct
  source 1..17: mol_type = other DNA
gggagtgcaggatggtg

SEQ ID NO: 143436 - DNA, 17 bp, synthetic construct
  source 1..17: mol_type = other DNA
ggagtgcaggatggtgg

SEQ ID NO: 143437 - DNA, 17 bp, synthetic construct
  source 1..17: mol_type = other DNA
gagtgcaggatggtggg

SEQ ID NO: 143438 - DNA, 17 bp, synthetic construct
  source 1..17: mol_type = other DNA
agtgcaggatggtgggg

SEQ ID NO: 143439 - DNA, 17 bp, synthetic construct
  source 1..17: mol_type = other DNA
gtgcaggatggtggggg

SEQ ID NO: 143440 - DNA, 17 bp, synthetic construct
  source 1..17: mol_type = other DNA
tgcaggatggtgggggc

SEQ ID NO: 143441 - DNA, 17 bp, synthetic construct
  source 1..17: mol_type = other DNA
gcaggatggtgggggcg

SEQ ID NO: 143442 - DNA, 17 bp, synthetic construct
  source 1..17: mol_type = other DNA
caggatggtgggggcgc

SEQ ID NO: 143443 - DNA, 17 bp, synthetic construct
  source 1..17: mol_type = other DNA
aggatggtgggggcgct

SEQ ID NO: 143444 - DNA, 17 bp, synthetic construct
  source 1..17: mol_type = other DNA
ggatggtgggggcgctg

SEQ ID NO: 143445 - DNA, 17 bp, synthetic construct
  source 1..17: mol_type = other DNA
gatggtgggggcgctgg

SEQ ID NO: 143446 - DNA, 17 bp, synthetic construct
  source 1..17: mol_type = other DNA
atggtgggggcgctgga

SEQ ID NO: 143447 - DNA, 17 bp, synthetic construct
  source 1..17: mol_type = other DNA
tggtgggggcgctggag

SEQ ID NO: 143448 - DNA, 17 bp, synthetic construct
  source 1..17: mol_type = other DNA
ggtgggggcgctggagc

SEQ ID NO: 143449 - DNA, 17 bp, synthetic construct
  source 1..17: mol_type = other DNA
gtgggggcgctggagca

SEQ ID NO: 143450 - DNA, 17 bp, synthetic construct
  source 1..17: mol_type = other DNA
tgggggcgctggagcac

SEQ ID NO: 143451 - DNA, 17 bp, synthetic construct
  source 1..17: mol_type = other DNA
gggggcgctggagcaca

SEQ ID NO: 143452 - DNA, 17 bp, synthetic construct
  source 1..17: mol_type = other DNA
ggggcgctggagcacat

SEQ ID NO: 143453 - DNA, 17 bp, synthetic construct
  source 1..17: mol_type = other DNA
gggcgctggagcacatg

SEQ ID NO: 143454 - DNA, 17 bp, synthetic construct
  source 1..17: mol_type = other DNA
ggcgctggagcacatgc

SEQ ID NO: 143455 - DNA, 17 bp, synthetic construct
  source 1..17: mol_type = other DNA
gcgctggagcacatgct

SEQ ID NO: 143456 - DNA, 17 bp, synthetic construct
  source 1..17: mol_type = other DNA
cgctggagcacatgctc

SEQ ID NO: 143457 - DNA, 17 bp, synthetic construct
  source 1..17: mol_type = other DNA
gctggagcacatgctcc

SEQ ID NO: 143458 - DNA, 17 bp, synthetic construct
  source 1..17: mol_type = other DNA
ctggagcacatgctccc

SEQ ID NO: 143459 - DNA, 17 bp, synthetic construct
  source 1..17: mol_type = other DNA
tggagcacatgctcccc

SEQ ID NO: 143460 - DNA, 17 bp, synthetic construct
  source 1..17: mol_type = other DNA
ggagcacatgctcccca

SEQ ID NO: 143461 - DNA, 17 bp, synthetic construct
  source 1..17: mol_type = other DNA
gagcacatgctccccac

SEQ ID NO: 143462 - DNA, 17 bp, synthetic construct
  source 1..17: mol_type = other DNA
agcacatgctccccacc

SEQ ID NO: 143463 - DNA, 17 bp, synthetic construct
  source 1..17: mol_type = other DNA
gcacatgctccccacca

SEQ ID NO: 143464 - DNA, 17 bp, synthetic construct
  source 1..17: mol_type = other DNA
cacatgctccccaccac

SEQ ID NO: 143465 - DNA, 17 bp, synthetic construct
  source 1..17: mol_type = other DNA
acatgctccccaccact

SEQ ID NO: 143466 - DNA, 17 bp, synthetic construct
  source 1..17: mol_type = other DNA
catgctccccaccactt

SEQ ID NO: 143467 - DNA, 17 bp, synthetic construct
  source 1..17: mol_type = other DNA
atgctccccaccacttg

SEQ ID NO: 143468 - DNA, 17 bp, synthetic construct
  source 1..17: mol_type = other DNA
tgctccccaccacttgt

SEQ ID NO: 143469 - DNA, 17 bp, synthetic construct
  source 1..17: mol_type = other DNA
gctccccaccacttgtc

SEQ ID NO: 143470 - DNA, 17 bp, synthetic construct
  source 1..17: mol_type = other DNA
ctccccaccacttgtcg

SEQ ID NO: 143471 - DNA, 17 bp, synthetic construct
  source 1..17: mol_type = other DNA
tccccaccacttgtcga

SEQ ID NO: 143472 - DNA, 17 bp, synthetic construct
  source 1..17: mol_type = other DNA
ccccaccacttgtcgag

SEQ ID NO: 143473 - DNA, 17 bp, synthetic construct
  source 1..17: mol_type = other DNA
cccaccacttgtcgagg

SEQ ID NO: 143474 - DNA, 17 bp, synthetic construct
  source 1..17: mol_type = other DNA
ccaccacttgtcgaggg

SEQ ID NO: 143475 - DNA, 17 bp, synthetic construct
  source 1..17: mol_type = other DNA
caccacttgtcgagggc

SEQ ID NO: 143476 - DNA, 17 bp, synthetic construct
  source 1..17: mol_type = other DNA
accacttgtcgagggct

SEQ ID NO: 143477 - DNA, 17 bp, synthetic construct
  source 1..17: mol_type = other DNA
ccacttgtcgagggctt

SEQ ID NO: 143478 - DNA, 17 bp, synthetic construct
  source 1..17: mol_type = other DNA
cacttgtcgagggctta

SEQ ID NO: 143479 - DNA, 17 bp, synthetic construct
  source 1..17: mol_type = other DNA
acttgtcgagggcttag

SEQ ID NO: 143480 - DNA, 17 bp, synthetic construct
  source 1..17: mol_type = other DNA
cttgtcgagggcttagc

SEQ ID NO: 143481 - DNA, 17 bp, synthetic construct
  source 1..17: mol_type = other DNA
ttgtcgagggcttagct

SEQ ID NO: 143482 - DNA, 17 bp, synthetic construct
  source 1..17: mol_type = other DNA
tgtcgagggcttagctc

SEQ ID NO: 143483 - DNA, 17 bp, synthetic construct
  source 1..17: mol_type = other DNA
gtcgagggcttagctcc

SEQ ID NO: 143484 - DNA, 17 bp, synthetic construct
  source 1..17: mol_type = other DNA
tcgagggcttagctccc

SEQ ID NO: 143485 - DNA, 17 bp, synthetic construct
  source 1..17: mol_type = other DNA
cgagggcttagctccct

SEQ ID NO: 143486 - DNA, 17 bp, synthetic construct
  source 1..17: mol_type = other DNA
gagggcttagctccctt

SEQ ID NO: 143487 - DNA, 17 bp, synthetic construct
  source 1..17: mol_type = other DNA
agggcttagctcccttt

SEQ ID NO: 143488 - DNA, 17 bp, synthetic construct
  source 1..17: mol_type = other DNA
gggcttagctccctttc

SEQ ID NO: 143489 - DNA, 17 bp, synthetic construct
  source 1..17: mol_type = other DNA
ggcttagctccctttcc

SEQ ID NO: 143490 - DNA, 17 bp, synthetic construct
  source 1..17: mol_type = other DNA
gcttagctccctttcct

SEQ ID NO: 143491 - DNA, 17 bp, synthetic construct
  source 1..17: mol_type = other DNA
cttagctccctttcctt

SEQ ID NO: 143492 - DNA, 17 bp, synthetic construct
  source 1..17: mol_type = other DNA
ttagctccctttccttc

SEQ ID NO: 143493 - DNA, 17 bp, synthetic construct
  source 1..17: mol_type = other DNA
tagctccctttccttcc

SEQ ID NO: 143494 - DNA, 17 bp, synthetic construct
  source 1..17: mol_type = other DNA
agctccctttccttcca

SEQ ID NO: 143495 - DNA, 17 bp, synthetic construct
  source 1..17: mol_type = other DNA
gctccctttccttccag

SEQ ID NO: 143496 - DNA, 17 bp, synthetic construct
  source 1..17: mol_type = other DNA
ctccctttccttccagg

SEQ ID NO: 143497 - DNA, 17 bp, synthetic construct
  source 1..17: mol_type = other DNA
tccctttccttccagga

SEQ ID NO: 143498 - DNA, 17 bp, synthetic construct
  source 1..17: mol_type = other DNA
ccctttccttccaggac

SEQ ID NO: 143499 - DNA, 17 bp, synthetic construct
  source 1..17: mol_type = other DNA
cctttccttccaggacc

SEQ ID NO: 143500 - DNA, 17 bp, synthetic construct
  source 1..17: mol_type = other DNA
ctttccttccaggacct

SEQ ID NO: 143501 - DNA, 17 bp, synthetic construct
  source 1..17: mol_type = other DNA
tttccttccaggacctc

SEQ ID NO: 143502 - DNA, 17 bp, synthetic construct
  source 1..17: mol_type = other DNA
ttccttccaggacctca

SEQ ID NO: 143503 - DNA, 17 bp, synthetic construct
  source 1..17: mol_type = other DNA
tccttccaggacctcag

SEQ ID NO: 143504 - DNA, 17 bp, synthetic construct
  source 1..17: mol_type = other DNA
ccttccaggacctcagc

SEQ ID NO: 143505 - DNA, 17 bp, synthetic construct
  source 1..17: mol_type = other DNA
cttccaggacctcagct

SEQ ID NO: 143506 - DNA, 17 bp, synthetic construct
  source 1..17: mol_type = other DNA
ttccaggacctcagctg

SEQ ID NO: 143507 - DNA, 17 bp, synthetic construct
  source 1..17: mol_type = other DNA
tccaggacctcagctgt

SEQ ID NO: 143508 - DNA, 17 bp, synthetic construct
  source 1..17: mol_type = other DNA
ccaggacctcagctgtg

SEQ ID NO: 143509 - DNA, 17 bp, synthetic construct
  source 1..17: mol_type = other DNA
caggacctcagctgtgt

SEQ ID NO: 143510 - DNA, 17 bp, synthetic construct
  source 1..17: mol_type = other DNA
aggacctcagctgtgtt

SEQ ID NO: 143511 - DNA, 17 bp, synthetic construct
  source 1..17: mol_type = other DNA
ggacctcagctgtgttc

SEQ ID NO: 143512 - DNA, 17 bp, synthetic construct
  source 1..17: mol_type = other DNA
gacctcagctgtgttcg

SEQ ID NO: 143513 - DNA, 17 bp, synthetic construct
  source 1..17: mol_type = other DNA
acctcagctgtgttcgt

SEQ ID NO: 143514 - DNA, 17 bp, synthetic construct
  source 1..17: mol_type = other DNA
cctcagctgtgttcgta

SEQ ID NO: 143515 - DNA, 17 bp, synthetic construct
  source 1..17: mol_type = other DNA
ctcagctgtgttcgtac

SEQ ID NO: 143516 - DNA, 17 bp, synthetic construct
  source 1..17: mol_type = other DNA
tcagctgtgttcgtaca

SEQ ID NO: 143517 - DNA, 17 bp, synthetic construct
  source 1..17: mol_type = other DNA
cagctgtgttcgtacaa

SEQ ID NO: 143518 - DNA, 17 bp, synthetic construct
  source 1..17: mol_type = other DNA
agctgtgttcgtacaat

SEQ ID NO: 143519 - DNA, 17 bp, synthetic construct
  source 1..17: mol_type = other DNA
gctgtgttcgtacaatg

SEQ ID NO: 143520 - DNA, 17 bp, synthetic construct
  source 1..17: mol_type = other DNA
ctgtgttcgtacaatgg

SEQ ID NO: 143521 - DNA, 17 bp, synthetic construct
  source 1..17: mol_type = other DNA
tgtgttcgtacaatggc

SEQ ID NO: 143522 - DNA, 17 bp, synthetic construct
  source 1..17: mol_type = other DNA
gtgttcgtacaatggca

SEQ ID NO: 143523 - DNA, 17 bp, synthetic construct
  source 1..17: mol_type = other DNA
tgttcgtacaatggcac

SEQ ID NO: 143524 - DNA, 17 bp, synthetic construct
  source 1..17: mol_type = other DNA
gttcgtacaatggcacc

SEQ ID NO: 143525 - DNA, 17 bp, synthetic construct
  source 1..17: mol_type = other DNA
ttcgtacaatggcacct

SEQ ID NO: 143526 - DNA, 17 bp, synthetic construct
  source 1..17: mol_type = other DNA
tcgtacaatggcacctt

SEQ ID NO: 143527 - DNA, 17 bp, synthetic construct
  source 1..17: mol_type = other DNA
cgtacaatggcaccttc

SEQ ID NO: 143528 - DNA, 17 bp, synthetic construct
  source 1..17: mol_type = other DNA
gtacaatggcaccttct

SEQ ID NO: 143529 - DNA, 17 bp, synthetic construct
  source 1..17: mol_type = other DNA
tacaatggcaccttcta

SEQ ID NO: 143530 - DNA, 17 bp, synthetic construct
  source 1..17: mol_type = other DNA
acaatggcaccttctac

SEQ ID NO: 143531 - DNA, 17 bp, synthetic construct
  source 1..17: mol_type = other DNA
caatggcaccttctacg

SEQ ID NO: 143532 - DNA, 17 bp, synthetic construct
  source 1..17: mol_type = other DNA
aatggcaccttctacgg

SEQ ID NO: 143533 - DNA, 17 bp, synthetic construct
  source 1..17: mol_type = other DNA
atggcaccttctacggg

SEQ ID NO: 143534 - DNA, 17 bp, synthetic construct
  source 1..17: mol_type = other DNA
tggcaccttctacgggg

SEQ ID NO: 143535 - DNA, 17 bp, synthetic construct
  source 1..17: mol_type = other DNA
ggcaccttctacggggt

SEQ ID NO: 143536 - DNA, 17 bp, synthetic construct
  source 1..17: mol_type = other DNA
gcaccttctacggggta

SEQ ID NO: 143537 - DNA, 17 bp, synthetic construct
  source 1..17: mol_type = other DNA
caccttctacggggtaa

SEQ ID NO: 143538 - DNA, 17 bp, synthetic construct
  source 1..17: mol_type = other DNA
accttctacggggtaag

SEQ ID NO: 143539 - DNA, 17 bp, synthetic construct
  source 1..17: mol_type = other DNA
ccttctacggggtaagg

SEQ ID NO: 143540 - DNA, 17 bp, synthetic construct
  source 1..17: mol_type = other DNA
cttctacggggtaaggg

SEQ ID NO: 143541 - DNA, 17 bp, synthetic construct
  source 1..17: mol_type = other DNA
ttctacggggtaagggc

SEQ ID NO: 143542 - DNA, 17 bp, synthetic construct
  source 1..17: mol_type = other DNA
tctacggggtaagggca

SEQ ID NO: 143543 - DNA, 17 bp, synthetic construct
  source 1..17: mol_type = other DNA
ctacggggtaagggcac

SEQ ID NO: 143544 - DNA, 17 bp, synthetic construct
  source 1..17: mol_type = other DNA
tacggggtaagggcaca

SEQ ID NO: 143545 - DNA, 17 bp, synthetic construct
  source 1..17: mol_type = other DNA
acggggtaagggcacag

SEQ ID NO: 143546 - DNA, 17 bp, synthetic construct
  source 1..17: mol_type = other DNA
cggggtaagggcacagc

SEQ ID NO: 143547 - DNA, 17 bp, synthetic construct
  source 1..17: mol_type = other DNA
ggggtaagggcacagca

SEQ ID NO: 143548 - DNA, 17 bp, synthetic construct
  source 1..17: mol_type = other DNA
gggtaagggcacagcag

SEQ ID NO: 143549 - DNA, 17 bp, synthetic construct
  source 1..17: mol_type = other DNA
ggtaagggcacagcagt

SEQ ID NO: 143550 - DNA, 17 bp, synthetic construct
  source 1..17: mol_type = other DNA
gtaagggcacagcagtg

SEQ ID NO: 143551 - DNA, 17 bp, synthetic construct
  source 1..17: mol_type = other DNA
taagggcacagcagtgg

SEQ ID NO: 143552 - DNA, 17 bp, synthetic construct
  source 1..17: mol_type = other DNA
aagggcacagcagtggg

SEQ ID NO: 143553 - DNA, 17 bp, synthetic construct
  source 1..17: mol_type = other DNA
agggcacagcagtgggt

SEQ ID NO: 143554 - DNA, 17 bp, synthetic construct
  source 1..17: mol_type = other DNA
gggcacagcagtgggtg

SEQ ID NO: 143555 - DNA, 17 bp, synthetic construct
  source 1..17: mol_type = other DNA
ggcacagcagtgggtgg

SEQ ID NO: 143556 - DNA, 17 bp, synthetic construct
  source 1..17: mol_type = other DNA
gcacagcagtgggtggg

SEQ ID NO: 143557 - DNA, 17 bp, synthetic construct
  source 1..17: mol_type = other DNA
cacagcagtgggtgggt

SEQ ID NO: 143558 - DNA, 17 bp, synthetic construct
  source 1..17: mol_type = other DNA
acagcagtgggtgggtg

SEQ ID NO: 143559 - DNA, 17 bp, synthetic construct
  source 1..17: mol_type = other DNA
cagcagtgggtgggtgt

SEQ ID NO: 143560 - DNA, 17 bp, synthetic construct
  source 1..17: mol_type = other DNA
agcagtgggtgggtgtg

SEQ ID NO: 143561 - DNA, 17 bp, synthetic construct
  source 1..17: mol_type = other DNA
gcagtgggtgggtgtgg

SEQ ID NO: 143562 - DNA, 17 bp, synthetic construct
  source 1..17: mol_type = other DNA
cagtgggtgggtgtggc

SEQ ID NO: 143563 - DNA, 17 bp, synthetic construct
  source 1..17: mol_type = other DNA
agtgggtgggtgtggcc

SEQ ID NO: 143564 - DNA, 17 bp, synthetic construct
  source 1..17: mol_type = other DNA
gtgggtgggtgtggccc

SEQ ID NO: 143565 - DNA, 17 bp, synthetic construct
  source 1..17: mol_type = other DNA
tgggtgggtgtggccct

SEQ ID NO: 143566 - DNA, 17 bp, synthetic construct
  source 1..17: mol_type = other DNA
gggtgggtgtggccctg

SEQ ID NO: 143567 - DNA, 17 bp, synthetic construct
  source 1..17: mol_type = other DNA
ggtgggtgtggccctgg

SEQ ID NO: 143568 - DNA, 17 bp, synthetic construct
  source 1..17: mol_type = other DNA
gtgggtgtggccctggg

SEQ ID NO: 143569 - DNA, 17 bp, synthetic construct
  source 1..17: mol_type = other DNA
tgggtgtggccctgggg

SEQ ID NO: 143570 - DNA, 17 bp, synthetic construct
  source 1..17: mol_type = other DNA
gggtgtggccctggggc

SEQ ID NO: 143571 - DNA, 17 bp, synthetic construct
  source 1..17: mol_type = other DNA
ggtgtggccctggggcc

SEQ ID NO: 143572 - DNA, 17 bp, synthetic construct
  source 1..17: mol_type = other DNA
gtgtggccctggggcct

SEQ ID NO: 143573 - DNA, 17 bp, synthetic construct
  source 1..17: mol_type = other DNA
tgtggccctggggcctg

SEQ ID NO: 143574 - DNA, 17 bp, synthetic construct
  source 1..17: mol_type = other DNA
gtggccctggggcctga

SEQ ID NO: 143575 - DNA, 17 bp, synthetic construct
  source 1..17: mol_type = other DNA
tggccctggggcctgaa

SEQ ID NO: 143576 - DNA, 17 bp, synthetic construct
  source 1..17: mol_type = other DNA
ggccctggggcctgaac

SEQ ID NO: 143577 - DNA, 17 bp, synthetic construct
  source 1..17: mol_type = other DNA
gccctggggcctgaaca

SEQ ID NO: 143578 - DNA, 17 bp, synthetic construct
  source 1..17: mol_type = other DNA
ccctggggcctgaacat

SEQ ID NO: 143579 - DNA, 17 bp, synthetic construct
  source 1..17: mol_type = other DNA
cctggggcctgaacatg

SEQ ID NO: 143580 - DNA, 17 bp, synthetic construct
  source 1..17: mol_type = other DNA
ctggggcctgaacatgt

SEQ ID NO: 143581 - DNA, 17 bp, synthetic construct
  source 1..17: mol_type = other DNA
tggggcctgaacatgtg

SEQ ID NO: 143582 - DNA, 17 bp, synthetic construct
  source 1..17: mol_type = other DNA
ggggcctgaacatgtgt

SEQ ID NO: 143583 - DNA, 17 bp, synthetic construct
  source 1..17: mol_type = other DNA
gggcctgaacatgtgtg

SEQ ID NO: 143584 - DNA, 17 bp, synthetic construct
  source 1..17: mol_type = other DNA
ggcctgaacatgtgtgt

SEQ ID NO: 143585 - DNA, 17 bp, synthetic construct
  source 1..17: mol_type = other DNA
gcctgaacatgtgtgtg

SEQ ID NO: 143586 - DNA, 17 bp, synthetic construct
  source 1..17: mol_type = other DNA
cctgaacatgtgtgtgg

SEQ ID NO: 143587 - DNA, 17 bp, synthetic construct
  source 1..17: mol_type = other DNA
ctgaacatgtgtgtggg

SEQ ID NO: 143588 - DNA, 17 bp, synthetic construct
  source 1..17: mol_type = other DNA
tgaacatgtgtgtggga

SEQ ID NO: 143589 - DNA, 17 bp, synthetic construct
  source 1..17: mol_type = other DNA
gaacatgtgtgtgggat

SEQ ID NO: 143590 - DNA, 17 bp, synthetic construct
  source 1..17: mol_type = other DNA
aacatgtgtgtgggatg

SEQ ID NO: 143591 - DNA, 17 bp, synthetic construct
  source 1..17: mol_type = other DNA
acatgtgtgtgggatgc

SEQ ID NO: 143592 - DNA, 17 bp, synthetic construct
  source 1..17: mol_type = other DNA
catgtgtgtgggatgcc

SEQ ID NO: 143593 - DNA, 17 bp, synthetic construct
  source 1..17: mol_type = other DNA
atgtgtgtgggatgccc

SEQ ID NO: 143594 - DNA, 17 bp, synthetic construct
  source 1..17: mol_type = other DNA
tgtgtgtgggatgcccc

SEQ ID NO: 143595 - DNA, 17 bp, synthetic construct
  source 1..17: mol_type = other DNA
gtgtgtgggatgccccg

SEQ ID NO: 143596 - DNA, 17 bp, synthetic construct
  source 1..17: mol_type = other DNA
tgtgtgggatgccccgg

SEQ ID NO: 143597 - DNA, 17 bp, synthetic construct
  source 1..17: mol_type = other DNA
gtgtgggatgccccggg

SEQ ID NO: 143598 - DNA, 17 bp, synthetic construct
  source 1..17: mol_type = other DNA
tgtgggatgccccgggg

SEQ ID NO: 143599 - DNA, 17 bp, synthetic construct
  source 1..17: mol_type = other DNA
gtgggatgccccggggc

SEQ ID NO: 143600 - DNA, 17 bp, synthetic construct
  source 1..17: mol_type = other DNA
tgggatgccccggggct

SEQ ID NO: 143601 - DNA, 17 bp, synthetic construct
  source 1..17: mol_type = other DNA
gggatgccccggggctc

SEQ ID NO: 143602 - DNA, 17 bp, synthetic construct
  source 1..17: mol_type = other DNA
ggatgccccggggctct

SEQ ID NO: 143603 - DNA, 17 bp, synthetic construct
  source 1..17: mol_type = other DNA
gatgccccggggctctc

SEQ ID NO: 143604 - DNA, 17 bp, synthetic construct
  source 1..17: mol_type = other DNA
atgccccggggctctct

SEQ ID NO: 143605 - DNA, 17 bp, synthetic construct
  source 1..17: mol_type = other DNA
tgccccggggctctctg

SEQ ID NO: 143606 - DNA, 17 bp, synthetic construct
  source 1..17: mol_type = other DNA
gccccggggctctctga

SEQ ID NO: 143607 - DNA, 17 bp, synthetic construct
  source 1..17: mol_type = other DNA
ccccggggctctctgag

SEQ ID NO: 143608 - DNA, 17 bp, synthetic construct
  source 1..17: mol_type = other DNA
cccggggctctctgagc

SEQ ID NO: 143609 - DNA, 17 bp, synthetic construct
  source 1..17: mol_type = other DNA
ccggggctctctgagcc

SEQ ID NO: 143610 - DNA, 17 bp, synthetic construct
  source 1..17: mol_type = other DNA
cggggctctctgagccc

SEQ ID NO: 143611 - DNA, 17 bp, synthetic construct
  source 1..17: mol_type = other DNA
ggggctctctgagcccc

SEQ ID NO: 143612 - DNA, 17 bp, synthetic construct
  source 1..17: mol_type = other DNA
gggctctctgagcccca

SEQ ID NO: 143613 - DNA, 17 bp, synthetic construct
  source 1..17: mol_type = other DNA
ggctctctgagccccac

SEQ ID NO: 143614 - DNA, 17 bp, synthetic construct
  source 1..17: mol_type = other DNA
gctctctgagccccact

SEQ ID NO: 143615 - DNA, 17 bp, synthetic construct
  source 1..17: mol_type = other DNA
ctctctgagccccactc

SEQ ID NO: 143616 - DNA, 17 bp, synthetic construct
  source 1..17: mol_type = other DNA
tctctgagccccactcc

SEQ ID NO: 143617 - DNA, 17 bp, synthetic construct
  source 1..17: mol_type = other DNA
ctctgagccccactcct

SEQ ID NO: 143618 - DNA, 17 bp, synthetic construct
  source 1..17: mol_type = other DNA
tctgagccccactcctt

SEQ ID NO: 143619 - DNA, 17 bp, synthetic construct
  source 1..17: mol_type = other DNA
ctgagccccactccttg

SEQ ID NO: 143620 - DNA, 17 bp, synthetic construct
  source 1..17: mol_type = other DNA
tgagccccactccttgt

SEQ ID NO: 143621 - DNA, 17 bp, synthetic construct
  source 1..17: mol_type = other DNA
gagccccactccttgtc

SEQ ID NO: 143622 - DNA, 17 bp, synthetic construct
  source 1..17: mol_type = other DNA
agccccactccttgtct

SEQ ID NO: 143623 - DNA, 17 bp, synthetic construct
  source 1..17: mol_type = other DNA
gccccactccttgtctt

SEQ ID NO: 143624 - DNA, 17 bp, synthetic construct
  source 1..17: mol_type = other DNA
ccccactccttgtcttg

SEQ ID NO: 143625 - DNA, 17 bp, synthetic construct
  source 1..17: mol_type = other DNA
cccactccttgtcttga

SEQ ID NO: 143626 - DNA, 17 bp, synthetic construct
  source 1..17: mol_type = other DNA
ccactccttgtcttgac

SEQ ID NO: 143627 - DNA, 17 bp, synthetic construct
  source 1..17: mol_type = other DNA
cactccttgtcttgaca

SEQ ID NO: 143628 - DNA, 17 bp, synthetic construct
  source 1..17: mol_type = other DNA
actccttgtcttgacat

SEQ ID NO: 143629 - DNA, 17 bp, synthetic construct
  source 1..17: mol_type = other DNA
ctccttgtcttgacatt

SEQ ID NO: 143630 - DNA, 17 bp, synthetic construct
  source 1..17: mol_type = other DNA
tccttgtcttgacattc

SEQ ID NO: 143631 - DNA, 17 bp, synthetic construct
  source 1..17: mol_type = other DNA
ccttgtcttgacattcc

SEQ ID NO: 143632 - DNA, 17 bp, synthetic construct
  source 1..17: mol_type = other DNA
cttgtcttgacattcct

SEQ ID NO: 143633 - DNA, 17 bp, synthetic construct
  source 1..17: mol_type = other DNA
ttgtcttgacattcctg

SEQ ID NO: 143634 - DNA, 17 bp, synthetic construct
  source 1..17: mol_type = other DNA
tgtcttgacattcctgc

SEQ ID NO: 143635 - DNA, 17 bp, synthetic construct
  source 1..17: mol_type = other DNA
gtcttgacattcctgcc

SEQ ID NO: 143636 - DNA, 17 bp, synthetic construct
  source 1..17: mol_type = other DNA
tcttgacattcctgccc

SEQ ID NO: 143637 - DNA, 17 bp, synthetic construct
  source 1..17: mol_type = other DNA
cttgacattcctgccct

SEQ ID NO: 143638 - DNA, 17 bp, synthetic construct
  source 1..17: mol_type = other DNA
ttgacattcctgccctg

SEQ ID NO: 143639 - DNA, 17 bp, synthetic construct
  source 1..17: mol_type = other DNA
tgacattcctgccctga

SEQ ID NO: 143640 - DNA, 17 bp, synthetic construct
  source 1..17: mol_type = other DNA
gacattcctgccctgag

SEQ ID NO: 143641 - DNA, 17 bp, synthetic construct
  source 1..17: mol_type = other DNA
acattcctgccctgagg

SEQ ID NO: 143642 - DNA, 17 bp, synthetic construct
  source 1..17: mol_type = other DNA
cattcctgccctgaggg

SEQ ID NO: 143643 - DNA, 17 bp, synthetic construct
  source 1..17: mol_type = other DNA
attcctgccctgagggc

SEQ ID NO: 143644 - DNA, 17 bp, synthetic construct
  source 1..17: mol_type = other DNA
ttcctgccctgagggcc

SEQ ID NO: 143645 - DNA, 17 bp, synthetic construct
  source 1..17: mol_type = other DNA
tcctgccctgagggccg

SEQ ID NO: 143646 - DNA, 17 bp, synthetic construct
  source 1..17: mol_type = other DNA
cctgccctgagggccga

SEQ ID NO: 143647 - DNA, 17 bp, synthetic construct
  source 1..17: mol_type = other DNA
ctgccctgagggccgat

SEQ ID NO: 143648 - DNA, 17 bp, synthetic construct
  source 1..17: mol_type = other DNA
tgccctgagggccgatc

SEQ ID NO: 143649 - DNA, 17 bp, synthetic construct
  source 1..17: mol_type = other DNA
gccctgagggccgatcc

SEQ ID NO: 143650 - DNA, 17 bp, synthetic construct
  source 1..17: mol_type = other DNA
ccctgagggccgatccg

SEQ ID NO: 143651 - DNA, 17 bp, synthetic construct
  source 1..17: mol_type = other DNA
cctgagggccgatccgc

SEQ ID NO: 143652 - DNA, 17 bp, synthetic construct
  source 1..17: mol_type = other DNA
ctgagggccgatccgca

SEQ ID NO: 143653 - DNA, 17 bp, synthetic construct
  source 1..17: mol_type = other DNA
tgagggccgatccgcac

SEQ ID NO: 143654 - DNA, 17 bp, synthetic construct
  source 1..17: mol_type = other DNA
gagggccgatccgcaca

SEQ ID NO: 143655 - DNA, 17 bp, synthetic construct
  source 1..17: mol_type = other DNA
agggccgatccgcacag

SEQ ID NO: 143656 - DNA, 17 bp, synthetic construct
  source 1..17: mol_type = other DNA
gggccgatccgcacagg

SEQ ID NO: 143657 - DNA, 17 bp, synthetic construct
  source 1..17: mol_type = other DNA
ggccgatccgcacaggg

SEQ ID NO: 143658 - DNA, 17 bp, synthetic construct
  source 1..17: mol_type = other DNA
gccgatccgcacagggg

SEQ ID NO: 143659 - DNA, 17 bp, synthetic construct
  source 1..17: mol_type = other DNA
ccgatccgcacaggggc

SEQ ID NO: 143660 - DNA, 17 bp, synthetic construct
  source 1..17: mol_type = other DNA
cgatccgcacaggggcc

SEQ ID NO: 143661 - DNA, 17 bp, synthetic construct
  source 1..17: mol_type = other DNA
gatccgcacaggggccc

SEQ ID NO: 143662 - DNA, 17 bp, synthetic construct
  source 1..17: mol_type = other DNA
atccgcacaggggccct

SEQ ID NO: 143663 - DNA, 17 bp, synthetic construct
  source 1..17: mol_type = other DNA
tccgcacaggggccctg

SEQ ID NO: 143664 - DNA, 17 bp, synthetic construct
  source 1..17: mol_type = other DNA
ccgcacaggggccctgg

SEQ ID NO: 143665 - DNA, 17 bp, synthetic construct
  source 1..17: mol_type = other DNA
cgcacaggggccctgga

SEQ ID NO: 143666 - DNA, 17 bp, synthetic construct
  source 1..17: mol_type = other DNA
gcacaggggccctggac

SEQ ID NO: 143667 - DNA, 17 bp, synthetic construct
  source 1..17: mol_type = other DNA
cacaggggccctggaca

SEQ ID NO: 143668 - DNA, 17 bp, synthetic construct
  source 1..17: mol_type = other DNA
acaggggccctggacac

SEQ ID NO: 143669 - DNA, 17 bp, synthetic construct
  source 1..17: mol_type = other DNA
caggggccctggacacg

SEQ ID NO: 143670 - DNA, 17 bp, synthetic construct
  source 1..17: mol_type = other DNA
aggggccctggacacgt

SEQ ID NO: 143671 - DNA, 17 bp, synthetic construct
  source 1..17: mol_type = other DNA
ggggccctggacacgtc

SEQ ID NO: 143672 - DNA, 17 bp, synthetic construct
  source 1..17: mol_type = other DNA
gggccctggacacgtca

SEQ ID NO: 143673 - DNA, 17 bp, synthetic construct
  source 1..17: mol_type = other DNA
ggccctggacacgtcag

SEQ ID NO: 143674 - DNA, 17 bp, synthetic construct
  source 1..17: mol_type = other DNA
gccctggacacgtcaga

SEQ ID NO: 143675 - DNA, 17 bp, synthetic construct
  source 1..17: mol_type = other DNA
ccctggacacgtcagag

SEQ ID NO: 143676 - DNA, 17 bp, synthetic construct
  source 1..17: mol_type = other DNA
cctggacacgtcagagc

SEQ ID NO: 143677 - DNA, 17 bp, synthetic construct
  source 1..17: mol_type = other DNA
ctggacacgtcagagct

SEQ ID NO: 143678 - DNA, 17 bp, synthetic construct
  source 1..17: mol_type = other DNA
tggacacgtcagagctg

SEQ ID NO: 143679 - DNA, 17 bp, synthetic construct
  source 1..17: mol_type = other DNA
ggacacgtcagagctgg

SEQ ID NO: 143680 - DNA, 17 bp, synthetic construct
  source 1..17: mol_type = other DNA
gacacgtcagagctggg

SEQ ID NO: 143681 - DNA, 17 bp, synthetic construct
  source 1..17: mol_type = other DNA
acacgtcagagctggga

SEQ ID NO: 143682 - DNA, 17 bp, synthetic construct
  source 1..17: mol_type = other DNA
cacgtcagagctgggac

SEQ ID NO: 143683 - DNA, 17 bp, synthetic construct
  source 1..17: mol_type = other DNA
acgtcagagctgggaca

SEQ ID NO: 143684 - DNA, 17 bp, synthetic construct
  source 1..17: mol_type = other DNA
cgtcagagctgggacat

SEQ ID NO: 143685 - DNA, 17 bp, synthetic construct
  source 1..17: mol_type = other DNA
gtcagagctgggacatg

SEQ ID NO: 143686 - DNA, 17 bp, synthetic construct
  source 1..17: mol_type = other DNA
tcagagctgggacatgc

SEQ ID NO: 143687 - DNA, 17 bp, synthetic construct
  source 1..17: mol_type = other DNA
cagagctgggacatgct

SEQ ID NO: 143688 - DNA, 17 bp, synthetic construct
  source 1..17: mol_type = other DNA
agagctgggacatgctt

SEQ ID NO: 143689 - DNA, 17 bp, synthetic construct
  source 1..17: mol_type = other DNA
gagctgggacatgcttg

SEQ ID NO: 143690 - DNA, 17 bp, synthetic construct
  source 1..17: mol_type = other DNA
agctgggacatgcttgg

SEQ ID NO: 143691 - DNA, 17 bp, synthetic construct
  source 1..17: mol_type = other DNA
gctgggacatgcttggg

SEQ ID NO: 143692 - DNA, 17 bp, synthetic construct
  source 1..17: mol_type = other DNA
ctgggacatgcttggga

SEQ ID NO: 143693 - DNA, 17 bp, synthetic construct
  source 1..17: mol_type = other DNA
tgggacatgcttgggac

SEQ ID NO: 143694 - DNA, 17 bp, synthetic construct
  source 1..17: mol_type = other DNA
gggacatgcttgggact

SEQ ID NO: 143695 - DNA, 17 bp, synthetic construct
  source 1..17: mol_type = other DNA
ggacatgcttgggactc

SEQ ID NO: 143696 - DNA, 17 bp, synthetic construct
  source 1..17: mol_type = other DNA
gacatgcttgggactca

SEQ ID NO: 143697 - DNA, 17 bp, synthetic construct
  source 1..17: mol_type = other DNA
acatgcttgggactcag

SEQ ID NO: 143698 - DNA, 17 bp, synthetic construct
  source 1..17: mol_type = other DNA
catgcttgggactcagg

SEQ ID NO: 143699 - DNA, 17 bp, synthetic construct
  source 1..17: mol_type = other DNA
atgcttgggactcaggg

SEQ ID NO: 143700 - DNA, 17 bp, synthetic construct
  source 1..17: mol_type = other DNA
tgcttgggactcagggg

SEQ ID NO: 143701 - DNA, 17 bp, synthetic construct
  source 1..17: mol_type = other DNA
gcttgggactcaggggc

SEQ ID NO: 143702 - DNA, 17 bp, synthetic construct
  source 1..17: mol_type = other DNA
cttgggactcaggggca

SEQ ID NO: 143703 - DNA, 17 bp, synthetic construct
  source 1..17: mol_type = other DNA
ttgggactcaggggcac

SEQ ID NO: 143704 - DNA, 17 bp, synthetic construct
  source 1..17: mol_type = other DNA
tgggactcaggggcacc

SEQ ID NO: 143705 - DNA, 17 bp, synthetic construct
  source 1..17: mol_type = other DNA
gggactcaggggcacct

SEQ ID NO: 143706 - DNA, 17 bp, synthetic construct
  source 1..17: mol_type = other DNA
ggactcaggggcacctt

SEQ ID NO: 143707 - DNA, 17 bp, synthetic construct
  source 1..17: mol_type = other DNA
gactcaggggcacctta

SEQ ID NO: 143708 - DNA, 17 bp, synthetic construct
  source 1..17: mol_type = other DNA
actcaggggcaccttac

SEQ ID NO: 143709 - DNA, 17 bp, synthetic construct
  source 1..17: mol_type = other DNA
ctcaggggcaccttacg

SEQ ID NO: 143710 - DNA, 17 bp, synthetic construct
  source 1..17: mol_type = other DNA
tcaggggcaccttacgt

SEQ ID NO: 143711 - DNA, 17 bp, synthetic construct
  source 1..17: mol_type = other DNA
caggggcaccttacgtc

SEQ ID NO: 143712 - DNA, 17 bp, synthetic construct
  source 1..17: mol_type = other DNA
aggggcaccttacgtcg

SEQ ID NO: 143713 - DNA, 17 bp, synthetic construct
  source 1..17: mol_type = other DNA
ggggcaccttacgtcga

SEQ ID NO: 143714 - DNA, 17 bp, synthetic construct
  source 1..17: mol_type = other DNA
gggcaccttacgtcgac

SEQ ID NO: 143715 - DNA, 17 bp, synthetic construct
  source 1..17: mol_type = other DNA
ggcaccttacgtcgaca

SEQ ID NO: 143716 - DNA, 17 bp, synthetic construct
  source 1..17: mol_type = other DNA
gcaccttacgtcgacag

SEQ ID NO: 143717 - DNA, 17 bp, synthetic construct
  source 1..17: mol_type = other DNA
caccttacgtcgacagc

SEQ ID NO: 143718 - DNA, 17 bp, synthetic construct
  source 1..17: mol_type = other DNA
accttacgtcgacagcc

SEQ ID NO: 143719 - DNA, 17 bp, synthetic construct
  source 1..17: mol_type = other DNA
ccttacgtcgacagcca

SEQ ID NO: 143720 - DNA, 17 bp, synthetic construct
  source 1..17: mol_type = other DNA
cttacgtcgacagccat

SEQ ID NO: 143721 - DNA, 17 bp, synthetic construct
  source 1..17: mol_type = other DNA
ttacgtcgacagccatg

SEQ ID NO: 143722 - DNA, 17 bp, synthetic construct
  source 1..17: mol_type = other DNA
tacgtcgacagccatga

SEQ ID NO: 143723 - DNA, 17 bp, synthetic construct
  source 1..17: mol_type = other DNA
acgtcgacagccatgag

SEQ ID NO: 143724 - DNA, 17 bp, synthetic construct
  source 1..17: mol_type = other DNA
cgtcgacagccatgagc

SEQ ID NO: 143725 - DNA, 17 bp, synthetic construct
  source 1..17: mol_type = other DNA
gtcgacagccatgagct

SEQ ID NO: 143726 - DNA, 17 bp, synthetic construct
  source 1..17: mol_type = other DNA
tcgacagccatgagctc

SEQ ID NO: 143727 - DNA, 17 bp, synthetic construct
  source 1..17: mol_type = other DNA
cgacagccatgagctcc

SEQ ID NO: 143728 - DNA, 17 bp, synthetic construct
  source 1..17: mol_type = other DNA
gacagccatgagctcca

SEQ ID NO: 143729 - DNA, 17 bp, synthetic construct
  source 1..17: mol_type = other DNA
acagccatgagctccac

SEQ ID NO: 143730 - DNA, 17 bp, synthetic construct
  source 1..17: mol_type = other DNA
cagccatgagctccaca

SEQ ID NO: 143731 - DNA, 17 bp, synthetic construct
  source 1..17: mol_type = other DNA
agccatgagctccacaa

SEQ ID NO: 143732 - DNA, 17 bp, synthetic construct
  source 1..17: mol_type = other DNA
gccatgagctccacaac

SEQ ID NO: 143733 - DNA, 17 bp, synthetic construct
  source 1..17: mol_type = other DNA
ccatgagctccacaact

SEQ ID NO: 143734 - DNA, 17 bp, synthetic construct
  source 1..17: mol_type = other DNA
catgagctccacaactg

SEQ ID NO: 143735 - DNA, 17 bp, synthetic construct
  source 1..17: mol_type = other DNA
atgagctccacaactgc

SEQ ID NO: 143736 - DNA, 17 bp, synthetic construct
  source 1..17: mol_type = other DNA
tgagctccacaactgct

SEQ ID NO: 143737 - DNA, 17 bp, synthetic construct
  source 1..17: mol_type = other DNA
gagctccacaactgctg

SEQ ID NO: 143738 - DNA, 17 bp, synthetic construct
  source 1..17: mol_type = other DNA
agctccacaactgctgc

SEQ ID NO: 143739 - DNA, 17 bp, synthetic construct
  source 1..17: mol_type = other DNA
gctccacaactgctgcc

SEQ ID NO: 143740 - DNA, 17 bp, synthetic construct
  source 1..17: mol_type = other DNA
ctccacaactgctgcct

SEQ ID NO: 143741 - DNA, 17 bp, synthetic construct
  source 1..17: mol_type = other DNA
tccacaactgctgcctc

SEQ ID NO: 143742 - DNA, 17 bp, synthetic construct
  source 1..17: mol_type = other DNA
ccacaactgctgcctct

SEQ ID NO: 143743 - DNA, 17 bp, synthetic construct
  source 1..17: mol_type = other DNA
cacaactgctgcctctg

SEQ ID NO: 143744 - DNA, 17 bp, synthetic construct
  source 1..17: mol_type = other DNA
acaactgctgcctctga

SEQ ID NO: 143745 - DNA, 17 bp, synthetic construct
  source 1..17: mol_type = other DNA
caactgctgcctctgag

SEQ ID NO: 143746 - DNA, 17 bp, synthetic construct
  source 1..17: mol_type = other DNA
aactgctgcctctgaga

SEQ ID NO: 143747 - DNA, 17 bp, synthetic construct
  source 1..17: mol_type = other DNA
actgctgcctctgagag

SEQ ID NO: 143748 - DNA, 17 bp, synthetic construct
  source 1..17: mol_type = other DNA
ctgctgcctctgagagg

SEQ ID NO: 143749 - DNA, 17 bp, synthetic construct
  source 1..17: mol_type = other DNA
tgctgcctctgagaggt

SEQ ID NO: 143750 - DNA, 17 bp, synthetic construct
  source 1..17: mol_type = other DNA
gctgcctctgagaggtc

SEQ ID NO: 143751 - DNA, 17 bp, synthetic construct
  source 1..17: mol_type = other DNA
ctgcctctgagaggtcc

SEQ ID NO: 143752 - DNA, 17 bp, synthetic construct
  source 1..17: mol_type = other DNA
tgcctctgagaggtccc

SEQ ID NO: 143753 - DNA, 17 bp, synthetic construct
  source 1..17: mol_type = other DNA
gcctctgagaggtccct

SEQ ID NO: 143754 - DNA, 17 bp, synthetic construct
  source 1..17: mol_type = other DNA
cctctgagaggtccctt

SEQ ID NO: 143755 - DNA, 17 bp, synthetic construct
  source 1..17: mol_type = other DNA
ctctgagaggtcccttc

SEQ ID NO: 143756 - DNA, 17 bp, synthetic construct
  source 1..17: mol_type = other DNA
tctgagaggtcccttca

SEQ ID NO: 143757 - DNA, 17 bp, synthetic construct
  source 1..17: mol_type = other DNA
ctgagaggtcccttcag

SEQ ID NO: 143758 - DNA, 17 bp, synthetic construct
  source 1..17: mol_type = other DNA
tgagaggtcccttcagg

SEQ ID NO: 143759 - DNA, 17 bp, synthetic construct
  source 1..17: mol_type = other DNA
gagaggtcccttcaggg

SEQ ID NO: 143760 - DNA, 17 bp, synthetic construct
  source 1..17: mol_type = other DNA
agaggtcccttcagggg

SEQ ID NO: 143761 - DNA, 17 bp, synthetic construct
  source 1..17: mol_type = other DNA
gaggtcccttcaggggc

SEQ ID NO: 143762 - DNA, 17 bp, synthetic construct
  source 1..17: mol_type = other DNA
aggtcccttcaggggct

SEQ ID NO: 143763 - DNA, 17 bp, synthetic construct
  source 1..17: mol_type = other DNA
ggtcccttcaggggctc

SEQ ID NO: 143764 - DNA, 17 bp, synthetic construct
  source 1..17: mol_type = other DNA
gtcccttcaggggctcc

SEQ ID NO: 143765 - DNA, 17 bp, synthetic construct
  source 1..17: mol_type = other DNA
tcccttcaggggctccc

SEQ ID NO: 143766 - DNA, 17 bp, synthetic construct
  source 1..17: mol_type = other DNA
cccttcaggggctccca

SEQ ID NO: 143767 - DNA, 17 bp, synthetic construct
  source 1..17: mol_type = other DNA
ccttcaggggctcccag

SEQ ID NO: 143768 - DNA, 17 bp, synthetic construct
  source 1..17: mol_type = other DNA
cttcaggggctcccagc

SEQ ID NO: 143769 - DNA, 17 bp, synthetic construct
  source 1..17: mol_type = other DNA
ttcaggggctcccagca

SEQ ID NO: 143770 - DNA, 17 bp, synthetic construct
  source 1..17: mol_type = other DNA
tcaggggctcccagcaa

SEQ ID NO: 143771 - DNA, 17 bp, synthetic construct
  source 1..17: mol_type = other DNA
caggggctcccagcaac

SEQ ID NO: 143772 - DNA, 17 bp, synthetic construct
  source 1..17: mol_type = other DNA
aggggctcccagcaaca

SEQ ID NO: 143773 - DNA, 17 bp, synthetic construct
  source 1..17: mol_type = other DNA
ggggctcccagcaacag

SEQ ID NO: 143774 - DNA, 17 bp, synthetic construct
  source 1..17: mol_type = other DNA
gggctcccagcaacagc

SEQ ID NO: 143775 - DNA, 17 bp, synthetic construct
  source 1..17: mol_type = other DNA
ggctcccagcaacagcc

SEQ ID NO: 143776 - DNA, 17 bp, synthetic construct
  source 1..17: mol_type = other DNA
gctcccagcaacagcct

SEQ ID NO: 143777 - DNA, 17 bp, synthetic construct
  source 1..17: mol_type = other DNA
ctcccagcaacagcctg

SEQ ID NO: 143778 - DNA, 17 bp, synthetic construct
  source 1..17: mol_type = other DNA
tcccagcaacagcctgg

SEQ ID NO: 143779 - DNA, 17 bp, synthetic construct
  source 1..17: mol_type = other DNA
cccagcaacagcctggg

SEQ ID NO: 143780 - DNA, 17 bp, synthetic construct
  source 1..17: mol_type = other DNA
ccagcaacagcctgggg

SEQ ID NO: 143781 - DNA, 17 bp, synthetic construct
  source 1..17: mol_type = other DNA
cagcaacagcctggggg

SEQ ID NO: 143782 - DNA, 17 bp, synthetic construct
  source 1..17: mol_type = other DNA
agcaacagcctgggggc

SEQ ID NO: 143783 - DNA, 17 bp, synthetic construct
  source 1..17: mol_type = other DNA
gcaacagcctgggggca

SEQ ID NO: 143784 - DNA, 17 bp, synthetic construct
  source 1..17: mol_type = other DNA
caacagcctgggggcag

SEQ ID NO: 143785 - DNA, 17 bp, synthetic construct
  source 1..17: mol_type = other DNA
aacagcctgggggcagc

SEQ ID NO: 143786 - DNA, 17 bp, synthetic construct
  source 1..17: mol_type = other DNA
acagcctgggggcagca

SEQ ID NO: 143787 - DNA, 17 bp, synthetic construct
  source 1..17: mol_type = other DNA
cagcctgggggcagcac

SEQ ID NO: 143788 - DNA, 17 bp, synthetic construct
  source 1..17: mol_type = other DNA
agcctgggggcagcaca

SEQ ID NO: 143789 - DNA, 17 bp, synthetic construct
  source 1..17: mol_type = other DNA
gcctgggggcagcacac

SEQ ID NO: 143790 - DNA, 17 bp, synthetic construct
  source 1..17: mol_type = other DNA
cctgggggcagcacaca

SEQ ID NO: 143791 - DNA, 17 bp, synthetic construct
  source 1..17: mol_type = other DNA
ctgggggcagcacacac

SEQ ID NO: 143792 - DNA, 17 bp, synthetic construct
  source 1..17: mol_type = other DNA
tgggggcagcacacact

SEQ ID NO: 143793 - DNA, 17 bp, synthetic construct
  source 1..17: mol_type = other DNA
gggggcagcacacactg

SEQ ID NO: 143794 - DNA, 17 bp, synthetic construct
  source 1..17: mol_type = other DNA
ggggcagcacacactgg

SEQ ID NO: 143795 - DNA, 17 bp, synthetic construct
  source 1..17: mol_type = other DNA
gggcagcacacactggc

SEQ ID NO: 143796 - DNA, 17 bp, synthetic construct
  source 1..17: mol_type = other DNA
ggcagcacacactggcc

SEQ ID NO: 143797 - DNA, 17 bp, synthetic construct
  source 1..17: mol_type = other DNA
gcagcacacactggcct

SEQ ID NO: 143798 - DNA, 17 bp, synthetic construct
  source 1..17: mol_type = other DNA
cagcacacactggcctg

SEQ ID NO: 143799 - DNA, 17 bp, synthetic construct
  source 1..17: mol_type = other DNA
agcacacactggcctgg

SEQ ID NO: 143800 - DNA, 17 bp, synthetic construct
  source 1..17: mol_type = other DNA
gcacacactggcctggg

SEQ ID NO: 143801 - DNA, 17 bp, synthetic construct
  source 1..17: mol_type = other DNA
cacacactggcctgggg

SEQ ID NO: 143802 - DNA, 17 bp, synthetic construct
  source 1..17: mol_type = other DNA
acacactggcctggggt

SEQ ID NO: 143803 - DNA, 17 bp, synthetic construct
  source 1..17: mol_type = other DNA
cacactggcctggggtc

SEQ ID NO: 143804 - DNA, 17 bp, synthetic construct
  source 1..17: mol_type = other DNA
acactggcctggggtcc

SEQ ID NO: 143805 - DNA, 17 bp, synthetic construct
  source 1..17: mol_type = other DNA
cactggcctggggtccc

SEQ ID NO: 143806 - DNA, 17 bp, synthetic construct
  source 1..17: mol_type = other DNA
actggcctggggtcccc

SEQ ID NO: 143807 - DNA, 17 bp, synthetic construct
  source 1..17: mol_type = other DNA
ctggcctggggtccccg

SEQ ID NO: 143808 - DNA, 17 bp, synthetic construct
  source 1..17: mol_type = other DNA
tggcctggggtccccgc

SEQ ID NO: 143809 - DNA, 17 bp, synthetic construct
  source 1..17: mol_type = other DNA
ggcctggggtccccgcc

SEQ ID NO: 143810 - DNA, 17 bp, synthetic construct
  source 1..17: mol_type = other DNA
gcctggggtccccgcct

SEQ ID NO: 143811 - DNA, 17 bp, synthetic construct
  source 1..17: mol_type = other DNA
cctggggtccccgcctg

SEQ ID NO: 143812 - DNA, 17 bp, synthetic construct
  source 1..17: mol_type = other DNA
ctggggtccccgcctgc

SEQ ID NO: 143813 - DNA, 17 bp, synthetic construct
  source 1..17: mol_type = other DNA
tggggtccccgcctgcc

SEQ ID NO: 143814 - DNA, 17 bp, synthetic construct
  source 1..17: mol_type = other DNA
ggggtccccgcctgccc

SEQ ID NO: 143815 - DNA, 17 bp, synthetic construct
  source 1..17: mol_type = other DNA
gggtccccgcctgcccg

SEQ ID NO: 143816 - DNA, 17 bp, synthetic construct
  source 1..17: mol_type = other DNA
ggtccccgcctgcccgc

SEQ ID NO: 143817 - DNA, 17 bp, synthetic construct
  source 1..17: mol_type = other DNA
gtccccgcctgcccgcc

SEQ ID NO: 143818 - DNA, 17 bp, synthetic construct
  source 1..17: mol_type = other DNA
tccccgcctgcccgccc

SEQ ID NO: 143819 - DNA, 17 bp, synthetic construct
  source 1..17: mol_type = other DNA
ccccgcctgcccgccca

SEQ ID NO: 143820 - DNA, 17 bp, synthetic construct
  source 1..17: mol_type = other DNA
cccgcctgcccgcccag

SEQ ID NO: 143821 - DNA, 17 bp, synthetic construct
  source 1..17: mol_type = other DNA
ccgcctgcccgcccaga

SEQ ID NO: 143822 - DNA, 17 bp, synthetic construct
  source 1..17: mol_type = other DNA
cgcctgcccgcccagat

SEQ ID NO: 143823 - DNA, 17 bp, synthetic construct
  source 1..17: mol_type = other DNA
gcctgcccgcccagatt

SEQ ID NO: 143824 - DNA, 17 bp, synthetic construct
  source 1..17: mol_type = other DNA
cctgcccgcccagattc

SEQ ID NO: 143825 - DNA, 17 bp, synthetic construct
  source 1..17: mol_type = other DNA
ctgcccgcccagattcc

SEQ ID NO: 143826 - DNA, 17 bp, synthetic construct
  source 1..17: mol_type = other DNA
tgcccgcccagattcct

SEQ ID NO: 143827 - DNA, 17 bp, synthetic construct
  source 1..17: mol_type = other DNA
gcccgcccagattccta

SEQ ID NO: 143828 - DNA, 17 bp, synthetic construct
  source 1..17: mol_type = other DNA
cccgcccagattcctac

SEQ ID NO: 143829 - DNA, 17 bp, synthetic construct
  source 1..17: mol_type = other DNA
ccgcccagattcctacc

SEQ ID NO: 143830 - DNA, 17 bp, synthetic construct
  source 1..17: mol_type = other DNA
cgcccagattcctaccc

SEQ ID NO: 143831 - DNA, 17 bp, synthetic construct
  source 1..17: mol_type = other DNA
gcccagattcctacccg

SEQ ID NO: 143832 - DNA, 17 bp, synthetic construct
  source 1..17: mol_type = other DNA
cccagattcctacccgc

SEQ ID NO: 143833 - DNA, 17 bp, synthetic construct
  source 1..17: mol_type = other DNA
ccagattcctacccgcc

SEQ ID NO: 143834 - DNA, 17 bp, synthetic construct
  source 1..17: mol_type = other DNA
cagattcctacccgccc

SEQ ID NO: 143835 - DNA, 17 bp, synthetic construct
  source 1..17: mol_type = other DNA
agattcctacccgcccg

SEQ ID NO: 143836 - DNA, 17 bp, synthetic construct
  source 1..17: mol_type = other DNA
gattcctacccgcccgg

SEQ ID NO: 143837 - DNA, 17 bp, synthetic construct
  source 1..17: mol_type = other DNA
attcctacccgcccgga

SEQ ID NO: 143838 - DNA, 17 bp, synthetic construct
  source 1..17: mol_type = other DNA
ttcctacccgcccggat

SEQ ID NO: 143839 - DNA, 17 bp, synthetic construct
  source 1..17: mol_type = other DNA
tcctacccgcccggatt

SEQ ID NO: 143840 - DNA, 17 bp, synthetic construct
  source 1..17: mol_type = other DNA
cctacccgcccggattc

SEQ ID NO: 143841 - DNA, 17 bp, synthetic construct
  source 1..17: mol_type = other DNA
ctacccgcccggattcc

SEQ ID NO: 143842 - DNA, 17 bp, synthetic construct
  source 1..17: mol_type = other DNA
tacccgcccggattcct

SEQ ID NO: 143843 - DNA, 17 bp, synthetic construct
  source 1..17: mol_type = other DNA
acccgcccggattcctg

SEQ ID NO: 143844 - DNA, 17 bp, synthetic construct
  source 1..17: mol_type = other DNA
cccgcccggattcctgc

SEQ ID NO: 143845 - DNA, 17 bp, synthetic construct
  source 1..17: mol_type = other DNA
ccgcccggattcctgcc

SEQ ID NO: 143846 - DNA, 17 bp, synthetic construct
  source 1..17: mol_type = other DNA
cgcccggattcctgcct

SEQ ID NO: 143847 - DNA, 17 bp, synthetic construct
  source 1..17: mol_type = other DNA
gcccggattcctgcctg

SEQ ID NO: 143848 - DNA, 17 bp, synthetic construct
  source 1..17: mol_type = other DNA
cccggattcctgcctgc

SEQ ID NO: 143849 - DNA, 17 bp, synthetic construct
  source 1..17: mol_type = other DNA
ccggattcctgcctgcc

SEQ ID NO: 143850 - DNA, 17 bp, synthetic construct
  source 1..17: mol_type = other DNA
cggattcctgcctgcca

SEQ ID NO: 143851 - DNA, 17 bp, synthetic construct
  source 1..17: mol_type = other DNA
ggattcctgcctgccag

SEQ ID NO: 143852 - DNA, 17 bp, synthetic construct
  source 1..17: mol_type = other DNA
gattcctgcctgccaga

SEQ ID NO: 143853 - DNA, 17 bp, synthetic construct
  source 1..17: mol_type = other DNA
attcctgcctgccagat

SEQ ID NO: 143854 - DNA, 17 bp, synthetic construct
  source 1..17: mol_type = other DNA
ttcctgcctgccagatt

SEQ ID NO: 143855 - DNA, 17 bp, synthetic construct
  source 1..17: mol_type = other DNA
tcctgcctgccagattc

SEQ ID NO: 143856 - DNA, 17 bp, synthetic construct
  source 1..17: mol_type = other DNA
cctgcctgccagattcc

SEQ ID NO: 143857 - DNA, 17 bp, synthetic construct
  source 1..17: mol_type = other DNA
ctgcctgccagattcct

SEQ ID NO: 143858 - DNA, 17 bp, synthetic construct
  source 1..17: mol_type = other DNA
tgcctgccagattcctg

SEQ ID NO: 143859 - DNA, 17 bp, synthetic construct
  source 1..17: mol_type = other DNA
gcctgccagattcctgc

SEQ ID NO: 143860 - DNA, 17 bp, synthetic construct
  source 1..17: mol_type = other DNA
cctgccagattcctgcc

SEQ ID NO: 143861 - DNA, 17 bp, synthetic construct
  source 1..17: mol_type = other DNA
ctgccagattcctgccc

SEQ ID NO: 143862 - DNA, 17 bp, synthetic construct
  source 1..17: mol_type = other DNA
tgccagattcctgcccc

SEQ ID NO: 143863 - DNA, 17 bp, synthetic construct
  source 1..17: mol_type = other DNA
gccagattcctgccccc

SEQ ID NO: 143864 - DNA, 17 bp, synthetic construct
  source 1..17: mol_type = other DNA
ccagattcctgccccca

SEQ ID NO: 143865 - DNA, 17 bp, synthetic construct
  source 1..17: mol_type = other DNA
cagattcctgcccccat

SEQ ID NO: 143866 - DNA, 17 bp, synthetic construct
  source 1..17: mol_type = other DNA
agattcctgcccccatg

SEQ ID NO: 143867 - DNA, 17 bp, synthetic construct
  source 1..17: mol_type = other DNA
gattcctgcccccatgg

SEQ ID NO: 143868 - DNA, 17 bp, synthetic construct
  source 1..17: mol_type = other DNA
attcctgcccccatggg

SEQ ID NO: 143869 - DNA, 17 bp, synthetic construct
  source 1..17: mol_type = other DNA
ttcctgcccccatgggg

SEQ ID NO: 143870 - DNA, 17 bp, synthetic construct
  source 1..17: mol_type = other DNA
tcctgcccccatggggt

SEQ ID NO: 143871 - DNA, 17 bp, synthetic construct
  source 1..17: mol_type = other DNA
cctgcccccatggggtc

SEQ ID NO: 143872 - DNA, 17 bp, synthetic construct
  source 1..17: mol_type = other DNA
ctgcccccatggggtct

SEQ ID NO: 143873 - DNA, 17 bp, synthetic construct
  source 1..17: mol_type = other DNA
tgcccccatggggtctc

SEQ ID NO: 143874 - DNA, 17 bp, synthetic construct
  source 1..17: mol_type = other DNA
gcccccatggggtctct

SEQ ID NO: 143875 - DNA, 17 bp, synthetic construct
  source 1..17: mol_type = other DNA
cccccatggggtctctg

SEQ ID NO: 143876 - DNA, 17 bp, synthetic construct
  source 1..17: mol_type = other DNA
ccccatggggtctctgc

SEQ ID NO: 143877 - DNA, 17 bp, synthetic construct
  source 1..17: mol_type = other DNA
cccatggggtctctgcc

SEQ ID NO: 143878 - DNA, 17 bp, synthetic construct
  source 1..17: mol_type = other DNA
ccatggggtctctgccc

SEQ ID NO: 143879 - DNA, 17 bp, synthetic construct
  source 1..17: mol_type = other DNA
catggggtctctgccca

SEQ ID NO: 143880 - DNA, 17 bp, synthetic construct
  source 1..17: mol_type = other DNA
atggggtctctgcccac

SEQ ID NO: 143881 - DNA, 17 bp, synthetic construct
  source 1..17: mol_type = other DNA
tggggtctctgcccacc

SEQ ID NO: 143882 - DNA, 17 bp, synthetic construct
  source 1..17: mol_type = other DNA
ggggtctctgcccaccc

SEQ ID NO: 143883 - DNA, 17 bp, synthetic construct
  source 1..17: mol_type = other DNA
gggtctctgcccaccca

SEQ ID NO: 143884 - DNA, 17 bp, synthetic construct
  source 1..17: mol_type = other DNA
ggtctctgcccacccag

SEQ ID NO: 143885 - DNA, 17 bp, synthetic construct
  source 1..17: mol_type = other DNA
gtctctgcccacccaga

SEQ ID NO: 143886 - DNA, 17 bp, synthetic construct
  source 1..17: mol_type = other DNA
tctctgcccacccagat

SEQ ID NO: 143887 - DNA, 17 bp, synthetic construct
  source 1..17: mol_type = other DNA
ctctgcccacccagatt

SEQ ID NO: 143888 - DNA, 17 bp, synthetic construct
  source 1..17: mol_type = other DNA
tctgcccacccagattc

SEQ ID NO: 143889 - DNA, 17 bp, synthetic construct
  source 1..17: mol_type = other DNA
ctgcccacccagattcc

SEQ ID NO: 143890 - DNA, 17 bp, synthetic construct
  source 1..17: mol_type = other DNA
tgcccacccagattcct

SEQ ID NO: 143891 - DNA, 17 bp, synthetic construct
  source 1..17: mol_type = other DNA
gcccacccagattcctg

SEQ ID NO: 143892 - DNA, 17 bp, synthetic construct
  source 1..17: mol_type = other DNA
cccacccagattcctgc

SEQ ID NO: 143893 - DNA, 17 bp, synthetic construct
  source 1..17: mol_type = other DNA
ccacccagattcctgcc

SEQ ID NO: 143894 - DNA, 17 bp, synthetic construct
  source 1..17: mol_type = other DNA
cacccagattcctgccc

SEQ ID NO: 143895 - DNA, 17 bp, synthetic construct
  source 1..17: mol_type = other DNA
acccagattcctgccca

SEQ ID NO: 143896 - DNA, 17 bp, synthetic construct
  source 1..17: mol_type = other DNA
cccagattcctgcccac

SEQ ID NO: 143897 - DNA, 17 bp, synthetic construct
  source 1..17: mol_type = other DNA
ccagattcctgcccaca

SEQ ID NO: 143898 - DNA, 17 bp, synthetic construct
  source 1..17: mol_type = other DNA
cagattcctgcccacat

SEQ ID NO: 143899 - DNA, 17 bp, synthetic construct
  source 1..17: mol_type = other DNA
agattcctgcccacatg

SEQ ID NO: 143900 - DNA, 17 bp, synthetic construct
  source 1..17: mol_type = other DNA
gattcctgcccacatgg

SEQ ID NO: 143901 - DNA, 17 bp, synthetic construct
  source 1..17: mol_type = other DNA
attcctgcccacatggg

SEQ ID NO: 143902 - DNA, 17 bp, synthetic construct
  source 1..17: mol_type = other DNA
ttcctgcccacatgggg

SEQ ID NO: 143903 - DNA, 17 bp, synthetic construct
  source 1..17: mol_type = other DNA
tcctgcccacatggggt

SEQ ID NO: 143904 - DNA, 17 bp, synthetic construct
  source 1..17: mol_type = other DNA
cctgcccacatggggtc

SEQ ID NO: 143905 - DNA, 17 bp, synthetic construct
  source 1..17: mol_type = other DNA
ctgcccacatggggtct

SEQ ID NO: 143906 - DNA, 17 bp, synthetic construct
  source 1..17: mol_type = other DNA
tgcccacatggggtctc

SEQ ID NO: 143907 - DNA, 17 bp, synthetic construct
  source 1..17: mol_type = other DNA
gcccacatggggtctct

SEQ ID NO: 143908 - DNA, 17 bp, synthetic construct
  source 1..17: mol_type = other DNA
cccacatggggtctctg

SEQ ID NO: 143909 - DNA, 17 bp, synthetic construct
  source 1..17: mol_type = other DNA
ccacatggggtctctgc

SEQ ID NO: 143910 - DNA, 17 bp, synthetic construct
  source 1..17: mol_type = other DNA
cacatggggtctctgcc

SEQ ID NO: 143911 - DNA, 17 bp, synthetic construct
  source 1..17: mol_type = other DNA
acatggggtctctgcct

SEQ ID NO: 143912 - DNA, 17 bp, synthetic construct
  source 1..17: mol_type = other DNA
catggggtctctgcctg

SEQ ID NO: 143913 - DNA, 17 bp, synthetic construct
  source 1..17: mol_type = other DNA
atggggtctctgcctgc

SEQ ID NO: 143914 - DNA, 17 bp, synthetic construct
  source 1..17: mol_type = other DNA
tggggtctctgcctgcc

SEQ ID NO: 143915 - DNA, 17 bp, synthetic construct
  source 1..17: mol_type = other DNA
ggggtctctgcctgccc

SEQ ID NO: 143916 - DNA, 17 bp, synthetic construct
  source 1..17: mol_type = other DNA
gggtctctgcctgccca

SEQ ID NO: 143917 - DNA, 17 bp, synthetic construct
  source 1..17: mol_type = other DNA
ggtctctgcctgcccag

SEQ ID NO: 143918 - DNA, 17 bp, synthetic construct
  source 1..17: mol_type = other DNA
gtctctgcctgcccaga

SEQ ID NO: 143919 - DNA, 17 bp, synthetic construct
  source 1..17: mol_type = other DNA
tctctgcctgcccagat

SEQ ID NO: 143920 - DNA, 17 bp, synthetic construct
  source 1..17: mol_type = other DNA
ctctgcctgcccagatt

SEQ ID NO: 143921 - DNA, 17 bp, synthetic construct
  source 1..17: mol_type = other DNA
tctgcctgcccagattc

SEQ ID NO: 143922 - DNA, 17 bp, synthetic construct
  source 1..17: mol_type = other DNA
ctgcctgcccagattcc

SEQ ID NO: 143923 - DNA, 17 bp, synthetic construct
  source 1..17: mol_type = other DNA
tgcctgcccagattccc

SEQ ID NO: 143924 - DNA, 17 bp, synthetic construct
  source 1..17: mol_type = other DNA
gcctgcccagattccct

SEQ ID NO: 143925 - DNA, 17 bp, synthetic construct
  source 1..17: mol_type = other DNA
cctgcccagattccctg

SEQ ID NO: 143926 - DNA, 17 bp, synthetic construct
  source 1..17: mol_type = other DNA
ctgcccagattccctgc

SEQ ID NO: 143927 - DNA, 17 bp, synthetic construct
  source 1..17: mol_type = other DNA
tgcccagattccctgcc

SEQ ID NO: 143928 - DNA, 17 bp, synthetic construct
  source 1..17: mol_type = other DNA
gcccagattccctgccc

SEQ ID NO: 143929 - DNA, 17 bp, synthetic construct
  source 1..17: mol_type = other DNA
cccagattccctgccca

SEQ ID NO: 143930 - DNA, 17 bp, synthetic construct
  source 1..17: mol_type = other DNA
ccagattccctgcccac

SEQ ID NO: 143931 - DNA, 17 bp, synthetic construct
  source 1..17: mol_type = other DNA
cagattccctgcccacc

SEQ ID NO: 143932 - DNA, 17 bp, synthetic construct
  source 1..17: mol_type = other DNA
agattccctgcccacct

SEQ ID NO: 143933 - DNA, 17 bp, synthetic construct
  source 1..17: mol_type = other DNA
gattccctgcccacctg

SEQ ID NO: 143934 - DNA, 17 bp, synthetic construct
  source 1..17: mol_type = other DNA
attccctgcccacctgt

SEQ ID NO: 143935 - DNA, 17 bp, synthetic construct
  source 1..17: mol_type = other DNA
ttccctgcccacctgtg

SEQ ID NO: 143936 - DNA, 17 bp, synthetic construct
  source 1..17: mol_type = other DNA
tccctgcccacctgtgg

SEQ ID NO: 143937 - DNA, 17 bp, synthetic construct
  source 1..17: mol_type = other DNA
ccctgcccacctgtggt

SEQ ID NO: 143938 - DNA, 17 bp, synthetic construct
  source 1..17: mol_type = other DNA
cctgcccacctgtggtc

SEQ ID NO: 143939 - DNA, 17 bp, synthetic construct
  source 1..17: mol_type = other DNA
ctgcccacctgtggtcc

SEQ ID NO: 143940 - DNA, 17 bp, synthetic construct
  source 1..17: mol_type = other DNA
tgcccacctgtggtccc

SEQ ID NO: 143941 - DNA, 17 bp, synthetic construct
  source 1..17: mol_type = other DNA
gcccacctgtggtccct

SEQ ID NO: 143942 - DNA, 17 bp, synthetic construct
  source 1..17: mol_type = other DNA
cccacctgtggtccctg

SEQ ID NO: 143943 - DNA, 17 bp, synthetic construct
  source 1..17: mol_type = other DNA
ccacctgtggtccctgt

SEQ ID NO: 143944 - DNA, 17 bp, synthetic construct
  source 1..17: mol_type = other DNA
cacctgtggtccctgtg

SEQ ID NO: 143945 - DNA, 17 bp, synthetic construct
  source 1..17: mol_type = other DNA
acctgtggtccctgtgt

SEQ ID NO: 143946 - DNA, 17 bp, synthetic construct
  source 1..17: mol_type = other DNA
cctgtggtccctgtgtg

SEQ ID NO: 143947 - DNA, 17 bp, synthetic construct
  source 1..17: mol_type = other DNA
ctgtggtccctgtgtgc

SEQ ID NO: 143948 - DNA, 17 bp, synthetic construct
  source 1..17: mol_type = other DNA
tgtggtccctgtgtgca

SEQ ID NO: 143949 - DNA, 17 bp, synthetic construct
  source 1..17: mol_type = other DNA
gtggtccctgtgtgcat

SEQ ID NO: 143950 - DNA, 17 bp, synthetic construct
  source 1..17: mol_type = other DNA
tggtccctgtgtgcatc

SEQ ID NO: 143951 - DNA, 17 bp, synthetic construct
  source 1..17: mol_type = other DNA
ggtccctgtgtgcatca

SEQ ID NO: 143952 - DNA, 17 bp, synthetic construct
  source 1..17: mol_type = other DNA
gtccctgtgtgcatcag

SEQ ID NO: 143953 - DNA, 17 bp, synthetic construct
  source 1..17: mol_type = other DNA
tccctgtgtgcatcagc

SEQ ID NO: 143954 - DNA, 17 bp, synthetic construct
  source 1..17: mol_type = other DNA
ccctgtgtgcatcagct

SEQ ID NO: 143955 - DNA, 17 bp, synthetic construct
  source 1..17: mol_type = other DNA
cctgtgtgcatcagctc

SEQ ID NO: 143956 - DNA, 17 bp, synthetic construct
  source 1..17: mol_type = other DNA
ctgtgtgcatcagctcc

SEQ ID NO: 143957 - DNA, 17 bp, synthetic construct
  source 1..17: mol_type = other DNA
tgtgtgcatcagctccc

SEQ ID NO: 143958 - DNA, 17 bp, synthetic construct
  source 1..17: mol_type = other DNA
gtgtgcatcagctccct

SEQ ID NO: 143959 - DNA, 17 bp, synthetic construct
  source 1..17: mol_type = other DNA
tgtgcatcagctccctg

SEQ ID NO: 143960 - DNA, 17 bp, synthetic construct
  source 1..17: mol_type = other DNA
gtgcatcagctccctgc

SEQ ID NO: 143961 - DNA, 17 bp, synthetic construct
  source 1..17: mol_type = other DNA
tgcatcagctccctgcc

SEQ ID NO: 143962 - DNA, 17 bp, synthetic construct
  source 1..17: mol_type = other DNA
gcatcagctccctgcct

SEQ ID NO: 143963 - DNA, 17 bp, synthetic construct
  source 1..17: mol_type = other DNA
catcagctccctgcctg

SEQ ID NO: 143964 - DNA, 17 bp, synthetic construct
  source 1..17: mol_type = other DNA
atcagctccctgcctgc

SEQ ID NO: 143965 - DNA, 17 bp, synthetic construct
  source 1..17: mol_type = other DNA
tcagctccctgcctgcc

SEQ ID NO: 143966 - DNA, 17 bp, synthetic construct
  source 1..17: mol_type = other DNA
cagctccctgcctgcct

SEQ ID NO: 143967 - DNA, 17 bp, synthetic construct
  source 1..17: mol_type = other DNA
agctccctgcctgcctg

SEQ ID NO: 143968 - DNA, 17 bp, synthetic construct
  source 1..17: mol_type = other DNA
gctccctgcctgcctgg

SEQ ID NO: 143969 - DNA, 17 bp, synthetic construct
  source 1..17: mol_type = other DNA
ctccctgcctgcctggg

SEQ ID NO: 143970 - DNA, 17 bp, synthetic construct
  source 1..17: mol_type = other DNA
tccctgcctgcctgggt

SEQ ID NO: 143971 - DNA, 17 bp, synthetic construct
  source 1..17: mol_type = other DNA
ccctgcctgcctgggtc

SEQ ID NO: 143972 - DNA, 17 bp, synthetic construct
  source 1..17: mol_type = other DNA
cctgcctgcctgggtcc

SEQ ID NO: 143973 - DNA, 17 bp, synthetic construct
  source 1..17: mol_type = other DNA
ctgcctgcctgggtcca

SEQ ID NO: 143974 - DNA, 17 bp, synthetic construct
  source 1..17: mol_type = other DNA
tgcctgcctgggtccat

SEQ ID NO: 143975 - DNA, 17 bp, synthetic construct
  source 1..17: mol_type = other DNA
gcctgcctgggtccatg

SEQ ID NO: 143976 - DNA, 17 bp, synthetic construct
  source 1..17: mol_type = other DNA
cctgcctgggtccatgc

SEQ ID NO: 143977 - DNA, 17 bp, synthetic construct
  source 1..17: mol_type = other DNA
ctgcctgggtccatgct

SEQ ID NO: 143978 - DNA, 17 bp, synthetic construct
  source 1..17: mol_type = other DNA
tgcctgggtccatgctc

SEQ ID NO: 143979 - DNA, 17 bp, synthetic construct
  source 1..17: mol_type = other DNA
gcctgggtccatgctca

SEQ ID NO: 143980 - DNA, 17 bp, synthetic construct
  source 1..17: mol_type = other DNA
cctgggtccatgctcag

SEQ ID NO: 143981 - DNA, 17 bp, synthetic construct
  source 1..17: mol_type = other DNA
ctgggtccatgctcagc

SEQ ID NO: 143982 - DNA, 17 bp, synthetic construct
  source 1..17: mol_type = other DNA
tgggtccatgctcagcc

SEQ ID NO: 143983 - DNA, 17 bp, synthetic construct
  source 1..17: mol_type = other DNA
gggtccatgctcagcca

SEQ ID NO: 143984 - DNA, 17 bp, synthetic construct
  source 1..17: mol_type = other DNA
ggtccatgctcagccag

SEQ ID NO: 143985 - DNA, 17 bp, synthetic construct
  source 1..17: mol_type = other DNA
gtccatgctcagccagg

SEQ ID NO: 143986 - DNA, 17 bp, synthetic construct
  source 1..17: mol_type = other DNA
tccatgctcagccaggg

SEQ ID NO: 143987 - DNA, 17 bp, synthetic construct
  source 1..17: mol_type = other DNA
ccatgctcagccagggg

SEQ ID NO: 143988 - DNA, 17 bp, synthetic construct
  source 1..17: mol_type = other DNA
catgctcagccaggggt

SEQ ID NO: 143989 - DNA, 17 bp, synthetic construct
  source 1..17: mol_type = other DNA
atgctcagccaggggtg

SEQ ID NO: 143990 - DNA, 17 bp, synthetic construct
  source 1..17: mol_type = other DNA
tgctcagccaggggtgc

SEQ ID NO: 143991 - DNA, 17 bp, synthetic construct
  source 1..17: mol_type = other DNA
gctcagccaggggtgca

SEQ ID NO: 143992 - DNA, 17 bp, synthetic construct
  source 1..17: mol_type = other DNA
ctcagccaggggtgcat

SEQ ID NO: 143993 - DNA, 17 bp, synthetic construct
  source 1..17: mol_type = other DNA
tcagccaggggtgcatc

SEQ ID NO: 143994 - DNA, 17 bp, synthetic construct
  source 1..17: mol_type = other DNA
cagccaggggtgcatct

SEQ ID NO: 143995 - DNA, 17 bp, synthetic construct
  source 1..17: mol_type = other DNA
agccaggggtgcatcta

SEQ ID NO: 143996 - DNA, 17 bp, synthetic construct
  source 1..17: mol_type = other DNA
gccaggggtgcatctat

SEQ ID NO: 143997 - DNA, 17 bp, synthetic construct
  source 1..17: mol_type = other DNA
ccaggggtgcatctatg

SEQ ID NO: 143998 - DNA, 17 bp, synthetic construct
  source 1..17: mol_type = other DNA
caggggtgcatctatgc

SEQ ID NO: 143999 - DNA, 17 bp, synthetic construct
  source 1..17: mol_type = other DNA
aggggtgcatctatgct

SEQ ID NO: 144000 - DNA, 17 bp, synthetic construct
  source 1..17: mol_type = other DNA
ggggtgcatctatgctc

SEQ ID NO: 144001 - DNA, 17 bp, synthetic construct
  source 1..17: mol_type = other DNA
gggtgcatctatgctcc

SEQ ID NO: 144002 - DNA, 17 bp, synthetic construct
  source 1..17: mol_type = other DNA
ggtgcatctatgctcca

SEQ ID NO: 144003 - DNA, 17 bp, synthetic construct
  source 1..17: mol_type = other DNA
gtgcatctatgctccat

SEQ ID NO: 144004 - DNA, 17 bp, synthetic construct
  source 1..17: mol_type = other DNA
tgcatctatgctccatc

SEQ ID NO: 144005 - DNA, 17 bp, synthetic construct
  source 1..17: mol_type = other DNA
gcatctatgctccatct

SEQ ID NO: 144006 - DNA, 17 bp, synthetic construct
  source 1..17: mol_type = other DNA
catctatgctccatctg

SEQ ID NO: 144007 - DNA, 17 bp, synthetic construct
  source 1..17: mol_type = other DNA
atctatgctccatctga

SEQ ID NO: 144008 - DNA, 17 bp, synthetic construct
  source 1..17: mol_type = other DNA
tctatgctccatctgag

SEQ ID NO: 144009 - DNA, 17 bp, synthetic construct
  source 1..17: mol_type = other DNA
ctatgctccatctgagg

SEQ ID NO: 144010 - DNA, 17 bp, synthetic construct
  source 1..17: mol_type = other DNA
tatgctccatctgagga

SEQ ID NO: 144011 - DNA, 17 bp, synthetic construct
  source 1..17: mol_type = other DNA
atgctccatctgaggaa

SEQ ID NO: 144012 - DNA, 17 bp, synthetic construct
  source 1..17: mol_type = other DNA
tgctccatctgaggaag

SEQ ID NO: 144013 - DNA, 17 bp, synthetic construct
  source 1..17: mol_type = other DNA
gctccatctgaggaagg

SEQ ID NO: 144014 - DNA, 17 bp, synthetic construct
  source 1..17: mol_type = other DNA
ctccatctgaggaagga

SEQ ID NO: 144015 - DNA, 17 bp, synthetic construct
  source 1..17: mol_type = other DNA
tccatctgaggaaggaa

SEQ ID NO: 144016 - DNA, 17 bp, synthetic construct
  source 1..17: mol_type = other DNA
ccatctgaggaaggaac

SEQ ID NO: 144017 - DNA, 17 bp, synthetic construct
  source 1..17: mol_type = other DNA
catctgaggaaggaaca

SEQ ID NO: 144018 - DNA, 17 bp, synthetic construct
  source 1..17: mol_type = other DNA
atctgaggaaggaacaa

SEQ ID NO: 144019 - DNA, 17 bp, synthetic construct
  source 1..17: mol_type = other DNA
tctgaggaaggaacaac

SEQ ID NO: 144020 - DNA, 17 bp, synthetic construct
  source 1..17: mol_type = other DNA
ctgaggaaggaacaact

SEQ ID NO: 144021 - DNA, 17 bp, synthetic construct
  source 1..17: mol_type = other DNA
tgaggaaggaacaactc

SEQ ID NO: 144022 - DNA, 17 bp, synthetic construct
  source 1..17: mol_type = other DNA
gaggaaggaacaactcc

SEQ ID NO: 144023 - DNA, 17 bp, synthetic construct
  source 1..17: mol_type = other DNA
aggaaggaacaactccc

SEQ ID NO: 144024 - DNA, 17 bp, synthetic construct
  source 1..17: mol_type = other DNA
ggaaggaacaactccct

SEQ ID NO: 144025 - DNA, 17 bp, synthetic construct
  source 1..17: mol_type = other DNA
gaaggaacaactccctg

SEQ ID NO: 144026 - DNA, 17 bp, synthetic construct
  source 1..17: mol_type = other DNA
aaggaacaactccctgc

SEQ ID NO: 144027 - DNA, 17 bp, synthetic construct
  source 1..17: mol_type = other DNA
aggaacaactccctgca

SEQ ID NO: 144028 - DNA, 17 bp, synthetic construct
  source 1..17: mol_type = other DNA
ggaacaactccctgcag

SEQ ID NO: 144029 - DNA, 17 bp, synthetic construct
  source 1..17: mol_type = other DNA
gaacaactccctgcagg

SEQ ID NO: 144030 - DNA, 17 bp, synthetic construct
  source 1..17: mol_type = other DNA
aacaactccctgcaggc

SEQ ID NO: 144031 - DNA, 17 bp, synthetic construct
  source 1..17: mol_type = other DNA
acaactccctgcaggcc

SEQ ID NO: 144032 - DNA, 17 bp, synthetic construct
  source 1..17: mol_type = other DNA
caactccctgcaggccc

SEQ ID NO: 144033 - DNA, 17 bp, synthetic construct
  source 1..17: mol_type = other DNA
aactccctgcaggcccc

SEQ ID NO: 144034 - DNA, 17 bp, synthetic construct
  source 1..17: mol_type = other DNA
actccctgcaggcccca

SEQ ID NO: 144035 - DNA, 17 bp, synthetic construct
  source 1..17: mol_type = other DNA
ctccctgcaggccccat

SEQ ID NO: 144036 - DNA, 17 bp, synthetic construct
  source 1..17: mol_type = other DNA
tccctgcaggccccatt

SEQ ID NO: 144037 - DNA, 17 bp, synthetic construct
  source 1..17: mol_type = other DNA
ccctgcaggccccattg

SEQ ID NO: 144038 - DNA, 17 bp, synthetic construct
  source 1..17: mol_type = other DNA
cctgcaggccccattgg

SEQ ID NO: 144039 - DNA, 17 bp, synthetic construct
  source 1..17: mol_type = other DNA
ctgcaggccccattggg

SEQ ID NO: 144040 - DNA, 17 bp, synthetic construct
  source 1..17: mol_type = other DNA
tgcaggccccattgggt

SEQ ID NO: 144041 - DNA, 17 bp, synthetic construct
  source 1..17: mol_type = other DNA
gcaggccccattgggtc

SEQ ID NO: 144042 - DNA, 17 bp, synthetic construct
  source 1..17: mol_type = other DNA
caggccccattgggtca

SEQ ID NO: 144043 - DNA, 17 bp, synthetic construct
  source 1..17: mol_type = other DNA
aggccccattgggtcat

SEQ ID NO: 144044 - DNA, 17 bp, synthetic construct
  source 1..17: mol_type = other DNA
ggccccattgggtcatg

SEQ ID NO: 144045 - DNA, 17 bp, synthetic construct
  source 1..17: mol_type = other DNA
gccccattgggtcatgg

SEQ ID NO: 144046 - DNA, 17 bp, synthetic construct
  source 1..17: mol_type = other DNA
ccccattgggtcatggg

SEQ ID NO: 144047 - DNA, 17 bp, synthetic construct
  source 1..17: mol_type = other DNA
cccattgggtcatgggg

SEQ ID NO: 144048 - DNA, 17 bp, synthetic construct
  source 1..17: mol_type = other DNA
ccattgggtcatgggga

SEQ ID NO: 144049 - DNA, 17 bp, synthetic construct
  source 1..17: mol_type = other DNA
cattgggtcatggggag

SEQ ID NO: 144050 - DNA, 17 bp, synthetic construct
  source 1..17: mol_type = other DNA
attgggtcatggggagg

SEQ ID NO: 144051 - DNA, 17 bp, synthetic construct
  source 1..17: mol_type = other DNA
ttgggtcatggggaggg

SEQ ID NO: 144052 - DNA, 17 bp, synthetic construct
  source 1..17: mol_type = other DNA
tgggtcatggggagggg

SEQ ID NO: 144053 - DNA, 17 bp, synthetic construct
  source 1..17: mol_type = other DNA
gggtcatggggaggggt

SEQ ID NO: 144054 - DNA, 17 bp, synthetic construct
  source 1..17: mol_type = other DNA
ggtcatggggaggggtc

SEQ ID NO: 144055 - DNA, 17 bp, synthetic construct
  source 1..17: mol_type = other DNA
gtcatggggaggggtcc

SEQ ID NO: 144056 - DNA, 17 bp, synthetic construct
  source 1..17: mol_type = other DNA
tcatggggaggggtcct

SEQ ID NO: 144057 - DNA, 17 bp, synthetic construct
  source 1..17: mol_type = other DNA
catggggaggggtcctg

SEQ ID NO: 144058 - DNA, 17 bp, synthetic construct
  source 1..17: mol_type = other DNA
atggggaggggtcctgg

SEQ ID NO: 144059 - DNA, 17 bp, synthetic construct
  source 1..17: mol_type = other DNA
tggggaggggtcctggc

SEQ ID NO: 144060 - DNA, 17 bp, synthetic construct
  source 1..17: mol_type = other DNA
ggggaggggtcctggcc

SEQ ID NO: 144061 - DNA, 17 bp, synthetic construct
  source 1..17: mol_type = other DNA
gggaggggtcctggccc

SEQ ID NO: 144062 - DNA, 17 bp, synthetic construct
  source 1..17: mol_type = other DNA
ggaggggtcctggccct

SEQ ID NO: 144063 - DNA, 17 bp, synthetic construct
  source 1..17: mol_type = other DNA
gaggggtcctggccctg

SEQ ID NO: 144064 - DNA, 17 bp, synthetic construct
  source 1..17: mol_type = other DNA
aggggtcctggccctgt

SEQ ID NO: 144065 - DNA, 17 bp, synthetic construct
  source 1..17: mol_type = other DNA
ggggtcctggccctgtt

SEQ ID NO: 144066 - DNA, 17 bp, synthetic construct
  source 1..17: mol_type = other DNA
gggtcctggccctgttg

SEQ ID NO: 144067 - DNA, 17 bp, synthetic construct
  source 1..17: mol_type = other DNA
ggtcctggccctgttgc

SEQ ID NO: 144068 - DNA, 17 bp, synthetic construct
  source 1..17: mol_type = other DNA
gtcctggccctgttgcc

SEQ ID NO: 144069 - DNA, 17 bp, synthetic construct
  source 1..17: mol_type = other DNA
tcctggccctgttgccc

SEQ ID NO: 144070 - DNA, 17 bp, synthetic construct
  source 1..17: mol_type = other DNA
cctggccctgttgcccc

SEQ ID NO: 144071 - DNA, 17 bp, synthetic construct
  source 1..17: mol_type = other DNA
ctggccctgttgcccca

SEQ ID NO: 144072 - DNA, 17 bp, synthetic construct
  source 1..17: mol_type = other DNA
tggccctgttgccccac

SEQ ID NO: 144073 - DNA, 17 bp, synthetic construct
  source 1..17: mol_type = other DNA
ggccctgttgccccacc

SEQ ID NO: 144074 - DNA, 17 bp, synthetic construct
  source 1..17: mol_type = other DNA
gccctgttgccccacca

SEQ ID NO: 144075 - DNA, 17 bp, synthetic construct
  source 1..17: mol_type = other DNA
ccctgttgccccaccag

SEQ ID NO: 144076 - DNA, 17 bp, synthetic construct
  source 1..17: mol_type = other DNA
cctgttgccccaccagt

SEQ ID NO: 144077 - DNA, 17 bp, synthetic construct
  source 1..17: mol_type = other DNA
ctgttgccccaccagtg

SEQ ID NO: 144078 - DNA, 17 bp, synthetic construct
  source 1..17: mol_type = other DNA
tgttgccccaccagtgc

SEQ ID NO: 144079 - DNA, 17 bp, synthetic construct
  source 1..17: mol_type = other DNA
gttgccccaccagtgcc

SEQ ID NO: 144080 - DNA, 17 bp, synthetic construct
  source 1..17: mol_type = other DNA
ttgccccaccagtgccc

SEQ ID NO: 144081 - DNA, 17 bp, synthetic construct
  source 1..17: mol_type = other DNA
tgccccaccagtgccct

SEQ ID NO: 144082 - DNA, 17 bp, synthetic construct
  source 1..17: mol_type = other DNA
gccccaccagtgccctc

SEQ ID NO: 144083 - DNA, 17 bp, synthetic construct
  source 1..17: mol_type = other DNA
ccccaccagtgccctca

SEQ ID NO: 144084 - DNA, 17 bp, synthetic construct
  source 1..17: mol_type = other DNA
cccaccagtgccctcag

SEQ ID NO: 144085 - DNA, 17 bp, synthetic construct
  source 1..17: mol_type = other DNA
ccaccagtgccctcagt

SEQ ID NO: 144086 - DNA, 17 bp, synthetic construct
  source 1..17: mol_type = other DNA
caccagtgccctcagtg

SEQ ID NO: 144087 - DNA, 17 bp, synthetic construct
  source 1..17: mol_type = other DNA
accagtgccctcagtgc

SEQ ID NO: 144088 - DNA, 17 bp, synthetic construct
  source 1..17: mol_type = other DNA
ccagtgccctcagtgcc

SEQ ID NO: 144089 - DNA, 17 bp, synthetic construct
  source 1..17: mol_type = other DNA
cagtgccctcagtgcca

SEQ ID NO: 144090 - DNA, 17 bp, synthetic construct
  source 1..17: mol_type = other DNA
agtgccctcagtgccac

SEQ ID NO: 144091 - DNA, 17 bp, synthetic construct
  source 1..17: mol_type = other DNA
gtgccctcagtgccacc

SEQ ID NO: 144092 - DNA, 17 bp, synthetic construct
  source 1..17: mol_type = other DNA
tgccctcagtgccaccc

SEQ ID NO: 144093 - DNA, 17 bp, synthetic construct
  source 1..17: mol_type = other DNA
gccctcagtgccaccct

SEQ ID NO: 144094 - DNA, 17 bp, synthetic construct
  source 1..17: mol_type = other DNA
ccctcagtgccaccctc

SEQ ID NO: 144095 - DNA, 17 bp, synthetic construct
  source 1..17: mol_type = other DNA
cctcagtgccaccctcc

SEQ ID NO: 144096 - DNA, 17 bp, synthetic construct
  source 1..17: mol_type = other DNA
ctcagtgccaccctccc

SEQ ID NO: 144097 - DNA, 17 bp, synthetic construct
  source 1..17: mol_type = other DNA
tcagtgccaccctccca

SEQ ID NO: 144098 - DNA, 17 bp, synthetic construct
  source 1..17: mol_type = other DNA
cagtgccaccctcccac

SEQ ID NO: 144099 - DNA, 17 bp, synthetic construct
  source 1..17: mol_type = other DNA
agtgccaccctcccacc

SEQ ID NO: 144100 - DNA, 17 bp, synthetic construct
  source 1..17: mol_type = other DNA
gtgccaccctcccaccc

SEQ ID NO: 144101 - DNA, 17 bp, synthetic construct
  source 1..17: mol_type = other DNA
tgccaccctcccacccc

SEQ ID NO: 144102 - DNA, 17 bp, synthetic construct
  source 1..17: mol_type = other DNA
gccaccctcccacccct

SEQ ID NO: 144103 - DNA, 17 bp, synthetic construct
  source 1..17: mol_type = other DNA
ccaccctcccacccctt

SEQ ID NO: 144104 - DNA, 17 bp, synthetic construct
  source 1..17: mol_type = other DNA
caccctcccaccccttg

SEQ ID NO: 144105 - DNA, 17 bp, synthetic construct
  source 1..17: mol_type = other DNA
accctcccaccccttgc

SEQ ID NO: 144106 - DNA, 17 bp, synthetic construct
  source 1..17: mol_type = other DNA
ccctcccaccccttgca

SEQ ID NO: 144107 - DNA, 17 bp, synthetic construct
  source 1..17: mol_type = other DNA
cctcccaccccttgcag

SEQ ID NO: 144108 - DNA, 17 bp, synthetic construct
  source 1..17: mol_type = other DNA
ctcccaccccttgcagg

SEQ ID NO: 144109 - DNA, 17 bp, synthetic construct
  source 1..17: mol_type = other DNA
tcccaccccttgcaggt

SEQ ID NO: 144110 - DNA, 17 bp, synthetic construct
  source 1..17: mol_type = other DNA
cccaccccttgcaggtt

SEQ ID NO: 144111 - DNA, 17 bp, synthetic construct
  source 1..17: mol_type = other DNA
ccaccccttgcaggttg

SEQ ID NO: 144112 - DNA, 17 bp, synthetic construct
  source 1..17: mol_type = other DNA
caccccttgcaggttgg

SEQ ID NO: 144113 - DNA, 17 bp, synthetic construct
  source 1..17: mol_type = other DNA
accccttgcaggttggt

SEQ ID NO: 144114 - DNA, 17 bp, synthetic construct
  source 1..17: mol_type = other DNA
ccccttgcaggttggtg

SEQ ID NO: 144115 - DNA, 17 bp, synthetic construct
  source 1..17: mol_type = other DNA
cccttgcaggttggtgc

SEQ ID NO: 144116 - DNA, 17 bp, synthetic construct
  source 1..17: mol_type = other DNA
ccttgcaggttggtgca

SEQ ID NO: 144117 - DNA, 17 bp, synthetic construct
  source 1..17: mol_type = other DNA
cttgcaggttggtgcaa

SEQ ID NO: 144118 - DNA, 17 bp, synthetic construct
  source 1..17: mol_type = other DNA
ttgcaggttggtgcaac

SEQ ID NO: 144119 - DNA, 17 bp, synthetic construct
  source 1..17: mol_type = other DNA
tgcaggttggtgcaacc

SEQ ID NO: 144120 - DNA, 17 bp, synthetic construct
  source 1..17: mol_type = other DNA
gcaggttggtgcaacct

SEQ ID NO: 144121 - DNA, 17 bp, synthetic construct
  source 1..17: mol_type = other DNA
caggttggtgcaacctt

SEQ ID NO: 144122 - DNA, 17 bp, synthetic construct
  source 1..17: mol_type = other DNA
aggttggtgcaaccttc

SEQ ID NO: 144123 - DNA, 17 bp, synthetic construct
  source 1..17: mol_type = other DNA
ggttggtgcaaccttcc

SEQ ID NO: 144124 - DNA, 17 bp, synthetic construct
  source 1..17: mol_type = other DNA
gttggtgcaaccttccc

SEQ ID NO: 144125 - DNA, 17 bp, synthetic construct
  source 1..17: mol_type = other DNA
ttggtgcaaccttccca

SEQ ID NO: 144126 - DNA, 17 bp, synthetic construct
  source 1..17: mol_type = other DNA
tggtgcaaccttcccag

SEQ ID NO: 144127 - DNA, 17 bp, synthetic construct
  source 1..17: mol_type = other DNA
ggtgcaaccttcccagg

SEQ ID NO: 144128 - DNA, 17 bp, synthetic construct
  source 1..17: mol_type = other DNA
gtgcaaccttcccaggc

SEQ ID NO: 144129 - DNA, 17 bp, synthetic construct
  source 1..17: mol_type = other DNA
tgcaaccttcccaggcg

SEQ ID NO: 144130 - DNA, 17 bp, synthetic construct
  source 1..17: mol_type = other DNA
gcaaccttcccaggcgc

SEQ ID NO: 144131 - DNA, 17 bp, synthetic construct
  source 1..17: mol_type = other DNA
caaccttcccaggcgcc

SEQ ID NO: 144132 - DNA, 17 bp, synthetic construct
  source 1..17: mol_type = other DNA
aaccttcccaggcgccc

SEQ ID NO: 144133 - DNA, 17 bp, synthetic construct
  source 1..17: mol_type = other DNA
accttcccaggcgccct

SEQ ID NO: 144134 - DNA, 17 bp, synthetic construct
  source 1..17: mol_type = other DNA
ccttcccaggcgccctt

SEQ ID NO: 144135 - DNA, 17 bp, synthetic construct
  source 1..17: mol_type = other DNA
cttcccaggcgcccttc

SEQ ID NO: 144136 - DNA, 17 bp, synthetic construct
  source 1..17: mol_type = other DNA
ttcccaggcgcccttcc

SEQ ID NO: 144137 - DNA, 17 bp, synthetic construct
  source 1..17: mol_type = other DNA
tcccaggcgcccttccc

SEQ ID NO: 144138 - DNA, 17 bp, synthetic construct
  source 1..17: mol_type = other DNA
cccaggcgcccttccct

SEQ ID NO: 144139 - DNA, 17 bp, synthetic construct
  source 1..17: mol_type = other DNA
ccaggcgcccttccctg

SEQ ID NO: 144140 - DNA, 17 bp, synthetic construct
  source 1..17: mol_type = other DNA
caggcgcccttccctgc

SEQ ID NO: 144141 - DNA, 17 bp, synthetic construct
  source 1..17: mol_type = other DNA
aggcgcccttccctgcc

SEQ ID NO: 144142 - DNA, 17 bp, synthetic construct
  source 1..17: mol_type = other DNA
ggcgcccttccctgcca

SEQ ID NO: 144143 - DNA, 17 bp, synthetic construct
  source 1..17: mol_type = other DNA
gcgcccttccctgccac

SEQ ID NO: 144144 - DNA, 17 bp, synthetic construct
  source 1..17: mol_type = other DNA
cgcccttccctgccaca

SEQ ID NO: 144145 - DNA, 17 bp, synthetic construct
  source 1..17: mol_type = other DNA
gcccttccctgccacat

SEQ ID NO: 144146 - DNA, 17 bp, synthetic construct
  source 1..17: mol_type = other DNA
cccttccctgccacatg

SEQ ID NO: 144147 - DNA, 17 bp, synthetic construct
  source 1..17: mol_type = other DNA
ccttccctgccacatgt

SEQ ID NO: 144148 - DNA, 17 bp, synthetic construct
  source 1..17: mol_type = other DNA
cttccctgccacatgtg

SEQ ID NO: 144149 - DNA, 17 bp, synthetic construct
  source 1..17: mol_type = other DNA
ttccctgccacatgtgt

SEQ ID NO: 144150 - DNA, 17 bp, synthetic construct
  source 1..17: mol_type = other DNA
tccctgccacatgtgta

SEQ ID NO: 144151 - DNA, 17 bp, synthetic construct
  source 1..17: mol_type = other DNA
ccctgccacatgtgtac

SEQ ID NO: 144152 - DNA, 17 bp, synthetic construct
  source 1..17: mol_type = other DNA
cctgccacatgtgtacc

SEQ ID NO: 144153 - DNA, 17 bp, synthetic construct
  source 1..17: mol_type = other DNA
ctgccacatgtgtacct

SEQ ID NO: 144154 - DNA, 17 bp, synthetic construct
  source 1..17: mol_type = other DNA
tgccacatgtgtacctg

SEQ ID NO: 144155 - DNA, 17 bp, synthetic construct
  source 1..17: mol_type = other DNA
gccacatgtgtacctgc

SEQ ID NO: 144156 - DNA, 17 bp, synthetic construct
  source 1..17: mol_type = other DNA
ccacatgtgtacctgcc

SEQ ID NO: 144157 - DNA, 17 bp, synthetic construct
  source 1..17: mol_type = other DNA
cacatgtgtacctgcct

SEQ ID NO: 144158 - DNA, 17 bp, synthetic construct
  source 1..17: mol_type = other DNA
acatgtgtacctgcctc

SEQ ID NO: 144159 - DNA, 17 bp, synthetic construct
  source 1..17: mol_type = other DNA
catgtgtacctgcctct

SEQ ID NO: 144160 - DNA, 17 bp, synthetic construct
  source 1..17: mol_type = other DNA
atgtgtacctgcctctc

SEQ ID NO: 144161 - DNA, 17 bp, synthetic construct
  source 1..17: mol_type = other DNA
tgtgtacctgcctctct

SEQ ID NO: 144162 - DNA, 17 bp, synthetic construct
  source 1..17: mol_type = other DNA
gtgtacctgcctctctg

SEQ ID NO: 144163 - DNA, 17 bp, synthetic construct
  source 1..17: mol_type = other DNA
tgtacctgcctctctgg

SEQ ID NO: 144164 - DNA, 17 bp, synthetic construct
  source 1..17: mol_type = other DNA
gtacctgcctctctggg

SEQ ID NO: 144165 - DNA, 17 bp, synthetic construct
  source 1..17: mol_type = other DNA
tacctgcctctctgggg

SEQ ID NO: 144166 - DNA, 17 bp, synthetic construct
  source 1..17: mol_type = other DNA
acctgcctctctgggga

SEQ ID NO: 144167 - DNA, 17 bp, synthetic construct
  source 1..17: mol_type = other DNA
cctgcctctctggggac

SEQ ID NO: 144168 - DNA, 17 bp, synthetic construct
  source 1..17: mol_type = other DNA
ctgcctctctggggaca

SEQ ID NO: 144169 - DNA, 17 bp, synthetic construct
  source 1..17: mol_type = other DNA
tgcctctctggggacac

SEQ ID NO: 144170 - DNA, 17 bp, synthetic construct
  source 1..17: mol_type = other DNA
gcctctctggggacacc

SEQ ID NO: 144171 - DNA, 17 bp, synthetic construct
  source 1..17: mol_type = other DNA
cctctctggggacaccc

SEQ ID NO: 144172 - DNA, 17 bp, synthetic construct
  source 1..17: mol_type = other DNA
ctctctggggacaccca

SEQ ID NO: 144173 - DNA, 17 bp, synthetic construct
  source 1..17: mol_type = other DNA
tctctggggacacccag

SEQ ID NO: 144174 - DNA, 17 bp, synthetic construct
  source 1..17: mol_type = other DNA
ctctggggacacccagg

SEQ ID NO: 144175 - DNA, 17 bp, synthetic construct
  source 1..17: mol_type = other DNA
tctggggacacccagga

SEQ ID NO: 144176 - DNA, 17 bp, synthetic construct
  source 1..17: mol_type = other DNA
ctggggacacccaggac

SEQ ID NO: 144177 - DNA, 17 bp, synthetic construct
  source 1..17: mol_type = other DNA
tggggacacccaggacc

SEQ ID NO: 144178 - DNA, 17 bp, synthetic construct
  source 1..17: mol_type = other DNA
ggggacacccaggaccc

SEQ ID NO: 144179 - DNA, 17 bp, synthetic construct
  source 1..17: mol_type = other DNA
gggacacccaggaccca

SEQ ID NO: 144180 - DNA, 17 bp, synthetic construct
  source 1..17: mol_type = other DNA
ggacacccaggacccaa

SEQ ID NO: 144181 - DNA, 17 bp, synthetic construct
  source 1..17: mol_type = other DNA
gacacccaggacccaac

SEQ ID NO: 144182 - DNA, 17 bp, synthetic construct
  source 1..17: mol_type = other DNA
acacccaggacccaacg

SEQ ID NO: 144183 - DNA, 17 bp, synthetic construct
  source 1..17: mol_type = other DNA
cacccaggacccaacgg

SEQ ID NO: 144184 - DNA, 17 bp, synthetic construct
  source 1..17: mol_type = other DNA
acccaggacccaacggt

SEQ ID NO: 144185 - DNA, 17 bp, synthetic construct
  source 1..17: mol_type = other DNA
cccaggacccaacggtg

SEQ ID NO: 144186 - DNA, 17 bp, synthetic construct
  source 1..17: mol_type = other DNA
ccaggacccaacggtgc

SEQ ID NO: 144187 - DNA, 17 bp, synthetic construct
  source 1..17: mol_type = other DNA
caggacccaacggtgca

SEQ ID NO: 144188 - DNA, 17 bp, synthetic construct
  source 1..17: mol_type = other DNA
aggacccaacggtgcaa

SEQ ID NO: 144189 - DNA, 17 bp, synthetic construct
  source 1..17: mol_type = other DNA
ggacccaacggtgcaat

SEQ ID NO: 144190 - DNA, 17 bp, synthetic construct
  source 1..17: mol_type = other DNA
gacccaacggtgcaatg

SEQ ID NO: 144191 - DNA, 17 bp, synthetic construct
  source 1..17: mol_type = other DNA
acccaacggtgcaatgt

SEQ ID NO: 144192 - DNA, 17 bp, synthetic construct
  source 1..17: mol_type = other DNA
cccaacggtgcaatgtc

SEQ ID NO: 144193 - DNA, 17 bp, synthetic construct
  source 1..17: mol_type = other DNA
ccaacggtgcaatgtca

SEQ ID NO: 144194 - DNA, 17 bp, synthetic construct
  source 1..17: mol_type = other DNA
caacggtgcaatgtcag

SEQ ID NO: 144195 - DNA, 17 bp, synthetic construct
  source 1..17: mol_type = other DNA
aacggtgcaatgtcagg

SEQ ID NO: 144196 - DNA, 17 bp, synthetic construct
  source 1..17: mol_type = other DNA
acggtgcaatgtcagga

SEQ ID NO: 144197 - DNA, 17 bp, synthetic construct
  source 1..17: mol_type = other DNA
cggtgcaatgtcaggag

SEQ ID NO: 144198 - DNA, 17 bp, synthetic construct
  source 1..17: mol_type = other DNA
ggtgcaatgtcaggagg

SEQ ID NO: 144199 - DNA, 17 bp, synthetic construct
  source 1..17: mol_type = other DNA
gtgcaatgtcaggagga

SEQ ID NO: 144200 - DNA, 17 bp, synthetic construct
  source 1..17: mol_type = other DNA
tgcaatgtcaggaggat

SEQ ID NO: 144201 - DNA, 17 bp, synthetic construct
  source 1..17: mol_type = other DNA
gcaatgtcaggaggatg

SEQ ID NO: 144202 - DNA, 17 bp, synthetic construct
  source 1..17: mol_type = other DNA
caatgtcaggaggatgc

SEQ ID NO: 144203 - DNA, 17 bp, synthetic construct
  source 1..17: mol_type = other DNA
aatgtcaggaggatgcc

SEQ ID NO: 144204 - DNA, 17 bp, synthetic construct
  source 1..17: mol_type = other DNA
atgtcaggaggatgcct

SEQ ID NO: 144205 - DNA, 17 bp, synthetic construct
  source 1..17: mol_type = other DNA
tgtcaggaggatgcctg

SEQ ID NO: 144206 - DNA, 17 bp, synthetic construct
  source 1..17: mol_type = other DNA
gtcaggaggatgcctgc

SEQ ID NO: 144207 - DNA, 17 bp, synthetic construct
  source 1..17: mol_type = other DNA
tcaggaggatgcctgca

SEQ ID NO: 144208 - DNA, 17 bp, synthetic construct
  source 1..17: mol_type = other DNA
caggaggatgcctgcaa

SEQ ID NO: 144209 - DNA, 17 bp, synthetic construct
  source 1..17: mol_type = other DNA
aggaggatgcctgcaac

SEQ ID NO: 144210 - DNA, 17 bp, synthetic construct
  source 1..17: mol_type = other DNA
ggaggatgcctgcaaca

SEQ ID NO: 144211 - DNA, 17 bp, synthetic construct
  source 1..17: mol_type = other DNA
gaggatgcctgcaacaa

SEQ ID NO: 144212 - DNA, 17 bp, synthetic construct
  source 1..17: mol_type = other DNA
aggatgcctgcaacaat

SEQ ID NO: 144213 - DNA, 17 bp, synthetic construct
  source 1..17: mol_type = other DNA
ggatgcctgcaacaata

SEQ ID NO: 144214 - DNA, 17 bp, synthetic construct
  source 1..17: mol_type = other DNA
gatgcctgcaacaatac

SEQ ID NO: 144215 - DNA, 17 bp, synthetic construct
  source 1..17: mol_type = other DNA
atgcctgcaacaatact

SEQ ID NO: 144216 - DNA, 17 bp, synthetic construct
  source 1..17: mol_type = other DNA
tgcctgcaacaatacta

SEQ ID NO: 144217 - DNA, 17 bp, synthetic construct
  source 1..17: mol_type = other DNA
gcctgcaacaatactac

SEQ ID NO: 144218 - DNA, 17 bp, synthetic construct
  source 1..17: mol_type = other DNA
cctgcaacaatactacc

SEQ ID NO: 144219 - DNA, 17 bp, synthetic construct
  source 1..17: mol_type = other DNA
ctgcaacaatactacct

SEQ ID NO: 144220 - DNA, 17 bp, synthetic construct
  source 1..17: mol_type = other DNA
tgcaacaatactacctg

SEQ ID NO: 144221 - DNA, 17 bp, synthetic construct
  source 1..17: mol_type = other DNA
gcaacaatactacctgt

SEQ ID NO: 144222 - DNA, 17 bp, synthetic construct
  source 1..17: mol_type = other DNA
caacaatactacctgtc

SEQ ID NO: 144223 - DNA, 17 bp, synthetic construct
  source 1..17: mol_type = other DNA
aacaatactacctgtcc

SEQ ID NO: 144224 - DNA, 17 bp, synthetic construct
  source 1..17: mol_type = other DNA
acaatactacctgtccc

SEQ ID NO: 144225 - DNA, 17 bp, synthetic construct
  source 1..17: mol_type = other DNA
caatactacctgtcccc

SEQ ID NO: 144226 - DNA, 17 bp, synthetic construct
  source 1..17: mol_type = other DNA
aatactacctgtcccca

SEQ ID NO: 144227 - DNA, 17 bp, synthetic construct
  source 1..17: mol_type = other DNA
atactacctgtccccag

SEQ ID NO: 144228 - DNA, 17 bp, synthetic construct
  source 1..17: mol_type = other DNA
tactacctgtccccagg

SEQ ID NO: 144229 - DNA, 17 bp, synthetic construct
  source 1..17: mol_type = other DNA
actacctgtccccaggt

SEQ ID NO: 144230 - DNA, 17 bp, synthetic construct
  source 1..17: mol_type = other DNA
ctacctgtccccaggtg

SEQ ID NO: 144231 - DNA, 17 bp, synthetic construct
  source 1..17: mol_type = other DNA
tacctgtccccaggtga

SEQ ID NO: 144232 - DNA, 17 bp, synthetic construct
  source 1..17: mol_type = other DNA
acctgtccccaggtgag

SEQ ID NO: 144233 - DNA, 17 bp, synthetic construct
  source 1..17: mol_type = other DNA
cctgtccccaggtgaga

SEQ ID NO: 144234 - DNA, 17 bp, synthetic construct
  source 1..17: mol_type = other DNA
ctgtccccaggtgagac

SEQ ID NO: 144235 - DNA, 17 bp, synthetic construct
  source 1..17: mol_type = other DNA
tgtccccaggtgagacc

SEQ ID NO: 144236 - DNA, 17 bp, synthetic construct
  source 1..17: mol_type = other DNA
gtccccaggtgagaccc

SEQ ID NO: 144237 - DNA, 17 bp, synthetic construct
  source 1..17: mol_type = other DNA
tccccaggtgagacccg

SEQ ID NO: 144238 - DNA, 17 bp, synthetic construct
  source 1..17: mol_type = other DNA
ccccaggtgagacccga

SEQ ID NO: 144239 - DNA, 17 bp, synthetic construct
  source 1..17: mol_type = other DNA
cccaggtgagacccgag

SEQ ID NO: 144240 - DNA, 17 bp, synthetic construct
  source 1..17: mol_type = other DNA
ccaggtgagacccgagg

SEQ ID NO: 144241 - DNA, 17 bp, synthetic construct
  source 1..17: mol_type = other DNA
caggtgagacccgaggc

SEQ ID NO: 144242 - DNA, 17 bp, synthetic construct
  source 1..17: mol_type = other DNA
aggtgagacccgaggca

SEQ ID NO: 144243 - DNA, 17 bp, synthetic construct
  source 1..17: mol_type = other DNA
ggtgagacccgaggcac

SEQ ID NO: 144244 - DNA, 17 bp, synthetic construct
  source 1..17: mol_type = other DNA
gtgagacccgaggcacc

SEQ ID NO: 144245 - DNA, 17 bp, synthetic construct
  source 1..17: mol_type = other DNA
tgagacccgaggcacct

SEQ ID NO: 144246 - DNA, 17 bp, synthetic construct
  source 1..17: mol_type = other DNA
gagacccgaggcacctg

SEQ ID NO: 144247 - DNA, 17 bp, synthetic construct
  source 1..17: mol_type = other DNA
agacccgaggcacctgc

SEQ ID NO: 144248 - DNA, 17 bp, synthetic construct
  source 1..17: mol_type = other DNA
gacccgaggcacctgcc

SEQ ID NO: 144249 - DNA, 17 bp, synthetic construct
  source 1..17: mol_type = other DNA
acccgaggcacctgccc

SEQ ID NO: 144250 - DNA, 17 bp, synthetic construct
  source 1..17: mol_type = other DNA
cccgaggcacctgcccc

SEQ ID NO: 144251 - DNA, 17 bp, synthetic construct
  source 1..17: mol_type = other DNA
ccgaggcacctgccccc

SEQ ID NO: 144252 - DNA, 17 bp, synthetic construct
  source 1..17: mol_type = other DNA
cgaggcacctgccccca

SEQ ID NO: 144253 - DNA, 17 bp, synthetic construct
  source 1..17: mol_type = other DNA
gaggcacctgcccccag

SEQ ID NO: 144254 - DNA, 17 bp, synthetic construct
  source 1..17: mol_type = other DNA
aggcacctgcccccagg

SEQ ID NO: 144255 - DNA, 17 bp, synthetic construct
  source 1..17: mol_type = other DNA
ggcacctgcccccaggt

SEQ ID NO: 144256 - DNA, 17 bp, synthetic construct
  source 1..17: mol_type = other DNA
gcacctgcccccaggtg

SEQ ID NO: 144257 - DNA, 17 bp, synthetic construct
  source 1..17: mol_type = other DNA
cacctgcccccaggtga

SEQ ID NO: 144258 - DNA, 17 bp, synthetic construct
  source 1..17: mol_type = other DNA
acctgcccccaggtgag

SEQ ID NO: 144259 - DNA, 17 bp, synthetic construct
  source 1..17: mol_type = other DNA
cctgcccccaggtgagc

SEQ ID NO: 144260 - DNA, 17 bp, synthetic construct
  source 1..17: mol_type = other DNA
ctgcccccaggtgagcc

SEQ ID NO: 144261 - DNA, 17 bp, synthetic construct
  source 1..17: mol_type = other DNA
tgcccccaggtgagccc

SEQ ID NO: 144262 - DNA, 17 bp, synthetic construct
  source 1..17: mol_type = other DNA
gcccccaggtgagcccc

SEQ ID NO: 144263 - DNA, 17 bp, synthetic construct
  source 1..17: mol_type = other DNA
cccccaggtgagccccc

SEQ ID NO: 144264 - DNA, 17 bp, synthetic construct
  source 1..17: mol_type = other DNA
ccccaggtgagcccccg

SEQ ID NO: 144265 - DNA, 17 bp, synthetic construct
  source 1..17: mol_type = other DNA
cccaggtgagcccccga

SEQ ID NO: 144266 - DNA, 17 bp, synthetic construct
  source 1..17: mol_type = other DNA
ccaggtgagcccccgag

SEQ ID NO: 144267 - DNA, 17 bp, synthetic construct
  source 1..17: mol_type = other DNA
caggtgagcccccgagg

SEQ ID NO: 144268 - DNA, 17 bp, synthetic construct
  source 1..17: mol_type = other DNA
aggtgagcccccgaggc

SEQ ID NO: 144269 - DNA, 17 bp, synthetic construct
  source 1..17: mol_type = other DNA
ggtgagcccccgaggca

SEQ ID NO: 144270 - DNA, 17 bp, synthetic construct
  source 1..17: mol_type = other DNA
gtgagcccccgaggcac

SEQ ID NO: 144271 - DNA, 17 bp, synthetic construct
  source 1..17: mol_type = other DNA
tgagcccccgaggcacc

SEQ ID NO: 144272 - DNA, 17 bp, synthetic construct
  source 1..17: mol_type = other DNA
gagcccccgaggcacct

SEQ ID NO: 144273 - DNA, 17 bp, synthetic construct
  source 1..17: mol_type = other DNA
agcccccgaggcacctg

SEQ ID NO: 144274 - DNA, 17 bp, synthetic construct
  source 1..17: mol_type = other DNA
gcccccgaggcacctgc

SEQ ID NO: 144275 - DNA, 17 bp, synthetic construct
  source 1..17: mol_type = other DNA
cccccgaggcacctgcc

SEQ ID NO: 144276 - DNA, 17 bp, synthetic construct
  source 1..17: mol_type = other DNA
ccccgaggcacctgccc

SEQ ID NO: 144277 - DNA, 17 bp, synthetic construct
  source 1..17: mol_type = other DNA
cccgaggcacctgcccc

SEQ ID NO: 144278 - DNA, 17 bp, synthetic construct
  source 1..17: mol_type = other DNA
ccgaggcacctgccccc

SEQ ID NO: 144279 - DNA, 17 bp, synthetic construct
  source 1..17: mol_type = other DNA
cgaggcacctgccccca

SEQ ID NO: 144280 - DNA, 17 bp, synthetic construct
  source 1..17: mol_type = other DNA
gaggcacctgcccccaa

SEQ ID NO: 144281 - DNA, 17 bp, synthetic construct
  source 1..17: mol_type = other DNA
aggcacctgcccccaag

SEQ ID NO: 144282 - DNA, 17 bp, synthetic construct
  source 1..17: mol_type = other DNA
ggcacctgcccccaagt

SEQ ID NO: 144283 - DNA, 17 bp, synthetic construct
  source 1..17: mol_type = other DNA
gcacctgcccccaagtg

SEQ ID NO: 144284 - DNA, 17 bp, synthetic construct
  source 1..17: mol_type = other DNA
cacctgcccccaagtga

SEQ ID NO: 144285 - DNA, 17 bp, synthetic construct
  source 1..17: mol_type = other DNA
acctgcccccaagtgag

SEQ ID NO: 144286 - DNA, 17 bp, synthetic construct
  source 1..17: mol_type = other DNA
cctgcccccaagtgaga

SEQ ID NO: 144287 - DNA, 17 bp, synthetic construct
  source 1..17: mol_type = other DNA
ctgcccccaagtgagac

SEQ ID NO: 144288 - DNA, 17 bp, synthetic construct
  source 1..17: mol_type = other DNA
tgcccccaagtgagacc

SEQ ID NO: 144289 - DNA, 17 bp, synthetic construct
  source 1..17: mol_type = other DNA
gcccccaagtgagaccc

SEQ ID NO: 144290 - DNA, 17 bp, synthetic construct
  source 1..17: mol_type = other DNA
cccccaagtgagacccg

SEQ ID NO: 144291 - DNA, 17 bp, synthetic construct
  source 1..17: mol_type = other DNA
ccccaagtgagacccga

SEQ ID NO: 144292 - DNA, 17 bp, synthetic construct
  source 1..17: mol_type = other DNA
cccaagtgagacccgag

SEQ ID NO: 144293 - DNA, 17 bp, synthetic construct
  source 1..17: mol_type = other DNA
ccaagtgagacccgagg

SEQ ID NO: 144294 - DNA, 17 bp, synthetic construct
  source 1..17: mol_type = other DNA
caagtgagacccgaggc

SEQ ID NO: 144295 - DNA, 17 bp, synthetic construct
  source 1..17: mol_type = other DNA
aagtgagacccgaggca

SEQ ID NO: 144296 - DNA, 17 bp, synthetic construct
  source 1..17: mol_type = other DNA
agtgagacccgaggcac

SEQ ID NO: 144297 - DNA, 17 bp, synthetic construct
  source 1..17: mol_type = other DNA
gtgagacccgaggcacc

SEQ ID NO: 144298 - DNA, 17 bp, synthetic construct
  source 1..17: mol_type = other DNA
tgagacccgaggcacct

SEQ ID NO: 144299 - DNA, 17 bp, synthetic construct
  source 1..17: mol_type = other DNA
gagacccgaggcacctg

SEQ ID NO: 144300 - DNA, 17 bp, synthetic construct
  source 1..17: mol_type = other DNA
agacccgaggcacctgc

SEQ ID NO: 144301 - DNA, 17 bp, synthetic construct
  source 1..17: mol_type = other DNA
gacccgaggcacctgcc

SEQ ID NO: 144302 - DNA, 17 bp, synthetic construct
  source 1..17: mol_type = other DNA
acccgaggcacctgccc

SEQ ID NO: 144303 - DNA, 17 bp, synthetic construct
  source 1..17: mol_type = other DNA
cccgaggcacctgcccc

SEQ ID NO: 144304 - DNA, 17 bp, synthetic construct
  source 1..17: mol_type = other DNA
ccgaggcacctgccccc

SEQ ID NO: 144305 - DNA, 17 bp, synthetic construct
  source 1..17: mol_type = other DNA
cgaggcacctgccccca

SEQ ID NO: 144306 - DNA, 17 bp, synthetic construct
  source 1..17: mol_type = other DNA
gaggcacctgcccccag

SEQ ID NO: 144307 - DNA, 17 bp, synthetic construct
  source 1..17: mol_type = other DNA
aggcacctgcccccagg

SEQ ID NO: 144308 - DNA, 17 bp, synthetic construct
  source 1..17: mol_type = other DNA
ggcacctgcccccaggt

SEQ ID NO: 144309 - DNA, 17 bp, synthetic construct
  source 1..17: mol_type = other DNA
gcacctgcccccaggtg

SEQ ID NO: 144310 - DNA, 17 bp, synthetic construct
  source 1..17: mol_type = other DNA
cacctgcccccaggtga

SEQ ID NO: 144311 - DNA, 17 bp, synthetic construct
  source 1..17: mol_type = other DNA
acctgcccccaggtgag

SEQ ID NO: 144312 - DNA, 17 bp, synthetic construct
  source 1..17: mol_type = other DNA
cctgcccccaggtgaga

SEQ ID NO: 144313 - DNA, 17 bp, synthetic construct
  source 1..17: mol_type = other DNA
ctgcccccaggtgagac

SEQ ID NO: 144314 - DNA, 17 bp, synthetic construct
  source 1..17: mol_type = other DNA
tgcccccaggtgagacc

SEQ ID NO: 144315 - DNA, 17 bp, synthetic construct
  source 1..17: mol_type = other DNA
gcccccaggtgagacct

SEQ ID NO: 144316 - DNA, 17 bp, synthetic construct
  source 1..17: mol_type = other DNA
cccccaggtgagacctg

SEQ ID NO: 144317 - DNA, 17 bp, synthetic construct
  source 1..17: mol_type = other DNA
ccccaggtgagacctga

SEQ ID NO: 144318 - DNA, 17 bp, synthetic construct
  source 1..17: mol_type = other DNA
cccaggtgagacctgag

SEQ ID NO: 144319 - DNA, 17 bp, synthetic construct
  source 1..17: mol_type = other DNA
ccaggtgagacctgagt

SEQ ID NO: 144320 - DNA, 17 bp, synthetic construct
  source 1..17: mol_type = other DNA
caggtgagacctgagtc

SEQ ID NO: 144321 - DNA, 17 bp, synthetic construct
  source 1..17: mol_type = other DNA
aggtgagacctgagtca

SEQ ID NO: 144322 - DNA, 17 bp, synthetic construct
  source 1..17: mol_type = other DNA
ggtgagacctgagtcac

SEQ ID NO: 144323 - DNA, 17 bp, synthetic construct
  source 1..17: mol_type = other DNA
gtgagacctgagtcacc

SEQ ID NO: 144324 - DNA, 17 bp, synthetic construct
  source 1..17: mol_type = other DNA
tgagacctgagtcaccc

SEQ ID NO: 144325 - DNA, 17 bp, synthetic construct
  source 1..17: mol_type = other DNA
gagacctgagtcacccg

SEQ ID NO: 144326 - DNA, 17 bp, synthetic construct
  source 1..17: mol_type = other DNA
agacctgagtcacccgc

SEQ ID NO: 144327 - DNA, 17 bp, synthetic construct
  source 1..17: mol_type = other DNA
gacctgagtcacccgcc

SEQ ID NO: 144328 - DNA, 17 bp, synthetic construct
  source 1..17: mol_type = other DNA
acctgagtcacccgccc

SEQ ID NO: 144329 - DNA, 17 bp, synthetic construct
  source 1..17: mol_type = other DNA
cctgagtcacccgcccc

SEQ ID NO: 144330 - DNA, 17 bp, synthetic construct
  source 1..17: mol_type = other DNA
ctgagtcacccgccccc

SEQ ID NO: 144331 - DNA, 17 bp, synthetic construct
  source 1..17: mol_type = other DNA
tgagtcacccgccccca

SEQ ID NO: 144332 - DNA, 17 bp, synthetic construct
  source 1..17: mol_type = other DNA
gagtcacccgcccccag

SEQ ID NO: 144333 - DNA, 17 bp, synthetic construct
  source 1..17: mol_type = other DNA
agtcacccgcccccagg

SEQ ID NO: 144334 - DNA, 17 bp, synthetic construct
  source 1..17: mol_type = other DNA
gtcacccgcccccaggt

SEQ ID NO: 144335 - DNA, 17 bp, synthetic construct
  source 1..17: mol_type = other DNA
tcacccgcccccaggtg

SEQ ID NO: 144336 - DNA, 17 bp, synthetic construct
  source 1..17: mol_type = other DNA
cacccgcccccaggtga

SEQ ID NO: 144337 - DNA, 17 bp, synthetic construct
  source 1..17: mol_type = other DNA
acccgcccccaggtgag

SEQ ID NO: 144338 - DNA, 17 bp, synthetic construct
  source 1..17: mol_type = other DNA
cccgcccccaggtgagc

SEQ ID NO: 144339 - DNA, 17 bp, synthetic construct
  source 1..17: mol_type = other DNA
ccgcccccaggtgagcc

SEQ ID NO: 144340 - DNA, 17 bp, synthetic construct
  source 1..17: mol_type = other DNA
cgcccccaggtgagccc

SEQ ID NO: 144341 - DNA, 17 bp, synthetic construct
  source 1..17: mol_type = other DNA
gcccccaggtgagcccc

SEQ ID NO: 144342 - DNA, 17 bp, synthetic construct
  source 1..17: mol_type = other DNA
cccccaggtgagccccc

SEQ ID NO: 144343 - DNA, 17 bp, synthetic construct
  source 1..17: mol_type = other DNA
ccccaggtgagcccccg

SEQ ID NO: 144344 - DNA, 17 bp, synthetic construct
  source 1..17: mol_type = other DNA
cccaggtgagcccccga

SEQ ID NO: 144345 - DNA, 17 bp, synthetic construct
  source 1..17: mol_type = other DNA
ccaggtgagcccccgag

SEQ ID NO: 144346 - DNA, 17 bp, synthetic construct
  source 1..17: mol_type = other DNA
caggtgagcccccgagg

SEQ ID NO: 144347 - DNA, 17 bp, synthetic construct
  source 1..17: mol_type = other DNA
aggtgagcccccgaggc

SEQ ID NO: 144348 - DNA, 17 bp, synthetic construct
  source 1..17: mol_type = other DNA
ggtgagcccccgaggca

SEQ ID NO: 144349 - DNA, 17 bp, synthetic construct
  source 1..17: mol_type = other DNA
gtgagcccccgaggcac

SEQ ID NO: 144350 - DNA, 17 bp, synthetic construct
  source 1..17: mol_type = other DNA
tgagcccccgaggcacc

SEQ ID NO: 144351 - DNA, 17 bp, synthetic construct
  source 1..17: mol_type = other DNA
gagcccccgaggcacct

SEQ ID NO: 144352 - DNA, 17 bp, synthetic construct
  source 1..17: mol_type = other DNA
agcccccgaggcacctg

SEQ ID NO: 144353 - DNA, 17 bp, synthetic construct
  source 1..17: mol_type = other DNA
gcccccgaggcacctgc

SEQ ID NO: 144354 - DNA, 17 bp, synthetic construct
  source 1..17: mol_type = other DNA
cccccgaggcacctgcc

SEQ ID NO: 144355 - DNA, 17 bp, synthetic construct
  source 1..17: mol_type = other DNA
ccccgaggcacctgccc

SEQ ID NO: 144356 - DNA, 17 bp, synthetic construct
  source 1..17: mol_type = other DNA
cccgaggcacctgcccc

SEQ ID NO: 144357 - DNA, 17 bp, synthetic construct
  source 1..17: mol_type = other DNA
ccgaggcacctgccccc

SEQ ID NO: 144358 - DNA, 17 bp, synthetic construct
  source 1..17: mol_type = other DNA
cgaggcacctgccccca

SEQ ID NO: 144359 - DNA, 17 bp, synthetic construct
  source 1..17: mol_type = other DNA
gaggcacctgcccccag

SEQ ID NO: 144360 - DNA, 17 bp, synthetic construct
  source 1..17: mol_type = other DNA
aggcacctgcccccagg

SEQ ID NO: 144361 - DNA, 17 bp, synthetic construct
  source 1..17: mol_type = other DNA
ggcacctgcccccaggt

SEQ ID NO: 144362 - DNA, 17 bp, synthetic construct
  source 1..17: mol_type = other DNA
gcacctgcccccaggtg

SEQ ID NO: 144363 - DNA, 17 bp, synthetic construct
  source 1..17: mol_type = other DNA
cacctgcccccaggtga

SEQ ID NO: 144364 - DNA, 17 bp, synthetic construct
  source 1..17: mol_type = other DNA
acctgcccccaggtgag

SEQ ID NO: 144365 - DNA, 17 bp, synthetic construct
  source 1..17: mol_type = other DNA
cctgcccccaggtgagt

SEQ ID NO: 144366 - DNA, 17 bp, synthetic construct
  source 1..17: mol_type = other DNA
ctgcccccaggtgagtc

SEQ ID NO: 144367 - DNA, 17 bp, synthetic construct
  source 1..17: mol_type = other DNA
tgcccccaggtgagtcc

SEQ ID NO: 144368 - DNA, 17 bp, synthetic construct
  source 1..17: mol_type = other DNA
gcccccaggtgagtccc

SEQ ID NO: 144369 - DNA, 17 bp, synthetic construct
  source 1..17: mol_type = other DNA
cccccaggtgagtccct

SEQ ID NO: 144370 - DNA, 17 bp, synthetic construct
  source 1..17: mol_type = other DNA
ccccaggtgagtccctg

SEQ ID NO: 144371 - DNA, 17 bp, synthetic construct
  source 1..17: mol_type = other DNA
cccaggtgagtccctga

SEQ ID NO: 144372 - DNA, 17 bp, synthetic construct
  source 1..17: mol_type = other DNA
ccaggtgagtccctgag

SEQ ID NO: 144373 - DNA, 17 bp, synthetic construct
  source 1..17: mol_type = other DNA
caggtgagtccctgagg

SEQ ID NO: 144374 - DNA, 17 bp, synthetic construct
  source 1..17: mol_type = other DNA
aggtgagtccctgaggc

SEQ ID NO: 144375 - DNA, 17 bp, synthetic construct
  source 1..17: mol_type = other DNA
ggtgagtccctgaggca

SEQ ID NO: 144376 - DNA, 17 bp, synthetic construct
  source 1..17: mol_type = other DNA
gtgagtccctgaggcac

SEQ ID NO: 144377 - DNA, 17 bp, synthetic construct
  source 1..17: mol_type = other DNA
tgagtccctgaggcact

SEQ ID NO: 144378 - DNA, 17 bp, synthetic construct
  source 1..17: mol_type = other DNA
gagtccctgaggcactt

SEQ ID NO: 144379 - DNA, 17 bp, synthetic construct
  source 1..17: mol_type = other DNA
agtccctgaggcacttg

SEQ ID NO: 144380 - DNA, 17 bp, synthetic construct
  source 1..17: mol_type = other DNA
gtccctgaggcacttgc

SEQ ID NO: 144381 - DNA, 17 bp, synthetic construct
  source 1..17: mol_type = other DNA
tccctgaggcacttgcc

SEQ ID NO: 144382 - DNA, 17 bp, synthetic construct
  source 1..17: mol_type = other DNA
ccctgaggcacttgccc

SEQ ID NO: 144383 - DNA, 17 bp, synthetic construct
  source 1..17: mol_type = other DNA
cctgaggcacttgcccc

SEQ ID NO: 144384 - DNA, 17 bp, synthetic construct
  source 1..17: mol_type = other DNA
ctgaggcacttgccccc

SEQ ID NO: 144385 - DNA, 17 bp, synthetic construct
  source 1..17: mol_type = other DNA
tgaggcacttgccccca

SEQ ID NO: 144386 - DNA, 17 bp, synthetic construct
  source 1..17: mol_type = other DNA
gaggcacttgcccccaa

SEQ ID NO: 144387 - DNA, 17 bp, synthetic construct
  source 1..17: mol_type = other DNA
aggcacttgcccccaag

SEQ ID NO: 144388 - DNA, 17 bp, synthetic construct
  source 1..17: mol_type = other DNA
ggcacttgcccccaagt

SEQ ID NO: 144389 - DNA, 17 bp, synthetic construct
  source 1..17: mol_type = other DNA
gcacttgcccccaagtg

SEQ ID NO: 144390 - DNA, 17 bp, synthetic construct
  source 1..17: mol_type = other DNA
cacttgcccccaagtga

SEQ ID NO: 144391 - DNA, 17 bp, synthetic construct
  source 1..17: mol_type = other DNA
acttgcccccaagtgag

SEQ ID NO: 144392 - DNA, 17 bp, synthetic construct
  source 1..17: mol_type = other DNA
cttgcccccaagtgaga

SEQ ID NO: 144393 - DNA, 17 bp, synthetic construct
  source 1..17: mol_type = other DNA
ttgcccccaagtgagac

SEQ ID NO: 144394 - DNA, 17 bp, synthetic construct
  source 1..17: mol_type = other DNA
tgcccccaagtgagacc

SEQ ID NO: 144395 - DNA, 17 bp, synthetic construct
  source 1..17: mol_type = other DNA
gcccccaagtgagaccc

SEQ ID NO: 144396 - DNA, 17 bp, synthetic construct
  source 1..17: mol_type = other DNA
cccccaagtgagacccg

SEQ ID NO: 144397 - DNA, 17 bp, synthetic construct
  source 1..17: mol_type = other DNA
ccccaagtgagacccga

SEQ ID NO: 144398 - DNA, 17 bp, synthetic construct
  source 1..17: mol_type = other DNA
cccaagtgagacccgag

SEQ ID NO: 144399 - DNA, 17 bp, synthetic construct
  source 1..17: mol_type = other DNA
ccaagtgagacccgagg

SEQ ID NO: 144400 - DNA, 17 bp, synthetic construct
  source 1..17: mol_type = other DNA
caagtgagacccgaggc

SEQ ID NO: 144401 - DNA, 17 bp, synthetic construct
  source 1..17: mol_type = other DNA
aagtgagacccgaggca

SEQ ID NO: 144402 - DNA, 17 bp, synthetic construct
  source 1..17: mol_type = other DNA
agtgagacccgaggcac

SEQ ID NO: 144403 - DNA, 17 bp, synthetic construct
  source 1..17: mol_type = other DNA
gtgagacccgaggcacc

SEQ ID NO: 144404 - DNA, 17 bp, synthetic construct
  source 1..17: mol_type = other DNA
tgagacccgaggcacct

SEQ ID NO: 144405 - DNA, 17 bp, synthetic construct
  source 1..17: mol_type = other DNA
gagacccgaggcacctg

SEQ ID NO: 144406 - DNA, 17 bp, synthetic construct
  source 1..17: mol_type = other DNA
agacccgaggcacctgc

SEQ ID NO: 144407 - DNA, 17 bp, synthetic construct
  source 1..17: mol_type = other DNA
gacccgaggcacctgcc

SEQ ID NO: 144408 - DNA, 17 bp, synthetic construct
  source 1..17: mol_type = other DNA
acccgaggcacctgccc

SEQ ID NO: 144409 - DNA, 17 bp, synthetic construct
  source 1..17: mol_type = other DNA
cccgaggcacctgcccc

SEQ ID NO: 144410 - DNA, 17 bp, synthetic construct
  source 1..17: mol_type = other DNA
ccgaggcacctgccccc

SEQ ID NO: 144411 - DNA, 17 bp, synthetic construct
  source 1..17: mol_type = other DNA
cgaggcacctgccccca

SEQ ID NO: 144412 - DNA, 17 bp, synthetic construct
  source 1..17: mol_type = other DNA
gaggcacctgcccccag

SEQ ID NO: 144413 - DNA, 17 bp, synthetic construct
  source 1..17: mol_type = other DNA
aggcacctgcccccagg

SEQ ID NO: 144414 - DNA, 17 bp, synthetic construct
  source 1..17: mol_type = other DNA
ggcacctgcccccaggt

SEQ ID NO: 144415 - DNA, 17 bp, synthetic construct
  source 1..17: mol_type = other DNA
gcacctgcccccaggtg

SEQ ID NO: 144416 - DNA, 17 bp, synthetic construct
  source 1..17: mol_type = other DNA
cacctgcccccaggtga

SEQ ID NO: 144417 - DNA, 17 bp, synthetic construct
  source 1..17: mol_type = other DNA
acctgcccccaggtgag

SEQ ID NO: 144418 - DNA, 17 bp, synthetic construct
  source 1..17: mol_type = other DNA
cctgcccccaggtgaga

SEQ ID NO: 144419 - DNA, 17 bp, synthetic construct
  source 1..17: mol_type = other DNA
ctgcccccaggtgagac

SEQ ID NO: 144420 - DNA, 17 bp, synthetic construct
  source 1..17: mol_type = other DNA
tgcccccaggtgagacc

SEQ ID NO: 144421 - DNA, 17 bp, synthetic construct
  source 1..17: mol_type = other DNA
gcccccaggtgagaccc

SEQ ID NO: 144422 - DNA, 17 bp, synthetic construct
  source 1..17: mol_type = other DNA
cccccaggtgagacccg

SEQ ID NO: 144423 - DNA, 17 bp, synthetic construct
  source 1..17: mol_type = other DNA
ccccaggtgagacccga

SEQ ID NO: 144424 - DNA, 17 bp, synthetic construct
  source 1..17: mol_type = other DNA
cccaggtgagacccgag

SEQ ID NO: 144425 - DNA, 17 bp, synthetic construct
  source 1..17: mol_type = other DNA
ccaggtgagacccgagg

SEQ ID NO: 144426 - DNA, 17 bp, synthetic construct
  source 1..17: mol_type = other DNA
caggtgagacccgaggc

SEQ ID NO: 144427 - DNA, 17 bp, synthetic construct
  source 1..17: mol_type = other DNA
aggtgagacccgaggca

SEQ ID NO: 144428 - DNA, 17 bp, synthetic construct
  source 1..17: mol_type = other DNA
ggtgagacccgaggcac

SEQ ID NO: 144429 - DNA, 17 bp, synthetic construct
  source 1..17: mol_type = other DNA
gtgagacccgaggcacc

SEQ ID NO: 144430 - DNA, 17 bp, synthetic construct
  source 1..17: mol_type = other DNA
tgagacccgaggcacct

SEQ ID NO: 144431 - DNA, 17 bp, synthetic construct
  source 1..17: mol_type = other DNA
gagacccgaggcacctg

SEQ ID NO: 144432 - DNA, 17 bp, synthetic construct
  source 1..17: mol_type = other DNA
agacccgaggcacctgc

SEQ ID NO: 144433 - DNA, 17 bp, synthetic construct
  source 1..17: mol_type = other DNA
gacccgaggcacctgcc

SEQ ID NO: 144434 - DNA, 17 bp, synthetic construct
  source 1..17: mol_type = other DNA
acccgaggcacctgccc

SEQ ID NO: 144435 - DNA, 17 bp, synthetic construct
  source 1..17: mol_type = other DNA
cccgaggcacctgcccc

SEQ ID NO: 144436 - DNA, 17 bp, synthetic construct
  source 1..17: mol_type = other DNA
ccgaggcacctgccccc

SEQ ID NO: 144437 - DNA, 17 bp, synthetic construct
  source 1..17: mol_type = other DNA
cgaggcacctgccccca

SEQ ID NO: 144438 - DNA, 17 bp, synthetic construct
  source 1..17: mol_type = other DNA
gaggcacctgcccccag

SEQ ID NO: 144439 - DNA, 17 bp, synthetic construct
  source 1..17: mol_type = other DNA
aggcacctgcccccagg

SEQ ID NO: 144440 - DNA, 17 bp, synthetic construct
  source 1..17: mol_type = other DNA
ggcacctgcccccaggt

SEQ ID NO: 144441 - DNA, 17 bp, synthetic construct
  source 1..17: mol_type = other DNA
gcacctgcccccaggtg

SEQ ID NO: 144442 - DNA, 17 bp, synthetic construct
  source 1..17: mol_type = other DNA
cacctgcccccaggtga

SEQ ID NO: 144443 - DNA, 17 bp, synthetic construct
  source 1..17: mol_type = other DNA
acctgcccccaggtgag

SEQ ID NO: 144444 - DNA, 17 bp, synthetic construct
  source 1..17: mol_type = other DNA
cctgcccccaggtgaga

SEQ ID NO: 144445 - DNA, 17 bp, synthetic construct
  source 1..17: mol_type = other DNA
ctgcccccaggtgagac

SEQ ID NO: 144446 - DNA, 17 bp, synthetic construct
  source 1..17: mol_type = other DNA
tgcccccaggtgagacc

SEQ ID NO: 144447 - DNA, 17 bp, synthetic construct
  source 1..17: mol_type = other DNA
gcccccaggtgagacct

SEQ ID NO: 144448 - DNA, 17 bp, synthetic construct
  source 1..17: mol_type = other DNA
cccccaggtgagacctg

SEQ ID NO: 144449 - DNA, 17 bp, synthetic construct
  source 1..17: mol_type = other DNA
ccccaggtgagacctga

SEQ ID NO: 144450 - DNA, 17 bp, synthetic construct
  source 1..17: mol_type = other DNA
cccaggtgagacctgag

SEQ ID NO: 144451 - DNA, 17 bp, synthetic construct
  source 1..17: mol_type = other DNA
ccaggtgagacctgagt

SEQ ID NO: 144452 - DNA, 17 bp, synthetic construct
  source 1..17: mol_type = other DNA
caggtgagacctgagtc

SEQ ID NO: 144453 - DNA, 17 bp, synthetic construct
  source 1..17: mol_type = other DNA
aggtgagacctgagtca

SEQ ID NO: 144454 - DNA, 17 bp, synthetic construct
  source 1..17: mol_type = other DNA
ggtgagacctgagtcac

SEQ ID NO: 144455 - DNA, 17 bp, synthetic construct
  source 1..17: mol_type = other DNA
gtgagacctgagtcacc

SEQ ID NO: 144456 - DNA, 17 bp, synthetic construct
  source 1..17: mol_type = other DNA
tgagacctgagtcacct

SEQ ID NO: 144457 - DNA, 17 bp, synthetic construct
  source 1..17: mol_type = other DNA
gagacctgagtcacctg

SEQ ID NO: 144458 - DNA, 17 bp, synthetic construct
  source 1..17: mol_type = other DNA
agacctgagtcacctgc

SEQ ID NO: 144459 - DNA, 17 bp, synthetic construct
  source 1..17: mol_type = other DNA
gacctgagtcacctgcc

SEQ ID NO: 144460 - DNA, 17 bp, synthetic construct
  source 1..17: mol_type = other DNA
acctgagtcacctgccc

SEQ ID NO: 144461 - DNA, 17 bp, synthetic construct
  source 1..17: mol_type = other DNA
cctgagtcacctgcccc

SEQ ID NO: 144462 - DNA, 17 bp, synthetic construct
  source 1..17: mol_type = other DNA
ctgagtcacctgccccc

SEQ ID NO: 144463 - DNA, 17 bp, synthetic construct
  source 1..17: mol_type = other DNA
tgagtcacctgccccca

SEQ ID NO: 144464 - DNA, 17 bp, synthetic construct
  source 1..17: mol_type = other DNA
gagtcacctgcccccag

SEQ ID NO: 144465 - DNA, 17 bp, synthetic construct
  source 1..17: mol_type = other DNA
agtcacctgcccccagg

SEQ ID NO: 144466 - DNA, 17 bp, synthetic construct
  source 1..17: mol_type = other DNA
gtcacctgcccccaggt

SEQ ID NO: 144467 - DNA, 17 bp, synthetic construct
  source 1..17: mol_type = other DNA
tcacctgcccccaggtg

SEQ ID NO: 144468 - DNA, 17 bp, synthetic construct
  source 1..17: mol_type = other DNA
cacctgcccccaggtga

SEQ ID NO: 144469 - DNA, 17 bp, synthetic construct
  source 1..17: mol_type = other DNA
acctgcccccaggtgag

SEQ ID NO: 144470 - DNA, 17 bp, synthetic construct
  source 1..17: mol_type = other DNA
cctgcccccaggtgagc

SEQ ID NO: 144471 - DNA, 17 bp, synthetic construct
  source 1..17: mol_type = other DNA
ctgcccccaggtgagcc

SEQ ID NO: 144472 - DNA, 17 bp, synthetic construct
  source 1..17: mol_type = other DNA
tgcccccaggtgagcca

SEQ ID NO: 144473 - DNA, 17 bp, synthetic construct
  source 1..17: mol_type = other DNA
gcccccaggtgagccac

SEQ ID NO: 144474 - DNA, 17 bp, synthetic construct
  source 1..17: mol_type = other DNA
cccccaggtgagccacc

SEQ ID NO: 144475 - DNA, 17 bp, synthetic construct
  source 1..17: mol_type = other DNA
ccccaggtgagccacca

SEQ ID NO: 144476 - DNA, 17 bp, synthetic construct
  source 1..17: mol_type = other DNA
cccaggtgagccaccaa

SEQ ID NO: 144477 - DNA, 17 bp, synthetic construct
  source 1..17: mol_type = other DNA
ccaggtgagccaccaag

SEQ ID NO: 144478 - DNA, 17 bp, synthetic construct
  source 1..17: mol_type = other DNA
caggtgagccaccaagg

SEQ ID NO: 144479 - DNA, 17 bp, synthetic construct
  source 1..17: mol_type = other DNA
aggtgagccaccaaggc

SEQ ID NO: 144480 - DNA, 17 bp, synthetic construct
  source 1..17: mol_type = other DNA
ggtgagccaccaaggca

SEQ ID NO: 144481 - DNA, 17 bp, synthetic construct
  source 1..17: mol_type = other DNA
gtgagccaccaaggcac

SEQ ID NO: 144482 - DNA, 17 bp, synthetic construct
  source 1..17: mol_type = other DNA
tgagccaccaaggcacc

SEQ ID NO: 144483 - DNA, 17 bp, synthetic construct
  source 1..17: mol_type = other DNA
gagccaccaaggcacct

SEQ ID NO: 144484 - DNA, 17 bp, synthetic construct
  source 1..17: mol_type = other DNA
agccaccaaggcacctg

SEQ ID NO: 144485 - DNA, 17 bp, synthetic construct
  source 1..17: mol_type = other DNA
gccaccaaggcacctgc

SEQ ID NO: 144486 - DNA, 17 bp, synthetic construct
  source 1..17: mol_type = other DNA
ccaccaaggcacctgcc

SEQ ID NO: 144487 - DNA, 17 bp, synthetic construct
  source 1..17: mol_type = other DNA
caccaaggcacctgccc

SEQ ID NO: 144488 - DNA, 17 bp, synthetic construct
  source 1..17: mol_type = other DNA
accaaggcacctgcccc

SEQ ID NO: 144489 - DNA, 17 bp, synthetic construct
  source 1..17: mol_type = other DNA
ccaaggcacctgccccc

SEQ ID NO: 144490 - DNA, 17 bp, synthetic construct
  source 1..17: mol_type = other DNA
caaggcacctgccccca

SEQ ID NO: 144491 - DNA, 17 bp, synthetic construct
  source 1..17: mol_type = other DNA
aaggcacctgcccccaa

SEQ ID NO: 144492 - DNA, 17 bp, synthetic construct
  source 1..17: mol_type = other DNA
aggcacctgcccccaag

SEQ ID NO: 144493 - DNA, 17 bp, synthetic construct
  source 1..17: mol_type = other DNA
ggcacctgcccccaagt

SEQ ID NO: 144494 - DNA, 17 bp, synthetic construct
  source 1..17: mol_type = other DNA
gcacctgcccccaagtg

SEQ ID NO: 144495 - DNA, 17 bp, synthetic construct
  source 1..17: mol_type = other DNA
cacctgcccccaagtga

SEQ ID NO: 144496 - DNA, 17 bp, synthetic construct
  source 1..17: mol_type = other DNA
acctgcccccaagtgag

SEQ ID NO: 144497 - DNA, 17 bp, synthetic construct
  source 1..17: mol_type = other DNA
cctgcccccaagtgaga

SEQ ID NO: 144498 - DNA, 17 bp, synthetic construct
  source 1..17: mol_type = other DNA
ctgcccccaagtgagac

SEQ ID NO: 144499 - DNA, 17 bp, synthetic construct
  source 1..17: mol_type = other DNA
tgcccccaagtgagacc

SEQ ID NO: 144500 - DNA, 17 bp, synthetic construct
  source 1..17: mol_type = other DNA
gcccccaagtgagaccc

SEQ ID NO: 144501 - DNA, 17 bp, synthetic construct
  source 1..17: mol_type = other DNA
cccccaagtgagacccg

SEQ ID NO: 144502 - DNA, 17 bp, synthetic construct
  source 1..17: mol_type = other DNA
ccccaagtgagacccga

SEQ ID NO: 144503 - DNA, 17 bp, synthetic construct
  source 1..17: mol_type = other DNA
cccaagtgagacccgag

SEQ ID NO: 144504 - DNA, 17 bp, synthetic construct
  source 1..17: mol_type = other DNA
ccaagtgagacccgagg

SEQ ID NO: 144505 - DNA, 17 bp, synthetic construct
  source 1..17: mol_type = other DNA
caagtgagacccgaggc

SEQ ID NO: 144506 - DNA, 17 bp, synthetic construct
  source 1..17: mol_type = other DNA
aagtgagacccgaggca

SEQ ID NO: 144507 - DNA, 17 bp, synthetic construct
  source 1..17: mol_type = other DNA
agtgagacccgaggcac

SEQ ID NO: 144508 - DNA, 17 bp, synthetic construct
  source 1..17: mol_type = other DNA
gtgagacccgaggcacc

SEQ ID NO: 144509 - DNA, 17 bp, synthetic construct
  source 1..17: mol_type = other DNA
tgagacccgaggcacct

SEQ ID NO: 144510 - DNA, 17 bp, synthetic construct
  source 1..17: mol_type = other DNA
gagacccgaggcacctg

SEQ ID NO: 144511 - DNA, 17 bp, synthetic construct
  source 1..17: mol_type = other DNA
agacccgaggcacctgc

SEQ ID NO: 144512 - DNA, 17 bp, synthetic construct
  source 1..17: mol_type = other DNA
gacccgaggcacctgcc

SEQ ID NO: 144513 - DNA, 17 bp, synthetic construct
  source 1..17: mol_type = other DNA
acccgaggcacctgccc

SEQ ID NO: 144514 - DNA, 17 bp, synthetic construct
  source 1..17: mol_type = other DNA
cccgaggcacctgcccc

SEQ ID NO: 144515 - DNA, 17 bp, synthetic construct
  source 1..17: mol_type = other DNA
ccgaggcacctgccccc

SEQ ID NO: 144516 - DNA, 17 bp, synthetic construct
  source 1..17: mol_type = other DNA
cgaggcacctgccccca

SEQ ID NO: 144517 - DNA, 17 bp, synthetic construct
  source 1..17: mol_type = other DNA
gaggcacctgcccccag

SEQ ID NO: 144518 - DNA, 17 bp, synthetic construct
  source 1..17: mol_type = other DNA
aggcacctgcccccagg

SEQ ID NO: 144519 - DNA, 17 bp, synthetic construct
  source 1..17: mol_type = other DNA
ggcacctgcccccaggt

SEQ ID NO: 144520 - DNA, 17 bp, synthetic construct
  source 1..17: mol_type = other DNA
gcacctgcccccaggtg

SEQ ID NO: 144521 - DNA, 17 bp, synthetic construct
  source 1..17: mol_type = other DNA
cacctgcccccaggtga

SEQ ID NO: 144522 - DNA, 17 bp, synthetic construct
  source 1..17: mol_type = other DNA
acctgcccccaggtgag

SEQ ID NO: 144523 - DNA, 17 bp, synthetic construct
  source 1..17: mol_type = other DNA
cctgcccccaggtgagc

SEQ ID NO: 144524 - DNA, 17 bp, synthetic construct
  source 1..17: mol_type = other DNA
ctgcccccaggtgagcc

SEQ ID NO: 144525 - DNA, 17 bp, synthetic construct
  source 1..17: mol_type = other DNA
tgcccccaggtgagccc

SEQ ID NO: 144526 - DNA, 17 bp, synthetic construct
  source 1..17: mol_type = other DNA
gcccccaggtgagccca

SEQ ID NO: 144527 - DNA, 17 bp, synthetic construct
  source 1..17: mol_type = other DNA
cccccaggtgagcccac

SEQ ID NO: 144528 - DNA, 17 bp, synthetic construct
  source 1..17: mol_type = other DNA
ccccaggtgagcccaca

SEQ ID NO: 144529 - DNA, 17 bp, synthetic construct
  source 1..17: mol_type = other DNA
cccaggtgagcccacag

SEQ ID NO: 144530 - DNA, 17 bp, synthetic construct
  source 1..17: mol_type = other DNA
ccaggtgagcccacagc

SEQ ID NO: 144531 - DNA, 17 bp, synthetic construct
  source 1..17: mol_type = other DNA
caggtgagcccacagct

SEQ ID NO: 144532 - DNA, 17 bp, synthetic construct
  source 1..17: mol_type = other DNA
aggtgagcccacagctg

SEQ ID NO: 144533 - DNA, 17 bp, synthetic construct
  source 1..17: mol_type = other DNA
ggtgagcccacagctgc

SEQ ID NO: 144534 - DNA, 17 bp, synthetic construct
  source 1..17: mol_type = other DNA
gtgagcccacagctgct

SEQ ID NO: 144535 - DNA, 17 bp, synthetic construct
  source 1..17: mol_type = other DNA
tgagcccacagctgctg

SEQ ID NO: 144536 - DNA, 17 bp, synthetic construct
  source 1..17: mol_type = other DNA
gagcccacagctgctgg

SEQ ID NO: 144537 - DNA, 17 bp, synthetic construct
  source 1..17: mol_type = other DNA
agcccacagctgctggg

SEQ ID NO: 144538 - DNA, 17 bp, synthetic construct
  source 1..17: mol_type = other DNA
gcccacagctgctgggc

SEQ ID NO: 144539 - DNA, 17 bp, synthetic construct
  source 1..17: mol_type = other DNA
cccacagctgctgggca

SEQ ID NO: 144540 - DNA, 17 bp, synthetic construct
  source 1..17: mol_type = other DNA
ccacagctgctgggcag

SEQ ID NO: 144541 - DNA, 17 bp, synthetic construct
  source 1..17: mol_type = other DNA
cacagctgctgggcaga

SEQ ID NO: 144542 - DNA, 17 bp, synthetic construct
  source 1..17: mol_type = other DNA
acagctgctgggcagac

SEQ ID NO: 144543 - DNA, 17 bp, synthetic construct
  source 1..17: mol_type = other DNA
cagctgctgggcagacc

SEQ ID NO: 144544 - DNA, 17 bp, synthetic construct
  source 1..17: mol_type = other DNA
agctgctgggcagaccc

SEQ ID NO: 144545 - DNA, 17 bp, synthetic construct
  source 1..17: mol_type = other DNA
gctgctgggcagaccca

SEQ ID NO: 144546 - DNA, 17 bp, synthetic construct
  source 1..17: mol_type = other DNA
ctgctgggcagacccag

SEQ ID NO: 144547 - DNA, 17 bp, synthetic construct
  source 1..17: mol_type = other DNA
tgctgggcagacccagc

SEQ ID NO: 144548 - DNA, 17 bp, synthetic construct
  source 1..17: mol_type = other DNA
gctgggcagacccagcc

SEQ ID NO: 144549 - DNA, 17 bp, synthetic construct
  source 1..17: mol_type = other DNA
ctgggcagacccagccc

SEQ ID NO: 144550 - DNA, 17 bp, synthetic construct
  source 1..17: mol_type = other DNA
tgggcagacccagccct

SEQ ID NO: 144551 - DNA, 17 bp, synthetic construct
  source 1..17: mol_type = other DNA
gggcagacccagccctg

SEQ ID NO: 144552 - DNA, 17 bp, synthetic construct
  source 1..17: mol_type = other DNA
ggcagacccagccctga

SEQ ID NO: 144553 - DNA, 17 bp, synthetic construct
  source 1..17: mol_type = other DNA
gcagacccagccctgag

SEQ ID NO: 144554 - DNA, 17 bp, synthetic construct
  source 1..17: mol_type = other DNA
cagacccagccctgagt

SEQ ID NO: 144555 - DNA, 17 bp, synthetic construct
  source 1..17: mol_type = other DNA
agacccagccctgagtc

SEQ ID NO: 144556 - DNA, 17 bp, synthetic construct
  source 1..17: mol_type = other DNA
gacccagccctgagtca

SEQ ID NO: 144557 - DNA, 17 bp, synthetic construct
  source 1..17: mol_type = other DNA
acccagccctgagtcac

SEQ ID NO: 144558 - DNA, 17 bp, synthetic construct
  source 1..17: mol_type = other DNA
cccagccctgagtcact

SEQ ID NO: 144559 - DNA, 17 bp, synthetic construct
  source 1..17: mol_type = other DNA
ccagccctgagtcactt

SEQ ID NO: 144560 - DNA, 17 bp, synthetic construct
  source 1..17: mol_type = other DNA
cagccctgagtcactta

SEQ ID NO: 144561 - DNA, 17 bp, synthetic construct
  source 1..17: mol_type = other DNA
agccctgagtcacttat

SEQ ID NO: 144562 - DNA, 17 bp, synthetic construct
  source 1..17: mol_type = other DNA
gccctgagtcacttatc

SEQ ID NO: 144563 - DNA, 17 bp, synthetic construct
  source 1..17: mol_type = other DNA
ccctgagtcacttatcc

SEQ ID NO: 144564 - DNA, 17 bp, synthetic construct
  source 1..17: mol_type = other DNA
cctgagtcacttatcct

SEQ ID NO: 144565 - DNA, 17 bp, synthetic construct
  source 1..17: mol_type = other DNA
ctgagtcacttatcctg

SEQ ID NO: 144566 - DNA, 17 bp, synthetic construct
  source 1..17: mol_type = other DNA
tgagtcacttatcctgg

SEQ ID NO: 144567 - DNA, 17 bp, synthetic construct
  source 1..17: mol_type = other DNA
gagtcacttatcctggc

SEQ ID NO: 144568 - DNA, 17 bp, synthetic construct
  source 1..17: mol_type = other DNA
agtcacttatcctggct

SEQ ID NO: 144569 - DNA, 17 bp, synthetic construct
  source 1..17: mol_type = other DNA
gtcacttatcctggctc

SEQ ID NO: 144570 - DNA, 17 bp, synthetic construct
  source 1..17: mol_type = other DNA
tcacttatcctggctcc

SEQ ID NO: 144571 - DNA, 17 bp, synthetic construct
  source 1..17: mol_type = other DNA
cacttatcctggctccc

SEQ ID NO: 144572 - DNA, 17 bp, synthetic construct
  source 1..17: mol_type = other DNA
acttatcctggctccct

SEQ ID NO: 144573 - DNA, 17 bp, synthetic construct
  source 1..17: mol_type = other DNA
cttatcctggctccctg

SEQ ID NO: 144574 - DNA, 17 bp, synthetic construct
  source 1..17: mol_type = other DNA
ttatcctggctccctgg

SEQ ID NO: 144575 - DNA, 17 bp, synthetic construct
  source 1..17: mol_type = other DNA
tatcctggctccctggg

SEQ ID NO: 144576 - DNA, 17 bp, synthetic construct
  source 1..17: mol_type = other DNA
atcctggctccctgggg

SEQ ID NO: 144577 - DNA, 17 bp, synthetic construct
  source 1..17: mol_type = other DNA
tcctggctccctggggt

SEQ ID NO: 144578 - DNA, 17 bp, synthetic construct
  source 1..17: mol_type = other DNA
cctggctccctggggtt

SEQ ID NO: 144579 - DNA, 17 bp, synthetic construct
  source 1..17: mol_type = other DNA
ctggctccctggggttc

SEQ ID NO: 144580 - DNA, 17 bp, synthetic construct
  source 1..17: mol_type = other DNA
tggctccctggggttct

SEQ ID NO: 144581 - DNA, 17 bp, synthetic construct
  source 1..17: mol_type = other DNA
ggctccctggggttctc

SEQ ID NO: 144582 - DNA, 17 bp, synthetic construct
  source 1..17: mol_type = other DNA
gctccctggggttctct

SEQ ID NO: 144583 - DNA, 17 bp, synthetic construct
  source 1..17: mol_type = other DNA
ctccctggggttctcta

SEQ ID NO: 144584 - DNA, 17 bp, synthetic construct
  source 1..17: mol_type = other DNA
tccctggggttctctag

SEQ ID NO: 144585 - DNA, 17 bp, synthetic construct
  source 1..17: mol_type = other DNA
ccctggggttctctagc

SEQ ID NO: 144586 - DNA, 17 bp, synthetic construct
  source 1..17: mol_type = other DNA
cctggggttctctagct

SEQ ID NO: 144587 - DNA, 17 bp, synthetic construct
  source 1..17: mol_type = other DNA
ctggggttctctagctc

SEQ ID NO: 144588 - DNA, 17 bp, synthetic construct
  source 1..17: mol_type = other DNA
tggggttctctagctca

SEQ ID NO: 144589 - DNA, 17 bp, synthetic construct
  source 1..17: mol_type = other DNA
ggggttctctagctcag

SEQ ID NO: 144590 - DNA, 17 bp, synthetic construct
  source 1..17: mol_type = other DNA
gggttctctagctcagc

SEQ ID NO: 144591 - DNA, 17 bp, synthetic construct
  source 1..17: mol_type = other DNA
ggttctctagctcagcc

SEQ ID NO: 144592 - DNA, 17 bp, synthetic construct
  source 1..17: mol_type = other DNA
gttctctagctcagcca

SEQ ID NO: 144593 - DNA, 17 bp, synthetic construct
  source 1..17: mol_type = other DNA
ttctctagctcagccat

SEQ ID NO: 144594 - DNA, 17 bp, synthetic construct
  source 1..17: mol_type = other DNA
tctctagctcagccatt

SEQ ID NO: 144595 - DNA, 17 bp, synthetic construct
  source 1..17: mol_type = other DNA
ctctagctcagccattg

SEQ ID NO: 144596 - DNA, 17 bp, synthetic construct
  source 1..17: mol_type = other DNA
tctagctcagccattgc

SEQ ID NO: 144597 - DNA, 17 bp, synthetic construct
  source 1..17: mol_type = other DNA
ctagctcagccattgct

SEQ ID NO: 144598 - DNA, 17 bp, synthetic construct
  source 1..17: mol_type = other DNA
tagctcagccattgctg

SEQ ID NO: 144599 - DNA, 17 bp, synthetic construct
  source 1..17: mol_type = other DNA
agctcagccattgctgg

SEQ ID NO: 144600 - DNA, 17 bp, synthetic construct
  source 1..17: mol_type = other DNA
gctcagccattgctggg

SEQ ID NO: 144601 - DNA, 17 bp, synthetic construct
  source 1..17: mol_type = other DNA
ctcagccattgctgggg

SEQ ID NO: 144602 - DNA, 17 bp, synthetic construct
  source 1..17: mol_type = other DNA
tcagccattgctggggt

SEQ ID NO: 144603 - DNA, 17 bp, synthetic construct
  source 1..17: mol_type = other DNA
cagccattgctggggtc

SEQ ID NO: 144604 - DNA, 17 bp, synthetic construct
  source 1..17: mol_type = other DNA
agccattgctggggtct

SEQ ID NO: 144605 - DNA, 17 bp, synthetic construct
  source 1..17: mol_type = other DNA
gccattgctggggtctt

SEQ ID NO: 144606 - DNA, 17 bp, synthetic construct
  source 1..17: mol_type = other DNA
ccattgctggggtcttg

SEQ ID NO: 144607 - DNA, 17 bp, synthetic construct
  source 1..17: mol_type = other DNA
cattgctggggtcttgt

SEQ ID NO: 144608 - DNA, 17 bp, synthetic construct
  source 1..17: mol_type = other DNA
attgctggggtcttgtt

SEQ ID NO: 144609 - DNA, 17 bp, synthetic construct
  source 1..17: mol_type = other DNA
ttgctggggtcttgttt

SEQ ID NO: 144610 - DNA, 17 bp, synthetic construct
  source 1..17: mol_type = other DNA
tgctggggtcttgtttg

SEQ ID NO: 144611 - DNA, 17 bp, synthetic construct
  source 1..17: mol_type = other DNA
gctggggtcttgtttgt

SEQ ID NO: 144612 - DNA, 17 bp, synthetic construct
  source 1..17: mol_type = other DNA
ctggggtcttgtttgtt

SEQ ID NO: 144613 - DNA, 17 bp, synthetic construct
  source 1..17: mol_type = other DNA
tggggtcttgtttgttt

SEQ ID NO: 144614 - DNA, 17 bp, synthetic construct
  source 1..17: mol_type = other DNA
ggggtcttgtttgtttc

SEQ ID NO: 144615 - DNA, 17 bp, synthetic construct
  source 1..17: mol_type = other DNA
gggtcttgtttgtttcc

SEQ ID NO: 144616 - DNA, 17 bp, synthetic construct
  source 1..17: mol_type = other DNA
ggtcttgtttgtttcca

SEQ ID NO: 144617 - DNA, 17 bp, synthetic construct
  source 1..17: mol_type = other DNA
gtcttgtttgtttccaa

SEQ ID NO: 144618 - DNA, 17 bp, synthetic construct
  source 1..17: mol_type = other DNA
tcttgtttgtttccaaa

SEQ ID NO: 144619 - DNA, 17 bp, synthetic construct
  source 1..17: mol_type = other DNA
cttgtttgtttccaaag

SEQ ID NO: 144620 - DNA, 17 bp, synthetic construct
  source 1..17: mol_type = other DNA
ttgtttgtttccaaagg

SEQ ID NO: 144621 - DNA, 17 bp, synthetic construct
  source 1..17: mol_type = other DNA
tgtttgtttccaaaggg

SEQ ID NO: 144622 - DNA, 17 bp, synthetic construct
  source 1..17: mol_type = other DNA
gtttgtttccaaaggga

SEQ ID NO: 144623 - DNA, 17 bp, synthetic construct
  source 1..17: mol_type = other DNA
tttgtttccaaagggag

SEQ ID NO: 144624 - DNA, 17 bp, synthetic construct
  source 1..17: mol_type = other DNA
ttgtttccaaagggagg

SEQ ID NO: 144625 - DNA, 17 bp, synthetic construct
  source 1..17: mol_type = other DNA
tgtttccaaagggaggg

SEQ ID NO: 144626 - DNA, 17 bp, synthetic construct
  source 1..17: mol_type = other DNA
gtttccaaagggagggt

SEQ ID NO: 144627 - DNA, 17 bp, synthetic construct
  source 1..17: mol_type = other DNA
tttccaaagggagggta

SEQ ID NO: 144628 - DNA, 17 bp, synthetic construct
  source 1..17: mol_type = other DNA
ttccaaagggagggtat

SEQ ID NO: 144629 - DNA, 17 bp, synthetic construct
  source 1..17: mol_type = other DNA
tccaaagggagggtatg

SEQ ID NO: 144630 - DNA, 17 bp, synthetic construct
  source 1..17: mol_type = other DNA
ccaaagggagggtatga

SEQ ID NO: 144631 - DNA, 17 bp, synthetic construct
  source 1..17: mol_type = other DNA
caaagggagggtatgaa

SEQ ID NO: 144632 - DNA, 17 bp, synthetic construct
  source 1..17: mol_type = other DNA
aaagggagggtatgaag

SEQ ID NO: 144633 - DNA, 17 bp, synthetic construct
  source 1..17: mol_type = other DNA
aagggagggtatgaagt

SEQ ID NO: 144634 - DNA, 17 bp, synthetic construct
  source 1..17: mol_type = other DNA
agggagggtatgaagta

SEQ ID NO: 144635 - DNA, 17 bp, synthetic construct
  source 1..17: mol_type = other DNA
gggagggtatgaagtag

SEQ ID NO: 144636 - DNA, 17 bp, synthetic construct
  source 1..17: mol_type = other DNA
ggagggtatgaagtagg

SEQ ID NO: 144637 - DNA, 17 bp, synthetic construct
  source 1..17: mol_type = other DNA
gagggtatgaagtagga

SEQ ID NO: 144638 - DNA, 17 bp, synthetic construct
  source 1..17: mol_type = other DNA
agggtatgaagtaggag

SEQ ID NO: 144639 - DNA, 17 bp, synthetic construct
  source 1..17: mol_type = other DNA
gggtatgaagtaggagg

SEQ ID NO: 144640 - DNA, 17 bp, synthetic construct
  source 1..17: mol_type = other DNA
ggtatgaagtaggagga

SEQ ID NO: 144641 - DNA, 17 bp, synthetic construct
  source 1..17: mol_type = other DNA
gtatgaagtaggaggat

SEQ ID NO: 144642 - DNA, 17 bp, synthetic construct
  source 1..17: mol_type = other DNA
tatgaagtaggaggata

SEQ ID NO: 144643 - DNA, 17 bp, synthetic construct
  source 1..17: mol_type = other DNA
atgaagtaggaggataa

SEQ ID NO: 144644 - DNA, 17 bp, synthetic construct
  source 1..17: mol_type = other DNA
tgaagtaggaggataac

SEQ ID NO: 144645 - DNA, 17 bp, synthetic construct
  source 1..17: mol_type = other DNA
gaagtaggaggataact

SEQ ID NO: 144646 - DNA, 17 bp, synthetic construct
  source 1..17: mol_type = other DNA
aagtaggaggataactg

SEQ ID NO: 144647 - DNA, 17 bp, synthetic construct
  source 1..17: mol_type = other DNA
agtaggaggataactga

SEQ ID NO: 144648 - DNA, 17 bp, synthetic construct
  source 1..17: mol_type = other DNA
gtaggaggataactgag

SEQ ID NO: 144649 - DNA, 17 bp, synthetic construct
  source 1..17: mol_type = other DNA
taggaggataactgagg

SEQ ID NO: 144650 - DNA, 17 bp, synthetic construct
  source 1..17: mol_type = other DNA
aggaggataactgaggg

SEQ ID NO: 144651 - DNA, 17 bp, synthetic construct
  source 1..17: mol_type = other DNA
ggaggataactgagggg

SEQ ID NO: 144652 - DNA, 17 bp, synthetic construct
  source 1..17: mol_type = other DNA
gaggataactgaggggg

SEQ ID NO: 144653 - DNA, 17 bp, synthetic construct
  source 1..17: mol_type = other DNA
aggataactgagggggt

SEQ ID NO: 144654 - DNA, 17 bp, synthetic construct
  source 1..17: mol_type = other DNA
ggataactgagggggtc

SEQ ID NO: 144655 - DNA, 17 bp, synthetic construct
  source 1..17: mol_type = other DNA
gataactgagggggtct

SEQ ID NO: 144656 - DNA, 17 bp, synthetic construct
  source 1..17: mol_type = other DNA
ataactgagggggtctg

SEQ ID NO: 144657 - DNA, 17 bp, synthetic construct
  source 1..17: mol_type = other DNA
taactgagggggtctgg

SEQ ID NO: 144658 - DNA, 17 bp, synthetic construct
  source 1..17: mol_type = other DNA
aactgagggggtctggg

SEQ ID NO: 144659 - DNA, 17 bp, synthetic construct
  source 1..17: mol_type = other DNA
actgagggggtctgggg

SEQ ID NO: 144660 - DNA, 17 bp, synthetic construct
  source 1..17: mol_type = other DNA
ctgagggggtctggggg

SEQ ID NO: 144661 - DNA, 17 bp, synthetic construct
  source 1..17: mol_type = other DNA
tgagggggtctgggggt

SEQ ID NO: 144662 - DNA, 17 bp, synthetic construct
  source 1..17: mol_type = other DNA
gagggggtctgggggtg

SEQ ID NO: 144663 - DNA, 17 bp, synthetic construct
  source 1..17: mol_type = other DNA
agggggtctgggggtgg

SEQ ID NO: 144664 - DNA, 17 bp, synthetic construct
  source 1..17: mol_type = other DNA
gggggtctgggggtggg

SEQ ID NO: 144665 - DNA, 17 bp, synthetic construct
  source 1..17: mol_type = other DNA
ggggtctgggggtggga

SEQ ID NO: 144666 - DNA, 17 bp, synthetic construct
  source 1..17: mol_type = other DNA
gggtctgggggtgggac

SEQ ID NO: 144667 - DNA, 17 bp, synthetic construct
  source 1..17: mol_type = other DNA
ggtctgggggtgggaca

SEQ ID NO: 144668 - DNA, 17 bp, synthetic construct
  source 1..17: mol_type = other DNA
gtctgggggtgggacag

SEQ ID NO: 144669 - DNA, 17 bp, synthetic construct
  source 1..17: mol_type = other DNA
tctgggggtgggacagg

SEQ ID NO: 144670 - DNA, 17 bp, synthetic construct
  source 1..17: mol_type = other DNA
ctgggggtgggacagga

SEQ ID NO: 144671 - DNA, 17 bp, synthetic construct
  source 1..17: mol_type = other DNA
tgggggtgggacaggac

SEQ ID NO: 144672 - DNA, 17 bp, synthetic construct
  source 1..17: mol_type = other DNA
gggggtgggacaggacc

SEQ ID NO: 144673 - DNA, 17 bp, synthetic construct
  source 1..17: mol_type = other DNA
ggggtgggacaggacct

SEQ ID NO: 144674 - DNA, 17 bp, synthetic construct
  source 1..17: mol_type = other DNA
gggtgggacaggacctg

SEQ ID NO: 144675 - DNA, 17 bp, synthetic construct
  source 1..17: mol_type = other DNA
ggtgggacaggacctgc

SEQ ID NO: 144676 - DNA, 17 bp, synthetic construct
  source 1..17: mol_type = other DNA
gtgggacaggacctgca

SEQ ID NO: 144677 - DNA, 17 bp, synthetic construct
  source 1..17: mol_type = other DNA
tgggacaggacctgcag

SEQ ID NO: 144678 - DNA, 17 bp, synthetic construct
  source 1..17: mol_type = other DNA
gggacaggacctgcagg

SEQ ID NO: 144679 - DNA, 17 bp, synthetic construct
  source 1..17: mol_type = other DNA
ggacaggacctgcaggc

SEQ ID NO: 144680 - DNA, 17 bp, synthetic construct
  source 1..17: mol_type = other DNA
gacaggacctgcaggct

SEQ ID NO: 144681 - DNA, 17 bp, synthetic construct
  source 1..17: mol_type = other DNA
acaggacctgcaggctg

SEQ ID NO: 144682 - DNA, 17 bp, synthetic construct
  source 1..17: mol_type = other DNA
caggacctgcaggctgc

SEQ ID NO: 144683 - DNA, 17 bp, synthetic construct
  source 1..17: mol_type = other DNA
aggacctgcaggctgct

SEQ ID NO: 144684 - DNA, 17 bp, synthetic construct
  source 1..17: mol_type = other DNA
ggacctgcaggctgctg

SEQ ID NO: 144685 - DNA, 17 bp, synthetic construct
  source 1..17: mol_type = other DNA
gacctgcaggctgctgg

SEQ ID NO: 144686 - DNA, 17 bp, synthetic construct
  source 1..17: mol_type = other DNA
acctgcaggctgctggg

SEQ ID NO: 144687 - DNA, 17 bp, synthetic construct
  source 1..17: mol_type = other DNA
cctgcaggctgctgggg

SEQ ID NO: 144688 - DNA, 17 bp, synthetic construct
  source 1..17: mol_type = other DNA
ctgcaggctgctgggga

SEQ ID NO: 144689 - DNA, 17 bp, synthetic construct
  source 1..17: mol_type = other DNA
tgcaggctgctggggac

SEQ ID NO: 144690 - DNA, 17 bp, synthetic construct
  source 1..17: mol_type = other DNA
gcaggctgctggggaca

SEQ ID NO: 144691 - DNA, 17 bp, synthetic construct
  source 1..17: mol_type = other DNA
caggctgctggggacag

SEQ ID NO: 144692 - DNA, 17 bp, synthetic construct
  source 1..17: mol_type = other DNA
aggctgctggggacagg

SEQ ID NO: 144693 - DNA, 17 bp, synthetic construct
  source 1..17: mol_type = other DNA
ggctgctggggacaggg

SEQ ID NO: 144694 - DNA, 17 bp, synthetic construct
  source 1..17: mol_type = other DNA
gctgctggggacagggg

SEQ ID NO: 144695 - DNA, 17 bp, synthetic construct
  source 1..17: mol_type = other DNA
ctgctggggacaggggc

SEQ ID NO: 144696 - DNA, 17 bp, synthetic construct
  source 1..17: mol_type = other DNA
tgctggggacaggggct

SEQ ID NO: 144697 - DNA, 17 bp, synthetic construct
  source 1..17: mol_type = other DNA
gctggggacaggggctg

SEQ ID NO: 144698 - DNA, 17 bp, synthetic construct
  source 1..17: mol_type = other DNA
ctggggacaggggctga

SEQ ID NO: 144699 - DNA, 17 bp, synthetic construct
  source 1..17: mol_type = other DNA
tggggacaggggctgag

SEQ ID NO: 144700 - DNA, 17 bp, synthetic construct
  source 1..17: mol_type = other DNA
ggggacaggggctgagg

SEQ ID NO: 144701 - DNA, 17 bp, synthetic construct
  source 1..17: mol_type = other DNA
gggacaggggctgaggt

SEQ ID NO: 144702 - DNA, 17 bp, synthetic construct
  source 1..17: mol_type = other DNA
ggacaggggctgaggtc

SEQ ID NO: 144703 - DNA, 17 bp, synthetic construct
  source 1..17: mol_type = other DNA
gacaggggctgaggtca

SEQ ID NO: 144704 - DNA, 17 bp, synthetic construct
  source 1..17: mol_type = other DNA
acaggggctgaggtcag

SEQ ID NO: 144705 - DNA, 17 bp, synthetic construct
  source 1..17: mol_type = other DNA
caggggctgaggtcagg

SEQ ID NO: 144706 - DNA, 17 bp, synthetic construct
  source 1..17: mol_type = other DNA
aggggctgaggtcaggt

SEQ ID NO: 144707 - DNA, 17 bp, synthetic construct
  source 1..17: mol_type = other DNA
ggggctgaggtcaggtt

SEQ ID NO: 144708 - DNA, 17 bp, synthetic construct
  source 1..17: mol_type = other DNA
gggctgaggtcaggttc

SEQ ID NO: 144709 - DNA, 17 bp, synthetic construct
  source 1..17: mol_type = other DNA
ggctgaggtcaggttcc

SEQ ID NO: 144710 - DNA, 17 bp, synthetic construct
  source 1..17: mol_type = other DNA
gctgaggtcaggttcca

SEQ ID NO: 144711 - DNA, 17 bp, synthetic construct
  source 1..17: mol_type = other DNA
ctgaggtcaggttccag

SEQ ID NO: 144712 - DNA, 17 bp, synthetic construct
  source 1..17: mol_type = other DNA
tgaggtcaggttccagg

SEQ ID NO: 144713 - DNA, 17 bp, synthetic construct
  source 1..17: mol_type = other DNA
gaggtcaggttccagga

SEQ ID NO: 144714 - DNA, 17 bp, synthetic construct
  source 1..17: mol_type = other DNA
aggtcaggttccaggaa

SEQ ID NO: 144715 - DNA, 17 bp, synthetic construct
  source 1..17: mol_type = other DNA
ggtcaggttccaggaag

SEQ ID NO: 144716 - DNA, 17 bp, synthetic construct
  source 1..17: mol_type = other DNA
gtcaggttccaggaagg

SEQ ID NO: 144717 - DNA, 17 bp, synthetic construct
  source 1..17: mol_type = other DNA
tcaggttccaggaaggc

SEQ ID NO: 144718 - DNA, 17 bp, synthetic construct
  source 1..17: mol_type = other DNA
caggttccaggaaggca

SEQ ID NO: 144719 - DNA, 17 bp, synthetic construct
  source 1..17: mol_type = other DNA
aggttccaggaaggcag

SEQ ID NO: 144720 - DNA, 17 bp, synthetic construct
  source 1..17: mol_type = other DNA
ggttccaggaaggcagg

SEQ ID NO: 144721 - DNA, 17 bp, synthetic construct
  source 1..17: mol_type = other DNA
gttccaggaaggcaggg

SEQ ID NO: 144722 - DNA, 17 bp, synthetic construct
  source 1..17: mol_type = other DNA
ttccaggaaggcagggg

SEQ ID NO: 144723 - DNA, 17 bp, synthetic construct
  source 1..17: mol_type = other DNA
tccaggaaggcaggggt

SEQ ID NO: 144724 - DNA, 17 bp, synthetic construct
  source 1..17: mol_type = other DNA
ccaggaaggcaggggta

SEQ ID NO: 144725 - DNA, 17 bp, synthetic construct
  source 1..17: mol_type = other DNA
caggaaggcaggggtag

SEQ ID NO: 144726 - DNA, 17 bp, synthetic construct
  source 1..17: mol_type = other DNA
aggaaggcaggggtagg

SEQ ID NO: 144727 - DNA, 17 bp, synthetic construct
  source 1..17: mol_type = other DNA
ggaaggcaggggtaggc

SEQ ID NO: 144728 - DNA, 17 bp, synthetic construct
  source 1..17: mol_type = other DNA
gaaggcaggggtaggca

SEQ ID NO: 144729 - DNA, 17 bp, synthetic construct
  source 1..17: mol_type = other DNA
aaggcaggggtaggcag

SEQ ID NO: 144730 - DNA, 17 bp, synthetic construct
  source 1..17: mol_type = other DNA
aggcaggggtaggcaga

SEQ ID NO: 144731 - DNA, 17 bp, synthetic construct
  source 1..17: mol_type = other DNA
ggcaggggtaggcagag

SEQ ID NO: 144732 - DNA, 17 bp, synthetic construct
  source 1..17: mol_type = other DNA
gcaggggtaggcagaga

SEQ ID NO: 144733 - DNA, 17 bp, synthetic construct
  source 1..17: mol_type = other DNA
caggggtaggcagagag

SEQ ID NO: 144734 - DNA, 17 bp, synthetic construct
  source 1..17: mol_type = other DNA
aggggtaggcagagaga

SEQ ID NO: 144735 - DNA, 17 bp, synthetic construct
  source 1..17: mol_type = other DNA
ggggtaggcagagagaa

SEQ ID NO: 144736 - DNA, 17 bp, synthetic construct
  source 1..17: mol_type = other DNA
gggtaggcagagagaag

SEQ ID NO: 144737 - DNA, 17 bp, synthetic construct
  source 1..17: mol_type = other DNA
ggtaggcagagagaagg

SEQ ID NO: 144738 - DNA, 17 bp, synthetic construct
  source 1..17: mol_type = other DNA
gtaggcagagagaaggt

SEQ ID NO: 144739 - DNA, 17 bp, synthetic construct
  source 1..17: mol_type = other DNA
taggcagagagaaggtg

SEQ ID NO: 144740 - DNA, 17 bp, synthetic construct
  source 1..17: mol_type = other DNA
aggcagagagaaggtgc

SEQ ID NO: 144741 - DNA, 17 bp, synthetic construct
  source 1..17: mol_type = other DNA
ggcagagagaaggtgct

SEQ ID NO: 144742 - DNA, 17 bp, synthetic construct
  source 1..17: mol_type = other DNA
gcagagagaaggtgctg

SEQ ID NO: 144743 - DNA, 17 bp, synthetic construct
  source 1..17: mol_type = other DNA
cagagagaaggtgctgg

SEQ ID NO: 144744 - DNA, 17 bp, synthetic construct
  source 1..17: mol_type = other DNA
agagagaaggtgctgga

SEQ ID NO: 144745 - DNA, 17 bp, synthetic construct
  source 1..17: mol_type = other DNA
gagagaaggtgctggaa

SEQ ID NO: 144746 - DNA, 17 bp, synthetic construct
  source 1..17: mol_type = other DNA
agagaaggtgctggaaa

SEQ ID NO: 144747 - DNA, 17 bp, synthetic construct
  source 1..17: mol_type = other DNA
gagaaggtgctggaaac

SEQ ID NO: 144748 - DNA, 17 bp, synthetic construct
  source 1..17: mol_type = other DNA
agaaggtgctggaaact

SEQ ID NO: 144749 - DNA, 17 bp, synthetic construct
  source 1..17: mol_type = other DNA
gaaggtgctggaaactg

SEQ ID NO: 144750 - DNA, 17 bp, synthetic construct
  source 1..17: mol_type = other DNA
aaggtgctggaaactgg

SEQ ID NO: 144751 - DNA, 17 bp, synthetic construct
  source 1..17: mol_type = other DNA
aggtgctggaaactggg

SEQ ID NO: 144752 - DNA, 17 bp, synthetic construct
  source 1..17: mol_type = other DNA
ggtgctggaaactgggg

SEQ ID NO: 144753 - DNA, 17 bp, synthetic construct
  source 1..17: mol_type = other DNA
gtgctggaaactggggt

SEQ ID NO: 144754 - DNA, 17 bp, synthetic construct
  source 1..17: mol_type = other DNA
tgctggaaactggggtg

SEQ ID NO: 144755 - DNA, 17 bp, synthetic construct
  source 1..17: mol_type = other DNA
gctggaaactggggtga

SEQ ID NO: 144756 - DNA, 17 bp, synthetic construct
  source 1..17: mol_type = other DNA
ctggaaactggggtgag

SEQ ID NO: 144757 - DNA, 17 bp, synthetic construct
  source 1..17: mol_type = other DNA
tggaaactggggtgagg

SEQ ID NO: 144758 - DNA, 17 bp, synthetic construct
  source 1..17: mol_type = other DNA
ggaaactggggtgaggc

SEQ ID NO: 144759 - DNA, 17 bp, synthetic construct
  source 1..17: mol_type = other DNA
gaaactggggtgaggct

SEQ ID NO: 144760 - DNA, 17 bp, synthetic construct
  source 1..17: mol_type = other DNA
aaactggggtgaggctg

SEQ ID NO: 144761 - DNA, 17 bp, synthetic construct
  source 1..17: mol_type = other DNA
aactggggtgaggctga

SEQ ID NO: 144762 - DNA, 17 bp, synthetic construct
  source 1..17: mol_type = other DNA
actggggtgaggctgag

SEQ ID NO: 144763 - DNA, 17 bp, synthetic construct
  source 1..17: mol_type = other DNA
ctggggtgaggctgagc

SEQ ID NO: 144764 - DNA, 17 bp, synthetic construct
  source 1..17: mol_type = other DNA
tggggtgaggctgagcc

SEQ ID NO: 144765 - DNA, 17 bp, synthetic construct
  source 1..17: mol_type = other DNA
ggggtgaggctgagccg

SEQ ID NO: 144766 - DNA, 17 bp, synthetic construct
  source 1..17: mol_type = other DNA
gggtgaggctgagccgg

SEQ ID NO: 144767 - DNA, 17 bp, synthetic construct
  source 1..17: mol_type = other DNA
ggtgaggctgagccggg

SEQ ID NO: 144768 - DNA, 17 bp, synthetic construct
  source 1..17: mol_type = other DNA
gtgaggctgagccggga

SEQ ID NO: 144769 - DNA, 17 bp, synthetic construct
  source 1..17: mol_type = other DNA
tgaggctgagccgggat

SEQ ID NO: 144770 - DNA, 17 bp, synthetic construct
  source 1..17: mol_type = other DNA
gaggctgagccgggata

SEQ ID NO: 144771 - DNA, 17 bp, synthetic construct
  source 1..17: mol_type = other DNA
aggctgagccgggataa

SEQ ID NO: 144772 - DNA, 17 bp, synthetic construct
  source 1..17: mol_type = other DNA
ggctgagccgggataac

SEQ ID NO: 144773 - DNA, 17 bp, synthetic construct
  source 1..17: mol_type = other DNA
gctgagccgggataact

SEQ ID NO: 144774 - DNA, 17 bp, synthetic construct
  source 1..17: mol_type = other DNA
ctgagccgggataactg

SEQ ID NO: 144775 - DNA, 17 bp, synthetic construct
  source 1..17: mol_type = other DNA
tgagccgggataactga

SEQ ID NO: 144776 - DNA, 17 bp, synthetic construct
  source 1..17: mol_type = other DNA
gagccgggataactgag

SEQ ID NO: 144777 - DNA, 17 bp, synthetic construct
  source 1..17: mol_type = other DNA
agccgggataactgagt

SEQ ID NO: 144778 - DNA, 17 bp, synthetic construct
  source 1..17: mol_type = other DNA
gccgggataactgagtg

SEQ ID NO: 144779 - DNA, 17 bp, synthetic construct
  source 1..17: mol_type = other DNA
ccgggataactgagtgg

SEQ ID NO: 144780 - DNA, 17 bp, synthetic construct
  source 1..17: mol_type = other DNA
cgggataactgagtggg

SEQ ID NO: 144781 - DNA, 17 bp, synthetic construct
  source 1..17: mol_type = other DNA
gggataactgagtgggg

SEQ ID NO: 144782 - DNA, 17 bp, synthetic construct
  source 1..17: mol_type = other DNA
ggataactgagtggggg

SEQ ID NO: 144783 - DNA, 17 bp, synthetic construct
  source 1..17: mol_type = other DNA
gataactgagtgggggc

SEQ ID NO: 144784 - DNA, 17 bp, synthetic construct
  source 1..17: mol_type = other DNA
ataactgagtgggggca

SEQ ID NO: 144785 - DNA, 17 bp, synthetic construct
  source 1..17: mol_type = other DNA
taactgagtgggggcaa

SEQ ID NO: 144786 - DNA, 17 bp, synthetic construct
  source 1..17: mol_type = other DNA
aactgagtgggggcaac

SEQ ID NO: 144787 - DNA, 17 bp, synthetic construct
  source 1..17: mol_type = other DNA
actgagtgggggcaact

SEQ ID NO: 144788 - DNA, 17 bp, synthetic construct
  source 1..17: mol_type = other DNA
ctgagtgggggcaactt

SEQ ID NO: 144789 - DNA, 17 bp, synthetic construct
  source 1..17: mol_type = other DNA
tgagtgggggcaacttc

SEQ ID NO: 144790 - DNA, 17 bp, synthetic construct
  source 1..17: mol_type = other DNA
gagtgggggcaacttct

SEQ ID NO: 144791 - DNA, 17 bp, synthetic construct
  source 1..17: mol_type = other DNA
agtgggggcaacttctt

SEQ ID NO: 144792 - DNA, 17 bp, synthetic construct
  source 1..17: mol_type = other DNA
gtgggggcaacttcttc

SEQ ID NO: 144793 - DNA, 17 bp, synthetic construct
  source 1..17: mol_type = other DNA
tgggggcaacttcttcg

SEQ ID NO: 144794 - DNA, 17 bp, synthetic construct
  source 1..17: mol_type = other DNA
gggggcaacttcttcgg

SEQ ID NO: 144795 - DNA, 17 bp, synthetic construct
  source 1..17: mol_type = other DNA
ggggcaacttcttcggg

SEQ ID NO: 144796 - DNA, 17 bp, synthetic construct
  source 1..17: mol_type = other DNA
gggcaacttcttcgggt

SEQ ID NO: 144797 - DNA, 17 bp, synthetic construct
  source 1..17: mol_type = other DNA
ggcaacttcttcgggta

SEQ ID NO: 144798 - DNA, 17 bp, synthetic construct
  source 1..17: mol_type = other DNA
gcaacttcttcgggtat

SEQ ID NO: 144799 - DNA, 17 bp, synthetic construct
  source 1..17: mol_type = other DNA
caacttcttcgggtata

SEQ ID NO: 144800 - DNA, 17 bp, synthetic construct
  source 1..17: mol_type = other DNA
aacttcttcgggtatag

SEQ ID NO: 144801 - DNA, 17 bp, synthetic construct
  source 1..17: mol_type = other DNA
acttcttcgggtatagg

SEQ ID NO: 144802 - DNA, 17 bp, synthetic construct
  source 1..17: mol_type = other DNA
cttcttcgggtataggc

SEQ ID NO: 144803 - DNA, 17 bp, synthetic construct
  source 1..17: mol_type = other DNA
ttcttcgggtataggcc

SEQ ID NO: 144804 - DNA, 17 bp, synthetic construct
  source 1..17: mol_type = other DNA
tcttcgggtataggccc

SEQ ID NO: 144805 - DNA, 17 bp, synthetic construct
  source 1..17: mol_type = other DNA
cttcgggtataggccca

SEQ ID NO: 144806 - DNA, 17 bp, synthetic construct
  source 1..17: mol_type = other DNA
ttcgggtataggcccag

SEQ ID NO: 144807 - DNA, 17 bp, synthetic construct
  source 1..17: mol_type = other DNA
tcgggtataggcccagg

SEQ ID NO: 144808 - DNA, 17 bp, synthetic construct
  source 1..17: mol_type = other DNA
cgggtataggcccaggc

SEQ ID NO: 144809 - DNA, 17 bp, synthetic construct
  source 1..17: mol_type = other DNA
gggtataggcccaggca

SEQ ID NO: 144810 - DNA, 17 bp, synthetic construct
  source 1..17: mol_type = other DNA
ggtataggcccaggcag

SEQ ID NO: 144811 - DNA, 17 bp, synthetic construct
  source 1..17: mol_type = other DNA
gtataggcccaggcagg

SEQ ID NO: 144812 - DNA, 17 bp, synthetic construct
  source 1..17: mol_type = other DNA
tataggcccaggcaggg

SEQ ID NO: 144813 - DNA, 17 bp, synthetic construct
  source 1..17: mol_type = other DNA
ataggcccaggcaggga

SEQ ID NO: 144814 - DNA, 17 bp, synthetic construct
  source 1..17: mol_type = other DNA
taggcccaggcagggac

SEQ ID NO: 144815 - DNA, 17 bp, synthetic construct
  source 1..17: mol_type = other DNA
aggcccaggcagggaca

SEQ ID NO: 144816 - DNA, 17 bp, synthetic construct
  source 1..17: mol_type = other DNA
ggcccaggcagggacag

SEQ ID NO: 144817 - DNA, 17 bp, synthetic construct
  source 1..17: mol_type = other DNA
gcccaggcagggacagg

SEQ ID NO: 144818 - DNA, 17 bp, synthetic construct
  source 1..17: mol_type = other DNA
cccaggcagggacaggg

SEQ ID NO: 144819 - DNA, 17 bp, synthetic construct
  source 1..17: mol_type = other DNA
ccaggcagggacagggc

SEQ ID NO: 144820 - DNA, 17 bp, synthetic construct
  source 1..17: mol_type = other DNA
caggcagggacagggct

SEQ ID NO: 144821 - DNA, 17 bp, synthetic construct
  source 1..17: mol_type = other DNA
aggcagggacagggcta

SEQ ID NO: 144822 - DNA, 17 bp, synthetic construct
  source 1..17: mol_type = other DNA
ggcagggacagggctaa

SEQ ID NO: 144823 - DNA, 17 bp, synthetic construct
  source 1..17: mol_type = other DNA
gcagggacagggctaag

SEQ ID NO: 144824 - DNA, 17 bp, synthetic construct
  source 1..17: mol_type = other DNA
cagggacagggctaagg

SEQ ID NO: 144825 - DNA, 17 bp, synthetic construct
  source 1..17: mol_type = other DNA
agggacagggctaaggg

SEQ ID NO: 144826 - DNA, 17 bp, synthetic construct
  source 1..17: mol_type = other DNA
gggacagggctaagggg

SEQ ID NO: 144827 - DNA, 17 bp, synthetic construct
  source 1..17: mol_type = other DNA
ggacagggctaaggggt

SEQ ID NO: 144828 - DNA, 17 bp, synthetic construct
  source 1..17: mol_type = other DNA
gacagggctaaggggtc

SEQ ID NO: 144829 - DNA, 17 bp, synthetic construct
  source 1..17: mol_type = other DNA
acagggctaaggggtcc

SEQ ID NO: 144830 - DNA, 17 bp, synthetic construct
  source 1..17: mol_type = other DNA
cagggctaaggggtcct

SEQ ID NO: 144831 - DNA, 17 bp, synthetic construct
  source 1..17: mol_type = other DNA
agggctaaggggtcctg

SEQ ID NO: 144832 - DNA, 17 bp, synthetic construct
  source 1..17: mol_type = other DNA
gggctaaggggtcctgg

SEQ ID NO: 144833 - DNA, 17 bp, synthetic construct
  source 1..17: mol_type = other DNA
ggctaaggggtcctgga

SEQ ID NO: 144834 - DNA, 17 bp, synthetic construct
  source 1..17: mol_type = other DNA
gctaaggggtcctggac

SEQ ID NO: 144835 - DNA, 17 bp, synthetic construct
  source 1..17: mol_type = other DNA
ctaaggggtcctggacc

SEQ ID NO: 144836 - DNA, 17 bp, synthetic construct
  source 1..17: mol_type = other DNA
taaggggtcctggacca

SEQ ID NO: 144837 - DNA, 17 bp, synthetic construct
  source 1..17: mol_type = other DNA
aaggggtcctggaccac

SEQ ID NO: 144838 - DNA, 17 bp, synthetic construct
  source 1..17: mol_type = other DNA
aggggtcctggaccact

SEQ ID NO: 144839 - DNA, 17 bp, synthetic construct
  source 1..17: mol_type = other DNA
ggggtcctggaccactg

SEQ ID NO: 144840 - DNA, 17 bp, synthetic construct
  source 1..17: mol_type = other DNA
gggtcctggaccactgg

SEQ ID NO: 144841 - DNA, 17 bp, synthetic construct
  source 1..17: mol_type = other DNA
ggtcctggaccactggg

SEQ ID NO: 144842 - DNA, 17 bp, synthetic construct
  source 1..17: mol_type = other DNA
gtcctggaccactgggg

SEQ ID NO: 144843 - DNA, 17 bp, synthetic construct
  source 1..17: mol_type = other DNA
tcctggaccactggggt

SEQ ID NO: 144844 - DNA, 17 bp, synthetic construct
  source 1..17: mol_type = other DNA
cctggaccactggggtg

SEQ ID NO: 144845 - DNA, 17 bp, synthetic construct
  source 1..17: mol_type = other DNA
ctggaccactggggtgt

SEQ ID NO: 144846 - DNA, 17 bp, synthetic construct
  source 1..17: mol_type = other DNA
tggaccactggggtgta

SEQ ID NO: 144847 - DNA, 17 bp, synthetic construct
  source 1..17: mol_type = other DNA
ggaccactggggtgtag

SEQ ID NO: 144848 - DNA, 17 bp, synthetic construct
  source 1..17: mol_type = other DNA
gaccactggggtgtaga

SEQ ID NO: 144849 - DNA, 17 bp, synthetic construct
  source 1..17: mol_type = other DNA
accactggggtgtagac

SEQ ID NO: 144850 - DNA, 17 bp, synthetic construct
  source 1..17: mol_type = other DNA
ccactggggtgtagaca

SEQ ID NO: 144851 - DNA, 17 bp, synthetic construct
  source 1..17: mol_type = other DNA
cactggggtgtagacag

SEQ ID NO: 144852 - DNA, 17 bp, synthetic construct
  source 1..17: mol_type = other DNA
actggggtgtagacagg

SEQ ID NO: 144853 - DNA, 17 bp, synthetic construct
  source 1..17: mol_type = other DNA
ctggggtgtagacagga

SEQ ID NO: 144854 - DNA, 17 bp, synthetic construct
  source 1..17: mol_type = other DNA
tggggtgtagacaggag

SEQ ID NO: 144855 - DNA, 17 bp, synthetic construct
  source 1..17: mol_type = other DNA
ggggtgtagacaggagg

SEQ ID NO: 144856 - DNA, 17 bp, synthetic construct
  source 1..17: mol_type = other DNA
gggtgtagacaggaggg

SEQ ID NO: 144857 - DNA, 17 bp, synthetic construct
  source 1..17: mol_type = other DNA
ggtgtagacaggagggc

SEQ ID NO: 144858 - DNA, 17 bp, synthetic construct
  source 1..17: mol_type = other DNA
gtgtagacaggagggca

SEQ ID NO: 144859 - DNA, 17 bp, synthetic construct
  source 1..17: mol_type = other DNA
tgtagacaggagggcag

SEQ ID NO: 144860 - DNA, 17 bp, synthetic construct
  source 1..17: mol_type = other DNA
gtagacaggagggcagg

SEQ ID NO: 144861 - DNA, 17 bp, synthetic construct
  source 1..17: mol_type = other DNA
tagacaggagggcaggc

SEQ ID NO: 144862 - DNA, 17 bp, synthetic construct
  source 1..17: mol_type = other DNA
agacaggagggcaggct

SEQ ID NO: 144863 - DNA, 17 bp, synthetic construct
  source 1..17: mol_type = other DNA
gacaggagggcaggctg

SEQ ID NO: 144864 - DNA, 17 bp, synthetic construct
  source 1..17: mol_type = other DNA
acaggagggcaggctgg

SEQ ID NO: 144865 - DNA, 17 bp, synthetic construct
  source 1..17: mol_type = other DNA
caggagggcaggctggg

SEQ ID NO: 144866 - DNA, 17 bp, synthetic construct
  source 1..17: mol_type = other DNA
aggagggcaggctgggc

SEQ ID NO: 144867 - DNA, 17 bp, synthetic construct
  source 1..17: mol_type = other DNA
ggagggcaggctgggcc

SEQ ID NO: 144868 - DNA, 17 bp, synthetic construct
  source 1..17: mol_type = other DNA
gagggcaggctgggccg

SEQ ID NO: 144869 - DNA, 17 bp, synthetic construct
  source 1..17: mol_type = other DNA
agggcaggctgggccgg

SEQ ID NO: 144870 - DNA, 17 bp, synthetic construct
  source 1..17: mol_type = other DNA
gggcaggctgggccggg

SEQ ID NO: 144871 - DNA, 17 bp, synthetic construct
  source 1..17: mol_type = other DNA
ggcaggctgggccgggg

SEQ ID NO: 144872 - DNA, 17 bp, synthetic construct
  source 1..17: mol_type = other DNA
gcaggctgggccggggc

SEQ ID NO: 144873 - DNA, 17 bp, synthetic construct
  source 1..17: mol_type = other DNA
caggctgggccggggca

SEQ ID NO: 144874 - DNA, 17 bp, synthetic construct
  source 1..17: mol_type = other DNA
aggctgggccggggcat

SEQ ID NO: 144875 - DNA, 17 bp, synthetic construct
  source 1..17: mol_type = other DNA
ggctgggccggggcatg

SEQ ID NO: 144876 - DNA, 17 bp, synthetic construct
  source 1..17: mol_type = other DNA
gctgggccggggcatgt

SEQ ID NO: 144877 - DNA, 17 bp, synthetic construct
  source 1..17: mol_type = other DNA
ctgggccggggcatgtg

SEQ ID NO: 144878 - DNA, 17 bp, synthetic construct
  source 1..17: mol_type = other DNA
tgggccggggcatgtgc

SEQ ID NO: 144879 - DNA, 17 bp, synthetic construct
  source 1..17: mol_type = other DNA
gggccggggcatgtgct

SEQ ID NO: 144880 - DNA, 17 bp, synthetic construct
  source 1..17: mol_type = other DNA
ggccggggcatgtgctg

SEQ ID NO: 144881 - DNA, 17 bp, synthetic construct
  source 1..17: mol_type = other DNA
gccggggcatgtgctgg

SEQ ID NO: 144882 - DNA, 17 bp, synthetic construct
  source 1..17: mol_type = other DNA
ccggggcatgtgctgga

SEQ ID NO: 144883 - DNA, 17 bp, synthetic construct
  source 1..17: mol_type = other DNA
cggggcatgtgctggag

SEQ ID NO: 144884 - DNA, 17 bp, synthetic construct
  source 1..17: mol_type = other DNA
ggggcatgtgctggagg

SEQ ID NO: 144885 - DNA, 17 bp, synthetic construct
  source 1..17: mol_type = other DNA
gggcatgtgctggagga

SEQ ID NO: 144886 - DNA, 17 bp, synthetic construct
  source 1..17: mol_type = other DNA
ggcatgtgctggaggag

SEQ ID NO: 144887 - DNA, 17 bp, synthetic construct
  source 1..17: mol_type = other DNA
gcatgtgctggaggaga

SEQ ID NO: 144888 - DNA, 17 bp, synthetic construct
  source 1..17: mol_type = other DNA
catgtgctggaggagag

SEQ ID NO: 144889 - DNA, 17 bp, synthetic construct
  source 1..17: mol_type = other DNA
atgtgctggaggagagg

SEQ ID NO: 144890 - DNA, 17 bp, synthetic construct
  source 1..17: mol_type = other DNA
tgtgctggaggagaggg

SEQ ID NO: 144891 - DNA, 17 bp, synthetic construct
  source 1..17: mol_type = other DNA
gtgctggaggagagggt

SEQ ID NO: 144892 - DNA, 17 bp, synthetic construct
  source 1..17: mol_type = other DNA
tgctggaggagagggtt

SEQ ID NO: 144893 - DNA, 17 bp, synthetic construct
  source 1..17: mol_type = other DNA
gctggaggagagggtta

SEQ ID NO: 144894 - DNA, 17 bp, synthetic construct
  source 1..17: mol_type = other DNA
ctggaggagagggttag

SEQ ID NO: 144895 - DNA, 17 bp, synthetic construct
  source 1..17: mol_type = other DNA
tggaggagagggttagg

SEQ ID NO: 144896 - DNA, 17 bp, synthetic construct
  source 1..17: mol_type = other DNA
ggaggagagggttaggg

SEQ ID NO: 144897 - DNA, 17 bp, synthetic construct
  source 1..17: mol_type = other DNA
gaggagagggttagggc

SEQ ID NO: 144898 - DNA, 17 bp, synthetic construct
  source 1..17: mol_type = other DNA
aggagagggttagggcc

SEQ ID NO: 144899 - DNA, 17 bp, synthetic construct
  source 1..17: mol_type = other DNA
ggagagggttagggcct

SEQ ID NO: 144900 - DNA, 17 bp, synthetic construct
  source 1..17: mol_type = other DNA
gagagggttagggcctg

SEQ ID NO: 144901 - DNA, 17 bp, synthetic construct
  source 1..17: mol_type = other DNA
agagggttagggcctga

SEQ ID NO: 144902 - DNA, 17 bp, synthetic construct
  source 1..17: mol_type = other DNA
gagggttagggcctgac

SEQ ID NO: 144903 - DNA, 17 bp, synthetic construct
  source 1..17: mol_type = other DNA
agggttagggcctgacg

SEQ ID NO: 144904 - DNA, 17 bp, synthetic construct
  source 1..17: mol_type = other DNA
gggttagggcctgacgc

SEQ ID NO: 144905 - DNA, 17 bp, synthetic construct
  source 1..17: mol_type = other DNA
ggttagggcctgacgcc

SEQ ID NO: 144906 - DNA, 17 bp, synthetic construct
  source 1..17: mol_type = other DNA
gttagggcctgacgccc

SEQ ID NO: 144907 - DNA, 17 bp, synthetic construct
  source 1..17: mol_type = other DNA
ttagggcctgacgcccc

SEQ ID NO: 144908 - DNA, 17 bp, synthetic construct
  source 1..17: mol_type = other DNA
tagggcctgacgcccct

SEQ ID NO: 144909 - DNA, 17 bp, synthetic construct
  source 1..17: mol_type = other DNA
agggcctgacgcccctc

SEQ ID NO: 144910 - DNA, 17 bp, synthetic construct
  source 1..17: mol_type = other DNA
gggcctgacgcccctca

SEQ ID NO: 144911 - DNA, 17 bp, synthetic construct
  source 1..17: mol_type = other DNA
ggcctgacgcccctcat

SEQ ID NO: 144912 - DNA, 17 bp, synthetic construct
  source 1..17: mol_type = other DNA
gcctgacgcccctcatg

SEQ ID NO: 144913 - DNA, 17 bp, synthetic construct
  source 1..17: mol_type = other DNA
cctgacgcccctcatgt

SEQ ID NO: 144914 - DNA, 17 bp, synthetic construct
  source 1..17: mol_type = other DNA
ctgacgcccctcatgtc

SEQ ID NO: 144915 - DNA, 17 bp, synthetic construct
  source 1..17: mol_type = other DNA
tgacgcccctcatgtcc

SEQ ID NO: 144916 - DNA, 17 bp, synthetic construct
  source 1..17: mol_type = other DNA
gacgcccctcatgtccc

SEQ ID NO: 144917 - DNA, 17 bp, synthetic construct
  source 1..17: mol_type = other DNA
acgcccctcatgtcccc

SEQ ID NO: 144918 - DNA, 17 bp, synthetic construct
  source 1..17: mol_type = other DNA
cgcccctcatgtcccca

SEQ ID NO: 144919 - DNA, 17 bp, synthetic construct
  source 1..17: mol_type = other DNA
gcccctcatgtccccac

SEQ ID NO: 144920 - DNA, 17 bp, synthetic construct
  source 1..17: mol_type = other DNA
cccctcatgtccccaca

SEQ ID NO: 144921 - DNA, 17 bp, synthetic construct
  source 1..17: mol_type = other DNA
ccctcatgtccccacag

SEQ ID NO: 144922 - DNA, 17 bp, synthetic construct
  source 1..17: mol_type = other DNA
cctcatgtccccacagg

SEQ ID NO: 144923 - DNA, 17 bp, synthetic construct
  source 1..17: mol_type = other DNA
ctcatgtccccacaggg

SEQ ID NO: 144924 - DNA, 17 bp, synthetic construct
  source 1..17: mol_type = other DNA
tcatgtccccacagggc

SEQ ID NO: 144925 - DNA, 17 bp, synthetic construct
  source 1..17: mol_type = other DNA
catgtccccacagggct

SEQ ID NO: 144926 - DNA, 17 bp, synthetic construct
  source 1..17: mol_type = other DNA
atgtccccacagggctt

SEQ ID NO: 144927 - DNA, 17 bp, synthetic construct
  source 1..17: mol_type = other DNA
tgtccccacagggcttt

SEQ ID NO: 144928 - DNA, 17 bp, synthetic construct
  source 1..17: mol_type = other DNA
gtccccacagggctttg

SEQ ID NO: 144929 - DNA, 17 bp, synthetic construct
  source 1..17: mol_type = other DNA
tccccacagggctttga

SEQ ID NO: 144930 - DNA, 17 bp, synthetic construct
  source 1..17: mol_type = other DNA
ccccacagggctttgag

SEQ ID NO: 144931 - DNA, 17 bp, synthetic construct
  source 1..17: mol_type = other DNA
cccacagggctttgagt

SEQ ID NO: 144932 - DNA, 17 bp, synthetic construct
  source 1..17: mol_type = other DNA
ccacagggctttgagta

SEQ ID NO: 144933 - DNA, 17 bp, synthetic construct
  source 1..17: mol_type = other DNA
cacagggctttgagtac

SEQ ID NO: 144934 - DNA, 17 bp, synthetic construct
  source 1..17: mol_type = other DNA
acagggctttgagtaca

SEQ ID NO: 144935 - DNA, 17 bp, synthetic construct
  source 1..17: mol_type = other DNA
cagggctttgagtacaa

SEQ ID NO: 144936 - DNA, 17 bp, synthetic construct
  source 1..17: mol_type = other DNA
agggctttgagtacaag

SEQ ID NO: 144937 - DNA, 17 bp, synthetic construct
  source 1..17: mol_type = other DNA
gggctttgagtacaaga

SEQ ID NO: 144938 - DNA, 17 bp, synthetic construct
  source 1..17: mol_type = other DNA
ggctttgagtacaagag

SEQ ID NO: 144939 - DNA, 17 bp, synthetic construct
  source 1..17: mol_type = other DNA
gctttgagtacaagaga

SEQ ID NO: 144940 - DNA, 17 bp, synthetic construct
  source 1..17: mol_type = other DNA
ctttgagtacaagagag

SEQ ID NO: 144941 - DNA, 17 bp, synthetic construct
  source 1..17: mol_type = other DNA
tttgagtacaagagagt

SEQ ID NO: 144942 - DNA, 17 bp, synthetic construct
  source 1..17: mol_type = other DNA
ttgagtacaagagagtg

SEQ ID NO: 144943 - DNA, 17 bp, synthetic construct
  source 1..17: mol_type = other DNA
tgagtacaagagagtgg

SEQ ID NO: 144944 - DNA, 17 bp, synthetic construct
  source 1..17: mol_type = other DNA
gagtacaagagagtggc

SEQ ID NO: 144945 - DNA, 17 bp, synthetic construct
  source 1..17: mol_type = other DNA
agtacaagagagtggcc

SEQ ID NO: 144946 - DNA, 17 bp, synthetic construct
  source 1..17: mol_type = other DNA
gtacaagagagtggccg

SEQ ID NO: 144947 - DNA, 17 bp, synthetic construct
  source 1..17: mol_type = other DNA
tacaagagagtggccgg

SEQ ID NO: 144948 - DNA, 17 bp, synthetic construct
  source 1..17: mol_type = other DNA
acaagagagtggccggg

SEQ ID NO: 144949 - DNA, 17 bp, synthetic construct
  source 1..17: mol_type = other DNA
caagagagtggccgggc

SEQ ID NO: 144950 - DNA, 17 bp, synthetic construct
  source 1..17: mol_type = other DNA
aagagagtggccgggca

SEQ ID NO: 144951 - DNA, 17 bp, synthetic construct
  source 1..17: mol_type = other DNA
agagagtggccgggcag

SEQ ID NO: 144952 - DNA, 17 bp, synthetic construct
  source 1..17: mol_type = other DNA
gagagtggccgggcagt

SEQ ID NO: 144953 - DNA, 17 bp, synthetic construct
  source 1..17: mol_type = other DNA
agagtggccgggcagtg

SEQ ID NO: 144954 - DNA, 17 bp, synthetic construct
  source 1..17: mol_type = other DNA
gagtggccgggcagtgc

SEQ ID NO: 144955 - DNA, 17 bp, synthetic construct
  source 1..17: mol_type = other DNA
agtggccgggcagtgct

SEQ ID NO: 144956 - DNA, 17 bp, synthetic construct
  source 1..17: mol_type = other DNA
gtggccgggcagtgctg

SEQ ID NO: 144957 - DNA, 17 bp, synthetic construct
  source 1..17: mol_type = other DNA
tggccgggcagtgctgt

SEQ ID NO: 144958 - DNA, 17 bp, synthetic construct
  source 1..17: mol_type = other DNA
ggccgggcagtgctgtg

SEQ ID NO: 144959 - DNA, 17 bp, synthetic construct
  source 1..17: mol_type = other DNA
gccgggcagtgctgtgg

SEQ ID NO: 144960 - DNA, 17 bp, synthetic construct
  source 1..17: mol_type = other DNA
ccgggcagtgctgtggg

SEQ ID NO: 144961 - DNA, 17 bp, synthetic construct
  source 1..17: mol_type = other DNA
cgggcagtgctgtgggg

SEQ ID NO: 144962 - DNA, 17 bp, synthetic construct
  source 1..17: mol_type = other DNA
gggcagtgctgtgggga

SEQ ID NO: 144963 - DNA, 17 bp, synthetic construct
  source 1..17: mol_type = other DNA
ggcagtgctgtggggag

SEQ ID NO: 144964 - DNA, 17 bp, synthetic construct
  source 1..17: mol_type = other DNA
gcagtgctgtggggagt

SEQ ID NO: 144965 - DNA, 17 bp, synthetic construct
  source 1..17: mol_type = other DNA
cagtgctgtggggagtg

SEQ ID NO: 144966 - DNA, 17 bp, synthetic construct
  source 1..17: mol_type = other DNA
agtgctgtggggagtgc

SEQ ID NO: 144967 - DNA, 17 bp, synthetic construct
  source 1..17: mol_type = other DNA
gtgctgtggggagtgcg

SEQ ID NO: 144968 - DNA, 17 bp, synthetic construct
  source 1..17: mol_type = other DNA
tgctgtggggagtgcgt

SEQ ID NO: 144969 - DNA, 17 bp, synthetic construct
  source 1..17: mol_type = other DNA
gctgtggggagtgcgtc

SEQ ID NO: 144970 - DNA, 17 bp, synthetic construct
  source 1..17: mol_type = other DNA
ctgtggggagtgcgtcc

SEQ ID NO: 144971 - DNA, 17 bp, synthetic construct
  source 1..17: mol_type = other DNA
tgtggggagtgcgtcca

SEQ ID NO: 144972 - DNA, 17 bp, synthetic construct
  source 1..17: mol_type = other DNA
gtggggagtgcgtccag

SEQ ID NO: 144973 - DNA, 17 bp, synthetic construct
  source 1..17: mol_type = other DNA
tggggagtgcgtccaga

SEQ ID NO: 144974 - DNA, 17 bp, synthetic construct
  source 1..17: mol_type = other DNA
ggggagtgcgtccagac

SEQ ID NO: 144975 - DNA, 17 bp, synthetic construct
  source 1..17: mol_type = other DNA
gggagtgcgtccagacc

SEQ ID NO: 144976 - DNA, 17 bp, synthetic construct
  source 1..17: mol_type = other DNA
ggagtgcgtccagaccg

SEQ ID NO: 144977 - DNA, 17 bp, synthetic construct
  source 1..17: mol_type = other DNA
gagtgcgtccagaccgc

SEQ ID NO: 144978 - DNA, 17 bp, synthetic construct
  source 1..17: mol_type = other DNA
agtgcgtccagaccgcc

SEQ ID NO: 144979 - DNA, 17 bp, synthetic construct
  source 1..17: mol_type = other DNA
gtgcgtccagaccgcct

SEQ ID NO: 144980 - DNA, 17 bp, synthetic construct
  source 1..17: mol_type = other DNA
tgcgtccagaccgcctg

SEQ ID NO: 144981 - DNA, 17 bp, synthetic construct
  source 1..17: mol_type = other DNA
gcgtccagaccgcctgc

SEQ ID NO: 144982 - DNA, 17 bp, synthetic construct
  source 1..17: mol_type = other DNA
cgtccagaccgcctgcc

SEQ ID NO: 144983 - DNA, 17 bp, synthetic construct
  source 1..17: mol_type = other DNA
gtccagaccgcctgcct

SEQ ID NO: 144984 - DNA, 17 bp, synthetic construct
  source 1..17: mol_type = other DNA
tccagaccgcctgcctc

SEQ ID NO: 144985 - DNA, 17 bp, synthetic construct
  source 1..17: mol_type = other DNA
ccagaccgcctgcctca

SEQ ID NO: 144986 - DNA, 17 bp, synthetic construct
  source 1..17: mol_type = other DNA
cagaccgcctgcctcac

SEQ ID NO: 144987 - DNA, 17 bp, synthetic construct
  source 1..17: mol_type = other DNA
agaccgcctgcctcacg

SEQ ID NO: 144988 - DNA, 17 bp, synthetic construct
  source 1..17: mol_type = other DNA
gaccgcctgcctcacgc

SEQ ID NO: 144989 - DNA, 17 bp, synthetic construct
  source 1..17: mol_type = other DNA
accgcctgcctcacgcc

SEQ ID NO: 144990 - DNA, 17 bp, synthetic construct
  source 1..17: mol_type = other DNA
ccgcctgcctcacgccc

SEQ ID NO: 144991 - DNA, 17 bp, synthetic construct
  source 1..17: mol_type = other DNA
cgcctgcctcacgcccg

SEQ ID NO: 144992 - DNA, 17 bp, synthetic construct
  source 1..17: mol_type = other DNA
gcctgcctcacgcccga

SEQ ID NO: 144993 - DNA, 17 bp, synthetic construct
  source 1..17: mol_type = other DNA
cctgcctcacgcccgat

SEQ ID NO: 144994 - DNA, 17 bp, synthetic construct
  source 1..17: mol_type = other DNA
ctgcctcacgcccgatg

SEQ ID NO: 144995 - DNA, 17 bp, synthetic construct
  source 1..17: mol_type = other DNA
tgcctcacgcccgatgg

SEQ ID NO: 144996 - DNA, 17 bp, synthetic construct
  source 1..17: mol_type = other DNA
gcctcacgcccgatggc

SEQ ID NO: 144997 - DNA, 17 bp, synthetic construct
  source 1..17: mol_type = other DNA
cctcacgcccgatggcc

SEQ ID NO: 144998 - DNA, 17 bp, synthetic construct
  source 1..17: mol_type = other DNA
ctcacgcccgatggcca

SEQ ID NO: 144999 - DNA, 17 bp, synthetic construct
  source 1..17: mol_type = other DNA
tcacgcccgatggccag

SEQ ID NO: 145000 - DNA, 17 bp, synthetic construct
  source 1..17: mol_type = other DNA
cacgcccgatggccagc

SEQ ID NO: 145001 - DNA, 17 bp, synthetic construct
  source 1..17: mol_type = other DNA
acgcccgatggccagcc

SEQ ID NO: 145002 - DNA, 17 bp, synthetic construct
  source 1..17: mol_type = other DNA
cgcccgatggccagcca

SEQ ID NO: 145003 - DNA, 17 bp, synthetic construct
  source 1..17: mol_type = other DNA
gcccgatggccagccag

SEQ ID NO: 145004 - DNA, 17 bp, synthetic construct
  source 1..17: mol_type = other DNA
cccgatggccagccagt

SEQ ID NO: 145005 - DNA, 17 bp, synthetic construct
  source 1..17: mol_type = other DNA
ccgatggccagccagtc

SEQ ID NO: 145006 - DNA, 17 bp, synthetic construct
  source 1..17: mol_type = other DNA
cgatggccagccagtcc

SEQ ID NO: 145007 - DNA, 17 bp, synthetic construct
  source 1..17: mol_type = other DNA
gatggccagccagtcca

SEQ ID NO: 145008 - DNA, 17 bp, synthetic construct
  source 1..17: mol_type = other DNA
atggccagccagtccag

SEQ ID NO: 145009 - DNA, 17 bp, synthetic construct
  source 1..17: mol_type = other DNA
tggccagccagtccagg

SEQ ID NO: 145010 - DNA, 17 bp, synthetic construct
  source 1..17: mol_type = other DNA
ggccagccagtccaggt

SEQ ID NO: 145011 - DNA, 17 bp, synthetic construct
  source 1..17: mol_type = other DNA
gccagccagtccaggta

SEQ ID NO: 145012 - DNA, 17 bp, synthetic construct
  source 1..17: mol_type = other DNA
ccagccagtccaggtaa

SEQ ID NO: 145013 - DNA, 17 bp, synthetic construct
  source 1..17: mol_type = other DNA
cagccagtccaggtaac

SEQ ID NO: 145014 - DNA, 17 bp, synthetic construct
  source 1..17: mol_type = other DNA
agccagtccaggtaaca

SEQ ID NO: 145015 - DNA, 17 bp, synthetic construct
  source 1..17: mol_type = other DNA
gccagtccaggtaacag

SEQ ID NO: 145016 - DNA, 17 bp, synthetic construct
  source 1..17: mol_type = other DNA
ccagtccaggtaacagc

SEQ ID NO: 145017 - DNA, 17 bp, synthetic construct
  source 1..17: mol_type = other DNA
cagtccaggtaacagca

SEQ ID NO: 145018 - DNA, 17 bp, synthetic construct
  source 1..17: mol_type = other DNA
agtccaggtaacagcag

SEQ ID NO: 145019 - DNA, 17 bp, synthetic construct
  source 1..17: mol_type = other DNA
gtccaggtaacagcaga

SEQ ID NO: 145020 - DNA, 17 bp, synthetic construct
  source 1..17: mol_type = other DNA
tccaggtaacagcagag

SEQ ID NO: 145021 - DNA, 17 bp, synthetic construct
  source 1..17: mol_type = other DNA
ccaggtaacagcagagg

SEQ ID NO: 145022 - DNA, 17 bp, synthetic construct
  source 1..17: mol_type = other DNA
caggtaacagcagaggc

SEQ ID NO: 145023 - DNA, 17 bp, synthetic construct
  source 1..17: mol_type = other DNA
aggtaacagcagaggca

SEQ ID NO: 145024 - DNA, 17 bp, synthetic construct
  source 1..17: mol_type = other DNA
ggtaacagcagaggcat

SEQ ID NO: 145025 - DNA, 17 bp, synthetic construct
  source 1..17: mol_type = other DNA
gtaacagcagaggcatg

SEQ ID NO: 145026 - DNA, 17 bp, synthetic construct
  source 1..17: mol_type = other DNA
taacagcagaggcatgt

SEQ ID NO: 145027 - DNA, 17 bp, synthetic construct
  source 1..17: mol_type = other DNA
aacagcagaggcatgtg

SEQ ID NO: 145028 - DNA, 17 bp, synthetic construct
  source 1..17: mol_type = other DNA
acagcagaggcatgtgg

SEQ ID NO: 145029 - DNA, 17 bp, synthetic construct
  source 1..17: mol_type = other DNA
cagcagaggcatgtggg

SEQ ID NO: 145030 - DNA, 17 bp, synthetic construct
  source 1..17: mol_type = other DNA
agcagaggcatgtgggg

SEQ ID NO: 145031 - DNA, 17 bp, synthetic construct
  source 1..17: mol_type = other DNA
gcagaggcatgtggggg

SEQ ID NO: 145032 - DNA, 17 bp, synthetic construct
  source 1..17: mol_type = other DNA
cagaggcatgtgggggc

SEQ ID NO: 145033 - DNA, 17 bp, synthetic construct
  source 1..17: mol_type = other DNA
agaggcatgtgggggca

SEQ ID NO: 145034 - DNA, 17 bp, synthetic construct
  source 1..17: mol_type = other DNA
gaggcatgtgggggcag

SEQ ID NO: 145035 - DNA, 17 bp, synthetic construct
  source 1..17: mol_type = other DNA
aggcatgtgggggcagg

SEQ ID NO: 145036 - DNA, 17 bp, synthetic construct
  source 1..17: mol_type = other DNA
ggcatgtgggggcaggt

SEQ ID NO: 145037 - DNA, 17 bp, synthetic construct
  source 1..17: mol_type = other DNA
gcatgtgggggcaggtc

SEQ ID NO: 145038 - DNA, 17 bp, synthetic construct
  source 1..17: mol_type = other DNA
catgtgggggcaggtct

SEQ ID NO: 145039 - DNA, 17 bp, synthetic construct
  source 1..17: mol_type = other DNA
atgtgggggcaggtctc

SEQ ID NO: 145040 - DNA, 17 bp, synthetic construct
  source 1..17: mol_type = other DNA
tgtgggggcaggtctca

SEQ ID NO: 145041 - DNA, 17 bp, synthetic construct
  source 1..17: mol_type = other DNA
gtgggggcaggtctcag

SEQ ID NO: 145042 - DNA, 17 bp, synthetic construct
  source 1..17: mol_type = other DNA
tgggggcaggtctcagc

SEQ ID NO: 145043 - DNA, 17 bp, synthetic construct
  source 1..17: mol_type = other DNA
gggggcaggtctcagct

SEQ ID NO: 145044 - DNA, 17 bp, synthetic construct
  source 1..17: mol_type = other DNA
ggggcaggtctcagctc

SEQ ID NO: 145045 - DNA, 17 bp, synthetic construct
  source 1..17: mol_type = other DNA
gggcaggtctcagctcc

SEQ ID NO: 145046 - DNA, 17 bp, synthetic construct
  source 1..17: mol_type = other DNA
ggcaggtctcagctccc

SEQ ID NO: 145047 - DNA, 17 bp, synthetic construct
  source 1..17: mol_type = other DNA
gcaggtctcagctccct

SEQ ID NO: 145048 - DNA, 17 bp, synthetic construct
  source 1..17: mol_type = other DNA
caggtctcagctccctc

SEQ ID NO: 145049 - DNA, 17 bp, synthetic construct
  source 1..17: mol_type = other DNA
aggtctcagctccctcc

SEQ ID NO: 145050 - DNA, 17 bp, synthetic construct
  source 1..17: mol_type = other DNA
ggtctcagctccctccc

SEQ ID NO: 145051 - DNA, 17 bp, synthetic construct
  source 1..17: mol_type = other DNA
gtctcagctccctccct

SEQ ID NO: 145052 - DNA, 17 bp, synthetic construct
  source 1..17: mol_type = other DNA
tctcagctccctccctg

SEQ ID NO: 145053 - DNA, 17 bp, synthetic construct
  source 1..17: mol_type = other DNA
ctcagctccctccctgg

SEQ ID NO: 145054 - DNA, 17 bp, synthetic construct
  source 1..17: mol_type = other DNA
tcagctccctccctgga

SEQ ID NO: 145055 - DNA, 17 bp, synthetic construct
  source 1..17: mol_type = other DNA
cagctccctccctggag

SEQ ID NO: 145056 - DNA, 17 bp, synthetic construct
  source 1..17: mol_type = other DNA
agctccctccctggaga

SEQ ID NO: 145057 - DNA, 17 bp, synthetic construct
  source 1..17: mol_type = other DNA
gctccctccctggagac

SEQ ID NO: 145058 - DNA, 17 bp, synthetic construct
  source 1..17: mol_type = other DNA
ctccctccctggagacc

SEQ ID NO: 145059 - DNA, 17 bp, synthetic construct
  source 1..17: mol_type = other DNA
tccctccctggagaccc

SEQ ID NO: 145060 - DNA, 17 bp, synthetic construct
  source 1..17: mol_type = other DNA
ccctccctggagaccct

SEQ ID NO: 145061 - DNA, 17 bp, synthetic construct
  source 1..17: mol_type = other DNA
cctccctggagaccctc

SEQ ID NO: 145062 - DNA, 17 bp, synthetic construct
  source 1..17: mol_type = other DNA
ctccctggagaccctca

SEQ ID NO: 145063 - DNA, 17 bp, synthetic construct
  source 1..17: mol_type = other DNA
tccctggagaccctcac

SEQ ID NO: 145064 - DNA, 17 bp, synthetic construct
  source 1..17: mol_type = other DNA
ccctggagaccctcacc

SEQ ID NO: 145065 - DNA, 17 bp, synthetic construct
  source 1..17: mol_type = other DNA
cctggagaccctcaccc

SEQ ID NO: 145066 - DNA, 17 bp, synthetic construct
  source 1..17: mol_type = other DNA
ctggagaccctcacccc

SEQ ID NO: 145067 - DNA, 17 bp, synthetic construct
  source 1..17: mol_type = other DNA
tggagaccctcaccccc

SEQ ID NO: 145068 - DNA, 17 bp, synthetic construct
  source 1..17: mol_type = other DNA
ggagaccctcaccccca

SEQ ID NO: 145069 - DNA, 17 bp, synthetic construct
  source 1..17: mol_type = other DNA
gagaccctcacccccaa

SEQ ID NO: 145070 - DNA, 17 bp, synthetic construct
  source 1..17: mol_type = other DNA
agaccctcacccccaat

SEQ ID NO: 145071 - DNA, 17 bp, synthetic construct
  source 1..17: mol_type = other DNA
gaccctcacccccaatg

SEQ ID NO: 145072 - DNA, 17 bp, synthetic construct
  source 1..17: mol_type = other DNA
accctcacccccaatgg

SEQ ID NO: 145073 - DNA, 17 bp, synthetic construct
  source 1..17: mol_type = other DNA
ccctcacccccaatggg

SEQ ID NO: 145074 - DNA, 17 bp, synthetic construct
  source 1..17: mol_type = other DNA
cctcacccccaatgggg

SEQ ID NO: 145075 - DNA, 17 bp, synthetic construct
  source 1..17: mol_type = other DNA
ctcacccccaatggggc

SEQ ID NO: 145076 - DNA, 17 bp, synthetic construct
  source 1..17: mol_type = other DNA
tcacccccaatggggct

SEQ ID NO: 145077 - DNA, 17 bp, synthetic construct
  source 1..17: mol_type = other DNA
cacccccaatggggctc

SEQ ID NO: 145078 - DNA, 17 bp, synthetic construct
  source 1..17: mol_type = other DNA
acccccaatggggctct

SEQ ID NO: 145079 - DNA, 17 bp, synthetic construct
  source 1..17: mol_type = other DNA
cccccaatggggctctg

SEQ ID NO: 145080 - DNA, 17 bp, synthetic construct
  source 1..17: mol_type = other DNA
ccccaatggggctctgc

SEQ ID NO: 145081 - DNA, 17 bp, synthetic construct
  source 1..17: mol_type = other DNA
cccaatggggctctgca

SEQ ID NO: 145082 - DNA, 17 bp, synthetic construct
  source 1..17: mol_type = other DNA
ccaatggggctctgcac

SEQ ID NO: 145083 - DNA, 17 bp, synthetic construct
  source 1..17: mol_type = other DNA
caatggggctctgcaca

SEQ ID NO: 145084 - DNA, 17 bp, synthetic construct
  source 1..17: mol_type = other DNA
aatggggctctgcacaa

SEQ ID NO: 145085 - DNA, 17 bp, synthetic construct
  source 1..17: mol_type = other DNA
atggggctctgcacaag

SEQ ID NO: 145086 - DNA, 17 bp, synthetic construct
  source 1..17: mol_type = other DNA
tggggctctgcacaaga

SEQ ID NO: 145087 - DNA, 17 bp, synthetic construct
  source 1..17: mol_type = other DNA
ggggctctgcacaagag

SEQ ID NO: 145088 - DNA, 17 bp, synthetic construct
  source 1..17: mol_type = other DNA
gggctctgcacaagagg

SEQ ID NO: 145089 - DNA, 17 bp, synthetic construct
  source 1..17: mol_type = other DNA
ggctctgcacaagaggt

SEQ ID NO: 145090 - DNA, 17 bp, synthetic construct
  source 1..17: mol_type = other DNA
gctctgcacaagaggta

SEQ ID NO: 145091 - DNA, 17 bp, synthetic construct
  source 1..17: mol_type = other DNA
ctctgcacaagaggtaa

SEQ ID NO: 145092 - DNA, 17 bp, synthetic construct
  source 1..17: mol_type = other DNA
tctgcacaagaggtaat

SEQ ID NO: 145093 - DNA, 17 bp, synthetic construct
  source 1..17: mol_type = other DNA
ctgcacaagaggtaatc

SEQ ID NO: 145094 - DNA, 17 bp, synthetic construct
  source 1..17: mol_type = other DNA
tgcacaagaggtaatcc

SEQ ID NO: 145095 - DNA, 17 bp, synthetic construct
  source 1..17: mol_type = other DNA
gcacaagaggtaatccc

SEQ ID NO: 145096 - DNA, 17 bp, synthetic construct
  source 1..17: mol_type = other DNA
cacaagaggtaatccct

SEQ ID NO: 145097 - DNA, 17 bp, synthetic construct
  source 1..17: mol_type = other DNA
acaagaggtaatcccta

SEQ ID NO: 145098 - DNA, 17 bp, synthetic construct
  source 1..17: mol_type = other DNA
caagaggtaatccctac

SEQ ID NO: 145099 - DNA, 17 bp, synthetic construct
  source 1..17: mol_type = other DNA
aagaggtaatccctact

SEQ ID NO: 145100 - DNA, 17 bp, synthetic construct
  source 1..17: mol_type = other DNA
agaggtaatccctactc

SEQ ID NO: 145101 - DNA, 17 bp, synthetic construct
  source 1..17: mol_type = other DNA
gaggtaatccctactca

SEQ ID NO: 145102 - DNA, 17 bp, synthetic construct
  source 1..17: mol_type = other DNA
aggtaatccctactcag

SEQ ID NO: 145103 - DNA, 17 bp, synthetic construct
  source 1..17: mol_type = other DNA
ggtaatccctactcagc

SEQ ID NO: 145104 - DNA, 17 bp, synthetic construct
  source 1..17: mol_type = other DNA
gtaatccctactcagct

SEQ ID NO: 145105 - DNA, 17 bp, synthetic construct
  source 1..17: mol_type = other DNA
taatccctactcagctt

SEQ ID NO: 145106 - DNA, 17 bp, synthetic construct
  source 1..17: mol_type = other DNA
aatccctactcagcttc

SEQ ID NO: 145107 - DNA, 17 bp, synthetic construct
  source 1..17: mol_type = other DNA
atccctactcagcttcc

SEQ ID NO: 145108 - DNA, 17 bp, synthetic construct
  source 1..17: mol_type = other DNA
tccctactcagcttcca

SEQ ID NO: 145109 - DNA, 17 bp, synthetic construct
  source 1..17: mol_type = other DNA
ccctactcagcttccac

SEQ ID NO: 145110 - DNA, 17 bp, synthetic construct
  source 1..17: mol_type = other DNA
cctactcagcttccaca

SEQ ID NO: 145111 - DNA, 17 bp, synthetic construct
  source 1..17: mol_type = other DNA
ctactcagcttccacac

SEQ ID NO: 145112 - DNA, 17 bp, synthetic construct
  source 1..17: mol_type = other DNA
tactcagcttccacact

SEQ ID NO: 145113 - DNA, 17 bp, synthetic construct
  source 1..17: mol_type = other DNA
actcagcttccacactc

SEQ ID NO: 145114 - DNA, 17 bp, synthetic construct
  source 1..17: mol_type = other DNA
ctcagcttccacactca

SEQ ID NO: 145115 - DNA, 17 bp, synthetic construct
  source 1..17: mol_type = other DNA
tcagcttccacactcac

SEQ ID NO: 145116 - DNA, 17 bp, synthetic construct
  source 1..17: mol_type = other DNA
cagcttccacactcacc

SEQ ID NO: 145117 - DNA, 17 bp, synthetic construct
  source 1..17: mol_type = other DNA
agcttccacactcaccc

SEQ ID NO: 145118 - DNA, 17 bp, synthetic construct
  source 1..17: mol_type = other DNA
gcttccacactcaccct

SEQ ID NO: 145119 - DNA, 17 bp, synthetic construct
  source 1..17: mol_type = other DNA
cttccacactcaccctt

SEQ ID NO: 145120 - DNA, 17 bp, synthetic construct
  source 1..17: mol_type = other DNA
ttccacactcacccttg

SEQ ID NO: 145121 - DNA, 17 bp, synthetic construct
  source 1..17: mol_type = other DNA
tccacactcacccttgc

SEQ ID NO: 145122 - DNA, 17 bp, synthetic construct
  source 1..17: mol_type = other DNA
ccacactcacccttgca

SEQ ID NO: 145123 - DNA, 17 bp, synthetic construct
  source 1..17: mol_type = other DNA
cacactcacccttgcat

SEQ ID NO: 145124 - DNA, 17 bp, synthetic construct
  source 1..17: mol_type = other DNA
acactcacccttgcatt

SEQ ID NO: 145125 - DNA, 17 bp, synthetic construct
  source 1..17: mol_type = other DNA
cactcacccttgcattt

SEQ ID NO: 145126 - DNA, 17 bp, synthetic construct
  source 1..17: mol_type = other DNA
actcacccttgcatttc

SEQ ID NO: 145127 - DNA, 17 bp, synthetic construct
  source 1..17: mol_type = other DNA
ctcacccttgcatttca

SEQ ID NO: 145128 - DNA, 17 bp, synthetic construct
  source 1..17: mol_type = other DNA
tcacccttgcatttcag

SEQ ID NO: 145129 - DNA, 17 bp, synthetic construct
  source 1..17: mol_type = other DNA
cacccttgcatttcagc

SEQ ID NO: 145130 - DNA, 17 bp, synthetic construct
  source 1..17: mol_type = other DNA
acccttgcatttcagct

SEQ ID NO: 145131 - DNA, 17 bp, synthetic construct
  source 1..17: mol_type = other DNA
cccttgcatttcagctg

SEQ ID NO: 145132 - DNA, 17 bp, synthetic construct
  source 1..17: mol_type = other DNA
ccttgcatttcagctga

SEQ ID NO: 145133 - DNA, 17 bp, synthetic construct
  source 1..17: mol_type = other DNA
cttgcatttcagctgaa

SEQ ID NO: 145134 - DNA, 17 bp, synthetic construct
  source 1..17: mol_type = other DNA
ttgcatttcagctgaat

SEQ ID NO: 145135 - DNA, 17 bp, synthetic construct
  source 1..17: mol_type = other DNA
tgcatttcagctgaatg

SEQ ID NO: 145136 - DNA, 17 bp, synthetic construct
  source 1..17: mol_type = other DNA
gcatttcagctgaatga

SEQ ID NO: 145137 - DNA, 17 bp, synthetic construct
  source 1..17: mol_type = other DNA
catttcagctgaatgaa

SEQ ID NO: 145138 - DNA, 17 bp, synthetic construct
  source 1..17: mol_type = other DNA
atttcagctgaatgaaa

SEQ ID NO: 145139 - DNA, 17 bp, synthetic construct
  source 1..17: mol_type = other DNA
tttcagctgaatgaaac

SEQ ID NO: 145140 - DNA, 17 bp, synthetic construct
  source 1..17: mol_type = other DNA
ttcagctgaatgaaacc

SEQ ID NO: 145141 - DNA, 17 bp, synthetic construct
  source 1..17: mol_type = other DNA
tcagctgaatgaaacct

SEQ ID NO: 145142 - DNA, 17 bp, synthetic construct
  source 1..17: mol_type = other DNA
cagctgaatgaaacctg

SEQ ID NO: 145143 - DNA, 17 bp, synthetic construct
  source 1..17: mol_type = other DNA
agctgaatgaaacctgg

SEQ ID NO: 145144 - DNA, 17 bp, synthetic construct
  source 1..17: mol_type = other DNA
gctgaatgaaacctggg

SEQ ID NO: 145145 - DNA, 17 bp, synthetic construct
  source 1..17: mol_type = other DNA
ctgaatgaaacctgggt

SEQ ID NO: 145146 - DNA, 17 bp, synthetic construct
  source 1..17: mol_type = other DNA
tgaatgaaacctgggtc

SEQ ID NO: 145147 - DNA, 17 bp, synthetic construct
  source 1..17: mol_type = other DNA
gaatgaaacctgggtca

SEQ ID NO: 145148 - DNA, 17 bp, synthetic construct
  source 1..17: mol_type = other DNA
aatgaaacctgggtcaa

SEQ ID NO: 145149 - DNA, 17 bp, synthetic construct
  source 1..17: mol_type = other DNA
atgaaacctgggtcaac

SEQ ID NO: 145150 - DNA, 17 bp, synthetic construct
  source 1..17: mol_type = other DNA
tgaaacctgggtcaaca

SEQ ID NO: 145151 - DNA, 17 bp, synthetic construct
  source 1..17: mol_type = other DNA
gaaacctgggtcaacag

SEQ ID NO: 145152 - DNA, 17 bp, synthetic construct
  source 1..17: mol_type = other DNA
aaacctgggtcaacagc

SEQ ID NO: 145153 - DNA, 17 bp, synthetic construct
  source 1..17: mol_type = other DNA
aacctgggtcaacagcc

SEQ ID NO: 145154 - DNA, 17 bp, synthetic construct
  source 1..17: mol_type = other DNA
acctgggtcaacagcca

SEQ ID NO: 145155 - DNA, 17 bp, synthetic construct
  source 1..17: mol_type = other DNA
cctgggtcaacagccat

SEQ ID NO: 145156 - DNA, 17 bp, synthetic construct
  source 1..17: mol_type = other DNA
ctgggtcaacagccatg

SEQ ID NO: 145157 - DNA, 17 bp, synthetic construct
  source 1..17: mol_type = other DNA
tgggtcaacagccatgt

SEQ ID NO: 145158 - DNA, 17 bp, synthetic construct
  source 1..17: mol_type = other DNA
gggtcaacagccatgtg

SEQ ID NO: 145159 - DNA, 17 bp, synthetic construct
  source 1..17: mol_type = other DNA
ggtcaacagccatgtgg

SEQ ID NO: 145160 - DNA, 17 bp, synthetic construct
  source 1..17: mol_type = other DNA
gtcaacagccatgtgga

SEQ ID NO: 145161 - DNA, 17 bp, synthetic construct
  source 1..17: mol_type = other DNA
tcaacagccatgtggac

SEQ ID NO: 145162 - DNA, 17 bp, synthetic construct
  source 1..17: mol_type = other DNA
caacagccatgtggaca

SEQ ID NO: 145163 - DNA, 17 bp, synthetic construct
  source 1..17: mol_type = other DNA
aacagccatgtggacaa

SEQ ID NO: 145164 - DNA, 17 bp, synthetic construct
  source 1..17: mol_type = other DNA
acagccatgtggacaac

SEQ ID NO: 145165 - DNA, 17 bp, synthetic construct
  source 1..17: mol_type = other DNA
cagccatgtggacaact

SEQ ID NO: 145166 - DNA, 17 bp, synthetic construct
  source 1..17: mol_type = other DNA
agccatgtggacaactg

SEQ ID NO: 145167 - DNA, 17 bp, synthetic construct
  source 1..17: mol_type = other DNA
gccatgtggacaactgc

SEQ ID NO: 145168 - DNA, 17 bp, synthetic construct
  source 1..17: mol_type = other DNA
ccatgtggacaactgca

SEQ ID NO: 145169 - DNA, 17 bp, synthetic construct
  source 1..17: mol_type = other DNA
catgtggacaactgcac

SEQ ID NO: 145170 - DNA, 17 bp, synthetic construct
  source 1..17: mol_type = other DNA
atgtggacaactgcacc

SEQ ID NO: 145171 - DNA, 17 bp, synthetic construct
  source 1..17: mol_type = other DNA
tgtggacaactgcaccg

SEQ ID NO: 145172 - DNA, 17 bp, synthetic construct
  source 1..17: mol_type = other DNA
gtggacaactgcaccgt

SEQ ID NO: 145173 - DNA, 17 bp, synthetic construct
  source 1..17: mol_type = other DNA
tggacaactgcaccgtg

SEQ ID NO: 145174 - DNA, 17 bp, synthetic construct
  source 1..17: mol_type = other DNA
ggacaactgcaccgtgt

SEQ ID NO: 145175 - DNA, 17 bp, synthetic construct
  source 1..17: mol_type = other DNA
gacaactgcaccgtgta

SEQ ID NO: 145176 - DNA, 17 bp, synthetic construct
  source 1..17: mol_type = other DNA
acaactgcaccgtgtac

SEQ ID NO: 145177 - DNA, 17 bp, synthetic construct
  source 1..17: mol_type = other DNA
caactgcaccgtgtacc

SEQ ID NO: 145178 - DNA, 17 bp, synthetic construct
  source 1..17: mol_type = other DNA
aactgcaccgtgtacct

SEQ ID NO: 145179 - DNA, 17 bp, synthetic construct
  source 1..17: mol_type = other DNA
actgcaccgtgtacctc

SEQ ID NO: 145180 - DNA, 17 bp, synthetic construct
  source 1..17: mol_type = other DNA
ctgcaccgtgtacctct

SEQ ID NO: 145181 - DNA, 17 bp, synthetic construct
  source 1..17: mol_type = other DNA
tgcaccgtgtacctctg

SEQ ID NO: 145182 - DNA, 17 bp, synthetic construct
  source 1..17: mol_type = other DNA
gcaccgtgtacctctgt

SEQ ID NO: 145183 - DNA, 17 bp, synthetic construct
  source 1..17: mol_type = other DNA
caccgtgtacctctgtg

SEQ ID NO: 145184 - DNA, 17 bp, synthetic construct
  source 1..17: mol_type = other DNA
accgtgtacctctgtga

SEQ ID NO: 145185 - DNA, 17 bp, synthetic construct
  source 1..17: mol_type = other DNA
ccgtgtacctctgtgag

SEQ ID NO: 145186 - DNA, 17 bp, synthetic construct
  source 1..17: mol_type = other DNA
cgtgtacctctgtgagg

SEQ ID NO: 145187 - DNA, 17 bp, synthetic construct
  source 1..17: mol_type = other DNA
gtgtacctctgtgaggc

SEQ ID NO: 145188 - DNA, 17 bp, synthetic construct
  source 1..17: mol_type = other DNA
tgtacctctgtgaggct

SEQ ID NO: 145189 - DNA, 17 bp, synthetic construct
  source 1..17: mol_type = other DNA
gtacctctgtgaggctg

SEQ ID NO: 145190 - DNA, 17 bp, synthetic construct
  source 1..17: mol_type = other DNA
tacctctgtgaggctga

SEQ ID NO: 145191 - DNA, 17 bp, synthetic construct
  source 1..17: mol_type = other DNA
acctctgtgaggctgag

SEQ ID NO: 145192 - DNA, 17 bp, synthetic construct
  source 1..17: mol_type = other DNA
cctctgtgaggctgagg

SEQ ID NO: 145193 - DNA, 17 bp, synthetic construct
  source 1..17: mol_type = other DNA
ctctgtgaggctgaggg

SEQ ID NO: 145194 - DNA, 17 bp, synthetic construct
  source 1..17: mol_type = other DNA
tctgtgaggctgagggt

SEQ ID NO: 145195 - DNA, 17 bp, synthetic construct
  source 1..17: mol_type = other DNA
ctgtgaggctgagggtg

SEQ ID NO: 145196 - DNA, 17 bp, synthetic construct
  source 1..17: mol_type = other DNA
tgtgaggctgagggtgg

SEQ ID NO: 145197 - DNA, 17 bp, synthetic construct
  source 1..17: mol_type = other DNA
gtgaggctgagggtgga

SEQ ID NO: 145198 - DNA, 17 bp, synthetic construct
  source 1..17: mol_type = other DNA
tgaggctgagggtggag

SEQ ID NO: 145199 - DNA, 17 bp, synthetic construct
  source 1..17: mol_type = other DNA
gaggctgagggtggagt

SEQ ID NO: 145200 - DNA, 17 bp, synthetic construct
  source 1..17: mol_type = other DNA
aggctgagggtggagtc

SEQ ID NO: 145201 - DNA, 17 bp, synthetic construct
  source 1..17: mol_type = other DNA
ggctgagggtggagtcc

SEQ ID NO: 145202 - DNA, 17 bp, synthetic construct
  source 1..17: mol_type = other DNA
gctgagggtggagtcca

SEQ ID NO: 145203 - DNA, 17 bp, synthetic construct
  source 1..17: mol_type = other DNA
ctgagggtggagtccat

SEQ ID NO: 145204 - DNA, 17 bp, synthetic construct
  source 1..17: mol_type = other DNA
tgagggtggagtccatt

SEQ ID NO: 145205 - DNA, 17 bp, synthetic construct
  source 1..17: mol_type = other DNA
gagggtggagtccattt

SEQ ID NO: 145206 - DNA, 17 bp, synthetic construct
  source 1..17: mol_type = other DNA
agggtggagtccatttg

SEQ ID NO: 145207 - DNA, 17 bp, synthetic construct
  source 1..17: mol_type = other DNA
gggtggagtccatttgc

SEQ ID NO: 145208 - DNA, 17 bp, synthetic construct
  source 1..17: mol_type = other DNA
ggtggagtccatttgct

SEQ ID NO: 145209 - DNA, 17 bp, synthetic construct
  source 1..17: mol_type = other DNA
gtggagtccatttgctg

SEQ ID NO: 145210 - DNA, 17 bp, synthetic construct
  source 1..17: mol_type = other DNA
tggagtccatttgctga

SEQ ID NO: 145211 - DNA, 17 bp, synthetic construct
  source 1..17: mol_type = other DNA
ggagtccatttgctgac

SEQ ID NO: 145212 - DNA, 17 bp, synthetic construct
  source 1..17: mol_type = other DNA
gagtccatttgctgacc

SEQ ID NO: 145213 - DNA, 17 bp, synthetic construct
  source 1..17: mol_type = other DNA
agtccatttgctgaccc

SEQ ID NO: 145214 - DNA, 17 bp, synthetic construct
  source 1..17: mol_type = other DNA
gtccatttgctgacccc

SEQ ID NO: 145215 - DNA, 17 bp, synthetic construct
  source 1..17: mol_type = other DNA
tccatttgctgacccca

SEQ ID NO: 145216 - DNA, 17 bp, synthetic construct
  source 1..17: mol_type = other DNA
ccatttgctgaccccac

SEQ ID NO: 145217 - DNA, 17 bp, synthetic construct
  source 1..17: mol_type = other DNA
catttgctgaccccaca

SEQ ID NO: 145218 - DNA, 17 bp, synthetic construct
  source 1..17: mol_type = other DNA
atttgctgaccccacag

SEQ ID NO: 145219 - DNA, 17 bp, synthetic construct
  source 1..17: mol_type = other DNA
tttgctgaccccacagc

SEQ ID NO: 145220 - DNA, 17 bp, synthetic construct
  source 1..17: mol_type = other DNA
ttgctgaccccacagcc

SEQ ID NO: 145221 - DNA, 17 bp, synthetic construct
  source 1..17: mol_type = other DNA
tgctgaccccacagcct

SEQ ID NO: 145222 - DNA, 17 bp, synthetic construct
  source 1..17: mol_type = other DNA
gctgaccccacagcctg

SEQ ID NO: 145223 - DNA, 17 bp, synthetic construct
  source 1..17: mol_type = other DNA
ctgaccccacagcctgc

SEQ ID NO: 145224 - DNA, 17 bp, synthetic construct
  source 1..17: mol_type = other DNA
tgaccccacagcctgca

SEQ ID NO: 145225 - DNA, 17 bp, synthetic construct
  source 1..17: mol_type = other DNA
gaccccacagcctgcat

SEQ ID NO: 145226 - DNA, 17 bp, synthetic construct
  source 1..17: mol_type = other DNA
accccacagcctgcatc

SEQ ID NO: 145227 - DNA, 17 bp, synthetic construct
  source 1..17: mol_type = other DNA
ccccacagcctgcatcc

SEQ ID NO: 145228 - DNA, 17 bp, synthetic construct
  source 1..17: mol_type = other DNA
cccacagcctgcatcct

SEQ ID NO: 145229 - DNA, 17 bp, synthetic construct
  source 1..17: mol_type = other DNA
ccacagcctgcatcctg

SEQ ID NO: 145230 - DNA, 17 bp, synthetic construct
  source 1..17: mol_type = other DNA
cacagcctgcatcctgc

SEQ ID NO: 145231 - DNA, 17 bp, synthetic construct
  source 1..17: mol_type = other DNA
acagcctgcatcctgcc

SEQ ID NO: 145232 - DNA, 17 bp, synthetic construct
  source 1..17: mol_type = other DNA
cagcctgcatcctgccc

SEQ ID NO: 145233 - DNA, 17 bp, synthetic construct
  source 1..17: mol_type = other DNA
agcctgcatcctgccca

SEQ ID NO: 145234 - DNA, 17 bp, synthetic construct
  source 1..17: mol_type = other DNA
gcctgcatcctgcccag

SEQ ID NO: 145235 - DNA, 17 bp, synthetic construct
  source 1..17: mol_type = other DNA
cctgcatcctgcccaga

SEQ ID NO: 145236 - DNA, 17 bp, synthetic construct
  source 1..17: mol_type = other DNA
ctgcatcctgcccagat

SEQ ID NO: 145237 - DNA, 17 bp, synthetic construct
  source 1..17: mol_type = other DNA
tgcatcctgcccagatg

SEQ ID NO: 145238 - DNA, 17 bp, synthetic construct
  source 1..17: mol_type = other DNA
gcatcctgcccagatgt

SEQ ID NO: 145239 - DNA, 17 bp, synthetic construct
  source 1..17: mol_type = other DNA
catcctgcccagatgtg

SEQ ID NO: 145240 - DNA, 17 bp, synthetic construct
  source 1..17: mol_type = other DNA
atcctgcccagatgtgt

SEQ ID NO: 145241 - DNA, 17 bp, synthetic construct
  source 1..17: mol_type = other DNA
tcctgcccagatgtgtc

SEQ ID NO: 145242 - DNA, 17 bp, synthetic construct
  source 1..17: mol_type = other DNA
cctgcccagatgtgtcc

SEQ ID NO: 145243 - DNA, 17 bp, synthetic construct
  source 1..17: mol_type = other DNA
ctgcccagatgtgtcca

SEQ ID NO: 145244 - DNA, 17 bp, synthetic construct
  source 1..17: mol_type = other DNA
tgcccagatgtgtccag

SEQ ID NO: 145245 - DNA, 17 bp, synthetic construct
  source 1..17: mol_type = other DNA
gcccagatgtgtccagc

SEQ ID NO: 145246 - DNA, 17 bp, synthetic construct
  source 1..17: mol_type = other DNA
cccagatgtgtccagct

SEQ ID NO: 145247 - DNA, 17 bp, synthetic construct
  source 1..17: mol_type = other DNA
ccagatgtgtccagctg

SEQ ID NO: 145248 - DNA, 17 bp, synthetic construct
  source 1..17: mol_type = other DNA
cagatgtgtccagctgc

SEQ ID NO: 145249 - DNA, 17 bp, synthetic construct
  source 1..17: mol_type = other DNA
agatgtgtccagctgca

SEQ ID NO: 145250 - DNA, 17 bp, synthetic construct
  source 1..17: mol_type = other DNA
gatgtgtccagctgcag

SEQ ID NO: 145251 - DNA, 17 bp, synthetic construct
  source 1..17: mol_type = other DNA
atgtgtccagctgcagg

SEQ ID NO: 145252 - DNA, 17 bp, synthetic construct
  source 1..17: mol_type = other DNA
tgtgtccagctgcaggg

SEQ ID NO: 145253 - DNA, 17 bp, synthetic construct
  source 1..17: mol_type = other DNA
gtgtccagctgcagggt

SEQ ID NO: 145254 - DNA, 17 bp, synthetic construct
  source 1..17: mol_type = other DNA
tgtccagctgcagggtg

SEQ ID NO: 145255 - DNA, 17 bp, synthetic construct
  source 1..17: mol_type = other DNA
gtccagctgcagggtgt

SEQ ID NO: 145256 - DNA, 17 bp, synthetic construct
  source 1..17: mol_type = other DNA
tccagctgcagggtgtg

SEQ ID NO: 145257 - DNA, 17 bp, synthetic construct
  source 1..17: mol_type = other DNA
ccagctgcagggtgtgt

SEQ ID NO: 145258 - DNA, 17 bp, synthetic construct
  source 1..17: mol_type = other DNA
cagctgcagggtgtgtg

SEQ ID NO: 145259 - DNA, 17 bp, synthetic construct
  source 1..17: mol_type = other DNA
agctgcagggtgtgtgc

SEQ ID NO: 145260 - DNA, 17 bp, synthetic construct
  source 1..17: mol_type = other DNA
gctgcagggtgtgtgct

SEQ ID NO: 145261 - DNA, 17 bp, synthetic construct
  source 1..17: mol_type = other DNA
ctgcagggtgtgtgctg

SEQ ID NO: 145262 - DNA, 17 bp, synthetic construct
  source 1..17: mol_type = other DNA
tgcagggtgtgtgctgg

SEQ ID NO: 145263 - DNA, 17 bp, synthetic construct
  source 1..17: mol_type = other DNA
gcagggtgtgtgctgga

SEQ ID NO: 145264 - DNA, 17 bp, synthetic construct
  source 1..17: mol_type = other DNA
cagggtgtgtgctggag

SEQ ID NO: 145265 - DNA, 17 bp, synthetic construct
  source 1..17: mol_type = other DNA
agggtgtgtgctggagg

SEQ ID NO: 145266 - DNA, 17 bp, synthetic construct
  source 1..17: mol_type = other DNA
gggtgtgtgctggaggc

SEQ ID NO: 145267 - DNA, 17 bp, synthetic construct
  source 1..17: mol_type = other DNA
ggtgtgtgctggaggcc

SEQ ID NO: 145268 - DNA, 17 bp, synthetic construct
  source 1..17: mol_type = other DNA
gtgtgtgctggaggccc

SEQ ID NO: 145269 - DNA, 17 bp, synthetic construct
  source 1..17: mol_type = other DNA
tgtgtgctggaggccct

SEQ ID NO: 145270 - DNA, 17 bp, synthetic construct
  source 1..17: mol_type = other DNA
gtgtgctggaggccctg

SEQ ID NO: 145271 - DNA, 17 bp, synthetic construct
  source 1..17: mol_type = other DNA
tgtgctggaggccctgc

SEQ ID NO: 145272 - DNA, 17 bp, synthetic construct
  source 1..17: mol_type = other DNA
gtgctggaggccctgcc

SEQ ID NO: 145273 - DNA, 17 bp, synthetic construct
  source 1..17: mol_type = other DNA
tgctggaggccctgccc

SEQ ID NO: 145274 - DNA, 17 bp, synthetic construct
  source 1..17: mol_type = other DNA
gctggaggccctgcccc

SEQ ID NO: 145275 - DNA, 17 bp, synthetic construct
  source 1..17: mol_type = other DNA
ctggaggccctgcccct

SEQ ID NO: 145276 - DNA, 17 bp, synthetic construct
  source 1..17: mol_type = other DNA
tggaggccctgcccctg

SEQ ID NO: 145277 - DNA, 17 bp, synthetic construct
  source 1..17: mol_type = other DNA
ggaggccctgcccctgc

SEQ ID NO: 145278 - DNA, 17 bp, synthetic construct
  source 1..17: mol_type = other DNA
gaggccctgcccctgcc

SEQ ID NO: 145279 - DNA, 17 bp, synthetic construct
  source 1..17: mol_type = other DNA
aggccctgcccctgcct

SEQ ID NO: 145280 - DNA, 17 bp, synthetic construct
  source 1..17: mol_type = other DNA
ggccctgcccctgcctg

SEQ ID NO: 145281 - DNA, 17 bp, synthetic construct
  source 1..17: mol_type = other DNA
gccctgcccctgcctgg

SEQ ID NO: 145282 - DNA, 17 bp, synthetic construct
  source 1..17: mol_type = other DNA
ccctgcccctgcctggg

SEQ ID NO: 145283 - DNA, 17 bp, synthetic construct
  source 1..17: mol_type = other DNA
cctgcccctgcctggga

SEQ ID NO: 145284 - DNA, 17 bp, synthetic construct
  source 1..17: mol_type = other DNA
ctgcccctgcctgggag

SEQ ID NO: 145285 - DNA, 17 bp, synthetic construct
  source 1..17: mol_type = other DNA
tgcccctgcctgggagt

SEQ ID NO: 145286 - DNA, 17 bp, synthetic construct
  source 1..17: mol_type = other DNA
gcccctgcctgggagtc

SEQ ID NO: 145287 - DNA, 17 bp, synthetic construct
  source 1..17: mol_type = other DNA
cccctgcctgggagtcc

SEQ ID NO: 145288 - DNA, 17 bp, synthetic construct
  source 1..17: mol_type = other DNA
ccctgcctgggagtcct

SEQ ID NO: 145289 - DNA, 17 bp, synthetic construct
  source 1..17: mol_type = other DNA
cctgcctgggagtcctt

SEQ ID NO: 145290 - DNA, 17 bp, synthetic construct
  source 1..17: mol_type = other DNA
ctgcctgggagtccttg

SEQ ID NO: 145291 - DNA, 17 bp, synthetic construct
  source 1..17: mol_type = other DNA
tgcctgggagtccttgt

SEQ ID NO: 145292 - DNA, 17 bp, synthetic construct
  source 1..17: mol_type = other DNA
gcctgggagtccttgtc

SEQ ID NO: 145293 - DNA, 17 bp, synthetic construct
  source 1..17: mol_type = other DNA
cctgggagtccttgtcc

SEQ ID NO: 145294 - DNA, 17 bp, synthetic construct
  source 1..17: mol_type = other DNA
ctgggagtccttgtcca

SEQ ID NO: 145295 - DNA, 17 bp, synthetic construct
  source 1..17: mol_type = other DNA
tgggagtccttgtccat

SEQ ID NO: 145296 - DNA, 17 bp, synthetic construct
  source 1..17: mol_type = other DNA
gggagtccttgtccatc

SEQ ID NO: 145297 - DNA, 17 bp, synthetic construct
  source 1..17: mol_type = other DNA
ggagtccttgtccatca

SEQ ID NO: 145298 - DNA, 17 bp, synthetic construct
  source 1..17: mol_type = other DNA
gagtccttgtccatcag

SEQ ID NO: 145299 - DNA, 17 bp, synthetic construct
  source 1..17: mol_type = other DNA
agtccttgtccatcagg

SEQ ID NO: 145300 - DNA, 17 bp, synthetic construct
  source 1..17: mol_type = other DNA
gtccttgtccatcaggg

SEQ ID NO: 145301 - DNA, 17 bp, synthetic construct
  source 1..17: mol_type = other DNA
tccttgtccatcaggga

SEQ ID NO: 145302 - DNA, 17 bp, synthetic construct
  source 1..17: mol_type = other DNA
ccttgtccatcagggag

SEQ ID NO: 145303 - DNA, 17 bp, synthetic construct
  source 1..17: mol_type = other DNA
cttgtccatcagggagg

SEQ ID NO: 145304 - DNA, 17 bp, synthetic construct
  source 1..17: mol_type = other DNA
ttgtccatcagggaggc

SEQ ID NO: 145305 - DNA, 17 bp, synthetic construct
  source 1..17: mol_type = other DNA
tgtccatcagggaggcc

SEQ ID NO: 145306 - DNA, 17 bp, synthetic construct
  source 1..17: mol_type = other DNA
gtccatcagggaggccc

SEQ ID NO: 145307 - DNA, 17 bp, synthetic construct
  source 1..17: mol_type = other DNA
tccatcagggaggccca

SEQ ID NO: 145308 - DNA, 17 bp, synthetic construct
  source 1..17: mol_type = other DNA
ccatcagggaggcccaa

SEQ ID NO: 145309 - DNA, 17 bp, synthetic construct
  source 1..17: mol_type = other DNA
catcagggaggcccaac

SEQ ID NO: 145310 - DNA, 17 bp, synthetic construct
  source 1..17: mol_type = other DNA
atcagggaggcccaacc

SEQ ID NO: 145311 - DNA, 17 bp, synthetic construct
  source 1..17: mol_type = other DNA
tcagggaggcccaaccc

SEQ ID NO: 145312 - DNA, 17 bp, synthetic construct
  source 1..17: mol_type = other DNA
cagggaggcccaacccc

SEQ ID NO: 145313 - DNA, 17 bp, synthetic construct
  source 1..17: mol_type = other DNA
agggaggcccaacccct

SEQ ID NO: 145314 - DNA, 17 bp, synthetic construct
  source 1..17: mol_type = other DNA
gggaggcccaacccctg

SEQ ID NO: 145315 - DNA, 17 bp, synthetic construct
  source 1..17: mol_type = other DNA
ggaggcccaacccctgt

SEQ ID NO: 145316 - DNA, 17 bp, synthetic construct
  source 1..17: mol_type = other DNA
gaggcccaacccctgtc

SEQ ID NO: 145317 - DNA, 17 bp, synthetic construct
  source 1..17: mol_type = other DNA
aggcccaacccctgtct

SEQ ID NO: 145318 - DNA, 17 bp, synthetic construct
  source 1..17: mol_type = other DNA
ggcccaacccctgtctg

SEQ ID NO: 145319 - DNA, 17 bp, synthetic construct
  source 1..17: mol_type = other DNA
gcccaacccctgtctgg

SEQ ID NO: 145320 - DNA, 17 bp, synthetic construct
  source 1..17: mol_type = other DNA
cccaacccctgtctggg

SEQ ID NO: 145321 - DNA, 17 bp, synthetic construct
  source 1..17: mol_type = other DNA
ccaacccctgtctggga

SEQ ID NO: 145322 - DNA, 17 bp, synthetic construct
  source 1..17: mol_type = other DNA
caacccctgtctgggat

SEQ ID NO: 145323 - DNA, 17 bp, synthetic construct
  source 1..17: mol_type = other DNA
aacccctgtctgggatg

SEQ ID NO: 145324 - DNA, 17 bp, synthetic construct
  source 1..17: mol_type = other DNA
acccctgtctgggatgc

SEQ ID NO: 145325 - DNA, 17 bp, synthetic construct
  source 1..17: mol_type = other DNA
cccctgtctgggatgcc

SEQ ID NO: 145326 - DNA, 17 bp, synthetic construct
  source 1..17: mol_type = other DNA
ccctgtctgggatgccc

SEQ ID NO: 145327 - DNA, 17 bp, synthetic construct
  source 1..17: mol_type = other DNA
cctgtctgggatgccct

SEQ ID NO: 145328 - DNA, 17 bp, synthetic construct
  source 1..17: mol_type = other DNA
ctgtctgggatgccctg

SEQ ID NO: 145329 - DNA, 17 bp, synthetic construct
  source 1..17: mol_type = other DNA
tgtctgggatgccctgc

SEQ ID NO: 145330 - DNA, 17 bp, synthetic construct
  source 1..17: mol_type = other DNA
gtctgggatgccctgca

SEQ ID NO: 145331 - DNA, 17 bp, synthetic construct
  source 1..17: mol_type = other DNA
tctgggatgccctgcac

SEQ ID NO: 145332 - DNA, 17 bp, synthetic construct
  source 1..17: mol_type = other DNA
ctgggatgccctgcaca

SEQ ID NO: 145333 - DNA, 17 bp, synthetic construct
  source 1..17: mol_type = other DNA
tgggatgccctgcacag

SEQ ID NO: 145334 - DNA, 17 bp, synthetic construct
  source 1..17: mol_type = other DNA
gggatgccctgcacagc

SEQ ID NO: 145335 - DNA, 17 bp, synthetic construct
  source 1..17: mol_type = other DNA
ggatgccctgcacagca

SEQ ID NO: 145336 - DNA, 17 bp, synthetic construct
  source 1..17: mol_type = other DNA
gatgccctgcacagcag

SEQ ID NO: 145337 - DNA, 17 bp, synthetic construct
  source 1..17: mol_type = other DNA
atgccctgcacagcagg

SEQ ID NO: 145338 - DNA, 17 bp, synthetic construct
  source 1..17: mol_type = other DNA
tgccctgcacagcaggg

SEQ ID NO: 145339 - DNA, 17 bp, synthetic construct
  source 1..17: mol_type = other DNA
gccctgcacagcaggga

SEQ ID NO: 145340 - DNA, 17 bp, synthetic construct
  source 1..17: mol_type = other DNA
ccctgcacagcagggag

SEQ ID NO: 145341 - DNA, 17 bp, synthetic construct
  source 1..17: mol_type = other DNA
cctgcacagcagggagg

SEQ ID NO: 145342 - DNA, 17 bp, synthetic construct
  source 1..17: mol_type = other DNA
ctgcacagcagggaggc

SEQ ID NO: 145343 - DNA, 17 bp, synthetic construct
  source 1..17: mol_type = other DNA
tgcacagcagggaggcc

SEQ ID NO: 145344 - DNA, 17 bp, synthetic construct
  source 1..17: mol_type = other DNA
gcacagcagggaggccc

SEQ ID NO: 145345 - DNA, 17 bp, synthetic construct
  source 1..17: mol_type = other DNA
cacagcagggaggcccc

SEQ ID NO: 145346 - DNA, 17 bp, synthetic construct
  source 1..17: mol_type = other DNA
acagcagggaggcccca

SEQ ID NO: 145347 - DNA, 17 bp, synthetic construct
  source 1..17: mol_type = other DNA
cagcagggaggccccac

SEQ ID NO: 145348 - DNA, 17 bp, synthetic construct
  source 1..17: mol_type = other DNA
agcagggaggccccacc

SEQ ID NO: 145349 - DNA, 17 bp, synthetic construct
  source 1..17: mol_type = other DNA
gcagggaggccccaccc

SEQ ID NO: 145350 - DNA, 17 bp, synthetic construct
  source 1..17: mol_type = other DNA
cagggaggccccacccc

SEQ ID NO: 145351 - DNA, 17 bp, synthetic construct
  source 1..17: mol_type = other DNA
agggaggccccacccct

SEQ ID NO: 145352 - DNA, 17 bp, synthetic construct
  source 1..17: mol_type = other DNA
gggaggccccacccctg

SEQ ID NO: 145353 - DNA, 17 bp, synthetic construct
  source 1..17: mol_type = other DNA
ggaggccccacccctgc

SEQ ID NO: 145354 - DNA, 17 bp, synthetic construct
  source 1..17: mol_type = other DNA
gaggccccacccctgct

SEQ ID NO: 145355 - DNA, 17 bp, synthetic construct
  source 1..17: mol_type = other DNA
aggccccacccctgctg

SEQ ID NO: 145356 - DNA, 17 bp, synthetic construct
  source 1..17: mol_type = other DNA
ggccccacccctgctgg

SEQ ID NO: 145357 - DNA, 17 bp, synthetic construct
  source 1..17: mol_type = other DNA
gccccacccctgctggg

SEQ ID NO: 145358 - DNA, 17 bp, synthetic construct
  source 1..17: mol_type = other DNA
ccccacccctgctgggg

SEQ ID NO: 145359 - DNA, 17 bp, synthetic construct
  source 1..17: mol_type = other DNA
cccacccctgctgggga

SEQ ID NO: 145360 - DNA, 17 bp, synthetic construct
  source 1..17: mol_type = other DNA
ccacccctgctggggag

SEQ ID NO: 145361 - DNA, 17 bp, synthetic construct
  source 1..17: mol_type = other DNA
cacccctgctggggagg

SEQ ID NO: 145362 - DNA, 17 bp, synthetic construct
  source 1..17: mol_type = other DNA
acccctgctggggaggc

SEQ ID NO: 145363 - DNA, 17 bp, synthetic construct
  source 1..17: mol_type = other DNA
cccctgctggggaggcc

SEQ ID NO: 145364 - DNA, 17 bp, synthetic construct
  source 1..17: mol_type = other DNA
ccctgctggggaggccc

SEQ ID NO: 145365 - DNA, 17 bp, synthetic construct
  source 1..17: mol_type = other DNA
cctgctggggaggcccc

SEQ ID NO: 145366 - DNA, 17 bp, synthetic construct
  source 1..17: mol_type = other DNA
ctgctggggaggcccca

SEQ ID NO: 145367 - DNA, 17 bp, synthetic construct
  source 1..17: mol_type = other DNA
tgctggggaggccccac

SEQ ID NO: 145368 - DNA, 17 bp, synthetic construct
  source 1..17: mol_type = other DNA
gctggggaggccccacc

SEQ ID NO: 145369 - DNA, 17 bp, synthetic construct
  source 1..17: mol_type = other DNA
ctggggaggccccaccc

SEQ ID NO: 145370 - DNA, 17 bp, synthetic construct
  source 1..17: mol_type = other DNA
tggggaggccccacccc

SEQ ID NO: 145371 - DNA, 17 bp, synthetic construct
  source 1..17: mol_type = other DNA
ggggaggccccacccct

SEQ ID NO: 145372 - DNA, 17 bp, synthetic construct
  source 1..17: mol_type = other DNA
gggaggccccacccctg

SEQ ID NO: 145373 - DNA, 17 bp, synthetic construct
  source 1..17: mol_type = other DNA
ggaggccccacccctgc

SEQ ID NO: 145374 - DNA, 17 bp, synthetic construct
  source 1..17: mol_type = other DNA
gaggccccacccctgcc

SEQ ID NO: 145375 - DNA, 17 bp, synthetic construct
  source 1..17: mol_type = other DNA
aggccccacccctgcct

SEQ ID NO: 145376 - DNA, 17 bp, synthetic construct
  source 1..17: mol_type = other DNA
ggccccacccctgcctg

SEQ ID NO: 145377 - DNA, 17 bp, synthetic construct
  source 1..17: mol_type = other DNA
gccccacccctgcctgg

SEQ ID NO: 145378 - DNA, 17 bp, synthetic construct
  source 1..17: mol_type = other DNA
ccccacccctgcctggg

SEQ ID NO: 145379 - DNA, 17 bp, synthetic construct
  source 1..17: mol_type = other DNA
cccacccctgcctggga

SEQ ID NO: 145380 - DNA, 17 bp, synthetic construct
  source 1..17: mol_type = other DNA
ccacccctgcctgggaa

SEQ ID NO: 145381 - DNA, 17 bp, synthetic construct
  source 1..17: mol_type = other DNA
cacccctgcctgggaag

SEQ ID NO: 145382 - DNA, 17 bp, synthetic construct
  source 1..17: mol_type = other DNA
acccctgcctgggaagc

SEQ ID NO: 145383 - DNA, 17 bp, synthetic construct
  source 1..17: mol_type = other DNA
cccctgcctgggaagcc

SEQ ID NO: 145384 - DNA, 17 bp, synthetic construct
  source 1..17: mol_type = other DNA
ccctgcctgggaagccc

SEQ ID NO: 145385 - DNA, 17 bp, synthetic construct
  source 1..17: mol_type = other DNA
cctgcctgggaagcccc

SEQ ID NO: 145386 - DNA, 17 bp, synthetic construct
  source 1..17: mol_type = other DNA
ctgcctgggaagcccca

SEQ ID NO: 145387 - DNA, 17 bp, synthetic construct
  source 1..17: mol_type = other DNA
tgcctgggaagccccac

SEQ ID NO: 145388 - DNA, 17 bp, synthetic construct
  source 1..17: mol_type = other DNA
gcctgggaagccccacc

SEQ ID NO: 145389 - DNA, 17 bp, synthetic construct
  source 1..17: mol_type = other DNA
cctgggaagccccaccc

SEQ ID NO: 145390 - DNA, 17 bp, synthetic construct
  source 1..17: mol_type = other DNA
ctgggaagccccacccc

SEQ ID NO: 145391 - DNA, 17 bp, synthetic construct
  source 1..17: mol_type = other DNA
tgggaagccccacccct

SEQ ID NO: 145392 - DNA, 17 bp, synthetic construct
  source 1..17: mol_type = other DNA
gggaagccccacccctg

SEQ ID NO: 145393 - DNA, 17 bp, synthetic construct
  source 1..17: mol_type = other DNA
ggaagccccacccctgc

SEQ ID NO: 145394 - DNA, 17 bp, synthetic construct
  source 1..17: mol_type = other DNA
gaagccccacccctgcc

SEQ ID NO: 145395 - DNA, 17 bp, synthetic construct
  source 1..17: mol_type = other DNA
aagccccacccctgcct

SEQ ID NO: 145396 - DNA, 17 bp, synthetic construct
  source 1..17: mol_type = other DNA
agccccacccctgcctg

SEQ ID NO: 145397 - DNA, 17 bp, synthetic construct
  source 1..17: mol_type = other DNA
gccccacccctgcctgg

SEQ ID NO: 145398 - DNA, 17 bp, synthetic construct
  source 1..17: mol_type = other DNA
ccccacccctgcctggg

SEQ ID NO: 145399 - DNA, 17 bp, synthetic construct
  source 1..17: mol_type = other DNA
cccacccctgcctggga

SEQ ID NO: 145400 - DNA, 17 bp, synthetic construct
  source 1..17: mol_type = other DNA
ccacccctgcctgggag

SEQ ID NO: 145401 - DNA, 17 bp, synthetic construct
  source 1..17: mol_type = other DNA
cacccctgcctgggagg

SEQ ID NO: 145402 - DNA, 17 bp, synthetic construct
  source 1..17: mol_type = other DNA
acccctgcctgggaggc

SEQ ID NO: 145403 - DNA, 17 bp, synthetic construct
  source 1..17: mol_type = other DNA
cccctgcctgggaggcc

SEQ ID NO: 145404 - DNA, 17 bp, synthetic construct
  source 1..17: mol_type = other DNA
ccctgcctgggaggccc

SEQ ID NO: 145405 - DNA, 17 bp, synthetic construct
  source 1..17: mol_type = other DNA
cctgcctgggaggcccc

SEQ ID NO: 145406 - DNA, 17 bp, synthetic construct
  source 1..17: mol_type = other DNA
ctgcctgggaggccccg

SEQ ID NO: 145407 - DNA, 17 bp, synthetic construct
  source 1..17: mol_type = other DNA
tgcctgggaggccccgc

SEQ ID NO: 145408 - DNA, 17 bp, synthetic construct
  source 1..17: mol_type = other DNA
gcctgggaggccccgcc

SEQ ID NO: 145409 - DNA, 17 bp, synthetic construct
  source 1..17: mol_type = other DNA
cctgggaggccccgccc

SEQ ID NO: 145410 - DNA, 17 bp, synthetic construct
  source 1..17: mol_type = other DNA
ctgggaggccccgcccc

SEQ ID NO: 145411 - DNA, 17 bp, synthetic construct
  source 1..17: mol_type = other DNA
tgggaggccccgcccct

SEQ ID NO: 145412 - DNA, 17 bp, synthetic construct
  source 1..17: mol_type = other DNA
gggaggccccgcccctg

SEQ ID NO: 145413 - DNA, 17 bp, synthetic construct
  source 1..17: mol_type = other DNA
ggaggccccgcccctgc

SEQ ID NO: 145414 - DNA, 17 bp, synthetic construct
  source 1..17: mol_type = other DNA
gaggccccgcccctgcc

SEQ ID NO: 145415 - DNA, 17 bp, synthetic construct
  source 1..17: mol_type = other DNA
aggccccgcccctgccc

SEQ ID NO: 145416 - DNA, 17 bp, synthetic construct
  source 1..17: mol_type = other DNA
ggccccgcccctgcccg

SEQ ID NO: 145417 - DNA, 17 bp, synthetic construct
  source 1..17: mol_type = other DNA
gccccgcccctgcccgg

SEQ ID NO: 145418 - DNA, 17 bp, synthetic construct
  source 1..17: mol_type = other DNA
ccccgcccctgcccggg

SEQ ID NO: 145419 - DNA, 17 bp, synthetic construct
  source 1..17: mol_type = other DNA
cccgcccctgcccggga

SEQ ID NO: 145420 - DNA, 17 bp, synthetic construct
  source 1..17: mol_type = other DNA
ccgcccctgcccgggag

SEQ ID NO: 145421 - DNA, 17 bp, synthetic construct
  source 1..17: mol_type = other DNA
cgcccctgcccgggagg

SEQ ID NO: 145422 - DNA, 17 bp, synthetic construct
  source 1..17: mol_type = other DNA
gcccctgcccgggaggc

SEQ ID NO: 145423 - DNA, 17 bp, synthetic construct
  source 1..17: mol_type = other DNA
cccctgcccgggaggcc

SEQ ID NO: 145424 - DNA, 17 bp, synthetic construct
  source 1..17: mol_type = other DNA
ccctgcccgggaggcca

SEQ ID NO: 145425 - DNA, 17 bp, synthetic construct
  source 1..17: mol_type = other DNA
cctgcccgggaggccat

SEQ ID NO: 145426 - DNA, 17 bp, synthetic construct
  source 1..17: mol_type = other DNA
ctgcccgggaggccatg

SEQ ID NO: 145427 - DNA, 17 bp, synthetic construct
  source 1..17: mol_type = other DNA
tgcccgggaggccatgc

SEQ ID NO: 145428 - DNA, 17 bp, synthetic construct
  source 1..17: mol_type = other DNA
gcccgggaggccatgcc

SEQ ID NO: 145429 - DNA, 17 bp, synthetic construct
  source 1..17: mol_type = other DNA
cccgggaggccatgccc

SEQ ID NO: 145430 - DNA, 17 bp, synthetic construct
  source 1..17: mol_type = other DNA
ccgggaggccatgcccc

SEQ ID NO: 145431 - DNA, 17 bp, synthetic construct
  source 1..17: mol_type = other DNA
cgggaggccatgcccct

SEQ ID NO: 145432 - DNA, 17 bp, synthetic construct
  source 1..17: mol_type = other DNA
gggaggccatgcccctg

SEQ ID NO: 145433 - DNA, 17 bp, synthetic construct
  source 1..17: mol_type = other DNA
ggaggccatgcccctgc

SEQ ID NO: 145434 - DNA, 17 bp, synthetic construct
  source 1..17: mol_type = other DNA
gaggccatgcccctgcc

SEQ ID NO: 145435 - DNA, 17 bp, synthetic construct
  source 1..17: mol_type = other DNA
aggccatgcccctgccc

SEQ ID NO: 145436 - DNA, 17 bp, synthetic construct
  source 1..17: mol_type = other DNA
ggccatgcccctgcccg

SEQ ID NO: 145437 - DNA, 17 bp, synthetic construct
  source 1..17: mol_type = other DNA
gccatgcccctgcccgg

SEQ ID NO: 145438 - DNA, 17 bp, synthetic construct
  source 1..17: mol_type = other DNA
ccatgcccctgcccggg

SEQ ID NO: 145439 - DNA, 17 bp, synthetic construct
  source 1..17: mol_type = other DNA
catgcccctgcccgggt

SEQ ID NO: 145440 - DNA, 17 bp, synthetic construct
  source 1..17: mol_type = other DNA
atgcccctgcccgggtg

SEQ ID NO: 145441 - DNA, 17 bp, synthetic construct
  source 1..17: mol_type = other DNA
tgcccctgcccgggtgg

SEQ ID NO: 145442 - DNA, 17 bp, synthetic construct
  source 1..17: mol_type = other DNA
gcccctgcccgggtggg

SEQ ID NO: 145443 - DNA, 17 bp, synthetic construct
  source 1..17: mol_type = other DNA
cccctgcccgggtgggc

SEQ ID NO: 145444 - DNA, 17 bp, synthetic construct
  source 1..17: mol_type = other DNA
ccctgcccgggtgggcc

SEQ ID NO: 145445 - DNA, 17 bp, synthetic construct
  source 1..17: mol_type = other DNA
cctgcccgggtgggccc

SEQ ID NO: 145446 - DNA, 17 bp, synthetic construct
  source 1..17: mol_type = other DNA
ctgcccgggtgggcccc

SEQ ID NO: 145447 - DNA, 17 bp, synthetic construct
  source 1..17: mol_type = other DNA
tgcccgggtgggcccct

SEQ ID NO: 145448 - DNA, 17 bp, synthetic construct
  source 1..17: mol_type = other DNA
gcccgggtgggcccctc

SEQ ID NO: 145449 - DNA, 17 bp, synthetic construct
  source 1..17: mol_type = other DNA
cccgggtgggcccctcc

SEQ ID NO: 145450 - DNA, 17 bp, synthetic construct
  source 1..17: mol_type = other DNA
ccgggtgggcccctccc

SEQ ID NO: 145451 - DNA, 17 bp, synthetic construct
  source 1..17: mol_type = other DNA
cgggtgggcccctcccc

SEQ ID NO: 145452 - DNA, 17 bp, synthetic construct
  source 1..17: mol_type = other DNA
gggtgggcccctcccca

SEQ ID NO: 145453 - DNA, 17 bp, synthetic construct
  source 1..17: mol_type = other DNA
ggtgggcccctccccag

SEQ ID NO: 145454 - DNA, 17 bp, synthetic construct
  source 1..17: mol_type = other DNA
gtgggcccctccccagg

SEQ ID NO: 145455 - DNA, 17 bp, synthetic construct
  source 1..17: mol_type = other DNA
tgggcccctccccagga

SEQ ID NO: 145456 - DNA, 17 bp, synthetic construct
  source 1..17: mol_type = other DNA
gggcccctccccaggag

SEQ ID NO: 145457 - DNA, 17 bp, synthetic construct
  source 1..17: mol_type = other DNA
ggcccctccccaggagg

SEQ ID NO: 145458 - DNA, 17 bp, synthetic construct
  source 1..17: mol_type = other DNA
gcccctccccaggaggc

SEQ ID NO: 145459 - DNA, 17 bp, synthetic construct
  source 1..17: mol_type = other DNA
cccctccccaggaggcc

SEQ ID NO: 145460 - DNA, 17 bp, synthetic construct
  source 1..17: mol_type = other DNA
ccctccccaggaggccg

SEQ ID NO: 145461 - DNA, 17 bp, synthetic construct
  source 1..17: mol_type = other DNA
cctccccaggaggccgc

SEQ ID NO: 145462 - DNA, 17 bp, synthetic construct
  source 1..17: mol_type = other DNA
ctccccaggaggccgca

SEQ ID NO: 145463 - DNA, 17 bp, synthetic construct
  source 1..17: mol_type = other DNA
tccccaggaggccgcac

SEQ ID NO: 145464 - DNA, 17 bp, synthetic construct
  source 1..17: mol_type = other DNA
ccccaggaggccgcacc

SEQ ID NO: 145465 - DNA, 17 bp, synthetic construct
  source 1..17: mol_type = other DNA
cccaggaggccgcaccc

SEQ ID NO: 145466 - DNA, 17 bp, synthetic construct
  source 1..17: mol_type = other DNA
ccaggaggccgcaccca

SEQ ID NO: 145467 - DNA, 17 bp, synthetic construct
  source 1..17: mol_type = other DNA
caggaggccgcacccac

SEQ ID NO: 145468 - DNA, 17 bp, synthetic construct
  source 1..17: mol_type = other DNA
aggaggccgcacccacc

SEQ ID NO: 145469 - DNA, 17 bp, synthetic construct
  source 1..17: mol_type = other DNA
ggaggccgcacccacca

SEQ ID NO: 145470 - DNA, 17 bp, synthetic construct
  source 1..17: mol_type = other DNA
gaggccgcacccaccag

SEQ ID NO: 145471 - DNA, 17 bp, synthetic construct
  source 1..17: mol_type = other DNA
aggccgcacccaccagg

SEQ ID NO: 145472 - DNA, 17 bp, synthetic construct
  source 1..17: mol_type = other DNA
ggccgcacccaccaggg

SEQ ID NO: 145473 - DNA, 17 bp, synthetic construct
  source 1..17: mol_type = other DNA
gccgcacccaccaggga

SEQ ID NO: 145474 - DNA, 17 bp, synthetic construct
  source 1..17: mol_type = other DNA
ccgcacccaccagggag

SEQ ID NO: 145475 - DNA, 17 bp, synthetic construct
  source 1..17: mol_type = other DNA
cgcacccaccagggagg

SEQ ID NO: 145476 - DNA, 17 bp, synthetic construct
  source 1..17: mol_type = other DNA
gcacccaccagggaggc

SEQ ID NO: 145477 - DNA, 17 bp, synthetic construct
  source 1..17: mol_type = other DNA
cacccaccagggaggcc

SEQ ID NO: 145478 - DNA, 17 bp, synthetic construct
  source 1..17: mol_type = other DNA
acccaccagggaggccc

SEQ ID NO: 145479 - DNA, 17 bp, synthetic construct
  source 1..17: mol_type = other DNA
cccaccagggaggcccc

SEQ ID NO: 145480 - DNA, 17 bp, synthetic construct
  source 1..17: mol_type = other DNA
ccaccagggaggccccg

SEQ ID NO: 145481 - DNA, 17 bp, synthetic construct
  source 1..17: mol_type = other DNA
caccagggaggccccgc

SEQ ID NO: 145482 - DNA, 17 bp, synthetic construct
  source 1..17: mol_type = other DNA
accagggaggccccgcc

SEQ ID NO: 145483 - DNA, 17 bp, synthetic construct
  source 1..17: mol_type = other DNA
ccagggaggccccgccc

SEQ ID NO: 145484 - DNA, 17 bp, synthetic construct
  source 1..17: mol_type = other DNA
cagggaggccccgccca

SEQ ID NO: 145485 - DNA, 17 bp, synthetic construct
  source 1..17: mol_type = other DNA
agggaggccccgcccac

SEQ ID NO: 145486 - DNA, 17 bp, synthetic construct
  source 1..17: mol_type = other DNA
gggaggccccgcccaca

SEQ ID NO: 145487 - DNA, 17 bp, synthetic construct
  source 1..17: mol_type = other DNA
ggaggccccgcccacag

SEQ ID NO: 145488 - DNA, 17 bp, synthetic construct
  source 1..17: mol_type = other DNA
gaggccccgcccacagc

SEQ ID NO: 145489 - DNA, 17 bp, synthetic construct
  source 1..17: mol_type = other DNA
aggccccgcccacagcc

SEQ ID NO: 145490 - DNA, 17 bp, synthetic construct
  source 1..17: mol_type = other DNA
ggccccgcccacagccc

SEQ ID NO: 145491 - DNA, 17 bp, synthetic construct
  source 1..17: mol_type = other DNA
gccccgcccacagccct

SEQ ID NO: 145492 - DNA, 17 bp, synthetic construct
  source 1..17: mol_type = other DNA
ccccgcccacagccctg

SEQ ID NO: 145493 - DNA, 17 bp, synthetic construct
  source 1..17: mol_type = other DNA
cccgcccacagccctgc

SEQ ID NO: 145494 - DNA, 17 bp, synthetic construct
  source 1..17: mol_type = other DNA
ccgcccacagccctgcc

SEQ ID NO: 145495 - DNA, 17 bp, synthetic construct
  source 1..17: mol_type = other DNA
cgcccacagccctgccc

SEQ ID NO: 145496 - DNA, 17 bp, synthetic construct
  source 1..17: mol_type = other DNA
gcccacagccctgcccc

SEQ ID NO: 145497 - DNA, 17 bp, synthetic construct
  source 1..17: mol_type = other DNA
cccacagccctgccccc

SEQ ID NO: 145498 - DNA, 17 bp, synthetic construct
  source 1..17: mol_type = other DNA
ccacagccctgccccct

SEQ ID NO: 145499 - DNA, 17 bp, synthetic construct
  source 1..17: mol_type = other DNA
cacagccctgccccctg

SEQ ID NO: 145500 - DNA, 17 bp, synthetic construct
  source 1..17: mol_type = other DNA
acagccctgccccctgt

SEQ ID NO: 145501 - DNA, 17 bp, synthetic construct
  source 1..17: mol_type = other DNA
cagccctgccccctgtc

SEQ ID NO: 145502 - DNA, 17 bp, synthetic construct
  source 1..17: mol_type = other DNA
agccctgccccctgtct

SEQ ID NO: 145503 - DNA, 17 bp, synthetic construct
  source 1..17: mol_type = other DNA
gccctgccccctgtctt

SEQ ID NO: 145504 - DNA, 17 bp, synthetic construct
  source 1..17: mol_type = other DNA
ccctgccccctgtcttt

SEQ ID NO: 145505 - DNA, 17 bp, synthetic construct
  source 1..17: mol_type = other DNA
cctgccccctgtctttg

SEQ ID NO: 145506 - DNA, 17 bp, synthetic construct
  source 1..17: mol_type = other DNA
ctgccccctgtctttgg

SEQ ID NO: 145507 - DNA, 17 bp, synthetic construct
  source 1..17: mol_type = other DNA
tgccccctgtctttggc

SEQ ID NO: 145508 - DNA, 17 bp, synthetic construct
  source 1..17: mol_type = other DNA
gccccctgtctttggcc

SEQ ID NO: 145509 - DNA, 17 bp, synthetic construct
  source 1..17: mol_type = other DNA
ccccctgtctttggccc

SEQ ID NO: 145510 - DNA, 17 bp, synthetic construct
  source 1..17: mol_type = other DNA
cccctgtctttggcccc

SEQ ID NO: 145511 - DNA, 17 bp, synthetic construct
  source 1..17: mol_type = other DNA
ccctgtctttggccccc

SEQ ID NO: 145512 - DNA, 17 bp, synthetic construct
  source 1..17: mol_type = other DNA
cctgtctttggccccca

SEQ ID NO: 145513 - DNA, 17 bp, synthetic construct
  source 1..17: mol_type = other DNA
ctgtctttggcccccac

SEQ ID NO: 145514 - DNA, 17 bp, synthetic construct
  source 1..17: mol_type = other DNA
tgtctttggcccccacc

SEQ ID NO: 145515 - DNA, 17 bp, synthetic construct
  source 1..17: mol_type = other DNA
gtctttggcccccacca

SEQ ID NO: 145516 - DNA, 17 bp, synthetic construct
  source 1..17: mol_type = other DNA
tctttggcccccaccag

SEQ ID NO: 145517 - DNA, 17 bp, synthetic construct
  source 1..17: mol_type = other DNA
ctttggcccccaccagg

SEQ ID NO: 145518 - DNA, 17 bp, synthetic construct
  source 1..17: mol_type = other DNA
tttggcccccaccaggg

SEQ ID NO: 145519 - DNA, 17 bp, synthetic construct
  source 1..17: mol_type = other DNA
ttggcccccaccagggg

SEQ ID NO: 145520 - DNA, 17 bp, synthetic construct
  source 1..17: mol_type = other DNA
tggcccccaccagggga

SEQ ID NO: 145521 - DNA, 17 bp, synthetic construct
  source 1..17: mol_type = other DNA
ggcccccaccaggggag

SEQ ID NO: 145522 - DNA, 17 bp, synthetic construct
  source 1..17: mol_type = other DNA
gcccccaccaggggagc

SEQ ID NO: 145523 - DNA, 17 bp, synthetic construct
  source 1..17: mol_type = other DNA
cccccaccaggggagcc

SEQ ID NO: 145524 - DNA, 17 bp, synthetic construct
  source 1..17: mol_type = other DNA
ccccaccaggggagcct

SEQ ID NO: 145525 - DNA, 17 bp, synthetic construct
  source 1..17: mol_type = other DNA
cccaccaggggagcctc

SEQ ID NO: 145526 - DNA, 17 bp, synthetic construct
  source 1..17: mol_type = other DNA
ccaccaggggagcctca

SEQ ID NO: 145527 - DNA, 17 bp, synthetic construct
  source 1..17: mol_type = other DNA
caccaggggagcctcag

SEQ ID NO: 145528 - DNA, 17 bp, synthetic construct
  source 1..17: mol_type = other DNA
accaggggagcctcagg

SEQ ID NO: 145529 - DNA, 17 bp, synthetic construct
  source 1..17: mol_type = other DNA
ccaggggagcctcagga

SEQ ID NO: 145530 - DNA, 17 bp, synthetic construct
  source 1..17: mol_type = other DNA
caggggagcctcaggaa

SEQ ID NO: 145531 - DNA, 17 bp, synthetic construct
  source 1..17: mol_type = other DNA
aggggagcctcaggaaa

SEQ ID NO: 145532 - DNA, 17 bp, synthetic construct
  source 1..17: mol_type = other DNA
ggggagcctcaggaaaa

SEQ ID NO: 145533 - DNA, 17 bp, synthetic construct
  source 1..17: mol_type = other DNA
gggagcctcaggaaaac

SEQ ID NO: 145534 - DNA, 17 bp, synthetic construct
  source 1..17: mol_type = other DNA
ggagcctcaggaaaacc

SEQ ID NO: 145535 - DNA, 17 bp, synthetic construct
  source 1..17: mol_type = other DNA
gagcctcaggaaaaccg

SEQ ID NO: 145536 - DNA, 17 bp, synthetic construct
  source 1..17: mol_type = other DNA
agcctcaggaaaaccgg

SEQ ID NO: 145537 - DNA, 17 bp, synthetic construct
  source 1..17: mol_type = other DNA
gcctcaggaaaaccggc

SEQ ID NO: 145538 - DNA, 17 bp, synthetic construct
  source 1..17: mol_type = other DNA
cctcaggaaaaccggct

SEQ ID NO: 145539 - DNA, 17 bp, synthetic construct
  source 1..17: mol_type = other DNA
ctcaggaaaaccggctg

SEQ ID NO: 145540 - DNA, 17 bp, synthetic construct
  source 1..17: mol_type = other DNA
tcaggaaaaccggctgc

SEQ ID NO: 145541 - DNA, 17 bp, synthetic construct
  source 1..17: mol_type = other DNA
caggaaaaccggctgct

SEQ ID NO: 145542 - DNA, 17 bp, synthetic construct
  source 1..17: mol_type = other DNA
aggaaaaccggctgctg

SEQ ID NO: 145543 - DNA, 17 bp, synthetic construct
  source 1..17: mol_type = other DNA
ggaaaaccggctgctgc

SEQ ID NO: 145544 - DNA, 17 bp, synthetic construct
  source 1..17: mol_type = other DNA
gaaaaccggctgctgct

SEQ ID NO: 145545 - DNA, 17 bp, synthetic construct
  source 1..17: mol_type = other DNA
aaaaccggctgctgcta

SEQ ID NO: 145546 - DNA, 17 bp, synthetic construct
  source 1..17: mol_type = other DNA
aaaccggctgctgctac

SEQ ID NO: 145547 - DNA, 17 bp, synthetic construct
  source 1..17: mol_type = other DNA
aaccggctgctgctact

SEQ ID NO: 145548 - DNA, 17 bp, synthetic construct
  source 1..17: mol_type = other DNA
accggctgctgctactc

SEQ ID NO: 145549 - DNA, 17 bp, synthetic construct
  source 1..17: mol_type = other DNA
ccggctgctgctactcc

SEQ ID NO: 145550 - DNA, 17 bp, synthetic construct
  source 1..17: mol_type = other DNA
cggctgctgctactcct

SEQ ID NO: 145551 - DNA, 17 bp, synthetic construct
  source 1..17: mol_type = other DNA
ggctgctgctactcctg

SEQ ID NO: 145552 - DNA, 17 bp, synthetic construct
  source 1..17: mol_type = other DNA
gctgctgctactcctgt

SEQ ID NO: 145553 - DNA, 17 bp, synthetic construct
  source 1..17: mol_type = other DNA
ctgctgctactcctgtg

SEQ ID NO: 145554 - DNA, 17 bp, synthetic construct
  source 1..17: mol_type = other DNA
tgctgctactcctgtga

SEQ ID NO: 145555 - DNA, 17 bp, synthetic construct
  source 1..17: mol_type = other DNA
gctgctactcctgtgag

SEQ ID NO: 145556 - DNA, 17 bp, synthetic construct
  source 1..17: mol_type = other DNA
ctgctactcctgtgagg

SEQ ID NO: 145557 - DNA, 17 bp, synthetic construct
  source 1..17: mol_type = other DNA
tgctactcctgtgagga

SEQ ID NO: 145558 - DNA, 17 bp, synthetic construct
  source 1..17: mol_type = other DNA
gctactcctgtgaggag

SEQ ID NO: 145559 - DNA, 17 bp, synthetic construct
  source 1..17: mol_type = other DNA
ctactcctgtgaggagg

SEQ ID NO: 145560 - DNA, 17 bp, synthetic construct
  source 1..17: mol_type = other DNA
tactcctgtgaggaggg

SEQ ID NO: 145561 - DNA, 17 bp, synthetic construct
  source 1..17: mol_type = other DNA
actcctgtgaggagggt

SEQ ID NO: 145562 - DNA, 17 bp, synthetic construct
  source 1..17: mol_type = other DNA
ctcctgtgaggagggta

SEQ ID NO: 145563 - DNA, 17 bp, synthetic construct
  source 1..17: mol_type = other DNA
tcctgtgaggagggtaa

SEQ ID NO: 145564 - DNA, 17 bp, synthetic construct
  source 1..17: mol_type = other DNA
cctgtgaggagggtaag

SEQ ID NO: 145565 - DNA, 17 bp, synthetic construct
  source 1..17: mol_type = other DNA
ctgtgaggagggtaagt

SEQ ID NO: 145566 - DNA, 17 bp, synthetic construct
  source 1..17: mol_type = other DNA
tgtgaggagggtaagtg

SEQ ID NO: 145567 - DNA, 17 bp, synthetic construct
  source 1..17: mol_type = other DNA
gtgaggagggtaagtgg

SEQ ID NO: 145568 - DNA, 17 bp, synthetic construct
  source 1..17: mol_type = other DNA
tgaggagggtaagtgga

SEQ ID NO: 145569 - DNA, 17 bp, synthetic construct
  source 1..17: mol_type = other DNA
gaggagggtaagtggaa

SEQ ID NO: 145570 - DNA, 17 bp, synthetic construct
  source 1..17: mol_type = other DNA
aggagggtaagtggaag

SEQ ID NO: 145571 - DNA, 17 bp, synthetic construct
  source 1..17: mol_type = other DNA
ggagggtaagtggaagc

SEQ ID NO: 145572 - DNA, 17 bp, synthetic construct
  source 1..17: mol_type = other DNA
gagggtaagtggaagcc

SEQ ID NO: 145573 - DNA, 17 bp, synthetic construct
  source 1..17: mol_type = other DNA
agggtaagtggaagcca

SEQ ID NO: 145574 - DNA, 17 bp, synthetic construct
  source 1..17: mol_type = other DNA
gggtaagtggaagccac

SEQ ID NO: 145575 - DNA, 17 bp, synthetic construct
  source 1..17: mol_type = other DNA
ggtaagtggaagccacc

SEQ ID NO: 145576 - DNA, 17 bp, synthetic construct
  source 1..17: mol_type = other DNA
gtaagtggaagccacct

SEQ ID NO: 145577 - DNA, 17 bp, synthetic construct
  source 1..17: mol_type = other DNA
taagtggaagccacctt

SEQ ID NO: 145578 - DNA, 17 bp, synthetic construct
  source 1..17: mol_type = other DNA
aagtggaagccaccttc

SEQ ID NO: 145579 - DNA, 17 bp, synthetic construct
  source 1..17: mol_type = other DNA
agtggaagccaccttcc

SEQ ID NO: 145580 - DNA, 17 bp, synthetic construct
  source 1..17: mol_type = other DNA
gtggaagccaccttccc

SEQ ID NO: 145581 - DNA, 17 bp, synthetic construct
  source 1..17: mol_type = other DNA
tggaagccaccttccca

SEQ ID NO: 145582 - DNA, 17 bp, synthetic construct
  source 1..17: mol_type = other DNA
ggaagccaccttcccac

SEQ ID NO: 145583 - DNA, 17 bp, synthetic construct
  source 1..17: mol_type = other DNA
gaagccaccttcccaca

SEQ ID NO: 145584 - DNA, 17 bp, synthetic construct
  source 1..17: mol_type = other DNA
aagccaccttcccacac

SEQ ID NO: 145585 - DNA, 17 bp, synthetic construct
  source 1..17: mol_type = other DNA
agccaccttcccacacc

SEQ ID NO: 145586 - DNA, 17 bp, synthetic construct
  source 1..17: mol_type = other DNA
gccaccttcccacacca

SEQ ID NO: 145587 - DNA, 17 bp, synthetic construct
  source 1..17: mol_type = other DNA
ccaccttcccacaccag

SEQ ID NO: 145588 - DNA, 17 bp, synthetic construct
  source 1..17: mol_type = other DNA
caccttcccacaccagc

SEQ ID NO: 145589 - DNA, 17 bp, synthetic construct
  source 1..17: mol_type = other DNA
accttcccacaccagcc

SEQ ID NO: 145590 - DNA, 17 bp, synthetic construct
  source 1..17: mol_type = other DNA
ccttcccacaccagccc

SEQ ID NO: 145591 - DNA, 17 bp, synthetic construct
  source 1..17: mol_type = other DNA
cttcccacaccagccct

SEQ ID NO: 145592 - DNA, 17 bp, synthetic construct
  source 1..17: mol_type = other DNA
ttcccacaccagccctc

SEQ ID NO: 145593 - DNA, 17 bp, synthetic construct
  source 1..17: mol_type = other DNA
tcccacaccagccctcc

SEQ ID NO: 145594 - DNA, 17 bp, synthetic construct
  source 1..17: mol_type = other DNA
cccacaccagccctcca

SEQ ID NO: 145595 - DNA, 17 bp, synthetic construct
  source 1..17: mol_type = other DNA
ccacaccagccctccag

SEQ ID NO: 145596 - DNA, 17 bp, synthetic construct
  source 1..17: mol_type = other DNA
cacaccagccctccagc

SEQ ID NO: 145597 - DNA, 17 bp, synthetic construct
  source 1..17: mol_type = other DNA
acaccagccctccagct

SEQ ID NO: 145598 - DNA, 17 bp, synthetic construct
  source 1..17: mol_type = other DNA
caccagccctccagctc

SEQ ID NO: 145599 - DNA, 17 bp, synthetic construct
  source 1..17: mol_type = other DNA
accagccctccagctcc

SEQ ID NO: 145600 - DNA, 17 bp, synthetic construct
  source 1..17: mol_type = other DNA
ccagccctccagctcca

SEQ ID NO: 145601 - DNA, 17 bp, synthetic construct
  source 1..17: mol_type = other DNA
cagccctccagctccag

SEQ ID NO: 145602 - DNA, 17 bp, synthetic construct
  source 1..17: mol_type = other DNA
agccctccagctccagc

SEQ ID NO: 145603 - DNA, 17 bp, synthetic construct
  source 1..17: mol_type = other DNA
gccctccagctccagcc

SEQ ID NO: 145604 - DNA, 17 bp, synthetic construct
  source 1..17: mol_type = other DNA
ccctccagctccagccc

SEQ ID NO: 145605 - DNA, 17 bp, synthetic construct
  source 1..17: mol_type = other DNA
cctccagctccagcccg

SEQ ID NO: 145606 - DNA, 17 bp, synthetic construct
  source 1..17: mol_type = other DNA
ctccagctccagcccgt

SEQ ID NO: 145607 - DNA, 17 bp, synthetic construct
  source 1..17: mol_type = other DNA
tccagctccagcccgtc

SEQ ID NO: 145608 - DNA, 17 bp, synthetic construct
  source 1..17: mol_type = other DNA
ccagctccagcccgtcg

SEQ ID NO: 145609 - DNA, 17 bp, synthetic construct
  source 1..17: mol_type = other DNA
cagctccagcccgtcgc

SEQ ID NO: 145610 - DNA, 17 bp, synthetic construct
  source 1..17: mol_type = other DNA
agctccagcccgtcgcc

SEQ ID NO: 145611 - DNA, 17 bp, synthetic construct
  source 1..17: mol_type = other DNA
gctccagcccgtcgcca

SEQ ID NO: 145612 - DNA, 17 bp, synthetic construct
  source 1..17: mol_type = other DNA
ctccagcccgtcgccac

SEQ ID NO: 145613 - DNA, 17 bp, synthetic construct
  source 1..17: mol_type = other DNA
tccagcccgtcgccacc

SEQ ID NO: 145614 - DNA, 17 bp, synthetic construct
  source 1..17: mol_type = other DNA
ccagcccgtcgccaccc

SEQ ID NO: 145615 - DNA, 17 bp, synthetic construct
  source 1..17: mol_type = other DNA
cagcccgtcgccaccca

SEQ ID NO: 145616 - DNA, 17 bp, synthetic construct
  source 1..17: mol_type = other DNA
agcccgtcgccacccat

SEQ ID NO: 145617 - DNA, 17 bp, synthetic construct
  source 1..17: mol_type = other DNA
gcccgtcgccacccatc

SEQ ID NO: 145618 - DNA, 17 bp, synthetic construct
  source 1..17: mol_type = other DNA
cccgtcgccacccatcc

SEQ ID NO: 145619 - DNA, 17 bp, synthetic construct
  source 1..17: mol_type = other DNA
ccgtcgccacccatcca

SEQ ID NO: 145620 - DNA, 17 bp, synthetic construct
  source 1..17: mol_type = other DNA
cgtcgccacccatccat

SEQ ID NO: 145621 - DNA, 17 bp, synthetic construct
  source 1..17: mol_type = other DNA
gtcgccacccatccatt

SEQ ID NO: 145622 - DNA, 17 bp, synthetic construct
  source 1..17: mol_type = other DNA
tcgccacccatccattc

SEQ ID NO: 145623 - DNA, 17 bp, synthetic construct
  source 1..17: mol_type = other DNA
cgccacccatccattcc

SEQ ID NO: 145624 - DNA, 17 bp, synthetic construct
  source 1..17: mol_type = other DNA
gccacccatccattcct

SEQ ID NO: 145625 - DNA, 17 bp, synthetic construct
  source 1..17: mol_type = other DNA
ccacccatccattcctg

SEQ ID NO: 145626 - DNA, 17 bp, synthetic construct
  source 1..17: mol_type = other DNA
cacccatccattcctgc

SEQ ID NO: 145627 - DNA, 17 bp, synthetic construct
  source 1..17: mol_type = other DNA
acccatccattcctgcc

SEQ ID NO: 145628 - DNA, 17 bp, synthetic construct
  source 1..17: mol_type = other DNA
cccatccattcctgccc

SEQ ID NO: 145629 - DNA, 17 bp, synthetic construct
  source 1..17: mol_type = other DNA
ccatccattcctgccca

SEQ ID NO: 145630 - DNA, 17 bp, synthetic construct
  source 1..17: mol_type = other DNA
catccattcctgcccag

SEQ ID NO: 145631 - DNA, 17 bp, synthetic construct
  source 1..17: mol_type = other DNA
atccattcctgcccaga

SEQ ID NO: 145632 - DNA, 17 bp, synthetic construct
  source 1..17: mol_type = other DNA
tccattcctgcccagac

SEQ ID NO: 145633 - DNA, 17 bp, synthetic construct
  source 1..17: mol_type = other DNA
ccattcctgcccagaca

SEQ ID NO: 145634 - DNA, 17 bp, synthetic construct
  source 1..17: mol_type = other DNA
cattcctgcccagacat

SEQ ID NO: 145635 - DNA, 17 bp, synthetic construct
  source 1..17: mol_type = other DNA
attcctgcccagacatc

SEQ ID NO: 145636 - DNA, 17 bp, synthetic construct
  source 1..17: mol_type = other DNA
ttcctgcccagacatct

SEQ ID NO: 145637 - DNA, 17 bp, synthetic construct
  source 1..17: mol_type = other DNA
tcctgcccagacatctg

SEQ ID NO: 145638 - DNA, 17 bp, synthetic construct
  source 1..17: mol_type = other DNA
cctgcccagacatctgc

SEQ ID NO: 145639 - DNA, 17 bp, synthetic construct
  source 1..17: mol_type = other DNA
ctgcccagacatctgca

SEQ ID NO: 145640 - DNA, 17 bp, synthetic construct
  source 1..17: mol_type = other DNA
tgcccagacatctgcac

SEQ ID NO: 145641 - DNA, 17 bp, synthetic construct
  source 1..17: mol_type = other DNA
gcccagacatctgcact

SEQ ID NO: 145642 - DNA, 17 bp, synthetic construct
  source 1..17: mol_type = other DNA
cccagacatctgcacta

SEQ ID NO: 145643 - DNA, 17 bp, synthetic construct
  source 1..17: mol_type = other DNA
ccagacatctgcactag

SEQ ID NO: 145644 - DNA, 17 bp, synthetic construct
  source 1..17: mol_type = other DNA
cagacatctgcactagg

SEQ ID NO: 145645 - DNA, 17 bp, synthetic construct
  source 1..17: mol_type = other DNA
agacatctgcactaggc

SEQ ID NO: 145646 - DNA, 17 bp, synthetic construct
  source 1..17: mol_type = other DNA
gacatctgcactaggca

SEQ ID NO: 145647 - DNA, 17 bp, synthetic construct
  source 1..17: mol_type = other DNA
acatctgcactaggcag

SEQ ID NO: 145648 - DNA, 17 bp, synthetic construct
  source 1..17: mol_type = other DNA
catctgcactaggcagc

SEQ ID NO: 145649 - DNA, 17 bp, synthetic construct
  source 1..17: mol_type = other DNA
atctgcactaggcagca

SEQ ID NO: 145650 - DNA, 17 bp, synthetic construct
  source 1..17: mol_type = other DNA
tctgcactaggcagcag

SEQ ID NO: 145651 - DNA, 17 bp, synthetic construct
  source 1..17: mol_type = other DNA
ctgcactaggcagcagt

SEQ ID NO: 145652 - DNA, 17 bp, synthetic construct
  source 1..17: mol_type = other DNA
tgcactaggcagcagtg

SEQ ID NO: 145653 - DNA, 17 bp, synthetic construct
  source 1..17: mol_type = other DNA
gcactaggcagcagtgg

SEQ ID NO: 145654 - DNA, 17 bp, synthetic construct
  source 1..17: mol_type = other DNA
cactaggcagcagtggg

SEQ ID NO: 145655 - DNA, 17 bp, synthetic construct
  source 1..17: mol_type = other DNA
actaggcagcagtggga

SEQ ID NO: 145656 - DNA, 17 bp, synthetic construct
  source 1..17: mol_type = other DNA
ctaggcagcagtgggat

SEQ ID NO: 145657 - DNA, 17 bp, synthetic construct
  source 1..17: mol_type = other DNA
taggcagcagtgggatg

SEQ ID NO: 145658 - DNA, 17 bp, synthetic construct
  source 1..17: mol_type = other DNA
aggcagcagtgggatgc

SEQ ID NO: 145659 - DNA, 17 bp, synthetic construct
  source 1..17: mol_type = other DNA
ggcagcagtgggatgcc

SEQ ID NO: 145660 - DNA, 17 bp, synthetic construct
  source 1..17: mol_type = other DNA
gcagcagtgggatgccc

SEQ ID NO: 145661 - DNA, 17 bp, synthetic construct
  source 1..17: mol_type = other DNA
cagcagtgggatgcccg

SEQ ID NO: 145662 - DNA, 17 bp, synthetic construct
  source 1..17: mol_type = other DNA
agcagtgggatgcccgc

SEQ ID NO: 145663 - DNA, 17 bp, synthetic construct
  source 1..17: mol_type = other DNA
gcagtgggatgcccgcg

SEQ ID NO: 145664 - DNA, 17 bp, synthetic construct
  source 1..17: mol_type = other DNA
cagtgggatgcccgcgt

SEQ ID NO: 145665 - DNA, 17 bp, synthetic construct
  source 1..17: mol_type = other DNA
agtgggatgcccgcgtc

SEQ ID NO: 145666 - DNA, 17 bp, synthetic construct
  source 1..17: mol_type = other DNA
gtgggatgcccgcgtcc

SEQ ID NO: 145667 - DNA, 17 bp, synthetic construct
  source 1..17: mol_type = other DNA
tgggatgcccgcgtcca

SEQ ID NO: 145668 - DNA, 17 bp, synthetic construct
  source 1..17: mol_type = other DNA
gggatgcccgcgtccag

SEQ ID NO: 145669 - DNA, 17 bp, synthetic construct
  source 1..17: mol_type = other DNA
ggatgcccgcgtccaga

SEQ ID NO: 145670 - DNA, 17 bp, synthetic construct
  source 1..17: mol_type = other DNA
gatgcccgcgtccagac

SEQ ID NO: 145671 - DNA, 17 bp, synthetic construct
  source 1..17: mol_type = other DNA
atgcccgcgtccagact

SEQ ID NO: 145672 - DNA, 17 bp, synthetic construct
  source 1..17: mol_type = other DNA
tgcccgcgtccagactc

SEQ ID NO: 145673 - DNA, 17 bp, synthetic construct
  source 1..17: mol_type = other DNA
gcccgcgtccagactcc

SEQ ID NO: 145674 - DNA, 17 bp, synthetic construct
  source 1..17: mol_type = other DNA
cccgcgtccagactcca

SEQ ID NO: 145675 - DNA, 17 bp, synthetic construct
  source 1..17: mol_type = other DNA
ccgcgtccagactccac

SEQ ID NO: 145676 - DNA, 17 bp, synthetic construct
  source 1..17: mol_type = other DNA
cgcgtccagactccacc

SEQ ID NO: 145677 - DNA, 17 bp, synthetic construct
  source 1..17: mol_type = other DNA
gcgtccagactccaccc

SEQ ID NO: 145678 - DNA, 17 bp, synthetic construct
  source 1..17: mol_type = other DNA
cgtccagactccaccct

SEQ ID NO: 145679 - DNA, 17 bp, synthetic construct
  source 1..17: mol_type = other DNA
gtccagactccaccctc

SEQ ID NO: 145680 - DNA, 17 bp, synthetic construct
  source 1..17: mol_type = other DNA
tccagactccaccctcg

SEQ ID NO: 145681 - DNA, 17 bp, synthetic construct
  source 1..17: mol_type = other DNA
ccagactccaccctcgg

SEQ ID NO: 145682 - DNA, 17 bp, synthetic construct
  source 1..17: mol_type = other DNA
cagactccaccctcggt

SEQ ID NO: 145683 - DNA, 17 bp, synthetic construct
  source 1..17: mol_type = other DNA
agactccaccctcggtc

SEQ ID NO: 145684 - DNA, 17 bp, synthetic construct
  source 1..17: mol_type = other DNA
gactccaccctcggtcc

SEQ ID NO: 145685 - DNA, 17 bp, synthetic construct
  source 1..17: mol_type = other DNA
actccaccctcggtcct

SEQ ID NO: 145686 - DNA, 17 bp, synthetic construct
  source 1..17: mol_type = other DNA
ctccaccctcggtcctg

SEQ ID NO: 145687 - DNA, 17 bp, synthetic construct
  source 1..17: mol_type = other DNA
tccaccctcggtcctgg

SEQ ID NO: 145688 - DNA, 17 bp, synthetic construct
  source 1..17: mol_type = other DNA
ccaccctcggtcctgga

SEQ ID NO: 145689 - DNA, 17 bp, synthetic construct
  source 1..17: mol_type = other DNA
caccctcggtcctggag

SEQ ID NO: 145690 - DNA, 17 bp, synthetic construct
  source 1..17: mol_type = other DNA
accctcggtcctggagg

SEQ ID NO: 145691 - DNA, 17 bp, synthetic construct
  source 1..17: mol_type = other DNA
ccctcggtcctggaggg

SEQ ID NO: 145692 - DNA, 17 bp, synthetic construct
  source 1..17: mol_type = other DNA
cctcggtcctggagggc

SEQ ID NO: 145693 - DNA, 17 bp, synthetic construct
  source 1..17: mol_type = other DNA
ctcggtcctggagggcc

SEQ ID NO: 145694 - DNA, 17 bp, synthetic construct
  source 1..17: mol_type = other DNA
tcggtcctggagggcca

SEQ ID NO: 145695 - DNA, 17 bp, synthetic construct
  source 1..17: mol_type = other DNA
cggtcctggagggccat

SEQ ID NO: 145696 - DNA, 17 bp, synthetic construct
  source 1..17: mol_type = other DNA
ggtcctggagggccatg

SEQ ID NO: 145697 - DNA, 17 bp, synthetic construct
  source 1..17: mol_type = other DNA
gtcctggagggccatgg

SEQ ID NO: 145698 - DNA, 17 bp, synthetic construct
  source 1..17: mol_type = other DNA
tcctggagggccatggg

SEQ ID NO: 145699 - DNA, 17 bp, synthetic construct
  source 1..17: mol_type = other DNA
cctggagggccatggga

SEQ ID NO: 145700 - DNA, 17 bp, synthetic construct
  source 1..17: mol_type = other DNA
ctggagggccatgggag

SEQ ID NO: 145701 - DNA, 17 bp, synthetic construct
  source 1..17: mol_type = other DNA
tggagggccatgggagg

SEQ ID NO: 145702 - DNA, 17 bp, synthetic construct
  source 1..17: mol_type = other DNA
ggagggccatgggaggg

SEQ ID NO: 145703 - DNA, 17 bp, synthetic construct
  source 1..17: mol_type = other DNA
gagggccatgggagggg

SEQ ID NO: 145704 - DNA, 17 bp, synthetic construct
  source 1..17: mol_type = other DNA
agggccatgggaggggt

SEQ ID NO: 145705 - DNA, 17 bp, synthetic construct
  source 1..17: mol_type = other DNA
gggccatgggaggggtg

SEQ ID NO: 145706 - DNA, 17 bp, synthetic construct
  source 1..17: mol_type = other DNA
ggccatgggaggggtgg

SEQ ID NO: 145707 - DNA, 17 bp, synthetic construct
  source 1..17: mol_type = other DNA
gccatgggaggggtggt

SEQ ID NO: 145708 - DNA, 17 bp, synthetic construct
  source 1..17: mol_type = other DNA
ccatgggaggggtggtc

SEQ ID NO: 145709 - DNA, 17 bp, synthetic construct
  source 1..17: mol_type = other DNA
catgggaggggtggtcc

SEQ ID NO: 145710 - DNA, 17 bp, synthetic construct
  source 1..17: mol_type = other DNA
atgggaggggtggtccc

SEQ ID NO: 145711 - DNA, 17 bp, synthetic construct
  source 1..17: mol_type = other DNA
tgggaggggtggtccca

SEQ ID NO: 145712 - DNA, 17 bp, synthetic construct
  source 1..17: mol_type = other DNA
gggaggggtggtcccat

SEQ ID NO: 145713 - DNA, 17 bp, synthetic construct
  source 1..17: mol_type = other DNA
ggaggggtggtcccatg

SEQ ID NO: 145714 - DNA, 17 bp, synthetic construct
  source 1..17: mol_type = other DNA
gaggggtggtcccatgg

SEQ ID NO: 145715 - DNA, 17 bp, synthetic construct
  source 1..17: mol_type = other DNA
aggggtggtcccatggg

SEQ ID NO: 145716 - DNA, 17 bp, synthetic construct
  source 1..17: mol_type = other DNA
ggggtggtcccatgggg

SEQ ID NO: 145717 - DNA, 17 bp, synthetic construct
  source 1..17: mol_type = other DNA
gggtggtcccatgggga

SEQ ID NO: 145718 - DNA, 17 bp, synthetic construct
  source 1..17: mol_type = other DNA
ggtggtcccatggggag

SEQ ID NO: 145719 - DNA, 17 bp, synthetic construct
  source 1..17: mol_type = other DNA
gtggtcccatggggagg

SEQ ID NO: 145720 - DNA, 17 bp, synthetic construct
  source 1..17: mol_type = other DNA
tggtcccatggggaggg

SEQ ID NO: 145721 - DNA, 17 bp, synthetic construct
  source 1..17: mol_type = other DNA
ggtcccatggggagggt

SEQ ID NO: 145722 - DNA, 17 bp, synthetic construct
  source 1..17: mol_type = other DNA
gtcccatggggagggtc

SEQ ID NO: 145723 - DNA, 17 bp, synthetic construct
  source 1..17: mol_type = other DNA
tcccatggggagggtcg

SEQ ID NO: 145724 - DNA, 17 bp, synthetic construct
  source 1..17: mol_type = other DNA
cccatggggagggtcgg

SEQ ID NO: 145725 - DNA, 17 bp, synthetic construct
  source 1..17: mol_type = other DNA
ccatggggagggtcggc

SEQ ID NO: 145726 - DNA, 17 bp, synthetic construct
  source 1..17: mol_type = other DNA
catggggagggtcggcc

SEQ ID NO: 145727 - DNA, 17 bp, synthetic construct
  source 1..17: mol_type = other DNA
atggggagggtcggccc

SEQ ID NO: 145728 - DNA, 17 bp, synthetic construct
  source 1..17: mol_type = other DNA
tggggagggtcggccca

SEQ ID NO: 145729 - DNA, 17 bp, synthetic construct
  source 1..17: mol_type = other DNA
ggggagggtcggcccag

SEQ ID NO: 145730 - DNA, 17 bp, synthetic construct
  source 1..17: mol_type = other DNA
gggagggtcggcccagc

SEQ ID NO: 145731 - DNA, 17 bp, synthetic construct
  source 1..17: mol_type = other DNA
ggagggtcggcccagca

SEQ ID NO: 145732 - DNA, 17 bp, synthetic construct
  source 1..17: mol_type = other DNA
gagggtcggcccagcaa

SEQ ID NO: 145733 - DNA, 17 bp, synthetic construct
  source 1..17: mol_type = other DNA
agggtcggcccagcaag

SEQ ID NO: 145734 - DNA, 17 bp, synthetic construct
  source 1..17: mol_type = other DNA
gggtcggcccagcaagt

SEQ ID NO: 145735 - DNA, 17 bp, synthetic construct
  source 1..17: mol_type = other DNA
ggtcggcccagcaagtc

SEQ ID NO: 145736 - DNA, 17 bp, synthetic construct
  source 1..17: mol_type = other DNA
gtcggcccagcaagtcc

SEQ ID NO: 145737 - DNA, 17 bp, synthetic construct
  source 1..17: mol_type = other DNA
tcggcccagcaagtcca

SEQ ID NO: 145738 - DNA, 17 bp, synthetic construct
  source 1..17: mol_type = other DNA
cggcccagcaagtccag

SEQ ID NO: 145739 - DNA, 17 bp, synthetic construct
  source 1..17: mol_type = other DNA
ggcccagcaagtccagg

SEQ ID NO: 145740 - DNA, 17 bp, synthetic construct
  source 1..17: mol_type = other DNA
gcccagcaagtccaggc

SEQ ID NO: 145741 - DNA, 17 bp, synthetic construct
  source 1..17: mol_type = other DNA
cccagcaagtccaggcc

SEQ ID NO: 145742 - DNA, 17 bp, synthetic construct
  source 1..17: mol_type = other DNA
ccagcaagtccaggccc

SEQ ID NO: 145743 - DNA, 17 bp, synthetic construct
  source 1..17: mol_type = other DNA
cagcaagtccaggccct

SEQ ID NO: 145744 - DNA, 17 bp, synthetic construct
  source 1..17: mol_type = other DNA
agcaagtccaggccctc

SEQ ID NO: 145745 - DNA, 17 bp, synthetic construct
  source 1..17: mol_type = other DNA
gcaagtccaggccctca

SEQ ID NO: 145746 - DNA, 17 bp, synthetic construct
  source 1..17: mol_type = other DNA
caagtccaggccctcag

SEQ ID NO: 145747 - DNA, 17 bp, synthetic construct
  source 1..17: mol_type = other DNA
aagtccaggccctcaga

SEQ ID NO: 145748 - DNA, 17 bp, synthetic construct
  source 1..17: mol_type = other DNA
agtccaggccctcagag

SEQ ID NO: 145749 - DNA, 17 bp, synthetic construct
  source 1..17: mol_type = other DNA
gtccaggccctcagagt

SEQ ID NO: 145750 - DNA, 17 bp, synthetic construct
  source 1..17: mol_type = other DNA
tccaggccctcagagtg

SEQ ID NO: 145751 - DNA, 17 bp, synthetic construct
  source 1..17: mol_type = other DNA
ccaggccctcagagtga

SEQ ID NO: 145752 - DNA, 17 bp, synthetic construct
  source 1..17: mol_type = other DNA
caggccctcagagtgag

SEQ ID NO: 145753 - DNA, 17 bp, synthetic construct
  source 1..17: mol_type = other DNA
aggccctcagagtgagg

SEQ ID NO: 145754 - DNA, 17 bp, synthetic construct
  source 1..17: mol_type = other DNA
ggccctcagagtgaggg

SEQ ID NO: 145755 - DNA, 17 bp, synthetic construct
  source 1..17: mol_type = other DNA
gccctcagagtgagggt

SEQ ID NO: 145756 - DNA, 17 bp, synthetic construct
  source 1..17: mol_type = other DNA
ccctcagagtgagggtc

SEQ ID NO: 145757 - DNA, 17 bp, synthetic construct
  source 1..17: mol_type = other DNA
cctcagagtgagggtcc

SEQ ID NO: 145758 - DNA, 17 bp, synthetic construct
  source 1..17: mol_type = other DNA
ctcagagtgagggtcca

SEQ ID NO: 145759 - DNA, 17 bp, synthetic construct
  source 1..17: mol_type = other DNA
tcagagtgagggtccag

SEQ ID NO: 145760 - DNA, 17 bp, synthetic construct
  source 1..17: mol_type = other DNA
cagagtgagggtccagt

SEQ ID NO: 145761 - DNA, 17 bp, synthetic construct
  source 1..17: mol_type = other DNA
agagtgagggtccagtg

SEQ ID NO: 145762 - DNA, 17 bp, synthetic construct
  source 1..17: mol_type = other DNA
gagtgagggtccagtgg

SEQ ID NO: 145763 - DNA, 17 bp, synthetic construct
  source 1..17: mol_type = other DNA
agtgagggtccagtggg

SEQ ID NO: 145764 - DNA, 17 bp, synthetic construct
  source 1..17: mol_type = other DNA
gtgagggtccagtgggg

SEQ ID NO: 145765 - DNA, 17 bp, synthetic construct
  source 1..17: mol_type = other DNA
tgagggtccagtggggc

SEQ ID NO: 145766 - DNA, 17 bp, synthetic construct
  source 1..17: mol_type = other DNA
gagggtccagtggggct

SEQ ID NO: 145767 - DNA, 17 bp, synthetic construct
  source 1..17: mol_type = other DNA
agggtccagtggggctc

SEQ ID NO: 145768 - DNA, 17 bp, synthetic construct
  source 1..17: mol_type = other DNA
gggtccagtggggctcc

SEQ ID NO: 145769 - DNA, 17 bp, synthetic construct
  source 1..17: mol_type = other DNA
ggtccagtggggctcca

SEQ ID NO: 145770 - DNA, 17 bp, synthetic construct
  source 1..17: mol_type = other DNA
gtccagtggggctccac

SEQ ID NO: 145771 - DNA, 17 bp, synthetic construct
  source 1..17: mol_type = other DNA
tccagtggggctccaca

SEQ ID NO: 145772 - DNA, 17 bp, synthetic construct
  source 1..17: mol_type = other DNA
ccagtggggctccacat

SEQ ID NO: 145773 - DNA, 17 bp, synthetic construct
  source 1..17: mol_type = other DNA
cagtggggctccacatc

SEQ ID NO: 145774 - DNA, 17 bp, synthetic construct
  source 1..17: mol_type = other DNA
agtggggctccacatct

SEQ ID NO: 145775 - DNA, 17 bp, synthetic construct
  source 1..17: mol_type = other DNA
gtggggctccacatctg

SEQ ID NO: 145776 - DNA, 17 bp, synthetic construct
  source 1..17: mol_type = other DNA
tggggctccacatctgc

SEQ ID NO: 145777 - DNA, 17 bp, synthetic construct
  source 1..17: mol_type = other DNA
ggggctccacatctgcc

SEQ ID NO: 145778 - DNA, 17 bp, synthetic construct
  source 1..17: mol_type = other DNA
gggctccacatctgcct

SEQ ID NO: 145779 - DNA, 17 bp, synthetic construct
  source 1..17: mol_type = other DNA
ggctccacatctgcctt

SEQ ID NO: 145780 - DNA, 17 bp, synthetic construct
  source 1..17: mol_type = other DNA
gctccacatctgccttt

SEQ ID NO: 145781 - DNA, 17 bp, synthetic construct
  source 1..17: mol_type = other DNA
ctccacatctgcctttc

SEQ ID NO: 145782 - DNA, 17 bp, synthetic construct
  source 1..17: mol_type = other DNA
tccacatctgcctttcc

SEQ ID NO: 145783 - DNA, 17 bp, synthetic construct
  source 1..17: mol_type = other DNA
ccacatctgcctttcct

SEQ ID NO: 145784 - DNA, 17 bp, synthetic construct
  source 1..17: mol_type = other DNA
cacatctgcctttcctc

SEQ ID NO: 145785 - DNA, 17 bp, synthetic construct
  source 1..17: mol_type = other DNA
acatctgcctttcctcc

SEQ ID NO: 145786 - DNA, 17 bp, synthetic construct
  source 1..17: mol_type = other DNA
catctgcctttcctcct

SEQ ID NO: 145787 - DNA, 17 bp, synthetic construct
  source 1..17: mol_type = other DNA
atctgcctttcctcctc

SEQ ID NO: 145788 - DNA, 17 bp, synthetic construct
  source 1..17: mol_type = other DNA
tctgcctttcctcctcc

SEQ ID NO: 145789 - DNA, 17 bp, synthetic construct
  source 1..17: mol_type = other DNA
ctgcctttcctcctccc

SEQ ID NO: 145790 - DNA, 17 bp, synthetic construct
  source 1..17: mol_type = other DNA
tgcctttcctcctccca

SEQ ID NO: 145791 - DNA, 17 bp, synthetic construct
  source 1..17: mol_type = other DNA
gcctttcctcctcccag

SEQ ID NO: 145792 - DNA, 17 bp, synthetic construct
  source 1..17: mol_type = other DNA
cctttcctcctcccaga

SEQ ID NO: 145793 - DNA, 17 bp, synthetic construct
  source 1..17: mol_type = other DNA
ctttcctcctcccagac

SEQ ID NO: 145794 - DNA, 17 bp, synthetic construct
  source 1..17: mol_type = other DNA
tttcctcctcccagact

SEQ ID NO: 145795 - DNA, 17 bp, synthetic construct
  source 1..17: mol_type = other DNA
ttcctcctcccagactc

SEQ ID NO: 145796 - DNA, 17 bp, synthetic construct
  source 1..17: mol_type = other DNA
tcctcctcccagactcc

SEQ ID NO: 145797 - DNA, 17 bp, synthetic construct
  source 1..17: mol_type = other DNA
cctcctcccagactcct

SEQ ID NO: 145798 - DNA, 17 bp, synthetic construct
  source 1..17: mol_type = other DNA
ctcctcccagactcctg

SEQ ID NO: 145799 - DNA, 17 bp, synthetic construct
  source 1..17: mol_type = other DNA
tcctcccagactcctgt

SEQ ID NO: 145800 - DNA, 17 bp, synthetic construct
  source 1..17: mol_type = other DNA
cctcccagactcctgtc

SEQ ID NO: 145801 - DNA, 17 bp, synthetic construct
  source 1..17: mol_type = other DNA
ctcccagactcctgtca

SEQ ID NO: 145802 - DNA, 17 bp, synthetic construct
  source 1..17: mol_type = other DNA
tcccagactcctgtcaa

SEQ ID NO: 145803 - DNA, 17 bp, synthetic construct
  source 1..17: mol_type = other DNA
cccagactcctgtcaag

SEQ ID NO: 145804 - DNA, 17 bp, synthetic construct
  source 1..17: mol_type = other DNA
ccagactcctgtcaagt

SEQ ID NO: 145805 - DNA, 17 bp, synthetic construct
  source 1..17: mol_type = other DNA
cagactcctgtcaagtc

SEQ ID NO: 145806 - DNA, 17 bp, synthetic construct
  source 1..17: mol_type = other DNA
agactcctgtcaagtcc

SEQ ID NO: 145807 - DNA, 17 bp, synthetic construct
  source 1..17: mol_type = other DNA
gactcctgtcaagtccg

SEQ ID NO: 145808 - DNA, 17 bp, synthetic construct
  source 1..17: mol_type = other DNA
actcctgtcaagtccgc

SEQ ID NO: 145809 - DNA, 17 bp, synthetic construct
  source 1..17: mol_type = other DNA
ctcctgtcaagtccgca

SEQ ID NO: 145810 - DNA, 17 bp, synthetic construct
  source 1..17: mol_type = other DNA
tcctgtcaagtccgcat

SEQ ID NO: 145811 - DNA, 17 bp, synthetic construct
  source 1..17: mol_type = other DNA
cctgtcaagtccgcatc

SEQ ID NO: 145812 - DNA, 17 bp, synthetic construct
  source 1..17: mol_type = other DNA
ctgtcaagtccgcatca

SEQ ID NO: 145813 - DNA, 17 bp, synthetic construct
  source 1..17: mol_type = other DNA
tgtcaagtccgcatcaa

SEQ ID NO: 145814 - DNA, 17 bp, synthetic construct
  source 1..17: mol_type = other DNA
gtcaagtccgcatcaac

SEQ ID NO: 145815 - DNA, 17 bp, synthetic construct
  source 1..17: mol_type = other DNA
tcaagtccgcatcaaca

SEQ ID NO: 145816 - DNA, 17 bp, synthetic construct
  source 1..17: mol_type = other DNA
caagtccgcatcaacac

SEQ ID NO: 145817 - DNA, 17 bp, synthetic construct
  source 1..17: mol_type = other DNA
aagtccgcatcaacacg

SEQ ID NO: 145818 - DNA, 17 bp, synthetic construct
  source 1..17: mol_type = other DNA
agtccgcatcaacacga

SEQ ID NO: 145819 - DNA, 17 bp, synthetic construct
  source 1..17: mol_type = other DNA
gtccgcatcaacacgac

SEQ ID NO: 145820 - DNA, 17 bp, synthetic construct
  source 1..17: mol_type = other DNA
tccgcatcaacacgacc

SEQ ID NO: 145821 - DNA, 17 bp, synthetic construct
  source 1..17: mol_type = other DNA
ccgcatcaacacgacca

SEQ ID NO: 145822 - DNA, 17 bp, synthetic construct
  source 1..17: mol_type = other DNA
cgcatcaacacgaccat

SEQ ID NO: 145823 - DNA, 17 bp, synthetic construct
  source 1..17: mol_type = other DNA
gcatcaacacgaccatc

SEQ ID NO: 145824 - DNA, 17 bp, synthetic construct
  source 1..17: mol_type = other DNA
catcaacacgaccatcc

SEQ ID NO: 145825 - DNA, 17 bp, synthetic construct
  source 1..17: mol_type = other DNA
atcaacacgaccatcct

SEQ ID NO: 145826 - DNA, 17 bp, synthetic construct
  source 1..17: mol_type = other DNA
tcaacacgaccatcctg

SEQ ID NO: 145827 - DNA, 17 bp, synthetic construct
  source 1..17: mol_type = other DNA
caacacgaccatcctgt

SEQ ID NO: 145828 - DNA, 17 bp, synthetic construct
  source 1..17: mol_type = other DNA
aacacgaccatcctgtg

SEQ ID NO: 145829 - DNA, 17 bp, synthetic construct
  source 1..17: mol_type = other DNA
acacgaccatcctgtgg

SEQ ID NO: 145830 - DNA, 17 bp, synthetic construct
  source 1..17: mol_type = other DNA
cacgaccatcctgtggc

SEQ ID NO: 145831 - DNA, 17 bp, synthetic construct
  source 1..17: mol_type = other DNA
acgaccatcctgtggca

SEQ ID NO: 145832 - DNA, 17 bp, synthetic construct
  source 1..17: mol_type = other DNA
cgaccatcctgtggcac

SEQ ID NO: 145833 - DNA, 17 bp, synthetic construct
  source 1..17: mol_type = other DNA
gaccatcctgtggcacc

SEQ ID NO: 145834 - DNA, 17 bp, synthetic construct
  source 1..17: mol_type = other DNA
accatcctgtggcacca

SEQ ID NO: 145835 - DNA, 17 bp, synthetic construct
  source 1..17: mol_type = other DNA
ccatcctgtggcaccag

SEQ ID NO: 145836 - DNA, 17 bp, synthetic construct
  source 1..17: mol_type = other DNA
catcctgtggcaccagg

SEQ ID NO: 145837 - DNA, 17 bp, synthetic construct
  source 1..17: mol_type = other DNA
atcctgtggcaccaggg

SEQ ID NO: 145838 - DNA, 17 bp, synthetic construct
  source 1..17: mol_type = other DNA
tcctgtggcaccagggc

SEQ ID NO: 145839 - DNA, 17 bp, synthetic construct
  source 1..17: mol_type = other DNA
cctgtggcaccagggct

SEQ ID NO: 145840 - DNA, 17 bp, synthetic construct
  source 1..17: mol_type = other DNA
ctgtggcaccagggctg

SEQ ID NO: 145841 - DNA, 17 bp, synthetic construct
  source 1..17: mol_type = other DNA
tgtggcaccagggctgc

SEQ ID NO: 145842 - DNA, 17 bp, synthetic construct
  source 1..17: mol_type = other DNA
gtggcaccagggctgcg

SEQ ID NO: 145843 - DNA, 17 bp, synthetic construct
  source 1..17: mol_type = other DNA
tggcaccagggctgcga

SEQ ID NO: 145844 - DNA, 17 bp, synthetic construct
  source 1..17: mol_type = other DNA
ggcaccagggctgcgag

SEQ ID NO: 145845 - DNA, 17 bp, synthetic construct
  source 1..17: mol_type = other DNA
gcaccagggctgcgaga

SEQ ID NO: 145846 - DNA, 17 bp, synthetic construct
  source 1..17: mol_type = other DNA
caccagggctgcgagac

SEQ ID NO: 145847 - DNA, 17 bp, synthetic construct
  source 1..17: mol_type = other DNA
accagggctgcgagacc

SEQ ID NO: 145848 - DNA, 17 bp, synthetic construct
  source 1..17: mol_type = other DNA
ccagggctgcgagaccg

SEQ ID NO: 145849 - DNA, 17 bp, synthetic construct
  source 1..17: mol_type = other DNA
cagggctgcgagaccga

SEQ ID NO: 145850 - DNA, 17 bp, synthetic construct
  source 1..17: mol_type = other DNA
agggctgcgagaccgag

SEQ ID NO: 145851 - DNA, 17 bp, synthetic construct
  source 1..17: mol_type = other DNA
gggctgcgagaccgagg

SEQ ID NO: 145852 - DNA, 17 bp, synthetic construct
  source 1..17: mol_type = other DNA
ggctgcgagaccgaggt

SEQ ID NO: 145853 - DNA, 17 bp, synthetic construct
  source 1..17: mol_type = other DNA
gctgcgagaccgaggtc

SEQ ID NO: 145854 - DNA, 17 bp, synthetic construct
  source 1..17: mol_type = other DNA
ctgcgagaccgaggtca

SEQ ID NO: 145855 - DNA, 17 bp, synthetic construct
  source 1..17: mol_type = other DNA
tgcgagaccgaggtcaa

SEQ ID NO: 145856 - DNA, 17 bp, synthetic construct
  source 1..17: mol_type = other DNA
gcgagaccgaggtcaac

SEQ ID NO: 145857 - DNA, 17 bp, synthetic construct
  source 1..17: mol_type = other DNA
cgagaccgaggtcaaca

SEQ ID NO: 145858 - DNA, 17 bp, synthetic construct
  source 1..17: mol_type = other DNA
gagaccgaggtcaacat

SEQ ID NO: 145859 - DNA, 17 bp, synthetic construct
  source 1..17: mol_type = other DNA
agaccgaggtcaacatc

SEQ ID NO: 145860 - DNA, 17 bp, synthetic construct
  source 1..17: mol_type = other DNA
gaccgaggtcaacatca

SEQ ID NO: 145861 - DNA, 17 bp, synthetic construct
  source 1..17: mol_type = other DNA
accgaggtcaacatcac

SEQ ID NO: 145862 - DNA, 17 bp, synthetic construct
  source 1..17: mol_type = other DNA
ccgaggtcaacatcacc

SEQ ID NO: 145863 - DNA, 17 bp, synthetic construct
  source 1..17: mol_type = other DNA
cgaggtcaacatcacct

SEQ ID NO: 145864 - DNA, 17 bp, synthetic construct
  source 1..17: mol_type = other DNA
gaggtcaacatcacctt

SEQ ID NO: 145865 - DNA, 17 bp, synthetic construct
  source 1..17: mol_type = other DNA
aggtcaacatcaccttc

SEQ ID NO: 145866 - DNA, 17 bp, synthetic construct
  source 1..17: mol_type = other DNA
ggtcaacatcaccttct

SEQ ID NO: 145867 - DNA, 17 bp, synthetic construct
  source 1..17: mol_type = other DNA
gtcaacatcaccttctg

SEQ ID NO: 145868 - DNA, 17 bp, synthetic construct
  source 1..17: mol_type = other DNA
tcaacatcaccttctgc

SEQ ID NO: 145869 - DNA, 17 bp, synthetic construct
  source 1..17: mol_type = other DNA
caacatcaccttctgcg

SEQ ID NO: 145870 - DNA, 17 bp, synthetic construct
  source 1..17: mol_type = other DNA
aacatcaccttctgcga

SEQ ID NO: 145871 - DNA, 17 bp, synthetic construct
  source 1..17: mol_type = other DNA
acatcaccttctgcgag

SEQ ID NO: 145872 - DNA, 17 bp, synthetic construct
  source 1..17: mol_type = other DNA
catcaccttctgcgagg

SEQ ID NO: 145873 - DNA, 17 bp, synthetic construct
  source 1..17: mol_type = other DNA
atcaccttctgcgaggg

SEQ ID NO: 145874 - DNA, 17 bp, synthetic construct
  source 1..17: mol_type = other DNA
tcaccttctgcgagggc

SEQ ID NO: 145875 - DNA, 17 bp, synthetic construct
  source 1..17: mol_type = other DNA
caccttctgcgagggct

SEQ ID NO: 145876 - DNA, 17 bp, synthetic construct
  source 1..17: mol_type = other DNA
accttctgcgagggctc

SEQ ID NO: 145877 - DNA, 17 bp, synthetic construct
  source 1..17: mol_type = other DNA
ccttctgcgagggctcc

SEQ ID NO: 145878 - DNA, 17 bp, synthetic construct
  source 1..17: mol_type = other DNA
cttctgcgagggctcct

SEQ ID NO: 145879 - DNA, 17 bp, synthetic construct
  source 1..17: mol_type = other DNA
ttctgcgagggctcctg

SEQ ID NO: 145880 - DNA, 17 bp, synthetic construct
  source 1..17: mol_type = other DNA
tctgcgagggctcctgc

SEQ ID NO: 145881 - DNA, 17 bp, synthetic construct
  source 1..17: mol_type = other DNA
ctgcgagggctcctgcc

SEQ ID NO: 145882 - DNA, 17 bp, synthetic construct
  source 1..17: mol_type = other DNA
tgcgagggctcctgccc

SEQ ID NO: 145883 - DNA, 17 bp, synthetic construct
  source 1..17: mol_type = other DNA
gcgagggctcctgcccc

SEQ ID NO: 145884 - DNA, 17 bp, synthetic construct
  source 1..17: mol_type = other DNA
cgagggctcctgccccg

SEQ ID NO: 145885 - DNA, 17 bp, synthetic construct
  source 1..17: mol_type = other DNA
gagggctcctgccccgg

SEQ ID NO: 145886 - DNA, 17 bp, synthetic construct
  source 1..17: mol_type = other DNA
agggctcctgccccgga

SEQ ID NO: 145887 - DNA, 17 bp, synthetic construct
  source 1..17: mol_type = other DNA
gggctcctgccccggag

SEQ ID NO: 145888 - DNA, 17 bp, synthetic construct
  source 1..17: mol_type = other DNA
ggctcctgccccggagc

SEQ ID NO: 145889 - DNA, 17 bp, synthetic construct
  source 1..17: mol_type = other DNA
gctcctgccccggagcg

SEQ ID NO: 145890 - DNA, 17 bp, synthetic construct
  source 1..17: mol_type = other DNA
ctcctgccccggagcgt

SEQ ID NO: 145891 - DNA, 17 bp, synthetic construct
  source 1..17: mol_type = other DNA
tcctgccccggagcgtc

SEQ ID NO: 145892 - DNA, 17 bp, synthetic construct
  source 1..17: mol_type = other DNA
cctgccccggagcgtcc

SEQ ID NO: 145893 - DNA, 17 bp, synthetic construct
  source 1..17: mol_type = other DNA
ctgccccggagcgtcca

SEQ ID NO: 145894 - DNA, 17 bp, synthetic construct
  source 1..17: mol_type = other DNA
tgccccggagcgtccaa

SEQ ID NO: 145895 - DNA, 17 bp, synthetic construct
  source 1..17: mol_type = other DNA
gccccggagcgtccaag

SEQ ID NO: 145896 - DNA, 17 bp, synthetic construct
  source 1..17: mol_type = other DNA
ccccggagcgtccaagt

SEQ ID NO: 145897 - DNA, 17 bp, synthetic construct
  source 1..17: mol_type = other DNA
cccggagcgtccaagtg

SEQ ID NO: 145898 - DNA, 17 bp, synthetic construct
  source 1..17: mol_type = other DNA
ccggagcgtccaagtga

SEQ ID NO: 145899 - DNA, 17 bp, synthetic construct
  source 1..17: mol_type = other DNA
cggagcgtccaagtgag

SEQ ID NO: 145900 - DNA, 17 bp, synthetic construct
  source 1..17: mol_type = other DNA
ggagcgtccaagtgagt

SEQ ID NO: 145901 - DNA, 17 bp, synthetic construct
  source 1..17: mol_type = other DNA
gagcgtccaagtgagtg

SEQ ID NO: 145902 - DNA, 17 bp, synthetic construct
  source 1..17: mol_type = other DNA
agcgtccaagtgagtgg

SEQ ID NO: 145903 - DNA, 17 bp, synthetic construct
  source 1..17: mol_type = other DNA
gcgtccaagtgagtggg

SEQ ID NO: 145904 - DNA, 17 bp, synthetic construct
  source 1..17: mol_type = other DNA
cgtccaagtgagtgggc

SEQ ID NO: 145905 - DNA, 17 bp, synthetic construct
  source 1..17: mol_type = other DNA
gtccaagtgagtgggct

SEQ ID NO: 145906 - DNA, 17 bp, synthetic construct
  source 1..17: mol_type = other DNA
tccaagtgagtgggctc

SEQ ID NO: 145907 - DNA, 17 bp, synthetic construct
  source 1..17: mol_type = other DNA
ccaagtgagtgggctcc

SEQ ID NO: 145908 - DNA, 17 bp, synthetic construct
  source 1..17: mol_type = other DNA
caagtgagtgggctcct

SEQ ID NO: 145909 - DNA, 17 bp, synthetic construct
  source 1..17: mol_type = other DNA
aagtgagtgggctcctg

SEQ ID NO: 145910 - DNA, 17 bp, synthetic construct
  source 1..17: mol_type = other DNA
agtgagtgggctcctgg

SEQ ID NO: 145911 - DNA, 17 bp, synthetic construct
  source 1..17: mol_type = other DNA
gtgagtgggctcctggc

SEQ ID NO: 145912 - DNA, 17 bp, synthetic construct
  source 1..17: mol_type = other DNA
tgagtgggctcctggcc

SEQ ID NO: 145913 - DNA, 17 bp, synthetic construct
  source 1..17: mol_type = other DNA
gagtgggctcctggccc

SEQ ID NO: 145914 - DNA, 17 bp, synthetic construct
  source 1..17: mol_type = other DNA
agtgggctcctggccct

SEQ ID NO: 145915 - DNA, 17 bp, synthetic construct
  source 1..17: mol_type = other DNA
gtgggctcctggccctg

SEQ ID NO: 145916 - DNA, 17 bp, synthetic construct
  source 1..17: mol_type = other DNA
tgggctcctggccctgt

SEQ ID NO: 145917 - DNA, 17 bp, synthetic construct
  source 1..17: mol_type = other DNA
gggctcctggccctgtg

SEQ ID NO: 145918 - DNA, 17 bp, synthetic construct
  source 1..17: mol_type = other DNA
ggctcctggccctgtgc

SEQ ID NO: 145919 - DNA, 17 bp, synthetic construct
  source 1..17: mol_type = other DNA
gctcctggccctgtgcc

SEQ ID NO: 145920 - DNA, 17 bp, synthetic construct
  source 1..17: mol_type = other DNA
ctcctggccctgtgcca

SEQ ID NO: 145921 - DNA, 17 bp, synthetic construct
  source 1..17: mol_type = other DNA
tcctggccctgtgccaa

SEQ ID NO: 145922 - DNA, 17 bp, synthetic construct
  source 1..17: mol_type = other DNA
cctggccctgtgccaag

SEQ ID NO: 145923 - DNA, 17 bp, synthetic construct
  source 1..17: mol_type = other DNA
ctggccctgtgccaaga

SEQ ID NO: 145924 - DNA, 17 bp, synthetic construct
  source 1..17: mol_type = other DNA
tggccctgtgccaagag

SEQ ID NO: 145925 - DNA, 17 bp, synthetic construct
  source 1..17: mol_type = other DNA
ggccctgtgccaagagc

SEQ ID NO: 145926 - DNA, 17 bp, synthetic construct
  source 1..17: mol_type = other DNA
gccctgtgccaagagca

SEQ ID NO: 145927 - DNA, 17 bp, synthetic construct
  source 1..17: mol_type = other DNA
ccctgtgccaagagcac

SEQ ID NO: 145928 - DNA, 17 bp, synthetic construct
  source 1..17: mol_type = other DNA
cctgtgccaagagcacc

SEQ ID NO: 145929 - DNA, 17 bp, synthetic construct
  source 1..17: mol_type = other DNA
ctgtgccaagagcacct

SEQ ID NO: 145930 - DNA, 17 bp, synthetic construct
  source 1..17: mol_type = other DNA
tgtgccaagagcacctg

SEQ ID NO: 145931 - DNA, 17 bp, synthetic construct
  source 1..17: mol_type = other DNA
gtgccaagagcacctgc

SEQ ID NO: 145932 - DNA, 17 bp, synthetic construct
  source 1..17: mol_type = other DNA
tgccaagagcacctgcg

SEQ ID NO: 145933 - DNA, 17 bp, synthetic construct
  source 1..17: mol_type = other DNA
gccaagagcacctgcgt

SEQ ID NO: 145934 - DNA, 17 bp, synthetic construct
  source 1..17: mol_type = other DNA
ccaagagcacctgcgtg

SEQ ID NO: 145935 - DNA, 17 bp, synthetic construct
  source 1..17: mol_type = other DNA
caagagcacctgcgtgt

SEQ ID NO: 145936 - DNA, 17 bp, synthetic construct
  source 1..17: mol_type = other DNA
aagagcacctgcgtgtg

SEQ ID NO: 145937 - DNA, 17 bp, synthetic construct
  source 1..17: mol_type = other DNA
agagcacctgcgtgtgg

SEQ ID NO: 145938 - DNA, 17 bp, synthetic construct
  source 1..17: mol_type = other DNA
gagcacctgcgtgtggt

SEQ ID NO: 145939 - DNA, 17 bp, synthetic construct
  source 1..17: mol_type = other DNA
agcacctgcgtgtggtg

SEQ ID NO: 145940 - DNA, 17 bp, synthetic construct
  source 1..17: mol_type = other DNA
gcacctgcgtgtggtgg

SEQ ID NO: 145941 - DNA, 17 bp, synthetic construct
  source 1..17: mol_type = other DNA
cacctgcgtgtggtggg

SEQ ID NO: 145942 - DNA, 17 bp, synthetic construct
  source 1..17: mol_type = other DNA
acctgcgtgtggtgggt

SEQ ID NO: 145943 - DNA, 17 bp, synthetic construct
  source 1..17: mol_type = other DNA
cctgcgtgtggtgggtc

SEQ ID NO: 145944 - DNA, 17 bp, synthetic construct
  source 1..17: mol_type = other DNA
ctgcgtgtggtgggtcc

SEQ ID NO: 145945 - DNA, 17 bp, synthetic construct
  source 1..17: mol_type = other DNA
tgcgtgtggtgggtccg

SEQ ID NO: 145946 - DNA, 17 bp, synthetic construct
  source 1..17: mol_type = other DNA
gcgtgtggtgggtccgc

SEQ ID NO: 145947 - DNA, 17 bp, synthetic construct
  source 1..17: mol_type = other DNA
cgtgtggtgggtccgcc

SEQ ID NO: 145948 - DNA, 17 bp, synthetic construct
  source 1..17: mol_type = other DNA
gtgtggtgggtccgccc

SEQ ID NO: 145949 - DNA, 17 bp, synthetic construct
  source 1..17: mol_type = other DNA
tgtggtgggtccgccct

SEQ ID NO: 145950 - DNA, 17 bp, synthetic construct
  source 1..17: mol_type = other DNA
gtggtgggtccgccctg

SEQ ID NO: 145951 - DNA, 17 bp, synthetic construct
  source 1..17: mol_type = other DNA
tggtgggtccgccctgg

SEQ ID NO: 145952 - DNA, 17 bp, synthetic construct
  source 1..17: mol_type = other DNA
ggtgggtccgccctggc

SEQ ID NO: 145953 - DNA, 17 bp, synthetic construct
  source 1..17: mol_type = other DNA
gtgggtccgccctggcc

SEQ ID NO: 145954 - DNA, 17 bp, synthetic construct
  source 1..17: mol_type = other DNA
tgggtccgccctggccc

SEQ ID NO: 145955 - DNA, 17 bp, synthetic construct
  source 1..17: mol_type = other DNA
gggtccgccctggcccg

SEQ ID NO: 145956 - DNA, 17 bp, synthetic construct
  source 1..17: mol_type = other DNA
ggtccgccctggcccgt

SEQ ID NO: 145957 - DNA, 17 bp, synthetic construct
  source 1..17: mol_type = other DNA
gtccgccctggcccgtc

SEQ ID NO: 145958 - DNA, 17 bp, synthetic construct
  source 1..17: mol_type = other DNA
tccgccctggcccgtca

SEQ ID NO: 145959 - DNA, 17 bp, synthetic construct
  source 1..17: mol_type = other DNA
ccgccctggcccgtcag

SEQ ID NO: 145960 - DNA, 17 bp, synthetic construct
  source 1..17: mol_type = other DNA
cgccctggcccgtcagc

SEQ ID NO: 145961 - DNA, 17 bp, synthetic construct
  source 1..17: mol_type = other DNA
gccctggcccgtcagct

SEQ ID NO: 145962 - DNA, 17 bp, synthetic construct
  source 1..17: mol_type = other DNA
ccctggcccgtcagctg

SEQ ID NO: 145963 - DNA, 17 bp, synthetic construct
  source 1..17: mol_type = other DNA
cctggcccgtcagctgg

SEQ ID NO: 145964 - DNA, 17 bp, synthetic construct
  source 1..17: mol_type = other DNA
ctggcccgtcagctggc

SEQ ID NO: 145965 - DNA, 17 bp, synthetic construct
  source 1..17: mol_type = other DNA
tggcccgtcagctggct

SEQ ID NO: 145966 - DNA, 17 bp, synthetic construct
  source 1..17: mol_type = other DNA
ggcccgtcagctggctg

SEQ ID NO: 145967 - DNA, 17 bp, synthetic construct
  source 1..17: mol_type = other DNA
gcccgtcagctggctgg

SEQ ID NO: 145968 - DNA, 17 bp, synthetic construct
  source 1..17: mol_type = other DNA
cccgtcagctggctggc

SEQ ID NO: 145969 - DNA, 17 bp, synthetic construct
  source 1..17: mol_type = other DNA
ccgtcagctggctggca

SEQ ID NO: 145970 - DNA, 17 bp, synthetic construct
  source 1..17: mol_type = other DNA
cgtcagctggctggcag

SEQ ID NO: 145971 - DNA, 17 bp, synthetic construct
  source 1..17: mol_type = other DNA
gtcagctggctggcagc

SEQ ID NO: 145972 - DNA, 17 bp, synthetic construct
  source 1..17: mol_type = other DNA
tcagctggctggcagcc

SEQ ID NO: 145973 - DNA, 17 bp, synthetic construct
  source 1..17: mol_type = other DNA
cagctggctggcagcct

SEQ ID NO: 145974 - DNA, 17 bp, synthetic construct
  source 1..17: mol_type = other DNA
agctggctggcagcctg

SEQ ID NO: 145975 - DNA, 17 bp, synthetic construct
  source 1..17: mol_type = other DNA
gctggctggcagcctgc

SEQ ID NO: 145976 - DNA, 17 bp, synthetic construct
  source 1..17: mol_type = other DNA
ctggctggcagcctgct

SEQ ID NO: 145977 - DNA, 17 bp, synthetic construct
  source 1..17: mol_type = other DNA
tggctggcagcctgctc

SEQ ID NO: 145978 - DNA, 17 bp, synthetic construct
  source 1..17: mol_type = other DNA
ggctggcagcctgctct

SEQ ID NO: 145979 - DNA, 17 bp, synthetic construct
  source 1..17: mol_type = other DNA
gctggcagcctgctctg

SEQ ID NO: 145980 - DNA, 17 bp, synthetic construct
  source 1..17: mol_type = other DNA
ctggcagcctgctctgg

SEQ ID NO: 145981 - DNA, 17 bp, synthetic construct
  source 1..17: mol_type = other DNA
tggcagcctgctctggg

SEQ ID NO: 145982 - DNA, 17 bp, synthetic construct
  source 1..17: mol_type = other DNA
ggcagcctgctctgggt

SEQ ID NO: 145983 - DNA, 17 bp, synthetic construct
  source 1..17: mol_type = other DNA
gcagcctgctctgggtc

SEQ ID NO: 145984 - DNA, 17 bp, synthetic construct
  source 1..17: mol_type = other DNA
cagcctgctctgggtca

SEQ ID NO: 145985 - DNA, 17 bp, synthetic construct
  source 1..17: mol_type = other DNA
agcctgctctgggtcag

SEQ ID NO: 145986 - DNA, 17 bp, synthetic construct
  source 1..17: mol_type = other DNA
gcctgctctgggtcagg

SEQ ID NO: 145987 - DNA, 17 bp, synthetic construct
  source 1..17: mol_type = other DNA
cctgctctgggtcagga

SEQ ID NO: 145988 - DNA, 17 bp, synthetic construct
  source 1..17: mol_type = other DNA
ctgctctgggtcaggag

SEQ ID NO: 145989 - DNA, 17 bp, synthetic construct
  source 1..17: mol_type = other DNA
tgctctgggtcaggagg

SEQ ID NO: 145990 - DNA, 17 bp, synthetic construct
  source 1..17: mol_type = other DNA
gctctgggtcaggaggg

SEQ ID NO: 145991 - DNA, 17 bp, synthetic construct
  source 1..17: mol_type = other DNA
ctctgggtcaggagggc

SEQ ID NO: 145992 - DNA, 17 bp, synthetic construct
  source 1..17: mol_type = other DNA
tctgggtcaggagggcc

SEQ ID NO: 145993 - DNA, 17 bp, synthetic construct
  source 1..17: mol_type = other DNA
ctgggtcaggagggcct

SEQ ID NO: 145994 - DNA, 17 bp, synthetic construct
  source 1..17: mol_type = other DNA
tgggtcaggagggccta

SEQ ID NO: 145995 - DNA, 17 bp, synthetic construct
  source 1..17: mol_type = other DNA
gggtcaggagggcctac

SEQ ID NO: 145996 - DNA, 17 bp, synthetic construct
  source 1..17: mol_type = other DNA
ggtcaggagggcctacg

SEQ ID NO: 145997 - DNA, 17 bp, synthetic construct
  source 1..17: mol_type = other DNA
gtcaggagggcctacgc

SEQ ID NO: 145998 - DNA, 17 bp, synthetic construct
  source 1..17: mol_type = other DNA
tcaggagggcctacgcc

SEQ ID NO: 145999 - DNA, 17 bp, synthetic construct
  source 1..17: mol_type = other DNA
caggagggcctacgcca

SEQ ID NO: 146000 - DNA, 17 bp, synthetic construct
  source 1..17: mol_type = other DNA
aggagggcctacgccag

SEQ ID NO: 146001 - DNA, 17 bp, synthetic construct
  source 1..17: mol_type = other DNA
ggagggcctacgccagc

SEQ ID NO: 146002 - DNA, 17 bp, synthetic construct
  source 1..17: mol_type = other DNA
gagggcctacgccagct

SEQ ID NO: 146003 - DNA, 17 bp, synthetic construct
  source 1..17: mol_type = other DNA
agggcctacgccagctc

SEQ ID NO: 146004 - DNA, 17 bp, synthetic construct
  source 1..17: mol_type = other DNA
gggcctacgccagctcc

SEQ ID NO: 146005 - DNA, 17 bp, synthetic construct
  source 1..17: mol_type = other DNA
ggcctacgccagctcca

SEQ ID NO: 146006 - DNA, 17 bp, synthetic construct
  source 1..17: mol_type = other DNA
gcctacgccagctccag

SEQ ID NO: 146007 - DNA, 17 bp, synthetic construct
  source 1..17: mol_type = other DNA
cctacgccagctccagg

SEQ ID NO: 146008 - DNA, 17 bp, synthetic construct
  source 1..17: mol_type = other DNA
ctacgccagctccagga

SEQ ID NO: 146009 - DNA, 17 bp, synthetic construct
  source 1..17: mol_type = other DNA
tacgccagctccaggaa

SEQ ID NO: 146010 - DNA, 17 bp, synthetic construct
  source 1..17: mol_type = other DNA
acgccagctccaggaag

SEQ ID NO: 146011 - DNA, 17 bp, synthetic construct
  source 1..17: mol_type = other DNA
cgccagctccaggaagg

SEQ ID NO: 146012 - DNA, 17 bp, synthetic construct
  source 1..17: mol_type = other DNA
gccagctccaggaagga

SEQ ID NO: 146013 - DNA, 17 bp, synthetic construct
  source 1..17: mol_type = other DNA
ccagctccaggaaggag

SEQ ID NO: 146014 - DNA, 17 bp, synthetic construct
  source 1..17: mol_type = other DNA
cagctccaggaaggagg

SEQ ID NO: 146015 - DNA, 17 bp, synthetic construct
  source 1..17: mol_type = other DNA
agctccaggaaggaggg

SEQ ID NO: 146016 - DNA, 17 bp, synthetic construct
  source 1..17: mol_type = other DNA
gctccaggaaggaggga

SEQ ID NO: 146017 - DNA, 17 bp, synthetic construct
  source 1..17: mol_type = other DNA
ctccaggaaggagggaa

SEQ ID NO: 146018 - DNA, 17 bp, synthetic construct
  source 1..17: mol_type = other DNA
tccaggaaggagggaag

SEQ ID NO: 146019 - DNA, 17 bp, synthetic construct
  source 1..17: mol_type = other DNA
ccaggaaggagggaagg

SEQ ID NO: 146020 - DNA, 17 bp, synthetic construct
  source 1..17: mol_type = other DNA
caggaaggagggaaggg

SEQ ID NO: 146021 - DNA, 17 bp, synthetic construct
  source 1..17: mol_type = other DNA
aggaaggagggaagggg

SEQ ID NO: 146022 - DNA, 17 bp, synthetic construct
  source 1..17: mol_type = other DNA
ggaaggagggaaggggc

SEQ ID NO: 146023 - DNA, 17 bp, synthetic construct
  source 1..17: mol_type = other DNA
gaaggagggaaggggct

SEQ ID NO: 146024 - DNA, 17 bp, synthetic construct
  source 1..17: mol_type = other DNA
aaggagggaaggggctc

SEQ ID NO: 146025 - DNA, 17 bp, synthetic construct
  source 1..17: mol_type = other DNA
aggagggaaggggctcc

SEQ ID NO: 146026 - DNA, 17 bp, synthetic construct
  source 1..17: mol_type = other DNA
ggagggaaggggctccc

SEQ ID NO: 146027 - DNA, 17 bp, synthetic construct
  source 1..17: mol_type = other DNA
gagggaaggggctcccc

SEQ ID NO: 146028 - DNA, 17 bp, synthetic construct
  source 1..17: mol_type = other DNA
agggaaggggctcccca

SEQ ID NO: 146029 - DNA, 17 bp, synthetic construct
  source 1..17: mol_type = other DNA
gggaaggggctccccag

SEQ ID NO: 146030 - DNA, 17 bp, synthetic construct
  source 1..17: mol_type = other DNA
ggaaggggctccccagc

SEQ ID NO: 146031 - DNA, 17 bp, synthetic construct
  source 1..17: mol_type = other DNA
gaaggggctccccagca

SEQ ID NO: 146032 - DNA, 17 bp, synthetic construct
  source 1..17: mol_type = other DNA
aaggggctccccagcag

SEQ ID NO: 146033 - DNA, 17 bp, synthetic construct
  source 1..17: mol_type = other DNA
aggggctccccagcagg

SEQ ID NO: 146034 - DNA, 17 bp, synthetic construct
  source 1..17: mol_type = other DNA
ggggctccccagcaggg

SEQ ID NO: 146035 - DNA, 17 bp, synthetic construct
  source 1..17: mol_type = other DNA
gggctccccagcagggc

SEQ ID NO: 146036 - DNA, 17 bp, synthetic construct
  source 1..17: mol_type = other DNA
ggctccccagcagggct

SEQ ID NO: 146037 - DNA, 17 bp, synthetic construct
  source 1..17: mol_type = other DNA
gctccccagcagggctc

SEQ ID NO: 146038 - DNA, 17 bp, synthetic construct
  source 1..17: mol_type = other DNA
ctccccagcagggctcc

SEQ ID NO: 146039 - DNA, 17 bp, synthetic construct
  source 1..17: mol_type = other DNA
tccccagcagggctccc

SEQ ID NO: 146040 - DNA, 17 bp, synthetic construct
  source 1..17: mol_type = other DNA
ccccagcagggctcccc

SEQ ID NO: 146041 - DNA, 17 bp, synthetic construct
  source 1..17: mol_type = other DNA
cccagcagggctccccc

SEQ ID NO: 146042 - DNA, 17 bp, synthetic construct
  source 1..17: mol_type = other DNA
ccagcagggctccccct

SEQ ID NO: 146043 - DNA, 17 bp, synthetic construct
  source 1..17: mol_type = other DNA
cagcagggctccccctc

SEQ ID NO: 146044 - DNA, 17 bp, synthetic construct
  source 1..17: mol_type = other DNA
agcagggctccccctct

SEQ ID NO: 146045 - DNA, 17 bp, synthetic construct
  source 1..17: mol_type = other DNA
gcagggctccccctctc

SEQ ID NO: 146046 - DNA, 17 bp, synthetic construct
  source 1..17: mol_type = other DNA
cagggctccccctctcc

SEQ ID NO: 146047 - DNA, 17 bp, synthetic construct
  source 1..17: mol_type = other DNA
agggctccccctctcca

SEQ ID NO: 146048 - DNA, 17 bp, synthetic construct
  source 1..17: mol_type = other DNA
gggctccccctctccac

SEQ ID NO: 146049 - DNA, 17 bp, synthetic construct
  source 1..17: mol_type = other DNA
ggctccccctctccacg

SEQ ID NO: 146050 - DNA, 17 bp, synthetic construct
  source 1..17: mol_type = other DNA
gctccccctctccacgt

SEQ ID NO: 146051 - DNA, 17 bp, synthetic construct
  source 1..17: mol_type = other DNA
ctccccctctccacgtc

SEQ ID NO: 146052 - DNA, 17 bp, synthetic construct
  source 1..17: mol_type = other DNA
tccccctctccacgtcc

SEQ ID NO: 146053 - DNA, 17 bp, synthetic construct
  source 1..17: mol_type = other DNA
ccccctctccacgtcca

SEQ ID NO: 146054 - DNA, 17 bp, synthetic construct
  source 1..17: mol_type = other DNA
cccctctccacgtccat

SEQ ID NO: 146055 - DNA, 17 bp, synthetic construct
  source 1..17: mol_type = other DNA
ccctctccacgtccatt

SEQ ID NO: 146056 - DNA, 17 bp, synthetic construct
  source 1..17: mol_type = other DNA
cctctccacgtccattg

SEQ ID NO: 146057 - DNA, 17 bp, synthetic construct
  source 1..17: mol_type = other DNA
ctctccacgtccattgg

SEQ ID NO: 146058 - DNA, 17 bp, synthetic construct
  source 1..17: mol_type = other DNA
tctccacgtccattggc

SEQ ID NO: 146059 - DNA, 17 bp, synthetic construct
  source 1..17: mol_type = other DNA
ctccacgtccattggca

SEQ ID NO: 146060 - DNA, 17 bp, synthetic construct
  source 1..17: mol_type = other DNA
tccacgtccattggcag

SEQ ID NO: 146061 - DNA, 17 bp, synthetic construct
  source 1..17: mol_type = other DNA
ccacgtccattggcaga

SEQ ID NO: 146062 - DNA, 17 bp, synthetic construct
  source 1..17: mol_type = other DNA
cacgtccattggcagaa

SEQ ID NO: 146063 - DNA, 17 bp, synthetic construct
  source 1..17: mol_type = other DNA
acgtccattggcagaaa

SEQ ID NO: 146064 - DNA, 17 bp, synthetic construct
  source 1..17: mol_type = other DNA
cgtccattggcagaaag

SEQ ID NO: 146065 - DNA, 17 bp, synthetic construct
  source 1..17: mol_type = other DNA
gtccattggcagaaagc

SEQ ID NO: 146066 - DNA, 17 bp, synthetic construct
  source 1..17: mol_type = other DNA
tccattggcagaaagcc

SEQ ID NO: 146067 - DNA, 17 bp, synthetic construct
  source 1..17: mol_type = other DNA
ccattggcagaaagcct

SEQ ID NO: 146068 - DNA, 17 bp, synthetic construct
  source 1..17: mol_type = other DNA
cattggcagaaagcctg

SEQ ID NO: 146069 - DNA, 17 bp, synthetic construct
  source 1..17: mol_type = other DNA
attggcagaaagcctgg

SEQ ID NO: 146070 - DNA, 17 bp, synthetic construct
  source 1..17: mol_type = other DNA
ttggcagaaagcctggg

SEQ ID NO: 146071 - DNA, 17 bp, synthetic construct
  source 1..17: mol_type = other DNA
tggcagaaagcctgggg

SEQ ID NO: 146072 - DNA, 17 bp, synthetic construct
  source 1..17: mol_type = other DNA
ggcagaaagcctggggc

SEQ ID NO: 146073 - DNA, 17 bp, synthetic construct
  source 1..17: mol_type = other DNA
gcagaaagcctggggcc

SEQ ID NO: 146074 - DNA, 17 bp, synthetic construct
  source 1..17: mol_type = other DNA
cagaaagcctggggccg

SEQ ID NO: 146075 - DNA, 17 bp, synthetic construct
  source 1..17: mol_type = other DNA
agaaagcctggggccgc

SEQ ID NO: 146076 - DNA, 17 bp, synthetic construct
  source 1..17: mol_type = other DNA
gaaagcctggggccgct

SEQ ID NO: 146077 - DNA, 17 bp, synthetic construct
  source 1..17: mol_type = other DNA
aaagcctggggccgctc

SEQ ID NO: 146078 - DNA, 17 bp, synthetic construct
  source 1..17: mol_type = other DNA
aagcctggggccgctct

SEQ ID NO: 146079 - DNA, 17 bp, synthetic construct
  source 1..17: mol_type = other DNA
agcctggggccgctctc

SEQ ID NO: 146080 - DNA, 17 bp, synthetic construct
  source 1..17: mol_type = other DNA
gcctggggccgctctcc

SEQ ID NO: 146081 - DNA, 17 bp, synthetic construct
  source 1..17: mol_type = other DNA
cctggggccgctctcct

SEQ ID NO: 146082 - DNA, 17 bp, synthetic construct
  source 1..17: mol_type = other DNA
ctggggccgctctccta

SEQ ID NO: 146083 - DNA, 17 bp, synthetic construct
  source 1..17: mol_type = other DNA
tggggccgctctcctag

SEQ ID NO: 146084 - DNA, 17 bp, synthetic construct
  source 1..17: mol_type = other DNA
ggggccgctctcctagc

SEQ ID NO: 146085 - DNA, 17 bp, synthetic construct
  source 1..17: mol_type = other DNA
gggccgctctcctagcc

SEQ ID NO: 146086 - DNA, 17 bp, synthetic construct
  source 1..17: mol_type = other DNA
ggccgctctcctagcca

SEQ ID NO: 146087 - DNA, 17 bp, synthetic construct
  source 1..17: mol_type = other DNA
gccgctctcctagccag

SEQ ID NO: 146088 - DNA, 17 bp, synthetic construct
  source 1..17: mol_type = other DNA
ccgctctcctagccagg

SEQ ID NO: 146089 - DNA, 17 bp, synthetic construct
  source 1..17: mol_type = other DNA
cgctctcctagccaggc

SEQ ID NO: 146090 - DNA, 17 bp, synthetic construct
  source 1..17: mol_type = other DNA
gctctcctagccaggcc

SEQ ID NO: 146091 - DNA, 17 bp, synthetic construct
  source 1..17: mol_type = other DNA
ctctcctagccaggcca

SEQ ID NO: 146092 - DNA, 17 bp, synthetic construct
  source 1..17: mol_type = other DNA
tctcctagccaggccag

SEQ ID NO: 146093 - DNA, 17 bp, synthetic construct
  source 1..17: mol_type = other DNA
ctcctagccaggccagg

SEQ ID NO: 146094 - DNA, 17 bp, synthetic construct
  source 1..17: mol_type = other DNA
tcctagccaggccaggg

SEQ ID NO: 146095 - DNA, 17 bp, synthetic construct
  source 1..17: mol_type = other DNA
cctagccaggccagggc

SEQ ID NO: 146096 - DNA, 17 bp, synthetic construct
  source 1..17: mol_type = other DNA
ctagccaggccagggcc

SEQ ID NO: 146097 - DNA, 17 bp, synthetic construct
  source 1..17: mol_type = other DNA
tagccaggccagggccc

SEQ ID NO: 146098 - DNA, 17 bp, synthetic construct
  source 1..17: mol_type = other DNA
agccaggccagggcccg

SEQ ID NO: 146099 - DNA, 17 bp, synthetic construct
  source 1..17: mol_type = other DNA
gccaggccagggcccgg

SEQ ID NO: 146100 - DNA, 17 bp, synthetic construct
  source 1..17: mol_type = other DNA
ccaggccagggcccggc

SEQ ID NO: 146101 - DNA, 17 bp, synthetic construct
  source 1..17: mol_type = other DNA
caggccagggcccggct

SEQ ID NO: 146102 - DNA, 17 bp, synthetic construct
  source 1..17: mol_type = other DNA
aggccagggcccggctg

SEQ ID NO: 146103 - DNA, 17 bp, synthetic construct
  source 1..17: mol_type = other DNA
ggccagggcccggctga

SEQ ID NO: 146104 - DNA, 17 bp, synthetic construct
  source 1..17: mol_type = other DNA
gccagggcccggctgag

SEQ ID NO: 146105 - DNA, 17 bp, synthetic construct
  source 1..17: mol_type = other DNA
ccagggcccggctgagc

SEQ ID NO: 146106 - DNA, 17 bp, synthetic construct
  source 1..17: mol_type = other DNA
cagggcccggctgagcc

SEQ ID NO: 146107 - DNA, 17 bp, synthetic construct
  source 1..17: mol_type = other DNA
agggcccggctgagccg

SEQ ID NO: 146108 - DNA, 17 bp, synthetic construct
  source 1..17: mol_type = other DNA
gggcccggctgagccga

SEQ ID NO: 146109 - DNA, 17 bp, synthetic construct
  source 1..17: mol_type = other DNA
ggcccggctgagccgag

SEQ ID NO: 146110 - DNA, 17 bp, synthetic construct
  source 1..17: mol_type = other DNA
gcccggctgagccgagc

SEQ ID NO: 146111 - DNA, 17 bp, synthetic construct
  source 1..17: mol_type = other DNA
cccggctgagccgagcc

SEQ ID NO: 146112 - DNA, 17 bp, synthetic construct
  source 1..17: mol_type = other DNA
ccggctgagccgagcca

SEQ ID NO: 146113 - DNA, 17 bp, synthetic construct
  source 1..17: mol_type = other DNA
cggctgagccgagccac

SEQ ID NO: 146114 - DNA, 17 bp, synthetic construct
  source 1..17: mol_type = other DNA
ggctgagccgagccaca

SEQ ID NO: 146115 - DNA, 17 bp, synthetic construct
  source 1..17: mol_type = other DNA
gctgagccgagccacat

SEQ ID NO: 146116 - DNA, 17 bp, synthetic construct
  source 1..17: mol_type = other DNA
ctgagccgagccacatg

SEQ ID NO: 146117 - DNA, 17 bp, synthetic construct
  source 1..17: mol_type = other DNA
tgagccgagccacatgg

SEQ ID NO: 146118 - DNA, 17 bp, synthetic construct
  source 1..17: mol_type = other DNA
gagccgagccacatggc

SEQ ID NO: 146119 - DNA, 17 bp, synthetic construct
  source 1..17: mol_type = other DNA
agccgagccacatggca

SEQ ID NO: 146120 - DNA, 17 bp, synthetic construct
  source 1..17: mol_type = other DNA
gccgagccacatggcac

SEQ ID NO: 146121 - DNA, 17 bp, synthetic construct
  source 1..17: mol_type = other DNA
ccgagccacatggcaca

SEQ ID NO: 146122 - DNA, 17 bp, synthetic construct
  source 1..17: mol_type = other DNA
cgagccacatggcacag

SEQ ID NO: 146123 - DNA, 17 bp, synthetic construct
  source 1..17: mol_type = other DNA
gagccacatggcacaga

SEQ ID NO: 146124 - DNA, 17 bp, synthetic construct
  source 1..17: mol_type = other DNA
agccacatggcacagag

SEQ ID NO: 146125 - DNA, 17 bp, synthetic construct
  source 1..17: mol_type = other DNA
gccacatggcacagagc

SEQ ID NO: 146126 - DNA, 17 bp, synthetic construct
  source 1..17: mol_type = other DNA
ccacatggcacagagct

SEQ ID NO: 146127 - DNA, 17 bp, synthetic construct
  source 1..17: mol_type = other DNA
cacatggcacagagctc

SEQ ID NO: 146128 - DNA, 17 bp, synthetic construct
  source 1..17: mol_type = other DNA
acatggcacagagctcc

SEQ ID NO: 146129 - DNA, 17 bp, synthetic construct
  source 1..17: mol_type = other DNA
catggcacagagctccc

SEQ ID NO: 146130 - DNA, 17 bp, synthetic construct
  source 1..17: mol_type = other DNA
atggcacagagctcccc

SEQ ID NO: 146131 - DNA, 17 bp, synthetic construct
  source 1..17: mol_type = other DNA
tggcacagagctccccg

SEQ ID NO: 146132 - DNA, 17 bp, synthetic construct
  source 1..17: mol_type = other DNA
ggcacagagctccccgc

SEQ ID NO: 146133 - DNA, 17 bp, synthetic construct
  source 1..17: mol_type = other DNA
gcacagagctccccgct

SEQ ID NO: 146134 - DNA, 17 bp, synthetic construct
  source 1..17: mol_type = other DNA
cacagagctccccgctg

SEQ ID NO: 146135 - DNA, 17 bp, synthetic construct
  source 1..17: mol_type = other DNA
acagagctccccgctgc

SEQ ID NO: 146136 - DNA, 17 bp, synthetic construct
  source 1..17: mol_type = other DNA
cagagctccccgctgcg

SEQ ID NO: 146137 - DNA, 17 bp, synthetic construct
  source 1..17: mol_type = other DNA
agagctccccgctgcga

SEQ ID NO: 146138 - DNA, 17 bp, synthetic construct
  source 1..17: mol_type = other DNA
gagctccccgctgcgaa

SEQ ID NO: 146139 - DNA, 17 bp, synthetic construct
  source 1..17: mol_type = other DNA
agctccccgctgcgaac

SEQ ID NO: 146140 - DNA, 17 bp, synthetic construct
  source 1..17: mol_type = other DNA
gctccccgctgcgaacc

SEQ ID NO: 146141 - DNA, 17 bp, synthetic construct
  source 1..17: mol_type = other DNA
ctccccgctgcgaaccc

SEQ ID NO: 146142 - DNA, 17 bp, synthetic construct
  source 1..17: mol_type = other DNA
tccccgctgcgaaccca

SEQ ID NO: 146143 - DNA, 17 bp, synthetic construct
  source 1..17: mol_type = other DNA
ccccgctgcgaacccag

SEQ ID NO: 146144 - DNA, 17 bp, synthetic construct
  source 1..17: mol_type = other DNA
cccgctgcgaacccagg

SEQ ID NO: 146145 - DNA, 17 bp, synthetic construct
  source 1..17: mol_type = other DNA
ccgctgcgaacccaggt

SEQ ID NO: 146146 - DNA, 17 bp, synthetic construct
  source 1..17: mol_type = other DNA
cgctgcgaacccaggtc

SEQ ID NO: 146147 - DNA, 17 bp, synthetic construct
  source 1..17: mol_type = other DNA
gctgcgaacccaggtcc

SEQ ID NO: 146148 - DNA, 17 bp, synthetic construct
  source 1..17: mol_type = other DNA
ctgcgaacccaggtcca

SEQ ID NO: 146149 - DNA, 17 bp, synthetic construct
  source 1..17: mol_type = other DNA
tgcgaacccaggtccag

SEQ ID NO: 146150 - DNA, 17 bp, synthetic construct
  source 1..17: mol_type = other DNA
gcgaacccaggtccagg

SEQ ID NO: 146151 - DNA, 17 bp, synthetic construct
  source 1..17: mol_type = other DNA
cgaacccaggtccaggt

SEQ ID NO: 146152 - DNA, 17 bp, synthetic construct
  source 1..17: mol_type = other DNA
gaacccaggtccaggtg

SEQ ID NO: 146153 - DNA, 17 bp, synthetic construct
  source 1..17: mol_type = other DNA
aacccaggtccaggtgt

SEQ ID NO: 146154 - DNA, 17 bp, synthetic construct
  source 1..17: mol_type = other DNA
acccaggtccaggtgtc

SEQ ID NO: 146155 - DNA, 17 bp, synthetic construct
  source 1..17: mol_type = other DNA
cccaggtccaggtgtcc

SEQ ID NO: 146156 - DNA, 17 bp, synthetic construct
  source 1..17: mol_type = other DNA
ccaggtccaggtgtccc

SEQ ID NO: 146157 - DNA, 17 bp, synthetic construct
  source 1..17: mol_type = other DNA
caggtccaggtgtcccc

SEQ ID NO: 146158 - DNA, 17 bp, synthetic construct
  source 1..17: mol_type = other DNA
aggtccaggtgtccccc

SEQ ID NO: 146159 - DNA, 17 bp, synthetic construct
  source 1..17: mol_type = other DNA
ggtccaggtgtccccct

SEQ ID NO: 146160 - DNA, 17 bp, synthetic construct
  source 1..17: mol_type = other DNA
gtccaggtgtccccctg

SEQ ID NO: 146161 - DNA, 17 bp, synthetic construct
  source 1..17: mol_type = other DNA
tccaggtgtccccctgg

SEQ ID NO: 146162 - DNA, 17 bp, synthetic construct
  source 1..17: mol_type = other DNA
ccaggtgtccccctggg

SEQ ID NO: 146163 - DNA, 17 bp, synthetic construct
  source 1..17: mol_type = other DNA
caggtgtccccctgggg

SEQ ID NO: 146164 - DNA, 17 bp, synthetic construct
  source 1..17: mol_type = other DNA
aggtgtccccctgggga

SEQ ID NO: 146165 - DNA, 17 bp, synthetic construct
  source 1..17: mol_type = other DNA
ggtgtccccctggggag

SEQ ID NO: 146166 - DNA, 17 bp, synthetic construct
  source 1..17: mol_type = other DNA
gtgtccccctggggagg

SEQ ID NO: 146167 - DNA, 17 bp, synthetic construct
  source 1..17: mol_type = other DNA
tgtccccctggggaggg

SEQ ID NO: 146168 - DNA, 17 bp, synthetic construct
  source 1..17: mol_type = other DNA
gtccccctggggagggt

SEQ ID NO: 146169 - DNA, 17 bp, synthetic construct
  source 1..17: mol_type = other DNA
tccccctggggagggtg

SEQ ID NO: 146170 - DNA, 17 bp, synthetic construct
  source 1..17: mol_type = other DNA
ccccctggggagggtgg

SEQ ID NO: 146171 - DNA, 17 bp, synthetic construct
  source 1..17: mol_type = other DNA
cccctggggagggtggg

SEQ ID NO: 146172 - DNA, 17 bp, synthetic construct
  source 1..17: mol_type = other DNA
ccctggggagggtgggt

SEQ ID NO: 146173 - DNA, 17 bp, synthetic construct
  source 1..17: mol_type = other DNA
cctggggagggtgggtg

SEQ ID NO: 146174 - DNA, 17 bp, synthetic construct
  source 1..17: mol_type = other DNA
ctggggagggtgggtgg

SEQ ID NO: 146175 - DNA, 17 bp, synthetic construct
  source 1..17: mol_type = other DNA
tggggagggtgggtgga

SEQ ID NO: 146176 - DNA, 17 bp, synthetic construct
  source 1..17: mol_type = other DNA
ggggagggtgggtggaa

SEQ ID NO: 146177 - DNA, 17 bp, synthetic construct
  source 1..17: mol_type = other DNA
gggagggtgggtggaac

SEQ ID NO: 146178 - DNA, 17 bp, synthetic construct
  source 1..17: mol_type = other DNA
ggagggtgggtggaacc

SEQ ID NO: 146179 - DNA, 17 bp, synthetic construct
  source 1..17: mol_type = other DNA
gagggtgggtggaacca

SEQ ID NO: 146180 - DNA, 17 bp, synthetic construct
  source 1..17: mol_type = other DNA
agggtgggtggaaccag

SEQ ID NO: 146181 - DNA, 17 bp, synthetic construct
  source 1..17: mol_type = other DNA
gggtgggtggaaccaga

SEQ ID NO: 146182 - DNA, 17 bp, synthetic construct
  source 1..17: mol_type = other DNA
ggtgggtggaaccagag

SEQ ID NO: 146183 - DNA, 17 bp, synthetic construct
  source 1..17: mol_type = other DNA
gtgggtggaaccagagc

SEQ ID NO: 146184 - DNA, 17 bp, synthetic construct
  source 1..17: mol_type = other DNA
tgggtggaaccagagcc

SEQ ID NO: 146185 - DNA, 17 bp, synthetic construct
  source 1..17: mol_type = other DNA
gggtggaaccagagcct

SEQ ID NO: 146186 - DNA, 17 bp, synthetic construct
  source 1..17: mol_type = other DNA
ggtggaaccagagcctt

SEQ ID NO: 146187 - DNA, 17 bp, synthetic construct
  source 1..17: mol_type = other DNA
gtggaaccagagccttc

SEQ ID NO: 146188 - DNA, 17 bp, synthetic construct
  source 1..17: mol_type = other DNA
tggaaccagagccttct

SEQ ID NO: 146189 - DNA, 17 bp, synthetic construct
  source 1..17: mol_type = other DNA
ggaaccagagccttctg

SEQ ID NO: 146190 - DNA, 17 bp, synthetic construct
  source 1..17: mol_type = other DNA
gaaccagagccttctgt

SEQ ID NO: 146191 - DNA, 17 bp, synthetic construct
  source 1..17: mol_type = other DNA
aaccagagccttctgtg

SEQ ID NO: 146192 - DNA, 17 bp, synthetic construct
  source 1..17: mol_type = other DNA
accagagccttctgtga

SEQ ID NO: 146193 - DNA, 17 bp, synthetic construct
  source 1..17: mol_type = other DNA
ccagagccttctgtgaa

SEQ ID NO: 146194 - DNA, 17 bp, synthetic construct
  source 1..17: mol_type = other DNA
cagagccttctgtgaag

SEQ ID NO: 146195 - DNA, 17 bp, synthetic construct
  source 1..17: mol_type = other DNA
agagccttctgtgaagc

SEQ ID NO: 146196 - DNA, 17 bp, synthetic construct
  source 1..17: mol_type = other DNA
gagccttctgtgaagcc

SEQ ID NO: 146197 - DNA, 17 bp, synthetic construct
  source 1..17: mol_type = other DNA
agccttctgtgaagccc

SEQ ID NO: 146198 - DNA, 17 bp, synthetic construct
  source 1..17: mol_type = other DNA
gccttctgtgaagcccc

SEQ ID NO: 146199 - DNA, 17 bp, synthetic construct
  source 1..17: mol_type = other DNA
ccttctgtgaagccccc

SEQ ID NO: 146200 - DNA, 17 bp, synthetic construct
  source 1..17: mol_type = other DNA
cttctgtgaagcccccc

SEQ ID NO: 146201 - DNA, 17 bp, synthetic construct
  source 1..17: mol_type = other DNA
ttctgtgaagcccccca

SEQ ID NO: 146202 - DNA, 17 bp, synthetic construct
  source 1..17: mol_type = other DNA
tctgtgaagccccccat

SEQ ID NO: 146203 - DNA, 17 bp, synthetic construct
  source 1..17: mol_type = other DNA
ctgtgaagccccccatg

SEQ ID NO: 146204 - DNA, 17 bp, synthetic construct
  source 1..17: mol_type = other DNA
tgtgaagccccccatgg

SEQ ID NO: 146205 - DNA, 17 bp, synthetic construct
  source 1..17: mol_type = other DNA
gtgaagccccccatggc

SEQ ID NO: 146206 - DNA, 17 bp, synthetic construct
  source 1..17: mol_type = other DNA
tgaagccccccatggct

SEQ ID NO: 146207 - DNA, 17 bp, synthetic construct
  source 1..17: mol_type = other DNA
gaagccccccatggctt

SEQ ID NO: 146208 - DNA, 17 bp, synthetic construct
  source 1..17: mol_type = other DNA
aagccccccatggcttg

SEQ ID NO: 146209 - DNA, 17 bp, synthetic construct
  source 1..17: mol_type = other DNA
agccccccatggcttgc

SEQ ID NO: 146210 - DNA, 17 bp, synthetic construct
  source 1..17: mol_type = other DNA
gccccccatggcttgcc

SEQ ID NO: 146211 - DNA, 17 bp, synthetic construct
  source 1..17: mol_type = other DNA
ccccccatggcttgcca

SEQ ID NO: 146212 - DNA, 17 bp, synthetic construct
  source 1..17: mol_type = other DNA
cccccatggcttgccac

SEQ ID NO: 146213 - DNA, 17 bp, synthetic construct
  source 1..17: mol_type = other DNA
ccccatggcttgccact

SEQ ID NO: 146214 - DNA, 17 bp, synthetic construct
  source 1..17: mol_type = other DNA
cccatggcttgccactg

SEQ ID NO: 146215 - DNA, 17 bp, synthetic construct
  source 1..17: mol_type = other DNA
ccatggcttgccactgt

SEQ ID NO: 146216 - DNA, 17 bp, synthetic construct
  source 1..17: mol_type = other DNA
catggcttgccactgtg

SEQ ID NO: 146217 - DNA, 17 bp, synthetic construct
  source 1..17: mol_type = other DNA
atggcttgccactgtgg

SEQ ID NO: 146218 - DNA, 17 bp, synthetic construct
  source 1..17: mol_type = other DNA
tggcttgccactgtggt

SEQ ID NO: 146219 - DNA, 17 bp, synthetic construct
  source 1..17: mol_type = other DNA
ggcttgccactgtggtt

SEQ ID NO: 146220 - DNA, 17 bp, synthetic construct
  source 1..17: mol_type = other DNA
gcttgccactgtggttg

SEQ ID NO: 146221 - DNA, 17 bp, synthetic construct
  source 1..17: mol_type = other DNA
cttgccactgtggttgg

SEQ ID NO: 146222 - DNA, 17 bp, synthetic construct
  source 1..17: mol_type = other DNA
ttgccactgtggttggc

SEQ ID NO: 146223 - DNA, 17 bp, synthetic construct
  source 1..17: mol_type = other DNA
tgccactgtggttggct

SEQ ID NO: 146224 - DNA, 17 bp, synthetic construct
  source 1..17: mol_type = other DNA
gccactgtggttggctg

SEQ ID NO: 146225 - DNA, 17 bp, synthetic construct
  source 1..17: mol_type = other DNA
ccactgtggttggctgt

SEQ ID NO: 146226 - DNA, 17 bp, synthetic construct
  source 1..17: mol_type = other DNA
cactgtggttggctgtc

SEQ ID NO: 146227 - DNA, 17 bp, synthetic construct
  source 1..17: mol_type = other DNA
actgtggttggctgtca

SEQ ID NO: 146228 - DNA, 17 bp, synthetic construct
  source 1..17: mol_type = other DNA
ctgtggttggctgtcag

SEQ ID NO: 146229 - DNA, 17 bp, synthetic construct
  source 1..17: mol_type = other DNA
tgtggttggctgtcagc

SEQ ID NO: 146230 - DNA, 17 bp, synthetic construct
  source 1..17: mol_type = other DNA
gtggttggctgtcagca

SEQ ID NO: 146231 - DNA, 17 bp, synthetic construct
  source 1..17: mol_type = other DNA
tggttggctgtcagcag

SEQ ID NO: 146232 - DNA, 17 bp, synthetic construct
  source 1..17: mol_type = other DNA
ggttggctgtcagcagg

SEQ ID NO: 146233 - DNA, 17 bp, synthetic construct
  source 1..17: mol_type = other DNA
gttggctgtcagcagga

SEQ ID NO: 146234 - DNA, 17 bp, synthetic construct
  source 1..17: mol_type = other DNA
ttggctgtcagcaggag

SEQ ID NO: 146235 - DNA, 17 bp, synthetic construct
  source 1..17: mol_type = other DNA
tggctgtcagcaggagg

SEQ ID NO: 146236 - DNA, 17 bp, synthetic construct
  source 1..17: mol_type = other DNA
ggctgtcagcaggaggg

SEQ ID NO: 146237 - DNA, 17 bp, synthetic construct
  source 1..17: mol_type = other DNA
gctgtcagcaggagggg

SEQ ID NO: 146238 - DNA, 17 bp, synthetic construct
  source 1..17: mol_type = other DNA
ctgtcagcaggaggggc

SEQ ID NO: 146239 - DNA, 17 bp, synthetic construct
  source 1..17: mol_type = other DNA
tgtcagcaggaggggcc

SEQ ID NO: 146240 - DNA, 17 bp, synthetic construct
  source 1..17: mol_type = other DNA
gtcagcaggaggggcca

SEQ ID NO: 146241 - DNA, 17 bp, synthetic construct
  source 1..17: mol_type = other DNA
tcagcaggaggggccag

SEQ ID NO: 146242 - DNA, 17 bp, synthetic construct
  source 1..17: mol_type = other DNA
cagcaggaggggccaga

SEQ ID NO: 146243 - DNA, 17 bp, synthetic construct
  source 1..17: mol_type = other DNA
agcaggaggggccagaa

SEQ ID NO: 146244 - DNA, 17 bp, synthetic construct
  source 1..17: mol_type = other DNA
gcaggaggggccagaag

SEQ ID NO: 146245 - DNA, 17 bp, synthetic construct
  source 1..17: mol_type = other DNA
caggaggggccagaagg

SEQ ID NO: 146246 - DNA, 17 bp, synthetic construct
  source 1..17: mol_type = other DNA
aggaggggccagaaggg

SEQ ID NO: 146247 - DNA, 17 bp, synthetic construct
  source 1..17: mol_type = other DNA
ggaggggccagaagggt

SEQ ID NO: 146248 - DNA, 17 bp, synthetic construct
  source 1..17: mol_type = other DNA
gaggggccagaagggtt

SEQ ID NO: 146249 - DNA, 17 bp, synthetic construct
  source 1..17: mol_type = other DNA
aggggccagaagggttg

SEQ ID NO: 146250 - DNA, 17 bp, synthetic construct
  source 1..17: mol_type = other DNA
ggggccagaagggttga

SEQ ID NO: 146251 - DNA, 17 bp, synthetic construct
  source 1..17: mol_type = other DNA
gggccagaagggttgac

SEQ ID NO: 146252 - DNA, 17 bp, synthetic construct
  source 1..17: mol_type = other DNA
ggccagaagggttgacc

SEQ ID NO: 146253 - DNA, 17 bp, synthetic construct
  source 1..17: mol_type = other DNA
gccagaagggttgaccc

SEQ ID NO: 146254 - DNA, 17 bp, synthetic construct
  source 1..17: mol_type = other DNA
ccagaagggttgaccct

SEQ ID NO: 146255 - DNA, 17 bp, synthetic construct
  source 1..17: mol_type = other DNA
cagaagggttgaccctt

SEQ ID NO: 146256 - DNA, 17 bp, synthetic construct
  source 1..17: mol_type = other DNA
agaagggttgaccctta

SEQ ID NO: 146257 - DNA, 17 bp, synthetic construct
  source 1..17: mol_type = other DNA
gaagggttgacccttag

SEQ ID NO: 146258 - DNA, 17 bp, synthetic construct
  source 1..17: mol_type = other DNA
aagggttgacccttagc

SEQ ID NO: 146259 - DNA, 17 bp, synthetic construct
  source 1..17: mol_type = other DNA
agggttgacccttagct

SEQ ID NO: 146260 - DNA, 17 bp, synthetic construct
  source 1..17: mol_type = other DNA
gggttgacccttagcta

SEQ ID NO: 146261 - DNA, 17 bp, synthetic construct
  source 1..17: mol_type = other DNA
ggttgacccttagctag

SEQ ID NO: 146262 - DNA, 17 bp, synthetic construct
  source 1..17: mol_type = other DNA
gttgacccttagctaga

SEQ ID NO: 146263 - DNA, 17 bp, synthetic construct
  source 1..17: mol_type = other DNA
ttgacccttagctagaa

SEQ ID NO: 146264 - DNA, 17 bp, synthetic construct
  source 1..17: mol_type = other DNA
tgacccttagctagaag

SEQ ID NO: 146265 - DNA, 17 bp, synthetic construct
  source 1..17: mol_type = other DNA
gacccttagctagaaga

SEQ ID NO: 146266 - DNA, 17 bp, synthetic construct
  source 1..17: mol_type = other DNA
acccttagctagaagag

SEQ ID NO: 146267 - DNA, 17 bp, synthetic construct
  source 1..17: mol_type = other DNA
cccttagctagaagagg

SEQ ID NO: 146268 - DNA, 17 bp, synthetic construct
  source 1..17: mol_type = other DNA
ccttagctagaagaggc

SEQ ID NO: 146269 - DNA, 17 bp, synthetic construct
  source 1..17: mol_type = other DNA
cttagctagaagaggca

SEQ ID NO: 146270 - DNA, 17 bp, synthetic construct
  source 1..17: mol_type = other DNA
ttagctagaagaggcag

SEQ ID NO: 146271 - DNA, 17 bp, synthetic construct
  source 1..17: mol_type = other DNA
tagctagaagaggcagg

SEQ ID NO: 146272 - DNA, 17 bp, synthetic construct
  source 1..17: mol_type = other DNA
agctagaagaggcagga

SEQ ID NO: 146273 - DNA, 17 bp, synthetic construct
  source 1..17: mol_type = other DNA
gctagaagaggcaggag

SEQ ID NO: 146274 - DNA, 17 bp, synthetic construct
  source 1..17: mol_type = other DNA
ctagaagaggcaggagg

SEQ ID NO: 146275 - DNA, 17 bp, synthetic construct
  source 1..17: mol_type = other DNA
tagaagaggcaggagga

SEQ ID NO: 146276 - DNA, 17 bp, synthetic construct
  source 1..17: mol_type = other DNA
agaagaggcaggaggaa
